United States Patent Application Publication US 2021/0272652 A1 - sequence listing, part 2

SEQ ID NO: 18081 - DNA, 96 bp, Aspergillus novofumigatus
  misc_feature: 77
agtaaggatagaagaagagttataagaagaggaagagggaggggaagagagagagaaagagttagagataagagttagaagaagaaggagagttag

SEQ ID NO: 18082 - DNA, 96 bp, Aspergillus novofumigatus
  misc_feature: 77
ccttactattgactacactatctaccttactattaacctcactatctatcttactgtctaccttactatctatcttactatctacctcactgcctg

SEQ ID NO: 18083 - DNA, 96 bp, Aspergillus novofumigatus
  misc_feature: 77
cctcactcactcactgcctgccttacttactatcttactcactaccttacttactgcctcactccctcactatctcacttactacctcccttactg

SEQ ID NO: 18084 - DNA, 96 bp, Aspergillus novofumigatus
  misc_feature: 77
ccctcactcactcactgcctgccttacttactatcttactcactaccttacttactgcctcactccctcactatctcacttactacctcccttact

SEQ ID NO: 18085 - DNA, 96 bp, Aspergillus novofumigatus
  misc_feature: 77
atttccttctcttctcctctcttctttctatctttattctaaatccttctctcttcctaaatccttctaaatccttattttcctatatctatctat

SEQ ID NO: 18086 - DNA, 96 bp, Aspergillus novofumigatus
  misc_feature: 77
acagacagtaaggtagatagtaagatagatagtaaggtagacagtaagatagatagtgtagtcaatagtaaggtaggtaataaggtagatagtaat

SEQ ID NO: 18087 - DNA, 96 bp, Aspergillus novofumigatus
  misc_feature: 77
agagattaggagaggttaggatagttagaaggagagtaagagagatttagatagaggggttaaataagagatagaaggagagatagaaggagagat

SEQ ID NO: 18088 - DNA, 96 bp, Aspergillus novofumigatus
  misc_feature: 77
agcaagacagacagtaaggtagatagtaagatagatagtaaggtagacagtaagatagatagtgtagtcaatagtaaggtaggtaataaggtagat

SEQ ID NO: 18089 - DNA, 96 bp, Aspergillus novofumigatus
  misc_feature: 77
aagacagacagtaaggtagatagtaagatagatagtaaggtagacagtaagatagatagtgtagtcaatagtaaggtaggtaataaggtagatagt

SEQ ID NO: 18090 - DNA, 96 bp, Aspergillus novofumigatus
  misc_feature: 77
aaataaatagtaaatagataataaaataaatgaataaataaataaaaatcaaaaagttaaaaaatcaaaaacctaaaataaattaaaaaataaatt

SEQ ID NO: 18091 - DNA, 96 bp, Aspergillus novofumigatus
  misc_feature: 77
aagcatgaggtttaggtggactacttaaacataatccgaggataaggattttagcggcttgtagtattttagccgcttgttgcatttttgccgctt

SEQ ID NO: 18092 - DNA, 96 bp, Aspergillus novofumigatus
  misc_feature: 76
ttcttactctatctcttactttacccctttctctatctctctcttctatctacacttactaccccttactcttattctatttcttactctccttct

SEQ ID NO: 18093 - DNA, 96 bp, Aspergillus novofumigatus
  misc_feature: 76
agatagaaggagagttagaaggagagttagaaggagagtaagaaatagaataagagtaaggggtagtaagtgtagatagaagagagagatagagaa

SEQ ID NO: 18094 - DNA, 96 bp, Aspergillus novofumigatus
  misc_feature: 76
agagaaatagagagaagagataaaaagggagaagaaaaaagaggtaaataagtaaaaaaaatagaaaaaagaagaagaagaaaggtcagggtggaa

SEQ ID NO: 18095 - DNA, 96 bp, Aspergillus novofumigatus
  misc_feature: 76
aataaataaatagtaaatagataataaaataaatgaataaataaataaaaatcaaaaagttaaaaaatcaaaaacctaaaataaattaaaaaataa

SEQ ID NO: 18096 - DNA, 96 bp, Aspergillus novofumigatus
  misc_feature: 76
ttattaccttttattttcttttcttttctattccctttcctcttccctttcctctttcctttcctcttccctttcctcttccctttcttcttctat

SEQ ID NO: 18097 - DNA, 96 bp, Aspergillus novofumigatus
  misc_feature: 76
aaatatatatacttaatctcttcttatcttaatctaataaatataaatatatatatctattatctagactaaatcttttctagtaactaaatctaa

SEQ ID NO: 18098 - DNA, 96 bp, Aspergillus novofumigatus
  misc_feature: 76
gacagacagtaaggtagatagtaagatagatagtaaggtagacagtaagatagatagtgtagtcaatagtaaggtaggtaataaggtagatagtaa

SEQ ID NO: 18099 - DNA, 96 bp, Aspergillus novofumigatus
  misc_feature: 76
ttaccttttattttcttttcttttctattccctttcctcttccctttcctctttcctttcctcttccctttcctcttccctttcttcttctatttt

SEQ ID NO: 18100 - DNA, 96 bp, Aspergillus novofumigatus
  misc_feature: 76
ataaatagtaaatagataataaaataaatgaataaataaataaaaatcaaaaagttaaaaaatcaaaaacctaaaataaattaaaaaataaattaa

SEQ ID NO: 18101 - DNA, 96 bp, Aspergillus novofumigatus
  misc_feature: 76
atagtaaatagataataaaataaatgaataaataaataaaaatcaaaaagttaaaaaatcaaaaacctaaaataaattaaaaaataaattaattaa

SEQ ID NO: 18102 - DNA, 96 bp, Aspergillus novofumigatus
  misc_feature: 76
ttaataacccttacttttattctatctctaactctttccttcttcccttctattcttaactctctctttctctttcttctcctttctatccctaac

SEQ ID NO: 18103 - DNA, 96 bp, Aspergillus novofumigatus
  misc_feature: 76
ttaagagagaaatagagagaagagataaaaagggagaagaaaaaagaggtaaataagtaaaaaaaatagaaaaaagaagaagaagaaaggtcaggg

SEQ ID NO: 18104 - DNA, 96 bp, Aspergillus novofumigatus
  misc_feature: 76
tgtcaggagatcaggttgatcagcattaatatattaataaatgaatatatatatttcaggataccataatgcgcagagatatatattatacattta

SEQ ID NO: 18105 - DNA, 96 bp, Aspergillus novofumigatus
  misc_feature: 76
tgagtaaggcagtgcatgagatagtgagggagatagtaagataggtagtaagataataagtaaatagataagtagggtagtaagatagtaatgcag

SEQ ID NO: 18106 - DNA, 96 bp, Aspergillus novofumigatus
  misc_feature: 76
gagatagaaggagagttagaaggagagttagaaggagagtaagaaatagaataagagtaaggggtagtaagtgtagatagaagagagagatagaga

SEQ ID NO: 18107 - DNA, 96 bp, Aspergillus novofumigatus
  misc_feature: 76
atctctaaatttctcttattttttttttaaatatatatacttaatctcttcttatcttaatctaataaatataaatatatatatctattatctaga

SEQ ID NO: 18108 - DNA, 96 bp, Aspergillus novofumigatus
  misc_feature: 76
tcccttattaccttgctcactgcctatcttactacctcccttactatcttacttactacctcccttactgttaaccttactatctacctcactact

SEQ ID NO: 18109 - DNA, 96 bp, Aspergillus novofumigatus
  misc_feature: 76
gggaggcagtgagtgagatagtaagtaagatagtgagggaggtagtgagtaagacagtgagtgagatagtaagtaaggcagtgagtgagatagtga

SEQ ID NO: 18110 - DNA, 96 bp, Aspergillus novofumigatus
  misc_feature: 76
taataaataaatagtaaatagataataaaataaatgaataaataaataaaaatcaaaaagttaaaaaatcaaaaacctaaaataaattaaaaaata

SEQ ID NO: 18111 - DNA, 96 bp, Aspergillus novofumigatus
  misc_feature: 76
agaaatagagagaagagataaaaagggagaagaaaaaagaggtaaataagtaaaaaaaatagaaaaaagaagaagaagaaaggtcagggtggaata

SEQ ID NO: 18112 - DNA, 96 bp, Aspergillus novofumigatus
  misc_feature: 76
agggggatatcaccatagttaggagagagatagttagtaaggtagataataagattaatagtatagtagatagtgaggttaacagtaaggttaata

SEQ ID NO: 18113 - DNA, 96 bp, Aspergillus novofumigatus
  misc_feature: 76
tatcttaatataataataatagtataataatctatatagttataataataacttagtaataataagaatagaaataataggatgctattagacttt

SEQ ID NO: 18114 - DNA, 96 bp, Aspergillus novofumigatus
  misc_feature: 76
tatctctccttctatctcttatttaacccctctatctaaatctctcttactctccttctaactatcctaacctctcctaatctcttcttctatctc

SEQ ID NO: 18115 - DNA, 96 bp, Aspergillus novofumigatus
  misc_feature: 76
gagattaggagaggttaggatagttagaaggagagtaagagagatttagatagaggggttaaataagagatagaaggagagatagaaggagagata

SEQ ID NO: 18116 - DNA, 96 bp, Aspergillus novofumigatus
  misc_feature: 76
gtactaaatataaccttttatagtagtctattctccttattactattattattaaatttattctaatcttctagggatttaagattattagatata

SEQ ID NO: 18117 - DNA, 96 bp, Aspergillus novofumigatus
  misc_feature: 76
tagctcccttattaccttgctcactgcctatcttactacctcccttactatcttacttactacctcccttactgttaaccttactatctacctcac

SEQ ID NO: 18118 - DNA, 96 bp, Aspergillus novofumigatus
  misc_feature: 76
tagaaggagagttagaaggagagttagaaggagagtaagaaatagaataagagtaaggggtagtaagtgtagatagaagagagagatagagaaagg

SEQ ID NO: 18119 - DNA, 96 bp, Aspergillus novofumigatus
  misc_feature: 76
gggatatcaccatagttaggagagagatagttagtaaggtagataataagattaatagtatagtagatagtgaggttaacagtaaggttaatagta

SEQ ID NO: 18120 - DNA, 96 bp, Aspergillus novofumigatus
  misc_feature: 76
tactatcttactaccctacttatctatttacttattatcttactacctatcttactatctcccttactatctcatacactaccttactcacttcct

SEQ ID NO: 18121 - DNA, 96 bp, Aspergillus novofumigatus
  misc_feature: 76
taccttttattttcttttcttttctattccctttcctcttccctttcctctttcctttcctcttccctttcctcttccctttcttcttctattttt

SEQ ID NO: 18122 - DNA, 96 bp, Aspergillus novofumigatus
  misc_feature: 76
ggcagcaagacagacagtaaggtagatagtaagatagatagtaaggtagacagtaagatagatagtgtagtcaatagtaaggtaggtaataaggta

SEQ ID NO: 18123 - DNA, 96 bp, Aspergillus novofumigatus
  misc_feature: 76
taccttatattattataaataactaggtatactatctaaatttaaaataataagtatatactatataaatatttaatatatttataacttagctat

SEQ ID NO: 18124 - DNA, 96 bp, Aspergillus novofumigatus
  misc_feature: 76
tacctgcattactatcttactaccctacttatctatttacttattatcttactacctatcttactatctcccttactatctcatacactaccttac

SEQ ID NO: 18125 - DNA, 96 bp, Aspergillus novofumigatus
  misc_feature: 76
tacctcttttttcttctccctttttatctcttctctctatttctctcttaattcttactctatctcttactttacccctttctctatctctctctt

SEQ ID NO: 18126 - DNA, 96 bp, Aspergillus novofumigatus
  misc_feature: 76
taatagcatcctattatttctattcttattattactaagttattattataactatatagattattatactattattattatattaagatactatta

SEQ ID NO: 18127 - DNA, 96 bp, Aspergillus novofumigatus
  misc_feature: 76
agagctatatctatactaaattttaaaaactataaaattaatttaactaaaaagcttctttaactttattagctttcttaataaaagctatattta

SEQ ID NO: 18128 - DNA, 96 bp, Aspergillus novofumigatus
  misc_feature: 76
taaaccagctagttaccttatattattataaataactaggtatactatctaaatttaaaataataagtatatactatataaatatttaatatattt

SEQ ID NO: 18129 - DNA, 96 bp, Aspergillus novofumigatus
  misc_feature: 76
aagtctaatagcatcctattatttctattcttattattactaagttattattataactatatagattattatactattattattatattaagatac

SEQ ID NO: 18130 - DNA, 96 bp, Aspergillus novofumigatus
  misc_feature: 76
ctcactgcctcactccctcactatctcactcactgcctccctcactgtcttacttactgcctccctcactatctcactcactatctcactcactac

SEQ ID NO: 18131 - DNA, 96 bp, Aspergillus novofumigatus
  misc_feature: 76
ggtagtgtatgagatagtaagggagatagtaagataggtagtaagataataagtaaatagataagtagggtagtaagatagtaatgcaggtaaaag

SEQ ID NO: 18132 - DNA, 96 bp, Aspergillus novofumigatus
  misc_feature: 76
gggggatatcaccatagttaggagagagatagttagtaaggtagataataagattaatagtatagtagatagtgaggttaacagtaaggttaatag

SEQ ID NO: 18133 - DNA, 96 bp, Aspergillus novofumigatus
  misc_feature: 76
cgcgcgcgcgcagggccggtcctggccaacggcgccggccccctggcctccctcctgcccgcctgccggtctgcccccccccaagggtccccgccc

SEQ ID NO: 18134 - DNA, 96 bp, Aspergillus novofumigatus
  misc_feature: 76
gcagtgagcgagatagtgagggaggcagtgagtgagatagtgagggaggcagtgagtgagatagtgagggaggcagtgagcaagacagtgagcgag

SEQ ID NO: 18135 - DNA, 96 bp, Aspergillus novofumigatus
  misc_feature: 76
gattaaggttaattagtagtaatatatgaataaatatatatattttaggatactataatgcgtagagatatatattatacagttagtttgaagagt

SEQ ID NO: 18136 - DNA, 96 bp, Aspergillus novofumigatus
  misc_feature: 76
aataacccttacttttattctatctctaactctttccttcttcccttctattcttaactctctctttctctttcttctcctttctatccctaactc

SEQ ID NO: 18137 - DNA, 96 bp, Aspergillus novofumigatus
  misc_feature: 76
actttacccctttctctatctctctcttctatctacacttactaccccttactcttattctatttcttactctccttctaactctccttctaactc

SEQ ID NO: 18138 - DNA, 96 bp, Aspergillus novofumigatus
  misc_feature: 76
gagtaaggcagtgcatgagatagtgagggagatagtaagataggtagtaagataataagtaaatagataagtagggtagtaagatagtaatgcagg

SEQ ID NO: 18139 - DNA, 96 bp, Aspergillus novofumigatus
  misc_feature: 76
ctcttaattcttactctatctcttactttacccctttctctatctctctcttctatctacacttactaccccttactcttattctatttcttactc

SEQ ID NO: 18140 - DNA, 96 bp, Aspergillus novofumigatus
  misc_feature: 76
gagggaggtatttagtaaaataaggagaatagatagaaggtaagaggtagtaaggagaataaagtaaggaaggataagtaatagagtaagggttag

SEQ ID NO: 18141 - DNA, 96 bp, Aspergillus novofumigatus
  misc_feature: 76
gagggaggcagtgagtgagatagtaagtaagatagtgagggaggtagtgagtaagacagtgagtgagatagtaagtaaggcagtgagtgagatagt

SEQ ID NO: 18142 - DNA, 96 bp, Aspergillus novofumigatus
  misc_feature: 76
gaggcaggcagcgagcaagttaggtagtgagtaagtgaggcagtgagtaagggagtcagtgagcaagatagtaagtaaggtagtgagtgagatagt

SEQ ID NO: 18143 - DNA, 96 bp, Aspergillus novofumigatus
  misc_feature: 76
gagcgagatagtgagggaggcagtgagtgagatagtgagggaggcagtgagtgagatagtgagggaggcagtgagcaagacagtgagcgagatagt

SEQ ID NO: 18144 - DNA, 96 bp, Aspergillus novofumigatus
  misc_feature: 76
gaaggagagttagaaggagagttagaaggagagtaagaaatagaataagagtaaggggtagtaagtgtagatagaagagagagatagagaaagggg

SEQ ID NO: 18145 - DNA, 96 bp, Aspergillus novofumigatus
  misc_feature: 76
ctctccttctatctcttatttaacccctctatctaaatctctcttactctccttctaactatcctaacctctcctaatctcttcttctatctcttc

SEQ ID NO: 18146 - DNA, 96 bp, Aspergillus novofumigatus
  misc_feature: 76
atagaaggagagttagaaggagagttagaaggagagtaagaaatagaataagagtaaggggtagtaagtgtagatagaagagagagatagagaaag

SEQ ID NO: 18147 - DNA, 96 bp, Aspergillus novofumigatus
  misc_feature: 76
agggttcacataagggttagtaagtttagagaagggaaaaggtagagatagtaagaaaaagaagatagtaagagattaagtaagggatcatataag

SEQ ID NO: 18148 - DNA, 96 bp, Aspergillus novofumigatus
  misc_feature: 76
ctggggtcaatggaagccgggcgcgcgcgccccgggggtgaccagttggcggggacccttgggggggggcagaccggcaggcgggcaggggggggg

SEQ ID NO: 18149 - DNA, 96 bp, Aspergillus novofumigatus
  misc_feature: 76
aaggagagatagaaggagagatagaaggagagatagaaggagagttagaaggagagttagaaggagagtaagaaatagaataagagtaaggggtag

SEQ ID NO: 18150 - DNA, 96 bp, Aspergillus novofumigatus
  misc_feature: 76
aagaaagagaagaagaaattaaaattaaggaaagataaaattaaaagaaaaggataaagttaaataataatttaatagaatgaattaggaatgtag

SEQ ID NO: 18151 - DNA, 96 bp, Aspergillus novofumigatus
  misc_feature: 76
actggggtcaatggaagccgggcgcgcgcgccccgggggtgaccagttggcggggacccttgggggggggcagaccggcaggcgggcagggggggg

SEQ ID NO: 18152 - DNA, 96 bp, Aspergillus novofumigatus
  misc_feature: 76
atcagcattaatatattaataaatgaatatatatatttcaggataccataatgcgcagagatatatattatacatttagtttatagagtatgttgg

SEQ ID NO: 18153 - DNA, 96 bp, Aspergillus novofumigatus
  misc_feature: 76
cagccaacatactctacaaactaactgtataatatatatctctgcgcattatggtatcctaaaatatatatattcattcattaatatatcaatgct

SEQ ID NO: 18154 - DNA, 96 bp, Aspergillus novofumigatus
  misc_feature: 76
cagacagtaaggtagatagtaagatagatagtaaggtagacagtaagatagatagtgtagtcaatagtaaggtaggtaataaggtagatagtaatt

SEQ ID NO: 18155 - DNA, 96 bp, Aspergillus novofumigatus
  misc_feature: 76
aatatatatacttaatctcttcttatcttaatctaataaatataaatatatatatctattatctagactaaatcttttctagtaactaaatctaat

SEQ ID NO: 18156 - DNA, 96 bp, Aspergillus novofumigatus
  misc_feature: 76
agagtaagtaaggcagtgcatgagatagtaagggagatagtaagataggtagtaagataataagtaaatagataagtagggtagtaagatagtaat

SEQ ID NO: 18157 - DNA, 96 bp, Aspergillus novofumigatus
  misc_feature: 76
agctatatctatactaaattttaaaaactataaaattaatttaactaaaaagcttctttaactttattagctttcttaataaaagctatatttaat

SEQ ID NO: 18158 - DNA, 96 bp, Aspergillus novofumigatus
  misc_feature: 76
atcttacttactacctatcttgctgcctccctcactcactcactgcctgccttacttactatcttactcactaccttacttactgcctcactccct

SEQ ID NO: 18159 - DNA, 96 bp, Aspergillus novofumigatus
  misc_feature: 76
agtgagcgagatagtgagggaggcagtgagtgagatagtgagggaggcagtgagtgagatagtgagggaggcagtgagcaagacagtgagcgagat

SEQ ID NO: 18160 - DNA, 96 bp, Aspergillus novofumigatus
  misc_feature: 76
atagtaagataggtagtaagataataagtaaatagataagtagggtagtaagatagtaatgcaggtaaaaggccccagggagattatatatcaggt

SEQ ID NO: 18161 - DNA, 96 bp, Aspergillus novofumigatus
  misc_feature: 76
aatagcatcctattatttctattcttattattactaagttattattataactatatagattattatactattattattatattaagatactattat

SEQ ID NO: 18162 - DNA, 96 bp, Aspergillus novofumigatus
  misc_feature: 76
agttagggagagatagaaggggagatagagggagagatagaagaaggattagaagaagagtaaggaataataagaaggagagttagaataagagtt

SEQ ID NO: 18163 - DNA, 96 bp, Aspergillus novofumigatus
  misc_feature: 76
acctgcattactatcttactaccctacttatctatttacttattatcttactacctatcttactatctcccttactatctcatacactaccttact

SEQ ID NO: 18164 - DNA, 96 bp, Aspergillus novofumigatus
  misc_feature: 76
agagagctatatctatactaaattttaaaaactataaaattaatttaactaaaaagcttctttaactttattagctttcttaataaaagctatatt

SEQ ID NO: 18165 - DNA, 96 bp, Aspergillus novofumigatus
  misc_feature: 76
actcactgcctgccttacttactatcttactcactaccttacttactgcctcactccctcactatctcacttactacctcccttactgtcttgctt

SEQ ID NO: 18166 - DNA, 96 bp, Aspergillus novofumigatus
  misc_feature: 76
actaaatataaccttttatagtagtctattctccttattactattattattaaatttattctaatcttctagggatttaagattattagatatatt

SEQ ID NO: 18167 - DNA, 96 bp, Aspergillus novofumigatus
  misc_feature: 76
accttatattattataaataactaggtatactatctaaatttaaaataataagtatatactatataaatatttaatatatttataacttagctatt

SEQ ID NO: 18168 - DNA, 96 bp, Aspergillus novofumigatus
  misc_feature: 75
aggtagtgtatgagatagtaagggagatagtaagataggtagtaagataataagtaaatagataagtagggtagtaagatagtaatgcaggtaaaa

SEQ ID NO: 18169 - DNA, 96 bp, Aspergillus novofumigatus
  misc_feature: 75
gagagttagaaggagagttagaaggagagtaagaaatagaataagagtaaggggtagtaagtgtagatagaagagagagatagagaaaggggtaaa

SEQ ID NO: 18170 - DNA, 96 bp, Aspergillus novofumigatus
  misc_feature: 75
tagtaaatagataataaaataaatgaataaataaataaaaatcaaaaagttaaaaaatcaaaaacctaaaataaattaaaaaataaattaattaaa

SEQ ID NO: 18171 - DNA, 96 bp, Aspergillus novofumigatus
  misc_feature: 75
attaggagaggttaggatagttagaaggagagtaagagagatttagatagaggggttaaataagagatagaaggagagatagaaggagagatagaa

SEQ ID NO: 18172 - DNA, 96 bp, Aspergillus novofumigatus
  misc_feature: 75
agattatctattatttatctaatacagataatttatattatactatagtaattttatttattaatatacttcccttcttattataaaagagaggaa

SEQ ID NO: 18173 - DNA, 96 bp, Aspergillus novofumigatus
  misc_feature: 75
aagggttcacataagggttagtaagtttagagaagggaaaaggtagagatagtaagaaaaagaagatagtaagagattaagtaagggatcatataa

SEQ ID NO: 18174 - DNA, 96 bp, Aspergillus novofumigatus
  misc_feature: 75
ttagtagatttagtaggtacctctaatactaatatactaactattatatctatctatctactattattaagccttagtatatagtagttagttata

SEQ ID NO: 18175 - DNA, 96 bp, Aspergillus novofumigatus
  misc_feature: 75
ggaatttatatataattatatactatattaattaataaagatatccctctttatagtaatttatagctataagctattattaccctagctagctaa

SEQ ID NO: 18176 - DNA, 96 bp, Aspergillus novofumigatus
  misc_feature: 75
cttactctatctcttactttacccctttctctatctctctcttctatctacacttactaccccttactcttattctatttcttactctccttctaa

SEQ ID NO: 18177 - DNA, 96 bp, Aspergillus novofumigatus
  misc_feature: 75
gagagtaagtaaggcagtgcatgagatagtaagggagatagtaagataggtagtaagataataagtaaatagataagtagggtagtaagatagtaa

SEQ ID NO: 18178 - DNA, 96 bp, Aspergillus novofumigatus
  misc_feature: 75
gcgagatagtgagggaggcagtgagtgagatagtgagggaggcagtgagtgagatagtgagggaggcagtgagcaagacagtgagcgagatagtaa

SEQ ID NO: 18179 - DNA, 96 bp, Aspergillus novofumigatus
  misc_feature: 75
aatataataataatagtataataatctatatagttataataataacttagtaataataagaatagaaataataggatgctattagacttttagtaa

SEQ ID NO: 18180 - DNA, 96 bp, Aspergillus novofumigatus
  misc_feature: 75
ggagagttagaaggagagttagaaggagagtaagaaatagaataagagtaaggggtagtaagtgtagatagaagagagagatagagaaaggggtaa

SEQ ID NO: 18181 - DNA, 96 bp, Aspergillus novofumigatus
  misc_feature: 75
ttaatctcttcttatcttaatctaataaatataaatatatatatctattatctagactaaatcttttctagtaactaaatctaattattatctagc

SEQ ID NO: 18182 - DNA, 96 bp, Aspergillus novofumigatus
  misc_feature: 75
tgtgtgttggaataaaatcaaatcgcgtacgcaggcattgaggtggcagaatagttagaattggaaagcggtgattctagcggcaaaacggggggt

SEQ ID NO: 18183 - DNA, 96 bp, Aspergillus novofumigatus
  misc_feature: 75
gcgcgcgcgcagggccggtcctggccaacggcgccggccccctggcctccctcctgcccgcctgccggtctgcccccccccaagggtccccgccca

SEQ ID NO: 18184 - DNA, 96 bp, Aspergillus novofumigatus
  misc_feature: 75
ctagctcccttattaccttgctcactgcctatcttactacctcccttactatcttacttactacctcccttactgttaaccttactatctacctca

SEQ ID NO: 18185 - DNA, 96 bp, Aspergillus novofumigatus
  misc_feature: 75
tgagggaggcagtgagtgagatagtaagtaagatagtgagggaggtagtgagtaagacagtgagtgagatagtaagtaaggcagtgagtgagatag

SEQ ID NO: 18186 - DNA, 96 bp, Aspergillus novofumigatus
  misc_feature: 75
tgagatagtgagtgagatagtgagggaggcagtaagtaagacagtgagggaggcagtgagtgagatagtgagggagtgaggcagtgagtaaggcag

SEQ ID NO: 18187 - DNA, 96 bp, Aspergillus novofumigatus
  misc_feature: 75
tcttactctatctcttactttacccctttctctatctctctcttctatctacacttactaccccttactcttattctatttcttactctccttcta

SEQ ID NO: 18188 - DNA, 96 bp, Aspergillus novofumigatus
  misc_feature: 75
tcttaatataataataatagtataataatctatatagttataataataacttagtaataataagaatagaaataataggatgctattagactttta

SEQ ID NO: 18189 - DNA, 96 bp, Aspergillus novofumigatus
  misc_feature: 75
tcttaacctctttaacctacctccttctaatatataatctatagattatatattacctatattataaactagcaataacatacactataataatat

SEQ ID NO: 18190 - DNA, 96 bp, Aspergillus novofumigatus
  misc_feature: 75
ggcagtgagcgagatagtgagggaggcagtgagtgagatagtgagggaggcagtgagtgagatagtgagggaggcagtgagcaagacagtgagcga

SEQ ID NO: 18191 - DNA, 96 bp, Aspergillus novofumigatus
  misc_feature: 75
aagggttagtaaggatagaagaagagttataagaagaggaagagggaggggaagagagagagaaagagttagagataagagttagaagaagaagga

SEQ ID NO: 18192 - DNA, 96 bp, Aspergillus novofumigatus
  misc_feature: 75
tccctcactcactcactgcctgccttacttactatcttactcactaccttacttactgcctcactccctcactatctcacttactacctcccttac

SEQ ID NO: 18193 - DNA, 96 bp, Aspergillus novofumigatus
  misc_feature: 75
gccaacatactctacaaactaactgtataatatatatctctgcgcattatggtatcctaaaatatatatattcattcattaatatatcaatgctga

SEQ ID NO: 18194 - DNA, 96 bp, Aspergillus novofumigatus
  misc_feature: 75
tcactcactcactgcctgccttacttactatcttactcactaccttacttactgcctcactccctcactatctcacttactacctcccttactgtc

SEQ ID NO: 18195 - DNA, 96 bp, Aspergillus novofumigatus
  misc_feature: 75
atagatttattagatattatagtattcctagtattattctcttagactatatagcctatagtttattagctagttctagaagtatttttataaata

SEQ ID NO: 18196 - DNA, 96 bp, Aspergillus novofumigatus
  misc_feature: 75
tattaccttttattttcttttcttttctattccctttcctcttccctttcctctttcctttcctcttccctttcctcttccctttcttcttctatt

SEQ ID NO: 18197 - DNA, 96 bp, Aspergillus novofumigatus
  misc_feature: 75
atctattatatactcttaatctaatagtaaataatacttatataaagaagaagagataaacctattataatatatatattcctcttacttagcata

SEQ ID NO: 18198 - DNA, 96 bp, Aspergillus novofumigatus
  misc_feature: 75
tatcttacttactacctatcttgctgcctccctcactcactcactgcctgccttacttactatcttactcactaccttacttactgcctcactccc

SEQ ID NO: 18199 - DNA, 96 bp, Aspergillus novofumigatus
  misc_feature: 75
gtgagggaggcagtgagtgagatagtaagtaagatagtgagggaggtagtgagtaagacagtgagtgagatagtaagtaaggcagtgagtgagata

SEQ ID NO: 18200 - DNA, 96 bp, Aspergillus novofumigatus
  misc_feature: 75
gctcccttattaccttgctcactgcctatcttactacctcccttactatcttacttactacctcccttactgttaaccttactatctacctcacta

SEQ ID NO: 18201 - DNA, 96 bp, Aspergillus novofumigatus
  misc_feature: 75
tagtgagggaggcagtgagtgagatagtgagggaggcagtgagtgagatagtgagggaggcagtgagcaagacagtgagcgagatagtaagtaagg

SEQ ID NO: 18202 - DNA, 96 bp, Aspergillus novofumigatus
  misc_feature: 75
tagtaagataggtagtaagataataagtaaatagataagtagggtagtaagatagtaatgcaggtaaaaggccccagggagattatatatcaggta

SEQ ID NO: 18203 - DNA, 96 bp, Aspergillus novofumigatus
  misc_feature: 75
tagcatagaaatactatatatcctaatcatatacctatataaagtgctataagctatatataactatataggttaccctagctttactaaaactat

SEQ ID NO: 18204 - DNA, 96 bp, Aspergillus novofumigatus
  misc_feature: 75
attattaccttttattttcttttcttttctattccctttcctcttccctttcctctttcctttcctcttccctttcctcttccctttcttcttcta

SEQ ID NO: 18205 - DNA, 96 bp, Aspergillus novofumigatus
  misc_feature: 75
attaaggttaattagtagtaatatatgaataaatatatatattttaggatactataatgcgtagagatatatattatacagttagtttgaagagta

SEQ ID NO: 18206 - DNA, 96 bp, Aspergillus novofumigatus
  misc_feature: 75
tactaaatataaccttttatagtagtctattctccttattactattattattaaatttattctaatcttctagggatttaagattattagatatat

SEQ ID NO: 18207 - DNA, 96 bp, Aspergillus novofumigatus
  misc_feature: 75
ctaaatataaccttttatagtagtctattctccttattactattattattaaatttattctaatcttctagggatttaagattattagatatatta

SEQ ID NO: 18208 - DNA, 96 bp, Aspergillus novofumigatus
  misc_feature: 75
taaggtagacagtaaggtagacagtaaggtagacagtaaggtagatagtaaggtagatagtaaggtggacagtaaaataggcagtaagataggtgg

SEQ ID NO: 18209 - DNA, 96 bp, Aspergillus novofumigatus
  misc_feature: 75
taagagagaaatagagagaagagataaaaagggagaagaaaaaagaggtaaataagtaaaaaaaatagaaaaaagaagaagaagaaaggtcagggt

SEQ ID NO: 18210 - DNA, 96 bp, Aspergillus novofumigatus
  misc_feature: 75
taactactatatactaaggcttaataatagtagatagatagatataatagttagtatattagtattagaggtacctactaaatctactaatctacc

SEQ ID NO: 18211 - DNA, 96 bp, Aspergillus novofumigatus
  misc_feature: 75
taaatagtaaatagataataaaataaatgaataaataaataaaaatcaaaaagttaaaaaatcaaaaacctaaaataaattaaaaaataaattaat

SEQ ID NO: 18212 - DNA, 96 bp, Aspergillus novofumigatus
  misc_feature: 75
accttttattttcttttcttttctattccctttcctcttccctttcctctttcctttcctcttccctttcctcttccctttcttcttctattttta

SEQ ID NO: 18213 - DNA, 96 bp, Aspergillus novofumigatus
  misc_feature: 75
gttagaataagagttaaggaaagagataaaagaaggattaagaagaggtagaagaagagttagaagaagagatagaagaagagattaggagaggtt

SEQ ID NO: 18214 - DNA, 96 bp, Aspergillus novofumigatus
  misc_feature: 75
ggttcacataagggttagtaagtttagagaagggaaaaggtagagatagtaagaaaaagaagatagtaagagattaagtaagggatcatataaggg

SEQ ID NO: 18215 - DNA, 96 bp, Aspergillus novofumigatus
  misc_feature: 75
ggggatatcaccatagttaggagagagatagttagtaaggtagataataagattaatagtatagtagatagtgaggttaacagtaaggttaatagt

SEQ ID NO: 18216 - DNA, 96 bp, Aspergillus novofumigatus
  misc_feature: 75
gggcagtgagcgagatagtgagggaggcagtgagtgagatagtgagggaggcagtgagtgagatagtgagggaggcagtgagcaagacagtgagcg

SEQ ID NO: 18217 - DNA, 96 bp, Aspergillus novofumigatus
  misc_feature: 75
ctatcttacttactacctatcttgctgcctccctcactcactcactgcctgccttacttactatcttactcactaccttacttactgcctcactcc

SEQ ID NO: 18218 - DNA, 96 bp, Aspergillus novofumigatus
  misc_feature: 75
ccctccctccctccctcgtccccctcgctcgcgcgcgcacccctgccggtcctcgccggcgccggccccccggtccctatgacggtgcgcgcgcgc

SEQ ID NO: 18219 - DNA, 96 bp, Aspergillus novofumigatus
  misc_feature: 75
gcagcaagacagacagtaaggtagatagtaagatagatagtaaggtagacagtaagatagatagtgtagtcaatagtaaggtaggtaataaggtag

SEQ ID NO: 18220 - DNA, 96 bp, Aspergillus novofumigatus
  misc_feature: 75
actctatctcttactttacccctttctctatctctctcttctatctacacttactaccccttactcttattctatttcttactctccttctaactc

SEQ ID NO: 18221 - DNA, 96 bp, Aspergillus novofumigatus
  misc_feature: 75
gagagctatatctatactaaattttaaaaactataaaattaatttaactaaaaagcttctttaactttattagctttcttaataaaagctatattt

SEQ ID NO: 18222 - DNA, 96 bp, Aspergillus novofumigatus
  misc_feature: 75
gaatttatatataattatatactatattaattaataaagatatccctctttatagtaatttatagctataagctattattaccctagctagctaat

SEQ ID NO: 18223 - DNA, 96 bp, Aspergillus novofumigatus
  misc_feature: 75
ctttacccctttctctatctctctcttctatctacacttactaccccttactcttattctatttcttactctccttctaactctccttctaactct

SEQ ID NO: 18224 - DNA, 96 bp, Aspergillus novofumigatus
  misc_feature: 75
ctttaacctacctccttctaatatataatctatagattatatattacctatattataaactagcaataacatacactataataatataattactat

SEQ ID NO: 18225 - DNA, 96 bp, Aspergillus novofumigatus
  misc_feature: 75
atagtgagggaggcagtgagtgagatagtgagggaggcagtgagtgagatagtgagggaggcagtgagcaagacagtgagcgagatagtaagtaag

SEQ ID NO: 18226 - DNA, 96 bp, Aspergillus novofumigatus
  misc_feature: 75
cttactattgactacactatctaccttactattaacctcactatctatcttactgtctaccttactatctatcttactatctacctcactgcctgt

SEQ ID NO: 18227 - DNA, 96 bp, Aspergillus novofumigatus
  misc_feature: 75
agggttagtaaggatagaagaagagttataagaagaggaagagggaggggaagagagagagaaagagttagagataagagttagaagaagaaggag

SEQ ID NO: 18228 - DNA, 96 bp, Aspergillus novofumigatus
  misc_feature: 75
atagagagtaagtaaggcagtgcatgagatagtaagggagatagtaagataggtagtaagataataagtaaatagataagtagggtagtaagatag

SEQ ID NO: 18229 - DNA, 96 bp, Aspergillus novofumigatus
  misc_feature: 75
ctatcttactaccctacttatctatttacttattatcttactacctatcttactatctcccttactatctcatacactaccttactcacttcctat

SEQ ID NO: 18230 - DNA, 96 bp, Aspergillus novofumigatus
  misc_feature: 75
caagacagacagtaaggtagatagtaagatagatagtaaggtagacagtaagatagatagtgtagtcaatagtaaggtaggtaataaggtagatag

SEQ ID NO: 18231 - DNA, 96 bp, Aspergillus novofumigatus
  misc_feature: 75
cactggggtcaatggaagccgggcgcgcgcgccccgggggtgaccagttggcggggacccttgggggggggcagaccggcaggcgggcaggggggg

SEQ ID NO: 18232 - DNA, 96 bp, Aspergillus novofumigatus
  misc_feature: 75
cagggggatatcaccatagttaggagagagatagttagtaaggtagataataagattaatagtatagtagatagtgaggttaacagtaaggttaat

SEQ ID NO: 18233 - DNA, 96 bp, Aspergillus novofumigatus
  misc_feature: 75
agccaacatactctacaaactaactgtataatatatatctctgcgcattatggtatcctaaaatatatatattcattcattaatatatcaatgctg

SEQ ID NO: 18234 - DNA, 96 bp, Aspergillus novofumigatus
  misc_feature: 75
ataataaataaatagtaaatagataataaaataaatgaataaataaataaaaatcaaaaagttaaaaaatcaaaaacctaaaataaattaaaaaat

SEQ ID NO: 18235 - DNA, 96 bp, Aspergillus novofumigatus
  misc_feature: 75
atttatatataattatatactatattaattaataaagatatccctctttatagtaatttatagctataagctattattaccctagctagctaatat

SEQ ID NO: 18236 - DNA, 96 bp, Aspergillus novofumigatus
  misc_feature: 75
attaccttttattttcttttcttttctattccctttcctcttccctttcctctttcctttcctcttccctttcctcttccctttcttcttctattt

SEQ ID NO: 18237 - DNA, 96 bp, Aspergillus novofumigatus
  misc_feature: 75
atcttaatataataataatagtataataatctatatagttataataataacttagtaataataagaatagaaataataggatgctattagactttt

SEQ ID NO: 18238 - DNA, 96 bp, Aspergillus novofumigatus
  misc_feature: 75
agtgagggaggcagtgagtgagatagtaagtaagatagtgagggaggtagtgagtaagacagtgagtgagatagtaagtaaggcagtgagtgagat

SEQ ID NO: 18239 - DNA, 96 bp, Aspergillus novofumigatus
  misc_feature: 75
agcgagcaagttaggtagtgagtaagtgaggcagtgagtaagggagtcagtgagcaagatagtaagtaaggtagtgagtgagatagtgagtgagat

SEQ ID NO: 18240 - DNA, 96 bp, Aspergillus novofumigatus
  misc_feature: 75
aagagagctatatctatactaaattttaaaaactataaaattaatttaactaaaaagcttctttaactttattagctttcttaataaaagctatat

SEQ ID NO: 18241 - DNA, 96 bp, Aspergillus novofumigatus
  misc_feature: 75
atagcatcctattatttctattcttattattactaagttattattataactatatagattattatactattattattatattaagatactattatt

SEQ ID NO: 18242 - DNA, 96 bp, Aspergillus novofumigatus
  misc_feature: 75
ataacccttacttttattctatctctaactctttccttcttcccttctattcttaactctctctttctctttcttctcctttctatccctaactct

SEQ ID NO: 18243 - DNA, 96 bp, Aspergillus novofumigatus
  misc_feature: 75
aaagctctaagtaagtaaagaagattaataaatatagataaactactactatattactttataattaagaaattaaaatttaaataataattttat

SEQ ID NO: 18244 - DNA, 96 bp, Aspergillus novofumigatus
  misc_feature: 75
agttagaataagagttaaggaaagagataaaagaaggattaagaagaggtagaagaagagttagaagaagagatagaagaagagattaggagaggt

SEQ ID NO: 18245 - DNA, 96 bp, Aspergillus novofumigatus
  misc_feature: 75
aggttaattagtagtaatatatgaataaatatatatattttaggatactataatgcgtagagatatatattatacagttagtttgaagagtatgtt

SEQ ID NO: 18246 - DNA, 96 bp, Aspergillus novofumigatus
  misc_feature: 75
aggggaagagagagagaaagagttagagataagagttagaagaagaaggagagttagtaaaagagatagagggtattagcaaaagtaagggttatt

SEQ ID NO: 18247 - DNA, 96 bp, Aspergillus novofumigatus
  misc_feature: 75
agcatagaaatactatatatcctaatcatatacctatataaagtgctataagctatatataactatataggttaccctagctttactaaaactatt

SEQ ID NO: 18248 - DNA, 96 bp, Aspergillus novofumigatus
  misc_feature: 75
aaggagagttagaaggagagttagaaggagagtaagaaatagaataagagtaaggggtagtaagtgtagatagaagagagagatagagaaaggggt

SEQ ID NO: 18249 - DNA, 96 bp, Aspergillus novofumigatus
  misc_feature: 75
aaggttaattagtagtaatatatgaataaatatatatattttaggatactataatgcgtagagatatatattatacagttagtttgaagagtatgt

SEQ ID NO: 18250 - DNA, 96 bp, Aspergillus novofumigatus
  misc_feature: 75
aaatagtaaatagataataaaataaatgaataaataaataaaaatcaaaaagttaaaaaatcaaaaacctaaaataaattaaaaaataaattaatt

SEQ ID NO: 18251 - DNA, 96 bp, Aspergillus novofumigatus
  misc_feature: 74
atatctaatttaataataaaagaccctaaatatagtaaatttagtaaataataattattagaaatcttaagagaagatttcttagctatttaaaaa

SEQ ID NO: 18252 - DNA, 96 bp, Aspergillus novofumigatus
  misc_feature: 74
aatagaaagctaaatctaacttaaaattattaaaagaagaataaatttaaattctataagatataactttaatataaaggaaaacctataataaaa

SEQ ID NO: 18253 - DNA, 96 bp, Aspergillus novofumigatus
  misc_feature: 74
atatatagaatactaataaagtataatagaactaataataatataaagaaggggaatatttatctaaatatatttatacttttttaaagtataaaa

SEQ ID NO: 18254 - DNA, 96 bp, Aspergillus novofumigatus
  misc_feature: 74
ctattatatactcttaatctaatagtaaataatacttatataaagaagaagagataaacctattataatatatatattcctcttacttagcataaa

SEQ ID NO: 18255 - DNA, 96 bp, Aspergillus novofumigatus
  misc_feature: 74
aatatatagaatactaataaagtataatagaactaataataatataaagaaggggaatatttatctaaatatatttatacttttttaaagtataaa

SEQ ID NO: 18256 - DNA, 96 bp, Aspergillus novofumigatus
  misc_feature: 74
taaatagataataaaataaatgaataaataaataaaaatcaaaaagttaaaaaatcaaaaacctaaaataaattaaaaaataaattaattaaagaa

SEQ ID NO: 18257 - DNA, 96 bp, Aspergillus novofumigatus
  misc_feature: 74
ttcctactcttcttaatctactctcttaaaatcccttcttttttcttctactatctctctttaatctcttaaaccctttacctctctctactctaa

SEQ ID NO: 18258 - DNA, 96 bp, Aspergillus novofumigatus
  misc_feature: 74
ttattagttctactatactttattagtattccatatattatagcttttattatagattttcctttatattaaggttatatcttatagaatttaatt

SEQ ID NO: 18259 - DNA, 96 bp, Aspergillus novofumigatus
  misc_feature: 74
tctattatatactcttaatctaatagtaaataatacttatataaagaagaagagataaacctattataatatatatattcctcttacttagcataa

SEQ ID NO: 18260 - DNA, 96 bp, Aspergillus novofumigatus
  misc_feature: 74
ttactatcttactaccctacttatctatttacttattatcttactacctatcttactatctcccttactatctcatacactaccttactcacttcc

SEQ ID NO: 18261 - DNA, 96 bp, Aspergillus novofumigatus
  misc_feature: 74
ttacctcttttttcttctccctttttatctcttctctctatttctctcttaattcttactctatctcttactttacccctttctctatctctctct

SEQ ID NO: 18262 - DNA, 96 bp, Aspergillus novofumigatus
  misc_feature: 74
aaatcttatctaggtactatatagataagataagtatataatagatacttataaaacaggtatttatatctatattaattatactataataattaa

SEQ ID NO: 18263 - DNA, 96 bp, Aspergillus novofumigatus
  misc_feature: 74
ttaattagtagtaatatatgaataaatatatatattttaggatactataatgcgtagagatatatattatacagttagtttgaagagtatgttggc

SEQ ID NO: 18264 - DNA, 96 bp, Aspergillus novofumigatus
  misc_feature: 74
tatcgggcaatgcttaatggaagacattaaattaggatattaaattattaatacaatattttttccttattaatacaatattaatttacttattaa

SEQ ID NO: 18265 - DNA, 96 bp, Aspergillus novofumigatus
  misc_feature: 74
gggaagagagagagaaagagttagagataagagttagaagaagaaggagagttagtaaaagagatagagggtattagcaaaagtaagggttattaa

SEQ ID NO: 18266 - DNA, 96 bp, Aspergillus novofumigatus
  misc_feature: 74
atctaggtactatatagataagataagtatataatagatacttataaaacaggtatttatatctatattaattatactataataattaatattaca

SEQ ID NO: 18267 - DNA, 96 bp, Aspergillus novofumigatus
  misc_feature: 74
tggaatttatatataattatatactatattaattaataaagatatccctctttatagtaatttatagctataagctattattaccctagctagcta

SEQ ID NO: 18268 - DNA, 96 bp, Aspergillus novofumigatus
  misc_feature: 74
gtgagatagtgagtgagatagtgagggaggcagtaagtaagacagtgagggaggcagtgagtgagatagtgagggagtgaggcagtgagtaaggca

SEQ ID NO: 18269 - DNA, 96 bp, Aspergillus novofumigatus
  misc_feature: 74
gtaaatagataataaaataaatgaataaataaataaaaatcaaaaagttaaaaaatcaaaaacctaaaataaattaaaaaataaattaattaaaga

SEQ ID NO: 18270 - DNA, 96 bp, Aspergillus novofumigatus
  misc_feature: 74
tctttaacctacctccttctaatatataatctatagattatatattacctatattataaactagcaataacatacactataataatataattacta

SEQ ID NO: 18271 - DNA, 96 bp, Aspergillus novofumigatus
  misc_feature: 74
attaagattatctattatttatctaatacagataatttatattatactatagtaattttatttattaatatacttcccttcttattataaaagaga

SEQ ID NO: 18272 - DNA, 96 bp, Aspergillus novofumigatus
  misc_feature: 74
tctctcttaattcttactctatctcttactttacccctttctctatctctctcttctatctacacttactaccccttactcttattctatttctta

SEQ ID NO: 18273 - DNA, 96 bp, Aspergillus novofumigatus
  misc_feature: 74
cagtgagcgagatagtgagggaggcagtgagtgagatagtgagggaggcagtgagtgagatagtgagggaggcagtgagcaagacagtgagcgaga

SEQ ID NO: 18274 - DNA, 96 bp, Aspergillus novofumigatus
  misc_feature: 74
gggttagtaaggatagaagaagagttataagaagaggaagagggaggggaagagagagagaaagagttagagataagagttagaagaagaaggaga

SEQ ID NO: 18275 - DNA, 96 bp, Aspergillus novofumigatus
  misc_feature: 74
cagcgagcaagttaggtagtgagtaagtgaggcagtgagtaagggagtcagtgagcaagatagtaagtaaggtagtgagtgagatagtgagtgaga

SEQ ID NO: 18276 - DNA, 96 bp, Aspergillus novofumigatus
  misc_feature: 74
ctatattattattagttctactatactttattagtattccatatattatagcttttattatagattttcctttatattaaggttatatcttataga

SEQ ID NO: 18277 - DNA, 96 bp, Aspergillus novofumigatus
  misc_feature: 74
cagcaagacagacagtaaggtagatagtaagatagatagtaaggtagacagtaagatagatagtgtagtcaatagtaaggtaggtaataaggtaga

SEQ ID NO: 18278 - DNA, 96 bp, Aspergillus novofumigatus
  misc_feature: 74
gtaagataggtagtaagataataagtaaatagataagtagggtagtaagatagtaatgcaggtaaaaggccccagggagattatatatcaggtaga

SEQ ID NO: 18279 - DNA, 96 bp, Aspergillus novofumigatus
  misc_feature: 74
ggcagcgagcaagttaggtagtgagtaagtgaggcagtgagtaagggagtcagtgagcaagatagtaagtaaggtagtgagtgagatagtgagtga

SEQ ID NO: 18280 - DNA, 96 bp, Aspergillus novofumigatus
  misc_feature: 74
taggagattaaggttaattagtagtaatatatgaataaatatatatattttaggatactataatgcgtagagatatatattatacagttagtttga

SEQ ID NO: 18281 - DNA, 96 bp, Aspergillus novofumigatus
  misc_feature: 74
atatagaatactaataaagtataatagaactaataataatataaagaaggggaatatttatctaaatatatttatacttttttaaagtataaaata

SEQ ID NO: 18282 - DNA, 96 bp, Aspergillus novofumigatus
  misc_feature: 74
ctcttaacctctttaacctacctccttctaatatataatctatagattatatattacctatattataaactagcaataacatacactataataata

SEQ ID NO: 18283 - DNA, 96 bp, Aspergillus novofumigatus
  misc_feature: 74
gatagagagtaagtaaggcagtgcatgagatagtaagggagatagtaagataggtagtaagataataagtaaatagataagtagggtagtaagata

SEQ ID NO: 18284 - DNA, 96 bp, Aspergillus novofumigatus
  misc_feature: 74
tatcttactaccctacttatctatttacttattatcttactacctatcttactatctcccttactatctcatacactaccttactcacttcctatc

SEQ ID NO: 18285 - DNA, 96 bp, Aspergillus novofumigatus
  misc_feature: 74
gcgagcaagttaggtagtgagtaagtgaggcagtgagtaagggagtcagtgagcaagatagtaagtaaggtagtgagtgagatagtgagtgagata

SEQ ID NO: 18286 - DNA, 96 bp, Aspergillus novofumigatus
  misc_feature: 74
tatcagggggatatcaccatagttaggagagagatagttagtaaggtagataataagattaatagtatagtagatagtgaggttaacagtaaggtt

SEQ ID NO: 18287 - DNA, 96 bp, Aspergillus novofumigatus
  misc_feature: 74
atagaatactaataaagtataatagaactaataataatataaagaaggggaatatttatctaaatatatttatacttttttaaagtataaaatata

SEQ ID NO: 18288 - DNA, 96 bp, Aspergillus novofumigatus
  misc_feature: 74
tatatagaatactaataaagtataatagaactaataataatataaagaaggggaatatttatctaaatatatttatacttttttaaagtataaaat

SEQ ID NO: 18289 - DNA, 96 bp, Aspergillus novofumigatus
  misc_feature: 74
tataatatatagaatactaataaagtataatagaactaataataatataaagaaggggaatatttatctaaatatatttatacttttttaaagtat

SEQ ID NO: 18290 - DNA, 96 bp, Aspergillus novofumigatus
  misc_feature: 74
gtagcatagaaatactatatatcctaatcatatacctatataaagtgctataagctatatataactatataggttaccctagctttactaaaacta

SEQ ID NO: 18291 - DNA, 96 bp, Aspergillus novofumigatus
  misc_feature: 74
tagtaaggtagacagtaaggtagacagtaaggtagacagtaaggtagatagtaaggtagatagtaaggtggacagtaaaataggcagtaagatagg

SEQ ID NO: 18292 - DNA, 96 bp, Aspergillus novofumigatus
  misc_feature: 74
actatcttactaccctacttatctatttacttattatcttactacctatcttactatctcccttactatctcatacactaccttactcacttccta

SEQ ID NO: 18293 - DNA, 96 bp, Aspergillus novofumigatus
  misc_feature: 74
ggtaagagagctatatctatactaaattttaaaaactataaaattaatttaactaaaaagcttctttaactttattagctttcttaataaaagcta

SEQ ID NO: 18294 - DNA, 96 bp, Aspergillus novofumigatus
  misc_feature: 74
actaactactatatactaaggcttaataatagtagatagatagatataatagttagtatattagtattagaggtacctactaaatctactaatcta

SEQ ID NO: 18295 - DNA, 96 bp, Aspergillus novofumigatus
  misc_feature: 74
tactcttcttaatctactctcttaaaatcccttcttttttcttctactatctctctttaatctcttaaaccctttacctctctctactctaaatta

SEQ ID NO: 18296 - DNA, 96 bp, Aspergillus novofumigatus
  misc_feature: 74
cagaagaacccagagctaagggtggaattatagactataaagataatataataaattacttagataatagagatagtaatataggagctagaatta

SEQ ID NO: 18297 - DNA, 96 bp, Aspergillus novofumigatus
  misc_feature: 74
taattagtagtaatatatgaataaatatatatattttaggatactataatgcgtagagatatatattatacagttagtttgaagagtatgttggct

SEQ ID NO: 18298 - DNA, 96 bp, Aspergillus novofumigatus
  misc_feature: 74
ggggaagagagagagaaagagttagagataagagttagaagaagaaggagagttagtaaaagagatagagggtattagcaaaagtaagggttatta

SEQ ID NO: 18299 - DNA, 96 bp, Aspergillus novofumigatus
  misc_feature: 74
taataacccttacttttattctatctctaactctttccttcttcccttctattcttaactctctctttctctttcttctcctttctatccctaact

SEQ ID NO: 18300 - DNA, 96 bp, Aspergillus novofumigatus
  misc_feature: 74
taagggttagtaaggatagaagaagagttataagaagaggaagagggaggggaagagagagagaaagagttagagataagagttagaagaagaagg

SEQ ID NO: 18301 - DNA, 96 bp, Aspergillus novofumigatus
  misc_feature: 74
atcagggggatatcaccatagttaggagagagatagttagtaaggtagataataagattaatagtatagtagatagtgaggttaacagtaaggtta

SEQ ID NO: 18302 - DNA, 96 bp, Aspergillus novofumigatus
  misc_feature: 74
taaacttaataacccttacttttattctatctctaactctttccttcttcccttctattcttaactctctctttctctttcttctcctttctatcc

SEQ ID NO: 18303 - DNA, 96 bp, Aspergillus novofumigatus
  misc_feature: 74
gtgtgttggaataaaatcaaatcgcgtacgcaggcattgaggtggcagaatagttagaattggaaagcggtgattctagcggcaaaacggggggtc

SEQ ID NO: 18304 - DNA, 96 bp, Aspergillus novofumigatus
  misc_feature: 74
ctcccttattaccttgctcactgcctatcttactacctcccttactatcttacttactacctcccttactgttaaccttactatctacctcactac

SEQ ID NO: 18305 - DNA, 96 bp, Aspergillus novofumigatus
  misc_feature: 74
actcttcttaatctactctcttaaaatcccttcttttttcttctactatctctctttaatctcttaaaccctttacctctctctactctaaattac

SEQ ID NO: 18306 - DNA, 96 bp, Aspergillus novofumigatus
  misc_feature: 74
gtaaggtagacagtaaggtagacagtaaggtagacagtaaggtagatagtaaggtagatagtaaggtggacagtaaaataggcagtaagataggtg

SEQ ID NO: 18307 - DNA, 96 bp, Aspergillus novofumigatus
  misc_feature: 74
ggttaattagtagtaatatatgaataaatatatatattttaggatactataatgcgtagagatatatattatacagttagtttgaagagtatgttg

SEQ ID NO: 18308 - DNA, 96 bp, Aspergillus novofumigatus
  misc_feature: 74
gggttcacataagggttagtaagtttagagaagggaaaaggtagagatagtaagaaaaagaagatagtaagagattaagtaagggatcatataagg

SEQ ID NO: 18309 - DNA, 96 bp, Aspergillus novofumigatus
  misc_feature: 74
gggaggggaagagagagagaaagagttagagataagagttagaagaagaaggagagttagtaaaagagatagagggtattagcaaaagtaagggtt

SEQ ID NO: 18310 - DNA, 96 bp, Aspergillus novofumigatus
  misc_feature: 74
gcagcgagcaagttaggtagtgagtaagtgaggcagtgagtaagggagtcagtgagcaagatagtaagtaaggtagtgagtgagatagtgagtgag

SEQ ID NO: 18311 - DNA, 96 bp, Aspergillus novofumigatus
  misc_feature: 74
gaagagattaggagaggttaggatagttagaaggagagtaagagagatttagatagaggggttaaataagagatagaaggagagatagaaggagag

SEQ ID NO: 18312 - DNA, 96 bp, Aspergillus novofumigatus
  misc_feature: 74
agtaaatagataataaaataaatgaataaataaataaaaatcaaaaagttaaaaaatcaaaaacctaaaataaattaaaaaataaattaattaaag

SEQ ID NO: 18313 - DNA, 96 bp, Aspergillus novofumigatus
  misc_feature: 74
cgagatagtgagggaggcagtgagtgagatagtgagggaggcagtgagtgagatagtgagggaggcagtgagcaagacagtgagcgagatagtaag

SEQ ID NO: 18314 - DNA, 96 bp, Aspergillus novofumigatus
  misc_feature: 74
cttaatctcttcttatcttaatctaataaatataaatatatatatctattatctagactaaatcttttctagtaactaaatctaattattatctag

SEQ ID NO: 18315 - DNA, 96 bp, Aspergillus novofumigatus
  misc_feature: 74
ctcttcttaatctactctcttaaaatcccttcttttttcttctactatctctctttaatctcttaaaccctttacctctctctactctaaattact

SEQ ID NO: 18316 - DNA, 96 bp, Aspergillus novofumigatus
  misc_feature: 74
ctcactcactcactgcctgccttacttactatcttactcactaccttacttactgcctcactccctcactatctcacttactacctcccttactgt

SEQ ID NO: 18317 - DNA, 96 bp, Aspergillus novofumigatus
  misc_feature: 74
ctatttataattactatctaccttattacctaccttactattgactacactatctatcttactgtctaccttactatctatcttactatctacctt

SEQ ID NO: 18318 - DNA, 96 bp, Aspergillus novofumigatus
  misc_feature: 74
cctactcttcttaatctactctcttaaaatcccttcttttttcttctactatctctctttaatctcttaaaccctttacctctctctactctaaat

SEQ ID NO: 18319 - DNA, 96 bp, Aspergillus novofumigatus
  misc_feature: 74
accagttggcggggggcccttgggggggcagaccggcaggcaggggcgcgcgccatagacagacacttgtagagacacacagacaccgggggcggg

SEQ ID NO: 18320 - DNA, 96 bp, Aspergillus novofumigatus
  misc_feature: 74
cactgcctcactccctcactatctcactcactgcctccctcactgtcttacttactgcctccctcactatctcactcactatctcactcactacct

SEQ ID NO: 18321 - DNA, 96 bp, Aspergillus novofumigatus
  misc_feature: 74
aatctattatatactcttaatctaatagtaaataatacttatataaagaagaagagataaacctattataatatatatattcctcttacttagcat

SEQ ID NO: 18322 - DNA, 96 bp, Aspergillus novofumigatus
  misc_feature: 74
agactataatatatctaataatcttaaacccctaaaagattagaatgaatttaataataatagtaataaggagaatagactattataagaggctat

SEQ ID NO: 18323 - DNA, 96 bp, Aspergillus novofumigatus
  misc_feature: 74
agtagcatagaaatactatatatcctaatcatatacctatataaagtgctataagctatatataactatataggttaccctagctttactaaaact

SEQ ID NO: 18324 - DNA, 96 bp, Aspergillus novofumigatus
  misc_feature: 74
agtaaggtagacagtaaggtagacagtaaggtagacagtaaggtagatagtaaggtagatagtaaggtggacagtaaaataggcagtaagataggt

SEQ ID NO: 18325 - DNA, 96 bp, Aspergillus novofumigatus
  misc_feature: 74
aggtaagagagctatatctatactaaattttaaaaactataaaattaatttaactaaaaagcttctttaactttattagctttcttaataaaagct

SEQ ID NO: 18326 - DNA, 96 bp, Aspergillus novofumigatus
  misc_feature: 74
actgcctcactccctcactatctcactcactgcctccctcactgtcttacttactgcctccctcactatctcactcactatctcactcactacctt

SEQ ID NO: 18327 - DNA, 96 bp, Aspergillus novofumigatus
  misc_feature: 74
aaagaagctaaagaagaattataataatataaaagagaggttgaagctatataagatatagtttataataataatagaattaattaattacatagt

SEQ ID NO: 18328 - DNA, 96 bp, Aspergillus novofumigatus
  misc_feature: 74
aataagtaaattaatattgtattaataaggaaaaaatattgtattaataatttaatatcctaatttaatgtcttccattaagcattgcccgatatt

SEQ ID NO: 18329 - DNA, 96 bp, Aspergillus novofumigatus
  misc_feature: 74
aagaagctaaagaagaattataataatataaaagagaggttgaagctatataagatatagtttataataataatagaattaattaattacatagtt

SEQ ID NO: 18330 - DNA, 96 bp, Aspergillus novofumigatus
  misc_feature: 73
taggaaatatctagtattaactatactagatatagtaatatattcccctctagtaatatattacatatatatatccctgactataatacccctaaa

SEQ ID NO: 18331 - DNA, 96 bp, Aspergillus novofumigatus
  misc_feature: 73
tttacctcttttttcttctccctttttatctcttctctctatttctctcttaattcttactctatctcttactttacccctttctctatctctctc

SEQ ID NO: 18332 - DNA, 96 bp, Aspergillus novofumigatus
  misc_feature: 73
ttagttctactatactttattagtattccatatattatagcttttattatagattttcctttatattaaggttatatcttatagaatttaattaaa

SEQ ID NO: 18333 - DNA, 96 bp, Aspergillus novofumigatus
  misc_feature: 73
taaacataatccgaggataaggattttagcggcttgtagtattttagccgcttgttgcattttagccgcttgtagtattttagcggcttttagcaa

SEQ ID NO: 18334 - DNA, 96 bp, Aspergillus novofumigatus
  misc_feature: 73
ttctctatattattattagttctactatactttattagtattccatatattatagcttttattatagattttcctttatattaaggttatatctta

SEQ ID NO: 18335 - DNA, 96 bp, Aspergillus novofumigatus
  misc_feature: 73
ttctatctcttatttaacccctctatctaaatctctcttactctccttctaactatcctaacctctcctaatctcttcttctatctcttcttctaa

SEQ ID NO: 18336 - DNA, 96 bp, Aspergillus novofumigatus
  misc_feature: 73
tatattattattagttctactatactttattagtattccatatattatagcttttattatagattttcctttatattaaggttatatcttatagaa

SEQ ID NO: 18337 - DNA, 96 bp, Aspergillus novofumigatus
  misc_feature: 73
ttccccttctctatattattattagttctactatactttattagtattccatatattatagcttttattatagattttcctttatattaaggttat

SEQ ID NO: 18338 - DNA, 96 bp, Aspergillus novofumigatus
  misc_feature: 73
aggagattaaggttaattagtagtaatatatgaataaatatatatattttaggatactataatgcgtagagatatatattatacagttagtttgaa

SEQ ID NO: 18339 - DNA, 96 bp, Aspergillus novofumigatus
  misc_feature: 73
ttattattagttctactatactttattagtattccatatattatagcttttattatagattttcctttatattaaggttatatcttatagaattta

SEQ ID NO: 18340 - DNA, 96 bp, Aspergillus novofumigatus
  misc_feature: 73
ttatatactcttaatctaatagtaaataatacttatataaagaagaagagataaacctattataatatatatattcctcttacttagcataaatag

SEQ ID NO: 18341 - DNA, 96 bp, Aspergillus novofumigatus
  misc_feature: 73
taatatatagaatactaataaagtataatagaactaataataatataaagaaggggaatatttatctaaatatatttatacttttttaaagtataa

SEQ ID NO: 18342 - DNA, 96 bp, Aspergillus novofumigatus
  misc_feature: 73
ttagaataagagttaaggaaagagataaaagaaggattaagaagaggtagaagaagagttagaagaagagatagaagaagagattaggagaggtta

SEQ ID NO: 18343 - DNA, 96 bp, Aspergillus novofumigatus
  misc_feature: 73
ttactcactgcctcactccctcactatctcactcactgcctccctcactgtcttacttactgcctccctcactatctcactcactatctcactcac

SEQ ID NO: 18344 - DNA, 96 bp, Aspergillus novofumigatus
  misc_feature: 73
ttactattgactacactatctaccttactattaacctcactatctatcttactgtctaccttactatctatcttactatctacctcactgcctgtc

SEQ ID NO: 18345 - DNA, 96 bp, Aspergillus novofumigatus
  misc_feature: 73
tagaagtattatattttactactcttataataaaatagcagtataataataaatatatactaattatatttactaagggtaataaggtcctattaa

SEQ ID NO: 18346 - DNA, 96 bp, Aspergillus novofumigatus
  misc_feature: 73
ttaagattatctattatttatctaatacagataatttatattatactatagtaattttatttattaatatacttcccttcttattataaaagagag

SEQ ID NO: 18347 - DNA, 96 bp, Aspergillus novofumigatus
  misc_feature: 73
tcagggggatatcaccatagttaggagagagatagttagtaaggtagataataagattaatagtatagtagatagtgaggttaacagtaaggttaa

SEQ ID NO: 18348 - DNA, 96 bp, Aspergillus novofumigatus
  misc_feature: 73
taatctattatatactcttaatctaatagtaaataatacttatataaagaagaagagataaacctattataatatatatattcctcttacttagca

SEQ ID NO: 18349 - DNA, 96 bp, Aspergillus novofumigatus
  misc_feature: 73
tgcattactatcttactaccctacttatctatttacttattatcttactacctatcttactatctcccttactatctcatgcactgccttacttac

SEQ ID NO: 18350 - DNA, 96 bp, Aspergillus novofumigatus
  misc_feature: 73
tcttatctaggtactatatagataagataagtatataatagatacttataaaacaggtatttatatctatattaattatactataataattaatat

SEQ ID NO: 18351 - DNA, 96 bp, Aspergillus novofumigatus
  misc_feature: 73
tagacagtaaggtagacagtaaggtagacagtaaggtagatagtaaggtagatagtaaggtggacagtaaaataggcagtaagataggtggtaaga

SEQ ID NO: 18352 - DNA, 96 bp, Aspergillus novofumigatus
  misc_feature: 73
tctattaatccttactacattcctaattcattctattaaattattatttactttatccttttcttttaatttatctttccttaattttaatttcct

SEQ ID NO: 18353 - DNA, 96 bp, Aspergillus novofumigatus
  misc_feature: 73
tctatattattattagttctactatactttattagtattccatatattatagcttttattatagattttcctttatattaaggttatatcttatag

SEQ ID NO: 18354 - DNA, 96 bp, Aspergillus novofumigatus
  misc_feature: 73
tctaaacttaataacccttacttttattctatctctaactctttccttcttcccttctattcttaactctctctttctctttcttctcctttctat

SEQ ID NO: 18355 - DNA, 96 bp, Aspergillus novofumigatus
  misc_feature: 73
tccttctatctcttatttaacccctctatctaaatctctcttactctccttctaactatcctaacctctcctaatctcttcttctatctcttcttc

SEQ ID NO: 18356 - DNA, 96 bp, Aspergillus novofumigatus
  misc_feature: 73
aagattatctattatttatctaatacagataatttatattatactatagtaattttatttattaatatacttcccttcttattataaaagagagga

SEQ ID NO: 18357 - DNA, 96 bp, Aspergillus novofumigatus
  misc_feature: 73
tactcttaatctaatagtaaataatacttatataaagaagaagagataaacctattataatatatatattcctcttacttagcataaatagtagga

SEQ ID NO: 18358 - DNA, 96 bp, Aspergillus novofumigatus
  misc_feature: 73
tcactgcctcactccctcactatctcactcactgcctccctcactgtcttacttactgcctccctcactatctcactcactatctcactcactacc

SEQ ID NO: 18359 - DNA, 96 bp, Aspergillus novofumigatus
  misc_feature: 73
attatatactcttaatctaatagtaaataatacttatataaagaagaagagataaacctattataatatatatattcctcttacttagcataaata

SEQ ID NO: 18360 - DNA, 96 bp, Aspergillus novofumigatus
  misc_feature: 73
aatttatatataattatatactatattaattaataaagatatccctctttatagtaatttatagctataagctattattaccctagctagctaata

SEQ ID NO: 18361 - DNA, 96 bp, Aspergillus novofumigatus
  misc_feature: 73
atcttatctaggtactatatagataagataagtatataatagatacttataaaacaggtatttatatctatattaattatactataataattaata

SEQ ID NO: 18362 - DNA, 96 bp, Aspergillus novofumigatus
  misc_feature: 73
tatctaggtactatatagataagataagtatataatagatacttataaaacaggtatttatatctatattaattatactataataattaatattac

SEQ ID NO: 18363 - DNA, 96 bp, Aspergillus novofumigatus
  misc_feature: 73
tatatactcttaatctaatagtaaataatacttatataaagaagaagagataaacctattataatatatatattcctcttacttagcataaatagt

SEQ ID NO: 18364 - DNA, 96 bp, Aspergillus novofumigatus
  misc_feature: 73
tatataaatataaataaatatgtatattaaagtaaaataaatatatttaacttatactagccttataattctataattatctagatctatctaggc

SEQ ID NO: 18365 - DNA, 96 bp, Aspergillus novofumigatus
  misc_feature: 73
taagagagctatatctatactaaattttaaaaactataaaattaatttaactaaaaagcttctttaactttattagctttcttaataaaagctata

SEQ ID NO: 18366 - DNA, 96 bp, Aspergillus novofumigatus
  misc_feature: 73
tatagaatactaataaagtataatagaactaataataatataaagaaggggaatatttatctaaatatatttatacttttttaaagtataaaatat

SEQ ID NO: 18367 - DNA, 96 bp, Aspergillus novofumigatus
  misc_feature: 73
ataatatatagaatactaataaagtataatagaactaataataatataaagaaggggaatatttatctaaatatatttatacttttttaaagtata

SEQ ID NO: 18368 - DNA, 96 bp, Aspergillus novofumigatus
  misc_feature: 73
tatactcttaatctaatagtaaataatacttatataaagaagaagagataaacctattataatatatatattcctcttacttagcataaatagtag

SEQ ID NO: 18369 - DNA, 96 bp, Aspergillus novofumigatus
  misc_feature: 73
gaagaacccagagctaagggtggaattatagactataaagataatataataaattacttagataatagagatagtaatataggagctagaattata

SEQ ID NO: 18370 - DNA, 96 bp, Aspergillus novofumigatus
  misc_feature: 73
tataaccttttatagtagtctattctccttattactattattattaaatttattctaatcttctagggatttaagattattagatatattatagtt

SEQ ID NO: 18371 - DNA, 96 bp, Aspergillus novofumigatus
  misc_feature: 73
tagttctactatactttattagtattccatatattatagcttttattatagattttcctttatattaaggttatatcttatagaatttaattaaat

SEQ ID NO: 18372 - DNA, 96 bp, Aspergillus novofumigatus
  misc_feature: 73
ctagctagggtaataatagcttatagctataaattactataaagagggatatctttattaattaatatagtatataattatatataaattccacta

SEQ ID NO: 18373 - DNA, 96 bp, Aspergillus novofumigatus
  misc_feature: 73
actcactgcctcactccctcactatctcactcactgcctccctcactgtcttacttactgcctccctcactatctcactcactatctcactcacta

SEQ ID NO: 18374 - DNA, 96 bp, Aspergillus novofumigatus
  misc_feature: 73
tagtagatttagtaggtacctctaatactaatatactaactattatatctatctatctactattattaagccttagtatatagtagttagttatat

SEQ ID NO: 18375 - DNA, 96 bp, Aspergillus novofumigatus
  misc_feature: 73
tagctagggtaataatagcttatagctataaattactataaagagggatatctttattaattaatatagtatataattatatataaattccactat

SEQ ID NO: 18376 - DNA, 96 bp, Aspergillus novofumigatus
  misc_feature: 73
gtaattatatatctaatttaataataaaagaccctaaatatagtaaatttagtaaataataattattagaaatcttaagagaagatttcttagcta

SEQ ID NO: 18377 - DNA, 96 bp, Aspergillus novofumigatus
  misc_feature: 73
atatatatatatatatataaatataaataaatatgtatattaaagtaaaataaatatatttaacttatactagccttataattctataattatcta

SEQ ID NO: 18378 - DNA, 96 bp, Aspergillus novofumigatus
  misc_feature: 73
acttaatctcttcttatcttaatctaataaatataaatatatatatctattatctagactaaatcttttctagtaactaaatctaattattatcta

SEQ ID NO: 18379 - DNA, 96 bp, Aspergillus novofumigatus
  misc_feature: 73
tagaataagagttaaggaaagagataaaagaaggattaagaagaggtagaagaagagttagaagaagagatagaagaagagattaggagaggttag

SEQ ID NO: 18380 - DNA, 96 bp, Aspergillus novofumigatus
  misc_feature: 73
cttctatctcttatttaacccctctatctaaatctctcttactctccttctaactatcctaacctctcctaatctcttcttctatctcttcttcta

SEQ ID NO: 18381 - DNA, 96 bp, Aspergillus novofumigatus
  misc_feature: 73
tactcactgcctcactccctcactatctcactcactgcctccctcactgtcttacttactgcctccctcactatctcactcactatctcactcact

SEQ ID NO: 18382 - DNA, 96 bp, Aspergillus novofumigatus
  misc_feature: 73
tactaaagctctaagtaagtaaagaagattaataaatatagataaactactactatattactttataattaagaaattaaaatttaaataataatt

SEQ ID NO: 18383 - DNA, 96 bp, Aspergillus novofumigatus
  misc_feature: 73
tacagaagaacccagagctaagggtggaattatagactataaagataatataataaattacttagataatagagatagtaatataggagctagaat

SEQ ID NO: 18384 - DNA, 96 bp, Aspergillus novofumigatus
  misc_feature: 73
aatagtaaatagataataaaataaatgaataaataaataaaaatcaaaaagttaaaaaatcaaaaacctaaaataaattaaaaaataaattaatta

SEQ ID NO: 18385 - DNA, 96 bp, Aspergillus novofumigatus
  misc_feature: 73
atatacttaatctcttcttatcttaatctaataaatataaatatatatatctattatctagactaaatcttttctagtaactaaatctaattatta

SEQ ID NO: 18386 - DNA, 96 bp, Aspergillus novofumigatus
  misc_feature: 73
taataagtaaattaatattgtattaataaggaaaaaatattgtattaataatttaatatcctaatttaatgtcttccattaagcattgcccgatat

SEQ ID NO: 18387 - DNA, 96 bp, Aspergillus novofumigatus
  misc_feature: 73
gattagtagatttagtaggtacctctaatactaatatactaactattatatctatctatctactattattaagccttagtatatagtagttagtta

SEQ ID NO: 18388 - DNA, 96 bp, Aspergillus novofumigatus
  misc_feature: 73
taaccttttatagtagtctattctccttattactattattattaaatttattctaatcttctagggatttaagattattagatatattatagttct

SEQ ID NO: 18389 - DNA, 96 bp, Aspergillus novofumigatus
  misc_feature: 73
attccccttctctatattattattagttctactatactttattagtattccatatattatagcttttattatagattttcctttatattaaggtta

SEQ ID NO: 18390 - DNA, 96 bp, Aspergillus novofumigatus
  misc_feature: 73
ggaggggaagagagagagaaagagttagagataagagttagaagaagaaggagagttagtaaaagagatagagggtattagcaaaagtaagggtta

SEQ ID NO: 18391 - DNA, 96 bp, Aspergillus novofumigatus
  misc_feature: 73
taaagctctaagtaagtaaagaagattaataaatatagataaactactactatattactttataattaagaaattaaaatttaaataataatttta

SEQ ID NO: 18392 - DNA, 96 bp, Aspergillus novofumigatus
  misc_feature: 73
gttaattagtagtaatatatgaataaatatatatattttaggatactataatgcgtagagatatatattatacagttagtttgaagagtatgttgg

SEQ ID NO: 18393 - DNA, 96 bp, Aspergillus novofumigatus
  misc_feature: 73
agctagctagggtaataatagcttatagctataaattactataaagagggatatctttattaattaatatagtatataattatatataaattccac

SEQ ID NO: 18394 - DNA, 96 bp, Aspergillus novofumigatus
  misc_feature: 73
ctaactactatatactaaggcttaataatagtagatagatagatataatagttagtatattagtattagaggtacctactaaatctactaatctac

SEQ ID NO: 18395 - DNA, 96 bp, Aspergillus novofumigatus
  misc_feature: 73
gtaagagagctatatctatactaaattttaaaaactataaaattaatttaactaaaaagcttctttaactttattagctttcttaataaaagctat

SEQ ID NO: 18396 - DNA, 96 bp, Aspergillus novofumigatus
  misc_feature: 73
gggtaattatatatctaatttaataataaaagaccctaaatatagtaaatttagtaaataataattattagaaatcttaagagaagatttcttagc

SEQ ID NO: 18397 - DNA, 96 bp, Aspergillus novofumigatus
  misc_feature: 73
ggcgcgcgcgcccggcctataccgaccccggtgtctgtgtgtctctacaagtgtctgtctatggcgcgcgcccctgcctgccggtctgcccccccc

SEQ ID NO: 18398 - DNA, 96 bp, Aspergillus novofumigatus
  misc_feature: 73
gctataatatatagaatactaataaagtataatagaactaataataatataaagaaggggaatatttatctaaatatatttatacttttttaaagt

SEQ ID NO: 18399 - DNA, 96 bp, Aspergillus novofumigatus
  misc_feature: 73
gccttactcactgcctcactccctcactatctcactcactgcctccctcactgtcttacttactgcctccctcactatctcactcactatctcact

SEQ ID NO: 18400 - DNA, 96 bp, Aspergillus novofumigatus
  misc_feature: 73
gattatctattatttatctaatacagataatttatattatactatagtaattttatttattaatatacttcccttcttattataaaagagaggaag

SEQ ID NO: 18401 - DNA, 96 bp, Aspergillus novofumigatus
  misc_feature: 73
gataggcttttctataaatataatactatctagaatactagtatatatcttaagactctatattactactataactaactctagagttattaaaat

SEQ ID NO: 18402 - DNA, 96 bp, Aspergillus novofumigatus
  misc_feature: 73
ccttactcactgcctcactccctcactatctcactcactgcctccctcactgtcttacttactgcctccctcactatctcactcactatctcactc

SEQ ID NO: 18403 - DNA, 96 bp, Aspergillus novofumigatus
  misc_feature: 73
gagtaagtaaggcagtgcatgagatagtaagggagatagtaagataggtagtaagataataagtaaatagataagtagggtagtaagatagtaatg

SEQ ID NO: 18404 - DNA, 96 bp, Aspergillus novofumigatus
  misc_feature: 73
cttctctatattattattagttctactatactttattagtattccatatattatagcttttattatagattttcctttatattaaggttatatctt

SEQ ID NO: 18405 - DNA, 96 bp, Aspergillus novofumigatus
  misc_feature: 73
aattaagattatctattatttatctaatacagataatttatattatactatagtaattttatttattaatatacttcccttcttattataaaagag

SEQ ID NO: 18406 - DNA, 96 bp, Aspergillus novofumigatus
  misc_feature: 73
ctccttctatctcttatttaacccctctatctaaatctctcttactctccttctaactatcctaacctctcctaatctcttcttctatctcttctt

SEQ ID NO: 18407 - DNA, 96 bp, Aspergillus novofumigatus
  misc_feature: 73
ctcactcactgcctcacttactacctatcttactacctcactcactatctcacttactatcttacttactgtcttgctcactgcctcccttactat

SEQ ID NO: 18408 - DNA, 96 bp, Aspergillus novofumigatus
  misc_feature: 73
ctattaatccttactacattcctaattcattctattaaattattatttactttatccttttcttttaatttatctttccttaattttaatttcctt

SEQ ID NO: 18409 - DNA, 96 bp, Aspergillus novofumigatus
  misc_feature: 73
atagtaaggtagacagtaaggtagacagtaaggtagacagtaaggtagatagtaaggtagatagtaaggtggacagtaaaataggcagtaagatag

SEQ ID NO: 18410 - DNA, 96 bp, Aspergillus novofumigatus
  misc_feature: 73
ctatctctccttctatctcttatttaacccctctatctaaatctctcttactctccttctaactatcctaacctctcctaatctcttcttctatct

SEQ ID NO: 18411 - DNA, 96 bp, Aspergillus novofumigatus
  misc_feature: 73
aatataaccttttatagtagtctattctccttattactattattattaaatttattctaatcttctagggatttaagattattagatatattatag

SEQ ID NO: 18412 - DNA, 96 bp, Aspergillus novofumigatus
  misc_feature: 73
ctactcttcttaatctactctcttaaaatcccttcttttttcttctactatctctctttaatctcttaaaccctttacctctctctactctaaatt

SEQ ID NO: 18413 - DNA, 96 bp, Aspergillus novofumigatus
  misc_feature: 73
agtaagataggtagtaagataataagtaaatagataagtagggtagtaagatagtaatgcaggtaaaaggccccagggagattatatatcaggtag

SEQ ID NO: 18414 - DNA, 96 bp, Aspergillus novofumigatus
  misc_feature: 73
ccttctatctcttatttaacccctctatctaaatctctcttactctccttctaactatcctaacctctcctaatctcttcttctatctcttcttct

SEQ ID NO: 18415 - DNA, 96 bp, Aspergillus novofumigatus
  misc_feature: 73
attaagagagaaatagagagaagagataaaaagggagaagaaaaaagaggtaaataagtaaaaaaaatagaaaaaagaagaagaagaaaggtcagg

SEQ ID NO: 18416 - DNA, 96 bp, Aspergillus novofumigatus
  misc_feature: 73
atactcttaatctaatagtaaataatacttatataaagaagaagagataaacctattataatatatatattcctcttacttagcataaatagtagg

SEQ ID NO: 18417 - DNA, 96 bp, Aspergillus novofumigatus
  misc_feature: 73
agaataagagttaaggaaagagataaaagaaggattaagaagaggtagaagaagagttagaagaagagatagaagaagagattaggagaggttagg

SEQ ID NO: 18418 - DNA, 96 bp, Aspergillus novofumigatus
  misc_feature: 73
caggcagcgagcaagttaggtagtgagtaagtgaggcagtgagtaagggagtcagtgagcaagatagtaagtaaggtagtgagtgagatagtgagt

SEQ ID NO: 18419 - DNA, 96 bp, Aspergillus novofumigatus
  misc_feature: 73
aggcagcgagcaagttaggtagtgagtaagtgaggcagtgagtaagggagtcagtgagcaagatagtaagtaaggtagtgagtgagatagtgagtg

SEQ ID NO: 18420 - DNA, 96 bp, Aspergillus novofumigatus
  misc_feature: 73
atttacctcttttttcttctccctttttatctcttctctctatttctctcttaattcttactctatctcttactttacccctttctctatctctct

SEQ ID NO: 18421 - DNA, 96 bp, Aspergillus novofumigatus
  misc_feature: 73
aaatagataataaaataaatgaataaataaataaaaatcaaaaagttaaaaaatcaaaaacctaaaataaattaaaaaataaattaattaaagaat

SEQ ID NO: 18422 - DNA, 96 bp, Aspergillus novofumigatus
  misc_feature: 73
atattattattagttctactatactttattagtattccatatattatagcttttattatagattttcctttatattaaggttatatcttatagaat

SEQ ID NO: 18423 - DNA, 96 bp, Aspergillus novofumigatus
  misc_feature: 73
attattattagttctactatactttattagtattccatatattatagcttttattatagattttcctttatattaaggttatatcttatagaattt

SEQ ID NO: 18424 - DNA, 96 bp, Aspergillus novofumigatus
  misc_feature: 73
attagtagatttagtaggtacctctaatactaatatactaactattatatctatctatctactattattaagccttagtatatagtagttagttat

SEQ ID NO: 18425 - DNA, 96 bp, Aspergillus novofumigatus
  misc_feature: 73
attaggagattaaggttaattagtagtaatatatgaataaatatatatattttaggatactataatgcgtagagatatatattatacagttagttt

SEQ ID NO: 18426 - DNA, 96 bp, Aspergillus novofumigatus
  misc_feature: 73
atcgggcaatgcttaatggaagacattaaattaggatattaaattattaatacaatattttttccttattaatacaatattaatttacttattaat

SEQ ID NO: 18427 - DNA, 96 bp, Aspergillus novofumigatus
  misc_feature: 73
atatttctattaatccttactacattcctaattcattctattaaattattatttactttatccttttcttttaatttatctttccttaattttaat

SEQ ID NO: 18428 - DNA, 96 bp, Aspergillus novofumigatus
  misc_feature: 73
atatatatacttaatctcttcttatcttaatctaataaatataaatatatatatctattatctagactaaatcttttctagtaactaaatctaatt

SEQ ID NO: 18429 - DNA, 96 bp, Aspergillus novofumigatus
  misc_feature: 73
ataataaaagctataatatatggaatactaataaagtatagtagaactaataataatatagagaaggggaatacttacctaaatatatttatactt

SEQ ID NO: 18430 - DNA, 96 bp, Aspergillus novofumigatus
  misc_feature: 73
agctcccttattaccttgctcactgcctatcttactacctcccttactatcttacttactacctcccttactgttaaccttactatctacctcact

SEQ ID NO: 18431 - DNA, 96 bp, Aspergillus novofumigatus
  misc_feature: 73
acagaagaacccagagctaagggtggaattatagactataaagataatataataaattacttagataatagagatagtaatataggagctagaatt

SEQ ID NO: 18432 - DNA, 96 bp, Aspergillus novofumigatus
  misc_feature: 72
aataataaataaatagtaaatagataataaaataaatgaataaataaataaaaatcaaaaagttaaaaaatcaaaaacctaaaataaattaaaaaa

SEQ ID NO: 18433 - DNA, 96 bp, Aspergillus novofumigatus
  misc_feature: 72
aaataataaataaatagtaaatagataataaaataaatgaataaataaataaaaatcaaaaagttaaaaaatcaaaaacctaaaataaattaaaaa

SEQ ID NO: 18434 - DNA, 96 bp, Aspergillus novofumigatus
  misc_feature: 72
gaagtattatattttactactcttataataaaatagcagtataataataaatatatactaattatatttactaagggtaataaggtcctattaaaa

SEQ ID NO: 18435 - DNA, 96 bp, Aspergillus novofumigatus
  misc_feature: 72
aaatagaaagctaaatctaacttaaaattattaaaagaagaataaatttaaattctataagatataactttaatataaaggaaaacctataataaa

SEQ ID NO: 18436 - DNA, 96 bp, Aspergillus novofumigatus
  misc_feature: 72
ataaataataaataaatagtaaatagataataaaataaatgaataaataaataaaaatcaaaaagttaaaaaatcaaaaacctaaaataaattaaa

SEQ ID NO: 18437 - DNA, 96 bp, Aspergillus novofumigatus
  misc_feature: 72
agaagtattatattttactactcttataataaaatagcagtataataataaatatatactaattatatttactaagggtaataaggtcctattaaa

SEQ ID NO: 18438 - DNA, 96 bp, Aspergillus novofumigatus
  misc_feature: 72
atatatctaatttaataataaaagaccctaaatatagtaaatttagtaaataataattattagaaatcttaagagaagatttcttagctatttaaa

SEQ ID NO: 18439 - DNA, 96 bp, Aspergillus novofumigatus
  misc_feature: 72
tctaggtactatatagataagataagtatataatagatacttataaaacaggtatttatatctatattaattatactataataattaatattacaa

SEQ ID NO: 18440 - DNA, 96 bp, Aspergillus novofumigatus
  misc_feature: 72
agctctaagtaagtaaagaagattaataaatatagataaactactactatattactttataattaagaaattaaaatttaaataataattttataa

SEQ ID NO: 18441 - DNA, 96 bp, Aspergillus novofumigatus
  misc_feature: 72
ataggaaatatctagtattaactatactagatatagtaatatattcccctctagtaatatattacatatatatatccctgactataatacccctaa

SEQ ID NO: 18442 - DNA, 96 bp, Aspergillus novofumigatus
  misc_feature: 72
ttagggaatattaatatctataataatatattattataggctatactacttatactactagtatcttctatttcagctatcttaattaattagcta

SEQ ID NO: 18443 - DNA, 96 bp, Aspergillus novofumigatus
  misc_feature: 72
ggctatagtgggccataagaccactatatatgctaggtcatataatatatactataattatctctataagttactaaatattctataacttagtaa

SEQ ID NO: 18444 - DNA, 96 bp, Aspergillus novofumigatus
  misc_feature: 72
attagttctactatactttattagtattccatatattatagcttttattatagattttcctttatattaaggttatatcttatagaatttaattaa

SEQ ID NO: 18445 - DNA, 96 bp, Aspergillus novofumigatus
  misc_feature: 72
ttaaggttaattagtagtaatatatgaataaatatatatattttaggatactataatgcgtagagatatatattatacagttagtttgaagagtat

SEQ ID NO: 18446 - DNA, 96 bp, Aspergillus novofumigatus
  misc_feature: 72
tattattagttctactatactttattagtattccatatattatagcttttattatagattttcctttatattaaggttatatcttatagaatttaa

SEQ ID NO: 18447 - DNA, 96 bp, Aspergillus novofumigatus
  misc_feature: 72
ttaaagactataatatatctaataatcttaaacccctaaaagattagaatgaatttaataataatagtaataaggagaatagactattataagagg

SEQ ID NO: 18448 - DNA, 96 bp, Aspergillus novofumigatus
  misc_feature: 72
gaaatatctagtattaactatactagatatagtaatatattcccctctagtaatatattacatatatatatccctgactataatacccctaaagca

SEQ ID NO: 18449 - DNA, 96 bp, Aspergillus novofumigatus
  misc_feature: 72
gagattaaggttaattagtagtaatatatgaataaatatatatattttaggatactataatgcgtagagatatatattatacagttagtttgaaga

SEQ ID NO: 18450 - DNA, 96 bp, Aspergillus novofumigatus
  misc_feature: 72
tctctatattattattagttctactatactttattagtattccatatattatagcttttattatagattttcctttatattaaggttatatcttat

SEQ ID NO: 18451 - DNA, 96 bp, Aspergillus novofumigatus
  misc_feature: 72
tctccttctatctcttatttaacccctctatctaaatctctcttactctccttctaactatcctaacctctcctaatctcttcttctatctcttct

SEQ ID NO: 18452 - DNA, 96 bp, Aspergillus novofumigatus
  misc_feature: 72
tctaatatttctattaatccttactacattcctaattcattctattaaattattatttactttatccttttcttttaatttatctttccttaattt

SEQ ID NO: 18453 - DNA, 96 bp, Aspergillus novofumigatus
  misc_feature: 72
gtattctagtatatatctatatctataaagaggattatatttaagcctaaaaaactactcatatatataaagcatgattaagttagatataaggga

SEQ ID NO: 18454 - DNA, 96 bp, Aspergillus novofumigatus
  misc_feature: 72
ccagttggcggggggcccttgggggggcagaccggcaggcaggggcgcgcgccatagacagacacttgtagagacacacagacaccgggggcggga

SEQ ID NO: 18455 - DNA, 96 bp, Aspergillus novofumigatus
  misc_feature: 72
tccccttctctatattattattagttctactatactttattagtattccatatattatagcttttattatagattttcctttatattaaggttata

SEQ ID NO: 18456 - DNA, 96 bp, Aspergillus novofumigatus
  misc_feature: 72
tcataggaaatatctagtattaactatactagatatagtaatatattcccctctagtaatatattacatatatatatccctgactataatacccct

SEQ ID NO: 18457 - DNA, 96 bp, Aspergillus novofumigatus
  misc_feature: 72
tcactcactgcctcacttactacctatcttactacctcactcactatctcacttactatcttacttactgtcttgctcactgcctcccttactata

SEQ ID NO: 18458 - DNA, 96 bp, Aspergillus novofumigatus
  misc_feature: 72
tattttaactaaagagatacatcatactttctactacctagatagattttccattccctaaccaatctcattattttataaagcatatatcccccc

SEQ ID NO: 18459 - DNA, 96 bp, Aspergillus novofumigatus
  misc_feature: 72
tattctgacacgaaattcatgtcctcgtgatgctagtgatgctagtgatgctagtgatgctagtgatgctagtgatgctagtgatgaaataaaggg

SEQ ID NO: 18460 - DNA, 96 bp, Aspergillus novofumigatus
  misc_feature: 72
tattattattagttctactatactttattagtattccatatattatagcttttattatagattttcctttatattaaggttatatcttatagaatt

SEQ ID NO: 18461 - DNA, 96 bp, Aspergillus novofumigatus
  misc_feature: 72
tattatatactcttaatctaatagtaaataatacttatataaagaagaagagataaacctattataatatatatattcctcttacttagcataaat

SEQ ID NO: 18462 - DNA, 96 bp, Aspergillus novofumigatus
  misc_feature: 72
tattagttctactatactttattagtattccatatattatagcttttattatagattttcctttatattaaggttatatcttatagaatttaatta

SEQ ID NO: 18463 - DNA, 96 bp, Aspergillus novofumigatus
  misc_feature: 72
ataaagaagctaaagaagaattataataatataaaagagaggttgaagctatataagatatagtttataataataatagaattaattaattacata

SEQ ID NO: 18464 - DNA, 96 bp, Aspergillus novofumigatus
  misc_feature: 72
tatctaaacttaataacccttacttttattctatctctaactctttccttcttcccttctattcttaactctctctttctctttcttctcctttct

SEQ ID NO: 18465 - DNA, 96 bp, Aspergillus novofumigatus
  misc_feature: 72
agatagtagctataaaaataataatagtaattataataataaggatagtaggagtaataagggtagtaatagtagtttatataactagtatatata

SEQ ID NO: 18466 - DNA, 96 bp, Aspergillus novofumigatus
  misc_feature: 72
tatatacttaatctcttcttatcttaatctaataaatataaatatatatatctattatctagactaaatcttttctagtaactaaatctaattatt

SEQ ID NO: 18467 - DNA, 96 bp, Aspergillus novofumigatus
  misc_feature: 72
tatataacctagaggttatatatattctataatatttagattaagattattagtattctataggatattaatctatagctctagtataaagtctat

SEQ ID NO: 18468 - DNA, 96 bp, Aspergillus novofumigatus
  misc_feature: 72
aacttaatcatgctttatatatatgagtagttttttaggcttaaatataatcctctttatagatatagatatatactagaatactaaataattata

SEQ ID NO: 18469 - DNA, 96 bp, Aspergillus novofumigatus
  misc_feature: 72
tataatctatagattatatattacctatattataaactagcaataacatacactataataatataattactataagaggaaaaggaaagcatccct

SEQ ID NO: 18470 - DNA, 96 bp, Aspergillus novofumigatus
  misc_feature: 72
ctctatattattattagttctactatactttattagtattccatatattatagcttttattatagattttcctttatattaaggttatatcttata

SEQ ID NO: 18471 - DNA, 96 bp, Aspergillus novofumigatus
  misc_feature: 72
aagctctaagtaagtaaagaagattaataaatatagataaactactactatattactttataattaagaaattaaaatttaaataataattttata

SEQ ID NO: 18472 - DNA, 96 bp, Aspergillus novofumigatus
  misc_feature: 72
taggtaagagagctatatctatactaaattttaaaaactataaaattaatttaactaaaaagcttctttaactttattagctttcttaataaaagc

SEQ ID NO: 18473 - DNA, 96 bp, Aspergillus novofumigatus
  misc_feature: 72
aagactataatatatctaataatcttaaacccctaaaagattagaatgaatttaataataatagtaataaggagaatagactattataagaggcta

SEQ ID NO: 18474 - DNA, 96 bp, Aspergillus novofumigatus
  misc_feature: 72
atatatataaatataaataaatatgtatattaaagtaaaataaatatatttaacttatactagccttataattctataattatctagatctatcta

SEQ ID NO: 18475 - DNA, 96 bp, Aspergillus novofumigatus
  misc_feature: 72
atctattatttatctaatacagataatttatattatactatagtaattttatttattaatatacttcccttcttattataaaagagaggaagtcta

SEQ ID NO: 18476 - DNA, 96 bp, Aspergillus novofumigatus
  misc_feature: 72
tagaatactaataaagtataatagaactaataataatataaagaaggggaatatttatctaaatatatttatacttttttaaagtataaaatatat

SEQ ID NO: 18477 - DNA, 96 bp, Aspergillus novofumigatus
  misc_feature: 72
ctataatatatagaatactaataaagtataatagaactaataataatataaagaaggggaatatttatctaaatatatttatacttttttaaagta

SEQ ID NO: 18478 - DNA, 96 bp, Aspergillus novofumigatus
  misc_feature: 72
tacttaaacataatccgaggataaggattttagcggcttgtagtattttagccgcttgttgcattttagccgcttgtagtattttagcggctttta

SEQ ID NO: 18479 - DNA, 96 bp, Aspergillus novofumigatus
  misc_feature: 72
tactattgactacactatctaccttactattaacctcactatctatcttactgtctaccttactatctatcttactatctacctcactgcctgtct

SEQ ID NO: 18480 - DNA, 96 bp, Aspergillus novofumigatus
  misc_feature: 72
taatataataataatagtataataatctatatagttataataataacttagtaataataagaatagaaataataggatgctattagacttttagta

SEQ ID NO: 18481 - DNA, 96 bp, Aspergillus novofumigatus
  misc_feature: 72
tacctgcattactatcttactaccctacttatctatttacttattatcttactacctatcttactatctcccttactatctcatgcactgccttac

SEQ ID NO: 18482 - DNA, 96 bp, Aspergillus novofumigatus
  misc_feature: 72
aggtagacagtaaggtagacagtaaggtagacagtaaggtagatagtaaggtagatagtaaggtggacagtaaaataggcagtaagataggtggta

SEQ ID NO: 18483 - DNA, 96 bp, Aspergillus novofumigatus
  misc_feature: 72
ctaacttaatcatgctttatatatatgagtagttttttaggcttaaatataatcctctttatagatatagatatatactagaatactaaataatta

SEQ ID NO: 18484 - DNA, 96 bp, Aspergillus novofumigatus
  misc_feature: 72
ataaataaagaagctaaagaagaattataataatataaaagagaggttgaagctatataagatatagtttataataataatagaattaattaatta

SEQ ID NO: 18485 - DNA, 96 bp, Aspergillus novofumigatus
  misc_feature: 72
taatctatagattatatattacctatattataaactagcaataacatacactataataatataattactataagaggaaaaggaaagcatccctct

SEQ ID NO: 18486 - DNA, 96 bp, Aspergillus novofumigatus
  misc_feature: 72
taataaaagctataatatatggaatactaataaagtatagtagaactaataataatatagagaaggggaatacttacctaaatatatttatacttt

SEQ ID NO: 18487 - DNA, 96 bp, Aspergillus novofumigatus
  misc_feature: 72
taagtaagaggaatatatatattataataggtttatctcttcttctttatataagtattatttactattagattaagagtatataatagattaaat

SEQ ID NO: 18488 - DNA, 96 bp, Aspergillus novofumigatus
  misc_feature: 72
taaggttaattagtagtaatatatgaataaatatatatattttaggatactataatgcgtagagatatatattatacagttagtttgaagagtatg

SEQ ID NO: 18489 - DNA, 96 bp, Aspergillus novofumigatus
  misc_feature: 72
ctgcctcactccctcactatctcactcactgcctccctcactgtcttacttactgcctccctcactatctcactcactatctcactcactacctta

SEQ ID NO: 18490 - DNA, 96 bp, Aspergillus novofumigatus
  misc_feature: 72
taagattatctattatttatctaatacagataatttatattatactatagtaattttatttattaatatacttcccttcttattataaaagagagg

SEQ ID NO: 18491 - DNA, 96 bp, Aspergillus novofumigatus
  misc_feature: 72
taacttaatcatgctttatatatatgagtagttttttaggcttaaatataatcctctttatagatatagatatatactagaatactaaataattat

SEQ ID NO: 18492 - DNA, 96 bp, Aspergillus novofumigatus
  misc_feature: 72
agaagctaaagaagaattataataatataaaagagaggttgaagctatataagatatagtttataataataatagaattaattaattacatagtta

SEQ ID NO: 18493 - DNA, 96 bp, Aspergillus novofumigatus
  misc_feature: 72
taaataaagaagctaaagaagaattataataatataaaagagaggttgaagctatataagatatagtttataataataatagaattaattaattac

SEQ ID NO: 18494 - DNA, 96 bp, Aspergillus novofumigatus
  misc_feature: 72
taaagactataatatatctaataatcttaaacccctaaaagattagaatgaatttaataataatagtaataaggagaatagactattataagaggc

SEQ ID NO: 18495 - DNA, 96 bp, Aspergillus novofumigatus
  misc_feature: 72
taaaatatctagttgatttattacctcctttatatttttaattttaatagatatctaatctattatatatttatctactaaatagtggatttatat

SEQ ID NO: 18496 - DNA, 96 bp, Aspergillus novofumigatus
  misc_feature: 72
aaaagctataatatatagaatactaataaagtataatagaactaataataatataaagaaggggaatatttatctaaatatatttatactttttta

SEQ ID NO: 18497 - DNA, 96 bp, Aspergillus novofumigatus
  misc_feature: 72
gtttattaggaatctatataacctagaggttatatatattctataatatttagattaagattattagtattctataggatattaatctatagctct

SEQ ID NO: 18498 - DNA, 96 bp, Aspergillus novofumigatus
  misc_feature: 72
gctctaagtaagtaaagaagattaataaatatagataaactactactatattactttataattaagaaattaaaatttaaataataattttataac

SEQ ID NO: 18499 - DNA, 96 bp, Aspergillus novofumigatus
  misc_feature: 72
gtagacagtaaggtagacagtaaggtagacagtaaggtagatagtaaggtagatagtaaggtggacagtaaaataggcagtaagataggtggtaag

SEQ ID NO: 18500 - DNA, 96 bp, Aspergillus novofumigatus
  misc_feature: 72
ggttagagtgcaaacagtgcaaaccggactgctaatcgtgactgccccatttcccactcctgacgaagttatgaattcccctggagggcccccccc

SEQ ID NO: 18501 - DNA, 96 bp, Aspergillus novofumigatus
  misc_feature: 72
ggtaattatatatctaatttaataataaaagaccctaaatatagtaaatttagtaaataataattattagaaatcttaagagaagatttcttagct

SEQ ID NO: 18502 - DNA, 96 bp, Aspergillus novofumigatus
  misc_feature: 72
ggagattaaggttaattagtagtaatatatgaataaatatatatattttaggatactataatgcgtagagatatatattatacagttagtttgaag

SEQ ID NO: 18503 - DNA, 96 bp, Aspergillus novofumigatus
  misc_feature: 72
atctatagattatatattacctatattataaactagcaataacatacactataataatataattactataagaggaaaaggaaagcatccctctcc

SEQ ID NO: 18504 - DNA, 96 bp, Aspergillus novofumigatus
  misc_feature: 72
ggaaatatctagtattaactatactagatatagtaatatattcccctctagtaatatattacatatatatatccctgactataatacccctaaagc

SEQ ID NO: 18505 - DNA, 96 bp, Aspergillus novofumigatus
  misc_feature: 72
gctatagtgggccataagaccactatatatgctaggtcatataatatatactataattatctctataagttactaaatattctataacttagtaat

SEQ ID NO: 18506 - DNA, 96 bp, Aspergillus novofumigatus
  misc_feature: 72
gctagctagggtaataatagcttatagctataaattactataaagagggatatctttattaattaatatagtatataattatatataaattccact

SEQ ID NO: 18507 - DNA, 96 bp, Aspergillus novofumigatus
  misc_feature: 72
agtaagtaaggcagtgcatgagatagtaagggagatagtaagataggtagtaagataataagtaaatagataagtagggtagtaagatagtaatgc

SEQ ID NO: 18508 - DNA, 96 bp, Aspergillus novofumigatus
  misc_feature: 72
gcaggcagcgagcaagttaggtagtgagtaagtgaggcagtgagtaagggagtcagtgagcaagatagtaagtaaggtagtgagtgagatagtgag

SEQ ID NO: 18509 - DNA, 96 bp, Aspergillus novofumigatus
  misc_feature: 72
cccttctctatattattattagttctactatactttattagtattccatatattatagcttttattatagattttcctttatattaaggttatatc

SEQ ID NO: 18510 - DNA, 96 bp, Aspergillus novofumigatus
  misc_feature: 72
aatctatagattatatattacctatattataaactagcaataacatacactataataatataattactataagaggaaaaggaaagcatccctctc

SEQ ID NO: 18511 - DNA, 96 bp, Aspergillus novofumigatus
  misc_feature: 72
atagaaagctaaatctaacttaaaattattaaaagaagaataaatttaaattctataagatataactttaatataaaggaaaacctataataaaag

SEQ ID NO: 18512 - DNA, 96 bp, Aspergillus novofumigatus
  misc_feature: 72
aggaaatatctagtattaactatactagatatagtaatatattcccctctagtaatatattacatatatatatccctgactataatacccctaaag

SEQ ID NO: 18513 - DNA, 96 bp, Aspergillus novofumigatus
  misc_feature: 72
cttatctaggtactatatagataagataagtatataatagatacttataaaacaggtatttatatctatattaattatactataataattaatatt

SEQ ID NO: 18514 - DNA, 96 bp, Aspergillus novofumigatus
  misc_feature: 72
cgagggggacgagggagggagggagggagggggaggcgcgcaggtgggcgcgcggtgggggagggcggcggccagttggctggccgagttggcgcg

SEQ ID NO: 18515 - DNA, 96 bp, Aspergillus novofumigatus
  misc_feature: 72
ccttctctatattattattagttctactatactttattagtattccatatattatagcttttattatagattttcctttatattaaggttatatct

SEQ ID NO: 18516 - DNA, 96 bp, Aspergillus novofumigatus
  misc_feature: 72
agtattctagtatatatctatatctataaagaggattatatttaagcctaaaaaactactcatatatataaagcatgattaagttagatataaggg

SEQ ID NO: 18517 - DNA, 96 bp, Aspergillus novofumigatus
  misc_feature: 72
ccccttctctatattattattagttctactatactttattagtattccatatattatagcttttattatagattttcctttatattaaggttatat

SEQ ID NO: 18518 - DNA, 96 bp, Aspergillus novofumigatus
  misc_feature: 72
aatcttatctaggtactatatagataagataagtatataatagatacttataaaacaggtatttatatctatattaattatactataataattaat

SEQ ID NO: 18519 - DNA, 96 bp, Aspergillus novofumigatus
  misc_feature: 72
agaagaacccagagctaagggtggaattatagactataaagataatataataaattacttagataatagagatagtaatataggagctagaattat

SEQ ID NO: 18520 - DNA, 96 bp, Aspergillus novofumigatus
  misc_feature: 72
agttctactatactttattagtattccatatattatagcttttattatagattttcctttatattaaggttatatcttatagaatttaattaaatt

SEQ ID NO: 18521 - DNA, 96 bp, Aspergillus novofumigatus
  misc_feature: 72
agtgagataggcagtaaggcaggcagcaagcaaagcagtgagcaaggcagtgagtaaggcagtcagcaagatagtgagtgagatagtgagcaagtt

SEQ ID NO: 18522 - DNA, 96 bp, Aspergillus novofumigatus
  misc_feature: 72
aaagactataatatatctaataatcttaaacccctaaaagattagaatgaatttaataataatagtaataaggagaatagactattataagaggct

SEQ ID NO: 18523 - DNA, 96 bp, Aspergillus novofumigatus
  misc_feature: 72
agattagtagatttagtaggtacctctaatactaatatactaactattatatctatctatctactattattaagccttagtatatagtagttagtt

SEQ ID NO: 18524 - DNA, 96 bp, Aspergillus novofumigatus
  misc_feature: 72
aaggtagacagtaaggtagacagtaaggtagacagtaaggtagatagtaaggtagatagtaaggtggacagtaaaataggcagtaagataggtggt

SEQ ID NO: 18525 - DNA, 96 bp, Aspergillus novofumigatus
  misc_feature: 71
tttttttatatatattttcataggctctgcttgctcttctgttataatatcttccttagaattaattctactgattctctacctaatatcatcaga

SEQ ID NO: 18526 - DNA, 96 bp, Aspergillus novofumigatus
  misc_feature: 71
tttttaattaagattatctattatttatctaatacagataatttatattatactatagtaattttatttattaatatacttcccttcttattataa

SEQ ID NO: 18527 - DNA, 96 bp, Aspergillus novofumigatus
  misc_feature: 71
attaggtaagagagctatatctatactaaattttaaaaactataaaattaatttaactaaaaagcttctttaactttattagctttcttaataaaa

SEQ ID NO: 18528 - DNA, 96 bp, Aspergillus novofumigatus
  misc_feature: 71
taaataataaataaatagtaaatagataataaaataaatgaataaataaataaaaatcaaaaagttaaaaaatcaaaaacctaaaataaattaaaa

SEQ ID NO: 18529 - DNA, 96 bp, Aspergillus novofumigatus
  misc_feature: 71
ttttaattaagattatctattatttatctaatacagataatttatattatactatagtaattttatttattaatatacttcccttcttattataaa

SEQ ID NO: 18530 - DNA, 96 bp, Aspergillus novofumigatus
  misc_feature: 71
ggataggcttttctataaatataatactatctagaatactagtatatatcttaagactctatattactactataactaactctagagttattaaaa

SEQ ID NO: 18531 - DNA, 96 bp, Aspergillus novofumigatus
  misc_feature: 71
ttttaactaaagagatacatcatactttctactacctagatagattttccattccctaaccaatctcattattttataaagcatatatccccccat

SEQ ID NO: 18532 - DNA, 96 bp, Aspergillus novofumigatus
  misc_feature: 71
tatatctaatttaataataaaagaccctaaatatagtaaatttagtaaataataattattagaaatcttaagagaagatttcttagctatttaaaa

SEQ ID NO: 18533 - DNA, 96 bp, Aspergillus novofumigatus
  misc_feature: 71
tttctataggtgtagttatatcctataaagtatattattatataacccagttaaggtatataaatagatctatagatagagtaatctaactattat

SEQ ID NO: 18534 - DNA, 96 bp, Aspergillus novofumigatus
  misc_feature: 71
tttattaggaatctatataacctagaggttatatatattctataatatttagattaagattattagtattctataggatattaatctatagctcta

SEQ ID NO: 18535 - DNA, 96 bp, Aspergillus novofumigatus
  misc_feature: 71
tattaggtaagagagctatatctatactaaattttaaaaactataaaattaatttaactaaaaagcttctttaactttattagctttcttaataaa

SEQ ID NO: 18536 - DNA, 96 bp, Aspergillus novofumigatus
  misc_feature: 71
ggaatctatataacctagaggttatatatattctataatatttagattaagattattagtattctataggatattaatctatagctctagtataaa

SEQ ID NO: 18537 - DNA, 96 bp, Aspergillus novofumigatus
  misc_feature: 71
tttaacctacctccttctaatatataatctatagattatatattacctatattataaactagcaataacatacactataataatataattactata

SEQ ID NO: 18538 - DNA, 96 bp, Aspergillus novofumigatus
  misc_feature: 71
aagctataatatatagaatactaataaagtataatagaactaataataatataaagaaggggaatatttatctaaatatatttatacttttttaaa

SEQ ID NO: 18539 - DNA, 96 bp, Aspergillus novofumigatus
  misc_feature: 71
ggcagtgagataggcagtaaggcaggcagcaagcaaagcagtgagcaaggcagtgagtaaggcagtcagcaagatagtgagtgagatagtgagcaa

SEQ ID NO: 18540 - DNA, 96 bp, Aspergillus novofumigatus
  misc_feature: 71
ttctattaatccttactacattcctaattcattctattaaattattatttactttatccttttcttttaatttatctttccttaattttaatttcc

SEQ ID NO: 18541 - DNA, 96 bp, Aspergillus novofumigatus
  misc_feature: 71
ttctataggtgtagttatatcctataaagtatattattatataacccagttaaggtatataaatagatctatagatagagtaatctaactattatc

SEQ ID NO: 18542 - DNA, 96 bp, Aspergillus novofumigatus
  misc_feature: 71
ttatttacctcttttttcttctccctttttatctcttctctctatttctctcttaattcttactctatctcttactttacccctttctctatctct

SEQ ID NO: 18543 - DNA, 96 bp, Aspergillus novofumigatus
  misc_feature: 71
aaaatagaaagctaaatctaacttaaaattattaaaagaagaataaatttaaattctataagatataactttaatataaaggaaaacctataataa

SEQ ID NO: 18544 - DNA, 96 bp, Aspergillus novofumigatus
  misc_feature: 71
ttatctattatttatctaatacagataatttatattatactatagtaattttatttattaatatacttcccttcttattataaaagagaggaagtc

SEQ ID NO: 18545 - DNA, 96 bp, Aspergillus novofumigatus
  misc_feature: 71
ttatctaggtactatatagataagataagtatataatagatacttataaaacaggtatttatatctatattaattatactataataattaatatta

SEQ ID NO: 18546 - DNA, 96 bp, Aspergillus novofumigatus
  misc_feature: 71
ttatagtataattaatatagatataaatacctgttttataagtatctattatatacttatcttatctatatagtacctagataagatttaatacct

SEQ ID NO: 18547 - DNA, 96 bp, Aspergillus novofumigatus
  misc_feature: 71
ttaacctacctccttctaatatataatctatagattatatattacctatattataaactagcaataacatacactataataatataattactataa

SEQ ID NO: 18548 - DNA, 96 bp, Aspergillus novofumigatus
  misc_feature: 71
ttaggagattaaggttaattagtagtaatatatgaataaatatatatattttaggatactataatgcgtagagatatatattatacagttagtttg

SEQ ID NO: 18549 - DNA, 96 bp, Aspergillus novofumigatus
  misc_feature: 71
ggtagacagtaaggtagacagtaaggtagacagtaaggtagatagtaaggtagatagtaaggtggacagtaaaataggcagtaagataggtggtaa

SEQ ID NO: 18550 - DNA, 96 bp, Aspergillus novofumigatus
  misc_feature: 71
taagtattccccttctctatattattattagttctactatactttattagtattccatatattatagcttttattatagattttcctttatattaa

SEQ ID NO: 18551 - DNA, 96 bp, Aspergillus novofumigatus
  misc_feature: 71
aaataaagaagctaaagaagaattataataatataaaagagaggttgaagctatataagatatagtttataataataatagaattaattaattaca

SEQ ID NO: 18552 - DNA, 96 bp, Aspergillus novofumigatus
  misc_feature: 71
attttaactaaagagatacatcatactttctactacctagatagattttccattccctaaccaatctcattattttataaagcatatatcccccca

SEQ ID NO: 18553 - DNA, 96 bp, Aspergillus novofumigatus
  misc_feature: 71
aggcagtgagataggcagtaaggcaggcagcaagcaaagcagtgagcaaggcagtgagtaaggcagtcagcaagatagtgagtgagatagtgagca

SEQ ID NO: 18554 - DNA, 96 bp, Aspergillus novofumigatus
  misc_feature: 71
tgcctcactccctcactatctcactcactgcctccctcactgtcttacttactgcctccctcactatctcactcactatctcactcactaccttac

SEQ ID NO: 18555 - DNA, 96 bp, Aspergillus novofumigatus
  misc_feature: 71
cttactcactgcctcactccctcactatctcactcactgcctccctcactgtcttacttactgcctccctcactatctcactcactatctcactca

SEQ ID NO: 18556 - DNA, 96 bp, Aspergillus novofumigatus
  misc_feature: 71
tgacacgaaattcatgtcctcgtgatgctagtgatgctagtgatgctagtgatgctagtgatgctagtgatgctagtgatgaaataaagggtactg

SEQ ID NO: 18557 - DNA, 96 bp, Aspergillus novofumigatus
  misc_feature: 71
gttaagagttatataaataatctatataaactctaaatcctaagtactagttattttattatataaaatatataattacttactatttttaaaaga

SEQ ID NO: 18558 - DNA, 96 bp, Aspergillus novofumigatus
  misc_feature: 71
tctattatttatctaatacagataatttatattatactatagtaattttatttattaatatacttcccttcttattataaaagagaggaagtctat

SEQ ID NO: 18559 - DNA, 96 bp, Aspergillus novofumigatus
  misc_feature: 71
tctatctcttatttaacccctctatctaaatctctcttactctccttctaactatcctaacctctcctaatctcttcttctatctcttcttctaac

SEQ ID NO: 18560 - DNA, 96 bp, Aspergillus novofumigatus
  misc_feature: 71
tctatataacctagaggttatatatattctataatatttagattaagattattagtattctataggatattaatctatagctctagtataaagtct

SEQ ID NO: 18561 - DNA, 96 bp, Aspergillus novofumigatus
  misc_feature: 71
tctaagtaagtaaagaagattaataaatatagataaactactactatattactttataattaagaaattaaaatttaaataataattttataacta

SEQ ID NO: 18562 - DNA, 96 bp, Aspergillus novofumigatus
  misc_feature: 71
tatttctattaatccttactacattcctaattcattctattaaattattatttactttatccttttcttttaatttatctttccttaattttaatt

SEQ ID NO: 18563 - DNA, 96 bp, Aspergillus novofumigatus
  misc_feature: 71
tatttacctcttttttcttctccctttttatctcttctctctatttctctcttaattcttactctatctcttactttacccctttctctatctctc

SEQ ID NO: 18564 - DNA, 96 bp, Aspergillus novofumigatus
  misc_feature: 71
tattctagtatatatctatatctataaagaggattatatttaagcctaaaaaactactcatatatataaagcatgattaagttagatataagggag

SEQ ID NO: 18565 - DNA, 96 bp, Aspergillus novofumigatus
  misc_feature: 71
tattccccttctctatattattattagttctactatactttattagtattccatatattatagcttttattatagattttcctttatattaaggtt

SEQ ID NO: 18566 - DNA, 96 bp, Aspergillus novofumigatus
  misc_feature: 71
taaaatagaaagctaaatctaacttaaaattattaaaagaagaataaatttaaattctataagatataactttaatataaaggaaaacctataata

SEQ ID NO: 18567 - DNA, 96 bp, Aspergillus novofumigatus
  misc_feature: 71
tatatatataaatataaataaatatgtatattaaagtaaaataaatatatttaacttatactagccttataattctataattatctagatctatct

SEQ ID NO: 18568 - DNA, 96 bp, Aspergillus novofumigatus
  misc_feature: 71
tatatatacttaatctcttcttatcttaatctaataaatataaatatatatatctattatctagactaaatcttttctagtaactaaatctaatta

SEQ ID NO: 18569 - DNA, 96 bp, Aspergillus novofumigatus
  misc_feature: 71
aatatctagttgatttattacctcctttatatttttaattttaatagatatctaatctattatatatttatctactaaatagtggatttatatata

SEQ ID NO: 18570 - DNA, 96 bp, Aspergillus novofumigatus
  misc_feature: 71
tatataatctatagattatatattacctatattataaactagcaataacatacactataataatataattactataagaggaaaaggaaagcatcc

SEQ ID NO: 18571 - DNA, 96 bp, Aspergillus novofumigatus
  misc_feature: 71
agtagatttagtaggtacctctaatactaatatactaactattatatctatctatctactattattaagccttagtatatagtagttagttatata

SEQ ID NO: 18572 - DNA, 96 bp, Aspergillus novofumigatus
  misc_feature: 71
tataataaaagctataatatatggaatactaataaagtatagtagaactaataataatatagagaaggggaatacttacctaaatatatttatact

SEQ ID NO: 18573 - DNA, 96 bp, Aspergillus novofumigatus
  misc_feature: 71
tataaataaagaagctaaagaagaattataataatataaaagagaggttgaagctatataagatatagtttataataataatagaattaattaatt

SEQ ID NO: 18574 - DNA, 96 bp, Aspergillus novofumigatus
  misc_feature: 71
taggcttttctataaatataatactatctagaatactagtatatatcttaagactctatattactactataactaactctagagttattaaaattt

SEQ ID NO: 18575 - DNA, 96 bp, Aspergillus novofumigatus
  misc_feature: 71
gaaagctaaatctaacttaaaattattaaaagaagaataaatttaaattctataagatataactttaatataaaggaaaacctataataaaagcta

SEQ ID NO: 18576 - DNA, 96 bp, Aspergillus novofumigatus
  misc_feature: 71
cttcctactcttcttaatctactctcttaaaatcccttcttttttcttctactatctctctttaatctcttaaaccctttacctctctctactcta

SEQ ID NO: 18577 - DNA, 96 bp, Aspergillus novofumigatus
  misc_feature: 71
ctatataacctagaggttatatatattctataatatttagattaagattattagtattctataggatattaatctatagctctagtataaagtcta

SEQ ID NO: 18578 - DNA, 96 bp, Aspergillus novofumigatus
  misc_feature: 71
atctaaacttaataacccttacttttattctatctctaactctttccttcttcccttctattcttaactctctctttctctttcttctcctttcta

SEQ ID NO: 18579 - DNA, 96 bp, Aspergillus novofumigatus
  misc_feature: 71
tacttaatctcttcttatcttaatctaataaatataaatatatatatctattatctagactaaatcttttctagtaactaaatctaattattatct

SEQ ID NO: 18580 - DNA, 96 bp, Aspergillus novofumigatus
  misc_feature: 71
atatactcttaatctaatagtaaataatacttatataaagaagaagagataaacctattataatatatatattcctcttacttagcataaatagta

SEQ ID NO: 18581 - DNA, 96 bp, Aspergillus novofumigatus
  misc_feature: 71
agaagaaagagaagaaggaaattaaaattaaggaaagataaattaaaagaaaaggataaagtaaataataatttaatagaatgaattaggaatgta

SEQ ID NO: 18582 - DNA, 96 bp, Aspergillus novofumigatus
  misc_feature: 71
taattcttctaattactaatatattaggatatataattataggtatacttctataacctaatagtaacttaatagagatatatataggataaggat

SEQ ID NO: 18583 - DNA, 96 bp, Aspergillus novofumigatus
  misc_feature: 71
taaatcttatctaggtactatatagataagataagtatataatagatacttataaaacaggtatttatatctatattaattatactataataatta

SEQ ID NO: 18584 - DNA, 96 bp, Aspergillus novofumigatus
  misc_feature: 71
taattatatatctaatttaataataaaagaccctaaatatagtaaatttagtaaataataattattagaaatcttaagagaagatttcttagctat

SEQ ID NO: 18585 - DNA, 96 bp, Aspergillus novofumigatus
  misc_feature: 71
taatatcagactctcatagctaatcttataagtagatagattagttaataaagataggataatataactactaataagaataaagaagataataat

SEQ ID NO: 18586 - DNA, 96 bp, Aspergillus novofumigatus
  misc_feature: 71
gtaagtattccccttctctatattattattagttctactatactttattagtattccatatattatagcttttattatagattttcctttatatta

SEQ ID NO: 18587 - DNA, 96 bp, Aspergillus novofumigatus
  misc_feature: 71
agatatataattaatcactactagatatcattacaatcttatagatattatttaaatcctatatatacctattaatattatatcctcccctactta

SEQ ID NO: 18588 - DNA, 96 bp, Aspergillus novofumigatus
  misc_feature: 71
ctgcattactatcttactaccctacttatctatttacttattatcttactacctatcttactatctcccttactatctcatgcactgccttactta

SEQ ID NO: 18589 - DNA, 96 bp, Aspergillus novofumigatus
  misc_feature: 71
ctaatataaagaaaaatctataataaaagctataatatatagaatactaataaagtataatagaactaataataatataaagaaggggaatattta

SEQ ID NO: 18590 - DNA, 96 bp, Aspergillus novofumigatus
  misc_feature: 71
aatctataataaaagctataatatatggaatactaataaagtatagtagaactaataataatatagagaaggggaatacttacctaaatatattta

SEQ ID NO: 18591 - DNA, 96 bp, Aspergillus novofumigatus
  misc_feature: 71
taaagaagctaaagaagaattataataatataaaagagaggttgaagctatataagatatagtttataataataatagaattaattaattacatag

SEQ ID NO: 18592 - DNA, 96 bp, Aspergillus novofumigatus
  misc_feature: 71
aagtattatattttactactcttataataaaatagcagtataataataaatatatactaattatatttactaagggtaataaggtcctattaaaac

SEQ ID NO: 18593 - DNA, 96 bp, Aspergillus novofumigatus
  misc_feature: 71
gttctactatactttattagtattccatatattatagcttttattatagattttcctttatattaaggttatatcttatagaatttaattaaattt

SEQ ID NO: 18594 - DNA, 96 bp, Aspergillus novofumigatus
  misc_feature: 71
gtattccccttctctatattattattagttctactatactttattagtattccatatattatagcttttattatagattttcctttatattaaggt

SEQ ID NO: 18595 - DNA, 96 bp, Aspergillus novofumigatus
  misc_feature: 71
gtagatttagtaggtacctctaatactaatatactaactattatatctatctatctactattattaagccttagtatatagtagttagttatatat

SEQ ID NO: 18596 - DNA, 96 bp, Aspergillus novofumigatus
  misc_feature: 71
ataatctatagattatatattacctatattataaactagcaataacatacactataataatataattactataagaggaaaaggaaagcatccctc

SEQ ID NO: 18597 - DNA, 96 bp, Aspergillus novofumigatus
  misc_feature: 71
agtttattaggaatctatataacctagaggttatatatattctataatatttagattaagattattagtattctataggatattaatctatagctc

SEQ ID NO: 18598 - DNA, 96 bp, Aspergillus novofumigatus
  misc_feature: 71
gaatctatataacctagaggttatatatattctataatatttagattaagattattagtattctataggatattaatctatagctctagtataaag

SEQ ID NO: 18599 - DNA, 96 bp, Aspergillus novofumigatus
  misc_feature: 71
ataaccttttatagtagtctattctccttattactattattattaaatttattctaatcttctagggatttaagattattagatatattatagttc

SEQ ID NO: 18600 - DNA, 96 bp, Aspergillus novofumigatus
  misc_feature: 71
ctatctaaacttaataacccttacttttattctatctctaactctttccttcttcccttctattcttaactctctctttctctttcttctcctttc

SEQ ID NO: 18601 - DNA, 96 bp, Aspergillus novofumigatus
  misc_feature: 71
agttaagagttatataaataatctatataaactctaaatcctaagtactagttattttattatataaaatatataattacttactatttttaaaag

SEQ ID NO: 18602 - DNA, 96 bp, Aspergillus novofumigatus
  misc_feature: 71
ctttatcttataattctattatttataattaaggtcacctattatttattagatataggttctttatattatactatagtaattctacttattaat

SEQ ID NO: 18603 - DNA, 96 bp, Aspergillus novofumigatus
  misc_feature: 71
agctataatatatagaatactaataaagtataatagaactaataataatataaagaaggggaatatttatctaaatatatttatacttttttaaag

SEQ ID NO: 18604 - DNA, 96 bp, Aspergillus novofumigatus
  misc_feature: 71
atattaaagactataatatatctaataatcttaaacccctaaaagattagaatgaatttaataataatagtaataaggagaatagactattataag

SEQ ID NO: 18605 - DNA, 96 bp, Aspergillus novofumigatus
  misc_feature: 71
ctctaagtaagtaaagaagattaataaatatagataaactactactatattactttataattaagaaattaaaatttaaataataattttataact

SEQ ID NO: 18606 - DNA, 96 bp, Aspergillus novofumigatus
  misc_feature: 71
ctcctatctaaacttaataacccttacttttattctatctctaactctttccttcttcccttctattcttaactctctctttctctttcttctcct

SEQ ID NO: 18607 - DNA, 96 bp, Aspergillus novofumigatus
  misc_feature: 71
ctatctcttatttaacccctctatctaaatctctcttactctccttctaactatcctaacctctcctaatctcttcttctatctcttcttctaact

SEQ ID NO: 18608 - DNA, 96 bp, Aspergillus novofumigatus
  misc_feature: 71
aagaacccagagctaagggtggaattatagactataaagataatataataaattacttagataatagagatagtaatataggagctagaattatag

SEQ ID NO: 18609 - DNA, 96 bp, Aspergillus novofumigatus
  misc_feature: 71
aattatagagatagtagctataaaaataataatagtaattataataataaggatagtaggagtaataagggtagtaatagtagtttatataactag

SEQ ID NO: 18610 - DNA, 96 bp, Aspergillus novofumigatus
  misc_feature: 71
ctaatatttctattaatccttactacattcctaattcattctattaaattattatttactttatccttttcttttaatttatctttccttaatttt

SEQ ID NO: 18611 - DNA, 96 bp, Aspergillus novofumigatus
  misc_feature: 71
agggtaattatatatctaatttaataataaaagaccctaaatatagtaaatttagtaaataataattattagaaatcttaagagaagatttcttag

SEQ ID NO: 18612 - DNA, 96 bp, Aspergillus novofumigatus
  misc_feature: 71
ctaaagctctaagtaagtaaagaagattaataaatatagataaactactactatattactttataattaagaaattaaaatttaaataataatttt

SEQ ID NO: 18613 - DNA, 96 bp, Aspergillus novofumigatus
  misc_feature: 71
cctgcattactatcttactaccctacttatctatttacttattatcttactacctatcttactatctcccttactatctcatgcactgccttactt

SEQ ID NO: 18614 - DNA, 96 bp, Aspergillus novofumigatus
  misc_feature: 71
cctaatataaagaaaaatctataataaaagctataatatatagaatactaataaagtataatagaactaataataatataaagaaggggaatattt

SEQ ID NO: 18615 - DNA, 96 bp, Aspergillus novofumigatus
  misc_feature: 71
atgtgtgttggaataaaatcaaatcgcgtacgcaggcattgaggtggcagaatagttagaattggaaagcggtgattctagcggcaaaacgggggg

SEQ ID NO: 18616 - DNA, 96 bp, Aspergillus novofumigatus
  misc_feature: 71
cataatccgaggataaggattttagcggcttgtagtattttagccgcttgttgcattttagccgcttgtagtattttagcggctttttgcaatttt

SEQ ID NO: 18617 - DNA, 96 bp, Aspergillus novofumigatus
  misc_feature: 71
agcaagttaggtagtgagtaagtgaggcagtgagtaagggagtcagtgagcaagatagtaagtaaggtagtgagtgagatagtgagtgagatagtg

SEQ ID NO: 18618 - DNA, 96 bp, Aspergillus novofumigatus
  misc_feature: 71
aagagaagaaagagaagaaggaaattaaaattaaggaaagataaattaaaagaaaaggataaagtaaataataatttaatagaatgaattaggaat

SEQ ID NO: 18619 - DNA, 96 bp, Aspergillus novofumigatus
  misc_feature: 71
attatttttaattaagattatctattatttatctaatacagataatttatattatactatagtaattttatttattaatatacttcccttcttatt

SEQ ID NO: 18620 - DNA, 96 bp, Aspergillus novofumigatus
  misc_feature: 71
attattagttctactatactttattagtattccatatattatagcttttattatagattttcctttatattaaggttatatcttatagaatttaat

SEQ ID NO: 18621 - DNA, 96 bp, Aspergillus novofumigatus
  misc_feature: 71
attatctattatttatctaatacagataatttatattatactatagtaattttatttattaatatacttcccttcttattataaaagagaggaagt

SEQ ID NO: 18622 - DNA, 96 bp, Aspergillus novofumigatus
  misc_feature: 71
attaatccttactacattcctaattcattctattaaattattatttactttatccttttcttttaatttatctttccttaattttaatttccttct

SEQ ID NO: 18623 - DNA, 96 bp, Aspergillus novofumigatus
  misc_feature: 71
aataaagaagctaaagaagaattataataatataaaagagaggttgaagctatataagatatagtttataataataatagaattaattaattacat

SEQ ID NO: 18624 - DNA, 96 bp, Aspergillus novofumigatus
  misc_feature: 71
agtactaaatataaccttttatagtagtctattctccttattactattattattaaatttattctaatcttctagggatttaagattattagatat

SEQ ID NO: 18625 - DNA, 96 bp, Aspergillus novofumigatus
  misc_feature: 71
atatatacttaatctcttcttatcttaatctaataaatataaatatatatatctattatctagactaaatcttttctagtaactaaatctaattat

SEQ ID NO: 18626 - DNA, 96 bp, Aspergillus novofumigatus
  misc_feature: 71
aaatatctagttgatttattacctcctttatatttttaattttaatagatatctaatctattatatatttatctactaaatagtggatttatatat

SEQ ID NO: 18627 - DNA, 96 bp, Aspergillus novofumigatus
  misc_feature: 71
atataaccttttatagtagtctattctccttattactattattattaaatttattctaatcttctagggatttaagattattagatatattatagt

SEQ ID NO: 18628 - DNA, 96 bp, Aspergillus novofumigatus
  misc_feature: 71
aggtaagtattccccttctctatattattattagttctactatactttattagtattccatatattatagcttttattatagattttcctttatat

SEQ ID NO: 18629 - DNA, 96 bp, Aspergillus novofumigatus
  misc_feature: 71
ataggcttttctataaatataatactatctagaatactagtatatatcttaagactctatattactactataactaactctagagttattaaaatt

SEQ ID NO: 18630 - DNA, 96 bp, Aspergillus novofumigatus
  misc_feature: 71
acctgcattactatcttactaccctacttatctatttacttattatcttactacctatcttactatctcccttactatctcatgcactgccttact

SEQ ID NO: 18631 - DNA, 96 bp, Aspergillus novofumigatus
  misc_feature: 71
actaaagctctaagtaagtaaagaagattaataaatatagataaactactactatattactttataattaagaaattaaaatttaaataataattt

SEQ ID NO: 18632 - DNA, 96 bp, Aspergillus novofumigatus
  misc_feature: 71
aagtaagaggaatatatatattataataggtttatctcttcttctttatataagtattatttactattagattaagagtatataatagattaaatt

SEQ ID NO: 18633 - DNA, 96 bp, Aspergillus novofumigatus
  misc_feature: 70
tttttttttatttctcttttttattatttaaaacttagattctaagagcatgctagttatttatatttaatagatagataatatcttaattattat

SEQ ID NO: 18634 - DNA, 96 bp, Aspergillus novofumigatus
  misc_feature: 70
ttttacctgcattactatcttactaccctacttatctatttacttattatcttactacctatcttactatctcccttactatctcatgcactgcct

SEQ ID NO: 18635 - DNA, 96 bp, Aspergillus novofumigatus
  misc_feature: 70
ttttaaaaatagtaagtaattatatattttatataataaaataactagtacttaggatttagagtttatatagattatttatataactcttaacta

SEQ ID NO: 18636 - DNA, 96 bp, Aspergillus novofumigatus
  misc_feature: 70
tttctttatcttataattctattatttataattaaggtcacctattatttattagatataggttctttatattatactatagtaattctacttatt

SEQ ID NO: 18637 - DNA, 96 bp, Aspergillus novofumigatus
  misc_feature: 70
ttctaatatataatctatagattatatattacctatattataaactagcaataacatacactataataatataattactataagaggaaaaggaaa

SEQ ID NO: 18638 - DNA, 96 bp, Aspergillus novofumigatus
  misc_feature: 70
tttatcttataattctattatttataattaaggtcacctattatttattagatataggttctttatattatactatagtaattctacttattaata

SEQ ID NO: 18639 - DNA, 96 bp, Aspergillus novofumigatus
  misc_feature: 70
taaattataaatataggagttagtctcttattatttagataatatattctttactattatagattatagtatttatttagctttattatagataaa

SEQ ID NO: 18640 - DNA, 96 bp, Aspergillus novofumigatus
  misc_feature: 70
tttaggtaagtattccccttctctatattattattagttctactatactttattagtattccatatattatagcttttattatagattttccttta

SEQ ID NO: 18641 - DNA, 96 bp, Aspergillus novofumigatus
  misc_feature: 70
tttagggaatattaatatctataataatatattattataggctatactacttatactactagtatcttctatttcagctatcttaattaattagct

SEQ ID NO: 18642 - DNA, 96 bp, Aspergillus novofumigatus
  misc_feature: 70
tttaatctattatatactcttaatctaatagtaaataatacttatataaagaagaagagataaacctattataatatatatattcctcttacttag

SEQ ID NO: 18643 - DNA, 96 bp, Aspergillus novofumigatus
  misc_feature: 70
ttctttatcttataattctattatttataattaaggtcacctattatttattagatataggttctttatattatactatagtaattctacttatta

SEQ ID NO: 18644 - DNA, 96 bp, Aspergillus novofumigatus
  misc_feature: 70
ttctgacacgaaattcatgtcctcgtgatgctagtgatgctagtgatgctagtgatgctagtgatgctagtgatgctagtgatgaaataaagggta

SEQ ID NO: 18645 - DNA, 96 bp, Aspergillus novofumigatus
  misc_feature: 70
cttctaatatataatctatagattatatattacctatattataaactagcaataacatacactataataatataattactataagaggaaaaggaa

SEQ ID NO: 18646 - DNA, 96 bp, Aspergillus novofumigatus
  misc_feature: 70
ttattctgacacgaaattcatgtcctcgtgatgctagtgatgctagtgatgctagtgatgctagtgatgctagtgatgctagtgatgaaataaagg

SEQ ID NO: 18647 - DNA, 96 bp, Aspergillus novofumigatus
  misc_feature: 70
ttatatatctaatttaataataaaagaccctaaatatagtaaatttagtaaataataattattagaaatcttaagagaagatttcttagctattta

SEQ ID NO: 18648 - DNA, 96 bp, Aspergillus novofumigatus
  misc_feature: 70
aggaatctatataacctagaggttatatatattctataatatttagattaagattattagtattctataggatattaatctatagctctagtataa

SEQ ID NO: 18649 - DNA, 96 bp, Aspergillus novofumigatus
  misc_feature: 70
ttaggtaagagagctatatctatactaaattttaaaaactataaaattaatttaactaaaaagcttctttaactttattagctttcttaataaaag

SEQ ID NO: 18650 - DNA, 96 bp, Aspergillus novofumigatus
  misc_feature: 70
ttacttactacctccctcactatctcacttactgcctccctcactatctcactcactgcccccctcactaactcgctcactatctcactcactatc

SEQ ID NO: 18651 - DNA, 96 bp, Aspergillus novofumigatus
  misc_feature: 70
ttacctgcattactatcttactaccctacttatctatttacttattatcttactacctatcttactatctcccttactatctcatgcactgcctta

SEQ ID NO: 18652 - DNA, 96 bp, Aspergillus novofumigatus
  misc_feature: 70
ttaatctattatatactcttaatctaatagtaaataatacttatataaagaagaagagataaacctattataatatatatattcctcttacttagc

SEQ ID NO: 18653 - DNA, 96 bp, Aspergillus novofumigatus
  misc_feature: 70
ttaatataataataatagtataataatctatatagttataataataacttagtaataataagaatagaaataataggatgctattagacttttagt

SEQ ID NO: 18654 - DNA, 96 bp, Aspergillus novofumigatus
  misc_feature: 70
tctttatcttataattctattatttataattaaggtcacctattatttattagatataggttctttatattatactatagtaattctacttattaa

SEQ ID NO: 18655 - DNA, 96 bp, Aspergillus novofumigatus
  misc_feature: 70
ttaagagttatataaataatctatataaactctaaatcctaagtactagttattttattatataaaatatataattacttactatttttaaaagat

SEQ ID NO: 18656 - DNA, 96 bp, Aspergillus novofumigatus
  misc_feature: 70
aatatttctattaatccttactacattcctaattcattctattaaattattatttactttatccttttcttttaatttatctttccttaattttaa

SEQ ID NO: 18657 - DNA, 96 bp, Aspergillus novofumigatus
  misc_feature: 70
aaagctataatatatagaatactaataaagtataatagaactaataataatataaagaaggggaatatttatctaaatatatttatacttttttaa

SEQ ID NO: 18658 - DNA, 96 bp, Aspergillus novofumigatus
  misc_feature: 70
gcgcgcgcgcccggcctataccgaccccggtgtctgtgtgtctctacaagtgtctgtctatggcgcgcgcccctgcctgccggtctgcccccccca

SEQ ID NO: 18659 - DNA, 96 bp, Aspergillus novofumigatus
  misc_feature: 70
taatatataatctatagattatatattacctatattataaactagcaataacatacactataataatataattactataagaggaaaaggaaagca

SEQ ID NO: 18660 - DNA, 96 bp, Aspergillus novofumigatus
  misc_feature: 70
taattaagattatctattatttatctaatacagataatttatattatactatagtaattttatttattaatatacttcccttcttattataaaaga

SEQ ID NO: 18661 - DNA, 96 bp, Aspergillus novofumigatus
  misc_feature: 70
aacctacctccttctaatatataatctatagattatatattacctatattataaactagcaataacatacactataataatataattactataaga

SEQ ID NO: 18662 - DNA, 96 bp, Aspergillus novofumigatus
  misc_feature: 70
tattaaagactataatatatctaataatcttaaacccctaaaagattagaatgaatttaataataatagtaataaggagaatagactattataaga

SEQ ID NO: 18663 - DNA, 96 bp, Aspergillus novofumigatus
  misc_feature: 70
taggtagtatagtagatagtaaggcaggcagtgaagcaggtagtaaggcaggtagtaaggcaggcagcaagaccagcagtgaagcaggcagtaaga

SEQ ID NO: 18664 - DNA, 96 bp, Aspergillus novofumigatus
  misc_feature: 70
agtaggtagggagggagtaagagagatagtaggtagataggaaggtagatagtaggtaggcagtaaggcaggcagtaaggtagatagggaggcaga

SEQ ID NO: 18665 - DNA, 96 bp, Aspergillus novofumigatus
  misc_feature: 70
tctgacacgaaattcatgtcctcgtgatgctagtgatgctagtgatgctagtgatgctagtgatgctagtgatgctagtgatgaaataaagggtac

SEQ ID NO: 18666 - DNA, 96 bp, Aspergillus novofumigatus
  misc_feature: 70
tctctagtattcttagaataatagtagtatcttattagtatatgaagctaatataattatataataggcctaattattatattaattaatatattt

SEQ ID NO: 18667 - DNA, 96 bp, Aspergillus novofumigatus
  misc_feature: 70
agaagagattaggagaggttaggatagttagaaggagagtaagagagatttagatagaggggttaaataagagatagaaggagagatagaaggaga

SEQ ID NO: 18668 - DNA, 96 bp, Aspergillus novofumigatus
  misc_feature: 70
tctatctctccttctatctcttatttaacccctctatctaaatctctcttactctccttctaactatcctaacctctcctaatctcttcttctatc

SEQ ID NO: 18669 - DNA, 96 bp, Aspergillus novofumigatus
  misc_feature: 70
tctataggtgtagttatatcctataaagtatattattatataacccagttaaggtatataaatagatctatagatagagtaatctaactattatct

SEQ ID NO: 18670 - DNA, 96 bp, Aspergillus novofumigatus
  misc_feature: 70
tctagttgatttattacctcctttatatttttaattttaatagatatctaatctattatatatttatctactaaatagtggatttatatatatatt

SEQ ID NO: 18671 - DNA, 96 bp, Aspergillus novofumigatus
  misc_feature: 70
atatatatatatatataaatataaataaatatgtatattaaagtaaaataaatatatttaacttatactagccttataattctataattatctaga

SEQ ID NO: 18672 - DNA, 96 bp, Aspergillus novofumigatus
  misc_feature: 70
tctactatactttattagtattccatatattatagcttttattatagattttcctttatattaaggttatatcttatagaatttaattaaatttat

SEQ ID NO: 18673 - DNA, 96 bp, Aspergillus novofumigatus
  misc_feature: 70
atatataattaatcactactagatatcattacaatcttatagatattatttaaatcctatatatacctattaatattatatcctcccctacttaga

SEQ ID NO: 18674 - DNA, 96 bp, Aspergillus novofumigatus
  misc_feature: 70
tctaacttaatcatgctttatatatatgagtagttttttaggcttaaatataatcctctttatagatatagatatatactagaatactaaataatt

SEQ ID NO: 18675 - DNA, 96 bp, Aspergillus novofumigatus
  misc_feature: 70
tccttctatctctccttctatctcttatttaacccctctatctaaatctctcttactctccttctaactatcctaacctctcctaatctcttcttc

SEQ ID NO: 18676 - DNA, 96 bp, Aspergillus novofumigatus
  misc_feature: 70
tatttttaattaagattatctattatttatctaatacagataatttatattatactatagtaattttatttattaatatacttcccttcttattat

SEQ ID NO: 18677 - DNA, 96 bp, Aspergillus novofumigatus
  misc_feature: 70
tattatttatctaatacagataatttatattatactatagtaattttatttattaatatacttcccttcttattataaaagagaggaagtctatat

SEQ ID NO: 18678 - DNA, 96 bp, Aspergillus novofumigatus
  misc_feature: 70
tattaggaatctatataacctagaggttatatatattctataatatttagattaagattattagtattctataggatattaatctatagctctagt

SEQ ID NO: 18679 - DNA, 96 bp, Aspergillus novofumigatus
  misc_feature: 70
tattaatccttactacattcctaattcattctattaaattattatttactttatccttttcttttaatttatctttccttaattttaatttccttc

SEQ ID NO: 18680 - DNA, 96 bp, Aspergillus novofumigatus
  misc_feature: 70
tatctattatttatctaatacagataatttatattatactatagtaattttatttattaatatacttcccttcttattataaaagagaggaagtct

SEQ ID NO: 18681 - DNA, 96 bp, Aspergillus novofumigatus
  misc_feature: 70
tatatttagaatttagtcttaaagggtttataatttaataatttaggtagtttttagtaatttcttaaatatctttttaaattataggctactagg

SEQ ID NO: 18682 - DNA, 96 bp, Aspergillus novofumigatus
  misc_feature: 70
agaatactaataaagtataatagaactaataataatataaagaaggggaatatttatctaaatatatttatacttttttaaagtataaaatatata

SEQ ID NO: 18683 - DNA, 96 bp, Aspergillus novofumigatus
  misc_feature: 70
atataacctagaggttatatatattctataatatttagattaagattattagtattctataggatattaatctatagctctagtataaagtctata

SEQ ID NO: 18684 - DNA, 96 bp, Aspergillus novofumigatus
  misc_feature: 70
ctattatttatctaatacagataatttatattatactatagtaattttatttattaatatacttcccttcttattataaaagagaggaagtctata

SEQ ID NO: 18685 - DNA, 96 bp, Aspergillus novofumigatus
  misc_feature: 70
tatacttaatctcttcttatcttaatctaataaatataaatatatatatctattatctagactaaatcttttctagtaactaaatctaattattat

SEQ ID NO: 18686 - DNA, 96 bp, Aspergillus novofumigatus
  misc_feature: 70
atagagatagtagctataaaaataataatagtaattataataataaggatagtaggagtaataagggtagtaatagtagtttatataactagtata

SEQ ID NO: 18687 - DNA, 96 bp, Aspergillus novofumigatus
  misc_feature: 70
taggaatctatataacctagaggttatatatattctataatatttagattaagattattagtattctataggatattaatctatagctctagtata

SEQ ID NO: 18688 - DNA, 96 bp, Aspergillus novofumigatus
  misc_feature: 70
atttttaattaagattatctattatttatctaatacagataatttatattatactatagtaattttatttattaatatacttcccttcttattata

SEQ ID NO: 18689 - DNA, 96 bp, Aspergillus novofumigatus
  misc_feature: 70
taggtaagtattccccttctctatattattattagttctactatactttattagtattccatatattatagcttttattatagattttcctttata

SEQ ID NO: 18690 - DNA, 96 bp, Aspergillus novofumigatus
  misc_feature: 70
tagtattctagtatatatctatatctataaagaggattatatttaagcctaaaaaactactcatatatataaagcatgattaagttagatataagg

SEQ ID NO: 18691 - DNA, 96 bp, Aspergillus novofumigatus
  misc_feature: 70
tagtatatagtaataatagaattaattaattatgtaattaattatagagtaattattaagtatttataactatctaggaagatagattagatccta

SEQ ID NO: 18692 - DNA, 96 bp, Aspergillus novofumigatus
  misc_feature: 70
tagggtaattatatatctaatttaataataaaagaccctaaatatagtaaatttagtaaataataattattagaaatcttaagagaagatttctta

SEQ ID NO: 18693 - DNA, 96 bp, Aspergillus novofumigatus
  misc_feature: 70
cataggaaatatctagtattaactatactagatatagtaatatattcccctctagtaatatattacatatatatatccctgactataataccccta

SEQ ID NO: 18694 - DNA, 96 bp, Aspergillus novofumigatus
  misc_feature: 70
tagcatcctattatttctattcttattattactaagttattattataactatatagattattatactattattattatattaagatactattatta

SEQ ID NO: 18695 - DNA, 96 bp, Aspergillus novofumigatus
  misc_feature: 70
tagatttagtaggtacctctaatactaatatactaactattatatctatctatctactattattaagccttagtatatagtagttagttatatatt

SEQ ID NO: 18696 - DNA, 96 bp, Aspergillus novofumigatus
  misc_feature: 70
aagaagtatatatctatatagtattattttatatagtagatatacccatagggatagaaaaatctatatagctaagagctactataaatatatcta

SEQ ID NO: 18697 - DNA, 96 bp, Aspergillus novofumigatus
  misc_feature: 70
ctataggtgtagttatatcctataaagtatattattatataacccagttaaggtatataaatagatctatagatagagtaatctaactattatcta

SEQ ID NO: 18698 - DNA, 96 bp, Aspergillus novofumigatus
  misc_feature: 70
tagagatagtagctataaaaataataatagtaattataataataaggatagtaggagtaataagggtagtaatagtagtttatataactagtatat

SEQ ID NO: 18699 - DNA, 96 bp, Aspergillus novofumigatus
  misc_feature: 70
gggctatagtgggccataagaccactatatatgctaggtcatataatatatactataattatctctataagttactaaatattctataacttagta

SEQ ID NO: 18700 - DNA, 96 bp, Aspergillus novofumigatus
  misc_feature: 70
acacgaaattcatgtcctcgtgatgctagtgatgctagtgatgctagtgatgctagtgatgctagtgatgctagtgatgaaataaagggtactgta

SEQ ID NO: 18701 - DNA, 96 bp, Aspergillus novofumigatus
  misc_feature: 70
atagataataaaataaatgaataaataaataaaaatcaaaaagttaaaaaatcaaaaacctaaaataaattaaaaaataaattaattaaagaatta

SEQ ID NO: 18702 - DNA, 96 bp, Aspergillus novofumigatus
  misc_feature: 70
taatccttactacattcctaattcattctattaaattattatttactttatccttttcttttaatttatctttccttaattttaatttccttcttc

SEQ ID NO: 18703 - DNA, 96 bp, Aspergillus novofumigatus
  misc_feature: 70
taatatttctattaatccttactacattcctaattcattctattaaattattatttactttatccttttcttttaatttatctttccttaatttta

SEQ ID NO: 18704 - DNA, 96 bp, Aspergillus novofumigatus
  misc_feature: 70
atttctataggtgtagttatatcctataaagtatattattatataacccagttaaggtatataaatagatctatagatagagtaatctaactatta

SEQ ID NO: 18705 - DNA, 96 bp, Aspergillus novofumigatus
  misc_feature: 70
gtagaagtattatattttactactcttataataaaatagcagtataataataaatatatactaattatatttactaagggtaataaggtcctatta

SEQ ID NO: 18706 - DNA, 96 bp, Aspergillus novofumigatus
  misc_feature: 70
agaggaatatatatattataataggtttatctcttcttctttatataagtattatttactattagattaagagtatataatagattaaatttatta

SEQ ID NO: 18707 - DNA, 96 bp, Aspergillus novofumigatus
  misc_feature: 70
taagaggaatatatatattataataggtttatctcttcttctttatataagtattatttactattagattaagagtatataatagattaaatttat

SEQ ID NO: 18708 - DNA, 96 bp, Aspergillus novofumigatus
  misc_feature: 70
gtgagataggcagtaaggcaggcagcaagcaaagcagtgagcaaggcagtgagtaaggcagtcagcaagatagtgagtgagatagtgagcaagtta

SEQ ID NO: 18709 - DNA, 96 bp, Aspergillus novofumigatus
  misc_feature: 70
gtattatattttactactcttataataaaatagcagtataataataaatatatactaattatatttactaagggtaataaggtcctattaaaactc

SEQ ID NO: 18710 - DNA, 96 bp, Aspergillus novofumigatus
  misc_feature: 70
gtaggtagggagggagtaagagagatagtaggtagataggaaggtagatagtaggtaggcagtaaggcaggcagtaaggtagatagggaggcagat

SEQ ID NO: 18711 - DNA, 96 bp, Aspergillus novofumigatus
  misc_feature: 70
actagatatataattaatcactactagatatcattacaatcttatagatattatttaaatcctatatatacctattaatattatatcctcccctac

SEQ ID NO: 18712 - DNA, 96 bp, Aspergillus novofumigatus
  misc_feature: 70
ggtaagtattccccttctctatattattattagttctactatactttattagtattccatatattatagcttttattatagattttcctttatatt

SEQ ID NO: 18713 - DNA, 96 bp, Aspergillus novofumigatus
  misc_feature: 70
atcataggaaatatctagtattaactatactagatatagtaatatattcccctctagtaatatattacatatatatatccctgactataatacccc

SEQ ID NO: 18714 - DNA, 96 bp, Aspergillus novofumigatus
  misc_feature: 70
atataatctatagattatatattacctatattataaactagcaataacatacactataataatataattactataagaggaaaaggaaagcatccc

SEQ ID NO: 18715 - DNA, 96 bp, Aspergillus novofumigatus
  misc_feature: 70
cctcctatctaaacttaataacccttacttttattctatctctaactctttccttcttcccttctattcttaactctctctttctctttcttctcc

SEQ ID NO: 18716 - DNA, 96 bp, Aspergillus novofumigatus
  misc_feature: 70
gcctcactccctcactatctcactcactgcctccctcactgtcttacttactgcctccctcactatctcactcactatctcactcactaccttact

SEQ ID NO: 18717 - DNA, 96 bp, Aspergillus novofumigatus
  misc_feature: 70
atatataatctatagattatatattacctatattataaactagcaataacatacactataataatataattactataagaggaaaaggaaagcatc

SEQ ID NO: 18718 - DNA, 96 bp, Aspergillus novofumigatus
  misc_feature: 70
gagcaagttaggtagtgagtaagtgaggcagtgagtaagggagtcagtgagcaagatagtaagtaaggtagtgagtgagatagtgagtgagatagt

SEQ ID NO: 18719 - DNA, 96 bp, Aspergillus novofumigatus
  misc_feature: 70
cttatttacctcttttttcttctccctttttatctcttctctctatttctctcttaattcttactctatctcttactttacccctttctctatctc

SEQ ID NO: 18720 - DNA, 96 bp, Aspergillus novofumigatus
  misc_feature: 70
atctatataacctagaggttatatatattctataatatttagattaagattattagtattctataggatattaatctatagctctagtataaagtc

SEQ ID NO: 18721 - DNA, 96 bp, Aspergillus novofumigatus
  misc_feature: 70
gacacgaaattcatgtcctcgtgatgctagtgatgctagtgatgctagtgatgctagtgatgctagtgatgctagtgatgaaataaagggtactgt

SEQ ID NO: 18722 - DNA, 96 bp, Aspergillus novofumigatus
  misc_feature: 70
attctattatttttaattaagattatctattatttatctaatacagataatttatattatactatagtaattttatttattaatatacttcccttc

SEQ ID NO: 18723 - DNA, 96 bp, Aspergillus novofumigatus
  misc_feature: 70
gaagctaaagaagaattataataatataaaagagaggttgaagctatataagatatagtttataataataatagaattaattaattacatagttat

SEQ ID NO: 18724 - DNA, 96 bp, Aspergillus novofumigatus
  misc_feature: 70
cttcctcctatctaaacttaataacccttacttttattctatctctaactctttccttcttcccttctattcttaactctctctttctctttcttc

SEQ ID NO: 18725 - DNA, 96 bp, Aspergillus novofumigatus
  misc_feature: 70
aagtattccccttctctatattattattagttctactatactttattagtattccatatattatagcttttattatagattttcctttatattaag

SEQ ID NO: 18726 - DNA, 96 bp, Aspergillus novofumigatus
  misc_feature: 70
aattaagagagaaatagagagaagagataaaaagggagaagaaaaaagaggtaaataagtaaaaaaaatagaaaaaagaagaagaagaaaggtcag

SEQ ID NO: 18727 - DNA, 96 bp, Aspergillus novofumigatus
  misc_feature: 70
ctgacacgaaattcatgtcctcgtgatgctagtgatgctagtgatgctagtgatgctagtgatgctagtgatgctagtgatgaaataaagggtact

SEQ ID NO: 18728 - DNA, 96 bp, Aspergillus novofumigatus
  misc_feature: 70
cgagcaagttaggtagtgagtaagtgaggcagtgagtaagggagtcagtgagcaagatagtaagtaaggtagtgagtgagatagtgagtgagatag

SEQ ID NO: 18729 - DNA, 96 bp, Aspergillus novofumigatus
  misc_feature: 70
ctaaaatagaaagctaaatctaacttaaaattattaaaagaagaataaatttaaattctataagatataactttaatataaaggaaaacctataat

SEQ ID NO: 18730 - DNA, 96 bp, Aspergillus novofumigatus
  misc_feature: 70
ccttctatctctccttctatctcttatttaacccctctatctaaatctctcttactctccttctaactatcctaacctctcctaatctcttcttct

SEQ ID NO: 18731 - DNA, 96 bp, Aspergillus novofumigatus
  misc_feature: 70
ccttcctcctatctaaacttaataacccttacttttattctatctctaactctttccttcttcccttctattcttaactctctctttctctttctt

SEQ ID NO: 18732 - DNA, 96 bp, Aspergillus novofumigatus
  misc_feature: 70
agaacccagagctaagggtggaattatagactataaagataatataataaattacttagataatagagatagtaatataggagctagaattatagg

SEQ ID NO: 18733 - DNA, 96 bp, Aspergillus novofumigatus
  misc_feature: 70
agagaagaaagagaagaaggaaattaaaattaaggaaagataaattaaaagaaaaggataaagtaaataataatttaatagaatgaattaggaatg

SEQ ID NO: 18734 - DNA, 96 bp, Aspergillus novofumigatus
  misc_feature: 70
cagttggcggggggcccttgggggggcagaccggcaggcaggggcgcgcgccatagacagacacttgtagagacacacagacaccgggggcgggat

SEQ ID NO: 18735 - DNA, 96 bp, Aspergillus novofumigatus
  misc_feature: 70
atttctattaatccttactacattcctaattcattctattaaattattatttactttatccttttcttttaatttatctttccttaattttaattt

SEQ ID NO: 18736 - DNA, 96 bp, Aspergillus novofumigatus
  misc_feature: 70
aaattataaatataggagttagtctcttattatttagataatatattctttactattatagattatagtatttatttagctttattatagataaat

SEQ ID NO: 18737 - DNA, 96 bp, Aspergillus novofumigatus
  misc_feature: 70
attctttagggaatattaatatctataataatatattattataggctatactacttatactactagtatcttctatttcagctatcttaattaatt

SEQ ID NO: 18738 - DNA, 96 bp, Aspergillus novofumigatus
  misc_feature: 70
attctgacacgaaattcatgtcctcgtgatgctagtgatgctagtgatgctagtgatgctagtgatgctagtgatgctagtgatgaaataaagggt

SEQ ID NO: 18739 - DNA, 96 bp, Aspergillus novofumigatus
  misc_feature: 70
agaattataataatataaaagagaggttgaagctatataagatatagtttataataataatagaattaattaattacatagttattattaaataat

SEQ ID NO: 18740 - DNA, 96 bp, Aspergillus novofumigatus
  misc_feature: 70
attatatatctaatttaataataaaagaccctaaatatagtaaatttagtaaataataattattagaaatcttaagagaagatttcttagctattt

SEQ ID NO: 18741 - DNA, 96 bp, Aspergillus novofumigatus
  misc_feature: 70
aggtagtatagtagatagtaaggcaggcagtgaagcaggtagtaaggcaggtagtaaggcaggcagcaagaccagcagtgaagcaggcagtaagat

SEQ ID NO: 18742 - DNA, 96 bp, Aspergillus novofumigatus
  misc_feature: 70
atctataataaaagctataatatatggaatactaataaagtatagtagaactaataataatatagagaaggggaatacttacctaaatatatttat

SEQ ID NO: 18743 - DNA, 96 bp, Aspergillus novofumigatus
  misc_feature: 70
atctagttgatttattacctcctttatatttttaattttaatagatatctaatctattatatatttatctactaaatagtggatttatatatatat

SEQ ID NO: 18744 - DNA, 96 bp, Aspergillus novofumigatus
  misc_feature: 70
atatctagttgatttattacctcctttatatttttaattttaatagatatctaatctattatatatttatctactaaatagtggatttatatatat

SEQ ID NO: 18745 - DNA, 96 bp, Aspergillus novofumigatus
  misc_feature: 70
aaagctaaatctaacttaaaattattaaaagaagaataaatttaaattctataagatataactttaatataaaggaaaacctataataaaagctat

SEQ ID NO: 18746 - DNA, 96 bp, Aspergillus novofumigatus
  misc_feature: 70
ataaaagctataatatatagaatactaataaagtataatagaactaataataatataaagaaggggaatatttatctaaatatatttatacttttt

SEQ ID NO: 18747 - DNA, 96 bp, Aspergillus novofumigatus
  misc_feature: 70
agtattatattttactactcttataataaaatagcagtataataataaatatatactaattatatttactaagggtaataaggtcctattaaaact

SEQ ID NO: 18748 - DNA, 96 bp, Aspergillus novofumigatus
  misc_feature: 70
aggataaggagttataggataagattaaatatattataaagatattagaggtaatagctaaataaataaataagtactagaagatagttaagaact

SEQ ID NO: 18749 - DNA, 96 bp, Aspergillus novofumigatus
  misc_feature: 70
agtaagaggaatatatatattataataggtttatctcttcttctttatataagtattatttactattagattaagagtatataatagattaaattt

SEQ ID NO: 18750 - DNA, 96 bp, Aspergillus novofumigatus
  misc_feature: 70
acttactaacccttactcttatcctatcctatccctaactctacccctctctctatcccttcctcctatctaaacttaataacccttacttttgct

SEQ ID NO: 18751 - DNA, 96 bp, Aspergillus novofumigatus
  misc_feature: 70
aatccttactacattcctaattcattctattaaattattatttactttatccttttcttttaatttatctttccttaattttaatttccttcttct

SEQ ID NO: 18752 - DNA, 96 bp, Aspergillus novofumigatus
  misc_feature: 70
aagagataaaagaaggattaagaagaggtagaagaagagttagaagaagagatagaagaagagattaggagaggttaggatagttagaaggagagt

SEQ ID NO: 18753 - DNA, 96 bp, Aspergillus novofumigatus
  misc_feature: 70
aatagataataaaataaatgaataaataaataaaaatcaaaaagttaaaaaatcaaaaacctaaaataaattaaaaaataaattaattaaagaatt

SEQ ID NO: 18754 - DNA, 96 bp, Aspergillus novofumigatus
  misc_feature: 70
aatatcagactctcatagctaatcttataagtagatagattagttaataaagataggataatataactactaataagaataaagaagataataatt

SEQ ID NO: 18755 - DNA, 96 bp, Aspergillus novofumigatus
  misc_feature: 70
aattatatatctaatttaataataaaagaccctaaatatagtaaatttagtaaataataattattagaaatcttaagagaagatttcttagctatt

SEQ ID NO: 18756 - DNA, 96 bp, Aspergillus novofumigatus
  misc_feature: 70
aagaggaatatatatattataataggtttatctcttcttctttatataagtattatttactattagattaagagtatataatagattaaatttatt

SEQ ID NO: 18757 - DNA, 96 bp, Aspergillus novofumigatus
  misc_feature: 70
aataaaagctataatatatggaatactaataaagtatagtagaactaataataatatagagaaggggaatacttacctaaatatatttatactttt

SEQ ID NO: 18758 - DNA, 96 bp, Aspergillus novofumigatus
  misc_feature: 70
aaatctataataaaagctataatatatggaatactaataaagtatagtagaactaataataatatagagaaggggaatacttacctaaatatattt

SEQ ID NO: 18759 - DNA, 96 bp, Aspergillus novofumigatus
  misc_feature: 69
tttttaataggctagaagtaatagatatattaattaataagctaaataagctctatatatttattatataagaggctaaaaaaggagttatttata

SEQ ID NO: 18760 - DNA, 96 bp, Aspergillus novofumigatus
  misc_feature: 69
cctccttctaatatataatctatagattatatattacctatattataaactagcaataacatacactataataatataattactataagaggaaaa

SEQ ID NO: 18761 - DNA, 96 bp, Aspergillus novofumigatus
  misc_feature: 69
tttaattaagattatctattatttatctaatacagataatttatattatactatagtaattttatttattaatatacttcccttcttattataaaa

SEQ ID NO: 18762 - DNA, 96 bp, Aspergillus novofumigatus
  misc_feature: 69
cagactctcatagctaatcttataagtagatagattagttaataaagataggataatataactactaataagaataaagaagataataatttaaaa

SEQ ID NO: 18763 - DNA, 96 bp, Aspergillus novofumigatus
  misc_feature: 69
ctaggtactatatagataagataagtatataatagatacttataaaacaggtatttatatctatattaattatactataataattaatattacaaa

SEQ ID NO: 18764 - DNA, 96 bp, Aspergillus novofumigatus
  misc_feature: 69
tttctattaatccttactacattcctaattcattctattaaattattatttactttatccttttcttttaatttatctttccttaattttaatttc

SEQ ID NO: 18765 - DNA, 96 bp, Aspergillus novofumigatus
  misc_feature: 69
acctccttctaatatataatctatagattatatattacctatattataaactagcaataacatacactataataatataattactataagaggaaa

SEQ ID NO: 18766 - DNA, 96 bp, Aspergillus novofumigatus
  misc_feature: 69
tttatagcttatatttatttctttttatactacttatctttcctagattattatttatagtccttagatatatatcctagcttcttatactataaa

SEQ ID NO: 18767 - DNA, 96 bp, Aspergillus novofumigatus
  misc_feature: 69
ttatatctaacttaatcatgctttatatatatgagtagttttttaggcttaaatataatcctctttatagatatagatatatactagaatactaaa

SEQ ID NO: 18768 - DNA, 96 bp, Aspergillus novofumigatus
  misc_feature: 69
aggataggcttttctataaatataatactatctagaatactagtatatatcttaagactctatattactactataactaactctagagttattaaa

SEQ ID NO: 18769 - DNA, 96 bp, Aspergillus novofumigatus
  misc_feature: 69
tcagactctcatagctaatcttataagtagatagattagttaataaagataggataatataactactaataagaataaagaagataataatttaaa

SEQ ID NO: 18770 - DNA, 96 bp, Aspergillus novofumigatus
  misc_feature: 69
gtgaggcaggtagccagcacgcgagggagtgagtgaggcagtgagcgaggtaggcagtgagcgaggtaggcagtgagcgaggtaggcagtgagcaa

SEQ ID NO: 18771 - DNA, 96 bp, Aspergillus viridinutans
  misc_feature: 6744
gaagagcacacgtctgaactccagtcacaacgttccatctcgtatgccgtatcattgatcggaagagcacacgtctgaactccagtcacaacgttc

SEQ ID NO: 18772 - DNA, 96 bp, Aspergillus viridinutans
  misc_feature: 6736
ggaagagcacacgtctgaactccagtcacaacgttccatctcgtatgccgtatcattgatcggaagagcacacgtctgaactccagtcacaacgtt

SEQ ID NO: 18773 - DNA, 96 bp, Aspergillus viridinutans
  misc_feature: 6736
cggaagagcacacgtctgaactccagtcacaacgttccatctcgtatgccgtatcattgatcggaagagcacacgtctgaactccagtcacaacgt

SEQ ID NO: 18774 - DNA, 96 bp, Aspergillus viridinutans
  misc_feature: 6735
aagagcacacgtctgaactccagtcacaacgttccatctcgtatgccgtatcattgatcggaagagcacacgtctgaactccagtcacaacgttcc

SEQ ID NO: 18775 - DNA, 96 bp, Aspergillus viridinutans
  misc_feature: 6720
tcggaagagcacacgtctgaactccagtcacaacgttccatctcgtatgccgtatcattgatcggaagagcacacgtctgaactccagtcacaacg

SEQ ID NO: 18776 - DNA, 96 bp, Aspergillus viridinutans
  misc_feature: 6693
atcggaagagcacacgtctgaactccagtcacaacgttccatctcgtatgccgtatcattgatcggaagagcacacgtctgaactccagtcacaac

SEQ ID NO: 18777 - DNA, 96 bp, Aspergillus viridinutans
  misc_feature: 6661
agagcacacgtctgaactccagtcacaacgttccatctcgtatgccgtatcattgatcggaagagcacacgtctgaactccagtcacaacgttcca

SEQ ID NO: 18778 - DNA, 96 bp, Aspergillus viridinutans
  misc_feature: 6407
tcggaagagcacacgtctgaactccagtcacaacgttccatctcgtatgccgtagatcggaagagcacacgtctgaactccagtcacaacgttcca

SEQ ID NO: 18779 - DNA, 96 bp, Aspergillus viridinutans
  misc_feature: 6405
atcggaagagcacacgtctgaactccagtcacaacgttccatctcgtatgccgtagatcggaagagcacacgtctgaactccagtcacaacgttcc

SEQ ID NO: 18780 - DNA, 96 bp, Aspergillus viridinutans
  misc_feature: 6393
gagcacacgtctgaactccagtcacaacgttccatctcgtatgccgtatcattgatcggaagagcacacgtctgaactccagtcacaacgttccat

SEQ ID NO: 18781 - DNA, 96 bp, Aspergillus viridinutans
  misc_feature: 6362
agcacacgtctgaactccagtcacaacgttccatctcgtatgccgtatcattgatcggaagagcacacgtctgaactccagtcacaacgttccatc

SEQ ID NO: 18782 - DNA, 96 bp, Aspergillus viridinutans
  misc_feature: 6352
acacgtctgaactccagtcacaacgttccatctcgtatgccgtatcattgatcggaagagcacacgtctgaactccagtcacaacgttccatctcg

SEQ ID NO: 18783 - DNA, 96 bp, Aspergillus viridinutans
  misc_feature: 6348
gcacacgtctgaactccagtcacaacgttccatctcgtatgccgtatcattgatcggaagagcacacgtctgaactccagtcacaacgttccatct

SEQ ID NO: 18784 - DNA, 96 bp, Aspergillus viridinutans
  misc_feature: 6348
cacacgtctgaactccagtcacaacgttccatctcgtatgccgtatcattgatcggaagagcacacgtctgaactccagtcacaacgttccatctc

SEQ ID NO: 18785 - DNA, 96 bp, Aspergillus viridinutans
  misc_feature: 6306
cacgtctgaactccagtcacaacgttccatctcgtatgccgtatcattgatcggaagagcacacgtctgaactccagtcacaacgttccatctcgt

SEQ ID NO: 18786 - DNA, 96 bp, Aspergillus viridinutans
  misc_feature: 6303
acgtctgaactccagtcacaacgttccatctcgtatgccgtatcattgatcggaagagcacacgtctgaactccagtcacaacgttccatctcgta

SEQ ID NO: 18787 - DNA, 96 bp, Aspergillus viridinutans
  misc_feature: 6300
cgtctgaactccagtcacaacgttccatctcgtatgccgtatcattgatcggaagagcacacgtctgaactccagtcacaacgttccatctcgtat

SEQ ID NO: 18788 - DNA, 96 bp, Aspergillus viridinutans
  misc_feature: 6292
gtctgaactccagtcacaacgttccatctcgtatgccgtatcattgatcggaagagcacacgtctgaactccagtcacaacgttccatctcgtatg

SEQ ID NO: 18789 - DNA, 96 bp, Aspergillus viridinutans
  misc_feature: 6282
cggaagagcacacgtctgaactccagtcacaacgttccatctcgtatgccgtagatcggaagagcacacgtctgaactccagtcacaacgttccat

SEQ ID NO: 18790 - DNA, 96 bp, Aspergillus viridinutans
  misc_feature: 6269
agagcacacgtctgaactccagtcacaacgttccatctcgtatgccgtagatcggaagagcacacgtctgaactccagtcacaacgttccatctcg

SEQ ID NO: 18791 - DNA, 96 bp, Aspergillus viridinutans
  misc_feature: 6265
acgtctgaactccagtcacaacgttccatctcgtatgccgtagatcggaagagcacacgtctgaactccagtcacaacgttccatctcgtatgccg

SEQ ID NO: 18792 - DNA, 96 bp, Aspergillus viridinutans
  misc_feature: 6261
ggaagagcacacgtctgaactccagtcacaacgttccatctcgtatgccgtagatcggaagagcacacgtctgaactccagtcacaacgttccatc

SEQ ID NO: 18793 - DNA, 96 bp, Aspergillus viridinutans
  misc_feature: 6260
cacgtctgaactccagtcacaacgttccatctcgtatgccgtagatcggaagagcacacgtctgaactccagtcacaacgttccatctcgtatgcc

SEQ ID NO: 18794 - DNA, 96 bp, Aspergillus viridinutans
  misc_feature: 6260
aagagcacacgtctgaactccagtcacaacgttccatctcgtatgccgtagatcggaagagcacacgtctgaactccagtcacaacgttccatctc

SEQ ID NO: 18795 - DNA, 96 bp, Aspergillus viridinutans
  misc_feature: 6258
gcacacgtctgaactccagtcacaacgttccatctcgtatgccgtagatcggaagagcacacgtctgaactccagtcacaacgttccatctcgtat

SEQ ID NO: 18796 - DNA, 96 bp, Aspergillus viridinutans
  misc_feature: 6258
cacacgtctgaactccagtcacaacgttccatctcgtatgccgtagatcggaagagcacacgtctgaactccagtcacaacgttccatctcgtatg

SEQ ID NO: 18797 - DNA, 96 bp, Aspergillus viridinutans
  misc_feature: 6257
acacgtctgaactccagtcacaacgttccatctcgtatgccgtagatcggaagagcacacgtctgaactccagtcacaacgttccatctcgtatgc

SEQ ID NO: 18798 - DNA, 96 bp, Aspergillus viridinutans
  misc_feature: 6256
gagcacacgtctgaactccagtcacaacgttccatctcgtatgccgtagatcggaagagcacacgtctgaactccagtcacaacgttccatctcgt

SEQ ID NO: 18799 - DNA, 96 bp, Aspergillus viridinutans
  misc_feature: 6256
gaagagcacacgtctgaactccagtcacaacgttccatctcgtatgccgtagatcggaagagcacacgtctgaactccagtcacaacgttccatct

SEQ ID NO: 18800 - DNA, 96 bp, Aspergillus viridinutans
  misc_feature: 6255
agcacacgtctgaactccagtcacaacgttccatctcgtatgccgtagatcggaagagcacacgtctgaactccagtcacaacgttccatctcgta

SEQ ID NO: 18801 - DNA, 96 bp, Aspergillus viridinutans
  misc_feature: 6240
gatcggaagagcacacgtctgaactccagtcacaacgttccatctcgtatgccgtagatcggaagagcacacgtctgaactccagtcacaacgttc

SEQ ID NO: 18802 - DNA, 96 bp, Aspergillus viridinutans
  misc_feature: 6231
cgtctgaactccagtcacaacgttccatctcgtatgccgtagatcggaagagcacacgtctgaactccagtcacaacgttccatctcgtatgccgt

SEQ ID NO: 18803 - DNA, 96 bp, Aspergillus viridinutans
  misc_feature: 6212
tctgaactccagtcacaacgttccatctcgtatgccgtatcattgatcggaagagcacacgtctgaactccagtcacaacgttccatctcgtatgc

SEQ ID NO: 18804 - DNA, 96 bp, Aspergillus viridinutans
  misc_feature: 6205
tgaactccagtcacaacgttccatctcgtatgccgtatcattgatcggaagagcacacgtctgaactccagtcacaacgttccatctcgtatgccg

SEQ ID NO: 18805 - DNA, 96 bp, Aspergillus viridinutans
  misc_feature: 6203
ctgaactccagtcacaacgttccatctcgtatgccgtatcattgatcggaagagcacacgtctgaactccagtcacaacgttccatctcgtatgcc

SEQ ID NO: 18806 - DNA, 96 bp, Aspergillus viridinutans
  misc_feature: 6170
gaactccagtcacaacgttccatctcgtatgccgtatcattgatcggaagagcacacgtctgaactccagtcacaacgttccatctcgtatgccgt

SEQ ID NO: 18807 - DNA, 96 bp, Aspergillus viridinutans
  misc_feature: 5441
gatcggaagagcacacgtctgaactccagtcacaacgttccatctcgtatgccgtatcattgatcggaagagcacacgtctgaactccagtcacaa

SEQ ID NO: 18808 - DNA, 96 bp, Aspergillus viridinutans
  misc_feature: 5209
gtctgaactccagtcacaacgttccatctcgtatgccgtagatcggaagagcacacgtctgaactccagtcacaacgttccatctcgtatgccgtc

SEQ ID NO: 18809 - DNA, 96 bp, Aspergillus viridinutans
  misc_feature: 5139
aactccagtcacaacgttccatctcgtatgccgtatcattgatcggaagagcacacgtctgaactccagtcacaacgttccatctcgtatgccgtc

SEQ ID NO: 18810 - DNA, 96 bp, Aspergillus viridinutans
  misc_feature: 5110
actccagtcacaacgttccatctcgtatgccgtatcattgatcggaagagcacacgtctgaactccagtcacaacgttccatctcgtatgccgtct

SEQ ID NO: 18811 - DNA, 96 bp, Aspergillus viridinutans
  misc_feature: 5009
tctgaactccagtcacaacgttccatctcgtatgccgtagatcggaagagcacacgtctgaactccagtcacaacgttccatctcgtatgccgtct

SEQ ID NO: 18812 - DNA, 96 bp, Aspergillus viridinutans
  misc_feature: 5000
ctccagtcacaacgttccatctcgtatgccgtatcattgatcggaagagcacacgtctgaactccagtcacaacgttccatctcgtatgccgtctt

SEQ ID NO: 18813 - DNA, 96 bp, Aspergillus viridinutans
  misc_feature: 4985
tccagtcacaacgttccatctcgtatgccgtatcattgatcggaagagcacacgtctgaactccagtcacaacgttccatctcgtatgccgtcttc

SEQ ID NO: 18814 - DNA, 96 bp, Aspergillus viridinutans
  misc_feature: 4969
ccagtcacaacgttccatctcgtatgccgtatcattgatcggaagagcacacgtctgaactccagtcacaacgttccatctcgtatgccgtcttct

SEQ ID NO: 18815 - DNA, 96 bp, Aspergillus viridinutans
  misc_feature: 4964
cagtcacaacgttccatctcgtatgccgtatcattgatcggaagagcacacgtctgaactccagtcacaacgttccatctcgtatgccgtcttctg

SEQ ID NO: 18816 - DNA, 96 bp, Aspergillus viridinutans
  misc_feature: 4960
agtcacaacgttccatctcgtatgccgtatcattgatcggaagagcacacgtctgaactccagtcacaacgttccatctcgtatgccgtcttctgc

SEQ ID NO: 18817 - DNA, 96 bp, Aspergillus viridinutans
  misc_feature: 4934
ctgaactccagtcacaacgttccatctcgtatgccgtagatcggaagagcacacgtctgaactccagtcacaacgttccatctcgtatgccgtctt

SEQ ID NO: 18818 - DNA, 96 bp, Aspergillus viridinutans
  misc_feature: 4929
tgaactccagtcacaacgttccatctcgtatgccgtagatcggaagagcacacgtctgaactccagtcacaacgttccatctcgtatgccgtcttc

SEQ ID NO: 18819 - DNA, 96 bp, Aspergillus viridinutans
  misc_feature: 4929
actccagtcacaacgttccatctcgtatgccgtagatcggaagagcacacgtctgaactccagtcacaacgttccatctcgtatgccgtcttctgc

SEQ ID NO: 18820 - DNA, 96 bp, Aspergillus viridinutans
  misc_feature: 4927
aactccagtcacaacgttccatctcgtatgccgtagatcggaagagcacacgtctgaactccagtcacaacgttccatctcgtatgccgtcttctg

SEQ ID NO: 18821 - DNA, 96 bp, Aspergillus viridinutans
  misc_feature: 4912
gaactccagtcacaacgttccatctcgtatgccgtagatcggaagagcacacgtctgaactccagtcacaacgttccatctcgtatgccgtcttct

SEQ ID NO: 18822 - DNA, 96 bp, Aspergillus viridinutans
  misc_feature: 4888
gtcacaacgttccatctcgtatgccgtatcattgatcggaagagcacacgtctgaactccagtcacaacgttccatctcgtatgccgtcttctgct

SEQ ID NO: 18823 - DNA, 96 bp, Aspergillus viridinutans
  misc_feature: 4887
ctccagtcacaacgttccatctcgtatgccgtagatcggaagagcacacgtctgaactccagtcacaacgttccatctcgtatgccgtcttctgct

SEQ ID NO: 18824 - DNA, 96 bp, Aspergillus viridinutans
  misc_feature: 4836
ccagtcacaacgttccatctcgtatgccgtagatcggaagagcacacgtctgaactccagtcacaacgttccatctcgtatgccgtcttctgcttg

SEQ ID NO: 18825 - DNA, 96 bp, Aspergillus viridinutans
  misc_feature: 4832
tccagtcacaacgttccatctcgtatgccgtagatcggaagagcacacgtctgaactccagtcacaacgttccatctcgtatgccgtcttctgctt

SEQ ID NO: 18826 - DNA, 96 bp, Aspergillus viridinutans
  misc_feature: 4831
cagtcacaacgttccatctcgtatgccgtagatcggaagagcacacgtctgaactccagtcacaacgttccatctcgtatgccgtcttctgcttga

SEQ ID NO: 18827 - DNA, 96 bp, Aspergillus viridinutans
  misc_feature: 4824
tcacaacgttccatctcgtatgccgtatcattgatcggaagagcacacgtctgaactccagtcacaacgttccatctcgtatgccgtcttctgctt

SEQ ID NO: 18828 - DNA, 96 bp, Aspergillus viridinutans
  misc_feature: 4815
agtcacaacgttccatctcgtatgccgtagatcggaagagcacacgtctgaactccagtcacaacgttccatctcgtatgccgtcttctgcttgaa

SEQ ID NO: 18829 - DNA, 96 bp, Aspergillus viridinutans
  misc_feature: 4797
gtcacaacgttccatctcgtatgccgtagatcggaagagcacacgtctgaactccagtcacaacgttccatctcgtatgccgtcttctgcttgaaa

SEQ ID NO: 18830 - DNA, 96 bp, Aspergillus viridinutans
  misc_feature: 4742
tcacaacgttccatctcgtatgccgtagatcggaagagcacacgtctgaactccagtcacaacgttccatctcgtatgccgtcttctgcttgaaaa

SEQ ID NO: 18831 - DNA, 96 bp, Aspergillus viridinutans
  misc_feature: 2778
atcggaagagcacacgtctgaactccagtcacaacgttccatctcgtatgccgtatcagatcggaagagcacacgtctgaactccagtcacaacgt

SEQ ID NO: 18832 - DNA, 96 bp, Aspergillus viridinutans
  misc_feature: 2777
tcggaagagcacacgtctgaactccagtcacaacgttccatctcgtatgccgtatcagatcggaagagcacacgtctgaactccagtcacaacgtt

SEQ ID NO: 18833 - DNA, 96 bp, Aspergillus viridinutans
  misc_feature: 2777
cggaagagcacacgtctgaactccagtcacaacgttccatctcgtatgccgtatcagatcggaagagcacacgtctgaactccagtcacaacgttc

SEQ ID NO: 18834 - DNA, 96 bp, Aspergillus viridinutans
  misc_feature: 2767
ggaagagcacacgtctgaactccagtcacaacgttccatctcgtatgccgtatcagatcggaagagcacacgtctgaactccagtcacaacgttcc

SEQ ID NO: 18835 - DNA, 96 bp, Aspergillus viridinutans
  misc_feature: 2754
gaagagcacacgtctgaactccagtcacaacgttccatctcgtatgccgtatcagatcggaagagcacacgtctgaactccagtcacaacgttcca

SEQ ID NO: 18836 - DNA, 96 bp, Aspergillus viridinutans
  misc_feature: 2702
gatcggaagagcacacgtctgaactccagtcacaacgttccatctcgtatgccgtatcagatcggaagagcacacgtctgaactccagtcacaacg

SEQ ID NO: 18837 - DNA, 96 bp, Aspergillus viridinutans
  misc_feature: 2673
agcacacgtctgaactccagtcacaacgttccatctcgtatgccgtatcagatcggaagagcacacgtctgaactccagtcacaacgttccatctc

SEQ ID NO: 18838 - DNA, 96 bp, Aspergillus viridinutans
  misc_feature: 2671
gcacacgtctgaactccagtcacaacgttccatctcgtatgccgtatcagatcggaagagcacacgtctgaactccagtcacaacgttccatctcg

SEQ ID NO: 18839 - DNA, 96 bp, Aspergillus viridinutans
  misc_feature: 2670
aagagcacacgtctgaactccagtcacaacgttccatctcgtatgccgtatcagatcggaagagcacacgtctgaactccagtcacaacgttccat

SEQ ID NO: 18840 - DNA, 96 bp, Aspergillus viridinutans
  misc_feature: 2668
gagcacacgtctgaactccagtcacaacgttccatctcgtatgccgtatcagatcggaagagcacacgtctgaactccagtcacaacgttccatct

SEQ ID NO: 18841 - DNA, 96 bp, Aspergillus viridinutans
  misc_feature: 2666
agagcacacgtctgaactccagtcacaacgttccatctcgtatgccgtatcagatcggaagagcacacgtctgaactccagtcacaacgttccatc

SEQ ID NO: 18842 - DNA, 96 bp, Aspergillus viridinutans
  misc_feature: 2663
gaagagcacacgtctgaactccagtcacaacgttccatctcgtatgccgtatcatgatcggaagagcacacgtctgaactccagtcacaacgttcc

SEQ ID NO: 18843 - DNA, 96 bp, Aspergillus viridinutans
  misc_feature: 2662
cggaagagcacacgtctgaactccagtcacaacgttccatctcgtatgccgtatcatgatcggaagagcacacgtctgaactccagtcacaacgtt

SEQ ID NO: 18844 - DNA, 96 bp, Aspergillus viridinutans
  misc_feature: 2660
tcggaagagcacacgtctgaactccagtcacaacgttccatctcgtatgccgtatcatgatcggaagagcacacgtctgaactccagtcacaacgt

SEQ ID NO: 18845 - DNA, 96 bp, Aspergillus viridinutans
  misc_feature: 2660
ggaagagcacacgtctgaactccagtcacaacgttccatctcgtatgccgtatcatgatcggaagagcacacgtctgaactccagtcacaacgttc

SEQ ID NO: 18846 - DNA, 96 bp, Aspergillus viridinutans
  misc_feature: 2659
acgtctgaactccagtcacaacgttccatctcgtatgccgtatcagatcggaagagcacacgtctgaactccagtcacaacgttccatctcgtatg

SEQ ID NO: 18847 - DNA, 96 bp, Aspergillus viridinutans
  misc_feature: 2659
cacgtctgaactccagtcacaacgttccatctcgtatgccgtatcagatcggaagagcacacgtctgaactccagtcacaacgttccatctcgtat

SEQ ID NO: 18848 - DNA, 96 bp, Aspergillus viridinutans
  misc_feature: 2659
cacacgtctgaactccagtcacaacgttccatctcgtatgccgtatcagatcggaagagcacacgtctgaactccagtcacaacgttccatctcgt

SEQ ID NO: 18849 - DNA, 96 bp, Aspergillus viridinutans
  misc_feature: 2657
gtctgaactccagtcacaacgttccatctcgtatgccgtatcagatcggaagagcacacgtctgaactccagtcacaacgttccatctcgtatgcc

SEQ ID NO: 18850 - DNA, 96 bp, Aspergillus viridinutans
  misc_feature: 2657
cgtctgaactccagtcacaacgttccatctcgtatgccgtatcagatcggaagagcacacgtctgaactccagtcacaacgttccatctcgtatgc

SEQ ID NO: 18851 - DNA, 96 bp, Aspergillus viridinutans
  misc_feature: 2656
acacgtctgaactccagtcacaacgttccatctcgtatgccgtatcagatcggaagagcacacgtctgaactccagtcacaacgttccatctcgta

SEQ ID NO: 18852 - DNA, 96 bp, Aspergillus viridinutans
  misc_feature: 2649
atcggaagagcacacgtctgaactccagtcacaacgttccatctcgtatgccgtatcatgatcggaagagcacacgtctgaactccagtcacaacg

SEQ ID NO: 18853 - DNA, 96 bp, Aspergillus viridinutans
  misc_feature: 2647
aagagcacacgtctgaactccagtcacaacgttccatctcgtatgccgtatcatgatcggaagagcacacgtctgaactccagtcacaacgttcca

SEQ ID NO: 18854 - DNA, 96 bp, Aspergillus viridinutans
  misc_feature: 2591
tctgaactccagtcacaacgttccatctcgtatgccgtatcagatcggaagagcacacgtctgaactccagtcacaacgttccatctcgtatgccg

SEQ ID NO: 18855 - DNA, 96 bp, Aspergillus viridinutans
  misc_feature: 2582
ctgaactccagtcacaacgttccatctcgtatgccgtatcagatcggaagagcacacgtctgaactccagtcacaacgttccatctcgtatgccgt

SEQ ID NO: 18856 - DNA, 96 bp, Aspergillus viridinutans
  misc_feature: 2565
agagcacacgtctgaactccagtcacaacgttccatctcgtatgccgtatcatgatcggaagagcacacgtctgaactccagtcacaacgttccat

SEQ ID NO: 18857 - DNA, 96 bp, Aspergillus viridinutans
  misc_feature: 2546
gagcacacgtctgaactccagtcacaacgttccatctcgtatgccgtatcatgatcggaagagcacacgtctgaactccagtcacaacgttccatc

SEQ ID NO: 18858 - DNA, 96 bp, Aspergillus viridinutans
  misc_feature: 2546
agcacacgtctgaactccagtcacaacgttccatctcgtatgccgtatcatgatcggaagagcacacgtctgaactccagtcacaacgttccatct

SEQ ID NO: 18859 - DNA, 96 bp, Aspergillus viridinutans
  misc_feature: 2545
gcacacgtctgaactccagtcacaacgttccatctcgtatgccgtatcatgatcggaagagcacacgtctgaactccagtcacaacgttccatctc

SEQ ID NO: 18860 - DNA, 96 bp, Aspergillus viridinutans
  misc_feature: 2543
cacgtctgaactccagtcacaacgttccatctcgtatgccgtatcatgatcggaagagcacacgtctgaactccagtcacaacgttccatctcgta

SEQ ID NO: 18861 - DNA, 96 bp, Aspergillus viridinutans
  misc_feature: 2543
acgtctgaactccagtcacaacgttccatctcgtatgccgtatcatgatcggaagagcacacgtctgaactccagtcacaacgttccatctcgtat

SEQ ID NO: 18862 - DNA, 96 bp, Aspergillus viridinutans
  misc_feature: 2542
cacacgtctgaactccagtcacaacgttccatctcgtatgccgtatcatgatcggaagagcacacgtctgaactccagtcacaacgttccatctcg

SEQ ID NO: 18863 - DNA, 96 bp, Aspergillus viridinutans
  misc_feature: 2539
acacgtctgaactccagtcacaacgttccatctcgtatgccgtatcatgatcggaagagcacacgtctgaactccagtcacaacgttccatctcgt

SEQ ID NO: 18864 - DNA, 96 bp, Aspergillus viridinutans
  misc_feature: 2538
cgtctgaactccagtcacaacgttccatctcgtatgccgtatcatgatcggaagagcacacgtctgaactccagtcacaacgttccatctcgtatg

SEQ ID NO: 18865 - DNA, 96 bp, Aspergillus viridinutans
  misc_feature: 2533
gtctgaactccagtcacaacgttccatctcgtatgccgtatcatgatcggaagagcacacgtctgaactccagtcacaacgttccatctcgtatgc

SEQ ID NO: 18866 - DNA, 96 bp, Aspergillus viridinutans
  misc_feature: 2483
gatcggaagagcacacgtctgaactccagtcacaacgttccatctcgtatgccgtatcatgatcggaagagcacacgtctgaactccagtcacaac

SEQ ID NO: 18867 - DNA, 96 bp, Aspergillus viridinutans
  misc_feature: 2443
ctgaactccagtcacaacgttccatctcgtatgccgtatcatgatcggaagagcacacgtctgaactccagtcacaacgttccatctcgtatgccg

SEQ ID NO: 18868 - DNA, 96 bp, Aspergillus viridinutans
  misc_feature: 2442
tctgaactccagtcacaacgttccatctcgtatgccgtatcatgatcggaagagcacacgtctgaactccagtcacaacgttccatctcgtatgcc

SEQ ID NO: 18869 - DNA, 96 bp, Aspergillus viridinutans
  misc_feature: 2430
tgaactccagtcacaacgttccatctcgtatgccgtatcatgatcggaagagcacacgtctgaactccagtcacaacgttccatctcgtatgccgt

SEQ ID NO: 18870 - DNA, 96 bp, Aspergillus viridinutans
  misc_feature: 2314
tgaactccagtcacaacgttccatctcgtatgccgtatcagatcggaagagcacacgtctgaactccagtcacaacgttccatctcgtatgccgtc

SEQ ID NO: 18871 - DNA, 96 bp, Aspergillus viridinutans
  misc_feature: 2298
gaactccagtcacaacgttccatctcgtatgccgtatcagatcggaagagcacacgtctgaactccagtcacaacgttccatctcgtatgccgtct

SEQ ID NO: 18872 - DNA, 96 bp, Aspergillus viridinutans
  misc_feature: 2263
aactccagtcacaacgttccatctcgtatgccgtatcagatcggaagagcacacgtctgaactccagtcacaacgttccatctcgtatgccgtctt

SEQ ID NO: 18873 - DNA, 96 bp, Aspergillus viridinutans
  misc_feature: 2262
actccagtcacaacgttccatctcgtatgccgtatcagatcggaagagcacacgtctgaactccagtcacaacgttccatctcgtatgccgtcttc

SEQ ID NO: 18874 - DNA, 96 bp, Aspergillus viridinutans
  misc_feature: 2251
ctccagtcacaacgttccatctcgtatgccgtatcagatcggaagagcacacgtctgaactccagtcacaacgttccatctcgtatgccgtcttct

SEQ ID NO: 18875 - DNA, 96 bp, Aspergillus viridinutans
  misc_feature: 2250
tccagtcacaacgttccatctcgtatgccgtatcagatcggaagagcacacgtctgaactccagtcacaacgttccatctcgtatgccgtcttctg

SEQ ID NO: 18876 - DNA, 96 bp, Aspergillus viridinutans
  misc_feature: 2250
ccagtcacaacgttccatctcgtatgccgtatcagatcggaagagcacacgtctgaactccagtcacaacgttccatctcgtatgccgtcttctgc

SEQ ID NO: 18877 - DNA, 96 bp, Aspergillus viridinutans
  misc_feature: 2240
cagtcacaacgttccatctcgtatgccgtatcagatcggaagagcacacgtctgaactccagtcacaacgttccatctcgtatgccgtcttctgct

SEQ ID NO: 18878 - DNA, 96 bp, Aspergillus viridinutans
  misc_feature: 2224
gtcacaacgttccatctcgtatgccgtatcagatcggaagagcacacgtctgaactccagtcacaacgttccatctcgtatgccgtcttctgcttg

SEQ ID NO: 18879 - DNA, 96 bp, Aspergillus viridinutans
  misc_feature: 2223
agtcacaacgttccatctcgtatgccgtatcagatcggaagagcacacgtctgaactccagtcacaacgttccatctcgtatgccgtcttctgctt

SEQ ID NO: 18880 - DNA, 96 bp, Aspergillus viridinutans
  misc_feature: 2208
tcacaacgttccatctcgtatgccgtatcagatcggaagagcacacgtctgaactccagtcacaacgttccatctcgtatgccgtcttctgcttga

SEQ ID NO: 18881 - DNA, 96 bp, Aspergillus viridinutans
  misc_feature: 2097
gaactccagtcacaacgttccatctcgtatgccgtatcatgatcggaagagcacacgtctgaactccagtcacaacgttccatctcgtatgccgtc

SEQ ID NO: 18882 - DNA, 96 bp, Aspergillus viridinutans
  misc_feature: 2084
aactccagtcacaacgttccatctcgtatgccgtatcatgatcggaagagcacacgtctgaactccagtcacaacgttccatctcgtatgccgtct

SEQ ID NO: 18883 - DNA, 96 bp, Aspergillus viridinutans
  misc_feature: 2050
actccagtcacaacgttccatctcgtatgccgtatcatgatcggaagagcacacgtctgaactccagtcacaacgttccatctcgtatgccgtctt

SEQ ID NO: 18884 - DNA, 96 bp, Aspergillus viridinutans
  misc_feature: 2040
ctccagtcacaacgttccatctcgtatgccgtatcatgatcggaagagcacacgtctgaactccagtcacaacgttccatctcgtatgccgtcttc

SEQ ID NO: 18885 - DNA, 96 bp, Aspergillus viridinutans
  misc_feature: 2034
ccagtcacaacgttccatctcgtatgccgtatcatgatcggaagagcacacgtctgaactccagtcacaacgttccatctcgtatgccgtcttctg

SEQ ID NO: 18886 - DNA, 96 bp, Aspergillus viridinutans
  misc_feature: 2032
tccagtcacaacgttccatctcgtatgccgtatcatgatcggaagagcacacgtctgaactccagtcacaacgttccatctcgtatgccgtcttct

SEQ ID NO: 18887 - DNA, 96 bp, Aspergillus viridinutans
  misc_feature: 2032
cagtcacaacgttccatctcgtatgccgtatcatgatcggaagagcacacgtctgaactccagtcacaacgttccatctcgtatgccgtcttctgc

SEQ ID NO: 18888 - DNA, 96 bp, Aspergillus viridinutans
  misc_feature: 2017
agtcacaacgttccatctcgtatgccgtatcatgatcggaagagcacacgtctgaactccagtcacaacgttccatctcgtatgccgtcttctgct

SEQ ID NO: 18889 - DNA, 96 bp, Aspergillus viridinutans
  misc_feature: 1998
gtcacaacgttccatctcgtatgccgtatcatgatcggaagagcacacgtctgaactccagtcacaacgttccatctcgtatgccgtcttctgctt

SEQ ID NO: 18890 - DNA, 96 bp, Aspergillus viridinutans
  misc_feature: 1990
tcacaacgttccatctcgtatgccgtatcatgatcggaagagcacacgtctgaactccagtcacaacgttccatctcgtatgccgtcttctgcttg

SEQ ID NO: 18891 - DNA, 96 bp, Aspergillus viridinutans
  misc_feature: 1767
atcggaagagcacacgtctgaactccagtcacaacgttccatctcgtatgccgtgatcggaagagcacacgtctgaactccagtcacaacgttcca

SEQ ID NO: 18892 - DNA, 96 bp, Aspergillus viridinutans
  misc_feature: 1741
tcggaagagcacacgtctgaactccagtcacaacgttccatctcgtatgccgtgatcggaagagcacacgtctgaactccagtcacaacgttccat

SEQ ID NO: 18893 - DNA, 96 bp, Aspergillus viridinutans
  misc_feature: 1738
cggaagagcacacgtctgaactccagtcacaacgttccatctcgtatgccgtgatcggaagagcacacgtctgaactccagtcacaacgttccatc

SEQ ID NO: 18894 - DNA, 96 bp, Aspergillus viridinutans
  misc_feature: 1737
gaagagcacacgtctgaactccagtcacaacgttccatctcgtatgccgtgatcggaagagcacacgtctgaactccagtcacaacgttccatctc

SEQ ID NO: 18895 - DNA, 96 bp, Aspergillus viridinutans
  misc_feature: 1736
ggaagagcacacgtctgaactccagtcacaacgttccatctcgtatgccgtgatcggaagagcacacgtctgaactccagtcacaacgttccatct

SEQ ID NO: 18896 - DNA, 96 bp, Aspergillus viridinutans
  misc_feature: 1736
aagagcacacgtctgaactccagtcacaacgttccatctcgtatgccgtgatcggaagagcacacgtctgaactccagtcacaacgttccatctcg

SEQ ID NO: 18897 - DNA, 96 bp, Aspergillus viridinutans
  misc_feature: 1730
cacgtctgaactccagtcacaacgttccatctcgtatgccgtgatcggaagagcacacgtctgaactccagtcacaacgttccatctcgtatgccg

SEQ ID NO: 18898 - DNA, 96 bp, Aspergillus viridinutans
  misc_feature: 1729
acacgtctgaactccagtcacaacgttccatctcgtatgccgtgatcggaagagcacacgtctgaactccagtcacaacgttccatctcgtatgcc

SEQ ID NO: 18899 - DNA, 96 bp, Aspergillus viridinutans
  misc_feature: 1727
cacacgtctgaactccagtcacaacgttccatctcgtatgccgtgatcggaagagcacacgtctgaactccagtcacaacgttccatctcgtatgc

SEQ ID NO: 18900 - DNA, 96 bp, Aspergillus viridinutans
  misc_feature: 1727
agagcacacgtctgaactccagtcacaacgttccatctcgtatgccgtgatcggaagagcacacgtctgaactccagtcacaacgttccatctcgt

SEQ ID NO: 18901 - DNA, 96 bp, Aspergillus viridinutans
  misc_feature: 1725
gcacacgtctgaactccagtcacaacgttccatctcgtatgccgtgatcggaagagcacacgtctgaactccagtcacaacgttccatctcgtatg

SEQ ID NO: 18902 - DNA, 96 bp, Aspergillus viridinutans
  misc_feature: 1724
agcacacgtctgaactccagtcacaacgttccatctcgtatgccgtgatcggaagagcacacgtctgaactccagtcacaacgttccatctcgtat

SEQ ID NO: 18903 - DNA, 96 bp, Aspergillus viridinutans
  misc_feature: 1722
gagcacacgtctgaactccagtcacaacgttccatctcgtatgccgtgatcggaagagcacacgtctgaactccagtcacaacgttccatctcgta

SEQ ID NO: 18904 - DNA, 96 bp, Aspergillus viridinutans
  misc_feature: 1721
acgtctgaactccagtcacaacgttccatctcgtatgccgtgatcggaagagcacacgtctgaactccagtcacaacgttccatctcgtatgccgt

SEQ ID NO: 18905 - DNA, 96 bp, Aspergillus viridinutans
  misc_feature: 1687
gatcggaagagcacacgtctgaactccagtcacaacgttccatctcgtatgccgtgatcggaagagcacacgtctgaactccagtcacaacgttcc

SEQ ID NO: 18906 - DNA, 96 bp, Aspergillus viridinutans
  misc_feature: 1411
cgtctgaactccagtcacaacgttccatctcgtatgccgtgatcggaagagcacacgtctgaactccagtcacaacgttccatctcgtatgccgtc

SEQ ID NO: 18907 - DNA, 96 bp, Aspergillus viridinutans
  misc_feature: 1409
tcggaagagcacacgtctgaactccagtcacaacgttccatctcgtatgccgtatcattagatcggaagagcacacgtctgaactccagtcacaac

SEQ ID NO: 18908 - DNA, 96 bp, Aspergillus viridinutans
  misc_feature: 1406
cggaagagcacacgtctgaactccagtcacaacgttccatctcgtatgccgtatcattagatcggaagagcacacgtctgaactccagtcacaacg

SEQ ID NO: 18909 - DNA, 96 bp, Aspergillus viridinutans
  misc_feature: 1405
atcggaagagcacacgtctgaactccagtcacaacgttccatctcgtatgccgtatcattagatcggaagagcacacgtctgaactccagtcacaa

SEQ ID NO: 18910 - DNA, 96 bp, Aspergillus viridinutans
  misc_feature: 1403
ggaagagcacacgtctgaactccagtcacaacgttccatctcgtatgccgtatcattagatcggaagagcacacgtctgaactccagtcacaacgt

SEQ ID NO: 18911 - DNA, 96 bp, Aspergillus viridinutans
  misc_feature: 1400
gaagagcacacgtctgaactccagtcacaacgttccatctcgtatgccgtatcattagatcggaagagcacacgtctgaactccagtcacaacgtt

SEQ ID NO: 18912 - DNA, 96 bp, Aspergillus viridinutans
  misc_feature: 1397
agagcacacgtctgaactccagtcacaacgttccatctcgtatgccgtatcattagatcggaagagcacacgtctgaactccagtcacaacgttcc

SEQ ID NO: 18913 - DNA, 96 bp, Aspergillus viridinutans
  misc_feature: 1397
aagagcacacgtctgaactccagtcacaacgttccatctcgtatgccgtatcattagatcggaagagcacacgtctgaactccagtcacaacgttc

SEQ ID NO: 18914 - DNA, 96 bp, Aspergillus viridinutans
  misc_feature: 1396
gagcacacgtctgaactccagtcacaacgttccatctcgtatgccgtatcattagatcggaagagcacacgtctgaactccagtcacaacgttcca

SEQ ID NO: 18915 - DNA, 96 bp, Aspergillus viridinutans
  misc_feature: 1389
gtctgaactccagtcacaacgttccatctcgtatgccgtgatcggaagagcacacgtctgaactccagtcacaacgttccatctcgtatgccgtct

SEQ ID NO: 18916 - DNA, 96 bp, Aspergillus viridinutans
  misc_feature: 1383
cacgtctgaactccagtcacaacgttccatctcgtatgccgtatcattagatcggaagagcacacgtctgaactccagtcacaacgttccatctcg

SEQ ID NO: 18917 - DNA, 96 bp, Aspergillus viridinutans
  misc_feature: 1382
gcacacgtctgaactccagtcacaacgttccatctcgtatgccgtatcattagatcggaagagcacacgtctgaactccagtcacaacgttccatc

SEQ ID NO: 18918 - DNA, 96 bp, Aspergillus viridinutans
  misc_feature: 1382
agcacacgtctgaactccagtcacaacgttccatctcgtatgccgtatcattagatcggaagagcacacgtctgaactccagtcacaacgttccat

SEQ ID NO: 18919 - DNA, 96 bp, Aspergillus viridinutans
  misc_feature: 1381
acacgtctgaactccagtcacaacgttccatctcgtatgccgtatcattagatcggaagagcacacgtctgaactccagtcacaacgttccatctc

SEQ ID NO: 18920 - DNA, 96 bp, Aspergillus viridinutans
  misc_feature: 1381
acgtctgaactccagtcacaacgttccatctcgtatgccgtatcattagatcggaagagcacacgtctgaactccagtcacaacgttccatctcgt

SEQ ID NO: 18921 - DNA, 96 bp, Aspergillus viridinutans
  misc_feature: 1380
gtctgaactccagtcacaacgttccatctcgtatgccgtatcattagatcggaagagcacacgtctgaactccagtcacaacgttccatctcgtat

SEQ ID NO: 18922 - DNA, 96 bp, Aspergillus viridinutans
  misc_feature: 1380
cacacgtctgaactccagtcacaacgttccatctcgtatgccgtatcattagatcggaagagcacacgtctgaactccagtcacaacgttccatct

SEQ ID NO: 18923 - DNA, 96 bp, Aspergillus viridinutans
  misc_feature: 1378
cgtctgaactccagtcacaacgttccatctcgtatgccgtatcattagatcggaagagcacacgtctgaactccagtcacaacgttccatctcgta

SEQ ID NO: 18924 - DNA, 96 bp, Aspergillus viridinutans
  misc_feature: 1348
gaactccagtcacaacgttccatctcgtatgccgtatcattagatcggaagagcacacgtctgaactccagtcacaacgttccatctcgtatgccg

SEQ ID NO: 18925 - DNA, 96 bp, Aspergillus viridinutans
  misc_feature: 1345
tgaactccagtcacaacgttccatctcgtatgccgtatcattagatcggaagagcacacgtctgaactccagtcacaacgttccatctcgtatgcc

SEQ ID NO: 18926 - DNA, 96 bp, Aspergillus viridinutans
  misc_feature: 1345
tctgaactccagtcacaacgttccatctcgtatgccgtatcattagatcggaagagcacacgtctgaactccagtcacaacgttccatctcgtatg

SEQ ID NO: 18927 - DNA, 96 bp, Aspergillus viridinutans
  misc_feature: 1345
ctgaactccagtcacaacgttccatctcgtatgccgtatcattagatcggaagagcacacgtctgaactccagtcacaacgttccatctcgtatgc

SEQ ID NO: 18928 - DNA, 96 bp, Aspergillus viridinutans
  misc_feature: 1344
aactccagtcacaacgttccatctcgtatgccgtatcattagatcggaagagcacacgtctgaactccagtcacaacgttccatctcgtatgccgt

SEQ ID NO: 18929 - DNA, 96 bp, Aspergillus viridinutans
  misc_feature: 1342
tctgaactccagtcacaacgttccatctcgtatgccgtgatcggaagagcacacgtctgaactccagtcacaacgttccatctcgtatgccgtctt

SEQ ID NO: 18930 - DNA, 96 bp, Aspergillus viridinutans
  misc_feature: 1340
ctgaactccagtcacaacgttccatctcgtatgccgtgatcggaagagcacacgtctgaactccagtcacaacgttccatctcgtatgccgtcttc

SEQ ID NO: 18931 - DNA, 96 bp, Aspergillus viridinutans
  misc_feature: 1336
tgaactccagtcacaacgttccatctcgtatgccgtgatcggaagagcacacgtctgaactccagtcacaacgttccatctcgtatgccgtcttct

SEQ ID NO: 18932 - DNA, 96 bp, Aspergillus viridinutans
  misc_feature: 1334
gaactccagtcacaacgttccatctcgtatgccgtgatcggaagagcacacgtctgaactccagtcacaacgttccatctcgtatgccgtcttctg

SEQ ID NO: 18933 - DNA, 96 bp, Aspergillus viridinutans
  misc_feature: 1333
gatcggaagagcacacgtctgaactccagtcacaacgttccatctcgtatgccgtatcattagatcggaagagcacacgtctgaactccagtcaca

SEQ ID NO: 18934 - DNA, 96 bp, Aspergillus viridinutans
  misc_feature: 1333
aactccagtcacaacgttccatctcgtatgccgtgatcggaagagcacacgtctgaactccagtcacaacgttccatctcgtatgccgtcttctgc

SEQ ID NO: 18935 - DNA, 96 bp, Aspergillus viridinutans
  misc_feature: 1322
actccagtcacaacgttccatctcgtatgccgtgatcggaagagcacacgtctgaactccagtcacaacgttccatctcgtatgccgtcttctgct

SEQ ID NO: 18936 - DNA, 96 bp, Aspergillus viridinutans
  misc_feature: 1311
tccagtcacaacgttccatctcgtatgccgtgatcggaagagcacacgtctgaactccagtcacaacgttccatctcgtatgccgtcttctgcttg

SEQ ID NO: 18937 - DNA, 96 bp, Aspergillus viridinutans
  misc_feature: 1307
ctccagtcacaacgttccatctcgtatgccgtgatcggaagagcacacgtctgaactccagtcacaacgttccatctcgtatgccgtcttctgctt

SEQ ID NO: 18938 - DNA, 96 bp, Aspergillus viridinutans
  misc_feature: 1306
ccagtcacaacgttccatctcgtatgccgtgatcggaagagcacacgtctgaactccagtcacaacgttccatctcgtatgccgtcttctgcttga

SEQ ID NO: 18939 - DNA, 96 bp, Aspergillus viridinutans
  misc_feature: 1297
cagtcacaacgttccatctcgtatgccgtgatcggaagagcacacgtctgaactccagtcacaacgttccatctcgtatgccgtcttctgcttgaa

SEQ ID NO: 18940 - DNA, 96 bp, Aspergillus viridinutans
  misc_feature: 1290
agtcacaacgttccatctcgtatgccgtgatcggaagagcacacgtctgaactccagtcacaacgttccatctcgtatgccgtcttctgcttgaaa

SEQ ID NO: 18941 - DNA, 96 bp, Aspergillus viridinutans
  misc_feature: 1289
gtcacaacgttccatctcgtatgccgtgatcggaagagcacacgtctgaactccagtcacaacgttccatctcgtatgccgtcttctgcttgaaaa

SEQ ID NO: 18942 - DNA, 96 bp, Aspergillus viridinutans
  misc_feature: 1284
tcacaacgttccatctcgtatgccgtgatcggaagagcacacgtctgaactccagtcacaacgttccatctcgtatgccgtcttctgcttgaaaaa

SEQ ID NO: 18943 - DNA, 96 bp, Aspergillus viridinutans
  misc_feature: 1209
atatatgtgtatatgtatatacacccacacagatgcgcacccccatggacatccatccgcacaacacggcccatcggtgccatacgtatatagata

SEQ ID NO: 18944 - DNA, 96 bp, Aspergillus viridinutans
  misc_feature: 1186
tatatgtgtatatgtatatacacccacacagatgcgcacccccatggacatccatccgcacaacacggcccatcggtgccatacgtatatagatat

SEQ ID NO: 18945 - DNA, 96 bp, Aspergillus viridinutans
  misc_feature: 1184
atatgtgtatatgtatatacacccacacagatgcgcacccccatggacatccatccgcacaacacggcccatcggtgccatacgtatatagatata

SEQ ID NO: 18946 - DNA, 96 bp, Aspergillus viridinutans
  misc_feature: 1181
tatatatgtgtatatgtatatacacccacacagatgcgcacccccatggacatccatccgcacaacacggcccatcggtgccatacgtatatagat

SEQ ID NO: 18947 - DNA, 96 bp, Aspergillus viridinutans
  misc_feature: 1180
tatgtgtatatgtatatacacccacacagatgcgcacccccatggacatccatccgcacaacacggcccatcggtgccatacgtatatagatatat

SEQ ID NO: 18948 - DNA, 96 bp, Aspergillus viridinutans
  misc_feature: 1176
tgtgtatatgtatatacacccacacagatgcgcacccccatggacatccatccgcacaacacggcccatcggtgccatacgtatatagatatatat

SEQ ID NO: 18949 - DNA, 96 bp, Aspergillus viridinutans
  misc_feature: 1167
atgtgtatatgtatatacacccacacagatgcgcacccccatggacatccatccgcacaacacggcccatcggtgccatacgtatatagatatata

SEQ ID NO: 18950 - DNA, 96 bp, Aspergillus viridinutans
  misc_feature: 1164
gtgtatatgtatatacacccacacagatgcgcacccccatggacatccatccgcacaacacggcccatcggtgccatacgtatatagatatatata

SEQ ID NO: 18951 - DNA, 96 bp, Aspergillus viridinutans
  misc_feature: 1157
tgtatatatgtgtatatgtatatacacccacacagatgcgcacccccatggacatccatccgcacaacacggcccatcggtgccatacgtatatag

SEQ ID NO: 18952 - DNA, 96 bp, Aspergillus viridinutans
  misc_feature: 1155
gtatatatgtgtatatgtatatacacccacacagatgcgcacccccatggacatccatccgcacaacacggcccatcggtgccatacgtatataga

SEQ ID NO: 18953 - DNA, 96 bp, Aspergillus viridinutans
  misc_feature: 1149
tgtgtatatatgtgtatatgtatatacacccacacagatgcgcacccccatggacatccatccgcacaacacggcccatcggtgccatacgtatat

SEQ ID NO: 18954 - DNA, 96 bp, Aspergillus viridinutans
  misc_feature: 1148
tgtatatgtatatacacccacacagatgcgcacccccatggacatccatccgcacaacacggcccatcggtgccatacgtatatagatatatatag

SEQ ID NO: 18955 - DNA, 96 bp, Aspergillus viridinutans
  misc_feature: 1145
gtgtatatatgtgtatatgtatatacacccacacagatgcgcacccccatggacatccatccgcacaacacggcccatcggtgccatacgtatata

SEQ ID NO: 18956 - DNA, 96 bp, Aspergillus viridinutans
  misc_feature: 1134
atgtgtatatatgtgtatatgtatatacacccacacagatgcgcacccccatggacatccatccgcacaacacggcccatcggtgccatacgtata

SEQ ID NO: 18957 - DNA, 96 bp, Aspergillus viridinutans
  misc_feature: 1132
actccagtcacaacgttccatctcgtatgccgtatcattagatcggaagagcacacgtctgaactccagtcacaacgttccatctcgtatgccgtc

SEQ ID NO: 18958 - DNA, 96 bp, Aspergillus viridinutans
  misc_feature: 1125
ctccagtcacaacgttccatctcgtatgccgtatcattagatcggaagagcacacgtctgaactccagtcacaacgttccatctcgtatgccgtct

SEQ ID NO: 18959 - DNA, 96 bp, Aspergillus viridinutans
  misc_feature: 1124
tatgtgtatatatgtgtatatgtatatacacccacacagatgcgcacccccatggacatccatccgcacaacacggcccatcggtgccatacgtat

SEQ ID NO: 18960 - DNA, 96 bp, Aspergillus viridinutans
  misc_feature: 1116
gtatatgtatatacacccacacagatgcgcacccccatggacatccatccgcacaacacggcccatcggtgccatacgtatatagatatatatagc

SEQ ID NO: 18961 - DNA, 96 bp, Aspergillus viridinutans
  misc_feature: 1115
atatgtgtatatatgtgtatatgtatatacacccacacagatgcgcacccccatggacatccatccgcacaacacggcccatcggtgccatacgta

SEQ ID NO: 18962 - DNA, 96 bp, Aspergillus viridinutans
  misc_feature: 1111
tccagtcacaacgttccatctcgtatgccgtatcattagatcggaagagcacacgtctgaactccagtcacaacgttccatctcgtatgccgtctt

SEQ ID NO: 18963 - DNA, 96 bp, Aspergillus viridinutans
  misc_feature: 1110
tatatgtatatacacccacacagatgcgcacccccatggacatccatccgcacaacacggcccatcggtgccatacgtatatagatatatatagcg

SEQ ID NO: 18964 - DNA, 96 bp, Aspergillus viridinutans
  misc_feature: 1108
ccagtcacaacgttccatctcgtatgccgtatcattagatcggaagagcacacgtctgaactccagtcacaacgttccatctcgtatgccgtcttc

SEQ ID NO: 18965 - DNA, 96 bp, Aspergillus viridinutans
  misc_feature: 1107
gtcacaacgttccatctcgtatgccgtatcattagatcggaagagcacacgtctgaactccagtcacaacgttccatctcgtatgccgtcttctgc

SEQ ID NO: 18966 - DNA, 96 bp, Aspergillus viridinutans
  misc_feature: 1106
cagtcacaacgttccatctcgtatgccgtatcattagatcggaagagcacacgtctgaactccagtcacaacgttccatctcgtatgccgtcttct

SEQ ID NO: 18967 - DNA, 96 bp, Aspergillus viridinutans
  misc_feature: 1106
agtcacaacgttccatctcgtatgccgtatcattagatcggaagagcacacgtctgaactccagtcacaacgttccatctcgtatgccgtcttctg

SEQ ID NO: 18968 - DNA, 96 bp, Aspergillus viridinutans
  misc_feature: 1099
tcacaacgttccatctcgtatgccgtatcattagatcggaagagcacacgtctgaactccagtcacaacgttccatctcgtatgccgtcttctgct

SEQ ID NO: 18969 - DNA, 96 bp, Aspergillus viridinutans
  misc_feature: 1099
tatatgtgtatatatgtgtatatgtatatacacccacacagatgcgcacccccatggacatccatccgcacaacacggcccatcggtgccatacgt

SEQ ID NO: 18970 - DNA, 96 bp, Aspergillus viridinutans
  misc_feature: 1085
atatatgtgtatatatgtgtatatgtatatacacccacacagatgcgcacccccatggacatccatccgcacaacacggcccatcggtgccatacg

SEQ ID NO: 18971 - DNA, 96 bp, Aspergillus viridinutans
  misc_feature: 1081
atatgtatatacacccacacagatgcgcacccccatggacatccatccgcacaacacggcccatcggtgccatacgtatatagatatatatagcga

SEQ ID NO: 18972 - DNA, 96 bp, Aspergillus viridinutans
  misc_feature: 1072
tatatatgtgtatatatgtgtatatgtatatacacccacacagatgcgcacccccatggacatccatccgcacaacacggcccatcggtgccatac

SEQ ID NO: 18973 - DNA, 96 bp, Aspergillus viridinutans
  misc_feature: 1069
gtatatacacccacacagatgcgcacccccatggacatccatccgcacaacacggcccatcggtgccatacgtatatagatatatatagcgacaca

SEQ ID NO: 18974 - DNA, 96 bp, Aspergillus viridinutans
  misc_feature: 1063
tatgtatatacacccacacagatgcgcacccccatggacatccatccgcacaacacggcccatcggtgccatacgtatatagatatatatagcgac

SEQ ID NO: 18975 - DNA, 96 bp, Aspergillus viridinutans
  misc_feature: 1062
atatatatgtgtatatatgtgtatatgtatatacacccacacagatgcgcacccccatggacatccatccgcacaacacggcccatcggtgccata

SEQ ID NO: 18976 - DNA, 96 bp, Aspergillus viridinutans
  misc_feature: 1061
atatacacccacacagatgcgcacccccatggacatccatccgcacaacacggcccatcggtgccatacgtatatagatatatatagcgacacacg

SEQ ID NO: 18977 - DNA, 96 bp, Aspergillus viridinutans
  misc_feature: 1060
tgtatatacacccacacagatgcgcacccccatggacatccatccgcacaacacggcccatcggtgccatacgtatatagatatatatagcgacac

SEQ ID NO: 18978 - DNA, 96 bp, Aspergillus viridinutans
  misc_feature: 1059
tatatacacccacacagatgcgcacccccatggacatccatccgcacaacacggcccatcggtgccatacgtatatagatatatatagcgacacac

SEQ ID NO: 18979 - DNA, 96 bp, Aspergillus viridinutans
  misc_feature: 1054
atgtatatacacccacacagatgcgcacccccatggacatccatccgcacaacacggcccatcggtgccatacgtatatagatatatatagcgaca

SEQ ID NO: 18980 - DNA, 96 bp, Aspergillus viridinutans
  misc_feature: 1048
tatacacccacacagatgcgcacccccatggacatccatccgcacaacacggcccatcggtgccatacgtatatagatatatatagcgacacacgg

SEQ ID NO: 18981 - DNA, 96 bp, Aspergillus viridinutans
  misc_feature: 1044
tatatatatgtgtatatatgtgtatatgtatatacacccacacagatgcgcacccccatggacatccatccgcacaacacggcccatcggtgccat

SEQ ID NO: 18982 - DNA, 96 bp, Aspergillus viridinutans
  misc_feature: 1041
atacacccacacagatgcgcacccccatggacatccatccgcacaacacggcccatcggtgccatacgtatatagatatatatagcgacacacgga

SEQ ID NO: 18983 - DNA, 96 bp, Aspergillus viridinutans
  misc_feature: 1038
tacacccacacagatgcgcacccccatggacatccatccgcacaacacggcccatcggtgccatacgtatatagatatatatagcgacacacggac

SEQ ID NO: 18984 - DNA, 96 bp, Aspergillus viridinutans
  misc_feature: 1036
atatatatatgtgtatatatgtgtatatgtatatacacccacacagatgcgcacccccatggacatccatccgcacaacacggcccatcggtgcca

SEQ ID NO: 18985 - DNA, 96 bp, Aspergillus viridinutans
  misc_feature: 1032
acacccacacagatgcgcacccccatggacatccatccgcacaacacggcccatcggtgccatacgtatatagatatatatagcgacacacggaca

SEQ ID NO: 18986 - DNA, 96 bp, Aspergillus viridinutans
  misc_feature: 1028
tatatatatatgtgtatatatgtgtatatgtatatacacccacacagatgcgcacccccatggacatccatccgcacaacacggcccatcggtgcc

SEQ ID NO: 18987 - DNA, 96 bp, Aspergillus viridinutans
  misc_feature: 1022
cacccacacagatgcgcacccccatggacatccatccgcacaacacggcccatcggtgccatacgtatatagatatatatagcgacacacggacat

SEQ ID NO: 18988 - DNA, 96 bp, Aspergillus viridinutans
  misc_feature: 1001
acccacacagatgcgcacccccatggacatccatccgcacaacacggcccatcggtgccatacgtatatagatatatatagcgacacacggacatc

SEQ ID NO: 18989 - DNA, 96 bp, Aspergillus viridinutans
  misc_feature: 1000
atgtatatatatatgtgtatatatgtgtatatgtatatacacccacacagatgcgcacccccatggacatccatccgcacaacacggcccatcggt

SEQ ID NO: 18990 - DNA, 96 bp, Aspergillus viridinutans
  misc_feature: 997
tgtatatatatatgtgtatatatgtgtatatgtatatacacccacacagatgcgcacccccatggacatccatccgcacaacacggcccatcggtg

SEQ ID NO: 18991 - DNA, 96 bp, Aspergillus viridinutans
  misc_feature: 997
cccacacagatgcgcacccccatggacatccatccgcacaacacggcccatcggtgccatacgtatatagatatatatagcgacacacggacatct

SEQ ID NO: 18992 - DNA, 96 bp, Aspergillus viridinutans
  misc_feature: 989
tatgtatatatatatgtgtatatatgtgtatatgtatatacacccacacagatgcgcacccccatggacatccatccgcacaacacggcccatcgg

SEQ ID NO: 18993 - DNA, 96 bp, Aspergillus viridinutans
  misc_feature: 988
gtatatatatatgtgtatatatgtgtatatgtatatacacccacacagatgcgcacccccatggacatccatccgcacaacacggcccatcggtgc

SEQ ID NO: 18994 - DNA, 96 bp, Aspergillus viridinutans
  misc_feature: 986
ccacacagatgcgcacccccatggacatccatccgcacaacacggcccatcggtgccatacgtatatagatatatatagcgacacacggacatctg

SEQ ID NO: 18995 - DNA, 96 bp, Aspergillus viridinutans
  misc_feature: 981
cacacagatgcgcacccccatggacatccatccgcacaacacggcccatcggtgccatacgtatatagatatatatagcgacacacggacatctgt

SEQ ID NO: 18996 - DNA, 96 bp, Aspergillus viridinutans
  misc_feature: 980
aactccagtcacaacgttccatctcgtatgccgtatcattgatcggaagagcacacgtctgaactccagtcacaacgttccatctcgtatgccgta

SEQ ID NO: 18997 - DNA, 96 bp, Aspergillus viridinutans
  misc_feature: 972
acacagatgcgcacccccatggacatccatccgcacaacacggcccatcggtgccatacgtatatagatatatatagcgacacacggacatctgta

SEQ ID NO: 18998 - DNA, 96 bp, Aspergillus viridinutans
  misc_feature: 969
atatgtatatatatatgtgtatatatgtgtatatgtatatacacccacacagatgcgcacccccatggacatccatccgcacaacacggcccatcg

SEQ ID NO: 18999 - DNA, 96 bp, Aspergillus viridinutans
  misc_feature: 966
cacagatgcgcacccccatggacatccatccgcacaacacggcccatcggtgccatacgtatatagatatatatagcgacacacggacatctgtat

SEQ ID NO: 19000 - DNA, 96 bp, Aspergillus viridinutans
  misc_feature: 956
acagatgcgcacccccatggacatccatccgcacaacacggcccatcggtgccatacgtatatagatatatatagcgacacacggacatctgtatc

SEQ ID NO: 19001 - DNA, 96 bp, Aspergillus viridinutans
  misc_feature: 936
tatatgtatatatatatgtgtatatatgtgtatatgtatatacacccacacagatgcgcacccccatggacatccatccgcacaacacggcccatc

SEQ ID NO: 19002 - DNA, 96 bp, Aspergillus viridinutans
  misc_feature: 929
cagatgcgcacccccatggacatccatccgcacaacacggcccatcggtgccatacgtatatagatatatatagcgacacacggacatctgtatcg

SEQ ID NO: 19003 - DNA, 96 bp, Aspergillus viridinutans
  misc_feature: 923
atatatgtatatatatatgtgtatatatgtgtatatgtatatacacccacacagatgcgcacccccatggacatccatccgcacaacacggcccat

SEQ ID NO: 19004 - DNA, 96 bp, Aspergillus viridinutans
  misc_feature: 918
gtctgaactccagtcacaacgttccatctcgtatgccgtagatcggaagagcacacgtctgaactccagtcacaacgttccatctcgtatgccgta

SEQ ID NO: 19005 - DNA, 96 bp, Aspergillus viridinutans
  misc_feature: 916
agatgcgcacccccatggacatccatccgcacaacacggcccatcggtgccatacgtatatagatatatatagcgacacacggacatctgtatcga

SEQ ID NO: 19006 - DNA, 96 bp, Aspergillus viridinutans
  misc_feature: 909
gatgcgcacccccatggacatccatccgcacaacacggcccatcggtgccatacgtatatagatatatatagcgacacacggacatctgtatcgat

SEQ ID NO: 19007 - DNA, 96 bp, Aspergillus viridinutans
  misc_feature: 889
atgcgcacccccatggacatccatccgcacaacacggcccatcggtgccatacgtatatagatatatatagcgacacacggacatctgtatcgata

SEQ ID NO: 19008 - DNA, 96 bp, Aspergillus viridinutans
  misc_feature: 879
tgcgcacccccatggacatccatccgcacaacacggcccatcggtgccatacgtatatagatatatatagcgacacacggacatctgtatcgatat

SEQ ID NO: 19009 - DNA, 96 bp, Aspergillus viridinutans
  misc_feature: 877
tatatatgtatatatatatgtgtatatatgtgtatatgtatatacacccacacagatgcgcacccccatggacatccatccgcacaacacggccca

SEQ ID NO: 19010 - DNA, 96 bp, Aspergillus viridinutans
  misc_feature: 866
gcgcacccccatggacatccatccgcacaacacggcccatcggtgccatacgtatatagatatatatagcgacacacggacatctgtatcgatata

SEQ ID NO: 19011 - DNA, 96 bp, Aspergillus viridinutans
  misc_feature: 865
acacatatatatatacatatatatctccgcatgcacggccaccggtgggccatgaaccacatccatcgacacgtccaccaagcgattggcggcctc

SEQ ID NO: 19012 - DNA, 96 bp, Aspergillus viridinutans
  misc_feature: 864
ggccaccggtgggccatgaaccacatccatcgacacgtccaccaagcgattggcggcctccctaatgctcgcgcgcggctctctgctgcctacaag

SEQ ID NO: 19013 - DNA, 96 bp, Aspergillus viridinutans
  misc_feature: 857
cacatatatatatacatatatatctccgcatgcacggccaccggtgggccatgaaccacatccatcgacacgtccaccaagcgattggcggcctcc

SEQ ID NO: 19014 - DNA, 96 bp, Aspergillus viridinutans
  misc_feature: 854
aggccgccaatcgcttggtggacgtgtcgatggatgtggttcatggcccaccggtggccgtgcatgcggagatatatatgtatatatatatgtgta

SEQ ID NO: 19015 - DNA, 96 bp, Aspergillus viridinutans
  misc_feature: 854
ggccgccaatcgcttggtggacgtgtcgatggatgtggttcatggcccaccggtggccgtgcatgcggagatatatatgtatatatatatgtgtat

SEQ ID NO: 19016 - DNA, 96 bp, Aspergillus viridinutans
  misc_feature: 851
gccgccaatcgcttggtggacgtgtcgatggatgtggttcatggcccaccggtggccgtgcatgcggagatatatatgtatatatatatgtgtata

SEQ ID NO: 19017 - DNA, 96 bp, Aspergillus viridinutans
  misc_feature: 851
gcacccccatggacatccatccgcacaacacggcccatcggtgccatacgtatatagatatatatagcgacacacggacatctgtatcgatatagg

SEQ ID NO: 19018 - DNA, 96 bp, Aspergillus viridinutans
  misc_feature: 850
cacccccatggacatccatccgcacaacacggcccatcggtgccatacgtatatagatatatatagcgacacacggacatctgtatcgatataggt

SEQ ID NO: 19019 - DNA, 96 bp, Aspergillus viridinutans
  misc_feature: 848
cgccaatcgcttggtggacgtgtcgatggatgtggttcatggcccaccggtggccgtgcatgcggagatatatatgtatatatatatgtgtatata

SEQ ID NO: 19020 - DNA, 96 bp, Aspergillus viridinutans
  misc_feature: 848
gcacggccaccggtgggccatgaaccacatccatcgacacgtccaccaagcgattggcggcctccctaatgctcgcgcgcggctctctgctgccta

SEQ ID NO: 19021 - DNA, 96 bp, Aspergillus viridinutans
  misc_feature: 848
gccaccggtgggccatgaaccacatccatcgacacgtccaccaagcgattggcggcctccctaatgctcgcgcgcggctctctgctgcctacaagg

SEQ ID NO: 19022 - DNA, 96 bp, Aspergillus viridinutans
  misc_feature: 846
tgcacggccaccggtgggccatgaaccacatccatcgacacgtccaccaagcgattggcggcctccctaatgctcgcgcgcggctctctgctgcct

SEQ ID NO: 19023 - DNA, 96 bp, Aspergillus viridinutans
  misc_feature: 846
atatatatgtatatatatatgtgtatatatgtgtatatgtatatacacccacacagatgcgcacccccatggacatccatccgcacaacacggccc

SEQ ID NO: 19024 - DNA, 96 bp, Aspergillus viridinutans
  misc_feature: 845
cggccaccggtgggccatgaaccacatccatcgacacgtccaccaagcgattggcggcctccctaatgctcgcgcgcggctctctgctgcctacaa

SEQ ID NO: 19025 - DNA, 96 bp, Aspergillus viridinutans
  misc_feature: 845
acggccaccggtgggccatgaaccacatccatcgacacgtccaccaagcgattggcggcctccctaatgctcgcgcgcggctctctgctgcctaca

SEQ ID NO: 19026 - DNA, 96 bp, Aspergillus viridinutans
  misc_feature: 845
acatatatatatacatatatatctccgcatgcacggccaccggtgggccatgaaccacatccatcgacacgtccaccaagcgattggcggcctccc

SEQ ID NO: 19027 - DNA, 96 bp, Aspergillus viridinutans
  misc_feature: 845
catatatatatacatatatatctccgcatgcacggccaccggtgggccatgaaccacatccatcgacacgtccaccaagcgattggcggcctccct

SEQ ID NO: 19028 - DNA, 96 bp, Aspergillus viridinutans
  misc_feature: 841
tatatacatatatatctccgcatgcacggccaccggtgggccatgaaccacatccatcgacacgtccaccaagcgattggcggcctccctaatgct

SEQ ID NO: 19029 - DNA, 96 bp, Aspergillus viridinutans
  misc_feature: 841
acggacatctgtatcgatataggtcggcgcgccaccgccgtacccgacggagggcagcgggccccgcgcgcggaggtgaccagttggccggcgccc

SEQ ID NO: 19030 - DNA, 96 bp, Aspergillus viridinutans
  misc_feature: 841
acccccatggacatccatccgcacaacacggcccatcggtgccatacgtatatagatatatatagcgacacacggacatctgtatcgatataggtc

SEQ ID NO: 19031 - DNA, 96 bp, Aspergillus viridinutans
  misc_feature: 841
ccgccaatcgcttggtggacgtgtcgatggatgtggttcatggcccaccggtggccgtgcatgcggagatatatatgtatatatatatgtgtatat

SEQ ID NO: 19032 - DNA, 96 bp, Aspergillus viridinutans
  misc_feature: 840
tacatatatatctccgcatgcacggccaccggtgggccatgaaccacatccatcgacacgtccaccaagcgattggcggcctccctaatgctcgcg

SEQ ID NO: 19033 - DNA, 96 bp, Aspergillus viridinutans
  misc_feature: 840
ccaccggtgggccatgaaccacatccatcgacacgtccaccaagcgattggcggcctccctaatgctcgcgcgcggctctctgctgcctacaaggc

SEQ ID NO: 19034 - DNA, 96 bp, Aspergillus viridinutans
  misc_feature: 840
cgacacacggacatctgtatcgatataggtcggcgcgccaccgccgtacccgacggagggcagcgggccccgcgcgcggaggtgaccagttggccg

SEQ ID NO: 19035 - DNA, 96 bp, Aspergillus viridinutans
  misc_feature: 839
atatatatatacatatatatctccgcatgcacggccaccggtgggccatgaaccacatccatcgacacgtccaccaagcgattggcggcctcccta

SEQ ID NO: 19036 - DNA, 96 bp, Aspergillus viridinutans
  misc_feature: 839
cgcacccccatggacatccatccgcacaacacggcccatcggtgccatacgtatatagatatatatagcgacacacggacatctgtatcgatatag

SEQ ID NO: 19037 - DNA, 96 bp, Aspergillus viridinutans
  misc_feature: 835
atgcacggccaccggtgggccatgaaccacatccatcgacacgtccaccaagcgattggcggcctccctaatgctcgcgcgcggctctctgctgcc

SEQ ID NO: 19038 - DNA, 96 bp, Aspergillus viridinutans
  misc_feature: 835
actccagtcacaacgttccatctcgtatgccgtatcattgatcggaagagcacacgtctgaactccagtcacaacgttccatctcgtatgccgtat

SEQ ID NO: 19039 - DNA, 96 bp, Aspergillus viridinutans
  misc_feature: 832
cacggccaccggtgggccatgaaccacatccatcgacacgtccaccaagcgattggcggcctccctaatgctcgcgcgcggctctctgctgcctac

SEQ ID NO: 19040 - DNA, 96 bp, Aspergillus viridinutans
  misc_feature: 832
acacacggacatctgtatcgatataggtcggcgcgccaccgccgtacccgacggagggcagcgggccccgcgcgcggaggtgaccagttggccggc

SEQ ID NO: 19041 - DNA, 96 bp, Aspergillus viridinutans
  misc_feature: 832
gccaatcgcttggtggacgtgtcgatggatgtggttcatggcccaccggtggccgtgcatgcggagatatatatgtatatatatatgtgtatatat

SEQ ID NO: 19042 - DNA, 96 bp, Aspergillus viridinutans
  misc_feature: 832
cccccatggacatccatccgcacaacacggcccatcggtgccatacgtatatagatatatatagcgacacacggacatctgtatcgatataggtcg

SEQ ID NO: 19043 - DNA, 96 bp, Aspergillus viridinutans
  misc_feature: 831
tatatatatacatatatatctccgcatgcacggccaccggtgggccatgaaccacatccatcgacacgtccaccaagcgattggcggcctccctaa

SEQ ID NO: 19044 - DNA, 96 bp, Aspergillus viridinutans
  misc_feature: 831
cacggacatctgtatcgatataggtcggcgcgccaccgccgtacccgacggagggcagcgggccccgcgcgcggaggtgaccagttggccggcgcc

SEQ ID NO: 19045 - DNA, 96 bp, Aspergillus viridinutans
  misc_feature: 831
atatatacatatatatctccgcatgcacggccaccggtgggccatgaaccacatccatcgacacgtccaccaagcgattggcggcctccctaatgc

SEQ ID NO: 19046 - DNA, 96 bp, Aspergillus viridinutans
  misc_feature: 831
cggacatctgtatcgatataggtcggcgcgccaccgccgtacccgacggagggcagcgggccccgcgcgcggaggtgaccagttggccggcgccct

SEQ ID NO: 19047 - DNA, 96 bp, Aspergillus viridinutans
  misc_feature: 830
ggccgtgttgtgcggatggatgtccatgggggtgcgcatctgtgtgggtgtatatacatatacacatatatacacatatatatatacatatatatc

SEQ ID NO: 19048 - DNA, 96 bp, Aspergillus viridinutans
  misc_feature: 830
atacatatatatctccgcatgcacggccaccggtgggccatgaaccacatccatcgacacgtccaccaagcgattggcggcctccctaatgctcgc

SEQ ID NO: 19049 - DNA, 96 bp, Aspergillus viridinutans
  misc_feature: 830
gacacacggacatctgtatcgatataggtcggcgcgccaccgccgtacccgacggagggcagcgggccccgcgcgcggaggtgaccagttggccgg

SEQ ID NO: 19050 - DNA, 96 bp, Aspergillus viridinutans
  misc_feature: 830
catatatatctccgcatgcacggccaccggtgggccatgaaccacatccatcgacacgtccaccaagcgattggcggcctccctaatgctcgcgcg

SEQ ID NO: 19051 - DNA, 96 bp, Aspergillus viridinutans
  misc_feature: 829
acacggacatctgtatcgatataggtcggcgcgccaccgccgtacccgacggagggcagcgggccccgcgcgcggaggtgaccagttggccggcgc

SEQ ID NO: 19052 - DNA, 96 bp, Aspergillus viridinutans
  misc_feature: 829
ctccgcatgcacggccaccggtgggccatgaaccacatccatcgacacgtccaccaagcgattggcggcctccctaatgctcgcgcgcggctctct

SEQ ID NO: 19053 - DNA, 96 bp, Aspergillus viridinutans
  misc_feature: 828
acatatatatctccgcatgcacggccaccggtgggccatgaaccacatccatcgacacgtccaccaagcgattggcggcctccctaatgctcgcgc

SEQ ID NO: 19054 - DNA, 96 bp, Aspergillus viridinutans
  misc_feature: 828
catgcacggccaccggtgggccatgaaccacatccatcgacacgtccaccaagcgattggcggcctccctaatgctcgcgcgcggctctctgctgc

SEQ ID NO: 19055 - DNA, 96 bp, Aspergillus viridinutans
  misc_feature: 828
atatacatatatatctccgcatgcacggccaccggtgggccatgaaccacatccatcgacacgtccaccaagcgattggcggcctccctaatgctc

SEQ ID NO: 19056 - DNA, 96 bp, Aspergillus viridinutans
  misc_feature: 828
atctccgcatgcacggccaccggtgggccatgaaccacatccatcgacacgtccaccaagcgattggcggcctccctaatgctcgcgcgcggctct

SEQ ID NO: 19057 - DNA, 96 bp, Aspergillus viridinutans
  misc_feature: 827
caccggtgggccatgaaccacatccatcgacacgtccaccaagcgattggcggcctccctaatgctcgcgcgcggctctctgctgcctacaaggcg

SEQ ID NO: 19058 - DNA, 96 bp, Aspergillus viridinutans
  misc_feature: 826
tctccgcatgcacggccaccggtgggccatgaaccacatccatcgacacgtccaccaagcgattggcggcctccctaatgctcgcgcgcggctctc

SEQ ID NO: 19059 - DNA, 96 bp, Aspergillus viridinutans
  misc_feature: 826
tatatatacatatatatctccgcatgcacggccaccggtgggccatgaaccacatccatcgacacgtccaccaagcgattggcggcctccctaatg

SEQ ID NO: 19060 - DNA, 96 bp, Aspergillus viridinutans
  misc_feature: 826
cacacggacatctgtatcgatataggtcggcgcgccaccgccgtacccgacggagggcagcgggccccgcgcgcggaggtgaccagttggccggcg

SEQ ID NO: 19061 - DNA, 96 bp, Aspergillus viridinutans
  misc_feature: 825
accggtgggccatgaaccacatccatcgacacgtccaccaagcgattggcggcctccctaatgctcgcgcgcggctctctgctgcctacaaggcgc

SEQ ID NO: 19062 - DNA, 96 bp, Aspergillus viridinutans
  misc_feature: 825
ccaatcgcttggtggacgtgtcgatggatgtggttcatggcccaccggtggccgtgcatgcggagatatatatgtatatatatatgtgtatatatg

SEQ ID NO: 19063 - DNA, 96 bp, Aspergillus viridinutans
  misc_feature: 822
ggacatctgtatcgatataggtcggcgcgccaccgccgtacccgacggagggcagcgggccccgcgcgcggaggtgaccagttggccggcgccctt

SEQ ID NO: 19064 - DNA, 96 bp, Aspergillus viridinutans
  misc_feature: 822
atatatatacatatatatctccgcatgcacggccaccggtgggccatgaaccacatccatcgacacgtccaccaagcgattggcggcctccctaat

SEQ ID NO: 19065 - DNA, 96 bp, Aspergillus viridinutans
  misc_feature: 821
tatacatatatatctccgcatgcacggccaccggtgggccatgaaccacatccatcgacacgtccaccaagcgattggcggcctccctaatgctcg

SEQ ID NO: 19066 - DNA, 96 bp, Aspergillus viridinutans
  misc_feature: 821
gcgacacacggacatctgtatcgatataggtcggcgcgccaccgccgtacccgacggagggcagcgggccccgcgcgcggaggtgaccagttggcc

SEQ ID NO: 19067 - DNA, 96 bp, Aspergillus viridinutans
  misc_feature: 821
ccccatggacatccatccgcacaacacggcccatcggtgccatacgtatatagatatatatagcgacacacggacatctgtatcgatataggtcgg

SEQ ID NO: 19068 - DNA, 96 bp, Aspergillus viridinutans
  misc_feature: 819
agcgacacacggacatctgtatcgatataggtcggcgcgccaccgccgtacccgacggagggcagcgggccccgcgcgcggaggtgaccagttggc

SEQ ID NO: 19069 - DNA, 96 bp, Aspergillus viridinutans
  misc_feature: 819
ccgcatgcacggccaccggtgggccatgaaccacatccatcgacacgtccaccaagcgattggcggcctccctaatgctcgcgcgcggctctctgc

SEQ ID NO: 19070 - DNA, 96 bp, Aspergillus viridinutans
  misc_feature: 818
gcatgcacggccaccggtgggccatgaaccacatccatcgacacgtccaccaagcgattggcggcctccctaatgctcgcgcgcggctctctgctg

SEQ ID NO: 19071 - DNA, 96 bp, Aspergillus viridinutans
  misc_feature: 815
cccatggacatccatccgcacaacacggcccatcggtgccatacgtatatagatatatatagcgacacacggacatctgtatcgatataggtcggc

SEQ ID NO: 19072 - DNA, 96 bp, Aspergillus viridinutans
  misc_feature: 815
ccggtgggccatgaaccacatccatcgacacgtccaccaagcgattggcggcctccctaatgctcgcgcgcggctctctgctgcctacaaggcgcg

SEQ ID NO: 19073 - DNA, 96 bp, Aspergillus viridinutans
  misc_feature: 813
tatctccgcatgcacggccaccggtgggccatgaaccacatccatcgacacgtccaccaagcgattggcggcctccctaatgctcgcgcgcggctc

SEQ ID NO: 19074 - DNA, 96 bp, Aspergillus viridinutans
  misc_feature: 813
cgcatgcacggccaccggtgggccatgaaccacatccatcgacacgtccaccaagcgattggcggcctccctaatgctcgcgcgcggctctctgct

SEQ ID NO: 19075 - DNA, 96 bp, Aspergillus viridinutans
  misc_feature: 813
caatcgcttggtggacgtgtcgatggatgtggttcatggcccaccggtggccgtgcatgcggagatatatatgtatatatatatgtgtatatatgt

SEQ ID NO: 19076 - DNA, 96 bp, Aspergillus viridinutans
  misc_feature: 812
atatatatctccgcatgcacggccaccggtgggccatgaaccacatccatcgacacgtccaccaagcgattggcggcctccctaatgctcgcgcgc

SEQ ID NO: 19077 - DNA, 96 bp, Aspergillus viridinutans
  misc_feature: 812
aatcgcttggtggacgtgtcgatggatgtggttcatggcccaccggtggccgtgcatgcggagatatatatgtatatatatatgtgtatatatgtg

SEQ ID NO: 19078 - DNA, 96 bp, Aspergillus viridinutans
  misc_feature: 808
tccgcatgcacggccaccggtgggccatgaaccacatccatcgacacgtccaccaagcgattggcggcctccctaatgctcgcgcgcggctctctg

SEQ ID NO: 19079 - DNA, 96 bp, Aspergillus viridinutans
  misc_feature: 805
atatctccgcatgcacggccaccggtgggccatgaaccacatccatcgacacgtccaccaagcgattggcggcctccctaatgctcgcgcgcggct

SEQ ID NO: 19080 - DNA, 96 bp, Aspergillus viridinutans
  misc_feature: 804
gccgtgttgtgcggatggatgtccatgggggtgcgcatctgtgtgggtgtatatacatatacacatatatacacatatatatatacatatatatct

SEQ ID NO: 19081 - DNA, 96 bp, Aspergillus viridinutans
  misc_feature: 803
tatagcgacacacggacatctgtatcgatataggtcggcgcgccaccgccgtacccgacggagggcagcgggccccgcgcgcggaggtgaccagtt

SEQ ID NO: 19082 - DNA, 96 bp, Aspergillus viridinutans
  misc_feature: 802
cggtgggccatgaaccacatccatcgacacgtccaccaagcgattggcggcctccctaatgctcgcgcgcggctctctgctgcctacaaggcgcgc

SEQ ID NO: 19083 - DNA, 96 bp, Aspergillus viridinutans
  misc_feature: 801
gtgggccatgaaccacatccatcgacacgtccaccaagcgattggcggcctccctaatgctcgcgcgcggctctctgctgcctacaaggcgcgcgc

SEQ ID NO: 19084 - DNA, 96 bp, Aspergillus viridinutans
  misc_feature: 800
ccatggacatccatccgcacaacacggcccatcggtgccatacgtatatagatatatatagcgacacacggacatctgtatcgatataggtcggcg

SEQ ID NO: 19085 - DNA, 96 bp, Aspergillus viridinutans
  misc_feature: 799
tatatctccgcatgcacggccaccggtgggccatgaaccacatccatcgacacgtccaccaagcgattggcggcctccctaatgctcgcgcgcggc

SEQ ID NO: 19086 - DNA, 96 bp, Aspergillus viridinutans
  misc_feature: 799
gacatctgtatcgatataggtcggcgcgccaccgccgtacccgacggagggcagcgggccccgcgcgcggaggtgaccagttggccggcgcccttg

SEQ ID NO: 19087 - DNA, 96 bp, Aspergillus viridinutans
  misc_feature: 798
ggtgggccatgaaccacatccatcgacacgtccaccaagcgattggcggcctccctaatgctcgcgcgcggctctctgctgcctacaaggcgcgcg

SEQ ID NO: 19088 - DNA, 96 bp, Aspergillus viridinutans
  misc_feature: 797
tatatatctccgcatgcacggccaccggtgggccatgaaccacatccatcgacacgtccaccaagcgattggcggcctccctaatgctcgcgcgcg

SEQ ID NO: 19089 - DNA, 96 bp, Aspergillus viridinutans
  misc_feature: 797
ctccagtcacaacgttccatctcgtatgccgtatcattgatcggaagagcacacgtctgaactccagtcacaacgttccatctcgtatgccgtatc

SEQ ID NO: 19090 - DNA, 96 bp, Aspergillus viridinutans
  misc_feature: 797
atcgcttggtggacgtgtcgatggatgtggttcatggcccaccggtggccgtgcatgcggagatatatatgtatatatatatgtgtatatatgtgt

SEQ ID NO: 19091 - DNA, 96 bp, Aspergillus viridinutans
  misc_feature: 796
atagcgacacacggacatctgtatcgatataggtcggcgcgccaccgccgtacccgacggagggcagcgggccccgcgcgcggaggtgaccagttg

SEQ ID NO: 19092 - DNA, 96 bp, Aspergillus viridinutans
  misc_feature: 795
tagcgacacacggacatctgtatcgatataggtcggcgcgccaccgccgtacccgacggagggcagcgggccccgcgcgcggaggtgaccagttgg

SEQ ID NO: 19093 - DNA, 96 bp, Aspergillus viridinutans
  misc_feature: 795
atatatctccgcatgcacggccaccggtgggccatgaaccacatccatcgacacgtccaccaagcgattggcggcctccctaatgctcgcgcgcgg

SEQ ID NO: 19094 - DNA, 96 bp, Aspergillus viridinutans
  misc_feature: 793
tgggccatgaaccacatccatcgacacgtccaccaagcgattggcggcctccctaatgctcgcgcgcggctctctgctgcctacaaggcgcgcgcg

SEQ ID NO: 19095 - DNA, 96 bp, Aspergillus viridinutans
  misc_feature: 793
gggccatgaaccacatccatcgacacgtccaccaagcgattggcggcctccctaatgctcgcgcgcggctctctgctgcctacaaggcgcgcgcgc

SEQ ID NO: 19096 - DNA, 96 bp, Aspergillus viridinutans
  misc_feature: 791
cgcttggtggacgtgtcgatggatgtggttcatggcccaccggtggccgtgcatgcggagatatatatgtatatatatatgtgtatatatgtgtat

SEQ ID NO: 19097 - DNA, 96 bp, Aspergillus viridinutans
  misc_feature: 789
atatagcgacacacggacatctgtatcgatataggtcggcgcgccaccgccgtacccgacggagggcagcgggccccgcgcgcggaggtgaccagt

SEQ ID NO: 19098 - DNA, 96 bp, Aspergillus viridinutans
  misc_feature: 788
ggccatgaaccacatccatcgacacgtccaccaagcgattggcggcctccctaatgctcgcgcgcggctctctgctgcctacaaggcgcgcgcgcg

SEQ ID NO: 19099 - DNA, 96 bp, Aspergillus viridinutans
  misc_feature: 787
tcgcttggtggacgtgtcgatggatgtggttcatggcccaccggtggccgtgcatgcggagatatatatgtatatatatatgtgtatatatgtgta

SEQ ID NO: 19100 - DNA, 96 bp, Aspergillus viridinutans
  misc_feature: 786
gcttggtggacgtgtcgatggatgtggttcatggcccaccggtggccgtgcatgcggagatatatatgtatatatatatgtgtatatatgtgtata

SEQ ID NO: 19101 - DNA, 96 bp, Aspergillus viridinutans
  misc_feature: 786
acatctgtatcgatataggtcggcgcgccaccgccgtacccgacggagggcagcgggccccgcgcgcggaggtgaccagttggccggcgcccttgc

SEQ ID NO: 19102 - DNA, 96 bp, Aspergillus viridinutans
  misc_feature: 784
tatatagcgacacacggacatctgtatcgatataggtcggcgcgccaccgccgtacccgacggagggcagcgggccccgcgcgcggaggtgaccag

SEQ ID NO: 19103 - DNA, 96 bp, Aspergillus viridinutans
  misc_feature: 784
gccatgaaccacatccatcgacacgtccaccaagcgattggcggcctccctaatgctcgcgcgcggctctctgctgcctacaaggcgcgcgcgcgg

SEQ ID NO: 19104 - DNA, 96 bp, Aspergillus viridinutans
  misc_feature: 779
catggacatccatccgcacaacacggcccatcggtgccatacgtatatagatatatatagcgacacacggacatctgtatcgatataggtcggcgc

SEQ ID NO: 19105 - DNA, 96 bp, Aspergillus viridinutans
  misc_feature: 777
ccatgaaccacatccatcgacacgtccaccaagcgattggcggcctccctaatgctcgcgcgcggctctctgctgcctacaaggcgcgcgcgcggt

SEQ ID NO: 19106 - DNA, 96 bp, Aspergillus viridinutans
  misc_feature: 776
atatatagcgacacacggacatctgtatcgatataggtcggcgcgccaccgccgtacccgacggagggcagcgggccccgcgcgcggaggtgacca

SEQ ID NO: 19107 - DNA, 96 bp, Aspergillus viridinutans
  misc_feature: 776
atctgtatcgatataggtcggcgcgccaccgccgtacccgacggagggcagcgggccccgcgcgcggaggtgaccagttggccggcgcccttgctg

SEQ ID NO: 19108 - DNA, 96 bp, Aspergillus viridinutans
  misc_feature: 775
ccgtgttgtgcggatggatgtccatgggggtgcgcatctgtgtgggtgtatatacatatacacatatatacacatatatatatacatatatatctc

SEQ ID NO: 19109 - DNA, 96 bp, Aspergillus viridinutans
  misc_feature: 774
catctgtatcgatataggtcggcgcgccaccgccgtacccgacggagggcagcgggccccgcgcgcggaggtgaccagttggccggcgcccttgct

SEQ ID NO: 19110 - DNA, 96 bp, Aspergillus viridinutans
  misc_feature: 767
tctgtatcgatataggtcggcgcgccaccgccgtacccgacggagggcagcgggccccgcgcgcggaggtgaccagttggccggcgcccttgctgg

SEQ ID NO: 19111 - DNA, 96 bp, Aspergillus viridinutans
  misc_feature: 763
atggacatccatccgcacaacacggcccatcggtgccatacgtatatagatatatatagcgacacacggacatctgtatcgatataggtcggcgcg

SEQ ID NO: 19112 - DNA, 96 bp, Aspergillus viridinutans
  misc_feature: 762
ctgtatcgatataggtcggcgcgccaccgccgtacccgacggagggcagcgggccccgcgcgcggaggtgaccagttggccggcgcccttgctgga

SEQ ID NO: 19113 - DNA, 96 bp, Aspergillus viridinutans
  misc_feature: 762
catgaaccacatccatcgacacgtccaccaagcgattggcggcctccctaatgctcgcgcgcggctctctgctgcctacaaggcgcgcgcgcggtc

SEQ ID NO: 19114 - DNA, 96 bp, Aspergillus viridinutans
  misc_feature: 761
cttggtggacgtgtcgatggatgtggttcatggcccaccggtggccgtgcatgcggagatatatatgtatatatatatgtgtatatatgtgtatat

SEQ ID NO: 19115 - DNA, 96 bp, Aspergillus viridinutans
  misc_feature: 759
cgatataggtcggcgcgccaccgccgtacccgacggagggcagcgggccccgcgcgcggaggtgaccagttggccggcgcccttgctggagcaggc

SEQ ID NO: 19116 - DNA, 96 bp, Aspergillus viridinutans
  misc_feature: 758
tgtatcgatataggtcggcgcgccaccgccgtacccgacggagggcagcgggccccgcgcgcggaggtgaccagttggccggcgcccttgctggag

SEQ ID NO: 19117 - DNA, 96 bp, Aspergillus viridinutans
  misc_feature: 756
tatcgatataggtcggcgcgccaccgccgtacccgacggagggcagcgggccccgcgcgcggaggtgaccagttggccggcgcccttgctggagca

SEQ ID NO: 19118 - DNA, 96 bp, Aspergillus viridinutans
  misc_feature: 755
tatatatagcgacacacggacatctgtatcgatataggtcggcgcgccaccgccgtacccgacggagggcagcgggccccgcgcgcggaggtgacc

SEQ ID NO: 19119 - DNA, 96 bp, Aspergillus viridinutans
  misc_feature: 755
gtatcgatataggtcggcgcgccaccgccgtacccgacggagggcagcgggccccgcgcgcggaggtgaccagttggccggcgcccttgctggagc

SEQ ID NO: 19120 - DNA, 96 bp, Aspergillus viridinutans
  misc_feature: 753
ggagatatatatgtatatatatatgtgtatatatgtgtatatgtatatacacccacacagatgcgcacccccatggacatccatccgcacaacacg

SEQ ID NO: 19121 - DNA, 96 bp, Aspergillus viridinutans
  misc_feature: 752
gatataggtcggcgcgccaccgccgtacccgacggagggcagcgggccccgcgcgcggaggtgaccagttggccggcgcccttgctggagcaggcg

SEQ ID NO: 19122 - DNA, 96 bp, Aspergillus viridinutans
  misc_feature: 752
atcgatataggtcggcgcgccaccgccgtacccgacggagggcagcgggccccgcgcgcggaggtgaccagttggccggcgcccttgctggagcag

SEQ ID NO: 19123 - DNA, 96 bp, Aspergillus viridinutans
  misc_feature: 747
ttggtggacgtgtcgatggatgtggttcatggcccaccggtggccgtgcatgcggagatatatatgtatatatatatgtgtatatatgtgtatatg

SEQ ID NO: 19124 - DNA, 96 bp, Aspergillus viridinutans
  misc_feature: 746
cggagatatatatgtatatatatatgtgtatatatgtgtatatgtatatacacccacacagatgcgcacccccatggacatccatccgcacaacac

SEQ ID NO: 19125 - DNA, 96 bp, Aspergillus viridinutans
  misc_feature: 741
tggacatccatccgcacaacacggcccatcggtgccatacgtatatagatatatatagcgacacacggacatctgtatcgatataggtcggcgcgc

SEQ ID NO: 19126 - DNA, 96 bp, Aspergillus viridinutans
  misc_feature: 740
tccagtcacaacgttccatctcgtatgccgtatcattgatcggaagagcacacgtctgaactccagtcacaacgttccatctcgtatgccgtatca

SEQ ID NO: 19127 - DNA, 96 bp, Aspergillus viridinutans
  misc_feature: 737
atgaaccacatccatcgacacgtccaccaagcgattggcggcctccctaatgctcgcgcgcggctctctgctgcctacaaggcgcgcgcgcggtca

SEQ ID NO: 19128 - DNA, 96 bp, Aspergillus viridinutans
  misc_feature: 737
tcgatataggtcggcgcgccaccgccgtacccgacggagggcagcgggccccgcgcgcggaggtgaccagttggccggcgcccttgctggagcagg

SEQ ID NO: 19129 - DNA, 96 bp, Aspergillus viridinutans
  misc_feature: 734
gatatatatagcgacacacggacatctgtatcgatataggtcggcgcgccaccgccgtacccgacggagggcagcgggccccgcgcgcggaggtga

SEQ ID NO: 19130 - DNA, 96 bp, Aspergillus viridinutans
  misc_feature: 734
atatatatagcgacacacggacatctgtatcgatataggtcggcgcgccaccgccgtacccgacggagggcagcgggccccgcgcgcggaggtgac

SEQ ID NO: 19131 - DNA, 96 bp, Aspergillus viridinutans
  misc_feature: 732
cacaacgttccatctcgtatgccgtatcattgatcggaagagcacacgtctgaactccagtcacaacgttccatctcgtatgccgtcttctgcttg

SEQ ID NO: 19132 - DNA, 96 bp, Aspergillus viridinutans
  misc_feature: 731
atataggtcggcgcgccaccgccgtacccgacggagggcagcgggccccgcgcgcggaggtgaccagttggccggcgcccttgctggagcaggcgg

SEQ ID NO: 19133 - DNA, 96 bp, Aspergillus viridinutans
  misc_feature: 730
tataggtcggcgcgccaccgccgtacccgacggagggcagcgggccccgcgcgcggaggtgaccagttggccggcgcccttgctggagcaggcggc

SEQ ID NO: 19134 - DNA, 96 bp, Aspergillus viridinutans
  misc_feature: 728
ggacatccatccgcacaacacggcccatcggtgccatacgtatatagatatatatagcgacacacggacatctgtatcgatataggtcggcgcgcc

SEQ ID NO: 19135 - DNA, 96 bp, Aspergillus viridinutans
  misc_feature: 728
ataggtcggcgcgccaccgccgtacccgacggagggcagcgggccccgcgcgcggaggtgaccagttggccggcgcccttgctggagcaggcggcc

SEQ ID NO: 19136 - DNA, 96 bp, Aspergillus viridinutans
  misc_feature: 727
acatatacacatatatacacatatatatatacatatatatctccgcatgcacggccaccggtgggccatgaaccacatccatcgacacgtccacca

SEQ ID NO: 19137 - DNA, 96 bp, Aspergillus viridinutans
  misc_feature: 723
tgcggagatatatatgtatatatatatgtgtatatatgtgtatatgtatatacacccacacagatgcgcacccccatggacatccatccgcacaac

SEQ ID NO: 19138 - DNA, 96 bp, Aspergillus viridinutans
  misc_feature: 720
taggtcggcgcgccaccgccgtacccgacggagggcagcgggccccgcgcgcggaggtgaccagttggccggcgcccttgctggagcaggcggcca

SEQ ID NO: 19139 - DNA, 96 bp, Aspergillus viridinutans
  misc_feature: 719
agatatatatagcgacacacggacatctgtatcgatataggtcggcgcgccaccgccgtacccgacggagggcagcgggccccgcgcgcggaggtg

SEQ ID NO: 19140 - DNA, 96 bp, Aspergillus viridinutans
  misc_feature: 717
tacatatacacatatatacacatatatatatacatatatatctccgcatgcacggccaccggtgggccatgaaccacatccatcgacacgtccacc

SEQ ID NO: 19141 - DNA, 96 bp, Aspergillus viridinutans
  misc_feature: 716
gacatccatccgcacaacacggcccatcggtgccatacgtatatagatatatatagcgacacacggacatctgtatcgatataggtcggcgcgcca

SEQ ID NO: 19142 - DNA, 96 bp, Aspergillus viridinutans
  misc_feature: 715
gcggagatatatatgtatatatatatgtgtatatatgtgtatatgtatatacacccacacagatgcgcacccccatggacatccatccgcacaaca

SEQ ID NO: 19143 - DNA, 96 bp, Aspergillus viridinutans
  misc_feature: 713
tgaaccacatccatcgacacgtccaccaagcgattggcggcctccctaatgctcgcgcgcggctctctgctgcctacaaggcgcgcgcgcggtcag

SEQ ID NO: 19144 - DNA, 96 bp, Aspergillus viridinutans
  misc_feature: 711
aggtcggcgcgccaccgccgtacccgacggagggcagcgggccccgcgcgcggaggtgaccagttggccggcgcccttgctggagcaggcggccag

SEQ ID NO: 19145 - DNA, 96 bp, Aspergillus viridinutans
  misc_feature: 710
tagatatatatagcgacacacggacatctgtatcgatataggtcggcgcgccaccgccgtacccgacggagggcagcgggccccgcgcgcggaggt

SEQ ID NO: 19146 - DNA, 96 bp, Aspergillus viridinutans
  misc_feature: 708
atacatatacacatatatacacatatatatatacatatatatctccgcatgcacggccaccggtgggccatgaaccacatccatcgacacgtccac

SEQ ID NO: 19147 - DNA, 96 bp, Aspergillus viridinutans
  misc_feature: 705
tatacatatacacatatatacacatatatatatacatatatatctccgcatgcacggccaccggtgggccatgaaccacatccatcgacacgtcca

SEQ ID NO: 19148 - DNA, 96 bp, Aspergillus viridinutans
  misc_feature: 703
gtggcgcgccgacctatatcgatacagatgtccgtgtgtcgctatatatatctatatacgtatggcaccgatgggccgtgttgtgcggatggatgt

SEQ ID NO: 19149 - DNA, 96 bp, Aspergillus viridinutans
  misc_feature: 703
ggtcggcgcgccaccgccgtacccgacggagggcagcgggccccgcgcgcggaggtgaccagttggccggcgcccttgctggagcaggcggccagg

SEQ ID NO: 19150 - DNA, 96 bp, Aspergillus viridinutans
  misc_feature: 702
atgcggagatatatatgtatatatatatgtgtatatatgtgtatatgtatatacacccacacagatgcgcacccccatggacatccatccgcacaa

SEQ ID NO: 19151 - DNA, 96 bp, Aspergillus viridinutans
  misc_feature: 702
gaaccacatccatcgacacgtccaccaagcgattggcggcctccctaatgctcgcgcgcggctctctgctgcctacaaggcgcgcgcgcggtcagc

SEQ ID NO: 19152 - DNA, 96 bp, Aspergillus viridinutans
  misc_feature: 701
atagatatatatagcgacacacggacatctgtatcgatataggtcggcgcgccaccgccgtacccgacggagggcagcgggccccgcgcgcggagg

SEQ ID NO: 19153 - DNA, 96 bp, Aspergillus viridinutans
  misc_feature: 700
ggtggcgcgccgacctatatcgatacagatgtccgtgtgtcgctatatatatctatatacgtatggcaccgatgggccgtgttgtgcggatggatg

SEQ ID NO: 19154 - DNA, 96 bp, Aspergillus viridinutans
  misc_feature: 697
tatagatatatatagcgacacacggacatctgtatcgatataggtcggcgcgccaccgccgtacccgacggagggcagcgggccccgcgcgcggag

SEQ ID NO: 19155 - DNA, 96 bp, Aspergillus viridinutans
  misc_feature: 695
ccagtcacaacgttccatctcgtatgccgtatcattgatcggaagagcacacgtctgaactccagtcacaacgttccatctcgtatgccgtatcat

SEQ ID NO: 19156 - DNA, 96 bp, Aspergillus viridinutans
  misc_feature: 694
cggtggcgcgccgacctatatcgatacagatgtccgtgtgtcgctatatatatctatatacgtatggcaccgatgggccgtgttgtgcggatggat

SEQ ID NO: 19157 - DNA, 96 bp, Aspergillus viridinutans
  misc_feature: 690
gtcggcgcgccaccgccgtacccgacggagggcagcgggccccgcgcgcggaggtgaccagttggccggcgcccttgctggagcaggcggccaggc

SEQ ID NO: 19158 - DNA, 96 bp, Aspergillus viridinutans
  misc_feature: 688
atatacatatacacatatatacacatatatatatacatatatatctccgcatgcacggccaccggtgggccatgaaccacatccatcgacacgtcc

SEQ ID NO: 19159 - DNA, 96 bp, Aspergillus viridinutans
  misc_feature: 685
gctcttccgatcagatcggaagagcgtcgtgtagggaaagagtgtagtactccgtgtagatctcggtggtcgccgtatcattaaaaaaaaaaaaaa

SEQ ID NO: 19160 - DNA, 96 bp, Aspergillus viridinutans
  misc_feature: 685
catgcggagatatatatgtatatatatatgtgtatatatgtgtatatgtatatacacccacacagatgcgcacccccatggacatccatccgcaca

SEQ ID NO: 19161 - DNA, 96 bp, Aspergillus viridinutans
  misc_feature: 684
tcggcgcgccaccgccgtacccgacggagggcagcgggccccgcgcgcggaggtgaccagttggccggcgcccttgctggagcaggcggccaggcg

SEQ ID NO: 19162 - DNA, 96 bp, Aspergillus viridinutans
  misc_feature: 684
atatagatatatatagcgacacacggacatctgtatcgatataggtcggcgcgccaccgccgtacccgacggagggcagcgggccccgcgcgcgga

SEQ ID NO: 19163 - DNA, 96 bp, Aspergillus viridinutans
  misc_feature: 684
gcggtggcgcgccgacctatatcgatacagatgtccgtgtgtcgctatatatatctatatacgtatggcaccgatgggccgtgttgtgcggatgga

SEQ ID NO: 19164 - DNA, 96 bp, Aspergillus viridinutans
  misc_feature: 682
aaccacatccatcgacacgtccaccaagcgattggcggcctccctaatgctcgcgcgcggctctctgctgcctacaaggcgcgcgcgcggtcagct

SEQ ID NO: 19165 - DNA, 96 bp, Aspergillus viridinutans
  misc_feature: 679
ggcggtggcgcgccgacctatatcgatacagatgtccgtgtgtcgctatatatatctatatacgtatggcaccgatgggccgtgttgtgcggatgg

SEQ ID NO: 19166 - DNA, 96 bp, Aspergillus viridinutans
  misc_feature: 678
accacatccatcgacacgtccaccaagcgattggcggcctccctaatgctcgcgcgcggctctctgctgcctacaaggcgcgcgcgcggtcagctg

SEQ ID NO: 19167 - DNA, 96 bp, Aspergillus viridinutans
  misc_feature: 677
cggcgcgccaccgccgtacccgacggagggcagcgggccccgcgcgcggaggtgaccagttggccggcgcccttgctggagcaggcggccaggcgg

SEQ ID NO: 19168 - DNA, 96 bp, Aspergillus viridinutans
  misc_feature: 676
ggcgcgccaccgccgtacccgacggagggcagcgggccccgcgcgcggaggtgaccagttggccggcgcccttgctggagcaggcggccaggcggg

SEQ ID NO: 19169 - DNA, 96 bp, Aspergillus viridinutans
  misc_feature: 673
tatatagatatatatagcgacacacggacatctgtatcgatataggtcggcgcgccaccgccgtacccgacggagggcagcgggccccgcgcgcgg

SEQ ID NO: 19170 - DNA, 96 bp, Aspergillus viridinutans
  misc_feature: 670
gcatgcggagatatatatgtatatatatatgtgtatatatgtgtatatgtatatacacccacacagatgcgcacccccatggacatccatccgcac

SEQ ID NO: 19171 - DNA, 96 bp, Aspergillus viridinutans
  misc_feature: 669
tatatacatatacacatatatacacatatatatatacatatatatctccgcatgcacggccaccggtgggccatgaaccacatccatcgacacgtc

SEQ ID NO: 19172 - DNA, 96 bp, Aspergillus viridinutans
  misc_feature: 667
gcgcgccaccgccgtacccgacggagggcagcgggccccgcgcgcggaggtgaccagttggccggcgcccttgctggagcaggcggccaggcgggg

SEQ ID NO: 19173 - DNA, 96 bp, Aspergillus viridinutans
  misc_feature: 666
gtatatagatatatatagcgacacacggacatctgtatcgatataggtcggcgcgccaccgccgtacccgacggagggcagcgggccccgcgcgcg

SEQ ID NO: 19174 - DNA, 96 bp, Aspergillus viridinutans
  misc_feature: 666
cggcggtggcgcgccgacctatatcgatacagatgtccgtgtgtcgctatatatatctatatacgtatggcaccgatgggccgtgttgtgcggatg

SEQ ID NO: 19175 - DNA, 96 bp, Aspergillus viridinutans
  misc_feature: 665
cacatccatcgacacgtccaccaagcgattggcggcctccctaatgctcgcgcgcggctctctgctgcctacaaggcgcgcgcgcggtcagctggt

SEQ ID NO: 19176 - DNA, 96 bp, Aspergillus viridinutans
  misc_feature: 661
tacccgacggagggcagcgggccccgcgcgcggaggtgaccagttggccggcgcccttgctggagcaggcggccaggcggggggtgcgcgcgcgcg

SEQ ID NO: 19177 - DNA, 96 bp, Aspergillus viridinutans
  misc_feature: 661
ccacatccatcgacacgtccaccaagcgattggcggcctccctaatgctcgcgcgcggctctctgctgcctacaaggcgcgcgcgcggtcagctgg

SEQ ID NO: 19178 - DNA, 96 bp, Aspergillus viridinutans
  misc_feature: 660
cgtacccgacggagggcagcgggccccgcgcgcggaggtgaccagttggccggcgcccttgctggagcaggcggccaggcggggggtgcgcgcgcg

SEQ ID NO: 19179 - DNA, 96 bp, Aspergillus viridinutans
  misc_feature: 659
tgcatgcggagatatatatgtatatatatatgtgtatatatgtgtatatgtatatacacccacacagatgcgcacccccatggacatccatccgca

SEQ ID NO: 19180 - DNA, 96 bp, Aspergillus viridinutans
  misc_feature: 658
ccgtacccgacggagggcagcgggccccgcgcgcggaggtgaccagttggccggcgcccttgctggagcaggcggccaggcggggggtgcgcgcgc

SEQ ID NO: 19181 - DNA, 96 bp, Aspergillus viridinutans
  misc_feature: 656
gtacccgacggagggcagcgggccccgcgcgcggaggtgaccagttggccggcgcccttgctggagcaggcggccaggcggggggtgcgcgcgcgc

SEQ ID NO: 19182 - DNA, 96 bp, Aspergillus viridinutans
  misc_feature: 655
gtatatacatatacacatatatacacatatatatatacatatatatctccgcatgcacggccaccggtgggccatgaaccacatccatcgacacgt

SEQ ID NO: 19183 - DNA, 96 bp, Aspergillus viridinutans
  misc_feature: 655
cgcgccaccgccgtacccgacggagggcagcgggccccgcgcgcggaggtgaccagttggccggcgcccttgctggagcaggcggccaggcggggg

SEQ ID NO: 19184 - DNA, 96 bp, Aspergillus viridinutans
  misc_feature: 655
caaggcgcgcgcgcggtcagctggtccctataacgggagcgcgcggccccctctgcctgcctgcttgcccaagggcgcccgccaactggtgacctt

SEQ ID NO: 19185 - DNA, 96 bp, Aspergillus viridinutans
  misc_feature: 654
acggcggtggcgcgccgacctatatcgatacagatgtccgtgtgtcgctatatatatctatatacgtatggcaccgatgggccgtgttgtgcggat

SEQ ID NO: 19186 - DNA, 96 bp, Aspergillus viridinutans
  misc_feature: 651
acccgacggagggcagcgggccccgcgcgcggaggtgaccagttggccggcgcccttgctggagcaggcggccaggcggggggtgcgcgcgcgcgc

SEQ ID NO: 19187 - DNA, 96 bp, Aspergillus viridinutans
  misc_feature: 651
acatccatcgacacgtccaccaagcgattggcggcctccctaatgctcgcgcgcggctctctgctgcctacaaggcgcgcgcgcggtcagctggtc

SEQ ID NO: 19188 - DNA, 96 bp, Aspergillus viridinutans
  misc_feature: 650
ccgacggagggcagcgggccccgcgcgcggaggtgaccagttggccggcgcccttgctggagcaggcggccaggcggggggtgcgcgcgcgcgcgc

SEQ ID NO: 19189 - DNA, 96 bp, Aspergillus viridinutans
  misc_feature: 650
gcctacaaggcgcgcgcgcggtcagctggtccctataacgggagcgcgcggccccctctgcctgcctgcttgcccaagggcgcccgccaactggtg

SEQ ID NO: 19190 - DNA, 96 bp, Aspergillus viridinutans
  misc_feature: 649
gtgcatgcggagatatatatgtatatatatatgtgtatatatgtgtatatgtatatacacccacacagatgcgcacccccatggacatccatccgc

SEQ ID NO: 19191 - DNA, 96 bp, Aspergillus viridinutans
  misc_feature: 649
acaaggcgcgcgcgcggtcagctggtccctataacgggagcgcgcggccccctctgcctgcctgcttgcccaagggcgcccgccaactggtgacct

SEQ ID NO: 19192 - DNA, 96 bp, Aspergillus viridinutans
  misc_feature: 649
aaggcgcgcgcgcggtcagctggtccctataacgggagcgcgcggccccctctgcctgcctgcttgcccaagggcgcccgccaactggtgaccttt

SEQ ID NO: 19193 - DNA, 96 bp, Aspergillus viridinutans
  misc_feature: 647
tgtatatacatatacacatatatacacatatatatatacatatatatctccgcatgcacggccaccggtgggccatgaaccacatccatcgacacg

SEQ ID NO: 19194 - DNA, 96 bp, Aspergillus viridinutans
  misc_feature: 647
cgtatatagatatatatagcgacacacggacatctgtatcgatataggtcggcgcgccaccgccgtacccgacggagggcagcgggccccgcgcgc

SEQ ID NO: 19195 - DNA, 96 bp, Aspergillus viridinutans
  misc_feature: 646
tacaaggcgcgcgcgcggtcagctggtccctataacgggagcgcgcggccccctctgcctgcctgcttgcccaagggcgcccgccaactggtgacc

SEQ ID NO: 19196 - DNA, 96 bp, Aspergillus viridinutans
  misc_feature: 644
gccgtacccgacggagggcagcgggccccgcgcgcggaggtgaccagttggccggcgcccttgctggagcaggcggccaggcggggggtgcgcgcg

SEQ ID NO: 19197 - DNA, 96 bp, Aspergillus viridinutans
  misc_feature: 644
ccgccgtacccgacggagggcagcgggccccgcgcgcggaggtgaccagttggccggcgcccttgctggagcaggcggccaggcggggggtgcgcg

SEQ ID NO: 19198 - DNA, 96 bp, Aspergillus viridinutans
  misc_feature: 643
accagttggcgggcgcccttgggcaagcaggcaggcagagggggccgcgcgctcccgttatagggaccagctgaccgcgcgcgcgccttgtaggca

SEQ ID NO: 19199 - DNA, 96 bp, Aspergillus viridinutans
  misc_feature: 643
cgccaccgccgtacccgacggagggcagcgggccccgcgcgcggaggtgaccagttggccggcgcccttgctggagcaggcggccaggcggggggt

SEQ ID NO: 19200 - DNA, 96 bp, Aspergillus viridinutans
  misc_feature: 642
gcgccaccgccgtacccgacggagggcagcgggccccgcgcgcggaggtgaccagttggccggcgcccttgctggagcaggcggccaggcgggggg

SEQ ID NO: 19201 - DNA, 96 bp, Aspergillus viridinutans
  misc_feature: 641
cccgacggagggcagcgggccccgcgcgcggaggtgaccagttggccggcgcccttgctggagcaggcggccaggcggggggtgcgcgcgcgcgcg

SEQ ID NO: 19202 - DNA, 96 bp, Aspergillus viridinutans
  misc_feature: 640
cctacaaggcgcgcgcgcggtcagctggtccctataacgggagcgcgcggccccctctgcctgcctgcttgcccaagggcgcccgccaactggtga

SEQ ID NO: 19203 - DNA, 96 bp, Aspergillus viridinutans
  misc_feature: 640
gggctctcgccaggcgcgcgcgcgcgcgcaccccccgcctggccgcctgctccagcaagggcgccggccaactggtcacctccgcgcgcggggccc

SEQ ID NO: 19204 - DNA, 96 bp, Aspergillus viridinutans
  misc_feature: 640
ccgtgcatgcggagatatatatgtatatatatatgtgtatatatgtgtatatgtatatacacccacacagatgcgcacccccatggacatccatcc

SEQ ID NO: 19205 - DNA, 96 bp, Aspergillus viridinutans
  misc_feature: 640
cgccgtacccgacggagggcagcgggccccgcgcgcggaggtgaccagttggccggcgcccttgctggagcaggcggccaggcggggggtgcgcgc

SEQ ID NO: 19206 - DNA, 96 bp, Aspergillus viridinutans
  misc_feature: 640
aggcgcgcgcgcggtcagctggtccctataacgggagcgcgcggccccctctgcctgcctgcttgcccaagggcgcccgccaactggtgacctttg

SEQ ID NO: 19207 - DNA, 96 bp, Aspergillus viridinutans
  misc_feature: 639
accgccgtacccgacggagggcagcgggccccgcgcgcggaggtgaccagttggccggcgcccttgctggagcaggcggccaggcggggggtgcgc

SEQ ID NO: 19208 - DNA, 96 bp, Aspergillus viridinutans
  misc_feature: 639
gccgtgcatgcggagatatatatgtatatatatatgtgtatatatgtgtatatgtatatacacccacacagatgcgcacccccatggacatccatc

SEQ ID NO: 19209 - DNA, 96 bp, Aspergillus viridinutans
  misc_feature: 638
tggccgtgcatgcggagatatatatgtatatatatatgtgtatatatgtgtatatgtatatacacccacacagatgcgcacccccatggacatcca

SEQ ID NO: 19210 - DNA, 96 bp, Aspergillus viridinutans
  misc_feature: 638
ctacaaggcgcgcgcgcggtcagctggtccctataacgggagcgcgcggccccctctgcctgcctgcttgcccaagggcgcccgccaactggtgac

SEQ ID NO: 19211 - DNA, 96 bp, Aspergillus viridinutans
  misc_feature: 637
cagtgggctctcgccaggcgcgcgcgcgcgcgcaccccccgcctggccgcctgctccagcaagggcgccggccaactggtcacctccgcgcgcggg

SEQ ID NO: 19212 - DNA, 96 bp, Aspergillus viridinutans
  misc_feature: 636
gtacggcggtggcgcgccgacctatatcgatacagatgtccgtgtgtcgctatatatatctatatacgtatggcaccgatgggccgtgttgtgcgg

SEQ ID NO: 19213 - DNA, 96 bp, Aspergillus viridinutans
  misc_feature: 635
gccaccgccgtacccgacggagggcagcgggccccgcgcgcggaggtgaccagttggccggcgcccttgctggagcaggcggccaggcggggggtg

SEQ ID NO: 19214 - DNA, 96 bp, Aspergillus viridinutans
  misc_feature: 634
tgggctctcgccaggcgcgcgcgcgcgcgcaccccccgcctggccgcctgctccagcaagggcgccggccaactggtcacctccgcgcgcggggcc

SEQ ID NO: 19215 - DNA, 96 bp, Aspergillus viridinutans
  misc_feature: 634
gtgtatatacatatacacatatatacacatatatatatacatatatatctccgcatgcacggccaccggtgggccatgaaccacatccatcgacac

SEQ ID NO: 19216 - DNA, 96 bp, Aspergillus viridinutans
  misc_feature: 634
caggcgcgcgcgcgcgcgcaccccccgcctggccgcctgctccagcaagggcgccggccaactggtcacctccgcgcgcggggcccgctgccctcc

SEQ ID NO: 19217 - DNA, 96 bp, Aspergillus viridinutans
  misc_feature: 634
cgcgcgcaaggccggtcctggccaacggcgccggcccagtgggctctcgccaggcgcgcgcgcgcgcgcaccccccgcctggccgcctgctccagc

SEQ ID NO: 19218 - DNA, 96 bp, Aspergillus viridinutans
  misc_feature: 633
cgcgcgcgcaaggccggtcctggccaacggcgccggcccagtgggctctcgccaggcgcgcgcgcgcgcgcaccccccgcctggccgcctgctcca

SEQ ID NO: 19219 - DNA, 96 bp, Aspergillus viridinutans
  misc_feature: 633
ggctctcgccaggcgcgcgcgcgcgcgcaccccccgcctggccgcctgctccagcaagggcgccggccaactggtcacctccgcgcgcggggcccg

SEQ ID NO: 19220 - DNA, 96 bp, Aspergillus viridinutans
  misc_feature: 633
gcgcgcgcaaggccggtcctggccaacggcgccggcccagtgggctctcgccaggcgcgcgcgcgcgcgcaccccccgcctggccgcctgctccag

SEQ ID NO: 19221 - DNA, 96 bp, Aspergillus viridinutans
  misc_feature: 633
cgtgcatgcggagatatatatgtatatatatatgtgtatatatgtgtatatgtatatacacccacacagatgcgcacccccatggacatccatccg

SEQ ID NO: 19222 - DNA, 96 bp, Aspergillus viridinutans
  misc_feature: 633
cgcgcggggcccgctgccctccgtcgggtacggcggtggcgcgccgacctatatcgatacagatgtccgtgtgtcgctatatatatctatatacgt

SEQ ID NO: 19223 - DNA, 96 bp, Aspergillus viridinutans
  misc_feature: 632
ccaccgccgtacccgacggagggcagcgggccccgcgcgcggaggtgaccagttggccggcgcccttgctggagcaggcggccaggcggggggtgc

SEQ ID NO: 19224 - DNA, 96 bp, Aspergillus viridinutans
  misc_feature: 631
tacggcggtggcgcgccgacctatatcgatacagatgtccgtgtgtcgctatatatatctatatacgtatggcaccgatgggccgtgttgtgcgga

SEQ ID NO: 19225 - DNA, 96 bp, Aspergillus viridinutans
  misc_feature: 631
gtgggctctcgccaggcgcgcgcgcgcgcgcaccccccgcctggccgcctgctccagcaagggcgccggccaactggtcacctccgcgcgcggggc

SEQ ID NO: 19226 - DNA, 96 bp, Aspergillus viridinutans
  misc_feature: 631
cccagtgggctctcgccaggcgcgcgcgcgcgcgcaccccccgcctggccgcctgctccagcaagggcgccggccaactggtcacctccgcgcgcg

SEQ ID NO: 19227 - DNA, 96 bp, Aspergillus viridinutans
  misc_feature: 630
aggcgcgcgcgcgcgcgcaccccccgcctggccgcctgctccagcaagggcgccggccaactggtcacctccgcgcgcggggcccgctgccctccg

SEQ ID NO: 19228 - DNA, 96 bp, Aspergillus viridinutans
  misc_feature: 630
caccgccgtacccgacggagggcagcgggccccgcgcgcggaggtgaccagttggccggcgcccttgctggagcaggcggccaggcggggggtgcg

SEQ ID NO: 19229 - DNA, 96 bp, Aspergillus viridinutans
  misc_feature: 629
gcgcgcaaggccggtcctggccaacggcgccggcccagtgggctctcgccaggcgcgcgcgcgcgcgcaccccccgcctggccgcctgctccagca

SEQ ID NO: 19230 - DNA, 96 bp, Aspergillus viridinutans
  misc_feature: 629
gcgcggggcccgctgccctccgtcgggtacggcggtggcgcgccgacctatatcgatacagatgtccgtgtgtcgctatatatatctatatacgta

SEQ ID NO: 19231 - DNA, 96 bp, Aspergillus viridinutans
  misc_feature: 629
ggtggccgtgcatgcggagatatatatgtatatatatatgtgtatatatgtgtatatgtatatacacccacacagatgcgcacccccatggacatc

SEQ ID NO: 19232 - DNA, 96 bp, Aspergillus viridinutans
  misc_feature: 628
cgcgcaaggccggtcctggccaacggcgccggcccagtgggctctcgccaggcgcgcgcgcgcgcgcaccccccgcctggccgcctgctccagcaa

SEQ ID NO: 19233 - DNA, 96 bp, Aspergillus viridinutans
  misc_feature: 628
tagggaccagctgaccgcgcgcgcgccttgtaggcagcagagagccgcgcgcgagcattagggaggccgccaatcgcttggtggacgtgtcgatgg

SEQ ID NO: 19234 - DNA, 96 bp, Aspergillus viridinutans
  misc_feature: 628
ggcgcgcgcgcggtcagctggtccctataacgggagcgcgcggccccctctgcctgcctgcttgcccaagggcgcccgccaactggtgacctttgc

SEQ ID NO: 19235 - DNA, 96 bp, Aspergillus viridinutans
  misc_feature: 628
ggccgtgcatgcggagatatatatgtatatatatatgtgtatatatgtgtatatgtatatacacccacacagatgcgcacccccatggacatccat

SEQ ID NO: 19236 - DNA, 96 bp, Aspergillus viridinutans
  misc_feature: 628
gcccagtgggctctcgccaggcgcgcgcgcgcgcgcaccccccgcctggccgcctgctccagcaagggcgccggccaactggtcacctccgcgcgc

SEQ ID NO: 19237 - DNA, 96 bp, Aspergillus viridinutans
  misc_feature: 628
ccagtgggctctcgccaggcgcgcgcgcgcgcgcaccccccgcctggccgcctgctccagcaagggcgccggccaactggtcacctccgcgcgcgg

SEQ ID NO: 19238 - DNA, 96 bp, Aspergillus viridinutans
  misc_feature: 628
agtgggctctcgccaggcgcgcgcgcgcgcgcaccccccgcctggccgcctgctccagcaagggcgccggccaactggtcacctccgcgcgcgggg

SEQ ID NO: 19239 - DNA, 96 bp, Aspergillus viridinutans
  misc_feature: 627
catccatcgacacgtccaccaagcgattggcggcctccctaatgctcgcgcgcggctctctgctgcctacaaggcgcgcgcgcggtcagctggtcc

SEQ ID NO: 19240 - DNA, 96 bp, Aspergillus viridinutans
  misc_feature: 627
cgacggagggcagcgggccccgcgcgcggaggtgaccagttggccggcgcccttgctggagcaggcggccaggcggggggtgcgcgcgcgcgcgcg

SEQ ID NO: 19241 - DNA, 96 bp, Aspergillus viridinutans
  misc_feature: 626
gggtgtatatacatatacacatatatacacatatatatatacatatatatctccgcatgcacggccaccggtgggccatgaaccacatccatcgac

SEQ ID NO: 19242 - DNA, 96 bp, Aspergillus viridinutans
  misc_feature: 625
gtggccgtgcatgcggagatatatatgtatatatatatgtgtatatatgtgtatatgtatatacacccacacagatgcgcacccccatggacatcc

SEQ ID NO: 19243 - DNA, 96 bp, Aspergillus viridinutans
  misc_feature: 625
atagggaccagctgaccgcgcgcgcgccttgtaggcagcagagagccgcgcgcgagcattagggaggccgccaatcgcttggtggacgtgtcgatg

SEQ ID NO: 19244 - DNA, 96 bp, Aspergillus viridinutans
  misc_feature: 624
ggcgcgcgcgcgcgcgcaccccccgcctggccgcctgctccagcaagggcgccggccaactggtcacctccgcgcgcggggcccgctgccctccgt

SEQ ID NO: 19245 - DNA, 96 bp, Aspergillus viridinutans
  misc_feature: 623
gctctcgccaggcgcgcgcgcgcgcgcaccccccgcctggccgcctgctccagcaagggcgccggccaactggtcacctccgcgcgcggggcccgc

SEQ ID NO: 19246 - DNA, 96 bp, Aspergillus viridinutans
  misc_feature: 621
ggtgtatatacatatacacatatatacacatatatatatacatatatatctccgcatgcacggccaccggtgggccatgaaccacatccatcgaca

SEQ ID NO: 19247 - DNA, 96 bp, Aspergillus viridinutans
  misc_feature: 621
tccatcgacacgtccaccaagcgattggcggcctccctaatgctcgcgcgcggctctctgctgcctacaaggcgcgcgcgcggtcagctggtccct

SEQ ID NO: 19248 - DNA, 96 bp, Aspergillus viridinutans
  misc_feature: 621
gacggagggcagcgggccccgcgcgcggaggtgaccagttggccggcgcccttgctggagcaggcggccaggcggggggtgcgcgcgcgcgcgcgc

SEQ ID NO: 19249 - DNA, 96 bp, Aspergillus viridinutans
  misc_feature: 621
gcgcaaggccggtcctggccaacggcgccggcccagtgggctctcgccaggcgcgcgcgcgcgcgcaccccccgcctggccgcctgctccagcaag

SEQ ID NO: 19250 - DNA, 96 bp, Aspergillus viridinutans
  misc_feature: 619
ggtacggcggtggcgcgccgacctatatcgatacagatgtccgtgtgtcgctatatatatctatatacgtatggcaccgatgggccgtgttgtgcg

SEQ ID NO: 19251 - DNA, 96 bp, Aspergillus viridinutans
  misc_feature: 618
tgggtgtatatacatatacacatatatacacatatatatatacatatatatctccgcatgcacggccaccggtgggccatgaaccacatccatcga

SEQ ID NO: 19252 - DNA, 96 bp, Aspergillus viridinutans
  misc_feature: 618
cgccaggcgcgcgcgcgcgcgcaccccccgcctggccgcctgctccagcaagggcgccggccaactggtcacctccgcgcgcggggcccgctgccc

SEQ ID NO: 19253 - DNA, 96 bp, Aspergillus viridinutans
  misc_feature: 618
caaggccggtcctggccaacggcgccggcccagtgggctctcgccaggcgcgcgcgcgcgcgcaccccccgcctggccgcctgctccagcaagggc

SEQ ID NO: 19254 - DNA, 96 bp, Aspergillus viridinutans
  misc_feature: 617
aaggccggtcctggccaacggcgccggcccagtgggctctcgccaggcgcgcgcgcgcgcgcaccccccgcctggccgcctgctccagcaagggcg

SEQ ID NO: 19255 - DNA, 96 bp, Aspergillus viridinutans
  misc_feature: 616
tatagggaccagctgaccgcgcgcgcgccttgtaggcagcagagagccgcgcgcgagcattagggaggccgccaatcgcttggtggacgtgtcgat

SEQ ID NO: 19256 - DNA, 96 bp, Aspergillus viridinutans
  misc_feature: 616
aggccggtcctggccaacggcgccggcccagtgggctctcgccaggcgcgcgcgcgcgcgcaccccccgcctggccgcctgctccagcaagggcgc

SEQ ID NO: 19257 - DNA, 96 bp, Aspergillus viridinutans
  misc_feature: 616
ctcgccaggcgcgcgcgcgcgcgcaccccccgcctggccgcctgctccagcaagggcgccggccaactggtcacctccgcgcgcggggcccgctgc

SEQ ID NO: 19258 - DNA, 96 bp, Aspergillus viridinutans
  misc_feature: 616
ccaggcgcgcgcgcgcgcgcaccccccgcctggccgcctgctccagcaagggcgccggccaactggtcacctccgcgcgcggggcccgctgccctc

SEQ ID NO: 19259 - DNA, 96 bp, Aspergillus viridinutans
  misc_feature: 616
ccagttggcgggcgcccttgggcaagcaggcaggcagagggggccgcgcgctcccgttatagggaccagctgaccgcgcgcgcgccttgtaggcag

SEQ ID NO: 19260 - DNA, 96 bp, Aspergillus viridinutans
  misc_feature: 615
tcgccaggcgcgcgcgcgcgcgcaccccccgcctggccgcctgctccagcaagggcgccggccaactggtcacctccgcgcgcggggcccgctgcc

SEQ ID NO: 19261 - DNA, 96 bp, Aspergillus viridinutans
  misc_feature: 615
atccatcgacacgtccaccaagcgattggcggcctccctaatgctcgcgcgcggctctctgctgcctacaaggcgcgcgcgcggtcagctggtccc

SEQ ID NO: 19262 - DNA, 96 bp, Aspergillus viridinutans
  misc_feature: 614
ggccggtcctggccaacggcgccggcccagtgggctctcgccaggcgcgcgcgcgcgcgcaccccccgcctggccgcctgctccagcaagggcgcc

SEQ ID NO: 19263 - DNA, 96 bp, Aspergillus viridinutans
  misc_feature: 614
ggcccagtgggctctcgccaggcgcgcgcgcgcgcgcaccccccgcctggccgcctgctccagcaagggcgccggccaactggtcacctccgcgcg

SEQ ID NO: 19264 - DNA, 96 bp, Aspergillus viridinutans
  misc_feature: 614
gccaggcgcgcgcgcgcgcgcaccccccgcctggccgcctgctccagcaagggcgccggccaactggtcacctccgcgcgcggggcccgctgccct

SEQ ID NO: 19265 - DNA, 96 bp, Aspergillus viridinutans
  misc_feature: 613
cctggccaacggcgccggcccagtgggctctcgccaggcgcgcgcgcgcgcgcaccccccgcctggccgcctgctccagcaagggcgccggccaac

SEQ ID NO: 19266 - DNA, 96 bp, Aspergillus viridinutans
  misc_feature: 612
cggtggccgtgcatgcggagatatatatgtatatatatatgtgtatatatgtgtatatgtatatacacccacacagatgcgcacccccatggacat

SEQ ID NO: 19267 - DNA, 96 bp, Aspergillus viridinutans
  misc_feature: 611
gggtacggcggtggcgcgccgacctatatcgatacagatgtccgtgtgtcgctatatatatctatatacgtatggcaccgatgggccgtgttgtgc

SEQ ID NO: 19268 - DNA, 96 bp, Aspergillus viridinutans
  misc_feature: 611
gccggtcctggccaacggcgccggcccagtgggctctcgccaggcgcgcgcgcgcgcgcaccccccgcctggccgcctgctccagcaagggcgccg

SEQ ID NO: 19269 - DNA, 96 bp, Aspergillus viridinutans
  misc_feature: 611
ctctcgccaggcgcgcgcgcgcgcgcaccccccgcctggccgcctgctccagcaagggcgccggccaactggtcacctccgcgcgcggggcccgct

SEQ ID NO: 19270 - DNA, 96 bp, Aspergillus viridinutans
  misc_feature: 608
gcgcgcgcgcggtcagctggtccctataacgggagcgcgcggccccctctgcctgcctgcttgcccaagggcgcccgccaactggtgacctttgcg

SEQ ID NO: 19271 - DNA, 96 bp, Aspergillus viridinutans
  misc_feature: 608
cgcaaggccggtcctggccaacggcgccggcccagtgggctctcgccaggcgcgcgcgcgcgcgcaccccccgcctggccgcctgctccagcaagg

SEQ ID NO: 19272 - DNA, 96 bp, Aspergillus viridinutans
  misc_feature: 606
gtcctggccaacggcgccggcccagtgggctctcgccaggcgcgcgcgcgcgcgcaccccccgcctggccgcctgctccagcaagggcgccggcca

SEQ ID NO: 19273 - DNA, 96 bp, Aspergillus viridinutans
  misc_feature: 605
tcgacacgtccaccaagcgattggcggcctccctaatgctcgcgcgcggctctctgctgcctacaaggcgcgcgcgcggtcagctggtccctataa

SEQ ID NO: 19274 - DNA, 96 bp, Aspergillus viridinutans
  misc_feature: 605
agttggcgggcgcccttgggcaagcaggcaggcagagggggccgcgcgctcccgttatagggaccagctgaccgcgcgcgcgccttgtaggcagca

SEQ ID NO: 19275 - DNA, 96 bp, Aspergillus viridinutans
  misc_feature: 604
ccggtggccgtgcatgcggagatatatatgtatatatatatgtgtatatatgtgtatatgtatatacacccacacagatgcgcacccccatggaca

SEQ ID NO: 19276 - DNA, 96 bp, Aspergillus viridinutans
  misc_feature: 604
tctcgccaggcgcgcgcgcgcgcgcaccccccgcctggccgcctgctccagcaagggcgccggccaactggtcacctccgcgcgcggggcccgctg

SEQ ID NO: 19277 - DNA, 96 bp, Aspergillus viridinutans
  misc_feature: 604
gttggcgggcgcccttgggcaagcaggcaggcagagggggccgcgcgctcccgttatagggaccagctgaccgcgcgcgcgccttgtaggcagcag

SEQ ID NO: 19278 - DNA, 96 bp, Aspergillus viridinutans
  misc_feature: 604
cagttggcgggcgcccttgggcaagcaggcaggcagagggggccgcgcgctcccgttatagggaccagctgaccgcgcgcgcgccttgtaggcagc

SEQ ID NO: 19279 - DNA, 96 bp, Aspergillus viridinutans
  misc_feature: 604
gcaaggccggtcctggccaacggcgccggcccagtgggctctcgccaggcgcgcgcgcgcgcgcaccccccgcctggccgcctgctccagcaaggg

SEQ ID NO: 19280 - DNA, 96 bp, Aspergillus viridinutans
  misc_feature: 603
gatggatgtggttcatggcccaccggtggccgtgcatgcggagatatatatgtatatatatatgtgtatatatgtgtatatgtatatacacccaca

SEQ ID NO: 19281 - DNA, 96 bp, Aspergillus viridinutans
  misc_feature: 602
gtgggtgtatatacatatacacatatatacacatatatatatacatatatatctccgcatgcacggccaccggtgggccatgaaccacatccatcg

SEQ ID NO: 19282 - DNA, 96 bp, Aspergillus viridinutans
  misc_feature: 602
ggtcctggccaacggcgccggcccagtgggctctcgccaggcgcgcgcgcgcgcgcaccccccgcctggccgcctgctccagcaagggcgccggcc

SEQ ID NO: 19283 - DNA, 96 bp, Aspergillus viridinutans
  misc_feature: 602
ggcgccggcccagtgggctctcgccaggcgcgcgcgcgcgcgcaccccccgcctggccgcctgctccagcaagggcgccggccaactggtcacctc

SEQ ID NO: 19284 - DNA, 96 bp, Aspergillus viridinutans
  misc_feature: 602
ccggtcctggccaacggcgccggcccagtgggctctcgccaggcgcgcgcgcgcgcgcaccccccgcctggccgcctgctccagcaagggcgccgg

SEQ ID NO: 19285 - DNA, 96 bp, Aspergillus viridinutans
  misc_feature: 601
tcctggccaacggcgccggcccagtgggctctcgccaggcgcgcgcgcgcgcgcaccccccgcctggccgcctgctccagcaagggcgccggccaa

SEQ ID NO: 19286 - DNA, 96 bp, Aspergillus viridinutans
  misc_feature: 601
tggatgtggttcatggcccaccggtggccgtgcatgcggagatatatatgtatatatatatgtgtatatatgtgtatatgtatatacacccacaca

SEQ ID NO: 19287 - DNA, 96 bp, Aspergillus viridinutans
  misc_feature: 601
accggtggccgtgcatgcggagatatatatgtatatatatatgtgtatatatgtgtatatgtatatacacccacacagatgcgcacccccatggac

SEQ ID NO: 19288 - DNA, 96 bp, Aspergillus viridinutans
  misc_feature: 600
cggtcctggccaacggcgccggcccagtgggctctcgccaggcgcgcgcgcgcgcgcaccccccgcctggccgcctgctccagcaagggcgccggc

SEQ ID NO: 19289 - DNA, 96 bp, Aspergillus viridinutans
  misc_feature: 599
gttatagggaccagctgaccgcgcgcgcgccttgtaggcagcagagagccgcgcgcgagcattagggaggccgccaatcgcttggtggacgtgtcg

SEQ ID NO: 19290 - DNA, 96 bp, Aspergillus viridinutans
  misc_feature: 598
cggcccagtgggctctcgccaggcgcgcgcgcgcgcgcaccccccgcctggccgcctgctccagcaagggcgccggccaactggtcacctccgcgc

SEQ ID NO: 19291 - DNA, 96 bp, Aspergillus viridinutans
  misc_feature: 598
cgggtacggcggtggcgcgccgacctatatcgatacagatgtccgtgtgtcgctatatatatctatatacgtatggcaccgatgggccgtgttgtg

SEQ ID NO: 19292 - DNA, 96 bp, Aspergillus viridinutans
  misc_feature: 597
ttggcgggcgcccttgggcaagcaggcaggcagagggggccgcgcgctcccgttatagggaccagctgaccgcgcgcgcgccttgtaggcagcaga

SEQ ID NO: 19293 - DNA, 96 bp, Aspergillus viridinutans
  misc_feature: 596
agttggccggcgcccttgctggagcaggcggccaggcggggggtgcgcgcgcgcgcgcgcctggcgagagcccactgggccggcgccgttggccag

SEQ ID NO: 19294 - DNA, 96 bp, Aspergillus viridinutans
  misc_feature: 595
ggatgtggttcatggcccaccggtggccgtgcatgcggagatatatatgtatatatatatgtgtatatatgtgtatatgtatatacacccacacag

SEQ ID NO: 19295 - DNA, 96 bp, Aspergillus viridinutans
  misc_feature: 595
cgcggggcccgctgccctccgtcgggtacggcggtggcgcgccgacctatatcgatacagatgtccgtgtgtcgctatatatatctatatacgtat

SEQ ID NO: 19296 - DNA, 96 bp, Aspergillus viridinutans
  misc_feature: 593
acggcgccggcccagtgggctctcgccaggcgcgcgcgcgcgcgcaccccccgcctggccgcctgctccagcaagggcgccggccaactggtcacc

SEQ ID NO: 19297 - DNA, 96 bp, Aspergillus viridinutans
  misc_feature: 591
ggcgggcgcccttgggcaagcaggcaggcagagggggccgcgcgctcccgttatagggaccagctgaccgcgcgcgcgccttgtaggcagcagaga

SEQ ID NO: 19298 - DNA, 96 bp, Aspergillus viridinutans
  misc_feature: 590
gcgccggcccagtgggctctcgccaggcgcgcgcgcgcgcgcaccccccgcctggccgcctgctccagcaagggcgccggccaactggtcacctcc

SEQ ID NO: 19299 - DNA, 96 bp, Aspergillus viridinutans
  misc_feature: 590
cggcgccggcccagtgggctctcgccaggcgcgcgcgcgcgcgcaccccccgcctggccgcctgctccagcaagggcgccggccaactggtcacct

SEQ ID NO: 19300 - DNA, 96 bp, Aspergillus viridinutans
  misc_feature: 589
cgcgcgcgcggtcagctggtccctataacgggagcgcgcggccccctctgcctgcctgcttgcccaagggcgcccgccaactggtgacctttgcgc

SEQ ID NO: 19301 - DNA, 96 bp, Aspergillus viridinutans
  misc_feature: 589
gacacgtccaccaagcgattggcggcctccctaatgctcgcgcgcggctctctgctgcctacaaggcgcgcgcgcggtcagctggtccctataacg

SEQ ID NO: 19302 - DNA, 96 bp, Aspergillus viridinutans
  misc_feature: 589
cgccggcccagtgggctctcgccaggcgcgcgcgcgcgcgcaccccccgcctggccgcctgctccagcaagggcgccggccaactggtcacctccg

SEQ ID NO: 19303 - DNA, 96 bp, Aspergillus viridinutans
  misc_feature: 588
gggcgcccttgggcaagcaggcaggcagagggggccgcgcgctcccgttatagggaccagctgaccgcgcgcgcgccttgtaggcagcagagagcc

SEQ ID NO: 19304 - DNA, 96 bp, Aspergillus viridinutans
  misc_feature: 588
cggtcagctggtccctataacgggagcgcgcggccccctctgcctgcctgcttgcccaagggcgcccgccaactggtgacctttgcgcgcgcgcgg

SEQ ID NO: 19305 - DNA, 96 bp, Aspergillus viridinutans
  misc_feature: 588
ccggcccagtgggctctcgccaggcgcgcgcgcgcgcgcaccccccgcctggccgcctgctccagcaagggcgccggccaactggtcacctccgcg

SEQ ID NO: 19306 - DNA, 96 bp, Aspergillus viridinutans
  misc_feature: 587
atggatgtggttcatggcccaccggtggccgtgcatgcggagatatatatgtatatatatatgtgtatatatgtgtatatgtatatacacccacac

SEQ ID NO: 19307 - DNA, 96 bp, Aspergillus viridinutans
  misc_feature: 587
aacggcgccggcccagtgggctctcgccaggcgcgcgcgcgcgcgcaccccccgcctggccgcctgctccagcaagggcgccggccaactggtcac

SEQ ID NO: 19308 - DNA, 96 bp, Aspergillus viridinutans
  misc_feature: 586
tggcgggcgcccttgggcaagcaggcaggcagagggggccgcgcgctcccgttatagggaccagctgaccgcgcgcgcgccttgtaggcagcagag

SEQ ID NO: 19309 - DNA, 96 bp, Aspergillus viridinutans
  misc_feature: 586
cagttggccggcgcccttgctggagcaggcggccaggcggggggtgcgcgcgcgcgcgcgcctggcgagagcccactgggccggcgccgttggcca

SEQ ID NO: 19310 - DNA, 96 bp, Aspergillus viridinutans
  misc_feature: 586
ccagttggccggcgcccttgctggagcaggcggccaggcggggggtgcgcgcgcgcgcgcgcctggcgagagcccactgggccggcgccgttggcc

SEQ ID NO: 19311 - DNA, 96 bp, Aspergillus viridinutans
  misc_feature: 586
gcggtcagctggtccctataacgggagcgcgcggccccctctgcctgcctgcttgcccaagggcgcccgccaactggtgacctttgcgcgcgcgcg

SEQ ID NO: 19312 - DNA, 96 bp, Aspergillus viridinutans
  misc_feature: 586
gccggcccagtgggctctcgccaggcgcgcgcgcgcgcgcaccccccgcctggccgcctgctccagcaagggcgccggccaactggtcacctccgc

SEQ ID NO: 19313 - DNA, 96 bp, Aspergillus viridinutans
  misc_feature: 585
caccggtggccgtgcatgcggagatatatatgtatatatatatgtgtatatatgtgtatatgtatatacacccacacagatgcgcacccccatgga

SEQ ID NO: 19314 - DNA, 96 bp, Aspergillus viridinutans
  misc_feature: 584
cgcggtcagctggtccctataacgggagcgcgcggccccctctgcctgcctgcttgcccaagggcgcccgccaactggtgacctttgcgcgcgcgc

SEQ ID NO: 19315 - DNA, 96 bp, Aspergillus viridinutans
  misc_feature: 584
acacgtccaccaagcgattggcggcctccctaatgctcgcgcgcggctctctgctgcctacaaggcgcgcgcgcggtcagctggtccctataacgg

SEQ ID NO: 19316 - DNA, 96 bp, Aspergillus viridinutans
  misc_feature: 583
cacgtccaccaagcgattggcggcctccctaatgctcgcgcgcggctctctgctgcctacaaggcgcgcgcgcggtcagctggtccctataacggg

SEQ ID NO: 19317 - DNA, 96 bp, Aspergillus viridinutans
  misc_feature: 582
gcgggcgcccttgggcaagcaggcaggcagagggggccgcgcgctcccgttatagggaccagctgaccgcgcgcgcgccttgtaggcagcagagag

SEQ ID NO: 19318 - DNA, 96 bp, Aspergillus viridinutans
  misc_feature: 581
gcgcgcgcggtcagctggtccctataacgggagcgcgcggccccctctgcctgcctgcttgcccaagggcgcccgccaactggtgacctttgcgcg

SEQ ID NO: 19319 - DNA, 96 bp, Aspergillus viridinutans
  misc_feature: 580
ggtcagctggtccctataacgggagcgcgcggccccctctgcctgcctgcttgcccaagggcgcccgccaactggtgacctttgcgcgcgcgcggc

SEQ ID NO: 19320 - DNA, 96 bp, Aspergillus viridinutans
  misc_feature: 580
gcgcgcggtcagctggtccctataacgggagcgcgcggccccctctgcctgcctgcttgcccaagggcgcccgccaactggtgacctttgcgcgcg

SEQ ID NO: 19321 - DNA, 96 bp, Aspergillus viridinutans
  misc_feature: 579
atgtggttcatggcccaccggtggccgtgcatgcggagatatatatgtatatatatatgtgtatatatgtgtatatgtatatacacccacacagat

SEQ ID NO: 19322 - DNA, 96 bp, Aspergillus viridinutans
  misc_feature: 578
gatgtggttcatggcccaccggtggccgtgcatgcggagatatatatgtatatatatatgtgtatatatgtgtatatgtatatacacccacacaga

SEQ ID NO: 19323 - DNA, 96 bp, Aspergillus viridinutans
  misc_feature: 577
tgaccagttggccggcgcccttgctggagcaggcggccaggcggggggtgcgcgcgcgcgcgcgcctggcgagagcccactgggccggcgccgttg

SEQ ID NO: 19324 - DNA, 96 bp, Aspergillus viridinutans
  misc_feature: 577
tcgggtacggcggtggcgcgccgacctatatcgatacagatgtccgtgtgtcgctatatatatctatatacgtatggcaccgatgggccgtgttgt

SEQ ID NO: 19325 - DNA, 96 bp, Aspergillus viridinutans
  misc_feature: 577
gtcagctggtccctataacgggagcgcgcggccccctctgcctgcctgcttgcccaagggcgcccgccaactggtgacctttgcgcgcgcgcggcc

SEQ ID NO: 19326 - DNA, 96 bp, Aspergillus viridinutans
  misc_feature: 577
cgcgcgcggtcagctggtccctataacgggagcgcgcggccccctctgcctgcctgcttgcccaagggcgcccgccaactggtgacctttgcgcgc

SEQ ID NO: 19327 - DNA, 96 bp, Aspergillus viridinutans
  misc_feature: 575
ttgggcaagcaggcaggcagagggggccgcgcgctcccgttatagggaccagctgaccgcgcgcgcgccttgtaggcagcagagagccgcgcgcga

SEQ ID NO: 19328 - DNA, 96 bp, Aspergillus viridinutans
  misc_feature: 575
acgtccaccaagcgattggcggcctccctaatgctcgcgcgcggctctctgctgcctacaaggcgcgcgcgcggtcagctggtccctataacggga

SEQ ID NO: 19329 - DNA, 96 bp, Aspergillus viridinutans
  misc_feature: 575
ggcgcccttgggcaagcaggcaggcagagggggccgcgcgctcccgttatagggaccagctgaccgcgcgcgcgccttgtaggcagcagagagccg

SEQ ID NO: 19330 - DNA, 96 bp, Aspergillus viridinutans
  misc_feature: 575
gcggggcccgctgccctccgtcgggtacggcggtggcgcgccgacctatatcgatacagatgtccgtgtgtcgctatatatatctatatacgtatg

SEQ ID NO: 19331 - DNA, 96 bp, Aspergillus viridinutans
  misc_feature: 575
gcgcggtcagctggtccctataacgggagcgcgcggccccctctgcctgcctgcttgcccaagggcgcccgccaactggtgacctttgcgcgcgcg

SEQ ID NO: 19332 - DNA, 96 bp, Aspergillus viridinutans
  misc_feature: 574
cgcgcggtcagctggtccctataacgggagcgcgcggccccctctgcctgcctgcttgcccaagggcgcccgccaactggtgacctttgcgcgcgc

SEQ ID NO: 19333 - DNA, 96 bp, Aspergillus viridinutans
  misc_feature: 574
accagttggccggcgcccttgctggagcaggcggccaggcggggggtgcgcgcgcgcgcgcgcctggcgagagcccactgggccggcgccgttggc

SEQ ID NO: 19334 - DNA, 96 bp, Aspergillus viridinutans
  misc_feature: 572
ggggcccgctgccctccgtcgggtacggcggtggcgcgccgacctatatcgatacagatgtccgtgtgtcgctatatatatctatatacgtatggc

SEQ ID NO: 19335 - DNA, 96 bp, Aspergillus viridinutans
  misc_feature: 572
gcccttgggcaagcaggcaggcagagggggccgcgcgctcccgttatagggaccagctgaccgcgcgcgcgccttgtaggcagcagagagccgcgc

SEQ ID NO: 19336 - DNA, 96 bp, Aspergillus viridinutans
  misc_feature: 571
gtcgggtacggcggtggcgcgccgacctatatcgatacagatgtccgtgtgtcgctatatatatctatatacgtatggcaccgatgggccgtgttg

SEQ ID NO: 19337 - DNA, 96 bp, Aspergillus viridinutans
  misc_feature: 570
gcgcccttgggcaagcaggcaggcagagggggccgcgcgctcccgttatagggaccagctgaccgcgcgcgcgccttgtaggcagcagagagccgc

SEQ ID NO: 19338 - DNA, 96 bp, Aspergillus viridinutans
  misc_feature: 570
gaccagttggccggcgcccttgctggagcaggcggccaggcggggggtgcgcgcgcgcgcgcgcctggcgagagcccactgggccggcgccgttgg

SEQ ID NO: 19339 - DNA, 96 bp, Aspergillus viridinutans
  misc_feature: 570
cgtccaccaagcgattggcggcctccctaatgctcgcgcgcggctctctgctgcctacaaggcgcgcgcgcggtcagctggtccctataacgggag

SEQ ID NO: 19340 - DNA, 96 bp, Aspergillus viridinutans
  misc_feature: 569
ccaccggtggccgtgcatgcggagatatatatgtatatatatatgtgtatatatgtgtatatgtatatacacccacacagatgcgcacccccatgg

SEQ ID NO: 19341 - DNA, 96 bp, Aspergillus viridinutans
  misc_feature: 568
gtccaccaagcgattggcggcctccctaatgctcgcgcgcggctctctgctgcctacaaggcgcgcgcgcggtcagctggtccctataacgggagc

SEQ ID NO: 19342 - DNA, 96 bp, Aspergillus viridinutans
  misc_feature: 568
cgggcgcccttgggcaagcaggcaggcagagggggccgcgcgctcccgttatagggaccagctgaccgcgcgcgcgccttgtaggcagcagagagc

SEQ ID NO: 19343 - DNA, 96 bp, Aspergillus viridinutans
  misc_feature: 568
ccttgggcaagcaggcaggcagagggggccgcgcgctcccgttatagggaccagctgaccgcgcgcgcgccttgtaggcagcagagagccgcgcgc

SEQ ID NO: 19344 - DNA, 96 bp, Aspergillus viridinutans
  misc_feature: 568
cttgggcaagcaggcaggcagagggggccgcgcgctcccgttatagggaccagctgaccgcgcgcgcgccttgtaggcagcagagagccgcgcgcg

SEQ ID NO: 19345 - DNA, 96 bp, Aspergillus viridinutans
  misc_feature: 567
gggcccgctgccctccgtcgggtacggcggtggcgcgccgacctatatcgatacagatgtccgtgtgtcgctatatatatctatatacgtatggca

SEQ ID NO: 19346 - DNA, 96 bp, Aspergillus viridinutans
  misc_feature: 567
cgtcgggtacggcggtggcgcgccgacctatatcgatacagatgtccgtgtgtcgctatatatatctatatacgtatggcaccgatgggccgtgtt

SEQ ID NO: 19347 - DNA, 96 bp, Aspergillus viridinutans
  misc_feature: 567
cccttgggcaagcaggcaggcagagggggccgcgcgctcccgttatagggaccagctgaccgcgcgcgcgccttgtaggcagcagagagccgcgcg

SEQ ID NO: 19348 - DNA, 96 bp, Aspergillus viridinutans
  misc_feature: 563
ggttcatggcccaccggtggccgtgcatgcggagatatatatgtatatatatatgtgtatatatgtgtatatgtatatacacccacacagatgcgc

SEQ ID NO: 19349 - DNA, 96 bp, Aspergillus viridinutans
  misc_feature: 563
agctggtccctataacgggagcgcgcggccccctctgcctgcctgcttgcccaagggcgcccgccaactggtgacctttgcgcgcgcgcggccgcc

SEQ ID NO: 19350 - DNA, 96 bp, Aspergillus viridinutans
  misc_feature: 562
cccaccggtggccgtgcatgcggagatatatatgtatatatatatgtgtatatatgtgtatatgtatatacacccacacagatgcgcacccccatg

SEQ ID NO: 19351 - DNA, 96 bp, Aspergillus viridinutans
  misc_feature: 561
cgcccttgggcaagcaggcaggcagagggggccgcgcgctcccgttatagggaccagctgaccgcgcgcgcgccttgtaggcagcagagagccgcg

SEQ ID NO: 19352 - DNA, 96 bp, Aspergillus viridinutans
  misc_feature: 560
tgtggttcatggcccaccggtggccgtgcatgcggagatatatatgtatatatatatgtgtatatatgtgtatatgtatatacacccacacagatg

SEQ ID NO: 19353 - DNA, 96 bp, Aspergillus viridinutans
  misc_feature: 560
gtggttcatggcccaccggtggccgtgcatgcggagatatatatgtatatatatatgtgtatatatgtgtatatgtatatacacccacacagatgc

SEQ ID NO: 19354 - DNA, 96 bp, Aspergillus viridinutans
  misc_feature: 560
ggcccgctgccctccgtcgggtacggcggtggcgcgccgacctatatcgatacagatgtccgtgtgtcgctatatatatctatatacgtatggcac

SEQ ID NO: 19355 - DNA, 96 bp, Aspergillus viridinutans
  misc_feature: 560
gggcaagcaggcaggcagagggggccgcgcgctcccgttatagggaccagctgaccgcgcgcgcgccttgtaggcagcagagagccgcgcgcgagc

SEQ ID NO: 19356 - DNA, 96 bp, Aspergillus viridinutans
  misc_feature: 560
cggggcccgctgccctccgtcgggtacggcggtggcgcgccgacctatatcgatacagatgtccgtgtgtcgctatatatatctatatacgtatgg

SEQ ID NO: 19357 - DNA, 96 bp, Aspergillus viridinutans
  misc_feature: 559
tggtccctataacgggagcgcgcggccccctctgcctgcctgcttgcccaagggcgcccgccaactggtgacctttgcgcgcgcgcggccgccgcc

SEQ ID NO: 19358 - DNA, 96 bp, Aspergillus viridinutans
  misc_feature: 559
cagctggtccctataacgggagcgcgcggccccctctgcctgcctgcttgcccaagggcgcccgccaactggtgacctttgcgcgcgcgcggccgc

SEQ ID NO: 19359 - DNA, 96 bp, Aspergillus viridinutans
  misc_feature: 558
tgggcaagcaggcaggcagagggggccgcgcgctcccgttatagggaccagctgaccgcgcgcgcgccttgtaggcagcagagagccgcgcgcgag

SEQ ID NO: 19360 - DNA, 96 bp, Aspergillus viridinutans
  misc_feature: 558
gctggtccctataacgggagcgcgcggccccctctgcctgcctgcttgcccaagggcgcccgccaactggtgacctttgcgcgcgcgcggccgccg

SEQ ID NO: 19361 - DNA, 96 bp, Aspergillus viridinutans
  misc_feature: 558
gcccaccggtggccgtgcatgcggagatatatatgtatatatatatgtgtatatatgtgtatatgtatatacacccacacagatgcgcacccccat

SEQ ID NO: 19362 - DNA, 96 bp, Aspergillus viridinutans
  misc_feature: 557
cagtcacaacgttccatctcgtatgccgtatcattgatcggaagagcacacgtctgaactccagtcacaacgttccatctcgtatgccgtatcatt

SEQ ID NO: 19363 - DNA, 96 bp, Aspergillus viridinutans
  misc_feature: 556
tccaccaagcgattggcggcctccctaatgctcgcgcgcggctctctgctgcctacaaggcgcgcgcgcggtcagctggtccctataacgggagcg

SEQ ID NO: 19364 - DNA, 96 bp, Aspergillus viridinutans
  misc_feature: 555
tcagctggtccctataacgggagcgcgcggccccctctgcctgcctgcttgcccaagggcgcccgccaactggtgacctttgcgcgcgcgcggccg

SEQ ID NO: 19365 - DNA, 96 bp, Aspergillus viridinutans
  misc_feature: 555
ctggtccctataacgggagcgcgcggccccctctgcctgcctgcttgcccaagggcgcccgccaactggtgacctttgcgcgcgcgcggccgccgc

SEQ ID NO: 19366 - DNA, 96 bp, Aspergillus viridinutans
  misc_feature: 554
tccgtcgggtacggcggtggcgcgccgacctatatcgatacagatgtccgtgtgtcgctatatatatctatatacgtatggcaccgatgggccgtg

SEQ ID NO: 19367 - DNA, 96 bp, Aspergillus viridinutans
  misc_feature: 554
ggtccctataacgggagcgcgcggccccctctgcctgcctgcttgcccaagggcgcccgccaactggtgacctttgcgcgcgcgcggccgccgcct

SEQ ID NO: 19368 - DNA, 96 bp, Aspergillus viridinutans
  misc_feature: 554
ctccgtcgggtacggcggtggcgcgccgacctatatcgatacagatgtccgtgtgtcgctatatatatctatatacgtatggcaccgatgggccgt

SEQ ID NO: 19369 - DNA, 96 bp, Aspergillus viridinutans
  misc_feature: 554
ccgtcgggtacggcggtggcgcgccgacctatatcgatacagatgtccgtgtgtcgctatatatatctatatacgtatggcaccgatgggccgtgt

SEQ ID NO: 19370 - DNA, 96 bp, Aspergillus viridinutans
  misc_feature: 553
gttcatggcccaccggtggccgtgcatgcggagatatatatgtatatatatatgtgtatatatgtgtatatgtatatacacccacacagatgcgca

SEQ ID NO: 19371 - DNA, 96 bp, Aspergillus viridinutans
  misc_feature: 552
tggttcatggcccaccggtggccgtgcatgcggagatatatatgtatatatatatgtgtatatatgtgtatatgtatatacacccacacagatgcg

SEQ ID NO: 19372 - DNA, 96 bp, Aspergillus viridinutans
  misc_feature: 551
gcgctcccgttatagggaccagctgaccgcgcgcgcgccttgtaggcagcagagagccgcgcgcgagcattagggaggccgccaatcgcttggtgg

SEQ ID NO: 19373 - DNA, 96 bp, Aspergillus viridinutans
  misc_feature: 549
ttcatggcccaccggtggccgtgcatgcggagatatatatgtatatatatatgtgtatatatgtgtatatgtatatacacccacacagatgcgcac

SEQ ID NO: 19374 - DNA, 96 bp, Aspergillus viridinutans
  misc_feature: 548
ggcccaccggtggccgtgcatgcggagatatatatgtatatatatatgtgtatatatgtgtatatgtatatacacccacacagatgcgcaccccca

SEQ ID NO: 19375 - DNA, 96 bp, Aspergillus viridinutans
  misc_feature: 547
cgcgctcccgttatagggaccagctgaccgcgcgcgcgccttgtaggcagcagagagccgcgcgcgagcattagggaggccgccaatcgcttggtg

SEQ ID NO: 19376 - DNA, 96 bp, Aspergillus viridinutans
  misc_feature: 546
ggcaagcaggcaggcagagggggccgcgcgctcccgttatagggaccagctgaccgcgcgcgcgccttgtaggcagcagagagccgcgcgcgagca

SEQ ID NO: 19377 - DNA, 96 bp, Aspergillus viridinutans
  misc_feature: 543
tggcccaccggtggccgtgcatgcggagatatatatgtatatatatatgtgtatatatgtgtatatgtatatacacccacacagatgcgcaccccc

SEQ ID NO: 19378 - DNA, 96 bp, Aspergillus viridinutans
  misc_feature: 543
catggcccaccggtggccgtgcatgcggagatatatatgtatatatatatgtgtatatatgtgtatatgtatatacacccacacagatgcgcaccc

SEQ ID NO: 19379 - DNA, 96 bp, Aspergillus viridinutans
  misc_feature: 542
tcatggcccaccggtggccgtgcatgcggagatatatatgtatatatatatgtgtatatatgtgtatatgtatatacacccacacagatgcgcacc

SEQ ID NO: 19380 - DNA, 96 bp, Aspergillus viridinutans
  misc_feature: 542
cccgctgccctccgtcgggtacggcggtggcgcgccgacctatatcgatacagatgtccgtgtgtcgctatatatatctatatacgtatggcaccg

SEQ ID NO: 19381 - DNA, 96 bp, Aspergillus viridinutans
  misc_feature: 541
gcccgctgccctccgtcgggtacggcggtggcgcgccgacctatatcgatacagatgtccgtgtgtcgctatatatatctatatacgtatggcacc

SEQ ID NO: 19382 - DNA, 96 bp, Aspergillus viridinutans
  misc_feature: 541
gcgcgctcccgttatagggaccagctgaccgcgcgcgcgccttgtaggcagcagagagccgcgcgcgagcattagggaggccgccaatcgcttggt

SEQ ID NO: 19383 - DNA, 96 bp, Aspergillus viridinutans
  misc_feature: 540
gagggggccgcgcgctcccgttatagggaccagctgaccgcgcgcgcgccttgtaggcagcagagagccgcgcgcgagcattagggaggccgccaa

SEQ ID NO: 19384 - DNA, 96 bp, Aspergillus viridinutans
  misc_feature: 540
gtccctataacgggagcgcgcggccccctctgcctgcctgcttgcccaagggcgcccgccaactggtgacctttgcgcgcgcgcggccgccgcctc

SEQ ID NO: 19385 - DNA, 96 bp, Aspergillus viridinutans
  misc_feature: 540
agggggccgcgcgctcccgttatagggaccagctgaccgcgcgcgcgccttgtaggcagcagagagccgcgcgcgagcattagggaggccgccaat

SEQ ID NO: 19386 - DNA, 96 bp, Aspergillus viridinutans
  misc_feature: 539
gggggccgcgcgctcccgttatagggaccagctgaccgcgcgcgcgccttgtaggcagcagagagccgcgcgcgagcattagggaggccgccaatc

SEQ ID NO: 19387 - DNA, 96 bp, Aspergillus viridinutans
  misc_feature: 538
gccgcgcgctcccgttatagggaccagctgaccgcgcgcgcgccttgtaggcagcagagagccgcgcgcgagcattagggaggccgccaatcgctt

SEQ ID NO: 19388 - DNA, 96 bp, Aspergillus viridinutans
  misc_feature: 537
atggcccaccggtggccgtgcatgcggagatatatatgtatatatatatgtgtatatatgtgtatatgtatatacacccacacagatgcgcacccc

SEQ ID NO: 19389 - DNA, 96 bp, Aspergillus viridinutans
  misc_feature: 537
cgcgcgctcccgttatagggaccagctgaccgcgcgcgcgccttgtaggcagcagagagccgcgcgcgagcattagggaggccgccaatcgcttgg

SEQ ID NO: 19390 - DNA, 96 bp, Aspergillus viridinutans
  misc_feature: 535
agagggggccgcgcgctcccgttatagggaccagctgaccgcgcgcgcgccttgtaggcagcagagagccgcgcgcgagcattagggaggccgcca

SEQ ID NO: 19391 - DNA, 96 bp, Aspergillus viridinutans
  misc_feature: 535
cctccgtcgggtacggcggtggcgcgccgacctatatcgatacagatgtccgtgtgtcgctatatatatctatatacgtatggcaccgatgggccg

SEQ ID NO: 19392 - DNA, 96 bp, Aspergillus viridinutans
  misc_feature: 534
ctgccctccgtcgggtacggcggtggcgcgccgacctatatcgatacagatgtccgtgtgtcgctatatatatctatatacgtatggcaccgatgg

SEQ ID NO: 19393 - DNA, 96 bp, Aspergillus viridinutans
  misc_feature: 534
cgctgccctccgtcgggtacggcggtggcgcgccgacctatatcgatacagatgtccgtgtgtcgctatatatatctatatacgtatggcaccgat

SEQ ID NO: 19394 - DNA, 96 bp, Aspergillus viridinutans
  misc_feature: 533
gcaagcaggcaggcagagggggccgcgcgctcccgttatagggaccagctgaccgcgcgcgcgccttgtaggcagcagagagccgcgcgcgagcat

SEQ ID NO: 19395 - DNA, 96 bp, Aspergillus viridinutans
  misc_feature: 531
ccgctgccctccgtcgggtacggcggtggcgcgccgacctatatcgatacagatgtccgtgtgtcgctatatatatctatatacgtatggcaccga

SEQ ID NO: 19396 - DNA, 96 bp, Aspergillus viridinutans
  misc_feature: 531
ggccgcgcgctcccgttatagggaccagctgaccgcgcgcgcgccttgtaggcagcagagagccgcgcgcgagcattagggaggccgccaatcgct

SEQ ID NO: 19397 - DNA, 96 bp, Aspergillus viridinutans
  misc_feature: 529
gggccgcgcgctcccgttatagggaccagctgaccgcgcgcgcgccttgtaggcagcagagagccgcgcgcgagcattagggaggccgccaatcgc

SEQ ID NO: 19398 - DNA, 96 bp, Aspergillus viridinutans
  misc_feature: 529
gctgccctccgtcgggtacggcggtggcgcgccgacctatatcgatacagatgtccgtgtgtcgctatatatatctatatacgtatggcaccgatg

SEQ ID NO: 19399 - DNA, 96 bp, Aspergillus viridinutans
  misc_feature: 529
ccgcgcgctcccgttatagggaccagctgaccgcgcgcgcgccttgtaggcagcagagagccgcgcgcgagcattagggaggccgccaatcgcttg

SEQ ID NO: 19400 - DNA, 96 bp, Aspergillus viridinutans
  misc_feature: 527
agcgcgcggccccctctgcctgcctgcttgcccaagggcgcccgccaactggtgacctttgcgcgcgcgcggccgccgcctcgaactcggccccaa

SEQ ID NO: 19401 - DNA, 96 bp, Aspergillus viridinutans
  misc_feature: 526
gagcgcgcggccccctctgcctgcctgcttgcccaagggcgcccgccaactggtgacctttgcgcgcgcgcggccgccgcctcgaactcggcccca

SEQ ID NO: 19402 - DNA, 96 bp, Aspergillus viridinutans
  misc_feature: 526
tgggcgcgcgcgcgcgcgaaggcgaccagttggccgggtccgttttggggccgagttcgaggcggcggccgcgcgcgcgcaaaggtcaccagttgg

SEQ ID NO: 19403 - DNA, 96 bp, Aspergillus viridinutans
  misc_feature: 526
ggggccgcgcgctcccgttatagggaccagctgaccgcgcgcgcgccttgtaggcagcagagagccgcgcgcgagcattagggaggccgccaatcg

SEQ ID NO: 19404 - DNA, 96 bp, Aspergillus viridinutans
  misc_feature: 525
aggcagagggggccgcgcgctcccgttatagggaccagctgaccgcgcgcgcgccttgtaggcagcagagagccgcgcgcgagcattagggaggcc

SEQ ID NO: 19405 - DNA, 96 bp, Aspergillus viridinutans
  misc_feature: 524
gcgcgcggccccctctgcctgcctgcttgcccaagggcgcccgccaactggtgacctttgcgcgcgcgcggccgccgcctcgaactcggccccaaa

SEQ ID NO: 19406 - DNA, 96 bp, Aspergillus viridinutans
  misc_feature: 524
ggagcgcgcggccccctctgcctgcctgcttgcccaagggcgcccgccaactggtgacctttgcgcgcgcgcggccgccgcctcgaactcggcccc

SEQ ID NO: 19407 - DNA, 96 bp, Aspergillus viridinutans
  misc_feature: 524
ccctccgtcgggtacggcggtggcgcgccgacctatatcgatacagatgtccgtgtgtcgctatatatatctatatacgtatggcaccgatgggcc

SEQ ID NO: 19408 - DNA, 96 bp, Aspergillus viridinutans
  misc_feature: 523
gggcgcgcgcgcgcgcgaaggcgaccagttggccgggtccgttttggggccgagttcgaggcggcggccgcgcgcgcgcaaaggtcaccagttggc

SEQ ID NO: 19409 - DNA, 96 bp, Aspergillus viridinutans
  misc_feature: 521
gccggtgggcgcgcgcgcgcgcgaaggcgaccagttggccgggtccgttttggggccgagttcgaggcggcggccgcgcgcgcgcaaaggtcacca

SEQ ID NO: 19410 - DNA, 96 bp, Aspergillus viridinutans
  misc_feature: 521
caggcaggcagagggggccgcgcgctcccgttatagggaccagctgaccgcgcgcgcgccttgtaggcagcagagagccgcgcgcgagcattaggg

SEQ ID NO: 19411 - DNA, 96 bp, Aspergillus viridinutans
  misc_feature: 520
tgccctccgtcgggtacggcggtggcgcgccgacctatatcgatacagatgtccgtgtgtcgctatatatatctatatacgtatggcaccgatggg

SEQ ID NO: 19412 - DNA, 96 bp, Aspergillus viridinutans
  misc_feature: 520
aagcaggcaggcagagggggccgcgcgctcccgttatagggaccagctgaccgcgcgcgcgccttgtaggcagcagagagccgcgcgcgagcatta

SEQ ID NO: 19413 - DNA, 96 bp, Aspergillus viridinutans
  misc_feature: 520
caagcaggcaggcagagggggccgcgcgctcccgttatagggaccagctgaccgcgcgcgcgccttgtaggcagcagagagccgcgcgcgagcatt

SEQ ID NO: 19414 - DNA, 96 bp, Aspergillus viridinutans
  misc_feature: 519
ggtgggcgcgcgcgcgcgcgaaggcgaccagttggccgggtccgttttggggccgagttcgaggcggcggccgcgcgcgcgcaaaggtcaccagtt

SEQ ID NO: 19415 - DNA, 96 bp, Aspergillus viridinutans
  misc_feature: 518
cgcgcggccccctctgcctgcctgcttgcccaagggcgcccgccaactggtgacctttgcgcgcgcgcggccgccgcctcgaactcggccccaaaa

SEQ ID NO: 19416 - DNA, 96 bp, Aspergillus viridinutans
  misc_feature: 518
ggcagagggggccgcgcgctcccgttatagggaccagctgaccgcgcgcgcgccttgtaggcagcagagagccgcgcgcgagcattagggaggccg

SEQ ID NO: 19417 - DNA, 96 bp, Aspergillus viridinutans
  misc_feature: 517
gtgggcgcgcgcgcgcgcgaaggcgaccagttggccgggtccgttttggggccgagttcgaggcggcggccgcgcgcgcgcaaaggtcaccagttg

SEQ ID NO: 19418 - DNA, 96 bp, Aspergillus viridinutans
  misc_feature: 517
gccctccgtcgggtacggcggtggcgcgccgacctatatcgatacagatgtccgtgtgtcgctatatatatctatatacgtatggcaccgatgggc

SEQ ID NO: 19419 - DNA, 96 bp, Aspergillus viridinutans
  misc_feature: 516
ccggtgggcgcgcgcgcgcgcgaaggcgaccagttggccgggtccgttttggggccgagttcgaggcggcggccgcgcgcgcgcaaaggtcaccag

SEQ ID NO: 19420 - DNA, 96 bp, Aspergillus viridinutans
  misc_feature: 515
aggcaggcagagggggccgcgcgctcccgttatagggaccagctgaccgcgcgcgcgccttgtaggcagcagagagccgcgcgcgagcattaggga

SEQ ID NO: 19421 - DNA, 96 bp, Aspergillus viridinutans
  misc_feature: 515
cagagggggccgcgcgctcccgttatagggaccagctgaccgcgcgcgcgccttgtaggcagcagagagccgcgcgcgagcattagggaggccgcc

SEQ ID NO: 19422 - DNA, 96 bp, Aspergillus viridinutans
  misc_feature: 512
gttttggggccgagttcgaggcggcggccgcgcgcgcgcaaaggtcaccagttggcgggcgcccttgggcaagcaggcaggcagagggggccgcgc

SEQ ID NO: 19423 - DNA, 96 bp, Aspergillus viridinutans
  misc_feature: 511
agcaggcaggcagagggggccgcgcgctcccgttatagggaccagctgaccgcgcgcgcgccttgtaggcagcagagagccgcgcgcgagcattag

SEQ ID NO: 19424 - DNA, 96 bp, Aspergillus viridinutans
  misc_feature: 510
gcaggcaggcagagggggccgcgcgctcccgttatagggaccagctgaccgcgcgcgcgccttgtaggcagcagagagccgcgcgcgagcattagg

SEQ ID NO: 19425 - DNA, 96 bp, Aspergillus viridinutans
  misc_feature: 509
gcagagggggccgcgcgctcccgttatagggaccagctgaccgcgcgcgcgccttgtaggcagcagagagccgcgcgcgagcattagggaggccgc

SEQ ID NO: 19426 - DNA, 96 bp, Aspergillus viridinutans
  misc_feature: 509
cggtgggcgcgcgcgcgcgcgaaggcgaccagttggccgggtccgttttggggccgagttcgaggcggcggccgcgcgcgcgcaaaggtcaccagt

SEQ ID NO: 19427 - DNA, 96 bp, Aspergillus viridinutans
  misc_feature: 508
tccctataacgggagcgcgcggccccctctgcctgcctgcttgcccaagggcgcccgccaactggtgacctttgcgcgcgcgcggccgccgcctcg

SEQ ID NO: 19428 - DNA, 96 bp, Aspergillus viridinutans
  misc_feature: 507
caggcagagggggccgcgcgctcccgttatagggaccagctgaccgcgcgcgcgccttgtaggcagcagagagccgcgcgcgagcattagggaggc

SEQ ID NO: 19429 - DNA, 96 bp, Aspergillus viridinutans
  misc_feature: 506
ggcgcgcgcgcgcgcgaaggcgaccagttggccgggtccgttttggggccgagttcgaggcggcggccgcgcgcgcgcaaaggtcaccagttggcg

SEQ ID NO: 19430 - DNA, 96 bp, Aspergillus viridinutans
  misc_feature: 505
gcgcgcgcgcgcgcgaaggcgaccagttggccgggtccgttttggggccgagttcgaggcggcggccgcgcgcgcgcaaaggtcaccagttggcgg

SEQ ID NO: 19431 - DNA, 96 bp, Aspergillus viridinutans
  misc_feature: 505
cgttttggggccgagttcgaggcggcggccgcgcgcgcgcaaaggtcaccagttggcgggcgcccttgggcaagcaggcaggcagagggggccgcg

SEQ ID NO: 19432 - DNA, 96 bp, Aspergillus viridinutans
  misc_feature: 505
cgcgcgcgcgcgcgaaggcgaccagttggccgggtccgttttggggccgagttcgaggcggcggccgcgcgcgcgcaaaggtcaccagttggcggg

SEQ ID NO: 19433 - DNA, 96 bp, Aspergillus viridinutans
  misc_feature: 504
ggcaggcagagggggccgcgcgctcccgttatagggaccagctgaccgcgcgcgcgccttgtaggcagcagagagccgcgcgcgagcattagggag

SEQ ID NO: 19434 - DNA, 96 bp, Aspergillus viridinutans
  misc_feature: 502
ctcttccgatcagatcggaagagcgtcgtgtagggaaagagtgtagtactccgtgtagatctcggtggtcgccgtatcattaaaaaaaaaaaaaaa

SEQ ID NO: 19435 - DNA, 96 bp, Aspergillus viridinutans
  misc_feature: 502
cgccggtgggcgcgcgcgcgcgcgaaggcgaccagttggccgggtccgttttggggccgagttcgaggcggcggccgcgcgcgcgcaaaggtcacc

SEQ ID NO: 19436 - DNA, 96 bp, Aspergillus viridinutans
  misc_feature: 501
gggagcgcgcggccccctctgcctgcctgcttgcccaagggcgcccgccaactggtgacctttgcgcgcgcgcggccgccgcctcgaactcggccc

SEQ ID NO: 19437 - DNA, 96 bp, Aspergillus viridinutans
  misc_feature: 500
gtgacctttgcgcgcgcgcggccgccgcctcgaactcggccccaaaacggacccggccaactggtcgccttcgcgcgcgcgcgcgcccaccggcgc

SEQ ID NO: 19438 - DNA, 96 bp, Aspergillus viridinutans
  misc_feature: 500
cctttgcgcgcgcgcggccgccgcctcgaactcggccccaaaacggacccggccaactggtcgccttcgcgcgcgcgcgcgcccaccggcgcctct

SEQ ID NO: 19439 - DNA, 96 bp, Aspergillus viridinutans
  misc_feature: 498
gcgcgcgcgcgcgaaggcgaccagttggccgggtccgttttggggccgagttcgaggcggcggccgcgcgcgcgcaaaggtcaccagttggcgggc

SEQ ID NO: 19440 - DNA, 96 bp, Aspergillus viridinutans
  misc_feature: 497
gcaggcagagggggccgcgcgctcccgttatagggaccagctgaccgcgcgcgcgccttgtaggcagcagagagccgcgcgcgagcattagggagg

SEQ ID NO: 19441 - DNA, 96 bp, Aspergillus viridinutans
  misc_feature: 497
acctttgcgcgcgcgcggccgccgcctcgaactcggccccaaaacggacccggccaactggtcgccttcgcgcgcgcgcgcgcccaccggcgcctc

SEQ ID NO: 19442 - DNA, 96 bp, Aspergillus viridinutans
  misc_feature: 496
tttgcgcgcgcgcggccgccgcctcgaactcggccccaaaacggacccggccaactggtcgccttcgcgcgcgcgcgcgcccaccggcgcctctcc

SEQ ID NO: 19443 - DNA, 96 bp, Aspergillus viridinutans
  misc_feature: 496
ccctataacgggagcgcgcggccccctctgcctgcctgcttgcccaagggcgcccgccaactggtgacctttgcgcgcgcgcggccgccgcctcga

SEQ ID NO: 19444 - DNA, 96 bp, Aspergillus viridinutans
  misc_feature: 495
ataacgggagcgcgcggccccctctgcctgcctgcttgcccaagggcgcccgccaactggtgacctttgcgcgcgcgcggccgccgcctcgaactc

SEQ ID NO: 19445 - DNA, 96 bp, Aspergillus viridinutans
  misc_feature: 493
ctttgcgcgcgcgcggccgccgcctcgaactcggccccaaaacggacccggccaactggtcgccttcgcgcgcgcgcgcgcccaccggcgcctctc

SEQ ID NO: 19446 - DNA, 96 bp, Aspergillus viridinutans
  misc_feature: 492
ttgcgcgcgcgcggccgccgcctcgaactcggccccaaaacggacccggccaactggtcgccttcgcgcgcgcgcgcgcccaccggcgcctctccc

SEQ ID NO: 19447 - DNA, 96 bp, Aspergillus viridinutans
  misc_feature: 492
cctataacgggagcgcgcggccccctctgcctgcctgcttgcccaagggcgcccgccaactggtgacctttgcgcgcgcgcggccgccgcctcgaa

SEQ ID NO: 19448 - DNA, 96 bp, Aspergillus viridinutans
  misc_feature: 492
ctataacgggagcgcgcggccccctctgcctgcctgcttgcccaagggcgcccgccaactggtgacctttgcgcgcgcgcggccgccgcctcgaac

SEQ ID NO: 19449 - DNA, 96 bp, Aspergillus viridinutans
  misc_feature: 492
ccgttttggggccgagttcgaggcggcggccgcgcgcgcgcaaaggtcaccagttggcgggcgcccttgggcaagcaggcaggcagagggggccgc

SEQ ID NO: 19450 - DNA, 96 bp, Aspergillus viridinutans
  misc_feature: 490
ttcggcgtggacgggtcgaggagccgcccgcgggagaggcgccggtgggcgcgcgcgcgcgcgaaggcgaccagttggccgggtccgttttggggc

SEQ ID NO: 19451 - DNA, 96 bp, Aspergillus viridinutans
  misc_feature: 489
tccgttttggggccgagttcgaggcggcggccgcgcgcgcgcaaaggtcaccagttggcgggcgcccttgggcaagcaggcaggcagagggggccg

SEQ ID NO: 19452 - DNA, 96 bp, Aspergillus viridinutans
  misc_feature: 489
gacctttgcgcgcgcgcggccgccgcctcgaactcggccccaaaacggacccggccaactggtcgccttcgcgcgcgcgcgcgcccaccggcgcct

SEQ ID NO: 19453 - DNA, 96 bp, Aspergillus viridinutans
  misc_feature: 488
tgacctttgcgcgcgcgcggccgccgcctcgaactcggccccaaaacggacccggccaactggtcgccttcgcgcgcgcgcgcgcccaccggcgcc

SEQ ID NO: 19454 - DNA, 96 bp, Aspergillus viridinutans
  misc_feature: 488
gcgcgcggccgccgcctcgaactcggccccaaaacggacccggccaactggtcgccttcgcgcgcgcgcgcgcccaccggcgcctctcccgcgggc

SEQ ID NO: 19455 - DNA, 96 bp, Aspergillus viridinutans
  misc_feature: 486
gcgcgcgcgaaggcgaccagttggccgggtccgttttggggccgagttcgaggcggcggccgcgcgcgcgcaaaggtcaccagttggcgggcgccc

SEQ ID NO: 19456 - DNA, 96 bp, Aspergillus viridinutans
  misc_feature: 486
cgggagcgcgcggccccctctgcctgcctgcttgcccaagggcgcccgccaactggtgacctttgcgcgcgcgcggccgccgcctcgaactcggcc

SEQ ID NO: 19457 - DNA, 96 bp, Aspergillus viridinutans
  misc_feature: 486
gcgcgcgcgcggccgccgcctcgaactcggccccaaaacggacccggccaactggtcgccttcgcgcgcgcgcgcgcccaccggcgcctctcccgc

SEQ ID NO: 19458 - DNA, 96 bp, Aspergillus viridinutans
  misc_feature: 485
tgcgcgcgcgcggccgccgcctcgaactcggccccaaaacggacccggccaactggtcgccttcgcgcgcgcgcgcgcccaccggcgcctctcccg

SEQ ID NO: 19459 - DNA, 96 bp, Aspergillus viridinutans
  misc_feature: 484
tataacgggagcgcgcggccccctctgcctgcctgcttgcccaagggcgcccgccaactggtgacctttgcgcgcgcgcggccgccgcctcgaact

SEQ ID NO: 19460 - DNA, 96 bp, Aspergillus viridinutans
  misc_feature: 484
gcgcgcgcgcgaaggcgaccagttggccgggtccgttttggggccgagttcgaggcggcggccgcgcgcgcgcaaaggtcaccagttggcgggcgc

SEQ ID NO: 19461 - DNA, 96 bp, Aspergillus viridinutans
  misc_feature: 482
tcggcgtggacgggtcgaggagccgcccgcgggagaggcgccggtgggcgcgcgcgcgcgcgaaggcgaccagttggccgggtccgttttggggcc

SEQ ID NO: 19462 - DNA, 96 bp, Aspergillus viridinutans
  misc_feature: 482
taacgggagcgcgcggccccctctgcctgcctgcttgcccaagggcgcccgccaactggtgacctttgcgcgcgcgcggccgccgcctcgaactcg

SEQ ID NO: 19463 - DNA, 96 bp, Aspergillus viridinutans
  misc_feature: 482
gttcggcgtggacgggtcgaggagccgcccgcgggagaggcgccggtgggcgcgcgcgcgcgcgaaggcgaccagttggccgggtccgttttgggg

SEQ ID NO: 19464 - DNA, 96 bp, Aspergillus viridinutans
  misc_feature: 482
ggttcggcgtggacgggtcgaggagccgcccgcgggagaggcgccggtgggcgcgcgcgcgcgcgaaggcgaccagttggccgggtccgttttggg

SEQ ID NO: 19465 - DNA, 96 bp, Aspergillus viridinutans
  misc_feature: 482
ggtccgttttggggccgagttcgaggcggcggccgcgcgcgcgcaaaggtcaccagttggcgggcgcccttgggcaagcaggcaggcagagggggc

SEQ ID NO: 19466 - DNA, 96 bp, Aspergillus viridinutans
  misc_feature: 482
cgcgcgcgcgaaggcgaccagttggccgggtccgttttggggccgagttcgaggcggcggccgcgcgcgcgcaaaggtcaccagttggcgggcgcc

SEQ ID NO: 19467 - DNA, 96 bp, Aspergillus viridinutans
  misc_feature: 481
gtccgttttggggccgagttcgaggcggcggccgcgcgcgcgcaaaggtcaccagttggcgggcgcccttgggcaagcaggcaggcagagggggcc

SEQ ID NO: 19468 - DNA, 96 bp, Aspergillus viridinutans
  misc_feature: 480
tctgaactccagtcacaacgttccatctcgtatgccgtagatcggaagagcacacgtctgaactccagtcacaacgttccatctcgtatgccgtag

SEQ ID NO: 19469 - DNA, 96 bp, Aspergillus viridinutans
  misc_feature: 480
gcggccgccgcctcgaactcggccccaaaacggacccggccaactggtcgccttcgcgcgcgcgcgcgcccaccggcgcctctcccgcgggcggct

SEQ ID NO: 19470 - DNA, 96 bp, Aspergillus viridinutans
  misc_feature: 480
cgcgcgcgcggccgccgcctcgaactcggccccaaaacggacccggccaactggtcgccttcgcgcgcgcgcgcgcccaccggcgcctctcccgcg

SEQ ID NO: 19471 - DNA, 96 bp, Aspergillus viridinutans
  misc_feature: 479
ggggttcggcgtggacgggtcgaggagccgcccgcgggagaggcgccggtgggcgcgcgcgcgcgcgaaggcgaccagttggccgggtccgttttg

SEQ ID NO: 19472 - DNA, 96 bp, Aspergillus viridinutans
  misc_feature: 478
agggaggcggtgggaggcgccgcgccggggggcggggttcggcgtggacgggtcgaggagccgcccgcgggagaggcgccggtgggcgcgcgcgcg

SEQ ID NO: 19473 - DNA, 96 bp, Aspergillus viridinutans
  misc_feature: 477
gggtccgttttggggccgagttcgaggcggcggccgcgcgcgcgcaaaggtcaccagttggcgggcgcccttgggcaagcaggcaggcagaggggg

SEQ ID NO: 19474 - DNA, 96 bp, Aspergillus viridinutans
  misc_feature: 477
gagggaggcggtgggaggcgccgcgccggggggcggggttcggcgtggacgggtcgaggagccgcccgcgggagaggcgccggtgggcgcgcgcgc

SEQ ID NO: 19475 - DNA, 96 bp, Aspergillus viridinutans
  misc_feature: 477
cgcgcgcgcgcgaaggcgaccagttggccgggtccgttttggggccgagttcgaggcggcggccgcgcgcgcgcaaaggtcaccagttggcgggcg

SEQ ID NO: 19476 - DNA, 96 bp, Aspergillus viridinutans
  misc_feature: 476
gggaggcgccgcgccggggggcggggttcggcgtggacgggtcgaggagccgcccgcgggagaggcgccggtgggcgcgcgcgcgcgcgaaggcga

SEQ ID NO: 19477 - DNA, 96 bp, Aspergillus viridinutans
  misc_feature: 476
gggttcggcgtggacgggtcgaggagccgcccgcgggagaggcgccggtgggcgcgcgcgcgcgcgaaggcgaccagttggccgggtccgttttgg

SEQ ID NO: 19478 - DNA, 96 bp, Aspergillus viridinutans
  misc_feature: 476
cgcggccgccgcctcgaactcggccccaaaacggacccggccaactggtcgccttcgcgcgcgcgcgcgcccaccggcgcctctcccgcgggcggc

SEQ ID NO: 19479 - DNA, 96 bp, Aspergillus viridinutans
  misc_feature: 476
cggcgtggacgggtcgaggagccgcccgcgggagaggcgccggtgggcgcgcgcgcgcgcgaaggcgaccagttggccgggtccgttttggggccg

SEQ ID NO: 19480 - DNA, 96 bp, Aspergillus viridinutans
  misc_feature: 475
tgggaggcgccgcgccggggggcggggttcggcgtggacgggtcgaggagccgcccgcgggagaggcgccggtgggcgcgcgcgcgcgcgaaggcg

SEQ ID NO: 19481 - DNA, 96 bp, Aspergillus viridinutans
  misc_feature: 475
ggaggcggtgggaggcgccgcgccggggggcggggttcggcgtggacgggtcgaggagccgcccgcgggagaggcgccggtgggcgcgcgcgcgcg

SEQ ID NO: 19482 - DNA, 96 bp, Aspergillus viridinutans
  misc_feature: 475
gcgcgcgcggccgccgcctcgaactcggccccaaaacggacccggccaactggtcgccttcgcgcgcgcgcgcgcccaccggcgcctctcccgcgg

SEQ ID NO: 19483 - DNA, 96 bp, Aspergillus viridinutans
  misc_feature: 475
gaggcggtgggaggcgccgcgccggggggcggggttcggcgtggacgggtcgaggagccgcccgcgggagaggcgccggtgggcgcgcgcgcgcgc

SEQ ID NO: 19484 - DNA, 96 bp, Aspergillus viridinutans
  misc_feature: 475
aggcggtgggaggcgccgcgccggggggcggggttcggcgtggacgggtcgaggagccgcccgcgggagaggcgccggtgggcgcgcgcgcgcgcg

SEQ ID NO: 19485 - DNA, 96 bp, Aspergillus viridinutans
  misc_feature: 473
gggaggcggtgggaggcgccgcgccggggggcggggttcggcgtggacgggtcgaggagccgcccgcgggagaggcgccggtgggcgcgcgcgcgc

SEQ ID NO: 19486 - DNA, 96 bp, Aspergillus viridinutans
  misc_feature: 473
acgggagcgcgcggccccctctgcctgcctgcttgcccaagggcgcccgccaactggtgacctttgcgcgcgcgcggccgccgcctcgaactcggc

SEQ ID NO: 19487 - DNA, 96 bp, Aspergillus viridinutans
  misc_feature: 472
tggacgggtcgaggagccgcccgcgggagaggcgccggtgggcgcgcgcgcgcgcgaaggcgaccagttggccgggtccgttttggggccgagttc

SEQ ID NO: 19488 - DNA, 96 bp, Aspergillus viridinutans
  misc_feature: 472
ggcgtggacgggtcgaggagccgcccgcgggagaggcgccggtgggcgcgcgcgcgcgcgaaggcgaccagttggccgggtccgttttggggccga

SEQ ID NO: 19489 - DNA, 96 bp, Aspergillus viridinutans
  misc_feature: 472
ggcggtgggaggcgccgcgccggggggcggggttcggcgtggacgggtcgaggagccgcccgcgggagaggcgccggtgggcgcgcgcgcgcgcga

SEQ ID NO: 19490 - DNA, 96 bp, Aspergillus viridinutans
  misc_feature: 472
aacgggagcgcgcggccccctctgcctgcctgcttgcccaagggcgcccgccaactggtgacctttgcgcgcgcgcggccgccgcctcgaactcgg

SEQ ID NO: 19491 - DNA, 96 bp, Aspergillus viridinutans
  misc_feature: 471
cgcgcggccgccgcctcgaactcggccccaaaacggacccggccaactggtcgccttcgcgcgcgcgcgcgcccaccggcgcctctcccgcgggcg

SEQ ID NO: 19492 - DNA, 96 bp, Aspergillus viridinutans
  misc_feature: 471
cgcgcgcggccgccgcctcgaactcggccccaaaacggacccggccaactggtcgccttcgcgcgcgcgcgcgcccaccggcgcctctcccgcggg

SEQ ID NO: 19493 - DNA, 96 bp, Aspergillus viridinutans
  misc_feature: 470
ctgaactccagtcacaacgttccatctcgtatgccgtagatcggaagagcacacgtctgaactccagtcacaacgttccatctcgtatgccgtaga

SEQ ID NO: 19494 - DNA, 96 bp, Aspergillus viridinutans
  misc_feature: 470
gccgccgcctcgaactcggccccaaaacggacccggccaactggtcgccttcgcgcgcgcgcgcgcccaccggcgcctctcccgcgggcggctcct

SEQ ID NO: 19495 - DNA, 96 bp, Aspergillus viridinutans
  misc_feature: 469
ccgccgcctcgaactcggccccaaaacggacccggccaactggtcgccttcgcgcgcgcgcgcgcccaccggcgcctctcccgcgggcggctcctc

SEQ ID NO: 19496 - DNA, 96 bp, Aspergillus viridinutans
  misc_feature: 469
agtcacaacgttccatctcgtatgccgtatcattgatcggaagagcacacgtctgaactccagtcacaacgttccatctcgtatgccgtatcattg

SEQ ID NO: 19497 - DNA, 96 bp, Aspergillus viridinutans
  misc_feature: 468
gtgggaggcgccgcgccggggggcggggttcggcgtggacgggtcgaggagccgcccgcgggagaggcgccggtgggcgcgcgcgcgcgcgaaggc

SEQ ID NO: 19498 - DNA, 96 bp, Aspergillus viridinutans
  misc_feature: 468
ggaggcgccgcgccggggggcggggttcggcgtggacgggtcgaggagccgcccgcgggagaggcgccggtgggcgcgcgcgcgcgcgaaggcgac

SEQ ID NO: 19499 - DNA, 96 bp, Aspergillus viridinutans
  misc_feature: 468
gcgcggccgccgcctcgaactcggccccaaaacggacccggccaactggtcgccttcgcgcgcgcgcgcgcccaccggcgcctctcccgcgggcgg

SEQ ID NO: 19500 - DNA, 96 bp, Aspergillus viridinutans
  misc_feature: 467
tcgaactcggccccaaaacggacccggccaactggtcgccttcgcgcgcgcgcgcgcccaccggcgcctctcccgcgggcggctcctcgacccgtc

SEQ ID NO: 19501 - DNA, 96 bp, Aspergillus viridinutans
  misc_feature: 467
ggccgccgcctcgaactcggccccaaaacggacccggccaactggtcgccttcgcgcgcgcgcgcgcccaccggcgcctctcccgcgggcggctcc

SEQ ID NO: 19502 - DNA, 96 bp, Aspergillus viridinutans
  misc_feature: 466
ggggggcggggttcggcgtggacgggtcgaggagccgcccgcgggagaggcgccggtgggcgcgcgcgcgcgcgaaggcgaccagttggccgggtc

SEQ ID NO: 19503 - DNA, 96 bp, Aspergillus viridinutans
  misc_feature: 465
gtcacaacgttccatctcgtatgccgtatcattgatcggaagagcacacgtctgaactccagtcacaacgttccatctcgtatgccgtatcattga

SEQ ID NO: 19504 - DNA, 96 bp, Aspergillus viridinutans
  misc_feature: 464
gcggtgggaggcgccgcgccggggggcggggttcggcgtggacgggtcgaggagccgcccgcgggagaggcgccggtgggcgcgcgcgcgcgcgaa

SEQ ID NO: 19505 - DNA, 96 bp, Aspergillus viridinutans
  misc_feature: 464
gtggacgggtcgaggagccgcccgcgggagaggcgccggtgggcgcgcgcgcgcgcgaaggcgaccagttggccgggtccgttttggggccgagtt

SEQ ID NO: 19506 - DNA, 96 bp, Aspergillus viridinutans
  misc_feature: 463
ggtgggaggcgccgcgccggggggcggggttcggcgtggacgggtcgaggagccgcccgcgggagaggcgccggtgggcgcgcgcgcgcgcgaagg

SEQ ID NO: 19507 - DNA, 96 bp, Aspergillus viridinutans
  misc_feature: 463
gggggcggggttcggcgtggacgggtcgaggagccgcccgcgggagaggcgccggtgggcgcgcgcgcgcgcgaaggcgaccagttggccgggtcc

SEQ ID NO: 19508 - DNA, 96 bp, Aspergillus viridinutans
  misc_feature: 463
ggacgggtcgaggagccgcccgcgggagaggcgccggtgggcgcgcgcgcgcgcgaaggcgaccagttggccgggtccgttttggggccgagttcg

SEQ ID NO: 19509 - DNA, 96 bp, Aspergillus viridinutans
  misc_feature: 462
cggccgccgcctcgaactcggccccaaaacggacccggccaactggtcgccttcgcgcgcgcgcgcgcccaccggcgcctctcccgcgggcggctc

SEQ ID NO: 19510 - DNA, 96 bp, Aspergillus viridinutans
  misc_feature: 461
gaggcgccgcgccggggggcggggttcggcgtggacgggtcgaggagccgcccgcgggagaggcgccggtgggcgcgcgcgcgcgcgaaggcgacc

SEQ ID NO: 19511 - DNA, 96 bp, Aspergillus viridinutans
  misc_feature: 460
gcgtggacgggtcgaggagccgcccgcgggagaggcgccggtgggcgcgcgcgcgcgcgaaggcgaccagttggccgggtccgttttggggccgag

SEQ ID NO: 19512 - DNA, 96 bp, Aspergillus viridinutans
  misc_feature: 459
tcacaacgttccatctcgtatgccgtatcattgatcggaagagcacacgtctgaactccagtcacaacgttccatctcgtatgccgtatcattgat

SEQ ID NO: 19513 - DNA, 96 bp, Aspergillus viridinutans
  misc_feature: 459
cgtggacgggtcgaggagccgcccgcgggagaggcgccggtgggcgcgcgcgcgcgcgaaggcgaccagttggccgggtccgttttggggccgagt

SEQ ID NO: 19514 - DNA, 96 bp, Aspergillus viridinutans
  misc_feature: 458
ggcgaccagttggccgggtccgttttggggccgagttcgaggcggcggccgcgcgcgcgcaaaggtcaccagttggcgggcgcccttgggcaagca

SEQ ID NO: 19515 - DNA, 96 bp, Aspergillus viridinutans
  misc_feature: 458
cggtgggaggcgccgcgccggggggcggggttcggcgtggacgggtcgaggagccgcccgcgggagaggcgccggtgggcgcgcgcgcgcgcgaag

SEQ ID NO: 19516 - DNA, 96 bp, Aspergillus viridinutans
  misc_feature: 457
gcgccggggggcggggttcggcgtggacgggtcgaggagccgcccgcgggagaggcgccggtgggcgcgcgcgcgcgcgaaggcgaccagttggcc

SEQ ID NO: 19517 - DNA, 96 bp, Aspergillus viridinutans
  misc_feature: 457
gaccagttggccgggtccgttttggggccgagttcgaggcggcggccgcgcgcgcgcaaaggtcaccagttggcgggcgcccttgggcaagcaggc

SEQ ID NO: 19518 - DNA, 96 bp, Aspergillus viridinutans
  misc_feature: 456
ggagggaggcggtgggaggcgccgcgccggggggcggggttcggcgtggacgggtcgaggagccgcccgcgggagaggcgccggtgggcgcgcgcg

SEQ ID NO: 19519 - DNA, 96 bp, Aspergillus viridinutans
  misc_feature: 456
cgcgcgcgaaggcgaccagttggccgggtccgttttggggccgagttcgaggcggcggccgcgcgcgcgcaaaggtcaccagttggcgggcgccct

SEQ ID NO: 19520 - DNA, 96 bp, Aspergillus viridinutans
  misc_feature: 455
aggcgaccagttggccgggtccgttttggggccgagttcgaggcggcggccgcgcgcgcgcaaaggtcaccagttggcgggcgcccttgggcaagc

SEQ ID NO: 19521 - DNA, 96 bp, Aspergillus viridinutans
  misc_feature: 455
cgcgccggggggcggggttcggcgtggacgggtcgaggagccgcccgcgggagaggcgccggtgggcgcgcgcgcgcgcgaaggcgaccagttggc

SEQ ID NO: 19522 - DNA, 96 bp, Aspergillus viridinutans
  misc_feature: 455
ccggggggcggggttcggcgtggacgggtcgaggagccgcccgcgggagaggcgccggtgggcgcgcgcgcgcgcgaaggcgaccagttggccggg

SEQ ID NO: 19523 - DNA, 96 bp, Aspergillus viridinutans
  misc_feature: 454
accagttggccgggtccgttttggggccgagttcgaggcggcggccgcgcgcgcgcaaaggtcaccagttggcgggcgcccttgggcaagcaggca

SEQ ID NO: 19524 - DNA, 96 bp, Aspergillus viridinutans
  misc_feature: 454
cgggtccgttttggggccgagttcgaggcggcggccgcgcgcgcgcaaaggtcaccagttggcgggcgcccttgggcaagcaggcaggcagagggg

SEQ ID NO: 19525 - DNA, 96 bp, Aspergillus viridinutans
  misc_feature: 454
cgccgcctcgaactcggccccaaaacggacccggccaactggtcgccttcgcgcgcgcgcgcgcccaccggcgcctctcccgcgggcggctcctcg

SEQ ID NO: 19526 - DNA, 96 bp, Aspergillus viridinutans
  misc_feature: 453
ggggcggggttcggcgtggacgggtcgaggagccgcccgcgggagaggcgccggtgggcgcgcgcgcgcgcgaaggcgaccagttggccgggtccg

SEQ ID NO: 19527 - DNA, 96 bp, Aspergillus viridinutans
  misc_feature: 453
gcgcgcgaaggcgaccagttggccgggtccgttttggggccgagttcgaggcggcggccgcgcgcgcgcaaaggtcaccagttggcgggcgccctt

SEQ ID NO: 19528 - DNA, 96 bp, Aspergillus viridinutans
  misc_feature: 453
agttggccgggtccgttttggggccgagttcgaggcggcggccgcgcgcgcgcaaaggtcaccagttggcgggcgcccttgggcaagcaggcaggc

SEQ ID NO: 19529 - DNA, 96 bp, Aspergillus viridinutans
  misc_feature: 452
gcgaccagttggccgggtccgttttggggccgagttcgaggcggcggccgcgcgcgcgcaaaggtcaccagttggcgggcgcccttgggcaagcag

SEQ ID NO: 19530 - DNA, 96 bp, Aspergillus viridinutans
  misc_feature: 452
aaggcgaccagttggccgggtccgttttggggccgagttcgaggcggcggccgcgcgcgcgcaaaggtcaccagttggcgggcgcccttgggcaag

SEQ ID NO: 19531 - DNA, 96 bp, Aspergillus viridinutans
  misc_feature: 452
ctcgaactcggccccaaaacggacccggccaactggtcgccttcgcgcgcgcgcgcgcccaccggcgcctctcccgcgggcggctcctcgacccgt

SEQ ID NO: 19532 - DNA, 96 bp, Aspergillus viridinutans
  misc_feature: 452
cgccgcgccggggggcggggttcggcgtggacgggtcgaggagccgcccgcgggagaggcgccggtgggcgcgcgcgcgcgcgaaggcgaccagtt

SEQ ID NO: 19533 - DNA, 96 bp, Aspergillus viridinutans
  misc_feature: 451
aggcgccgcgccggggggcggggttcggcgtggacgggtcgaggagccgcccgcgggagaggcgccggtgggcgcgcgcgcgcgcgaaggcgacca

SEQ ID NO: 19534 - DNA, 96 bp, Aspergillus viridinutans
  misc_feature: 451
tgaactccagtcacaacgttccatctcgtatgccgtagatcggaagagcacacgtctgaactccagtcacaacgttccatctcgtatgccgtagat

SEQ ID NO: 19535 - DNA, 96 bp, Aspergillus viridinutans
  misc_feature: 451
gccgcctcgaactcggccccaaaacggacccggccaactggtcgccttcgcgcgcgcgcgcgcccaccggcgcctctcccgcgggcggctcctcga

SEQ ID NO: 19536 - DNA, 96 bp, Aspergillus viridinutans
  misc_feature: 451
ggcgccgcgccggggggcggggttcggcgtggacgggtcgaggagccgcccgcgggagaggcgccggtgggcgcgcgcgcgcgcgaaggcgaccag

SEQ ID NO: 19537 - DNA, 96 bp, Aspergillus viridinutans
  misc_feature: 451
gccggggggcggggttcggcgtggacgggtcgaggagccgcccgcgggagaggcgccggtgggcgcgcgcgcgcgcgaaggcgaccagttggccgg

SEQ ID NO: 19538 - DNA, 96 bp, Aspergillus viridinutans
  misc_feature: 451
gaactccagtcacaacgttccatctcgtatgccgtagatcggaagagcacacgtctgaactccagtcacaacgttccatctcgtatgccgtagatc

SEQ ID NO: 19539 - DNA, 96 bp, Aspergillus viridinutans
  misc_feature: 451
aactccagtcacaacgttccatctcgtatgccgtagatcggaagagcacacgtctgaactccagtcacaacgttccatctcgtatgccgtagatcg

SEQ ID NO: 19540 - DNA, 96 bp, Aspergillus viridinutans
  misc_feature: 451
cgaccagttggccgggtccgttttggggccgagttcgaggcggcggccgcgcgcgcgcaaaggtcaccagttggcgggcgcccttgggcaagcagg

SEQ ID NO: 19541 - DNA, 96 bp, Aspergillus viridinutans
  misc_feature: 451
ccgcgccggggggcggggttcggcgtggacgggtcgaggagccgcccgcgggagaggcgccggtgggcgcgcgcgcgcgcgaaggcgaccagttgg

SEQ ID NO: 19542 - DNA, 96 bp, Aspergillus viridinutans
  misc_feature: 450
gccgcgccggggggcggggttcggcgtggacgggtcgaggagccgcccgcgggagaggcgccggtgggcgcgcgcgcgcgcgaaggcgaccagttg

SEQ ID NO: 19543 - DNA, 96 bp, Aspergillus viridinutans
  misc_feature: 450
ccgggtccgttttggggccgagttcgaggcggcggccgcgcgcgcgcaaaggtcaccagttggcgggcgcccttgggcaagcaggcaggcagaggg

SEQ ID NO: 19544 - DNA, 96 bp, Aspergillus viridinutans
  misc_feature: 449
gcctcgaactcggccccaaaacggacccggccaactggtcgccttcgcgcgcgcgcgcgcccaccggcgcctctcccgcgggcggctcctcgaccc

SEQ ID NO: 19545 - DNA, 96 bp, Aspergillus viridinutans
  misc_feature: 449
cgccggggggcggggttcggcgtggacgggtcgaggagccgcccgcgggagaggcgccggtgggcgcgcgcgcgcgcgaaggcgaccagttggccg

SEQ ID NO: 19546 - DNA, 96 bp, Aspergillus viridinutans
  misc_feature: 448
gggagggaggcggtgggaggcgccgcgccggggggcggggttcggcgtggacgggtcgaggagccgcccgcgggagaggcgccggtgggcgcgcgc

SEQ ID NO: 19547 - DNA, 96 bp, Aspergillus viridinutans
  misc_feature: 448
gggaggaggaggggagggaggcggtgggaggcgccgcgccggggggcggggttcggcgtggacgggtcgaggagccgcccgcgggagaggcgccgg

SEQ ID NO: 19548 - DNA, 96 bp, Aspergillus viridinutans
  misc_feature: 448
gagggaggaggaggggagggaggcggtgggaggcgccgcgccggggggcggggttcggcgtggacgggtcgaggagccgcccgcgggagaggcgcc

SEQ ID NO: 19549 - DNA, 96 bp, Aspergillus viridinutans
  misc_feature: 448
cctcgaactcggccccaaaacggacccggccaactggtcgccttcgcgcgcgcgcgcgcccaccggcgcctctcccgcgggcggctcctcgacccg

SEQ ID NO: 19550 - DNA, 96 bp, Aspergillus viridinutans
  misc_feature: 448
agggaggaggaggggagggaggcggtgggaggcgccgcgccggggggcggggttcggcgtggacgggtcgaggagccgcccgcgggagaggcgccg

SEQ ID NO: 19551 - DNA, 96 bp, Aspergillus viridinutans
  misc_feature: 447
cggggggcggggttcggcgtggacgggtcgaggagccgcccgcgggagaggcgccggtgggcgcgcgcgcgcgcgaaggcgaccagttggccgggt

SEQ ID NO: 19552 - DNA, 96 bp, Aspergillus viridinutans
  misc_feature: 447
cgcgcgaaggcgaccagttggccgggtccgttttggggccgagttcgaggcggcggccgcgcgcgcgcaaaggtcaccagttggcgggcgcccttg

SEQ ID NO: 19553 - DNA, 96 bp, Aspergillus viridinutans
  misc_feature: 447
cagttggccgggtccgttttggggccgagttcgaggcggcggccgcgcgcgcgcaaaggtcaccagttggcgggcgcccttgggcaagcaggcagg

SEQ ID NO: 19554 - DNA, 96 bp, Aspergillus viridinutans
  misc_feature: 445
ccgcctcgaactcggccccaaaacggacccggccaactggtcgccttcgcgcgcgcgcgcgcccaccggcgcctctcccgcgggcggctcctcgac

SEQ ID NO: 19555 - DNA, 96 bp, Aspergillus viridinutans
  misc_feature: 444
gttggccgggtccgttttggggccgagttcgaggcggcggccgcgcgcgcgcaaaggtcaccagttggcgggcgcccttgggcaagcaggcaggca

SEQ ID NO: 19556 - DNA, 96 bp, Aspergillus viridinutans
  misc_feature: 444
cgcctcgaactcggccccaaaacggacccggccaactggtcgccttcgcgcgcgcgcgcgcccaccggcgcctctcccgcgggcggctcctcgacc

SEQ ID NO: 19557 - DNA, 96 bp, Aspergillus viridinutans
  misc_feature: 444
agagggaggaggaggggagggaggcggtgggaggcgccgcgccggggggcggggttcggcgtggacgggtcgaggagccgcccgcgggagaggcgc

SEQ ID NO: 19558 - DNA, 96 bp, Aspergillus viridinutans
  misc_feature: 443
ccagttggccgggtccgttttggggccgagttcgaggcggcggccgcgcgcgcgcaaaggtcaccagttggcgggcgcccttgggcaagcaggcag

SEQ ID NO: 19559 - DNA, 96 bp, Aspergillus viridinutans
  misc_feature: 442
ggaggaggaggggagggaggcggtgggaggcgccgcgccggggggcggggttcggcgtggacgggtcgaggagccgcccgcgggagaggcgccggt

SEQ ID NO: 19560 - DNA, 96 bp, Aspergillus viridinutans
  misc_feature: 442
gcgccgcgccggggggcggggttcggcgtggacgggtcgaggagccgcccgcgggagaggcgccggtgggcgcgcgcgcgcgcgaaggcgaccagt

SEQ ID NO: 19561 - DNA, 96 bp, Aspergillus viridinutans
  misc_feature: 441
ggggagggaggcggtgggaggcgccgcgccggggggcggggttcggcgtggacgggtcgaggagccgcccgcgggagaggcgccggtgggcgcgcg

SEQ ID NO: 19562 - DNA, 96 bp, Aspergillus viridinutans
  misc_feature: 440
gaaggcgaccagttggccgggtccgttttggggccgagttcgaggcggcggccgcgcgcgcgcaaaggtcaccagttggcgggcgcccttgggcaa

SEQ ID NO: 19563 - DNA, 96 bp, Aspergillus viridinutans
  misc_feature: 440
gggaagggcaagggaaagggagagggaggaggaggggagggaggcggtgggaggcgccgcgccggggggcggggttcggcgtggacgggtcgagga

SEQ ID NO: 19564 - DNA, 96 bp, Aspergillus viridinutans
  misc_feature: 440
ggaagggcaagggaaagggagagggaggaggaggggagggaggcggtgggaggcgccgcgccggggggcggggttcggcgtggacgggtcgaggag

SEQ ID NO: 19565 - DNA, 96 bp, Aspergillus viridinutans
  misc_feature: 440
gagagggaggaggaggggagggaggcggtgggaggcgccgcgccggggggcggggttcggcgtggacgggtcgaggagccgcccgcgggagaggcg

SEQ ID NO: 19566 - DNA, 96 bp, Aspergillus viridinutans
  misc_feature: 439
ttggccgggtccgttttggggccgagttcgaggcggcggccgcgcgcgcgcaaaggtcaccagttggcgggcgcccttgggcaagcaggcaggcag

SEQ ID NO: 19567 - DNA, 96 bp, Aspergillus viridinutans
  misc_feature: 439
agggagagggaggaggaggggagggaggcggtgggaggcgccgcgccggggggcggggttcggcgtggacgggtcgaggagccgcccgcgggagag

SEQ ID NO: 19568 - DNA, 96 bp, Aspergillus viridinutans
  misc_feature: 438
gggagagggaggaggaggggagggaggcggtgggaggcgccgcgccggggggcggggttcggcgtggacgggtcgaggagccgcccgcgggagagg

SEQ ID NO: 19569 - DNA, 96 bp, Aspergillus viridinutans
  misc_feature: 438
ggcggggttcggcgtggacgggtcgaggagccgcccgcgggagaggcgccggtgggcgcgcgcgcgcgcgaaggcgaccagttggccgggtccgtt

SEQ ID NO: 19570 - DNA, 96 bp, Aspergillus viridinutans
  misc_feature: 438
ggccgggtccgttttggggccgagttcgaggcggcggccgcgcgcgcgcaaaggtcaccagttggcgggcgcccttgggcaagcaggcaggcagag

SEQ ID NO: 19571 - DNA, 96 bp, Aspergillus viridinutans
  misc_feature: 438
gccgggtccgttttggggccgagttcgaggcggcggccgcgcgcgcgcaaaggtcaccagttggcgggcgcccttgggcaagcaggcaggcagagg

SEQ ID NO: 19572 - DNA, 96 bp, Aspergillus viridinutans
  misc_feature: 437
gggcggggttcggcgtggacgggtcgaggagccgcccgcgggagaggcgccggtgggcgcgcgcgcgcgcgaaggcgaccagttggccgggtccgt

SEQ ID NO: 19573 - DNA, 96 bp, Aspergillus viridinutans
  misc_feature: 437
aagggaaagggagagggaggaggaggggagggaggcggtgggaggcgccgcgccggggggcggggttcggcgtggacgggtcgaggagccgcccgc

SEQ ID NO: 19574 - DNA, 96 bp, Aspergillus viridinutans
  misc_feature: 437
gcgcgaaggcgaccagttggccgggtccgttttggggccgagttcgaggcggcggccgcgcgcgcgcaaaggtcaccagttggcgggcgcccttgg

SEQ ID NO: 19575 - DNA, 96 bp, Aspergillus viridinutans
  misc_feature: 437
gaggaggaggggagggaggcggtgggaggcgccgcgccggggggcggggttcggcgtggacgggtcgaggagccgcccgcgggagaggcgccggtg

SEQ ID NO: 19576 - DNA, 96 bp, Aspergillus viridinutans
  misc_feature: 436
aggggagggaggcggtgggaggcgccgcgccggggggcggggttcggcgtggacgggtcgaggagccgcccgcgggagaggcgccggtgggcgcgc

SEQ ID NO: 19577 - DNA, 96 bp, Aspergillus viridinutans
  misc_feature: 435
gaagggcaagggaaagggagagggaggaggaggggagggaggcggtgggaggcgccgcgccggggggcggggttcggcgtggacgggtcgaggagc

SEQ ID NO: 19578 - DNA, 96 bp, Aspergillus viridinutans
  misc_feature: 435
gaggggagggaggcggtgggaggcgccgcgccggggggcggggttcggcgtggacgggtcgaggagccgcccgcgggagaggcgccggtgggcgcg

SEQ ID NO: 19579 - DNA, 96 bp, Aspergillus viridinutans
  misc_feature: 435
agggaaagggagagggaggaggaggggagggaggcggtgggaggcgccgcgccggggggcggggttcggcgtggacgggtcgaggagccgcccgcg

SEQ ID NO: 19580 - DNA, 96 bp, Aspergillus viridinutans
  misc_feature: 435
actccagtcacaacgttccatctcgtatgccgtagatcggaagagcacacgtctgaactccagtcacaacgttccatctcgtatgccgtagatcgg

SEQ ID NO: 19581 - DNA, 96 bp, Aspergillus viridinutans
  misc_feature: 434
cgaaggcgaccagttggccgggtccgttttggggccgagttcgaggcggcggccgcgcgcgcgcaaaggtcaccagttggcgggcgcccttgggca

SEQ ID NO: 19582 - DNA, 96 bp, Aspergillus viridinutans
  misc_feature: 434
ggaggggagggaggcggtgggaggcgccgcgccggggggcggggttcggcgtggacgggtcgaggagccgcccgcgggagaggcgccggtgggcgc

SEQ ID NO: 19583 - DNA, 96 bp, Aspergillus viridinutans
  misc_feature: 433
ggagagggaggaggaggggagggaggcggtgggaggcgccgcgccggggggcggggttcggcgtggacgggtcgaggagccgcccgcgggagaggc

SEQ ID NO: 19584 - DNA, 96 bp, Aspergillus viridinutans
  misc_feature: 432
gggaaagggagagggaggaggaggggagggaggcggtgggaggcgccgcgccggggggcggggttcggcgtggacgggtcgaggagccgcccgcgg

SEQ ID NO: 19585 - DNA, 96 bp, Aspergillus viridinutans
  misc_feature: 432
aggggaagggcaagggaaagggagagggaggaggaggggagggaggcggtgggaggcgccgcgccggggggcggggttcggcgtggacgggtcgag

SEQ ID NO: 19586 - DNA, 96 bp, Aspergillus viridinutans
  misc_feature: 431
tggccgggtccgttttggggccgagttcgaggcggcggccgcgcgcgcgcaaaggtcaccagttggcgggcgcccttgggcaagcaggcaggcaga

SEQ ID NO: 19587 - DNA, 96 bp, Aspergillus viridinutans
  misc_feature: 431
ggggaagggcaagggaaagggagagggaggaggaggggagggaggcggtgggaggcgccgcgccggggggcggggttcggcgtggacgggtcgagg

SEQ ID NO: 19588 - DNA, 96 bp, Aspergillus viridinutans
  misc_feature: 431
ggaggaggggagggaggcggtgggaggcgccgcgccggggggcggggttcggcgtggacgggtcgaggagccgcccgcgggagaggcgccggtggg

SEQ ID NO: 19589 - DNA, 96 bp, Aspergillus viridinutans
  misc_feature: 431
gcggggttcggcgtggacgggtcgaggagccgcccgcgggagaggcgccggtgggcgcgcgcgcgcgcgaaggcgaccagttggccgggtccgttt

SEQ ID NO: 19590 - DNA, 96 bp, Aspergillus viridinutans
  misc_feature: 431
gcgaaggcgaccagttggccgggtccgttttggggccgagttcgaggcggcggccgcgcgcgcgcaaaggtcaccagttggcgggcgcccttgggc

SEQ ID NO: 19591 - DNA, 96 bp, Aspergillus viridinutans
  misc_feature: 430
aagggcaagggaaagggagagggaggaggaggggagggaggcggtgggaggcgccgcgccggggggcggggttcggcgtggacgggtcgaggagcc

SEQ ID NO: 19592 - DNA, 96 bp, Aspergillus viridinutans
  misc_feature: 429
ctccagtcacaacgttccatctcgtatgccgtagatcggaagagcacacgtctgaactccagtcacaacgttccatctcgtatgccgtagatcgga

SEQ ID NO: 19593 - DNA, 96 bp, Aspergillus viridinutans
  misc_feature: 429
cgcgaaggcgaccagttggccgggtccgttttggggccgagttcgaggcggcggccgcgcgcgcgcaaaggtcaccagttggcgggcgcccttggg

SEQ ID NO: 19594 - DNA, 96 bp, Aspergillus viridinutans
  misc_feature: 429
aggaggggagggaggcggtgggaggcgccgcgccggggggcggggttcggcgtggacgggtcgaggagccgcccgcgggagaggcgccggtgggcg

SEQ ID NO: 19595 - DNA, 96 bp, Aspergillus viridinutans
  misc_feature: 428
aagggagagggaggaggaggggagggaggcggtgggaggcgccgcgccggggggcggggttcggcgtggacgggtcgaggagccgcccgcgggaga

SEQ ID NO: 19596 - DNA, 96 bp, Aspergillus viridinutans
  misc_feature: 428
caagggaaagggagagggaggaggaggggagggaggcggtgggaggcgccgcgccggggggcggggttcggcgtggacgggtcgaggagccgcccg

SEQ ID NO: 19597 - DNA, 96 bp, Aspergillus viridinutans
  misc_feature: 427
gaggaggggagggaggcggtgggaggcgccgcgccggggggcggggttcggcgtggacgggtcgaggagccgcccgcgggagaggcgccggtgggc

SEQ ID NO: 19598 - DNA, 96 bp, Aspergillus viridinutans
  misc_feature: 425
gaggggaagggcaagggaaagggagagggaggaggaggggagggaggcggtgggaggcgccgcgccggggggcggggttcggcgtggacgggtcga

SEQ ID NO: 19599 - DNA, 96 bp, Aspergillus viridinutans
  misc_feature: 425
aggaggaggggagggaggcggtgggaggcgccgcgccggggggcggggttcggcgtggacgggtcgaggagccgcccgcgggagaggcgccggtgg

SEQ ID NO: 19600 - DNA, 96 bp, Aspergillus viridinutans
  misc_feature: 424
ggaggggaagggcaagggaaagggagagggaggaggaggggagggaggcggtgggaggcgccgcgccggggggcggggttcggcgtggacgggtcg

SEQ ID NO: 19601 - DNA, 96 bp, Aspergillus viridinutans
  misc_feature: 422
gaaagggagagggaggaggaggggagggaggcggtgggaggcgccgcgccggggggcggggttcggcgtggacgggtcgaggagccgcccgcggga

SEQ ID NO: 19602 - DNA, 96 bp, Aspergillus viridinutans
  misc_feature: 422
gggcaagggaaagggagagggaggaggaggggagggaggcggtgggaggcgccgcgccggggggcggggttcggcgtggacgggtcgaggagccgc

SEQ ID NO: 19603 - DNA, 96 bp, Aspergillus viridinutans
  misc_feature: 422
ccagtcacaacgttccatctcgtatgccgtagatcggaagagcacacgtctgaactccagtcacaacgttccatctcgtatgccgtagatcggaag

SEQ ID NO: 19604 - DNA, 96 bp, Aspergillus viridinutans
  misc_feature: 422
cggggttcggcgtggacgggtcgaggagccgcccgcgggagaggcgccggtgggcgcgcgcgcgcgcgaaggcgaccagttggccgggtccgtttt

SEQ ID NO: 19605 - DNA, 96 bp, Aspergillus viridinutans
  misc_feature: 422
agggcaagggaaagggagagggaggaggaggggagggaggcggtgggaggcgccgcgccggggggcggggttcggcgtggacgggtcgaggagccg

SEQ ID NO: 19606 - DNA, 96 bp, Aspergillus viridinutans
  misc_feature: 421
tccagtcacaacgttccatctcgtatgccgtagatcggaagagcacacgtctgaactccagtcacaacgttccatctcgtatgccgtagatcggaa

SEQ ID NO: 19607 - DNA, 96 bp, Aspergillus viridinutans
  misc_feature: 421
cagtcacaacgttccatctcgtatgccgtagatcggaagagcacacgtctgaactccagtcacaacgttccatctcgtatgccgtagatcggaaga

SEQ ID NO: 19608 - DNA, 96 bp, Aspergillus viridinutans
  misc_feature: 421
gcaagggaaagggagagggaggaggaggggagggaggcggtgggaggcgccgcgccggggggcggggttcggcgtggacgggtcgaggagccgccc

SEQ ID NO: 19609 - DNA, 96 bp, Aspergillus viridinutans
  misc_feature: 421
aaagggagagggaggaggaggggagggaggcggtgggaggcgccgcgccggggggcggggttcggcgtggacgggtcgaggagccgcccgcgggag

SEQ ID NO: 19610 - DNA, 96 bp, Aspergillus viridinutans
  misc_feature: 419
ggcaagggaaagggagagggaggaggaggggagggaggcggtgggaggcgccgcgccggggggcggggttcggcgtggacgggtcgaggagccgcc

SEQ ID NO: 19611 - DNA, 96 bp, Aspergillus viridinutans
  misc_feature: 418
ggaaagggagagggaggaggaggggagggaggcggtgggaggcgccgcgccggggggcggggttcggcgtggacgggtcgaggagccgcccgcggg

SEQ ID NO: 19612 - DNA, 96 bp, Aspergillus viridinutans
  misc_feature: 416
agtcacaacgttccatctcgtatgccgtagatcggaagagcacacgtctgaactccagtcacaacgttccatctcgtatgccgtagatcggaagag

SEQ ID NO: 19613 - DNA, 96 bp, Aspergillus viridinutans
  misc_feature: 414
gggaggggaagggcaagggaaagggagagggaggaggaggggagggaggcggtgggaggcgccgcgccggggggcggggttcggcgtggacgggtc

SEQ ID NO: 19614 - DNA, 96 bp, Aspergillus viridinutans
  misc_feature: 410
gtcacaacgttccatctcgtatgccgtagatcggaagagcacacgtctgaactccagtcacaacgttccatctcgtatgccgtagatcggaagagc

SEQ ID NO: 19615 - DNA, 96 bp, Aspergillus viridinutans
  misc_feature: 408
cggagtactacactctttccctacacgacgctcttccgatcgatcggaagagcacacgtctgaactccagtcacaacgttccatctcgtatgccgt

SEQ ID NO: 19616 - DNA, 96 bp, Aspergillus viridinutans
  misc_feature: 407
acggagtactacactctttccctacacgacgctcttccgatcgatcggaagagcacacgtctgaactccagtcacaacgttccatctcgtatgccg

SEQ ID NO: 19617 - DNA, 96 bp, Aspergillus viridinutans
  misc_feature: 403
cacggagtactacactctttccctacacgacgctcttccgatcgatcggaagagcacacgtctgaactccagtcacaacgttccatctcgtatgcc

SEQ ID NO: 19618 - DNA, 96 bp, Aspergillus viridinutans
  misc_feature: 401
tcacaacgttccatctcgtatgccgtagatcggaagagcacacgtctgaactccagtcacaacgttccatctcgtatgccgtagatcggaagagca

SEQ ID NO: 19619 - DNA, 96 bp, Aspergillus viridinutans
  misc_feature: 396
cgggaggggaagggcaagggaaagggagagggaggaggaggggagggaggcggtgggaggcgccgcgccggggggcggggttcggcgtggacgggt

SEQ ID NO: 19620 - DNA, 96 bp, Aspergillus viridinutans
  misc_feature: 393
tctgaactccagtcacaacgttccatctcgtatgccgtagatcggaagagcacacgtctgaactccagtcacaacgttccatctcgtatgccgtat

SEQ ID NO: 19621 - DNA, 96 bp, Aspergillus viridinutans
  misc_feature: 392
tcgggaggggaagggcaagggaaagggagagggaggaggaggggagggaggcggtgggaggcgccgcgccggggggcggggttcggcgtggacggg

SEQ ID NO: 19622 - DNA, 96 bp, Aspergillus viridinutans
  misc_feature: 389
acacggagtactacactctttccctacacgacgctcttccgatcgatcggaagagcacacgtctgaactccagtcacaacgttccatctcgtatgc

SEQ ID NO: 19623 - DNA, 96 bp, Aspergillus viridinutans
  misc_feature: 382
atcgggaggggaagggcaagggaaagggagagggaggaggaggggagggaggcggtgggaggcgccgcgccggggggcggggttcggcgtggacgg

SEQ ID NO: 19624 - DNA, 96 bp, Aspergillus viridinutans
  misc_feature: 379
aatcgggaggggaagggcaagggaaagggagagggaggaggaggggagggaggcggtgggaggcgccgcgccggggggcggggttcggcgtggacg

SEQ ID NO: 19625 - DNA, 96 bp, Aspergillus viridinutans
  misc_feature: 369
aggaatcgggaggggaagggcaagggaaagggagagggaggaggaggggagggaggcggtgggaggcgccgcgccggggggcggggttcggcgtgg

SEQ ID NO: 19626 - DNA, 96 bp, Aspergillus viridinutans
  misc_feature: 367
tcttccgatcagatcggaagagcgtcgtgtagggaaagagtgtagtactccgtgtagatctcggtggtcgccgtatcattaaaaaaaaaaaaaaaa

SEQ ID NO: 19627 - DNA, 96 bp, Aspergillus viridinutans
  misc_feature: 366
ggaatcgggaggggaagggcaagggaaagggagagggaggaggaggggagggaggcggtgggaggcgccgcgccggggggcggggttcggcgtgga

SEQ ID NO: 19628 - DNA, 96 bp, Aspergillus viridinutans
  misc_feature: 366
gaatcgggaggggaagggcaagggaaagggagagggaggaggaggggagggaggcggtgggaggcgccgcgccggggggcggggttcggcgtggac

SEQ ID NO: 19629 - DNA, 96 bp, Aspergillus viridinutans
  misc_feature: 365
ctgaactccagtcacaacgttccatctcgtatgccgtagatcggaagagcacacgtctgaactccagtcacaacgttccatctcgtatgccgtatc

SEQ ID NO: 19630 - DNA, 96 bp, Aspergillus viridinutans
  misc_feature: 365
gaaggaatcgggaggggaagggcaagggaaagggagagggaggaggaggggagggaggcggtgggaggcgccgcgccggggggcggggttcggcgt

SEQ ID NO: 19631 - DNA, 96 bp, Aspergillus viridinutans
  misc_feature: 364
ggaaggaatcgggaggggaagggcaagggaaagggagagggaggaggaggggagggaggcggtgggaggcgccgcgccggggggcggggttcggcg

SEQ ID NO: 19632 - DNA, 96 bp, Aspergillus viridinutans
  misc_feature: 360
gggaaggaatcgggaggggaagggcaagggaaagggagagggaggaggaggggagggaggcggtgggaggcgccgcgccggggggcggggttcggc

SEQ ID NO: 19633 - DNA, 96 bp, Aspergillus viridinutans
  misc_feature: 358
aaggaatcgggaggggaagggcaagggaaagggagagggaggaggaggggagggaggcggtgggaggcgccgcgccggggggcggggttcggcgtg

SEQ ID NO: 19634 - DNA, 96 bp, Aspergillus viridinutans
  misc_feature: 356
gagcacacgtctgaactccagtcacaacgttccatctcgtatgccgtagatcggaagagcagatcggaagagcacacgtctgaactccagtcacaa

SEQ ID NO: 19635 - DNA, 96 bp, Aspergillus viridinutans
  misc_feature: 356
agagcacacgtctgaactccagtcacaacgttccatctcgtatgccgtagatcggaagagcagatcggaagagcacacgtctgaactccagtcaca

SEQ ID NO: 19636 - DNA, 96 bp, Aspergillus viridinutans
  misc_feature: 355
agcacacgtctgaactccagtcacaacgttccatctcgtatgccgtagatcggaagagcagatcggaagagcacacgtctgaactccagtcacaac

SEQ ID NO: 19637 - DNA, 96 bp, Aspergillus viridinutans
  misc_feature: 354
gaagagcacacgtctgaactccagtcacaacgttccatctcgtatgccgtagatcggaagagcagatcggaagagcacacgtctgaactccagtca

SEQ ID NO: 19638 - DNA, 96 bp, Aspergillus viridinutans
  misc_feature: 354
aagagcacacgtctgaactccagtcacaacgttccatctcgtatgccgtagatcggaagagcagatcggaagagcacacgtctgaactccagtcac

SEQ ID NO: 19639 - DNA, 96 bp, Aspergillus viridinutans
  misc_feature: 354
cggaagagcacacgtctgaactccagtcacaacgttccatctcgtatgccgtagatcggaagagcagatcggaagagcacacgtctgaactccagt

SEQ ID NO: 19640 - DNA, 96 bp, Aspergillus viridinutans
  misc_feature: 353
cgtctgaactccagtcacaacgttccatctcgtatgccgtagatcggaagagcagatcggaagagcacacgtctgaactccagtcacaacgttcca

SEQ ID NO: 19641 - DNA, 96 bp, Aspergillus viridinutans
  misc_feature: 353
tcggaagagcacacgtctgaactccagtcacaacgttccatctcgtatgccgtagatcggaagagcagatcggaagagcacacgtctgaactccag

SEQ ID NO: 19642 - DNA, 96 bp, Aspergillus viridinutans
  misc_feature: 353
ggaagagcacacgtctgaactccagtcacaacgttccatctcgtatgccgtagatcggaagagcagatcggaagagcacacgtctgaactccagtc

SEQ ID NO: 19643 - DNA, 96 bp, Aspergillus viridinutans
  misc_feature: 353
gcacacgtctgaactccagtcacaacgttccatctcgtatgccgtagatcggaagagcagatcggaagagcacacgtctgaactccagtcacaacg

SEQ ID NO: 19644 - DNA, 96 bp, Aspergillus viridinutans
  misc_feature: 353
cacacgtctgaactccagtcacaacgttccatctcgtatgccgtagatcggaagagcagatcggaagagcacacgtctgaactccagtcacaacgt

SEQ ID NO: 19645 - DNA, 96 bp, Aspergillus viridinutans
  misc_feature: 352
acgtctgaactccagtcacaacgttccatctcgtatgccgtagatcggaagagcagatcggaagagcacacgtctgaactccagtcacaacgttcc

SEQ ID NO: 19646 - DNA, 96 bp, Aspergillus viridinutans
  misc_feature: 352
cacgtctgaactccagtcacaacgttccatctcgtatgccgtagatcggaagagcagatcggaagagcacacgtctgaactccagtcacaacgttc

SEQ ID NO: 19647 - DNA, 96 bp, Aspergillus viridinutans
  misc_feature: 352
acacgtctgaactccagtcacaacgttccatctcgtatgccgtagatcggaagagcagatcggaagagcacacgtctgaactccagtcacaacgtt

SEQ ID NO: 19648 - DNA, 96 bp, Aspergillus viridinutans
  misc_feature: 349
atcggaagagcacacgtctgaactccagtcacaacgttccatctcgtatgccgtagatcggaagagcagatcggaagagcacacgtctgaactcca

SEQ ID NO: 19649 - DNA, 96 bp, Aspergillus viridinutans
  misc_feature: 348
tacacggagtactacactctttccctacacgacgctcttccgatcgatcggaagagcacacgtctgaactccagtcacaacgttccatctcgtatg

SEQ ID NO: 19650 - DNA, 96 bp, Aspergillus viridinutans
  misc_feature: 347
agggaaggaatcgggaggggaagggcaagggaaagggagagggaggaggaggggagggaggcggtgggaggcgccgcgccggggggcggggttcgg

SEQ ID NO: 19651 - DNA, 96 bp, Aspergillus viridinutans
  misc_feature: 343
gatcggaagagcacacgtctgaactccagtcacaacgttccatctcgtatgccgtagatcggaagagcagatcggaagagcacacgtctgaactcc

SEQ ID NO: 19652 - DNA, 96 bp, Aspergillus viridinutans
  misc_feature: 342
gagggaaggaatcgggaggggaagggcaagggaaagggagagggaggaggaggggagggaggcggtgggaggcgccgcgccggggggcggggttcg

SEQ ID NO: 19653 - DNA, 96 bp, Aspergillus viridinutans
  misc_feature: 339
ctacacggagtactacactctttccctacacgacgctcttccgatcgatcggaagagcacacgtctgaactccagtcacaacgttccatctcgtat

SEQ ID NO: 19654 - DNA, 96 bp, Aspergillus viridinutans
  misc_feature: 334
tgaactccagtcacaacgttccatctcgtatgccgtagatcggaagagcacacgtctgaactccagtcacaacgttccatctcgtatgccgtatca

SEQ ID NO: 19655 - DNA, 96 bp, Aspergillus viridinutans
  misc_feature: 333
gtctgaactccagtcacaacgttccatctcgtatgccgtagatcggaagagcagatcggaagagcacacgtctgaactccagtcacaacgttccat

SEQ ID NO: 19656 - DNA, 96 bp, Aspergillus viridinutans
  misc_feature: 330
cgagggaaggaatcgggaggggaagggcaagggaaagggagagggaggaggaggggagggaggcggtgggaggcgccgcgccggggggcggggttc

SEQ ID NO: 19657 - DNA, 96 bp, Aspergillus viridinutans
  misc_feature: 329
tactacactctttccctacacgacgctcttccgatcgatcggaagagcacacgtctgaactccagtcacaacgttccatctcgtatgccgtcttct

SEQ ID NO: 19658 - DNA, 96 bp, Aspergillus viridinutans
  misc_feature: 329
ggagtactacactctttccctacacgacgctcttccgatcgatcggaagagcacacgtctgaactccagtcacaacgttccatctcgtatgccgtc

SEQ ID NO: 19659 - DNA, 96 bp, Aspergillus viridinutans
  misc_feature: 328
gtactacactctttccctacacgacgctcttccgatcgatcggaagagcacacgtctgaactccagtcacaacgttccatctcgtatgccgtcttc

SEQ ID NO: 19660 - DNA, 96 bp, Aspergillus viridinutans
  misc_feature: 328
actacactctttccctacacgacgctcttccgatcgatcggaagagcacacgtctgaactccagtcacaacgttccatctcgtatgccgtcttctg

SEQ ID NO: 19661 - DNA, 96 bp, Aspergillus viridinutans
  misc_feature: 327
gagtactacactctttccctacacgacgctcttccgatcgatcggaagagcacacgtctgaactccagtcacaacgttccatctcgtatgccgtct

SEQ ID NO: 19662 - DNA, 96 bp, Aspergillus viridinutans
  misc_feature: 326
ctacactctttccctacacgacgctcttccgatcgatcggaagagcacacgtctgaactccagtcacaacgttccatctcgtatgccgtcttctgc

SEQ ID NO: 19663 - DNA, 96 bp, Aspergillus viridinutans
  misc_feature: 326
agtactacactctttccctacacgacgctcttccgatcgatcggaagagcacacgtctgaactccagtcacaacgttccatctcgtatgccgtctt

SEQ ID NO: 19664 - DNA, 96 bp, Aspergillus viridinutans
  misc_feature: 325
tctgaactccagtcacaacgttccatctcgtatgccgtagatcggaagagcagatcggaagagcacacgtctgaactccagtcacaacgttccatc

SEQ ID NO: 19665 - DNA, 96 bp, Aspergillus viridinutans
  misc_feature: 325
tacactctttccctacacgacgctcttccgatcgatcggaagagcacacgtctgaactccagtcacaacgttccatctcgtatgccgtcttctgct

SEQ ID NO: 19666 - DNA, 96 bp, Aspergillus viridinutans
  misc_feature: 324
ctgaactccagtcacaacgttccatctcgtatgccgtagatcggaagagcagatcggaagagcacacgtctgaactccagtcacaacgttccatct

SEQ ID NO: 19667 - DNA, 96 bp, Aspergillus viridinutans
  misc_feature: 323
tgaactccagtcacaacgttccatctcgtatgccgtagatcggaagagcagatcggaagagcacacgtctgaactccagtcacaacgttccatctc

SEQ ID NO: 19668 - DNA, 96 bp, Aspergillus viridinutans
  misc_feature: 323
gaactccagtcacaacgttccatctcgtatgccgtagatcggaagagcagatcggaagagcacacgtctgaactccagtcacaacgttccatctcg

SEQ ID NO: 19669 - DNA, 96 bp, Aspergillus viridinutans
  misc_feature: 322
actccagtcacaacgttccatctcgtatgccgtagatcggaagagcagatcggaagagcacacgtctgaactccagtcacaacgttccatctcgta

SEQ ID NO: 19670 - DNA, 96 bp, Aspergillus viridinutans
  misc_feature: 322
aactccagtcacaacgttccatctcgtatgccgtagatcggaagagcagatcggaagagcacacgtctgaactccagtcacaacgttccatctcgt

SEQ ID NO: 19671 - DNA, 96 bp, Aspergillus viridinutans
  misc_feature: 321
ggaagagcacacgtctgaactccagtcacaacgttccatctcgtatgccgtatcaagatcggaagagcacacgtctgaactccagtcacaacgttc

SEQ ID NO: 19672 - DNA, 96 bp, Aspergillus viridinutans
  misc_feature: 321
cggaagagcacacgtctgaactccagtcacaacgttccatctcgtatgccgtatcaagatcggaagagcacacgtctgaactccagtcacaacgtt

SEQ ID NO: 19673 - DNA, 96 bp, Aspergillus viridinutans
  misc_feature: 320
aagagcacacgtctgaactccagtcacaacgttccatctcgtatgccgtatcaagatcggaagagcacacgtctgaactccagtcacaacgttcca

SEQ ID NO: 19674 - DNA, 96 bp, Aspergillus viridinutans
  misc_feature: 320
gaagagcacacgtctgaactccagtcacaacgttccatctcgtatgccgtatcaagatcggaagagcacacgtctgaactccagtcacaacgttcc

SEQ ID NO: 19675 - DNA, 96 bp, Aspergillus viridinutans
  misc_feature: 320
acgagggaaggaatcgggaggggaagggcaagggaaagggagagggaggaggaggggagggaggcggtgggaggcgccgcgccggggggcggggtt

SEQ ID NO: 19676 - DNA, 96 bp, Aspergillus viridinutans
  misc_feature: 320
acactctttccctacacgacgctcttccgatcgatcggaagagcacacgtctgaactccagtcacaacgttccatctcgtatgccgtcttctgctt

SEQ ID NO: 19677 - DNA, 96 bp, Aspergillus viridinutans
  misc_feature: 319
cactctttccctacacgacgctcttccgatcgatcggaagagcacacgtctgaactccagtcacaacgttccatctcgtatgccgtcttctgcttg

SEQ ID NO: 19678 - DNA, 96 bp, Aspergillus viridinutans
  misc_feature: 318
tcggaagagcacacgtctgaactccagtcacaacgttccatctcgtatgccgtatcaagatcggaagagcacacgtctgaactccagtcacaacgt

SEQ ID NO: 19679 - DNA, 96 bp, Aspergillus viridinutans
  misc_feature: 318
cagtcacaacgttccatctcgtatgccgtagatcggaagagcagatcggaagagcacacgtctgaactccagtcacaacgttccatctcgtatgcc

SEQ ID NO: 19680 - DNA, 96 bp, Aspergillus viridinutans
  misc_feature: 318
ctccagtcacaacgttccatctcgtatgccgtagatcggaagagcagatcggaagagcacacgtctgaactccagtcacaacgttccatctcgtat

SEQ ID NO: 19681 - DNA, 96 bp, Aspergillus viridinutans
  misc_feature: 318
agtcacaacgttccatctcgtatgccgtagatcggaagagcagatcggaagagcacacgtctgaactccagtcacaacgttccatctcgtatgccg

SEQ ID NO: 19682 - DNA, 96 bp, Aspergillus viridinutans
  misc_feature: 317
tccagtcacaacgttccatctcgtatgccgtagatcggaagagcagatcggaagagcacacgtctgaactccagtcacaacgttccatctcgtatg

SEQ ID NO: 19683 - DNA, 96 bp, Aspergillus viridinutans
  misc_feature: 317
ccagtcacaacgttccatctcgtatgccgtagatcggaagagcagatcggaagagcacacgtctgaactccagtcacaacgttccatctcgtatgc

SEQ ID NO: 19684 - DNA, 96 bp, Aspergillus viridinutans
  misc_feature: 317
atcggaagagcacacgtctgaactccagtcacaacgttccatctcgtatgccgtatcaagatcggaagagcacacgtctgaactccagtcacaacg

SEQ ID NO: 19685 - DNA, 96 bp, Aspergillus viridinutans
  misc_feature: 316
gtcacaacgttccatctcgtatgccgtagatcggaagagcagatcggaagagcacacgtctgaactccagtcacaacgttccatctcgtatgccgt

SEQ ID NO: 19686 - DNA, 96 bp, Aspergillus viridinutans
  misc_feature: 315
cacgtctgaactccagtcacaacgttccatctcgtatgccgtatcaagatcggaagagcacacgtctgaactccagtcacaacgttccatctcgta

SEQ ID NO: 19687 - DNA, 96 bp, Aspergillus viridinutans
  misc_feature: 315
cgtctgaactccagtcacaacgttccatctcgtatgccgtatcaagatcggaagagcacacgtctgaactccagtcacaacgttccatctcgtatg

SEQ ID NO: 19688 - DNA, 96 bp, Aspergillus viridinutans
  misc_feature: 315
agagcacacgtctgaactccagtcacaacgttccatctcgtatgccgtatcaagatcggaagagcacacgtctgaactccagtcacaacgttccat

SEQ ID NO: 19689 - DNA, 96 bp, Aspergillus viridinutans
  misc_feature: 315
acgtctgaactccagtcacaacgttccatctcgtatgccgtatcaagatcggaagagcacacgtctgaactccagtcacaacgttccatctcgtat

SEQ ID NO: 19690 - DNA, 96 bp, Aspergillus viridinutans
  misc_feature: 314
gtctgaactccagtcacaacgttccatctcgtatgccgtatcaagatcggaagagcacacgtctgaactccagtcacaacgttccatctcgtatgc

SEQ ID NO: 19691 - DNA, 96 bp, Aspergillus viridinutans
  misc_feature: 314
gcacacgtctgaactccagtcacaacgttccatctcgtatgccgtatcaagatcggaagagcacacgtctgaactccagtcacaacgttccatctc

SEQ ID NO: 19692 - DNA, 96 bp, Aspergillus viridinutans
  misc_feature: 314
gagcacacgtctgaactccagtcacaacgttccatctcgtatgccgtatcaagatcggaagagcacacgtctgaactccagtcacaacgttccatc

SEQ ID NO: 19693 - DNA, 96 bp, Aspergillus viridinutans
  misc_feature: 314
gacgagggaaggaatcgggaggggaagggcaagggaaagggagagggaggaggaggggagggaggcggtgggaggcgccgcgccggggggcggggt

SEQ ID NO: 19694 - DNA, 96 bp, Aspergillus viridinutans
  misc_feature: 314
cacacgtctgaactccagtcacaacgttccatctcgtatgccgtatcaagatcggaagagcacacgtctgaactccagtcacaacgttccatctcg

SEQ ID NO: 19695 - DNA, 96 bp, Aspergillus viridinutans
  misc_feature: 314
agcacacgtctgaactccagtcacaacgttccatctcgtatgccgtatcaagatcggaagagcacacgtctgaactccagtcacaacgttccatct

SEQ ID NO: 19696 - DNA, 96 bp, Aspergillus viridinutans
  misc_feature: 314
acacgtctgaactccagtcacaacgttccatctcgtatgccgtatcaagatcggaagagcacacgtctgaactccagtcacaacgttccatctcgt

SEQ ID NO: 19697 - DNA, 96 bp, Aspergillus viridinutans
  misc_feature: 312
tgacgagggaaggaatcgggaggggaagggcaagggaaagggagagggaggaggaggggagggaggcggtgggaggcgccgcgccggggggcgggg

SEQ ID NO: 19698 - DNA, 96 bp, Aspergillus viridinutans
  misc_feature: 310
gatcggaagagcacacgtctgaactccagtcacaacgttccatctcgtatgccgtatcaagatcggaagagcacacgtctgaactccagtcacaac

SEQ ID NO: 19699 - DNA, 96 bp, Aspergillus viridinutans
  misc_feature: 307
atcggaagagcgtcgtgtagggaaagagtgtagtactccgtgtagatctcggtggtcgccgtatcattaaaaaaaaaaaaaaaaaaaaaaaaaaaa

SEQ ID NO: 19700 - DNA, 96 bp, Aspergillus viridinutans
  misc_feature: 307
tgaactccagtcacaacgttccatctcgtatgccgtatcaagatcggaagagcacacgtctgaactccagtcacaacgttccatctcgtatgccgt

SEQ ID NO: 19701 - DNA, 96 bp, Aspergillus viridinutans
  misc_feature: 307
tctgaactccagtcacaacgttccatctcgtatgccgtatcaagatcggaagagcacacgtctgaactccagtcacaacgttccatctcgtatgcc

SEQ ID NO: 19702 - DNA, 96 bp, Aspergillus viridinutans
  misc_feature: 307
actctttccctacacgacgctcttccgatcgatcggaagagcacacgtctgaactccagtcacaacgttccatctcgtatgccgtcttctgcttga

SEQ ID NO: 19703 - DNA, 96 bp, Aspergillus viridinutans
  misc_feature: 307
ctgaactccagtcacaacgttccatctcgtatgccgtatcaagatcggaagagcacacgtctgaactccagtcacaacgttccatctcgtatgccg

SEQ ID NO: 19704 - DNA, 96 bp, Aspergillus viridinutans
  misc_feature: 304
agatcggaagagcacacgtctgaactccagtcacaacgttccatctcgtatgccgtagatcggaagagcacacgtctgaactccagtcacaacgtt

SEQ ID NO: 19705 - DNA, 96 bp, Aspergillus viridinutans
  misc_feature: 303
gaactccagtcacaacgttccatctcgtatgccgtatcatgatcggaagagcacacgtctgaactccagtcacaacgttccatctcgtatgccgta

SEQ ID NO: 19706 - DNA, 96 bp, Aspergillus viridinutans
  misc_feature: 302
ctctttccctacacgacgctcttccgatcgatcggaagagcacacgtctgaactccagtcacaacgttccatctcgtatgccgtcttctgcttgaa

SEQ ID NO: 19707 - DNA, 96 bp, Aspergillus viridinutans
  misc_feature: 302
tctacacggagtactacactctttccctacacgacgctcttccgatcgatcggaagagcacacgtctgaactccagtcacaacgttccatctcgta

SEQ ID NO: 19708 - DNA, 96 bp, Aspergillus viridinutans
  misc_feature: 300
gtgacgagggaaggaatcgggaggggaagggcaagggaaagggagagggaggaggaggggagggaggcggtgggaggcgccgcgccggggggcggg

SEQ ID NO: 19709 - DNA, 96 bp, Aspergillus viridinutans
  misc_feature: 299
atctacacggagtactacactctttccctacacgacgctcttccgatcgatcggaagagcacacgtctgaactccagtcacaacgttccatctcgt

SEQ ID NO: 19710 - DNA, 96 bp, Aspergillus viridinutans
  misc_feature: 297
tctttccctacacgacgctcttccgatcgatcggaagagcacacgtctgaactccagtcacaacgttccatctcgtatgccgtcttctgcttgaaa

SEQ ID NO: 19711 - DNA, 96 bp, Aspergillus viridinutans
  misc_feature: 297
gatctacacggagtactacactctttccctacacgacgctcttccgatcgatcggaagagcacacgtctgaactccagtcacaacgttccatctcg

SEQ ID NO: 19712 - DNA, 96 bp, Aspergillus viridinutans
  misc_feature: 293
ctttccctacacgacgctcttccgatcgatcggaagagcacacgtctgaactccagtcacaacgttccatctcgtatgccgtcttctgcttgaaaa

SEQ ID NO: 19713 - DNA, 96 bp, Aspergillus viridinutans
  misc_feature: 290
gatcggaagagcgtcgtgtagggaaagagtgtagtactccgtgtagatctcggtggtcgccgtatcattaaaaaaaaaaaaaaaaaaaaaaaaaaa

SEQ ID NO: 19714 - DNA, 96 bp, Aspergillus viridinutans
  misc_feature: 290
ggtgacgagggaaggaatcgggaggggaagggcaagggaaagggagagggaggaggaggggagggaggcggtgggaggcgccgcgccggggggcgg

SEQ ID NO: 19715 - DNA, 96 bp, Aspergillus viridinutans
  misc_feature: 281
gggtgacgagggaaggaatcgggaggggaagggcaagggaaagggagagggaggaggaggggagggaggcggtgggaggcgccgcgccggggggcg

SEQ ID NO: 19716 - DNA, 96 bp, Aspergillus viridinutans
  misc_feature: 275
tttccctacacgacgctcttccgatcgatcggaagagcacacgtctgaactccagtcacaacgttccatctcgtatgccgtcttctgcttgaaaaa

SEQ ID NO: 19717 - DNA, 96 bp, Aspergillus viridinutans
  misc_feature: 275
agatctacacggagtactacactctttccctacacgacgctcttccgatcgatcggaagagcacacgtctgaactccagtcacaacgttccatctc

SEQ ID NO: 19718 - DNA, 96 bp, Aspergillus viridinutans
  misc_feature: 269
agggtgacgagggaaggaatcgggaggggaagggcaagggaaagggagagggaggaggaggggagggaggcggtgggaggcgccgcgccggggggc

SEQ ID NO: 19719 - DNA, 96 bp, Aspergillus viridinutans
  misc_feature: 268
cgtctgaactccagtcacaacgttccatctcgtatgccgtgatcggaagagcacacgtctgaactccagtcacaacgttccatctcgtatgccgta

SEQ ID NO: 19720 - DNA, 96 bp, Aspergillus viridinutans
  misc_feature: 261
gagatctacacggagtactacactctttccctacacgacgctcttccgatcgatcggaagagcacacgtctgaactccagtcacaacgttccatct

SEQ ID NO: 19721 - DNA, 96 bp, Aspergillus viridinutans
  misc_feature: 261
gaactccagtcacaacgttccatctcgtatgccgtatcaagatcggaagagcacacgtctgaactccagtcacaacgttccatctcgtatgccgtc

SEQ ID NO: 19722 - DNA, 96 bp, Aspergillus viridinutans
  misc_feature: 260
aactccagtcacaacgttccatctcgtatgccgtatcaagatcggaagagcacacgtctgaactccagtcacaacgttccatctcgtatgccgtct

SEQ ID NO: 19723 - DNA, 96 bp, Aspergillus viridinutans
  misc_feature: 258
tcacaacgttccatctcgtatgccgtagatcggaagagcagatcggaagagcacacgtctgaactccagtcacaacgttccatctcgtatgccgtc

SEQ ID NO: 19724 - DNA, 96 bp, Aspergillus viridinutans
  misc_feature: 258
actccagtcacaacgttccatctcgtatgccgtatcaagatcggaagagcacacgtctgaactccagtcacaacgttccatctcgtatgccgtctt

SEQ ID NO: 19725 - DNA, 96 bp, Aspergillus viridinutans
  misc_feature: 257
cagtcacaacgttccatctcgtatgccgtatcaagatcggaagagcacacgtctgaactccagtcacaacgttccatctcgtatgccgtcttctgc

SEQ ID NO: 19726 - DNA, 96 bp, Aspergillus viridinutans
  misc_feature: 257
agtcacaacgttccatctcgtatgccgtatcaagatcggaagagcacacgtctgaactccagtcacaacgttccatctcgtatgccgtcttctgct

SEQ ID NO: 19727 - DNA, 96 bp, Aspergillus viridinutans
  misc_feature: 256
ctccagtcacaacgttccatctcgtatgccgtatcaagatcggaagagcacacgtctgaactccagtcacaacgttccatctcgtatgccgtcttc

SEQ ID NO: 19728 - DNA, 96 bp, Aspergillus viridinutans
  misc_feature: 256
ccagtcacaacgttccatctcgtatgccgtatcaagatcggaagagcacacgtctgaactccagtcacaacgttccatctcgtatgccgtcttctg

SEQ ID NO: 19729 - DNA, 96 bp, Aspergillus viridinutans
  misc_feature: 255
tccagtcacaacgttccatctcgtatgccgtatcaagatcggaagagcacacgtctgaactccagtcacaacgttccatctcgtatgccgtcttct

SEQ ID NO: 19730 - DNA, 96 bp, Aspergillus viridinutans
  misc_feature: 254
gtcacaacgttccatctcgtatgccgtatcaagatcggaagagcacacgtctgaactccagtcacaacgttccatctcgtatgccgtcttctgctt

SEQ ID NO: 19731 - DNA, 96 bp, Aspergillus viridinutans
  misc_feature: 253
tcacaacgttccatctcgtatgccgtatcaagatcggaagagcacacgtctgaactccagtcacaacgttccatctcgtatgccgtcttctgcttg

SEQ ID NO: 19732 - DNA, 96 bp, Aspergillus viridinutans
  misc_feature: 252
cgagatctacacggagtactacactctttccctacacgacgctcttccgatcgatcggaagagcacacgtctgaactccagtcacaacgttccatc

SEQ ID NO: 19733 - DNA, 96 bp, Aspergillus viridinutans
  misc_feature: 252
gagggtgacgagggaaggaatcgggaggggaagggcaagggaaagggagagggaggaggaggggagggaggcggtgggaggcgccgcgccgggggg

SEQ ID NO: 19734 - DNA, 96 bp, Aspergillus viridinutans
  misc_feature: 249
cttccgatcagatcggaagagcgtcgtgtagggaaagagtgtagtactccgtgtagatctcggtggtcgccgtatcattaaaaaaaaaaaaaaaaa

SEQ ID NO: 19735 - DNA, 96 bp, Aspergillus viridinutans
  misc_feature: 248
aagagcacacgtctgaactccagtcacaacgttccatctcgggatcggaagagcacacgtctgaactccagtcacaacgttccatctcgtatgccg

SEQ ID NO: 19736 - DNA, 96 bp, Aspergillus viridinutans
  misc_feature: 247
gaagagcacacgtctgaactccagtcacaacgttccatctcgggatcggaagagcacacgtctgaactccagtcacaacgttccatctcgtatgcc

SEQ ID NO: 19737 - DNA, 96 bp, Aspergillus viridinutans
  misc_feature: 246
ggaagagcacacgtctgaactccagtcacaacgttccatctcgggatcggaagagcacacgtctgaactccagtcacaacgttccatctcgtatgc

SEQ ID NO: 19738 - DNA, 96 bp, Aspergillus viridinutans
  misc_feature: 246
agagcacacgtctgaactccagtcacaacgttccatctcgggatcggaagagcacacgtctgaactccagtcacaacgttccatctcgtatgccgt

SEQ ID NO: 19739 - DNA, 96 bp, Aspergillus viridinutans
  misc_feature: 245
cggaagagcacacgtctgaactccagtcacaacgttccatctcgggatcggaagagcacacgtctgaactccagtcacaacgttccatctcgtatg

SEQ ID NO: 19740 - DNA, 96 bp, Aspergillus viridinutans
  misc_feature: 244
tcggaagagcacacgtctgaactccagtcacaacgttccatctcgggatcggaagagcacacgtctgaactccagtcacaacgttccatctcgtat

SEQ ID NO: 19741 - DNA, 96 bp, Aspergillus viridinutans
  misc_feature: 243
tgaactccagtcacaacgttccatctcgtatgccgtatcagatcggaagagcacacgtctgaactccagtcacaacgttccatctcgtatgccgta

SEQ ID NO: 19742 - DNA, 96 bp, Aspergillus viridinutans
  misc_feature: 242
atcggaagagcacacgtctgaactccagtcacaacgttccatctcgggatcggaagagcacacgtctgaactccagtcacaacgttccatctcgta

SEQ ID NO: 19743 - DNA, 96 bp, Aspergillus viridinutans
  misc_feature: 234
ttccctacacgacgctcttccgatcgatcggaagagcacacgtctgaactccagtcacaacgttccatctcgtatgccgtcttctgcttgaaaaaa

SEQ ID NO: 19744 - DNA, 96 bp, Aspergillus viridinutans
  misc_feature: 229
cgagggtgacgagggaaggaatcgggaggggaagggcaagggaaagggagagggaggaggaggggagggaggcggtgggaggcgccgcgccggggg

SEQ ID NO: 19745 - DNA, 96 bp, Aspergillus viridinutans
  misc_feature: 229
cagatcggaagagcacacgtctgaactccagtcacaacgttccatctcgtatgccgtagatcggaagagcacacgtctgaactccagtcacaacgt

SEQ ID NO: 19746 - DNA, 96 bp, Aspergillus viridinutans
  misc_feature: 228
tcggaagagcgtcgtgtagggaaagagtgtagtactccgtgtagatctcggtggtcgccgtatcattaaaaaaaaaaaaaaaaaaaaaaaaaaaaa

SEQ ID NO: 19747 - DNA, 96 bp, Aspergillus viridinutans
  misc_feature: 221
gaactccagtcacaacgttccatctcgtatgccgtagatcggaagagcacacgtctgaactccagtcacaacgttccatctcgtatgccgtatcat

SEQ ID NO: 19748 - DNA, 96 bp, Aspergillus viridinutans
  misc_feature: 217
gcagatcggaagagcacacgtctgaactccagtcacaacgttccatctcgtatgccgtagatcggaagagcacacgtctgaactccagtcacaacg

SEQ ID NO: 19749 - DNA, 96 bp, Aspergillus viridinutans
  misc_feature: 211
gagcacacgtctgaactccagtcacaacgttccatctcgggatcggaagagcacacgtctgaactccagtcacaacgttccatctcgtatgccgtc

SEQ ID NO: 19750 - DNA, 96 bp, Aspergillus viridinutans
  misc_feature: 209
gcgagggtgacgagggaaggaatcgggaggggaagggcaagggaaagggagagggaggaggaggggagggaggcggtgggaggcgccgcgccgggg

SEQ ID NO: 19751 - DNA, 96 bp, Aspergillus viridinutans
  misc_feature: 209
agcacacgtctgaactccagtcacaacgttccatctcgggatcggaagagcacacgtctgaactccagtcacaacgttccatctcgtatgccgtct

SEQ ID NO: 19752 - DNA, 96 bp, Aspergillus viridinutans
  misc_feature: 207
acgtctgaactccagtcacaacgttccatctcgggatcggaagagcacacgtctgaactccagtcacaacgttccatctcgtatgccgtcttctgc

SEQ ID NO: 19753 - DNA, 96 bp, Aspergillus viridinutans
  misc_feature: 207
gcacacgtctgaactccagtcacaacgttccatctcgggatcggaagagcacacgtctgaactccagtcacaacgttccatctcgtatgccgtctt

SEQ ID NO: 19754 - DNA, 96 bp, Aspergillus viridinutans
  misc_feature: 207
gatcggaagagcacacgtctgaactccagtcacaacgttccatctcgggatcggaagagcacacgtctgaactccagtcacaacgttccatctcgt

SEQ ID NO: 19755 - DNA, 96 bp, Aspergillus viridinutans
  misc_feature: 207
cacacgtctgaactccagtcacaacgttccatctcgggatcggaagagcacacgtctgaactccagtcacaacgttccatctcgtatgccgtcttc

SEQ ID NO: 19756 - DNA, 96 bp, Aspergillus viridinutans
  misc_feature: 207
cacgtctgaactccagtcacaacgttccatctcgggatcggaagagcacacgtctgaactccagtcacaacgttccatctcgtatgccgtcttctg

SEQ ID NO: 19757 - DNA, 96 bp, Aspergillus viridinutans
  misc_feature: 207
acacgtctgaactccagtcacaacgttccatctcgggatcggaagagcacacgtctgaactccagtcacaacgttccatctcgtatgccgtcttct

SEQ ID NO: 19758 - DNA, 96 bp, Aspergillus viridinutans
  misc_feature: 205
tgctcttccgatcagatcggaagagcgtcgtgtagggaaagagtgtagtactccgtgtagatctcggtggtcgccgtatcattaaaaaaaaaaaaa

SEQ ID NO: 19759 - DNA, 96 bp, Aspergillus viridinutans
  misc_feature: 205
acacgtctgaactccagtcacaacgttccatctcgtatgccgtatcattgatcggaagagcagatcggaagagcacacgtctgaactccagtcaca

SEQ ID NO: 19760 - DNA, 96 bp, Aspergillus viridinutans
  misc_feature: 205
aagagcacacgtctgaactccagtcacaacgttccatctcgtatgccgtatcattgatcggaagagcagatcggaagagcacacgtctgaactcca

SEQ ID NO: 19761 - DNA, 96 bp, Aspergillus viridinutans
  misc_feature: 205
gcacacgtctgaactccagtcacaacgttccatctcgtatgccgtatcattgatcggaagagcagatcggaagagcacacgtctgaactccagtca

SEQ ID NO: 19762 - DNA, 96 bp, Aspergillus viridinutans
  misc_feature: 205
tcggaagagcacacgtctgaactccagtcacaacgttccatctcgtatgccgtatcattgatcggaagagcagatcggaagagcacacgtctgaac

SEQ ID NO: 19763 - DNA, 96 bp, Aspergillus viridinutans
  misc_feature: 205
cacacgtctgaactccagtcacaacgttccatctcgtatgccgtatcattgatcggaagagcagatcggaagagcacacgtctgaactccagtcac

SEQ ID NO: 19764 - DNA, 96 bp, Aspergillus viridinutans
  misc_feature: 205
gaagagcacacgtctgaactccagtcacaacgttccatctcgtatgccgtatcattgatcggaagagcagatcggaagagcacacgtctgaactcc

SEQ ID NO: 19765 - DNA, 96 bp, Aspergillus viridinutans
  misc_feature: 205
ggaagagcacacgtctgaactccagtcacaacgttccatctcgtatgccgtatcattgatcggaagagcagatcggaagagcacacgtctgaactc

SEQ ID NO: 19766 - DNA, 96 bp, Aspergillus viridinutans
  misc_feature: 205
cggaagagcacacgtctgaactccagtcacaacgttccatctcgtatgccgtatcattgatcggaagagcagatcggaagagcacacgtctgaact

SEQ ID NO: 19767 - DNA, 96 bp, Aspergillus viridinutans
  misc_feature: 204
cacgtctgaactccagtcacaacgttccatctcgtatgccgtatcattgatcggaagagcagatcggaagagcacacgtctgaactccagtcacaa

SEQ ID NO: 19768 - DNA, 96 bp, Aspergillus viridinutans
  misc_feature: 204
acgtctgaactccagtcacaacgttccatctcgtatgccgtatcattgatcggaagagcagatcggaagagcacacgtctgaactccagtcacaac

SEQ ID NO: 19769 - DNA, 96 bp, Aspergillus viridinutans
  misc_feature: 204
agcacacgtctgaactccagtcacaacgttccatctcgtatgccgtatcattgatcggaagagcagatcggaagagcacacgtctgaactccagtc

SEQ ID NO: 19770 - DNA, 96 bp, Aspergillus viridinutans
  misc_feature: 204
agagcacacgtctgaactccagtcacaacgttccatctcgtatgccgtatcattgatcggaagagcagatcggaagagcacacgtctgaactccag

SEQ ID NO: 19771 - DNA, 96 bp, Aspergillus viridinutans
  misc_feature: 204
cgtctgaactccagtcacaacgttccatctcgggatcggaagagcacacgtctgaactccagtcacaacgttccatctcgtatgccgtcttctgct

SEQ ID NO: 19772 - DNA, 96 bp, Aspergillus viridinutans
  misc_feature: 203
atcggaagagcacacgtctgaactccagtcacaacgttccatctcgtatgccgtatcattgatcggaagagcagatcggaagagcacacgtctgaa

SEQ ID NO: 19773 - DNA, 96 bp, Aspergillus viridinutans
  misc_feature: 203
agagcagatcggaagagcacacgtctgaactccagtcacaacgttccatctcgtatgccgtagatcggaagagcacacgtctgaactccagtcaca

SEQ ID NO: 19774 - DNA, 96 bp, Aspergillus viridinutans
  misc_feature: 203
gaagagcagatcggaagagcacacgtctgaactccagtcacaacgttccatctcgtatgccgtagatcggaagagcacacgtctgaactccagtca

SEQ ID NO: 19775 - DNA, 96 bp, Aspergillus viridinutans
  misc_feature: 203
aagagcagatcggaagagcacacgtctgaactccagtcacaacgttccatctcgtatgccgtagatcggaagagcacacgtctgaactccagtcac

SEQ ID NO: 19776 - DNA, 96 bp, Aspergillus viridinutans
  misc_feature: 203
ggaagagcagatcggaagagcacacgtctgaactccagtcacaacgttccatctcgtatgccgtagatcggaagagcacacgtctgaactccagtc

SEQ ID NO: 19777 - DNA, 96 bp, Aspergillus viridinutans
  misc_feature: 203
gagcacacgtctgaactccagtcacaacgttccatctcgtatgccgtatcattgatcggaagagcagatcggaagagcacacgtctgaactccagt

SEQ ID NO: 19778 - DNA, 96 bp, Aspergillus viridinutans
  misc_feature: 203
cggaagagcagatcggaagagcacacgtctgaactccagtcacaacgttccatctcgtatgccgtagatcggaagagcacacgtctgaactccagt

SEQ ID NO: 19779 - DNA, 96 bp, Aspergillus viridinutans
  misc_feature: 202
gagcagatcggaagagcacacgtctgaactccagtcacaacgttccatctcgtatgccgtagatcggaagagcacacgtctgaactccagtcacaa

SEQ ID NO: 19780 - DNA, 96 bp, Aspergillus viridinutans
  misc_feature: 202
agcagatcggaagagcacacgtctgaactccagtcacaacgttccatctcgtatgccgtagatcggaagagcacacgtctgaactccagtcacaac

SEQ ID NO: 19781 - DNA, 96 bp, Aspergillus viridinutans
  misc_feature: 202
gtctgaactccagtcacaacgttccatctcgggatcggaagagcacacgtctgaactccagtcacaacgttccatctcgtatgccgtcttctgctt

SEQ ID NO: 19782 - DNA, 96 bp, Aspergillus viridinutans
  misc_feature: 202
cgtctgaactccagtcacaacgttccatctcgtatgccgtatcattgatcggaagagcagatcggaagagcacacgtctgaactccagtcacaacg

SEQ ID NO: 19783 - DNA, 96 bp, Aspergillus viridinutans
  misc_feature: 202
aactccagtcacaacgttccatctcgtatgccgtatcatgatcggaagagcacacgtctgaactccagtcacaacgttccatctcgtatgccgtat

SEQ ID NO: 19784 - DNA, 96 bp, Aspergillus viridinutans
  misc_feature: 201
atcggaagagcagatcggaagagcacacgtctgaactccagtcacaacgttccatctcgtatgccgtagatcggaagagcacacgtctgaactcca

SEQ ID NO: 19785 - DNA, 96 bp, Aspergillus viridinutans
  misc_feature: 201
gtctgaactccagtcacaacgttccatctcgtatgccgtatcattgatcggaagagcagatcggaagagcacacgtctgaactccagtcacaacgt

SEQ ID NO: 19786 - DNA, 96 bp, Aspergillus viridinutans
  misc_feature: 200
tcggaagagcagatcggaagagcacacgtctgaactccagtcacaacgttccatctcgtatgccgtagatcggaagagcacacgtctgaactccag

SEQ ID NO: 19787 - DNA, 96 bp, Aspergillus viridinutans
  misc_feature: 198
ccgagatctacacggagtactacactctttccctacacgacgctcttccgatcgatcggaagagcacacgtctgaactccagtcacaacgttccat

SEQ ID NO: 19788 - DNA, 96 bp, Aspergillus viridinutans
  misc_feature: 196
tgaactccagtcacaacgttccatctcgtatgccgtatcattgatcggaagagcagatcggaagagcacacgtctgaactccagtcacaacgttcc

SEQ ID NO: 19789 - DNA, 96 bp, Aspergillus viridinutans
  misc_feature: 196
tctgaactccagtcacaacgttccatctcgtatgccgtatcattgatcggaagagcagatcggaagagcacacgtctgaactccagtcacaacgtt

SEQ ID NO: 19790 - DNA, 96 bp, Aspergillus viridinutans
  misc_feature: 196
cgcgagggtgacgagggaaggaatcgggaggggaagggcaagggaaagggagagggaggaggaggggagggaggcggtgggaggcgccgcgccggg

SEQ ID NO: 19791 - DNA, 96 bp, Aspergillus viridinutans
  misc_feature: 195
tccctacacgacgctcttccgatcgatcggaagagcacacgtctgaactccagtcacaacgttccatctcgtatgccgtcttctgcttgaaaaaaa

SEQ ID NO: 19792 - DNA, 96 bp, Aspergillus viridinutans
  misc_feature: 195
gaactccagtcacaacgttccatctcgtatgccgtatcattgatcggaagagcagatcggaagagcacacgtctgaactccagtcacaacgttcca

SEQ ID NO: 19793 - DNA, 96 bp, Aspergillus viridinutans
  misc_feature: 195
atcggaagagcacacgtctgaactccagtcacaacgttccatctcgtatgccgtcttctgcttgaaaaaaaaaaacgtctgaactccagtcacaac

SEQ ID NO: 19794 - DNA, 96 bp, Aspergillus viridinutans
  misc_feature: 195
ctgaactccagtcacaacgttccatctcgtatgccgtatcattgatcggaagagcagatcggaagagcacacgtctgaactccagtcacaacgttc

SEQ ID NO: 19795 - DNA, 96 bp, Aspergillus viridinutans
  misc_feature: 194
tctgaactccagtcacaacgttccatctcgggatcggaagagcacacgtctgaactccagtcacaacgttccatctcgtatgccgtcttctgcttg

SEQ ID NO: 19796 - DNA, 96 bp, Aspergillus viridinutans
  misc_feature: 193
gatcggaagagcacacgtctgaactccagtcacaacgttccatctcgtatgccgtatcattgatcggaagagcagatcggaagagcacacgtctga

SEQ ID NO: 19797 - DNA, 96 bp, Aspergillus viridinutans
  misc_feature: 193
ctgaactccagtcacaacgttccatctcgggatcggaagagcacacgtctgaactccagtcacaacgttccatctcgtatgccgtcttctgcttga

SEQ ID NO: 19798 - DNA, 96 bp, Aspergillus viridinutans
  misc_feature: 192
tcggaagagcacacgtctgaactccagtcacaacgttccatctcgtatgccgtcttctgcttgaaaaaaaaaaacgtctgaactccagtcacaacg

SEQ ID NO: 19799 - DNA, 96 bp, Aspergillus viridinutans
  misc_feature: 191
aactccagtcacaacgttccatctcgggatcggaagagcacacgtctgaactccagtcacaacgttccatctcgtatgccgtcttctgcttgaaaa

SEQ ID NO: 19800 - DNA, 96 bp, Aspergillus viridinutans
  misc_feature: 191
gaactccagtcacaacgttccatctcgggatcggaagagcacacgtctgaactccagtcacaacgttccatctcgtatgccgtcttctgcttgaaa

SEQ ID NO: 19801 - DNA, 96 bp, Aspergillus viridinutans
  misc_feature: 191
tgaactccagtcacaacgttccatctcgggatcggaagagcacacgtctgaactccagtcacaacgttccatctcgtatgccgtcttctgcttgaa

SEQ ID NO: 19802 - DNA, 96 bp, Aspergillus viridinutans
  misc_feature: 191
gcgcgagggtgacgagggaaggaatcgggaggggaagggcaagggaaagggagagggaggaggaggggagggaggcggtgggaggcgccgcgccgg

SEQ ID NO: 19803 - DNA, 96 bp, Aspergillus viridinutans
  misc_feature: 190
actccagtcacaacgttccatctcgggatcggaagagcacacgtctgaactccagtcacaacgttccatctcgtatgccgtcttctgcttgaaaaa

SEQ ID NO: 19804 - DNA, 96 bp, Aspergillus viridinutans
  misc_feature: 190
agatcggaagagcacacgtctgaactccagtcacaacgttccatctcgtatgccgtatcattgatcggaagagcacacgtctgaactccagtcaca

SEQ ID NO: 19805 - DNA, 96 bp, Aspergillus viridinutans
  misc_feature: 190
actccagtcacaacgttccatctcgtatgccgtatcattagatcggaagagcacacgtctgaactccagtcacaacgttccatctcgtatgccgta

SEQ ID NO: 19806 - DNA, 96 bp, Aspergillus viridinutans
  misc_feature: 190
gatcggaagagcagatcggaagagcacacgtctgaactccagtcacaacgttccatctcgtatgccgtagatcggaagagcacacgtctgaactcc

SEQ ID NO: 19807 - DNA, 96 bp, Aspergillus viridinutans
  misc_feature: 190
actccagtcacaacgttccatctcgtatgccgtatcatgatcggaagagcacacgtctgaactccagtcacaacgttccatctcgtatgccgtatc

SEQ ID NO: 19808 - DNA, 96 bp, Aspergillus viridinutans
  misc_feature: 190
cggaagagcacacgtctgaactccagtcacaacgttccatctcgtatgccgtcttctgcttgaaaaaaaaaaacgtctgaactccagtcacaacgt

SEQ ID NO: 19809 - DNA, 96 bp, Aspergillus viridinutans
  misc_feature: 189
ctccagtcacaacgttccatctcgggatcggaagagcacacgtctgaactccagtcacaacgttccatctcgtatgccgtcttctgcttgaaaaaa

SEQ ID NO: 19810 - DNA, 96 bp, Aspergillus viridinutans
  misc_feature: 189
gatcggaagagcacacgtctgaactccagtcacaacgttccatctcgtatgccgtcttctgcttgaaaaaaaaaaacgtctgaactccagtcacaa

SEQ ID NO: 19811 - DNA, 96 bp, Aspergillus viridinutans
  misc_feature: 188
tccagtcacaacgttccatctcgggatcggaagagcacacgtctgaactccagtcacaacgttccatctcgtatgccgtcttctgcttgaaaaaaa

SEQ ID NO: 19812 - DNA, 96 bp, Aspergillus viridinutans
  misc_feature: 187
agtcacaacgttccatctcgggatcggaagagcacacgtctgaactccagtcacaacgttccatctcgtatgccgtcttctgcttgaaaaaaaaaa

SEQ ID NO: 19813 - DNA, 96 bp, Aspergillus viridinutans
  misc_feature: 187
ccagtcacaacgttccatctcgggatcggaagagcacacgtctgaactccagtcacaacgttccatctcgtatgccgtcttctgcttgaaaaaaaa

SEQ ID NO: 19814 - DNA, 96 bp, Aspergillus viridinutans
  misc_feature: 186
cagtcacaacgttccatctcgggatcggaagagcacacgtctgaactccagtcacaacgttccatctcgtatgccgtcttctgcttgaaaaaaaaa

SEQ ID NO: 19815 - DNA, 96 bp, Aspergillus viridinutans
  misc_feature: 186
cggaagagcacacgtctgaactccagtcacaacgttccatctcgtatgccgtaagatcggaagagcacacgtctgaactccagtcacaacgttcca

SEQ ID NO: 19816 - DNA, 96 bp, Aspergillus viridinutans
  misc_feature: 186
ggaagagcacacgtctgaactccagtcacaacgttccatctcgtatgccgtcttctgcttgaaaaaaaaaaacgtctgaactccagtcacaacgtt

SEQ ID NO: 19817 - DNA, 96 bp, Aspergillus viridinutans
  misc_feature: 186
aactccagtcacaacgttccatctcgtatgccgtatcattgatcggaagagcagatcggaagagcacacgtctgaactccagtcacaacgttccat

SEQ ID NO: 19818 - DNA, 96 bp, Aspergillus viridinutans
  misc_feature: 185
tcggaagagcacacgtctgaactccagtcacaacgttccatctcgtatgccgtaagatcggaagagcacacgtctgaactccagtcacaacgttcc

SEQ ID NO: 19819 - DNA, 96 bp, Aspergillus viridinutans
  misc_feature: 185
gtcacaacgttccatctcgtatgccgtatcattgatcggaagagcagatcggaagagcacacgtctgaactccagtcacaacgttccatctcgtat

SEQ ID NO: 19820 - DNA, 96 bp, Aspergillus viridinutans
  misc_feature: 185
atcggaagagcacacgtctgaactccagtcacaacgttccatctcgtatgccgtaagatcggaagagcacacgtctgaactccagtcacaacgttc

SEQ ID NO: 19821 - DNA, 96 bp, Aspergillus viridinutans
  misc_feature: 184
accgagatctacacggagtactacactctttccctacacgacgctcttccgatcgatcggaagagcacacgtctgaactccagtcacaacgttcca

SEQ ID NO: 19822 - DNA, 96 bp, Aspergillus viridinutans
  misc_feature: 184
tcacaacgttccatctcgtatgccgtatcattgatcggaagagcagatcggaagagcacacgtctgaactccagtcacaacgttccatctcgtatg

SEQ ID NO: 19823 - DNA, 96 bp, Aspergillus viridinutans
  misc_feature: 184
agtcacaacgttccatctcgtatgccgtatcattgatcggaagagcagatcggaagagcacacgtctgaactccagtcacaacgttccatctcgta

SEQ ID NO: 19824 - DNA, 96 bp, Aspergillus viridinutans
  misc_feature: 184
gaagagcacacgtctgaactccagtcacaacgttccatctcgtatgccgtcttctgcttgaaaaaaaaaaacgtctgaactccagtcacaacgttc

SEQ ID NO: 19825 - DNA, 96 bp, Aspergillus viridinutans
  misc_feature: 184
cagtcacaacgttccatctcgtatgccgtatcattgatcggaagagcagatcggaagagcacacgtctgaactccagtcacaacgttccatctcgt

SEQ ID NO: 19826 - DNA, 96 bp, Aspergillus viridinutans
  misc_feature: 183
ccagtcacaacgttccatctcgtatgccgtatcattgatcggaagagcagatcggaagagcacacgtctgaactccagtcacaacgttccatctcg

SEQ ID NO: 19827 - DNA, 96 bp, Aspergillus viridinutans
  misc_feature: 182
tccagtcacaacgttccatctcgtatgccgtatcattgatcggaagagcagatcggaagagcacacgtctgaactccagtcacaacgttccatctc

SEQ ID NO: 19828 - DNA, 96 bp, Aspergillus viridinutans
  misc_feature: 182
aagagcacacgtctgaactccagtcacaacgttccatctcgtatgccgtcttctgcttgaaaaaaaaaaacgtctgaactccagtcacaacgttcc

SEQ ID NO: 19829 - DNA, 96 bp, Aspergillus viridinutans
  misc_feature: 182
actccagtcacaacgttccatctcgtatgccgtatcattgatcggaagagcagatcggaagagcacacgtctgaactccagtcacaacgttccatc

SEQ ID NO: 19830 - DNA, 96 bp, Aspergillus viridinutans
  misc_feature: 182
ctccagtcacaacgttccatctcgtatgccgtatcattgatcggaagagcagatcggaagagcacacgtctgaactccagtcacaacgttccatct

SEQ ID NO: 19831 - DNA, 96 bp, Aspergillus viridinutans
  misc_feature: 181
gatcggaagagcacacgtctgaactccagtcacaacgttccatctcgtatgccgtaagatcggaagagcacacgtctgaactccagtcacaacgtt

SEQ ID NO: 19832 - DNA, 96 bp, Aspergillus viridinutans
  misc_feature: 180
ttccgatcagatcggaagagcgtcgtgtagggaaagagtgtagtactccgtgtagatctcggtggtcgccgtatcattaaaaaaaaaaaaaaaaaa

SEQ ID NO: 19833 - DNA, 96 bp, Aspergillus viridinutans
  misc_feature: 180
ccctacacgacgctcttccgatcgatcggaagagcacacgtctgaactccagtcacaacgttccatctcgtatgccgtcttctgcttgaaaaaaaa

SEQ ID NO: 19834 - DNA, 96 bp, Aspergillus viridinutans
  misc_feature: 180
ctccagtcacaacgttccatctcgtatgccgtatcatgatcggaagagcacacgtctgaactccagtcacaacgttccatctcgtatgccgtatca

SEQ ID NO: 19835 - DNA, 96 bp, Aspergillus viridinutans
  misc_feature: 180
acacgtctgaactccagtcacaacgttccatctcgtatgccgtatcggaagagcacacgtctgaactccagtcacaacgttccatctcgtatgccg

SEQ ID NO: 19836 - DNA, 96 bp, Aspergillus viridinutans
  misc_feature: 180
cacgtctgaactccagtcacaacgttccatctcgtatgccgtatcggaagagcacacgtctgaactccagtcacaacgttccatctcgtatgccgt

SEQ ID NO: 19837 - DNA, 96 bp, Aspergillus viridinutans
  misc_feature: 179
gaagagcacacgtctgaactccagatcggaagagcacacgtctgaactccagtcacaacgttccatctcgtatgccgtcttctgcttgaaaaaaaa

SEQ ID NO: 19838 - DNA, 96 bp, Aspergillus viridinutans
  misc_feature: 179
cacacgtctgaactccagtcacaacgttccatctcgtatgccgtatcggaagagcacacgtctgaactccagtcacaacgttccatctcgtatgcc

SEQ ID NO: 19839 - DNA, 96 bp, Aspergillus viridinutans
  misc_feature: 179
ggaagagcacacgtctgaactccagtcacaacgttccatctcgtatgccgtatcggaagagcacacgtctgaactccagtcacaacgttccatctc

SEQ ID NO: 19840 - DNA, 96 bp, Aspergillus viridinutans
  misc_feature: 179
ggaagagcacacgtctgaactccagtcacaacgttccatctcgtatgccgtaagatcggaagagcacacgtctgaactccagtcacaacgttccat

SEQ ID NO: 19841 - DNA, 96 bp, Aspergillus viridinutans
  misc_feature: 179
gcacacgtctgaactccagtcacaacgttccatctcgtatgccgtatcggaagagcacacgtctgaactccagtcacaacgttccatctcgtatgc

SEQ ID NO: 19842 - DNA, 96 bp, Aspergillus viridinutans
  misc_feature: 179
gaagagcacacgtctgaactccagtcacaacgttccatctcgtatgccgtaagatcggaagagcacacgtctgaactccagtcacaacgttccatc

SEQ ID NO: 19843 - DNA, 96 bp, Aspergillus viridinutans
  misc_feature: 179
gagcacacgtctgaactccagtcacaacgttccatctcgtatgccgtatcggaagagcacacgtctgaactccagtcacaacgttccatctcgtat

SEQ ID NO: 19844 - DNA, 96 bp, Aspergillus viridinutans
  misc_feature: 179
gagcacacgtctgaactccagtcacaacgttccatctcgtatgccgtaagatcggaagagcacacgtctgaactccagtcacaacgttccatctcg

SEQ ID NO: 19845 - DNA, 96 bp, Aspergillus viridinutans
  misc_feature: 179
agagcacacgtctgaactccagtcacaacgttccatctcgtatgccgtaagatcggaagagcacacgtctgaactccagtcacaacgttccatctc

SEQ ID NO: 19846 - DNA, 96 bp, Aspergillus viridinutans
  misc_feature: 179
gaagagcacacgtctgaactccagtcacaacgttccatctcgtatgccgtatcggaagagcacacgtctgaactccagtcacaacgttccatctcg

SEQ ID NO: 19847 - DNA, 96 bp, Aspergillus viridinutans
  misc_feature: 179
cggaagagcacacgtctgaactccagtcacaacgttccatctcgtatgccgtatcggaagagcacacgtctgaactccagtcacaacgttccatct

SEQ ID NO: 19848 - DNA, 96 bp, Aspergillus viridinutans
  misc_feature: 179
agcacacgtctgaactccagtcacaacgttccatctcgtatgccgtatcggaagagcacacgtctgaactccagtcacaacgttccatctcgtatg

SEQ ID NO: 19849 - DNA, 96 bp, Aspergillus viridinutans
  misc_feature: 179
aagagcacacgtctgaactccagtcacaacgttccatctcgtatgccgtaagatcggaagagcacacgtctgaactccagtcacaacgttccatct

SEQ ID NO: 19850 - DNA, 96 bp, Aspergillus viridinutans
  misc_feature: 179
aagagcacacgtctgaactccagtcacaacgttccatctcgtatgccgtatcggaagagcacacgtctgaactccagtcacaacgttccatctcgt

SEQ ID NO: 19851 - DNA, 96 bp, Aspergillus viridinutans
  misc_feature: 178
gtcacaacgttccatctcgggatcggaagagcacacgtctgaactccagtcacaacgttccatctcgtatgccgtcttctgcttgaaaaaaaaaaa

SEQ ID NO: 19852 - DNA, 96 bp, Aspergillus viridinutans
  misc_feature: 178
tcggaagagcacacgtctgaactccagtcacaacgttccatctcgtatgccgtatcggaagagcacacgtctgaactccagtcacaacgttccatc

SEQ ID NO: 19853 - DNA, 96 bp, Aspergillus viridinutans
  misc_feature: 178
agagcacacgtctgaactccagtcacaacgttccatctcgtatgccgtatcggaagagcacacgtctgaactccagtcacaacgttccatctcgta

SEQ ID NO: 19854 - DNA, 96 bp, Aspergillus viridinutans
  misc_feature: 177
cggaagagcgtcgtgtagggaaagagtgtagtactccgtgtagatctcggtggtcgccgtatcattaaaaaaaaaaaaaaaaaaaaaaaaaaaaaa

SEQ ID NO: 19855 - DNA, 96 bp, Aspergillus viridinutans
  misc_feature: 177
gcacacgtctgaactccagtcacaacgttccatctcgtatgccgtaagatcggaagagcacacgtctgaactccagtcacaacgttccatctcgta

SEQ ID NO: 19856 - DNA, 96 bp, Aspergillus viridinutans
  misc_feature: 177
agcacacgtctgaactccagtcacaacgttccatctcgtatgccgtaagatcggaagagcacacgtctgaactccagtcacaacgttccatctcgt

SEQ ID NO: 19857 - DNA, 96 bp, Aspergillus viridinutans
  misc_feature: 176
agagcacacgtctgaactccagatcggaagagcacacgtctgaactccagtcacaacgttccatctcgtatgccgtcttctgcttgaaaaaaaaaa

SEQ ID NO: 19858 - DNA, 96 bp, Aspergillus viridinutans
  misc_feature: 176
aagagcacacgtctgaactccagatcggaagagcacacgtctgaactccagtcacaacgttccatctcgtatgccgtcttctgcttgaaaaaaaaa

SEQ ID NO: 19859 - DNA, 96 bp, Aspergillus viridinutans
  misc_feature: 176
gatcggaagagcacacgtctgaactccagtcacaacgttccatctcgtatgccgtatcggaagagcacacgtctgaactccagtcacaacgttcca

SEQ ID NO: 19860 - DNA, 96 bp, Aspergillus viridinutans
  misc_feature: 176
acacgtctgaactccagtcacaacgttccatctcgtatgccgtaagatcggaagagcacacgtctgaactccagtcacaacgttccatctcgtatg

SEQ ID NO: 19861 - DNA, 96 bp, Aspergillus viridinutans
  misc_feature: 176
cacacgtctgaactccagtcacaacgttccatctcgtatgccgtaagatcggaagagcacacgtctgaactccagtcacaacgttccatctcgtat

SEQ ID NO: 19862 - DNA, 96 bp, Aspergillus viridinutans
  misc_feature: 176
atcggaagagcacacgtctgaactccagtcacaacgttccatctcgtatgccgtatcggaagagcacacgtctgaactccagtcacaacgttccat

SEQ ID NO: 19863 - DNA, 96 bp, Aspergillus viridinutans
  misc_feature: 175
tcggaagagcacacgtctgaactccagtcacaacgttccatctcgtatgccgtatccttgatcggaagagcacacgtctgaactccagtcacaacg

SEQ ID NO: 19864 - DNA, 96 bp, Aspergillus viridinutans
  misc_feature: 175
atcggaagagcacacgtctgaactccagtcacaacgttccatctcgtatgccgtatccttgatcggaagagcacacgtctgaactccagtcacaac

SEQ ID NO: 19865 - DNA, 96 bp, Aspergillus viridinutans
  misc_feature: 175
cacgtctgaactccagtcacaacgttccatctcgtatgccgtaagatcggaagagcacacgtctgaactccagtcacaacgttccatctcgtatgc

SEQ ID NO: 19866 - DNA, 96 bp, Aspergillus viridinutans
  misc_feature: 175
cgcgcgagggtgacgagggaaggaatcgggaggggaagggcaagggaaagggagagggaggaggaggggagggaggcggtgggaggcgccgcgccg

SEQ ID NO: 19867 - DNA, 96 bp, Aspergillus viridinutans
  misc_feature: 174
cacaacgttccatctcgtatgccgtagatcggaagagcacacgtctgaactccagtcacaacgttccatctcgtatgccgtcttctgcttgaaaaa

SEQ ID NO: 19868 - DNA, 96 bp, Aspergillus viridinutans
  misc_feature: 174
agagcacacgtctgaactccagtcacaacgttccatctcgtatgccgtcttctgcttgaaaaaaaaaaacgtctgaactccagtcacaacgttcca

SEQ ID NO: 19869 - DNA, 96 bp, Aspergillus viridinutans
  misc_feature: 174
tcggaagagcacacgtctgaactccagtcacaacgttccatctcgtatgccgtatcatagatcggaagagcacacgtctgaactccagtcacaacg

SEQ ID NO: 19870 - DNA, 96 bp, Aspergillus viridinutans
  misc_feature: 174
gtctgaactccagtcacaacgttccatctcgtatgccgtaagatcggaagagcacacgtctgaactccagtcacaacgttccatctcgtatgccgt

SEQ ID NO: 19871 - DNA, 96 bp, Aspergillus viridinutans
  misc_feature: 174
acgtctgaactccagtcacaacgttccatctcgtatgccgtaagatcggaagagcacacgtctgaactccagtcacaacgttccatctcgtatgcc

SEQ ID NO: 19872 - DNA, 96 bp, Aspergillus viridinutans
  misc_feature: 174
ggaagagcacacgtctgaactccagtcacaacgttccatctcgtatgccgtatccttgatcggaagagcacacgtctgaactccagtcacaacgtt

SEQ ID NO: 19873 - DNA, 96 bp, Aspergillus viridinutans
  misc_feature: 174
aagagcacacgtctgaactccagtcacaacgttccatctcgtatgccgtatccttgatcggaagagcacacgtctgaactccagtcacaacgttcc

SEQ ID NO: 19874 - DNA, 96 bp, Aspergillus viridinutans
  misc_feature: 174
gaagagcacacgtctgaactccagtcacaacgttccatctcgtatgccgtatccttgatcggaagagcacacgtctgaactccagtcacaacgttc

SEQ ID NO: 19875 - DNA, 96 bp, Aspergillus viridinutans
  misc_feature: 174
cgtctgaactccagtcacaacgttccatctcgtatgccgtaagatcggaagagcacacgtctgaactccagtcacaacgttccatctcgtatgccg

SEQ ID NO: 19876 - DNA, 96 bp, Aspergillus viridinutans
  misc_feature: 174
cggaagagcacacgtctgaactccagtcacaacgttccatctcgtatgccgtatccttgatcggaagagcacacgtctgaactccagtcacaacgt

SEQ ID NO: 19877 - DNA, 96 bp, Aspergillus viridinutans
  misc_feature: 174
cggaagagcacacgtctgaactccagtcacaacgttccatctcgtatgccgtatcatagatcggaagagcacacgtctgaactccagtcacaacgt

SEQ ID NO: 19878 - DNA, 96 bp, Aspergillus viridinutans
  misc_feature: 173
atcggaagagcacacgtctgaactccagtcacaacgttccatctcgtatgccgtatcatagatcggaagagcacacgtctgaactccagtcacaac

SEQ ID NO: 19879 - DNA, 96 bp, Aspergillus viridinutans
  misc_feature: 173
aagagcacacgtctgaactccagtcacaacgttccatctcgtatgccgtatcatagatcggaagagcacacgtctgaactccagtcacaacgttcc

SEQ ID NO: 19880 - DNA, 96 bp, Aspergillus viridinutans
  misc_feature: 172
agagcacacgtctgaactccagtcacaacgttccatctcgtatgccgtatcatagatcggaagagcacacgtctgaactccagtcacaacgttcca

SEQ ID NO: 19881 - DNA, 96 bp, Aspergillus viridinutans
  misc_feature: 172
ggaagagcacacgtctgaactccagtcacaacgttccatctcgtatgccgtatcatagatcggaagagcacacgtctgaactccagtcacaacgtt

SEQ ID NO: 19882 - DNA, 96 bp, Aspergillus viridinutans
  misc_feature: 172
acgtctgaactccagtcacaacgttccatctcgtatgccgtatcggaagagcacacgtctgaactccagtcacaacgttccatctcgtatgccgtc

SEQ ID NO: 19883 - DNA, 96 bp, Aspergillus viridinutans
  misc_feature: 172
gaagagcacacgtctgaactccagtcacaacgttccatctcgtatgccgtatcatagatcggaagagcacacgtctgaactccagtcacaacgttc

SEQ ID NO: 19884 - DNA, 96 bp, Aspergillus viridinutans
  misc_feature: 172
cgtctgaactccagtcacaacgttccatctcgtatgccgtatcggaagagcacacgtctgaactccagtcacaacgttccatctcgtatgccgtct

SEQ ID NO: 19885 - DNA, 96 bp, Aspergillus viridinutans
  misc_feature: 171
gtctgaactccagtcacaacgttccatctcgtatgccgtatcggaagagcacacgtctgaactccagtcacaacgttccatctcgtatgccgtctt

SEQ ID NO: 19886 - DNA, 96 bp, Aspergillus viridinutans
  misc_feature: 170
ggaagagcacacgtctgaactccagatcggaagagcacacgtctgaactccagtcacaacgttccatctcgtatgccgtcttctgcttgaaaaaaa

SEQ ID NO: 19887 - DNA, 96 bp, Aspergillus viridinutans
  misc_feature: 169
gcgcgcgagggtgacgagggaaggaatcgggaggggaagggcaagggaaagggagagggaggaggaggggagggaggcggtgggaggcgccgcgcc

SEQ ID NO: 19888 - DNA, 96 bp, Aspergillus viridinutans
  misc_feature: 169
ggaagagcacacgtctgaactccagtcacaacgttccatctcggatcggaagagcacacgtctgaactccagtcacaacgttccatctcgtatgcc

SEQ ID NO: 19889 - DNA, 96 bp, Aspergillus viridinutans
  misc_feature: 169
cggaagagcacacgtctgaactccagtcacaacgttccatctcggatcggaagagcacacgtctgaactccagtcacaacgttccatctcgtatgc

SEQ ID NO: 19890 - DNA, 96 bp, Aspergillus viridinutans
  misc_feature: 169
gaagagcacacgtctgaactccagtcacaacgttccatctcggatcggaagagcacacgtctgaactccagtcacaacgttccatctcgtatgccg

SEQ ID NO: 19891 - DNA, 96 bp, Aspergillus viridinutans
  misc_feature: 169
aagagcacacgtctgaactccagtcacaacgttccatctcggatcggaagagcacacgtctgaactccagtcacaacgttccatctcgtatgccgt

SEQ ID NO: 19892 - DNA, 96 bp, Aspergillus viridinutans
  misc_feature: 168
tcggaagagcacacgtctgaactccagtcacaacgttccatctcggatcggaagagcacacgtctgaactccagtcacaacgttccatctcgtatg

SEQ ID NO: 19893 - DNA, 96 bp, Aspergillus viridinutans
  misc_feature: 167
tgaactccagtcacaacgttccatctcgtatgccgtatcggaagagcacacgtctgaactccagtcacaacgttccatctcgtatgccgtcttctg

SEQ ID NO: 19894 - DNA, 96 bp, Aspergillus viridinutans
  misc_feature: 167
tctgaactccagtcacaacgttccatctcgtatgccgtatcggaagagcacacgtctgaactccagtcacaacgttccatctcgtatgccgtcttc

SEQ ID NO: 19895 - DNA, 96 bp, Aspergillus viridinutans
  misc_feature: 167
tcggaagagcacacgtctgaactccagtcacaacgttccatctcgtatgccgtatcatggatcggaagagcacacgtctgaactccagtcacaacg

SEQ ID NO: 19896 - DNA, 96 bp, Aspergillus viridinutans
  misc_feature: 167
atcggaagagcacacgtctgaactccagtcacaacgttccatctcgtatgccgtatcatggatcggaagagcacacgtctgaactccagtcacaac

SEQ ID NO: 19897 - DNA, 96 bp, Aspergillus viridinutans
  misc_feature: 167
ggaagagcacacgtctgaactccagtcacaacgttccatctcgtatgccgtatcatggatcggaagagcacacgtctgaactccagtcacaacgtt

SEQ ID NO: 19898 - DNA, 96 bp, Aspergillus viridinutans
  misc_feature: 167
aagagcacacgtctgaactccagtcacaacgttccatctcgtatgccgtatcatggatcggaagagcacacgtctgaactccagtcacaacgttcc

SEQ ID NO: 19899 - DNA, 96 bp, Aspergillus viridinutans
  misc_feature: 167
gaactccagtcacaacgttccatctcgtatgccgtatcggaagagcacacgtctgaactccagtcacaacgttccatctcgtatgccgtcttctgc

SEQ ID NO: 19900 - DNA, 96 bp, Aspergillus viridinutans
  misc_feature: 167
gaagagcacacgtctgaactccagtcacaacgttccatctcgtatgccgtatcatggatcggaagagcacacgtctgaactccagtcacaacgttc

SEQ ID NO: 19901 - DNA, 96 bp, Aspergillus viridinutans
  misc_feature: 167
ctgaactccagtcacaacgttccatctcgtatgccgtatcggaagagcacacgtctgaactccagtcacaacgttccatctcgtatgccgtcttct

SEQ ID NO: 19902 - DNA, 96 bp, Aspergillus viridinutans
  misc_feature: 167
cggaagagcacacgtctgaactccagtcacaacgttccatctcgtatgccgtatcatggatcggaagagcacacgtctgaactccagtcacaacgt

SEQ ID NO: 19903 - DNA, 96 bp, Aspergillus viridinutans
  misc_feature: 167
aactccagtcacaacgttccatctcgtatgccgtatcggaagagcacacgtctgaactccagtcacaacgttccatctcgtatgccgtcttctgct

SEQ ID NO: 19904 - DNA, 96 bp, Aspergillus viridinutans
  misc_feature: 166
tcggaagagcacacgtctgaactccagtcacaacgttccatctcgtatgccgtatcgatcggaagagcacacgtctgaactccagtcacaacgttc

SEQ ID NO: 19905 - DNA, 96 bp, Aspergillus viridinutans
  misc_feature: 166
acgtctgaactccagtcacaacgttccatctcgtatgccgtatcatagatcggaagagcacacgtctgaactccagtcacaacgttccatctcgta

SEQ ID NO: 19906 - DNA, 96 bp, Aspergillus viridinutans
  misc_feature: 166
gtctgaactccagtcacaacgttccatctcgtatgccgtatcatagatcggaagagcacacgtctgaactccagtcacaacgttccatctcgtatg

SEQ ID NO: 19907 - DNA, 96 bp, Aspergillus viridinutans
  misc_feature: 166
gcacacgtctgaactccagtcacaacgttccatctcgtatgccgtatcatagatcggaagagcacacgtctgaactccagtcacaacgttccatct

SEQ ID NO: 19908 - DNA, 96 bp, Aspergillus viridinutans
  misc_feature: 166
cacacgtctgaactccagtcacaacgttccatctcgtatgccgtatcatagatcggaagagcacacgtctgaactccagtcacaacgttccatctc

SEQ ID NO: 19909 - DNA, 96 bp, Aspergillus viridinutans
  misc_feature: 166
ctccagtcacaacgttccatctcgtatgccgtatcggaagagcacacgtctgaactccagtcacaacgttccatctcgtatgccgtcttctgcttg

SEQ ID NO: 19910 - DNA, 96 bp, Aspergillus viridinutans
  misc_feature: 166
cgtctgaactccagtcacaacgttccatctcgtatgccgtatcatagatcggaagagcacacgtctgaactccagtcacaacgttccatctcgtat

SEQ ID NO: 19911 - DNA, 96 bp, Aspergillus viridinutans
  misc_feature: 166
acacgtctgaactccagtcacaacgttccatctcgtatgccgtatcatagatcggaagagcacacgtctgaactccagtcacaacgttccatctcg

SEQ ID NO: 19912 - DNA, 96 bp, Aspergillus viridinutans
  misc_feature: 166
cacgtctgaactccagtcacaacgttccatctcgtatgccgtatcatagatcggaagagcacacgtctgaactccagtcacaacgttccatctcgt

SEQ ID NO: 19913 - DNA, 96 bp, Aspergillus viridinutans
  misc_feature: 166
atcggaagagcacacgtctgaactccagtcacaacgttccatctcgtatgccgtatcgatcggaagagcacacgtctgaactccagtcacaacgtt

SEQ ID NO: 19914 - DNA, 96 bp, Aspergillus viridinutans
  misc_feature: 166
actccagtcacaacgttccatctcgtatgccgtatcggaagagcacacgtctgaactccagtcacaacgttccatctcgtatgccgtcttctgctt

SEQ ID NO: 19915 - DNA, 96 bp, Aspergillus viridinutans
  misc_feature: 165
cggaagagcacacgtctgaactccagatcggaagagcacacgtctgaactccagtcacaacgttccatctcgtatgccgtcttctgcttgaaaaaa

SEQ ID NO: 19916 - DNA, 96 bp, Aspergillus viridinutans
  misc_feature: 165
cggaagagcacacgtctgaactccagtcacaacgttccatctcgtatgccgtatcgatcggaagagcacacgtctgaactccagtcacaacgttcc

SEQ ID NO: 19917 - DNA, 96 bp, Aspergillus viridinutans
  misc_feature: 165
agcacacgtctgaactccagtcacaacgttccatctcgtatgccgtatcatagatcggaagagcacacgtctgaactccagtcacaacgttccatc

SEQ ID NO: 19918 - DNA, 96 bp, Aspergillus viridinutans
  misc_feature: 165
gagcacacgtctgaactccagtcacaacgttccatctcgtatgccgtatcatagatcggaagagcacacgtctgaactccagtcacaacgttccat

SEQ ID NO: 19919 - DNA, 96 bp, Aspergillus viridinutans
  misc_feature: 165
atcggaagagcacacgtctgaactccagtcacaacgttccatctcggatcggaagagcacacgtctgaactccagtcacaacgttccatctcgtat

SEQ ID NO: 19920 - DNA, 96 bp, Aspergillus viridinutans
  misc_feature: 164
ggaagagcacacgtctgaactccagtcacaacgttccatctcgtatgccgtatcgatcggaagagcacacgtctgaactccagtcacaacgttcca

SEQ ID NO: 19921 - DNA, 96 bp, Aspergillus viridinutans
  misc_feature: 164
agagcacacgtctgaactccagtcacaacgttccatctcgtatgccgtatcatggatcggaagagcacacgtctgaactccagtcacaacgttcca

SEQ ID NO: 19922 - DNA, 96 bp, Aspergillus viridinutans
  misc_feature: 164
cggaagagcacacgtctgaactccagtcacaacgttccatctcgtatgccgtctgatcggaagagcacacgtctgaactccagtcacaacgttcca

SEQ ID NO: 19923 - DNA, 96 bp, Aspergillus viridinutans
  misc_feature: 164
tcggaagagcacacgtctgaactccagtcacaacgttccatctcgtatgccgtctgatcggaagagcacacgtctgaactccagtcacaacgttcc

SEQ ID NO: 19924 - DNA, 96 bp, Aspergillus viridinutans
  misc_feature: 164
gatcggaagagcacacgtctgaactccagtcacaacgttccatctcgtatgccgtctgatcggaagagcacacgtctgaactccagtcacaacgtt

SEQ ID NO: 19925 - DNA, 96 bp, Aspergillus viridinutans
  misc_feature: 164
atcggaagagcacacgtctgaactccagtcacaacgttccatctcgtatgccgtctgatcggaagagcacacgtctgaactccagtcacaacgttc

SEQ ID NO: 19926 - DNA, 96 bp, Aspergillus viridinutans
  misc_feature: 163
gagcacacgtctgaactccagatcggaagagcacacgtctgaactccagtcacaacgttccatctcgtatgccgtcttctgcttgaaaaaaaaaaa

SEQ ID NO: 19927 - DNA, 96 bp, Aspergillus viridinutans
  misc_feature: 163
gatcggaagagcacacgtctgaactccagtcacaacgttccatctcgtatgccgtatcatagatcggaagagcacacgtctgaactccagtcacaa

SEQ ID NO: 19928 - DNA, 96 bp, Aspergillus viridinutans
  misc_feature: 163
ccagtcacaacgttccatctcgtatgccgtatcggaagagcacacgtctgaactccagtcacaacgttccatctcgtatgccgtcttctgcttgaa

SEQ ID NO: 19929 - DNA, 96 bp, Aspergillus viridinutans
  misc_feature: 163
tccagtcacaacgttccatctcgtatgccgtatcggaagagcacacgtctgaactccagtcacaacgttccatctcgtatgccgtcttctgcttga

SEQ ID NO: 19930 - DNA, 96 bp, Aspergillus viridinutans
  misc_feature: 162
agtcacaacgttccatctcgtatgccgtatcggaagagcacacgtctgaactccagtcacaacgttccatctcgtatgccgtcttctgcttgaaaa

SEQ ID NO: 19931 - DNA, 96 bp, Aspergillus viridinutans
  misc_feature: 162
cagtcacaacgttccatctcgtatgccgtatcggaagagcacacgtctgaactccagtcacaacgttccatctcgtatgccgtcttctgcttgaaa

SEQ ID NO: 19932 - DNA, 96 bp, Aspergillus viridinutans
  misc_feature: 162
tctgaactccagtcacaacgttccatctcgtatgccgtatcatagatcggaagagcacacgtctgaactccagtcacaacgttccatctcgtatgc

SEQ ID NO: 19933 - DNA, 96 bp, Aspergillus viridinutans
  misc_feature: 162
gatcggaagagcacacgtctgaactccagtcacaacgttccatctcggatcggaagagcacacgtctgaactccagtcacaacgttccatctcgta

SEQ ID NO: 19934 - DNA, 96 bp, Aspergillus viridinutans
  misc_feature: 161
gtcacaacgttccatctcgtatgccgtatcggaagagcacacgtctgaactccagtcacaacgttccatctcgtatgccgtcttctgcttgaaaaa

SEQ ID NO: 19935 - DNA, 96 bp, Aspergillus viridinutans
  misc_feature: 161
agagcacacgtctgaactccagtcacaacgttccatctcgtatgccgtatccttgatcggaagagcacacgtctgaactccagtcacaacgttcca

SEQ ID NO: 19936 - DNA, 96 bp, Aspergillus viridinutans
  misc_feature: 161
tgaactccagtcacaacgttccatctcgtatgccgtatcatagatcggaagagcacacgtctgaactccagtcacaacgttccatctcgtatgccg

SEQ ID NO: 19937 - DNA, 96 bp, Aspergillus viridinutans
  misc_feature: 161
ctgaactccagtcacaacgttccatctcgtatgccgtatcatagatcggaagagcacacgtctgaactccagtcacaacgttccatctcgtatgcc

SEQ ID NO: 19938 - DNA, 96 bp, Aspergillus viridinutans
  misc_feature: 160
tcggaagagcacacgtctgaactccagatcggaagagcacacgtctgaactccagtcacaacgttccatctcgtatgccgtcttctgcttgaaaaa

SEQ ID NO: 19939 - DNA, 96 bp, Aspergillus viridinutans
  misc_feature: 160
gaagagcacacgtctgaactccagtcacaacgttccatctcgtatgccgtatcgatcggaagagcacacgtctgaactccagtcacaacgttccat

SEQ ID NO: 19940 - DNA, 96 bp, Aspergillus viridinutans
  misc_feature: 160
gaactccagtcacaacgttccatctcgtatgccgtatcatagatcggaagagcacacgtctgaactccagtcacaacgttccatctcgtatgccgt

SEQ ID NO: 19941 - DNA, 96 bp, Aspergillus viridinutans
  misc_feature: 159
cggaagagcacacgtctgaactccagtcacaacgttccatctcgtatgccgtatgatcggaagagcacacgtctgaactccagtcacaacgttcca

SEQ ID NO: 19942 - DNA, 96 bp, Aspergillus viridinutans
  misc_feature: 159
aagagcacacgtctgaactccagtcacaacgttccatctcgtatgccgtatcgatcggaagagcacacgtctgaactccagtcacaacgttccatc

SEQ ID NO: 19943 - DNA, 96 bp, Aspergillus viridinutans
  misc_feature: 159
agcacacgtctgaactccagtcacaacgttccatctcgtatgccgtatcgatcggaagagcacacgtctgaactccagtcacaacgttccatctcg

SEQ ID NO: 19944 - DNA, 96 bp, Aspergillus viridinutans
  misc_feature: 158
tcggaagagcacacgtctgaactccagtcacaacgttccatctcgtatgccgtatgatcggaagagcacacgtctgaactccagtcacaacgttcc

SEQ ID NO: 19945 - DNA, 96 bp, Aspergillus viridinutans
  misc_feature: 158
cacacgtctgaactccagtcacaacgttccatctcgtatgccgtatcgatcggaagagcacacgtctgaactccagtcacaacgttccatctcgta

SEQ ID NO: 19946 - DNA, 96 bp, Aspergillus viridinutans
  misc_feature: 158
cgtctgaactccagtcacaacgttccatctcgtatgccgtatcgatcggaagagcacacgtctgaactccagtcacaacgttccatctcgtatgcc

SEQ ID NO: 19947 - DNA, 96 bp, Aspergillus viridinutans
  misc_feature: 158
acgtctgaactccagtcacaacgttccatctcgtatgccgtatcgatcggaagagcacacgtctgaactccagtcacaacgttccatctcgtatgc

SEQ ID NO: 19948 - DNA, 96 bp, Aspergillus viridinutans
  misc_feature: 158
gcacacgtctgaactccagtcacaacgttccatctcgtatgccgtatcgatcggaagagcacacgtctgaactccagtcacaacgttccatctcgt

SEQ ID NO: 19949 - DNA, 96 bp, Aspergillus viridinutans
  misc_feature: 158
gagttcagacgtgtgctcttccgatcagatcggaagagcgtcgtgtagggaaagagtgtagtactccgtgtagatctcggtggtcgccgtatcatt

SEQ ID NO: 19950 - DNA, 96 bp, Aspergillus viridinutans
  misc_feature: 158
gagcacacgtctgaactccagtcacaacgttccatctcgtatgccgtatcgatcggaagagcacacgtctgaactccagtcacaacgttccatctc

SEQ ID NO: 19951 - DNA, 96 bp, Aspergillus viridinutans
  misc_feature: 158
cacgtctgaactccagtcacaacgttccatctcgtatgccgtatcgatcggaagagcacacgtctgaactccagtcacaacgttccatctcgtatg

SEQ ID NO: 19952 - DNA, 96 bp, Aspergillus viridinutans
  misc_feature: 158
acacgtctgaactccagtcacaacgttccatctcgtatgccgtatcgatcggaagagcacacgtctgaactccagtcacaacgttccatctcgtat

SEQ ID NO: 19953 - DNA, 96 bp, Aspergillus viridinutans
  misc_feature: 158
agagcacacgtctgaactccagtcacaacgttccatctcgtatgccgtatcgatcggaagagcacacgtctgaactccagtcacaacgttccatct

SEQ ID NO: 19954 - DNA, 96 bp, Aspergillus viridinutans
  misc_feature: 157
atcggaagagcacacgtctgaactccagatcggaagagcacacgtctgaactccagtcacaacgttccatctcgtatgccgtcttctgcttgaaaa

SEQ ID NO: 19955 - DNA, 96 bp, Aspergillus viridinutans
  misc_feature: 157
gtctgaactccagtcacaacgttccatctcgtatgccgtatcgatcggaagagcacacgtctgaactccagtcacaacgttccatctcgtatgccg

SEQ ID NO: 19956 - DNA, 96 bp, Aspergillus viridinutans
  misc_feature: 157
acgtctgaactccagtcacaacgttccatctcgtatgccgtctgatcggaagagcacacgtctgaactccagtcacaacgttccatctcgtatgcc

SEQ ID NO: 19957 - DNA, 96 bp, Aspergillus viridinutans
  misc_feature: 157
cgcgcgcgagggtgacgagggaaggaatcgggaggggaagggcaagggaaagggagagggaggaggaggggagggaggcggtgggaggcgccgcgc

SEQ ID NO: 19958 - DNA, 96 bp, Aspergillus viridinutans
  misc_feature: 157
cacgtctgaactccagtcacaacgttccatctcgtatgccgtctgatcggaagagcacacgtctgaactccagtcacaacgttccatctcgtatgc

SEQ ID NO: 19959 - DNA, 96 bp, Aspergillus viridinutans
  misc_feature: 157
atcggaagagcacacgtctgaactccagtcacaacgttccatctcgtatgccgtatgatcggaagagcacacgtctgaactccagtcacaacgttc

SEQ ID NO: 19960 - DNA, 96 bp, Aspergillus viridinutans
  misc_feature: 157
acacgtctgaactccagtcacaacgttccatctcgtatgccgtctgatcggaagagcacacgtctgaactccagtcacaacgttccatctcgtatg

SEQ ID NO: 19961 - DNA, 96 bp, Aspergillus viridinutans
  misc_feature: 157
cacacgtctgaactccagtcacaacgttccatctcgtatgccgtctgatcggaagagcacacgtctgaactccagtcacaacgttccatctcgtat

SEQ ID NO: 19962 - DNA, 96 bp, Aspergillus viridinutans
  misc_feature: 156
tcacaacgttccatctcgtatgccgtatcggaagagcacacgtctgaactccagtcacaacgttccatctcgtatgccgtcttctgcttgaaaaaa

SEQ ID NO: 19963 - DNA, 96 bp, Aspergillus viridinutans
  misc_feature: 156
gatcggaagagcacacgtctgaactccagatcggaagagcacacgtctgaactccagtcacaacgttccatctcgtatgccgtcttctgcttgaaa

SEQ ID NO: 19964 - DNA, 96 bp, Aspergillus viridinutans
  misc_feature: 156
gcacacgtctgaactccagtcacaacgttccatctcgtatgccgtctgatcggaagagcacacgtctgaactccagtcacaacgttccatctcgta

SEQ ID NO: 19965 - DNA, 96 bp, Aspergillus viridinutans
  misc_feature: 156
ggaagagcacacgtctgaactccagtcacaacgttccatctcgtatgccgtctgatcggaagagcacacgtctgaactccagtcacaacgttccat

SEQ ID NO: 19966 - DNA, 96 bp, Aspergillus viridinutans
  misc_feature: 156
gagcacacgtctgaactccagtcacaacgttccatctcgtatgccgtctgatcggaagagcacacgtctgaactccagtcacaacgttccatctcg

SEQ ID NO: 19967 - DNA, 96 bp, Aspergillus viridinutans
  misc_feature: 156
cgtctgaactccagtcacaacgttccatctcgtatgccgtctgatcggaagagcacacgtctgaactccagtcacaacgttccatctcgtatgccg

SEQ ID NO: 19968 - DNA, 96 bp, Aspergillus viridinutans
  misc_feature: 156
agcacacgtctgaactccagtcacaacgttccatctcgtatgccgtctgatcggaagagcacacgtctgaactccagtcacaacgttccatctcgt

SEQ ID NO: 19969 - DNA, 96 bp, Aspergillus viridinutans
  misc_feature: 155
tctgaactccagtcacaacgttccatctcgtatgccgtatcgatcggaagagcacacgtctgaactccagtcacaacgttccatctcgtatgccgt

SEQ ID NO: 19970 - DNA, 96 bp, Aspergillus viridinutans
  misc_feature: 155
gtctgaactccagtcacaacgttccatctcgtatgccgtctgatcggaagagcacacgtctgaactccagtcacaacgttccatctcgtatgccgt

SEQ ID NO: 19971 - DNA, 96 bp, Aspergillus viridinutans
  misc_feature: 155
gaagagcacacgtctgaactccagtcacaacgttccatctcgtatgccgtctgatcggaagagcacacgtctgaactccagtcacaacgttccatc

SEQ ID NO: 19972 - DNA, 96 bp, Aspergillus viridinutans
  misc_feature: 155
agagcacacgtctgaactccagtcacaacgttccatctcgtatgccgtctgatcggaagagcacacgtctgaactccagtcacaacgttccatctc

SEQ ID NO: 19973 - DNA, 96 bp, Aspergillus viridinutans
  misc_feature: 155
aagagcacacgtctgaactccagtcacaacgttccatctcgtatgccgtctgatcggaagagcacacgtctgaactccagtcacaacgttccatct

SEQ ID NO: 19974 - DNA, 96 bp, Aspergillus viridinutans
  misc_feature: 154
tccagtcacaacgttccatctcgtatgccgtatcatgatcggaagagcacacgtctgaactccagtcacaacgttccatctcgtatgccgtatcat

SEQ ID NO: 19975 - DNA, 96 bp, Aspergillus viridinutans
  misc_feature: 153
ggagttcagacgtgtgctcttccgatcagatcggaagagcgtcgtgtagggaaagagtgtagtactccgtgtagatctcggtggtcgccgtatcat

SEQ ID NO: 19976 - DNA, 96 bp, Aspergillus viridinutans
  misc_feature: 152
ggaagagcacacgtctgaactccagtcacaacgttccatctcgtatgccgtatgatcggaagagcacacgtctgaactccagtcacaacgttccat

SEQ ID NO: 19977 - DNA, 96 bp, Aspergillus viridinutans
  misc_feature: 151
gaagagcacacgtctgaactccagtcacaacgttccatctcgtatgccgtatgatcggaagagcacacgtctgaactccagtcacaacgttccatc

SEQ ID NO: 19978 - DNA, 96 bp, Aspergillus viridinutans
  misc_feature: 151
gagcacacgtctgaactccagtcacaacgttccatctcggatcggaagagcacacgtctgaactccagtcacaacgttccatctcgtatgccgtct

SEQ ID NO: 19979 - DNA, 96 bp, Aspergillus viridinutans
  misc_feature: 151
agagcacacgtctgaactccagtcacaacgttccatctcggatcggaagagcacacgtctgaactccagtcacaacgttccatctcgtatgccgtc

SEQ ID NO: 19980 - DNA, 96 bp, Aspergillus viridinutans
  misc_feature: 150
tctgaactccagtcacaacgttccatctcgtatgccgtctgatcggaagagcacacgtctgaactccagtcacaacgttccatctcgtatgccgtc

SEQ ID NO: 19981 - DNA, 96 bp, Aspergillus viridinutans
  misc_feature: 150
acgtctgaactccagtcacaacgttccatctcgtatgccgtatgatcggaagagcacacgtctgaactccagtcacaacgttccatctcgtatgcc

SEQ ID NO: 19982 - DNA, 96 bp, Aspergillus viridinutans
  misc_feature: 150
cacgtctgaactccagtcacaacgttccatctcgtatgccgtatgatcggaagagcacacgtctgaactccagtcacaacgttccatctcgtatgc

SEQ ID NO: 19983 - DNA, 96 bp, Aspergillus viridinutans
  misc_feature: 150
agcacacgtctgaactccagtcacaacgttccatctcgtatgccgtatcatggatcggaagagcacacgtctgaactccagtcacaacgttccatc

SEQ ID NO: 19984 - DNA, 96 bp, Aspergillus viridinutans
  misc_feature: 150
ctgaactccagtcacaacgttccatctcgtatgccgtctgatcggaagagcacacgtctgaactccagtcacaacgttccatctcgtatgccgtct

SEQ ID NO: 19985 - DNA, 96 bp, Aspergillus viridinutans
  misc_feature: 150
cgtctgaactccagtcacaacgttccatctcgtatgccgtatgatcggaagagcacacgtctgaactccagtcacaacgttccatctcgtatgccg

SEQ ID NO: 19986 - DNA, 96 bp, Aspergillus viridinutans
  misc_feature: 150
acacgtctgaactccagtcacaacgttccatctcgtatgccgtatcatggatcggaagagcacacgtctgaactccagtcacaacgttccatctcg

SEQ ID NO: 19987 - DNA, 96 bp, Aspergillus viridinutans
  misc_feature: 150
acacgtctgaactccagtcacaacgttccatctcgtatgccgtatgatcggaagagcacacgtctgaactccagtcacaacgttccatctcgtatg

SEQ ID NO: 19988 - DNA, 96 bp, Aspergillus viridinutans
  misc_feature: 150
cacacgtctgaactccagtcacaacgttccatctcgtatgccgtatgatcggaagagcacacgtctgaactccagtcacaacgttccatctcgtat

SEQ ID NO: 19989 - DNA, 96 bp, Aspergillus viridinutans
  misc_feature: 149
gcacacgtctgaactccagtcacaacgttccatctcgtatgccgtatgatcggaagagcacacgtctgaactccagtcacaacgttccatctcgta

SEQ ID NO: 19990 - DNA, 96 bp, Aspergillus viridinutans
  misc_feature: 149
gcacacgtctgaactccagtcacaacgttccatctcgtatgccgtatcatggatcggaagagcacacgtctgaactccagtcacaacgttccatct

SEQ ID NO: 19991 - DNA, 96 bp, Aspergillus viridinutans
  misc_feature: 149
gcacacgtctgaactccagtcacaacgttccatctcggatcggaagagcacacgtctgaactccagtcacaacgttccatctcgtatgccgtcttc

SEQ ID NO: 19992 - DNA, 96 bp, Aspergillus viridinutans
  misc_feature: 149
gagcacacgtctgaactccagtcacaacgttccatctcgtatgccgtatgatcggaagagcacacgtctgaactccagtcacaacgttccatctcg

SEQ ID NO: 19993 - DNA, 96 bp, Aspergillus viridinutans
  misc_feature: 149
gagcacacgtctgaactccagtcacaacgttccatctcgtatgccgtatcatggatcggaagagcacacgtctgaactccagtcacaacgttccat

SEQ ID NO: 19994 - DNA, 96 bp, Aspergillus viridinutans
  misc_feature: 149
cacacgtctgaactccagtcacaacgttccatctcgtatgccgtatcatggatcggaagagcacacgtctgaactccagtcacaacgttccatctc

SEQ ID NO: 19995 - DNA, 96 bp, Aspergillus viridinutans
  misc_feature: 149
agagcacacgtctgaactccagtcacaacgttccatctcgtatgccgtatgatcggaagagcacacgtctgaactccagtcacaacgttccatctc

SEQ ID NO: 19996 - DNA, 96 bp, Aspergillus viridinutans
  misc_feature: 149
cacgtctgaactccagtcacaacgttccatctcgtatgccgtatcatggatcggaagagcacacgtctgaactccagtcacaacgttccatctcgt

SEQ ID NO: 19997 - DNA, 96 bp, Aspergillus viridinutans
  misc_feature: 149
agcacacgtctgaactccagtcacaacgttccatctcgtatgccgtatgatcggaagagcacacgtctgaactccagtcacaacgttccatctcgt

SEQ ID NO: 19998 - DNA, 96 bp, Aspergillus viridinutans
  misc_feature: 149
agcacacgtctgaactccagtcacaacgttccatctcggatcggaagagcacacgtctgaactccagtcacaacgttccatctcgtatgccgtctt

SEQ ID NO: 19999 - DNA, 96 bp, Aspergillus viridinutans
  misc_feature: 149
aagagcacacgtctgaactccagtcacaacgttccatctcgtatgccgtatgatcggaagagcacacgtctgaactccagtcacaacgttccatct

SEQ ID NO: 20000 - DNA, 96 bp, Aspergillus viridinutans
  misc_feature: 148
gtcacaacgttccatctcgtatgccgtctgatcggaagagcacacgtctgaactccagtcacaacgttccatctcgtatgccgtcttctgcttgaa

SEQ ID NO: 20001 - DNA, 96 bp, Aspergillus viridinutans
  misc_feature: 148
acgtctgaactccagtcacaacgttccatctcgtatgccgtatcatggatcggaagagcacacgtctgaactccagtcacaacgttccatctcgta

SEQ ID NO: 20002 - DNA, 96 bp, Aspergillus viridinutans
  misc_feature: 148
gtctgaactccagtcacaacgttccatctcgtatgccgtatgatcggaagagcacacgtctgaactccagtcacaacgttccatctcgtatgccgt

SEQ ID NO: 20003 - DNA, 96 bp, Aspergillus viridinutans
  misc_feature: 148
gcgcgcgcgagggtgacgagggaaggaatcgggaggggaagggcaagggaaagggagagggaggaggaggggagggaggcggtgggaggcgccgcg

SEQ ID NO: 20004 - DNA, 96 bp, Aspergillus viridinutans
  misc_feature: 148
cgtctgaactccagtcacaacgttccatctcgtatgccgtatcatggatcggaagagcacacgtctgaactccagtcacaacgttccatctcgtat

SEQ ID NO: 20005 - DNA, 96 bp, Aspergillus viridinutans
  misc_feature: 147
tcacaacgttccatctcgtatgccgtctgatcggaagagcacacgtctgaactccagtcacaacgttccatctcgtatgccgtcttctgcttgaaa

SEQ ID NO: 20006 - DNA, 96 bp, Aspergillus viridinutans
  misc_feature: 147
tgaactccagtcacaacgttccatctcgtatgccgtctgatcggaagagcacacgtctgaactccagtcacaacgttccatctcgtatgccgtctt

SEQ ID NO: 20007 - DNA, 96 bp, Aspergillus viridinutans
  misc_feature: 147
agtcacaacgttccatctcgtatgccgtctgatcggaagagcacacgtctgaactccagtcacaacgttccatctcgtatgccgtcttctgcttga

SEQ ID NO: 20008 - DNA, 96 bp, Aspergillus viridinutans
  misc_feature: 147
gtctgaactccagtcacaacgttccatctcgtatgccgtatcatggatcggaagagcacacgtctgaactccagtcacaacgttccatctcgtatg

SEQ ID NO: 20009 - DNA, 96 bp, Aspergillus viridinutans
  misc_feature: 147
cacgtctgaactccagtcacaacgttccatctcggatcggaagagcacacgtctgaactccagtcacaacgttccatctcgtatgccgtcttctgc

SEQ ID NO: 20010 - DNA, 96 bp, Aspergillus viridinutans
  misc_feature: 147
acacgtctgaactccagtcacaacgttccatctcggatcggaagagcacacgtctgaactccagtcacaacgttccatctcgtatgccgtcttctg

SEQ ID NO: 20011 - DNA, 96 bp, Aspergillus viridinutans
  misc_feature: 147
cacacgtctgaactccagtcacaacgttccatctcggatcggaagagcacacgtctgaactccagtcacaacgttccatctcgtatgccgtcttct

SEQ ID NO: 20012 - DNA, 96 bp, Aspergillus viridinutans
  misc_feature: 146
tccagtcacaacgttccatctcgtatgccgtctgatcggaagagcacacgtctgaactccagtcacaacgttccatctcgtatgccgtcttctgct

SEQ ID NO: 20013 - DNA, 96 bp, Aspergillus viridinutans
  misc_feature: 146
gagcacacgtctgaactccagtcacaacgttccatctcgtatgccgtatcattgatcggaagagcacacgtctgaactccagtcacaacgttccac

SEQ ID NO: 20014 - DNA, 96 bp, Aspergillus viridinutans
  misc_feature: 146
gtctgaactccagtcacaacgttccatctcgtatgccgtgatcggaagagcacacgtctgaactccagtcacaacgttccatctcgtatgccgtat

SEQ ID NO: 20015 - DNA, 96 bp, Aspergillus viridinutans
  misc_feature: 146
ggcgcgcgcgagggtgacgagggaaggaatcgggaggggaagggcaagggaaagggagagggaggaggaggggagggaggcggtgggaggcgccgc

SEQ ID NO: 20016 - DNA, 96 bp, Aspergillus viridinutans
  misc_feature: 146
gcacacgtctgaactccagtcacaacgttccatctcgtatgccgtatccttgatcggaagagcacacgtctgaactccagtcacaacgttccatct

SEQ ID NO: 20017 - DNA, 96 bp, Aspergillus viridinutans
  misc_feature: 146
agcacacgtctgaactccagtcacaacgttccatctcgtatgccgtatccttgatcggaagagcacacgtctgaactccagtcacaacgttccatc

SEQ ID NO: 20018 - DNA, 96 bp, Aspergillus viridinutans
  misc_feature: 146
gagcacacgtctgaactccagtcacaacgttccatctcgtatgccgtatccttgatcggaagagcacacgtctgaactccagtcacaacgttccat

SEQ ID NO: 20019 - DNA, 96 bp, Aspergillus viridinutans
  misc_feature: 146
cacacgtctgaactccagtcacaacgttccatctcgtatgccgtatccttgatcggaagagcacacgtctgaactccagtcacaacgttccatctc

SEQ ID NO: 20020 - DNA, 96 bp, Aspergillus viridinutans
  misc_feature: 146
gaactccagtcacaacgttccatctcgtatgccgtctgatcggaagagcacacgtctgaactccagtcacaacgttccatctcgtatgccgtcttc

SEQ ID NO: 20021 - DNA, 96 bp, Aspergillus viridinutans
  misc_feature: 146
acacgtctgaactccagtcacaacgttccatctcgtatgccgtatccttgatcggaagagcacacgtctgaactccagtcacaacgttccatctcg

SEQ ID NO: 20022 - DNA, 96 bp, Aspergillus viridinutans
  misc_feature: 146
ccagtcacaacgttccatctcgtatgccgtctgatcggaagagcacacgtctgaactccagtcacaacgttccatctcgtatgccgtcttctgctt

SEQ ID NO: 20023 - DNA, 96 bp, Aspergillus viridinutans
  misc_feature: 146
cagtcacaacgttccatctcgtatgccgtctgatcggaagagcacacgtctgaactccagtcacaacgttccatctcgtatgccgtcttctgcttg

SEQ ID NO: 20024 - DNA, 96 bp, Aspergillus viridinutans
  misc_feature: 146
acgtctgaactccagtcacaacgttccatctcggatcggaagagcacacgtctgaactccagtcacaacgttccatctcgtatgccgtcttctgct

SEQ ID NO: 20025 - DNA, 96 bp, Aspergillus viridinutans
  misc_feature: 145
gtctgaactccagtcacaacgttccatctcgtatgccgtatccttgatcggaagagcacacgtctgaactccagtcacaacgttccatctcgtatg

SEQ ID NO: 20026 - DNA, 96 bp, Aspergillus viridinutans
  misc_feature: 145
ctccagtcacaacgttccatctcgtatgccgtctgatcggaagagcacacgtctgaactccagtcacaacgttccatctcgtatgccgtcttctgc

SEQ ID NO: 20027 - DNA, 96 bp, Aspergillus viridinutans
  misc_feature: 145
gagcacacgtctgaactccagtcacaacgttccatctcgtatgccgtcttctgcttgaaaaaaaaaaacgtctgaactccagtcacaacgttccat

SEQ ID NO: 20028 - DNA, 96 bp, Aspergillus viridinutans
  misc_feature: 145
cgtctgaactccagtcacaacgttccatctcgtatgccgtatccttgatcggaagagcacacgtctgaactccagtcacaacgttccatctcgtat

SEQ ID NO: 20029 - DNA, 96 bp, Aspergillus viridinutans
  misc_feature: 145
actccagtcacaacgttccatctcgtatgccgtctgatcggaagagcacacgtctgaactccagtcacaacgttccatctcgtatgccgtcttctg

SEQ ID NO: 20030 - DNA, 96 bp, Aspergillus viridinutans
  misc_feature: 145
cacgtctgaactccagtcacaacgttccatctcgtatgccgtatccttgatcggaagagcacacgtctgaactccagtcacaacgttccatctcgt

SEQ ID NO: 20031 - DNA, 96 bp, Aspergillus viridinutans
  misc_feature: 145
aactccagtcacaacgttccatctcgtatgccgtctgatcggaagagcacacgtctgaactccagtcacaacgttccatctcgtatgccgtcttct

SEQ ID NO: 20032 - DNA, 96 bp, Aspergillus viridinutans
  misc_feature: 144
tgaactccagtcacaacgttccatctcgtatgccgtatcatggatcggaagagcacacgtctgaactccagtcacaacgttccatctcgtatgccg

SEQ ID NO: 20033 - DNA, 96 bp, Aspergillus viridinutans
  misc_feature: 144
tctgaactccagtcacaacgttccatctcgtatgccgtatcatggatcggaagagcacacgtctgaactccagtcacaacgttccatctcgtatgc

SEQ ID NO: 20034 - DNA, 96 bp, Aspergillus viridinutans
  misc_feature: 144
acgtctgaactccagtcacaacgttccatctcgtatgccgtatccttgatcggaagagcacacgtctgaactccagtcacaacgttccatctcgta

SEQ ID NO: 20035 - DNA, 96 bp, Aspergillus viridinutans
  misc_feature: 144
ctgaactccagtcacaacgttccatctcgtatgccgtatcatggatcggaagagcacacgtctgaactccagtcacaacgttccatctcgtatgcc

SEQ ID NO: 20036 - DNA, 96 bp, Aspergillus viridinutans
  misc_feature: 144
cgtctgaactccagtcacaacgttccatctcggatcggaagagcacacgtctgaactccagtcacaacgttccatctcgtatgccgtcttctgctt

SEQ ID NO: 20037 - DNA, 96 bp, Aspergillus viridinutans
  misc_feature: 143
tgaactccagtcacaacgttccatctcgtatgccgtatccttgatcggaagagcacacgtctgaactccagtcacaacgttccatctcgtatgccg

SEQ ID NO: 20038 - DNA, 96 bp, Aspergillus viridinutans
  misc_feature: 143
tctgaactccagtcacaacgttccatctcgtatgccgtatccttgatcggaagagcacacgtctgaactccagtcacaacgttccatctcgtatgc

SEQ ID NO: 20039 - DNA, 96 bp, Aspergillus viridinutans
  misc_feature: 143
tctgaactccagtcacaacgttccatctcgtatgccgtaagatcggaagagcacacgtctgaactccagtcacaacgttccatctcgtatgccgtc

SEQ ID NO: 20040 - DNA, 96 bp, Aspergillus viridinutans
  misc_feature: 143
agttcagacgtgtgctcttccgatcagatcggaagagcgtcgtgtagggaaagagtgtagtactccgtgtagatctcggtggtcgccgtatcatta

SEQ ID NO: 20041 - DNA, 96 bp, Aspergillus viridinutans
  misc_feature: 143
gtctgaactccagtcacaacgttccatctcggatcggaagagcacacgtctgaactccagtcacaacgttccatctcgtatgccgtcttctgcttg

SEQ ID NO: 20042 - DNA, 96 bp, Aspergillus viridinutans
  misc_feature: 142
cggaagagcagatcggaagagcagatcggaagagcacacgtctgaactccagtcacaacgttccatctcgtatgccgtcttctgcttgaaaaaaaa

SEQ ID NO: 20043 - DNA, 96 bp, Aspergillus viridinutans
  misc_feature: 142
tcggaagagcagatcggaagagcagatcggaagagcacacgtctgaactccagtcacaacgttccatctcgtatgccgtcttctgcttgaaaaaaa

SEQ ID NO: 20044 - DNA, 96 bp, Aspergillus viridinutans
  misc_feature: 142
agcacacgtctgaactccagtcacaacgttccatctcgtatgccgtatcattgatcggaagagcacacgtctgaactccagtcacaacgttccacc

SEQ ID NO: 20045 - DNA, 96 bp, Aspergillus viridinutans
  misc_feature: 142
gatcggaagagcacacgtctgaactccagtcacaacgttccatctcgtatgccgtatcgatcggaagagcacacgtctgaactccagtcacaacgt

SEQ ID NO: 20046 - DNA, 96 bp, Aspergillus viridinutans
  misc_feature: 142
gaactccagtcacaacgttccatctcgtatgccgtatcatggatcggaagagcacacgtctgaactccagtcacaacgttccatctcgtatgccgt

SEQ ID NO: 20047 - DNA, 96 bp, Aspergillus viridinutans
  misc_feature: 142
actccagtcacaacgttccatctcgtatgccgtatcatagatcggaagagcacacgtctgaactccagtcacaacgttccatctcgtatgccgtct

SEQ ID NO: 20048 - DNA, 96 bp, Aspergillus viridinutans
  misc_feature: 141
gatcggaagagcacacgtctgaactccagtcacaacgttccatctcgtatgccgtatcatggatcggaagagcacacgtctgaactccagtcacaa

SEQ ID NO: 20049 - DNA, 96 bp, Aspergillus viridinutans
  misc_feature: 141
ctgaactccagtcacaacgttccatctcgtatgccgtatccttgatcggaagagcacacgtctgaactccagtcacaacgttccatctcgtatgcc

SEQ ID NO: 20050 - DNA, 96 bp, Aspergillus viridinutans
  misc_feature: 141
aactccagtcacaacgttccatctcgtatgccgtatcatagatcggaagagcacacgtctgaactccagtcacaacgttccatctcgtatgccgtc

SEQ ID NO: 20051 - DNA, 96 bp, Aspergillus viridinutans
  misc_feature: 141
ctgaactccagtcacaacgttccatctcgtatgccgtaagatcggaagagcacacgtctgaactccagtcacaacgttccatctcgtatgccgtct

SEQ ID NO: 20052 - DNA, 96 bp, Aspergillus viridinutans
  misc_feature: 140
gaagagcagatcggaagagcagatcggaagagcacacgtctgaactccagtcacaacgttccatctcgtatgccgtcttctgcttgaaaaaaaaaa

SEQ ID NO: 20053 - DNA, 96 bp, Aspergillus viridinutans
  misc_feature: 140
ggaagagcagatcggaagagcagatcggaagagcacacgtctgaactccagtcacaacgttccatctcgtatgccgtcttctgcttgaaaaaaaaa

SEQ ID NO: 20054 - DNA, 96 bp, Aspergillus viridinutans
  misc_feature: 140
ctgaactccagtcacaacgttccatctcggatcggaagagcacacgtctgaactccagtcacaacgttccatctcgtatgccgtcttctgcttgaa

SEQ ID NO: 20055 - DNA, 96 bp, Aspergillus viridinutans
  misc_feature: 140
tgaactccagtcacaacgttccatctcgtatgccgtaagatcggaagagcacacgtctgaactccagtcacaacgttccatctcgtatgccgtctt

SEQ ID NO: 20056 - DNA, 96 bp, Aspergillus viridinutans
  misc_feature: 140
tctgaactccagtcacaacgttccatctcggatcggaagagcacacgtctgaactccagtcacaacgttccatctcgtatgccgtcttctgcttga

SEQ ID NO: 20057 - DNA, 96 bp, Aspergillus viridinutans
  misc_feature: 140
gaactccagtcacaacgttccatctcgtatgccgtaagatcggaagagcacacgtctgaactccagtcacaacgttccatctcgtatgccgtcttc

SEQ ID NO: 20058 - DNA, 96 bp, Aspergillus viridinutans
  misc_feature: 140
gaactccagtcacaacgttccatctcgtatgccgtatccttgatcggaagagcacacgtctgaactccagtcacaacgttccatctcgtatgccgt

SEQ ID NO: 20059 - DNA, 96 bp, Aspergillus viridinutans
  misc_feature: 140
cggcgcgcgcgagggtgacgagggaaggaatcgggaggggaagggcaagggaaagggagagggaggaggaggggagggaggcggtgggaggcgccg

SEQ ID NO: 20060 - DNA, 96 bp, Aspergillus viridinutans
  misc_feature: 139
cctacacgacgctcttccgatcgatcggaagagcacacgtctgaactccagtcacaacgttccatctcgtatgccgtcttctgcttgaaaaaaaaa

SEQ ID NO: 20061 - DNA, 96 bp, Aspergillus viridinutans
  misc_feature: 139
agtcacaacgttccatctcgtatgccgtatcatagatcggaagagcacacgtctgaactccagtcacaacgttccatctcgtatgccgtcttctgc

SEQ ID NO: 20062 - DNA, 96 bp, Aspergillus viridinutans
  misc_feature: 139
gcacacgtctgaactccagtcacaacgttccatctcgtatgccgtatcattgatcggaagagcacacgtctgaactccagtcacaacgttccacct

SEQ ID NO: 20063 - DNA, 96 bp, Aspergillus viridinutans
  misc_feature: 139
agcacacgtctgaactccagtcacaacgttccatctcgtatgccgtcttctgcttgaaaaaaaaaaacgtctgaactccagtcacaacgttccatc

SEQ ID NO: 20064 - DNA, 96 bp, Aspergillus viridinutans
  misc_feature: 139
cacacgtctgaactccagtcacaacgttccatctcgtatgccgtatcattgatcggaagagcacacgtctgaactccagtcacaacgttccacctc

SEQ ID NO: 20065 - DNA, 96 bp, Aspergillus viridinutans
  misc_feature: 139
acacgtctgaactccagtcacaacgttccatctcgtatgccgtatcattgatcggaagagcacacgtctgaactccagtcacaacgttccacctcg

SEQ ID NO: 20066 - DNA, 96 bp, Aspergillus viridinutans
  misc_feature: 139
ccagtcacaacgttccatctcgtatgccgtatcatagatcggaagagcacacgtctgaactccagtcacaacgttccatctcgtatgccgtcttct

SEQ ID NO: 20067 - DNA, 96 bp, Aspergillus viridinutans
  misc_feature: 139
cagtcacaacgttccatctcgtatgccgtatcatagatcggaagagcacacgtctgaactccagtcacaacgttccatctcgtatgccgtcttctg

SEQ ID NO: 20068 - DNA, 96 bp, Aspergillus viridinutans
  misc_feature: 139
actccagtcacaacgttccatctcgtatgccgtaagatcggaagagcacacgtctgaactccagtcacaacgttccatctcgtatgccgtcttctg

SEQ ID NO: 20069 - DNA, 96 bp, Aspergillus viridinutans
  misc_feature: 139
aactccagtcacaacgttccatctcgtatgccgtaagatcggaagagcacacgtctgaactccagtcacaacgttccatctcgtatgccgtcttct

SEQ ID NO: 20070 - DNA, 96 bp, Aspergillus viridinutans
  misc_feature: 139
aactccagtcacaacgttccatctcgtatgccgtagatcggaagagcacacgtctgaactccagtcacaacgttccatctcgtatgccgtatcatt

SEQ ID NO: 20071 - DNA, 96 bp, Aspergillus viridinutans
  misc_feature: 138
agcacacgtctgaactccagatcggaagagcacacgtctgaactccagtcacaacgttccatctcgtatgccgtcttctgcttgaaaaaaaaaaaa

SEQ ID NO: 20072 - DNA, 96 bp, Aspergillus viridinutans
  misc_feature: 138
actccagtcacaacgttccatctcggatcggaagagcacacgtctgaactccagtcacaacgttccatctcgtatgccgtcttctgcttgaaaaaa

SEQ ID NO: 20073 - DNA, 96 bp, Aspergillus viridinutans
  misc_feature: 138
aactccagtcacaacgttccatctcggatcggaagagcacacgtctgaactccagtcacaacgttccatctcgtatgccgtcttctgcttgaaaaa

SEQ ID NO: 20074 - DNA, 96 bp, Aspergillus viridinutans
  misc_feature: 138
gaactccagtcacaacgttccatctcggatcggaagagcacacgtctgaactccagtcacaacgttccatctcgtatgccgtcttctgcttgaaaa

SEQ ID NO: 20075 - DNA, 96 bp, Aspergillus viridinutans
  misc_feature: 138
tgaactccagtcacaacgttccatctcggatcggaagagcacacgtctgaactccagtcacaacgttccatctcgtatgccgtcttctgcttgaaa

SEQ ID NO: 20076 - DNA, 96 bp, Aspergillus viridinutans
  misc_feature: 138
agatcggaagagcacacgtctgaactccagtcacaacgttccatctcgtatgccgtatcatgatcggaagagcacacgtctgaactccagtcacaa

SEQ ID NO: 20077 - DNA, 96 bp, Aspergillus viridinutans
  misc_feature: 138
tccagtcacaacgttccatctcgtatgccgtatcatagatcggaagagcacacgtctgaactccagtcacaacgttccatctcgtatgccgtcttc

SEQ ID NO: 20078 - DNA, 96 bp, Aspergillus viridinutans
  misc_feature: 138
gtcacaacgttccatctcgtatgccgtatcatagatcggaagagcacacgtctgaactccagtcacaacgttccatctcgtatgccgtcttctgct

SEQ ID NO: 20079 - DNA, 96 bp, Aspergillus viridinutans
  misc_feature: 138
ctccagtcacaacgttccatctcgtatgccgtaagatcggaagagcacacgtctgaactccagtcacaacgttccatctcgtatgccgtcttctgc

SEQ ID NO: 20080 - DNA, 96 bp, Aspergillus viridinutans
  misc_feature: 138
ctccagtcacaacgttccatctcgtatgccgtatcatagatcggaagagcacacgtctgaactccagtcacaacgttccatctcgtatgccgtctt

SEQ ID NO: 20081 - DNA, 96 bp, Aspergillus viridinutans
  misc_feature: 138
cacgtctgaactccagtcacaacgttccatctcgtatgccgtatcattgatcggaagagcacacgtctgaactccagtcacaacgttccacctcgt

SEQ ID NO: 20082 - DNA, 96 bp, Aspergillus viridinutans
  misc_feature: 137
ggaagagcgtcgtgtagggaaagagtgtagtactccgtgtagatctcggtggtcgccgtatcattaaaaaaaaaaaaaaaaaaaaaaaaaaaaaaa

SEQ ID NO: 20083 - DNA, 96 bp, Aspergillus viridinutans
  misc_feature: 137
ctacacgacgctcttccgatcgatcggaagagcacacgtctgaactccagtcacaacgttccatctcgtatgccgtcttctgcttgaaaaaaaaaa

SEQ ID NO: 20084 - DNA, 96 bp, Aspergillus viridinutans
  misc_feature: 137
ccagtcacaacgttccatctcggatcggaagagcacacgtctgaactccagtcacaacgttccatctcgtatgccgtcttctgcttgaaaaaaaaa

SEQ ID NO: 20085 - DNA, 96 bp, Aspergillus viridinutans
  misc_feature: 137
atcggaagagcagatcggaagagcagatcggaagagcacacgtctgaactccagtcacaacgttccatctcgtatgccgtcttctgcttgaaaaaa

SEQ ID NO: 20086 - DNA, 96 bp, Aspergillus viridinutans
  misc_feature: 137
tccagtcacaacgttccatctcgtatgccgtaagatcggaagagcacacgtctgaactccagtcacaacgttccatctcgtatgccgtcttctgct

SEQ ID NO: 20087 - DNA, 96 bp, Aspergillus viridinutans
  misc_feature: 137
caccgagatctacacggagtactacactctttccctacacgacgctcttccgatcgatcggaagagcacacgtctgaactccagtcacaacgttcc

SEQ ID NO: 20088 - DNA, 96 bp, Aspergillus viridinutans
  misc_feature: 137
gcacacgtctgaactccagtcacaacgttccatctcgtatgccgtcttctgcttgaaaaaaaaaaacgtctgaactccagtcacaacgttccatct

SEQ ID NO: 20089 - DNA, 96 bp, Aspergillus viridinutans
  misc_feature: 137
gaggagagatggaggagagatggaggagagatggaggagagatggaggagagatggaggagagatggaggagagatggaggagagatggaggagag

SEQ ID NO: 20090 - DNA, 96 bp, Aspergillus viridinutans
  misc_feature: 137
cacacgtctgaactccagtcacaacgttccatctcgtatgccgtcttctgcttgaaaaaaaaaaacgtctgaactccagtcacaacgttccatctc

SEQ ID NO: 20091 - DNA, 96 bp, Aspergillus viridinutans
  misc_feature: 137
actccagtcacaacgttccatctcgtatgccgtatcattgatcggaagagcacacgtctgaactccagtcacaacgttccatctcgtatgccgtag

SEQ ID NO: 20092 - DNA, 96 bp, Aspergillus viridinutans
  misc_feature: 136
gatcggaagagcacacgtctgaactccagtcacaacgttccatctcgtatgccgtcttctgcttgaaaaaaaaaaaaaaaaaaaaaaaaaaaaaaa

SEQ ID NO: 20093 - DNA, 96 bp, Aspergillus viridinutans
  misc_feature: 136
tcacaacgttccatctcgggatcggaagagcacacgtctgaactccagtcacaacgttccatctcgtatgccgtcttctgcttgaaaaaaaaaaaa

SEQ ID NO: 20094 - DNA, 96 bp, Aspergillus viridinutans
  misc_feature: 136
tccagtcacaacgttccatctcggatcggaagagcacacgtctgaactccagtcacaacgttccatctcgtatgccgtcttctgcttgaaaaaaaa

SEQ ID NO: 20095 - DNA, 96 bp, Aspergillus viridinutans
  misc_feature: 136
ctccagtcacaacgttccatctcggatcggaagagcacacgtctgaactccagtcacaacgttccatctcgtatgccgtcttctgcttgaaaaaaa

SEQ ID NO: 20096 - DNA, 96 bp, Aspergillus viridinutans
  misc_feature: 136
tcacaacgttccatctcgtatgccgtatcatagatcggaagagcacacgtctgaactccagtcacaacgttccatctcgtatgccgtcttctgctt

SEQ ID NO: 20097 - DNA, 96 bp, Aspergillus viridinutans
  misc_feature: 136
agtcacaacgttccatctcgtatgccgtaagatcggaagagcacacgtctgaactccagtcacaacgttccatctcgtatgccgtcttctgcttga

SEQ ID NO: 20098 - DNA, 96 bp, Aspergillus viridinutans
  misc_feature: 136
acgtctgaactccagtcacaacgttccatctcgtatgccgtatcattgatcggaagagcacacgtctgaactccagtcacaacgttccacctcgta

SEQ ID NO: 20099 - DNA, 96 bp, Aspergillus viridinutans
  misc_feature: 136
gtctgaactccagtcacaacgttccatctcgtatgccgtatcattgatcggaagagcacacgtctgaactccagtcacaacgttccacctcgtatg

SEQ ID NO: 20100 - DNA, 96 bp, Aspergillus viridinutans
  misc_feature: 136
cgtctgaactccagtcacaacgttccatctcgtatgccgtatcattgatcggaagagcacacgtctgaactccagtcacaacgttccacctcgtat

SEQ ID NO: 20101 - DNA, 96 bp, Aspergillus viridinutans
  misc_feature: 136
ccagtcacaacgttccatctcgtatgccgtaagatcggaagagcacacgtctgaactccagtcacaacgttccatctcgtatgccgtcttctgctt

SEQ ID NO: 20102 - DNA, 96 bp, Aspergillus viridinutans
  misc_feature: 136
cagtcacaacgttccatctcgtatgccgtaagatcggaagagcacacgtctgaactccagtcacaacgttccatctcgtatgccgtcttctgcttg

SEQ ID NO: 20103 - DNA, 96 bp, Aspergillus viridinutans
  misc_feature: 135
cagtcacaacgttccatctcggatcggaagagcacacgtctgaactccagtcacaacgttccatctcgtatgccgtcttctgcttgaaaaaaaaaa

SEQ ID NO: 20104 - DNA, 96 bp, Aspergillus viridinutans
  misc_feature: 135
tcacaacgttccatctcgtatgccgtaagatcggaagagcacacgtctgaactccagtcacaacgttccatctcgtatgccgtcttctgcttgaaa

SEQ ID NO: 20105 - DNA, 96 bp, Aspergillus viridinutans
  misc_feature: 135
gtcacaacgttccatctcgtatgccgtaagatcggaagagcacacgtctgaactccagtcacaacgttccatctcgtatgccgtcttctgcttgaa

SEQ ID NO: 20106 - DNA, 96 bp, Aspergillus viridinutans
  misc_feature: 135
gttcagacgtgtgctcttccgatcagatcggaagagcgtcgtgtagggaaagagtgtagtactccgtgtagatctcggtggtcgccgtatcattaa

SEQ ID NO: 20107 - DNA, 96 bp, Aspergillus viridinutans
  misc_feature: 135
aggagagatggaggagagatggaggagagatggaggagagatggaggagagatggaggagagatggaggagagatggaggagagatggaggagaga

SEQ ID NO: 20108 - DNA, 96 bp, Aspergillus viridinutans
  misc_feature: 135
ggaagagcacacgtctgaactccagtcacaacgttccatctcgtatgccgtctcattgatcggaagagcacacgtctgaactccagtcacaacgtt

SEQ ID NO: 20109 - DNA, 96 bp, Aspergillus viridinutans
  misc_feature: 135
atcggaagagcacacgtctgaactccagtcacaacgttccatctcgtatgccgtcgatcggaagagcacacgtctgaactccagtcacaacgttcc

SEQ ID NO: 20110 - DNA, 96 bp, Aspergillus viridinutans
  misc_feature: 135
gaagagcacacgtctgaactccagtcacaacgttccatctcgtatgccgtctcattgatcggaagagcacacgtctgaactccagtcacaacgttc

SEQ ID NO: 20111 - DNA, 96 bp, Aspergillus viridinutans
  misc_feature: 135
cggaagagcacacgtctgaactccagtcacaacgttccatctcgtatgccgtctcattgatcggaagagcacacgtctgaactccagtcacaacgt

SEQ ID NO: 20112 - DNA, 96 bp, Aspergillus viridinutans
  misc_feature: 134
cgtgtgctcttccgatcagatcggaagagcgtcgtgtagggaaagagtgtagtactccgtgtagatctcggtggtcgccgtatcattaaaaaaaaa

SEQ ID NO: 20113 - DNA, 96 bp, Aspergillus viridinutans
  misc_feature: 134
gatcggaagagcacacgtctgaactccagtcacaacgttccatctcgtatgccggatcggaagagcacacgtctgaactccagtcacaacgttcca

SEQ ID NO: 20114 - DNA, 96 bp, Aspergillus viridinutans
  misc_feature: 134
tctgaactccagtcacaacgttccatctcgtatgccgtatcattgatcggaagagcacacgtctgaactccagtcacaacgttccacctcgtatgc

SEQ ID NO: 20115 - DNA, 96 bp, Aspergillus viridinutans
  misc_feature: 134
tcggaagagcacacgtctgaactccagtcacaacgttccatctcgtatgccgtctcattgatcggaagagcacacgtctgaactccagtcacaacg

SEQ ID NO: 20116 - DNA, 96 bp, Aspergillus viridinutans
  misc_feature: 134
aagagcacacgtctgaactccagtcacaacgttccatctcgtatgccgtctcattgatcggaagagcacacgtctgaactccagtcacaacgttcc

SEQ ID NO: 20117 - DNA, 96 bp, Aspergillus viridinutans
  misc_feature: 134
cggaagagcacacgtctgaactccagtcacaacgttccatctcgtatgccgtatcattcggaagagcacacgtctgaactccagtcacaacgttcc

SEQ ID NO: 20118 - DNA, 96 bp, Aspergillus viridinutans
  misc_feature: 134
acacgtctgaactccagtcacaacgttccatctcgtatgccgtcttctgcttgaaaaaaaaaaacgtctgaactccagtcacaacgttccatctcg

SEQ ID NO: 20119 - DNA, 96 bp, Aspergillus viridinutans
  misc_feature: 133
agtcacaacgttccatctcggatcggaagagcacacgtctgaactccagtcacaacgttccatctcgtatgccgtcttctgcttgaaaaaaaaaaa

SEQ ID NO: 20120 - DNA, 96 bp, Aspergillus viridinutans
  misc_feature: 133
gtgtgctcttccgatcagatcggaagagcgtcgtgtagggaaagagtgtagtactccgtgtagatctcggtggtcgccgtatcattaaaaaaaaaa

SEQ ID NO: 20121 - DNA, 96 bp, Aspergillus viridinutans
  misc_feature: 133
acgtgtgctcttccgatcagatcggaagagcgtcgtgtagggaaagagtgtagtactccgtgtagatctcggtggtcgccgtatcattaaaaaaaa

SEQ ID NO: 20122 - DNA, 96 bp, Aspergillus viridinutans
  misc_feature: 133
gacgtgtgctcttccgatcagatcggaagagcgtcgtgtagggaaagagtgtagtactccgtgtagatctcggtggtcgccgtatcattaaaaaaa

SEQ ID NO: 20123 - DNA, 96 bp, Aspergillus viridinutans
  misc_feature: 133
agacgtgtgctcttccgatcagatcggaagagcgtcgtgtagggaaagagtgtagtactccgtgtagatctcggtggtcgccgtatcattaaaaaa

SEQ ID NO: 20124 - DNA, 96 bp, Aspergillus viridinutans
  misc_feature: 133
gatcggaagagcagatcggaagagcagatcggaagagcacacgtctgaactccagtcacaacgttccatctcgtatgccgtcttctgcttgaaaaa

SEQ ID NO: 20125 - DNA, 96 bp, Aspergillus viridinutans
  misc_feature: 133
cagacgtgtgctcttccgatcagatcggaagagcgtcgtgtagggaaagagtgtagtactccgtgtagatctcggtggtcgccgtatcattaaaaa

SEQ ID NO: 20126 - DNA, 96 bp, Aspergillus viridinutans
  misc_feature: 133
ttcagacgtgtgctcttccgatcagatcggaagagcgtcgtgtagggaaagagtgtagtactccgtgtagatctcggtggtcgccgtatcattaaa

SEQ ID NO: 20127 - DNA, 96 bp, Aspergillus viridinutans
  misc_feature: 133
tcggaagagcacacgtctgaactccagtcacaacgttccatctcgtatgccgtcgatcggaagagcacacgtctgaactccagtcacaacgttcca

SEQ ID NO: 20128 - DNA, 96 bp, Aspergillus viridinutans
  misc_feature: 133
tgaactccagtcacaacgttccatctcgtatgccgtatcattgatcggaagagcacacgtctgaactccagtcacaacgttccacctcgtatgccg

SEQ ID NO: 20129 - DNA, 96 bp, Aspergillus viridinutans
  misc_feature: 133
tctgaactccagtcacaacgttccatctcgtatgccgtgatcggaagagcacacgtctgaactccagtcacaacgttccatctcgtatgccgtatc

SEQ ID NO: 20130 - DNA, 96 bp, Aspergillus viridinutans
  misc_feature: 133
ctccagtcacaacgttccatctcgtatgccgtatcattgatcggaagagcacacgtctgaactccagtcacaacgttccatctcgtatgccgtaga

SEQ ID NO: 20131 - DNA, 96 bp, Aspergillus viridinutans
  misc_feature: 133
tcggaagagcacacgtctgaactccagtcacaacgttccatctcgtatgccgtatcattcggaagagcacacgtctgaactccagtcacaacgttc

SEQ ID NO: 20132 - DNA, 96 bp, Aspergillus viridinutans
  misc_feature: 133
atcggaagagcacacgtctgaactccagtcacaacgttccatctcgtatgccgtctcattgatcggaagagcacacgtctgaactccagtcacaac

SEQ ID NO: 20133 - DNA, 96 bp, Aspergillus viridinutans
  misc_feature: 133
ctgaactccagtcacaacgttccatctcgtatgccgtatcattgatcggaagagcacacgtctgaactccagtcacaacgttccacctcgtatgcc

SEQ ID NO: 20134 - DNA, 96 bp, Aspergillus viridinutans
  misc_feature: 133
ctccagtcacaacgttccatctcgtatgccgtatcattagatcggaagagcacacgtctgaactccagtcacaacgttccatctcgtatgccgtat

SEQ ID NO: 20135 - DNA, 96 bp, Aspergillus viridinutans
  misc_feature: 133
acacgtctgaactccagtcacaacgttccatctcgtatgccggatcggaagagcacacgtctgaactccagtcacaacgttccatctcgtatgccg

SEQ ID NO: 20136 - DNA, 96 bp, Aspergillus viridinutans
  misc_feature: 133
cacgtctgaactccagtcacaacgttccatctcgtatgccgtcttctgcttgaaaaaaaaaaacgtctgaactccagtcacaacgttccatctcgt

SEQ ID NO: 20137 - DNA, 96 bp, Aspergillus viridinutans
  misc_feature: 133
atcggaagagcacacgtctgaactccagtcacaacgttccatctcgtatgccgtatcattcggaagagcacacgtctgaactccagtcacaacgtt

SEQ ID NO: 20138 - DNA, 96 bp, Aspergillus viridinutans
  misc_feature: 132
tgtgctcttccgatcagatcggaagagcgtcgtgtagggaaagagtgtagtactccgtgtagatctcggtggtcgccgtatcattaaaaaaaaaaa

SEQ ID NO: 20139 - DNA, 96 bp, Aspergillus viridinutans
  misc_feature: 132
agagcacacgtctgaactccagtcacaacgttccatctcgtatgccgtctcattgatcggaagagcacacgtctgaactccagtcacaacgttcca

SEQ ID NO: 20140 - DNA, 96 bp, Aspergillus viridinutans
  misc_feature: 132
ggaagagcacacgtctgaactccagtcacaacgttccatctcgtatgccgtatcattcggaagagcacacgtctgaactccagtcacaacgttcca

SEQ ID NO: 20141 - DNA, 96 bp, Aspergillus viridinutans
  misc_feature: 132
cacacgtctgaactccagtcacaacgttccatctcgtatgccggatcggaagagcacacgtctgaactccagtcacaacgttccatctcgtatgcc

SEQ ID NO: 20142 - DNA, 96 bp, Aspergillus viridinutans
  misc_feature: 132
gcacacgtctgaactccagtcacaacgttccatctcgtatgccggatcggaagagcacacgtctgaactccagtcacaacgttccatctcgtatgc

SEQ ID NO: 20143 - DNA, 96 bp, Aspergillus viridinutans
  misc_feature: 132
gatcggaagagcacacgtctgaactccagtcacaacgttccatctcgtatgccgtcgatcggaagagcacacgtctgaactccagtcacaacgttc

SEQ ID NO: 20144 - DNA, 96 bp, Aspergillus viridinutans
  misc_feature: 132
gatcggaagagcacacgtctgaactccagtcacaacgttccatctcgtatgccgtatgatcggaagagcacacgtctgaactccagtcacaacgtt

SEQ ID NO: 20145 - DNA, 96 bp, Aspergillus viridinutans
  misc_feature: 132
ctgaactccagtcacaacgttccatctcgtatgccgtatcgatcggaagagcacacgtctgaactccagtcacaacgttccatctcgtatgccgtc

SEQ ID NO: 20146 - DNA, 96 bp, Aspergillus viridinutans
  misc_feature: 132
cacgtctgaactccagtcacaacgttccatctcgtatgccggatcggaagagcacacgtctgaactccagtcacaacgttccatctcgtatgccgt

SEQ ID NO: 20147 - DNA, 96 bp, Aspergillus viridinutans
  misc_feature: 132
atcggaagagcacacgtctgaactccagtcacaacgttccatctcgtatgccggatcggaagagcacacgtctgaactccagtcacaacgttccat

SEQ ID NO: 20148 - DNA, 96 bp, Aspergillus viridinutans
  misc_feature: 131
aagagcagatcggaagagcagatcggaagagcacacgtctgaactccagtcacaacgttccatctcgtatgccgtcttctgcttgaaaaaaaaaaa

SEQ ID NO: 20149 - DNA, 96 bp, Aspergillus viridinutans
  misc_feature: 131
tcagacgtgtgctcttccgatcagatcggaagagcgtcgtgtagggaaagagtgtagtactccgtgtagatctcggtggtcgccgtatcattaaaa

SEQ ID NO: 20150 - DNA, 96 bp, Aspergillus viridinutans
  misc_feature: 131
tgaactccagtcacaacgttccatctcgtatgccgtatcgatcggaagagcacacgtctgaactccagtcacaacgttccatctcgtatgccgtct

SEQ ID NO: 20151 - DNA, 96 bp, Aspergillus viridinutans
  misc_feature: 131
tcggaagagcacacgtctgaactccagtcacaacgttccatctcgtatgccggatcggaagagcacacgtctgaactccagtcacaacgttccatc

SEQ ID NO: 20152 - DNA, 96 bp, Aspergillus viridinutans
  misc_feature: 131
agagcacacgtctgaactccagtcacaacgttccatctcgtatgccggatcggaagagcacacgtctgaactccagtcacaacgttccatctcgta

SEQ ID NO: 20153 - DNA, 96 bp, Aspergillus viridinutans
  misc_feature: 131
ggaagagcacacgtctgaactccagtcacaacgttccatctcgtatgccggatcggaagagcacacgtctgaactccagtcacaacgttccatctc

SEQ ID NO: 20154 - DNA, 96 bp, Aspergillus viridinutans
  misc_feature: 131
gagcacacgtctgaactccagtcacaacgttccatctcgtatgccggatcggaagagcacacgtctgaactccagtcacaacgttccatctcgtat

SEQ ID NO: 20155 - DNA, 96 bp, Aspergillus viridinutans
  misc_feature: 131
gaagagcacacgtctgaactccagtcacaacgttccatctcgtatgccggatcggaagagcacacgtctgaactccagtcacaacgttccatctcg

SEQ ID NO: 20156 - DNA, 96 bp, Aspergillus viridinutans
  misc_feature: 131
gaactccagtcacaacgttccatctcgtatgccgtatcagatcggaagagcacacgtctgaactccagtcacaacgttccatctcgtatgccgtat

SEQ ID NO: 20157 - DNA, 96 bp, Aspergillus viridinutans
  misc_feature: 131
cggaagagcacacgtctgaactccagtcacaacgttccatctcgtatgccggatcggaagagcacacgtctgaactccagtcacaacgttccatct

SEQ ID NO: 20158 - DNA, 96 bp, Aspergillus viridinutans
  misc_feature: 131
agcacacgtctgaactccagtcacaacgttccatctcgtatgccggatcggaagagcacacgtctgaactccagtcacaacgttccatctcgtatg

SEQ ID NO: 20159 - DNA, 96 bp, Aspergillus viridinutans
  misc_feature: 131
aagagcacacgtctgaactccagtcacaacgttccatctcgtatgccggatcggaagagcacacgtctgaactccagtcacaacgttccatctcgt

SEQ ID NO: 20160 - DNA, 96 bp, Aspergillus viridinutans
  misc_feature: 130
acgtctgaactccagtcacaacgttccatctcgtatgccgtcttctgcttgaaaaaaaaaaacgtctgaactccagtcacaacgttccatctcgta

SEQ ID NO: 20161 - DNA, 96 bp, Aspergillus viridinutans
  misc_feature: 128
tccagtcacaacgttccatctcgtatgccgtatcattgatcggaagagcacacgtctgaactccagtcacaacgttccatctcgtatgccgtagat

SEQ ID NO: 20162 - DNA, 96 bp, Aspergillus viridinutans
  misc_feature: 128
aagagcacacgtctgaactccagtcacaacgttccatctcgtatgccgtatcattcggaagagcacacgtctgaactccagtcacaacgttccatc

SEQ ID NO: 20163 - DNA, 96 bp, Aspergillus viridinutans
  misc_feature: 128
cacaacgttccatctcgtatgccgtatcattgatcggaagagcacacgtctgaactccagtcacaacgttccatctcgtatgccgtatcattgatc

SEQ ID NO: 20164 - DNA, 96 bp, Aspergillus viridinutans
  misc_feature: 128
gaagagcacacgtctgaactccagtcacaacgttccatctcgtatgccgtatcattcggaagagcacacgtctgaactccagtcacaacgttccat

SEQ ID NO: 20165 - DNA, 96 bp, Aspergillus viridinutans
  misc_feature: 128
cgtctgaactccagtcacaacgttccatctcgtatgccgtcttctgcttgaaaaaaaaaaacgtctgaactccagtcacaacgttccatctcgtat

SEQ ID NO: 20166 - DNA, 96 bp, Aspergillus viridinutans
  misc_feature: 127
atcggaagagcacacgtctgaactccagtcacaacgttccatctcgtatgccgtcttctgcttgaaaaaaaaaaaaaaaaaaaaaaaaaaaaaaaa

SEQ ID NO: 20167 - DNA, 96 bp, Aspergillus viridinutans
  misc_feature: 127
gagatggaggagagatggaggagagatggaggagagatggaggagagatggaggagagatggaggagagatggaggagagatggaggagagatgga

SEQ ID NO: 20168 - DNA, 96 bp, Aspergillus viridinutans
  misc_feature: 127
tccagtcacaacgttccatctcgtatgccgtatcattagatcggaagagcacacgtctgaactccagtcacaacgttccatctcgtatgccgtatc

SEQ ID NO: 20169 - DNA, 96 bp, Aspergillus viridinutans
  misc_feature: 127
agcacacgtctgaactccagtcacaacgttccatctcgtatgccgtcgatcggaagagcacacgtctgaactccagtcacaacgttccatctcgta

SEQ ID NO: 20170 - DNA, 96 bp, Aspergillus viridinutans
  misc_feature: 127
gtctgaactccagtcacaacgttccatctcgtatgccgtcttctgcttgaaaaaaaaaaacgtctgaactccagtcacaacgttccatctcgtatg

SEQ ID NO: 20171 - DNA, 96 bp, Aspergillus viridinutans
  misc_feature: 127
ccggcgcgcgcgagggtgacgagggaaggaatcgggaggggaagggcaagggaaagggagagggaggaggaggggagggaggcggtgggaggcgcc

SEQ ID NO: 20172 - DNA, 96 bp, Aspergillus viridinutans
  misc_feature: 127
acacgtctgaactccagtcacaacgttccatctcgtatgccgtcgatcggaagagcacacgtctgaactccagtcacaacgttccatctcgtatgc

SEQ ID NO: 20173 - DNA, 96 bp, Aspergillus viridinutans
  misc_feature: 127
gcacacgtctgaactccagtcacaacgttccatctcgtatgccgtcgatcggaagagcacacgtctgaactccagtcacaacgttccatctcgtat

SEQ ID NO: 20174 - DNA, 96 bp, Aspergillus viridinutans
  misc_feature: 127
ccagtcacaacgttccatctcgtatgccgtatcattgatcggaagagcacacgtctgaactccagtcacaacgttccatctcgtatgccgtagatc

SEQ ID NO: 20175 - DNA, 96 bp, Aspergillus viridinutans
  misc_feature: 127
gagcacacgtctgaactccagtcacaacgttccatctcgtatgccgtatcattcggaagagcacacgtctgaactccagtcacaacgttccatctc

SEQ ID NO: 20176 - DNA, 96 bp, Aspergillus viridinutans
  misc_feature: 127
cgtctgaactccagtcacaacgttccatctcgtatgccgtcgatcggaagagcacacgtctgaactccagtcacaacgttccatctcgtatgccgt

SEQ ID NO: 20177 - DNA, 96 bp, Aspergillus viridinutans
  misc_feature: 127
agcacacgtctgaactccagtcacaacgttccatctcgtatgccgtatcattcggaagagcacacgtctgaactccagtcacaacgttccatctcg

SEQ ID NO: 20178 - DNA, 96 bp, Aspergillus viridinutans
  misc_feature: 127
agagatggaggagagatggaggagagatggaggagagatggaggagagatggaggagagatggaggagagatggaggagagatggaggagagatgg

SEQ ID NO: 20179 - DNA, 96 bp, Aspergillus viridinutans
  misc_feature: 127
cacacgtctgaactccagtcacaacgttccatctcgtatgccgtcgatcggaagagcacacgtctgaactccagtcacaacgttccatctcgtatg

SEQ ID NO: 20180 - DNA, 96 bp, Aspergillus viridinutans
  misc_feature: 127
agagcacacgtctgaactccagtcacaacgttccatctcgtatgccgtatcattcggaagagcacacgtctgaactccagtcacaacgttccatct

SEQ ID NO: 20181 - DNA, 96 bp, Aspergillus viridinutans
  misc_feature: 126
ggaggagagatggaggagagatggaggagagatggaggagagatggaggagagatggaggagagatggaggagagatggaggagagatggaggaga

SEQ ID NO: 20182 - DNA, 96 bp, Aspergillus viridinutans
  misc_feature: 126
cacacgtctgaactccagtcacaacgttccatctcgtatgccgtatcattcggaagagcacacgtctgaactccagtcacaacgttccatctcgta

SEQ ID NO: 20183 - DNA, 96 bp, Aspergillus viridinutans
  misc_feature: 126
cacgtctgaactccagtcacaacgttccatctcgtatgccgtcgatcggaagagcacacgtctgaactccagtcacaacgttccatctcgtatgcc

SEQ ID NO: 20184 - DNA, 96 bp, Aspergillus viridinutans
  misc_feature: 126
gcacacgtctgaactccagtcacaacgttccatctcgtatgccgtatcattcggaagagcacacgtctgaactccagtcacaacgttccatctcgt

SEQ ID NO: 20185 - DNA, 96 bp, Aspergillus viridinutans
  misc_feature: 126
gagcacacgtctgaactccagtcacaacgttccatctcgtatgccgtcgatcggaagagcacacgtctgaactccagtcacaacgttccatctcgt

SEQ ID NO: 20186 - DNA, 96 bp, Aspergillus viridinutans
  misc_feature: 126
aactccagtcacaacgttccatctcgtatgccgtatcgatcggaagagcacacgtctgaactccagtcacaacgttccatctcgtatgccgtcttc

SEQ ID NO: 20187 - DNA, 96 bp, Aspergillus viridinutans
  misc_feature: 126
gaactccagtcacaacgttccatctcgtatgccgtatcgatcggaagagcacacgtctgaactccagtcacaacgttccatctcgtatgccgtctt

SEQ ID NO: 20188 - DNA, 96 bp, Aspergillus viridinutans
  misc_feature: 126
agatggaggagagatggaggagagatggaggagagatggaggagagatggaggagagatggaggagagatggaggagagatggaggagagatggag

SEQ ID NO: 20189 - DNA, 96 bp, Aspergillus viridinutans
  misc_feature: 126
acgtctgaactccagtcacaacgttccatctcgtatgccgtcgatcggaagagcacacgtctgaactccagtcacaacgttccatctcgtatgccg

SEQ ID NO: 20190 - DNA, 96 bp, Aspergillus viridinutans
  misc_feature: 126
cagtcacaacgttccatctcgtatgccgtatcattgatcggaagagcacacgtctgaactccagtcacaacgttccatctcgtatgccgtagatcg

SEQ ID NO: 20191 - DNA, 96 bp, Aspergillus viridinutans
  misc_feature: 126
agagcacacgtctgaactccagtcacaacgttccatctcgtatgccgtcgatcggaagagcacacgtctgaactccagtcacaacgttccatctcg

SEQ ID NO: 20192 - DNA, 96 bp, Aspergillus viridinutans
  misc_feature: 126
acacgtctgaactccagtcacaacgttccatctcgtatgccgtatcattcggaagagcacacgtctgaactccagtcacaacgttccatctcgtat

SEQ ID NO: 20193 - DNA, 96 bp, Aspergillus viridinutans
  misc_feature: 125
tctgaactccagtcacaacgttccatctcgtatgccgtcttctgcttgaaaaaaaaaaacgtctgaactccagtcacaacgttccatctcgtatgc

SEQ ID NO: 20194 - DNA, 96 bp, Aspergillus viridinutans
  misc_feature: 125
gtctgaactccagtcacaacgttccatctcgtatgccgtatcattcggaagagcacacgtctgaactccagtcacaacgttccatctcgtatgccg

SEQ ID NO: 20195 - DNA, 96 bp, Aspergillus viridinutans
  misc_feature: 125
cgtctgaactccagtcacaacgttccatctcgtatgccgtatcattcggaagagcacacgtctgaactccagtcacaacgttccatctcgtatgcc

SEQ ID NO: 20196 - DNA, 96 bp, Aspergillus viridinutans
  misc_feature: 125
ggaagagcacacgtctgaactccagtcacaacgttccatctcgtatgccgtcgatcggaagagcacacgtctgaactccagtcacaacgttccatc

SEQ ID NO: 20197 - DNA, 96 bp, Aspergillus viridinutans
  misc_feature: 125
acgtctgaactccagtcacaacgttccatctcgtatgccgtatcattcggaagagcacacgtctgaactccagtcacaacgttccatctcgtatgc

SEQ ID NO: 20198 - DNA, 96 bp, Aspergillus viridinutans
  misc_feature: 125
aagagcacacgtctgaactccagtcacaacgttccatctcgtatgccgtcgatcggaagagcacacgtctgaactccagtcacaacgttccatctc

SEQ ID NO: 20199 - DNA, 96 bp, Aspergillus viridinutans
  misc_feature: 125
gaagagcacacgtctgaactccagtcacaacgttccatctcgtatgccgtcgatcggaagagcacacgtctgaactccagtcacaacgttccatct

SEQ ID NO: 20200 - DNA, 96 bp, Aspergillus viridinutans
  misc_feature: 125
gaactccagtcacaacgttccatctcgtatgccgtatcattgatcggaagagcacacgtctgaactccagtcacaacgttccacctcgtatgccgt

SEQ ID NO: 20201 - DNA, 96 bp, Aspergillus viridinutans
  misc_feature: 125
cggaagagcacacgtctgaactccagtcacaacgttccatctcgtatgccgtcgatcggaagagcacacgtctgaactccagtcacaacgttccat

SEQ ID NO: 20202 - DNA, 96 bp, Aspergillus viridinutans
  misc_feature: 125
cacgtctgaactccagtcacaacgttccatctcgtatgccgtatcattcggaagagcacacgtctgaactccagtcacaacgttccatctcgtatg

SEQ ID NO: 20203 - DNA, 96 bp, Aspergillus viridinutans
  misc_feature: 124
ctgaactccagtcacaacgttccatctcgtatgccgtgatcggaagagcacacgtctgaactccagtcacaacgttccatctcgtatgccgtatca

SEQ ID NO: 20204 - DNA, 96 bp, Aspergillus viridinutans
  misc_feature: 124
tccagtcacaacgttccatctcgtatgccgtatcgatcggaagagcacacgtctgaactccagtcacaacgttccatctcgtatgccgtcttctgc

SEQ ID NO: 20205 - DNA, 96 bp, Aspergillus viridinutans
  misc_feature: 124
gatggaggagagatggaggagagatggaggagagatggaggagagatggaggagagatggaggagagatggaggagagatggaggagagatggagg

SEQ ID NO: 20206 - DNA, 96 bp, Aspergillus viridinutans
  misc_feature: 124
agcacacgtctgaactccagtcacaacgttccatctcgtatgccgtctcattgatcggaagagcacacgtctgaactccagtcacaacgttccatc

SEQ ID NO: 20207 - DNA, 96 bp, Aspergillus viridinutans
  misc_feature: 124
gagcacacgtctgaactccagtcacaacgttccatctcgtatgccgtctcattgatcggaagagcacacgtctgaactccagtcacaacgttccat

SEQ ID NO: 20208 - DNA, 96 bp, Aspergillus viridinutans
  misc_feature: 124
aactccagtcacaacgttccatctcgtatgccgtatcatggatcggaagagcacacgtctgaactccagtcacaacgttccatctcgtatgccgtc

SEQ ID NO: 20209 - DNA, 96 bp, Aspergillus viridinutans
  misc_feature: 124
ctccagtcacaacgttccatctcgtatgccgtatcgatcggaagagcacacgtctgaactccagtcacaacgttccatctcgtatgccgtcttctg

SEQ ID NO: 20210 - DNA, 96 bp, Aspergillus viridinutans
  misc_feature: 124
actccagtcacaacgttccatctcgtatgccgtatcgatcggaagagcacacgtctgaactccagtcacaacgttccatctcgtatgccgtcttct

SEQ ID NO: 20211 - DNA, 96 bp, Aspergillus viridinutans
  misc_feature: 123
tggaggagagatggaggagagatggaggagagatggaggagagatggaggagagatggaggagagatggaggagagatggaggagagatggaggag

SEQ ID NO: 20212 - DNA, 96 bp, Aspergillus viridinutans
  misc_feature: 123
gtcacaacgttccatctcgtatgccgtatcattgatcggaagagcacacgtctgaactccagtcacaacgttccatctcgtatgccgtagatcgga

SEQ ID NO: 20213 - DNA, 96 bp, Aspergillus viridinutans
  misc_feature: 123
cagatcggaagagcacacgtctgaactccagtcacaacgttccatctcgtatgccgtatcattgatcggaagagcacacgtctgaactccagtcac

SEQ ID NO: 20214 - DNA, 96 bp, Aspergillus viridinutans
  misc_feature: 123
ctgaactccagtcacaacgttccatctcgtatgccgtcttctgcttgaaaaaaaaaaacgtctgaactccagtcacaacgttccatctcgtatgcc

SEQ ID NO: 20215 - DNA, 96 bp, Aspergillus viridinutans
  misc_feature: 123
aactccagtcacaacgttccatctcgtatgccgtatccttgatcggaagagcacacgtctgaactccagtcacaacgttccatctcgtatgccgtc

SEQ ID NO: 20216 - DNA, 96 bp, Aspergillus viridinutans
  misc_feature: 123
agtcacaacgttccatctcgtatgccgtatcattgatcggaagagcacacgtctgaactccagtcacaacgttccatctcgtatgccgtagatcgg

SEQ ID NO: 20217 - DNA, 96 bp, Aspergillus viridinutans
  misc_feature: 123
actccagtcacaacgttccatctcgtatgccgtatccttgatcggaagagcacacgtctgaactccagtcacaacgttccatctcgtatgccgtct

SEQ ID NO: 20218 - DNA, 96 bp, Aspergillus viridinutans
  misc_feature: 122
gtgctcttccgatcagatcggaagagcgtcgtgtagggaaagagtgtagtactccgtgtagatctcggtggtcgccgtatcattaaaaaaaaaaaa

SEQ ID NO: 20219 - DNA, 96 bp, Aspergillus viridinutans
  misc_feature: 122
ccagtcacaacgttccatctcgtatgccgtatcattagatcggaagagcacacgtctgaactccagtcacaacgttccatctcgtatgccgtatca

SEQ ID NO: 20220 - DNA, 96 bp, Aspergillus viridinutans
  misc_feature: 122
tgaactccagtcacaacgttccatctcgtatgccgtcttctgcttgaaaaaaaaaaacgtctgaactccagtcacaacgttccatctcgtatgccg

SEQ ID NO: 20221 - DNA, 96 bp, Aspergillus viridinutans
  misc_feature: 122
tgaactccagtcacaacgttccatctcgtatgccgtctcattgatcggaagagcacacgtctgaactccagtcacaacgttccatctcgtatgccg

SEQ ID NO: 20222 - DNA, 96 bp, Aspergillus viridinutans
  misc_feature: 122
tctgaactccagtcacaacgttccatctcgtatgccgtctcattgatcggaagagcacacgtctgaactccagtcacaacgttccatctcgtatgc

SEQ ID NO: 20223 - DNA, 96 bp, Aspergillus viridinutans
  misc_feature: 122
atggaggagagatggaggagagatggaggagagatggaggagagatggaggagagatggaggagagatggaggagagatggaggagagatggagga

SEQ ID NO: 20224 - DNA, 96 bp, Aspergillus viridinutans
  misc_feature: 122
acgtctgaactccagtcacaacgttccatctcgtatgccgtctcattgatcggaagagcacacgtctgaactccagtcacaacgttccatctcgta

SEQ ID NO: 20225 - DNA, 96 bp, Aspergillus viridinutans
  misc_feature: 122
gtctgaactccagtcacaacgttccatctcgtatgccgtctcattgatcggaagagcacacgtctgaactccagtcacaacgttccatctcgtatg

SEQ ID NO: 20226 - DNA, 96 bp, Aspergillus viridinutans
  misc_feature: 122
ctgaactccagtcacaacgttccatctcgtatgccgtctcattgatcggaagagcacacgtctgaactccagtcacaacgttccatctcgtatgcc

SEQ ID NO: 20227 - DNA, 96 bp, Aspergillus viridinutans
  misc_feature: 122
gcacacgtctgaactccagtcacaacgttccatctcgtatgccgtctcattgatcggaagagcacacgtctgaactccagtcacaacgttccatct

SEQ ID NO: 20228 - DNA, 96 bp, Aspergillus viridinutans
  misc_feature: 122
cacacgtctgaactccagtcacaacgttccatctcgtatgccgtctcattgatcggaagagcacacgtctgaactccagtcacaacgttccatctc

SEQ ID NO: 20229 - DNA, 96 bp, Aspergillus viridinutans
  misc_feature: 122
aactccagtcacaacgttccatctcgtatgccgtatcattgatcggaagagcacacgtctgaactccagtcacaacgttccacctcgtatgccgtc

SEQ ID NO: 20230 - DNA, 96 bp, Aspergillus viridinutans
  misc_feature: 122
cgtctgaactccagtcacaacgttccatctcgtatgccgtctcattgatcggaagagcacacgtctgaactccagtcacaacgttccatctcgtat

SEQ ID NO: 20231 - DNA, 96 bp, Aspergillus viridinutans
  misc_feature: 122
acacgtctgaactccagtcacaacgttccatctcgtatgccgtctcattgatcggaagagcacacgtctgaactccagtcacaacgttccatctcg

SEQ ID NO: 20232 - DNA, 96 bp, Aspergillus viridinutans
  misc_feature: 121
gagagatggaggagagatggaggagagatggaggagagatggaggagagatggaggagagatggaggagagatggaggagagatggaggagagatg

SEQ ID NO: 20233 - DNA, 96 bp, Aspergillus viridinutans
  misc_feature: 121
gaactccagtcacaacgttccatctcgtatgccgtctcattgatcggaagagcacacgtctgaactccagtcacaacgttccatctcgtatgccgt

SEQ ID NO: 20234 - DNA, 96 bp, Aspergillus viridinutans
  misc_feature: 121
ccagtcacaacgttccatctcgtatgccgtatcgatcggaagagcacacgtctgaactccagtcacaacgttccatctcgtatgccgtcttctgct

SEQ ID NO: 20235 - DNA, 96 bp, Aspergillus viridinutans
  misc_feature: 121
cagtcacaacgttccatctcgtatgccgtatcattgatcggaagagcacacgtctgaactccagtcacaacgttccatctcgtatgccgtatcatg

SEQ ID NO: 20236 - DNA, 96 bp, Aspergillus viridinutans
  misc_feature: 121
cagtcacaacgttccatctcgtatgccgtatcgatcggaagagcacacgtctgaactccagtcacaacgttccatctcgtatgccgtcttctgctt

SEQ ID NO: 20237 - DNA, 96 bp, Aspergillus viridinutans
  misc_feature: 121
cacgtctgaactccagtcacaacgttccatctcgtatgccgtctcattgatcggaagagcacacgtctgaactccagtcacaacgttccatctcgt

SEQ ID NO: 20238 - DNA, 96 bp, Aspergillus viridinutans
  misc_feature: 121
agtcacaacgttccatctcgtatgccgtatcgatcggaagagcacacgtctgaactccagtcacaacgttccatctcgtatgccgtcttctgcttg

SEQ ID NO: 20239 - DNA, 96 bp, Aspergillus viridinutans
  misc_feature: 121
actccagtcacaacgttccatctcgtatgccgtatcatggatcggaagagcacacgtctgaactccagtcacaacgttccatctcgtatgccgtct

SEQ ID NO: 20240 - DNA, 96 bp, Aspergillus viridinutans
  misc_feature: 120
tacacgacgctcttccgatcgatcggaagagcacacgtctgaactccagtcacaacgttccatctcgtatgccgtcttctgcttgaaaaaaaaaaa

SEQ ID NO: 20241 - DNA, 96 bp, Aspergillus viridinutans
  misc_feature: 120
gtcacaacgttccatctcgtatgccgtatcgatcggaagagcacacgtctgaactccagtcacaacgttccatctcgtatgccgtcttctgcttga

SEQ ID NO: 20242 - DNA, 96 bp, Aspergillus viridinutans
  misc_feature: 119
tcacaacgttccatctcgtatgccgtatcgatcggaagagcacacgtctgaactccagtcacaacgttccatctcgtatgccgtcttctgcttgaa

SEQ ID NO: 20243 - DNA, 96 bp, Aspergillus viridinutans
  misc_feature: 119
ggagagatggaggagagatggaggagagatggaggagagatggaggagagatggaggagagatggaggagagatggaggagagatggaggagagat

SEQ ID NO: 20244 - DNA, 96 bp, Aspergillus viridinutans
  misc_feature: 118
tcacaacgttccatctcgtatgccgtatcattgatcggaagagcacacgtctgaactccagtcacaacgttccatctcgtatgccgtagatcggaa

SEQ ID NO: 20245 - DNA, 96 bp, Aspergillus viridinutans
  misc_feature: 118
gcagatcggaagagcacacgtctgaactccagtcacaacgttccatctcgtatgccgtatcattgatcggaagagcacacgtctgaactccagtca

SEQ ID NO: 20246 - DNA, 96 bp, Aspergillus viridinutans
  misc_feature: 118
tctgaactccagtcacaacgttccatctcgtatgccgtatcattcggaagagcacacgtctgaactccagtcacaacgttccatctcgtatgccgt

SEQ ID NO: 20247 - DNA, 96 bp, Aspergillus viridinutans
  misc_feature: 118
gaactccagtcacaacgttccatctcgtatgccgtcttctgcttgaaaaaaaaaaacgtctgaactccagtcacaacgttccatctcgtatgccgt

SEQ ID NO: 20248 - DNA, 96 bp, Aspergillus viridinutans
  misc_feature: 117
tcggaagagcacacgtctgaactccagtcacaacgttccatctcgtatgccgtcttctgcttgaaaaaaaaaaaaaaaaaaaaaaaaaaaaaaaaa

SEQ ID NO: 20249 - DNA, 96 bp, Aspergillus viridinutans
  misc_feature: 117
gaagagcgtcgtgtagggaaagagtgtagtactccgtgtagatctcggtggtcgccgtatcattaaaaaaaaaaaaaaaaaaaaaaaaaaaaaaaa

SEQ ID NO: 20250 - DNA, 96 bp, Aspergillus viridinutans
  misc_feature: 117
cttccgatctgctcttccgatcagatcggaagagcgtcgtgtagggaaagagtgtagtactccgtgtagatctcggtggtcgccgtatcattaaaa

SEQ ID NO: 20251 - DNA, 96 bp, Aspergillus viridinutans
  misc_feature: 117
gaagaataagaagaataagaagaataagaagaataagaagaataagaagaataagaagaataagaagaataagaagaataagaagaataagaagaa

SEQ ID NO: 20252 - DNA, 96 bp, Aspergillus viridinutans
  misc_feature: 117
ctcttccgatctgctcttccgatcagatcggaagagcgtcgtgtagggaaagagtgtagtactccgtgtagatctcggtggtcgccgtatcattaa

SEQ ID NO: 20253 - DNA, 96 bp, Aspergillus viridinutans
  misc_feature: 117
tgaactccagtcacaacgttccatctcgtatgccgtatcattcggaagagcacacgtctgaactccagtcacaacgttccatctcgtatgccgtct

SEQ ID NO: 20254 - DNA, 96 bp, Aspergillus viridinutans
  misc_feature: 117
ctgaactccagtcacaacgttccatctcgtatgccgtatcattcggaagagcacacgtctgaactccagtcacaacgttccatctcgtatgccgtc

SEQ ID NO: 20255 - DNA, 96 bp, Aspergillus viridinutans
  misc_feature: 117
ccagtcacaacgttccatctcgtatgccgtatcattcggaagagcacacgtctgaactccagtcacaacgttccatctcgtatgccgtcttctgct

SEQ ID NO: 20256 - DNA, 96 bp, Aspergillus viridinutans
  misc_feature: 117
actccagtcacaacgttccatctcgtatgccgtatcattgatcggaagagcacacgtctgaactccagtcacaacgttccacctcgtatgccgtct

SEQ ID NO: 20257 - DNA, 96 bp, Aspergillus viridinutans
  misc_feature: 116
atctgctcttccgatcagatcggaagagcgtcgtgtagggaaagagtgtagtactccgtgtagatctcggtggtcgccgtatcattaaaaaaaaaa

SEQ ID NO: 20258 - DNA, 96 bp, Aspergillus viridinutans
  misc_feature: 116
gatctgctcttccgatcagatcggaagagcgtcgtgtagggaaagagtgtagtactccgtgtagatctcggtggtcgccgtatcattaaaaaaaaa

SEQ ID NO: 20259 - DNA, 96 bp, Aspergillus viridinutans
  misc_feature: 116
cgatctgctcttccgatcagatcggaagagcgtcgtgtagggaaagagtgtagtactccgtgtagatctcggtggtcgccgtatcattaaaaaaaa

SEQ ID NO: 20260 - DNA, 96 bp, Aspergillus viridinutans
  misc_feature: 116
ccgatctgctcttccgatcagatcggaagagcgtcgtgtagggaaagagtgtagtactccgtgtagatctcggtggtcgccgtatcattaaaaaaa

SEQ ID NO: 20261 - DNA, 96 bp, Aspergillus viridinutans
  misc_feature: 116
tccgatctgctcttccgatcagatcggaagagcgtcgtgtagggaaagagtgtagtactccgtgtagatctcggtggtcgccgtatcattaaaaaa

SEQ ID NO: 20262 - DNA, 96 bp, Aspergillus viridinutans
  misc_feature: 116
ttccgatctgctcttccgatcagatcggaagagcgtcgtgtagggaaagagtgtagtactccgtgtagatctcggtggtcgccgtatcattaaaaa

SEQ ID NO: 20263 - DNA, 96 bp, Aspergillus viridinutans
  misc_feature: 116
agaagaataagaagaataagaagaataagaagaataagaagaataagaagaataagaagaataagaagaataagaagaataagaagaataagaaga

SEQ ID NO: 20264 - DNA, 96 bp, Aspergillus viridinutans
  misc_feature: 116
tccagtcacaacgttccatctcgtatgccgtatccttgatcggaagagcacacgtctgaactccagtcacaacgttccatctcgtatgccgtcttc

SEQ ID NO: 20265 - DNA, 96 bp, Aspergillus viridinutans
  misc_feature: 116
tccagtcacaacgttccatctcgtatgccgtatcattcggaagagcacacgtctgaactccagtcacaacgttccatctcgtatgccgtcttctgc

SEQ ID NO: 20266 - DNA, 96 bp, Aspergillus viridinutans
  misc_feature: 116
gctcttccgatctgctcttccgatcagatcggaagagcgtcgtgtagggaaagagtgtagtactccgtgtagatctcggtggtcgccgtatcatta

SEQ ID NO: 20267 - DNA, 96 bp, Aspergillus viridinutans
  misc_feature: 116
gtctgaactccagtcacaacgttccatctcgtatgccgtgatcggaagagcacacgtctgaactccagtcacaacgttccatctcgtatgccgtag

SEQ ID NO: 20268 - DNA, 96 bp, Aspergillus viridinutans
  misc_feature: 116
gccggcgcgcgcgagggtgacgagggaaggaatcgggaggggaagggcaagggaaagggagagggaggaggaggggagggaggcggtgggaggcgc

SEQ ID NO: 20269 - DNA, 96 bp, Aspergillus viridinutans
  misc_feature: 116
aactccagtcacaacgttccatctcgtatgccgtatcattcggaagagcacacgtctgaactccagtcacaacgttccatctcgtatgccgtcttc

SEQ ID NO: 20270 - DNA, 96 bp, Aspergillus viridinutans
  misc_feature: 116
ctccagtcacaacgttccatctcgtatgccgtatccttgatcggaagagcacacgtctgaactccagtcacaacgttccatctcgtatgccgtctt

SEQ ID NO: 20271 - DNA, 96 bp, Aspergillus viridinutans
  misc_feature: 115
tcttccgatctgctcttccgatcagatcggaagagcgtcgtgtagggaaagagtgtagtactccgtgtagatctcggtggtcgccgtatcattaaa

SEQ ID NO: 20272 - DNA, 96 bp, Aspergillus viridinutans
  misc_feature: 115
aactccagtcacaacgttccatctcgtatgccgtatcagatcggaagagcacacgtctgaactccagtcacaacgttccatctcgtatgccgtatc

SEQ ID NO: 20273 - DNA, 96 bp, Aspergillus viridinutans
  misc_feature: 115
gaactccagtcacaacgttccatctcgtatgccgtatcattcggaagagcacacgtctgaactccagtcacaacgttccatctcgtatgccgtctt

SEQ ID NO: 20274 - DNA, 96 bp, Aspergillus viridinutans
  misc_feature: 115
aagaagaataagaagaataagaagaataagaagaataagaagaataagaagaataagaagaataagaagaataagaagaataagaagaataagaag

SEQ ID NO: 20275 - DNA, 96 bp, Aspergillus viridinutans
  misc_feature: 115
ctccagtcacaacgttccatctcgtatgccgtatcatggatcggaagagcacacgtctgaactccagtcacaacgttccatctcgtatgccgtctt

SEQ ID NO: 20276 - DNA, 96 bp, Aspergillus viridinutans
  misc_feature: 115
aagaataagaagaataagaagaataagaagaataagaagaataagaagaataagaagaataagaagaataagaagaataagaagaataagaagaat

SEQ ID NO: 20277 - DNA, 96 bp, Aspergillus viridinutans
  misc_feature: 115
atcggaagagcacacgtctgaactccagtcacaacgttccatctcgtagatcggaagagcacacgtctgaactccagtcacaacgttccatctcgt

SEQ ID NO: 20278 - DNA, 96 bp, Aspergillus viridinutans
  misc_feature: 115
actccagtcacaacgttccatctcgtatgccgtatcattcggaagagcacacgtctgaactccagtcacaacgttccatctcgtatgccgtcttct

SEQ ID NO: 20279 - DNA, 96 bp, Aspergillus viridinutans
  misc_feature: 114
tctgctcttccgatcagatcggaagagcgtcgtgtagggaaagagtgtagtactccgtgtagatctcggtggtcgccgtatcattaaaaaaaaaaa

SEQ ID NO: 20280 - DNA, 96 bp, Aspergillus viridinutans
  misc_feature: 114
tctgaactccagtcacaacgttccatctcgtatgccgtatgatcggaagagcacacgtctgaactccagtcacaacgttccatctcgtatgccgtc

SEQ ID NO: 20281 - DNA, 96 bp, Aspergillus viridinutans
  misc_feature: 114
tcggaagagcagatcggaagagcacacgtctgaactccagtcacaacgttccatctcgtatgccgtatcattgatcggaagagcacacgtctgaac

SEQ ID NO: 20282 - DNA, 96 bp, Aspergillus viridinutans
  misc_feature: 114
tcggaagagcacacgtctgaactccagtcacaacgttccatctcgtagatcggaagagcacacgtctgaactccagtcacaacgttccatctcgta

SEQ ID NO: 20283 - DNA, 96 bp, Aspergillus viridinutans
  misc_feature: 114
tccagtcacaacgttccatctcgtatgccgtatcatggatcggaagagcacacgtctgaactccagtcacaacgttccatctcgtatgccgtcttc

SEQ ID NO: 20284 - DNA, 96 bp, Aspergillus viridinutans
  misc_feature: 114
cacaacgttccatctcgtatgccgtatcatgatcggaagagcacacgtctgaactccagtcacaacgttccatctcgtatgccgtcttctgcttga

SEQ ID NO: 20285 - DNA, 96 bp, Aspergillus viridinutans
  misc_feature: 114
gtcacaacgttccatctcgtatgccgtatcattcggaagagcacacgtctgaactccagtcacaacgttccatctcgtatgccgtcttctgcttga

SEQ ID NO: 20286 - DNA, 96 bp, Aspergillus viridinutans
  misc_feature: 114
gtctgaactccagtcacaacgttccatctcgtatgccgtcgatcggaagagcacacgtctgaactccagtcacaacgttccatctcgtatgccgtc

SEQ ID NO: 20287 - DNA, 96 bp, Aspergillus viridinutans
  misc_feature: 114
gaagagcagatcggaagagcacacgtctgaactccagtcacaacgttccatctcgtatgccgtatcattgatcggaagagcacacgtctgaactcc

SEQ ID NO: 20288 - DNA, 96 bp, Aspergillus viridinutans
  misc_feature: 114
ggaagagcagatcggaagagcacacgtctgaactccagtcacaacgttccatctcgtatgccgtatcattgatcggaagagcacacgtctgaactc

SEQ ID NO: 20289 - DNA, 96 bp, Aspergillus viridinutans
  misc_feature: 114
ggaagagcacacgtctgaactccagtcacaacgttccatctcgtagatcggaagagcacacgtctgaactccagtcacaacgttccatctcgtatg

SEQ ID NO: 20290 - DNA, 96 bp, Aspergillus viridinutans
  misc_feature: 114
gatcggaagagcacacgtctgaactccagtcacaacgttccatctcgtatgccgtatcattcggaagagcacacgtctgaactccagtcacaacgt

SEQ ID NO: 20291 - DNA, 96 bp, Aspergillus viridinutans
  misc_feature: 114
gagcacacgtctgaactccagtcacaacgttccatctcgtagatcggaagagcacacgtctgaactccagtcacaacgttccatctcgtatgccgt

SEQ ID NO: 20292 - DNA, 96 bp, Aspergillus viridinutans
  misc_feature: 114
ctgaactccagtcacaacgttccatctcgtatgccgtatgatcggaagagcacacgtctgaactccagtcacaacgttccatctcgtatgccgtct

SEQ ID NO: 20293 - DNA, 96 bp, Aspergillus viridinutans
  misc_feature: 114
ctccagtcacaacgttccatctcgtatgccgtatcattgatcggaagagcacacgtctgaactccagtcacaacgttccacctcgtatgccgtctt

SEQ ID NO: 20294 - DNA, 96 bp, Aspergillus viridinutans
  misc_feature: 114
cggaagagcagatcggaagagcacacgtctgaactccagtcacaacgttccatctcgtatgccgtatcattgatcggaagagcacacgtctgaact

SEQ ID NO: 20295 - DNA, 96 bp, Aspergillus viridinutans
  misc_feature: 114
cggaagagcacacgtctgaactccagtcacaacgttccatctcgtagatcggaagagcacacgtctgaactccagtcacaacgttccatctcgtat

SEQ ID NO: 20296 - DNA, 96 bp, Aspergillus viridinutans
  misc_feature: 114
cagtcacaacgttccatctcgtatgccgtatcattcggaagagcacacgtctgaactccagtcacaacgttccatctcgtatgccgtcttctgctt

SEQ ID NO: 20297 - DNA, 96 bp, Aspergillus viridinutans
  misc_feature: 114
agtcacaacgttccatctcgtatgccgtatcattcggaagagcacacgtctgaactccagtcacaacgttccatctcgtatgccgtcttctgcttg

SEQ ID NO: 20298 - DNA, 96 bp, Aspergillus viridinutans
  misc_feature: 113
tcacaacgttccatctcgtatgccgtatcattcggaagagcacacgtctgaactccagtcacaacgttccatctcgtatgccgtcttctgcttgaa

SEQ ID NO: 20299 - DNA, 96 bp, Aspergillus viridinutans
  misc_feature: 113
aagagcagatcggaagagcacacgtctgaactccagtcacaacgttccatctcgtatgccgtatcattgatcggaagagcacacgtctgaactcca

SEQ ID NO: 20300 - DNA, 96 bp, Aspergillus viridinutans
  misc_feature: 113
agtcacaacgttccatctcgtatgccgtatccttgatcggaagagcacacgtctgaactccagtcacaacgttccatctcgtatgccgtcttctgc

SEQ ID NO: 20301 - DNA, 96 bp, Aspergillus viridinutans
  misc_feature: 113
gatcggaagagcacacgtctgaactccagtcacaacgttccatctcgtagatcggaagagcacacgtctgaactccagtcacaacgttccatctcg

SEQ ID NO: 20302 - DNA, 96 bp, Aspergillus viridinutans
  misc_feature: 113
gagcagatcggaagagcacacgtctgaactccagtcacaacgttccatctcgtatgccgtatcattgatcggaagagcacacgtctgaactccagt

SEQ ID NO: 20303 - DNA, 96 bp, Aspergillus viridinutans
  misc_feature: 113
agcagatcggaagagcacacgtctgaactccagtcacaacgttccatctcgtatgccgtatcattgatcggaagagcacacgtctgaactccagtc

SEQ ID NO: 20304 - DNA, 96 bp, Aspergillus viridinutans
  misc_feature: 113
acgtctgaactccagtcacaacgttccatctcgtatgccggatcggaagagcacacgtctgaactccagtcacaacgttccatctcgtatgccgtc

SEQ ID NO: 20305 - DNA, 96 bp, Aspergillus viridinutans
  misc_feature: 113
agagcagatcggaagagcacacgtctgaactccagtcacaacgttccatctcgtatgccgtatcattgatcggaagagcacacgtctgaactccag

SEQ ID NO: 20306 - DNA, 96 bp, Aspergillus viridinutans
  misc_feature: 113
ctccagtcacaacgttccatctcgtatgccgtatcattcggaagagcacacgtctgaactccagtcacaacgttccatctcgtatgccgtcttctg

SEQ ID NO: 20307 - DNA, 96 bp, Aspergillus viridinutans
  misc_feature: 113
agagcacacgtctgaactccagtcacaacgttccatctcgtagatcggaagagcacacgtctgaactccagtcacaacgttccatctcgtatgccg

SEQ ID NO: 20308 - DNA, 96 bp, Aspergillus viridinutans
  misc_feature: 113
ccagtcacaacgttccatctcgtatgccgtatccttgatcggaagagcacacgtctgaactccagtcacaacgttccatctcgtatgccgtcttct

SEQ ID NO: 20309 - DNA, 96 bp, Aspergillus viridinutans
  misc_feature: 113
cagtcacaacgttccatctcgtatgccgtatccttgatcggaagagcacacgtctgaactccagtcacaacgttccatctcgtatgccgtcttctg

SEQ ID NO: 20310 - DNA, 96 bp, Aspergillus viridinutans
  misc_feature: 112
tccagtcacaacgttccatctcgtatgccgtatcattgatcggaagagcacacgtctgaactccagtcacaacgttccacctcgtatgccgtcttc

SEQ ID NO: 20311 - DNA, 96 bp, Aspergillus viridinutans
  misc_feature: 112
gtctgaactccagtcacaacgttccatctcgtatgccgtagatcggaagagcacacgtctgaactccagtcacaacgttccatctcgtatgccgtg

SEQ ID NO: 20312 - DNA, 96 bp, Aspergillus viridinutans
  misc_feature: 112
aagagcacacgtctgaactccagtcacaacgttccatctcgtagatcggaagagcacacgtctgaactccagtcacaacgttccatctcgtatgcc

SEQ ID NO: 20313 - DNA, 96 bp, Aspergillus viridinutans
  misc_feature: 112
gaagagcacacgtctgaactccagtcacaacgttccatctcgtagatcggaagagcacacgtctgaactccagtcacaacgttccatctcgtatgc

SEQ ID NO: 20314 - DNA, 96 bp, Aspergillus viridinutans
  misc_feature: 112
cgtctgaactccagtcacaacgttccatctcgtatgccggatcggaagagcacacgtctgaactccagtcacaacgttccatctcgtatgccgtct

SEQ ID NO: 20315 - DNA, 96 bp, Aspergillus viridinutans
  misc_feature: 111
tctgaactccagtcacaacgttccatctcgtatgccgtcgatcggaagagcacacgtctgaactccagtcacaacgttccatctcgtatgccgtct

SEQ ID NO: 20316 - DNA, 96 bp, Aspergillus viridinutans
  misc_feature: 111
agatcggaagagcacacgtctgaactccagtcacaacgttccatctcgtatgccgtatcagatcggaagagcacacgtctgaactccagtcacaac

SEQ ID NO: 20317 - DNA, 96 bp, Aspergillus viridinutans
  misc_feature: 111
agtcacaacgttccatctcgtatgccgtatcatggatcggaagagcacacgtctgaactccagtcacaacgttccatctcgtatgccgtcttctgc

SEQ ID NO: 20318 - DNA, 96 bp, Aspergillus viridinutans
  misc_feature: 111
agccggcgcgcgcgagggtgacgagggaaggaatcgggaggggaagggcaagggaaagggagagggaggaggaggggagggaggcggtgggaggcg

SEQ ID NO: 20319 - DNA, 96 bp, Aspergillus viridinutans
  misc_feature: 111
ccagtcacaacgttccatctcgtatgccgtatcatggatcggaagagcacacgtctgaactccagtcacaacgttccatctcgtatgccgtcttct

SEQ ID NO: 20320 - DNA, 96 bp, Aspergillus viridinutans
  misc_feature: 111
cagtcacaacgttccatctcgtatgccgtatcatggatcggaagagcacacgtctgaactccagtcacaacgttccatctcgtatgccgtcttctg

SEQ ID NO: 20321 - DNA, 96 bp, Aspergillus viridinutans
  misc_feature: 110
tgaactccagtcacaacgttccatctcgtatgccgtatgatcggaagagcacacgtctgaactccagtcacaacgttccatctcgtatgccgtctt

SEQ ID NO: 20322 - DNA, 96 bp, Aspergillus viridinutans
  misc_feature: 110
agtcacaacgttccatctcgtatgccgtatgatcggaagagcacacgtctgaactccagtcacaacgttccatctcgtatgccgtcttctgcttga

SEQ ID NO: 20323 - DNA, 96 bp, Aspergillus viridinutans
  misc_feature: 110
ctccagtcacaacgttccatctcgtatgccgtatgatcggaagagcacacgtctgaactccagtcacaacgttccatctcgtatgccgtcttctgc

SEQ ID NO: 20324 - DNA, 96 bp, Aspergillus viridinutans
  misc_feature: 110
aactccagtcacaacgttccatctcgtatgccgtctcattgatcggaagagcacacgtctgaactccagtcacaacgttccatctcgtatgccgtc

SEQ ID NO: 20325 - DNA, 96 bp, Aspergillus viridinutans
  misc_feature: 110
gaactccagtcacaacgttccatctcgtatgccgtatgatcggaagagcacacgtctgaactccagtcacaacgttccatctcgtatgccgtcttc

SEQ ID NO: 20326 - DNA, 96 bp, Aspergillus viridinutans
  misc_feature: 110
ccagtcacaacgttccatctcgtatgccgtatgatcggaagagcacacgtctgaactccagtcacaacgttccatctcgtatgccgtcttctgctt

SEQ ID NO: 20327 - DNA, 96 bp, Aspergillus viridinutans
  misc_feature: 110
cagtcacaacgttccatctcgtatgccgtatgatcggaagagcacacgtctgaactccagtcacaacgttccatctcgtatgccgtcttctgcttg

SEQ ID NO: 20328 - DNA, 96 bp, Aspergillus viridinutans
  misc_feature: 110
actccagtcacaacgttccatctcgtatgccgtctcattgatcggaagagcacacgtctgaactccagtcacaacgttccatctcgtatgccgtct

SEQ ID NO: 20329 - DNA, 96 bp, Aspergillus viridinutans
  misc_feature: 109
atcggaagagcagatcggaagagcacacgtctgaactccagtcacaacgttccatctcgtatgccgtatcattgatcggaagagcacacgtctgaa

SEQ ID NO: 20330 - DNA, 96 bp, Aspergillus viridinutans
  misc_feature: 109
tgaactccagtcacaacgttccatctcgtatgccgtcgatcggaagagcacacgtctgaactccagtcacaacgttccatctcgtatgccgtcttc

SEQ ID NO: 20331 - DNA, 96 bp, Aspergillus viridinutans
  misc_feature: 109
tccagtcacaacgttccatctcgtatgccgtatgatcggaagagcacacgtctgaactccagtcacaacgttccatctcgtatgccgtcttctgct

SEQ ID NO: 20332 - DNA, 96 bp, Aspergillus viridinutans
  misc_feature: 109
gtctgaactccagtcacaacgttccatctcgtatgccggatcggaagagcacacgtctgaactccagtcacaacgttccatctcgtatgccgtctt

SEQ ID NO: 20333 - DNA, 96 bp, Aspergillus viridinutans
  misc_feature: 109
gcacacgtctgaactccagtcacaacgttccatctcgtagatcggaagagcacacgtctgaactccagtcacaacgttccatctcgtatgccgtct

SEQ ID NO: 20334 - DNA, 96 bp, Aspergillus viridinutans
  misc_feature: 109
agcacacgtctgaactccagtcacaacgttccatctcgtagatcggaagagcacacgtctgaactccagtcacaacgttccatctcgtatgccgtc

SEQ ID NO: 20335 - DNA, 96 bp, Aspergillus viridinutans
  misc_feature: 109
acacgtctgaactccagtcacaacgttccatctcgtagatcggaagagcacacgtctgaactccagtcacaacgttccatctcgtatgccgtcttc

SEQ ID NO: 20336 - DNA, 96 bp, Aspergillus viridinutans
  misc_feature: 109
ctgaactccagtcacaacgttccatctcgtatgccgtcgatcggaagagcacacgtctgaactccagtcacaacgttccatctcgtatgccgtctt

SEQ ID NO: 20337 - DNA, 96 bp, Aspergillus viridinutans
  misc_feature: 109
actccagtcacaacgttccatctcgtatgccgtatgatcggaagagcacacgtctgaactccagtcacaacgttccatctcgtatgccgtcttctg

SEQ ID NO: 20338 - DNA, 96 bp, Aspergillus viridinutans
  misc_feature: 109
cacacgtctgaactccagtcacaacgttccatctcgtagatcggaagagcacacgtctgaactccagtcacaacgttccatctcgtatgccgtctt

SEQ ID NO: 20339 - DNA, 96 bp, Aspergillus viridinutans
  misc_feature: 109
aactccagtcacaacgttccatctcgtatgccgtatgatcggaagagcacacgtctgaactccagtcacaacgttccatctcgtatgccgtcttct

SEQ ID NO: 20340 - DNA, 96 bp, Aspergillus viridinutans
  misc_feature: 108
ctgctcttccgatcagatcggaagagcgtcgtgtagggaaagagtgtagtactccgtgtagatctcggtggtcgccgtatcattaaaaaaaaaaaa

SEQ ID NO: 20341 - DNA, 96 bp, Aspergillus viridinutans
  misc_feature: 108
tcacaacgttccatctcgtatgccgtatgatcggaagagcacacgtctgaactccagtcacaacgttccatctcgtatgccgtcttctgcttgaaa

SEQ ID NO: 20342 - DNA, 96 bp, Aspergillus viridinutans
  misc_feature: 108
gtcacaacgttccatctcgtatgccgtatgatcggaagagcacacgtctgaactccagtcacaacgttccatctcgtatgccgtcttctgcttgaa

SEQ ID NO: 20343 - DNA, 96 bp, Aspergillus viridinutans
  misc_feature: 108
ccagtcacaacgttccatctcgtatgccgtgatcggaagagcacacgtctgaactccagtcacaacgttccatctcgtatgccgtagatcggaaga

SEQ ID NO: 20344 - DNA, 96 bp, Aspergillus viridinutans
  misc_feature: 108
tctgaactccagtcacaacgttccatctcgtatgccgtgatcggaagagcacacgtctgaactccagtcacaacgttccatctcgtatgccgtaga

SEQ ID NO: 20345 - DNA, 96 bp, Aspergillus viridinutans
  misc_feature: 108
gtcacaacgttccatctcgtatgccgtatccttgatcggaagagcacacgtctgaactccagtcacaacgttccatctcgtatgccgtcttctgct

SEQ ID NO: 20346 - DNA, 96 bp, Aspergillus viridinutans
  misc_feature: 108
gaactccagtcacaacgttccatctcgtatgccgtcgatcggaagagcacacgtctgaactccagtcacaacgttccatctcgtatgccgtcttct

SEQ ID NO: 20347 - DNA, 96 bp, Aspergillus viridinutans
  misc_feature: 108
aactccagtcacaacgttccatctcgtatgccgtcgatcggaagagcacacgtctgaactccagtcacaacgttccatctcgtatgccgtcttctg

SEQ ID NO: 20348 - DNA, 96 bp, Aspergillus viridinutans
  misc_feature: 108
cacgtctgaactccagtcacaacgttccatctcgtagatcggaagagcacacgtctgaactccagtcacaacgttccatctcgtatgccgtcttct

SEQ ID NO: 20349 - DNA, 96 bp, Aspergillus viridinutans
  misc_feature: 107
gatcggaagagcacacgtctgaactccagtcacaacgttccatctcgtatgccgtctcattgatcggaagagcacacgtctgaactccagtcacaa

SEQ ID NO: 20350 - DNA, 96 bp, Aspergillus viridinutans
  misc_feature: 107
actccagtcacaacgttccatctcgtatgccgtatcagatcggaagagcacacgtctgaactccagtcacaacgttccatctcgtatgccgtatca

SEQ ID NO: 20351 - DNA, 96 bp, Aspergillus viridinutans
  misc_feature: 107
tgaactccagtcacaacgttccatctcgtatgccgtgatcggaagagcacacgtctgaactccagtcacaacgttccatctcgtatgccgtagatc

SEQ ID NO: 20352 - DNA, 96 bp, Aspergillus viridinutans
  misc_feature: 107
tgaactccagtcacaacgttccatctcgtatgccggatcggaagagcacacgtctgaactccagtcacaacgttccatctcgtatgccgtcttctg

SEQ ID NO: 20353 - DNA, 96 bp, Aspergillus viridinutans
  misc_feature: 107
tctgaactccagtcacaacgttccatctcgtatgccggatcggaagagcacacgtctgaactccagtcacaacgttccatctcgtatgccgtcttc

SEQ ID NO: 20354 - DNA, 96 bp, Aspergillus viridinutans
  misc_feature: 107
actccagtcacaacgttccatctcgtatgccgtgatcggaagagcacacgtctgaactccagtcacaacgttccatctcgtatgccgtagatcgga

SEQ ID NO: 20355 - DNA, 96 bp, Aspergillus viridinutans
  misc_feature: 107
tccagtcacaacgttccatctcgtatgccgtgatcggaagagcacacgtctgaactccagtcacaacgttccatctcgtatgccgtagatcggaag

SEQ ID NO: 20356 - DNA, 96 bp, Aspergillus viridinutans
  misc_feature: 107
tcacaacgttccatctcgtatgccgtatcatggatcggaagagcacacgtctgaactccagtcacaacgttccatctcgtatgccgtcttctgctt

SEQ ID NO: 20357 - DNA, 96 bp, Aspergillus viridinutans
  misc_feature: 107
gtctgaactccagtcacaacgttccatctcgtagatcggaagagcacacgtctgaactccagtcacaacgttccatctcgtatgccgtcttctgct

SEQ ID NO: 20358 - DNA, 96 bp, Aspergillus viridinutans
  misc_feature: 107
gtcacaacgttccatctcgtatgccgtatcatggatcggaagagcacacgtctgaactccagtcacaacgttccatctcgtatgccgtcttctgct

SEQ ID NO: 20359 - DNA, 96 bp, Aspergillus viridinutans
  misc_feature: 107
cgtctgaactccagtcacaacgttccatctcgtagatcggaagagcacacgtctgaactccagtcacaacgttccatctcgtatgccgtcttctgc

SEQ ID NO: 20360 - DNA, 96 bp, Aspergillus viridinutans
  misc_feature: 107
actccagtcacaacgttccatctcgtatgccgtcgatcggaagagcacacgtctgaactccagtcacaacgttccatctcgtatgccgtcttctgc

SEQ ID NO: 20361 - DNA, 96 bp, Aspergillus viridinutans
  misc_feature: 107
gaactccagtcacaacgttccatctcgtatgccggatcggaagagcacacgtctgaactccagtcacaacgttccatctcgtatgccgtcttctgc

SEQ ID NO: 20362 - DNA, 96 bp, Aspergillus viridinutans
  misc_feature: 107
gaactccagtcacaacgttccatctcgtatgccgtgatcggaagagcacacgtctgaactccagtcacaacgttccatctcgtatgccgtagatcg

SEQ ID NO: 20363 - DNA, 96 bp, Aspergillus viridinutans
  misc_feature: 107
gaactccagtcacaacgttccatctcgtatgccgtatcagatcggaagagcacacgtctgaactccagtcacaacgttccatctcgtatgccgtag

SEQ ID NO: 20364 - DNA, 96 bp, Aspergillus viridinutans
  misc_feature: 107
ctgaactccagtcacaacgttccatctcgtatgccgtgatcggaagagcacacgtctgaactccagtcacaacgttccatctcgtatgccgtagat

SEQ ID NO: 20365 - DNA, 96 bp, Aspergillus viridinutans
  misc_feature: 107
ctgaactccagtcacaacgttccatctcgtatgccggatcggaagagcacacgtctgaactccagtcacaacgttccatctcgtatgccgtcttct

SEQ ID NO: 20366 - DNA, 96 bp, Aspergillus viridinutans
  misc_feature: 107
cagtcacaacgttccatctcgtatgccgtgatcggaagagcacacgtctgaactccagtcacaacgttccatctcgtatgccgtagatcggaagag

SEQ ID NO: 20367 - DNA, 96 bp, Aspergillus viridinutans
  misc_feature: 107
aactccagtcacaacgttccatctcgtatgccgtgatcggaagagcacacgtctgaactccagtcacaacgttccatctcgtatgccgtagatcgg

SEQ ID NO: 20368 - DNA, 96 bp, Aspergillus viridinutans
  misc_feature: 107
acgtctgaactccagtcacaacgttccatctcgtagatcggaagagcacacgtctgaactccagtcacaacgttccatctcgtatgccgtcttctg

SEQ ID NO: 20369 - DNA, 96 bp, Aspergillus viridinutans
  misc_feature: 107
aactccagtcacaacgttccatctcgtatgccggatcggaagagcacacgtctgaactccagtcacaacgttccatctcgtatgccgtcttctgct

SEQ ID NO: 20370 - DNA, 96 bp, Aspergillus viridinutans
  misc_feature: 107
actccagtcacaacgttccatctcgtatgccggatcggaagagcacacgtctgaactccagtcacaacgttccatctcgtatgccgtcttctgctt

SEQ ID NO: 20371 - DNA, 96 bp, Aspergillus viridinutans
  misc_feature: 106
gtcacaacgttccatctcggatcggaagagcacacgtctgaactccagtcacaacgttccatctcgtatgccgtcttctgcttgaaaaaaaaaaaa

SEQ ID NO: 20372 - DNA, 96 bp, Aspergillus viridinutans
  misc_feature: 106
ctccagtcacaacgttccatctcgtatgccgtgatcggaagagcacacgtctgaactccagtcacaacgttccatctcgtatgccgtagatcggaa

SEQ ID NO: 20373 - DNA, 96 bp, Aspergillus viridinutans
  misc_feature: 106
gtcacaacgttccatctcgtatgccgtgatcggaagagcacacgtctgaactccagtcacaacgttccatctcgtatgccgtagatcggaagagca

SEQ ID NO: 20374 - DNA, 96 bp, Aspergillus viridinutans
  misc_feature: 106
aactccagtcacaacgttccatctcgtatgccgtatcagatcggaagagcacacgtctgaactccagtcacaacgttccatctcgtatgccgtaga

SEQ ID NO: 20375 - DNA, 96 bp, Aspergillus viridinutans
  misc_feature: 106
agtcacaacgttccatctcgtatgccgtgatcggaagagcacacgtctgaactccagtcacaacgttccatctcgtatgccgtagatcggaagagc

SEQ ID NO: 20376 - DNA, 96 bp, Aspergillus viridinutans
  misc_feature: 106
ctccagtcacaacgttccatctcgtatgccggatcggaagagcacacgtctgaactccagtcacaacgttccatctcgtatgccgtcttctgcttg

SEQ ID NO: 20377 - DNA, 96 bp, Aspergillus viridinutans
  misc_feature: 105
tccgatcagatcggaagagcgtcgtgtagggaaagagtgtagtactccgtgtagatctcggtggtcgccgtatcattaaaaaaaaaaaaaaaaaaa

SEQ ID NO: 20378 - DNA, 96 bp, Aspergillus viridinutans
  misc_feature: 105
cagatcggaagagcacacgtctgaactccagtcacaacgttccatctcgtatgccgtatcatgatcggaagagcacacgtctgaactccagtcaca

SEQ ID NO: 20379 - DNA, 96 bp, Aspergillus viridinutans
  misc_feature: 105
tgaactccagtcacaacgttccatctcgtagatcggaagagcacacgtctgaactccagtcacaacgttccatctcgtatgccgtcttctgcttga

SEQ ID NO: 20380 - DNA, 96 bp, Aspergillus viridinutans
  misc_feature: 105
tctgaactccagtcacaacgttccatctcgtagatcggaagagcacacgtctgaactccagtcacaacgttccatctcgtatgccgtcttctgctt

SEQ ID NO: 20381 - DNA, 96 bp, Aspergillus viridinutans
  misc_feature: 105
tccagtcacaacgttccatctcgtatgccgtctcattgatcggaagagcacacgtctgaactccagtcacaacgttccatctcgtatgccgtcttc

SEQ ID NO: 20382 - DNA, 96 bp, Aspergillus viridinutans
  misc_feature: 105
agtcacaacgttccatctcgtatgccgtatcattgatcggaagagcacacgtctgaactccagtcacaacgttccacctcgtatgccgtcttctgc

SEQ ID NO: 20383 - DNA, 96 bp, Aspergillus viridinutans
  misc_feature: 105
ctgaactccagtcacaacgttccatctcgtagatcggaagagcacacgtctgaactccagtcacaacgttccatctcgtatgccgtcttctgcttg

SEQ ID NO: 20384 - DNA, 96 bp, Aspergillus viridinutans
  misc_feature: 105
ctccagtcacaacgttccatctcgtatgccgtctcattgatcggaagagcacacgtctgaactccagtcacaacgttccatctcgtatgccgtctt

SEQ ID NO: 20385 - DNA, 96 bp, Aspergillus viridinutans
  misc_feature: 105
ctccagtcacaacgttccatctcgtatgccgtcgatcggaagagcacacgtctgaactccagtcacaacgttccatctcgtatgccgtcttctgct

SEQ ID NO: 20386 - DNA, 96 bp, Aspergillus viridinutans
  misc_feature: 105
ccagtcacaacgttccatctcgtatgccgtatcattgatcggaagagcacacgtctgaactccagtcacaacgttccacctcgtatgccgtcttct

SEQ ID NO: 20387 - DNA, 96 bp, Aspergillus viridinutans
  misc_feature: 105
cagtcacaacgttccatctcgtatgccgtatcattgatcggaagagcacacgtctgaactccagtcacaacgttccacctcgtatgccgtcttctg

SEQ ID NO: 20388 - DNA, 96 bp, Aspergillus viridinutans
  misc_feature: 104
ccagtcacaacgttccatctcgtagatcggaagagcacacgtctgaactccagtcacaacgttccatctcgtatgccgtcttctgcttgaaaaaaa

SEQ ID NO: 20389 - DNA, 96 bp, Aspergillus viridinutans
  misc_feature: 104
tccagtcacaacgttccatctcgtagatcggaagagcacacgtctgaactccagtcacaacgttccatctcgtatgccgtcttctgcttgaaaaaa

SEQ ID NO: 20390 - DNA, 96 bp, Aspergillus viridinutans
  misc_feature: 104
ctccagtcacaacgttccatctcgtagatcggaagagcacacgtctgaactccagtcacaacgttccatctcgtatgccgtcttctgcttgaaaaa

SEQ ID NO: 20391 - DNA, 96 bp, Aspergillus viridinutans
  misc_feature: 104
actccagtcacaacgttccatctcgtagatcggaagagcacacgtctgaactccagtcacaacgttccatctcgtatgccgtcttctgcttgaaaa

SEQ ID NO: 20392 - DNA, 96 bp, Aspergillus viridinutans
  misc_feature: 104
aactccagtcacaacgttccatctcgtagatcggaagagcacacgtctgaactccagtcacaacgttccatctcgtatgccgtcttctgcttgaaa

SEQ ID NO: 20393 - DNA, 96 bp, Aspergillus viridinutans
  misc_feature: 104
gaactccagtcacaacgttccatctcgtagatcggaagagcacacgtctgaactccagtcacaacgttccatctcgtatgccgtcttctgcttgaa

SEQ ID NO: 20394 - DNA, 96 bp, Aspergillus viridinutans
  misc_feature: 104
tccagtcacaacgttccatctcgtatgccgtcgatcggaagagcacacgtctgaactccagtcacaacgttccatctcgtatgccgtcttctgctt

SEQ ID NO: 20395 - DNA, 96 bp, Aspergillus viridinutans
  misc_feature: 104
tcacaacgttccatctcgtatgccgtatccttgatcggaagagcacacgtctgaactccagtcacaacgttccatctcgtatgccgtcttctgctt

SEQ ID NO: 20396 - DNA, 96 bp, Aspergillus viridinutans
  misc_feature: 104
ggaagagcacacgtctgaactccagtcacaacgttccatctcgtatgccgtatcatgctcggaagagcacacgtctgaactccagtcacaacgttc

SEQ ID NO: 20397 - DNA, 96 bp, Aspergillus viridinutans
  misc_feature: 104
gaagagcacacgtctgaactccagtcacaacgttccatctcgtatgccgtatcatgctcggaagagcacacgtctgaactccagtcacaacgttcc

SEQ ID NO: 20398 - DNA, 96 bp, Aspergillus viridinutans
  misc_feature: 104
ccagtcacaacgttccatctcgtatgccgtctcattgatcggaagagcacacgtctgaactccagtcacaacgttccatctcgtatgccgtcttct

SEQ ID NO: 20399 - DNA, 96 bp, Aspergillus viridinutans
  misc_feature: 104
cagtcacaacgttccatctcgtatgccgtctcattgatcggaagagcacacgtctgaactccagtcacaacgttccatctcgtatgccgtcttctg

SEQ ID NO: 20400 - DNA, 96 bp, Aspergillus viridinutans
  misc_feature: 103
agtcacaacgttccatctcgtagatcggaagagcacacgtctgaactccagtcacaacgttccatctcgtatgccgtcttctgcttgaaaaaaaaa

SEQ ID NO: 20401 - DNA, 96 bp, Aspergillus viridinutans
  misc_feature: 103
cagtcacaacgttccatctcgtagatcggaagagcacacgtctgaactccagtcacaacgttccatctcgtatgccgtcttctgcttgaaaaaaaa

SEQ ID NO: 20402 - DNA, 96 bp, Aspergillus viridinutans
  misc_feature: 103
aagagcacacgtctgaactccagtcacaacgttccatctcgtatgccgtatcatgctcggaagagcacacgtctgaactccagtcacaacgttcca

SEQ ID NO: 20403 - DNA, 96 bp, Aspergillus viridinutans
  misc_feature: 103
tccagtcacaacgttccatctcgtatgccggatcggaagagcacacgtctgaactccagtcacaacgttccatctcgtatgccgtcttctgcttga

SEQ ID NO: 20404 - DNA, 96 bp, Aspergillus viridinutans
  misc_feature: 103
gatcggaagagcagatcggaagagcacacgtctgaactccagtcacaacgttccatctcgtatgccgtatcattgatcggaagagcacacgtctga

SEQ ID NO: 20405 - DNA, 96 bp, Aspergillus viridinutans
  misc_feature: 103
ccagtcacaacgttccatctcgtatgccgtcgatcggaagagcacacgtctgaactccagtcacaacgttccatctcgtatgccgtcttctgcttg

SEQ ID NO: 20406 - DNA, 96 bp, Aspergillus viridinutans
  misc_feature: 102
gctcttccgatctgatcggaagagcgtcgtgtagggaaagagtgtagtactccgtgtagatctcggtggtcgccgtatcattaaaaaaaaaaaaaa

SEQ ID NO: 20407 - DNA, 96 bp, Aspergillus viridinutans
  misc_feature: 102
agagcagatcggaagagcagatcggaagagcacacgtctgaactccagtcacaacgttccatctcgtatgccgtcttctgcttgaaaaaaaaaaaa

SEQ ID NO: 20408 - DNA, 96 bp, Aspergillus viridinutans
  misc_feature: 102
gtcacaacgttccatctcgtagatcggaagagcacacgtctgaactccagtcacaacgttccatctcgtatgccgtcttctgcttgaaaaaaaaaa

SEQ ID NO: 20409 - DNA, 96 bp, Aspergillus viridinutans
  misc_feature: 102
tcacaacgttccatctcgtatgccggatcggaagagcacacgtctgaactccagtcacaacgttccatctcgtatgccgtcttctgcttgaaaaaa

SEQ ID NO: 20410 - DNA, 96 bp, Aspergillus viridinutans
  misc_feature: 102
gtcacaacgttccatctcgtatgccggatcggaagagcacacgtctgaactccagtcacaacgttccatctcgtatgccgtcttctgcttgaaaaa

SEQ ID NO: 20411 - DNA, 96 bp, Aspergillus viridinutans
  misc_feature: 102
agtcacaacgttccatctcgtatgccggatcggaagagcacacgtctgaactccagtcacaacgttccatctcgtatgccgtcttctgcttgaaaa

SEQ ID NO: 20412 - DNA, 96 bp, Aspergillus viridinutans
  misc_feature: 102
cagtcacaacgttccatctcgtatgccggatcggaagagcacacgtctgaactccagtcacaacgttccatctcgtatgccgtcttctgcttgaaa

SEQ ID NO: 20413 - DNA, 96 bp, Aspergillus viridinutans
  misc_feature: 102
tcggaagagcagatcggaagagcacacgtctgaactccagtcacaacgttccatctcgtatgccgtatcatgatcggaagagcacacgtctgaact

SEQ ID NO: 20414 - DNA, 96 bp, Aspergillus viridinutans
  misc_feature: 102
tcggaagagcacacgtctgaactccagtcacaacgttccatctcgtatgccgtatcatgctcggaagagcacacgtctgaactccagtcacaacgt

SEQ ID NO: 20415 - DNA, 96 bp, Aspergillus viridinutans
  misc_feature: 102
cagtcacaacgttccatctcgtatgccgtcgatcggaagagcacacgtctgaactccagtcacaacgttccatctcgtatgccgtcttctgcttga

SEQ ID NO: 20416 - DNA, 96 bp, Aspergillus viridinutans
  misc_feature: 102
gagccggcgcgcgcgagggtgacgagggaaggaatcgggaggggaagggcaagggaaagggagagggaggaggaggggagggaggcggtgggaggc

SEQ ID NO: 20417 - DNA, 96 bp, Aspergillus viridinutans
  misc_feature: 102
agtcacaacgttccatctcgtatgccgtctcattgatcggaagagcacacgtctgaactccagtcacaacgttccatctcgtatgccgtcttctgc

SEQ ID NO: 20418 - DNA, 96 bp, Aspergillus viridinutans
  misc_feature: 102
atcggaagagcacacgtctgaactccagtcacaacgttccatctcgtatgccgtatcatgctcggaagagcacacgtctgaactccagtcacaacg

SEQ ID NO: 20419 - DNA, 96 bp, Aspergillus viridinutans
  misc_feature: 102
cggaagagcacacgtctgaactccagtcacaacgttccatctcgtatgccgtatcatgctcggaagagcacacgtctgaactccagtcacaacgtt

SEQ ID NO: 20420 - DNA, 96 bp, Aspergillus viridinutans
  misc_feature: 102
actccagtcacaacgttccatctcgtatgccgtatcagatcggaagagcacacgtctgaactccagtcacaacgttccatctcgtatgccgtagat

SEQ ID NO: 20421 - DNA, 96 bp, Aspergillus viridinutans
  misc_feature: 101
agtcacaacgttccatctcgtatgccgtcgatcggaagagcacacgtctgaactccagtcacaacgttccatctcgtatgccgtcttctgcttgaa

SEQ ID NO: 20422 - DNA, 96 bp, Aspergillus viridinutans
  misc_feature: 101
ccagtcacaacgttccatctcgtatgccggatcggaagagcacacgtctgaactccagtcacaacgttccatctcgtatgccgtcttctgcttgaa

SEQ ID NO: 20423 - DNA, 96 bp, Aspergillus viridinutans
  misc_feature: 101
tgtattcttctgtattcttctgtattcttctgtattcttctgtattcttctgtattcttctgtattcttctgtattcttctgtattcttctgtatt

SEQ ID NO: 20424 - DNA, 96 bp, Aspergillus viridinutans
  misc_feature: 101
tctgtattcttctgtattcttctgtattcttctgtattcttctgtattcttctgtattcttctgtattcttctgtattcttctgtattcttctgta

SEQ ID NO: 20425 - DNA, 96 bp, Aspergillus viridinutans
  misc_feature: 101
tccagtcacaacgttccatctcgtatgccgtatcagatcggaagagcacacgtctgaactccagtcacaacgttccatctcgtatgccgtagatcg

SEQ ID NO: 20426 - DNA, 96 bp, Aspergillus viridinutans
  misc_feature: 101
gcagatcggaagagcacacgtctgaactccagtcacaacgttccatctcgtatgccgtatcatgatcggaagagcacacgtctgaactccagtcac

SEQ ID NO: 20427 - DNA, 96 bp, Aspergillus viridinutans
  misc_feature: 101
gtcacaacgttccatctcgtatgccgtctcattgatcggaagagcacacgtctgaactccagtcacaacgttccatctcgtatgccgtcttctgct

SEQ ID NO: 20428 - DNA, 96 bp, Aspergillus viridinutans
  misc_feature: 101
ggaagagcagatcggaagagcacacgtctgaactccagtcacaacgttccatctcgtatgccgtatcatgatcggaagagcacacgtctgaactcc

SEQ ID NO: 20429 - DNA, 96 bp, Aspergillus viridinutans
  misc_feature: 101
ctccagtcacaacgttccatctcgtatgccgtatcagatcggaagagcacacgtctgaactccagtcacaacgttccatctcgtatgccgtagatc

SEQ ID NO: 20430 - DNA, 96 bp, Aspergillus viridinutans
  misc_feature: 101
cggaagagcagatcggaagagcacacgtctgaactccagtcacaacgttccatctcgtatgccgtatcatgatcggaagagcacacgtctgaactc

SEQ ID NO: 20431 - DNA, 96 bp, Aspergillus viridinutans
  misc_feature: 101
aactccagtcacaacgttccatctcgtatgccgtcttctgcttgaaaaaaaaaaacgtctgaactccagtcacaacgttccatctcgtatgccgtc

SEQ ID NO: 20432 - DNA, 96 bp, Aspergillus viridinutans
  misc_feature: 100
tgaactccagtcacaacgttccatctcgtatgccgtagatcggaagagcacacgtctgaactccagtcacaacgttccatctcgtatgccgtgatc

SEQ ID NO: 20433 - DNA, 96 bp, Aspergillus viridinutans
  misc_feature: 100
tctgaactccagtcacaacgttccatctcgtatgccgtagatcggaagagcacacgtctgaactccagtcacaacgttccatctcgtatgccgtga

SEQ ID NO: 20434 - DNA, 96 bp, Aspergillus viridinutans
  misc_feature: 100
tcacaacgttccatctcgtatgccgtctcattgatcggaagagcacacgtctgaactccagtcacaacgttccatctcgtatgccgtcttctgctt

SEQ ID NO: 20435 - DNA, 96 bp, Aspergillus viridinutans
  misc_feature: 100
agaataagaagaataagaagaataagaagaataagaagaataagaagaataagaagaataagaagaataagaagaataagaagaataagaagaata

SEQ ID NO: 20436 - DNA, 96 bp, Aspergillus viridinutans
  misc_feature: 100
gaactccagtcacaacgttccatctcgtatgccgtagatcggaagagcacacgtctgaactccagtcacaacgttccatctcgtatgccgtgatcg

SEQ ID NO: 20437 - DNA, 96 bp, Aspergillus viridinutans
  misc_feature: 100
ctgtattcttctgtattcttctgtattcttctgtattcttctgtattcttctgtattcttctgtattcttctgtattcttctgtattcttctgtat

SEQ ID NO: 20438 - DNA, 96 bp, Aspergillus viridinutans
  misc_feature: 100
ctgaactccagtcacaacgttccatctcgtatgccgtagatcggaagagcacacgtctgaactccagtcacaacgttccatctcgtatgccgtgat

SEQ ID NO: 20439 - DNA, 96 bp, Aspergillus viridinutans
  misc_feature: 100
aactccagtcacaacgttccatctcgtatgccgtagatcggaagagcacacgtctgaactccagtcacaacgttccatctcgtatgccgtgatcgg

SEQ ID NO: 20440 - DNA, 96 bp, Aspergillus viridinutans
  misc_feature: 99
gcacacgtctgaactccagatcggaagagcacacgtctgaactccagtcacaacgttccatctcgtatgccgtcttctgcttgaaaaaaaaaaaaa

SEQ ID NO: 20441 - DNA, 96 bp, Aspergillus viridinutans
  misc_feature: 99
agtcacaacgttccatctcgtatgccgtatcagatcggaagagcacacgtctgaactccagtcacaacgttccatctcgtatgccgtagatcggaa

SEQ ID NO: 20442 - DNA, 96 bp, Aspergillus viridinutans
  misc_feature: 99
gaagagcagatcggaagagcacacgtctgaactccagtcacaacgttccatctcgtatgccgtatcatgatcggaagagcacacgtctgaactcca

SEQ ID NO: 20443 - DNA, 96 bp, Aspergillus viridinutans
  misc_feature: 99
agcagatcggaagagcacacgtctgaactccagtcacaacgttccatctcgtatgccgtatcatgatcggaagagcacacgtctgaactccagtca

SEQ ID NO: 20444 - DNA, 96 bp, Aspergillus viridinutans
  misc_feature: 99
tcacaacgttccatctcgtatgccgtatcagatcggaagagcacacgtctgaactccagtcacaacgttccatctcgtatgccgtagatcggaaga

SEQ ID NO: 20445 - DNA, 96 bp, Aspergillus viridinutans
  misc_feature: 99
actccagtcacaacgttccatctcgtatgccgtatcatgatcggaagagcacacgtctgaactccagtcacaacgttccatctcgtatgccgtaga

SEQ ID NO: 20446 - DNA, 96 bp, Aspergillus viridinutans
  misc_feature: 99
cagtcacaacgttccatctcgtatgccgtatcagatcggaagagcacacgtctgaactccagtcacaacgttccatctcgtatgccgtagatcgga

SEQ ID NO: 20447 - DNA, 96 bp, Aspergillus viridinutans
  misc_feature: 99
gtcacaacgttccatctcgtatgccgtatcagatcggaagagcacacgtctgaactccagtcacaacgttccatctcgtatgccgtagatcggaag

SEQ ID NO: 20448 - DNA, 96 bp, Aspergillus viridinutans
  misc_feature: 99
gagcagatcggaagagcacacgtctgaactccagtcacaacgttccatctcgtatgccgtatcatgatcggaagagcacacgtctgaactccagtc

SEQ ID NO: 20449 - DNA, 96 bp, Aspergillus viridinutans
  misc_feature: 99
aagagcagatcggaagagcacacgtctgaactccagtcacaacgttccatctcgtatgccgtatcatgatcggaagagcacacgtctgaactccag

SEQ ID NO: 20450 - DNA, 96 bp, Aspergillus viridinutans
  misc_feature: 99
aactccagtcacaacgttccatctcgtatgccgtatcatgatcggaagagcacacgtctgaactccagtcacaacgttccatctcgtatgccgtag

SEQ ID NO: 20451 - DNA, 96 bp, Aspergillus viridinutans
  misc_feature: 99
ccagtcacaacgttccatctcgtatgccgtatcagatcggaagagcacacgtctgaactccagtcacaacgttccatctcgtatgccgtagatcgg

SEQ ID NO: 20452 - DNA, 96 bp, Aspergillus viridinutans
  misc_feature: 99
ccagtcacaacgttccatctcgtatgccgtatcatgatcggaagagcacacgtctgaactccagtcacaacgttccatctcgtatgccgtatcatt

SEQ ID NO: 20453 - DNA, 96 bp, Aspergillus viridinutans
  misc_feature: 99
agagcagatcggaagagcacacgtctgaactccagtcacaacgttccatctcgtatgccgtatcatgatcggaagagcacacgtctgaactccagt

SEQ ID NO: 20454 - DNA, 96 bp, Aspergillus viridinutans
  misc_feature: 98
gtcacaacgttccatctcgtatgccgtcgatcggaagagcacacgtctgaactccagtcacaacgttccatctcgtatgccgtcttctgcttgaaa

SEQ ID NO: 20455 - DNA, 96 bp, Aspergillus viridinutans
  misc_feature: 98
cagatcggaagagcacacgtctgaactccagtcacaacgttccatctcgtatgccgtatcagatcggaagagcacacgtctgaactccagtcacaa

SEQ ID NO: 20456 - DNA, 96 bp, Aspergillus viridinutans
  misc_feature: 98
ttctgtattcttctgtattcttctgtattcttctgtattcttctgtattcttctgtattcttctgtattcttctgtattcttctgtattcttctgt

SEQ ID NO: 20457 - DNA, 96 bp, Aspergillus viridinutans
  misc_feature: 98
gatcggaagagcagatcggaagagcacacgtctgaactccagtcacaacgttccatctcgtatgccgtatcatgatcggaagagcacacgtctgaa

SEQ ID NO: 20458 - DNA, 96 bp, Aspergillus viridinutans
  misc_feature: 98
gaataagaagaataagaagaataagaagaataagaagaataagaagaataagaagaataagaagaataagaagaataagaagaataagaagaataa

SEQ ID NO: 20459 - DNA, 96 bp, Aspergillus viridinutans
  misc_feature: 98
agtcacaacgttccatctcgtatgccgtatcattgatcggaagagcacacgtctgaactccagtcacaacgttccatctcgtatgccgtatcatga

SEQ ID NO: 20460 - DNA, 96 bp, Aspergillus viridinutans
  misc_feature: 98
atcggaagagcagatcggaagagcacacgtctgaactccagtcacaacgttccatctcgtatgccgtatcatgatcggaagagcacacgtctgaac

SEQ ID NO: 20461 - DNA, 96 bp, Aspergillus viridinutans
  misc_feature: 98
gtcacaacgttccatctcgtatgccgtatcattgatcggaagagcacacgtctgaactccagtcacaacgttccacctcgtatgccgtcttctgct

SEQ ID NO: 20462 - DNA, 96 bp, Aspergillus viridinutans
  misc_feature: 98
cttctgtattcttctgtattcttctgtattcttctgtattcttctgtattcttctgtattcttctgtattcttctgtattcttctgtattcttctg

SEQ ID NO: 20463 - DNA, 96 bp, Aspergillus viridinutans
  misc_feature: 97
tcttctgtattcttctgtattcttctgtattcttctgtattcttctgtattcttctgtattcttctgtattcttctgtattcttctgtattcttct

SEQ ID NO: 20464 - DNA, 96 bp, Aspergillus viridinutans
  misc_feature: 97
ataagaagaataagaagaataagaagaataagaagaataagaagaataagaagaataagaagaataagaagaataagaagaataagaagaataaga

SEQ ID NO: 20465 - DNA, 96 bp, Aspergillus viridinutans
  misc_feature: 97
aataagaagaataagaagaataagaagaataagaagaataagaagaataagaagaataagaagaataagaagaataagaagaataagaagaataag

SEQ ID NO: 20466 - DNA, 96 bp, Aspergillus viridinutans
  misc_feature: 96
cggaagagcacacgtctgaactccagtcacaacgttccatctcgtatgccgtcttctgcttgaaaaaaaaaaaaaaaaaaaaaaaaaaaaaaaaaa

SEQ ID NO: 20467 - DNA, 96 bp, Aspergillus viridinutans
  misc_feature: 96
tcacaacgttccatctcgtagatcggaagagcacacgtctgaactccagtcacaacgttccatctcgtatgccgtcttctgcttgaaaaaaaaaaa

SEQ ID NO: 20468 - DNA, 96 bp, Aspergillus viridinutans
  misc_feature: 96
tcacaacgttccatctcgtatgccgtcgatcggaagagcacacgtctgaactccagtcacaacgttccatctcgtatgccgtcttctgcttgaaaa

SEQ ID NO: 20469 - DNA, 96 bp, Aspergillus viridinutans
  misc_feature: 96
ttcttctgtattcttctgtattcttctgtattcttctgtattcttctgtattcttctgtattcttctgtattcttctgtattcttctgtattcttc

SEQ ID NO: 20470 - DNA, 96 bp, Aspergillus viridinutans
  misc_feature: 96
taagaagaataagaagaataagaagaataagaagaataagaagaataagaagaataagaagaataagaagaataagaagaataagaagaataagaa

SEQ ID NO: 20471 - DNA, 96 bp, Aspergillus viridinutans
  misc_feature: 96
ctccagtcacaacgttccatctcgtatgccgtagatcggaagagcacacgtctgaactccagtcacaacgttccatctcgtatgccgtgatcggaa

SEQ ID NO: 20472 - DNA, 96 bp, Aspergillus viridinutans
  misc_feature: 96
actccagtcacaacgttccatctcgtatgccgtagatcggaagagcacacgtctgaactccagtcacaacgttccatctcgtatgccgtgatcgga

SEQ ID NO: 20473 - DNA, 96 bp, Aspergillus viridinutans
  misc_feature: 96
tcacaacgttccatctcgtatgccgtatcattgatcggaagagcacacgtctgaactccagtcacaacgttccacctcgtatgccgtcttctgctt

SEQ ID NO: 20474 - DNA, 96 bp, Aspergillus viridinutans
  misc_feature: 96
gtcacaacgttccatctcgtatgccgtatcattgatcggaagagcacacgtctgaactccagtcacaacgttccatctcgtatgccgtatcatgat

SEQ ID NO: 20475 - DNA, 96 bp, Aspergillus viridinutans
  misc_feature: 96
gctcttccgatcagatcggaagagcgtcgtgtagggaaagagtgtagtactccgtgtagatctcggtggtcgccgtatcattaaaaaaaaaaaaag

SEQ ID NO: 20476 - DNA, 96 bp, Aspergillus viridinutans
  misc_feature: 96
cagtcacaacgttccatctcgtatgccgtatcattagatcggaagagcacacgtctgaactccagtcacaacgttccatctcgtatgccgtatcat

SEQ ID NO: 20477 - DNA, 96 bp, Aspergillus viridinutans
  misc_feature: 95
aagagcgtcgtgtagggaaagagtgtagtactccgtgtagatctcggtggtcgccgtatcattaaaaaaaaaaaaaaaaaaaaaaaaaaaaaaaaa

SEQ ID NO: 20478 - DNA, 96 bp, Aspergillus viridinutans
  misc_feature: 95
tcggaagagcacacgtctgaactccagtcacaacgttccatctcgtatgccgtatcattatcggaagagcacacgtctgaactccagtcacaacgt

SEQ ID NO: 20479 - DNA, 96 bp, Aspergillus viridinutans
  misc_feature: 95
tcacaacgttccatctcgtatgccgtgatcggaagagcacacgtctgaactccagtcacaacgttccatctcgtatgccgtagatcggaagagcac

SEQ ID NO: 20480 - DNA, 96 bp, Aspergillus viridinutans
  misc_feature: 95
gtattcttctgtattcttctgtattcttctgtattcttctgtattcttctgtattcttctgtattcttctgtattcttctgtattcttctgtattc

SEQ ID NO: 20481 - DNA, 96 bp, Aspergillus viridinutans
  misc_feature: 95
atcggaagagcacacgtctgaactccagtcacaacgttccatctcgtatgccgtatcattatcggaagagcacacgtctgaactccagtcacaacg

SEQ ID NO: 20482 - DNA, 96 bp, Aspergillus viridinutans
  misc_feature: 95
cggaagagcacacgtctgaactccagtcacaacgttccatctcgtatgccgtatcattatcggaagagcacacgtctgaactccagtcacaacgtt

SEQ ID NO: 20483 - DNA, 96 bp, Aspergillus viridinutans
  misc_feature: 94
tccagtcacaacgttccatctcgtatgccgtagatcggaagagcacacgtctgaactccagtcacaacgttccatctcgtatgccgtgatcggaag

SEQ ID NO: 20484 - DNA, 96 bp, Aspergillus viridinutans
  misc_feature: 94
ggaagagcacacgtctgaactccagtcacaacgttccatctcgtatgccgtatcattatcggaagagcacacgtctgaactccagtcacaacgttc

SEQ ID NO: 20485 - DNA, 96 bp, Aspergillus viridinutans
  misc_feature: 94
gaagagcacacgtctgaactccagtcacaacgttccatctcgtatgccgtatcattatcggaagagcacacgtctgaactccagtcacaacgttcc

SEQ ID NO: 20486 - DNA, 96 bp, Aspergillus viridinutans
  misc_feature: 94
gagcacacgtctgaactccagtcacaacgttccatctcgtatgccgtatcatgctcggaagagcacacgtctgaactccagtcacaacgttccatc

SEQ ID NO: 20487 - DNA, 96 bp, Aspergillus viridinutans
  misc_feature: 94
gaactccagtcacaacgttccatctcgtatgccgtagatcggaagagcacacgtctgaactccagtcacaacgttccatctcgtatgccgtatcag

SEQ ID NO: 20488 - DNA, 96 bp, Aspergillus viridinutans
  misc_feature: 94
attcttctgtattcttctgtattcttctgtattcttctgtattcttctgtattcttctgtattcttctgtattcttctgtattcttctgtattctt

SEQ ID NO: 20489 - DNA, 96 bp, Aspergillus viridinutans
  misc_feature: 94
agagcacacgtctgaactccagtcacaacgttccatctcgtatgccgtatcatgctcggaagagcacacgtctgaactccagtcacaacgttccat

SEQ ID NO: 20490 - DNA, 96 bp, Aspergillus viridinutans
  misc_feature: 94
actccagtcacaacgttccatctcgtatgccgtcttctgcttgaaaaaaaaaaacgtctgaactccagtcacaacgttccatctcgtatgccgtct

SEQ ID NO: 20491 - DNA, 96 bp, Aspergillus viridinutans
  misc_feature: 93
gcagatcggaagagcacacgtctgaactccagtcacaacgttccatctcgtatgccgtatcagatcggaagagcacacgtctgaactccagtcaca

SEQ ID NO: 20492 - DNA, 96 bp, Aspergillus viridinutans
  misc_feature: 93
tgaactccagtcacaacgttccatctcgtatgccgtgatcggaagagcacacgtctgaactccagtcacaacgttccatctcgtatgccgtatcat

SEQ ID NO: 20493 - DNA, 96 bp, Aspergillus viridinutans
  misc_feature: 93
tcacaacgttccatctcgtatgccgtatcattgatcggaagagcacacgtctgaactccagtcacaacgttccatctcgtatgccgtatcatgatc

SEQ ID NO: 20494 - DNA, 96 bp, Aspergillus viridinutans
  misc_feature: 93
gatcggaagagcacacgtctgaactccagtcacaacgttccatctcgtatgccgtatcatgctcggaagagcacacgtctgaactccagtcacaac

SEQ ID NO: 20495 - DNA, 96 bp, Aspergillus viridinutans
  misc_feature: 93
gcacacgtctgaactccagtcacaacgttccatctcgtatgccgtatcatgctcggaagagcacacgtctgaactccagtcacaacgttccatctc

SEQ ID NO: 20496 - DNA, 96 bp, Aspergillus viridinutans
  misc_feature: 93
ctccagtcacaacgttccatctcgtatgccgtatcatgatcggaagagcacacgtctgaactccagtcacaacgttccatctcgtatgccgtagat

SEQ ID NO: 20497 - DNA, 96 bp, Aspergillus viridinutans
  misc_feature: 93
cacacgtctgaactccagtcacaacgttccatctcgtatgccgtatcatgctcggaagagcacacgtctgaactccagtcacaacgttccatctcg

SEQ ID NO: 20498 - DNA, 96 bp, Aspergillus viridinutans
  misc_feature: 93
agcacacgtctgaactccagtcacaacgttccatctcgtatgccgtatcatgctcggaagagcacacgtctgaactccagtcacaacgttccatct

SEQ ID NO: 20499 - DNA, 96 bp, Aspergillus viridinutans
  misc_feature: 92
ggaagagcacacgtctgaactccagtcacaacgttccatctcgtatgccgtgatcggaagagcagatcggaagagcacacgtctgaactccagtca

SEQ ID NO: 20500 - DNA, 96 bp, Aspergillus viridinutans
  misc_feature: 92
ccagtcacaacgttccatctcgtatgccgtagatcggaagagcacacgtctgaactccagtcacaacgttccatctcgtatgccgtgatcggaaga

SEQ ID NO: 20501 - DNA, 96 bp, Aspergillus viridinutans
  misc_feature: 92
aactccagtcacaacgttccatctcgtatgccgtagatcggaagagcacacgtctgaactccagtcacaacgttccatctcgtatgccgtatcaga

SEQ ID NO: 20502 - DNA, 96 bp, Aspergillus viridinutans
  misc_feature: 92
tcggaagagcagatcggaagagcacacgtctgaactccagtcacaacgttccatctcgtatgccgtatcagatcggaagagcacacgtctgaactc

SEQ ID NO: 20503 - DNA, 96 bp, Aspergillus viridinutans
  misc_feature: 92
tcggaagagcacacgtctgaactccagtcacaacgttccatctcgtatgccgtcttctgcttgaaaaaaaaacacgtctgaactccagtcacaacg

SEQ ID NO: 20504 - DNA, 96 bp, Aspergillus viridinutans
  misc_feature: 92
tccagtcacaacgttccatctcgtatgccgtatcatgatcggaagagcacacgtctgaactccagtcacaacgttccatctcgtatgccgtagatc

SEQ ID NO: 20505 - DNA, 96 bp, Aspergillus viridinutans
  misc_feature: 92
tattcttctgtattcttctgtattcttctgtattcttctgtattcttctgtattcttctgtattcttctgtattcttctgtattcttctgtattct

SEQ ID NO: 20506 - DNA, 96 bp, Aspergillus viridinutans
  misc_feature: 92
aagttattttaataagtttaaattaatattaataattattaatctaacttctactcttaattagatattattctttacttaataaaatagataata

SEQ ID NO: 20507 - DNA, 96 bp, Aspergillus viridinutans
  misc_feature: 92
cagtcacaacgttccatctcgtatgccgtagatcggaagagcacacgtctgaactccagtcacaacgttccatctcgtatgccgtgatcggaagag

SEQ ID NO: 20508 - DNA, 96 bp, Aspergillus viridinutans
  misc_feature: 92
ccagtcacaacgttccatctcgtatgccgtatcatgatcggaagagcacacgtctgaactccagtcacaacgttccatctcgtatgccgtagatcg

SEQ ID NO: 20509 - DNA, 96 bp, Aspergillus viridinutans
  misc_feature: 92
attttattaagtaaagaataatatctaattaagagtagaagttagattaataattattaatattaatttaaacttattaaaataactttaataact

SEQ ID NO: 20510 - DNA, 96 bp, Aspergillus viridinutans
  misc_feature: 91
gagcacacgtctgaactccagtcacaacgttccatctcgtatgccgtatcattgatcggaagagcacacgtctgaactccagtcacaacgttccaa

SEQ ID NO: 20511 - DNA, 96 bp, Aspergillus viridinutans
  misc_feature: 91
aagagcacacgtctgaactccagtcacaacgttccatctcgtatgccgtgatcggaagagcagatcggaagagcacacgtctgaactccagtcaca

SEQ ID NO: 20512 - DNA, 96 bp, Aspergillus viridinutans
  misc_feature: 91
ggaagagcagatcggaagagcacacgtctgaactccagtcacaacgttccatctcgtatgccgtatcagatcggaagagcacacgtctgaactcca

SEQ ID NO: 20513 - DNA, 96 bp, Aspergillus viridinutans
  misc_feature: 91
aagagcacacgtctgaactccagtcacaacgttccatctcgtatgccgtatcattatcggaagagcacacgtctgaactccagtcacaacgttcca

SEQ ID NO: 20514 - DNA, 96 bp, Aspergillus viridinutans
  misc_feature: 91
tcggaagagcacacgtctgaactccagtcacaacgttccatctcgtatgccgtgatcggaagagcagatcggaagagcacacgtctgaactccagt

SEQ ID NO: 20515 - DNA, 96 bp, Aspergillus viridinutans
  misc_feature: 91
tattttattaagtaaagaataatatctaattaagagtagaagttagattaataattattaatattaatttaaacttattaaaataactttaataac

SEQ ID NO: 20516 - DNA, 96 bp, Aspergillus viridinutans
  misc_feature: 91
cacgtctgaactccagtcacaacgttccatctcgtatgccgtatcatgctcggaagagcacacgtctgaactccagtcacaacgttccatctcgta

SEQ ID NO: 20517 - DNA, 96 bp, Aspergillus viridinutans
  misc_feature: 91
taagtttaaattaatattaataattattaatctaacttctactcttaattagatattattctttacttaataaaatagataatattaaatctatat

SEQ ID NO: 20518 - DNA, 96 bp, Aspergillus viridinutans
  misc_feature: 91
atcggaagagcacacgtctgaactccagtcacaacgttccatctcgtatgccgtcttctgcttgaaaaaaaaacacgtctgaactccagtcacaac

SEQ ID NO: 20519 - DNA, 96 bp, Aspergillus viridinutans
  misc_feature: 91
gaagagcacacgtctgaactccagtcacaacgttccatctcgtatgccgtgatcggaagagcagatcggaagagcacacgtctgaactccagtcac

SEQ ID NO: 20520 - DNA, 96 bp, Aspergillus viridinutans
  misc_feature: 91
cggaagagcagatcggaagagcacacgtctgaactccagtcacaacgttccatctcgtatgccgtatcagatcggaagagcacacgtctgaactcc

SEQ ID NO: 20521 - DNA, 96 bp, Aspergillus viridinutans
  misc_feature: 91
ggaagagcacacgtctgaactccagtcacaacgttccatctcgtatgccgtatcattcatcggaagagcacacgtctgaactccagtcacaacgtt

SEQ ID NO: 20522 - DNA, 96 bp, Aspergillus viridinutans
  misc_feature: 91
aagagcacacgtctgaactccagtcacaacgttccatctcgtatgccgtatcattcatcggaagagcacacgtctgaactccagtcacaacgttcc

SEQ ID NO: 20523 - DNA, 96 bp, Aspergillus viridinutans
  misc_feature: 91
aagtttaaattaatattaataattattaatctaacttctactcttaattagatattattctttacttaataaaatagataatattaaatctatatc

SEQ ID NO: 20524 - DNA, 96 bp, Aspergillus viridinutans
  misc_feature: 91
cggaagagcacacgtctgaactccagtcacaacgttccatctcgtatgccgtgatcggaagagcagatcggaagagcacacgtctgaactccagtc

SEQ ID NO: 20525 - DNA, 96 bp, Aspergillus viridinutans
  misc_feature: 91
gaagagcacacgtctgaactccagtcacaacgttccatctcgtatgccgtatcattcatcggaagagcacacgtctgaactccagtcacaacgttc

SEQ ID NO: 20526 - DNA, 96 bp, Aspergillus viridinutans
  misc_feature: 91
atcggaagagcacacgtctgaactccagtcacaacgttccatctcgtatgccgtgatcggaagagcagatcggaagagcacacgtctgaactccag

SEQ ID NO: 20527 - DNA, 96 bp, Aspergillus viridinutans
  misc_feature: 91
ctccagtcacaacgttccatctcgtatgccgtcttctgcttgaaaaaaaaaaacgtctgaactccagtcacaacgttccatctcgtatgccgtctt

SEQ ID NO: 20528 - DNA, 96 bp, Aspergillus viridinutans
  misc_feature: 91
aaagttattttaataagtttaaattaatattaataattattaatctaacttctactcttaattagatattattctttacttaataaaatagataat

SEQ ID NO: 20529 - DNA, 96 bp, Aspergillus viridinutans
  misc_feature: 91
acgtctgaactccagtcacaacgttccatctcgtatgccgtatcatgctcggaagagcacacgtctgaactccagtcacaacgttccatctcgtat

SEQ ID NO: 20530 - DNA, 96 bp, Aspergillus viridinutans
  misc_feature: 91
acacgtctgaactccagtcacaacgttccatctcgtatgccgtatcatgctcggaagagcacacgtctgaactccagtcacaacgttccatctcgt

SEQ ID NO: 20531 - DNA, 96 bp, Aspergillus viridinutans
  misc_feature: 90
tttaaattaatattaataattattaatctaacttctactcttaattagatattattctttacttaataaaatagataatattaaatctatatcttc

SEQ ID NO: 20532 - DNA, 96 bp, Aspergillus viridinutans
  misc_feature: 90
gatcggaagagcacacgtctgaactccagtcacaacgttccatctcgtatgccgtcttctgcttgaaaaaaaaacacgtctgaactccagtcacaa

SEQ ID NO: 20533 - DNA, 96 bp, Aspergillus viridinutans
  misc_feature: 90
agagcacacgtctgaactccagtcacaacgttccatctcgtatgccgtgatcggaagagcagatcggaagagcacacgtctgaactccagtcacaa

SEQ ID NO: 20534 - DNA, 96 bp, Aspergillus viridinutans
  misc_feature: 90
ttattttaataagtttaaattaatattaataattattaatctaacttctactcttaattagatattattctttacttaataaaatagataatatta

SEQ ID NO: 20535 - DNA, 96 bp, Aspergillus viridinutans
  misc_feature: 90
gatcggaagagcacacgtctgaactccagtcacaacgttccatctcgtatgccgtgatcggaagagcagatcggaagagcacacgtctgaactcca

SEQ ID NO: 20536 - DNA, 96 bp, Aspergillus viridinutans
  misc_feature: 90
acgtctgaactccagtcacaacgttccatctcgtatgccgtgatcggaagagcagatcggaagagcacacgtctgaactccagtcacaacgttcca

SEQ ID NO: 20537 - DNA, 96 bp, Aspergillus viridinutans
  misc_feature: 90
gtcacaacgttccatctcgtatgccgtagatcggaagagcacacgtctgaactccagtcacaacgttccatctcgtatgccgtgatcggaagagca

SEQ ID NO: 20538 - DNA, 96 bp, Aspergillus viridinutans
  misc_feature: 90
tgagccggcgcgcgcgagggtgacgagggaaggaatcgggaggggaagggcaagggaaagggagagggaggaggaggggagggaggcggtgggagg

SEQ ID NO: 20539 - DNA, 96 bp, Aspergillus viridinutans
  misc_feature: 90
tcggaagagcacacgtctgaactccagtcacaacgttccatctcgtatgccgtatcattcatcggaagagcacacgtctgaactccagtcacaacg

SEQ ID NO: 20540 - DNA, 96 bp, Aspergillus viridinutans
  misc_feature: 90
atcggaagagcacacgtctgaactccagtcacaacgttccatctcgtatgccgtatcattcatcggaagagcacacgtctgaactccagtcacaac

SEQ ID NO: 20541 - DNA, 96 bp, Aspergillus viridinutans
  misc_feature: 90
gagcacacgtctgaactccagtcacaacgttccatctcgtatgccgtgatcggaagagcagatcggaagagcacacgtctgaactccagtcacaac

SEQ ID NO: 20542 - DNA, 96 bp, Aspergillus viridinutans
  misc_feature: 90
cacgtctgaactccagtcacaacgttccatctcgtatgccgtgatcggaagagcagatcggaagagcacacgtctgaactccagtcacaacgttcc

SEQ ID NO: 20543 - DNA, 96 bp, Aspergillus viridinutans
  misc_feature: 90
agtcacaacgttccatctcgtatgccgtagatcggaagagcacacgtctgaactccagtcacaacgttccatctcgtatgccgtgatcggaagagc

SEQ ID NO: 20544 - DNA, 96 bp, Aspergillus viridinutans
  misc_feature: 90
gcacacgtctgaactccagtcacaacgttccatctcgtatgccgtgatcggaagagcagatcggaagagcacacgtctgaactccagtcacaacgt

SEQ ID NO: 20545 - DNA, 96 bp, Aspergillus viridinutans
  misc_feature: 90
gaagagcagatcggaagagcacacgtctgaactccagtcacaacgttccatctcgtatgccgtatcagatcggaagagcacacgtctgaactccag

SEQ ID NO: 20546 - DNA, 96 bp, Aspergillus viridinutans
  misc_feature: 90
acacgtctgaactccagtcacaacgttccatctcgtatgccgtgatcggaagagcagatcggaagagcacacgtctgaactccagtcacaacgttc

SEQ ID NO: 20547 - DNA, 96 bp, Aspergillus viridinutans
  misc_feature: 90
agcacacgtctgaactccagtcacaacgttccatctcgtatgccgtgatcggaagagcagatcggaagagcacacgtctgaactccagtcacaacg

SEQ ID NO: 20548 - DNA, 96 bp, Aspergillus viridinutans
  misc_feature: 90
cgtctgaactccagtcacaacgttccatctcgtatgccgtatcatgctcggaagagcacacgtctgaactccagtcacaacgttccatctcgtatg

SEQ ID NO: 20549 - DNA, 96 bp, Aspergillus viridinutans
  misc_feature: 90
cggaagagcacacgtctgaactccagtcacaacgttccatctcgtatgccgtcttctgcttgaaaaaaaaacacgtctgaactccagtcacaacgt

SEQ ID NO: 20550 - DNA, 96 bp, Aspergillus viridinutans
  misc_feature: 90
cggaagagcacacgtctgaactccagtcacaacgttccatctcgtatgccgtatcattcatcggaagagcacacgtctgaactccagtcacaacgt

SEQ ID NO: 20551 - DNA, 96 bp, Aspergillus viridinutans
  misc_feature: 90
cagtcacaacgttccatctcgtatgccgtatcatgatcggaagagcacacgtctgaactccagtcacaacgttccatctcgtatgccgtagatcgg

SEQ ID NO: 20552 - DNA, 96 bp, Aspergillus viridinutans
  misc_feature: 90
cacacgtctgaactccagtcacaacgttccatctcgtatgccgtgatcggaagagcagatcggaagagcacacgtctgaactccagtcacaacgtt

SEQ ID NO: 20553 - DNA, 96 bp, Aspergillus viridinutans
  misc_feature: 90
agttattttaataagtttaaattaatattaataattattaatctaacttctactcttaattagatattattctttacttaataaaatagataatat

SEQ ID NO: 20554 - DNA, 96 bp, Aspergillus viridinutans
  misc_feature: 89
gtcacaacgttccatctcgtatgccgtatcatgatcggaagagcacacgtctgaactccagtcacaacgttccatctcgtatgccgtagatcggaa

SEQ ID NO: 20555 - DNA, 96 bp, Aspergillus viridinutans
  misc_feature: 89
taaagttattttaataagtttaaattaatattaataattattaatctaacttctactcttaattagatattattctttacttaataaaatagataa

SEQ ID NO: 20556 - DNA, 96 bp, Aspergillus viridinutans
  misc_feature: 89
tattttaataagtttaaattaatattaataattattaatctaacttctactcttaattagatattattctttacttaataaaatagataatattaa

SEQ ID NO: 20557 - DNA, 96 bp, Aspergillus viridinutans
  misc_feature: 89
gagcagatcggaagagcacacgtctgaactccagtcacaacgttccatctcgtatgccgtatcagatcggaagagcacacgtctgaactccagtca

SEQ ID NO: 20558 - DNA, 96 bp, Aspergillus viridinutans
  misc_feature: 89
ataagtttaaattaatattaataattattaatctaacttctactcttaattagatattattctttacttaataaaatagataatattaaatctata

SEQ ID NO: 20559 - DNA, 96 bp, Aspergillus viridinutans
  misc_feature: 89
gtctgaactccagtcacaacgttccatctcgtatgccgtgatcggaagagcagatcggaagagcacacgtctgaactccagtcacaacgttccatc

SEQ ID NO: 20560 - DNA, 96 bp, Aspergillus viridinutans
  misc_feature: 89
gtctgaactccagtcacaacgttccatctcgtatgccgtatcatgctcggaagagcacacgtctgaactccagtcacaacgttccatctcgtatgc

SEQ ID NO: 20561 - DNA, 96 bp, Aspergillus viridinutans
  misc_feature: 89
agagcagatcggaagagcacacgtctgaactccagtcacaacgttccatctcgtatgccgtatcagatcggaagagcacacgtctgaactccagtc

SEQ ID NO: 20562 - DNA, 96 bp, Aspergillus viridinutans
  misc_feature: 89
cgtctgaactccagtcacaacgttccatctcgtatgccgtgatcggaagagcagatcggaagagcacacgtctgaactccagtcacaacgttccat

SEQ ID NO: 20563 - DNA, 96 bp, Aspergillus viridinutans
  misc_feature: 89
atcggaagagcagatcggaagagcacacgtctgaactccagtcacaacgttccatctcgtatgccgtatcagatcggaagagcacacgtctgaact

SEQ ID NO: 20564 - DNA, 96 bp, Aspergillus viridinutans
  misc_feature: 89
agtttaaattaatattaataattattaatctaacttctactcttaattagatattattctttacttaataaaatagataatattaaatctatatct

SEQ ID NO: 20565 - DNA, 96 bp, Aspergillus viridinutans
  misc_feature: 89
aagagcagatcggaagagcacacgtctgaactccagtcacaacgttccatctcgtatgccgtatcagatcggaagagcacacgtctgaactccagt

SEQ ID NO: 20566 - DNA, 96 bp, Aspergillus viridinutans
  misc_feature: 88
agtcacaacgttccatctcgtatgccgtatcatgatcggaagagcacacgtctgaactccagtcacaacgttccatctcgtatgccgtagatcgga

SEQ ID NO: 20567 - DNA, 96 bp, Aspergillus viridinutans
  misc_feature: 88
tccagtcacaacgttccatctcgtatgccgtcttctgcttgaaaaaaaaaaacgtctgaactccagtcacaacgttccatctcgtatgccgtcttc

SEQ ID NO: 20568 - DNA, 96 bp, Aspergillus viridinutans
  misc_feature: 88
cacgtctgaactccagtcacaacgttccatctcgtatgccgtatcattatcggaagagcacacgtctgaactccagtcacaacgttccatctcgta

SEQ ID NO: 20569 - DNA, 96 bp, Aspergillus viridinutans
  misc_feature: 88
gtttaaattaatattaataattattaatctaacttctactcttaattagatattattctttacttaataaaatagataatattaaatctatatctt

SEQ ID NO: 20570 - DNA, 96 bp, Aspergillus viridinutans
  misc_feature: 88
agcacacgtctgaactccagtcacaacgttccatctcgtatgccgtatcattgatcggaagagcacacgtctgaactccagtcacaacgttccaac

SEQ ID NO: 20571 - DNA, 96 bp, Aspergillus viridinutans
  misc_feature: 88
gttattttaataagtttaaattaatattaataattattaatctaacttctactcttaattagatattattctttacttaataaaatagataatatt

SEQ ID NO: 20572 - DNA, 96 bp, Aspergillus viridinutans
  misc_feature: 88
agcagatcggaagagcacacgtctgaactccagtcacaacgttccatctcgtatgccgtatcagatcggaagagcacacgtctgaactccagtcac

SEQ ID NO: 20573 - DNA, 96 bp, Aspergillus viridinutans
  misc_feature: 88
ggaagagcacacgtctgaactccagtcacaacgttccatctcgtatgccgtcttctgcttgaaaaaaaaacacgtctgaactccagtcacaacgtt

SEQ ID NO: 20574 - DNA, 96 bp, Aspergillus viridinutans
  misc_feature: 88
cacacgtctgaactccagtcacaacgttccatctcgtatgccgtatcattatcggaagagcacacgtctgaactccagtcacaacgttccatctcg

SEQ ID NO: 20575 - DNA, 96 bp, Aspergillus viridinutans
  misc_feature: 88
agagcacacgtctgaactccagtcacaacgttccatctcgtatgccgtatcattatcggaagagcacacgtctgaactccagtcacaacgttccat

SEQ ID NO: 20576 - DNA, 96 bp, Aspergillus viridinutans
  misc_feature: 88
aataagtttaaattaatattaataattattaatctaacttctactcttaattagatattattctttacttaataaaatagataatattaaatctat

SEQ ID NO: 20577 - DNA, 96 bp, Aspergillus viridinutans
  misc_feature: 88
acgtctgaactccagtcacaacgttccatctcgtatgccgtatcattatcggaagagcacacgtctgaactccagtcacaacgttccatctcgtat

SEQ ID NO: 20578 - DNA, 96 bp, Aspergillus viridinutans
  misc_feature: 88
acacgtctgaactccagtcacaacgttccatctcgtatgccgtatcattatcggaagagcacacgtctgaactccagtcacaacgttccatctcgt

SEQ ID NO: 20579 - DNA, 96 bp, Aspergillus viridinutans
  misc_feature: 87
tgaactccagtcacaacgttccatctcgtatgccgtatcattatcggaagagcacacgtctgaactccagtcacaacgttccatctcgtatgccgt

SEQ ID NO: 20580 - DNA, 96 bp, Aspergillus viridinutans
  misc_feature: 87
tctgaactccagtcacaacgttccatctcgtatgccgtatcattatcggaagagcacacgtctgaactccagtcacaacgttccatctcgtatgcc

SEQ ID NO: 20581 - DNA, 96 bp, Aspergillus viridinutans
  misc_feature: 87
tccagtcacaacgttccatctcgtatgccgtgatcggaagagcagatcggaagagcacacgtctgaactccagtcacaacgttccatctcgtatgc

SEQ ID NO: 20582 - DNA, 96 bp, Aspergillus viridinutans
  misc_feature: 87
taataagtttaaattaatattaataattattaatctaacttctactcttaattagatattattctttacttaataaaatagataatattaaatcta

SEQ ID NO: 20583 - DNA, 96 bp, Aspergillus viridinutans
  misc_feature: 87
gatcggaagagcagatcggaagagcacacgtctgaactccagtcacaacgttccatctcgtatgccgtatcagatcggaagagcacacgtctgaac

SEQ ID NO: 20584 - DNA, 96 bp, Aspergillus viridinutans
  misc_feature: 87
gtctgaactccagtcacaacgttccatctcgtatgccgtatcattatcggaagagcacacgtctgaactccagtcacaacgttccatctcgtatgc

SEQ ID NO: 20585 - DNA, 96 bp, Aspergillus viridinutans
  misc_feature: 87
atcggaagagcacacgtctgaactccagtcacaacgttccatctcgtatgccgtagatcggaagagcacacgactgaactccagtcacaacgttcc

SEQ ID NO: 20586 - DNA, 96 bp, Aspergillus viridinutans
  misc_feature: 87
gcacacgtctgaactccagtcacaacgttccatctcgtatgccgtatcattatcggaagagcacacgtctgaactccagtcacaacgttccatctc

SEQ ID NO: 20587 - DNA, 96 bp, Aspergillus viridinutans
  misc_feature: 87
gagcacacgtctgaactccagtcacaacgttccatctcgtatgccgtatcattatcggaagagcacacgtctgaactccagtcacaacgttccatc

SEQ ID NO: 20588 - DNA, 96 bp, Aspergillus viridinutans
  misc_feature: 87
ctccagtcacaacgttccatctcgtatgccgtagatcggaagagcacacgtctgaactccagtcacaacgttccatctcgtatgccgtatcagatc

SEQ ID NO: 20589 - DNA, 96 bp, Aspergillus viridinutans
  misc_feature: 87
gaagagcacacgtctgaactccagtcacaacgttccatctcgtatgccgtcttctgcttgaaaaaaaaacacgtctgaactccagtcacaacgttc

SEQ ID NO: 20590 - DNA, 96 bp, Aspergillus viridinutans
  misc_feature: 87
ctgaactccagtcacaacgttccatctcgtatgccgtatcattatcggaagagcacacgtctgaactccagtcacaacgttccatctcgtatgccg

SEQ ID NO: 20591 - DNA, 96 bp, Aspergillus viridinutans
  misc_feature: 87
ctccagtcacaacgttccatctcgtatgccgtgatcggaagagcagatcggaagagcacacgtctgaactccagtcacaacgttccatctcgtatg

SEQ ID NO: 20592 - DNA, 96 bp, Aspergillus viridinutans
  misc_feature: 87
cgtctgaactccagtcacaacgttccatctcgtatgccgtatcattatcggaagagcacacgtctgaactccagtcacaacgttccatctcgtatg

SEQ ID NO: 20593 - DNA, 96 bp, Aspergillus viridinutans
  misc_feature: 87
cagtcacaacgttccatctcgtatgccgtgatcggaagagcagatcggaagagcacacgtctgaactccagtcacaacgttccatctcgtatgccg

SEQ ID NO: 20594 - DNA, 96 bp, Aspergillus viridinutans
  misc_feature: 87
actccagtcacaacgttccatctcgtatgccgtagatcggaagagcacacgtctgaactccagtcacaacgttccatctcgtatgccgtatcagat

SEQ ID NO: 20595 - DNA, 96 bp, Aspergillus viridinutans
  misc_feature: 87
actccagtcacaacgttccatctcgtatgccgtgatcggaagagcagatcggaagagcacacgtctgaactccagtcacaacgttccatctcgtat

SEQ ID NO: 20596 - DNA, 96 bp, Aspergillus viridinutans
  misc_feature: 87
agcacacgtctgaactccagtcacaacgttccatctcgtatgccgtatcattatcggaagagcacacgtctgaactccagtcacaacgttccatct

SEQ ID NO: 20597 - DNA, 96 bp, Aspergillus viridinutans
  misc_feature: 86
ttttaataagtttaaattaatattaataattattaatctaacttctactcttaattagatattattctttacttaataaaatagataatattaaat

SEQ ID NO: 20598 - DNA, 96 bp, Aspergillus viridinutans
  misc_feature: 86
agtcacaacgttccatctcgtatgccgtagatcggaagagcacacgtctgaactccagtcacaacgttccatctcgtatgccgtatcagatcggaa

SEQ ID NO: 20599 - DNA, 96 bp, Aspergillus viridinutans
  misc_feature: 86
ttaataagtttaaattaatattaataattattaatctaacttctactcttaattagatattattctttacttaataaaatagataatattaaatct

SEQ ID NO: 20600 - DNA, 96 bp, Aspergillus viridinutans
  misc_feature: 86
tcggaagagcacacgtctgaactccagtcacaacgttccatctcgtatgccgtagatcggaagagcacacgactgaactccagtcacaacgttcca

SEQ ID NO: 20601 - DNA, 96 bp, Aspergillus viridinutans
  misc_feature: 86
agagcacacgtctgaactccagtcacaacgttccatctcgtatgccgtatcattcatcggaagagcacacgtctgaactccagtcacaacgttcca

SEQ ID NO: 20602 - DNA, 96 bp, Aspergillus viridinutans
  misc_feature: 86
tctgaactccagtcacaacgttccatctcgtatgccgtatcatgctcggaagagcacacgtctgaactccagtcacaacgttccatctcgtatgcc

SEQ ID NO: 20603 - DNA, 96 bp, Aspergillus viridinutans
  misc_feature: 86
cagtcacaacgttccatctcgtatgccgtagatcggaagagcacacgtctgaactccagtcacaacgttccatctcgtatgccgtatcagatcgga

SEQ ID NO: 20604 - DNA, 96 bp, Aspergillus viridinutans
  misc_feature: 86
tccagtcacaacgttccatctcgtatgccgtagatcggaagagcacacgtctgaactccagtcacaacgttccatctcgtatgccgtatcagatcg

SEQ ID NO: 20605 - DNA, 96 bp, Aspergillus viridinutans
  misc_feature: 86
aactccagtcacaacgttccatctcgtatgccgtgatcggaagagcagatcggaagagcacacgtctgaactccagtcacaacgttccatctcgta

SEQ ID NO: 20606 - DNA, 96 bp, Aspergillus viridinutans
  misc_feature: 86
gtcacaacgttccatctcgtatgccgtagatcggaagagcacacgtctgaactccagtcacaacgttccatctcgtatgccgtatcagatcggaag

SEQ ID NO: 20607 - DNA, 96 bp, Aspergillus viridinutans
  misc_feature: 86
ccagtcacaacgttccatctcgtatgccgtgatcggaagagcagatcggaagagcacacgtctgaactccagtcacaacgttccatctcgtatgcc

SEQ ID NO: 20608 - DNA, 96 bp, Aspergillus viridinutans
  misc_feature: 86
aagagcacacgtctgaactccagtcacaacgttccatctcgtatgccgtcttctgcttgaaaaaaaaacacgtctgaactccagtcacaacgttcc

SEQ ID NO: 20609 - DNA, 96 bp, Aspergillus viridinutans
  misc_feature: 86
gcacacgtctgaactccagtcacaacgttccatctcgtatgccgtatcattgatcggaagagcacacgtctgaactccagtcacaacgttccaact

SEQ ID NO: 20610 - DNA, 96 bp, Aspergillus viridinutans
  misc_feature: 86
cacacgtctgaactccagtcacaacgttccatctcgtatgccgtatcattgatcggaagagcacacgtctgaactccagtcacaacgttccaactc

SEQ ID NO: 20611 - DNA, 96 bp, Aspergillus viridinutans
  misc_feature: 86
gaactccagtcacaacgttccatctcgtatgccgtgatcggaagagcagatcggaagagcacacgtctgaactccagtcacaacgttccatctcgt

SEQ ID NO: 20612 - DNA, 96 bp, Aspergillus viridinutans
  misc_feature: 86
ctgaactccagtcacaacgttccatctcgtatgccgtatcatgctcggaagagcacacgtctgaactccagtcacaacgttccatctcgtatgccg

SEQ ID NO: 20613 - DNA, 96 bp, Aspergillus viridinutans
  misc_feature: 86
ctccagtcacaacgttccatctcgtatgccgtatcagatcggaagagcacacgtctgaactccagtcacaacgttccatctcgtatgccgtatcat

SEQ ID NO: 20614 - DNA, 96 bp, Aspergillus viridinutans
  misc_feature: 86
acacgtctgaactccagtcacaacgttccatctcgtatgccgtatcattgatcggaagagcacacgtctgaactccagtcacaacgttccaactcg

SEQ ID NO: 20615 - DNA, 96 bp, Aspergillus viridinutans
  misc_feature: 86
ccagtcacaacgttccatctcgtatgccgtagatcggaagagcacacgtctgaactccagtcacaacgttccatctcgtatgccgtatcagatcgg

SEQ ID NO: 20616 - DNA, 96 bp, Aspergillus viridinutans
  misc_feature: 86
cacgtctgaactccagtcacaacgttccatctcgtatgccgtatcattgatcggaagagcacacgtctgaactccagtcacaacgttccaactcgt

SEQ ID NO: 20617 - DNA, 96 bp, Aspergillus viridinutans
  misc_feature: 86
agtcacaacgttccatctcgtatgccgtgatcggaagagcagatcggaagagcacacgtctgaactccagtcacaacgttccatctcgtatgccgt

SEQ ID NO: 20618 - DNA, 96 bp, Aspergillus viridinutans
  misc_feature: 85
acacgacgctcttccgatcgatcggaagagcacacgtctgaactccagtcacaacgttccatctcgtatgccgtcttctgcttgaaaaaaaaaaaa

SEQ ID NO: 20619 - DNA, 96 bp, Aspergillus viridinutans
  misc_feature: 85
tgaactccagtcacaacgttccatctcgtatgccgtgatcggaagagcagatcggaagagcacacgtctgaactccagtcacaacgttccatctcg

SEQ ID NO: 20620 - DNA, 96 bp, Aspergillus viridinutans
  misc_feature: 85
tgaactccagtcacaacgttccatctcgtatgccgtatcatgctcggaagagcacacgtctgaactccagtcacaacgttccatctcgtatgccgt

SEQ ID NO: 20621 - DNA, 96 bp, Aspergillus viridinutans
  misc_feature: 85
tcacaacgttccatctcgtatgccgtagatcggaagagcacacgtctgaactccagtcacaacgttccatctcgtatgccgtatcagatcggaaga

SEQ ID NO: 20622 - DNA, 96 bp, Aspergillus viridinutans
  misc_feature: 85
tctgaactccagtcacaacgttccatctcgtatgccgtgatcggaagagcagatcggaagagcacacgtctgaactccagtcacaacgttccatct

SEQ ID NO: 20623 - DNA, 96 bp, Aspergillus viridinutans
  misc_feature: 85
tcacaacgttccatctcgtatgccgtatcatgatcggaagagcacacgtctgaactccagtcacaacgttccatctcgtatgccgtagatcggaag

SEQ ID NO: 20624 - DNA, 96 bp, Aspergillus viridinutans
  misc_feature: 85
taaatatagtaaatatagtaaatatagtaaatatagtaaatatagtaaatatagtaaatatagtaaatatagtaaatatagtaaatatagtaaata

SEQ ID NO: 20625 - DNA, 96 bp, Aspergillus viridinutans
  misc_feature: 85
acgtctgaactccagtcacaacgttccatctcgtatgccgtatcattgatcggaagagcacacgtctgaactccagtcacaacgttccaactcgta

SEQ ID NO: 20626 - DNA, 96 bp, Aspergillus viridinutans
  misc_feature: 85
ctgaactccagtcacaacgttccatctcgtatgccgtgatcggaagagcagatcggaagagcacacgtctgaactccagtcacaacgttccatctc

SEQ ID NO: 20627 - DNA, 96 bp, Aspergillus viridinutans
  misc_feature: 84
attttaataagtttaaattaatattaataattattaatctaacttctactcttaattagatattattctttacttaataaaatagataatattaaa

SEQ ID NO: 20628 - DNA, 96 bp, Aspergillus viridinutans
  misc_feature: 84
tttaataagtttaaattaatattaataattattaatctaacttctactcttaattagatattattctttacttaataaaatagataatattaaatc

SEQ ID NO: 20629 - DNA, 96 bp, Aspergillus viridinutans
  misc_feature: 84
tattaaagttattttaataagtttaaattaatattaataattattaatctaacttctactcttaattagatattattctttacttaataaaataga

SEQ ID NO: 20630 - DNA, 96 bp, Aspergillus viridinutans
  misc_feature: 84
gtctgaactccagtcacaacgttccatctcgtatgccgtatcattgatcggaagagcacacgtctgaactccagtcacaacgttccaactcgtatg

SEQ ID NO: 20631 - DNA, 96 bp, Aspergillus viridinutans
  misc_feature: 84
atcggaagagcacacgtctgaactccagtcacaacgttccatctcgtatgccgtcttctgcttgaaaaaaaaaaagaactccagtcacaacgttcc

SEQ ID NO: 20632 - DNA, 96 bp, Aspergillus viridinutans
  misc_feature: 84
cgtctgaactccagtcacaacgttccatctcgtatgccgtatcattgatcggaagagcacacgtctgaactccagtcacaacgttccaactcgtat

SEQ ID NO: 20633 - DNA, 96 bp, Aspergillus viridinutans
  misc_feature: 84
attaaagttattttaataagtttaaattaatattaataattattaatctaacttctactcttaattagatattattctttacttaataaaatagat

SEQ ID NO: 20634 - DNA, 96 bp, Aspergillus viridinutans
  misc_feature: 83
ttattaaagttattttaataagtttaaattaatattaataattattaatctaacttctactcttaattagatattattctttacttaataaaatag

SEQ ID NO: 20635 - DNA, 96 bp, Aspergillus viridinutans
  misc_feature: 83
agagcacacgtctgaactccagtcacaacgttccatctcgtatgccgtcttctgcttgaaaaaaaaacacgtctgaactccagtcacaacgttcca

SEQ ID NO: 20636 - DNA, 96 bp, Aspergillus viridinutans
  misc_feature: 83
atcggaagagcacacgtctgaactccagtcacaacgttccatctcggtggtcgcgatcggaagagcacacgtctgaactccagtcacaacgttcca

SEQ ID NO: 20637 - DNA, 96 bp, Aspergillus viridinutans
  misc_feature: 83
tcacaacgttccatctcgtatgccgtagatcggaagagcacacgtctgaactccagtcacaacgttccatctcgtatgccgtgatcggaagagcac

SEQ ID NO: 20638 - DNA, 96 bp, Aspergillus viridinutans
  misc_feature: 82
gatcggaagagcagatcggaagagcacacgtctgaactccagtcacaacgttccatctcgtatgccgtcttctgcttgaaaaaaaaaaaaaaaaaa

SEQ ID NO: 20639 - DNA, 96 bp, Aspergillus viridinutans
  misc_feature: 82
ctcttccgatctgatcggaagagcgtcgtgtagggaaagagtgtagtactccgtgtagatctcggtggtcgccgtatcattaaaaaaaaaaaaaaa

SEQ ID NO: 20640 - DNA, 96 bp, Aspergillus viridinutans
  misc_feature: 82
tctgaactccagtcacaacgttccatctcgtatgccgtatcattgatcggaagagcacacgtctgaactccagtcacaacgttccaactcgtatgc

SEQ ID NO: 20641 - DNA, 96 bp, Aspergillus viridinutans
  misc_feature: 82
tcggaagagcacacgtctgaactccagtcacaacgttccatctcgtatgccgtatcattgatcggaagaacacacgtctgaactccagtcacaacg

SEQ ID NO: 20642 - DNA, 96 bp, Aspergillus viridinutans
  misc_feature: 82
taaatataaagatatatctagtagttaaatagtatatattaatatatcctatataatctatattaatatagctaataataatacctagcttatata

SEQ ID NO: 20643 - DNA, 96 bp, Aspergillus viridinutans
  misc_feature: 82
atcggaagagcacacgtctgaactccagtcacaacgttccatctcgtatgccgtatcattgatcggaagaacacacgtctgaactccagtcacaac

SEQ ID NO: 20644 - DNA, 96 bp, Aspergillus viridinutans
  misc_feature: 82
gtaaatatagtaaatatagtaaatatagtaaatatagtaaatatagtaaatatagtaaatatagtaaatatagtaaatatagtaaatatagtaaat

SEQ ID NO: 20645 - DNA, 96 bp, Aspergillus viridinutans
  misc_feature: 82
agtcacaacgttccatctcgtatgccgtcttctgcttgaaaaaaaaaaacgtctgaactccagtcacaacgttccatctcgtatgccgtcttctgc

SEQ ID NO: 20646 - DNA, 96 bp, Aspergillus viridinutans
  misc_feature: 82
gatcggaagagcacacgtctgaactccagtcacaacgttccatctcgtatgccgtcttctgcttgaaaaaaaaaaagaactccagtcacaacgttc

SEQ ID NO: 20647 - DNA, 96 bp, Aspergillus viridinutans
  misc_feature: 82
cggaagagcacacgtctgaactccagtcacaacgttccatctcgtatgccgtagatcggaagagcacacgactgaactccagtcacaacgttccat

SEQ ID NO: 20648 - DNA, 96 bp, Aspergillus viridinutans
  misc_feature: 82
aagagcacacgtctgaactccagtcacaacgttccatctcgtatgccgtgatcggcagagcacacgtctgaactccagtcacaacgttccatctcg

SEQ ID NO: 20649 - DNA, 96 bp, Aspergillus viridinutans
  misc_feature: 82
ccagtcacaacgttccatctcgtatgccgtcttctgcttgaaaaaaaaaaacgtctgaactccagtcacaacgttccatctcgtatgccgtcttct

SEQ ID NO: 20650 - DNA, 96 bp, Aspergillus viridinutans
  misc_feature: 82
cagtcacaacgttccatctcgtatgccgtcttctgcttgaaaaaaaaaaacgtctgaactccagtcacaacgttccatctcgtatgccgtcttctg

SEQ ID NO: 20651 - DNA, 96 bp, Aspergillus viridinutans
  misc_feature: 82
agagcacacgtctgaactccagtcacaacgttccatctcgtatgccgtgatcggcagagcacacgtctgaactccagtcacaacgttccatctcgt

SEQ ID NO: 20652 - DNA, 96 bp, Aspergillus viridinutans
  misc_feature: 81
tcggaagagcacacgtctgaactccagtcacaacgttccatctcgtatgccgtcttctgcttgaaaaaaaaaaagaactccagtcacaacgttcca

SEQ ID NO: 20653 - DNA, 96 bp, Aspergillus viridinutans
  misc_feature: 81
agagcacacgtctgaactccagtcacaacgttccatctcgtatgccgtatcattgatcggaagaacacacgtctgaactccagtcacaacgttcca

SEQ ID NO: 20654 - DNA, 96 bp, Aspergillus viridinutans
  misc_feature: 81
atcggaagagcacacgtctgaactccagtcacaacgttccatctcgtatgccgtgatcggcagagcacacgtctgaactccagtcacaacgttcca

SEQ ID NO: 20655 - DNA, 96 bp, Aspergillus viridinutans
  misc_feature: 81
tgaactccagtcacaacgttccatctcgtatgccgtatcattgatcggaagagcacacgtctgaactccagtcacaacgttccaactcgtatgccg

SEQ ID NO: 20656 - DNA, 96 bp, Aspergillus viridinutans
  misc_feature: 81
tcggaagagcacacgtctgaactccagtcacaacgttccatctcgtatgccgtgatcggcagagcacacgtctgaactccagtcacaacgttccat

SEQ ID NO: 20657 - DNA, 96 bp, Aspergillus viridinutans
  misc_feature: 81
gagcacacgtctgaactccagtcacaacgttccatctcgtatgccgtgatcggcagagcacacgtctgaactccagtcacaacgttccatctcgta

SEQ ID NO: 20658 - DNA, 96 bp, Aspergillus viridinutans
  misc_feature: 81
ctgaactccagtcacaacgttccatctcgtatgccgtatcattgatcggaagagcacacgtctgaactccagtcacaacgttccaactcgtatgcc

SEQ ID NO: 20659 - DNA, 96 bp, Aspergillus viridinutans
  misc_feature: 81
acacgtctgaactccagtcacaacgttccatctcgtatgccgtgatcggcagagcacacgtctgaactccagtcacaacgttccatctcgtatgcc

SEQ ID NO: 20660 - DNA, 96 bp, Aspergillus viridinutans
  misc_feature: 81
ggaagagcacacgtctgaactccagtcacaacgttccatctcgtatgccgtgatcggcagagcacacgtctgaactccagtcacaacgttccatct

SEQ ID NO: 20661 - DNA, 96 bp, Aspergillus viridinutans
  misc_feature: 81
ggaagagcacacgtctgaactccagtcacaacgttccatctcgtatgccgtatcattgatcggaagaacacacgtctgaactccagtcacaacgtt

SEQ ID NO: 20662 - DNA, 96 bp, Aspergillus viridinutans
  misc_feature: 81
ggaagagcacacgtctgaactccagtcacaacgttccatctcgtatgccgtagatcggaagagcacacgactgaactccagtcacaacgttccatc

SEQ ID NO: 20663 - DNA, 96 bp, Aspergillus viridinutans
  misc_feature: 81
aagagcacacgtctgaactccagtcacaacgttccatctcgtatgccgtatcattgatcggaagaacacacgtctgaactccagtcacaacgttcc

SEQ ID NO: 20664 - DNA, 96 bp, Aspergillus viridinutans
  misc_feature: 81
cacacgtctgaactccagtcacaacgttccatctcgtatgccgtgatcggcagagcacacgtctgaactccagtcacaacgttccatctcgtatgc

SEQ ID NO: 20665 - DNA, 96 bp, Aspergillus viridinutans
  misc_feature: 81
gcacacgtctgaactccagtcacaacgttccatctcgtatgccgtgatcggcagagcacacgtctgaactccagtcacaacgttccatctcgtatg

SEQ ID NO: 20666 - DNA, 96 bp, Aspergillus viridinutans
  misc_feature: 81
cggaagagcacacgtctgaactccagtcacaacgttccatctcgtatgccgtgatcggcagagcacacgtctgaactccagtcacaacgttccatc

SEQ ID NO: 20667 - DNA, 96 bp, Aspergillus viridinutans
  misc_feature: 81
gaagagcacacgtctgaactccagtcacaacgttccatctcgtatgccgtgatcggcagagcacacgtctgaactccagtcacaacgttccatctc

SEQ ID NO: 20668 - DNA, 96 bp, Aspergillus viridinutans
  misc_feature: 81
gaagagcacacgtctgaactccagtcacaacgttccatctcgtatgccgtatcattgatcggaagaacacacgtctgaactccagtcacaacgttc

SEQ ID NO: 20669 - DNA, 96 bp, Aspergillus viridinutans
  misc_feature: 81
ccaccgagatctacacggagtactacactctttccctacacgacgctcttccgatcgatcggaagagcacacgtctgaactccagtcacaacgttc

SEQ ID NO: 20670 - DNA, 96 bp, Aspergillus viridinutans
  misc_feature: 81
cacgtctgaactccagtcacaacgttccatctcgtatgccgtgatcggcagagcacacgtctgaactccagtcacaacgttccatctcgtatgccg

SEQ ID NO: 20671 - DNA, 96 bp, Aspergillus viridinutans
  misc_feature: 81
agcacacgtctgaactccagtcacaacgttccatctcgtatgccgtgatcggcagagcacacgtctgaactccagtcacaacgttccatctcgtat

SEQ ID NO: 20672 - DNA, 96 bp, Aspergillus viridinutans
  misc_feature: 81
acgtctgaactccagtcacaacgttccatctcgtatgccgtgatcggcagagcacacgtctgaactccagtcacaacgttccatctcgtatgccgt

SEQ ID NO: 20673 - DNA, 96 bp, Aspergillus viridinutans
  misc_feature: 80
agtaaatatagtaaatatagtaaatatagtaaatatagtaaatatagtaaatatagtaaatatagtaaatatagtaaatatagtaaatatagtaaa

SEQ ID NO: 20674 - DNA, 96 bp, Aspergillus viridinutans
  misc_feature: 80
attttcataaatataatttgttaataaaaaatataaataagttttataacctaaattattataaaaaaataagattaatttaaataataatactaa

SEQ ID NO: 20675 - DNA, 96 bp, Aspergillus viridinutans
  misc_feature: 80
tagtaaatatagtaaatatagtaaatatagtaaatatagtaaatatagtaaatatagtaaatatagtaaatatagtaaatatagtaaatatagtaa

SEQ ID NO: 20676 - DNA, 96 bp, Aspergillus viridinutans
  misc_feature: 80
ttaaagttattttaataagtttaaattaatattaataattattaatctaacttctactcttaattagatattattctttacttaataaaatagata

SEQ ID NO: 20677 - DNA, 96 bp, Aspergillus viridinutans
  misc_feature: 80
agcacacgtctgaactccagtcacaacgttccatctcgtatgccgtagatcggaagagcacacgactgaactccagtcacaacgttccatctcgta

SEQ ID NO: 20678 - DNA, 96 bp, Aspergillus viridinutans
  misc_feature: 80
gctcttccgatcagatcggaagagcgtcgtgtagggaaagagtgtagtactccgtgtagatctcggtggtcgccgtatcattaaaaaaaaaaaaac

SEQ ID NO: 20679 - DNA, 96 bp, Aspergillus viridinutans
  misc_feature: 80
cacgtctgaactccagtcacaacgttccatctcgtatgccgtagatcggaagagcacacgactgaactccagtcacaacgttccatctcgtatgcc

SEQ ID NO: 20680 - DNA, 96 bp, Aspergillus viridinutans
  misc_feature: 80
gatcggaagagcacacgtctgaactccagtcacaacgttccatctcgtatgccgtgatcggcagagcacacgtctgaactccagtcacaacgttcc

SEQ ID NO: 20681 - DNA, 96 bp, Aspergillus viridinutans
  misc_feature: 80
gcacacgtctgaactccagtcacaacgttccatctcgtatgccgtagatcggaagagcacacgactgaactccagtcacaacgttccatctcgtat

SEQ ID NO: 20682 - DNA, 96 bp, Aspergillus viridinutans
  misc_feature: 80
gagcacacgtctgaactccagtcacaacgttccatctcgtatgccgtagatcggaagagcacacgactgaactccagtcacaacgttccatctcgt

SEQ ID NO: 20683 - DNA, 96 bp, Aspergillus viridinutans
  misc_feature: 80
ctccagtcacaacgttccatctcgtatgccgtatcattgatcggaagagcacacgtctgaactccagtcacaacgttccatctcgtatgccgtctc

SEQ ID NO: 20684 - DNA, 96 bp, Aspergillus viridinutans
  misc_feature: 80
cgtctgaactccagtcacaacgttccatctcgtatgccgtagatcggaagagcacacgactgaactccagtcacaacgttccatctcgtatgccgt

SEQ ID NO: 20685 - DNA, 96 bp, Aspergillus viridinutans
  misc_feature: 80
acgtctgaactccagtcacaacgttccatctcgtatgccgtagatcggaagagcacacgactgaactccagtcacaacgttccatctcgtatgccg

SEQ ID NO: 20686 - DNA, 96 bp, Aspergillus viridinutans
  misc_feature: 80
cggaagagcacacgtctgaactccagtcacaacgttccatctcgtatgccgtatcattgatcggaagaacacacgtctgaactccagtcacaacgt

SEQ ID NO: 20687 - DNA, 96 bp, Aspergillus viridinutans
  misc_feature: 80
cacacgtctgaactccagtcacaacgttccatctcgtatgccgtagatcggaagagcacacgactgaactccagtcacaacgttccatctcgtatg

SEQ ID NO: 20688 - DNA, 96 bp, Aspergillus viridinutans
  misc_feature: 80
actccagtcacaacgttccatctcgtatgccgtagatcggaagagcacacgtctgaactccagtcacaacgttccatctcgtatgccgtatcattg

SEQ ID NO: 20689 - DNA, 96 bp, Aspergillus viridinutans
  misc_feature: 80
aaatataaagatatatctagtagttaaatagtatatattaatatatcctatataatctatattaatatagctaataataatacctagcttatatat

SEQ ID NO: 20690 - DNA, 96 bp, Aspergillus viridinutans
  misc_feature: 79
ttttcataaatataatttgttaataaaaaatataaataagttttataacctaaattattataaaaaaataagattaatttaaataataatactaat

SEQ ID NO: 20691 - DNA, 96 bp, Aspergillus viridinutans
  misc_feature: 79
ttaattaatttatagctatatattgtaaaacattaaaatataataagatataataagatttaaattttatcttatatacatttgattaaatatatt

SEQ ID NO: 20692 - DNA, 96 bp, Aspergillus viridinutans
  misc_feature: 79
ctccagtcacaacgttccatctcgtatgccgtagatcggaagagcacacgtctgaactccagtcacaacgttccatctcgtatgccgtatcattga

SEQ ID NO: 20693 - DNA, 96 bp, Aspergillus viridinutans
  misc_feature: 79
tattttcataaatataatttgttaataaaaaatataaataagttttataacctaaattattataaaaaaataagattaatttaaataataatacta

SEQ ID NO: 20694 - DNA, 96 bp, Aspergillus viridinutans
  misc_feature: 79
aatatagtaaatatagtaaatatagtaaatatagtaaatatagtaaatatagtaaatatagtaaatatagtaaatatagtaaatatagtaaatata

SEQ ID NO: 20695 - DNA, 96 bp, Aspergillus viridinutans
  misc_feature: 79
taatttatagctatatattgtaaaacattaaaatataataagatataataagatttaaattttatcttatatacatttgattaaatatattatact

SEQ ID NO: 20696 - DNA, 96 bp, Aspergillus viridinutans
  misc_feature: 79
acacgtctgaactccagtcacaacgttccatctcgtatgccgtagatcggaagagcacacgactgaactccagtcacaacgttccatctcgtatgc

SEQ ID NO: 20697 - DNA, 96 bp, Aspergillus viridinutans
  misc_feature: 79
aagagcacacgtctgaactccagtcacaacgttccatctcgtatgccgtagatcggaagagcacacgactgaactccagtcacaacgttccatctc

SEQ ID NO: 20698 - DNA, 96 bp, Aspergillus viridinutans
  misc_feature: 79
gaagagcacacgtctgaactccagtcacaacgttccatctcgtatgccgtagatcggaagagcacacgactgaactccagtcacaacgttccatct

SEQ ID NO: 20699 - DNA, 96 bp, Aspergillus viridinutans
  misc_feature: 79
agagcacacgtctgaactccagtcacaacgttccatctcgtatgccgtagatcggaagagcacacgactgaactccagtcacaacgttccatctcg

SEQ ID NO: 20700 - DNA, 96 bp, Aspergillus viridinutans
  misc_feature: 79
attaattcattattttcataaatataatttgttaataaaaaatataaataagttttataacctaaattattataaaaaaataagattaatttaaat

SEQ ID NO: 20701 - DNA, 96 bp, Aspergillus viridinutans
  misc_feature: 79
aaatatagtaaatatagtaaatatagtaaatatagtaaatatagtaaatatagtaaatatagtaaatatagtaaatatagtaaatatagtaaatat

SEQ ID NO: 20702 - DNA, 96 bp, Aspergillus viridinutans
  misc_feature: 78
ttaattcattattttcataaatataatttgttaataaaaaatataaataagttttataacctaaattattataaaaaaataagattaatttaaata

SEQ ID NO: 20703 - DNA, 96 bp, Aspergillus viridinutans
  misc_feature: 78
tccagtcacaacgttccatctcgtatgccgtagatcggaagagcacacgtctgaactccagtcacaacgttccatctcgtatgccgtatcattgat

SEQ ID NO: 20704 - DNA, 96 bp, Aspergillus viridinutans
  misc_feature: 78
ataaagatatatctagtagttaaatagtatatattaatatatcctatataatctatattaatatagctaataataatacctagcttatatataata

SEQ ID NO: 20705 - DNA, 96 bp, Aspergillus viridinutans
  misc_feature: 78
aatataaagatatatctagtagttaaatagtatatattaatatatcctatataatctatattaatatagctaataataatacctagcttatatata

SEQ ID NO: 20706 - DNA, 96 bp, Aspergillus viridinutans
  misc_feature: 78
tatagtaaatatagtaaatatagtaaatatagtaaatatagtaaatatagtaaatatagtaaatatagtaaatatagtaaatatagtaaatatagt

SEQ ID NO: 20707 - DNA, 96 bp, Aspergillus viridinutans
  misc_feature: 78
tataaagatatatctagtagttaaatagtatatattaatatatcctatataatctatattaatatagctaataataatacctagcttatatataat

SEQ ID NO: 20708 - DNA, 96 bp, Aspergillus viridinutans
  misc_feature: 78
atagtaaatatagtaaatatagtaaatatagtaaatatagtaaatatagtaaatatagtaaatatagtaaatatagtaaatatagtaaatatagta

SEQ ID NO: 20709 - DNA, 96 bp, Aspergillus viridinutans
  misc_feature: 78
gtgagccggcgcgcgcgagggtgacgagggaaggaatcgggaggggaagggcaagggaaagggagagggaggaggaggggagggaggcggtgggag

SEQ ID NO: 20710 - DNA, 96 bp, Aspergillus viridinutans
  misc_feature: 78
ccagtcacaacgttccatctcgtatgccgtagatcggaagagcacacgtctgaactccagtcacaacgttccatctcgtatgccgtatcattgatc

SEQ ID NO: 20711 - DNA, 96 bp, Aspergillus viridinutans
  misc_feature: 78
cagtcacaacgttccatctcgtatgccgtagatcggaagagcacacgtctgaactccagtcacaacgttccatctcgtatgccgtatcattgatcg

SEQ ID NO: 20712 - DNA, 96 bp, Aspergillus viridinutans
  misc_feature: 78
aattaatttatagctatatattgtaaaacattaaaatataataagatataataagatttaaattttatcttatatacatttgattaaatatattat

SEQ ID NO: 20713 - DNA, 96 bp, Aspergillus viridinutans
  misc_feature: 77
tttcataaatataatttgttaataaaaaatataaataagttttataacctaaattattataaaaaaataagattaatttaaataataatactaata

SEQ ID NO: 20714 - DNA, 96 bp, Aspergillus viridinutans
  misc_feature: 77
aattaattcattattttcataaatataatttgttaataaaaaatataaataagttttataacctaaattattataaaaaaataagattaatttaaa

SEQ ID NO: 20715 - DNA, 96 bp, Aspergillus viridinutans
  misc_feature: 77
ttcataaatataatttgttaataaaaaatataaataagttttataacctaaattattataaaaaaataagattaatttaaataataatactaataa

SEQ ID NO: 20716 - DNA, 96 bp, Aspergillus viridinutans
  misc_feature: 77
attaatttatagctatatattgtaaaacattaaaatataataagatataataagatttaaattttatcttatatacatttgattaaatatattata

SEQ ID NO: 20717 - DNA, 96 bp, Aspergillus viridinutans
  misc_feature: 77
agagcacacgtctgaactccagtcacaacgttccatctcgtatgccgtatcattgatcggaagagcacacgtctgaactccagtcacaacgttccc

SEQ ID NO: 20718 - DNA, 96 bp, Aspergillus viridinutans
  misc_feature: 77
agcacacgtctgaactccagtcacaacgttccatctcgtatgccgtatcattcatcggaagagcacacgtctgaactccagtcacaacgttccatc

SEQ ID NO: 20719 - DNA, 96 bp, Aspergillus viridinutans
  misc_feature: 77
gatcggaagagcacacgtctgaactccagtcacaacgttccatctcgtatgccgtagatcggaagagcacacgactgaactccagtcacaacgttc

SEQ ID NO: 20720 - DNA, 96 bp, Aspergillus viridinutans
  misc_feature: 77
gagcacacgtctgaactccagtcacaacgttccatctcgtatgccgtatcattcatcggaagagcacacgtctgaactccagtcacaacgttccat

SEQ ID NO: 20721 - DNA, 96 bp, Aspergillus viridinutans
  misc_feature: 77
aagatatatctagtagttaaatagtatatattaatatatcctatataatctatattaatatagctaataataatacctagcttatatataatatct

SEQ ID NO: 20722 - DNA, 96 bp, Aspergillus viridinutans
  misc_feature: 76
tcacaacgttccatctcgtatgccgtagatcggaagagcacacgtctgaactccagtcacaacgttccatctcgtatgccgtatcattgatcggaa

SEQ ID NO: 20723 - DNA, 96 bp, Aspergillus viridinutans
  misc_feature: 76
ttattttcataaatataatttgttaataaaaaatataaataagttttataacctaaattattataaaaaaataagattaatttaaataataatact

SEQ ID NO: 20724 - DNA, 96 bp, Aspergillus viridinutans
  misc_feature: 76
taaatataatttgttaataaaaaatataaataagttttataacctaaattattataaaaaaataagattaatttaaataataatactaataataca

SEQ ID NO: 20725 - DNA, 96 bp, Aspergillus viridinutans
  misc_feature: 76
gtcacaacgttccatctcgtatgccgtagatcggaagagcacacgtctgaactccagtcacaacgttccatctcgtatgccgtatcattgatcgga

SEQ ID NO: 20726 - DNA, 96 bp, Aspergillus viridinutans
  misc_feature: 76
agtcacaacgttccatctcgtatgccgtatcatgatcggaagagcacacgtctgaactccagtcacaacgttccatctcgtatgccgtatcattga

SEQ ID NO: 20727 - DNA, 96 bp, Aspergillus viridinutans
  misc_feature: 76
attcattattttcataaatataatttgttaataaaaaatataaataagttttataacctaaattattataaaaaaataagattaatttaaataata

SEQ ID NO: 20728 - DNA, 96 bp, Aspergillus viridinutans
  misc_feature: 76
tattaagtataatatatttaatcaaatgtatataagataaaatttaaatcttattatatcttattatattttaatgttttacaatatatagctata

SEQ ID NO: 20729 - DNA, 96 bp, Aspergillus viridinutans
  misc_feature: 76
acgtctgaactccagtcacaacgttccatctcgtatgccgtatcattcatcggaagagcacacgtctgaactccagtcacaacgttccatctcgta

SEQ ID NO: 20730 - DNA, 96 bp, Aspergillus viridinutans
  misc_feature: 76
taattaatttatagctatatattgtaaaacattaaaatataataagatataataagatttaaattttatcttatatacatttgattaaatatatta

SEQ ID NO: 20731 - DNA, 96 bp, Aspergillus viridinutans
  misc_feature: 76
atttatagctatatattgtaaaacattaaaatataataagatataataagatttaaattttatcttatatacatttgattaaatatattatactta

SEQ ID NO: 20732 - DNA, 96 bp, Aspergillus viridinutans
  misc_feature: 76
taaagatatatctagtagttaaatagtatatattaatatatcctatataatctatattaatatagctaataataatacctagcttatatataatat

SEQ ID NO: 20733 - DNA, 96 bp, Aspergillus viridinutans
  misc_feature: 76
gcacacgtctgaactccagtcacaacgttccatctcgtatgccgtatcattcatcggaagagcacacgtctgaactccagtcacaacgttccatct

SEQ ID NO: 20734 - DNA, 96 bp, Aspergillus viridinutans
  misc_feature: 76
aaagatatatctagtagttaaatagtatatattaatatatcctatataatctatattaatatagctaataataatacctagcttatatataatatc

SEQ ID NO: 20735 - DNA, 96 bp, Aspergillus viridinutans
  misc_feature: 76
cacacgtctgaactccagtcacaacgttccatctcgtatgccgtatcattcatcggaagagcacacgtctgaactccagtcacaacgttccatctc

SEQ ID NO: 20736 - DNA, 96 bp, Aspergillus viridinutans
  misc_feature: 76
gaactccagtcacaacgttccatctcgtatgccgtatcatgctcggaagagcacacgtctgaactccagtcacaacgttccatctcgtatgccgtc

SEQ ID NO: 20737 - DNA, 96 bp, Aspergillus viridinutans
  misc_feature: 76
atatagtaaatatagtaaatatagtaaatatagtaaatatagtaaatatagtaaatatagtaaatatagtaaatatagtaaatatagtaaatatag

SEQ ID NO: 20738 - DNA, 96 bp, Aspergillus viridinutans
  misc_feature: 76
cgtctgaactccagtcacaacgttccatctcgtatgccgtatcattcatcggaagagcacacgtctgaactccagtcacaacgttccatctcgtat

SEQ ID NO: 20739 - DNA, 96 bp, Aspergillus viridinutans
  misc_feature: 76
acacgtctgaactccagtcacaacgttccatctcgtatgccgtatcattcatcggaagagcacacgtctgaactccagtcacaacgttccatctcg

SEQ ID NO: 20740 - DNA, 96 bp, Aspergillus viridinutans
  misc_feature: 76
agtcacaacgttccatctcgtatgccgtagatcggaagagcacacgtctgaactccagtcacaacgttccatctcgtatgccgtatcattgatcgg

SEQ ID NO: 20741 - DNA, 96 bp, Aspergillus viridinutans
  misc_feature: 76
cagtcacaacgttccatctcgtatgccgtatcatgatcggaagagcacacgtctgaactccagtcacaacgttccatctcgtatgccgtatcattg

SEQ ID NO: 20742 - DNA, 96 bp, Aspergillus viridinutans
  misc_feature: 76
cacgtctgaactccagtcacaacgttccatctcgtatgccgtatcattcatcggaagagcacacgtctgaactccagtcacaacgttccatctcgt

SEQ ID NO: 20743 - DNA, 96 bp, Aspergillus viridinutans
  misc_feature: 76
attaattaatttatagctatatattgtaaaacattaaaatataataagatataataagatttaaattttatcttatatacatttgattaaatatat

SEQ ID NO: 20744 - DNA, 96 bp, Aspergillus viridinutans
  misc_feature: 76
agatatatctagtagttaaatagtatatattaatatatcctatataatctatattaatatagctaataataatacctagcttatatataatatctt

SEQ ID NO: 20745 - DNA, 96 bp, Aspergillus viridinutans
  misc_feature: 76
aatttatagctatatattgtaaaacattaaaatataataagatataataagatttaaattttatcttatatacatttgattaaatatattatactt

SEQ ID NO: 20746 - DNA, 96 bp, Aspergillus viridinutans
  misc_feature: 75
agagcgtcgtgtagggaaagagtgtagtactccgtgtagatctcggtggtcgccgtatcattaaaaaaaaaaaaaaaaaaaaaaaaaaaaaaaaaa

SEQ ID NO: 20747 - DNA, 96 bp, Aspergillus viridinutans
  misc_feature: 75
ttcattattttcataaatataatttgttaataaaaaatataaataagttttataacctaaattattataaaaaaataagattaatttaaataataa

SEQ ID NO: 20748 - DNA, 96 bp, Aspergillus viridinutans
  misc_feature: 75
taattcattattttcataaatataatttgttaataaaaaatataaataagttttataacctaaattattataaaaaaataagattaatttaaataa

SEQ ID NO: 20749 - DNA, 96 bp, Aspergillus viridinutans
  misc_feature: 75
atataaagatatatctagtagttaaatagtatatattaatatatcctatataatctatattaatatagctaataataatacctagcttatatataa

SEQ ID NO: 20750 - DNA, 96 bp, Aspergillus viridinutans
  misc_feature: 75
attaagtataatatatttaatcaaatgtatataagataaaatttaaatcttattatatcttattatattttaatgttttacaatatatagctataa

SEQ ID NO: 20751 - DNA, 96 bp, Aspergillus viridinutans
  misc_feature: 75
ttaatttatagctatatattgtaaaacattaaaatataataagatataataagatttaaattttatcttatatacatttgattaaatatattatac

SEQ ID NO: 20752 - DNA, 96 bp, Aspergillus viridinutans
  misc_feature: 75
taattaattcattattttcataaatataatttgttaataaaaaatataaataagttttataacctaaattattataaaaaaataagattaatttaa

SEQ ID NO: 20753 - DNA, 96 bp, Aspergillus viridinutans
  misc_feature: 75
gcatcaacaggcatcaacaggcatcaacaggcatcaacaggcatcaacaggcatcaacaggcatcaacaggcatcaacaggcatcaacaggcatca

SEQ ID NO: 20754 - DNA, 96 bp, Aspergillus viridinutans
  misc_feature: 75
tcataaatataatttgttaataaaaaatataaataagttttataacctaaattattataaaaaaataagattaatttaaataataatactaataat

SEQ ID NO: 20755 - DNA, 96 bp, Aspergillus viridinutans
  misc_feature: 75
aattaattaatttatagctatatattgtaaaacattaaaatataataagatataataagatttaaattttatcttatatacatttgattaaatata

SEQ ID NO: 20756 - DNA, 96 bp, Aspergillus viridinutans
  misc_feature: 75
ctcttccgatcagatcggaagagcgtcgtgtagggaaagagtgtagtactccgtgtagatctcggtggtcgccgtatcattaaaaaaaaaaaaaac

SEQ ID NO: 20757 - DNA, 96 bp, Aspergillus viridinutans
  misc_feature: 75
gtctgaactccagtcacaacgttccatctcgtatgccgtatcattcatcggaagagcacacgtctgaactccagtcacaacgttccatctcgtatg

SEQ ID NO: 20758 - DNA, 96 bp, Aspergillus viridinutans
  misc_feature: 75
gtcacaacgttccatctcgtatgccgtcttctgcttgaaaaaaaaaaacgtctgaactccagtcacaacgttccatctcgtatgccgtcttctgct

SEQ ID NO: 20759 - DNA, 96 bp, Aspergillus viridinutans
  misc_feature: 75
gtcacaacgttccatctcgtatgccgtatcatgatcggaagagcacacgtctgaactccagtcacaacgttccatctcgtatgccgtatcattgat

SEQ ID NO: 20760 - DNA, 96 bp, Aspergillus viridinutans
  misc_feature: 75
gaactccagtcacaacgttccatctcgtatgccgtatcattatcggaagagcacacgtctgaactccagtcacaacgttccatctcgtatgccgtc

SEQ ID NO: 20761 - DNA, 96 bp, Aspergillus viridinutans
  misc_feature: 75
ctaaatataaagatatatctagtagttaaatagtatatattaatatatcctatataatctatattaatatagctaataataatacctagcttatat

SEQ ID NO: 20762 - DNA, 96 bp, Aspergillus viridinutans
  misc_feature: 74
tttatagctatatattgtaaaacattaaaatataataagatataataagatttaaattttatcttatatacatttgattaaatatattatacttaa

SEQ ID NO: 20763 - DNA, 96 bp, Aspergillus viridinutans
  misc_feature: 74
tatctaattaagagtagaagttagatttaataattattaatattagtttaaacttattaaaataactttaataactcctaatttatctttctttaa

SEQ ID NO: 20764 - DNA, 96 bp, Aspergillus viridinutans
  misc_feature: 74
tgaactccagtcacaacgttccatctcgtatgccgtatcattcatcggaagagcacacgtctgaactccagtcacaacgttccatctcgtatgccg

SEQ ID NO: 20765 - DNA, 96 bp, Aspergillus viridinutans
  misc_feature: 74
tctgaactccagtcacaacgttccatctcgtatgccgtatcattcatcggaagagcacacgtctgaactccagtcacaacgttccatctcgtatgc

SEQ ID NO: 20766 - DNA, 96 bp, Aspergillus viridinutans
  misc_feature: 74
tcggaagagcacacgtctgaactccagtcacaacgttccatctcggtggtcgcgatcggaagagcacacgtctgaactccagtcacaacgttccat

SEQ ID NO: 20767 - DNA, 96 bp, Aspergillus viridinutans
  misc_feature: 74
tcattattttcataaatataatttgttaataaaaaatataaataagttttataacctaaattattataaaaaaataagattaatttaaataataat

SEQ ID NO: 20768 - DNA, 96 bp, Aspergillus viridinutans
  misc_feature: 74
tcacaacgttccatctcgtatgccgtgatcggaagagcagatcggaagagcacacgtctgaactccagtcacaacgttccatctcgtatgccgtct

SEQ ID NO: 20769 - DNA, 96 bp, Aspergillus viridinutans
  misc_feature: 74
cataaatataatttgttaataaaaaatataaataagttttataacctaaattattataaaaaaataagattaatttaaataataatactaataata

SEQ ID NO: 20770 - DNA, 96 bp, Aspergillus viridinutans
  misc_feature: 74
taaagaaagataaattaggagttattaaagttattttaataagtttaaactaatattaataattattaaatctaacttctactcttaattagatat

SEQ ID NO: 20771 - DNA, 96 bp, Aspergillus viridinutans
  misc_feature: 74
gtcacaacgttccatctcgtatgccgtgatcggaagagcagatcggaagagcacacgtctgaactccagtcacaacgttccatctcgtatgccgtc

SEQ ID NO: 20772 - DNA, 96 bp, Aspergillus viridinutans
  misc_feature: 74
ataaatataatttgttaataaaaaatataaataagttttataacctaaattattataaaaaaataagattaatttaaataataatactaataatac

SEQ ID NO: 20773 - DNA, 96 bp, Aspergillus viridinutans
  misc_feature: 74
ctgaactccagtcacaacgttccatctcgtatgccgtatcattcatcggaagagcacacgtctgaactccagtcacaacgttccatctcgtatgcc

SEQ ID NO: 20774 - DNA, 96 bp, Aspergillus viridinutans
  misc_feature: 74
gatatatctagtagttaaatagtatatattaatatatcctatataatctatattaatatagctaataataatacctagcttatatataatatcttt

SEQ ID NO: 20775 - DNA, 96 bp, Aspergillus viridinutans
  misc_feature: 74
ctattaagtataatatatttaatcaaatgtatataagataaaatttaaatcttattatatcttattatattttaatgttttacaatatatagctat

SEQ ID NO: 20776 - DNA, 96 bp, Aspergillus viridinutans
  misc_feature: 74
aactccagtcacaacgttccatctcgtatgccgtagatcggaagagcacacgtctgaactccagtcacaacgttccatctcgtatgccgtatcatg

SEQ ID NO: 20777 - DNA, 96 bp, Aspergillus viridinutans
  misc_feature: 74
aattcattattttcataaatataatttgttaataaaaaatataaataagttttataacctaaattattataaaaaaataagattaatttaaataat

SEQ ID NO: 20778 - DNA, 96 bp, Aspergillus viridinutans
  misc_feature: 74
aaatataatttgttaataaaaaatataaataagttttataacctaaattattataaaaaaataagattaatttaaataataatactaataatacat

SEQ ID NO: 20779 - DNA, 96 bp, Aspergillus viridinutans
  misc_feature: 74
aactccagtcacaacgttccatctcgtatgccgtatcattatcggaagagcacacgtctgaactccagtcacaacgttccatctcgtatgccgtct

SEQ ID NO: 20780 - DNA, 96 bp, Aspergillus viridinutans
  misc_feature: 74
aactccagtcacaacgttccatctcgtatgccgtatcatgctcggaagagcacacgtctgaactccagtcacaacgttccatctcgtatgccgtct

SEQ ID NO: 20781 - DNA, 96 bp, Aspergillus viridinutans
  misc_feature: 73
cacaacgttccatctcgtatgccgtatcagatcggaagagcacacgtctgaactccagtcacaacgttccatctcgtatgccgtcttctgcttgaa

SEQ ID NO: 20782 - DNA, 96 bp, Aspergillus viridinutans
  misc_feature: 73
ttaattaattaatttatagctatatattgtaaaacattaaaatataataagatataataagatttaaattttatcttatatacatttgattaaata

SEQ ID NO: 20783 - DNA, 96 bp, Aspergillus viridinutans
  misc_feature: 73
ggaagagcacacgtctgaactccagtcacaacgttccatctcgtatgccgtatcagatcggaagagcagatcggaagagcacacgtctgaactcca

SEQ ID NO: 20784 - DNA, 96 bp, Aspergillus viridinutans
  misc_feature: 73
tcggaagagcacacgtctgaactccagtcacaacgttccatctcgtatgccgtatcagatcggaagagcagatcggaagagcacacgtctgaactc

SEQ ID NO: 20785 - DNA, 96 bp, Aspergillus viridinutans
  misc_feature: 73
tccagtcacaacgttccatctcgtatgccgtatcattatcggaagagcacacgtctgaactccagtcacaacgttccatctcgtatgccgtcttct

SEQ ID NO: 20786 - DNA, 96 bp, Aspergillus viridinutans
  misc_feature: 73
tcacaacgttccatctcgtatgccgtatcatgatcggaagagcacacgtctgaactccagtcacaacgttccatctcgtatgccgtatcattgatc

SEQ ID NO: 20787 - DNA, 96 bp, Aspergillus viridinutans
  misc_feature: 73
cattattttcataaatataatttgttaataaaaaatataaataagttttataacctaaattattataaaaaaataagattaatttaaataataata

SEQ ID NO: 20788 - DNA, 96 bp, Aspergillus viridinutans
  misc_feature: 73
tatataattaattcattattttcataaatataatttgttaataaaaaatataaataagttttataacctaaattattataaaaaaataagattaat

SEQ ID NO: 20789 - DNA, 96 bp, Aspergillus viridinutans
  misc_feature: 73
actaaatataaagatatatctagtagttaaatagtatatattaatatatcctatataatctatattaatatagctaataataatacctagcttata

SEQ ID NO: 20790 - DNA, 96 bp, Aspergillus viridinutans
  misc_feature: 73
ataattaattcattattttcataaatataatttgttaataaaaaatataaataagttttataacctaaattattataaaaaaataagattaattta

SEQ ID NO: 20791 - DNA, 96 bp, Aspergillus viridinutans
  misc_feature: 73
attattttcataaatataatttgttaataaaaaatataaataagttttataacctaaattattataaaaaaataagattaatttaaataataatac

SEQ ID NO: 20792 - DNA, 96 bp, Aspergillus viridinutans
  misc_feature: 73
cggaagagcacacgtctgaactccagtcacaacgttccatctcgtatgccgtatcagatcggaagagcagatcggaagagcacacgtctgaactcc

SEQ ID NO: 20793 - DNA, 96 bp, Aspergillus viridinutans
  misc_feature: 73
cggaagagcacacgtctgaactccagtcacaacgttccatctcggtggtcgcgatcggaagagcacacgtctgaactccagtcacaacgttccatc

SEQ ID NO: 20794 - DNA, 96 bp, Aspergillus viridinutans
  misc_feature: 73
gaactccagtcacaacgttccatctcgtatgccgtatcattcatcggaagagcacacgtctgaactccagtcacaacgttccatctcgtatgccgt

SEQ ID NO: 20795 - DNA, 96 bp, Aspergillus viridinutans
  misc_feature: 73
agatcggaagagcacacgtctgaactccagtcacaacgttccatctcgtatgccgtgatcggaagagcacacgtctgaactccagtcacaacgttc

SEQ ID NO: 20796 - DNA, 96 bp, Aspergillus viridinutans
  misc_feature: 73
ctcttccgatcagatcggaagagcgtcgtgtagggaaagagtgtagtactccgtgtagatctcggtggtcgccgtatcattaaaaaaaaaaaaaag

SEQ ID NO: 20797 - DNA, 96 bp, Aspergillus viridinutans
  misc_feature: 73
attaattaattaatttatagctatatattgtaaaacattaaaatataataagatataataagatttaaattttatcttatatacatttgattaaat

SEQ ID NO: 20798 - DNA, 96 bp, Aspergillus viridinutans
  misc_feature: 73
atatatctagtagttaaatagtatatattaatatatcctatataatctatattaatatagctaataataatacctagcttatatataatatctttt

SEQ ID NO: 20799 - DNA, 96 bp, Aspergillus viridinutans
  misc_feature: 73
actccagtcacaacgttccatctcgtatgccgtatcattatcggaagagcacacgtctgaactccagtcacaacgttccatctcgtatgccgtctt

SEQ ID NO: 20800 - DNA, 96 bp, Aspergillus viridinutans
  misc_feature: 73
aatataatttgttaataaaaaatataaataagttttataacctaaattattataaaaaaataagattaatttaaataataatactaataatacatt

SEQ ID NO: 20801 - DNA, 96 bp, Aspergillus viridinutans
  misc_feature: 72
ccgatcagatcggaagagcgtcgtgtagggaaagagtgtagtactccgtgtagatctcggtggtcgccgtatcattaaaaaaaaaaaaaaaaaaaa

SEQ ID NO: 20802 - DNA, 96 bp, Aspergillus viridinutans
  misc_feature: 72
gatcggaagagcgtcgtgtagggaaagagtgtagtactccgtgtagatctcggtggtcgccgtatcattaaaaaaaaaaaaaaaaaaaaaaaaaga

SEQ ID NO: 20803 - DNA, 96 bp, Aspergillus viridinutans
  misc_feature: 72
tcacaacgttccatctcgtatgccgtatcattatcggaagagcacacgtctgaactccagtcacaacgttccatctcgtatgccgtcttctgcttg

SEQ ID NO: 20804 - DNA, 96 bp, Aspergillus viridinutans
  misc_feature: 72
tataattaattcattattttcataaatataatttgttaataaaaaatataaataagttttataacctaaattattataaaaaaataagattaattt

SEQ ID NO: 20805 - DNA, 96 bp, Aspergillus viridinutans
  misc_feature: 72
taatatatttaatcaaatgtatataagataagatttaaatcttattatatcttattatagtatattaaagtatatattattaaatatttacttgtt

SEQ ID NO: 20806 - DNA, 96 bp, Aspergillus viridinutans
  misc_feature: 72
gatcggaagagcacacgtctgaactccagtcacaacgttccatctcgtatgccgtatcattatcggaagagcacacgtctgaactccagtcacaac

SEQ ID NO: 20807 - DNA, 96 bp, Aspergillus viridinutans
  misc_feature: 72
gatcggaagagcacacgtctgaactccagtcacaacgttccatctcgtatgccgtatcagatcggaagagcagatcggaagagcacacgtctgaac

SEQ ID NO: 20808 - DNA, 96 bp, Aspergillus viridinutans
  misc_feature: 72
ggcatcaacaggcatcaacaggcatcaacaggcatcaacaggcatcaacaggcatcaacaggcatcaacaggcatcaacaggcatcaacaggcatc

SEQ ID NO: 20809 - DNA, 96 bp, Aspergillus viridinutans
  misc_feature: 72
ggaagagcacacgtctgaactccagtcacaacgttccatctcggtggtcgcgatcggaagagcacacgtctgaactccagtcacaacgttccatct

SEQ ID NO: 20810 - DNA, 96 bp, Aspergillus viridinutans
  misc_feature: 72
cagtcacaacgttccatctcgtatgccgtatcattatcggaagagcacacgtctgaactccagtcacaacgttccatctcgtatgccgtcttctgc

SEQ ID NO: 20811 - DNA, 96 bp, Aspergillus viridinutans
  misc_feature: 72
gaagagcacacgtctgaactccagtcacaacgttccatctcggtggtcgcgatcggaagagcacacgtctgaactccagtcacaacgttccatctc

SEQ ID NO: 20812 - DNA, 96 bp, Aspergillus viridinutans
  misc_feature: 72
gaagagcacacgtctgaactccagtcacaacgttccatctcgtatgccgtatcagatcggaagagcagatcggaagagcacacgtctgaactccag

SEQ ID NO: 20813 - DNA, 96 bp, Aspergillus viridinutans
  misc_feature: 72
ctccagtcacaacgttccatctcgtatgccgtatcattatcggaagagcacacgtctgaactccagtcacaacgttccatctcgtatgccgtcttc

SEQ ID NO: 20814 - DNA, 96 bp, Aspergillus viridinutans
  misc_feature: 72
gaactccagtcacaacgttccatctcgtatgccgtatcattgatcggaagagcacacgtctgaactccagtcacaacgttccaactcgtatgccgt

SEQ ID NO: 20815 - DNA, 96 bp, Aspergillus viridinutans
  misc_feature: 72
atcggaagagcgtcgtgtagggaaagagtgtagtactccgtgtagatctcggtggtcgccgtatcattaaaaaaaaaaaaaaaaaaaaaaaaaaag

SEQ ID NO: 20816 - DNA, 96 bp, Aspergillus viridinutans
  misc_feature: 72
atctaattaagagtagaagttagatttaataattattaatattagtttaaacttattaaaataactttaataactcctaatttatctttctttaag

SEQ ID NO: 20817 - DNA, 96 bp, Aspergillus viridinutans
  misc_feature: 72
aagagcacacgtctgaactccagtcacaacgttccatctcggtggtcgcgatcggaagagcacacgtctgaactccagtcacaacgttccatctcg

SEQ ID NO: 20818 - DNA, 96 bp, Aspergillus viridinutans
  misc_feature: 72
ccagtcacaacgttccatctcgtatgccgtatcattatcggaagagcacacgtctgaactccagtcacaacgttccatctcgtatgccgtcttctg

SEQ ID NO: 20819 - DNA, 96 bp, Aspergillus viridinutans
  misc_feature: 72
atcggaagagcacacgtctgaactccagtcacaacgttccatctcgtatgccgtatcagatcggaagagcagatcggaagagcacacgtctgaact

SEQ ID NO: 20820 - DNA, 96 bp, Aspergillus viridinutans
  misc_feature: 72
atataattaattcattattttcataaatataatttgttaataaaaaatataaataagttttataacctaaattattataaaaaaataagattaatt

SEQ ID NO: 20821 - DNA, 96 bp, Aspergillus viridinutans
  misc_feature: 72
ataatatatttaatcaaatgtatataagataagatttaaatcttattatatcttattatagtatattaaagtatatattattaaatatttacttgt

SEQ ID NO: 20822 - DNA, 96 bp, Aspergillus viridinutans
  misc_feature: 71
gctcttccgatcgatcggaagagcgtcgtgtagggaaagagtgtagtactccgtgtagatctcggtggtcgccgtatcattaaaaaaaaaaaaaaa

SEQ ID NO: 20823 - DNA, 96 bp, Aspergillus viridinutans
  misc_feature: 71
cacgacgctcttccgatcgatcggaagagcacacgtctgaactccagtcacaacgttccatctcgtatgccgtcttctgcttgaaaaaaaaaaaaa

SEQ ID NO: 20824 - DNA, 96 bp, Aspergillus viridinutans
  misc_feature: 71
tgtatataattaattcattattttcataaatataatttgttaataaaaaatataaataagttttataacctaaattattataaaaaaataagatta

SEQ ID NO: 20825 - DNA, 96 bp, Aspergillus viridinutans
  misc_feature: 71
tattactaaatataaagatatatctagtagttaaatagtatatattaatatatcctatataatctatattaatatagctaataataatacctagct

SEQ ID NO: 20826 - DNA, 96 bp, Aspergillus viridinutans
  misc_feature: 71
gagcacacgtctgaactccagtcacaacgttccatctcggtggtcgcgatcggaagagcacacgtctgaactccagtcacaacgttccatctcgta

SEQ ID NO: 20827 - DNA, 96 bp, Aspergillus viridinutans
  misc_feature: 71
taattaattaatttatagctatatattgtaaaacattaaaatataataagatataataagatttaaattttatcttatatacatttgattaaatat

SEQ ID NO: 20828 - DNA, 96 bp, Aspergillus viridinutans
  misc_feature: 71
gtcacaacgttccatctcgtatgccgtatcattatcggaagagcacacgtctgaactccagtcacaacgttccatctcgtatgccgtcttctgctt

SEQ ID NO: 20829 - DNA, 96 bp, Aspergillus viridinutans
  misc_feature: 71
acacgtctgaactccagtcacaacgttccatctcggtggtcgcgatcggaagagcacacgtctgaactccagtcacaacgttccatctcgtatgcc

SEQ ID NO: 20830 - DNA, 96 bp, Aspergillus viridinutans
  misc_feature: 71
cacacgtctgaactccagtcacaacgttccatctcggtggtcgcgatcggaagagcacacgtctgaactccagtcacaacgttccatctcgtatgc

SEQ ID NO: 20831 - DNA, 96 bp, Aspergillus viridinutans
  misc_feature: 71
gcacacgtctgaactccagtcacaacgttccatctcggtggtcgcgatcggaagagcacacgtctgaactccagtcacaacgttccatctcgtatg

SEQ ID NO: 20832 - DNA, 96 bp, Aspergillus viridinutans
  misc_feature: 71
cgtctgaactccagtcacaacgttccatctcgtatgccgtgatcggcagagcacacgtctgaactccagtcacaacgttccatctcgtatgccgtc

SEQ ID NO: 20833 - DNA, 96 bp, Aspergillus viridinutans
  misc_feature: 71
ctccagtcacaacgttccatctcgtatgccgtatcatgctcggaagagcacacgtctgaactccagtcacaacgttccatctcgtatgccgtcttc

SEQ ID NO: 20834 - DNA, 96 bp, Aspergillus viridinutans
  misc_feature: 71
cacgtctgaactccagtcacaacgttccatctcggtggtcgcgatcggaagagcacacgtctgaactccagtcacaacgttccatctcgtatgccg

SEQ ID NO: 20835 - DNA, 96 bp, Aspergillus viridinutans
  misc_feature: 71
aatatcctgactagatgatgattcaatatcaaatactatggtattgaatcgatatcctgactagatgatgattcgatatcaaatactatggtattg

SEQ ID NO: 20836 - DNA, 96 bp, Aspergillus viridinutans
  misc_feature: 71
agcacacgtctgaactccagtcacaacgttccatctcggtggtcgcgatcggaagagcacacgtctgaactccagtcacaacgttccatctcgtat

SEQ ID NO: 20837 - DNA, 96 bp, Aspergillus viridinutans
  misc_feature: 71
ataagattcattctattattattatatctcggtttattaatgtattattagtattattatttaaattaatcttatttttttataataatttaggtt

SEQ ID NO: 20838 - DNA, 96 bp, Aspergillus viridinutans
  misc_feature: 71
agtcacaacgttccatctcgtatgccgtatcattatcggaagagcacacgtctgaactccagtcacaacgttccatctcgtatgccgtcttctgct

SEQ ID NO: 20839 - DNA, 96 bp, Aspergillus viridinutans
  misc_feature: 71
agagcacacgtctgaactccagtcacaacgttccatctcggtggtcgcgatcggaagagcacacgtctgaactccagtcacaacgttccatctcgt

SEQ ID NO: 20840 - DNA, 96 bp, Aspergillus viridinutans
  misc_feature: 71
actccagtcacaacgttccatctcgtatgccgtatcatgctcggaagagcacacgtctgaactccagtcacaacgttccatctcgtatgccgtctt

SEQ ID NO: 20841 - DNA, 96 bp, Aspergillus viridinutans
  misc_feature: 70
ctcgtatgccgtagatcggaagagcgtcgtgtagggaaagagtgtagtactccgtgtagatctcggtggtcgccgtatcattaaaaaaaaaaaaaa

SEQ ID NO: 20842 - DNA, 96 bp, Aspergillus viridinutans
  misc_feature: 70
aattaattaattaatttatagctatatattgtaaaacattaaaatataataagatataataagatttaaattttatcttatatacatttgattaaa

SEQ ID NO: 20843 - DNA, 96 bp, Aspergillus viridinutans
  misc_feature: 70
gatcggaagagcacacgtctgaactccagtcacaacgttccatctcgtatgccgtatccttgatcggaagagcacacgtctgaactccagtcacaa

SEQ ID NO: 20844 - DNA, 96 bp, Aspergillus viridinutans
  misc_feature: 70
ttaattaattaattaatttatagctatatattgtaaaacattaaaatataataagatataataagatttaaattttatcttatatacatttgatta

SEQ ID NO: 20845 - DNA, 96 bp, Aspergillus viridinutans
  misc_feature: 70
gtatataattaattcattattttcataaatataatttgttaataaaaaatataaataagttttataacctaaattattataaaaaaataagattaa

SEQ ID NO: 20846 - DNA, 96 bp, Aspergillus viridinutans
  misc_feature: 70
taattaattaattaatttatagctatatattgtaaaacattaaaatataataagatataataagatttaaattttatcttatatacatttgattaa

SEQ ID NO: 20847 - DNA, 96 bp, Aspergillus viridinutans
  misc_feature: 70
tcggaagagcacacgtctgaactccagtcacaacgttccatctcgtatgccgtatcagaccggaagagcacacgtctgaactccagtcacaacgtt

SEQ ID NO: 20848 - DNA, 96 bp, Aspergillus viridinutans
  misc_feature: 70
tccagtcacaacgttccatctcgtatgccgtatcatgctcggaagagcacacgtctgaactccagtcacaacgttccatctcgtatgccgtcttct

SEQ ID NO: 20849 - DNA, 96 bp, Aspergillus viridinutans
  misc_feature: 70
tcataagattcattctattattattatatctcggtttattaatgtattattagtattattatttaaattaatcttatttttttataataatttagg

SEQ ID NO: 20850 - DNA, 96 bp, Aspergillus viridinutans
  misc_feature: 70
tcaaatgtatataagataaaatttaaatcttattatatcttattatattttaatgttttacaatatatagctataaattaattaattaattaattt

SEQ ID NO: 20851 - DNA, 96 bp, Aspergillus viridinutans
  misc_feature: 70
actattaagtataatatatttaatcaaatgtatataagataaaatttaaatcttattatatcttattatattttaatgttttacaatatatagcta

SEQ ID NO: 20852 - DNA, 96 bp, Aspergillus viridinutans
  misc_feature: 70
aatatatttaatcaaatgtatataagataagatttaaatcttattatatcttattatagtatattaaagtatatattattaaatatttacttgtta

SEQ ID NO: 20853 - DNA, 96 bp, Aspergillus viridinutans
  misc_feature: 70
caaatgtatataagataaaatttaaatcttattatatcttattatattttaatgttttacaatatatagctataaattaattaattaattaattta

SEQ ID NO: 20854 - DNA, 96 bp, Aspergillus viridinutans
  misc_feature: 70
ggaagagcacacgtctgaactccagtcacaacgttccatctcgtatgccgtatcagaccggaagagcacacgtctgaactccagtcacaacgttcc

SEQ ID NO: 20855 - DNA, 96 bp, Aspergillus viridinutans
  misc_feature: 70
cagtcacaacgttccatctcgtatgccgtatcatgctcggaagagcacacgtctgaactccagtcacaacgttccatctcgtatgccgtcttctgc

SEQ ID NO: 20856 - DNA, 96 bp, Aspergillus viridinutans
  misc_feature: 70
cggaagagcacacgtctgaactccagtcacaacgttccatctcgtatgccgtatcagaccggaagagcacacgtctgaactccagtcacaacgttc

SEQ ID NO: 20857 - DNA, 96 bp, Aspergillus viridinutans
  misc_feature: 70
caacaggcatcaacaggcatcaacaggcatcaacaggcatcaacaggcatcaacaggcatcaacaggcatcaacaggcatcaacaggcatcaacag

SEQ ID NO: 20858 - DNA, 96 bp, Aspergillus viridinutans
  misc_feature: 70
ccagtcacaacgttccatctcgtatgccgtatcatgctcggaagagcacacgtctgaactccagtcacaacgttccatctcgtatgccgtcttctg

SEQ ID NO: 20859 - DNA, 96 bp, Aspergillus viridinutans
  misc_feature: 70
cataagattcattctattattattatatctcggtttattaatgtattattagtattattatttaaattaatcttatttttttataataatttaggt

SEQ ID NO: 20860 - DNA, 96 bp, Aspergillus viridinutans
  misc_feature: 70
atcggaagagcacacgtctgaactccagtcacaacgttccatctcgtatgccgtatcagaccggaagagcacacgtctgaactccagtcacaacgt

SEQ ID NO: 20861 - DNA, 96 bp, Aspergillus viridinutans
  misc_feature: 70
atcaaatgtatataagataaaatttaaatcttattatatcttattatattttaatgttttacaatatatagctataaattaattaattaattaatt

SEQ ID NO: 20862 - DNA, 96 bp, Aspergillus viridinutans
  misc_feature: 70
aagagcacacgtctgaactccagtcacaacgttccatctcgtatgccgtatcagatcggaagagcagatcggaagagcacacgtctgaactccagt

SEQ ID NO: 20863 - DNA, 96 bp, Aspergillus viridinutans
  misc_feature: 69
gcacacgtctgaactccagtcacaacgttccatctcgtatgccgtatcagatcggaagagcagatcggaagagcacacgtctgaactccagtcaca

SEQ ID NO: 20864 - DNA, 96 bp, Aspergillus viridinutans
  misc_feature: 69
gaagagcacacgtctgaactccagtcacaacgttccatctcgtatgccgtatcagaccggaagagcacacgtctgaactccagtcacaacgttcca

SEQ ID NO: 20865 - DNA, 96 bp, Aspergillus viridinutans
  misc_feature: 69
gagcacacgtctgaactccagtcacaacgttccatctcgtatgccgtatcagatcggaagagcagatcggaagagcacacgtctgaactccagtca

SEQ ID NO: 20866 - DNA, 96 bp, Aspergillus viridinutans
  misc_feature: 69
tcacaacgttccatctcgtatgccgtcttctgcttgaaaaaaaaaaacgtctgaactccagtcacaacgttccatctcgtatgccgtcttctgctt

SEQ ID NO: 20867 - DNA, 96 bp, Aspergillus viridinutans
  misc_feature: 69
tcaaatactatggtattgaatcaatatcctgactagatgatgattcaatatcaaatactatggtattgaatcgatatcctgactagatgatgattc

SEQ ID NO: 20868 - DNA, 96 bp, Aspergillus viridinutans
  misc_feature: 69
atatttaataatatatactttaatatactataataagatataataagatttaaatcttatcttatatacatttgattaaatatattatgctcaata

SEQ ID NO: 20869 - DNA, 96 bp, Aspergillus viridinutans
  misc_feature: 69
tactaaatataaagatatatctagtagttaaatagtatatattaatatatcctatataatctatattaatatagctaataataatacctagcttat

SEQ ID NO: 20870 - DNA, 96 bp, Aspergillus viridinutans
  misc_feature: 69
atataatttgttaataaaaaatataaataagttttataacctaaattattataaaaaaataagattaatttaaataataatactaataatacatta

SEQ ID NO: 20871 - DNA, 96 bp, Aspergillus viridinutans
  misc_feature: 69
gatcggaagagcacacgtctgaactccagtcacaacgttccatctcgtatgccgtcttctgcttgaaaaaaaaaacgtctgaactccagtcacaac

SEQ ID NO: 20872 - DNA, 96 bp, Aspergillus viridinutans
  misc_feature: 69
agcacacgtctgaactccagtcacaacgttccatctcgtatgccgtatcagatcggaagagcagatcggaagagcacacgtctgaactccagtcac

SEQ ID NO: 20873 - DNA, 96 bp, Aspergillus viridinutans
  misc_feature: 69
gtctgaactccagtcacaacgttccatctcgtatgccgtgatcggcagagcacacgtctgaactccagtcacaacgttccatctcgtatgccgtct

SEQ ID NO: 20874 - DNA, 96 bp, Aspergillus viridinutans
  misc_feature: 69
ggaagagcacacgtctgaactccagtcacaacgttccatctcgtatgccgtcttctgcttgaaaaaaaaaacgtctgaactccagtcacaacgttc

SEQ ID NO: 20875 - DNA, 96 bp, Aspergillus viridinutans
  misc_feature: 69
gagcacacgtctgaactccagtcacaacgttccatctcgtatgccgtatcattgatcggaagaacacacgtctgaactccagtcacaacgttccat

SEQ ID NO: 20876 - DNA, 96 bp, Aspergillus viridinutans
  misc_feature: 69
agagcacacgtctgaactccagtcacaacgttccatctcgtatgccgtatcagatcggaagagcagatcggaagagcacacgtctgaactccagtc

SEQ ID NO: 20877 - DNA, 96 bp, Aspergillus viridinutans
  misc_feature: 69
cggaagagcacacgtctgaactccagtcacaacgttccatctcgtatgccgtcttctgcttgaaaaaaaaaacgtctgaactccagtcacaacgtt

SEQ ID NO: 20878 - DNA, 96 bp, Aspergillus viridinutans
  misc_feature: 69
caatatcctgactagatgatgattcaatatcaaatactatggtattgaatcgatatcctgactagatgatgattcgatatcaaatactatggtatt

SEQ ID NO: 20879 - DNA, 96 bp, Aspergillus viridinutans
  misc_feature: 69
attactaaatataaagatatatctagtagttaaatagtatatattaatatatcctatataatctatattaatatagctaataataatacctagctt

SEQ ID NO: 20880 - DNA, 96 bp, Aspergillus viridinutans
  misc_feature: 69
attaattaattaattaatttatagctatatattgtaaaacattaaaatataataagatataataagatttaaattttatcttatatacatttgatt

SEQ ID NO: 20881 - DNA, 96 bp, Aspergillus viridinutans
  misc_feature: 69
aggcatcaacaggcatcaacaggcatcaacaggcatcaacaggcatcaacaggcatcaacaggcatcaacaggcatcaacaggcatcaacaggcat

SEQ ID NO: 20882 - DNA, 96 bp, Aspergillus viridinutans
  misc_feature: 69
atactttaatatactataataagatataataagatttaaatcttatcttatatacatttgattaaatatattatgctcaatagtttaaatactatt

SEQ ID NO: 20883 - DNA, 96 bp, Aspergillus viridinutans
  misc_feature: 69
agtcacaacgttccatctcgtatgccgtatcatgctcggaagagcacacgtctgaactccagtcacaacgttccatctcgtatgccgtcttctgct

SEQ ID NO: 20884 - DNA, 96 bp, Aspergillus viridinutans
  misc_feature: 69
acgtctgaactccagtcacaacgttccatctcggtggtcgcgatcggaagagcacacgtctgaactccagtcacaacgttccatctcgtatgccgt

SEQ ID NO: 20885 - DNA, 96 bp, Aspergillus viridinutans
  misc_feature: 68
gagcagatcggaagagcagatcggaagagcacacgtctgaactccagtcacaacgttccatctcgtatgccgtcttctgcttgaaaaaaaaaaaaa

SEQ ID NO: 20886 - DNA, 96 bp, Aspergillus viridinutans
  misc_feature: 68
cacacgtctgaactccagtcacaacgttccatctcgtatgccgtatcagatcggaagagcagatcggaagagcacacgtctgaactccagtcacaa

SEQ ID NO: 20887 - DNA, 96 bp, Aspergillus viridinutans
  misc_feature: 68
ttgtatataattaattcattattttcataaatataatttgttaataaaaaatataaataagttttataacctaaattattataaaaaaataagatt

SEQ ID NO: 20888 - DNA, 96 bp, Aspergillus viridinutans
  misc_feature: 68
ttactaaatataaagatatatctagtagttaaatagtatatattaatatatcctatataatctatattaatatagctaataataatacctagctta

SEQ ID NO: 20889 - DNA, 96 bp, Aspergillus viridinutans
  misc_feature: 68
tcggaagagcacacgtctgaactccagtcacaacgttccatctcgtatgccgtagatcgcaagagcacacgtctgaactccagtcacaacgttcca

SEQ ID NO: 20890 - DNA, 96 bp, Aspergillus viridinutans
  misc_feature: 68
caggcatcaacaggcatcaacaggcatcaacaggcatcaacaggcatcaacaggcatcaacaggcatcaacaggcatcaacaggcatcaacaggca

SEQ ID NO: 20891 - DNA, 96 bp, Aspergillus viridinutans
  misc_feature: 68
gaatactatggtatcaatattcatactaggtgatcattcgatatcaaatactatggtattgaatcaatatcctgactagatgatgattcaatatca

SEQ ID NO: 20892 - DNA, 96 bp, Aspergillus viridinutans
  misc_feature: 68
tctgaactccagtcacaacgttccatctcgtatgccgtgatcggcagagcacacgtctgaactccagtcacaacgttccatctcgtatgccgtctt

SEQ ID NO: 20893 - DNA, 96 bp, Aspergillus viridinutans
  misc_feature: 68
tctattattattatatctcggtttattaatgtattattagtattattatttaaattaatcttatttttttataataatttaggttataaaacttat

SEQ ID NO: 20894 - DNA, 96 bp, Aspergillus viridinutans
  misc_feature: 68
tatactttaatatactataataagatataataagatttaaatcttatcttatatacatttgattaaatatattatgctcaatagtttaaatactat

SEQ ID NO: 20895 - DNA, 96 bp, Aspergillus viridinutans
  misc_feature: 68
taagattcattctattattattatatctcggtttattaatgtattattagtattattatttaaattaatcttatttttttataataatttaggtta

SEQ ID NO: 20896 - DNA, 96 bp, Aspergillus viridinutans
  misc_feature: 68
acacgtctgaactccagtcacaacgttccatctcgtatgccgtatcagatcggaagagcagatcggaagagcacacgtctgaactccagtcacaac

SEQ ID NO: 20897 - DNA, 96 bp, Aspergillus viridinutans
  misc_feature: 68
gtctgaactccagtcacaacgttccatctcgtatgccgtatcagatcggaagagcagatcggaagagcacacgtctgaactccagtcacaacgttc

SEQ ID NO: 20898 - DNA, 96 bp, Aspergillus viridinutans
  misc_feature: 68
atcggaagagcacacgtctgaactccagtcacaacgttccatctcgtatgccgtagatcgcaagagcacacgtctgaactccagtcacaacgttcc

SEQ ID NO: 20899 - DNA, 96 bp, Aspergillus viridinutans
  misc_feature: 68
agcacacgtctgaactccagtcacaacgttccatctcgtatgccgtatcattgatcggaagaacacacgtctgaactccagtcacaacgttccatc

SEQ ID NO: 20900 - DNA, 96 bp, Aspergillus viridinutans
  misc_feature: 68
ctgaactccagtcacaacgttccatctcgtatgccgtgatcggcagagcacacgtctgaactccagtcacaacgttccatctcgtatgccgtcttc

SEQ ID NO: 20901 - DNA, 96 bp, Aspergillus viridinutans
  misc_feature: 68
atcggaagagcacacgtctgaactccagtcacaacgttccatctcgtatgccgtcttctgcttgaaaaaaaaaacgtctgaactccagtcacaacg

SEQ ID NO: 20902 - DNA, 96 bp, Aspergillus viridinutans
  misc_feature: 68
cacgtctgaactccagtcacaacgttccatctcgtatgccgtatcagatcggaagagcagatcggaagagcacacgtctgaactccagtcacaacg

SEQ ID NO: 20903 - DNA, 96 bp, Aspergillus viridinutans
  misc_feature: 68
cgtctgaactccagtcacaacgttccatctcgtatgccgtatcagatcggaagagcagatcggaagagcacacgtctgaactccagtcacaacgtt

SEQ ID NO: 20904 - DNA, 96 bp, Aspergillus viridinutans
  misc_feature: 68
caaatactatggtattgaatcaatatcctgactagatgatgattcaatatcaaatactatggtattgaatcgatatcctgactagatgatgattcg

SEQ ID NO: 20905 - DNA, 96 bp, Aspergillus viridinutans
  misc_feature: 68
aacaggcatcaacaggcatcaacaggcatcaacaggcatcaacaggcatcaacaggcatcaacaggcatcaacaggcatcaacaggcatcaacagg

SEQ ID NO: 20906 - DNA, 96 bp, Aspergillus viridinutans
  misc_feature: 68
caagtaaatatttaataatatatactttaatatactataataagatataataagatttaaatcttatcttatatacatttgattaaatatattatg

SEQ ID NO: 20907 - DNA, 96 bp, Aspergillus viridinutans
  misc_feature: 68
aaccatttaagtaaggtaaccttaactaataaagaaaataattatagtaattaaaataattgtaaatacaaattgtaaatacaattaaccttccat

SEQ ID NO: 20908 - DNA, 96 bp, Aspergillus viridinutans
  misc_feature: 68
atatatttaatcaaatgtatataagataagatttaaatcttattatatcttattatagtatattaaagtatatattattaaatatttacttgttat

SEQ ID NO: 20909 - DNA, 96 bp, Aspergillus viridinutans
  misc_feature: 68
aataatatctaattaagagtagaagttagattaataattattaatattaatttaaacttattaaaataactttaataacttctaatttatctttct

SEQ ID NO: 20910 - DNA, 96 bp, Aspergillus viridinutans
  misc_feature: 68
acgtctgaactccagtcacaacgttccatctcgtatgccgtatcagatcggaagagcagatcggaagagcacacgtctgaactccagtcacaacgt

SEQ ID NO: 20911 - DNA, 96 bp, Aspergillus viridinutans
  misc_feature: 67
tttaataatatatactttaatatactataataagatataataagatttaaatcttatcttatatacatttgattaaatatattatgctcaatagtt

SEQ ID NO: 20912 - DNA, 96 bp, Aspergillus viridinutans
  misc_feature: 67
aaatatttaataatatatactttaatatactataataagatataataagatttaaatcttatcttatatacatttgattaaatatattatgctcaa

SEQ ID NO: 20913 - DNA, 96 bp, Aspergillus viridinutans
  misc_feature: 67
ttctattattattatatctcggtttattaatgtattattagtattattatttaaattaatcttatttttttataataatttaggttataaaactta

SEQ ID NO: 20914 - DNA, 96 bp, Aspergillus viridinutans
  misc_feature: 67
gattcattctattattattatatctcggtttattaatgtattattagtattattatttaaattaatcttatttttttataataatttaggttataa

SEQ ID NO: 20915 - DNA, 96 bp, Aspergillus viridinutans
  misc_feature: 67
ctgaactccagtcacaacgttccatctcgtatgccgtatcagatcggaagagcagatcggaagagcacacgtctgaactccagtcacaacgttcca

SEQ ID NO: 20916 - DNA, 96 bp, Aspergillus viridinutans
  misc_feature: 67
ctcttccgatcagatcggaagagcgtcgtgtagggaaagagtgtagtactccgtgtagatctcggtggtcgccgtatcattaaaaaaaaaaaaaga

SEQ ID NO: 20917 - DNA, 96 bp, Aspergillus viridinutans
  misc_feature: 67
tctgaactccagtcacaacgttccatctcgtatgccgtatcagatcggaagagcagatcggaagagcacacgtctgaactccagtcacaacgttcc

SEQ ID NO: 20918 - DNA, 96 bp, Aspergillus viridinutans
  misc_feature: 67
tcggaagagcacacgtctgaactccagtcacaacgttccatctcgtatgccgtcttctgcttgaaaaaaaaaacgtctgaactccagtcacaacgt

SEQ ID NO: 20919 - DNA, 96 bp, Aspergillus viridinutans
  misc_feature: 67
aaatactatggtattgaatcaatatcctgactagatgatgattcaatatcaaatactatggtattgaatcgatatcctgactagatgatgattcga

SEQ ID NO: 20920 - DNA, 96 bp, Aspergillus viridinutans
  misc_feature: 67
tcaatatcctgactagatgatgattcaatatcaaatactatggtattgaatcgatatcctgactagatgatgattcgatatcaaatactatggtat

SEQ ID NO: 20921 - DNA, 96 bp, Aspergillus viridinutans
  misc_feature: 67
tatttaataatatatactttaatatactataataagatataataagatttaaatcttatcttatatacatttgattaaatatattatgctcaatag

SEQ ID NO: 20922 - DNA, 96 bp, Aspergillus viridinutans
  misc_feature: 67
tatataagataagatttaaatcttattatatcttattatagtatattaaagtatatattattaaatatttacttgttattttataataaaataata

SEQ ID NO: 20923 - DNA, 96 bp, Aspergillus viridinutans
  misc_feature: 67
taaatatggttaataatacgattacttgtatgtaatgtatatattattttattataaaataacaagtaaatatttaataatatatactttaatata

SEQ ID NO: 20924 - DNA, 96 bp, Aspergillus viridinutans
  misc_feature: 67
atacgattacttgtatgtaatgtatatattattttattataaaataacaagtaaatatttaataatatatactttaatatactataataagatata

SEQ ID NO: 20925 - DNA, 96 bp, Aspergillus viridinutans
  misc_feature: 67
aaaaaatataaataagttttataacctaaattattataaaaaaataagattaatttaaataataatactaataatacattaataaaccgagatata

SEQ ID NO: 20926 - DNA, 96 bp, Aspergillus viridinutans
  misc_feature: 67
atggttaataatacgattacttgtatgtaatgtatatattattttattataaaataacaagtaaatatttaataatatatactttaatatactata

SEQ ID NO: 20927 - DNA, 96 bp, Aspergillus viridinutans
  misc_feature: 67
tactttaatatactataataagatataataagatttaaatcttatcttatatacatttgattaaatatattatgctcaatagtttaaatactatta

SEQ ID NO: 20928 - DNA, 96 bp, Aspergillus viridinutans
  misc_feature: 67
acgtctgaactccagtcacaacgttccatctcgtatgccgtcttctgcttgaaaaaaaaacacgtctgaactccagtcacaacgttccatctcgta

SEQ ID NO: 20929 - DNA, 96 bp, Aspergillus viridinutans
  misc_feature: 67
atcaacaggcatcaacaggcatcaacaggcatcaacaggcatcaacaggcatcaacaggcatcaacaggcatcaacaggcatcaacaggcatcaac

SEQ ID NO: 20930 - DNA, 96 bp, Aspergillus viridinutans
  misc_feature: 67
gtcacaacgttccatctcgtatgccgtatcatgctcggaagagcacacgtctgaactccagtcacaacgttccatctcgtatgccgtcttctgctt

SEQ ID NO: 20931 - DNA, 96 bp, Aspergillus viridinutans
  misc_feature: 67
aagataagatttaaatcttattatatcttattatagtatattaaagtatatattattaaatatttacttgttattttataataaaataatatatac

SEQ ID NO: 20932 - DNA, 96 bp, Aspergillus viridinutans
  misc_feature: 67
gaagagcacacgtctgaactccagtcacaacgttccatctcgtatgccgtcttctgcttgaaaaaaaaaacgtctgaactccagtcacaacgttcc

SEQ ID NO: 20933 - DNA, 96 bp, Aspergillus viridinutans
  misc_feature: 67
gatcggaagagcacacgtctgaactccagtcacaacgttccatctcgtatgccgtatcagaccggaagagcacacgtctgaactccagtcacaacg

SEQ ID NO: 20934 - DNA, 96 bp, Aspergillus viridinutans
  misc_feature: 67
gatcggaagagcacacgtctgaactccagtcacaacgttccatctcgtatgccgtagatcgcaagagcacacgtctgaactccagtcacaacgttc

SEQ ID NO: 20935 - DNA, 96 bp, Aspergillus viridinutans
  misc_feature: 67
gataagatttaaatcttattatatcttattatagtatattaaagtatatattattaaatatttacttgttattttataataaaataatatatacat

SEQ ID NO: 20936 - DNA, 96 bp, Aspergillus viridinutans
  misc_feature: 67
aataagttttataacctaaattattataaaaaaataagattaatttaaataataatactaataatacattaataaaccgagatataataataatag

SEQ ID NO: 20937 - DNA, 96 bp, Aspergillus viridinutans
  misc_feature: 67
attgtatataattaattcattattttcataaatataatttgttaataaaaaatataaataagttttataacctaaattattataaaaaaataagat

SEQ ID NO: 20938 - DNA, 96 bp, Aspergillus viridinutans
  misc_feature: 67
aatatttaataatatatactttaatatactataataagatataataagatttaaatcttatcttatatacatttgattaaatatattatgctcaat

SEQ ID NO: 20939 - DNA, 96 bp, Aspergillus viridinutans
  misc_feature: 67
ataagatttaaatcttattatatcttattatagtatattaaagtatatattattaaatatttacttgttattttataataaaataatatatacatt

SEQ ID NO: 20940 - DNA, 96 bp, Aspergillus viridinutans
  misc_feature: 67
aaatgtatataagataaaatttaaatcttattatatcttattatattttaatgttttacaatatatagctataaattaattaattaattaatttat

SEQ ID NO: 20941 - DNA, 96 bp, Aspergillus viridinutans
  misc_feature: 67
aactattaagtataatatatttaatcaaatgtatataagataaaatttaaatcttattatatcttattatattttaatgttttacaatatatagct

SEQ ID NO: 20942 - DNA, 96 bp, Aspergillus viridinutans
  misc_feature: 67
aatgtatataagataaaatttaaatcttattatatcttattatattttaatgttttacaatatatagctataaattaattaattaattaatttatt

SEQ ID NO: 20943 - DNA, 96 bp, Aspergillus viridinutans
  misc_feature: 67
aagaataatatctaattaagagtagaagttagattaataattattaatattaatttaaacttattaaaataactttaataacttctaatttatctt

SEQ ID NO: 20944 - DNA, 96 bp, Aspergillus viridinutans
  misc_feature: 66
aatactatggtatcaatattcatactaggtgatcattcgatatcaaatactatggtattgaatcaatatcctgactagatgatgattcaatatcaa

SEQ ID NO: 20945 - DNA, 96 bp, Aspergillus viridinutans
  misc_feature: 66
ataaataagttttataacctaaattattataaaaaaataagattaatttaaataataatactaataatacattaataaaccgagatataataataa

SEQ ID NO: 20946 - DNA, 96 bp, Aspergillus viridinutans
  misc_feature: 66
ttatgattaagagatcaaatggaaggttaattgtatttacaatttgtatttacaattattttaattactataattattttctttattagttaaggt

SEQ ID NO: 20947 - DNA, 96 bp, Aspergillus viridinutans
  misc_feature: 66
tataatttgttaataaaaaatataaataagttttataacctaaattattataaaaaaataagattaatttaaataataatactaataatacattaa

SEQ ID NO: 20948 - DNA, 96 bp, Aspergillus viridinutans
  misc_feature: 66
tagaagttagatttaataattattaatattagtttaaacttattaaaataactttaataactcctaatttatctttctttaaggttaaattattaa

SEQ ID NO: 20949 - DNA, 96 bp, Aspergillus viridinutans
  misc_feature: 66
ttaataatatatactttaatatactataataagatataataagatttaaatcttatcttatatacatttgattaaatatattatgctcaatagttt

SEQ ID NO: 20950 - DNA, 96 bp, Aspergillus viridinutans
  misc_feature: 66
tcaacaggcatcaacaggcatcaacaggcatcaacaggcatcaacaggcatcaacaggcatcaacaggcatcaacaggcatcaacaggcatcaaca

SEQ ID NO: 20951 - DNA, 96 bp, Aspergillus viridinutans
  misc_feature: 66
agataagatttaaatcttattatatcttattatagtatattaaagtatatattattaaatatttacttgttattttataataaaataatatataca

SEQ ID NO: 20952 - DNA, 96 bp, Aspergillus viridinutans
  misc_feature: 66
tgaactccagtcacaacgttccatctcgtatgccgtgatcggcagagcacacgtctgaactccagtcacaacgttccatctcgtatgccgtcttct

SEQ ID NO: 20953 - DNA, 96 bp, Aspergillus viridinutans
  misc_feature: 66
tgaactccagtcacaacgttccatctcgtatgccgtcttctgcttgaaaaaaaaacacgtctgaactccagtcacaacgttccatctcgtatgccg

SEQ ID NO: 20954 - DNA, 96 bp, Aspergillus viridinutans
  misc_feature: 66
tcttccgatcagatcggaagagcgtcgtgtagggaaagagtgtagtactccgtgtagatctcggtggtcgccgtatcattaaaaaaaaaaaaaaag

SEQ ID NO: 20955 - DNA, 96 bp, Aspergillus viridinutans
  misc_feature: 66
aattgtatataattaattcattattttcataaatataatttgttaataaaaaatataaataagttttataacctaaattattataaaaaaataaga

SEQ ID NO: 20956 - DNA, 96 bp, Aspergillus viridinutans
  misc_feature: 66
tctgaactccagtcacaacgttccatctcgtatgccgtcttctgcttgaaaaaaaaacacgtctgaactccagtcacaacgttccatctcgtatgc

SEQ ID NO: 20957 - DNA, 96 bp, Aspergillus viridinutans
  misc_feature: 66
tcattctattattattatatctcggtttattaatgtattattagtattattatttaaattaatcttatttttttataataatttaggttataaaac

SEQ ID NO: 20958 - DNA, 96 bp, Aspergillus viridinutans
  misc_feature: 66
tcacaacgttccatctcgtatgccgtatcatgctcggaagagcacacgtctgaactccagtcacaacgttccatctcgtatgccgtcttctgcttg

SEQ ID NO: 20959 - DNA, 96 bp, Aspergillus viridinutans
  misc_feature: 66
aaataagttttataacctaaattattataaaaaaataagattaatttaaataataatactaataatacattaataaaccgagatataataataata

SEQ ID NO: 20960 - DNA, 96 bp, Aspergillus viridinutans
  misc_feature: 66
tatggttaataatacgattacttgtatgtaatgtatatattattttattataaaataacaagtaaatatttaataatatatactttaatatactat

SEQ ID NO: 20961 - DNA, 96 bp, Aspergillus viridinutans
  misc_feature: 66
tatgattaagagatcaaatggaaggttaattgtatttacaatttgtatttacaattattttaattactataattattttctttattagttaaggtt

SEQ ID NO: 20962 - DNA, 96 bp, Aspergillus viridinutans
  misc_feature: 66
agattcattctattattattatatctcggtttattaatgtattattagtattattatttaaattaatcttatttttttataataatttaggttata

SEQ ID NO: 20963 - DNA, 96 bp, Aspergillus viridinutans
  misc_feature: 66
atatactttaatatactataataagatataataagatttaaatcttatcttatatacatttgattaaatatattatgctcaatagtttaaatacta

SEQ ID NO: 20964 - DNA, 96 bp, Aspergillus viridinutans
  misc_feature: 66
taaataagttttataacctaaattattataaaaaaataagattaatttaaataataatactaataatacattaataaaccgagatataataataat

SEQ ID NO: 20965 - DNA, 96 bp, Aspergillus viridinutans
  misc_feature: 66
gtctgaactccagtcacaacgttccatctcgtatgccgtcttctgcttgaaaaaaaaacacgtctgaactccagtcacaacgttccatctcgtatg

SEQ ID NO: 20966 - DNA, 96 bp, Aspergillus viridinutans
  misc_feature: 66
gtcataagattcattctattattattatatctcggtttattaatgtattattagtattattatttaaattaatcttatttttttataataatttag

SEQ ID NO: 20967 - DNA, 96 bp, Aspergillus viridinutans
  misc_feature: 66
ctgaactccagtcacaacgttccatctcgtatgccgtcttctgcttgaaaaaaaaacacgtctgaactccagtcacaacgttccatctcgtatgcc

SEQ ID NO: 20968 - DNA, 96 bp, Aspergillus viridinutans
  misc_feature: 66
aaactattaagtataatatatttaatcaaatgtatataagataaaatttaaatcttattatatcttattatattttaatgttttacaatatatagc

SEQ ID NO: 20969 - DNA, 96 bp, Aspergillus viridinutans
  misc_feature: 66
acaggcatcaacaggcatcaacaggcatcaacaggcatcaacaggcatcaacaggcatcaacaggcatcaacaggcatcaacaggcatcaacaggc

SEQ ID NO: 20970 - DNA, 96 bp, Aspergillus viridinutans
  misc_feature: 66
aactccagtcacaacgttccatctcgtatgccgtgatcggcagagcacacgtctgaactccagtcacaacgttccatctcgtatgccgtcttctgc

SEQ ID NO: 20971 - DNA, 96 bp, Aspergillus viridinutans
  misc_feature: 66
gcacacgtctgaactccagtcacaacgttccatctcgtatgccgtcttctgcttgaaaaaaaaacacgtctgaactccagtcacaacgttccatct

SEQ ID NO: 20972 - DNA, 96 bp, Aspergillus viridinutans
  misc_feature: 66
gcacacgtctgaactccagtcacaacgttccatctcgtatgccgtatcattgatcggaagaacacacgtctgaactccagtcacaacgttccatct

SEQ ID NO: 20973 - DNA, 96 bp, Aspergillus viridinutans
  misc_feature: 66
agcacacgtctgaactccagtcacaacgttccatctcgtatgccgtcttctgcttgaaaaaaaaacacgtctgaactccagtcacaacgttccatc

SEQ ID NO: 20974 - DNA, 96 bp, Aspergillus viridinutans
  misc_feature: 66
gatcggaagagcacacgtctgaactccagtcacaacgttccatctcgtatgccgtcttctgcttgaaaaaaaaaatgaactccagtcacaacgttc

SEQ ID NO: 20975 - DNA, 96 bp, Aspergillus viridinutans
  misc_feature: 66
gagcacacgtctgaactccagtcacaacgttccatctcgtatgccgtcttctgcttgaaaaaaaaacacgtctgaactccagtcacaacgttccat

SEQ ID NO: 20976 - DNA, 96 bp, Aspergillus viridinutans
  misc_feature: 66
cacacgtctgaactccagtcacaacgttccatctcgtatgccgtcttctgcttgaaaaaaaaacacgtctgaactccagtcacaacgttccatctc

SEQ ID NO: 20977 - DNA, 96 bp, Aspergillus viridinutans
  misc_feature: 66
cacacgtctgaactccagtcacaacgttccatctcgtatgccgtatcattgatcggaagaacacacgtctgaactccagtcacaacgttccatctc

SEQ ID NO: 20978 - DNA, 96 bp, Aspergillus viridinutans
  misc_feature: 66
aactccagtcacaacgttccatctcgtatgccgtatcattgatcggaagagcacacgtctgaactccagtcacaacgttccaactcgtatgccgtc

SEQ ID NO: 20979 - DNA, 96 bp, Aspergillus viridinutans
  misc_feature: 66
gaatcaatatcctgactagatgatgattcaatatcaaatactatggtattgaatcgatatcctgactagatgatgattcgatatcaaatactatgg

SEQ ID NO: 20980 - DNA, 96 bp, Aspergillus viridinutans
  misc_feature: 66
gaactccagtcacaacgttccatctcgtatgccgtgatcggcagagcacacgtctgaactccagtcacaacgttccatctcgtatgccgtcttctg

SEQ ID NO: 20981 - DNA, 96 bp, Aspergillus viridinutans
  misc_feature: 66
cgtctgaactccagtcacaacgttccatctcgtatgccgtcttctgcttgaaaaaaaaacacgtctgaactccagtcacaacgttccatctcgtat

SEQ ID NO: 20982 - DNA, 96 bp, Aspergillus viridinutans
  misc_feature: 66
cggaagagcacacgtctgaactccagtcacaacgttccatctcgtatgccgtcttctgcttgaaaaaaaaaaagaactccagtcacaacgttccat

SEQ ID NO: 20983 - DNA, 96 bp, Aspergillus viridinutans
  misc_feature: 66
acacgtctgaactccagtcacaacgttccatctcgtatgccgtcttctgcttgaaaaaaaaacacgtctgaactccagtcacaacgttccatctcg

SEQ ID NO: 20984 - DNA, 96 bp, Aspergillus viridinutans
  misc_feature: 66
cacgtctgaactccagtcacaacgttccatctcgtatgccgtcttctgcttgaaaaaaaaacacgtctgaactccagtcacaacgttccatctcgt

SEQ ID NO: 20985 - DNA, 96 bp, Aspergillus viridinutans
  misc_feature: 66
cacaacgttccatctcgtatgccgtatcattagatcggaagagcacacgtctgaactccagtcacaacgttccatctcgtatgccgtcttctgctt

SEQ ID NO: 20986 - DNA, 96 bp, Aspergillus viridinutans
  misc_feature: 66
attctattattattatatctcggtttattaatgtattattagtattattatttaaattaatcttatttttttataataatttaggttataaaactt

SEQ ID NO: 20987 - DNA, 96 bp, Aspergillus viridinutans
  misc_feature: 66
agaagttagatttaataattattaatattagtttaaacttattaaaataactttaataactcctaatttatctttctttaaggttaaattattaat

SEQ ID NO: 20988 - DNA, 96 bp, Aspergillus viridinutans
  misc_feature: 66
atcgatatcctgactagatgatgattcgatatcaaatactatggtattgaatcgatatcctgactagatgatgaggaatactatggtatcaatatt

SEQ ID NO: 20989 - DNA, 96 bp, Aspergillus viridinutans
  misc_feature: 66
aagattcattctattattattatatctcggtttattaatgtattattagtattattatttaaattaatcttatttttttataataatttaggttat

SEQ ID NO: 20990 - DNA, 96 bp, Aspergillus viridinutans
  misc_feature: 66
aatatggttaataatacgattacttgtatgtaatgtatatattattttattataaaataacaagtaaatatttaataatatatactttaatatact

SEQ ID NO: 20991 - DNA, 96 bp, Aspergillus viridinutans
  misc_feature: 66
actccagtcacaacgttccatctcgtatgccgtgatcggcagagcacacgtctgaactccagtcacaacgttccatctcgtatgccgtcttctgct

SEQ ID NO: 20992 - DNA, 96 bp, Aspergillus viridinutans
  misc_feature: 66
agaataatatctaattaagagtagaagttagattaataattattaatattaatttaaacttattaaaataactttaataacttctaatttatcttt

SEQ ID NO: 20993 - DNA, 96 bp, Aspergillus viridinutans
  misc_feature: 65
tcacaacgttccatctcggatcggaagagcacacgtctgaactccagtcacaacgttccatctcgtatgccgtcttctgcttgaaaaaaaaaaaaa

SEQ ID NO: 20994 - DNA, 96 bp, Aspergillus viridinutans
  misc_feature: 65
ttcattctattattattatatctcggtttattaatgtattattagtattattatttaaattaatcttatttttttataataatttaggttataaaa

SEQ ID NO: 20995 - DNA, 96 bp, Aspergillus viridinutans
  misc_feature: 65
attcattctattattattatatctcggtttattaatgtattattagtattattatttaaattaatcttatttttttataataatttaggttataaa

SEQ ID NO: 20996 - DNA, 96 bp, Aspergillus viridinutans
  misc_feature: 65
caaccatttaagtaaggtaaccttaactaataaagaaaataattatagtaattaaaataattgtaaatacaaattgtaaatacaattaaccttcca

SEQ ID NO: 20997 - DNA, 96 bp, Aspergillus viridinutans
  misc_feature: 65
aataatacgattacttgtatgtaatgtatatattattttattataaaataacaagtaaatatttaataatatatactttaatatactataataaga

SEQ ID NO: 20998 - DNA, 96 bp, Aspergillus viridinutans
  misc_feature: 65
taagataagatttaaatcttattatatcttattatagtatattaaagtatatattattaaatatttacttgttattttataataaaataatatata

SEQ ID NO: 20999 - DNA, 96 bp, Aspergillus viridinutans
  misc_feature: 65
atatggttaataatacgattacttgtatgtaatgtatatattattttattataaaataacaagtaaatatttaataatatatactttaatatacta

SEQ ID NO: 21000 - DNA, 96 bp, Aspergillus viridinutans
  misc_feature: 65
agcacacgtctgaactccagtcacaacgttccatctcgtatgccgtagatcgcaagagcacacgtctgaactccagtcacaacgttccatctcgta

SEQ ID NO: 21001 - DNA, 96 bp, Aspergillus viridinutans
  misc_feature: 65
taataatatatactttaatatactataataagatataataagatttaaatcttatcttatatacatttgattaaatatattatgctcaatagttta

SEQ ID NO: 21002 - DNA, 96 bp, Aspergillus viridinutans
  misc_feature: 65
atgtatataagataaaatttaaatcttattatatcttattatattttaatgttttacaatatatagctataaattaattaattaattaatttatta

SEQ ID NO: 21003 - DNA, 96 bp, Aspergillus viridinutans
  misc_feature: 65
agtcataagattcattctattattattatatctcggtttattaatgtattattagtattattatttaaattaatcttatttttttataataattta

SEQ ID NO: 21004 - DNA, 96 bp, Aspergillus viridinutans
  misc_feature: 65
atatatactttaatatactataataagatataataagatttaaatcttatcttatatacatttgattaaatatattatgctcaatagtttaaatac

SEQ ID NO: 21005 - DNA, 96 bp, Aspergillus viridinutans
  misc_feature: 65
cacgtctgaactccagtcacaacgttccatctcgtatgccgtagatcgcaagagcacacgtctgaactccagtcacaacgttccatctcgtatgcc

SEQ ID NO: 21006 - DNA, 96 bp, Aspergillus viridinutans
  misc_feature: 65
ggaagagcacacgtctgaactccagtcacaacgttccatctcgtatgccgtcttctgcttgaaaaaaaaaaagaactccagtcacaacgttccatc

SEQ ID NO: 21007 - DNA, 96 bp, Aspergillus viridinutans
  misc_feature: 65
ggaagagcacacgtctgaactccagtcacaacgttccatctcgtatgccgtagatcgcaagagcacacgtctgaactccagtcacaacgttccatc

SEQ ID NO: 21008 - DNA, 96 bp, Aspergillus viridinutans
  misc_feature: 65
atcggaagagcacacgtctgaactccagtcacaacgttccatctcgtatgccgtcttctgcttgaaaaaaaaaatgaactccagtcacaacgttcc

SEQ ID NO: 21009 - DNA, 96 bp, Aspergillus viridinutans
  misc_feature: 65
acacgtctgaactccagtcacaacgttccatctcgtatgccgtagatcgcaagagcacacgtctgaactccagtcacaacgttccatctcgtatgc

SEQ ID NO: 21010 - DNA, 96 bp, Aspergillus viridinutans
  misc_feature: 65
gcacacgtctgaactccagtcacaacgttccatctcgtatgccgtagatcgcaagagcacacgtctgaactccagtcacaacgttccatctcgtat

SEQ ID NO: 21011 - DNA, 96 bp, Aspergillus viridinutans
  misc_feature: 65
gagcacacgtctgaactccagtcacaacgttccatctcgtatgccgtagatcgcaagagcacacgtctgaactccagtcacaacgttccatctcgt

SEQ ID NO: 21012 - DNA, 96 bp, Aspergillus viridinutans
  misc_feature: 65
aagagcacacgtctgaactccagtcacaacgttccatctcgtatgccgtagatcgcaagagcacacgtctgaactccagtcacaacgttccatctc

SEQ ID NO: 21013 - DNA, 96 bp, Aspergillus viridinutans
  misc_feature: 65
gaataatatctaattaagagtagaagttagattaataattattaatattaatttaaacttattaaaataactttaataacttctaatttatctttc

SEQ ID NO: 21014 - DNA, 96 bp, Aspergillus viridinutans
  misc_feature: 65
gaagagcacacgtctgaactccagtcacaacgttccatctcgtatgccgtagatcgcaagagcacacgtctgaactccagtcacaacgttccatct

SEQ ID NO: 21015 - DNA, 96 bp, Aspergillus viridinutans
  misc_feature: 65
gaactccagtcacaacgttccatctcgtatgccgtcttctgcttgaaaaaaaaacacgtctgaactccagtcacaacgttccatctcgtatgccgt

SEQ ID NO: 21016 - DNA, 96 bp, Aspergillus viridinutans
  misc_feature: 65
cgtctgaactccagtcacaacgttccatctcgtatgccgtagatcgcaagagcacacgtctgaactccagtcacaacgttccatctcgtatgccgt

SEQ ID NO: 21017 - DNA, 96 bp, Aspergillus viridinutans
  misc_feature: 65
acgtctgaactccagtcacaacgttccatctcgtatgccgtagatcgcaagagcacacgtctgaactccagtcacaacgttccatctcgtatgccg

SEQ ID NO: 21018 - DNA, 96 bp, Aspergillus viridinutans
  misc_feature: 65
cggaagagcacacgtctgaactccagtcacaacgttccatctcgtatgccgtagatcgcaagagcacacgtctgaactccagtcacaacgttccat

SEQ ID NO: 21019 - DNA, 96 bp, Aspergillus viridinutans
  misc_feature: 65
acacgtctgaactccagtcacaacgttccatctcgtatgccgtatcattgatcggaagaacacacgtctgaactccagtcacaacgttccatctcg

SEQ ID NO: 21020 - DNA, 96 bp, Aspergillus viridinutans
  misc_feature: 65
agagcacacgtctgaactccagtcacaacgttccatctcgtatgccgtagatcgcaagagcacacgtctgaactccagtcacaacgttccatctcg

SEQ ID NO: 21021 - DNA, 96 bp, Aspergillus viridinutans
  misc_feature: 65
cattctattattattatatctcggtttattaatgtattattagtattattatttaaattaatcttatttttttataataatttaggttataaaact

SEQ ID NO: 21022 - DNA, 96 bp, Aspergillus viridinutans
  misc_feature: 65
cacacgtctgaactccagtcacaacgttccatctcgtatgccgtagatcgcaagagcacacgtctgaactccagtcacaacgttccatctcgtatg

SEQ ID NO: 21023 - DNA, 96 bp, Aspergillus viridinutans
  misc_feature: 65
cacgtctgaactccagtcacaacgttccatctcgtatgccgtatcattgatcggaagaacacacgtctgaactccagtcacaacgttccatctcgt

SEQ ID NO: 21024 - DNA, 96 bp, Aspergillus viridinutans
  misc_feature: 65
atttaataatatatactttaatatactataataagatataataagatttaaatcttatcttatatacatttgattaaatatattatgctcaatagt

SEQ ID NO: 21025 - DNA, 96 bp, Aspergillus viridinutans
  misc_feature: 65
ataatttgttaataaaaaatataaataagttttataacctaaattattataaaaaaataagattaatttaaataataatactaataatacattaat

SEQ ID NO: 21026 - DNA, 96 bp, Aspergillus viridinutans
  misc_feature: 65
atataagataagatttaaatcttattatatcttattatagtatattaaagtatatattattaaatatttacttgttattttataataaaataatat

SEQ ID NO: 21027 - DNA, 96 bp, Aspergillus viridinutans
  misc_feature: 65
aatacgattacttgtatgtaatgtatatattattttattataaaataacaagtaaatatttaataatatatactttaatatactataataagatat

SEQ ID NO: 21028 - DNA, 96 bp, Aspergillus viridinutans
  misc_feature: 65
actttaatatactataataagatataataagatttaaatcttatcttatatacatttgattaaatatattatgctcaatagtttaaatactattat

SEQ ID NO: 21029 - DNA, 96 bp, Aspergillus viridinutans
  misc_feature: 65
aaagaataatatctaattaagagtagaagttagattaataattattaatattaatttaaacttattaaaataactttaataacttctaatttatct

SEQ ID NO: 21030 - DNA, 96 bp, Aspergillus viridinutans
  misc_feature: 64
tcttccgatctgatcggaagagcgtcgtgtagggaaagagtgtagtactccgtgtagatctcggtggtcgccgtatcattaaaaaaaaaaaaaaaa

SEQ ID NO: 21031 - DNA, 96 bp, Aspergillus viridinutans
  misc_feature: 64
cacacgtctgaactccagatcggaagagcacacgtctgaactccagtcacaacgttccatctcgtatgccgtcttctgcttgaaaaaaaaaaaaaa

SEQ ID NO: 21032 - DNA, 96 bp, Aspergillus viridinutans
  misc_feature: 64
atactatggtatcaatattcatactaggtgatcattcgatatcaaatactatggtattgaatcaatatcctgactagatgatgattcaatatcaaa

SEQ ID NO: 21033 - DNA, 96 bp, Aspergillus viridinutans
  misc_feature: 64
catcaacaggcatcaacaggcatcaacaggcatcaacaggcatcaacaggcatcaacaggcatcaacaggcatcaacaggcatcaacaggcatcaa

SEQ ID NO: 21034 - DNA, 96 bp, Aspergillus viridinutans
  misc_feature: 64
ttgaatcaatatcctgactagatgatgattcaatatcaaatactatggtattgaatcgatatcctgactagatgatgattcgatatcaaatactat

SEQ ID NO: 21035 - DNA, 96 bp, Aspergillus viridinutans
  misc_feature: 64
tcaattgtatataattaattcattattttcataaatataatttgttaataaaaaatataaataagttttataacctaaattattataaaaaaataa

SEQ ID NO: 21036 - DNA, 96 bp, Aspergillus viridinutans
  misc_feature: 64
tgtatataagataagatttaaatcttattatatcttattatagtatattaaagtatatattattaaatatttacttgttattttataataaaataa

SEQ ID NO: 21037 - DNA, 96 bp, Aspergillus viridinutans
  misc_feature: 64
gattacttgtatgtaatgtatatattattttattataaaataacaagtaaatatttaataatatatactttaatatactataataagatataataa

SEQ ID NO: 21038 - DNA, 96 bp, Aspergillus viridinutans
  misc_feature: 64
tacgattacttgtatgtaatgtatatattattttattataaaataacaagtaaatatttaataatatatactttaatatactataataagatataa

SEQ ID NO: 21039 - DNA, 96 bp, Aspergillus viridinutans
  misc_feature: 64
aaaaatataaataagttttataacctaaattattataaaaaaataagattaatttaaataataatactaataatacattaataaaccgagatataa

SEQ ID NO: 21040 - DNA, 96 bp, Aspergillus viridinutans
  misc_feature: 64
aataatatatactttaatatactataataagatataataagatttaaatcttatcttatatacatttgattaaatatattatgctcaatagtttaa

SEQ ID NO: 21041 - DNA, 96 bp, Aspergillus viridinutans
  misc_feature: 64
tcggaagagcacacgtctgaactccagtcacaacgttccatctcgtatgccgtcttctgcttgaaaaaaaaaatgaactccagtcacaacgttcca

SEQ ID NO: 21042 - DNA, 96 bp, Aspergillus viridinutans
  misc_feature: 64
taaatatttaataatatatactttaatatactataataagatataataagatttaaatcttatcttatatacatttgattaaatatattatgctca

SEQ ID NO: 21043 - DNA, 96 bp, Aspergillus viridinutans
  misc_feature: 64
tgaatcaatatcctgactagatgatgattcaatatcaaatactatggtattgaatcgatatcctgactagatgatgattcgatatcaaatactatg

SEQ ID NO: 21044 - DNA, 96 bp, Aspergillus viridinutans
  misc_feature: 64
tgaactccagtcacaacgttccatctcgtatgccgtatcagatcggaagagcagatcggaagagcacacgtctgaactccagtcacaacgttccat

SEQ ID NO: 21045 - DNA, 96 bp, Aspergillus viridinutans
  misc_feature: 64
actccagtcacaacgttccatctcgtatgccgtagatcggaagagcacacgtctgaactccagtcacaacgttccatctcgtatgccgtatcatga

SEQ ID NO: 21046 - DNA, 96 bp, Aspergillus viridinutans
  misc_feature: 64
attgtatttacaatttgtatttacaattattttaattactataattattttctttattagttaaggttaccttacttaaatggttgtacacaaata

SEQ ID NO: 21047 - DNA, 96 bp, Aspergillus viridinutans
  misc_feature: 64
tataaataagttttataacctaaattattataaaaaaataagattaatttaaataataatactaataatacattaataaaccgagatataataata

SEQ ID NO: 21048 - DNA, 96 bp, Aspergillus viridinutans
  misc_feature: 64
aaatataaataagttttataacctaaattattataaaaaaataagattaatttaaataataatactaataatacattaataaaccgagatataata

SEQ ID NO: 21049 - DNA, 96 bp, Aspergillus viridinutans
  misc_feature: 64
gttaataatacgattacttgtatgtaatgtatatattattttattataaaataacaagtaaatatttaataatatatactttaatatactataata

SEQ ID NO: 21050 - DNA, 96 bp, Aspergillus viridinutans
  misc_feature: 64
tatggtatcaatattcatactaggtgatcattcgatatcaaatactatggtattgaatcaatatcctgactagatgatgattcaatatcaaatact

SEQ ID NO: 21051 - DNA, 96 bp, Aspergillus viridinutans
  misc_feature: 64
taatacgattacttgtatgtaatgtatatattattttattataaaataacaagtaaatatttaataatatatactttaatatactataataagata

SEQ ID NO: 21052 - DNA, 96 bp, Aspergillus viridinutans
  misc_feature: 64
tataagataagatttaaatcttattatatcttattatagtatattaaagtatatattattaaatatttacttgttattttataataaaataatata

SEQ ID NO: 21053 - DNA, 96 bp, Aspergillus viridinutans
  misc_feature: 64
acgtctgaactccagtcacaacgttccatctcgtatgccgtatcattgatcggaagaacacacgtctgaactccagtcacaacgttccatctcgta

SEQ ID NO: 21054 - DNA, 96 bp, Aspergillus viridinutans
  misc_feature: 64
taaactattaagtataatatatttaatcaaatgtatataagataaaatttaaatcttattatatcttattatattttaatgttttacaatatatag

SEQ ID NO: 21055 - DNA, 96 bp, Aspergillus viridinutans
  misc_feature: 64
gtattgaatcaatatcctgactagatgatgattcaatatcaaatactatggtattgaatcgatatcctgactagatgatgattcgatatcaaatac

SEQ ID NO: 21056 - DNA, 96 bp, Aspergillus viridinutans
  misc_feature: 64
aaatatggttaataatacgattacttgtatgtaatgtatatattattttattataaaataacaagtaaatatttaataatatatactttaatatac

SEQ ID NO: 21057 - DNA, 96 bp, Aspergillus viridinutans
  misc_feature: 64
gtatataagataagatttaaatcttattatatcttattatagtatattaaagtatatattattaaatatttacttgttattttataataaaataat

SEQ ID NO: 21058 - DNA, 96 bp, Aspergillus viridinutans
  misc_feature: 64
ggtcaattgtatataattaattcattattttcataaatataatttgttaataaaaaatataaataagttttataacctaaattattataaaaaaat

SEQ ID NO: 21059 - DNA, 96 bp, Aspergillus viridinutans
  misc_feature: 64
acaaccatttaagtaaggtaaccttaactaataaagaaaataattatagtaattaaaataattgtaaatacaaattgtaaatacaattaaccttcc

SEQ ID NO: 21060 - DNA, 96 bp, Aspergillus viridinutans
  misc_feature: 64
ctccagtcacaacgttccatctcgtatgccgtagatcggaagagcacacgtctgaactccagtcacaacgttccatctcgtatgccgtatcatgat

SEQ ID NO: 21061 - DNA, 96 bp, Aspergillus viridinutans
  misc_feature: 64
cgtctgaactccagtcacaacgttccatctcgtatgccgtatcattgatcggaagaacacacgtctgaactccagtcacaacgttccatctcgtat

SEQ ID NO: 21062 - DNA, 96 bp, Aspergillus viridinutans
  misc_feature: 64
ccatttaagtaaggtaaccttaactaataaagaaaataattatagtaattaaaataattgtaaatacaaattgtaaatacaattaaccttccattt

SEQ ID NO: 21063 - DNA, 96 bp, Aspergillus viridinutans
  misc_feature: 64
aatagtcataagattcattctattattattatatctcggtttattaatgtattattagtattattatttaaattaatcttatttttttataataat

SEQ ID NO: 21064 - DNA, 96 bp, Aspergillus viridinutans
  misc_feature: 64
acgattacttgtatgtaatgtatatattattttattataaaataacaagtaaatatttaataatatatactttaatatactataataagatataat

SEQ ID NO: 21065 - DNA, 96 bp, Aspergillus viridinutans
  misc_feature: 64
attaatagtcataagattcattctattattattatatctcggtttattaatgtattattagtattattatttaaattaatcttatttttttataat

SEQ ID NO: 21066 - DNA, 96 bp, Aspergillus viridinutans
  misc_feature: 64
ataatacgattacttgtatgtaatgtatatattattttattataaaataacaagtaaatatttaataatatatactttaatatactataataagat

SEQ ID NO: 21067 - DNA, 96 bp, Aspergillus viridinutans
  misc_feature: 64
atagtcataagattcattctattattattatatctcggtttattaatgtattattagtattattatttaaattaatcttatttttttataataatt

SEQ ID NO: 21068 - DNA, 96 bp, Aspergillus viridinutans
  misc_feature: 64
actccagtcacaacgttccatctcgtatgccgtatcattgatcggaagagcacacgtctgaactccagtcacaacgttccaactcgtatgccgtct

SEQ ID NO: 21069 - DNA, 96 bp, Aspergillus viridinutans
  misc_feature: 64
accatttaagtaaggtaaccttaactaataaagaaaataattatagtaattaaaataattgtaaatacaaattgtaaatacaattaaccttccatt

SEQ ID NO: 21070 - DNA, 96 bp, Aspergillus viridinutans
  misc_feature: 63
agtcacaacgttccatctcgtatgccgtgatcggcagagcacacgtctgaactccagtcacaacgttccatctcgtatgccgtcttctgcttgaaa

SEQ ID NO: 21071 - DNA, 96 bp, Aspergillus viridinutans
  misc_feature: 63
taaatcttattatatcttattatagtatattaaagtatatattattaaatatttacttgttattttataataaaataatatatacattacatacaa

SEQ ID NO: 21072 - DNA, 96 bp, Aspergillus viridinutans
  misc_feature: 63
cagtcacaacgttccatctcgtatgccgtgatcggcagagcacacgtctgaactccagtcacaacgttccatctcgtatgccgtcttctgcttgaa

SEQ ID NO: 21073 - DNA, 96 bp, Aspergillus viridinutans
  misc_feature: 63
ttaataatacgattacttgtatgtaatgtatatattattttattataaaataacaagtaaatatttaataatatatactttaatatactataataa

SEQ ID NO: 21074 - DNA, 96 bp, Aspergillus viridinutans
  misc_feature: 63
ttaagtaaggtaaccttaactaataaagaaaataattatagtaattaaaataattgtaaatacaaattgtaaatacaattaaccttccatttgatc

SEQ ID NO: 21075 - DNA, 96 bp, Aspergillus viridinutans
  misc_feature: 63
aagagcacacgtctgaactccagtcacaacgttccatctcgtatgccgtcttctgcttgaaaaaaaaaacgtctgaactccagtcacaacgttcca

SEQ ID NO: 21076 - DNA, 96 bp, Aspergillus viridinutans
  misc_feature: 63
tcgatatcctgactagatgatgattcgatatcaaatactatggtattgaatcgatatcctgactagatgatgaggaatactatggtatcaatattc

SEQ ID NO: 21077 - DNA, 96 bp, Aspergillus viridinutans
  misc_feature: 63
tccagtcacaacgttccatctcgtatgccgtgatcggcagagcacacgtctgaactccagtcacaacgttccatctcgtatgccgtcttctgcttg

SEQ ID NO: 21078 - DNA, 96 bp, Aspergillus viridinutans
  misc_feature: 63
tccagtcacaacgttccatctcgtatgccgtagatcggaagagcacacgtctgaactccagtcacaacgttccatctcgtatgccgtatcatgatc

SEQ ID NO: 21079 - DNA, 96 bp, Aspergillus viridinutans
  misc_feature: 63
ccagtcacaacgttccatctcgtatgccgtgatcggcagagcacacgtctgaactccagtcacaacgttccatctcgtatgccgtcttctgcttga

SEQ ID NO: 21080 - DNA, 96 bp, Aspergillus viridinutans
  misc_feature: 63
gtcaattgtatataattaattcattattttcataaatataatttgttaataaaaaatataaataagttttataacctaaattattataaaaaaata

SEQ ID NO: 21081 - DNA, 96 bp, Aspergillus viridinutans
  misc_feature: 63
atgtatataagataagatttaaatcttattatatcttattatagtatattaaagtatatattattaaatatttacttgttattttataataaaata

SEQ ID NO: 21082 - DNA, 96 bp, Aspergillus viridinutans
  misc_feature: 63
aatatatactttaatatactataataagatataataagatttaaatcttatcttatatacatttgattaaatatattatgctcaatagtttaaata

SEQ ID NO: 21083 - DNA, 96 bp, Aspergillus viridinutans
  misc_feature: 63
cgattacttgtatgtaatgtatatattattttattataaaataacaagtaaatatttaataatatatactttaatatactataataagatataata

SEQ ID NO: 21084 - DNA, 96 bp, Aspergillus viridinutans
  misc_feature: 63
tatatactttaatatactataataagatataataagatttaaatcttatcttatatacatttgattaaatatattatgctcaatagtttaaatact

SEQ ID NO: 21085 - DNA, 96 bp, Aspergillus viridinutans
  misc_feature: 63
ctttaatatactataataagatataataagatttaaatcttatcttatatacatttgattaaatatattatgctcaatagtttaaatactattata

SEQ ID NO: 21086 - DNA, 96 bp, Aspergillus viridinutans
  misc_feature: 63
tagtcataagattcattctattattattatatctcggtttattaatgtattattagtattattatttaaattaatcttatttttttataataattt

SEQ ID NO: 21087 - DNA, 96 bp, Aspergillus viridinutans
  misc_feature: 63
atggtatcaatattcatactaggtgatcattcgatatcaaatactatggtattgaatcaatatcctgactagatgatgattcaatatcaaatacta

SEQ ID NO: 21088 - DNA, 96 bp, Aspergillus viridinutans
  misc_feature: 63
attgaatcaatatcctgactagatgatgattcaatatcaaatactatggtattgaatcgatatcctgactagatgatgattcgatatcaaatacta

SEQ ID NO: 21089 - DNA, 96 bp, Aspergillus viridinutans
  misc_feature: 63
tacttgtatgtaatgtatatattattttattataaaataacaagtaaatatttaataatatatactttaatatactataataagatataataagat

SEQ ID NO: 21090 - DNA, 96 bp, Aspergillus viridinutans
  misc_feature: 63
ggagtactacactctttccctacacgacgctcttccgatcgatcggaagagcacacgtctgaactccagtcacaacgttccatctcgtatgccgta

SEQ ID NO: 21091 - DNA, 96 bp, Aspergillus viridinutans
  misc_feature: 63
taagatttaaatcttattatatcttattatagtatattaaagtatatattattaaatatttacttgttattttataataaaataatatatacatta

SEQ ID NO: 21092 - DNA, 96 bp, Aspergillus viridinutans
  misc_feature: 63
taatatatactttaatatactataataagatataataagatttaaatcttatcttatatacatttgattaaatatattatgctcaatagtttaaat

SEQ ID NO: 21093 - DNA, 96 bp, Aspergillus viridinutans
  misc_feature: 63
atgattaagagatcaaatggaaggttaattgtatttacaatttgtatttacaattattttaattactataattattttctttattagttaaggtta

SEQ ID NO: 21094 - DNA, 96 bp, Aspergillus viridinutans
  misc_feature: 63
taaagaataatatctaattaagagtagaagttagattaataattattaatattaatttaaacttattaaaataactttaataacttctaatttatc

SEQ ID NO: 21095 - DNA, 96 bp, Aspergillus viridinutans
  misc_feature: 63
gtctgaactccagtcacaacgttccatctcggtggtcgcgatcggaagagcacacgtctgaactccagtcacaacgttccatctcgtatgccgtct

SEQ ID NO: 21096 - DNA, 96 bp, Aspergillus viridinutans
  misc_feature: 63
gtaaatatttaataatatatactttaatatactataataagatataataagatttaaatcttatcttatatacatttgattaaatatattatgctc

SEQ ID NO: 21097 - DNA, 96 bp, Aspergillus viridinutans
  misc_feature: 63
ggtatcaatattcatactaggtgatcattcgatatcaaatactatggtattgaatcaatatcctgactagatgatgattcaatatcaaatactatg

SEQ ID NO: 21098 - DNA, 96 bp, Aspergillus viridinutans
  misc_feature: 63
aagtaaatatttaataatatatactttaatatactataataagatataataagatttaaatcttatcttatatacatttgattaaatatattatgc

SEQ ID NO: 21099 - DNA, 96 bp, Aspergillus viridinutans
  misc_feature: 63
cgtctgaactccagtcacaacgttccatctcggtggtcgcgatcggaagagcacacgtctgaactccagtcacaacgttccatctcgtatgccgtc

SEQ ID NO: 21100 - DNA, 96 bp, Aspergillus viridinutans
  misc_feature: 63
attacttgtatgtaatgtatatattattttattataaaataacaagtaaatatttaataatatatactttaatatactataataagatataataag

SEQ ID NO: 21101 - DNA, 96 bp, Aspergillus viridinutans
  misc_feature: 63
ctccagtcacaacgttccatctcgtatgccgtgatcggcagagcacacgtctgaactccagtcacaacgttccatctcgtatgccgtcttctgctt

SEQ ID NO: 21102 - DNA, 96 bp, Aspergillus viridinutans
  misc_feature: 63
ccagtcacaacgttccatctcgtatgccgtagatcggaagagcacacgtctgaactccagtcacaacgttccatctcgtatgccgtatcatgatcg

SEQ ID NO: 21103 - DNA, 96 bp, Aspergillus viridinutans
  misc_feature: 63
aatgtatataagataagatttaaatcttattatatcttattatagtatattaaagtatatattattaaatatttacttgttattttataataaaat

SEQ ID NO: 21104 - DNA, 96 bp, Aspergillus viridinutans
  misc_feature: 63
atataaataagttttataacctaaattattataaaaaaataagattaatttaaataataatactaataatacattaataaaccgagatataataat

SEQ ID NO: 21105 - DNA, 96 bp, Aspergillus viridinutans
  misc_feature: 63
ataagataagatttaaatcttattatatcttattatagtatattaaagtatatattattaaatatttacttgttattttataataaaataatatat

SEQ ID NO: 21106 - DNA, 96 bp, Aspergillus viridinutans
  misc_feature: 63
agtaaatatttaataatatatactttaatatactataataagatataataagatttaaatcttatcttatatacatttgattaaatatattatgct

SEQ ID NO: 21107 - DNA, 96 bp, Aspergillus viridinutans
  misc_feature: 62
tcgtatgccgtagatcggaagagcgtcgtgtagggaaagagtgtagtactccgtgtagatctcggtggtcgccgtatcattaaaaaaaaaaaaaaa

SEQ ID NO: 21108 - DNA, 96 bp, Aspergillus viridinutans
  misc_feature: 62
tggtcaattgtatataattaattcattattttcataaatataatttgttaataaaaaatataaataagttttataacctaaattattataaaaaaa

SEQ ID NO: 21109 - DNA, 96 bp, Aspergillus viridinutans
  misc_feature: 62
tcacaacgttccatctcgtatgccgtgatcggcagagcacacgtctgaactccagtcacaacgttccatctcgtatgccgtcttctgcttgaaaaa

SEQ ID NO: 21110 - DNA, 96 bp, Aspergillus viridinutans
  misc_feature: 62
gtcacaacgttccatctcgtatgccgtgatcggcagagcacacgtctgaactccagtcacaacgttccatctcgtatgccgtcttctgcttgaaaa

SEQ ID NO: 21111 - DNA, 96 bp, Aspergillus viridinutans
  misc_feature: 62
aaatgtatataagataagatttaaatcttattatatcttattatagtatattaaagtatatattattaaatatttacttgttattttataataaaa

SEQ ID NO: 21112 - DNA, 96 bp, Aspergillus viridinutans
  misc_feature: 62
caaatgtatataagataagatttaaatcttattatatcttattatagtatattaaagtatatattattaaatatttacttgttattttataataaa

SEQ ID NO: 21113 - DNA, 96 bp, Aspergillus viridinutans
  misc_feature: 62
tttaagtaaggtaaccttaactaataaagaaaataattatagtaattaaaataattgtaaatacaaattgtaaatacaattaaccttccatttgat

SEQ ID NO: 21114 - DNA, 96 bp, Aspergillus viridinutans
  misc_feature: 62
ataatatatactttaatatactataataagatataataagatttaaatcttatcttatatacatttgattaaatatattatgctcaatagtttaaa

SEQ ID NO: 21115 - DNA, 96 bp, Aspergillus viridinutans
  misc_feature: 62
gtcacaacgttccatctcgtatgccgtagatcggaagagcacacgtctgaactccagtcacaacgttccatctcgtatgccgtatcatgatcggaa

SEQ ID NO: 21116 - DNA, 96 bp, Aspergillus viridinutans
  misc_feature: 62
aatataaataagttttataacctaaattattataaaaaaataagattaatttaaataataatactaataatacattaataaaccgagatataataa

SEQ ID NO: 21117 - DNA, 96 bp, Aspergillus viridinutans
  misc_feature: 62
tcaaatgtatataagataagatttaaatcttattatatcttattatagtatattaaagtatatattattaaatatttacttgttattttataataa

SEQ ID NO: 21118 - DNA, 96 bp, Aspergillus viridinutans
  misc_feature: 62
taatagtcataagattcattctattattattatatctcggtttattaatgtattattagtattattatttaaattaatcttatttttttataataa

SEQ ID NO: 21119 - DNA, 96 bp, Aspergillus viridinutans
  misc_feature: 62
tggttaataatacgattacttgtatgtaatgtatatattattttattataaaataacaagtaaatatttaataatatatactttaatatactataa

SEQ ID NO: 21120 - DNA, 96 bp, Aspergillus viridinutans
  misc_feature: 62
ttaatagtcataagattcattctattattattatatctcggtttattaatgtattattagtattattatttaaattaatcttatttttttataata

SEQ ID NO: 21121 - DNA, 96 bp, Aspergillus viridinutans
  misc_feature: 62
agtcacaacgttccatctcgtatgccgtagatcggaagagcacacgtctgaactccagtcacaacgttccatctcgtatgccgtatcatgatcgga

SEQ ID NO: 21122 - DNA, 96 bp, Aspergillus viridinutans
  misc_feature: 62
tccagtcacaacgttccatctcgtatgccgtatcattgatcggaagagcacacgtctgaactccagtcacaacgttccaactcgtatgccgtcttc

SEQ ID NO: 21123 - DNA, 96 bp, Aspergillus viridinutans
  misc_feature: 62
actatggtatcaatattcatactaggtgatcattcgatatcaaatactatggtattgaatcaatatcctgactagatgatgattcaatatcaaata

SEQ ID NO: 21124 - DNA, 96 bp, Aspergillus viridinutans
  misc_feature: 62
tattgaatcaatatcctgactagatgatgattcaatatcaaatactatggtattgaatcgatatcctgactagatgatgattcgatatcaaatact

SEQ ID NO: 21125 - DNA, 96 bp, Aspergillus viridinutans
  misc_feature: 62
tatggtattgaatcgatatcctgactagatgatgattcgatatcaaatactatggtattgaatcgatatcctgactagatgatgaggaatactatg

SEQ ID NO: 21126 - DNA, 96 bp, Aspergillus viridinutans
  misc_feature: 62
tatatttaatcaaatgtatataagataagatttaaatcttattatatcttattatagtatattaaagtatatattattaaatatttacttgttatt

SEQ ID NO: 21127 - DNA, 96 bp, Aspergillus viridinutans
  misc_feature: 62
atttaaactattaagtataatatatttaatcaaatgtatataagataaaatttaaatcttattatatcttattatattttaatgttttacaatata

SEQ ID NO: 21128 - DNA, 96 bp, Aspergillus viridinutans
  misc_feature: 62
taaaagatattatatataagctaggtattattattagctatattaatatagattatataggatatattaatatatactatttaactactagatata

SEQ ID NO: 21129 - DNA, 96 bp, Aspergillus viridinutans
  misc_feature: 62
tactatggtatcaatattcatactaggtgatcattcgatatcaaatactatggtattgaatcaatatcctgactagatgatgattcaatatcaaat

SEQ ID NO: 21130 - DNA, 96 bp, Aspergillus viridinutans
  misc_feature: 62
tacaaccatttaagtaaggtaaccttaactaataaagaaaataattatagtaattaaaataattgtaaatacaaattgtaaatacaattaaccttc

SEQ ID NO: 21131 - DNA, 96 bp, Aspergillus viridinutans
  misc_feature: 62
taataatacgattacttgtatgtaatgtatatattattttattataaaataacaagtaaatatttaataatatatactttaatatactataataag

SEQ ID NO: 21132 - DNA, 96 bp, Aspergillus viridinutans
  misc_feature: 62
taagtaaggtaaccttaactaataaagaaaataattatagtaattaaaataattgtaaatacaaattgtaaatacaattaaccttccatttgatct

SEQ ID NO: 21133 - DNA, 96 bp, Aspergillus viridinutans
  misc_feature: 62
taaaaaatataaataagttttataacctaaattattataaaaaaataagattaatttaaataataatactaataatacattaataaaccgagatat

SEQ ID NO: 21134 - DNA, 96 bp, Aspergillus viridinutans
  misc_feature: 62
gtctgaactccagtcacaacgttccatctcgtatgccgtatcattgatcggaagaacacacgtctgaactccagtcacaacgttccatctcgtatg

SEQ ID NO: 21135 - DNA, 96 bp, Aspergillus viridinutans
  misc_feature: 62
gtcacaacgttccatctcgtatgccgtatcagatcggaagagcagatcggaagagcacacgtctgaactccagtcacaacgttccatctcgtatgc

SEQ ID NO: 21136 - DNA, 96 bp, Aspergillus viridinutans
  misc_feature: 62
ctatggtatcaatattcatactaggtgatcattcgatatcaaatactatggtattgaatcaatatcctgactagatgatgattcaatatcaaatac

SEQ ID NO: 21137 - DNA, 96 bp, Aspergillus viridinutans
  misc_feature: 62
ggttaataatacgattacttgtatgtaatgtatatattattttattataaaataacaagtaaatatttaataatatatactttaatatactataat

SEQ ID NO: 21138 - DNA, 96 bp, Aspergillus viridinutans
  misc_feature: 62
aagagcacacgtctgaactccagtcacaacgttccatctcgtatgccgtcttctgcttgaaaaaaaaaaagaactccagtcacaacgttccatctc

SEQ ID NO: 21139 - DNA, 96 bp, Aspergillus viridinutans
  misc_feature: 62
actccagtcacaacgttccatctcgtatgccgtatcagatcggaagagcagatcggaagagcacacgtctgaactccagtcacaacgttccatctc

SEQ ID NO: 21140 - DNA, 96 bp, Aspergillus viridinutans
  misc_feature: 62
gaagagcacacgtctgaactccagtcacaacgttccatctcgtatgccgtcttctgcttgaaaaaaaaaaagaactccagtcacaacgttccatct

SEQ ID NO: 21141 - DNA, 96 bp, Aspergillus viridinutans
  misc_feature: 62
cttccgatcagatcggaagagcgtcgtgtagggaaagagtgtagtactccgtgtagatctcggtggtcgccgtatcattaaaaaaaaaaaaaaaag

SEQ ID NO: 21142 - DNA, 96 bp, Aspergillus viridinutans
  misc_feature: 62
caattgtatataattaattcattattttcataaatataatttgttaataaaaaatataaataagttttataacctaaattattataaaaaaataag

SEQ ID NO: 21143 - DNA, 96 bp, Aspergillus viridinutans
  misc_feature: 62
ctccagtcacaacgttccatctcgtatgccgtatcattgatcggaagagcacacgtctgaactccagtcacaacgttccaactcgtatgccgtctt

SEQ ID NO: 21144 - DNA, 96 bp, Aspergillus viridinutans
  misc_feature: 62
ctccagtcacaacgttccatctcgtatgccgtatcagatcggaagagcagatcggaagagcacacgtctgaactccagtcacaacgttccatctcg

SEQ ID NO: 21145 - DNA, 96 bp, Aspergillus viridinutans
  misc_feature: 62
cagtcacaacgttccatctcgtatgccgtagatcggaagagcacacgtctgaactccagtcacaacgttccatctcgtatgccgtatcatgatcgg

SEQ ID NO: 21146 - DNA, 96 bp, Aspergillus viridinutans
  misc_feature: 62
catttaagtaaggtaaccttaactaataaagaaaataattatagtaattaaaataattgtaaatacaaattgtaaatacaattaaccttccatttg

SEQ ID NO: 21147 - DNA, 96 bp, Aspergillus viridinutans
  misc_feature: 62
agtcacaacgttccatctcgtatgccgtatcagatcggaagagcagatcggaagagcacacgtctgaactccagtcacaacgttccatctcgtatg

SEQ ID NO: 21148 - DNA, 96 bp, Aspergillus viridinutans
  misc_feature: 62
cagtcacaacgttccatctcgtatgccgtatcagatcggaagagcagatcggaagagcacacgtctgaactccagtcacaacgttccatctcgtat

SEQ ID NO: 21149 - DNA, 96 bp, Aspergillus viridinutans
  misc_feature: 62
aattgtatttacaatttgtatttacaattattttaattactataattattttctttattagttaaggttaccttacttaaatggttgtacacaaat

SEQ ID NO: 21150 - DNA, 96 bp, Aspergillus viridinutans
  misc_feature: 62
agtatttaaactattaagtataatatatttaatcaaatgtatataagataaaatttaaatcttattatatcttattatattttaatgttttacaat

SEQ ID NO: 21151 - DNA, 96 bp, Aspergillus viridinutans
  misc_feature: 62
aaaatataaataagttttataacctaaattattataaaaaaataagattaatttaaataataatactaataatacattaataaaccgagatataat

SEQ ID NO: 21152 - DNA, 96 bp, Aspergillus viridinutans
  misc_feature: 62
aatcgatatcctgactagatgatgattcgatatcaaatactatggtattgaatcgatatcctgactagatgatgaggaatactatggtatcaatat

SEQ ID NO: 21153 - DNA, 96 bp, Aspergillus viridinutans
  misc_feature: 62
agtcacaacgttccatctcgtatgccgtatcattagatcggaagagcacacgtctgaactccagtcacaacgttccatctcgtatgccgtatcatt

SEQ ID NO: 21154 - DNA, 96 bp, Aspergillus viridinutans
  misc_feature: 62
acttgtatgtaatgtatatattattttattataaaataacaagtaaatatttaataatatatactttaatatactataataagatataataagatt

SEQ ID NO: 21155 - DNA, 96 bp, Aspergillus viridinutans
  misc_feature: 61
gtggtcaattgtatataattaattcattattttcataaatataatttgttaataaaaaatataaataagttttataacctaaattattataaaaaa

SEQ ID NO: 21156 - DNA, 96 bp, Aspergillus viridinutans
  misc_feature: 61
atggtattgaatcaatatcctgactagatgatgattcaatatcaaatactatggtattgaatcgatatcctgactagatgatgattcgatatcaaa

SEQ ID NO: 21157 - DNA, 96 bp, Aspergillus viridinutans
  misc_feature: 61
atttgttaataaaaaatataaataagttttataacctaaattattataaaaaaataagattaatttaaataataatactaataatacattaataaa

SEQ ID NO: 21158 - DNA, 96 bp, Aspergillus viridinutans
  misc_feature: 61
tttaaactattaagtataatatatttaatcaaatgtatataagataaaatttaaatcttattatatcttattatattttaatgttttacaatatat

SEQ ID NO: 21159 - DNA, 96 bp, Aspergillus viridinutans
  misc_feature: 61
gatcggaagagcacacgtctgaactccagtcacaacgttccatctcgtatgccgtatcattcatcggaagagcacacgtctgaactccagtcacaa

SEQ ID NO: 21160 - DNA, 96 bp, Aspergillus viridinutans
  misc_feature: 61
aatttgttaataaaaaatataaataagttttataacctaaattattataaaaaaataagattaatttaaataataatactaataatacattaataa

SEQ ID NO: 21161 - DNA, 96 bp, Aspergillus viridinutans
  misc_feature: 61
tataaatatcttagaaagtagattataagatactttactaataatattttactaatactatatataaatataaggctctaaaagtttagctagtaa

SEQ ID NO: 21162 - DNA, 96 bp, Aspergillus viridinutans
  misc_feature: 61
attcgagtttctctcccggctaattaattattatataaaatttatagacattaatgttatttgttatctttagtttaaatttaactgactaattaa

SEQ ID NO: 21163 - DNA, 96 bp, Aspergillus viridinutans
  misc_feature: 61
ttaagagatcaaatggaaggttaattgtatttacaatttgtatttacaattattttaattactataattattttctttattagttaaggttacctt

SEQ ID NO: 21164 - DNA, 96 bp, Aspergillus viridinutans
  misc_feature: 61
ttaaatcttattatatcttattatagtatattaaagtatatattattaaatatttacttgttattttataataaaataatatatacattacataca

SEQ ID NO: 21165 - DNA, 96 bp, Aspergillus viridinutans
  misc_feature: 61
ttaaactattaagtataatatatttaatcaaatgtatataagataaaatttaaatcttattatatcttattatattttaatgttttacaatatata

SEQ ID NO: 21166 - DNA, 96 bp, Aspergillus viridinutans
  misc_feature: 61
tggtatcaatattcatactaggtgatcattcgatatcaaatactatggtattgaatcaatatcctgactagatgatgattcaatatcaaatactat

SEQ ID NO: 21167 - DNA, 96 bp, Aspergillus viridinutans
  misc_feature: 61
tgattaagagatcaaatggaaggttaattgtatttacaatttgtatttacaattattttaattactataattattttctttattagttaaggttac

SEQ ID NO: 21168 - DNA, 96 bp, Aspergillus viridinutans
  misc_feature: 61
attgaatcgatatcctgactagatgatgattcgatatcaaatactatggtattgaatcgatatcctgactagatgatgaggaatactatggtatca

SEQ ID NO: 21169 - DNA, 96 bp, Aspergillus viridinutans
  misc_feature: 61
atactagatgacattcgatatccctactagatgacattcaatattgattcgatatccctactagatgacatttgatatcgattcgatattgattca

SEQ ID NO: 21170 - DNA, 96 bp, Aspergillus viridinutans
  misc_feature: 61
tgaatattgataccatagtattcctcatcatctagtcaggatatcgattcaataccatagtatttgatatcgaatcatcatctagtcaggatatcg

SEQ ID NO: 21171 - DNA, 96 bp, Aspergillus viridinutans
  misc_feature: 61
tgaactccagtcacaacgttccatctcggtggtcgcgatcggaagagcacacgtctgaactccagtcacaacgttccatctcgtatgccgtcttct

SEQ ID NO: 21172 - DNA, 96 bp, Aspergillus viridinutans
  misc_feature: 61
tctgaactccagtcacaacgttccatctcgtatgccgtatcattgatcggaagaacacacgtctgaactccagtcacaacgttccatctcgtatgc

SEQ ID NO: 21173 - DNA, 96 bp, Aspergillus viridinutans
  misc_feature: 61
tctgaactccagtcacaacgttccatctcggtggtcgcgatcggaagagcacacgtctgaactccagtcacaacgttccatctcgtatgccgtctt

SEQ ID NO: 21174 - DNA, 96 bp, Aspergillus viridinutans
  misc_feature: 61
tccagtcacaacgttccatctcgtatgccgtatcagatcggaagagcagatcggaagagcacacgtctgaactccagtcacaacgttccatctcgt

SEQ ID NO: 21175 - DNA, 96 bp, Aspergillus viridinutans
  misc_feature: 61
tccagtcacaacgttccatctcggtggtcgcgatcggaagagcacacgtctgaactccagtcacaacgttccatctcgtatgccgtcttctgcttg

SEQ ID NO: 21176 - DNA, 96 bp, Aspergillus viridinutans
  misc_feature: 61
atatcctgactagatgatgaggaatactatggtatcaatattcatactaggtgatcattcgatatcaaatactatggtattgaatcaatatcctga

SEQ ID NO: 21177 - DNA, 96 bp, Aspergillus viridinutans
  misc_feature: 61
tcacaacgttccatctcgtatgccgtatcagatcggaagagcagatcggaagagcacacgtctgaactccagtcacaacgttccatctcgtatgcc

SEQ ID NO: 21178 - DNA, 96 bp, Aspergillus viridinutans
  misc_feature: 61
tcacaacgttccatctcgtatgccgtagatcggaagagcacacgtctgaactccagtcacaacgttccatctcgtatgccgtatcatgatcggaag

SEQ ID NO: 21179 - DNA, 96 bp, Aspergillus viridinutans
  misc_feature: 61
atttaagtaaggtaaccttaactaataaagaaaataattatagtaattaaaataattgtaaatacaaattgtaaatacaattaaccttccatttga

SEQ ID NO: 21180 - DNA, 96 bp, Aspergillus viridinutans
  misc_feature: 61
tatttaaactattaagtataatatatttaatcaaatgtatataagataaaatttaaatcttattatatcttattatattttaatgttttacaatat

SEQ ID NO: 21181 - DNA, 96 bp, Aspergillus viridinutans
  misc_feature: 61
tattgaatcgatatcctgactagatgatgattcgatatcaaatactatggtattgaatcgatatcctgactagatgatgaggaatactatggtatc

SEQ ID NO: 21182 - DNA, 96 bp, Aspergillus viridinutans
  misc_feature: 61
tatataaatatcttagaaagtagattataagatactttactaataatattttactaatactatatataaatataaggctctaaaagtttagctagt

SEQ ID NO: 21183 - DNA, 96 bp, Aspergillus viridinutans
  misc_feature: 61
ccagtcacaacgttccatctcgtatgccgtatcagatcggaagagcagatcggaagagcacacgtctgaactccagtcacaacgttccatctcgta

SEQ ID NO: 21184 - DNA, 96 bp, Aspergillus viridinutans
  misc_feature: 61
taagtaaagaataatatctaattaagagtagaagttagattaataattattaatattaatttaaacttattaaaataactttaataacttctaatt

SEQ ID NO: 21185 - DNA, 96 bp, Aspergillus viridinutans
  misc_feature: 61
taagagatcaaatggaaggttaattgtatttacaatttgtatttacaattattttaattactataattattttctttattagttaaggttacctta

SEQ ID NO: 21186 - DNA, 96 bp, Aspergillus viridinutans
  misc_feature: 61
gtattgaatcgatatcctgactagatgatgattcgatatcaaatactatggtattgaatcgatatcctgactagatgatgaggaatactatggtat

SEQ ID NO: 21187 - DNA, 96 bp, Aspergillus viridinutans
  misc_feature: 61
gtacaaccatttaagtaaggtaaccttaactaataaagaaaataattatagtaattaaaataattgtaaatacaaattgtaaatacaattaacctt

SEQ ID NO: 21188 - DNA, 96 bp, Aspergillus viridinutans
  misc_feature: 61
gtaaagaataatatctaattaagagtagaagttagattaataattattaatattaatttaaacttattaaaataactttaataacttctaatttat

SEQ ID NO: 21189 - DNA, 96 bp, Aspergillus viridinutans
  misc_feature: 61
gattaagagatcaaatggaaggttaattgtatttacaatttgtatttacaattattttaattactataattattttctttattagttaaggttacc

SEQ ID NO: 21190 - DNA, 96 bp, Aspergillus viridinutans
  misc_feature: 61
cacgtctgaactccagtcacaacgttccatctcgtatgccgtcttctgcttgaaaaaaaaaaagaactccagtcacaacgttccatctcgtatgcc

SEQ ID NO: 21191 - DNA, 96 bp, Aspergillus viridinutans
  misc_feature: 61
ctgaactccagtcacaacgttccatctcgtatgccgtatcattgatcggaagaacacacgtctgaactccagtcacaacgttccatctcgtatgcc

SEQ ID NO: 21192 - DNA, 96 bp, Aspergillus viridinutans
  misc_feature: 61
aagttagatttaataattattaatattagtttaaacttattaaaataactttaataactcctaatttatctttctttaaggttaaattattaatcc

SEQ ID NO: 21193 - DNA, 96 bp, Aspergillus viridinutans
  misc_feature: 61
acacgtctgaactccagtcacaacgttccatctcgtatgccgtcttctgcttgaaaaaaaaaaagaactccagtcacaacgttccatctcgtatgc

SEQ ID NO: 21194 - DNA, 96 bp, Aspergillus viridinutans
  misc_feature: 61
aactccagtcacaacgttccatctcggtggtcgcgatcggaagagcacacgtctgaactccagtcacaacgttccatctcgtatgccgtcttctgc

SEQ ID NO: 21195 - DNA, 96 bp, Aspergillus viridinutans
  misc_feature: 61
gaactccagtcacaacgttccatctcgtatgccgtatcagatcggaagagcagatcggaagagcacacgtctgaactccagtcacaacgttccatc

SEQ ID NO: 21196 - DNA, 96 bp, Aspergillus viridinutans
  misc_feature: 61
gatatcctgactagatgatgaggaatactatggtatcaatattcatactaggtgatcattcgatatcaaatactatggtattgaatcaatatcctg

SEQ ID NO: 21197 - DNA, 96 bp, Aspergillus viridinutans
  misc_feature: 61
gagcacacgtctgaactccagtcacaacgttccatctcgtatgccgtcttctgcttgaaaaaaaaaatgaactccagtcacaacgttccatctcgt

SEQ ID NO: 21198 - DNA, 96 bp, Aspergillus viridinutans
  misc_feature: 61
gagcacacgtctgaactccagtcacaacgttccatctcgtatgccgtcttctgcttgaaaaaaaaaaagaactccagtcacaacgttccatctcgt

SEQ ID NO: 21199 - DNA, 96 bp, Aspergillus viridinutans
  misc_feature: 61
gagcacacgtctgaactccagtcacaacgttccatctcgtatgccgtatcattgatcggaagagcacacgtctgaactccagtcacaacgttccct

SEQ ID NO: 21200 - DNA, 96 bp, Aspergillus viridinutans
  misc_feature: 61
ctgaactccagtcacaacgttccatctcggtggtcgcgatcggaagagcacacgtctgaactccagtcacaacgttccatctcgtatgccgtcttc

SEQ ID NO: 21201 - DNA, 96 bp, Aspergillus viridinutans
  misc_feature: 61
gaactccagtcacaacgttccatctcggtggtcgcgatcggaagagcacacgtctgaactccagtcacaacgttccatctcgtatgccgtcttctg

SEQ ID NO: 21202 - DNA, 96 bp, Aspergillus viridinutans
  misc_feature: 61
cttgtatgtaatgtatatattattttattataaaataacaagtaaatatttaataatatatactttaatatactataataagatataataagattt

SEQ ID NO: 21203 - DNA, 96 bp, Aspergillus viridinutans
  misc_feature: 61
ctccagtcacaacgttccatctcggtggtcgcgatcggaagagcacacgtctgaactccagtcacaacgttccatctcgtatgccgtcttctgctt

SEQ ID NO: 21204 - DNA, 96 bp, Aspergillus viridinutans
  misc_feature: 61
ctatggtattgaatcgatatcctgactagatgatgattcgatatcaaatactatggtattgaatcgatatcctgactagatgatgaggaatactat

SEQ ID NO: 21205 - DNA, 96 bp, Aspergillus viridinutans
  misc_feature: 61
acgtctgaactccagtcacaacgttccatctcgtatgccgtcttctgcttgaaaaaaaaaaagaactccagtcacaacgttccatctcgtatgccg

SEQ ID NO: 21206 - DNA, 96 bp, Aspergillus viridinutans
  misc_feature: 61
cggaagagcacacgtctgaactccagtcacaacgttccatctcgtatgccgtcttctgcttgaaaaaaaaaatgaactccagtcacaacgttccat

SEQ ID NO: 21207 - DNA, 96 bp, Aspergillus viridinutans
  misc_feature: 61
agagcacacgtctgaactccagtcacaacgttccatctcgtatgccgtcttctgcttgaaaaaaaaaaagaactccagtcacaacgttccatctcg

SEQ ID NO: 21208 - DNA, 96 bp, Aspergillus viridinutans
  misc_feature: 61
agagcacacgtctgaactccagtcacaacgttccatctcgtatgccgtcttctgcttgaaaaaaaaaatgaactccagtcacaacgttccatctcg

SEQ ID NO: 21209 - DNA, 96 bp, Aspergillus viridinutans
  misc_feature: 61
atatttaatcaaatgtatataagataagatttaaatcttattatatcttattatagtatattaaagtatatattattaaatatttacttgttattt

SEQ ID NO: 21210 - DNA, 96 bp, Aspergillus viridinutans
  misc_feature: 61
actccagtcacaacgttccatctcggtggtcgcgatcggaagagcacacgtctgaactccagtcacaacgttccatctcgtatgccgtcttctgct

SEQ ID NO: 21211 - DNA, 96 bp, Aspergillus viridinutans
  misc_feature: 61
aactccagtcacaacgttccatctcgtatgccgtatcagatcggaagagcagatcggaagagcacacgtctgaactccagtcacaacgttccatct

SEQ ID NO: 21212 - DNA, 96 bp, Aspergillus viridinutans
  misc_feature: 60
tctcgtatgccgtagatcggaagagcgtcgtgtagggaaagagtgtagtactccgtgtagatctcggtggtcgccgtatcattaaaaaaaaaaaaa

SEQ ID NO: 21213 - DNA, 96 bp, Aspergillus viridinutans
  misc_feature: 60
cacaacgttccatctcgtatgccgtgatcggaagagcacacgtctgaactccagtcacaacgttccatctcgtatgccgtcttctgcttgaaaaaa

SEQ ID NO: 21214 - DNA, 96 bp, Aspergillus viridinutans
  misc_feature: 60
ataaatatcttagaaagtagattataagatactttactaataatattttactaatactatatataaatataaggctctaaaagtttagctagtaaa

SEQ ID NO: 21215 - DNA, 96 bp, Aspergillus viridinutans
  misc_feature: 60
ttaagagtagaagttagatttaataattattaatattagtttaaacttattaaaataactttaataactcctaatttatctttctttaaggttaaa

SEQ ID NO: 21216 - DNA, 96 bp, Aspergillus viridinutans
  misc_feature: 60
gatcggaagagcagatcggaagagcacacgtctgaactccagtcacaacgttccatctcgtatgccgtcttctgcttgaaaaaaaaaaaaaaacaa

SEQ ID NO: 21217 - DNA, 96 bp, Aspergillus viridinutans
  misc_feature: 60
aagtatttaaactattaagtataatatatttaatcaaatgtatataagataaaatttaaatcttattatatcttattatattttaatgttttacaa

SEQ ID NO: 21218 - DNA, 96 bp, Aspergillus viridinutans
  misc_feature: 60
tactagatgacattcgatatccctactagatgacattcaatattgattcgatatccctactagatgacatttgatatcgattcgatattgattcaa

SEQ ID NO: 21219 - DNA, 96 bp, Aspergillus viridinutans
  misc_feature: 60
ttatataaatatcttagaaagtagattataagatactttactaataatattttactaatactatatataaatataaggctctaaaagtttagctag

SEQ ID NO: 21220 - DNA, 96 bp, Aspergillus viridinutans
  misc_feature: 60
taatcaaatgtatataagataagatttaaatcttattatatcttattatagtatattaaagtatatattattaaatatttacttgttattttataa

SEQ ID NO: 21221 - DNA, 96 bp, Aspergillus viridinutans
  misc_feature: 60
aattaatagtcataagattcattctattattattatatctcggtttattaatgtattattagtattattatttaaattaatcttatttttttataa

SEQ ID NO: 21222 - DNA, 96 bp, Aspergillus viridinutans
  misc_feature: 60
ttacttgtatgtaatgtatatattattttattataaaataacaagtaaatatttaataatatatactttaatatactataataagatataataaga

SEQ ID NO: 21223 - DNA, 96 bp, Aspergillus viridinutans
  misc_feature: 60
tgtacaaccatttaagtaaggtaaccttaactaataaagaaaataattatagtaattaaaataattgtaaatacaaattgtaaatacaattaacct

SEQ ID NO: 21224 - DNA, 96 bp, Aspergillus viridinutans
  misc_feature: 60
ctatggtattgaatcaatatcctgactagatgatgattcaatatcaaatactatggtattgaatcgatatcctgactagatgatgattcgatatca

SEQ ID NO: 21225 - DNA, 96 bp, Aspergillus viridinutans
  misc_feature: 60
tgaactccagtcacaacgttccatctcgtatgccgtatcattgatcggaagaacacacgtctgaactccagtcacaacgttccatctcgtatgccg

SEQ ID NO: 21226 - DNA, 96 bp, Aspergillus viridinutans
  misc_feature: 60
ccagtcacaacgttccatctcggtggtcgcgatcggaagagcacacgtctgaactccagtcacaacgttccatctcgtatgccgtcttctgcttga

SEQ ID NO: 21227 - DNA, 96 bp, Aspergillus viridinutans
  misc_feature: 60
gaatcgatatcctgactagatgatgattcgatatcaaatactatggtattgaatcgatatcctgactagatgatgaggaatactatggtatcaata

SEQ ID NO: 21228 - DNA, 96 bp, Aspergillus viridinutans
  misc_feature: 60
atcaaatgtatataagataagatttaaatcttattatatcttattatagtatattaaagtatatattattaaatatttacttgttattttataata

SEQ ID NO: 21229 - DNA, 96 bp, Aspergillus viridinutans
  misc_feature: 60
taatttgttaataaaaaatataaataagttttataacctaaattattataaaaaaataagattaatttaaataataatactaataatacattaata

SEQ ID NO: 21230 - DNA, 96 bp, Aspergillus viridinutans
  misc_feature: 60
atataaatatcttagaaagtagattataagatactttactaataatattttactaatactatatataaatataaggctctaaaagtttagctagta

SEQ ID NO: 21231 - DNA, 96 bp, Aspergillus viridinutans
  misc_feature: 60
agcacacgtctgaactccagtcacaacgttccatctcgtatgccgtcttctgcttgaaaaaaaaaaagaactccagtcacaacgttccatctcgta

SEQ ID NO: 21232 - DNA, 96 bp, Aspergillus viridinutans
  misc_feature: 60
ggtattgaatcgatatcctgactagatgatgattcgatatcaaatactatggtattgaatcgatatcctgactagatgatgaggaatactatggta

SEQ ID NO: 21233 - DNA, 96 bp, Aspergillus viridinutans
  misc_feature: 60
aattcgagtttctctcccggctaattaattattatataaaatttatagacattaatgttatttgttatctttagtttaaatttaactgactaatta

SEQ ID NO: 21234 - DNA, 96 bp, Aspergillus viridinutans
  misc_feature: 60
taaatatcttagaaagtagattataagatactttactaataatattttactaatactatatataaatataaggctctaaaagtttagctagtaaat

SEQ ID NO: 21235 - DNA, 96 bp, Aspergillus viridinutans
  misc_feature: 60
gtgtacaaccatttaagtaaggtaaccttaactaataaagaaaataattatagtaattaaaataattgtaaatacaaattgtaaatacaattaacc

SEQ ID NO: 21236 - DNA, 96 bp, Aspergillus viridinutans
  misc_feature: 60
gtatcaatattcatactaggtgatcattcgatatcaaatactatggtattgaatcaatatcctgactagatgatgattcaatatcaaatactatgg

SEQ ID NO: 21237 - DNA, 96 bp, Aspergillus viridinutans
  misc_feature: 60
cgtctgaactccagtcacaacgttccatctcgtatgccgtatcagaccggaagagcacacgtctgaactccagtcacaacgttccatctcgtatgc

SEQ ID NO: 21238 - DNA, 96 bp, Aspergillus viridinutans
  misc_feature: 60
gcacacgtctgaactccagtcacaacgttccatctcgtatgccgtcttctgcttgaaaaaaaaaaagaactccagtcacaacgttccatctcgtat

SEQ ID NO: 21239 - DNA, 96 bp, Aspergillus viridinutans
  misc_feature: 60
gcacacgtctgaactccagtcacaacgttccatctcgtatgccgtatcattgatcggaagagcacacgtctgaactccagtcacaacgttccctct

SEQ ID NO: 21240 - DNA, 96 bp, Aspergillus viridinutans
  misc_feature: 60
agcacacgtctgaactccagtcacaacgttccatctcgtatgccgtatcattgatcggaagagcacacgtctgaactccagtcacaacgttccctc

SEQ ID NO: 21241 - DNA, 96 bp, Aspergillus viridinutans
  misc_feature: 60
aagagcacacgtctgaactccagtcacaacgttccatctcgtatgccgtcttctgcttgaaaaaaaaaatgaactccagtcacaacgttccatctc

SEQ ID NO: 21242 - DNA, 96 bp, Aspergillus viridinutans
  misc_feature: 60
aagtaaggtaaccttaactaataaagaaaataattatagtaattaaaataattgtaaatacaaattgtaaatacaattaaccttccatttgatctc

SEQ ID NO: 21243 - DNA, 96 bp, Aspergillus viridinutans
  misc_feature: 60
cacacgtctgaactccagtcacaacgttccatctcgtatgccgtatcattgatcggaagagcacacgtctgaactccagtcacaacgttccctctc

SEQ ID NO: 21244 - DNA, 96 bp, Aspergillus viridinutans
  misc_feature: 60
gaactccagtcacaacgttccatctcgtatgccgtgatcggaagagcacacgtctgaactccagtcacaacgttccatctcgtatgccgtatcatt

SEQ ID NO: 21245 - DNA, 96 bp, Aspergillus viridinutans
  misc_feature: 60
cgtctgaactccagtcacaacgttccatctcgtatgccgtcttctgcttgaaaaaaaaaaagaactccagtcacaacgttccatctcgtatgccgt

SEQ ID NO: 21246 - DNA, 96 bp, Aspergillus viridinutans
  misc_feature: 60
acacgtctgaactccagtcacaacgttccatctcgtatgccgtatcattgatcggaagagcacacgtctgaactccagtcacaacgttccctctcg

SEQ ID NO: 21247 - DNA, 96 bp, Aspergillus viridinutans
  misc_feature: 60
atggtattgaatcgatatcctgactagatgatgattcgatatcaaatactatggtattgaatcgatatcctgactagatgatgaggaatactatgg

SEQ ID NO: 21248 - DNA, 96 bp, Aspergillus viridinutans
  misc_feature: 60
cacacgtctgaactccagtcacaacgttccatctcgtatgccgtcttctgcttgaaaaaaaaaaagaactccagtcacaacgttccatctcgtatg

SEQ ID NO: 21249 - DNA, 96 bp, Aspergillus viridinutans
  misc_feature: 60
atatatataatttatacatacgaaattatatacaagtttaatttatatgtatataaatatatatattattacacttgtatattaattgcattaaat

SEQ ID NO: 21250 - DNA, 96 bp, Aspergillus viridinutans
  misc_feature: 60
aatcaaatgtatataagataagatttaaatcttattatatcttattatagtatattaaagtatatattattaaatatttacttgttattttataat

SEQ ID NO: 21251 - DNA, 96 bp, Aspergillus viridinutans
  misc_feature: 60
attaagagatcaaatggaaggttaattgtatttacaatttgtatttacaattattttaattactataattattttctttattagttaaggttacct

SEQ ID NO: 21252 - DNA, 96 bp, Aspergillus viridinutans
  misc_feature: 60
aagagcacacgtctgaactccagtcacaacgttccatctcgtatgccgtatcagaccggaagagcacacgtctgaactccagtcacaacgttccat

SEQ ID NO: 21253 - DNA, 96 bp, Aspergillus viridinutans
  misc_feature: 60
aataaaaaatataaataagttttataacctaaattattataaaaaaataagattaatttaaataataatactaataatacattaataaaccgagat

SEQ ID NO: 21254 - DNA, 96 bp, Aspergillus viridinutans
  misc_feature: 60
atcctgactagatgatgaggaatactatggtatcaatattcatactaggtgatcattcgatatcaaatactatggtattgaatcaatatcctgact

SEQ ID NO: 21255 - DNA, 96 bp, Aspergillus viridinutans
  misc_feature: 60
aagtaaagaataatatctaattaagagtagaagttagattaataattattaatattaatttaaacttattaaaataactttaataacttctaattt

SEQ ID NO: 21256 - DNA, 96 bp, Aspergillus viridinutans
  misc_feature: 59
tttgttaataaaaaatataaataagttttataacctaaattattataaaaaaataagattaatttaaataataatactaataatacattaataaac

SEQ ID NO: 21257 - DNA, 96 bp, Aspergillus viridinutans
  misc_feature: 59
tttataattataatctatttatagtcaaataaaacttaatttaaaaattaatattgaagattaataggataaaaataaacaagtatgagcgttaat

SEQ ID NO: 21258 - DNA, 96 bp, Aspergillus viridinutans
  misc_feature: 59
tttaaatcttattatatcttattatagtatattaaagtatatattattaaatatttacttgttattttataataaaataatatatacattacatac

SEQ ID NO: 21259 - DNA, 96 bp, Aspergillus viridinutans
  misc_feature: 59
ttaataaaaaatataaataagttttataacctaaattattataaaaaaataagattaatttaaataataatactaataatacattaataaaccgag

SEQ ID NO: 21260 - DNA, 96 bp, Aspergillus viridinutans
  misc_feature: 59
ttaagtaaagaataatatctaattaagagtagaagttagattaataattattaatattaatttaaacttattaaaataactttaataacttctaat

SEQ ID NO: 21261 - DNA, 96 bp, Aspergillus viridinutans
  misc_feature: 59
attaagagtagaagttagatttaataattattaatattagtttaaacttattaaaataactttaataactcctaatttatctttctttaaggttaa

SEQ ID NO: 21262 - DNA, 96 bp, Aspergillus viridinutans
  misc_feature: 59
tggtattgaatcgatatcctgactagatgatgattcgatatcaaatactatggtattgaatcgatatcctgactagatgatgaggaatactatggt

SEQ ID NO: 21263 - DNA, 96 bp, Aspergillus viridinutans
  misc_feature: 59
tcggaagagcacacgtctgaactccagtcacaacgttccatctcgtatgccgtatcctgatcggaagagcacacgtctgaactccagtcacaacgt

SEQ ID NO: 21264 - DNA, 96 bp, Aspergillus viridinutans
  misc_feature: 59
ggtgagccggcgcgcgcgagggtgacgagggaaggaatcgggaggggaagggcaagggaaagggagagggaggaggaggggagggaggcggtggga

SEQ ID NO: 21265 - DNA, 96 bp, Aspergillus viridinutans
  misc_feature: 59
acaacgttccatctcgtatgccgtatcattgatcggaagagcacacgtctgaactccagtcacaacgttccatctcgtatgccgtcttctgcttga

SEQ ID NO: 21266 - DNA, 96 bp, Aspergillus viridinutans
  misc_feature: 59
tatttaatcaaatgtatataagataagatttaaatcttattatatcttattatagtatattaaagtatatattattaaatatttacttgttatttt

SEQ ID NO: 21267 - DNA, 96 bp, Aspergillus viridinutans
  misc_feature: 59
gaatcgatatcctgactagatgatgaggaatactatggtatcaatattcatactaggtgatcattcgatatcaaatactatggtattgaatcaata

SEQ ID NO: 21268 - DNA, 96 bp, Aspergillus viridinutans
  misc_feature: 59
ctagatgacattcgatatccctactagatgacattcaatattgattcgatatccctactagatgacatttgatatcgattcgatattgattcaata

SEQ ID NO: 21269 - DNA, 96 bp, Aspergillus viridinutans
  misc_feature: 59
ataaaaaatataaataagttttataacctaaattattataaaaaaataagattaatttaaataataatactaataatacattaataaaccgagata

SEQ ID NO: 21270 - DNA, 96 bp, Aspergillus viridinutans
  misc_feature: 59
tatcctgactagatgatgaggaatactatggtatcaatattcatactaggtgatcattcgatatcaaatactatggtattgaatcaatatcctgac

SEQ ID NO: 21271 - DNA, 96 bp, Aspergillus viridinutans
  misc_feature: 59
tacttaataattaatagtcataagattcattctattattattatatctcggtttattaatgtattattagtattattatttaaattaatcttattt

SEQ ID NO: 21272 - DNA, 96 bp, Aspergillus viridinutans
  misc_feature: 59
agcacacgtctgaactccagtcacaacgttccatctcgtatgccgtcttctgcttgaaaaaaaaaatgaactccagtcacaacgttccatctcgta

SEQ ID NO: 21273 - DNA, 96 bp, Aspergillus viridinutans
  misc_feature: 59
acacgtctgaactccagtcacaacgttccatctcgtatgccgtatcagaccggaagagcacacgtctgaactccagtcacaacgttccatctcgta

SEQ ID NO: 21274 - DNA, 96 bp, Aspergillus viridinutans
  misc_feature: 59
acgtctgaactccagtcacaacgttccatctcgtatgccgtatcattgatcggaagagcacacgtctgaactccagtcacaacgttccctctcgta

SEQ ID NO: 21275 - DNA, 96 bp, Aspergillus viridinutans
  misc_feature: 59
taattaagagtagaagttagatttaataattattaatattagtttaaacttattaaaataactttaataactcctaatttatctttctttaaggtt

SEQ ID NO: 21276 - DNA, 96 bp, Aspergillus viridinutans
  misc_feature: 59
gtagaagttagatttaataattattaatattagtttaaacttattaaaataactttaataactcctaatttatctttctttaaggttaaattatta

SEQ ID NO: 21277 - DNA, 96 bp, Aspergillus viridinutans
  misc_feature: 59
aattaagagtagaagttagatttaataattattaatattagtttaaacttattaaaataactttaataactcctaatttatctttctttaaggtta

SEQ ID NO: 21278 - DNA, 96 bp, Aspergillus viridinutans
  misc_feature: 59
agtaaagaataatatctaattaagagtagaagttagattaataattattaatattaatttaaacttattaaaataactttaataacttctaattta

SEQ ID NO: 21279 - DNA, 96 bp, Aspergillus viridinutans
  misc_feature: 59
gtctgaactccagtcacaacgttccatctcgtatgccgtatcattgatcggaagagcacacgtctgaactccagtcacaacgttccctctcgtatg

SEQ ID NO: 21280 - DNA, 96 bp, Aspergillus viridinutans
  misc_feature: 59
gtctgaactccagtcacaacgttccatctcgtatgccgtatcagaccggaagagcacacgtctgaactccagtcacaacgttccatctcgtatgcc

SEQ ID NO: 21281 - DNA, 96 bp, Aspergillus viridinutans
  misc_feature: 59
aagagatcaaatggaaggttaattgtatttacaatttgtatttacaattattttaattactataattattttctttattagttaaggttaccttac

SEQ ID NO: 21282 - DNA, 96 bp, Aspergillus viridinutans
  misc_feature: 59
cacgtctgaactccagtcacaacgttccatctcgtatgccgtcttctgcttgaaaaaaaaaatgaactccagtcacaacgttccatctcgtatgcc

SEQ ID NO: 21283 - DNA, 96 bp, Aspergillus viridinutans
  misc_feature: 59
ggaagagcacacgtctgaactccagtcacaacgttccatctcgtatgccgtcttctgcttgaaaaaaaaaatgaactccagtcacaacgttccatc

SEQ ID NO: 21284 - DNA, 96 bp, Aspergillus viridinutans
  misc_feature: 59
ggaagagcacacgtctgaactccagtcacaacgttccatctcgtatgccgtatcctgatcggaagagcacacgtctgaactccagtcacaacgttc

SEQ ID NO: 21285 - DNA, 96 bp, Aspergillus viridinutans
  misc_feature: 59
gaagagcacacgtctgaactccagtcacaacgttccatctcgtatgccgtatcctgatcggaagagcacacgtctgaactccagtcacaacgttcc

SEQ ID NO: 21286 - DNA, 96 bp, Aspergillus viridinutans
  misc_feature: 59
acacgtctgaactccagtcacaacgttccatctcgtatgccgtcttctgcttgaaaaaaaaaatgaactccagtcacaacgttccatctcgtatgc

SEQ ID NO: 21287 - DNA, 96 bp, Aspergillus viridinutans
  misc_feature: 59
gcacacgtctgaactccagtcacaacgttccatctcgtatgccgtcttctgcttgaaaaaaaaaatgaactccagtcacaacgttccatctcgtat

SEQ ID NO: 21288 - DNA, 96 bp, Aspergillus viridinutans
  misc_feature: 59
gcacacgtctgaactccagtcacaacgttccatctcgtatgccgtatcagaccggaagagcacacgtctgaactccagtcacaacgttccatctcg

SEQ ID NO: 21289 - DNA, 96 bp, Aspergillus viridinutans
  misc_feature: 59
agagcacacgtctgaactccagtcacaacgttccatctcgtatgccgtatcagaccggaagagcacacgtctgaactccagtcacaacgttccatc

SEQ ID NO: 21290 - DNA, 96 bp, Aspergillus viridinutans
  misc_feature: 59
gatcggaagagcgtcgtgtagggaaagagtgtagtactccgtgtagatctcggtggtcgccgtatcattaaaaaaaaaaaaaaaaaaaaaaaaaag

SEQ ID NO: 21291 - DNA, 96 bp, Aspergillus viridinutans
  misc_feature: 59
gagcacacgtctgaactccagtcacaacgttccatctcgtatgccgtatcagaccggaagagcacacgtctgaactccagtcacaacgttccatct

SEQ ID NO: 21292 - DNA, 96 bp, Aspergillus viridinutans
  misc_feature: 59
agcacacgtctgaactccagtcacaacgttccatctcgtatgccgtatcagaccggaagagcacacgtctgaactccagtcacaacgttccatctc

SEQ ID NO: 21293 - DNA, 96 bp, Aspergillus viridinutans
  misc_feature: 59
gaattcgagtttctctcccggctaattaattattatataaaatttatagacattaatgttatttgttatctttagtttaaatttaactgactaatt

SEQ ID NO: 21294 - DNA, 96 bp, Aspergillus viridinutans
  misc_feature: 59
gaagagcacacgtctgaactccagtcacaacgttccatctcgtatgccgtcttctgcttgaaaaaaaaaatgaactccagtcacaacgttccatct

SEQ ID NO: 21295 - DNA, 96 bp, Aspergillus viridinutans
  misc_feature: 59
gaactccagtcacaacgttccatctcgtatgccgtatcattgatcggaagaacacacgtctgaactccagtcacaacgttccatctcgtatgccgt

SEQ ID NO: 21296 - DNA, 96 bp, Aspergillus viridinutans
  misc_feature: 59
cgtctgaactccagtcacaacgttccatctcgtatgccgtatcattgatcggaagagcacacgtctgaactccagtcacaacgttccctctcgtat

SEQ ID NO: 21297 - DNA, 96 bp, Aspergillus viridinutans
  misc_feature: 59
cggaagagcacacgtctgaactccagtcacaacgttccatctcgtatgccgtatcctgatcggaagagcacacgtctgaactccagtcacaacgtt

SEQ ID NO: 21298 - DNA, 96 bp, Aspergillus viridinutans
  misc_feature: 59
attatgattaagagatcaaatggaaggttaattgtatttacaatttgtatttacaattattttaattactataattattttctttattagttaagg

SEQ ID NO: 21299 - DNA, 96 bp, Aspergillus viridinutans
  misc_feature: 59
cacacgtctgaactccagtcacaacgttccatctcgtatgccgtcttctgcttgaaaaaaaaaatgaactccagtcacaacgttccatctcgtatg

SEQ ID NO: 21300 - DNA, 96 bp, Aspergillus viridinutans
  misc_feature: 59
acgtctgaactccagtcacaacgttccatctcgtatgccgtatcagaccggaagagcacacgtctgaactccagtcacaacgttccatctcgtatg

SEQ ID NO: 21301 - DNA, 96 bp, Aspergillus viridinutans
  misc_feature: 59
cagatcggaagagcacacgtctgaactccagtcacaacgttccatctcgtatgccgtgatcggaagagcacacgtctgaactccagtcacaacgtt

SEQ ID NO: 21302 - DNA, 96 bp, Aspergillus viridinutans
  misc_feature: 59
cacgtctgaactccagtcacaacgttccatctcgtatgccgtatcattgatcggaagagcacacgtctgaactccagtcacaacgttccctctcgt

SEQ ID NO: 21303 - DNA, 96 bp, Aspergillus viridinutans
  misc_feature: 59
cacgtctgaactccagtcacaacgttccatctcgtatgccgtatcagaccggaagagcacacgtctgaactccagtcacaacgttccatctcgtat

SEQ ID NO: 21304 - DNA, 96 bp, Aspergillus viridinutans
  misc_feature: 59
cacacgtctgaactccagtcacaacgttccatctcgtatgccgtatcagaccggaagagcacacgtctgaactccagtcacaacgttccatctcgt

SEQ ID NO: 21305 - DNA, 96 bp, Aspergillus viridinutans
  misc_feature: 59
actagatgacattcgatatccctactagatgacattcaatattgattcgatatccctactagatgacatttgatatcgattcgatattgattcaat

SEQ ID NO: 21306 - DNA, 96 bp, Aspergillus viridinutans
  misc_feature: 59
agtagaagttagatttaataattattaatattagtttaaacttattaaaataactttaataactcctaatttatctttctttaaggttaaattatt

SEQ ID NO: 21307 - DNA, 96 bp, Aspergillus viridinutans
  misc_feature: 59
acttaataattaatagtcataagattcattctattattattatatctcggtttattaatgtattattagtattattatttaaattaatcttatttt

SEQ ID NO: 21308 - DNA, 96 bp, Aspergillus viridinutans
  misc_feature: 58
ggtggtcaattgtatataattaattcattattttcataaatataatttgttaataaaaaatataaataagttttataacctaaattattataaaaa

SEQ ID NO: 21309 - DNA, 96 bp, Aspergillus viridinutans
  misc_feature: 58
agtcacaacgttccatctcggtggtcgcgatcggaagagcacacgtctgaactccagtcacaacgttccatctcgtatgccgtcttctgcttgaaa

SEQ ID NO: 21310 - DNA, 96 bp, Aspergillus viridinutans
  misc_feature: 58
cagtcacaacgttccatctcggtggtcgcgatcggaagagcacacgtctgaactccagtcacaacgttccatctcgtatgccgtcttctgcttgaa

SEQ ID NO: 21311 - DNA, 96 bp, Aspergillus viridinutans
  misc_feature: 58
ttataattataatctatttatagtcaaataaaacttaatttaaaaattaatattgaagattaataggataaaaataaacaagtatgagcgttaata

SEQ ID NO: 21312 - DNA, 96 bp, Aspergillus viridinutans
  misc_feature: 58
gttaattgtatttacaatttgtatttacaattattttaattactataattattttctttattagttaaggttaccttacttaaatggttgtacaca

SEQ ID NO: 21313 - DNA, 96 bp, Aspergillus viridinutans
  misc_feature: 58
aagagcacacgtctgaactccagtcacaacgttccatctcgtatgccgtatcctgatcggaagagcacacgtctgaactccagtcacaacgttcca

SEQ ID NO: 21314 - DNA, 96 bp, Aspergillus viridinutans
  misc_feature: 58
tgaatcgatatcctgactagatgatgattcgatatcaaatactatggtattgaatcgatatcctgactagatgatgaggaatactatggtatcaat

SEQ ID NO: 21315 - DNA, 96 bp, Aspergillus viridinutans
  misc_feature: 58
taataaaaaatataaataagttttataacctaaattattataaaaaaataagattaatttaaataataatactaataatacattaataaaccgaga

SEQ ID NO: 21316 - DNA, 96 bp, Aspergillus viridinutans
  misc_feature: 58
tcggaagagcagatcggaagagcacacgtctgaactccagtcacaacgttccatctcgtatgccgtgatcggaagagcacacgtctgaactccagt

SEQ ID NO: 21317 - DNA, 96 bp, Aspergillus viridinutans
  misc_feature: 58
tcctgactagatgatgaggaatactatggtatcaatattcatactaggtgatcattcgatatcaaatactatggtattgaatcaatatcctgacta

SEQ ID NO: 21318 - DNA, 96 bp, Aspergillus viridinutans
  misc_feature: 58
aatactatggtattgaatcgatatcctgactagatgatgattcgatatcaaatactatggtattgaatcgatatcctgactagatgatgaggaata

SEQ ID NO: 21319 - DNA, 96 bp, Aspergillus viridinutans
  misc_feature: 58
atttaaatcttattatatcttattatagtatattaaagtatatattattaaatatttacttgttattttataataaaataatatatacattacata

SEQ ID NO: 21320 - DNA, 96 bp, Aspergillus viridinutans
  misc_feature: 58
tataattataatctatttatagtcaaataaaacttaatttaaaaattaatattgaagattaataggataaaaataaacaagtatgagcgttaatat

SEQ ID NO: 21321 - DNA, 96 bp, Aspergillus viridinutans
  misc_feature: 58
taattaatagtcataagattcattctattattattatatctcggtttattaatgtattattagtattattatttaaattaatcttatttttttata

SEQ ID NO: 21322 - DNA, 96 bp, Aspergillus viridinutans
  misc_feature: 58
actatggtattgaatcgatatcctgactagatgatgattcgatatcaaatactatggtattgaatcgatatcctgactagatgatgaggaatacta

SEQ ID NO: 21323 - DNA, 96 bp, Aspergillus viridinutans
  misc_feature: 58
tagatgacattcgatatccctactagatgacattcaatattgattcgatatccctactagatgacatttgatatcgattcgatattgattcaatat

SEQ ID NO: 21324 - DNA, 96 bp, Aspergillus viridinutans
  misc_feature: 58
tactatggtattgaatcgatatcctgactagatgatgattcgatatcaaatactatggtattgaatcgatatcctgactagatgatgaggaatact

SEQ ID NO: 21325 - DNA, 96 bp, Aspergillus viridinutans
  misc_feature: 58
agagtagaagttagatttaataattattaatattagtttaaacttattaaaataactttaataactcctaatttatctttctttaaggttaaatta

SEQ ID NO: 21326 - DNA, 96 bp, Aspergillus viridinutans
  misc_feature: 58
taagagtagaagttagatttaataattattaatattagtttaaacttattaaaataactttaataactcctaatttatctttctttaaggttaaat

SEQ ID NO: 21327 - DNA, 96 bp, Aspergillus viridinutans
  misc_feature: 58
atttaatcaaatgtatataagataagatttaaatcttattatatcttattatagtatattaaagtatatattattaaatatttacttgttatttta

SEQ ID NO: 21328 - DNA, 96 bp, Aspergillus viridinutans
  misc_feature: 58
gtttaggtggtcaattgtatataattaattcattattttcataaatataatttgttaataaaaaatataaataagttttataacctaaattattat

SEQ ID NO: 21329 - DNA, 96 bp, Aspergillus viridinutans
  misc_feature: 58
gtctgaactccagtcacaacgttccatctcgtatgccgtagatcggaagagcacacgactgaactccagtcacaacgttccatctcgtatgccgtc

SEQ ID NO: 21330 - DNA, 96 bp, Aspergillus viridinutans
  misc_feature: 58
aagatttaaatcttattatatcttattatagtatattaaagtatatattattaaatatttacttgttattttataataaaataatatatacattac

SEQ ID NO: 21331 - DNA, 96 bp, Aspergillus viridinutans
  misc_feature: 58
gaagttagatttaataattattaatattagtttaaacttattaaaataactttaataactcctaatttatctttctttaaggttaaattattaatc

SEQ ID NO: 21332 - DNA, 96 bp, Aspergillus viridinutans
  misc_feature: 58
agatgacattcgatatccctactagatgacattcaatattgattcgatatccctactagatgacatttgatatcgattcgatattgattcaatatc

SEQ ID NO: 21333 - DNA, 96 bp, Aspergillus viridinutans
  misc_feature: 58
cggaagagcagatcggaagagcacacgtctgaactccagtcacaacgttccatctcgtatgccgtgatcggaagagcacacgtctgaactccagtc

SEQ ID NO: 21334 - DNA, 96 bp, Aspergillus viridinutans
  misc_feature: 58
aactccagtcacaacgttccatctcgtatgccgtatcattcatcggaagagcacacgtctgaactccagtcacaacgttccatctcgtatgccgtc

SEQ ID NO: 21335 - DNA, 96 bp, Aspergillus viridinutans
  misc_feature: 58
ctaattaagagtagaagttagatttaataattattaatattagtttaaacttattaaaataactttaataactcctaatttatctttctttaaggt

SEQ ID NO: 21336 - DNA, 96 bp, Aspergillus viridinutans
  misc_feature: 58
atcggaagagcacacgtctgaactccagtcacaacgttccatctcgtatgccgtatcctgatcggaagagcacacgtctgaactccagtcacaacg

SEQ ID NO: 21337 - DNA, 96 bp, Aspergillus viridinutans
  misc_feature: 58
acgtctgaactccagtcacaacgttccatctcgtatgccgtcttctgcttgaaaaaaaaaatgaactccagtcacaacgttccatctcgtatgccg

SEQ ID NO: 21338 - DNA, 96 bp, Aspergillus viridinutans
  misc_feature: 58
agagatcaaatggaaggttaattgtatttacaatttgtatttacaattattttaattactataattattttctttattagttaaggttaccttact

SEQ ID NO: 21339 - DNA, 96 bp, Aspergillus viridinutans
  misc_feature: 58
actccagtcacaacgttccatctcgtatgccgtatcattcatcggaagagcacacgtctgaactccagtcacaacgttccatctcgtatgccgtct

SEQ ID NO: 21340 - DNA, 96 bp, Aspergillus viridinutans
  misc_feature: 58
aagagtagaagttagatttaataattattaatattagtttaaacttattaaaataactttaataactcctaatttatctttctttaaggttaaatt

SEQ ID NO: 21341 - DNA, 96 bp, Aspergillus viridinutans
  misc_feature: 57
tcacaacgttccatctcggtggtcgcgatcggaagagcacacgtctgaactccagtcacaacgttccatctcgtatgccgtcttctgcttgaaaaa

SEQ ID NO: 21342 - DNA, 96 bp, Aspergillus viridinutans
  misc_feature: 57
gtcacaacgttccatctcggtggtcgcgatcggaagagcacacgtctgaactccagtcacaacgttccatctcgtatgccgtcttctgcttgaaaa

SEQ ID NO: 21343 - DNA, 96 bp, Aspergillus viridinutans
  misc_feature: 57
aggtggtcaattgtatataattaattcattattttcataaatataatttgttaataaaaaatataaataagttttataacctaaattattataaaa

SEQ ID NO: 21344 - DNA, 96 bp, Aspergillus viridinutans
  misc_feature: 57
ttaattgtatttacaatttgtatttacaattattttaattactataattattttctttattagttaaggttaccttacttaaatggttgtacacaa

SEQ ID NO: 21345 - DNA, 96 bp, Aspergillus viridinutans
  misc_feature: 57
tatggtattgaatcaatatcctgactagatgatgattcaatatcaaatactatggtattgaatcgatatcctgactagatgatgattcgatatcaa

SEQ ID NO: 21346 - DNA, 96 bp, Aspergillus viridinutans
  misc_feature: 57
ttgaatcgatatcctgactagatgatgattcgatatcaaatactatggtattgaatcgatatcctgactagatgatgaggaatactatggtatcaa

SEQ ID NO: 21347 - DNA, 96 bp, Aspergillus viridinutans
  misc_feature: 57
ttacttaataattaatagtcataagattcattctattattattatatctcggtttattaatgtattattagtattattatttaaattaatcttatt

SEQ ID NO: 21348 - DNA, 96 bp, Aspergillus viridinutans
  misc_feature: 57
atatatatataatttatacatacgaaattatatacaagtttaatttatatgtatataaatatatatattattacacttgtatattaattgcattaa

SEQ ID NO: 21349 - DNA, 96 bp, Aspergillus viridinutans
  misc_feature: 57
taagtatttaaactattaagtataatatatttaatcaaatgtatataagataaaatttaaatcttattatatcttattatattttaatgttttaca

SEQ ID NO: 21350 - DNA, 96 bp, Aspergillus viridinutans
  misc_feature: 57
ggaagagcacacgtctgaactccagtcacaacgttccatctcgtatgccgtatagatcggaagagcacacgtctgaactccagtcacaacgttcca

SEQ ID NO: 21351 - DNA, 96 bp, Aspergillus viridinutans
  misc_feature: 57
ggaagagcagatcggaagagcacacgtctgaactccagtcacaacgttccatctcgtatgccgtgatcggaagagcacacgtctgaactccagtca

SEQ ID NO: 21352 - DNA, 96 bp, Aspergillus viridinutans
  misc_feature: 57
tgaatcgatatcctgactagatgatgaggaatactatggtatcaatattcatactaggtgatcattcgatatcaaatactatggtattgaatcaat

SEQ ID NO: 21353 - DNA, 96 bp, Aspergillus viridinutans
  misc_feature: 57
tgaactccagtcacaacgttccatctcgtatgccgtatcattgatcggaagagcacacgtctgaactccagtcacaacgttccctctcgtatgccg

SEQ ID NO: 21354 - DNA, 96 bp, Aspergillus viridinutans
  misc_feature: 57
tctgaactccagtcacaacgttccatctcgtatgccgtatcattgatcggaagagcacacgtctgaactccagtcacaacgttccctctcgtatgc

SEQ ID NO: 21355 - DNA, 96 bp, Aspergillus viridinutans
  misc_feature: 57
tcaaatactatggtattgaatcgatatcctgactagatgatgattcgatatcaaatactatggtattgaatcgatatcctgactagatgatgagga

SEQ ID NO: 21356 - DNA, 96 bp, Aspergillus viridinutans
  misc_feature: 57
tatttactagctaaacttttagagccttatatttatatatagtattagtaaaatattattagtaaagtatcttataatctactttctaagatattt

SEQ ID NO: 21357 - DNA, 96 bp, Aspergillus viridinutans
  misc_feature: 57
gtatttaaactattaagtataatatatttaatcaaatgtatataagataaaatttaaatcttattatatcttattatattttaatgttttacaata

SEQ ID NO: 21358 - DNA, 96 bp, Aspergillus viridinutans
  misc_feature: 57
tatcaatattcatactaggtgatcattcgatatcaaatactatggtattgaatcaatatcctgactagatgatgattcaatatcaaatactatggt

SEQ ID NO: 21359 - DNA, 96 bp, Aspergillus viridinutans
  misc_feature: 57
aattacttaataattaatagtcataagattcattctattattattatatctcggtttattaatgtattattagtattattatttaaattaatctta

SEQ ID NO: 21360 - DNA, 96 bp, Aspergillus viridinutans
  misc_feature: 57
gaagagcagatcggaagagcacacgtctgaactccagtcacaacgttccatctcgtatgccgtgatcggaagagcacacgtctgaactccagtcac

SEQ ID NO: 21361 - DNA, 96 bp, Aspergillus viridinutans
  misc_feature: 57
gtctgaactccagtcacaacgttccatctcgtatgccgtagatcgcaagagcacacgtctgaactccagtcacaacgttccatctcgtatgccgtc

SEQ ID NO: 21362 - DNA, 96 bp, Aspergillus viridinutans
  misc_feature: 57
atactatggtattgaatcgatatcctgactagatgatgattcgatatcaaatactatggtattgaatcgatatcctgactagatgatgaggaatac

SEQ ID NO: 21363 - DNA, 96 bp, Aspergillus viridinutans
  misc_feature: 57
ctgaactccagtcacaacgttccatctcgtatgccgtatcattgatcggaagagcacacgtctgaactccagtcacaacgttccctctcgtatgcc

SEQ ID NO: 21364 - DNA, 96 bp, Aspergillus viridinutans
  misc_feature: 57
cggaagagcacacgtctgaactccagtcacaacgttccatctcgtatgccgtatagatcggaagagcacacgtctgaactccagtcacaacgttcc

SEQ ID NO: 21365 - DNA, 96 bp, Aspergillus viridinutans
  misc_feature: 57
agtcacaacgttccatctcgtatgccgtatcattgatcggaagagcacacgtctgaactccagtcacaacgttccaactcgtatgccgtcttctgc

SEQ ID NO: 21366 - DNA, 96 bp, Aspergillus viridinutans
  misc_feature: 57
gatttaaatcttattatatcttattatagtatattaaagtatatattattaaatatttacttgttattttataataaaataatatatacattacat

SEQ ID NO: 21367 - DNA, 96 bp, Aspergillus viridinutans
  misc_feature: 57
gagtagaagttagatttaataattattaatattagtttaaacttattaaaataactttaataactcctaatttatctttctttaaggttaaattat

SEQ ID NO: 21368 - DNA, 96 bp, Aspergillus viridinutans
  misc_feature: 57
gaagagcacacgtctgaactccagtcacaacgttccatctcgtatgccgtatagatcggaagagcacacgtctgaactccagtcacaacgttccat

SEQ ID NO: 21369 - DNA, 96 bp, Aspergillus viridinutans
  misc_feature: 57
atcggaagagcagatcggaagagcacacgtctgaactccagtcacaacgttccatctcgtatgccgtgatcggaagagcacacgtctgaactccag

SEQ ID NO: 21370 - DNA, 96 bp, Aspergillus viridinutans
  misc_feature: 57
cgtctgaactccagtcacaacgttccatctcgtatgccgtcttctgcttgaaaaaaaaaatgaactccagtcacaacgttccatctcgtatgccgt

SEQ ID NO: 21371 - DNA, 96 bp, Aspergillus viridinutans
  misc_feature: 57
ccagtcacaacgttccatctcgtatgccgtatcattgatcggaagagcacacgtctgaactccagtcacaacgttccaactcgtatgccgtcttct

SEQ ID NO: 21372 - DNA, 96 bp, Aspergillus viridinutans
  misc_feature: 57
acctagtaattagaatacattagattctatactaatatgctatatttatatatataatcatattatatatatatatatatactagatactagtatg

SEQ ID NO: 21373 - DNA, 96 bp, Aspergillus viridinutans
  misc_feature: 57
cagtcacaacgttccatctcgtatgccgtatcattgatcggaagagcacacgtctgaactccagtcacaacgttccaactcgtatgccgtcttctg

SEQ ID NO: 21374 - DNA, 96 bp, Aspergillus viridinutans
  misc_feature: 57
cacaacgttccatctcgtatgccgtatccttgatcggaagagcacacgtctgaactccagtcacaacgttccatctcgtatgccgtcttctgcttg

SEQ ID NO: 21375 - DNA, 96 bp, Aspergillus viridinutans
  misc_feature: 57
agaattcgagtttctctcccggctaattaattattatataaaatttatagacattaatgttatttgttatctttagtttaaatttaactgactaat

SEQ ID NO: 21376 - DNA, 96 bp, Aspergillus viridinutans
  misc_feature: 57
attacttaataattaatagtcataagattcattctattattattatatctcggtttattaatgtattattagtattattatttaaattaatcttat

SEQ ID NO: 21377 - DNA, 96 bp, Aspergillus viridinutans
  misc_feature: 57
aatcgatatcctgactagatgatgaggaatactatggtatcaatattcatactaggtgatcattcgatatcaaatactatggtattgaatcaatat

SEQ ID NO: 21378 - DNA, 96 bp, Aspergillus viridinutans
  misc_feature: 56
ttttataattataatctatttatagtcaaataaaacttaatttaaaaattaatattgaagattaataggataaaaataaacaagtatgagcgttaa

SEQ ID NO: 21379 - DNA, 96 bp, Aspergillus viridinutans
  misc_feature: 56
taggtggtcaattgtatataattaattcattattttcataaatataatttgttaataaaaaatataaataagttttataacctaaattattataaa

SEQ ID NO: 21380 - DNA, 96 bp, Aspergillus viridinutans
  misc_feature: 56
tttaggtggtcaattgtatataattaattcattattttcataaatataatttgttaataaaaaatataaataagttttataacctaaattattata

SEQ ID NO: 21381 - DNA, 96 bp, Aspergillus viridinutans
  misc_feature: 56
tatatatataatttatacatacgaaattatatacaagtttaatttatatgtatataaatatatatattattacacttgtatattaattgcattaaa

SEQ ID NO: 21382 - DNA, 96 bp, Aspergillus viridinutans
  misc_feature: 56
tttaatcaaatgtatataagataagatttaaatcttattatatcttattatagtatattaaagtatatattattaaatatttacttgttattttat

SEQ ID NO: 21383 - DNA, 96 bp, Aspergillus viridinutans
  misc_feature: 56
ttgttaataaaaaatataaataagttttataacctaaattattataaaaaaataagattaatttaaataataatactaataatacattaataaacc

SEQ ID NO: 21384 - DNA, 96 bp, Aspergillus viridinutans
  misc_feature: 56
agagcagatcggaagagcacacgtctgaactccagtcacaacgttccatctcgtatgccgtgatcggaagagcacacgtctgaactccagtcacaa

SEQ ID NO: 21385 - DNA, 96 bp, Aspergillus viridinutans
  misc_feature: 56
ttaggtttaggtggtcaattgtatataattaattcattattttcataaatataatttgttaataaaaaatataaataagttttataacctaaatta

SEQ ID NO: 21386 - DNA, 96 bp, Aspergillus viridinutans
  misc_feature: 56
ttaatcaaatgtatataagataagatttaaatcttattatatcttattatagtatattaaagtatatattattaaatatttacttgttattttata

SEQ ID NO: 21387 - DNA, 96 bp, Aspergillus viridinutans
  misc_feature: 56
ctcttccgatcagatcggaagagcgtcgtgtagggaaagagtgtagtactccgtgtagatctcggtggtcgccgtatcattaaaaaaaaaaaaaca

SEQ ID NO: 21388 - DNA, 96 bp, Aspergillus viridinutans
  misc_feature: 56
tgttaataaaaaatataaataagttttataacctaaattattataaaaaaataagattaatttaaataataatactaataatacattaataaaccg

SEQ ID NO: 21389 - DNA, 96 bp, Aspergillus viridinutans
  misc_feature: 56
aagagcagatcggaagagcacacgtctgaactccagtcacaacgttccatctcgtatgccgtgatcggaagagcacacgtctgaactccagtcaca

SEQ ID NO: 21390 - DNA, 96 bp, Aspergillus viridinutans
  misc_feature: 56
agatttaaatcttattatatcttattatagtatattaaagtatatattattaaatatttacttgttattttataataaaataatatatacattaca

SEQ ID NO: 21391 - DNA, 96 bp, Aspergillus viridinutans
  misc_feature: 56
aactccagtcacaacgttccatctcgtatgccgtatcattagatcggaagagcagatcggaagagcacacgtctgaactccagtcacaacgttcca

SEQ ID NO: 21392 - DNA, 96 bp, Aspergillus viridinutans
  misc_feature: 56
tgactagatgatgaggaatactatggtatcaatattcatactaggtgatcattcgatatcaaatactatggtattgaatcaatatcctgactagat

SEQ ID NO: 21393 - DNA, 96 bp, Aspergillus viridinutans
  misc_feature: 56
tgaactccagtcacaacgttccatctcgtatgccgtatcattagatcggaagagcagatcggaagagcacacgtctgaactccagtcacaacgttc

SEQ ID NO: 21394 - DNA, 96 bp, Aspergillus viridinutans
  misc_feature: 56
tcttccgatcagatcggaagagcgtcgtgtagggaaagagtgtagtactccgtgtagatctcggtggtcgccgtatcattaaaaaaaaaaaaaaga

SEQ ID NO: 21395 - DNA, 96 bp, Aspergillus viridinutans
  misc_feature: 56
tctgaactccagtcacaacgttccatctcgtatgccgtatcattagatcggaagagcagatcggaagagcacacgtctgaactccagtcacaacgt

SEQ ID NO: 21396 - DNA, 96 bp, Aspergillus viridinutans
  misc_feature: 56
ctgactagatgatgaggaatactatggtatcaatattcatactaggtgatcattcgatatcaaatactatggtattgaatcaatatcctgactaga

SEQ ID NO: 21397 - DNA, 96 bp, Aspergillus viridinutans
  misc_feature: 56
aatataaaagatattatatataagctaggtattattattagctatattaatatagattatataggatatattaatatatactatttaactactaga

SEQ ID NO: 21398 - DNA, 96 bp, Aspergillus viridinutans
  misc_feature: 56
tctaattaagagtagaagttagatttaataattattaatattagtttaaacttattaaaataactttaataactcctaatttatctttctttaagg

SEQ ID NO: 21399 - DNA, 96 bp, Aspergillus viridinutans
  misc_feature: 56
gttaataaaaaatataaataagttttataacctaaattattataaaaaaataagattaatttaaataataatactaataatacattaataaaccga

SEQ ID NO: 21400 - DNA, 96 bp, Aspergillus viridinutans
  misc_feature: 56
tcggaagagcacacgtctgaactccagtcacaacgttccatctcgtatgccgtatagatcggaagagcacacgtctgaactccagtcacaacgttc

SEQ ID NO: 21401 - DNA, 96 bp, Aspergillus viridinutans
  misc_feature: 56
tcgatatcctgactagatgatgaggaatactatggtatcaatattcatactaggtgatcattcgatatcaaatactatggtattgaatcaatatcc

SEQ ID NO: 21402 - DNA, 96 bp, Aspergillus viridinutans
  misc_feature: 56
tatatatatataatttatacatacgaaattatatacaagtttaatttatatgtatataaatatatatattattacacttgtatattaattgcatta

SEQ ID NO: 21403 - DNA, 96 bp, Aspergillus viridinutans
  misc_feature: 56
taggtttaggtggtcaattgtatataattaattcattattttcataaatataatttgttaataaaaaatataaataagttttataacctaaattat

SEQ ID NO: 21404 - DNA, 96 bp, Aspergillus viridinutans
  misc_feature: 56
ggtttaggtggtcaattgtatataattaattcattattttcataaatataatttgttaataaaaaatataaataagttttataacctaaattatta

SEQ ID NO: 21405 - DNA, 96 bp, Aspergillus viridinutans
  misc_feature: 56
gaactccagtcacaacgttccatctcgtatgccgtatcattagatcggaagagcagatcggaagagcacacgtctgaactccagtcacaacgttcc

SEQ ID NO: 21406 - DNA, 96 bp, Aspergillus viridinutans
  misc_feature: 56
gatcggaagagcacacgtctgaactccagtcacaacgttccatctcggtggtcgcgatcggaagagcacacgtctgaactccagtcacaacgttcc

SEQ ID NO: 21407 - DNA, 96 bp, Aspergillus viridinutans
  misc_feature: 56
gcacacgtctgaactccagtcacaacgttccatctcgtatgccgtatcctgatcggaagagcacacgtctgaactccagtcacaacgttccatctc

SEQ ID NO: 21408 - DNA, 96 bp, Aspergillus viridinutans
  misc_feature: 56
aagagcacacgtctgaactccagtcacaacgttccatctcgtatgccgtatagatcggaagagcacacgtctgaactccagtcacaacgttccatc

SEQ ID NO: 21409 - DNA, 96 bp, Aspergillus viridinutans
  misc_feature: 56
gagcacacgtctgaactccagtcacaacgttccatctcgtatgccgtatcctgatcggaagagcacacgtctgaactccagtcacaacgttccatc

SEQ ID NO: 21410 - DNA, 96 bp, Aspergillus viridinutans
  misc_feature: 56
gatcggaagagcacacgtctgaactccagtcacaacgttccatctcgtatgccgtatagatcggaagagcacacgtctgaactccagtcacaacgt

SEQ ID NO: 21411 - DNA, 96 bp, Aspergillus viridinutans
  misc_feature: 56
atcgatatcctgactagatgatgaggaatactatggtatcaatattcatactaggtgatcattcgatatcaaatactatggtattgaatcaatatc

SEQ ID NO: 21412 - DNA, 96 bp, Aspergillus viridinutans
  misc_feature: 56
atgaatattgataccatagtattcctcatcatctagtcaggatatcgattcaataccatagtatttgatatcgaatcatcatctagtcaggatatc

SEQ ID NO: 21413 - DNA, 96 bp, Aspergillus viridinutans
  misc_feature: 56
gaataatatctaattaagagtagaagttagatttaataattattaatattagtttaaacttattaaaataactttaataactcctaatttatcttt

SEQ ID NO: 21414 - DNA, 96 bp, Aspergillus viridinutans
  misc_feature: 56
aataatatctaattaagagtagaagttagatttaataattattaatattagtttaaacttattaaaataactttaataactcctaatttatctttc

SEQ ID NO: 21415 - DNA, 96 bp, Aspergillus viridinutans
  misc_feature: 56
caagttgatatcctgactagttgatgattcaatattgaatactatggtattgaatcaacatccatactaggtgatgattcgatatcgaatactaag

SEQ ID NO: 21416 - DNA, 96 bp, Aspergillus viridinutans
  misc_feature: 56
ctgaactccagtcacaacgttccatctcgtatgccgtatcattagatcggaagagcagatcggaagagcacacgtctgaactccagtcacaacgtt

SEQ ID NO: 21417 - DNA, 96 bp, Aspergillus viridinutans
  misc_feature: 56
cgatatcctgactagatgatgaggaatactatggtatcaatattcatactaggtgatcattcgatatcaaatactatggtattgaatcaatatcct

SEQ ID NO: 21418 - DNA, 96 bp, Aspergillus viridinutans
  misc_feature: 56
cgatatccctactagatgacattcaatattgattcgatatccctactagatgacatttgatatcgattcgatattgattcaatatcaatactagat

SEQ ID NO: 21419 - DNA, 96 bp, Aspergillus viridinutans
  misc_feature: 56
cacacgtctgaactccagtcacaacgttccatctcgtatgccgtatcctgatcggaagagcacacgtctgaactccagtcacaacgttccatctcg

SEQ ID NO: 21420 - DNA, 96 bp, Aspergillus viridinutans
  misc_feature: 56
ccttagtattcgatatcgaatcatcacctagtatggatgttgattcaataccatagtattcaatattgaatcatcaactagtcaggatatcaactt

SEQ ID NO: 21421 - DNA, 96 bp, Aspergillus viridinutans
  misc_feature: 56
atcaaatactatggtattgaatcgatatcctgactagatgatgattcgatatcaaatactatggtattgaatcgatatcctgactagatgatgagg

SEQ ID NO: 21422 - DNA, 96 bp, Aspergillus viridinutans
  misc_feature: 56
agagcacacgtctgaactccagtcacaacgttccatctcgtatgccgtcttctgcttgaaaaaaaaaacgtctgaactccagtcacaacgttccat

SEQ ID NO: 21423 - DNA, 96 bp, Aspergillus viridinutans
  misc_feature: 56
agagcacacgtctgaactccagtcacaacgttccatctcgtatgccgtatcctgatcggaagagcacacgtctgaactccagtcacaacgttccat

SEQ ID NO: 21424 - DNA, 96 bp, Aspergillus viridinutans
  misc_feature: 56
acttacttacttatatagcttatctctcttactagattctatcttaattaattcttcttacttacttacttatatagcttatctctcttactagat

SEQ ID NO: 21425 - DNA, 96 bp, Aspergillus viridinutans
  misc_feature: 56
atcggaagagcacacgtctgaactccagtcacaacgttccatctcgtatgccgtatagatcggaagagcacacgtctgaactccagtcacaacgtt

SEQ ID NO: 21426 - DNA, 96 bp, Aspergillus viridinutans
  misc_feature: 56
aggtttaggtggtcaattgtatataattaattcattattttcataaatataatttgttaataaaaaatataaataagttttataacctaaattatt

SEQ ID NO: 21427 - DNA, 96 bp, Aspergillus viridinutans
  misc_feature: 56
agcacacgtctgaactccagtcacaacgttccatctcgtatgccgtatcctgatcggaagagcacacgtctgaactccagtcacaacgttccatct

SEQ ID NO: 21428 - DNA, 96 bp, Aspergillus viridinutans
  misc_feature: 56
agaataatatctaattaagagtagaagttagatttaataattattaatattagtttaaacttattaaaataactttaataactcctaatttatctt

SEQ ID NO: 21429 - DNA, 96 bp, Aspergillus viridinutans
  misc_feature: 56
acacgtctgaactccagtcacaacgttccatctcgtatgccgtatcctgatcggaagagcacacgtctgaactccagtcacaacgttccatctcgt

SEQ ID NO: 21430 - DNA, 96 bp, Aspergillus viridinutans
  misc_feature: 55
ctcttccgatcgatcggaagagcgtcgtgtagggaaagagtgtagtactccgtgtagatctcggtggtcgccgtatcattaaaaaaaaaaaaaaaa

SEQ ID NO: 21431 - DNA, 96 bp, Aspergillus viridinutans
  misc_feature: 55
taattgtatttacaatttgtatttacaattattttaattactataattattttctttattagttaaggttaccttacttaaatggttgtacacaaa

SEQ ID NO: 21432 - DNA, 96 bp, Aspergillus viridinutans
  misc_feature: 55
acgtctgaactccagtcacaacgttccatctcgtatgccgtatcattagatcggaagagcagatcggaagagcacacgtctgaactccagtcacaa

SEQ ID NO: 21433 - DNA, 96 bp, Aspergillus viridinutans
  misc_feature: 55
ttgaatcgatatcctgactagatgatgaggaatactatggtatcaatattcatactaggtgatcattcgatatcaaatactatggtattgaatcaa

SEQ ID NO: 21434 - DNA, 96 bp, Aspergillus viridinutans
  misc_feature: 55
caaatactatggtattgaatcgatatcctgactagatgatgattcgatatcaaatactatggtattgaatcgatatcctgactagatgatgaggaa

SEQ ID NO: 21435 - DNA, 96 bp, Aspergillus viridinutans
  misc_feature: 55
tcggaagagcacacgtctgaactccagtcacaacgttccatctcgtatgccgtatcattagatcggaagagcagatcggaagagcacacgtctgaa

SEQ ID NO: 21436 - DNA, 96 bp, Aspergillus viridinutans
  misc_feature: 55
ttaggtggtcaattgtatataattaattcattattttcataaatataatttgttaataaaaaatataaataagttttataacctaaattattataa

SEQ ID NO: 21437 - DNA, 96 bp, Aspergillus viridinutans
  misc_feature: 55
attaagtaaagaataatatctaattaagagtagaagttagattaataattattaatattaatttaaacttattaaaataactttaataacttctaa

SEQ ID NO: 21438 - DNA, 96 bp, Aspergillus viridinutans
  misc_feature: 55
ttacttacttacttatatagcttatctctcttactagattctatcttaattaattcttcttacttacttacttatatagcttatctctcttactag

SEQ ID NO: 21439 - DNA, 96 bp, Aspergillus viridinutans
  misc_feature: 55
gctcttccgatcagatcggaagagcgtcgtgtagggaaagagtgtagtactccgtgtagatctcggtggtcgccgtatcattaaaaaaaaaaaaca

SEQ ID NO: 21440 - DNA, 96 bp, Aspergillus viridinutans
  misc_feature: 55
cacgtctgaactccagtcacaacgttccatctcgtatgccgtatcattagatcggaagagcagatcggaagagcacacgtctgaactccagtcaca

SEQ ID NO: 21441 - DNA, 96 bp, Aspergillus viridinutans
  misc_feature: 55
agagcacacgtctgaactccagtcacaacgttccatctcgtatgccgtatcattagatcggaagagcagatcggaagagcacacgtctgaactcca

SEQ ID NO: 21442 - DNA, 96 bp, Aspergillus viridinutans
  misc_feature: 55
gatcggaagagcagatcggaagagcacacgtctgaactccagtcacaacgttccatctcgtatgccgtgatcggaagagcacacgtctgaactcca

SEQ ID NO: 21443 - DNA, 96 bp, Aspergillus viridinutans
  misc_feature: 55
gaagagcacacgtctgaactccagtcacaacgttccatctcgtatgccgtatcatatcggaagagcacacgtctgaactccagtcacaacgttcca

SEQ ID NO: 21444 - DNA, 96 bp, Aspergillus viridinutans
  misc_feature: 55
gatgacattcgatatccctactagatgacattcaatattgattcgatatccctactagatgacatttgatatcgattcgatattgattcaatatca

SEQ ID NO: 21445 - DNA, 96 bp, Aspergillus viridinutans
  misc_feature: 55
tgataccttagtattcgatatcgaatcatcacctagtatggatgttgattcaataccatagtattcaatattgaatcatcaactagtcaggatatc

SEQ ID NO: 21446 - DNA, 96 bp, Aspergillus viridinutans
  misc_feature: 55
cacacgtctgaactccagtcacaacgttccatctcgtatgccgtatcattagatcggaagagcagatcggaagagcacacgtctgaactccagtca

SEQ ID NO: 21447 - DNA, 96 bp, Aspergillus viridinutans
  misc_feature: 55
atcggaagagcgtcgtgtagggaaagagtgtagtactccgtgtagatctcggtggtcgccgtatcattaaaaaaaaaaaagacgtgtagggaaaga

SEQ ID NO: 21448 - DNA, 96 bp, Aspergillus viridinutans
  misc_feature: 55
tacttacttacttatatagcttatctctcttactagattctatcttaattaattcttcttacttacttacttatatagcttatctctcttactaga

SEQ ID NO: 21449 - DNA, 96 bp, Aspergillus viridinutans
  misc_feature: 55
tcggaagagcacacgtctgaactccagtcacaacgttccatctcgtatgccgtatcattgatcggaagagcacacgtctgaactcccgtcacaacg

SEQ ID NO: 21450 - DNA, 96 bp, Aspergillus viridinutans
  misc_feature: 55
tcggaagagcacacgtctgaactccagtcacaacgttccatctcgtatgccgtatcatatcggaagagcacacgtctgaactccagtcacaacgtt

SEQ ID NO: 21451 - DNA, 96 bp, Aspergillus viridinutans
  misc_feature: 55
atcggaagagcacacgtctgaactccagtcacaacgttccatctcgtatgccgtatcattagatcggaagagcagatcggaagagcacacgtctga

SEQ ID NO: 21452 - DNA, 96 bp, Aspergillus viridinutans
  misc_feature: 55
tatccctactagatgacattcaatattgattcgatatccctactagatgacatttgatatcgattcgatattgattcaatatcaatactagatgat

SEQ ID NO: 21453 - DNA, 96 bp, Aspergillus viridinutans
  misc_feature: 55
tatcaaatactatggtattgaatcgatatcctgactagatgatgattcgatatcaaatactatggtattgaatcgatatcctgactagatgatgag

SEQ ID NO: 21454 - DNA, 96 bp, Aspergillus viridinutans
  misc_feature: 55
ataatataaaagatattatatataagctaggtattattattagctatattaatatagattatataggatatattaatatatactatttaactacta

SEQ ID NO: 21455 - DNA, 96 bp, Aspergillus viridinutans
  misc_feature: 55
cacgtctgaactccagtcacaacgttccatctcgtatgccgtatcctgatcggaagagcacacgtctgaactccagtcacaacgttccatctcgta

SEQ ID NO: 21456 - DNA, 96 bp, Aspergillus viridinutans
  misc_feature: 55
taatatctaattaagagtagaagttagatttaataattattaatattagtttaaacttattaaaataactttaataactcctaatttatctttctt

SEQ ID NO: 21457 - DNA, 96 bp, Aspergillus viridinutans
  misc_feature: 55
taatataaaagatattatatataagctaggtattattattagctatattaatatagattatataggatatattaatatatactatttaactactag

SEQ ID NO: 21458 - DNA, 96 bp, Aspergillus viridinutans
  misc_feature: 55
cgtctgaactccagtcacaacgttccatctcgtatgccgtatcattagatcggaagagcagatcggaagagcacacgtctgaactccagtcacaac

SEQ ID NO: 21459 - DNA, 96 bp, Aspergillus viridinutans
  misc_feature: 55
gagcagatcggaagagcacacgtctgaactccagtcacaacgttccatctcgtatgccgtgatcggaagagcacacgtctgaactccagtcacaac

SEQ ID NO: 21460 - DNA, 96 bp, Aspergillus viridinutans
  misc_feature: 55
cggaagagcacacgtctgaactccagtcacaacgttccatctcgtatgccgtatcattagatcggaagagcagatcggaagagcacacgtctgaac

SEQ ID NO: 21461 - DNA, 96 bp, Aspergillus viridinutans
  misc_feature: 55
acacgtctgaactccagtcacaacgttccatctcgtatgccgtatcattagatcggaagagcagatcggaagagcacacgtctgaactccagtcac

SEQ ID NO: 21462 - DNA, 96 bp, Aspergillus viridinutans
  misc_feature: 55
gtctgaactccagtcacaacgttccatctcgtatgccgtatcctgatcggaagagcacacgtctgaactccagtcacaacgttccatctcgtatgc

SEQ ID NO: 21463 - DNA, 96 bp, Aspergillus viridinutans
  misc_feature: 55
gtctgaactccagtcacaacgttccatctcgtatgccgtatcattagatcggaagagcagatcggaagagcacacgtctgaactccagtcacaacg

SEQ ID NO: 21464 - DNA, 96 bp, Aspergillus viridinutans
  misc_feature: 55
gggtgagccggcgcgcgcgagggtgacgagggaaggaatcgggaggggaagggcaagggaaagggagagggaggaggaggggagggaggcggtggg

SEQ ID NO: 21465 - DNA, 96 bp, Aspergillus viridinutans
  misc_feature: 55
aagagcacacgtctgaactccagtcacaacgttccatctcgtatgccgtatcattagatcggaagagcagatcggaagagcacacgtctgaactcc

SEQ ID NO: 21466 - DNA, 96 bp, Aspergillus viridinutans
  misc_feature: 55
ggaagagcacacgtctgaactccagtcacaacgttccatctcgtatgccgtatcattagatcggaagagcagatcggaagagcacacgtctgaact

SEQ ID NO: 21467 - DNA, 96 bp, Aspergillus viridinutans
  misc_feature: 55
ggaagagcacacgtctgaactccagtcacaacgttccatctcgtatgccgtatcatatcggaagagcacacgtctgaactccagtcacaacgttcc

SEQ ID NO: 21468 - DNA, 96 bp, Aspergillus viridinutans
  misc_feature: 55
gcagatcggaagagcacacgtctgaactccagtcacaacgttccatctcgtatgccgtgatcggaagagcacacgtctgaactccagtcacaacgt

SEQ ID NO: 21469 - DNA, 96 bp, Aspergillus viridinutans
  misc_feature: 55
gcacacgtctgaactccagtcacaacgttccatctcgtatgccgtatcattagatcggaagagcagatcggaagagcacacgtctgaactccagtc

SEQ ID NO: 21470 - DNA, 96 bp, Aspergillus viridinutans
  misc_feature: 55
gcacacgtctgaactccagtcacaacgttccatctcgtatgccgtatagatcggaagagcacacgtctgaactccagtcacaacgttccatctcgt

SEQ ID NO: 21471 - DNA, 96 bp, Aspergillus viridinutans
  misc_feature: 55
gaagagcacacgtctgaactccagtcacaacgttccatctcgtatgccgtatcattagatcggaagagcagatcggaagagcacacgtctgaactc

SEQ ID NO: 21472 - DNA, 96 bp, Aspergillus viridinutans
  misc_feature: 55
gagtactacactctttccctacacgacgctcttccgatcgatcggaagagcacacgtctgaactccagtcacaacgttccatctcgtatgccgtat

SEQ ID NO: 21473 - DNA, 96 bp, Aspergillus viridinutans
  misc_feature: 55
gagcacacgtctgaactccagtcacaacgttccatctcgtatgccgtatcattagatcggaagagcagatcggaagagcacacgtctgaactccag

SEQ ID NO: 21474 - DNA, 96 bp, Aspergillus viridinutans
  misc_feature: 55
gagcacacgtctgaactccagtcacaacgttccatctcgtatgccgtatagatcggaagagcacacgtctgaactccagtcacaacgttccatctc

SEQ ID NO: 21475 - DNA, 96 bp, Aspergillus viridinutans
  misc_feature: 55
gactagatgatgaggaatactatggtatcaatattcatactaggtgatcattcgatatcaaatactatggtattgaatcaatatcctgactagatg

SEQ ID NO: 21476 - DNA, 96 bp, Aspergillus viridinutans
  misc_feature: 55
cggaagagcacacgtctgaactccagtcacaacgttccatctcgtatgccgtatcatatcggaagagcacacgtctgaactccagtcacaacgttc

SEQ ID NO: 21477 - DNA, 96 bp, Aspergillus viridinutans
  misc_feature: 55
cttaataattaatagtcataagattcattctattattattatatctcggtttattaatgtattattagtattattatttaaattaatcttattttt

SEQ ID NO: 21478 - DNA, 96 bp, Aspergillus viridinutans
  misc_feature: 55
cctgactagatgatgaggaatactatggtatcaatattcatactaggtgatcattcgatatcaaatactatggtattgaatcaatatcctgactag

SEQ ID NO: 21479 - DNA, 96 bp, Aspergillus viridinutans
  misc_feature: 55
agcagatcggaagagcacacgtctgaactccagtcacaacgttccatctcgtatgccgtgatcggaagagcacacgtctgaactccagtcacaacg

SEQ ID NO: 21480 - DNA, 96 bp, Aspergillus viridinutans
  misc_feature: 55
cgtctgaactccagtcacaacgttccatctcgtatgccgtatcctgatcggaagagcacacgtctgaactccagtcacaacgttccatctcgtatg

SEQ ID NO: 21481 - DNA, 96 bp, Aspergillus viridinutans
  misc_feature: 55
cggaggcgcgcgcggccagaggggcaggcaggcaggcaggcaggcaggcaaagtgggggggggacgcgcggggcccaggtcgcggggggggggggg

SEQ ID NO: 21482 - DNA, 96 bp, Aspergillus viridinutans
  misc_feature: 55
agcacacgtctgaactccagtcacaacgttccatctcgtatgccgtatagatcggaagagcacacgtctgaactccagtcacaacgttccatctcg

SEQ ID NO: 21483 - DNA, 96 bp, Aspergillus viridinutans
  misc_feature: 55
cattcgatatccctactagatgacattcaatattgattcgatatccctactagatgacatttgatatcgattcgatattgattcaatatcaatact

SEQ ID NO: 21484 - DNA, 96 bp, Aspergillus viridinutans
  misc_feature: 55
aaatactatggtattgaatcgatatcctgactagatgatgattcgatatcaaatactatggtattgaatcgatatcctgactagatgatgaggaat

SEQ ID NO: 21485 - DNA, 96 bp, Aspergillus viridinutans
  misc_feature: 55
aatttaggttataaaacttatttatattttttattaacaaattatatttatgaaaataatgaattaattatatacaattgaccacctaaacctaat

SEQ ID NO: 21486 - DNA, 96 bp, Aspergillus viridinutans
  misc_feature: 55
atcctgactagatgatgattcgatatcaaatactatggtattgaatcgatatcctgactagatgatgaggaatactatggtatcaatattcatact

SEQ ID NO: 21487 - DNA, 96 bp, Aspergillus viridinutans
  misc_feature: 55
atatttactagctaaacttttagagccttatatttatatatagtattagtaaaatattattagtaaagtatcttataatctactttctaagatatt

SEQ ID NO: 21488 - DNA, 96 bp, Aspergillus viridinutans
  misc_feature: 55
ataaaagatattatatataagctaggtattattattagctatattaatatagattatataggatatattaatatatactatttaactactagatat

SEQ ID NO: 21489 - DNA, 96 bp, Aspergillus viridinutans
  misc_feature: 55
acgtctgaactccagtcacaacgttccatctcgtatgccgtatcctgatcggaagagcacacgtctgaactccagtcacaacgttccatctcgtat

SEQ ID NO: 21490 - DNA, 96 bp, Aspergillus viridinutans
  misc_feature: 55
ataattaatagtcataagattcattctattattattatatctcggtttattaatgtattattagtattattatttaaattaatcttatttttttat

SEQ ID NO: 21491 - DNA, 96 bp, Aspergillus viridinutans
  misc_feature: 55
ataatatctaattaagagtagaagttagatttaataattattaatattagtttaaacttattaaaataactttaataactcctaatttatctttct

SEQ ID NO: 21492 - DNA, 96 bp, Aspergillus viridinutans
  misc_feature: 55
agcacacgtctgaactccagtcacaacgttccatctcgtatgccgtatcattagatcggaagagcagatcggaagagcacacgtctgaactccagt

SEQ ID NO: 21493 - DNA, 96 bp, Aspergillus viridinutans
  misc_feature: 55
agagcacacgtctgaactccagtcacaacgttccatctcgtatgccgtatagatcggaagagcacacgtctgaactccagtcacaacgttccatct

SEQ ID NO: 21494 - DNA, 96 bp, Aspergillus viridinutans
  misc_feature: 54
ttcgatatccctactagatgacattcaatattgattcgatatccctactagatgacatttgatatcgattcgatattgattcaatatcaatactag

SEQ ID NO: 21495 - DNA, 96 bp, Aspergillus viridinutans
  misc_feature: 54
tctgaactccagtcacaacgttccatctcgtatgccgtatcagaccggaagagcacacgtctgaactccagtcacaacgttccatctcgtatgccg

SEQ ID NO: 21496 - DNA, 96 bp, Aspergillus viridinutans
  misc_feature: 54
tctgaactccagtcacaacgttccatctcgtatgccgtagatcggaagagcacacgtctgaactccagtcacaacgttccatctcgtatgccgtcg

SEQ ID NO: 21497 - DNA, 96 bp, Aspergillus viridinutans
  misc_feature: 54
tcggaagagcgtcgtgtagggaaagagtgtagtactccgtgtagatctcggtggtcgccgtatcattaaaaaaaaaaaagacgtgtagggaaagag

SEQ ID NO: 21498 - DNA, 96 bp, Aspergillus viridinutans
  misc_feature: 54
tcctgactagatgatgattcgatatcaaatactatggtattgaatcgatatcctgactagatgatgaggaatactatggtatcaatattcatacta

SEQ ID NO: 21499 - DNA, 96 bp, Aspergillus viridinutans
  misc_feature: 54
tccagtcacaacgttccatctcgtatgccgtatcattagatcggaagagcagatcggaagagcacacgtctgaactccagtcacaacgttccatct

SEQ ID NO: 21500 - DNA, 96 bp, Aspergillus viridinutans
  misc_feature: 54
tcacaacgttccatctcgtatgccgtatcattagatcggaagagcagatcggaagagcacacgtctgaactccagtcacaacgttccatctcgtat

SEQ ID NO: 21501 - DNA, 96 bp, Aspergillus viridinutans
  misc_feature: 54
tatcctgactagatgatgattcgatatcaaatactatggtattgaatcgatatcctgactagatgatgaggaatactatggtatcaatattcatac

SEQ ID NO: 21502 - DNA, 96 bp, Aspergillus viridinutans
  misc_feature: 54
gttataaaacttatttatattttttattaacaaattatatttatgaaaataatgaattaattatatacaattgaccacctaaacctaatccagcta

SEQ ID NO: 21503 - DNA, 96 bp, Aspergillus viridinutans
  misc_feature: 54
gtcacaacgttccatctcgtatgccgtatcattagatcggaagagcagatcggaagagcacacgtctgaactccagtcacaacgttccatctcgta

SEQ ID NO: 21504 - DNA, 96 bp, Aspergillus viridinutans
  misc_feature: 54
acacgtctgaactccagtcacaacgttccatctcgtatgccgtatcatatcggaagagcacacgtctgaactccagtcacaacgttccatctcgta

SEQ ID NO: 21505 - DNA, 96 bp, Aspergillus viridinutans
  misc_feature: 54
atcggaagagcacacgtctgaactccagtcacaacgttccatctcgtatgccgtatcattgatcggaagagcacacgtctgaactcccgtcacaac

SEQ ID NO: 21506 - DNA, 96 bp, Aspergillus viridinutans
  misc_feature: 54
agatcggaagagcacacgtctgaactccagtcacaacgttccatctcgtatgccgtatcattagatcggaagagcacacgtctgaactccagtcac

SEQ ID NO: 21507 - DNA, 96 bp, Aspergillus viridinutans
  misc_feature: 54
gtctgaactccagtcacaacgttccatctcgtatgccgtatcatatcggaagagcacacgtctgaactccagtcacaacgttccatctcgtatgcc

SEQ ID NO: 21508 - DNA, 96 bp, Aspergillus viridinutans
  misc_feature: 54
cgtctgaactccagtcacaacgttccatctcgtatgccgtatcatatcggaagagcacacgtctgaactccagtcacaacgttccatctcgtatgc

SEQ ID NO: 21509 - DNA, 96 bp, Aspergillus viridinutans
  misc_feature: 54
gcacacgtctgaactccagtcacaacgttccatctcgtatgccgtatcatatcggaagagcacacgtctgaactccagtcacaacgttccatctcg

SEQ ID NO: 21510 - DNA, 96 bp, Aspergillus viridinutans
  misc_feature: 54
agagcacacgtctgaactccagtcacaacgttccatctcgtatgccgtatcatatcggaagagcacacgtctgaactccagtcacaacgttccatc

SEQ ID NO: 21511 - DNA, 96 bp, Aspergillus viridinutans
  misc_feature: 54
gatgatgattcaatatcaaatactatggtattgaatcgatatcctgactagatgatgattcgatatcaaatactatggtattgaatcgatatcctg

SEQ ID NO: 21512 - DNA, 96 bp, Aspergillus viridinutans
  misc_feature: 54
gatcggaagagcacacgtctgaactccagtcacaacgttccatctcgtatgccgtatcattagatcggaagagcagatcggaagagcacacgtctg

SEQ ID NO: 21513 - DNA, 96 bp, Aspergillus viridinutans
  misc_feature: 54
gagcacacgtctgaactccagtcacaacgttccatctcgtatgccgtatcatatcggaagagcacacgtctgaactccagtcacaacgttccatct

SEQ ID NO: 21514 - DNA, 96 bp, Aspergillus viridinutans
  misc_feature: 54
ccagtcacaacgttccatctcgtatgccgtatcattagatcggaagagcagatcggaagagcacacgtctgaactccagtcacaacgttccatctc

SEQ ID NO: 21515 - DNA, 96 bp, Aspergillus viridinutans
  misc_feature: 54
agcacacgtctgaactccagtcacaacgttccatctcgtatgccgtatcatatcggaagagcacacgtctgaactccagtcacaacgttccatctc

SEQ ID NO: 21516 - DNA, 96 bp, Aspergillus viridinutans
  misc_feature: 54
cttacttacttatatagcttatctctcttactagattctatcttaattaattcttcttacttacttacttatatagcttatctctcttactagatt

SEQ ID NO: 21517 - DNA, 96 bp, Aspergillus viridinutans
  misc_feature: 54
ctgaactccagtcacaacgttccatctcgtatgccgtatcagaccggaagagcacacgtctgaactccagtcacaacgttccatctcgtatgccgt

SEQ ID NO: 21518 - DNA, 96 bp, Aspergillus viridinutans
  misc_feature: 54
cagtcacaacgttccatctcgtatgccgtatcattagatcggaagagcagatcggaagagcacacgtctgaactccagtcacaacgttccatctcg

SEQ ID NO: 21519 - DNA, 96 bp, Aspergillus viridinutans
  misc_feature: 54
cctagtaattagaatacattagattctatactaatatgctatatttatatatataatcatattatatatatatatatatactagatactagtatgg

SEQ ID NO: 21520 - DNA, 96 bp, Aspergillus viridinutans
  misc_feature: 54
ccagtcacaacgttccatctcgtatgccgtatcatgatcggaagagcacacgtctgaactccagtcacaacgttccatctcgtatgccgtatcatg

SEQ ID NO: 21521 - DNA, 96 bp, Aspergillus viridinutans
  misc_feature: 54
acgtctgaactccagtcacaacgttccatctcgtatgccgtatcatatcggaagagcacacgtctgaactccagtcacaacgttccatctcgtatg

SEQ ID NO: 21522 - DNA, 96 bp, Aspergillus viridinutans
  misc_feature: 54
cacgtctgaactccagtcacaacgttccatctcgtatgccgtatcatatcggaagagcacacgtctgaactccagtcacaacgttccatctcgtat

SEQ ID NO: 21523 - DNA, 96 bp, Aspergillus viridinutans
  misc_feature: 54
aactccagtcacaacgttccatctcgtatgccgtatcattgatcggaagagcacacgtctgaactccagtcacaacgttccatctcgtatgccgtg

SEQ ID NO: 21524 - DNA, 96 bp, Aspergillus viridinutans
  misc_feature: 54
cacacgtctgaactccagtcacaacgttccatctcgtatgccgtatcatatcggaagagcacacgtctgaactccagtcacaacgttccatctcgt

SEQ ID NO: 21525 - DNA, 96 bp, Aspergillus viridinutans
  misc_feature: 54
actccagtcacaacgttccatctcgtatgccgtatcattagatcggaagagcagatcggaagagcacacgtctgaactccagtcacaacgttccat

SEQ ID NO: 21526 - DNA, 96 bp, Aspergillus viridinutans
  misc_feature: 54
aagagcacacgtctgaactccagtcacaacgttccatctcgtatgccgtatcatatcggaagagcacacgtctgaactccagtcacaacgttccat

SEQ ID NO: 21527 - DNA, 96 bp, Aspergillus viridinutans
  misc_feature: 54
atataaaagatattatatataagctaggtattattattagctatattaatatagattatataggatatattaatatatactatttaactactagat

SEQ ID NO: 21528 - DNA, 96 bp, Aspergillus viridinutans
  misc_feature: 54
atcggaagagcacacgtctgaactccagtcacaacgttccatctcgtatgccgtatcatatcggaagagcacacgtctgaactccagtcacaacgt

SEQ ID NO: 21529 - DNA, 96 bp, Aspergillus viridinutans
  misc_feature: 54
agtcacaacgttccatctcgtatgccgtatcattagatcggaagagcagatcggaagagcacacgtctgaactccagtcacaacgttccatctcgt

SEQ ID NO: 21530 - DNA, 96 bp, Aspergillus viridinutans
  misc_feature: 53
tttgataccttagtattcgatatcgaatcatcacctagtatggatgttgattcaataccatagtattcaatattgaatcatcaactagtcaggata

SEQ ID NO: 21531 - DNA, 96 bp, Aspergillus viridinutans
  misc_feature: 53
tttaggttataaaacttatttatattttttattaacaaattatatttatgaaaataatgaattaattatatacaattgaccacctaaacctaatcc

SEQ ID NO: 21532 - DNA, 96 bp, Aspergillus viridinutans
  misc_feature: 53
atgacattcgatatccctactagatgacattcaatattgattcgatatccctactagatgacatttgatatcgattcgatattgattcaatatcaa

SEQ ID NO: 21533 - DNA, 96 bp, Aspergillus viridinutans
  misc_feature: 53
ttgataccttagtattcgatatcgaatcatcacctagtatggatgttgattcaataccatagtattcaatattgaatcatcaactagtcaggatat

SEQ ID NO: 21534 - DNA, 96 bp, Aspergillus viridinutans
  misc_feature: 53
ttcaatatcaaatactatggtattgaatcgatatcctgactagatgatgattcgatatcaaatactatggtattgaatcgatatcctgactagatg

SEQ ID NO: 21535 - DNA, 96 bp, Aspergillus viridinutans
  misc_feature: 53
ttattaagtaaagaataatatctaattaagagtagaagttagattaataattattaatattaatttaaacttattaaaataactttaataacttct

SEQ ID NO: 21536 - DNA, 96 bp, Aspergillus viridinutans
  misc_feature: 53
ttaggttataaaacttatttatattttttattaacaaattatatttatgaaaataatgaattaattatatacaattgaccacctaaacctaatcca

SEQ ID NO: 21537 - DNA, 96 bp, Aspergillus viridinutans
  misc_feature: 53
ttaataattaatagtcataagattcattctattattattatatctcggtttattaatgtattattagtattattatttaaattaatcttatttttt

SEQ ID NO: 21538 - DNA, 96 bp, Aspergillus viridinutans
  misc_feature: 53
tcttccgatcagatcggaagagcgtcgtgtagggaaagagtgtagtactccgtgtagatctcggtggtcgccgtatcattaaaaaaaaaaaaaaca

SEQ ID NO: 21539 - DNA, 96 bp, Aspergillus viridinutans
  misc_feature: 53
tggtattgaatcgatatcctgactagatgatgaggaatactatggtatcaatattcatactaggtgatcattcgatatcaaatactatggtattga

SEQ ID NO: 21540 - DNA, 96 bp, Aspergillus viridinutans
  misc_feature: 53
attgaatcgatatcctgactagatgatgaggaatactatggtatcaatattcatactaggtgatcattcgatatcaaatactatggtattgaatca

SEQ ID NO: 21541 - DNA, 96 bp, Aspergillus viridinutans
  misc_feature: 53
tgatgaggaatactatggtatcaatattcatactaggtgatcattcgatatcaaatactatggtattgaatcaatatcctgactagatgatgattc

SEQ ID NO: 21542 - DNA, 96 bp, Aspergillus viridinutans
  misc_feature: 53
tgagaattcgagtttctctcccggctaattaattattatataaaatttatagacattaatgttatttgttatctttagtttaaatttaactgacta

SEQ ID NO: 21543 - DNA, 96 bp, Aspergillus viridinutans
  misc_feature: 53
tgacattcgatatccctactagatgacattcaatattgattcgatatccctactagatgacatttgatatcgattcgatattgattcaatatcaat

SEQ ID NO: 21544 - DNA, 96 bp, Aspergillus viridinutans
  misc_feature: 53
tctgaactccagtcacaacgttccatctcgtatgccgtatcctgatcggaagagcacacgtctgaactccagtcacaacgttccatctcgtatgcc

SEQ ID NO: 21545 - DNA, 96 bp, Aspergillus viridinutans
  misc_feature: 53
tcgatatccctactagatgacattcaatattgattcgatatccctactagatgacatttgatatcgattcgatattgattcaatatcaatactaga

SEQ ID NO: 21546 - DNA, 96 bp, Aspergillus viridinutans
  misc_feature: 53
tcggaggcgcgcgcggccagaggggcaggcaggcaggcaggcaggcaggcaaagtgggggggggacgcgcggggcccaggtcgcgggggggggggg

SEQ ID NO: 21547 - DNA, 96 bp, Aspergillus viridinutans
  misc_feature: 53
actagatgatgaggaatactatggtatcaatattcatactaggtgatcattcgatatcaaatactatggtattgaatcaatatcctgactagatga

SEQ ID NO: 21548 - DNA, 96 bp, Aspergillus viridinutans
  misc_feature: 53
atatcaaatactatggtattgaatcgatatcctgactagatgatgattcgatatcaaatactatggtattgaatcgatatcctgactagatgatga

SEQ ID NO: 21549 - DNA, 96 bp, Aspergillus viridinutans
  misc_feature: 53
atgatgattcaatatcaaatactatggtattgaatcgatatcctgactagatgatgattcgatatcaaatactatggtattgaatcgatatcctga

SEQ ID NO: 21550 - DNA, 96 bp, Aspergillus viridinutans
  misc_feature: 53
actccagtcacaacgttccatctcgtatgccgtatcattgatcggaagagcacacgtctgaactccagtcacaacgttccatctcgtatgccgtga

SEQ ID NO: 21551 - DNA, 96 bp, Aspergillus viridinutans
  misc_feature: 53
tattaagtaaagaataatatctaattaagagtagaagttagattaataattattaatattaatttaaacttattaaaataactttaataacttcta

SEQ ID NO: 21552 - DNA, 96 bp, Aspergillus viridinutans
  misc_feature: 53
tatgaatattgataccatagtattcctcatcatctagtcaggatatcgattcaataccatagtatttgatatcgaatcatcatctagtcaggatat

SEQ ID NO: 21553 - DNA, 96 bp, Aspergillus viridinutans
  misc_feature: 53
tataaaagatattatatataagctaggtattattattagctatattaatatagattatataggatatattaatatatactatttaactactagata

SEQ ID NO: 21554 - DNA, 96 bp, Aspergillus viridinutans
  misc_feature: 53
atccctactagatgacattcaatattgattcgatatccctactagatgacatttgatatcgattcgatattgattcaatatcaatactagatgata

SEQ ID NO: 21555 - DNA, 96 bp, Aspergillus viridinutans
  misc_feature: 53
cacacgtctgaactccagtcacaacgttccatctcgtatgccgtatagatcggaagagcacacgtctgaactccagtcacaacgttccatctcgta

SEQ ID NO: 21556 - DNA, 96 bp, Aspergillus viridinutans
  misc_feature: 53
aataattaatagtcataagattcattctattattattatatctcggtttattaatgtattattagtattattatttaaattaatcttattttttta

SEQ ID NO: 21557 - DNA, 96 bp, Aspergillus viridinutans
  misc_feature: 53
cggaagagcacacgtctgaactccagtcacaacgttccatctcgtatgccgtagatcggaagagcacacgtctgaactccagtcacaacgttccac

SEQ ID NO: 21558 - DNA, 96 bp, Aspergillus viridinutans
  misc_feature: 53
gtctgaactccagtcacaacgttccatctcgtatgccgtatagatcggaagagcacacgtctgaactccagtcacaacgttccatctcgtatgccg

SEQ ID NO: 21559 - DNA, 96 bp, Aspergillus viridinutans
  misc_feature: 53
acattcgatatccctactagatgacattcaatattgattcgatatccctactagatgacatttgatatcgattcgatattgattcaatatcaatac

SEQ ID NO: 21560 - DNA, 96 bp, Aspergillus viridinutans
  misc_feature: 53
gtattgaatcgatatcctgactagatgatgaggaatactatggtatcaatattcatactaggtgatcattcgatatcaaatactatggtattgaat

SEQ ID NO: 21561 - DNA, 96 bp, Aspergillus viridinutans
  misc_feature: 53
ggttataaaacttatttatattttttattaacaaattatatttatgaaaataatgaattaattatatacaattgaccacctaaacctaatccagct

SEQ ID NO: 21562 - DNA, 96 bp, Aspergillus viridinutans
  misc_feature: 53
cgtctgaactccagtcacaacgttccatctcgtatgccgtatagatcggaagagcacacgtctgaactccagtcacaacgttccatctcgtatgcc

SEQ ID NO: 21563 - DNA, 96 bp, Aspergillus viridinutans
  misc_feature: 53
aggttataaaacttatttatattttttattaacaaattatatttatgaaaataatgaattaattatatacaattgaccacctaaacctaatccagc

SEQ ID NO: 21564 - DNA, 96 bp, Aspergillus viridinutans
  misc_feature: 53
acgtctgaactccagtcacaacgttccatctcgtatgccgtatagatcggaagagcacacgtctgaactccagtcacaacgttccatctcgtatgc

SEQ ID NO: 21565 - DNA, 96 bp, Aspergillus viridinutans
  misc_feature: 53
gcacacgtctgaactccagtcacaacgttccatctcgtatgccgtcttctgcttgaaaaaaaaaacgtctgaactccagtcacaacgttccatctc

SEQ ID NO: 21566 - DNA, 96 bp, Aspergillus viridinutans
  misc_feature: 53
gagcacacgtctgaactccagtcacaacgttccatctcgtatgccgtcttctgcttgaaaaaaaaaacgtctgaactccagtcacaacgttccatc

SEQ ID NO: 21567 - DNA, 96 bp, Aspergillus viridinutans
  misc_feature: 53
ctccagtcacaacgttccatctcgtatgccgtatcattagatcggaagagcagatcggaagagcacacgtctgaactccagtcacaacgttccatc

SEQ ID NO: 21568 - DNA, 96 bp, Aspergillus viridinutans
  misc_feature: 53
ataattataatctatttatagtcaaataaaacttaatttaaaaattaatattgaagattaataggataaaaataaacaagtatgagcgttaatatc

SEQ ID NO: 21569 - DNA, 96 bp, Aspergillus viridinutans
  misc_feature: 53
aactccagtcacaacgttccatctcgtatgccgtcttctgcttgaaaaaaaaacacgtctgaactccagtcacaacgttccatctcgtatgccgtc

SEQ ID NO: 21570 - DNA, 96 bp, Aspergillus viridinutans
  misc_feature: 53
gaactccagtcacaacgttccatctcgtatgccgtatcattgatcggaagagcacacgtctgaactccagtcacaacgttccctctcgtatgccgt

SEQ ID NO: 21571 - DNA, 96 bp, Aspergillus viridinutans
  misc_feature: 53
ctgaactccagtcacaacgttccatctcgtatgccgtatcctgatcggaagagcacacgtctgaactccagtcacaacgttccatctcgtatgccg

SEQ ID NO: 21572 - DNA, 96 bp, Aspergillus viridinutans
  misc_feature: 53
ctccagtcacaacgttccatctcgtatgccgtatcattagatcggaagagcacacgtctgaactccagtcacaacgttccatctcgtatgccgtag

SEQ ID NO: 21573 - DNA, 96 bp, Aspergillus viridinutans
  misc_feature: 53
cacacgtctgaactccagtcacaacgttccatctcgtatgccgtcttctgcttgaaaaaaaaaacgtctgaactccagtcacaacgttccatctcg

SEQ ID NO: 21574 - DNA, 96 bp, Aspergillus viridinutans
  misc_feature: 53
cacgtctgaactccagtcacaacgttccatctcgtatgccgtatagatcggaagagcacacgtctgaactccagtcacaacgttccatctcgtatg

SEQ ID NO: 21575 - DNA, 96 bp, Aspergillus viridinutans
  misc_feature: 53
atgatgaggaatactatggtatcaatattcatactaggtgatcattcgatatcaaatactatggtattgaatcaatatcctgactagatgatgatt

SEQ ID NO: 21576 - DNA, 96 bp, Aspergillus viridinutans
  misc_feature: 53
acacgtctgaactccagtcacaacgttccatctcgtatgccgtatagatcggaagagcacacgtctgaactccagtcacaacgttccatctcgtat

SEQ ID NO: 21577 - DNA, 96 bp, Aspergillus viridinutans
  misc_feature: 53
agcacacgtctgaactccagtcacaacgttccatctcgtatgccgtcttctgcttgaaaaaaaaaacgtctgaactccagtcacaacgttccatct

SEQ ID NO: 21578 - DNA, 96 bp, Aspergillus viridinutans
  misc_feature: 52
tttattaagtaaagaataatatctaattaagagtagaagttagattaataattattaatattaatttaaacttattaaaataactttaataacttc

SEQ ID NO: 21579 - DNA, 96 bp, Aspergillus viridinutans
  misc_feature: 52
atcggaagagcgtcgtgtagggaaagagtgtagtactccgtgtagatctcggtggtcgccgtatcattaaaaaaaaaaaaaaaaaaaaaaaaagaa

SEQ ID NO: 21580 - DNA, 96 bp, Aspergillus viridinutans
  misc_feature: 52
ggtattgaatcgatatcctgactagatgatgaggaatactatggtatcaatattcatactaggtgatcattcgatatcaaatactatggtattgaa

SEQ ID NO: 21581 - DNA, 96 bp, Aspergillus viridinutans
  misc_feature: 52
gagaattcgagtttctctcccggctaattaattattatataaaatttatagacattaatgttatttgttatctttagtttaaatttaactgactaa

SEQ ID NO: 21582 - DNA, 96 bp, Aspergillus viridinutans
  misc_feature: 52
attataatctatttatagtcaaataaaacttaatttaaaaattaatattgaagattaataggataaaaataaacaagtatgagcgttaatatctaa

SEQ ID NO: 21583 - DNA, 96 bp, Aspergillus viridinutans
  misc_feature: 52
ttacttacttatatagcttatctctcttactagattctatcttaattaattcttcttacttacttacttatatagcttatctctcttactagattc

SEQ ID NO: 21584 - DNA, 96 bp, Aspergillus viridinutans
  misc_feature: 52
tgaactccagtcacaacgttccatctcgtatgccgtatcctgatcggaagagcacacgtctgaactccagtcacaacgttccatctcgtatgccgt

SEQ ID NO: 21585 - DNA, 96 bp, Aspergillus viridinutans
  misc_feature: 52
tcttccgatcagatcggaagagcgtcgtgtagggaaagagtgtagtactccgtgtagatctcggtggtcgccgtatcattaaaaaaaaaaaaaaac

SEQ ID NO: 21586 - DNA, 96 bp, Aspergillus viridinutans
  misc_feature: 52
tctgaactccagtcacaacgttccatctcgtatgccgtatagatcggaagagcacacgtctgaactccagtcacaacgttccatctcgtatgccgt

SEQ ID NO: 21587 - DNA, 96 bp, Aspergillus viridinutans
  misc_feature: 52
tctgaactccagtcacaacgttccatctcgtatgccgtagatcggaagagcacacgactgaactccagtcacaacgttccatctcgtatgccgtct

SEQ ID NO: 21588 - DNA, 96 bp, Aspergillus viridinutans
  misc_feature: 52
tctgaactccagtcacaacgttccatctcgtatgccgtagatcgcaagagcacacgtctgaactccagtcacaacgttccatctcgtatgccgtct

SEQ ID NO: 21589 - DNA, 96 bp, Aspergillus viridinutans
  misc_feature: 52
tccagtcacaacgttccatctcgtatgccgtatcattagatcggaagagcacacgtctgaactccagtcacaacgttccatctcgtatgccgtaga

SEQ ID NO: 21590 - DNA, 96 bp, Aspergillus viridinutans
  misc_feature: 52
tccctactagatgacattcaatattgattcgatatccctactagatgacatttgatatcgattcgatattgattcaatatcaatactagatgatat

SEQ ID NO: 21591 - DNA, 96 bp, Aspergillus viridinutans
  misc_feature: 52
tccagtcacaacgttccatctcgtatgccgtatcagatcggaagagcacacgtctgaactccagtcacaacgttccatctcgtatgccgtatcatt

SEQ ID NO: 21592 - DNA, 96 bp, Aspergillus viridinutans
  misc_feature: 52
tcacaacgttccatctcgtatgccgtatcattgatcggaagagcacacgtctgaactccagtcacaacgttccaactcgtatgccgtcttctgctt

SEQ ID NO: 21593 - DNA, 96 bp, Aspergillus viridinutans
  misc_feature: 52
gacattcgatatccctactagatgacattcaatattgattcgatatccctactagatgacatttgatatcgattcgatattgattcaatatcaata

SEQ ID NO: 21594 - DNA, 96 bp, Aspergillus viridinutans
  misc_feature: 52
tattgaatcgatatcctgactagatgatgaggaatactatggtatcaatattcatactaggtgatcattcgatatcaaatactatggtattgaatc

SEQ ID NO: 21595 - DNA, 96 bp, Aspergillus viridinutans
  misc_feature: 52
taggttataaaacttatttatattttttattaacaaattatatttatgaaaataatgaattaattatatacaattgaccacctaaacctaatccag

SEQ ID NO: 21596 - DNA, 96 bp, Aspergillus viridinutans
  misc_feature: 52
aattataatctatttatagtcaaataaaacttaatttaaaaattaatattgaagattaataggataaaaataaacaagtatgagcgttaatatcta

SEQ ID NO: 21597 - DNA, 96 bp, Aspergillus viridinutans
  misc_feature: 52
agtcacaacgttccatctcgtatgccgtatcattgatcggaagagcacacgtctgaactccagtcacaacgttccatctcgtatgccgtatcatta

SEQ ID NO: 21598 - DNA, 96 bp, Aspergillus viridinutans
  misc_feature: 52
gtctgaactccagtcacaacgttccatctcgtatgccgtcttctgcttgaaaaaaaaaaagaactccagtcacaacgttccatctcgtatgccgtc

SEQ ID NO: 21599 - DNA, 96 bp, Aspergillus viridinutans
  misc_feature: 52
gtcacaacgttccatctcgtatgccgtatcattgatcggaagagcacacgtctgaactccagtcacaacgttccaactcgtatgccgtcttctgct

SEQ ID NO: 21600 - DNA, 96 bp, Aspergillus viridinutans
  misc_feature: 52
ggaagagcacacgtctgaactccagtcacaacgttccatctcgtatgccgtatcattgatcggaagagcacacgtctgaactcccgtcacaacgtt

SEQ ID NO: 21601 - DNA, 96 bp, Aspergillus viridinutans
  misc_feature: 52
atttaggttataaaacttatttatattttttattaacaaattatatttatgaaaataatgaattaattatatacaattgaccacctaaacctaatc

SEQ ID NO: 21602 - DNA, 96 bp, Aspergillus viridinutans
  misc_feature: 52
gatgatgaggaatactatggtatcaatattcatactaggtgatcattcgatatcaaatactatggtattgaatcaatatcctgactagatgatgat

SEQ ID NO: 21603 - DNA, 96 bp, Aspergillus viridinutans
  misc_feature: 52
cctgactagatgatgattcgatatcaaatactatggtattgaatcgatatcctgactagatgatgaggaatactatggtatcaatattcatactag

SEQ ID NO: 21604 - DNA, 96 bp, Aspergillus viridinutans
  misc_feature: 52
cgtctgaactccagtcacaacgttccatctcgtatgccgtcttctgcttgaaaaaaaaaacgtctgaactccagtcacaacgttccatctcgtatg

SEQ ID NO: 21605 - DNA, 96 bp, Aspergillus viridinutans
  misc_feature: 52
cggaagagcacacgtctgaactccagtcacaacgttccatctcgtatgccgtatcattgatcggaagagcacacgtctgaactcccgtcacaacgt

SEQ ID NO: 21606 - DNA, 96 bp, Aspergillus viridinutans
  misc_feature: 52
attcgatatccctactagatgacattcaatattgattcgatatcaatactagatgacattcgatatccctactagatgacattcaatattgattcg

SEQ ID NO: 21607 - DNA, 96 bp, Aspergillus viridinutans
  misc_feature: 52
aatatcaaatactatggtattgaatcgatatcctgactagatgatgattcgatatcaaatactatggtattgaatcgatatcctgactagatgatg

SEQ ID NO: 21608 - DNA, 96 bp, Aspergillus viridinutans
  misc_feature: 52
atggtattgaatcgatatcctgactagatgatgaggaatactatggtatcaatattcatactaggtgatcattcgatatcaaatactatggtattg

SEQ ID NO: 21609 - DNA, 96 bp, Aspergillus viridinutans
  misc_feature: 52
agtcagttaaatttaaactaaagataacaaataacattaatgtctataaattttatataataattaattagccgggagagaaactcgaattctcat

SEQ ID NO: 21610 - DNA, 96 bp, Aspergillus viridinutans
  misc_feature: 52
acacgtctgaactccagtcacaacgttccatctcgtatgccgtcttctgcttgaaaaaaaaaacgtctgaactccagtcacaacgttccatctcgt

SEQ ID NO: 21611 - DNA, 96 bp, Aspergillus viridinutans
  misc_feature: 52
aatatctaattaagagtagaagttagatttaataattattaatattagtttaaacttattaaaataactttaataactcctaatttatctttcttt

SEQ ID NO: 21612 - DNA, 96 bp, Aspergillus viridinutans
  misc_feature: 51
ttttattaagtaaagaataatatctaattaagagtagaagttagattaataattattaatattaatttaaacttattaaaataactttaataactt

SEQ ID NO: 21613 - DNA, 96 bp, Aspergillus viridinutans
  misc_feature: 51
ttataaaacttatttatattttttattaacaaattatatttatgaaaataatgaattaattatatacaattgaccacctaaacctaatccagctag

SEQ ID NO: 21614 - DNA, 96 bp, Aspergillus viridinutans
  misc_feature: 51
tcggaagagcgtcgtgtagggaaagagtgtagtactccgtgtagatctcggtggtcgccgtatcattaaaaaaaaaaaaaaaaaaaaaaaaaaaga

SEQ ID NO: 21615 - DNA, 96 bp, Aspergillus viridinutans
  misc_feature: 51
tctgaactccagtcacaacgttccatctcgtatgccgtcttctgcttgaaaaaaaaaacgtctgaactccagtcacaacgttccatctcgtatgcc

SEQ ID NO: 21616 - DNA, 96 bp, Aspergillus viridinutans
  misc_feature: 51
tctgaactccagtcacaacgttccatctcgtatgccgtatcatatcggaagagcacacgtctgaactccagtcacaacgttccatctcgtatgccg

SEQ ID NO: 21617 - DNA, 96 bp, Aspergillus viridinutans
  misc_feature: 51
tccagtcacaacgttccatctcgtatgccgtatcattgatcggaagagcacacgtctgaactccagtcacaacgttccatctcgtatgccgtgatc

SEQ ID NO: 21618 - DNA, 96 bp, Aspergillus viridinutans
  misc_feature: 51
tccagtcacaacgttccatctcgtatgccgtatcattcatcggaagagcacacgtctgaactccagtcacaacgttccatctcgtatgccgtcttc

SEQ ID NO: 21619 - DNA, 96 bp, Aspergillus viridinutans
  misc_feature: 51
agatgatgaggaatactatggtatcaatattcatactaggtgatcattcgatatcaaatactatggtattgaatcaatatcctgactagatgatga

SEQ ID NO: 21620 - DNA, 96 bp, Aspergillus viridinutans
  misc_feature: 51
actagatgatgattcgatatcaaatactatggtattgaatcgatatcctgactagatgatgaggaatactatggtatcaatattcatactaggtga

SEQ ID NO: 21621 - DNA, 96 bp, Aspergillus viridinutans
  misc_feature: 51
cacgtctgaactccagtcacaacgttccatctcgtatgccgtcttctgcttgaaaaaaaaaacgtctgaactccagtcacaacgttccatctcgta

SEQ ID NO: 21622 - DNA, 96 bp, Aspergillus viridinutans
  misc_feature: 51
taattataatctatttatagtcaaataaaacttaatttaaaaattaatattgaagattaataggataaaaataaacaagtatgagcgttaatatct

SEQ ID NO: 21623 - DNA, 96 bp, Aspergillus viridinutans
  misc_feature: 51
taataattaatagtcataagattcattctattattattatatctcggtttattaatgtattattagtattattatttaaattaatcttattttttt

SEQ ID NO: 21624 - DNA, 96 bp, Aspergillus viridinutans
  misc_feature: 51
gtctgaactccagtcacaacgttccatctcgtatgccgtcttctgcttgaaaaaaaaaacgtctgaactccagtcacaacgttccatctcgtatgc

SEQ ID NO: 21625 - DNA, 96 bp, Aspergillus viridinutans
  misc_feature: 51
ggaggcgcgcgcggccagaggggcaggcaggcaggcaggcaggcaggcaaagtgggggggggacgcgcggggcccaggtcgcgggggggggggggg

SEQ ID NO: 21626 - DNA, 96 bp, Aspergillus viridinutans
  misc_feature: 51
aagagcacacgtctgaactccagtcacaacgttccatctcgtatgccgtatcattgatcggaagagcacacgtctgaactcccgtcacaacgttcc

SEQ ID NO: 21627 - DNA, 96 bp, Aspergillus viridinutans
  misc_feature: 51
cagtcacaacgttccatctcgtatgccgtatcattagatcggaagagcacacgtctgaactccagtcacaacgttccatctcgtatgccgtagatc

SEQ ID NO: 21628 - DNA, 96 bp, Aspergillus viridinutans
  misc_feature: 51
agtactacactctttccctacacgacgctcttccgatcgatcggaagagcacacgtctgaactccagtcacaacgttccatctcgtatgccgtatc

SEQ ID NO: 21629 - DNA, 96 bp, Aspergillus viridinutans
  misc_feature: 51
gaagagcacacgtctgaactccagtcacaacgttccatctcgtatgccgtatcattgatcggaagagcacacgtctgaactcccgtcacaacgttc

SEQ ID NO: 21630 - DNA, 96 bp, Aspergillus viridinutans
  misc_feature: 51
ctgactagatgatgattcgatatcaaatactatggtattgaatcgatatcctgactagatgatgaggaatactatggtatcaatattcatactagg

SEQ ID NO: 21631 - DNA, 96 bp, Aspergillus viridinutans
  misc_feature: 51
ctgaactccagtcacaacgttccatctcgtatgccgtatcatatcggaagagcacacgtctgaactccagtcacaacgttccatctcgtatgccgt

SEQ ID NO: 21632 - DNA, 96 bp, Aspergillus viridinutans
  misc_feature: 51
ctccagtcacaacgttccatctcgtatgccgtatcattgatcggaagagcacacgtctgaactccagtcacaacgttccatctcgtatgccgtgat

SEQ ID NO: 21633 - DNA, 96 bp, Aspergillus viridinutans
  misc_feature: 51
ctccagtcacaacgttccatctcgtatgccgtatcattcatcggaagagcacacgtctgaactccagtcacaacgttccatctcgtatgccgtctt

SEQ ID NO: 21634 - DNA, 96 bp, Aspergillus viridinutans
  misc_feature: 51
agtcacaacgttccatctcgtatgccgtatcattagatcggaagagcacacgtctgaactccagtcacaacgttccatctcgtatgccgtagatcg

SEQ ID NO: 21635 - DNA, 96 bp, Aspergillus viridinutans
  misc_feature: 51
ccagtcacaacgttccatctcgtatgccgtatcattgatcggaagagcacacgtctgaactccagtcacaacgttccatctcgtatgccgtgatcg

SEQ ID NO: 21636 - DNA, 96 bp, Aspergillus viridinutans
  misc_feature: 51
cagtcacaacgttccatctcgtatgccgtatcattgatcggaagagcacacgtctgaactccagtcacaacgttccatctcgtatgccgtgatcgg

SEQ ID NO: 21637 - DNA, 96 bp, Aspergillus viridinutans
  misc_feature: 51
ccagtcacaacgttccatctcgtatgccgtatcattagatcggaagagcacacgtctgaactccagtcacaacgttccatctcgtatgccgtagat

SEQ ID NO: 21638 - DNA, 96 bp, Aspergillus viridinutans
  misc_feature: 51
caatatcaaatactatggtattgaatcgatatcctgactagatgatgattcgatatcaaatactatggtattgaatcgatatcctgactagatgat

SEQ ID NO: 21639 - DNA, 96 bp, Aspergillus viridinutans
  misc_feature: 51
acgtctgaactccagtcacaacgttccatctcgtatgccgtcttctgcttgaaaaaaaaaacgtctgaactccagtcacaacgttccatctcgtat

SEQ ID NO: 21640 - DNA, 96 bp, Aspergillus viridinutans
  misc_feature: 50
gatcggaagagcgtcgtgtagggaaagagtgtagtactccgtgtagatctcggtggtcgccgtatcattaaaaaaaaaaaaaaaaaaaaaaaagaa

SEQ ID NO: 21641 - DNA, 96 bp, Aspergillus viridinutans
  misc_feature: 50
ttataatctatttatagtcaaataaaacttaatttaaaaattaatattgaagattaataggataaaaataaacaagtatgagcgttaatatctaat

SEQ ID NO: 21642 - DNA, 96 bp, Aspergillus viridinutans
  misc_feature: 50
tgactagatgatgattcgatatcaaatactatggtattgaatcgatatcctgactagatgatgaggaatactatggtatcaatattcatactaggt

SEQ ID NO: 21643 - DNA, 96 bp, Aspergillus viridinutans
  misc_feature: 50
gatgaggaatactatggtatcaatattcatactaggtgatcattcgatatcaaatactatggtattgaatcaatatcctgactagatgatgattca

SEQ ID NO: 21644 - DNA, 96 bp, Aspergillus viridinutans
  misc_feature: 50
tctgaactccagtcacaacgttccatctcgtatgccgtcttctgcttgaaaaaaaaaaagaactccagtcacaacgttccatctcgtatgccgtct

SEQ ID NO: 21645 - DNA, 96 bp, Aspergillus viridinutans
  misc_feature: 50
tcgatatccctactagatgacattcaatattgattcgatatcaatactagatgacattcgatatccctactagatgacattcaatattgattcgat

SEQ ID NO: 21646 - DNA, 96 bp, Aspergillus viridinutans
  misc_feature: 50
tatggtattgaatcgatatcctgactagatgatgaggaatactatggtatcaatattcatactaggtgatcattcgatatcaaatactatggtatt

SEQ ID NO: 21647 - DNA, 96 bp, Aspergillus viridinutans
  misc_feature: 50
tacttacttatatagcttatctctcttactagattctatcttaattaattcttcttacttacttacttatatagcttatctctcttactagattct

SEQ ID NO: 21648 - DNA, 96 bp, Aspergillus viridinutans
  misc_feature: 50
gtctgaactccagtcacaacgttccatctcgtatgccgtcttctgcttgaaaaaaaaaatgaactccagtcacaacgttccatctcgtatgccgtc

SEQ ID NO: 21649 - DNA, 96 bp, Aspergillus viridinutans
  misc_feature: 50
ctgaactccagtcacaacgttccatctcgtatgccgtcttctgcttgaaaaaaaaaacgtctgaactccagtcacaacgttccatctcgtatgccg

SEQ ID NO: 21650 - DNA, 96 bp, Aspergillus viridinutans
  misc_feature: 50
ctagatgatgaggaatactatggtatcaatattcatactaggtgatcattcgatatcaaatactatggtattgaatcaatatcctgactagatgat

SEQ ID NO: 21651 - DNA, 96 bp, Aspergillus viridinutans
  misc_feature: 50
attcaatatcaaatactatggtattgaatcgatatcctgactagatgatgattcgatatcaaatactatggtattgaatcgatatcctgactagat

SEQ ID NO: 21652 - DNA, 96 bp, Aspergillus viridinutans
  misc_feature: 50
accaccgagatctacacggagtactacactctttccctacacgacgctcttccgatcgatcggaagagcacacgtctgaactccagtcacaacgtt

SEQ ID NO: 21653 - DNA, 96 bp, Aspergillus viridinutans
  misc_feature: 49
ttcgatatccctactagatgacattcaatattgattcgatatcaatactagatgacattcgatatccctactagatgacattcaatattgattcga

SEQ ID NO: 21654 - DNA, 96 bp, Aspergillus viridinutans
  misc_feature: 49
aagtagttagagaaagtataaattagagaattaaattattaaaaatagtatatatactaaagttattaagatatattaaatataagaattaattaa

SEQ ID NO: 21655 - DNA, 96 bp, Aspergillus viridinutans
  misc_feature: 49
aagagcacacgtctgaactccagtcacaacgttccatctcgtatgccgtctcatgatcggaagagcacacgtctgaactccagtcacaacgttcca

SEQ ID NO: 21656 - DNA, 96 bp, Aspergillus viridinutans
  misc_feature: 49
agagcacacgtctgaactccagtcacaacgttccatctcgtatgccgtatcattgatcggaagagcacacgtctgaactcccgtcacaacgttcca

SEQ ID NO: 21657 - DNA, 96 bp, Aspergillus viridinutans
  misc_feature: 49
tgaactccagtcacaacgttccatctcgtatgccgtcttctgcttgaaaaaaaaaacgtctgaactccagtcacaacgttccatctcgtatgccgt

SEQ ID NO: 21658 - DNA, 96 bp, Aspergillus viridinutans
  misc_feature: 49
tgaactccagtcacaacgttccatctcgtatgccgtagatcgcaagagcacacgtctgaactccagtcacaacgttccatctcgtatgccgtcttc

SEQ ID NO: 21659 - DNA, 96 bp, Aspergillus viridinutans
  misc_feature: 49
tctgaactccagtcacaacgttccatctcgtatgccgtcttctgcttgaaaaaaaaaatgaactccagtcacaacgttccatctcgtatgccgtct

SEQ ID NO: 21660 - DNA, 96 bp, Aspergillus viridinutans
  misc_feature: 49
cattcgatatcaaatactatggtattgaatcaatatcctgactagatgatgattcaatatcaaatactatggtattgaatcgatatcctgactaga

SEQ ID NO: 21661 - DNA, 96 bp, Aspergillus viridinutans
  misc_feature: 49
gattcaatatcaaatactatggtattgaatcgatatcctgactagatgatgattcgatatcaaatactatggtattgaatcgatatcctgactaga

SEQ ID NO: 21662 - DNA, 96 bp, Aspergillus viridinutans
  misc_feature: 49
tcggaagagcacacgtctgaactccagtcacaacgttccatctcgtatgccgtctcatgatcggaagagcacacgtctgaactccagtcacaacgt

SEQ ID NO: 21663 - DNA, 96 bp, Aspergillus viridinutans
  misc_feature: 49
tcggaagagcacacgtctgaactccagtcacaacgttccatctcgtatgccgtatcattcgatcggaagagcacacgtctgaactccagtcacaac

SEQ ID NO: 21664 - DNA, 96 bp, Aspergillus viridinutans
  misc_feature: 49
tcacaacgttccatctcgtatgccgtagatcggaagagcagatcggaagagcacacgtctgaactccagtcacaacgttccatctcgtatgccgta

SEQ ID NO: 21665 - DNA, 96 bp, Aspergillus viridinutans
  misc_feature: 49
cgatatccctactagatgacattcaatattgattcgatatcaatactagatgacattcgatatccctactagatgacattcaatattgattcgata

SEQ ID NO: 21666 - DNA, 96 bp, Aspergillus viridinutans
  misc_feature: 49
tataatataaaagatattatatataagctaggtattattattagctatattaatatagattatataggatatattaatatatactatttaactact

SEQ ID NO: 21667 - DNA, 96 bp, Aspergillus viridinutans
  misc_feature: 49
gatcggaagagcacacgtctgaactccagtcacaacgttccatctcgtatgccgtctcatgatcggaagagcacacgtctgaactccagtcacaac

SEQ ID NO: 21668 - DNA, 96 bp, Aspergillus viridinutans
  misc_feature: 49
gtcacaacgttccatctcgtatgccgtatcattcatcggaagagcacacgtctgaactccagtcacaacgttccatctcgtatgccgtcttctgct

SEQ ID NO: 21669 - DNA, 96 bp, Aspergillus viridinutans
  misc_feature: 49
ggaagagcacacgtctgaactccagtcacaacgttccatctcgtatgccgtagatcggaagagcacacgtctgaactccagtcacaacgttccacc

SEQ ID NO: 21670 - DNA, 96 bp, Aspergillus viridinutans
  misc_feature: 49
ggacccggccaactggtcgccttcgcgcgcgcgcgcgcccaccggcgcctctcccgcgggcggctcctcgacccgtccacgccgaacccccccccc

SEQ ID NO: 21671 - DNA, 96 bp, Aspergillus viridinutans
  misc_feature: 49
gacccggccaactggtcgccttcgcgcgcgcgcgcgcccaccggcgcctctcccgcgggcggctcctcgacccgtccacgccgaaccccccccccc

SEQ ID NO: 21672 - DNA, 96 bp, Aspergillus viridinutans
  misc_feature: 49
ggaagagcacacgtctgaactccagtcacaacgttccatctcgtatgccgtctcatgatcggaagagcacacgtctgaactccagtcacaacgttc

SEQ ID NO: 21673 - DNA, 96 bp, Aspergillus viridinutans
  misc_feature: 49
gaagagcacacgtctgaactccagtcacaacgttccatctcgtatgccgtctcatgatcggaagagcacacgtctgaactccagtcacaacgttcc

SEQ ID NO: 21674 - DNA, 96 bp, Aspergillus viridinutans
  misc_feature: 49
agtcacaacgttccatctcgtatgccgtatcattcatcggaagagcacacgtctgaactccagtcacaacgttccatctcgtatgccgtcttctgc

SEQ ID NO: 21675 - DNA, 96 bp, Aspergillus viridinutans
  misc_feature: 49
gactagatgatgattcgatatcaaatactatggtattgaatcgatatcctgactagatgatgaggaatactatggtatcaatattcatactaggtg

SEQ ID NO: 21676 - DNA, 96 bp, Aspergillus viridinutans
  misc_feature: 49
gaactccagtcacaacgttccatctcgtatgccgtagatcgcaagagcacacgtctgaactccagtcacaacgttccatctcgtatgccgtcttct

SEQ ID NO: 21677 - DNA, 96 bp, Aspergillus viridinutans
  misc_feature: 49
ctgaactccagtcacaacgttccatctcgtatgccgtagatcgcaagagcacacgtctgaactccagtcacaacgttccatctcgtatgccgtctt

SEQ ID NO: 21678 - DNA, 96 bp, Aspergillus viridinutans
  misc_feature: 49
ctatggtattgaatcgatatcctgactagatgatgaggaatactatggtatcaatattcatactaggtgatcattcgatatcaaatactatggtat

SEQ ID NO: 21679 - DNA, 96 bp, Aspergillus viridinutans
  misc_feature: 49
ctagatgatgattcgatatcaaatactatggtattgaatcgatatcctgactagatgatgaggaatactatggtatcaatattcatactaggtgat

SEQ ID NO: 21680 - DNA, 96 bp, Aspergillus viridinutans
  misc_feature: 49
cggaagagcacacgtctgaactccagtcacaacgttccatctcgtatgccgtatcattcgatcggaagagcacacgtctgaactccagtcacaacg

SEQ ID NO: 21681 - DNA, 96 bp, Aspergillus viridinutans
  misc_feature: 49
atcggaagagcacacgtctgaactccagtcacaacgttccatctcgtatgccgtctcatgatcggaagagcacacgtctgaactccagtcacaacg

SEQ ID NO: 21682 - DNA, 96 bp, Aspergillus viridinutans
  misc_feature: 49
cggaagagcacacgtctgaactccagtcacaacgttccatctcgtatgccgtctcatgatcggaagagcacacgtctgaactccagtcacaacgtt

SEQ ID NO: 21683 - DNA, 96 bp, Aspergillus viridinutans
  misc_feature: 49
atactatggtattgaatcgatatcctgactagatgatgaggaatactatggtatcaatattcatactaggtgatcattcgatatcaaatactatgg

SEQ ID NO: 21684 - DNA, 96 bp, Aspergillus viridinutans
  misc_feature: 49
ccagtcacaacgttccatctcgtatgccgtatcattcatcggaagagcacacgtctgaactccagtcacaacgttccatctcgtatgccgtcttct

SEQ ID NO: 21685 - DNA, 96 bp, Aspergillus viridinutans
  misc_feature: 49
cagtcacaacgttccatctcgtatgccgtatcattcatcggaagagcacacgtctgaactccagtcacaacgttccatctcgtatgccgtcttctg

SEQ ID NO: 21686 - DNA, 96 bp, Aspergillus viridinutans
  misc_feature: 49
aactccagtcacaacgttccatctcgtatgccgtagatcgcaagagcacacgtctgaactccagtcacaacgttccatctcgtatgccgtcttctg

SEQ ID NO: 21687 - DNA, 96 bp, Aspergillus viridinutans
  misc_feature: 48
cgtatgccgtagatcggaagagcgtcgtgtagggaaagagtgtagtactccgtgtagatctcggtggtcgccgtatcattaaaaaaaaaaaaaaaa

SEQ ID NO: 21688 - DNA, 96 bp, Aspergillus viridinutans
  misc_feature: 48
atcggaagagcacacgtctgaactccagtcacaacgttccatctcgtatgccgtatcattcgatcggaagagcacacgtctgaactccagtcacaa

SEQ ID NO: 21689 - DNA, 96 bp, Aspergillus viridinutans
  misc_feature: 48
ttgtatatatatataatttatacatacgaaattatatacaagtttaatttatatgtatataaatatatatattattacacttgtatattaattgca

SEQ ID NO: 21690 - DNA, 96 bp, Aspergillus viridinutans
  misc_feature: 48
atgaggaatactatggtatcaatattcatactaggtgatcattcgatatcaaatactatggtattgaatcaatatcctgactagatgatgattcaa

SEQ ID NO: 21691 - DNA, 96 bp, Aspergillus viridinutans
  misc_feature: 48
tgtatatatatataatttatacatacgaaattatatacaagtttaatttatatgtatataaatatatatattattacacttgtatattaattgcat

SEQ ID NO: 21692 - DNA, 96 bp, Aspergillus viridinutans
  misc_feature: 48
gtactacactctttccctacacgacgctcttccgatcgatcggaagagcacacgtctgaactccagtcacaacgttccatctcgtatgccgtatca

SEQ ID NO: 21693 - DNA, 96 bp, Aspergillus viridinutans
  misc_feature: 48
atcggaagagcgtcgtgtagggaaagagtgtagtactccgtgtagatctcggtggtcgccgtatcattaaaaaaaaaaaaaaaaaaaaaaaaaaga

SEQ ID NO: 21694 - DNA, 96 bp, Aspergillus viridinutans
  misc_feature: 48
agtcacaacgttccatctcgtatgccgtatcattgatcggaagagcacacgtctgaactccagtcacaacgttccatctcgtatgccgtgatcgga

SEQ ID NO: 21695 - DNA, 96 bp, Aspergillus viridinutans
  misc_feature: 48
tccagtcacaacgttccatctcgtatgccgtagatcgcaagagcacacgtctgaactccagtcacaacgttccatctcgtatgccgtcttctgctt

SEQ ID NO: 21696 - DNA, 96 bp, Aspergillus viridinutans
  misc_feature: 48
tcattcgatatcaaatactatggtattgaatcaatatcctgactagatgatgattcaatatcaaatactatggtattgaatcgatatcctgactag

SEQ ID NO: 21697 - DNA, 96 bp, Aspergillus viridinutans
  misc_feature: 48
cagtcacaacgttccatctcgtatgccgtagatcgcaagagcacacgtctgaactccagtcacaacgttccatctcgtatgccgtcttctgcttga

SEQ ID NO: 21698 - DNA, 96 bp, Aspergillus viridinutans
  misc_feature: 48
gttatataaatatcttagaaagtagattataagatactttactaataatattttactaatactatatataaatataaggctctaaaagtttagcta

SEQ ID NO: 21699 - DNA, 96 bp, Aspergillus viridinutans
  misc_feature: 48
tagatgatgaggaatactatggtatcaatattcatactaggtgatcattcgatatcaaatactatggtattgaatcaatatcctgactagatgatg

SEQ ID NO: 21700 - DNA, 96 bp, Aspergillus viridinutans
  misc_feature: 48
acttacttatatagcttatctctcttactagattctatcttaattaattcttcttacttacttacttatatagcttatctctcttactagattcta

SEQ ID NO: 21701 - DNA, 96 bp, Aspergillus viridinutans
  misc_feature: 48
tactatggtattgaatcgatatcctgactagatgatgaggaatactatggtatcaatattcatactaggtgatcattcgatatcaaatactatggt

SEQ ID NO: 21702 - DNA, 96 bp, Aspergillus viridinutans
  misc_feature: 48
agcacacgtctgaactccagtcacaacgttccatctcgtatgccgtagatcggaagagcacacgtctgaactccagtcacaacgttccacctcgta

SEQ ID NO: 21703 - DNA, 96 bp, Aspergillus viridinutans
  misc_feature: 48
cacgtctgaactccagtcacaacgttccatctcgtatgccgtctcatgatcggaagagcacacgtctgaactccagtcacaacgttccatctcgta

SEQ ID NO: 21704 - DNA, 96 bp, Aspergillus viridinutans
  misc_feature: 48
actccagtcacaacgttccatctcgtatgccgtagatcggaagagcacacgtctgaactccagtcacaacgttccatctcgtatgccgtatcatta

SEQ ID NO: 21705 - DNA, 96 bp, Aspergillus viridinutans
  misc_feature: 48
agttagagaaagtataaattagagaattaaattattaaaaatagtatatatactaaagttattaagatatattaaatataagaattaattaattta

SEQ ID NO: 21706 - DNA, 96 bp, Aspergillus viridinutans
  misc_feature: 48
gatcggaagagcacacgtctgaactccagtcacaacgttccatctcgtatgccgtatcctgatcggaagagcacacgtctgaactccagtcacaac

SEQ ID NO: 21707 - DNA, 96 bp, Aspergillus viridinutans
  misc_feature: 48
gtcacaacgttccatctcgtatgccgtatcattagatcggaagagcacacgtctgaactccagtcacaacgttccatctcgtatgccgtagatcgg

SEQ ID NO: 21708 - DNA, 96 bp, Aspergillus viridinutans
  misc_feature: 48
gtatatatatataatttatacatacgaaattatatacaagtttaatttatatgtatataaatatatatattattacacttgtatattaattgcatt

SEQ ID NO: 21709 - DNA, 96 bp, Aspergillus viridinutans
  misc_feature: 48
gtagttagagaaagtataaattagagaattaaattattaaaaatagtatatatactaaagttattaagatatattaaatataagaattaattaatt

SEQ ID NO: 21710 - DNA, 96 bp, Aspergillus viridinutans
  misc_feature: 48
cacgtctgaactccagtcacaacgttccatctcgtatgccgtagatcggaagagcacacgtctgaactccagtcacaacgttccacctcgtatgcc

SEQ ID NO: 21711 - DNA, 96 bp, Aspergillus viridinutans
  misc_feature: 48
ggaagagcacacgtctgaactccagtcacaacgttccatctcgtatgccgtatcattcgatcggaagagcacacgtctgaactccagtcacaacgt

SEQ ID NO: 21712 - DNA, 96 bp, Aspergillus viridinutans
  misc_feature: 48
acacgtctgaactccagtcacaacgttccatctcgtatgccgtagatcggaagagcacacgtctgaactccagtcacaacgttccacctcgtatgc

SEQ ID NO: 21713 - DNA, 96 bp, Aspergillus viridinutans
  misc_feature: 48
actccagtcacaacgttccatctcgtatgccgtagatcgcaagagcacacgtctgaactccagtcacaacgttccatctcgtatgccgtcttctgc

SEQ ID NO: 21714 - DNA, 96 bp, Aspergillus viridinutans
  misc_feature: 48
gcacacgtctgaactccagtcacaacgttccatctcgtatgccgtctcatgatcggaagagcacacgtctgaactccagtcacaacgttccatctc

SEQ ID NO: 21715 - DNA, 96 bp, Aspergillus viridinutans
  misc_feature: 48
gcacacgtctgaactccagtcacaacgttccatctcgtatgccgtagatcggaagagcacacgtctgaactccagtcacaacgttccacctcgtat

SEQ ID NO: 21716 - DNA, 96 bp, Aspergillus viridinutans
  misc_feature: 48
gagcacacgtctgaactccagtcacaacgttccatctcgtatgccgtctcatgatcggaagagcacacgtctgaactccagtcacaacgttccatc

SEQ ID NO: 21717 - DNA, 96 bp, Aspergillus viridinutans
  misc_feature: 48
gatcggaagagcacacgtctgaactccagtcacaacgttccatctcgtatgccgtatcatatcggaagagcacacgtctgaactccagtcacaacg

SEQ ID NO: 21718 - DNA, 96 bp, Aspergillus viridinutans
  misc_feature: 48
gatatcgaatactaaggtatcaagtcgatatcctgactagttgatgattcgatatcgaatactaaggtatcaagttgatatcctgactagttgatg

SEQ ID NO: 21719 - DNA, 96 bp, Aspergillus viridinutans
  misc_feature: 48
gatatccctactagatgacattcaatattgattcgatatcaatactagatgacattcgatatccctactagatgacattcaatattgattcgatat

SEQ ID NO: 21720 - DNA, 96 bp, Aspergillus viridinutans
  misc_feature: 48
aagagcacacgtctgaactccagtcacaacgttccatctcgtatgccgtagatcggaagagcacacgtctgaactccagtcacaacgttccacctc

SEQ ID NO: 21721 - DNA, 96 bp, Aspergillus viridinutans
  misc_feature: 48
gagcacacgtctgaactccagtcacaacgttccatctcgtatgccgtagatcggaagagcacacgtctgaactccagtcacaacgttccacctcgt

SEQ ID NO: 21722 - DNA, 96 bp, Aspergillus viridinutans
  misc_feature: 48
aactccagtcacaacgttccatctcgtatgccgtatcattgatcggaagaacacacgtctgaactccagtcacaacgttccatctcgtatgccgtc

SEQ ID NO: 21723 - DNA, 96 bp, Aspergillus viridinutans
  misc_feature: 48
gaagagcacacgtctgaactccagtcacaacgttccatctcgtatgccgtatcattcgatcggaagagcacacgtctgaactccagtcacaacgtt

SEQ ID NO: 21724 - DNA, 96 bp, Aspergillus viridinutans
  misc_feature: 48
gaagagcacacgtctgaactccagtcacaacgttccatctcgtatgccgtagatcggaagagcacacgtctgaactccagtcacaacgttccacct

SEQ ID NO: 21725 - DNA, 96 bp, Aspergillus viridinutans
  misc_feature: 48
aagagcacacgtctgaactccagtcacaacgttccatctcgtatgccgtatcattcgatcggaagagcacacgtctgaactccagtcacaacgttc

SEQ ID NO: 21726 - DNA, 96 bp, Aspergillus viridinutans
  misc_feature: 48
ctccagtcacaacgttccatctcgtatgccgtagatcgcaagagcacacgtctgaactccagtcacaacgttccatctcgtatgccgtcttctgct

SEQ ID NO: 21727 - DNA, 96 bp, Aspergillus viridinutans
  misc_feature: 48
cgtctgaactccagtcacaacgttccatctcgtatgccgtctcatgatcggaagagcacacgtctgaactccagtcacaacgttccatctcgtatg

SEQ ID NO: 21728 - DNA, 96 bp, Aspergillus viridinutans
  misc_feature: 48
agagcacacgtctgaactccagtcacaacgttccatctcgtatgccgtagatcggaagagcacacgtctgaactccagtcacaacgttccacctcg

SEQ ID NO: 21729 - DNA, 96 bp, Aspergillus viridinutans
  misc_feature: 48
cacacgtctgaactccagtcacaacgttccatctcgtatgccgtctcatgatcggaagagcacacgtctgaactccagtcacaacgttccatctcg

SEQ ID NO: 21730 - DNA, 96 bp, Aspergillus viridinutans
  misc_feature: 48
ccagtcacaacgttccatctcgtatgccgtagatcgcaagagcacacgtctgaactccagtcacaacgttccatctcgtatgccgtcttctgcttg

SEQ ID NO: 21731 - DNA, 96 bp, Aspergillus viridinutans
  misc_feature: 48
cacacgtctgaactccagtcacaacgttccatctcgtatgccgtagatcggaagagcacacgtctgaactccagtcacaacgttccacctcgtatg

SEQ ID NO: 21732 - DNA, 96 bp, Aspergillus viridinutans
  misc_feature: 48
agagcacacgtctgaactccagtcacaacgttccatctcgtatgccgtctcatgatcggaagagcacacgtctgaactccagtcacaacgttccat

SEQ ID NO: 21733 - DNA, 96 bp, Aspergillus viridinutans
  misc_feature: 48
aaatactatggtattgaatcgatatcctgactagatgatgaggaatactatggtatcaatattcatactaggtgatcattcgatatcaaatactat

SEQ ID NO: 21734 - DNA, 96 bp, Aspergillus viridinutans
  misc_feature: 48
acgtctgaactccagtcacaacgttccatctcgtatgccgtctcatgatcggaagagcacacgtctgaactccagtcacaacgttccatctcgtat

SEQ ID NO: 21735 - DNA, 96 bp, Aspergillus viridinutans
  misc_feature: 48
agcacacgtctgaactccagtcacaacgttccatctcgtatgccgtctcatgatcggaagagcacacgtctgaactccagtcacaacgttccatct

SEQ ID NO: 21736 - DNA, 96 bp, Aspergillus viridinutans
  misc_feature: 48
actccagtcacaacgttccatctcgtatgccgtcttctgcttgaaaaaaaaacacgtctgaactccagtcacaacgttccatctcgtatgccgtct

SEQ ID NO: 21737 - DNA, 96 bp, Aspergillus viridinutans
  misc_feature: 48
acacgtctgaactccagtcacaacgttccatctcgtatgccgtctcatgatcggaagagcacacgtctgaactccagtcacaacgttccatctcgt

SEQ ID NO: 21738 - DNA, 96 bp, Aspergillus viridinutans
  misc_feature: 47
gtcacaacgttccatctcgtatgccgtatcattgatcggaagagcacacgtctgaactccagtcacaacgttccatctcgtatgccgtgatcggaa

SEQ ID NO: 21739 - DNA, 96 bp, Aspergillus viridinutans
  misc_feature: 47
agtcacaacgttccatctcgtatgccgtagatcgcaagagcacacgtctgaactccagtcacaacgttccatctcgtatgccgtcttctgcttgaa

SEQ ID NO: 21740 - DNA, 96 bp, Aspergillus viridinutans
  misc_feature: 47
ttataatataaaagatattatatataagctaggtattattattagctatattaatatagattatataggatatattaatatatactatttaactac

SEQ ID NO: 21741 - DNA, 96 bp, Aspergillus viridinutans
  misc_feature: 47
ttaattaattctccttacttacttacttatatagcttatctctcttactagattctatcttaattaattcttcttacttacttacttatatagctt

SEQ ID NO: 21742 - DNA, 96 bp, Aspergillus viridinutans
  misc_feature: 47
atcggaagagcgtcgtgtagggaaagagtgtagtactccgtgtagatctcggtggtcgccgtatcattaaaaaaaaaaaaaaaaaaaaaaaaaaca

SEQ ID NO: 21743 - DNA, 96 bp, Aspergillus viridinutans
  misc_feature: 47
tgaggaatactatggtatcaatattcatactaggtgatcattcgatatcaaatactatggtattgaatcaatatcctgactagatgatgattcaat

SEQ ID NO: 21744 - DNA, 96 bp, Aspergillus viridinutans
  misc_feature: 47
cttccgatcagatcggaagagcgtcgtgtagggaaagagtgtagtactccgtgtagatctcggtggtcgccgtatcattaaaaaaaaaaaaaaaga

SEQ ID NO: 21745 - DNA, 96 bp, Aspergillus viridinutans
  misc_feature: 47
tccagtcacaacgttccatctcgtatgccgtagatcggaagagcacacgtctgaactccagtcacaacgttccatctcgtatgccgtatcattaga

SEQ ID NO: 21746 - DNA, 96 bp, Aspergillus viridinutans
  misc_feature: 47
tcacaacgttccatctcgtatgccgtatcattgatcggaagagcacacgtctgaactccagtcacaacgttccatctcgtatgccgtgatcggaag

SEQ ID NO: 21747 - DNA, 96 bp, Aspergillus viridinutans
  misc_feature: 47
tcacaacgttccatctcgtatgccgtatcattcatcggaagagcacacgtctgaactccagtcacaacgttccatctcgtatgccgtcttctgctt

SEQ ID NO: 21748 - DNA, 96 bp, Aspergillus viridinutans
  misc_feature: 47
tataatctatttatagtcaaataaaacttaatttaaaaattaatattgaagattaataggataaaaataaacaagtatgagcgttaatatctaatt

SEQ ID NO: 21749 - DNA, 96 bp, Aspergillus viridinutans
  misc_feature: 47
tataaaacttatttatattttttattaacaaattatatttatgaaaataatgaattaattatatacaattgaccacctaaacctaatccagctagt

SEQ ID NO: 21750 - DNA, 96 bp, Aspergillus viridinutans
  misc_feature: 47
tagttagagaaagtataaattagagaattaaattattaaaaatagtatatatactaaagttattaagatatattaaatataagaattaattaattt

SEQ ID NO: 21751 - DNA, 96 bp, Aspergillus viridinutans
  misc_feature: 47
cttataatataaaagatattatatataagctaggtattattattagctatattaatatagattatataggatatattaatatatactatttaacta

SEQ ID NO: 21752 - DNA, 96 bp, Aspergillus viridinutans
  misc_feature: 47
tagtaagagagataagctatataagtaagtaagtaagaagaattaattaagatagaatctagtaagagagataagctatataagtaagtaagtaag

SEQ ID NO: 21753 - DNA, 96 bp, Aspergillus viridinutans
  misc_feature: 47
aaagtagttagagaaagtataaattagagaattaaattattaaaaatagtatatatactaaagttattaagatatattaaatataagaattaatta

SEQ ID NO: 21754 - DNA, 96 bp, Aspergillus viridinutans
  misc_feature: 47
taaagtagttagagaaagtataaattagagaattaaattattaaaaatagtatatatactaaagttattaagatatattaaatataagaattaatt

SEQ ID NO: 21755 - DNA, 96 bp, Aspergillus viridinutans
  misc_feature: 47
agagcacacgtctgaactccagtcacaacgttccatctcgtatgccgtatcatgatcggaagagcacacgtctgaactccagtcacaacgttccac

SEQ ID NO: 21756 - DNA, 96 bp, Aspergillus viridinutans
  misc_feature: 47
gtctgaactccagtcacaacgttccatctcgtatgccgtctcatgatcggaagagcacacgtctgaactccagtcacaacgttccatctcgtatgc

SEQ ID NO: 21757 - DNA, 96 bp, Aspergillus viridinutans
  misc_feature: 47
gagcacacgtctgaactccagtcacaacgttccatctcgtatgccgtatcatgatcggaagagcacacgtctgaactccagtcacaacgttccacc

SEQ ID NO: 21758 - DNA, 96 bp, Aspergillus viridinutans
  misc_feature: 47
agagcacacgtctgaactccagtcacaacgttccatctcgtatgccgtatcattcgatcggaagagcacacgtctgaactccagtcacaacgttcc

SEQ ID NO: 21759 - DNA, 96 bp, Aspergillus viridinutans
  misc_feature: 47
gcatacgagatggaacgttgtgactggagttcagacgtgtgctcttccgagatcggaagagcgtcgtgtagggaaagagtgtagtactccgtgtag

SEQ ID NO: 21760 - DNA, 96 bp, Aspergillus viridinutans
  misc_feature: 47
gatcattcgatatcaaatactatggtattgaatcaatatcctgactagatgatgattcaatatcaaatactatggtattgaatcgatatcctgact

SEQ ID NO: 21761 - DNA, 96 bp, Aspergillus viridinutans
  misc_feature: 47
gatattgatactagatgacattcgatatccctactagatgacattcaatattgattcgatatccctactagatgacatttgatatcgattcgatat

SEQ ID NO: 21762 - DNA, 96 bp, Aspergillus viridinutans
  misc_feature: 47
gaactccagtcacaacgttccatctcgtatgccgtatcctgatcggaagagcacacgtctgaactccagtcacaacgttccatctcgtatgccgtc

SEQ ID NO: 21763 - DNA, 96 bp, Aspergillus viridinutans
  misc_feature: 47
ctccagtcacaacgttccatctcgtatgccgtagatcggaagagcacacgtctgaactccagtcacaacgttccatctcgtatgccgtatcattag

SEQ ID NO: 21764 - DNA, 96 bp, Aspergillus viridinutans
  misc_feature: 47
acgtctgaactccagtcacaacgttccatctcgtatgccgtagatcggaagagcacacgtctgaactccagtcacaacgttccacctcgtatgccg

SEQ ID NO: 21765 - DNA, 96 bp, Aspergillus viridinutans
  misc_feature: 47
agtagttagagaaagtataaattagagaattaaattattaaaaatagtatatatactaaagttattaagatatattaaatataagaattaattaat

SEQ ID NO: 21766 - DNA, 96 bp, Aspergillus viridinutans
  misc_feature: 47
actccagtcacaacgttccatctcgtatgccgtatcattgatcggaagaacacacgtctgaactccagtcacaacgttccatctcgtatgccgtct

SEQ ID NO: 21767 - DNA, 96 bp, Aspergillus viridinutans
  misc_feature: 46
atcggaagagcagatcggaagagcacacgtctgaactccagtcacaacgttccatctcgtatgccgtcttctgcttgaaaaaaaaaaaaaaaaaaa

SEQ ID NO: 21768 - DNA, 96 bp, Aspergillus viridinutans
  misc_feature: 46
tcacaacgttccatctcgtatgccgtagatcgcaagagcacacgtctgaactccagtcacaacgttccatctcgtatgccgtcttctgcttgaaaa

SEQ ID NO: 21769 - DNA, 96 bp, Aspergillus viridinutans
  misc_feature: 46
gtcacaacgttccatctcgtatgccgtagatcgcaagagcacacgtctgaactccagtcacaacgttccatctcgtatgccgtcttctgcttgaaa

SEQ ID NO: 21770 - DNA, 96 bp, Aspergillus viridinutans
  misc_feature: 46
ttaattctccttacttacttacttatatagcttatctctcttactagattctatcttaattaattcttcttacttacttacttatatagcttatct

SEQ ID NO: 21771 - DNA, 96 bp, Aspergillus viridinutans
  misc_feature: 46
gatcggaagagcacacgtctgaactccagtcacaacgttccatctcgtatgccgtatcattcgatcggaagagcacacgtctgaactccagtcaca

SEQ ID NO: 21772 - DNA, 96 bp, Aspergillus viridinutans
  misc_feature: 46
gaagagcacacgtctgaactccagtcacaacgttccatctcgtatgccgtatcatttcggaagagcacacgtctgaactccagtcacaacgttcca

SEQ ID NO: 21773 - DNA, 96 bp, Aspergillus viridinutans
  misc_feature: 46
cagatcggaagagcacacgtctgaactccagtcacaacgttccatctcgtatgccgtatcattagatcggaagagcacacgtctgaactccagtca

SEQ ID NO: 21774 - DNA, 96 bp, Aspergillus viridinutans
  misc_feature: 46
tctgaactccagtcacaacgttccatctcgtatgccgtctcatgatcggaagagcacacgtctgaactccagtcacaacgttccatctcgtatgcc

SEQ ID NO: 21775 - DNA, 96 bp, Aspergillus viridinutans
  misc_feature: 46
tcggaagagcgtcgtgtagggaaagagtgtagtactccgtgtagatctcggtggtcgccgtatcattaaaaaaaaaaaaaaaaaaaaaaaaaaaag

SEQ ID NO: 21776 - DNA, 96 bp, Aspergillus viridinutans
  misc_feature: 46
tcggaagagcacacgtctgaactccagtcacaacgttccatctcgtatgccgtatcatttcggaagagcacacgtctgaactccagtcacaacgtt

SEQ ID NO: 21777 - DNA, 96 bp, Aspergillus viridinutans
  misc_feature: 46
tcgattcgatattgattcaatatcaatactagatgatattcgatatccctactagatgacattcaatattgattcgatatcaatactagatgatat

SEQ ID NO: 21778 - DNA, 96 bp, Aspergillus viridinutans
  misc_feature: 46
tcacaacgttccatctcgtatgccgtatcattagatcggaagagcacacgtctgaactccagtcacaacgttccatctcgtatgccgtagatcgga

SEQ ID NO: 21779 - DNA, 96 bp, Aspergillus viridinutans
  misc_feature: 46
tattgattcaatatcaatactagatgatattcgatatccctactagatgacattcaatattgattcgatatcaatactagatgatattcgatatcc

SEQ ID NO: 21780 - DNA, 96 bp, Aspergillus viridinutans
  misc_feature: 46
tattgatactagatgacattcgatatccctactagatgacattcaatattgattcgatatccctactagatgacatttgatatcgattcgatattg

SEQ ID NO: 21781 - DNA, 96 bp, Aspergillus viridinutans
  misc_feature: 46
cgatattgatactagatgacattcgatatccctactagatgacattcaatattgattcgatatccctactagatgacatttgatatcgattcgata

SEQ ID NO: 21782 - DNA, 96 bp, Aspergillus viridinutans
  misc_feature: 46
atcattcgatatcaaatactatggtattgaatcaatatcctgactagatgatgattcaatatcaaatactatggtattgaatcgatatcctgacta

SEQ ID NO: 21783 - DNA, 96 bp, Aspergillus viridinutans
  misc_feature: 46
atttgatatcgattcgatattgattcaatatcaatactagatgatattcgatatccctactagatgacattcaatattgattcgatatcaatacta

SEQ ID NO: 21784 - DNA, 96 bp, Aspergillus viridinutans
  misc_feature: 46
tagatgatgattcgatatcaaatactatggtattgaatcgatatcctgactagatgatgaggaatactatggtatcaatattcatactaggtgatc

SEQ ID NO: 21785 - DNA, 96 bp, Aspergillus viridinutans
  misc_feature: 46
actatggtattgaatcgatatcctgactagatgatgaggaatactatggtatcaatattcatactaggtgatcattcgatatcaaatactatggta

SEQ ID NO: 21786 - DNA, 96 bp, Aspergillus viridinutans
  misc_feature: 46
ggaaagtgactaatatctgtctattcttgatagggcaggaagcgaacgttcagaccaaagctatttcagcgaaaaattgatgtcaaaggcattgac

SEQ ID NO: 21787 - DNA, 96 bp, Aspergillus viridinutans
  misc_feature: 46
cggacccggccaactggtcgccttcgcgcgcgcgcgcgcccaccggcgcctctcccgcgggcggctcctcgacccgtccacgccgaaccccccccc

SEQ ID NO: 21788 - DNA, 96 bp, Aspergillus viridinutans
  misc_feature: 46
ggaagagcacacgtctgaactccagtcacaacgttccatctcgtatgccgtatcatttcggaagagcacacgtctgaactccagtcacaacgttcc

SEQ ID NO: 21789 - DNA, 96 bp, Aspergillus viridinutans
  misc_feature: 46
gcacacgtctgaactccagtcacaacgttccatctcgtatgccgtatcatgatcggaagagcacacgtctgaactccagtcacaacgttccacctc

SEQ ID NO: 21790 - DNA, 96 bp, Aspergillus viridinutans
  misc_feature: 46
cggaagagcacacgtctgaactccagtcacaacgttccatctcgtatgccgtatcatttcggaagagcacacgtctgaactccagtcacaacgttc

SEQ ID NO: 21791 - DNA, 96 bp, Aspergillus viridinutans
  misc_feature: 46
ctgaactccagtcacaacgttccatctcgtatgccgtagatcggaagagcacacgactgaactccagtcacaacgttccatctcgtatgccgtctt

SEQ ID NO: 21792 - DNA, 96 bp, Aspergillus viridinutans
  misc_feature: 46
cgattcgatattgattcaatatcaatactagatgatattcgatatccctactagatgacattcaatattgattcgatatcaatactagatgatatt

SEQ ID NO: 21793 - DNA, 96 bp, Aspergillus viridinutans
  misc_feature: 46
atgatgattcgatatcaaatactatggtattgaatcgatatcctgactagatgatgaggaatactatggtatcaatattcatactaggtgatcatt

SEQ ID NO: 21794 - DNA, 96 bp, Aspergillus viridinutans
  misc_feature: 46
atcggaagagcacacgtctgaactccagtcacaacgttccatctcgtatgccgtatcatttcggaagagcacacgtctgaactccagtcacaacgt

SEQ ID NO: 21795 - DNA, 96 bp, Aspergillus viridinutans
  misc_feature: 46
atattgatactagatgacattcgatatccctactagatgacattcaatattgattcgatatccctactagatgacatttgatatcgattcgatatt

SEQ ID NO: 21796 - DNA, 96 bp, Aspergillus viridinutans
  misc_feature: 46
ataatctatttatagtcaaataaaacttaatttaaaaattaatattgaagattaataggataaaaataaacaagtatgagcgttaatatctaattt

SEQ ID NO: 21797 - DNA, 96 bp, Aspergillus viridinutans
  misc_feature: 46
ataaaacttatttatattttttattaacaaattatatttatgaaaataatgaattaattatatacaattgaccacctaaacctaatccagctagtt

SEQ ID NO: 21798 - DNA, 96 bp, Aspergillus viridinutans
  misc_feature: 46
agcacacgtctgaactccagtcacaacgttccatctcgtatgccgtatcatgatcggaagagcacacgtctgaactccagtcacaacgttccacct

SEQ ID NO: 21799 - DNA, 96 bp, Aspergillus viridinutans
  misc_feature: 46
aggtgatcattcgatatcaaatactatggtattgaatcaatatcctgactagatgatgattcaatatcaaatactatggtattgaatcgatatcct

SEQ ID NO: 21800 - DNA, 96 bp, Aspergillus viridinutans
  misc_feature: 45
tcttccgatcgatcggaagagcgtcgtgtagggaaagagtgtagtactccgtgtagatctcggtggtcgccgtatcattaaaaaaaaaaaaaaaaa

SEQ ID NO: 21801 - DNA, 96 bp, Aspergillus viridinutans
  misc_feature: 45
cttccgatctgatcggaagagcgtcgtgtagggaaagagtgtagtactccgtgtagatctcggtggtcgccgtatcattaaaaaaaaaaaaaaaaa

SEQ ID NO: 21802 - DNA, 96 bp, Aspergillus viridinutans
  misc_feature: 45
acgacgctcttccgatcgatcggaagagcacacgtctgaactccagtcacaacgttccatctcgtatgccgtcttctgcttgaaaaaaaaaaaaaa

SEQ ID NO: 21803 - DNA, 96 bp, Aspergillus viridinutans
  misc_feature: 45
tttgatatcgattcgatattgattcaatatcaatactagatgatattcgatatccctactagatgacattcaatattgattcgatatcaatactag

SEQ ID NO: 21804 - DNA, 96 bp, Aspergillus viridinutans
  misc_feature: 45
gatcggaagagcgtcgtgtagggaaagagtgtagtactccgtgtagatctcggtggtcgccgtatcattaaaaaaaaaaaaaaaaaaaaaaagaaa

SEQ ID NO: 21805 - DNA, 96 bp, Aspergillus viridinutans
  misc_feature: 45
tttagtttagaggtaaggatactattattattaattaaattattattattagtaggggtaaggactctattattattattattaatagtatagaag

SEQ ID NO: 21806 - DNA, 96 bp, Aspergillus viridinutans
  misc_feature: 45
gatcggaagagcgtcgtgtagggaaagagtgtagtactccgtgtagatctcggtggtcgccgtatcattaaaaaaaaaaaaaaaaaaaaaaaacaa

SEQ ID NO: 21807 - DNA, 96 bp, Aspergillus viridinutans
  misc_feature: 45
gtttagaggtaaggatactattattattaattaaattattattattagtaggggtaaggactctattattattattattaatagtatagaaggtaa

SEQ ID NO: 21808 - DNA, 96 bp, Aspergillus viridinutans
  misc_feature: 45
gagcacacgtctgaactccagtcacaacgttccatctcgtatgccgtatcattcgatcggaagagcacacgtctgaactccagtcacaacgttcca

SEQ ID NO: 21809 - DNA, 96 bp, Aspergillus viridinutans
  misc_feature: 45
tgatcattcgatatcaaatactatggtattgaatcaatatcctgactagatgatgattcaatatcaaatactatggtattgaatcgatatcctgac

SEQ ID NO: 21810 - DNA, 96 bp, Aspergillus viridinutans
  misc_feature: 45
agatgatgattcgatatcaaatactatggtattgaatcgatatcctgactagatgatgaggaatactatggtatcaatattcatactaggtgatca

SEQ ID NO: 21811 - DNA, 96 bp, Aspergillus viridinutans
  misc_feature: 45
tgatatcgattcgatattgattcaatatcaatactagatgatattcgatatccctactagatgacattcaatattgattcgatatcaatactagat

SEQ ID NO: 21812 - DNA, 96 bp, Aspergillus viridinutans
  misc_feature: 45
tgaactccagtcacaacgttccatctcgtatgccgtatagatcggaagagcacacgtctgaactccagtcacaacgttccatctcgtatgccgtct

SEQ ID NO: 21813 - DNA, 96 bp, Aspergillus viridinutans
  misc_feature: 45
tgaactccagtcacaacgttccatctcgtatgccgtagatcggaagagcacacgactgaactccagtcacaacgttccatctcgtatgccgtcttc

SEQ ID NO: 21814 - DNA, 96 bp, Aspergillus viridinutans
  misc_feature: 45
gctcttccgatcagatcggaagagcgtcgtgtagggaaagagtgtagtactccgtgtagatctcggtggtcgccgtatcattaaaaaaaaaaaaga

SEQ ID NO: 21815 - DNA, 96 bp, Aspergillus viridinutans
  misc_feature: 45
tctgaactccagtcacaacgttccatctcgtatgccgtatcagatcggaagagcacacgtctgaactccagtcacaacgttccacctcgtatgccg

SEQ ID NO: 21816 - DNA, 96 bp, Aspergillus viridinutans
  misc_feature: 45
tcgatattgatactagatgacattcgatatccctactagatgacattcaatattgattcgatatccctactagatgacatttgatatcgattcgat

SEQ ID NO: 21817 - DNA, 96 bp, Aspergillus viridinutans
  misc_feature: 45
tcgaatactaaggtatcaagtcgatatcctgactagttgatgattcgatatcgaatactaaggtatcaagttgatatcctgactagttgatgattc

SEQ ID NO: 21818 - DNA, 96 bp, Aspergillus viridinutans
  misc_feature: 45
tccagtcacaacgttccatctcgtatgccgtatagatcggaagagcacacgtctgaactccagtcacaacgttccatctcgtatgccgtcttctgc

SEQ ID NO: 21819 - DNA, 96 bp, Aspergillus viridinutans
  misc_feature: 45
cagtcacaacgttccatctcgtatgccgtatcatgatcggaagagcacacgtctgaactccagtcacaacgttccatctcgtatgccgtatcatga

SEQ ID NO: 21820 - DNA, 96 bp, Aspergillus viridinutans
  misc_feature: 45
atatcgattcgatattgattcaatatcaatactagatgatattcgatatccctactagatgacattcaatattgattcgatatcaatactagatga

SEQ ID NO: 21821 - DNA, 96 bp, Aspergillus viridinutans
  misc_feature: 45
gtgatcattcgatatcaaatactatggtattgaatcaatatcctgactagatgatgattcaatatcaaatactatggtattgaatcgatatcctga

SEQ ID NO: 21822 - DNA, 96 bp, Aspergillus viridinutans
  misc_feature: 45
gaggaatactatggtatcaatattcatactaggtgatcattcgatatcaaatactatggtattgaatcaatatcctgactagatgatgattcaata

SEQ ID NO: 21823 - DNA, 96 bp, Aspergillus viridinutans
  misc_feature: 45
tactacactctttccctacacgacgctcttccgatcgatcggaagagcacacgtctgaactccagtcacaacgttccatctcgtatgccgtatcat

SEQ ID NO: 21824 - DNA, 96 bp, Aspergillus viridinutans
  misc_feature: 45
cacgtctgaactccagtcacaacgttccatctcgtatgccgtatcatgatcggaagagcacacgtctgaactccagtcacaacgttccacctcgta

SEQ ID NO: 21825 - DNA, 96 bp, Aspergillus viridinutans
  misc_feature: 45
taattaattctccttacttacttacttatatagcttatctctcttactagattctatcttaattaattcttcttacttacttacttatatagctta

SEQ ID NO: 21826 - DNA, 96 bp, Aspergillus viridinutans
  misc_feature: 45
taatctatttatagtcaaataaaacttaatttaaaaattaatattgaagattaataggataaaaataaacaagtatgagcgttaatatctaattta

SEQ ID NO: 21827 - DNA, 96 bp, Aspergillus viridinutans
  misc_feature: 45
gtcacaacgttccatctcgtatgccgtatcatgatcggaagagcacacgtctgaactccagtcacaacgttccatctcgtatgccgtatcatgatc

SEQ ID NO: 21828 - DNA, 96 bp, Aspergillus viridinutans
  misc_feature: 45
ggtgatcattcgatatcaaatactatggtattgaatcaatatcctgactagatgatgattcaatatcaaatactatggtattgaatcgatatcctg

SEQ ID NO: 21829 - DNA, 96 bp, Aspergillus viridinutans
  misc_feature: 45
acggacccggccaactggtcgccttcgcgcgcgcgcgcgcccaccggcgcctctcccgcgggcggctcctcgacccgtccacgccgaacccccccc

SEQ ID NO: 21830 - DNA, 96 bp, Aspergillus viridinutans
  misc_feature: 45
ggaatactatggtatcaatattcatactaggtgatcattcgatatcaaatactatggtattgaatcaatatcctgactagatgatgattcaatatc

SEQ ID NO: 21831 - DNA, 96 bp, Aspergillus viridinutans
  misc_feature: 45
gatcggaagagcgtcgtgtagggaaagagtgtagtactccgtgtagatctcggtggtcgccgtatcattaaaaaaaaaaaagacgtgtagggaaag

SEQ ID NO: 21832 - DNA, 96 bp, Aspergillus viridinutans
  misc_feature: 45
atattgattcaatatcaatactagatgatattcgatatccctactagatgacattcaatattgattcgatatcaatactagatgatattcgatatc

SEQ ID NO: 21833 - DNA, 96 bp, Aspergillus viridinutans
  misc_feature: 45
gaactccagtcacaacgttccatctcgtatgccgtcttctgcttgaaaaaaaaaacgtctgaactccagtcacaacgttccatctcgtatgccgtc

SEQ ID NO: 21834 - DNA, 96 bp, Aspergillus viridinutans
  misc_feature: 45
ctgaactccagtcacaacgttccatctcgtatgccgtatagatcggaagagcacacgtctgaactccagtcacaacgttccatctcgtatgccgtc

SEQ ID NO: 21835 - DNA, 96 bp, Aspergillus viridinutans
  misc_feature: 45
aactccagtcacaacgttccatctcgtatgccgtatagatcggaagagcacacgtctgaactccagtcacaacgttccatctcgtatgccgtcttc

SEQ ID NO: 21836 - DNA, 96 bp, Aspergillus viridinutans
  misc_feature: 45
gaactccagtcacaacgttccatctcgtatgccgtatagatcggaagagcacacgtctgaactccagtcacaacgttccatctcgtatgccgtctt

SEQ ID NO: 21837 - DNA, 96 bp, Aspergillus viridinutans
  misc_feature: 45
cttatctctcttactagattctatcttaattaattcttcttacttacttacttatatagcttatctctcttactagattctatcttaattaattct

SEQ ID NO: 21838 - DNA, 96 bp, Aspergillus viridinutans
  misc_feature: 45
ctgaactccagtcacaacgttccatctcgtatgccgtctcatgatcggaagagcacacgtctgaactccagtcacaacgttccatctcgtatgccg

SEQ ID NO: 21839 - DNA, 96 bp, Aspergillus viridinutans
  misc_feature: 45
ctccagtcacaacgttccatctcgtatgccgtcttctgcttgaaaaaaaaacacgtctgaactccagtcacaacgttccatctcgtatgccgtctt

SEQ ID NO: 21840 - DNA, 96 bp, Aspergillus viridinutans
  misc_feature: 45
ctccagtcacaacgttccatctcgtatgccgtatagatcggaagagcacacgtctgaactccagtcacaacgttccatctcgtatgccgtcttctg

SEQ ID NO: 21841 - DNA, 96 bp, Aspergillus viridinutans
  misc_feature: 45
cggcatacgagatggaacgttgtgactggagttcagacgtgtgctcttccgagatcggaagagcgtcgtgtagggaaagagtgtagtactccgtgt

SEQ ID NO: 21842 - DNA, 96 bp, Aspergillus viridinutans
  misc_feature: 45
cgatatcgaatactaaggtatcaagtcgatatcctgactagttgatgattcgatatcgaatactaaggtatcaagttgatatcctgactagttgat

SEQ ID NO: 21843 - DNA, 96 bp, Aspergillus viridinutans
  misc_feature: 45
cacacgtctgaactccagtcacaacgttccatctcgtatgccgtatcatgatcggaagagcacacgtctgaactccagtcacaacgttccacctcg

SEQ ID NO: 21844 - DNA, 96 bp, Aspergillus viridinutans
  misc_feature: 45
ccagtcacaacgttccatctcgtatgccgtatagatcggaagagcacacgtctgaactccagtcacaacgttccatctcgtatgccgtcttctgct

SEQ ID NO: 21845 - DNA, 96 bp, Aspergillus viridinutans
  misc_feature: 45
agtcacaacgttccatctcgtatgccgtatcatgatcggaagagcacacgtctgaactccagtcacaacgttccatctcgtatgccgtatcatgat

SEQ ID NO: 21846 - DNA, 96 bp, Aspergillus viridinutans
  misc_feature: 45
aggaatactatggtatcaatattcatactaggtgatcattcgatatcaaatactatggtattgaatcaatatcctgactagatgatgattcaatat

SEQ ID NO: 21847 - DNA, 96 bp, Aspergillus viridinutans
  misc_feature: 45
aattaattctccttacttacttacttatatagcttatctctcttactagattctatcttaattaattcttcttacttacttacttatatagcttat

SEQ ID NO: 21848 - DNA, 96 bp, Aspergillus viridinutans
  misc_feature: 45
aactccagtcacaacgttccatctcgtatgccgtatcctgatcggaagagcacacgtctgaactccagtcacaacgttccatctcgtatgccgtct

SEQ ID NO: 21849 - DNA, 96 bp, Aspergillus viridinutans
  misc_feature: 45
actccagtcacaacgttccatctcgtatgccgtatagatcggaagagcacacgtctgaactccagtcacaacgttccatctcgtatgccgtcttct

SEQ ID NO: 21850 - DNA, 96 bp, Aspergillus viridinutans
  misc_feature: 45
acacgtctgaactccagtcacaacgttccatctcgtatgccgtatcatgatcggaagagcacacgtctgaactccagtcacaacgttccacctcgt

SEQ ID NO: 21851 - DNA, 96 bp, Aspergillus viridinutans
  misc_feature: 44
cgatcagatcggaagagcgtcgtgtagggaaagagtgtagtactccgtgtagatctcggtggtcgccgtatcattaaaaaaaaaaaaaaaaaaaaa

SEQ ID NO: 21852 - DNA, 96 bp, Aspergillus viridinutans
  misc_feature: 44
gctcttccgatcagatcggaagagcgtcgtgtagggaaagagtgtagtactccgtgtagatctcggtggtcgccggatcattaaaaaaaaaaaaaa

SEQ ID NO: 21853 - DNA, 96 bp, Aspergillus viridinutans
  misc_feature: 44
tttgtatatatatataatttatacatacgaaattatatacaagtttaatttatatgtatataaatatatatattattacacttgtatattaattgc

SEQ ID NO: 21854 - DNA, 96 bp, Aspergillus viridinutans
  misc_feature: 44
atcggaagagcgtcgtgtagggaaagagtgtagtactccgtgtagatctcggtggtcgccgtatcattaaaaaaaaaaaaaaaaaaaaaaaagaaa

SEQ ID NO: 21855 - DNA, 96 bp, Aspergillus viridinutans
  misc_feature: 44
tttagaggtaaggatactattattattaattaaattattattattagtaggggtaaggactctattattattattattaatagtatagaaggtaag

SEQ ID NO: 21856 - DNA, 96 bp, Aspergillus viridinutans
  misc_feature: 44
cggaagagcacacgtctgaactccagtcacaacgttccatctcgtatgccgtagatcggaagagcacacgtctgaactccagtcacaacgttccaa

SEQ ID NO: 21857 - DNA, 96 bp, Aspergillus viridinutans
  misc_feature: 44
ttgatatcgattcgatattgattcaatatcaatactagatgatattcgatatccctactagatgacattcaatattgattcgatatcaatactaga

SEQ ID NO: 21858 - DNA, 96 bp, Aspergillus viridinutans
  misc_feature: 44
tcacaacgttccatctcgtatgccgtatagatcggaagagcacacgtctgaactccagtcacaacgttccatctcgtatgccgtcttctgcttgaa

SEQ ID NO: 21859 - DNA, 96 bp, Aspergillus viridinutans
  misc_feature: 44
ttagtttagaggtaaggatactattattattaattaaattattattattagtaggggtaaggactctattattattattattaatagtatagaagg

SEQ ID NO: 21860 - DNA, 96 bp, Aspergillus viridinutans
  misc_feature: 44
gatcggaagagcagatcggaagagcacacgtctgaactccagtcacaacgttccatctcgtatgccgtcttctgcttgaaaaaaaaaaaaaaaaca

SEQ ID NO: 21861 - DNA, 96 bp, Aspergillus viridinutans
  misc_feature: 44
tggaaagtgactaatatctgtctattcttgatagggcaggaagcgaacgttcagaccaaagctatttcagcgaaaaattgatgtcaaaggcattga

SEQ ID NO: 21862 - DNA, 96 bp, Aspergillus viridinutans
  misc_feature: 44
cgaatactaaggtatcaagtcgatatcctgactagttgatgattcgatatcgaatactaaggtatcaagttgatatcctgactagttgatgattca

SEQ ID NO: 21863 - DNA, 96 bp, Aspergillus viridinutans
  misc_feature: 44
tgaactccagtcacaacgttccatctcgtatgccgtatcagatcggaagagcacacgtctgaactccagtcacaacgttccacctcgtatgccgtc

SEQ ID NO: 21864 - DNA, 96 bp, Aspergillus viridinutans
  misc_feature: 44
tgaactccagtcacaacgttccatctcgtatgccgtatcagaccggaagagcacacgtctgaactccagtcacaacgttccatctcgtatgccgtc

SEQ ID NO: 21865 - DNA, 96 bp, Aspergillus viridinutans
  misc_feature: 44
tcggaagagcacacgtctgaactccagtcacaacgttccatctcggtggtgatcggaagagcacacgtctgaactccagtcacaacgttccatctc

SEQ ID NO: 21866 - DNA, 96 bp, Aspergillus viridinutans
  misc_feature: 44
tcgatatcgaatactaaggtatcaagtcgatatcctgactagttgatgattcgatatcgaatactaaggtatcaagttgatatcctgactagttga

SEQ ID NO: 21867 - DNA, 96 bp, Aspergillus viridinutans
  misc_feature: 44
tccagtcacaacgttccatctcgtatgccgtcttctgcttgaaaaaaaaacacgtctgaactccagtcacaacgttccatctcgtatgccgtcttc

SEQ ID NO: 21868 - DNA, 96 bp, Aspergillus viridinutans
  misc_feature: 44
tccagtcacaacgttccatctcgtatgccgtatcctgatcggaagagcacacgtctgaactccagtcacaacgttccatctcgtatgccgtcttct

SEQ ID NO: 21869 - DNA, 96 bp, Aspergillus viridinutans
  misc_feature: 44
tcacaacgttccatctcgtatgccgtatcatgatcggaagagcacacgtctgaactccagtcacaacgttccatctcgtatgccgtatcatgatcg

SEQ ID NO: 21870 - DNA, 96 bp, Aspergillus viridinutans
  misc_feature: 44
gtcacaacgttccatctcgtatgccgtatagatcggaagagcacacgtctgaactccagtcacaacgttccatctcgtatgccgtcttctgcttga

SEQ ID NO: 21871 - DNA, 96 bp, Aspergillus viridinutans
  misc_feature: 44
tagtttagaggtaaggatactattattattaattaaattattattattagtaggggtaaggactctattattattattattaatagtatagaaggt

SEQ ID NO: 21872 - DNA, 96 bp, Aspergillus viridinutans
  misc_feature: 44
caaatactatggtattgaatcgatatcctgactagatgatgaggaatactatggtatcaatattcatactaggtgatcattcgatatcaaatacta

SEQ ID NO: 21873 - DNA, 96 bp, Aspergillus viridinutans
  misc_feature: 44
acacgtctgaactccagtcacaacgttccatctcgtatgccgtatcagatcggaagagcacacgtctgaactccagtcacaacgttccacctcgta

SEQ ID NO: 21874 - DNA, 96 bp, Aspergillus viridinutans
  misc_feature: 44
agtttagaggtaaggatactattattattaattaaattattattattagtaggggtaaggactctattattattattattaatagtatagaaggta

SEQ ID NO: 21875 - DNA, 96 bp, Aspergillus viridinutans
  misc_feature: 44
ggcatacgagatggaacgttgtgactggagttcagacgtgtgctcttccgagatcggaagagcgtcgtgtagggaaagagtgtagtactccgtgta

SEQ ID NO: 21876 - DNA, 96 bp, Aspergillus viridinutans
  misc_feature: 44
aatattagggcttcttagtataaatcctattactattaatataatctaaaaggtatttactttatatataaaaattttattataatatataactta

SEQ ID NO: 21877 - DNA, 96 bp, Aspergillus viridinutans
  misc_feature: 44
taaattaattaattaattaatttattaaatttaaaatatcaagtaaatgtttaataatataatatatataccttacatacaactaatcaattcatt

SEQ ID NO: 21878 - DNA, 96 bp, Aspergillus viridinutans
  misc_feature: 44
ggaagagcacacgtctgaactccagtcacaacgttccatctcgtatgccgtagatcggaagagcacacgtctgaactccagtcacaacgttccaac

SEQ ID NO: 21879 - DNA, 96 bp, Aspergillus viridinutans
  misc_feature: 44
gtctgaactccagtcacaacgttccatctcgtatgccgtatcattcgatcggaagagcacacgtctgaactccagtcacaacgttccatctcgtat

SEQ ID NO: 21880 - DNA, 96 bp, Aspergillus viridinutans
  misc_feature: 44
gtctgaactccagtcacaacgttccatctcgtatgccgtatcatgatcggaagagcacacgtctgaactccagtcacaacgttccacctcgtatgc

SEQ ID NO: 21881 - DNA, 96 bp, Aspergillus viridinutans
  misc_feature: 44
gtctgaactccagtcacaacgttccatctcgtatgccgtatcagatcggaagagcacacgtctgaactccagtcacaacgttccacctcgtatgcc

SEQ ID NO: 21882 - DNA, 96 bp, Aspergillus viridinutans
  misc_feature: 44
gtctgaactccagtcacaacgttccatctcgtatgccgtagatcggaagagcacacgtctgaactccagtcacaacgttccacctcgtatgccgtc

SEQ ID NO: 21883 - DNA, 96 bp, Aspergillus viridinutans
  misc_feature: 44
gtcacaacgttccatctcgtatgccgtatcattgatcggaagagcacacgtctgaactccagtcacaacgttccatctcgtatgccgtatcattag

SEQ ID NO: 21884 - DNA, 96 bp, Aspergillus viridinutans
  misc_feature: 44
gtcacaacgttccatctcgtatgccgtagatcggaagagcacacgtctgaactccagtcacaacgttccatctcgtatgccgtatcattagatcgg

SEQ ID NO: 21885 - DNA, 96 bp, Aspergillus viridinutans
  misc_feature: 44
agagcacacgtctgaactccagtcacaacgttccatctcgtatgccgtatcagatcggaagagcacacgtctgaactccagtcacaacgttccacc

SEQ ID NO: 21886 - DNA, 96 bp, Aspergillus viridinutans
  misc_feature: 44
ggggtgagccggcgcgcgcgagggtgacgagggaaggaatcgggaggggaagggcaagggaaagggagagggaggaggaggggagggaggcggtgg

SEQ ID NO: 21887 - DNA, 96 bp, Aspergillus viridinutans
  misc_feature: 44
aacggacccggccaactggtcgccttcgcgcgcgcgcgcgcccaccggcgcctctcccgcgggcggctcctcgacccgtccacgccgaaccccccc

SEQ ID NO: 21888 - DNA, 96 bp, Aspergillus viridinutans
  misc_feature: 44
ggaagagcacacgtctgaactccagtcacaacgttccatctcgtatgccgtatcattgatcggaagagaacacgtctgaactccagtcacaacgtt

SEQ ID NO: 21889 - DNA, 96 bp, Aspergillus viridinutans
  misc_feature: 44
aagagcacacgtctgaactccagtcacaacgttccatctcgtatgccgtatcattgatcggaagagaacacgtctgaactccagtcacaacgttcc

SEQ ID NO: 21890 - DNA, 96 bp, Aspergillus viridinutans
  misc_feature: 44
cgtctgaactccagtcacaacgttccatctcgtatgccgtatcagatcggaagagcacacgtctgaactccagtcacaacgttccacctcgtatgc

SEQ ID NO: 21891 - DNA, 96 bp, Aspergillus viridinutans
  misc_feature: 44
gcagatcggaagagcacacgtctgaactccagtcacaacgttccatctcgtatgccgtatcattagatcggaagagcacacgtctgaactccagtc

SEQ ID NO: 21892 - DNA, 96 bp, Aspergillus viridinutans
  misc_feature: 44
actccagtcacaacgttccatctcgtatgccgtagatcggaagagcacacgactgaactccagtcacaacgttccatctcgtatgccgtcttctgc

SEQ ID NO: 21893 - DNA, 96 bp, Aspergillus viridinutans
  misc_feature: 44
gcacacgtctgaactccagtcacaacgttccatctcgtatgccgtatcattcgatcggaagagcacacgtctgaactccagtcacaacgttccatc

SEQ ID NO: 21894 - DNA, 96 bp, Aspergillus viridinutans
  misc_feature: 44
gcacacgtctgaactccagtcacaacgttccatctcgtatgccgtatcagatcggaagagcacacgtctgaactccagtcacaacgttccacctcg

SEQ ID NO: 21895 - DNA, 96 bp, Aspergillus viridinutans
  misc_feature: 44
gattcgatattgattcaatatcaatactagatgatattcgatatccctactagatgacattcaatattgattcgatatcaatactagatgatattc

SEQ ID NO: 21896 - DNA, 96 bp, Aspergillus viridinutans
  misc_feature: 44
gattcgatattgatactagatgacattcgatatccctactagatgacattcaatattgattcgatatccctactagatgacatttgatatcgattc

SEQ ID NO: 21897 - DNA, 96 bp, Aspergillus viridinutans
  misc_feature: 44
gatgatgattcgatatcaaatactatggtattgaatcgatatcctgactagatgatgaggaatactatggtatcaatattcatactaggtgatcat

SEQ ID NO: 21898 - DNA, 96 bp, Aspergillus viridinutans
  misc_feature: 44
cagtcacaacgttccatctcgtatgccgtagatcggaagagcacacgtctgaactccagtcacaacgttccatctcgtatgccgtatcattagatc

SEQ ID NO: 21899 - DNA, 96 bp, Aspergillus viridinutans
  misc_feature: 44
gatatcgattcgatattgattcaatatcaatactagatgatattcgatatccctactagatgacattcaatattgattcgatatcaatactagatg

SEQ ID NO: 21900 - DNA, 96 bp, Aspergillus viridinutans
  misc_feature: 44
agcacacgtctgaactccagtcacaacgttccatctcgtatgccgtatcagatcggaagagcacacgtctgaactccagtcacaacgttccacctc

SEQ ID NO: 21901 - DNA, 96 bp, Aspergillus viridinutans
  misc_feature: 44
gaggcgcgcgcggccagaggggcaggcaggcaggcaggcaggcaggcaaagtgggggggggacgcgcggggcccaggtcgcggggggggggggggg

SEQ ID NO: 21902 - DNA, 96 bp, Aspergillus viridinutans
  misc_feature: 44
acacgtctgaactccagtcacaacgttccatctcgtatgccgtatcattcgatcggaagagcacacgtctgaactccagtcacaacgttccatctc

SEQ ID NO: 21903 - DNA, 96 bp, Aspergillus viridinutans
  misc_feature: 44
aactccagtcacaacgttccatctcgtatgccgtatcattgatcggaagagcacacgtctgaactccagtcacaacgttccctctcgtatgccgtc

SEQ ID NO: 21904 - DNA, 96 bp, Aspergillus viridinutans
  misc_feature: 44
gaagagcacacgtctgaactccagtcacaacgttccatctcgtatgccgtatcattgatcggaagagaacacgtctgaactccagtcacaacgttc

SEQ ID NO: 21905 - DNA, 96 bp, Aspergillus viridinutans
  misc_feature: 44
gaagagcacacgtctgaactccagtcacaacgttccatctcgtatgccgtagatcggaagagcacacgtctgaactccagtcacaacgttccaact

SEQ ID NO: 21906 - DNA, 96 bp, Aspergillus viridinutans
  misc_feature: 44
ctccagtcacaacgttccatctcgtatgccgtatcctgatcggaagagcacacgtctgaactccagtcacaacgttccatctcgtatgccgtcttc

SEQ ID NO: 21907 - DNA, 96 bp, Aspergillus viridinutans
  misc_feature: 44
gaactccagtcacaacgttccatctcgtatgccgtagatcggaagagcacacgactgaactccagtcacaacgttccatctcgtatgccgtcttct

SEQ ID NO: 21908 - DNA, 96 bp, Aspergillus viridinutans
  misc_feature: 44
cttaattaattctccttacttacttacttatatagcttatctctcttactagattctatcttaattaattcttcttacttacttacttatatagct

SEQ ID NO: 21909 - DNA, 96 bp, Aspergillus viridinutans
  misc_feature: 44
ctgaactccagtcacaacgttccatctcgtatgccgtcttctgcttgaaaaaaaaaaagaactccagtcacaacgttccatctcgtatgccgtctt

SEQ ID NO: 21910 - DNA, 96 bp, Aspergillus viridinutans
  misc_feature: 44
ctgaactccagtcacaacgttccatctcgtatgccgtatcagatcggaagagcacacgtctgaactccagtcacaacgttccacctcgtatgccgt

SEQ ID NO: 21911 - DNA, 96 bp, Aspergillus viridinutans
  misc_feature: 44
ctactagatgacattcaatattgattcgatatcaatactagatgacattcgatatccctactagatgacattcaatattgattcgatatccctact

SEQ ID NO: 21912 - DNA, 96 bp, Aspergillus viridinutans
  misc_feature: 44
cgtctgaactccagtcacaacgttccatctcgtatgccgtatcatgatcggaagagcacacgtctgaactccagtcacaacgttccacctcgtatg

SEQ ID NO: 21913 - DNA, 96 bp, Aspergillus viridinutans
  misc_feature: 44
cgtctgaactccagtcacaacgttccatctcgtatgccgtagatcggaagagcacacgtctgaactccagtcacaacgttccacctcgtatgccgt

SEQ ID NO: 21914 - DNA, 96 bp, Aspergillus viridinutans
  misc_feature: 44
cggaagagcacacgtctgaactccagtcacaacgttccatctcgtatgccgtatcattgatcggaagagaacacgtctgaactccagtcacaacgt

SEQ ID NO: 21915 - DNA, 96 bp, Aspergillus viridinutans
  misc_feature: 44
cggaagagcacacgtctgaactccagtcacaacgttccatctcggtggtgatcggaagagcacacgtctgaactccagtcacaacgttccatctcg

SEQ ID NO: 21916 - DNA, 96 bp, Aspergillus viridinutans
  misc_feature: 44
agtcacaacgttccatctcgtatgccgtagatcggaagagcacacgtctgaactccagtcacaacgttccatctcgtatgccgtatcattagatcg

SEQ ID NO: 21917 - DNA, 96 bp, Aspergillus viridinutans
  misc_feature: 44
cacgtctgaactccagtcacaacgttccatctcgtatgccgtatcattcgatcggaagagcacacgtctgaactccagtcacaacgttccatctcg

SEQ ID NO: 21918 - DNA, 96 bp, Aspergillus viridinutans
  misc_feature: 44
ccagtcacaacgttccatctcgtatgccgtatcctgatcggaagagcacacgtctgaactccagtcacaacgttccatctcgtatgccgtcttctg

SEQ ID NO: 21919 - DNA, 96 bp, Aspergillus viridinutans
  misc_feature: 44
ccagtcacaacgttccatctcgtatgccgtagatcggaagagcacacgtctgaactccagtcacaacgttccatctcgtatgccgtatcattagat

SEQ ID NO: 21920 - DNA, 96 bp, Aspergillus viridinutans
  misc_feature: 44
acgtctgaactccagtcacaacgttccatctcgtatgccgtatcagatcggaagagcacacgtctgaactccagtcacaacgttccacctcgtatg

SEQ ID NO: 21921 - DNA, 96 bp, Aspergillus viridinutans
  misc_feature: 44
cagtcacaacgttccatctcgtatgccgtatagatcggaagagcacacgtctgaactccagtcacaacgttccatctcgtatgccgtcttctgctt

SEQ ID NO: 21922 - DNA, 96 bp, Aspergillus viridinutans
  misc_feature: 44
aactccagtcacaacgttccatctcgtatgccgtagatcggaagagcacacgactgaactccagtcacaacgttccatctcgtatgccgtcttctg

SEQ ID NO: 21923 - DNA, 96 bp, Aspergillus viridinutans
  misc_feature: 44
cacgtctgaactccagtcacaacgttccatctcgtatgccgtatcagatcggaagagcacacgtctgaactccagtcacaacgttccacctcgtat

SEQ ID NO: 21924 - DNA, 96 bp, Aspergillus viridinutans
  misc_feature: 44
cacacgtctgaactccagtcacaacgttccatctcgtatgccgtatcattcgatcggaagagcacacgtctgaactccagtcacaacgttccatct

SEQ ID NO: 21925 - DNA, 96 bp, Aspergillus viridinutans
  misc_feature: 44
cacacgtctgaactccagtcacaacgttccatctcgtatgccgtatcagatcggaagagcacacgtctgaactccagtcacaacgttccacctcgt

SEQ ID NO: 21926 - DNA, 96 bp, Aspergillus viridinutans
  misc_feature: 44
caatactagatgatattcgatatccctactagatgacattcaatattgattcgatatcaatactagatgacattcgatatccctactagatgacat

SEQ ID NO: 21927 - DNA, 96 bp, Aspergillus viridinutans
  misc_feature: 44
agtcacaacgttccatctcgtatgccgtatagatcggaagagcacacgtctgaactccagtcacaacgttccatctcgtatgccgtcttctgcttg

SEQ ID NO: 21928 - DNA, 96 bp, Aspergillus viridinutans
  misc_feature: 44
agcacacgtctgaactccagtcacaacgttccatctcgtatgccgtatcattcgatcggaagagcacacgtctgaactccagtcacaacgttccat

SEQ ID NO: 21929 - DNA, 96 bp, Aspergillus viridinutans
  misc_feature: 44
ataaattaattaattaattaatttattaaatttaaaatatcaagtaaatgtttaataatataatatatataccttacatacaactaatcaattcat

SEQ ID NO: 21930 - DNA, 96 bp, Aspergillus viridinutans
  misc_feature: 44
acgtctgaactccagtcacaacgttccatctcgtatgccgtatcatgatcggaagagcacacgtctgaactccagtcacaacgttccacctcgtat

SEQ ID NO: 21931 - DNA, 96 bp, Aspergillus viridinutans
  misc_feature: 44
aactccagtcacaacgttccatctcgtatgccgtcttctgcttgaaaaaaaaaacgtctgaactccagtcacaacgttccatctcgtatgccgtct

SEQ ID NO: 21932 - DNA, 96 bp, Aspergillus viridinutans
  misc_feature: 44
actccagtcacaacgttccatctcgtatgccgtatcattgatcggaagagcacacgtctgaactccagtcacaacgttccctctcgtatgccgtct

SEQ ID NO: 21933 - DNA, 96 bp, Aspergillus viridinutans
  misc_feature: 44
actccagtcacaacgttccatctcgtatgccgtcttctgcttgaaaaaaaaaacgtctgaactccagtcacaacgttccatctcgtatgccgtctt

SEQ ID NO: 21934 - DNA, 96 bp, Aspergillus viridinutans
  misc_feature: 44
actccagtcacaacgttccatctcgtatgccgtatcctgatcggaagagcacacgtctgaactccagtcacaacgttccatctcgtatgccgtctt

SEQ ID NO: 21935 - DNA, 96 bp, Aspergillus viridinutans
  misc_feature: 43
ttttgtatatatatataatttatacatacgaaattatatacaagtttaatttatatgtatataaatatatatattattacacttgtatattaattg

SEQ ID NO: 21936 - DNA, 96 bp, Aspergillus viridinutans
  misc_feature: 43
aaaaatctatggaaagtgactaatatctgtctattcttgatagggcaggaagcgaacgttcagaccaaagctatttcagcgaaaaattgatgtcaa

SEQ ID NO: 21937 - DNA, 96 bp, Aspergillus viridinutans
  misc_feature: 43
atttagtttagaggtaaggatactattattattaattaaattattattattagtaggggtaaggactctattattattattattaatagtatagaa

SEQ ID NO: 21938 - DNA, 96 bp, Aspergillus viridinutans
  misc_feature: 43
gtcacaacgttccatctcgtatgccgtatcattgatcggaagagcacacgtctgaactccagtcacaacgttccatctcgtatgccgtcttctgca

SEQ ID NO: 21939 - DNA, 96 bp, Aspergillus viridinutans
  misc_feature: 43
tataaattaattaattaattaatttattaaatttaaaatatcaagtaaatgtttaataatataatatatataccttacatacaactaatcaattca

SEQ ID NO: 21940 - DNA, 96 bp, Aspergillus viridinutans
  misc_feature: 43
tgaactccagtcacaacgttccatctcgtatgccgtctcatgatcggaagagcacacgtctgaactccagtcacaacgttccatctcgtatgccgt

SEQ ID NO: 21941 - DNA, 96 bp, Aspergillus viridinutans
  misc_feature: 43
tgaactccagtcacaacgttccatctcgtatgccgtatcatgatcggaagagcacacgtctgaactccagtcacaacgttccacctcgtatgccgt

SEQ ID NO: 21942 - DNA, 96 bp, Aspergillus viridinutans
  misc_feature: 43
tctgaactccagtcacaacgttccatctcgtatgccgtatcatgatcggaagagcacacgtctgaactccagtcacaacgttccacctcgtatgcc

SEQ ID NO: 21943 - DNA, 96 bp, Aspergillus viridinutans
  misc_feature: 43
tctgaactccagtcacaacgttccatctcgtatgccgtagatcggaagagcacacgtctgaactccagtcacaacgttccacctcgtatgccgtct

SEQ ID NO: 21944 - DNA, 96 bp, Aspergillus viridinutans
  misc_feature: 43
catacgagatggaacgttgtgactggagttcagacgtgtgctcttccgagatcggaagagcgtcgtgtagggaaagagtgtagtactccgtgtaga

SEQ ID NO: 21945 - DNA, 96 bp, Aspergillus viridinutans
  misc_feature: 43
tcggaagagcacacgtctgaactccagtcacaacgttccatctcgtatgccgtatcattgatcggaagagaacacgtctgaactccagtcacaacg

SEQ ID NO: 21946 - DNA, 96 bp, Aspergillus viridinutans
  misc_feature: 43
tcgattcaataccatagtatttgatattgaatcatcatctagtcaggatattgattcaataccatagtatttgatatcgaatgatcacctagtatg

SEQ ID NO: 21947 - DNA, 96 bp, Aspergillus viridinutans
  misc_feature: 43
tcacaacgttccatctcgtatgccgtagatcggaagagcacacgtctgaactccagtcacaacgttccatctcgtatgccgtatcattagatcgga

SEQ ID NO: 21948 - DNA, 96 bp, Aspergillus viridinutans
  misc_feature: 43
tccagtcacaacgttccatctcgtatgccgtcttctgcttgaaaaaaaaaacgtctgaactccagtcacaacgttccatctcgtatgccgtcttct

SEQ ID NO: 21949 - DNA, 96 bp, Aspergillus viridinutans
  misc_feature: 43
tccagtcacaacgttccatctcgtatgccgtatcattgatcggaagagcacacgtctgaactccagtcacaacgttccctctcgtatgccgtcttc

SEQ ID NO: 21950 - DNA, 96 bp, Aspergillus viridinutans
  misc_feature: 43
tccagtcacaacgttccatctcgtatgccgtatcattgatcggaagagcacacgtctgaactccagtcacaacgttccatctcgtatgccgtctcc

SEQ ID NO: 21951 - DNA, 96 bp, Aspergillus viridinutans
  misc_feature: 43
tccagtcacaacgttccatctcgtatgccgtatcattgatcggaagagcacacgtctgaactccagtcacaacgttccatctcgtatgccgtatcc

SEQ ID NO: 21952 - DNA, 96 bp, Aspergillus viridinutans
  misc_feature: 43
tccagtcacaacgttccatctcgtatgccgtatcagatcggaagagcacacgtctgaactccagtcacaacgttccacctcgtatgccgtcttctg

SEQ ID NO: 21953 - DNA, 96 bp, Aspergillus viridinutans
  misc_feature: 43
tcaatattgattcgatatcaatactagatgacattcgatatccctactagatgacattcaatattgattcgatatccctactagatgacatttgat

SEQ ID NO: 21954 - DNA, 96 bp, Aspergillus viridinutans
  misc_feature: 43
tatcgattcgatattgattcaatatcaatactagatgatattcgatatccctactagatgacattcaatattgattcgatatcaatactagatgat

SEQ ID NO: 21955 - DNA, 96 bp, Aspergillus viridinutans
  misc_feature: 43
atcgattcgatattgattcaatatcaatactagatgatattcgatatccctactagatgacattcaatattgattcgatatcaatactagatgata

SEQ ID NO: 21956 - DNA, 96 bp, Aspergillus viridinutans
  misc_feature: 43
tactagatgacattcaatattgattcgatatcaatactagatgacattcgatatccctactagatgacattcaatattgattcgatatccctacta

SEQ ID NO: 21957 - DNA, 96 bp, Aspergillus viridinutans
  misc_feature: 43
cgtctgaactccagtcacaacgttccatctcgtatgccgtatcattcgatcggaagagcacacgtctgaactccagtcacaacgttccatctcgta

SEQ ID NO: 21958 - DNA, 96 bp, Aspergillus viridinutans
  misc_feature: 43
tacgagatggaacgttgtgactggagttcagacgtgtgctcttccgagatcggaagagcgtcgtgtagggaaagagtgtagtactccgtgtagatc

SEQ ID NO: 21959 - DNA, 96 bp, Aspergillus viridinutans
  misc_feature: 43
taattctccttacttacttacttatatagcttatctctcttactagattctatcttaattaattcttcttacttacttacttatatagcttatctc

SEQ ID NO: 21960 - DNA, 96 bp, Aspergillus viridinutans
  misc_feature: 43
gatcggaagagcgtcgtgtagggaaagagtgtagtactccgtgtagatctcggtggtcgccgtatcattaaaaaaaaaaaaaaaaaaaaaaaaaac

SEQ ID NO: 21961 - DNA, 96 bp, Aspergillus viridinutans
  misc_feature: 43
atcggaagagcacacgtctgaactccagtcacaacgttccatctcgtatgccgtatcattgatcggaagagaacacgtctgaactccagtcacaac

SEQ ID NO: 21962 - DNA, 96 bp, Aspergillus viridinutans
  misc_feature: 43
aagagcacacgtctgaactccagtcacaacgttccatctcgtatgccgtatcagatcggaagagcacacgtctgaactccagtcacaacgttccac

SEQ ID NO: 21963 - DNA, 96 bp, Aspergillus viridinutans
  misc_feature: 43
gattcaatatcaatactagatgatattcgatatccctactagatgacattcaatattgattcgatatcaatactagatgatattcgatatccctac

SEQ ID NO: 21964 - DNA, 96 bp, Aspergillus viridinutans
  misc_feature: 43
ccagtcacaacgttccatctcgtatgccgtatcagatcggaagagcacacgtctgaactccagtcacaacgttccacctcgtatgccgtcttctgc

SEQ ID NO: 21965 - DNA, 96 bp, Aspergillus viridinutans
  misc_feature: 43
cagtcacaacgttccatctcgtatgccgtcttctgcttgaaaaaaaaaacgtctgaactccagtcacaacgttccatctcgtatgccgtcttctgc

SEQ ID NO: 21966 - DNA, 96 bp, Aspergillus viridinutans
  misc_feature: 43
cagtcacaacgttccatctcgtatgccgtatcctgatcggaagagcacacgtctgaactccagtcacaacgttccatctcgtatgccgtcttctgc

SEQ ID NO: 21967 - DNA, 96 bp, Aspergillus viridinutans
  misc_feature: 43
gcacacgtctgaactccagtcacaacgttccatctcgtatgccgtatcatttcggaagagcacacgtctgaactccagtcacaacgttccatctcg

SEQ ID NO: 21968 - DNA, 96 bp, Aspergillus viridinutans
  misc_feature: 43
agagcacacgtctgaactccagtcacaacgttccatctcgtatgccgtatcatttcggaagagcacacgtctgaactccagtcacaacgttccatc

SEQ ID NO: 21969 - DNA, 96 bp, Aspergillus viridinutans
  misc_feature: 43
attaattctccttacttacttacttatatagcttatctctcttactagattctatcttaattaattcttcttacttacttacttatatagcttatc

SEQ ID NO: 21970 - DNA, 96 bp, Aspergillus viridinutans
  misc_feature: 43
aagagcacacgtctgaactccagtcacaacgttccatctcgtatgccgtagatcggaagagcacacgtctgaactccagtcacaacgttccaactc

SEQ ID NO: 21971 - DNA, 96 bp, Aspergillus viridinutans
  misc_feature: 43
gagcacacgtctgaactccagtcacaacgttccatctcgtatgccgtatcatttcggaagagcacacgtctgaactccagtcacaacgttccatct

SEQ ID NO: 21972 - DNA, 96 bp, Aspergillus viridinutans
  misc_feature: 43
gagcacacgtctgaactccagtcacaacgttccatctcgtatgccgtatcagatcggaagagcacacgtctgaactccagtcacaacgttccacct

SEQ ID NO: 21973 - DNA, 96 bp, Aspergillus viridinutans
  misc_feature: 43
gagcacacgtctgaactccagtcacaacgttccatctcgtatgccgtagatcggaagagcacacgtctgaactccagtcacaacgttccaactcgt

SEQ ID NO: 21974 - DNA, 96 bp, Aspergillus viridinutans
  misc_feature: 43
agcacacgtctgaactccagtcacaacgttccatctcgtatgccgtatcatttcggaagagcacacgtctgaactccagtcacaacgttccatctc

SEQ ID NO: 21975 - DNA, 96 bp, Aspergillus viridinutans
  misc_feature: 43
gaccaccgagatctacacggagtactacactctttccctacacgacgctcttccgatcgatcggaagagcacacgtctgaactccagtcacaacgt

SEQ ID NO: 21976 - DNA, 96 bp, Aspergillus viridinutans
  misc_feature: 43
actccagtcacaacgttccatctcgtatgccgtatcagatcggaagagcacacgtctgaactccagtcacaacgttccacctcgtatgccgtcttc

SEQ ID NO: 21977 - DNA, 96 bp, Aspergillus viridinutans
  misc_feature: 43
ctccagtcacaacgttccatctcgtatgccgtcttctgcttgaaaaaaaaaacgtctgaactccagtcacaacgttccatctcgtatgccgtcttc

SEQ ID NO: 21978 - DNA, 96 bp, Aspergillus viridinutans
  misc_feature: 43
gaactccagtcacaacgttccatctcgtatgccgtatcagatcggaagagcacacgtctgaactccagtcacaacgttccacctcgtatgccgtct

SEQ ID NO: 21979 - DNA, 96 bp, Aspergillus viridinutans
  misc_feature: 43
gaactccagtcacaacgttccatctcgtatgccgtatcagaccggaagagcacacgtctgaactccagtcacaacgttccatctcgtatgccgtct

SEQ ID NO: 21980 - DNA, 96 bp, Aspergillus viridinutans
  misc_feature: 43
ctgaactccagtcacaacgttccatctcgtatgccgtcttctgcttgaaaaaaaaaatgaactccagtcacaacgttccatctcgtatgccgtctt

SEQ ID NO: 21981 - DNA, 96 bp, Aspergillus viridinutans
  misc_feature: 43
ctgaactccagtcacaacgttccatctcgtatgccgtatcatgatcggaagagcacacgtctgaactccagtcacaacgttccacctcgtatgccg

SEQ ID NO: 21982 - DNA, 96 bp, Aspergillus viridinutans
  misc_feature: 43
ctccagtcacaacgttccatctcgtatgccgtatcattgatcggaagagcacacgtctgaactccagtcacaacgttccctctcgtatgccgtctt

SEQ ID NO: 21983 - DNA, 96 bp, Aspergillus viridinutans
  misc_feature: 43
ctccagtcacaacgttccatctcgtatgccgtatcagatcggaagagcacacgtctgaactccagtcacaacgttccacctcgtatgccgtcttct

SEQ ID NO: 21984 - DNA, 96 bp, Aspergillus viridinutans
  misc_feature: 43
agagcacacgtctgaactccagtcacaacgttccatctcgtatgccgtagatcggaagagcacacgtctgaactccagtcacaacgttccaactcg

SEQ ID NO: 21985 - DNA, 96 bp, Aspergillus viridinutans
  misc_feature: 43
ccagtcacaacgttccatctcgtatgccgtcttctgcttgaaaaaaaaacacgtctgaactccagtcacaacgttccatctcgtatgccgtcttct

SEQ ID NO: 21986 - DNA, 96 bp, Aspergillus viridinutans
  misc_feature: 43
ccagtcacaacgttccatctcgtatgccgtcttctgcttgaaaaaaaaaacgtctgaactccagtcacaacgttccatctcgtatgccgtcttctg

SEQ ID NO: 21987 - DNA, 96 bp, Aspergillus viridinutans
  misc_feature: 43
catttgatatcgattcgatattgattcaatatcaatactagatgatattcgatatccctactagatgacattcaatattgattcgatatcaatact

SEQ ID NO: 21988 - DNA, 96 bp, Aspergillus viridinutans
  misc_feature: 43
acggcatacgagatggaacgttgtgactggagttcagacgtgtgctcttccgagatcggaagagcgtcgtgtagggaaagagtgtagtactccgtg

SEQ ID NO: 21989 - DNA, 96 bp, Aspergillus viridinutans
  misc_feature: 43
attagggcttcttagtataaatcctattactattaatataatctaaaaggtatttactttatatataaaaattttattataatatataacttaatt

SEQ ID NO: 21990 - DNA, 96 bp, Aspergillus viridinutans
  misc_feature: 43
aagagcacacgtctgaactccagtcacaacgttccatctcgtatgccgtatcatttcggaagagcacacgtctgaactccagtcacaacgttccat

SEQ ID NO: 21991 - DNA, 96 bp, Aspergillus viridinutans
  misc_feature: 43
atacgagatggaacgttgtgactggagttcagacgtgtgctcttccgagatcggaagagcgtcgtgtagggaaagagtgtagtactccgtgtagat

SEQ ID NO: 21992 - DNA, 96 bp, Aspergillus viridinutans
  misc_feature: 43
atcggaagagcacacgtctgaactccagtcacaacgttccatctcggtggtgatcggaagagcacacgtctgaactccagtcacaacgttccatct

SEQ ID NO: 21993 - DNA, 96 bp, Aspergillus viridinutans
  misc_feature: 43
agtcacaacgttccatctcgtatgccgtcttctgcttgaaaaaaaaaacgtctgaactccagtcacaacgttccatctcgtatgccgtcttctgct

SEQ ID NO: 21994 - DNA, 96 bp, Aspergillus viridinutans
  misc_feature: 43
acgagatggaacgttgtgactggagttcagacgtgtgctcttccgagatcggaagagcgtcgtgtagggaaagagtgtagtactccgtgtagatct

SEQ ID NO: 21995 - DNA, 96 bp, Aspergillus viridinutans
  misc_feature: 43
acgtctgaactccagtcacaacgttccatctcgtatgccgtatcattcgatcggaagagcacacgtctgaactccagtcacaacgttccatctcgt

SEQ ID NO: 21996 - DNA, 96 bp, Aspergillus viridinutans
  misc_feature: 43
aactccagtcacaacgttccatctcgtatgccgtatcagatcggaagagcacacgtctgaactccagtcacaacgttccacctcgtatgccgtctt

SEQ ID NO: 21997 - DNA, 96 bp, Aspergillus viridinutans
  misc_feature: 42
atcggaagagcgtcgtgtagggaaagagtgtagtactccgtgtagatctcggtggtcgccgtatcattaaaaaaaaaaaaaaaaaaaaaaaacaaa

SEQ ID NO: 21998 - DNA, 96 bp, Aspergillus viridinutans
  misc_feature: 42
tcggaagagcagatcggaagagcacacgtctgaactccagtcacaacgttccatctcgtatgccgtatcattagatcggaagagcacacgtctgaa

SEQ ID NO: 21999 - DNA, 96 bp, Aspergillus viridinutans
  misc_feature: 42
atattagggcttcttagtataaatcctattactattaatataatctaaaaggtatttactttatatataaaaattttattataatatataacttaa

SEQ ID NO: 22000 - DNA, 96 bp, Aspergillus viridinutans
  misc_feature: 42
tcaatactagatgatattcgatatccctactagatgacattcaatattgattcgatatcaatactagatgacattcgatatccctactagatgaca

SEQ ID NO: 22001 - DNA, 96 bp, Aspergillus viridinutans
  misc_feature: 42
agagcagatcggaagagcacacgtctgaactccagtcacaacgttccatctcgtatgccgtatcattagatcggaagagcacacgtctgaactcca

SEQ ID NO: 22002 - DNA, 96 bp, Aspergillus viridinutans
  misc_feature: 42
agagcacacgtctgaactccagtcacaacgttccatctcgtatgccgtatcattgatcggaagagaacacgtctgaactccagtcacaacgttcca

SEQ ID NO: 22003 - DNA, 96 bp, Aspergillus viridinutans
  misc_feature: 42
tgattcaatatcaatactagatgatattcgatatccctactagatgacattcaatattgattcgatatcaatactagatgatattcgatatcccta

SEQ ID NO: 22004 - DNA, 96 bp, Aspergillus viridinutans
  misc_feature: 42
tgacatttgatatcgattcgatattgattcaatatcaatactagatgatattcgatatccctactagatgacattcaatattgattcgatatcaat

SEQ ID NO: 22005 - DNA, 96 bp, Aspergillus viridinutans
  misc_feature: 42
taaaaatctatggaaagtgactaatatctgtctattcttgatagggcaggaagcgaacgttcagaccaaagctatttcagcgaaaaattgatgtca

SEQ ID NO: 22006 - DNA, 96 bp, Aspergillus viridinutans
  misc_feature: 42
tgaactccagtcacaacgttccatctcgtatgccgtcttctgcttgaaaaaaaaaatgaactccagtcacaacgttccatctcgtatgccgtcttc

SEQ ID NO: 22007 - DNA, 96 bp, Aspergillus viridinutans
  misc_feature: 42
tgaactccagtcacaacgttccatctcgtatgccgtcttctgcttgaaaaaaaaaaagaactccagtcacaacgttccatctcgtatgccgtcttc

SEQ ID NO: 22008 - DNA, 96 bp, Aspergillus viridinutans
  misc_feature: 42
tgaactccagtcacaacgttccatctcgtatgccgtatcattcgatcggaagagcacacgtctgaactccagtcacaacgttccatctcgtatgcc

SEQ ID NO: 22009 - DNA, 96 bp, Aspergillus viridinutans
  misc_feature: 42
tgaactccagtcacaacgttccatctcgtatgccgtatcatatcggaagagcacacgtctgaactccagtcacaacgttccatctcgtatgccgtc

SEQ ID NO: 22010 - DNA, 96 bp, Aspergillus viridinutans
  misc_feature: 42
tcttatatttaatatatcttaataactttagtatatatactatttttaataatttaattctctaatttatactttctctaactactttactaaatc

SEQ ID NO: 22011 - DNA, 96 bp, Aspergillus viridinutans
  misc_feature: 42
tctgaactccagtcacaacgttccatctcgtatgccgtatcatttcggaagagcacacgtctgaactccagtcacaacgttccatctcgtatgccg

SEQ ID NO: 22012 - DNA, 96 bp, Aspergillus viridinutans
  misc_feature: 42
tctgaactccagtcacaacgttccatctcgtatgccgtatcattcgatcggaagagcacacgtctgaactccagtcacaacgttccatctcgtatg

SEQ ID NO: 22013 - DNA, 96 bp, Aspergillus viridinutans
  misc_feature: 42
tatttagtttagaggtaaggatactattattattaattaaattattattattagtaggggtaaggactctattattattattattaatagtataga

SEQ ID NO: 22014 - DNA, 96 bp, Aspergillus viridinutans
  misc_feature: 42
tcacaacgttccatctcgtatgccgtatcattgatcggaagagcacacgtctgaactccagtcacaacgttccatctcgtatgccgtatcattaga

SEQ ID NO: 22015 - DNA, 96 bp, Aspergillus viridinutans
  misc_feature: 42
tcggaagagcacacgtctgaactccagtcacaacgttccatctcgtatgccgtatccgatcggaagagcacacgtctgaactccagtcacaacgtt

SEQ ID NO: 22016 - DNA, 96 bp, Aspergillus viridinutans
  misc_feature: 42
tcggaagagcacacgtctgaactccagtcacaacgttccatctcgtatgccgtatcattgatcggaagagcacacgtctgaactccagtcaccacg

SEQ ID NO: 22017 - DNA, 96 bp, Aspergillus viridinutans
  misc_feature: 42
tccgatcagatcggaagagcgtcgtgtagggaaagagtgtagtactccgtgtagatctcggtggtcgccgtatcattaaaaaaaaaaaaaaaaaag

SEQ ID NO: 22018 - DNA, 96 bp, Aspergillus viridinutans
  misc_feature: 42
tccagtcacaacgttccatctcgtatgccgtatcagaccggaagagcacacgtctgaactccagtcacaacgttccatctcgtatgccgtcttctg

SEQ ID NO: 22019 - DNA, 96 bp, Aspergillus viridinutans
  misc_feature: 42
cgattcaataccatagtatttgatattgaatcatcatctagtcaggatattgattcaataccatagtatttgatatcgaatgatcacctagtatga

SEQ ID NO: 22020 - DNA, 96 bp, Aspergillus viridinutans
  misc_feature: 42
attgatactagatgacattcgatatccctactagatgacattcaatattgattcgatatccctactagatgacatttgatatcgattcgatattga

SEQ ID NO: 22021 - DNA, 96 bp, Aspergillus viridinutans
  misc_feature: 42
gacatttgatatcgattcgatattgattcaatatcaatactagatgatattcgatatccctactagatgacattcaatattgattcgatatcaata

SEQ ID NO: 22022 - DNA, 96 bp, Aspergillus viridinutans
  misc_feature: 42
tattagggcttcttagtataaatcctattactattaatataatctaaaaggtatttactttatatataaaaattttattataatatataacttaat

SEQ ID NO: 22023 - DNA, 96 bp, Aspergillus viridinutans
  misc_feature: 42
caatattgattcgatatcaatactagatgacattcgatatccctactagatgacattcaatattgattcgatatccctactagatgacatttgata

SEQ ID NO: 22024 - DNA, 96 bp, Aspergillus viridinutans
  misc_feature: 42
gaagagcacacgtctgaactccagtcacaacgttccatctcggtggtgatcggaagagcacacgtctgaactccagtcacaacgttccatctcgta

SEQ ID NO: 22025 - DNA, 96 bp, Aspergillus viridinutans
  misc_feature: 42
acacgtctgaactccagtcacaacgttccatctcgtatgccgtatcatttcggaagagcacacgtctgaactccagtcacaacgttccatctcgta

SEQ ID NO: 22026 - DNA, 96 bp, Aspergillus viridinutans
  misc_feature: 42
agttaatcttctactagatagtattattattacttacctattagataaaataattattagatatagagatattatctagaatacctatattcttta

SEQ ID NO: 22027 - DNA, 96 bp, Aspergillus viridinutans
  misc_feature: 42
caatatatagctataaattaattaattaattaatttattaaatttaaaatatcaagtaaatgtttaataatataatatatataccttacatacaac

SEQ ID NO: 22028 - DNA, 96 bp, Aspergillus viridinutans
  misc_feature: 42
cggaagagcagatcggaagagcacacgtctgaactccagtcacaacgttccatctcgtatgccgtatcattagatcggaagagcacacgtctgaac

SEQ ID NO: 22029 - DNA, 96 bp, Aspergillus viridinutans
  misc_feature: 42
gtctgaactccagtcacaacgttccatctcgtatgccgtatcatttcggaagagcacacgtctgaactccagtcacaacgttccatctcgtatgcc

SEQ ID NO: 22030 - DNA, 96 bp, Aspergillus viridinutans
  misc_feature: 42
atcaatactagatgatattcgatatccctactagatgacattcaatattgattcgatatcaatactagatgacattcgatatccctactagatgac

SEQ ID NO: 22031 - DNA, 96 bp, Aspergillus viridinutans
  misc_feature: 42
gtcacaacgttccatctcgtatgccgtatcagatcggaagagcacacgtctgaactccagtcacaacgttccacctcgtatgccgtcttctgcttg

SEQ ID NO: 22032 - DNA, 96 bp, Aspergillus viridinutans
  misc_feature: 42
acatttgatatcgattcgatattgattcaatatcaatactagatgatattcgatatccctactagatgacattcaatattgattcgatatcaatac

SEQ ID NO: 22033 - DNA, 96 bp, Aspergillus viridinutans
  misc_feature: 42
cctactagatgacattcaatattgattcgatatcaatactagatgacattcgatatccctactagatgacattcaatattgattcgatatccctac

SEQ ID NO: 22034 - DNA, 96 bp, Aspergillus viridinutans
  misc_feature: 42
aaacggacccggccaactggtcgccttcgcgcgcgcgcgcgcccaccggcgcctctcccgcgggcggctcctcgacccgtccacgccgaacccccc

SEQ ID NO: 22035 - DNA, 96 bp, Aspergillus viridinutans
  misc_feature: 42
attgattcaatatcaatactagatgatattcgatatccctactagatgacattcaatattgattcgatatcaatactagatgatattcgatatccc

SEQ ID NO: 22036 - DNA, 96 bp, Aspergillus viridinutans
  misc_feature: 42
cacgtctgaactccagtcacaacgttccatctcgtatgccgtagatcggaagagcacacgtctgaactccagtcacaacgttccaactcgtatgcc

SEQ ID NO: 22037 - DNA, 96 bp, Aspergillus viridinutans
  misc_feature: 42
agcacacgtctgaactccagtcacaacgttccatctcggtggtgatcggaagagcacacgtctgaactccagtcacaacgttccatctcgtatgcc

SEQ ID NO: 22038 - DNA, 96 bp, Aspergillus viridinutans
  misc_feature: 42
aagagcagatcggaagagcacacgtctgaactccagtcacaacgttccatctcgtatgccgtatcattagatcggaagagcacacgtctgaactcc

SEQ ID NO: 22039 - DNA, 96 bp, Aspergillus viridinutans
  misc_feature: 42
ggaagagcagatcggaagagcacacgtctgaactccagtcacaacgttccatctcgtatgccgtatcattagatcggaagagcacacgtctgaact

SEQ ID NO: 22040 - DNA, 96 bp, Aspergillus viridinutans
  misc_feature: 42
ggaagagcacacgtctgaactccagtcacaacgttccatctcgtatgccgtagatcggaagagcacacgtctgaactccagtcacaacgttccagc

SEQ ID NO: 22041 - DNA, 96 bp, Aspergillus viridinutans
  misc_feature: 42
ggaagagcacacgtctgaactccagtcacaacgttccatctcggtggtgatcggaagagcacacgtctgaactccagtcacaacgttccatctcgt

SEQ ID NO: 22042 - DNA, 96 bp, Aspergillus viridinutans
  misc_feature: 42
gctcttccgatcagatcggaagagcgtcgtgtagggaaagagtgtagtactccgtgtagatctcggtggtcgccgtatcattaaaaaaaaaaaaat

SEQ ID NO: 22043 - DNA, 96 bp, Aspergillus viridinutans
  misc_feature: 42
acacgtctgaactccagtcacaacgttccatctcgtatgccgtagatcggaagagcacacgtctgaactccagtcacaacgttccaactcgtatgc

SEQ ID NO: 22044 - DNA, 96 bp, Aspergillus viridinutans
  misc_feature: 42
ctgaactccagtcacaacgttccatctcgtatgccgtatcattcgatcggaagagcacacgtctgaactccagtcacaacgttccatctcgtatgc

SEQ ID NO: 22045 - DNA, 96 bp, Aspergillus viridinutans
  misc_feature: 42
gagcacacgtctgaactccagtcacaacgttccatctcggtggtgatcggaagagcacacgtctgaactccagtcacaacgttccatctcgtatgc

SEQ ID NO: 22046 - DNA, 96 bp, Aspergillus viridinutans
  misc_feature: 42
cgtctgaactccagtcacaacgttccatctcgtatgccgtatcatttcggaagagcacacgtctgaactccagtcacaacgttccatctcgtatgc

SEQ ID NO: 22047 - DNA, 96 bp, Aspergillus viridinutans
  misc_feature: 42
agtcacaacgttccatctcgtatgccgtcttctgcttgaaaaaaaaacacgtctgaactccagtcacaacgttccatctcgtatgccgtcttctgc

SEQ ID NO: 22048 - DNA, 96 bp, Aspergillus viridinutans
  misc_feature: 42
ccagtcacaacgttccatctcgtatgccgtatcagaccggaagagcacacgtctgaactccagtcacaacgttccatctcgtatgccgtcttctgc

SEQ ID NO: 22049 - DNA, 96 bp, Aspergillus viridinutans
  misc_feature: 42
gcacacgtctgaactccagtcacaacgttccatctcgtatgccgtagatcggaagagcacacgtctgaactccagtcacaacgttccaactcgtat

SEQ ID NO: 22050 - DNA, 96 bp, Aspergillus viridinutans
  misc_feature: 42
gcacacgtctgaactccagtcacaacgttccatctcggtggtgatcggaagagcacacgtctgaactccagtcacaacgttccatctcgtatgccg

SEQ ID NO: 22051 - DNA, 96 bp, Aspergillus viridinutans
  misc_feature: 42
ctaggtgatcattcgatatcaaatactatggtattgaatcaatatcctgactagatgatgattcaatatcaaatactatggtattgaatcgatatc

SEQ ID NO: 22052 - DNA, 96 bp, Aspergillus viridinutans
  misc_feature: 42
gaagagcagatcggaagagcacacgtctgaactccagtcacaacgttccatctcgtatgccgtatcattagatcggaagagcacacgtctgaactc

SEQ ID NO: 22053 - DNA, 96 bp, Aspergillus viridinutans
  misc_feature: 42
aagagcacacgtctgaactccagtcacaacgttccatctcgtatgccgtagatcggaagagcacacgtctgaactccagtcacaacgttccagctc

SEQ ID NO: 22054 - DNA, 96 bp, Aspergillus viridinutans
  misc_feature: 42
gagcagatcggaagagcacacgtctgaactccagtcacaacgttccatctcgtatgccgtatcattagatcggaagagcacacgtctgaactccag

SEQ ID NO: 22055 - DNA, 96 bp, Aspergillus viridinutans
  misc_feature: 42
gagcacacgtctgaactccagtcacaacgttccatctcgtatgccgtagatcggaagagcacacgtctgaactccagtcacaacgttccagctcgt

SEQ ID NO: 22056 - DNA, 96 bp, Aspergillus viridinutans
  misc_feature: 42
gaactccagtcacaacgttccatctcgtatgccgtatcatgatcggaagagcacacgtctgaactccagtcacaacgttccacctcgtatgccgtc

SEQ ID NO: 22057 - DNA, 96 bp, Aspergillus viridinutans
  misc_feature: 42
ataaaaatctatggaaagtgactaatatctgtctattcttgatagggcaggaagcgaacgttcagaccaaagctatttcagcgaaaaattgatgtc

SEQ ID NO: 22058 - DNA, 96 bp, Aspergillus viridinutans
  misc_feature: 42
ctataaattaattaattaattaatttattaaatttaaaatatcaagtaaatgtttaataatataatatatataccttacatacaactaatcaattc

SEQ ID NO: 22059 - DNA, 96 bp, Aspergillus viridinutans
  misc_feature: 42
gaagagcacacgtctgaactccagtcacaacgttccatctcgtatgccgtagatcggaagagcacacgtctgaactccagtcacaacgttccagct

SEQ ID NO: 22060 - DNA, 96 bp, Aspergillus viridinutans
  misc_feature: 42
actccagtcacaacgttccatctcgtatgccgtatcagaccggaagagcacacgtctgaactccagtcacaacgttccatctcgtatgccgtcttc

SEQ ID NO: 22061 - DNA, 96 bp, Aspergillus viridinutans
  misc_feature: 42
gaactccagtcacaacgttccatctcgtatgccgtatcattcgatcggaagagcacacgtctgaactccagtcacaacgttccatctcgtatgccg

SEQ ID NO: 22062 - DNA, 96 bp, Aspergillus viridinutans
  misc_feature: 42
cggaagagcacacgtctgaactccagtcacaacgttccatctcgtatgccgtagatcggaagagcacacgtctgaactccagtcacaacgttccag

SEQ ID NO: 22063 - DNA, 96 bp, Aspergillus viridinutans
  misc_feature: 42
ctgaactccagtcacaacgttccatctcgtatgccgtatcatttcggaagagcacacgtctgaactccagtcacaacgttccatctcgtatgccgt

SEQ ID NO: 22064 - DNA, 96 bp, Aspergillus viridinutans
  misc_feature: 42
ctccagtcacaacgttccatctcgtatgccgtatcagaccggaagagcacacgtctgaactccagtcacaacgttccatctcgtatgccgtcttct

SEQ ID NO: 22065 - DNA, 96 bp, Aspergillus viridinutans
  misc_feature: 42
ctaaggtatcaagtcgatatcctgactagttgatgattcgatatcgaatactaaggtatcaagttgatatcctgactagttgatgattcaatattg

SEQ ID NO: 22066 - DNA, 96 bp, Aspergillus viridinutans
  misc_feature: 42
acgtctgaactccagtcacaacgttccatctcgtatgccgtagatcggaagagcacacgtctgaactccagtcacaacgttccaactcgtatgccg

SEQ ID NO: 22067 - DNA, 96 bp, Aspergillus viridinutans
  misc_feature: 42
acgtctgaactccagtcacaacgttccatctcgtatgccgtagatcggaagagcacacgtctgaactccagtcacaacgttccagctcgtatgccg

SEQ ID NO: 22068 - DNA, 96 bp, Aspergillus viridinutans
  misc_feature: 42
agagcacacgtctgaactccagtcacaacgttccatctcgtatgccgtagatcggaagagcacacgtctgaactccagtcacaacgttccagctcg

SEQ ID NO: 22069 - DNA, 96 bp, Aspergillus viridinutans
  misc_feature: 42
ccagtcacaacgttccatctcgtatgccgtatcattgatcggaagagcacacgtctgaactccagtcacaacgttccctctcgtatgccgtcttct

SEQ ID NO: 22070 - DNA, 96 bp, Aspergillus viridinutans
  misc_feature: 42
cacacgtctgaactccagtcacaacgttccatctcgtatgccgtagatcggaagagcacacgtctgaactccagtcacaacgttccaactcgtatg

SEQ ID NO: 22071 - DNA, 96 bp, Aspergillus viridinutans
  misc_feature: 42
agagcacacgtctgaactccagtcacaacgttccatctcggtggtgatcggaagagcacacgtctgaactccagtcacaacgttccatctcgtatg

SEQ ID NO: 22072 - DNA, 96 bp, Aspergillus viridinutans
  misc_feature: 42
acgtctgaactccagtcacaacgttccatctcgtatgccgtatcatttcggaagagcacacgtctgaactccagtcacaacgttccatctcgtatg

SEQ ID NO: 22073 - DNA, 96 bp, Aspergillus viridinutans
  misc_feature: 42
cagtcacaacgttccatctcgtatgccgtcttctgcttgaaaaaaaaacacgtctgaactccagtcacaacgttccatctcgtatgccgtcttctg

SEQ ID NO: 22074 - DNA, 96 bp, Aspergillus viridinutans
  misc_feature: 42
cagtcacaacgttccatctcgtatgccgtatcagatcggaagagcacacgtctgaactccagtcacaacgttccacctcgtatgccgtcttctgct

SEQ ID NO: 22075 - DNA, 96 bp, Aspergillus viridinutans
  misc_feature: 42
cacgtctgaactccagtcacaacgttccatctcgtatgccgtatcatttcggaagagcacacgtctgaactccagtcacaacgttccatctcgtat

SEQ ID NO: 22076 - DNA, 96 bp, Aspergillus viridinutans
  misc_feature: 42
cacacgtctgaactccagtcacaacgttccatctcgtatgccgtatcatttcggaagagcacacgtctgaactccagtcacaacgttccatctcgt

SEQ ID NO: 22077 - DNA, 96 bp, Aspergillus viridinutans
  misc_feature: 42
cacacgtctgaactccagtcacaacgttccatctcggtggtgatcggaagagcacacgtctgaactccagtcacaacgttccatctcgtatgccgt

SEQ ID NO: 22078 - DNA, 96 bp, Aspergillus viridinutans
  misc_feature: 42
atggaaagtgactaatatctgtctattcttgatagggcaggaagcgaacgttcagaccaaagctatttcagcgaaaaattgatgtcaaaggcattg

SEQ ID NO: 22079 - DNA, 96 bp, Aspergillus viridinutans
  misc_feature: 42
atgtcatctagtagggatatcgaatatcatctagtattgatatcgaatcaatattgaatgtcatctagtagggatatcgaatatcatctagtattg

SEQ ID NO: 22080 - DNA, 96 bp, Aspergillus viridinutans
  misc_feature: 42
atatagctataaattaattaattaattaatttattaaatttaaaatatcaagtaaatgtttaataatataatatatataccttacatacaactaat

SEQ ID NO: 22081 - DNA, 96 bp, Aspergillus viridinutans
  misc_feature: 42
atcggaagagcacacgtctgaactccagtcacaacgttccatctcgtatgccgtatccgatcggaagagcacacgtctgaactccagtcacaacgt

SEQ ID NO: 22082 - DNA, 96 bp, Aspergillus viridinutans
  misc_feature: 42
atcgattcaataccatagtatttgatattgaatcatcatctagtcaggatattgattcaataccatagtatttgatatcgaatgatcacctagtat

SEQ ID NO: 22083 - DNA, 96 bp, Aspergillus viridinutans
  misc_feature: 42
actaggtgatcattcgatatcaaatactatggtattgaatcaatatcctgactagatgatgattcaatatcaaatactatggtattgaatcgatat

SEQ ID NO: 22084 - DNA, 96 bp, Aspergillus viridinutans
  misc_feature: 42
atatcaaatgtcatctagtagggatatcgaatcaatattgaatgtcatctagtagggatatcgaatgtcatctagtattgatatcgaatcaatatt

SEQ ID NO: 22085 - DNA, 96 bp, Aspergillus viridinutans
  misc_feature: 42
aagagcacacgtctgaactccagtcacaacgttccatctcggtggtgatcggaagagcacacgtctgaactccagtcacaacgttccatctcgtat

SEQ ID NO: 22086 - DNA, 96 bp, Aspergillus viridinutans
  misc_feature: 42
aatatatagctataaattaattaattaattaatttattaaatttaaaatatcaagtaaatgtttaataatataatatatataccttacatacaact

SEQ ID NO: 22087 - DNA, 96 bp, Aspergillus viridinutans
  misc_feature: 42
agtcacaacgttccatctcgtatgccgtatcagatcggaagagcacacgtctgaactccagtcacaacgttccacctcgtatgccgtcttctgctt

SEQ ID NO: 22088 - DNA, 96 bp, Aspergillus viridinutans
  misc_feature: 42
agcagatcggaagagcacacgtctgaactccagtcacaacgttccatctcgtatgccgtatcattagatcggaagagcacacgtctgaactccagt

SEQ ID NO: 22089 - DNA, 96 bp, Aspergillus viridinutans
  misc_feature: 42
aactccagtcacaacgttccatctcgtatgccgtatcattcgatcggaagagcacacgtctgaactccagtcacaacgttccatctcgtatgccgt

SEQ ID NO: 22090 - DNA, 96 bp, Aspergillus viridinutans
  misc_feature: 42
aactccagtcacaacgttccatctcgtatgccgtatcagaccggaagagcacacgtctgaactccagtcacaacgttccatctcgtatgccgtctt

SEQ ID NO: 22091 - DNA, 96 bp, Aspergillus viridinutans
  misc_feature: 41
tttttgtatatatatataatttatacatacgaaattatatacaagtttaatttatatgtatataaatatatatattattacacttgtatattaatt

SEQ ID NO: 22092 - DNA, 96 bp, Aspergillus viridinutans
  misc_feature: 41
acaatatatagctataaattaattaattaattaatttattaaatttaaaatatcaagtaaatgtttaataatataatatatataccttacatacaa

SEQ ID NO: 22093 - DNA, 96 bp, Aspergillus viridinutans
  misc_feature: 41
ttgatactagatgacattcgatatccctactagatgacattcaatattgattcgatatccctactagatgacatttgatatcgattcgatattgat

SEQ ID NO: 22094 - DNA, 96 bp, Aspergillus viridinutans
  misc_feature: 41
ttctccttacttacttacttatatagcttatctctcttactagattctatcttaattaattcttcttacttacttacttatatagcttatctctct

SEQ ID NO: 22095 - DNA, 96 bp, Aspergillus viridinutans
  misc_feature: 41
ttatttagtttagaggtaaggatactattattattaattaaattattattattagtaggggtaaggactctattattattattattaatagtatag

SEQ ID NO: 22096 - DNA, 96 bp, Aspergillus viridinutans
  misc_feature: 41
tatatagctataaattaattaattaattaatttattaaatttaaaatatcaagtaaatgtttaataatataatatatataccttacatacaactaa

SEQ ID NO: 22097 - DNA, 96 bp, Aspergillus viridinutans
  misc_feature: 41
atagtaaattaattatacctaaattatctttatctatttttatactataggcctctattatattactctctaatactaatatatataagtaattaa

SEQ ID NO: 22098 - DNA, 96 bp, Aspergillus viridinutans
  misc_feature: 41
tatttttgtatatatatataatttatacatacgaaattatatacaagtttaatttatatgtatataaatatatatattattacacttgtatattaa

SEQ ID NO: 22099 - DNA, 96 bp, Aspergillus viridinutans
  misc_feature: 41
gatcggaagagcgtcgtgtagggaaagagtgtagtactccgtgtagatctcggtggtcgccgtatcattaaaaaaaaaaaaaaaaaaaaaaaaaca

SEQ ID NO: 22100 - DNA, 96 bp, Aspergillus viridinutans
  misc_feature: 41
tgatactagatgacattcgatatccctactagatgacattcaatattgattcgatatccctactagatgacatttgatatcgattcgatattgatt

SEQ ID NO: 22101 - DNA, 96 bp, Aspergillus viridinutans
  misc_feature: 41
agggatatcgaatatcatctagtattgatattgaatcaatatcgaatcgatatcaaatgtcatctagtagggatatcgaatcaatattgaatgtca

SEQ ID NO: 22102 - DNA, 96 bp, Aspergillus viridinutans
  misc_feature: 41
tctcttactagattctatcttaattaattcttcttacttacttacttatatagcttatctctcttactagattctatcttaattaattctccttac

SEQ ID NO: 22103 - DNA, 96 bp, Aspergillus viridinutans
  misc_feature: 41
tctctcttactagattctatcttaattaattcttcttacttacttacttatatagcttatctctcttactagattctatcttaattaattctcctt

SEQ ID NO: 22104 - DNA, 96 bp, Aspergillus viridinutans
  misc_feature: 41
tctagtagggatatcgaatatcatctagtattgatattgaatcaatatcgaatcgatatcaaatgtcatctagtagggatatcgaatcaatattga

SEQ ID NO: 22105 - DNA, 96 bp, Aspergillus viridinutans
  misc_feature: 41
tcggaagagcacacgtctgaactccagtcacaacgttccatctcgtatgccgtatcattgatcggaagagcaaacgtctgaactccagtcacaacg

SEQ ID NO: 22106 - DNA, 96 bp, Aspergillus viridinutans
  misc_feature: 41
tcacaacgttccatctcgtatgccgtatcagatcggaagagcacacgtctgaactccagtcacaacgttccacctcgtatgccgtcttctgcttga

SEQ ID NO: 22107 - DNA, 96 bp, Aspergillus viridinutans
  misc_feature: 41
actccagtcacaacgttccatctcgtatgccgtgatcggaagagcacacgtctgaactccagtcacaacgttccatctcgtatgccgtatcattga

SEQ ID NO: 22108 - DNA, 96 bp, Aspergillus viridinutans
  misc_feature: 41
taaggtatcaagtcgatatcctgactagttgatgattcgatatcgaatactaaggtatcaagttgatatcctgactagttgatgattcaatattga

SEQ ID NO: 22109 - DNA, 96 bp, Aspergillus viridinutans
  misc_feature: 41
tcaaatactatggtattgaatcgatatcctgactagatgatgaggaatactatggtatcaatattcatactaggtgatcattcgatatcaaatact

SEQ ID NO: 22110 - DNA, 96 bp, Aspergillus viridinutans
  misc_feature: 41
tactaggtgatcattcgatatcaaatactatggtattgaatcaatatcctgactagatgatgattcaatatcaaatactatggtattgaatcgata

SEQ ID NO: 22111 - DNA, 96 bp, Aspergillus viridinutans
  misc_feature: 41
tatatttttgtatatatatataatttatacatacgaaattatatacaagtttaatttatatgtatataaatatatatattattacacttgtatatt

SEQ ID NO: 22112 - DNA, 96 bp, Aspergillus viridinutans
  misc_feature: 41
tatagtaaattaattatacctaaattatctttatctatttttatactataggcctctattatattactctctaatactaatatatataagtaatta

SEQ ID NO: 22113 - DNA, 96 bp, Aspergillus viridinutans
  misc_feature: 41
tatagctataaattaattaattaattaatttattaaatttaaaatatcaagtaaatgtttaataatataatatatataccttacatacaactaatc

SEQ ID NO: 22114 - DNA, 96 bp, Aspergillus viridinutans
  misc_feature: 41
atatatagctataaattaattaattaattaatttattaaatttaaaatatcaagtaaatgtttaataatataatatatataccttacatacaacta

SEQ ID NO: 22115 - DNA, 96 bp, Aspergillus viridinutans
  misc_feature: 41
tacttatatagcttatctctcttactagattctatcttaattaattcttcttacttacttacttatatagcttatctctcttactagattctatct

SEQ ID NO: 22116 - DNA, 96 bp, Aspergillus viridinutans
  misc_feature: 41
agcacacgtctgaactccagtcacaacgttccatctcgtatgccgtagatcggaagagcacacgtctgaactccagtcacaacgttccaactcgta

SEQ ID NO: 22117 - DNA, 96 bp, Aspergillus viridinutans
  misc_feature: 41
agcacacgtctgaactccagtcacaacgttccatctcgtatgccgtagatcggaagagcacacgtctgaactccagtcacaacgttccagctcgta

SEQ ID NO: 22118 - DNA, 96 bp, Aspergillus viridinutans
  misc_feature: 41
atatttttgtatatatatataatttatacatacgaaattatatacaagtttaatttatatgtatataaatatatatattattacacttgtatatta

SEQ ID NO: 22119 - DNA, 96 bp, Aspergillus viridinutans
  misc_feature: 41
atatcttatttatttagtttagaggtaaggatactattattattaattaaattattattattagtaggggtaaggactctattattattattatta

SEQ ID NO: 22120 - DNA, 96 bp, Aspergillus viridinutans
  misc_feature: 41
ctctcttactagattctatcttaattaattcttcttacttacttacttatatagcttatctctcttactagattctatcttaattaattctcctta

SEQ ID NO: 22121 - DNA, 96 bp, Aspergillus viridinutans
  misc_feature: 41
gtctgaactccagtcacaacgttccatctcgtatgccgtagatcggaagagcacacgtctgaactccagtcacaacgttccaactcgtatgccgtc

SEQ ID NO: 22122 - DNA, 96 bp, Aspergillus viridinutans
  misc_feature: 41
aaaacggacccggccaactggtcgccttcgcgcgcgcgcgcgcccaccggcgcctctcccgcgggcggctcctcgacccgtccacgccgaaccccc

SEQ ID NO: 22123 - DNA, 96 bp, Aspergillus viridinutans
  misc_feature: 41
gggatatcgaatatcatctagtattgatattgaatcaatatcgaatcgatatcaaatgtcatctagtagggatatcgaatcaatattgaatgtcat

SEQ ID NO: 22124 - DNA, 96 bp, Aspergillus viridinutans
  misc_feature: 41
cacgtctgaactccagtcacaacgttccatctcgtatgccgtagatcggaagagcacacgtctgaactccagtcacaacgttccagctcgtatgcc

SEQ ID NO: 22125 - DNA, 96 bp, Aspergillus viridinutans
  misc_feature: 41
ggagtactacactctttccctacacgacgctcttccgatcagatcggaagagcacacgtctgaactccagtcacaacgttccatctcgtatgccgt

SEQ ID NO: 22126 - DNA, 96 bp, Aspergillus viridinutans
  misc_feature: 41
ggaagagcacacgtctgaactccagtcacaacgttccatctcgtatgccgtatccgatcggaagagcacacgtctgaactccagtcacaacgttcc

SEQ ID NO: 22127 - DNA, 96 bp, Aspergillus viridinutans
  misc_feature: 41
gcttatctctcttactagattctatcttaattaattcttcttacttacttacttatatagcttatctctcttactagattctatcttaattaattc

SEQ ID NO: 22128 - DNA, 96 bp, Aspergillus viridinutans
  misc_feature: 41
gctataaattaattaattaattaatttattaaatttaaaatatcaagtaaatgtttaataatataatatatataccttacatacaactaatcaatt

SEQ ID NO: 22129 - DNA, 96 bp, Aspergillus viridinutans
  misc_feature: 41
acacgtctgaactccagtcacaacgttccatctcgtatgccgtagatcggaagagcacacgtctgaactccagtcacaacgttccagctcgtatgc

SEQ ID NO: 22130 - DNA, 96 bp, Aspergillus viridinutans
  misc_feature: 41
actccagtcacaacgttccatctcgtatgccgtcttctgcttgaaaaaaaaaatgaactccagtcacaacgttccatctcgtatgccgtcttctgc

SEQ ID NO: 22131 - DNA, 96 bp, Aspergillus viridinutans
  misc_feature: 41
agtcacaacgttccatctcgtatgccgtatcattgatcggaagagcacacgtctgaactccagtcacaacgttccctctcgtatgccgtcttctgc

SEQ ID NO: 22132 - DNA, 96 bp, Aspergillus viridinutans
  misc_feature: 41
gcacacgtctgaactccagtcacaacgttccatctcgtatgccgtagatcggaagagcacacgtctgaactccagtcacaacgttccagctcgtat

SEQ ID NO: 22133 - DNA, 96 bp, Aspergillus viridinutans
  misc_feature: 41
gaatcgatatcaaatgtcatctagtagggatatcgaatcaatattgaatgtcatctagtagggatatcgaatgtcatctagtattgatatcgaatc

SEQ ID NO: 22134 - DNA, 96 bp, Aspergillus viridinutans
  misc_feature: 41
atattgaatgtcatctagtagggatatcgaatatcatctagtattgatattgaatcaatatcgaatcgatatcaaatgtcatctagtagggatatc

SEQ ID NO: 22135 - DNA, 96 bp, Aspergillus viridinutans
  misc_feature: 41
atatcgaatcgatatcaaatgtcatctagtagggatatcgaatcaatattgaatgtcatctagtagggatatcgaatgtcatctagtattgatatc

SEQ ID NO: 22136 - DNA, 96 bp, Aspergillus viridinutans
  misc_feature: 41
gagatggaacgttgtgactggagttcagacgtgtgctcttccgagatcggaagagcgtcgtgtagggaaagagtgtagtactccgtgtagatctcg

SEQ ID NO: 22137 - DNA, 96 bp, Aspergillus viridinutans
  misc_feature: 41
cgagatggaacgttgtgactggagttcagacgtgtgctcttccgagatcggaagagcgtcgtgtagggaaagagtgtagtactccgtgtagatctc

SEQ ID NO: 22138 - DNA, 96 bp, Aspergillus viridinutans
  misc_feature: 41
actccagtcacaacgttccatctcgtatgccgtatcattcgatcggaagagcacacgtctgaactccagtcacaacgttccatctcgtatgccgtc

SEQ ID NO: 22139 - DNA, 96 bp, Aspergillus viridinutans
  misc_feature: 41
gaactccagtcacaacgttccatctcgtatgccgtcttctgcttgaaaaaaaaaatgaactccagtcacaacgttccatctcgtatgccgtcttct

SEQ ID NO: 22140 - DNA, 96 bp, Aspergillus viridinutans
  misc_feature: 41
gaactccagtcacaacgttccatctcgtatgccgtcttctgcttgaaaaaaaaaaagaactccagtcacaacgttccatctcgtatgccgtcttct

SEQ ID NO: 22141 - DNA, 96 bp, Aspergillus viridinutans
  misc_feature: 41
gaactccagtcacaacgttccatctcgtatgccgtatcatatcggaagagcacacgtctgaactccagtcacaacgttccatctcgtatgccgtct

SEQ ID NO: 22142 - DNA, 96 bp, Aspergillus viridinutans
  misc_feature: 41
cggaagagcacacgtctgaactccagtcacaacgttccatctcgtatgccgtatccgatcggaagagcacacgtctgaactccagtcacaacgttc

SEQ ID NO: 22143 - DNA, 96 bp, Aspergillus viridinutans
  misc_feature: 41
ctccagtcacaacgttccatctcgtatgccgtcttctgcttgaaaaaaaaaatgaactccagtcacaacgttccatctcgtatgccgtcttctgct

SEQ ID NO: 22144 - DNA, 96 bp, Aspergillus viridinutans
  misc_feature: 41
ctccagtcacaacgttccatctcgtatgccgtatcattcgatcggaagagcacacgtctgaactccagtcacaacgttccatctcgtatgccgtct

SEQ ID NO: 22145 - DNA, 96 bp, Aspergillus viridinutans
  misc_feature: 41
cgtctgaactccagtcacaacgttccatctcgtatgccgtgatcggaagagcacacgtctgaactccagtcacaacgttccatctcgtatgccgtg

SEQ ID NO: 22146 - DNA, 96 bp, Aspergillus viridinutans
  misc_feature: 41
cggaagagcacacgtctgaactccagtcacaacgttccatctcgtatgccgtatcattgatcggaagagcacacgtctgaactccagtcaccacgt

SEQ ID NO: 22147 - DNA, 96 bp, Aspergillus viridinutans
  misc_feature: 41
cggaagagcacacgtctgaactccagtcacaacgttccatctcgtatgccgtatcattgatcggaagagcaaacgtctgaactccagtcacaacgt

SEQ ID NO: 22148 - DNA, 96 bp, Aspergillus viridinutans
  misc_feature: 41
actaatatctgtctattcttgatagggcaggaagcgaacgttcagaccaaagctatttcagcgaaaaattgatgtcaaaggcattgactggtggcg

SEQ ID NO: 22149 - DNA, 96 bp, Aspergillus viridinutans
  misc_feature: 41
cacgtctgaactccagtcacaacgttccatctcgtatgccgtatcattgatcggaagagcacacgtctgaactccagtcacaacgttccatctcgg

SEQ ID NO: 22150 - DNA, 96 bp, Aspergillus viridinutans
  misc_feature: 41
agatggaacgttgtgactggagttcagacgtgtgctcttccgagatcggaagagcgtcgtgtagggaaagagtgtagtactccgtgtagatctcgg

SEQ ID NO: 22151 - DNA, 96 bp, Aspergillus viridinutans
  misc_feature: 41
cacacgtctgaactccagtcacaacgttccatctcgtatgccgtagatcggaagagcacacgtctgaactccagtcacaacgttccagctcgtatg

SEQ ID NO: 22152 - DNA, 96 bp, Aspergillus viridinutans
  misc_feature: 41
cagtcacaacgttccatctcgtatgccgtatcattgatcggaagagcacacgtctgaactccagtcacaacgttccctctcgtatgccgtcttctg

SEQ ID NO: 22153 - DNA, 96 bp, Aspergillus viridinutans
  misc_feature: 41
cagtcacaacgttccatctcgtatgccgtatcagaccggaagagcacacgtctgaactccagtcacaacgttccatctcgtatgccgtcttctgct

SEQ ID NO: 22154 - DNA, 96 bp, Aspergillus viridinutans
  misc_feature: 41
aactccagtcacaacgttccatctcgtatgccgtcttctgcttgaaaaaaaaaaagaactccagtcacaacgttccatctcgtatgccgtcttctg

SEQ ID NO: 22155 - DNA, 96 bp, Aspergillus viridinutans
  misc_feature: 41
aactccagtcacaacgttccatctcgtatgccgtcttctgcttgaaaaaaaaaatgaactccagtcacaacgttccatctcgtatgccgtcttctg

SEQ ID NO: 22156 - DNA, 96 bp, Aspergillus viridinutans
  misc_feature: 41
cacaacgttccatctcgtatgccgtatcattgatcggaagagcacacgtctgaactccagtcacaacgttccacctcgtatgccgtcttctgcttg

SEQ ID NO: 22157 - DNA, 96 bp, Aspergillus viridinutans
  misc_feature: 41
aactccagtcacaacgttccatctcgtatgccgtgatcggaagagcacacgtctgaactccagtcacaacgttccatctcgtatgccgtatcattg

SEQ ID NO: 22158 - DNA, 96 bp, Aspergillus viridinutans
  misc_feature: 41
aaattaattaattaattaatttattaaatttaaaatatcaagtaaatgtttaataatataatatatataccttacatacaactaatcaattcattg

SEQ ID NO: 22159 - DNA, 96 bp, Aspergillus viridinutans
  misc_feature: 41
atctagtagggatatcgaatatcatctagtattgatattgaatcaatatcgaatcgatatcaaatgtcatctagtagggatatcgaatcaatattg

SEQ ID NO: 22160 - DNA, 96 bp, Aspergillus viridinutans
  misc_feature: 41
atttttgtatatatatataatttatacatacgaaattatatacaagtttaatttatatgtatataaatatatatattattacacttgtatattaat

SEQ ID NO: 22161 - DNA, 96 bp, Aspergillus viridinutans
  misc_feature: 41
atttatttagtttagaggtaaggatactattattattaattaaattattattattagtaggggtaaggactctattattattattattaatagtat

SEQ ID NO: 22162 - DNA, 96 bp, Aspergillus viridinutans
  misc_feature: 41
atctctcttactagattctatcttaattaattcttcttacttacttacttatatagcttatctctcttactagattctatcttaattaattctcct

SEQ ID NO: 22163 - DNA, 96 bp, Aspergillus viridinutans
  misc_feature: 41
aactccagtcacaacgttccatctcgtatgccgtatcatgatcggaagagcacacgtctgaactccagtcacaacgttccacctcgtatgccgtct

SEQ ID NO: 22164 - DNA, 96 bp, Aspergillus viridinutans
  misc_feature: 41
aatgtcatctagtagggatatcgaatatcatctagtattgatatcgaatcaatattgaatgtcatctagtagggatatcgaatatcatctagtatt

SEQ ID NO: 22165 - DNA, 96 bp, Aspergillus viridinutans
  misc_feature: 40
acacgtctgaactccagatcggaagagcacacgtctgaactccagtcacaacgttccatctcgtatgccgtcttctgcttgaaaaaaaaaaaaaaa

SEQ ID NO: 22166 - DNA, 96 bp, Aspergillus viridinutans
  misc_feature: 40
catctcgtatgccgtagatcggaagagcgtcgtgtagggaaagagtgtagtactccgtgtagatctcggtggtcgccgtatcattaaaaaaaaaaa

SEQ ID NO: 22167 - DNA, 96 bp, Aspergillus viridinutans
  misc_feature: 40
tttatttagtttagaggtaaggatactattattattaattaaattattattattagtaggggtaaggactctattattattattattaatagtata

SEQ ID NO: 22168 - DNA, 96 bp, Aspergillus viridinutans
  misc_feature: 40
aataaataaagatattaataaagctatttaatttagataaagaattattaaatatatataagaaactatttaataaagggaagtaagacctataaa

SEQ ID NO: 22169 - DNA, 96 bp, Aspergillus viridinutans
  misc_feature: 40
atcgatatcaaatgtcatctagtagggatatcgaatcaatattgaatgtcatctagtagggatatcgaatgtcatctagtattgatatcgaatcaa

SEQ ID NO: 22170 - DNA, 96 bp, Aspergillus viridinutans
  misc_feature: 40
tagctataaattaattaattaattaatttattaaatttaaaatatcaagtaaatgtttaataatataatatatataccttacatacaactaatcaa

SEQ ID NO: 22171 - DNA, 96 bp, Aspergillus viridinutans
  misc_feature: 40
atgacatttgatatcgattcgatattgattcaatatcaatactagatgatattcgatatccctactagatgacattcaatattgattcgatatcaa

SEQ ID NO: 22172 - DNA, 96 bp, Aspergillus viridinutans
  misc_feature: 40
tcttccgatcagatcggaagagcgtcgtgtagggaaagagtgtagtactccgtgtagatctcggtggtcgccgtatcattaaaaaaaaaaaaagaa

SEQ ID NO: 22173 - DNA, 96 bp, Aspergillus viridinutans
  misc_feature: 40
ttcttatatttaatatatcttaataactttagtatatatactatttttaataatttaattctctaatttatactttctctaactactttactaaat

SEQ ID NO: 22174 - DNA, 96 bp, Aspergillus viridinutans
  misc_feature: 40
gtcacaacgttccatctcgtatgccgtgatcggaagagcacacgtctgaactccagtcacaacgttccatctcgtatgccgtatcattgatcggaa

SEQ ID NO: 22175 - DNA, 96 bp, Aspergillus viridinutans
  misc_feature: 40
tatcttatttatttagtttagaggtaaggatactattattattaattaaattattattattagtaggggtaaggactctattattattattattaa

SEQ ID NO: 22176 - DNA, 96 bp, Aspergillus viridinutans
  misc_feature: 40
gatcggaagagcacacgtctgaactccagtcacaacgttccatctcgtatgccgtcttctgcttgaaaaaaaaaacacgtctgaactccagtcaca

SEQ ID NO: 22177 - DNA, 96 bp, Aspergillus viridinutans
  misc_feature: 40
gaagagcacacgtctgaactccagtcacaacgttccatctcgtatgccgtatccgatcggaagagcacacgtctgaactccagtcacaacgttcca

SEQ ID NO: 22178 - DNA, 96 bp, Aspergillus viridinutans
  misc_feature: 40
aatcgatatcaaatgtcatctagtagggatatcgaatcaatattgaatgtcatctagtagggatatcgaatgtcatctagtattgatatcgaatca

SEQ ID NO: 22179 - DNA, 96 bp, Aspergillus viridinutans
  misc_feature: 40
atagctataaattaattaattaattaatttattaaatttaaaatatcaagtaaatgtttaataatataatatatataccttacatacaactaatca

SEQ ID NO: 22180 - DNA, 96 bp, Aspergillus viridinutans
  misc_feature: 40
tgaactccagtcacaacgttccatctcgtatgccgtagatcggaagagcacacgtctgaactccagtcacaacgttccacctcgtatgccgtcttc

SEQ ID NO: 22181 - DNA, 96 bp, Aspergillus viridinutans
  misc_feature: 40
tcttatttatttagtttagaggtaaggatactattattattaattaaattattattattagtaggggtaaggactctattattattattattaata

SEQ ID NO: 22182 - DNA, 96 bp, Aspergillus viridinutans
  misc_feature: 40
ctgaactccagtcacaacgttccatctcgtatgccgtagatcggaagagcacacgtctgaactccagtcacaacgttccatctcgtatgccgtcga

SEQ ID NO: 22183 - DNA, 96 bp, Aspergillus viridinutans
  misc_feature: 40
tccagtcacaacgttccatctcgtatgccgtatcattcgatcggaagagcacacgtctgaactccagtcacaacgttccatctcgtatgccgtctt

SEQ ID NO: 22184 - DNA, 96 bp, Aspergillus viridinutans
  misc_feature: 40
gtctgaactccagtcacaacgttccatctcgtatgccgtgatcggaagagcacacgtctgaactccagtcacaacgttccatctcgtatgccgtga

SEQ ID NO: 22185 - DNA, 96 bp, Aspergillus viridinutans
  misc_feature: 40
tcacaacgttccatctcgtatgccgtgatcggaagagcacacgtctgaactccagtcacaacgttccatctcgtatgccgtatcattgatcggaag

SEQ ID NO: 22186 - DNA, 96 bp, Aspergillus viridinutans
  misc_feature: 40
tcacaacgttccatctcgtatgccgtatcctgatcggaagagcacacgtctgaactccagtcacaacgttccatctcgtatgccgtcttctgcttg

SEQ ID NO: 22187 - DNA, 96 bp, Aspergillus viridinutans
  misc_feature: 40
cgatatcaaatgtcatctagtagggatatcgaatcaatattgaatgtcatctagtagggatatcgaatgtcatctagtattgatatcgaatcaata

SEQ ID NO: 22188 - DNA, 96 bp, Aspergillus viridinutans
  misc_feature: 40
tattgaatgtcatctagtagggatatcgaatatcatctagtattgatattgaatcaatatcgaatcgatatcaaatgtcatctagtagggatatcg

SEQ ID NO: 22189 - DNA, 96 bp, Aspergillus viridinutans
  misc_feature: 40
tatctctcttactagattctatcttaattaattcttcttacttacttacttatatagcttatctctcttactagattctatcttaattaattctcc

SEQ ID NO: 22190 - DNA, 96 bp, Aspergillus viridinutans
  misc_feature: 40
tatcgaatcgatatcaaatgtcatctagtagggatatcgaatcaatattgaatgtcatctagtagggatatcgaatgtcatctagtattgatatcg

SEQ ID NO: 22191 - DNA, 96 bp, Aspergillus viridinutans
  misc_feature: 40
tatattaatatatcctatataatctatattaatatagctaataataatacctagcttatatataatatcttttatattataaggcttatagataat

SEQ ID NO: 22192 - DNA, 96 bp, Aspergillus viridinutans
  misc_feature: 40
atatcgaatatcatctagtattgatattgaatcaatatcgaatcgatatcaaatgtcatctagtagggatatcgaatcaatattgaatgtcatcta

SEQ ID NO: 22193 - DNA, 96 bp, Aspergillus viridinutans
  misc_feature: 40
gaactccagtcacaacgttccatctcgtatgccgtatcaagatcggaagagcacacgtctgaactccagtcacaacgttccatctcgtatgccgta

SEQ ID NO: 22194 - DNA, 96 bp, Aspergillus viridinutans
  misc_feature: 40
agtagaagttagattaataattattaatattaatttaaacttattaaaataactttaataactcctaatttatctttctttaaggtctaattatta

SEQ ID NO: 22195 - DNA, 96 bp, Aspergillus viridinutans
  misc_feature: 40
ctagattctatcttaattaattcttcttacttacttacttatatagcttatctctcttactagattctatcttaattaattctccttacttactta

SEQ ID NO: 22196 - DNA, 96 bp, Aspergillus viridinutans
  misc_feature: 40
atcggaagagcacacgtctgaactccagtcacaacgttccatctcgtatgccgtatcattgatcggaagagcaaacgtctgaactccagtcacaac

SEQ ID NO: 22197 - DNA, 96 bp, Aspergillus viridinutans
  misc_feature: 40
atcggaagagcacacgtctgaactccagtcacaacgttccatctcgtatgccgtatcattgatcggaagagcacacgtctgaactccagtcaccac

SEQ ID NO: 22198 - DNA, 96 bp, Aspergillus viridinutans
  misc_feature: 40
gtcacaacgttccatctcgtatgccgtcttctgcttgaaaaaaaaacacgtctgaactccagtcacaacgttccatctcgtatgccgtcttctgct

SEQ ID NO: 22199 - DNA, 96 bp, Aspergillus viridinutans
  misc_feature: 40
gtcacaacgttccatctcgtatgccgtatcctgatcggaagagcacacgtctgaactccagtcacaacgttccatctcgtatgccgtcttctgctt

SEQ ID NO: 22200 - DNA, 96 bp, Aspergillus viridinutans
  misc_feature: 40
gtcacaacgttccatctcgtatgccgtatcagaccggaagagcacacgtctgaactccagtcacaacgttccatctcgtatgccgtcttctgcttg

SEQ ID NO: 22201 - DNA, 96 bp, Aspergillus viridinutans
  misc_feature: 40
acccggccaactggtcgccttcgcgcgcgcgcgcgcccaccggcgcctctcccgcgggcggctcctcgacccgtccacgccgaacccccccccccc

SEQ ID NO: 22202 - DNA, 96 bp, Aspergillus viridinutans
  misc_feature: 40
ggaagagcacacgtctgaactccagtcacaacgttccatctcgtatgccgtatcattgatcggaagagcacacgtctgaactccagtcaccacgtt

SEQ ID NO: 22203 - DNA, 96 bp, Aspergillus viridinutans
  misc_feature: 40
ggaagagcacacgtctgaactccagtcacaacgttccatctcgtatgccgtatcattgatcggaagagcaaacgtctgaactccagtcacaacgtt

SEQ ID NO: 22204 - DNA, 96 bp, Aspergillus viridinutans
  misc_feature: 40
aagagcacacgtctgaactccagtcacaacgttccatctcgtatgccgtatcattgatcggaagagcaaacgtctgaactccagtcacaacgttcc

SEQ ID NO: 22205 - DNA, 96 bp, Aspergillus viridinutans
  misc_feature: 40
gcgccaccagtcaatgcctttgacatcaatttttcgctgaaatagctttggtctgaacgttcgcttcctgccctatcaagaatagacagatattag

SEQ ID NO: 22206 - DNA, 96 bp, Aspergillus viridinutans
  misc_feature: 40
actccagtcacaacgttccatctcgtatgccgtagatcggaagagcacacgtctgaactccagtcacaacgttccacctcgtatgccgtcttctgc

SEQ ID NO: 22207 - DNA, 96 bp, Aspergillus viridinutans
  misc_feature: 40
actccagtcacaacgttccatctcgtatgccgtcttctgcttgaaaaaaaaaaagaactccagtcacaacgttccatctcgtatgccgtcttctgc

SEQ ID NO: 22208 - DNA, 96 bp, Aspergillus viridinutans
  misc_feature: 40
gatactagatgacattcgatatccctactagatgacattcaatattgattcgatatccctactagatgacatttgatatcgattcgatattgattc

SEQ ID NO: 22209 - DNA, 96 bp, Aspergillus viridinutans
  misc_feature: 40
attctccttacttacttacttatatagcttatctctcttactagattctatcttaattaattcttcttacttacttacttatatagcttatctctc

SEQ ID NO: 22210 - DNA, 96 bp, Aspergillus viridinutans
  misc_feature: 40
gaactccagtcacaacgttccatctcgtatgccgtctcatgatcggaagagcacacgtctgaactccagtcacaacgttccatctcgtatgccgtc

SEQ ID NO: 22211 - DNA, 96 bp, Aspergillus viridinutans
  misc_feature: 40
gaatgtcatctagtagggatatcgaatatcatctagtattgatatcgaatcaatattgaatgtcatctagtagggatatcgaatatcatctagtat

SEQ ID NO: 22212 - DNA, 96 bp, Aspergillus viridinutans
  misc_feature: 40
gaagagcacacgtctgaactccagtcacaacgttccatctcgtatgccgtatcattgatcggaagagcaaacgtctgaactccagtcacaacgttc

SEQ ID NO: 22213 - DNA, 96 bp, Aspergillus viridinutans
  misc_feature: 40
ctccagtcacaacgttccatctcgtatgccgtatcatgatcggaagagcacacgtctgaactccagtcacaacgttccacctcgtatgccgtcttc

SEQ ID NO: 22214 - DNA, 96 bp, Aspergillus viridinutans
  misc_feature: 40
ccagtcacaacgttccatctcgtatgccgtatcattcgatcggaagagcacacgtctgaactccagtcacaacgttccatctcgtatgccgtcttc

SEQ ID NO: 22215 - DNA, 96 bp, Aspergillus viridinutans
  misc_feature: 40
actccagtcacaacgttccatctcgtatgccgtatcatatcggaagagcacacgtctgaactccagtcacaacgttccatctcgtatgccgtcttc

SEQ ID NO: 22216 - DNA, 96 bp, Aspergillus viridinutans
  misc_feature: 40
gaactccagtcacaacgttccatctcgtatgccgtagatcggaagagcacacgtctgaactccagtcacaacgttccacctcgtatgccgtcttct

SEQ ID NO: 22217 - DNA, 96 bp, Aspergillus viridinutans
  misc_feature: 40
ctgaactccagtcacaacgttccatctcgtatgccgtagatcggaagagcacacgtctgaactccagtcacaacgttccacctcgtatgccgtctt

SEQ ID NO: 22218 - DNA, 96 bp, Aspergillus viridinutans
  misc_feature: 40
ctcttactagattctatcttaattaattcttcttacttacttacttatatagcttatctctcttactagattctatcttaattaattctccttact

SEQ ID NO: 22219 - DNA, 96 bp, Aspergillus viridinutans
  misc_feature: 40
ctccagtcacaacgttccatctcgtatgccgtagatcggaagagcacacgtctgaactccagtcacaacgttccacctcgtatgccgtcttctgct

SEQ ID NO: 22220 - DNA, 96 bp, Aspergillus viridinutans
  misc_feature: 40
ctccagtcacaacgttccatctcgtatgccgtagatcggaagagcacacgactgaactccagtcacaacgttccatctcgtatgccgtcttctgct

SEQ ID NO: 22221 - DNA, 96 bp, Aspergillus viridinutans
  misc_feature: 40
ctatagtaaattaattatacctaaattatctttatctatttttatactataggcctctattatattactctctaatactaatatatataagtaatt

SEQ ID NO: 22222 - DNA, 96 bp, Aspergillus viridinutans
  misc_feature: 40
cggaagagcacacgtctgaactccagtcacaacgttccatctcgtatgccgtcttctgcttgaaaaaaaaaacacgtctgaactccagtcacaacg

SEQ ID NO: 22223 - DNA, 96 bp, Aspergillus viridinutans
  misc_feature: 40
cgtctgaactccagtcacaacgttccatctcgtatgccgtagatcggaagagcacacgtctgaactccagtcacaacgttccaactcgtatgccgt

SEQ ID NO: 22224 - DNA, 96 bp, Aspergillus viridinutans
  misc_feature: 40
cgaatcaatattgaatgtcatctagtagggatatcgaatatcatctagtattgatatcgaatcaatattgaatgtcatctagtagggatatcgaat

SEQ ID NO: 22225 - DNA, 96 bp, Aspergillus viridinutans
  misc_feature: 40
ccagtcacaacgttccatctcgtatgccgtatcattgatcggaagagcacacgtctgaactccagtcacaacgttccatctcgtatgccgtctcct

SEQ ID NO: 22226 - DNA, 96 bp, Aspergillus viridinutans
  misc_feature: 40
ccagtcacaacgttccatctcgtatgccgtatcattgatcggaagagcacacgtctgaactccagtcacaacgttccatctcgtatgccgtatcct

SEQ ID NO: 22227 - DNA, 96 bp, Aspergillus viridinutans
  misc_feature: 40
catctagtagggatatcgaatatcatctagtattgatattgaatcaatatcgaatcgatatcaaatgtcatctagtagggatatcgaatcaatatt

SEQ ID NO: 22228 - DNA, 96 bp, Aspergillus viridinutans
  misc_feature: 40
cagtcacaacgttccatctcgtatgccgtatcattcgatcggaagagcacacgtctgaactccagtcacaacgttccatctcgtatgccgtcttct

SEQ ID NO: 22229 - DNA, 96 bp, Aspergillus viridinutans
  misc_feature: 40
aactccagtcacaacgttccatctcgtatgccgtagatcggaagagcacacgtctgaactccagtcacaacgttccacctcgtatgccgtcttctg

SEQ ID NO: 22230 - DNA, 96 bp, Aspergillus viridinutans
  misc_feature: 40
aatatcgaatcgatatcaaatgtcatctagtagggatatcgaatcaatattgaatgtcatctagtagggatatcgaatgtcatctagtattgatat

SEQ ID NO: 22231 - DNA, 96 bp, Aspergillus viridinutans
  misc_feature: 40
atatatttttgtatatatatataatttatacatacgaaattatatacaagtttaatttatatgtatataaatatatatattattacacttgtatat

SEQ ID NO: 22232 - DNA, 96 bp, Aspergillus viridinutans
  misc_feature: 40
agtcacaacgttccatctcgtatgccgtatcctgatcggaagagcacacgtctgaactccagtcacaacgttccatctcgtatgccgtcttctgct

SEQ ID NO: 22233 - DNA, 96 bp, Aspergillus viridinutans
  misc_feature: 40
agtcacaacgttccatctcgtatgccgtatcagaccggaagagcacacgtctgaactccagtcacaacgttccatctcgtatgccgtcttctgctt

SEQ ID NO: 22234 - DNA, 96 bp, Aspergillus viridinutans
  misc_feature: 40
agcttatctctcttactagattctatcttaattaattcttcttacttacttacttatatagcttatctctcttactagattctatcttaattaatt

SEQ ID NO: 22235 - DNA, 96 bp, Aspergillus viridinutans
  misc_feature: 40
aattctccttacttacttacttatatagcttatctctcttactagattctatcttaattaattcttcttacttacttacttatatagcttatctct

SEQ ID NO: 22236 - DNA, 96 bp, Aspergillus viridinutans
  misc_feature: 40
acttatatagcttatctctcttactagattctatcttaattaattcttcttacttacttacttatatagcttatctctcttactagattctatctt

SEQ ID NO: 22237 - DNA, 96 bp, Aspergillus viridinutans
  misc_feature: 40
actccagtcacaacgttccatctcgtatgccgtatcatgatcggaagagcacacgtctgaactccagtcacaacgttccacctcgtatgccgtctt

SEQ ID NO: 22238 - DNA, 96 bp, Aspergillus viridinutans
  misc_feature: 40
aatatcttatttatttagtttagaggtaaggatactattattattaattaaattattattattagtaggggtaaggactctattattattattatt

SEQ ID NO: 22239 - DNA, 96 bp, Aspergillus viridinutans
  misc_feature: 40
aactccagtcacaacgttccatctcgtatgccgtatcatatcggaagagcacacgtctgaactccagtcacaacgttccatctcgtatgccgtctt

SEQ ID NO: 22240 - DNA, 96 bp, Aspergillus viridinutans
  misc_feature: 39
tttacaatatatagctataaattaattaattaattaatttattaaatttaaaatatcaagtaaatgtttaataatataatatatataccttacata

SEQ ID NO: 22241 - DNA, 96 bp, Aspergillus viridinutans
  misc_feature: 39
atcggaagagcacacgtctgaactccagtcacaacgttccatctcgtatgccgtcttctgcttgaaaaaaaaaacacgtctgaactccagtcacaa

SEQ ID NO: 22242 - DNA, 96 bp, Aspergillus viridinutans
  misc_feature: 39
ttgtaggaggcctcctcgttcctggtcctgctccgacggctcccccagttctgcatggcggaactggccgagcaggcctgtttgatgcatgaattc

SEQ ID NO: 22243 - DNA, 96 bp, Aspergillus viridinutans
  misc_feature: 39
ttgattcaatatcaatactagatgatattcgatatccctactagatgacattcaatattgattcgatatcaatactagatgatattcgatatccct

SEQ ID NO: 22244 - DNA, 96 bp, Aspergillus viridinutans
  misc_feature: 39
ttcaatattgattcgatatcaatactagatgacattcgatatccctactagatgacattcaatattgattcgatatccctactagatgacatttga

SEQ ID NO: 22245 - DNA, 96 bp, Aspergillus viridinutans
  misc_feature: 39
aaggtatcaagtcgatatcctgactagttgatgattcgatatcgaatactaaggtatcaagttgatatcctgactagttgatgattcaatattgaa

SEQ ID NO: 22246 - DNA, 96 bp, Aspergillus viridinutans
  misc_feature: 39
ttatctctcttactagattctatcttaattaattcttcttacttacttacttatatagcttatctctcttactagattctatcttaattaattctc

SEQ ID NO: 22247 - DNA, 96 bp, Aspergillus viridinutans
  misc_feature: 39
atatattaatatatcctatataatctatattaatatagctaataataatacctagcttatatataatatcttttatattataaggcttatagataa

SEQ ID NO: 22248 - DNA, 96 bp, Aspergillus viridinutans
  misc_feature: 39
ttatatatttttgtatatatatataatttatacatacgaaattatatacaagtttaatttatatgtatataaatatatatattattacacttgtat

SEQ ID NO: 22249 - DNA, 96 bp, Aspergillus viridinutans
  misc_feature: 39
ttagggcttcttagtataaatcctattactattaatataatctaaaaggtatttactttatatataaaaattttattataatatataacttaatta

SEQ ID NO: 22250 - DNA, 96 bp, Aspergillus viridinutans
  misc_feature: 39
tacaatatatagctataaattaattaattaattaatttattaaatttaaaatatcaagtaaatgtttaataatataatatatataccttacataca

SEQ ID NO: 22251 - DNA, 96 bp, Aspergillus viridinutans
  misc_feature: 39
gatgacatttgatatcgattcgatattgattcaatatcaatactagatgatattcgatatccctactagatgacattcaatattgattcgatatca

SEQ ID NO: 22252 - DNA, 96 bp, Aspergillus viridinutans
  misc_feature: 39
tcttgatagggcaggaagcgaacgttcagaccaaagctatttcagcgaaaaattgatgtcaaaggcattgactggtggcgctatgagcaagaaatc

SEQ ID NO: 22253 - DNA, 96 bp, Aspergillus viridinutans
  misc_feature: 39
tcttactagattctatcttaattaattcttcttacttacttacttatatagcttatctctcttactagattctatcttaattaattctccttactt

SEQ ID NO: 22254 - DNA, 96 bp, Aspergillus viridinutans
  misc_feature: 39
tcggaagagcacacgtctgaactccagtcacaacgttccatctcgtatgccgtcttctgcttgaaaaaaaaaacacgtctgaactccagtcacaac

SEQ ID NO: 22255 - DNA, 96 bp, Aspergillus viridinutans
  misc_feature: 39
tcgatatcaaatgtcatctagtagggatatcgaatcaatattgaatgtcatctagtagggatatcgaatgtcatctagtattgatatcgaatcaat

SEQ ID NO: 22256 - DNA, 96 bp, Aspergillus viridinutans
  misc_feature: 39
tactagatgacatttgatatcgattcgatattgattcaatatcaatactagatgatattcgatatccctactagatgacattcaatattgattcga

SEQ ID NO: 22257 - DNA, 96 bp, Aspergillus viridinutans
  misc_feature: 39
tccttacttacttacttatatagcttatctctcttactagattctatcttaattaattcttcttacttacttacttatatagcttatctctcttac

SEQ ID NO: 22258 - DNA, 96 bp, Aspergillus viridinutans
  misc_feature: 39
agtcacaacgttccatctcgtatgccgtgatcggaagagcacacgtctgaactccagtcacaacgttccatctcgtatgccgtatcattgatcgga

SEQ ID NO: 22259 - DNA, 96 bp, Aspergillus viridinutans
  misc_feature: 39
tccagtcacaacgttccatctcgtatgccgtgatcggaagagcacacgtctgaactccagtcacaacgttccatctcgtatgccgtatcattgatc

SEQ ID NO: 22260 - DNA, 96 bp, Aspergillus viridinutans
  misc_feature: 39
tccagtcacaacgttccatctcgtatgccgtatcatgatcggaagagcacacgtctgaactccagtcacaacgttccacctcgtatgccgtcttct

SEQ ID NO: 22261 - DNA, 96 bp, Aspergillus viridinutans
  misc_feature: 39
tccagtcacaacgttccatctcgtatgccgtatcatatcggaagagcacacgtctgaactccagtcacaacgttccatctcgtatgccgtcttctg

SEQ ID NO: 22262 - DNA, 96 bp, Aspergillus viridinutans
  misc_feature: 39
tcacaacgttccatctcgtatgccgtatcattgatcggaagagcacacgtctgaactccagtcacaacgttccatctcgtatgccgtcttctgcat

SEQ ID NO: 22263 - DNA, 96 bp, Aspergillus viridinutans
  misc_feature: 39
tcacaacgttccatctcgtatgccgtatcattagatcggaagagcacacgtctgaactccagtcacaacgttccatctcgtatgccgtatcattga

SEQ ID NO: 22264 - DNA, 96 bp, Aspergillus viridinutans
  misc_feature: 39
tcacaacgttccatctcgtatgccgtatcagaccggaagagcacacgtctgaactccagtcacaacgttccatctcgtatgccgtcttctgcttga

SEQ ID NO: 22265 - DNA, 96 bp, Aspergillus viridinutans
  misc_feature: 39
tcaatatcgaatcgatatcaaatgtcatctagtagggatatcgaatcaatattgaatgtcatctagtagggatatcgaatgtcatctagtattgat

SEQ ID NO: 22266 - DNA, 96 bp, Aspergillus viridinutans
  misc_feature: 39
atcaatatcgaatcgatatcaaatgtcatctagtagggatatcgaatcaatattgaatgtcatctagtagggatatcgaatgtcatctagtattga

SEQ ID NO: 22267 - DNA, 96 bp, Aspergillus viridinutans
  misc_feature: 39
agggatattgaatgattcgaatcgccatatggtacctatatcgtatagatattgaatgattcaaatcatcatatagtcgggattcgaatcgtcata

SEQ ID NO: 22268 - DNA, 96 bp, Aspergillus viridinutans
  misc_feature: 39
tatatattaatatatcctatataatctatattaatatagctaataataatacctagcttatatataatatcttttatattataaggcttatagata

SEQ ID NO: 22269 - DNA, 96 bp, Aspergillus viridinutans
  misc_feature: 39
tatcgaatatcatctagtattgatattgaatcaatatcgaatcgatatcaaatgtcatctagtagggatatcgaatcaatattgaatgtcatctag

SEQ ID NO: 22270 - DNA, 96 bp, Aspergillus viridinutans
  misc_feature: 39
caatatcgaatcgatatcaaatgtcatctagtagggatatcgaatcaatattgaatgtcatctagtagggatatcgaatgtcatctagtattgata

SEQ ID NO: 22271 - DNA, 96 bp, Aspergillus viridinutans
  misc_feature: 39
tatatatttttgtatatatatataatttatacatacgaaattatatacaagtttaatttatatgtatataaatatatatattattacacttgtata

SEQ ID NO: 22272 - DNA, 96 bp, Aspergillus viridinutans
  misc_feature: 39
tagcttatctctcttactagattctatcttaattaattcttcttacttacttacttatatagcttatctctcttactagattctatcttaattaat

SEQ ID NO: 22273 - DNA, 96 bp, Aspergillus viridinutans
  misc_feature: 39
tagattctatcttaattaattcttcttacttacttacttatatagcttatctctcttactagattctatcttaattaattctccttacttacttac

SEQ ID NO: 22274 - DNA, 96 bp, Aspergillus viridinutans
  misc_feature: 39
taatatcttatttatttagtttagaggtaaggatactattattattaattaaattattattattagtaggggtaaggactctattattattattat

SEQ ID NO: 22275 - DNA, 96 bp, Aspergillus viridinutans
  misc_feature: 39
agcgccaccagtcaatgcctttgacatcaatttttcgctgaaatagctttggtctgaacgttcgcttcctgccctatcaagaatagacagatatta

SEQ ID NO: 22276 - DNA, 96 bp, Aspergillus viridinutans
  misc_feature: 39
cttccgatcagatcggaagagcgtcgtgtagggaaagagtgtagtactccgtgtagatctcggtggtcgccgtatcattaaaaaaaaaaaaaaaac

SEQ ID NO: 22277 - DNA, 96 bp, Aspergillus viridinutans
  misc_feature: 39
gtctgaactccagtcacaacgttccatctcgtatgccgtagatcggaagagcacacgtctgaactccagtcacaacgttccagctcgtatgccgtc

SEQ ID NO: 22278 - DNA, 96 bp, Aspergillus viridinutans
  misc_feature: 39
gtcacaacgttccatctcgtatgccgtcttctgcttgaaaaaaaaaacgtctgaactccagtcacaacgttccatctcgtatgccgtcttctgctt

SEQ ID NO: 22279 - DNA, 96 bp, Aspergillus viridinutans
  misc_feature: 39
gtcacaacgttccatctcgtatgccgtatcattgatcggaagagcacacgtctgaactccagtcacaacgttccctctcgtatgccgtcttctgct

SEQ ID NO: 22280 - DNA, 96 bp, Aspergillus viridinutans
  misc_feature: 39
gtcacaacgttccatctcgtatgccgtatcattcgatcggaagagcacacgtctgaactccagtcacaacgttccatctcgtatgccgtcttctgc

SEQ ID NO: 22281 - DNA, 96 bp, Aspergillus viridinutans
  misc_feature: 39
gtcacaacgttccatctcgtatgccgtatcattagatcggaagagcacacgtctgaactccagtcacaacgttccatctcgtatgccgtatcattg

SEQ ID NO: 22282 - DNA, 96 bp, Aspergillus viridinutans
  misc_feature: 39
ggaagagcacacgtctgaactccagtcacaacgttccatctcgtatgccgtcttctgcttgaaaaaaaaaacacgtctgaactccagtcacaacgt

SEQ ID NO: 22283 - DNA, 96 bp, Aspergillus viridinutans
  misc_feature: 39
atcggaagagcacacgtctgaactccagtcacaacgttccatctcgtatgccgtagatcggaagagcaaacgtctgaactccagtcacaacgttcc

SEQ ID NO: 22284 - DNA, 96 bp, Aspergillus viridinutans
  misc_feature: 39
aagagcacacgtctgaactccagtcacaacgttccatctcgtatgccgtatcattgatcggaagagcacacgtctgaactccagtcaccacgttcc

SEQ ID NO: 22285 - DNA, 96 bp, Aspergillus viridinutans
  misc_feature: 39
cagtcacaacgttccatctcgtatgccgtatcatgatcggaagagcacacgtctgaactccagtcacaacgttccacctcgtatgccgtcttctgc

SEQ ID NO: 22286 - DNA, 96 bp, Aspergillus viridinutans
  misc_feature: 39
ccagtcacaacgttccatctcgtatgccgtatcatatcggaagagcacacgtctgaactccagtcacaacgttccatctcgtatgccgtcttctgc

SEQ ID NO: 22287 - DNA, 96 bp, Aspergillus viridinutans
  misc_feature: 39
ctgaactccagtcacaacgttccatctcgtatgccgtagatcggaagagcacacgtctgaactccagtcacaacgttccatctcgtatgccgtctc

SEQ ID NO: 22288 - DNA, 96 bp, Aspergillus viridinutans
  misc_feature: 39
gaagagcacacgtctgaactccagtcacaacgttccatctcgtatgccgtcttctgcttgaaaaaaaaaacacgtctgaactccagtcacaacgtt

SEQ ID NO: 22289 - DNA, 96 bp, Aspergillus viridinutans
  misc_feature: 39
gaagagcacacgtctgaactccagtcacaacgttccatctcgtatgccgtatcattgatcggaagagcacacgtctgaactccagtcaccacgttc

SEQ ID NO: 22290 - DNA, 96 bp, Aspergillus viridinutans
  misc_feature: 39
cttgtaggaggcctcctcgttcctggtcctgctccgacggctcccccagttctgcatggcggaactggccgagcaggcctgtttgatgcatgaatt

SEQ ID NO: 22291 - DNA, 96 bp, Aspergillus viridinutans
  misc_feature: 39
cttgatagggcaggaagcgaacgttcagaccaaagctatttcagcgaaaaattgatgtcaaaggcattgactggtggcgctatgagcaagaaatct

SEQ ID NO: 22292 - DNA, 96 bp, Aspergillus viridinutans
  misc_feature: 39
ctccagtcacaacgttccatctcgtatgccgtgatcggaagagcacacgtctgaactccagtcacaacgttccatctcgtatgccgtatcattgat

SEQ ID NO: 22293 - DNA, 96 bp, Aspergillus viridinutans
  misc_feature: 39
ctccagtcacaacgttccatctcgtatgccgtatcattgatcggaagaacacacgtctgaactccagtcacaacgttccatctcgtatgccgtctt

SEQ ID NO: 22294 - DNA, 96 bp, Aspergillus viridinutans
  misc_feature: 39
ctccagtcacaacgttccatctcgtatgccgtatcatatcggaagagcacacgtctgaactccagtcacaacgttccatctcgtatgccgtcttct

SEQ ID NO: 22295 - DNA, 96 bp, Aspergillus viridinutans
  misc_feature: 39
cgtctgaactccagtcacaacgttccatctcgtatgccgtagatcggaagagcacacgtctgaactccagtcacaacgttccagctcgtatgccgt

SEQ ID NO: 22296 - DNA, 96 bp, Aspergillus viridinutans
  misc_feature: 39
ccagtcacaacgttccatctcgtatgccgtgatcggaagagcacacgtctgaactccagtcacaacgttccatctcgtatgccgtatcattgatcg

SEQ ID NO: 22297 - DNA, 96 bp, Aspergillus viridinutans
  misc_feature: 39
agtaagagagataagctatataagtaagtaagtaagaagaattaattaagatagaatctagtaagagagataagctatataagtaagtaagtaagg

SEQ ID NO: 22298 - DNA, 96 bp, Aspergillus viridinutans
  misc_feature: 39
cagtcacaacgttccatctcgtatgccgtgatcggaagagcacacgtctgaactccagtcacaacgttccatctcgtatgccgtatcattgatcgg

SEQ ID NO: 22299 - DNA, 96 bp, Aspergillus viridinutans
  misc_feature: 39
ccagtcacaacgttccatctcgtatgccgtatcatgatcggaagagcacacgtctgaactccagtcacaacgttccacctcgtatgccgtcttctg

SEQ ID NO: 22300 - DNA, 96 bp, Aspergillus viridinutans
  misc_feature: 39
cagtcacaacgttccatctcgtatgccgtatcatatcggaagagcacacgtctgaactccagtcacaacgttccatctcgtatgccgtcttctgct

SEQ ID NO: 22301 - DNA, 96 bp, Aspergillus viridinutans
  misc_feature: 39
agtcacaacgttccatctcgtatgccgtatcattcgatcggaagagcacacgtctgaactccagtcacaacgttccatctcgtatgccgtcttctg

SEQ ID NO: 22302 - DNA, 96 bp, Aspergillus viridinutans
  misc_feature: 39
atggaacgttgtgactggagttcagacgtgtgctcttccgagatcggaagagcgtcgtgtagggaaagagtgtagtactccgtgtagatctcggtg

SEQ ID NO: 22303 - DNA, 96 bp, Aspergillus viridinutans
  misc_feature: 39
attcaatattgattcgatatcaatactagatgacattcgatatccctactagatgacattcaatattgattcgatatccctactagatgacatttg

SEQ ID NO: 22304 - DNA, 96 bp, Aspergillus viridinutans
  misc_feature: 39
agctataaattaattaattaattaatttattaaatttaaaatatcaagtaaatgtttaataatataatatatataccttacatacaactaatcaat

SEQ ID NO: 22305 - DNA, 96 bp, Aspergillus viridinutans
  misc_feature: 39
aggtatcaagtcgatatcctgactagttgatgattcgatatcgaatactaaggtatcaagttgatatcctgactagttgatgattcaatattgaat

SEQ ID NO: 22306 - DNA, 96 bp, Aspergillus viridinutans
  misc_feature: 39
atcttatttatttagtttagaggtaaggatactattattattaattaaattattattattagtaggggtaaggactctattattattattattaat

SEQ ID NO: 22307 - DNA, 96 bp, Aspergillus viridinutans
  misc_feature: 39
atattaatatatcctatataatctatattaatatagctaataataatacctagcttatatataatatcttttatattataaggcttatagataatt

SEQ ID NO: 22308 - DNA, 96 bp, Aspergillus viridinutans
  misc_feature: 38
ttccgatctgatcggaagagcgtcgtgtagggaaagagtgtagtactccgtgtagatctcggtggtcgccgtatcattaaaaaaaaaaaaaaaaaa

SEQ ID NO: 22309 - DNA, 96 bp, Aspergillus viridinutans
  misc_feature: 38
agcagatcggaagagcagatcggaagagcacacgtctgaactccagtcacaacgttccatctcgtatgccgtcttctgcttgaaaaaaaaaaaaaa

SEQ ID NO: 22310 - DNA, 96 bp, Aspergillus viridinutans
  misc_feature: 38
cgctcttccgatcagatcggaagagcgtcgtgtagggaaagagtgtagtactccgtgtagatctcggtggtcgccgtatcattaaaaaaaaaaaaa

SEQ ID NO: 22311 - DNA, 96 bp, Aspergillus viridinutans
  misc_feature: 38
gatcggaagagcgtcgtgtagggaaagagtgtagtactccgtgtagatctcggtggtcgccgtatcattaaaaaaaaaaaaaaaaaaaaaagaaaa

SEQ ID NO: 22312 - DNA, 96 bp, Aspergillus viridinutans
  misc_feature: 38
atcggaagagcagatcggaagagcacacgtctgaactccagtcacaacgttccatctcgtatgccgtcttctgcttgaaaaaaaaaaaaaaacaaa

SEQ ID NO: 22313 - DNA, 96 bp, Aspergillus viridinutans
  misc_feature: 38
ttgatagggcaggaagcgaacgttcagaccaaagctatttcagcgaaaaattgatgtcaaaggcattgactggtggcgctatgagcaagaaatctt

SEQ ID NO: 22314 - DNA, 96 bp, Aspergillus viridinutans
  misc_feature: 38
ttgaatgattcgaatcgccatatggtacctatatcgtatagatattgaatgattcaaatcatcatatagtcgggattcgaatcgtcatatagtagg

SEQ ID NO: 22315 - DNA, 96 bp, Aspergillus viridinutans
  misc_feature: 38
tcgaatcaatattgaatgtcatctagtagggatatcgaatatcatctagtattgatatcgaatcaatattgaatgtcatctagtagggatatcgaa

SEQ ID NO: 22316 - DNA, 96 bp, Aspergillus viridinutans
  misc_feature: 38
ttatttatttagtttagaggtaaggatactattattattaattaaattattattattagtaggggtaaggactctattattattattattaatagt

SEQ ID NO: 22317 - DNA, 96 bp, Aspergillus viridinutans
  misc_feature: 38
ttacttatatagcttatctctcttactagattctatcttaattaattcttcttacttacttacttatatagcttatctctcttactagattctatc

SEQ ID NO: 22318 - DNA, 96 bp, Aspergillus viridinutans
  misc_feature: 38
ttacaatatatagctataaattaattaattaattaatttattaaatttaaaatatcaagtaaatgtttaataatataatatatataccttacatac

SEQ ID NO: 22319 - DNA, 96 bp, Aspergillus viridinutans
  misc_feature: 38
atagcttatctctcttactagattctatcttaattaattcttcttacttacttacttatatagcttatctctcttactagattctatcttaattaa

SEQ ID NO: 22320 - DNA, 96 bp, Aspergillus viridinutans
  misc_feature: 38
gtagaagttagattaataattattaatattaatttaaacttattaaaataactttaataactcctaatttatctttctttaaggtctaattattaa

SEQ ID NO: 22321 - DNA, 96 bp, Aspergillus viridinutans
  misc_feature: 38
agccttataatataaaagatattatatataagctaggtattattattagctatattaatatagattatataggatatattaatatatactatttaa

SEQ ID NO: 22322 - DNA, 96 bp, Aspergillus viridinutans
  misc_feature: 38
tcggaagagcacacgtctgaactccagtcacaacgttccatctcgtatgccgtagatcggaagagcaaacgtctgaactccagtcacaacgttcca

SEQ ID NO: 22323 - DNA, 96 bp, Aspergillus viridinutans
  misc_feature: 38
tcggaagagcacacgtctgaactccagtcacaacgttccatctcgtatgccgtagaccggaagagcacacgtctgaactccagtcacaacgttcca

SEQ ID NO: 22324 - DNA, 96 bp, Aspergillus viridinutans
  misc_feature: 38
tggaacgttgtgactggagttcagacgtgtgctcttccgagatcggaagagcgtcgtgtagggaaagagtgtagtactccgtgtagatctcggtgg

SEQ ID NO: 22325 - DNA, 96 bp, Aspergillus viridinutans
  misc_feature: 38
atcggaagagcacacgtctgaactccagtcacaacgttccatctcgtatgccgtatcattacggcatacgagatggaacgttgtgactggagttca

SEQ ID NO: 22326 - DNA, 96 bp, Aspergillus viridinutans
  misc_feature: 38
atcggaagagcagatcggaagagcacacgtctgaactccagtcacaacgttccatctcgtatgccgtatcattagatcggaagagcacacgtctga

SEQ ID NO: 22327 - DNA, 96 bp, Aspergillus viridinutans
  misc_feature: 38
tcacaacgttccatctcgtatgccgtcttctgcttgaaaaaaaaaacgtctgaactccagtcacaacgttccatctcgtatgccgtcttctgcttg

SEQ ID NO: 22328 - DNA, 96 bp, Aspergillus viridinutans
  misc_feature: 38
tcacaacgttccatctcgtatgccgtatcattcgatcggaagagcacacgtctgaactccagtcacaacgttccatctcgtatgccgtcttctgct

SEQ ID NO: 22329 - DNA, 96 bp, Aspergillus viridinutans
  misc_feature: 38
tcaagtcgatatcctgactagttgatgattcgatatcgaatactaaggtatcaagttgatatcctgactagttgatgattcaatattgaatactat

SEQ ID NO: 22330 - DNA, 96 bp, Aspergillus viridinutans
  misc_feature: 38
aatagtatcaatatcgaacaaatcctcatatagtaaggatatcgaatcgaatagtatcaatatcgaattcatatagtagggatatcgaattaaata

SEQ ID NO: 22331 - DNA, 96 bp, Aspergillus viridinutans
  misc_feature: 38
tattgaatgattcgaatcgccatatggtacctatatcgtatagatattgaatgattcaaatcatcatatagtcgggattcgaatcgtcatatagta

SEQ ID NO: 22332 - DNA, 96 bp, Aspergillus viridinutans
  misc_feature: 38
ggtatcaagtcgatatcctgactagttgatgattcgatatcgaatactaaggtatcaagttgatatcctgactagttgatgattcaatattgaata

SEQ ID NO: 22333 - DNA, 96 bp, Aspergillus viridinutans
  misc_feature: 38
tattaatatatcctatataatctatattaatatagctaataataatacctagcttatatataatatcttttatattataaggcttatagataattc

SEQ ID NO: 22334 - DNA, 96 bp, Aspergillus viridinutans
  misc_feature: 38
tagtaaattaattatacctaaattatctttatctatttttatactataggcctctattatattactctctaatactaatatatataagtaattaat

SEQ ID NO: 22335 - DNA, 96 bp, Aspergillus viridinutans
  misc_feature: 38
tagggatattgaatgattcgaatcgccatatggtacctatatcgtatagatattgaatgattcaaatcatcatatagtcgggattcgaatcgtcat

SEQ ID NO: 22336 - DNA, 96 bp, Aspergillus viridinutans
  misc_feature: 38
tagaagttagattaataattattaatattaatttaaacttattaaaataactttaataactcctaatttatctttctttaaggtctaattattaat

SEQ ID NO: 22337 - DNA, 96 bp, Aspergillus viridinutans
  misc_feature: 38
tactagattctatcttaattaattcttcttacttacttacttatatagcttatctctcttactagattctatcttaattaattctccttacttact

SEQ ID NO: 22338 - DNA, 96 bp, Aspergillus viridinutans
  misc_feature: 38
attctatcttaattaattcttcttacttacttacttatatagcttatctctcttactagattctatcttaattaattctccttacttacttactta

SEQ ID NO: 22339 - DNA, 96 bp, Aspergillus viridinutans
  misc_feature: 38
gtcacaacgttccatctcgtatgccgtatcatatcggaagagcacacgtctgaactccagtcacaacgttccatctcgtatgccgtcttctgcttg

SEQ ID NO: 22340 - DNA, 96 bp, Aspergillus viridinutans
  misc_feature: 38
gtatatattaatatatcctatataatctatattaatatagctaataataatacctagcttatatataatatcttttatattataaggcttatagat

SEQ ID NO: 22341 - DNA, 96 bp, Aspergillus viridinutans
  misc_feature: 38
gggggtgagccggcgcgcgcgagggtgacgagggaaggaatcgggaggggaagggcaagggaaagggagagggaggaggaggggagggaggcggtg

SEQ ID NO: 22342 - DNA, 96 bp, Aspergillus viridinutans
  misc_feature: 38
acggagtactacactctttccctacacgacgctcttccgatcagatcggaagagcacacgtctgaactccagtcacaacgttccatctcgtatgcc

SEQ ID NO: 22343 - DNA, 96 bp, Aspergillus viridinutans
  misc_feature: 38
ggcatacgagatggaacgttgtgactggagttcagacgtgtgctcttccgatcagatcggaagagcgtcgtgtagggaaagagtgtagtactccgt

SEQ ID NO: 22344 - DNA, 96 bp, Aspergillus viridinutans
  misc_feature: 38
ggatgggatggatgggatggatgggatggatgggatggatgggatggatgggatggatgggatggatgggatggatgggatggatgggatggatgg

SEQ ID NO: 22345 - DNA, 96 bp, Aspergillus viridinutans
  misc_feature: 38
atcggaagagcacacgtctgaactccagtcacaacgttccatctcgtatgccgtagaccggaagagcacacgtctgaactccagtcacaacgttcc

SEQ ID NO: 22346 - DNA, 96 bp, Aspergillus viridinutans
  misc_feature: 38
aagagcacacgtctgaactccagtcacaacgttccatctcgtatgccgtatcattgatgggaagagcacacgtctgaactccagtcacaacgttcc

SEQ ID NO: 22347 - DNA, 96 bp, Aspergillus viridinutans
  misc_feature: 38
gattctatcttaattaattcttcttacttacttacttatatagcttatctctcttactagattctatcttaattaattctccttacttacttactt

SEQ ID NO: 22348 - DNA, 96 bp, Aspergillus viridinutans
  misc_feature: 38
gatggaacgttgtgactggagttcagacgtgtgctcttccgagatcggaagagcgtcgtgtagggaaagagtgtagtactccgtgtagatctcggt

SEQ ID NO: 22349 - DNA, 96 bp, Aspergillus viridinutans
  misc_feature: 38
gatcggaagagcagatcggaagagcacacgtctgaactccagtcacaacgttccatctcgtatgccgtatcattagatcggaagagcacacgtctg

SEQ ID NO: 22350 - DNA, 96 bp, Aspergillus viridinutans
  misc_feature: 38
gatcggaagagcacacgtctgaactccagtcacaacgttccatctcgtatgccgtatccgatcggaagagcacacgtctgaactccagtcacaacg

SEQ ID NO: 22351 - DNA, 96 bp, Aspergillus viridinutans
  misc_feature: 38
agatgacatttgatatcgattcgatattgattcaatatcaatactagatgatattcgatatccctactagatgacattcaatattgattcgatatc

SEQ ID NO: 22352 - DNA, 96 bp, Aspergillus viridinutans
  misc_feature: 38
gagcacacgtctgaactccagtcacaacgttccatctcgtatgccgtatcattgatcggaagagcacacgtctgaactcccgtcacaacgttccat

SEQ ID NO: 22353 - DNA, 96 bp, Aspergillus viridinutans
  misc_feature: 38
acacgtctgaactccagtcacaacgttccatctcggtggtgatcggaagagcacacgtctgaactccagtcacaacgttccatctcgtatgccgtc

SEQ ID NO: 22354 - DNA, 96 bp, Aspergillus viridinutans
  misc_feature: 38
aagagcacacgtctgaactccagtcacaacgttccatctcgtatgccgtcttctgcttgaaaaaaaaaacacgtctgaactccagtcacaacgttc

SEQ ID NO: 22355 - DNA, 96 bp, Aspergillus viridinutans
  misc_feature: 38
ccagtcacaacgttccatctcgtatgccgtatcattgatcggaagagcacacgtctgaactccagtcacaacgttccatctcgtatgccgtatcag

SEQ ID NO: 22356 - DNA, 96 bp, Aspergillus viridinutans
  misc_feature: 38
ctccagtcacaacgttccatctcgtatgccgtcttctgcttgaaaaaaaaaaagaactccagtcacaacgttccatctcgtatgccgtcttctgct

SEQ ID NO: 22357 - DNA, 96 bp, Aspergillus viridinutans
  misc_feature: 38
attgaatgattcgaatcgccatatggtacctatatcgtatagatattgaatgattcaaatcatcatatagtcgggattcgaatcgtcatatagtag

SEQ ID NO: 22358 - DNA, 96 bp, Aspergillus viridinutans
  misc_feature: 38
cggagtactacactctttccctacacgacgctcttccgatcagatcggaagagcacacgtctgaactccagtcacaacgttccatctcgtatgccg

SEQ ID NO: 22359 - DNA, 96 bp, Aspergillus viridinutans
  misc_feature: 38
cggcatacgagatggaacgttgtgactggagttcagacgtgtgctcttccgatcagatcggaagagcgtcgtgtagggaaagagtgtagtactccg

SEQ ID NO: 22360 - DNA, 96 bp, Aspergillus viridinutans
  misc_feature: 38
cggaagagcacacgtctgaactccagtcacaacgttccatctcgtatgccgtagatcggaagagcaaacgtctgaactccagtcacaacgttccat

SEQ ID NO: 22361 - DNA, 96 bp, Aspergillus viridinutans
  misc_feature: 38
cattcaatattgattcgatatcaatactagatgacattcgatatccctactagatgacattcaatattgattcgatatccctactagatgacattt

SEQ ID NO: 22362 - DNA, 96 bp, Aspergillus viridinutans
  misc_feature: 38
cacgtctgaactccagtcacaacgttccatctcggtggtgatcggaagagcacacgtctgaactccagtcacaacgttccatctcgtatgccgtct

SEQ ID NO: 22363 - DNA, 96 bp, Aspergillus viridinutans
  misc_feature: 38
attaatatatcctatataatctatattaatatagctaataataatacctagcttatatataatatcttttatattataaggcttatagataattct

SEQ ID NO: 22364 - DNA, 96 bp, Aspergillus viridinutans
  misc_feature: 38
atattgaatgattcgaatcgccatatggtacctatatcgtatagatattgaatgattcaaatcatcatatagtcgggattcgaatcgtcatatagt

SEQ ID NO: 22365 - DNA, 96 bp, Aspergillus viridinutans
  misc_feature: 38
aattaattatacctaaattatctttatctatttttatactataggcctctattatattactctctaatactaatatatataagtaattaattatat

SEQ ID NO: 22366 - DNA, 96 bp, Aspergillus viridinutans
  misc_feature: 38
agtcacaacgttccatctcgtatgccgtatcatgatcggaagagcacacgtctgaactccagtcacaacgttccacctcgtatgccgtcttctgct

SEQ ID NO: 22367 - DNA, 96 bp, Aspergillus viridinutans
  misc_feature: 38
agtcacaacgttccatctcgtatgccgtatcatatcggaagagcacacgtctgaactccagtcacaacgttccatctcgtatgccgtcttctgctt

SEQ ID NO: 22368 - DNA, 96 bp, Aspergillus viridinutans
  misc_feature: 38
agattctatcttaattaattcttcttacttacttacttatatagcttatctctcttactagattctatcttaattaattctccttacttacttact

SEQ ID NO: 22369 - DNA, 96 bp, Aspergillus viridinutans
  misc_feature: 38
aactccagtcacaacgttccatctcgtatgccgtctcatgatcggaagagcacacgtctgaactccagtcacaacgttccatctcgtatgccgtct

SEQ ID NO: 22370 - DNA, 96 bp, Aspergillus viridinutans
  misc_feature: 38
actagattctatcttaattaattcttcttacttacttacttatatagcttatctctcttactagattctatcttaattaattctccttacttactt

SEQ ID NO: 22371 - DNA, 96 bp, Aspergillus viridinutans
  misc_feature: 38
aatattattattattatcctctttattattattatctaatcccttactattatccttatagaaggttattacttatatagttattacttaggtagt

SEQ ID NO: 22372 - DNA, 96 bp, Aspergillus viridinutans
  misc_feature: 38
actacactctttccctacacgacgctcttccgatcgatcggaagagcacacgtctgaactccagtcacaacgttccatctcgtatgccgtatcatt

SEQ ID NO: 22373 - DNA, 96 bp, Aspergillus viridinutans
  misc_feature: 37
atctcgtatgccgtagatcggaagagcgtcgtgtagggaaagagtgtagtactccgtgtagatctcggtggtcgccgtatcattaaaaaaaaaaaa

SEQ ID NO: 22374 - DNA, 96 bp, Aspergillus viridinutans
  misc_feature: 37
acaacgttccatctcgtatgccgtagatcggaagagcacacgtctgaactccagtcacaacgttccatctcgtatgccgtcttctgcttgaaaaaa

SEQ ID NO: 22375 - DNA, 96 bp, Aspergillus viridinutans
  misc_feature: 37
gatcggaagagcgtcgtgtagggaaagagtgtagtactccgtgtagatctcggtggtcgccgtatcattaaaaaaaaaaaaaaaaaaaaagaaaaa

SEQ ID NO: 22376 - DNA, 96 bp, Aspergillus viridinutans
  misc_feature: 37
gagttattaaagttattttaataagtttaaattaatattaataattattaatctaacttctactcttaattagatattattctttacttaataaaa

SEQ ID NO: 22377 - DNA, 96 bp, Aspergillus viridinutans
  misc_feature: 37
tttagatttataggtcttacttccctttattaaatagtttcttatatatatttaataattctttatctaaattaaatagctttattaatatcttta

SEQ ID NO: 22378 - DNA, 96 bp, Aspergillus viridinutans
  misc_feature: 37
tcttccgatcagatcggaagagcgtcgtgtagggaaagagtgtagtactccgtgtagatctcggtggtcgccgtatcattaaaaaaaaaaaaacaa

SEQ ID NO: 22379 - DNA, 96 bp, Aspergillus viridinutans
  misc_feature: 37
ttgatatcgaatgtcatctagtattgatatcgaatgtcatctagtattgatatcgaatcgatatcaaatgtcatctagtagggatatcgaatgtca

SEQ ID NO: 22380 - DNA, 96 bp, Aspergillus viridinutans
  misc_feature: 37
ttctatcttaattaattcttcttacttacttacttatatagcttatctctcttactagattctatcttaattaattctccttacttacttacttat

SEQ ID NO: 22381 - DNA, 96 bp, Aspergillus viridinutans
  misc_feature: 37
ttcgctgcatgtagaggcccgcaggaagatgatagctaagctacaagatgtggagggactccgggggaaactatcagattatgacgcgcttgtgtc

SEQ ID NO: 22382 - DNA, 96 bp, Aspergillus viridinutans
  misc_feature: 37
tcaaatcatcatctagtcaggatatcaattcaatgccatagtattcaatattgaatcatcaactagtatggatatcaaatcatcatctagtaggaa

SEQ ID NO: 22383 - DNA, 96 bp, Aspergillus viridinutans
  misc_feature: 37
ttactagattctatcttaattaattcttcttacttacttacttatatagcttatctctcttactagattctatcttaattaattctccttacttac

SEQ ID NO: 22384 - DNA, 96 bp, Aspergillus viridinutans
  misc_feature: 37
tgtaggaggcctcctcgttcctggtcctgctccgacggctcccccagttctgcatggcggaactggccgagcaggcctgtttgatgcatgaattcg

SEQ ID NO: 22385 - DNA, 96 bp, Aspergillus viridinutans
  misc_feature: 37
agagcacacgtctgaactccagtcacaacgttccatctcgtatgccgtatcattgatcggaagagcaaacgtctgaactccagtcacaacgttcca

SEQ ID NO: 22386 - DNA, 96 bp, Aspergillus viridinutans
  misc_feature: 37
agagcacacgtctgaactccagtcacaacgttccatctcgtatgccgtatcattgatgggaagagcacacgtctgaactccagtcacaacgttcca

SEQ ID NO: 22387 - DNA, 96 bp, Aspergillus viridinutans
  misc_feature: 37
agagcacacgtctgaactccagtcacaacgttccatctcgtatgccgtatcattgatcggaagagcacacgtctgaactccagtcaccacgttcca

SEQ ID NO: 22388 - DNA, 96 bp, Aspergillus viridinutans
  misc_feature: 37
gtagggatattgaatgattcgaatcgccatatggtacctatatcgtatagatattgaatgattcaaatcatcatatagtcgggattcgaatcgtca

SEQ ID NO: 22389 - DNA, 96 bp, Aspergillus viridinutans
  misc_feature: 37
tgaatgattcgaatcgccatatggtacctatatcgtatagatattgaatgattcaaatcatcatatagtcgggattcgaatcgtcatatagtaggg

SEQ ID NO: 22390 - DNA, 96 bp, Aspergillus viridinutans
  misc_feature: 37
tgaactccagtcacaacgttccatctcgtatgccgtatcatttcggaagagcacacgtctgaactccagtcacaacgttccatctcgtatgccgtc

SEQ ID NO: 22391 - DNA, 96 bp, Aspergillus viridinutans
  misc_feature: 37
tgaactccagtcacaacgttccatctcgtatgccgtatcattgatcggaagagaacacgtctgaactccagtcacaacgttccatctcgtatgccg

SEQ ID NO: 22392 - DNA, 96 bp, Aspergillus viridinutans
  misc_feature: 37
cagtcacaacgttccatctcgtatgccgtatcattgatcggaagagcacacgtctgaactccagtcacaacgttccatctcgtatgccgtatcaga

SEQ ID NO: 22393 - DNA, 96 bp, Aspergillus viridinutans
  misc_feature: 37
tctgaactccagtcacaacgttccatctcgtatgccgtatcattgatcggaagagaacacgtctgaactccagtcacaacgttccatctcgtatgc

SEQ ID NO: 22394 - DNA, 96 bp, Aspergillus viridinutans
  misc_feature: 37
tctgaactccagtcacaacgttccatctcgtatgccgtagatcggaagagcacacgtctgaactccagtcacaacgttccaactcgtatgccgtct

SEQ ID NO: 22395 - DNA, 96 bp, Aspergillus viridinutans
  misc_feature: 37
tctccttacttacttacttatatagcttatctctcttactagattctatcttaattaattcttcttacttacttacttatatagcttatctctctt

SEQ ID NO: 22396 - DNA, 96 bp, Aspergillus viridinutans
  misc_feature: 37
tcggaagagcacacgtctgaactccagtcacaacgttccatctcgtatgccgtcttctgcttgaaaaaaaaaaacactctttccctacacgacgct

SEQ ID NO: 22397 - DNA, 96 bp, Aspergillus viridinutans
  misc_feature: 37
tcggaagagcacacgtctgaactccagtcacaacgttccatctcgtatgccgtatcattgatgggaagagcacacgtctgaactccagtcacaacg

SEQ ID NO: 22398 - DNA, 96 bp, Aspergillus viridinutans
  misc_feature: 37
tccagtcacaacgttccatctcgtatgccgtctcatgatcggaagagcacacgtctgaactccagtcacaacgttccatctcgtatgccgtcttct

SEQ ID NO: 22399 - DNA, 96 bp, Aspergillus viridinutans
  misc_feature: 37
tccagtcacaacgttccatctcgtatgccgtatcatttcggaagagcacacgtctgaactccagtcacaacgttccatctcgtatgccgtcttctg

SEQ ID NO: 22400 - DNA, 96 bp, Aspergillus viridinutans
  misc_feature: 37
tccagtcacaacgttccatctcgtatgccgtatcattgatcggaagaacacacgtctgaactccagtcacaacgttccatctcgtatgccgtcttc

SEQ ID NO: 22401 - DNA, 96 bp, Aspergillus viridinutans
  misc_feature: 37
tccagtcacaacgttccatctcgtatgccgtagatcggaagagcacacgtctgaactccagtcacaacgttccacctcgtatgccgtcttctgctt

SEQ ID NO: 22402 - DNA, 96 bp, Aspergillus viridinutans
  misc_feature: 37
tccagtcacaacgttccatctcgtatgccgtagatcggaagagcacacgactgaactccagtcacaacgttccatctcgtatgccgtcttctgctt

SEQ ID NO: 22403 - DNA, 96 bp, Aspergillus viridinutans
  misc_feature: 37
caaagagatagatgaccagcacatggtcatctacactgatggcagcggctaccagggccgcgtaggcgcctcagctatctgccttcgagccgctga

SEQ ID NO: 22404 - DNA, 96 bp, Aspergillus viridinutans
  misc_feature: 37
tcacaacgttccatctcgtatgccgtatcattgatcggaagagcacacgtctgaactccagtcacaacgttccctctcgtatgccgtcttctgctt

SEQ ID NO: 22405 - DNA, 96 bp, Aspergillus viridinutans
  misc_feature: 37
tcacaacgttccatctcgtatgccgtatcatatcggaagagcacacgtctgaactccagtcacaacgttccatctcgtatgccgtcttctgcttga

SEQ ID NO: 22406 - DNA, 96 bp, Aspergillus viridinutans
  misc_feature: 37
tcaatattgaatgtcatctagtagggatatcgaatatcatctagtattgatattgaatcaatatcgaatcgatatcaaatgtcatctagtagggat

SEQ ID NO: 22407 - DNA, 96 bp, Aspergillus viridinutans
  misc_feature: 37
cttaaagaaagataaattaggagttattaaagttattttaataagtttaaattaatattaataattattaatctaacttctactcttaattagata

SEQ ID NO: 22408 - DNA, 96 bp, Aspergillus viridinutans
  misc_feature: 37
tatcgaatcaatattgaatgtcatctagtagggatatcgaatatcatctagtattgatatcgaatcaatattgaatgtcatctagtagggatatcg

SEQ ID NO: 22409 - DNA, 96 bp, Aspergillus viridinutans
  misc_feature: 37
caatattgaatgtcatctagtagggatatcgaatatcatctagtattgatattgaatcaatatcgaatcgatatcaaatgtcatctagtagggata

SEQ ID NO: 22410 - DNA, 96 bp, Aspergillus viridinutans
  misc_feature: 37
tatcaagtcgatatcctgactagttgatgattcgatatcgaatactaaggtatcaagttgatatcctgactagttgatgattcaatattgaatact

SEQ ID NO: 22411 - DNA, 96 bp, Aspergillus viridinutans
  misc_feature: 37
tatcaaatcatcatctagtcaggatatcaattcaatgccatagtattcaatattgaatcatcaactagtatggatatcaaatcatcatctagtagg

SEQ ID NO: 22412 - DNA, 96 bp, Aspergillus viridinutans
  misc_feature: 37
ggatattgaatgattcgaatcgccatatggtacctatatcgtatagatattgaatgattcaaatcatcatatagtcgggattcgaatcgtcatata

SEQ ID NO: 22413 - DNA, 96 bp, Aspergillus viridinutans
  misc_feature: 37
aaattaattatacctaaattatctttatctatttttatactataggcctctattatattactctctaatactaatatatataagtaattaattata

SEQ ID NO: 22414 - DNA, 96 bp, Aspergillus viridinutans
  misc_feature: 37
atagtatatattaatatatcctatataatctatattaatatagctaataataatacctagcttatatataatatcttttatattataaggcttata

SEQ ID NO: 22415 - DNA, 96 bp, Aspergillus viridinutans
  misc_feature: 37
tagtatatattaatatatcctatataatctatattaatatagctaataataatacctagcttatatataatatcttttatattataaggcttatag

SEQ ID NO: 22416 - DNA, 96 bp, Aspergillus viridinutans
  misc_feature: 37
ggcttctaagctataattagttatctctttatctatatataaggctaaatatattactattatttatactataaaggaagctatctagcttaccta

SEQ ID NO: 22417 - DNA, 96 bp, Aspergillus viridinutans
  misc_feature: 37
agcacacgtctgaactccagtcacaacgttccatctcgtatgccgtagatcggaagagcaaacgtctgaactccagtcacaacgttccatctcgta

SEQ ID NO: 22418 - DNA, 96 bp, Aspergillus viridinutans
  misc_feature: 37
acgtctgaactccagtcacaacgttccatctcgtatgccgtatcattgatcggaagagaacacgtctgaactccagtcacaacgttccatctcgta

SEQ ID NO: 22419 - DNA, 96 bp, Aspergillus viridinutans
  misc_feature: 37
agaatattattattattatcctctttattattattatctaatcccttactattatccttatagaaggttattacttatatagttattacttaggta

SEQ ID NO: 22420 - DNA, 96 bp, Aspergillus viridinutans
  misc_feature: 37
aaatagtatatattaatatatcctatataatctatattaatatagctaataataatacctagcttatatataatatcttttatattataaggctta

SEQ ID NO: 22421 - DNA, 96 bp, Aspergillus viridinutans
  misc_feature: 37
ctccttacttacttacttatatagcttatctctcttactagattctatcttaattaattcttcttacttacttacttatatagcttatctctctta

SEQ ID NO: 22422 - DNA, 96 bp, Aspergillus viridinutans
  misc_feature: 37
taaattaattatacctaaattatctttatctatttttatactataggcctctattatattactctctaatactaatatatataagtaattaattat

SEQ ID NO: 22423 - DNA, 96 bp, Aspergillus viridinutans
  misc_feature: 37
taaatagtatatattaatatatcctatataatctatattaatatagctaataataatacctagcttatatataatatcttttatattataaggctt

SEQ ID NO: 22424 - DNA, 96 bp, Aspergillus viridinutans
  misc_feature: 37
atcggaagagcacacgtctgaactccagtcacaacgttccatctcgtatgccgtatcattgatgggaagagcacacgtctgaactccagtcacaac

SEQ ID NO: 22425 - DNA, 96 bp, Aspergillus viridinutans
  misc_feature: 37
gttcgctgcatgtagaggcccgcaggaagatgatagctaagctacaagatgtggagggactccgggggaaactatcagattatgacgcgcttgtgt

SEQ ID NO: 22426 - DNA, 96 bp, Aspergillus viridinutans
  misc_feature: 37
cctggaagaatgggaaacgcggaaagcatatgtactccccccatgggagccaccccttctttgcacgattaaggaccatgaagccgcactaataac

SEQ ID NO: 22427 - DNA, 96 bp, Aspergillus viridinutans
  misc_feature: 37
gtcacaacgttccatctcgtatgccgtatcatgatcggaagagcacacgtctgaactccagtcacaacgttccacctcgtatgccgtcttctgctt

SEQ ID NO: 22428 - DNA, 96 bp, Aspergillus viridinutans
  misc_feature: 37
gtatcaagtcgatatcctgactagttgatgattcgatatcgaatactaaggtatcaagttgatatcctgactagttgatgattcaatattgaatac

SEQ ID NO: 22429 - DNA, 96 bp, Aspergillus viridinutans
  misc_feature: 37
attataaataaataaagatattaataaagctatttaatttagataaagaattattaaatatatataagaaactatttaataaagggaagtaagacc

SEQ ID NO: 22430 - DNA, 96 bp, Aspergillus viridinutans
  misc_feature: 37
gggatattgaatgattcgaatcgccatatggtacctatatcgtatagatattgaatgattcaaatcatcatatagtcgggattcgaatcgtcatat

SEQ ID NO: 22431 - DNA, 96 bp, Aspergillus viridinutans
  misc_feature: 37
ggctcgaaggcagatagctgaggcgcctacgcggccctggtagccgctgccatcagtgtagatgaccatgtgctggtcatctatctctttgtgtat

SEQ ID NO: 22432 - DNA, 96 bp, Aspergillus viridinutans
  misc_feature: 37
cacgtctgaactccagtcacaacgttccatctcgtatgccgtagatcggaagagcaaacgtctgaactccagtcacaacgttccatctcgtatgcc

SEQ ID NO: 22433 - DNA, 96 bp, Aspergillus viridinutans
  misc_feature: 37
ctgaactccagtcacaacgttccatctcgtatgccgtatcattgatcggaagagaacacgtctgaactccagtcacaacgttccatctcgtatgcc

SEQ ID NO: 22434 - DNA, 96 bp, Aspergillus viridinutans
  misc_feature: 37
ggcatacgagatggaacgttgtgactggagttcagacgtgtgctcttccgatagatcggaagagcgtcgtgtagggaaagagtgtagtactccgtg

SEQ ID NO: 22435 - DNA, 96 bp, Aspergillus viridinutans
  misc_feature: 37
acggcatacgagatggaacgttgtgactggagttcagacgtgtgctcttccgatcagatcggaagagcgtcgtgtagggaaagagtgtagtactcc

SEQ ID NO: 22436 - DNA, 96 bp, Aspergillus viridinutans
  misc_feature: 37
ggaagcgaacgttcagaccaaagctatttcagcgaaaaattgatgtcaaaggcattgactggtggcgctatgagcaagaaatcttagagaagaagc

SEQ ID NO: 22437 - DNA, 96 bp, Aspergillus viridinutans
  misc_feature: 37
agagcacacgtctgaactccagtcacaacgttccatctcgtatgccgtcttctgcttgaaaaaaaaaaacactctttccctacacgacgctcttcc

SEQ ID NO: 22438 - DNA, 96 bp, Aspergillus viridinutans
  misc_feature: 37
ggaagagcacacgtctgaactccagtcacaacgttccatctcgtatgccgtcttctgcttgaaaaaaaaaaacactctttccctacacgacgctct

SEQ ID NO: 22439 - DNA, 96 bp, Aspergillus viridinutans
  misc_feature: 37
ggaagagcacacgtctgaactccagtcacaacgttccatctcgtatgccgtatcattgatgggaagagcacacgtctgaactccagtcacaacgtt

SEQ ID NO: 22440 - DNA, 96 bp, Aspergillus viridinutans
  misc_feature: 37
ggaagagcacacgtctgaactccagtcacaacgttccatctcgtatgccgtatcattgatcggaagagcacacgtctgaactccagtcccaacgtt

SEQ ID NO: 22441 - DNA, 96 bp, Aspergillus viridinutans
  misc_feature: 37
ggaagagcacacgtctgaactccagtcacaacgttccatctcgtatgccgtagatcggaagagcaaacgtctgaactccagtcacaacgttccatc

SEQ ID NO: 22442 - DNA, 96 bp, Aspergillus viridinutans
  misc_feature: 37
agagcacacgtctgaactccagtcacaacgttccatctcgtatgccgtcttctgcttgaaaaaaaaaacacgtctgaactccagtcacaacgttcc

SEQ ID NO: 22443 - DNA, 96 bp, Aspergillus viridinutans
  misc_feature: 37
aagagcacacgtctgaactccagtcacaacgttccatctcgtatgccgtatcattgatcggaagagcacacgtctgaactccagtcccaacgttcc

SEQ ID NO: 22444 - DNA, 96 bp, Aspergillus viridinutans
  misc_feature: 37
ctattactaaatataaagatatatctagtagttaaatagtatatattaatatatcctatataatctatattaatatagctaataataatacctagc

SEQ ID NO: 22445 - DNA, 96 bp, Aspergillus viridinutans
  misc_feature: 37
acacgtctgaactccagtcacaacgttccatctcgtatgccgtagatcggaagagcaaacgtctgaactccagtcacaacgttccatctcgtatgc

SEQ ID NO: 22446 - DNA, 96 bp, Aspergillus viridinutans
  misc_feature: 37
cacggagtactacactctttccctacacgacgctcttccgatcagatcggaagagcacacgtctgaactccagtcacaacgttccatctcgtatgc

SEQ ID NO: 22447 - DNA, 96 bp, Aspergillus viridinutans
  misc_feature: 37
cagtcacaacgttccatctcgtatgccgtctcatgatcggaagagcacacgtctgaactccagtcacaacgttccatctcgtatgccgtcttctgc

SEQ ID NO: 22448 - DNA, 96 bp, Aspergillus viridinutans
  misc_feature: 37
ccagtcacaacgttccatctcgtatgccgtatcatttcggaagagcacacgtctgaactccagtcacaacgttccatctcgtatgccgtcttctgc

SEQ ID NO: 22449 - DNA, 96 bp, Aspergillus viridinutans
  misc_feature: 37
gcacacgtctgaactccagtcacaacgttccatctcgtatgccgtatccgatcggaagagcacacgtctgaactccagtcacaacgttccatctcg

SEQ ID NO: 22450 - DNA, 96 bp, Aspergillus viridinutans
  misc_feature: 37
gcacacgtctgaactccagtcacaacgttccatctcgtatgccgtagatcggaagagcaaacgtctgaactccagtcacaacgttccatctcgtat

SEQ ID NO: 22451 - DNA, 96 bp, Aspergillus viridinutans
  misc_feature: 37
agagcacacgtctgaactccagtcacaacgttccatctcgtatgccgtatccgatcggaagagcacacgtctgaactccagtcacaacgttccatc

SEQ ID NO: 22452 - DNA, 96 bp, Aspergillus viridinutans
  misc_feature: 37
agcacacgtctgaactccagtcacaacgttccatctcgtatgccgtatcattgatcggaagagcacacgtctgaactcccgtcacaacgttccatc

SEQ ID NO: 22453 - DNA, 96 bp, Aspergillus viridinutans
  misc_feature: 37
gatcggaagagcacacgtctgaactccagtcacaacgttccatctcgtatgccgtagaccggaagagcacacgtctgaactccagtcacaacgttc

SEQ ID NO: 22454 - DNA, 96 bp, Aspergillus viridinutans
  misc_feature: 37
atatcgaatcaatattgaatgtcatctagtagggatatcgaatatcatctagtattgatatcgaatcaatattgaatgtcatctagtagggatatc

SEQ ID NO: 22455 - DNA, 96 bp, Aspergillus viridinutans
  misc_feature: 37
gatagggcaggaagcgaacgttcagaccaaagctatttcagcgaaaaattgatgtcaaaggcattgactggtggcgctatgagcaagaaatcttag

SEQ ID NO: 22456 - DNA, 96 bp, Aspergillus viridinutans
  misc_feature: 37
cggaagagcacacgtctgaactccagtcacaacgttccatctcgtatgccgtcttctgcttgaaaaaaaaaaacactctttccctacacgacgctc

SEQ ID NO: 22457 - DNA, 96 bp, Aspergillus viridinutans
  misc_feature: 37
gagcacacgtctgaactccagtcacaacgttccatctcgtatgccgtcttctgcttgaaaaaaaaaaacactctttccctacacgacgctcttccg

SEQ ID NO: 22458 - DNA, 96 bp, Aspergillus viridinutans
  misc_feature: 37
gagcacacgtctgaactccagtcacaacgttccatctcgtatgccgtatccgatcggaagagcacacgtctgaactccagtcacaacgttccatct

SEQ ID NO: 22459 - DNA, 96 bp, Aspergillus viridinutans
  misc_feature: 37
gagcacacgtctgaactccagtcacaacgttccatctcgtatgccgtagatcggaagagcaaacgtctgaactccagtcacaacgttccatctcgt

SEQ ID NO: 22460 - DNA, 96 bp, Aspergillus viridinutans
  misc_feature: 37
aagagcacacgtctgaactccagtcacaacgttccatctcgtatgccgtagatcggaagagcaaacgtctgaactccagtcacaacgttccatctc

SEQ ID NO: 22461 - DNA, 96 bp, Aspergillus viridinutans
  misc_feature: 37
agcacacgtctgaactccagtcacaacgttccatctcgtatgccgtatccgatcggaagagcacacgtctgaactccagtcacaacgttccatctc

SEQ ID NO: 22462 - DNA, 96 bp, Aspergillus viridinutans
  misc_feature: 37
atgtcatctagtattgatatcgaatcaatattgaatgtcatctagtagggatatcgaatatcatctagtattgatatcgaatcaatattgaatgtc

SEQ ID NO: 22463 - DNA, 96 bp, Aspergillus viridinutans
  misc_feature: 37
gaagcgaacgttcagaccaaagctatttcagcgaaaaattgatgtcaaaggcattgactggtggcgctatgagcaagaaatcttagagaagaagct

SEQ ID NO: 22464 - DNA, 96 bp, Aspergillus viridinutans
  misc_feature: 37
aagagcacacgtctgaactccagtcacaacgttccatctcgtatgccgtcttctgcttgaaaaaaaaaaacactctttccctacacgacgctcttc

SEQ ID NO: 22465 - DNA, 96 bp, Aspergillus viridinutans
  misc_feature: 37
gaagagcacacgtctgaactccagtcacaacgttccatctcgtatgccgtcttctgcttgaaaaaaaaaaacactctttccctacacgacgctctt

SEQ ID NO: 22466 - DNA, 96 bp, Aspergillus viridinutans
  misc_feature: 37
gaagagcacacgtctgaactccagtcacaacgttccatctcgtatgccgtatcattgatgggaagagcacacgtctgaactccagtcacaacgttc

SEQ ID NO: 22467 - DNA, 96 bp, Aspergillus viridinutans
  misc_feature: 37
gaagagcacacgtctgaactccagtcacaacgttccatctcgtatgccgtatcattgatcggaagagcacacgtctgaactccagtcccaacgttc

SEQ ID NO: 22468 - DNA, 96 bp, Aspergillus viridinutans
  misc_feature: 37
gaagagcacacgtctgaactccagtcacaacgttccatctcgtatgccgtagatcggaagagcaaacgtctgaactccagtcacaacgttccatct

SEQ ID NO: 22469 - DNA, 96 bp, Aspergillus viridinutans
  misc_feature: 37
ctccagtcacaacgttccatctcgtatgccgtctcatgatcggaagagcacacgtctgaactccagtcacaacgttccatctcgtatgccgtcttc

SEQ ID NO: 22470 - DNA, 96 bp, Aspergillus viridinutans
  misc_feature: 37
actccagtcacaacgttccatctcgtatgccgtatcatttcggaagagcacacgtctgaactccagtcacaacgttccatctcgtatgccgtcttc

SEQ ID NO: 22471 - DNA, 96 bp, Aspergillus viridinutans
  misc_feature: 37
gaactccagtcacaacgttccatctcgtatgccgtatcatttcggaagagcacacgtctgaactccagtcacaacgttccatctcgtatgccgtct

SEQ ID NO: 22472 - DNA, 96 bp, Aspergillus viridinutans
  misc_feature: 37
gaactccagtcacaacgttccatctcgtatgccgtatcattgatcggaagagaacacgtctgaactccagtcacaacgttccatctcgtatgccgt

SEQ ID NO: 22473 - DNA, 96 bp, Aspergillus viridinutans
  misc_feature: 37
cttatttatttagtttagaggtaaggatactattattattaattaaattattattattagtaggggtaaggactctattattattattattaatag

SEQ ID NO: 22474 - DNA, 96 bp, Aspergillus viridinutans
  misc_feature: 37
cttacttatatagcttatctctcttactagattctatcttaattaattcttcttacttacttacttatatagcttatctctcttactagattctat

SEQ ID NO: 22475 - DNA, 96 bp, Aspergillus viridinutans
  misc_feature: 37
ctcttccgatcagatcggaagagcgtcgtgtagggaaagagtgtagtactccgtgtagatctcggtggtcgccgtatcattaaaaaaaaaaaaaat

SEQ ID NO: 22476 - DNA, 96 bp, Aspergillus viridinutans
  misc_feature: 37
ctccagtcacaacgttccatctcgtatgccgtatcatttcggaagagcacacgtctgaactccagtcacaacgttccatctcgtatgccgtcttct

SEQ ID NO: 22477 - DNA, 96 bp, Aspergillus viridinutans
  misc_feature: 37
ctccagtcacaacgttccatctcgtatgccgtagatcggaagagcacacgtctgaactccagtcacaacgttccaactcgtatgccgtcttctgct

SEQ ID NO: 22478 - DNA, 96 bp, Aspergillus viridinutans
  misc_feature: 37
cgttcagaccaaagctatttcagcgaaaaattgatgtcaaaggcattgactggtggcgctatgagcaagaaatcttagagaagaagctattccctt

SEQ ID NO: 22479 - DNA, 96 bp, Aspergillus viridinutans
  misc_feature: 37
cgtctgaactccagtcacaacgttccatctcgtatgccgtatcattgatcggaagagaacacgtctgaactccagtcacaacgttccatctcgtat

SEQ ID NO: 22480 - DNA, 96 bp, Aspergillus viridinutans
  misc_feature: 37
cgtctgaactccagtcacaacgttccatctcgtatgccgtagatcggaagagcaaacgtctgaactccagtcacaacgttccatctcgtatgccgt

SEQ ID NO: 22481 - DNA, 96 bp, Aspergillus viridinutans
  misc_feature: 37
acgtctgaactccagtcacaacgttccatctcgtatgccgtagatcggaagagcaaacgtctgaactccagtcacaacgttccatctcgtatgccg

SEQ ID NO: 22482 - DNA, 96 bp, Aspergillus viridinutans
  misc_feature: 37
cggaagagcacacgtctgaactccagtcacaacgttccatctcgtatgccgtatcattgatgggaagagcacacgtctgaactccagtcacaacgt

SEQ ID NO: 22483 - DNA, 96 bp, Aspergillus viridinutans
  misc_feature: 37
agagcacacgtctgaactccagtcacaacgttccatctcgtatgccgtagatcggaagagcaaacgtctgaactccagtcacaacgttccatctcg

SEQ ID NO: 22484 - DNA, 96 bp, Aspergillus viridinutans
  misc_feature: 37
ccagtcacaacgttccatctcgtatgccgtctcatgatcggaagagcacacgtctgaactccagtcacaacgttccatctcgtatgccgtcttctg

SEQ ID NO: 22485 - DNA, 96 bp, Aspergillus viridinutans
  misc_feature: 37
ccagtcacaacgttccatctcgtatgccgtagatcggaagagcacacgtctgaactccagtcacaacgttccacctcgtatgccgtcttctgcttg

SEQ ID NO: 22486 - DNA, 96 bp, Aspergillus viridinutans
  misc_feature: 37
caagtcgatatcctgactagttgatgattcgatatcgaatactaaggtatcaagttgatatcctgactagttgatgattcaatattgaatactatg

SEQ ID NO: 22487 - DNA, 96 bp, Aspergillus viridinutans
  misc_feature: 37
cacacgtctgaactccagtcacaacgttccatctcgtatgccgtagatcggaagagcaaacgtctgaactccagtcacaacgttccatctcgtatg

SEQ ID NO: 22488 - DNA, 96 bp, Aspergillus viridinutans
  misc_feature: 37
acacggagtactacactctttccctacacgacgctcttccgatcagatcggaagagcacacgtctgaactccagtcacaacgttccatctcgtatg

SEQ ID NO: 22489 - DNA, 96 bp, Aspergillus viridinutans
  misc_feature: 37
cacacgtctgaactccagtcacaacgttccatctcgtatgccgtatccgatcggaagagcacacgtctgaactccagtcacaacgttccatctcgt

SEQ ID NO: 22490 - DNA, 96 bp, Aspergillus viridinutans
  misc_feature: 37
aagagcacacgtctgaactccagtcacaacgttccatctcgtatgccgtatccgatcggaagagcacacgtctgaactccagtcacaacgttccat

SEQ ID NO: 22491 - DNA, 96 bp, Aspergillus viridinutans
  misc_feature: 37
ataaataaataaagatattaataaagctatttaatttagataaagaattattaaatatatataagaaactatttaataaagggaagtaagacctat

SEQ ID NO: 22492 - DNA, 96 bp, Aspergillus viridinutans
  misc_feature: 37
agcgaacgttcagaccaaagctatttcagcgaaaaattgatgtcaaaggcattgactggtggcgctatgagcaagaaatcttagagaagaagctat

SEQ ID NO: 22493 - DNA, 96 bp, Aspergillus viridinutans
  misc_feature: 37
aatagtatatattaatatatcctatataatctatattaatatagctaataataatacctagcttatatataatatcttttatattataaggcttat

SEQ ID NO: 22494 - DNA, 96 bp, Aspergillus viridinutans
  misc_feature: 37
agtcacaacgttccatctcgtatgccgtctcatgatcggaagagcacacgtctgaactccagtcacaacgttccatctcgtatgccgtcttctgct

SEQ ID NO: 22495 - DNA, 96 bp, Aspergillus viridinutans
  misc_feature: 37
acgttcagaccaaagctatttcagcgaaaaattgatgtcaaaggcattgactggtggcgctatgagcaagaaatcttagagaagaagctattccct

SEQ ID NO: 22496 - DNA, 96 bp, Aspergillus viridinutans
  misc_feature: 37
agataaattaggagttattaaagttattttaataagtttaaattaatattaataattattaatctaacttctactcttaattagatattattcttt

SEQ ID NO: 22497 - DNA, 96 bp, Aspergillus viridinutans
  misc_feature: 37
actccagtcacaacgttccatctcgtatgccgtctcatgatcggaagagcacacgtctgaactccagtcacaacgttccatctcgtatgccgtctt

SEQ ID NO: 22498 - DNA, 96 bp, Aspergillus viridinutans
  misc_feature: 37
aatgtcatctagtattgatatcgaatcaatattgaatgtcatctagtagggatatcgaatatcatctagtattgatatcgaatcaatattgaatgt

SEQ ID NO: 22499 - DNA, 96 bp, Aspergillus viridinutans
  misc_feature: 37
aactccagtcacaacgttccatctcgtatgccgtatcatttcggaagagcacacgtctgaactccagtcacaacgttccatctcgtatgccgtctt

SEQ ID NO: 22500 - DNA, 96 bp, Aspergillus viridinutans
  misc_feature: 36
cttccgatcgatcggaagagcgtcgtgtagggaaagagtgtagtactccgtgtagatctcggtggtcgccgtatcattaaaaaaaaaaaaaaaaaa

SEQ ID NO: 22501 - DNA, 96 bp, Aspergillus viridinutans
  misc_feature: 36
ccatctcgtatgccgtagatcggaagagcgtcgtgtagggaaagagtgtagtactccgtgtagatctcggtggtcgccgtatcattaaaaaaaaaa

SEQ ID NO: 22502 - DNA, 96 bp, Aspergillus viridinutans
  misc_feature: 36
gatcggaagagcgtcgtgtagggaaagagtgtagtactccgtgtagatctcggtggtcgccgtatcattaaaaaaaaaaaaaaaaaagaaaaaaaa

SEQ ID NO: 22503 - DNA, 96 bp, Aspergillus viridinutans
  misc_feature: 36
gtcacaacgttccatctcgtatgccgtagatcggaagagcacacgactgaactccagtcacaacgttccatctcgtatgccgtcttctgcttgaaa

SEQ ID NO: 22504 - DNA, 96 bp, Aspergillus viridinutans
  misc_feature: 36
attcttatatttaatatatcttaataactttagtatatatactatttttaataatttaattctctaatttatactttctctaactactttactaaa

SEQ ID NO: 22505 - DNA, 96 bp, Aspergillus viridinutans
  misc_feature: 36
ttgattcgatatcaatactagatgatattcgatatccctactagatgacattcaatattgattcgatatcaatactagatgacattcgatatccct

SEQ ID NO: 22506 - DNA, 96 bp, Aspergillus viridinutans
  misc_feature: 36
ttcttgatagggcaggaagcgaacgttcagaccaaagctatttcagcgaaaaattgatgtcaaaggcattgactggtggcgctatgagcaagaaat

SEQ ID NO: 22507 - DNA, 96 bp, Aspergillus viridinutans
  misc_feature: 36
ttccgatcagatcggaagagcgtcgtgtagggaaagagtgtagtactccgtgtagatctcggtggtcgccgtatcattaaaaaaaaaaaaaaaaga

SEQ ID NO: 22508 - DNA, 96 bp, Aspergillus viridinutans
  misc_feature: 36
agtcacaacgttccatctcgtatgccgtagatcggaagagcacacgtctgaactccagtcacaacgttccacctcgtatgccgtcttctgcttgaa

SEQ ID NO: 22509 - DNA, 96 bp, Aspergillus viridinutans
  misc_feature: 36
agtcacaacgttccatctcgtatgccgtcttctgcttgaaaaaaaaaatgaactccagtcacaacgttccatctcgtatgccgtcttctgcttgaa

SEQ ID NO: 22510 - DNA, 96 bp, Aspergillus viridinutans
  misc_feature: 36
agtcacaacgttccatctcgtatgccgtagatcggaagagcacacgactgaactccagtcacaacgttccatctcgtatgccgtcttctgcttgaa

SEQ ID NO: 22511 - DNA, 96 bp, Aspergillus viridinutans
  misc_feature: 36
aaataaataaagatattaataaagctatttaatttagataaagaattattaaatatatataagaaactatttaataaagggaagtaagacctataa

SEQ ID NO: 22512 - DNA, 96 bp, Aspergillus viridinutans
  misc_feature: 36
ttagatttataggtcttacttccctttattaaatagtttcttatatatatttaataattctttatctaaattaaatagctttattaatatctttat

SEQ ID NO: 22513 - DNA, 96 bp, Aspergillus viridinutans
  misc_feature: 36
ttagaatattattattattatcctctttattattattatctaatcccttactattatccttatagaaggttattacttatatagttattacttagg

SEQ ID NO: 22514 - DNA, 96 bp, Aspergillus viridinutans
  misc_feature: 36
ttaatatcttatttatttagtttagaggtaaggatactattattattaattaaattattattattagtaggggtaaggactctattattattatta

SEQ ID NO: 22515 - DNA, 96 bp, Aspergillus viridinutans
  misc_feature: 36
ttaatatatcctatataatctatattaatatagctaataataatacctagcttatatataatatcttttatattataaggcttatagataattcta

SEQ ID NO: 22516 - DNA, 96 bp, Aspergillus viridinutans
  misc_feature: 36
ttaaagaaagataaattaggagttattaaagttattttaataagtttaaattaatattaataattattaatctaacttctactcttaattagatat

SEQ ID NO: 22517 - DNA, 96 bp, Aspergillus viridinutans
  misc_feature: 36
tgttcgctgcatgtagaggcccgcaggaagatgatagctaagctacaagatgtggagggactccgggggaaactatcagattatgacgcgcttgtg

SEQ ID NO: 22518 - DNA, 96 bp, Aspergillus viridinutans
  misc_feature: 36
cggcgaccaccgagatctacacggagtactacactctttccctacacgacgctcttccgatcgatcggaagagcacacgtctgaactccagtcaca

SEQ ID NO: 22519 - DNA, 96 bp, Aspergillus viridinutans
  misc_feature: 36
tgattcaatatccctaccatatggtgattcgaatccctactatatgagattcaaatcattcgatacccctaccatatggcgattcgatatccctac

SEQ ID NO: 22520 - DNA, 96 bp, Aspergillus viridinutans
  misc_feature: 36
tgatatcgaatgtcatctagtattgatatcgaatgtcatctagtattgatatcgaatcgatatcaaatgtcatctagtagggatatcgaatgtcat

SEQ ID NO: 22521 - DNA, 96 bp, Aspergillus viridinutans
  misc_feature: 36
tgatagggcaggaagcgaacgttcagaccaaagctatttcagcgaaaaattgatgtcaaaggcattgactggtggcgctatgagcaagaaatctta

SEQ ID NO: 22522 - DNA, 96 bp, Aspergillus viridinutans
  misc_feature: 36
tccagtcacaacgttccatctcgtatgccgtatcattgatcggaagagcacacgtctgaactccagtcacaacgttccatctcgtatgccgtctca

SEQ ID NO: 22523 - DNA, 96 bp, Aspergillus viridinutans
  misc_feature: 36
tgaactccagtcacaacgttccatctcgtatgccgtagatcggaagagcacacgtctgaactccagtcacaacgttccaactcgtatgccgtcttc

SEQ ID NO: 22524 - DNA, 96 bp, Aspergillus viridinutans
  misc_feature: 36
tcttattattagtactaatcttaatcttatagacctaacaccccttaatagccttatagctagtaggcagggccttaagcatctagatatcttatt

SEQ ID NO: 22525 - DNA, 96 bp, Aspergillus viridinutans
  misc_feature: 36
agtatatattaatatatcctatataatctatattaatatagctaataataatacctagcttatatataatatcttttatattataaggcttataga

SEQ ID NO: 22526 - DNA, 96 bp, Aspergillus viridinutans
  misc_feature: 36
tacgagatggaacgttgtgactggagttcagacgtgtgctcttccgatagatcggaagagcgtcgtgtagggaaagagtgtagtactccgtgtaga

SEQ ID NO: 22527 - DNA, 96 bp, Aspergillus viridinutans
  misc_feature: 36
atagggcaggaagcgaacgttcagaccaaagctatttcagcgaaaaattgatgtcaaaggcattgactggtggcgctatgagcaagaaatcttaga

SEQ ID NO: 22528 - DNA, 96 bp, Aspergillus viridinutans
  misc_feature: 36
agcacacgtctgaactccagtcacaacgttccatctcgtatgccgtcttctgcttgaaaaaaaaaaacactctttccctacacgacgctcttccga

SEQ ID NO: 22529 - DNA, 96 bp, Aspergillus viridinutans
  misc_feature: 36
tcggaagagcacacgtctgaactccagtcacaacgttccatctcgtatgccgtctcatggatcggaagagcacacgtctgaactccagtcacaacg

SEQ ID NO: 22530 - DNA, 96 bp, Aspergillus viridinutans
  misc_feature: 36
tcggaagagcacacgtctgaactccagtcacaacgttccatctcgtatgccgtatcattgatcggaagagcacacgtctgaactccagtcccaacg

SEQ ID NO: 22531 - DNA, 96 bp, Aspergillus viridinutans
  misc_feature: 36
tcggaagagcacacgtctgaactccagtcacaacgttccatctcgtatgccgtatcattacggcatacgagatggaacgttgtgactggagttcag

SEQ ID NO: 22532 - DNA, 96 bp, Aspergillus viridinutans
  misc_feature: 36
atcgaatcaatattgaatgtcatctagtagggatatcgaatatcatctagtattgatatcgaatcaatattgaatgtcatctagtagggatatcga

SEQ ID NO: 22533 - DNA, 96 bp, Aspergillus viridinutans
  misc_feature: 36
atcaaatcatcatctagtcaggatatcaattcaatgccatagtattcaatattgaatcatcaactagtatggatatcaaatcatcatctagtagga

SEQ ID NO: 22534 - DNA, 96 bp, Aspergillus viridinutans
  misc_feature: 36
atcaatattgaatgtcatctagtagggatatcgaatatcatctagtattgatattgaatcaatatcgaatcgatatcaaatgtcatctagtaggga

SEQ ID NO: 22535 - DNA, 96 bp, Aspergillus viridinutans
  misc_feature: 36
tccagtcacaacgttccatctcgtatgccgtcttctgcttgaaaaaaaaaatgaactccagtcacaacgttccatctcgtatgccgtcttctgctt

SEQ ID NO: 22536 - DNA, 96 bp, Aspergillus viridinutans
  misc_feature: 36
tcacaacgttccatctcgtatgccgtcttctgcttgaaaaaaaaacacgtctgaactccagtcacaacgttccatctcgtatgccgtcttctgctt

SEQ ID NO: 22537 - DNA, 96 bp, Aspergillus viridinutans
  misc_feature: 36
tcacaacgttccatctcgtatgccgtctcatgatcggaagagcacacgtctgaactccagtcacaacgttccatctcgtatgccgtcttctgcttg

SEQ ID NO: 22538 - DNA, 96 bp, Aspergillus viridinutans
  misc_feature: 36
tcacaacgttccatctcgtatgccgtatcatttcggaagagcacacgtctgaactccagtcacaacgttccatctcgtatgccgtcttctgcttga

SEQ ID NO: 22539 - DNA, 96 bp, Aspergillus viridinutans
  misc_feature: 36
tcacaacgttccatctcgtatgccgtatcatgatcggaagagcacacgtctgaactccagtcacaacgttccacctcgtatgccgtcttctgcttg

SEQ ID NO: 22540 - DNA, 96 bp, Aspergillus viridinutans
  misc_feature: 36
cagtcacaacgttccatctcgtatgccgtagatcggaagagcacacgtctgaactccagtcacaacgttccacctcgtatgccgtcttctgcttga

SEQ ID NO: 22541 - DNA, 96 bp, Aspergillus viridinutans
  misc_feature: 36
cagtcacaacgttccatctcgtatgccgtcttctgcttgaaaaaaaaaatgaactccagtcacaacgttccatctcgtatgccgtcttctgcttga

SEQ ID NO: 22542 - DNA, 96 bp, Aspergillus viridinutans
  misc_feature: 36
cagtcacaacgttccatctcgtatgccgtagatcggaagagcacacgactgaactccagtcacaacgttccatctcgtatgccgtcttctgcttga

SEQ ID NO: 22543 - DNA, 96 bp, Aspergillus viridinutans
  misc_feature: 36
aaatcatcatctagtcaggatatcaattcaatgccatagtattcaatattgaatcatcaactagtatggatatcaaatcatcatctagtaggaata

SEQ ID NO: 22544 - DNA, 96 bp, Aspergillus viridinutans
  misc_feature: 36
tattattattattatcctctttattattattatctaatcccttactattatccttatagaaggttattacttatatagttattacttaggtagtta

SEQ ID NO: 22545 - DNA, 96 bp, Aspergillus viridinutans
  misc_feature: 36
tatcctccttgtatatatatacatgtagctaacataaaatacacctgtaattttagtaattttaacttctagatattaagagagagaaataatatt

SEQ ID NO: 22546 - DNA, 96 bp, Aspergillus viridinutans
  misc_feature: 36
tatccctaccatatggtgattcgaatccctactatatgagattcaaatcattcgatacccctaccatatggcgattcgatatccctaccatatgac

SEQ ID NO: 22547 - DNA, 96 bp, Aspergillus viridinutans
  misc_feature: 36
tatatatttaaaaaattgatttataaaaaaaaattattaataattttttttttctatgaaattatatatttttgtatatatatataatttatacat

SEQ ID NO: 22548 - DNA, 96 bp, Aspergillus viridinutans
  misc_feature: 36
taaataaataaagatattaataaagctatttaatttagataaagaattattaaatatatataagaaactatttaataaagggaagtaagacctata

SEQ ID NO: 22549 - DNA, 96 bp, Aspergillus viridinutans
  misc_feature: 36
aattatatatttaaaaaattgatttataaaaaaaaattattaataattttttttttctatgaaattatatatttttgtatatatatataatttata

SEQ ID NO: 22550 - DNA, 96 bp, Aspergillus viridinutans
  misc_feature: 36
atcaagtcgatatcctgactagttgatgattcgatatcgaatactaaggtatcaagttgatatcctgactagttgatgattcaatattgaatacta

SEQ ID NO: 22551 - DNA, 96 bp, Aspergillus viridinutans
  misc_feature: 36
aagcgaacgttcagaccaaagctatttcagcgaaaaattgatgtcaaaggcattgactggtggcgctatgagcaagaaatcttagagaagaagcta

SEQ ID NO: 22552 - DNA, 96 bp, Aspergillus viridinutans
  misc_feature: 36
agattatactactataatctaacttaagttagatttttatttataattatataagttataattaaataaattaagaattaagattatattaatcta

SEQ ID NO: 22553 - DNA, 96 bp, Aspergillus viridinutans
  misc_feature: 36
tagaatattattattattatcctctttattattattatctaatcccttactattatccttatagaaggttattacttatatagttattacttaggt

SEQ ID NO: 22554 - DNA, 96 bp, Aspergillus viridinutans
  misc_feature: 36
acacgtctgaactccagtcacaacgttccatctcgtatgccgtatccgatcggaagagcacacgtctgaactccagtcacaacgttccatctcgta

SEQ ID NO: 22555 - DNA, 96 bp, Aspergillus viridinutans
  misc_feature: 36
tacaggggctaaatctaggcatgaggtatattatagttatatacttataatctatatcctccttgtatatatatacatgtagctaacataaaatac

SEQ ID NO: 22556 - DNA, 96 bp, Aspergillus viridinutans
  misc_feature: 36
catacgagatggaacgttgtgactggagttcagacgtgtgctcttccgatagatcggaagagcgtcgtgtagggaaagagtgtagtactccgtgta

SEQ ID NO: 22557 - DNA, 96 bp, Aspergillus viridinutans
  misc_feature: 36
tacacaaagagatagatgaccagcacatggtcatctacactgatggcagcggctaccagggccgcgtaggcgcctcagctatctgccttcgagccg

SEQ ID NO: 22558 - DNA, 96 bp, Aspergillus viridinutans
  misc_feature: 36
gtaaattaattatacctaaattatctttatctatttttatactataggcctctattatattactctctaatactaatatatataagtaattaatta

SEQ ID NO: 22559 - DNA, 96 bp, Aspergillus viridinutans
  misc_feature: 36
cttactagattctatcttaattaattcttcttacttacttacttatatagcttatctctcttactagattctatcttaattaattctccttactta

SEQ ID NO: 22560 - DNA, 96 bp, Aspergillus viridinutans
  misc_feature: 36
gttcagaccaaagctatttcagcgaaaaattgatgtcaaaggcattgactggtggcgctatgagcaagaaatcttagagaagaagctattccctta

SEQ ID NO: 22561 - DNA, 96 bp, Aspergillus viridinutans
  misc_feature: 36
taaagaaagataaattaggagttattaaagttattttaataagtttaaattaatattaataattattaatctaacttctactcttaattagatatt

SEQ ID NO: 22562 - DNA, 96 bp, Aspergillus viridinutans
  misc_feature: 36
atcggaagagcacacgtctgaactccagtcacaacgttccatctcgtatgccgtctcatggatcggaagagcacacgtctgaactccagtcacaac

SEQ ID NO: 22563 - DNA, 96 bp, Aspergillus viridinutans
  misc_feature: 36
gtctgaactccagtcacaacgttccatctcgtatgccgtatcattgatcggaagagaacacgtctgaactccagtcacaacgttccatctcgtatg

SEQ ID NO: 22564 - DNA, 96 bp, Aspergillus viridinutans
  misc_feature: 36
gtcacaacgttccatctcgtatgccgtctcatgatcggaagagcacacgtctgaactccagtcacaacgttccatctcgtatgccgtcttctgctt

SEQ ID NO: 22565 - DNA, 96 bp, Aspergillus viridinutans
  misc_feature: 36
gtcacaacgttccatctcgtatgccgtatcatttcggaagagcacacgtctgaactccagtcacaacgttccatctcgtatgccgtcttctgcttg

SEQ ID NO: 22566 - DNA, 96 bp, Aspergillus viridinutans
  misc_feature: 36
attatatatttaaaaaattgatttataaaaaaaaattattaataattttttttttctatgaaattatatatttttgtatatatatataatttatac

SEQ ID NO: 22567 - DNA, 96 bp, Aspergillus viridinutans
  misc_feature: 36
ggtgattcaatatccctaccatatggtgattcgaatccctactatatgagattcaaatcattcgatacccctaccatatggcgattcgatatccct

SEQ ID NO: 22568 - DNA, 96 bp, Aspergillus viridinutans
  misc_feature: 36
ggaagagcacacgtctgaactccagtcacaacgttccatctcgtatgccgtctcatggatcggaagagcacacgtctgaactccagtcacaacgtt

SEQ ID NO: 22569 - DNA, 96 bp, Aspergillus viridinutans
  misc_feature: 36
ggaagagcacacgtctgaactccagtcacaacgttccatctcgtatgccgtagaccggaagagcacacgtctgaactccagtcacaacgttccatc

SEQ ID NO: 22570 - DNA, 96 bp, Aspergillus viridinutans
  misc_feature: 36
aagagcacacgtctgaactccagtcacaacgttccatctcgtatgccgtctcatggatcggaagagcacacgtctgaactccagtcacaacgttcc

SEQ ID NO: 22571 - DNA, 96 bp, Aspergillus viridinutans
  misc_feature: 36
gcttctaagctataattagttatctctttatctatatataaggctaaatatattactattatttatactataaaggaagctatctagcttacctat

SEQ ID NO: 22572 - DNA, 96 bp, Aspergillus viridinutans
  misc_feature: 36
gctcgaaggcagatagctgaggcgcctacgcggccctggtagccgctgccatcagtgtagatgaccatgtgctggtcatctatctctttgtgtatg

SEQ ID NO: 22573 - DNA, 96 bp, Aspergillus viridinutans
  misc_feature: 36
atcggaagagcacacgtctgaactccagtcacaacgttccatctcgtatgccgtcttctgcttgaaaaaaaaaaacactctttccctacacgacgc

SEQ ID NO: 22574 - DNA, 96 bp, Aspergillus viridinutans
  misc_feature: 36
acacaaagagatagatgaccagcacatggtcatctacactgatggcagcggctaccagggccgcgtaggcgcctcagctatctgccttcgagccgc

SEQ ID NO: 22575 - DNA, 96 bp, Aspergillus viridinutans
  misc_feature: 36
cgtctgaactccagtcacaacgttccatctcgtatgccgtatccgatcggaagagcacacgtctgaactccagtcacaacgttccatctcgtatgc

SEQ ID NO: 22576 - DNA, 96 bp, Aspergillus viridinutans
  misc_feature: 36
gcatacgagatggaacgttgtgactggagttcagacgtgtgctcttccgatagatcggaagagcgtcgtgtagggaaagagtgtagtactccgtgt

SEQ ID NO: 22577 - DNA, 96 bp, Aspergillus viridinutans
  misc_feature: 36
actccagtcacaacgttccatctcgtatgccgtagatcggaagagcacacgtctgaactccagtcacaacgttccaactcgtatgccgtcttctgc

SEQ ID NO: 22578 - DNA, 96 bp, Aspergillus viridinutans
  misc_feature: 36
gcacacgtctgaactccagtcacaacgttccatctcgtatgccgtcttctgcttgaaaaaaaaaaacactctttccctacacgacgctcttccgat

SEQ ID NO: 22579 - DNA, 96 bp, Aspergillus viridinutans
  misc_feature: 36
gcacacgtctgaactccagtcacaacgttccatctcgtatgccgtatcattgatcggaagagaacacgtctgaactccagtcacaacgttccatct

SEQ ID NO: 22580 - DNA, 96 bp, Aspergillus viridinutans
  misc_feature: 36
agcacacgtctgaactccagtcacaacgttccatctcgtatgccgtatcattgatcggaagagaacacgtctgaactccagtcacaacgttccatc

SEQ ID NO: 22581 - DNA, 96 bp, Aspergillus viridinutans
  misc_feature: 36
cacacgtctgaactccagtcacaacgttccatctcgtatgccgtcttctgcttgaaaaaaaaaaacactctttccctacacgacgctcttccgatc

SEQ ID NO: 22582 - DNA, 96 bp, Aspergillus viridinutans
  misc_feature: 36
gatcggaagagcacacgtctgaactccagtcacaacgttccatctcgtatgccgtatcatttcggaagagcacacgtctgaactccagtcacaacg

SEQ ID NO: 22583 - DNA, 96 bp, Aspergillus viridinutans
  misc_feature: 36
gatattgaatgattcgaatcgccatatggtacctatatcgtatagatattgaatgattcaaatcatcatatagtcgggattcgaatcgtcatatag

SEQ ID NO: 22584 - DNA, 96 bp, Aspergillus viridinutans
  misc_feature: 36
gagcacacgtctgaactccagtcacaacgttccatctcgtatgccgtatcattgatcggaagagaacacgtctgaactccagtcacaacgttccat

SEQ ID NO: 22585 - DNA, 96 bp, Aspergillus viridinutans
  misc_feature: 36
cacacgtctgaactccagtcacaacgttccatctcgtatgccgtatcattgatcggaagagaacacgtctgaactccagtcacaacgttccatctc

SEQ ID NO: 22586 - DNA, 96 bp, Aspergillus viridinutans
  misc_feature: 36
agtagggatattgaatgattcgaatcgccatatggtacctatatcgtatagatattgaatgattcaaatcatcatatagtcgggattcgaatcgtc

SEQ ID NO: 22587 - DNA, 96 bp, Aspergillus viridinutans
  misc_feature: 36
gaatattattattattatcctctttattattattatctaatcccttactattatccttatagaaggttattacttatatagttattacttaggtag

SEQ ID NO: 22588 - DNA, 96 bp, Aspergillus viridinutans
  misc_feature: 36
gaagagcacacgtctgaactccagtcacaacgttccatctcgtatgccgtctcatggatcggaagagcacacgtctgaactccagtcacaacgttc

SEQ ID NO: 22589 - DNA, 96 bp, Aspergillus viridinutans
  misc_feature: 36
cgtctgaactccagtcacaacgttccatctcggtggtgatcggaagagcacacgtctgaactccagtcacaacgttccatctcgtatgccgtcttc

SEQ ID NO: 22590 - DNA, 96 bp, Aspergillus viridinutans
  misc_feature: 36
gaactccagtcacaacgttccatctcgtatgccgtagatcggaagagcacacgtctgaactccagtcacaacgttccaactcgtatgccgtcttct

SEQ ID NO: 22591 - DNA, 96 bp, Aspergillus viridinutans
  misc_feature: 36
aggaagcgaacgttcagaccaaagctatttcagcgaaaaattgatgtcaaaggcattgactggtggcgctatgagcaagaaatcttagagaagaag

SEQ ID NO: 22592 - DNA, 96 bp, Aspergillus viridinutans
  misc_feature: 36
cttagaatattattattattatcctctttattattattatctaatcccttactattatccttatagaaggttattacttatatagttattacttag

SEQ ID NO: 22593 - DNA, 96 bp, Aspergillus viridinutans
  misc_feature: 36
agagatagatgaccagcacatggtcatctacactgatggcagcggctaccagggccgcgtaggcgcctcagctatctgccttcgagccgctgacag

SEQ ID NO: 22594 - DNA, 96 bp, Aspergillus viridinutans
  misc_feature: 36
ctgaactccagtcacaacgttccatctcgtatgccgtagatcggaagagcacacgtctgaactccagtcacaacgttccaactcgtatgccgtctt

SEQ ID NO: 22595 - DNA, 96 bp, Aspergillus viridinutans
  misc_feature: 36
ctatagtatcgatattcctactagatgatgatttgatatccatactagttgatgattcaatattgaatactatggcattgaattgatatcctgact

SEQ ID NO: 22596 - DNA, 96 bp, Aspergillus viridinutans
  misc_feature: 36
atatcaaatcatcatctagtcaggatatcaattcaatgccatagtattcaatattgaatcatcaactagtatggatatcaaatcatcatctagtag

SEQ ID NO: 22597 - DNA, 96 bp, Aspergillus viridinutans
  misc_feature: 36
atacgagatggaacgttgtgactggagttcagacgtgtgctcttccgatagatcggaagagcgtcgtgtagggaaagagtgtagtactccgtgtag

SEQ ID NO: 22598 - DNA, 96 bp, Aspergillus viridinutans
  misc_feature: 36
cgaccaccgagatctacacggagtactacactctttccctacacgacgctcttccgatcgatcggaagagcacacgtctgaactccagtcacaacg

SEQ ID NO: 22599 - DNA, 96 bp, Aspergillus viridinutans
  misc_feature: 36
cggcatacgagatggaacgttgtgactggagttcagacgtgtgctcttccgatagatcggaagagcgtcgtgtagggaaagagtgtagtactccgt

SEQ ID NO: 22600 - DNA, 96 bp, Aspergillus viridinutans
  misc_feature: 36
cggaagagcacacgtctgaactccagtcacaacgttccatctcgtatgccgtctcatggatcggaagagcacacgtctgaactccagtcacaacgt

SEQ ID NO: 22601 - DNA, 96 bp, Aspergillus viridinutans
  misc_feature: 36
cggaagagcacacgtctgaactccagtcacaacgttccatctcgtatgccgtatcattgatcggaagagcacacgtctgaactccagtcccaacgt

SEQ ID NO: 22602 - DNA, 96 bp, Aspergillus viridinutans
  misc_feature: 36
cggaagagcacacgtctgaactccagtcacaacgttccatctcgtatgccgtagaccggaagagcacacgtctgaactccagtcacaacgttccat

SEQ ID NO: 22603 - DNA, 96 bp, Aspergillus viridinutans
  misc_feature: 36
cgatatcctgactagttgatgattcgatatcgaatactaaggtatcaagttgatatcctgactagttgatgattcaatattgaatactatggtatt

SEQ ID NO: 22604 - DNA, 96 bp, Aspergillus viridinutans
  misc_feature: 36
acacgtctgaactccagtcacaacgttccatctcgtatgccgtatcattgatcggaagagaacacgtctgaactccagtcacaacgttccatctcg

SEQ ID NO: 22605 - DNA, 96 bp, Aspergillus viridinutans
  misc_feature: 36
aagtcgatatcctgactagttgatgattcgatatcgaatactaaggtatcaagttgatatcctgactagttgatgattcaatattgaatactatgg

SEQ ID NO: 22606 - DNA, 96 bp, Aspergillus viridinutans
  misc_feature: 36
ccagtcacaacgttccatctcgtatgccgtcttctgcttgaaaaaaaaaatgaactccagtcacaacgttccatctcgtatgccgtcttctgcttg

SEQ ID NO: 22607 - DNA, 96 bp, Aspergillus viridinutans
  misc_feature: 36
ccagtcacaacgttccatctcgtatgccgtagatcggaagagcacacgactgaactccagtcacaacgttccatctcgtatgccgtcttctgcttg

SEQ ID NO: 22608 - DNA, 96 bp, Aspergillus viridinutans
  misc_feature: 36
acgtctgaactccagtcacaacgttccatctcgtatgccgtatccgatcggaagagcacacgtctgaactccagtcacaacgttccatctcgtatg

SEQ ID NO: 22609 - DNA, 96 bp, Aspergillus viridinutans
  misc_feature: 36
cagtcacaacgttccatctcgtatgccgtatcatttcggaagagcacacgtctgaactccagtcacaacgttccatctcgtatgccgtcttctgct

SEQ ID NO: 22610 - DNA, 96 bp, Aspergillus viridinutans
  misc_feature: 36
aactccagtcacaacgttccatctcgtatgccgtagatcggaagagcacacgtctgaactccagtcacaacgttccaactcgtatgccgtcttctg

SEQ ID NO: 22611 - DNA, 96 bp, Aspergillus viridinutans
  misc_feature: 36
cacgtctgaactccagtcacaacgttccatctcgtatgccgtatccgatcggaagagcacacgtctgaactccagtcacaacgttccatctcgtat

SEQ ID NO: 22612 - DNA, 96 bp, Aspergillus viridinutans
  misc_feature: 36
cacgtctgaactccagtcacaacgttccatctcgtatgccgtatcattgatcggaagagaacacgtctgaactccagtcacaacgttccatctcgt

SEQ ID NO: 22613 - DNA, 96 bp, Aspergillus viridinutans
  misc_feature: 36
cacaacgttccatctcgtatgccgtatcattgatcggaagagcacacgtctgaactccagtcacaacgttccaactcgtatgccgtcttctgcttg

SEQ ID NO: 22614 - DNA, 96 bp, Aspergillus viridinutans
  misc_feature: 36
attatactactataatctaacttaagttagatttttatttataattatataagttataattaaataaattaagaattaagattatattaatctact

SEQ ID NO: 22615 - DNA, 96 bp, Aspergillus viridinutans
  misc_feature: 36
atcgaatatcatctagtattgatattgaatcaatatcgaatcgatatcaaatgtcatctagtagggatatcgaatcaatattgaatgtcatctagt

SEQ ID NO: 22616 - DNA, 96 bp, Aspergillus viridinutans
  misc_feature: 36
atcctccttgtatatatatacatgtagctaacataaaatacacctgtaattttagtaattttaacttctagatattaagagagagaaataatattt

SEQ ID NO: 22617 - DNA, 96 bp, Aspergillus viridinutans
  misc_feature: 36
atattattattattatcctctttattattattatctaatcccttactattatccttatagaaggttattacttatatagttattacttaggtagtt

SEQ ID NO: 22618 - DNA, 96 bp, Aspergillus viridinutans
  misc_feature: 36
aagaaagataaattaggagttattaaagttattttaataagtttaaattaatattaataattattaatctaacttctactcttaattagatattat

SEQ ID NO: 22619 - DNA, 96 bp, Aspergillus viridinutans
  misc_feature: 36
agtcacaacgttccatctcgtatgccgtatcatttcggaagagcacacgtctgaactccagtcacaacgttccatctcgtatgccgtcttctgctt

SEQ ID NO: 22620 - DNA, 96 bp, Aspergillus viridinutans
  misc_feature: 36
agtaaattaattatacctaaattatctttatctatttttatactataggcctctattatattactctctaatactaatatatataagtaattaatt

SEQ ID NO: 22621 - DNA, 96 bp, Aspergillus viridinutans
  misc_feature: 36
aggcttctaagctataattagttatctctttatctatatataaggctaaatatattactattatttatactataaaggaagctatctagcttacct

SEQ ID NO: 22622 - DNA, 96 bp, Aspergillus viridinutans
  misc_feature: 36
acgtctgaactccagtcacaacgttccatctcggtggtgatcggaagagcacacgtctgaactccagtcacaacgttccatctcgtatgccgtctt

SEQ ID NO: 22623 - DNA, 96 bp, Aspergillus viridinutans
  misc_feature: 36
aattatatatttttgtatatatatataatttatacatacgaaattatatacaagtttaatttatatgtatataaatatatatattattacacttgt

SEQ ID NO: 22624 - DNA, 96 bp, Aspergillus viridinutans
  misc_feature: 36
aagataaattaggagttattaaagttattttaataagtttaaattaatattaataattattaatctaacttctactcttaattagatattattctt

SEQ ID NO: 22625 - DNA, 96 bp, Aspergillus viridinutans
  misc_feature: 35
gtatgccgtagatcggaagagcgtcgtgtagggaaagagtgtagtactccgtgtagatctcggtggtcgccgtatcattaaaaaaaaaaaaaaaaa

SEQ ID NO: 22626 - DNA, 96 bp, Aspergillus viridinutans
  misc_feature: 35
gtcacaacgttccatctcggtggtgatcggaagagcacacgtctgaactccagtcacaacgttccatctcgtatgccgtcttctgcttgaaaaaaa

SEQ ID NO: 22627 - DNA, 96 bp, Aspergillus viridinutans
  misc_feature: 35
agtcacaacgttccatctcggtggtgatcggaagagcacacgtctgaactccagtcacaacgttccatctcgtatgccgtcttctgcttgaaaaaa

SEQ ID NO: 22628 - DNA, 96 bp, Aspergillus viridinutans
  misc_feature: 35
tcacaacgttccatctcgtatgccgtagatcggaagagcacacgactgaactccagtcacaacgttccatctcgtatgccgtcttctgcttgaaaa

SEQ ID NO: 22629 - DNA, 96 bp, Aspergillus viridinutans
  misc_feature: 35
gtcacaacgttccatctcgtatgccgtagatcggaagagcacacgtctgaactccagtcacaacgttccacctcgtatgccgtcttctgcttgaaa

SEQ ID NO: 22630 - DNA, 96 bp, Aspergillus viridinutans
  misc_feature: 35
tttaatatcttatttatttagtttagaggtaaggatactattattattaattaaattattattattagtaggggtaaggactctattattattatt

SEQ ID NO: 22631 - DNA, 96 bp, Aspergillus viridinutans
  misc_feature: 35
aataggcctatcttataggcttctaagctataattagttatctctttatctatatataagactaaatatattactattattcatactataaaggaa

SEQ ID NO: 22632 - DNA, 96 bp, Aspergillus viridinutans
  misc_feature: 35
ttcagaccaaagctatttcagcgaaaaattgatgtcaaaggcattgactggtggcgctatgagcaagaaatcttagagaagaagctattcccttat

SEQ ID NO: 22633 - DNA, 96 bp, Aspergillus viridinutans
  misc_feature: 35
agtcacaacgttccatctcgtatgccgtagatcggaagagcacacgtctgaactccagtcacaacgttccaactcgtatgccgtcttctgcttgaa

SEQ ID NO: 22634 - DNA, 96 bp, Aspergillus viridinutans
  misc_feature: 35
ataagataggcctattattaaatataaagatatatctagtagttaaatagcatatattaatacatcctatataatctatattaatatagctaataa

SEQ ID NO: 22635 - DNA, 96 bp, Aspergillus viridinutans
  misc_feature: 35
ttatatatttaaaaaattgatttataaaaaaaaattattaataattttttttttctatgaaattatatatttttgtatatatatataatttataca

SEQ ID NO: 22636 - DNA, 96 bp, Aspergillus viridinutans
  misc_feature: 35
taattataaaatagtaggtaatatatatataatatatatatatatatatattacttttaacttattaaaacatagataaaaaaatatattatataa

SEQ ID NO: 22637 - DNA, 96 bp, Aspergillus viridinutans
  misc_feature: 35
aattcttatatttaatatatcttaataactttagtatatatactatttttaataatttaattctctaatttatactttctctaactactttactaa

SEQ ID NO: 22638 - DNA, 96 bp, Aspergillus viridinutans
  misc_feature: 35
atatctaattaagagtagaagttagattaataattattaatattaatttaaacttattaaaataactttaataacttctaatttatctttctctaa

SEQ ID NO: 22639 - DNA, 96 bp, Aspergillus viridinutans
  misc_feature: 35
taatatatcctatataatctatattaatatagctaataataatacctagcttatatataatatcttttatattataaggcttatagataattctaa

SEQ ID NO: 22640 - DNA, 96 bp, Aspergillus viridinutans
  misc_feature: 35
ttaattcttatatttaatatatcttaataactttagtatatatactatttttaataatttaattctctaatttatactttctctaactactttact

SEQ ID NO: 22641 - DNA, 96 bp, Aspergillus viridinutans
  misc_feature: 35
tgtcatctagtattgatatcgaatcaatattgaatgtcatctagtagggatatcgaatatcatctagtattgatatcgaatcaatattgaatgtca

SEQ ID NO: 22642 - DNA, 96 bp, Aspergillus viridinutans
  misc_feature: 35
aagagatagatgaccagcacatggtcatctacactgatggcagcggctaccagggccgcgtaggcgcctcagctatctgccttcgagccgctgaca

SEQ ID NO: 22643 - DNA, 96 bp, Aspergillus viridinutans
  misc_feature: 35
acaggggctaaatctaggcatgaggtatattatagttatatacttataatctatatcctccttgtatatatatacatgtagctaacataaaataca

SEQ ID NO: 22644 - DNA, 96 bp, Aspergillus viridinutans
  misc_feature: 35
agagcacacgtctgaactccagtcacaacgttccatctcgtatgccgtctcatggatcggaagagcacacgtctgaactccagtcacaacgttcca

SEQ ID NO: 22645 - DNA, 96 bp, Aspergillus viridinutans
  misc_feature: 35
tgatatcgaatcaatattgaatgtcatctagtagggatatcgaatatcatctagtattgatatcgaatcaatattgaatgtcatctagtagggata

SEQ ID NO: 22646 - DNA, 96 bp, Aspergillus viridinutans
  misc_feature: 35
ctattcttgatagggcaggaagcgaacgttcagaccaaagctatttcagcgaaaaattgatgtcaaaggcattgactggtggcgctatgagcaaga

SEQ ID NO: 22647 - DNA, 96 bp, Aspergillus viridinutans
  misc_feature: 35
tctgaactccagtcacaacgttccatctcgtatgccgtgatcggaagagcacacgtctgaactccagtcacaacgttccatctcgtatgccgtgat

SEQ ID NO: 22648 - DNA, 96 bp, Aspergillus viridinutans
  misc_feature: 35
tagtatcgatattcctactagatgatgatttgatatccatactagttgatgattcaatattgaatactatggcattgaattgatatcctgactaga

SEQ ID NO: 22649 - DNA, 96 bp, Aspergillus viridinutans
  misc_feature: 35
tcgatattcctactagatgatgatttgatatccatactagttgatgattcaatattgaatactatggcattgaattgatatcctgactagatgatg

SEQ ID NO: 22650 - DNA, 96 bp, Aspergillus viridinutans
  misc_feature: 35
tcgatatcctgactagttgatgattcgatatcgaatactaaggtatcaagttgatatcctgactagttgatgattcaatattgaatactatggtat

SEQ ID NO: 22651 - DNA, 96 bp, Aspergillus viridinutans
  misc_feature: 35
aaaatattatttctctctcttaatatctagaagttaaaattactaaaattacaggtgtattttatgttagctacatgtatatatatacaaggagga

SEQ ID NO: 22652 - DNA, 96 bp, Aspergillus viridinutans
  misc_feature: 35
tcctatataatctatattaatatagctaataataatacctagcttatatataatatcttttatattataaggcttatagataattctaatatctag

SEQ ID NO: 22653 - DNA, 96 bp, Aspergillus viridinutans
  misc_feature: 35
tccagtcacaacgttccatctcgtatgccgtagatcggaagagcacacgtctgaactccagtcacaacgttccaactcgtatgccgtcttctgctt

SEQ ID NO: 22654 - DNA, 96 bp, Aspergillus viridinutans
  misc_feature: 35
tcatctagtattgatatcgaatgtcatctagtattgatatcgaatcgatatcaaatgtcatctagtagggatatcgaatgtcatctagtattgata

SEQ ID NO: 22655 - DNA, 96 bp, Aspergillus viridinutans
  misc_feature: 35
atcgaatgtcatctagtattgatatcgaatcaatattgaatgtcatctagtagggatatcgaatatcatctagtattgatatcgaatcaatattga

SEQ ID NO: 22656 - DNA, 96 bp, Aspergillus viridinutans
  misc_feature: 35
tcaatatcaaatcatcacctagtatggatatcgattcgataccttagtattcgatattgaatcatcaactagtatggatattgattcgataccata

SEQ ID NO: 22657 - DNA, 96 bp, Aspergillus viridinutans
  misc_feature: 35
cagtcacaacgttccatctcgtatgccgtagatcggaagagcacacgtctgaactccagtcacaacgttccaactcgtatgccgtcttctgcttga

SEQ ID NO: 22658 - DNA, 96 bp, Aspergillus viridinutans
  misc_feature: 35
ctacaggggctaaatctaggcatgaggtatattatagttatatacttataatctatatcctccttgtatatatatacatgtagctaacataaaata

SEQ ID NO: 22659 - DNA, 96 bp, Aspergillus viridinutans
  misc_feature: 35
ggatatcgaatgtcatctagtattgatatcgaatcaatattgaatgtcatctagtagggatatcgaatatcatctagtattgatatcgaatcaata

SEQ ID NO: 22660 - DNA, 96 bp, Aspergillus viridinutans
  misc_feature: 35
tattgatatcgaatcaatattgaatgtcatctagtagggatatcgaatatcatctagtattgatatcgaatcaatattgaatgtcatctagtaggg

SEQ ID NO: 22661 - DNA, 96 bp, Aspergillus viridinutans
  misc_feature: 35
gatattaagaaaagatagattaagctatcttaatatacttatctttaatatcttattaatatatttaatctatatttagttaaaactatagtaata

SEQ ID NO: 22662 - DNA, 96 bp, Aspergillus viridinutans
  misc_feature: 35
tatcgaatgtcatctagtattgatatcgaatcaatattgaatgtcatctagtagggatatcgaatatcatctagtattgatatcgaatcaatattg

SEQ ID NO: 22663 - DNA, 96 bp, Aspergillus viridinutans
  misc_feature: 35
ctagatgacatttgatatcgattcgatattgattcaatatcaatactagatgatattcgatatccctactagatgacattcaatattgattcgata

SEQ ID NO: 22664 - DNA, 96 bp, Aspergillus viridinutans
  misc_feature: 35
ccatagtattcgatatcgaatcatcaactagtatgaatatcaaatcattatctagtaggaatatcaataccatagtactatactaagatatatata

SEQ ID NO: 22665 - DNA, 96 bp, Aspergillus viridinutans
  misc_feature: 35
tatagtatcgatattcctactagatgatgatttgatatccatactagttgatgattcaatattgaatactatggcattgaattgatatcctgacta

SEQ ID NO: 22666 - DNA, 96 bp, Aspergillus viridinutans
  misc_feature: 35
tatagcttatctctcttactagattctatcttaattaattcttcttacttacttacttatatagcttatctctcttactagattctatcttaatta

SEQ ID NO: 22667 - DNA, 96 bp, Aspergillus viridinutans
  misc_feature: 35
tataattataaaatagtaggtaatatatatataatatatatatatatatatattacttttaacttattaaaacatagataaaaaaatatattatat

SEQ ID NO: 22668 - DNA, 96 bp, Aspergillus viridinutans
  misc_feature: 35
tagtattgatatcgaatcaatattgaatgtcatctagtagggatatcgaatatcatctagtattgatatcgaatcaatattgaatgtcatctagta

SEQ ID NO: 22669 - DNA, 96 bp, Aspergillus viridinutans
  misc_feature: 35
taattcttatatttaatatatcttaataactttagtatatatactatttttaataatttaattctctaatttatactttctctaactactttacta

SEQ ID NO: 22670 - DNA, 96 bp, Aspergillus viridinutans
  misc_feature: 35
tagggcaggaagcgaacgttcagaccaaagctatttcagcgaaaaattgatgtcaaaggcattgactggtggcgctatgagcaagaaatcttagag

SEQ ID NO: 22671 - DNA, 96 bp, Aspergillus viridinutans
  misc_feature: 35
gtgattcaatatccctaccatatggtgattcgaatccctactatatgagattcaaatcattcgatacccctaccatatggcgattcgatatcccta

SEQ ID NO: 22672 - DNA, 96 bp, Aspergillus viridinutans
  misc_feature: 35
taattttagtaagtagattagggcacctagcataaataatatagaggtaggtaagtataacttagctacttctttatctataactcctagggccta

SEQ ID NO: 22673 - DNA, 96 bp, Aspergillus viridinutans
  misc_feature: 35
tagatttataggtcttacttccctttattaaatagtttcttatatatatttaataattctttatctaaattaaatagctttattaatatctttatt

SEQ ID NO: 22674 - DNA, 96 bp, Aspergillus viridinutans
  misc_feature: 35
tagatgacatttgatatcgattcgatattgattcaatatcaatactagatgatattcgatatccctactagatgacattcaatattgattcgatat

SEQ ID NO: 22675 - DNA, 96 bp, Aspergillus viridinutans
  misc_feature: 35
atcctatataatctatattaatatagctaataataatacctagcttatatataatatcttttatattataaggcttatagataattctaatatcta

SEQ ID NO: 22676 - DNA, 96 bp, Aspergillus viridinutans
  misc_feature: 35
tactagattctaccttaattaattctccttacttacttacttatatagcttatctctcttactagattctatcttaattaattcttcttacttact

SEQ ID NO: 22677 - DNA, 96 bp, Aspergillus viridinutans
  misc_feature: 35
gtcgatatcctgactagttgatgattcgatatcgaatactaaggtatcaagttgatatcctgactagttgatgattcaatattgaatactatggta

SEQ ID NO: 22678 - DNA, 96 bp, Aspergillus viridinutans
  misc_feature: 35
attatatatttttgtatatatatataatttatacatacgaaattatatacaagtttaatttatatgtatataaatatatatattattacacttgta

SEQ ID NO: 22679 - DNA, 96 bp, Aspergillus viridinutans
  misc_feature: 35
aaagaaagataaattaggagttattaaagttattttaataagtttaaattaatattaataattattaatctaacttctactcttaattagatatta

SEQ ID NO: 22680 - DNA, 96 bp, Aspergillus viridinutans
  misc_feature: 35
actaatataataaaacttaactactttatactatagtctcctatctctaactactattatactataatattaactcctctctatctattcttatta

SEQ ID NO: 22681 - DNA, 96 bp, Aspergillus viridinutans
  misc_feature: 35
acttagaatattattattattatcctctttattattattatctaatcccttactattatccttatagaaggttattacttatatagttattactta

SEQ ID NO: 22682 - DNA, 96 bp, Aspergillus viridinutans
  misc_feature: 35
atcggaagagcacacgtctgaactccagtcacaacgttccatctcgtatgccgtcttctgcttgaaaaaaacacacgtctgaactccagtcacaac

SEQ ID NO: 22683 - DNA, 96 bp, Aspergillus viridinutans
  misc_feature: 35
gatcggaagagcacacgtctgaactccagtcacaacgttccatctcgtatgccgtcttctgctcgaaaaaacacacgtctgaactccagtcacaac

SEQ ID NO: 22684 - DNA, 96 bp, Aspergillus viridinutans
  misc_feature: 35
atcggaagagcacacgtctgaactccagtcacaacgttccatctcgtatgccgtatcattgatcggaaaagcacacgtctgaactccagtcacaac

SEQ ID NO: 22685 - DNA, 96 bp, Aspergillus viridinutans
  misc_feature: 35
atcggaagagcacacgtctgaactccagtcacaacgttccatctcgtatgccgtatcattgatcggaagagcacacgtctgaactccagtcccaac

SEQ ID NO: 22686 - DNA, 96 bp, Aspergillus viridinutans
  misc_feature: 35
gtctgaactccagtcacaacgttccatctcgtatgccgtatccgatcggaagagcacacgtctgaactccagtcacaacgttccatctcgtatgcc

SEQ ID NO: 22687 - DNA, 96 bp, Aspergillus viridinutans
  misc_feature: 35
aaagagatagatgaccagcacatggtcatctacactgatggcagcggctaccagggccgcgtaggcgcctcagctatctgccttcgagccgctgac

SEQ ID NO: 22688 - DNA, 96 bp, Aspergillus viridinutans
  misc_feature: 35
gattatactactataatctaacttaagttagatttttatttataattatataagttataattaaataaattaagaattaagattatattaatctac

SEQ ID NO: 22689 - DNA, 96 bp, Aspergillus viridinutans
  misc_feature: 35
gtaattttagtaagtagattagggcacctagcataaataatatagaggtaggtaagtataacttagctacttctttatctataactcctagggcct

SEQ ID NO: 22690 - DNA, 96 bp, Aspergillus viridinutans
  misc_feature: 35
attaattcttatatttaatatatcttaataactttagtatatatactatttttaataatttaattctctaatttatactttctctaactactttac

SEQ ID NO: 22691 - DNA, 96 bp, Aspergillus viridinutans
  misc_feature: 35
ctggaagaatgggaaacgcggaaagcatatgtactccccccatgggagccaccccttctttgcacgattaaggaccatgaagccgcactaataacc

SEQ ID NO: 22692 - DNA, 96 bp, Aspergillus viridinutans
  misc_feature: 35
aggggctaaatctaggcatgaggtatattatagttatatacttataatctatatcctccttgtatatatatacatgtagctaacataaaatacacc

SEQ ID NO: 22693 - DNA, 96 bp, Aspergillus viridinutans
  misc_feature: 35
gggatggatgggatggatgggatggatgggatggatgggatggatgggatggatgggatggatgggatggatgggatggatgggatggatgggatg

SEQ ID NO: 22694 - DNA, 96 bp, Aspergillus viridinutans
  misc_feature: 35
aagagcacacgtctgaactccagtcacaacgttccatctcgtatgccgtatcattgatcggaaaagcacacgtctgaactccagtcacaacgttcc

SEQ ID NO: 22695 - DNA, 96 bp, Aspergillus viridinutans
  misc_feature: 35
gagatagatgaccagcacatggtcatctacactgatggcagcggctaccagggccgcgtaggcgcctcagctatctgccttcgagccgctgacagc

SEQ ID NO: 22696 - DNA, 96 bp, Aspergillus viridinutans
  misc_feature: 35
gcacacgtctgaactccagtcacaacgttccatctcgtatgccgtatcattgatcggaagagcacacgtctgaactcccgtcacaacgttccatct

SEQ ID NO: 22697 - DNA, 96 bp, Aspergillus viridinutans
  misc_feature: 35
gatcggaagagcacacgtctgaactccagtcacaacgttccatctcgtatgccgtcttctgcttgaaaaaaaaaaacactctttccctacacgacg

SEQ ID NO: 22698 - DNA, 96 bp, Aspergillus viridinutans
  misc_feature: 35
gatatcgaatcaatattgaatgtcatctagtagggatatcgaatatcatctagtattgatatcgaatcaatattgaatgtcatctagtagggatat

SEQ ID NO: 22699 - DNA, 96 bp, Aspergillus viridinutans
  misc_feature: 35
gatatcctgactagttgatgattcgatatcgaatactaaggtatcaagttgatatcctgactagttgatgattcaatattgaatactatggtattg

SEQ ID NO: 22700 - DNA, 96 bp, Aspergillus viridinutans
  misc_feature: 35
cttctaagctataattagttatctctttatctatatataaggctaaatatattactattatttatactataaaggaagctatctagcttacctatc

SEQ ID NO: 22701 - DNA, 96 bp, Aspergillus viridinutans
  misc_feature: 35
gagttaatcttctactagatagtattattattacttacttattagataaaataattattagatataaagatattatctagaatacctatattcttt

SEQ ID NO: 22702 - DNA, 96 bp, Aspergillus viridinutans
  misc_feature: 35
gagcacacgtctgaactccagtcacaacgttccatctcgtatgccgtatcattgatcggaagagcacacgtctgaactccagtcacaacgttccag

SEQ ID NO: 22703 - DNA, 96 bp, Aspergillus viridinutans
  misc_feature: 35
aagagcacacgtctgaactccagtcacaacgttccatctcgtatgccgtagaccggaagagcacacgtctgaactccagtcacaacgttccatctc

SEQ ID NO: 22704 - DNA, 96 bp, Aspergillus viridinutans
  misc_feature: 35
gagatggaacgttgtgactggagttcagacgtgtgctcttccgatagatcggaagagcgtcgtgtagggaaagagtgtagtactccgtgtagatct

SEQ ID NO: 22705 - DNA, 96 bp, Aspergillus viridinutans
  misc_feature: 35
cacacgtctgaactccagtcacaacgttccatctcgtatgccgtatcattgatcggaagagcacacgtctgaactcccgtcacaacgttccatctc

SEQ ID NO: 22706 - DNA, 96 bp, Aspergillus viridinutans
  misc_feature: 35
cttattattagtactaatcttaatcttatagacctaacaccccttaatagccttatagctagtaggcagggccttaagcatctagatatcttattt

SEQ ID NO: 22707 - DNA, 96 bp, Aspergillus viridinutans
  misc_feature: 35
ctcgaaggcagatagctgaggcgcctacgcggccctggtagccgctgccatcagtgtagatgaccatgtgctggtcatctatctctttgtgtatgt

SEQ ID NO: 22708 - DNA, 96 bp, Aspergillus viridinutans
  misc_feature: 35
atagtatcgatattcctactagatgatgatttgatatccatactagttgatgattcaatattgaatactatggcattgaattgatatcctgactag

SEQ ID NO: 22709 - DNA, 96 bp, Aspergillus viridinutans
  misc_feature: 35
aattttagtaagtagattagggcacctagcataaataatatagaggtaggtaagtataacttagctacttctttatctataactcctagggcctag

SEQ ID NO: 22710 - DNA, 96 bp, Aspergillus viridinutans
  misc_feature: 35
ctactagatgacatttgatatcgattcgatattgattcaatatcaatactagatgatattcgatatccctactagatgacattcaatattgattcg

SEQ ID NO: 22711 - DNA, 96 bp, Aspergillus viridinutans
  misc_feature: 35
ctaatataataaaacttaactactttatactatagtctcctatctctaactactattatactataatattaactcctctctatctattcttattag

SEQ ID NO: 22712 - DNA, 96 bp, Aspergillus viridinutans
  misc_feature: 35
atcggaagagcacacgtctgaactccagtcacaacgttccatctcgtatgccgtcttctgctcgaaaaaacacacgtctgaactccagtcacaacg

SEQ ID NO: 22713 - DNA, 96 bp, Aspergillus viridinutans
  misc_feature: 35
atccctaccatatggtgattcgaatccctactatatgagattcaaatcattcgatacccctaccatatggcgattcgatatccctaccatatgacg

SEQ ID NO: 22714 - DNA, 96 bp, Aspergillus viridinutans
  misc_feature: 35
acggcatacgagatggaacgttgtgactggagttcagacgtgtgctcttccgatagatcggaagagcgtcgtgtagggaaagagtgtagtactccg

SEQ ID NO: 22715 - DNA, 96 bp, Aspergillus viridinutans
  misc_feature: 35
agagcacacgtctgaactccagtcacaacgttccatctcgtatgccgtagaccggaagagcacacgtctgaactccagtcacaacgttccatctcg

SEQ ID NO: 22716 - DNA, 96 bp, Aspergillus viridinutans
  misc_feature: 35
acacgtctgaactccagtcacaacgttccatctcgtatgccgtatcattgatcggaagagcacacgtctgaactcccgtcacaacgttccatctcg

SEQ ID NO: 22717 - DNA, 96 bp, Aspergillus viridinutans
  misc_feature: 35
cgaatgtcatctagtattgatatcgaatcaatattgaatgtcatctagtagggatatcgaatatcatctagtattgatatcgaatcaatattgaat

SEQ ID NO: 22718 - DNA, 96 bp, Aspergillus viridinutans
  misc_feature: 35
cctatataatctatattaatatagctaataataatacctagcttatatataatatcttttatattataaggcttatagataattctaatatctagg

SEQ ID NO: 22719 - DNA, 96 bp, Aspergillus viridinutans
  misc_feature: 35
ccagtcacaacgttccatctcgtatgccgtagatcggaagagcacacgtctgaactccagtcacaacgttccaactcgtatgccgtcttctgcttg

SEQ ID NO: 22720 - DNA, 96 bp, Aspergillus viridinutans
  misc_feature: 35
catagtattcgatatcgaatcatcaactagtatgaatatcaaatcattatctagtaggaatatcaataccatagtactatactaagatatatatat

SEQ ID NO: 22721 - DNA, 96 bp, Aspergillus viridinutans
  misc_feature: 35
cacaaagagatagatgaccagcacatggtcatctacactgatggcagcggctaccagggccgcgtaggcgcctcagctatctgccttcgagccgct

SEQ ID NO: 22722 - DNA, 96 bp, Aspergillus viridinutans
  misc_feature: 35
caaatcatcatctagtcaggatatcaattcaatgccatagtattcaatattgaatcatcaactagtatggatatcaaatcatcatctagtaggaat

SEQ ID NO: 22723 - DNA, 96 bp, Aspergillus viridinutans
  misc_feature: 35
aattataaaatagtaggtaatatatatataatatatatatatatatatattacttttaacttattaaaacatagataaaaaaatatattatataat

SEQ ID NO: 22724 - DNA, 96 bp, Aspergillus viridinutans
  misc_feature: 35
acgagatggaacgttgtgactggagttcagacgtgtgctcttccgatagatcggaagagcgtcgtgtagggaaagagtgtagtactccgtgtagat

SEQ ID NO: 22725 - DNA, 96 bp, Aspergillus viridinutans
  misc_feature: 35
ataatatctaattaagagtagaagttagattaataattattaatattaatttaaacttattaaaataactttaataacttctaatttatctttctt

SEQ ID NO: 22726 - DNA, 96 bp, Aspergillus viridinutans
  misc_feature: 35
aaagataaattaggagttattaaagttattttaataagtttaaattaatattaataattattaatctaacttctactcttaattagatattattct

SEQ ID NO: 22727 - DNA, 96 bp, Aspergillus viridinutans
  misc_feature: 35
agaaagataaattaggagttattaaagttattttaataagtttaaattaatattaataattattaatctaacttctactcttaattagatattatt

SEQ ID NO: 22728 - DNA, 96 bp, Aspergillus viridinutans
  misc_feature: 34
tcacaacgttccatctcggtggtgatcggaagagcacacgtctgaactccagtcacaacgttccatctcgtatgccgtcttctgcttgaaaaaaaa

SEQ ID NO: 22729 - DNA, 96 bp, Aspergillus viridinutans
  misc_feature: 34
cagtcacaacgttccatctcggtggtgatcggaagagcacacgtctgaactccagtcacaacgttccatctcgtatgccgtcttctgcttgaaaaa

SEQ ID NO: 22730 - DNA, 96 bp, Aspergillus viridinutans
  misc_feature: 34
atcggaagagcgtcgtgtagggaaagagtgtagtactccgtgtagatctcggtggtcgccgtatcattaaaaaaaaaaaaaaaaaaaaaaagaaaa

SEQ ID NO: 22731 - DNA, 96 bp, Aspergillus viridinutans
  misc_feature: 34
tcacaacgttccatctcgtatgccgtagatcggaagagcacacgtctgaactccagtcacaacgttccacctcgtatgccgtcttctgcttgaaaa

SEQ ID NO: 22732 - DNA, 96 bp, Aspergillus viridinutans
  misc_feature: 34
tcacaacgttccatctcgtatgccgtcttctgcttgaaaaaaaaaatgaactccagtcacaacgttccatctcgtatgccgtcttctgcttgaaaa

SEQ ID NO: 22733 - DNA, 96 bp, Aspergillus viridinutans
  misc_feature: 34
ccagtcacaacgttccatctcggtggtgatcggaagagcacacgtctgaactccagtcacaacgttccatctcgtatgccgtcttctgcttgaaaa

SEQ ID NO: 22734 - DNA, 96 bp, Aspergillus viridinutans
  misc_feature: 34
tcggaagagcgtcgtgtagggaaagagtgtagtactccgtgtagatctcggtggtcgccgtatcattaaaaaaaaaaaaaaaaaaaaaaaaagaaa

SEQ ID NO: 22735 - DNA, 96 bp, Aspergillus viridinutans
  misc_feature: 34
gtcacaacgttccatctcgtatgccgtcttctgcttgaaaaaaaaaatgaactccagtcacaacgttccatctcgtatgccgtcttctgcttgaaa

SEQ ID NO: 22736 - DNA, 96 bp, Aspergillus viridinutans
  misc_feature: 34
tccagtcacaacgttccatctcggtggtgatcggaagagcacacgtctgaactccagtcacaacgttccatctcgtatgccgtcttctgcttgaaa

SEQ ID NO: 22737 - DNA, 96 bp, Aspergillus viridinutans
  misc_feature: 34
cttccgatcagatcggaagagcgtcgtgtagggaaagagtgtagtactccgtgtagatctcggtggtcgccgtatcattaaaaaaaaaaaaaacaa

SEQ ID NO: 22738 - DNA, 96 bp, Aspergillus viridinutans
  misc_feature: 34
gatcggaagagcacacgtctgaactccagtcacaacgttccatctcgtatgccgtcttctgcttgaaaaaaacacacgtctgaactccagtcacaa

SEQ ID NO: 22739 - DNA, 96 bp, Aspergillus viridinutans
  misc_feature: 34
acacgtctgaactccagtcacaacgttccatctcgtatgccgtatcatgatcggaagagcagatcggaagagcacacgtctgaactccagtcacaa

SEQ ID NO: 22740 - DNA, 96 bp, Aspergillus viridinutans
  misc_feature: 34
ggcgaccaccgagatctacacggagtactacactctttccctacacgacgctcttccgatcgatcggaagagcacacgtctgaactccagtcacaa

SEQ ID NO: 22741 - DNA, 96 bp, Aspergillus viridinutans
  misc_feature: 34
gatcggaagagcacacgtctgaactccagtcacaacgttccatctcgtatgccgtctcatggatcggaagagcacacgtctgaactccagtcacaa

SEQ ID NO: 22742 - DNA, 96 bp, Aspergillus viridinutans
  misc_feature: 34
gatcggaagagcacacgtctgaactccagtcacaacgttccatctcgtatgccgtatcattgatgggaagagcacacgtctgaactccagtcacaa

SEQ ID NO: 22743 - DNA, 96 bp, Aspergillus viridinutans
  misc_feature: 34
ccttattatctttaagatctagattaaaccttactaacctctctggacatctctagatggcgctattcctggaagcctcgccttactgaagagcaa

SEQ ID NO: 22744 - DNA, 96 bp, Aspergillus viridinutans
  misc_feature: 34
gtctattcttgatagggcaggaagcgaacgttcagaccaaagctatttcagcgaaaaattgatgtcaaaggcattgactggtggcgctatgagcaa

SEQ ID NO: 22745 - DNA, 96 bp, Aspergillus viridinutans
  misc_feature: 34
tattcttgatagggcaggaagcgaacgttcagaccaaagctatttcagcgaaaaattgatgtcaaaggcattgactggtggcgctatgagcaagaa

SEQ ID NO: 22746 - DNA, 96 bp, Aspergillus viridinutans
  misc_feature: 34
caggaagcgaacgttcagaccaaagctatttcagcgaaaaattgatgtcaaaggcattgactggtggcgctatgagcaagaaatcttagagaagaa

SEQ ID NO: 22747 - DNA, 96 bp, Aspergillus viridinutans
  misc_feature: 34
ttctaagctataattagttatctctttatctatatataaggctaaatatattactattatttatactataaaggaagctatctagcttacctatct

SEQ ID NO: 22748 - DNA, 96 bp, Aspergillus viridinutans
  misc_feature: 34
agataggtaagctagatagcttcctttatagtatgaataatagtaatatatttagtcttatatatagataaagagataactaattatagcttagaa

SEQ ID NO: 22749 - DNA, 96 bp, Aspergillus viridinutans
  misc_feature: 34
tcgaatgtcatctagtattgatatcgaatcaatattgaatgtcatctagtagggatatcgaatatcatctagtattgatatcgaatcaatattgaa

SEQ ID NO: 22750 - DNA, 96 bp, Aspergillus viridinutans
  misc_feature: 34
ctccagtcacaacgttccatctcggtggtgatcggaagagcacacgtctgaactccagtcacaacgttccatctcgtatgccgtcttctgcttgaa

SEQ ID NO: 22751 - DNA, 96 bp, Aspergillus viridinutans
  misc_feature: 34
gctaggtattattattagctatattaatatagattatataggatatattaatatatactatttaactactagatatatctttatatttagtaataa

SEQ ID NO: 22752 - DNA, 96 bp, Aspergillus viridinutans
  misc_feature: 34
aggagttattaaagttattttaataagtttaaattaatattaataattattaatctaacttctactcttaattagatattattctttacttaataa

SEQ ID NO: 22753 - DNA, 96 bp, Aspergillus viridinutans
  misc_feature: 34
tagtagattaatataatcttaattcttaatttatttaattataacttatataattataaataaaaatctaacttaagttagattatagtagtataa

SEQ ID NO: 22754 - DNA, 96 bp, Aspergillus viridinutans
  misc_feature: 34
ttataaataaataaagatattaataaagctatttaatttagataaagaattattaaatatatataagaaactatttaataaagggaagtaagacct

SEQ ID NO: 22755 - DNA, 96 bp, Aspergillus viridinutans
  misc_feature: 34
ttagtagattaatataatcttaattcttaatttatttaattataacttatataattataaataaaaatctaacttaagttagattatagtagtata

SEQ ID NO: 22756 - DNA, 96 bp, Aspergillus viridinutans
  misc_feature: 34
attaggagttattaaagttattttaataagtttaaattaatattaataattattaatctaacttctactcttaattagatattattctttacttaa

SEQ ID NO: 22757 - DNA, 96 bp, Aspergillus viridinutans
  misc_feature: 34
atgtaagctaggcattattattagctatattaatatagattatataggatgtattaatatatgctatttaactactagatatatctttatatttaa

SEQ ID NO: 22758 - DNA, 96 bp, Aspergillus viridinutans
  misc_feature: 34
cacacgtctgaactccagtcacaacgttccatctcgtatgccgtatcatgatcggaagagcagatcggaagagcacacgtctgaactccagtcaca

SEQ ID NO: 22759 - DNA, 96 bp, Aspergillus viridinutans
  misc_feature: 34
tgtcatctagtattgatatcgaatgtcatctagtattgatatcgaatcgatatcaaatgtcatctagtagggatatcgaatgtcatctagtattga

SEQ ID NO: 22760 - DNA, 96 bp, Aspergillus viridinutans
  misc_feature: 34
tatcgaattcttatatagtagggatattgaattgaatagtagtaatatataattcttatagaggtatagtaataggatattaaataccactataca

SEQ ID NO: 22761 - DNA, 96 bp, Aspergillus viridinutans
  misc_feature: 34
tgggatggatgggatggatgggatggatgggatggatgggatggatgggatggatgggatggatgggatggatgggatggatgggatggatgggat

SEQ ID NO: 22762 - DNA, 96 bp, Aspergillus viridinutans
  misc_feature: 34
gaagagcacacgtctgaactccagtcacaacgttccatctcgtatgccgtatcatgatcggaagagcagatcggaagagcacacgtctgaactcca

SEQ ID NO: 22763 - DNA, 96 bp, Aspergillus viridinutans
  misc_feature: 34
gagcacacgtctgaactccagtcacaacgttccatctcgtatgccgtcttctgcttgaaaaaaaaaacacgtctgaactccagtcacaacgttcca

SEQ ID NO: 22764 - DNA, 96 bp, Aspergillus viridinutans
  misc_feature: 34
agagcacacgtctgaactccagtcacaacgttccatctcgtatgccgtatcattgatcggaaaagcacacgtctgaactccagtcacaacgttcca

SEQ ID NO: 22765 - DNA, 96 bp, Aspergillus viridinutans
  misc_feature: 34
agcacacgtctgaactccagtcacaacgttccatctcgtatgccgtatcatgatcggaagagcagatcggaagagcacacgtctgaactccagtca

SEQ ID NO: 22766 - DNA, 96 bp, Aspergillus viridinutans
  misc_feature: 34
cgaaggcagatagctgaggcgcctacgcggccctggtagccgctgccatcagtgtagatgaccatgtgctggtcatctatctctttgtgtatgtca

SEQ ID NO: 22767 - DNA, 96 bp, Aspergillus viridinutans
  misc_feature: 34
tgaactccagtcacaacgttccatctcgtatgccgtgatcggaagagcacacgtctgaactccagtcacaacgttccatctcgtatgccgtgatcg

SEQ ID NO: 22768 - DNA, 96 bp, Aspergillus viridinutans
  misc_feature: 34
tgaactccagtcacaacgttccatctcgtatgccgtatcattgatcggaagagcacacgtctgaactcccgtcacaacgttccatctcgtatgccg

SEQ ID NO: 22769 - DNA, 96 bp, Aspergillus viridinutans
  misc_feature: 34
tgaactccagtcacaacgttccatctcgtatgccgtagatcggaagagcacacgtctgaactccagtcacaacgttccagctcgtatgccgtcttc

SEQ ID NO: 22770 - DNA, 96 bp, Aspergillus viridinutans
  misc_feature: 34
tgaactccagtcacaacgttccatctcggtggtgatcggaagagcacacgtctgaactccagtcacaacgttccatctcgtatgccgtcttctgct

SEQ ID NO: 22771 - DNA, 96 bp, Aspergillus viridinutans
  misc_feature: 34
tctgaactccagtcacaacgttccatctcgtatgccgtatccgatcggaagagcacacgtctgaactccagtcacaacgttccatctcgtatgccg

SEQ ID NO: 22772 - DNA, 96 bp, Aspergillus viridinutans
  misc_feature: 34
tctgaactccagtcacaacgttccatctcgtatgccgtatcattgatcggaagagcacacgtctgaactcccgtcacaacgttccatctcgtatgc

SEQ ID NO: 22773 - DNA, 96 bp, Aspergillus viridinutans
  misc_feature: 34
tctgaactccagtcacaacgttccatctcgtatgccgtagatcggaagagcacacgtctgaactccagtcacaacgttccagctcgtatgccgtct

SEQ ID NO: 22774 - DNA, 96 bp, Aspergillus viridinutans
  misc_feature: 34
tctgaactccagtcacaacgttccatctcggtggtgatcggaagagcacacgtctgaactccagtcacaacgttccatctcgtatgccgtcttctg

SEQ ID NO: 22775 - DNA, 96 bp, Aspergillus viridinutans
  misc_feature: 34
acgagatggaacgttgtgactggagttcagacgtgtgctcttccgatcagatcggaagagcgtcgtgtagggaaagagtgtagtactccgtgtaga

SEQ ID NO: 22776 - DNA, 96 bp, Aspergillus viridinutans
  misc_feature: 34
gagataggtaagctagatagcttcctttatagtatgaataatagtaatatatttagtcttatatatagataaagagataactaattatagcttaga

SEQ ID NO: 22777 - DNA, 96 bp, Aspergillus viridinutans
  misc_feature: 34
gctgcatgtagaggcccgcaggaagatgatagctaagctacaagatgtggagggactccgggggaaactatcagattatgacgcgcttgtgtccga

SEQ ID NO: 22778 - DNA, 96 bp, Aspergillus viridinutans
  misc_feature: 34
tcggaagagcacacgtctgaactccagtcacaacgttccatctcgtatgccgtcttctgcttgaaaaaaacacacgtctgaactccagtcacaacg

SEQ ID NO: 22779 - DNA, 96 bp, Aspergillus viridinutans
  misc_feature: 34
tcggaagagcacacgtctgaactccagtcacaacgttccatctcgtatgccgtcttctgctcgaaaaaacacacgtctgaactccagtcacaacgt

SEQ ID NO: 22780 - DNA, 96 bp, Aspergillus viridinutans
  misc_feature: 34
tcggaagagcacacgtctgaactccagtcacaacgttccatctcgtatgccgtatcattgatcggaaaagcacacgtctgaactccagtcacaacg

SEQ ID NO: 22781 - DNA, 96 bp, Aspergillus viridinutans
  misc_feature: 34
tcggaagagcacacgtctgaactccagtcacaacgttccatctcgtatgccgtatcattgatcagaagagcacacgtctgaactccagtcacaacg

SEQ ID NO: 22782 - DNA, 96 bp, Aspergillus viridinutans
  misc_feature: 34
tcggaagagcacacgtctgaactccagtcacaacgttccatctcggtggtcggatcggaagagcacacgtctgaactccagtcacaacgttccatc

SEQ ID NO: 22783 - DNA, 96 bp, Aspergillus viridinutans
  misc_feature: 34
tcggaagagcacacgtctgaactccagtcacaacgttccatctcggtggtcgatcggaagagcacacgtctgaactccagtcacaacgttccatct

SEQ ID NO: 22784 - DNA, 96 bp, Aspergillus viridinutans
  misc_feature: 34
tcgctgcatgtagaggcccgcaggaagatgatagctaagctacaagatgtggagggactccgggggaaactatcagattatgacgcgcttgtgtcc

SEQ ID NO: 22785 - DNA, 96 bp, Aspergillus viridinutans
  misc_feature: 34
gatgaccagcacatggtcatctacactgatggcagcggctaccagggccgcgtaggcgcctcagctatctgccttcgagccgctgacagcgcgcga

SEQ ID NO: 22786 - DNA, 96 bp, Aspergillus viridinutans
  misc_feature: 34
tcgaaggcagatagctgaggcgcctacgcggccctggtagccgctgccatcagtgtagatgaccatgtgctggtcatctatctctttgtgtatgtc

SEQ ID NO: 22787 - DNA, 96 bp, Aspergillus viridinutans
  misc_feature: 34
tccagtcacaacgttccatctcgtatgccgtcttctgcttgaaaaaaaaaaagaactccagtcacaacgttccatctcgtatgccgtcttctgctt

SEQ ID NO: 22788 - DNA, 96 bp, Aspergillus viridinutans
  misc_feature: 34
tatcgatattcctactagatgatgatttgatatccatactagttgatgattcaatattgaatactatggcattgaattgatatcctgactagatga

SEQ ID NO: 22789 - DNA, 96 bp, Aspergillus viridinutans
  misc_feature: 34
cgatattcctactagatgatgatttgatatccatactagttgatgattcaatattgaatactatggcattgaattgatatcctgactagatgatga

SEQ ID NO: 22790 - DNA, 96 bp, Aspergillus viridinutans
  misc_feature: 34
atatccctaccatatggtgattcgaatccctactatatgagattcaaatcattcgatacccctaccatatggcgattcgatatccctaccatatga

SEQ ID NO: 22791 - DNA, 96 bp, Aspergillus viridinutans
  misc_feature: 34
atctgtctattcttgatagggcaggaagcgaacgttcagaccaaagctatttcagcgaaaaattgatgtcaaaggcattgactggtggcgctatga

SEQ ID NO: 22792 - DNA, 96 bp, Aspergillus viridinutans
  misc_feature: 34
tcaggatattgattcaataccatagtatttgatatcgaatcatcatctagtcaggatatcgattcaataccatagtatttgatattgaatcatcat

SEQ ID NO: 22793 - DNA, 96 bp, Aspergillus viridinutans
  misc_feature: 34
tcacaacgttccatctcgtatgccgtatcattgatcggaagagcacacgtctgaactccagtcacaacgttccatctcgtatgccgtatcagatcg

SEQ ID NO: 22794 - DNA, 96 bp, Aspergillus viridinutans
  misc_feature: 34
cagtcacaacgttccatctcgtatgccgtcttctgcttgaaaaaaaaaaagaactccagtcacaacgttccatctcgtatgccgtcttctgcttga

SEQ ID NO: 22795 - DNA, 96 bp, Aspergillus viridinutans
  misc_feature: 34
actccagtcacaacgttccatctcggtggtgatcggaagagcacacgtctgaactccagtcacaacgttccatctcgtatgccgtcttctgcttga

SEQ ID NO: 22796 - DNA, 96 bp, Aspergillus viridinutans
  misc_feature: 34
tataagataggcctattattaaatataaagatatatctagtagttaaatagcatatattaatacatcctatataatctatattaatatagctaata

SEQ ID NO: 22797 - DNA, 96 bp, Aspergillus viridinutans
  misc_feature: 34
taggagttattaaagttattttaataagtttaaattaatattaataattattaatctaacttctactcttaattagatattattctttacttaata

SEQ ID NO: 22798 - DNA, 96 bp, Aspergillus viridinutans
  misc_feature: 34
tatctgtctattcttgatagggcaggaagcgaacgttcagaccaaagctatttcagcgaaaaattgatgtcaaaggcattgactggtggcgctatg

SEQ ID NO: 22799 - DNA, 96 bp, Aspergillus viridinutans
  misc_feature: 34
tatcctatataatctatattaatatagctaataataatacctagcttatatataatatcttttatattataaggcttatagataattctaatatct

SEQ ID NO: 22800 - DNA, 96 bp, Aspergillus viridinutans
  misc_feature: 34
tatatttatatatagtattagtaaaatattattagtaaagtatcttataatctactttctaagatatttatataactattttatatatctatttat

SEQ ID NO: 22801 - DNA, 96 bp, Aspergillus viridinutans
  misc_feature: 34
tatatcctatataatctatattaatatagctaataataatacctagcttatatataatatcttttatattataaggcttatagataattctaatat

SEQ ID NO: 22802 - DNA, 96 bp, Aspergillus viridinutans
  misc_feature: 34
ataattataaaatagtaggtaatatatatataatatatatatatatatatattacttttaacttattaaaacatagataaaaaaatatattatata

SEQ ID NO: 22803 - DNA, 96 bp, Aspergillus viridinutans
  misc_feature: 34
gacctagatattaagaaaagatagattaagctatcttaatatacttatctttaatatcttattaatatatttaatctatatttagttaaaactata

SEQ ID NO: 22804 - DNA, 96 bp, Aspergillus viridinutans
  misc_feature: 34
tataaataaataaagatattaataaagctatttaatttagataaagaattattaaatatatataagaaactatttaataaagggaagtaagaccta

SEQ ID NO: 22805 - DNA, 96 bp, Aspergillus viridinutans
  misc_feature: 34
tagttttaactaaatatagattaaatatattaataagatattaaagataagtatattaagatagcttaatctatcttttcttaatatctaggtcta

SEQ ID NO: 22806 - DNA, 96 bp, Aspergillus viridinutans
  misc_feature: 34
tagtaattttagtaagtagattagggcacctagcataaataatatagaggtaggtaagtataacttagctacttctttatctataactcctagggc

SEQ ID NO: 22807 - DNA, 96 bp, Aspergillus viridinutans
  misc_feature: 34
taggagttaatcttctactagatagtattattattacttacttattagataaaataattattagatataaagatattatctagaatacctatattc

SEQ ID NO: 22808 - DNA, 96 bp, Aspergillus viridinutans
  misc_feature: 34
gcctataagataggcctattattaaatataaagatatatctagtagttaaatagcatatattaatacatcctatataatctatattaatatagcta

SEQ ID NO: 22809 - DNA, 96 bp, Aspergillus viridinutans
  misc_feature: 34
agttagtagattaatataatcttaattcttaatttatttaattataacttatataattataaataaaaatctaacttaagttagattatagtagta

SEQ ID NO: 22810 - DNA, 96 bp, Aspergillus viridinutans
  misc_feature: 34
tactaatataataaaacttaactactttatactatagtctcctatctctaactactattatactataatattaactcctctctatctattcttatt

SEQ ID NO: 22811 - DNA, 96 bp, Aspergillus viridinutans
  misc_feature: 34
acgtctgaactccagtcacaacgttccatctcgtatgccgtatcattgatcggaagagcacacgtctgaactccagtcacaacgttccagctcgta

SEQ ID NO: 22812 - DNA, 96 bp, Aspergillus viridinutans
  misc_feature: 34
aagagcacacgtctgaactccagtcacaacgttccatctcggtggtcgatcggaagagcacacgtctgaactccagtcacaacgttccatctcgta

SEQ ID NO: 22813 - DNA, 96 bp, Aspergillus viridinutans
  misc_feature: 34
agagcacacgtctgaactccagtcacaacgttccatctcggtggtcggatcggaagagcacacgtctgaactccagtcacaacgttccatctcgta

SEQ ID NO: 22814 - DNA, 96 bp, Aspergillus viridinutans
  misc_feature: 34
acgtctgaactccagtcacaacgttccatctcgtatgccgtatcattgatcggaagagcacacgtctgaactcccgtcacaacgttccatctcgta

SEQ ID NO: 22815 - DNA, 96 bp, Aspergillus viridinutans
  misc_feature: 34
tacacggagtactacactctttccctacacgacgctcttccgatcatcggaagagcacacgtctgaactccagtcacaacgttccatctcgtatgc

SEQ ID NO: 22816 - DNA, 96 bp, Aspergillus viridinutans
  misc_feature: 34
agaccttaaagaaagataaattaggagttattaaagttattttaataagtttaaattaatattaataattattaatctaacttctactcttaatta

SEQ ID NO: 22817 - DNA, 96 bp, Aspergillus viridinutans
  misc_feature: 34
ctagattctaccttaattaattctccttacttacttacttatatagcttatctctcttactagattctatcttaattaattcttcttacttactta

SEQ ID NO: 22818 - DNA, 96 bp, Aspergillus viridinutans
  misc_feature: 34
taagataggcctattattaaatataaagatatatctagtagttaaatagcatatattaatacatcctatataatctatattaatatagctaataat

SEQ ID NO: 22819 - DNA, 96 bp, Aspergillus viridinutans
  misc_feature: 34
gataaattaggagttattaaagttattttaataagtttaaattaatattaataattattaatctaacttctactcttaattagatattattcttta

SEQ ID NO: 22820 - DNA, 96 bp, Aspergillus viridinutans
  misc_feature: 34
atcggaagagcacacgtctgaactccagtcacaacgttccatctcgtatgccgtatcattgatcagaagagcacacgtctgaactccagtcacaac

SEQ ID NO: 22821 - DNA, 96 bp, Aspergillus viridinutans
  misc_feature: 34
cacgtctgaactccagtcacaacgttccatctcgtatgccgtatcatgatcggaagagcagatcggaagagcacacgtctgaactccagtcacaac

SEQ ID NO: 22822 - DNA, 96 bp, Aspergillus viridinutans
  misc_feature: 34
gcgaccaccgagatctacacggagtactacactctttccctacacgacgctcttccgatcgatcggaagagcacacgtctgaactccagtcacaac

SEQ ID NO: 22823 - DNA, 96 bp, Aspergillus viridinutans
  misc_feature: 34
gttagtagattaatataatcttaattcttaatttatttaattataacttatataattataaataaaaatctaacttaagttagattatagtagtat

SEQ ID NO: 22824 - DNA, 96 bp, Aspergillus viridinutans
  misc_feature: 34
gcacacgtctgaactccagtcacaacgttccatctcgtatgccgtatcatgatcggaagagcagatcggaagagcacacgtctgaactccagtcac

SEQ ID NO: 22825 - DNA, 96 bp, Aspergillus viridinutans
  misc_feature: 34
gtctgaactccagtcacaacgttccatctcgtatgccgtatcattgatcggaagagcacacgtctgaactcccgtcacaacgttccatctcgtatg

SEQ ID NO: 22826 - DNA, 96 bp, Aspergillus viridinutans
  misc_feature: 34
gtctgaactccagtcacaacgttccatctcgtatgccgtatcattgatcggaagagcacacgtctgaactccagtcacaacgttccagctcgtatg

SEQ ID NO: 22827 - DNA, 96 bp, Aspergillus viridinutans
  misc_feature: 34
gtctgaactccagtcacaacgttccatctcgtatgccgtatcatgatcggaagagcagatcggaagagcacacgtctgaactccagtcacaacgtt

SEQ ID NO: 22828 - DNA, 96 bp, Aspergillus viridinutans
  misc_feature: 34
gtctgaactccagtcacaacgttccatctcggtggtgatcggaagagcacacgtctgaactccagtcacaacgttccatctcgtatgccgtcttct

SEQ ID NO: 22829 - DNA, 96 bp, Aspergillus viridinutans
  misc_feature: 34
actatagtatcgatattcctactagatgatgatttgatatccatactagttgatgattcaatattgaatactatggcattgaattgatatcctgac

SEQ ID NO: 22830 - DNA, 96 bp, Aspergillus viridinutans
  misc_feature: 34
gtcacaacgttccatctcgtatgccgtatcattgatcggaagagcacacgtctgaactccagtcacaacgttccatctcgtatgccgtatcagatc

SEQ ID NO: 22831 - DNA, 96 bp, Aspergillus viridinutans
  misc_feature: 34
gtattgatatcgaatcaatattgaatgtcatctagtagggatatcgaatatcatctagtattgatatcgaatcaatattgaatgtcatctagtagg

SEQ ID NO: 22832 - DNA, 96 bp, Aspergillus viridinutans
  misc_feature: 34
gtatcgatattcctactagatgatgatttgatatccatactagttgatgattcaatattgaatactatggcattgaattgatatcctgactagatg

SEQ ID NO: 22833 - DNA, 96 bp, Aspergillus viridinutans
  misc_feature: 34
atatcgaattcttatatagtagggatattgaattgaatagtagtaatatataattcttatagaggtatagtaataggatattaaataccactatac

SEQ ID NO: 22834 - DNA, 96 bp, Aspergillus viridinutans
  misc_feature: 34
ggggctaaatctaggcatgaggtatattatagttatatacttataatctatatcctccttgtatatatatacatgtagctaacataaaatacacct

SEQ ID NO: 22835 - DNA, 96 bp, Aspergillus viridinutans
  misc_feature: 34
attgattcgatatcaatactagatgatattcgatatccctactagatgacattcaatattgattcgatatcaatactagatgacattcgatatccc

SEQ ID NO: 22836 - DNA, 96 bp, Aspergillus viridinutans
  misc_feature: 34
cgttgtgactggagttcagacgtgtgctcttccgagatcggaagagcgtcgtgtagggaaagagtgtagtactccgtgtagatctcggtggtcgcc

SEQ ID NO: 22837 - DNA, 96 bp, Aspergillus viridinutans
  misc_feature: 34
agtaattttagtaagtagattagggcacctagcataaataatatagaggtaggtaagtataacttagctacttctttatctataactcctagggcc

SEQ ID NO: 22838 - DNA, 96 bp, Aspergillus viridinutans
  misc_feature: 34
acacggagtactacactctttccctacacgacgctcttccgatcatcggaagagcacacgtctgaactccagtcacaacgttccatctcgtatgcc

SEQ ID NO: 22839 - DNA, 96 bp, Aspergillus viridinutans
  misc_feature: 34
gcacacgtctgaactccagtcacaacgttccatctcggtggtcgatcggaagagcacacgtctgaactccagtcacaacgttccatctcgtatgcc

SEQ ID NO: 22840 - DNA, 96 bp, Aspergillus viridinutans
  misc_feature: 34
cacacgtctgaactccagtcacaacgttccatctcggtggtcggatcggaagagcacacgtctgaactccagtcacaacgttccatctcgtatgcc

SEQ ID NO: 22841 - DNA, 96 bp, Aspergillus viridinutans
  misc_feature: 34
ctgaactccagtcacaacgttccatctcgtatgccgtatcattgatcggaagagcacacgtctgaactcccgtcacaacgttccatctcgtatgcc

SEQ ID NO: 22842 - DNA, 96 bp, Aspergillus viridinutans
  misc_feature: 34
ggatggatgggatggatgggatggatgggatggatgggatggatgggatggatgggatggatgggatggatgggatggatgggatggatgggatgg

SEQ ID NO: 22843 - DNA, 96 bp, Aspergillus viridinutans
  misc_feature: 34
ggaagagcacacgtctgaactccagtcacaacgttccatctcgtatgccgtatcatgatcggaagagcagatcggaagagcacacgtctgaactcc

SEQ ID NO: 22844 - DNA, 96 bp, Aspergillus viridinutans
  misc_feature: 34
ggagttaatcttctactagatagtattattattacttacttattagataaaataattattagatataaagatattatctagaatacctatattctt

SEQ ID NO: 22845 - DNA, 96 bp, Aspergillus viridinutans
  misc_feature: 34
ggaagagcacacgtctgaactccagtcacaacgttccatctcgtatgccgtatcattgatcggaaaagcacacgtctgaactccagtcacaacgtt

SEQ ID NO: 22846 - DNA, 96 bp, Aspergillus viridinutans
  misc_feature: 34
ggaagagcacacgtctgaactccagtcacaacgttccatctcgtatgccgtatcattgatcagaagagcacacgtctgaactccagtcacaacgtt

SEQ ID NO: 22847 - DNA, 96 bp, Aspergillus viridinutans
  misc_feature: 34
ggaagagcacacgtctgaactccagtcacaacgttccatctcggtggtcggatcggaagagcacacgtctgaactccagtcacaacgttccatctc

SEQ ID NO: 22848 - DNA, 96 bp, Aspergillus viridinutans
  misc_feature: 34
ggaagagcacacgtctgaactccagtcacaacgttccatctcggtggtcgatcggaagagcacacgtctgaactccagtcacaacgttccatctcg

SEQ ID NO: 22849 - DNA, 96 bp, Aspergillus viridinutans
  misc_feature: 34
aagagcacacgtctgaactccagtcacaacgttccatctcgtatgccgtatcattgatcagaagagcacacgtctgaactccagtcacaacgttcc

SEQ ID NO: 22850 - DNA, 96 bp, Aspergillus viridinutans
  misc_feature: 34
ggaacgttgtgactggagttcagacgtgtgctcttccgagatcggaagagcgtcgtgtagggaaagagtgtagtactccgtgtagatctcggtggt

SEQ ID NO: 22851 - DNA, 96 bp, Aspergillus viridinutans
  misc_feature: 34
agcacacgtctgaactccagtcacaacgttccatctcgtatgccgtatcattgatcggaagagcacacgtctgaactccagtcacaacgttccagc

SEQ ID NO: 22852 - DNA, 96 bp, Aspergillus viridinutans
  misc_feature: 34
ctcctcgttcctggtcctgctccgacggctcccccagttctgcatggcggaactggccgagcaggcctgtttgatgcatgaattcggcgacgtagc

SEQ ID NO: 22853 - DNA, 96 bp, Aspergillus viridinutans
  misc_feature: 34
acgttgtgactggagttcagacgtgtgctcttccgagatcggaagagcgtcgtgtagggaaagagtgtagtactccgtgtagatctcggtggtcgc

SEQ ID NO: 22854 - DNA, 96 bp, Aspergillus viridinutans
  misc_feature: 34
agcacacgtctgaactccagtcacaacgttccatctcggtggtcgatcggaagagcacacgtctgaactccagtcacaacgttccatctcgtatgc

SEQ ID NO: 22855 - DNA, 96 bp, Aspergillus viridinutans
  misc_feature: 34
gcacacgtctgaactccagtcacaacgttccatctcggtggtcggatcggaagagcacacgtctgaactccagtcacaacgttccatctcgtatgc

SEQ ID NO: 22856 - DNA, 96 bp, Aspergillus viridinutans
  misc_feature: 34
gcatacgagatggaacgttgtgactggagttcagacgtgtgctcttccgatcagatcggaagagcgtcgtgtagggaaagagtgtagtactccgtg

SEQ ID NO: 22857 - DNA, 96 bp, Aspergillus viridinutans
  misc_feature: 34
ctgaactccagtcacaacgttccatctcggtggtgatcggaagagcacacgtctgaactccagtcacaacgttccatctcgtatgccgtcttctgc

SEQ ID NO: 22858 - DNA, 96 bp, Aspergillus viridinutans
  misc_feature: 34
gcacacgtctgaactccagtcacaacgttccatctcgtatgccgtatcattgatcggaagagcacacgtctgaactccagtcacaacgttccagct

SEQ ID NO: 22859 - DNA, 96 bp, Aspergillus viridinutans
  misc_feature: 34
atcggaagagcacacgtctgaactccagtcacaacgttccatctcggtggtcgatcggaagagcacacgtctgaactccagtcacaacgttccatc

SEQ ID NO: 22860 - DNA, 96 bp, Aspergillus viridinutans
  misc_feature: 34
gagatggaacgttgtgactggagttcagacgtgtgctcttccgatcagatcggaagagcgtcgtgtagggaaagagtgtagtactccgtgtagatc

SEQ ID NO: 22861 - DNA, 96 bp, Aspergillus viridinutans
  misc_feature: 34
cgagatggaacgttgtgactggagttcagacgtgtgctcttccgatagatcggaagagcgtcgtgtagggaaagagtgtagtactccgtgtagatc

SEQ ID NO: 22862 - DNA, 96 bp, Aspergillus viridinutans
  misc_feature: 34
gatcggaagagcacacgtctgaactccagtcacaacgttccatctcgtatgccgtagatcggaagagcaaacgtctgaactccagtcacaacgttc

SEQ ID NO: 22863 - DNA, 96 bp, Aspergillus viridinutans
  misc_feature: 34
ctgaactccagtcacaacgttccatctcgtatgccgtgatcggaagagcacacgtctgaactccagtcacaacgttccatctcgtatgccgtgatc

SEQ ID NO: 22864 - DNA, 96 bp, Aspergillus viridinutans
  misc_feature: 34
cggaagagcacacgtctgaactccagtcacaacgttccatctcgtatgccgtatcatgatcggaagagcagatcggaagagcacacgtctgaactc

SEQ ID NO: 22865 - DNA, 96 bp, Aspergillus viridinutans
  misc_feature: 34
aataattagaccttaaagaaagataaattaggagttattaaagttattttaataagtttaaattaatattaataattattaatctaacttctactc

SEQ ID NO: 22866 - DNA, 96 bp, Aspergillus viridinutans
  misc_feature: 34
gagtactacactctttccctacacgacgctcttccgatcagatcggaagagcacacgtctgaactccagtcacaacgttccatctcgtatgccgtc

SEQ ID NO: 22867 - DNA, 96 bp, Aspergillus viridinutans
  misc_feature: 34
cacacgtctgaactccagtcacaacgttccatctcgtatgccgtatcattgatcggaagagcacacgtctgaactccagtcacaacgttccagctc

SEQ ID NO: 22868 - DNA, 96 bp, Aspergillus viridinutans
  misc_feature: 34
gagcacacgtctgaactccagtcacaacgttccatctcgtatgccgtatcatgatcggaagagcagatcggaagagcacacgtctgaactccagtc

SEQ ID NO: 22869 - DNA, 96 bp, Aspergillus viridinutans
  misc_feature: 34
gagcacacgtctgaactccagtcacaacgttccatctcggtggtcggatcggaagagcacacgtctgaactccagtcacaacgttccatctcgtat

SEQ ID NO: 22870 - DNA, 96 bp, Aspergillus viridinutans
  misc_feature: 34
gagcacacgtctgaactccagtcacaacgttccatctcggtggtcgatcggaagagcacacgtctgaactccagtcacaacgttccatctcgtatg

SEQ ID NO: 22871 - DNA, 96 bp, Aspergillus viridinutans
  misc_feature: 34
cggaagagcacacgtctgaactccagtcacaacgttccatctcggtggtcgatcggaagagcacacgtctgaactccagtcacaacgttccatctc

SEQ ID NO: 22872 - DNA, 96 bp, Aspergillus viridinutans
  misc_feature: 34
agatggaacgttgtgactggagttcagacgtgtgctcttccgatagatcggaagagcgtcgtgtagggaaagagtgtagtactccgtgtagatctc

SEQ ID NO: 22873 - DNA, 96 bp, Aspergillus viridinutans
  misc_feature: 34
ataatatctaattaagagtagaagttagattaataattattaatattaatttaaacttattaaaataactttaataacttctaatttatctttctc

SEQ ID NO: 22874 - DNA, 96 bp, Aspergillus viridinutans
  misc_feature: 34
gaacgttgtgactggagttcagacgtgtgctcttccgagatcggaagagcgtcgtgtagggaaagagtgtagtactccgtgtagatctcggtggtc

SEQ ID NO: 22875 - DNA, 96 bp, Aspergillus viridinutans
  misc_feature: 34
gaatgtcatctagtattgatatcgaatgtcatctagtattgatatcgaatcgatatcaaatgtcatctagtagggatatcgaatgtcatctagtat

SEQ ID NO: 22876 - DNA, 96 bp, Aspergillus viridinutans
  misc_feature: 34
gaagagcacacgtctgaactccagtcacaacgttccatctcgtatgccgtatcattgatcggaaaagcacacgtctgaactccagtcacaacgttc

SEQ ID NO: 22877 - DNA, 96 bp, Aspergillus viridinutans
  misc_feature: 34
gaagagcacacgtctgaactccagtcacaacgttccatctcgtatgccgtatcattgatcagaagagcacacgtctgaactccagtcacaacgttc

SEQ ID NO: 22878 - DNA, 96 bp, Aspergillus viridinutans
  misc_feature: 34
gaagagcacacgtctgaactccagtcacaacgttccatctcgtatgccgtagaccggaagagcacacgtctgaactccagtcacaacgttccatct

SEQ ID NO: 22879 - DNA, 96 bp, Aspergillus viridinutans
  misc_feature: 34
gaagagcacacgtctgaactccagtcacaacgttccatctcggtggtcggatcggaagagcacacgtctgaactccagtcacaacgttccatctcg

SEQ ID NO: 22880 - DNA, 96 bp, Aspergillus viridinutans
  misc_feature: 34
gaagagcacacgtctgaactccagtcacaacgttccatctcggtggtcgatcggaagagcacacgtctgaactccagtcacaacgttccatctcgt

SEQ ID NO: 22881 - DNA, 96 bp, Aspergillus viridinutans
  misc_feature: 34
gaactccagtcacaacgttccatctcgtatgccgtgatcggaagagcacacgtctgaactccagtcacaacgttccatctcgtatgccgtgatcgg

SEQ ID NO: 22882 - DNA, 96 bp, Aspergillus viridinutans
  misc_feature: 34
aagagcacacgtctgaactccagtcacaacgttccatctcgtatgccgtatcatgatcggaagagcagatcggaagagcacacgtctgaactccag

SEQ ID NO: 22883 - DNA, 96 bp, Aspergillus viridinutans
  misc_feature: 34
ctgaactccagtcacaacgttccatctcgtatgccgtatccgatcggaagagcacacgtctgaactccagtcacaacgttccatctcgtatgccgt

SEQ ID NO: 22884 - DNA, 96 bp, Aspergillus viridinutans
  misc_feature: 34
ctgaactccagtcacaacgttccatctcgtatgccgtagatcggaagagcacacgtctgaactccagtcacaacgttccagctcgtatgccgtctt

SEQ ID NO: 22885 - DNA, 96 bp, Aspergillus viridinutans
  misc_feature: 34
ctataagataggcctattattaaatataaagatatatctagtagttaaatagcatatattaatacatcctatataatctatattaatatagctaat

SEQ ID NO: 22886 - DNA, 96 bp, Aspergillus viridinutans
  misc_feature: 34
ctagtaattttagtaagtagattagggcacctagcataaataatatagaggtaggtaagtataacttagctacttctttatctataactcctaggg

SEQ ID NO: 22887 - DNA, 96 bp, Aspergillus viridinutans
  misc_feature: 34
agtattgatatcgaatcaatattgaatgtcatctagtagggatatcgaatatcatctagtattgatatcgaatcaatattgaatgtcatctagtag

SEQ ID NO: 22888 - DNA, 96 bp, Aspergillus viridinutans
  misc_feature: 34
ctacacggagtactacactctttccctacacgacgctcttccgatcatcggaagagcacacgtctgaactccagtcacaacgttccatctcgtatg

SEQ ID NO: 22889 - DNA, 96 bp, Aspergillus viridinutans
  misc_feature: 34
acgtctgaactccagtcacaacgttccatctcgtatgccgtatcatgatcggaagagcagatcggaagagcacacgtctgaactccagtcacaacg

SEQ ID NO: 22890 - DNA, 96 bp, Aspergillus viridinutans
  misc_feature: 34
cgtctgaactccagtcacaacgttccatctcgtatgccgtatcattgatcggaagagcacacgtctgaactcccgtcacaacgttccatctcgtat

SEQ ID NO: 22891 - DNA, 96 bp, Aspergillus viridinutans
  misc_feature: 34
cgtctgaactccagtcacaacgttccatctcgtatgccgtatcattgatcggaagagcacacgtctgaactccagtcacaacgttccagctcgtat

SEQ ID NO: 22892 - DNA, 96 bp, Aspergillus viridinutans
  misc_feature: 34
cgtctgaactccagtcacaacgttccatctcgtatgccgtatcatgatcggaagagcagatcggaagagcacacgtctgaactccagtcacaacgt

SEQ ID NO: 22893 - DNA, 96 bp, Aspergillus viridinutans
  misc_feature: 34
cccggccaactggtcgccttcgcgcgcgcgcgcgcccaccggcgcctctcccgcgggcggctcctcgacccgtccacgccgaaccccccccccccg

SEQ ID NO: 22894 - DNA, 96 bp, Aspergillus viridinutans
  misc_feature: 34
cacggagtactacactctttccctacacgacgctcttccgatcatcggaagagcacacgtctgaactccagtcacaacgttccatctcgtatgccg

SEQ ID NO: 22895 - DNA, 96 bp, Aspergillus viridinutans
  misc_feature: 34
cacacgtctgaactccagtcacaacgttccatctcggtggtcgatcggaagagcacacgtctgaactccagtcacaacgttccatctcgtatgccg

SEQ ID NO: 22896 - DNA, 96 bp, Aspergillus viridinutans
  misc_feature: 34
acacgtctgaactccagtcacaacgttccatctcggtggtcggatcggaagagcacacgtctgaactccagtcacaacgttccatctcgtatgccg

SEQ ID NO: 22897 - DNA, 96 bp, Aspergillus viridinutans
  misc_feature: 34
cggaagagcacacgtctgaactccagtcacaacgttccatctcgtatgccgtatcattgatcggaaaagcacacgtctgaactccagtcacaacgt

SEQ ID NO: 22898 - DNA, 96 bp, Aspergillus viridinutans
  misc_feature: 34
cggaagagcacacgtctgaactccagtcacaacgttccatctcgtatgccgtatcattgatcagaagagcacacgtctgaactccagtcacaacgt

SEQ ID NO: 22899 - DNA, 96 bp, Aspergillus viridinutans
  misc_feature: 34
cggaagagcacacgtctgaactccagtcacaacgttccatctcggtggtcggatcggaagagcacacgtctgaactccagtcacaacgttccatct

SEQ ID NO: 22900 - DNA, 96 bp, Aspergillus viridinutans
  misc_feature: 34
agatagatgaccagcacatggtcatctacactgatggcagcggctaccagggccgcgtaggcgcctcagctatctgccttcgagccgctgacagcg

SEQ ID NO: 22901 - DNA, 96 bp, Aspergillus viridinutans
  misc_feature: 34
acacgtctgaactccagtcacaacgttccatctcgtatgccgtatcattgatcggaagagcacacgtctgaactccagtcacaacgttccagctcg

SEQ ID NO: 22902 - DNA, 96 bp, Aspergillus viridinutans
  misc_feature: 34
cgagatggaacgttgtgactggagttcagacgtgtgctcttccgatcagatcggaagagcgtcgtgtagggaaagagtgtagtactccgtgtagat

SEQ ID NO: 22903 - DNA, 96 bp, Aspergillus viridinutans
  misc_feature: 34
aacgttgtgactggagttcagacgtgtgctcttccgagatcggaagagcgtcgtgtagggaaagagtgtagtactccgtgtagatctcggtggtcg

SEQ ID NO: 22904 - DNA, 96 bp, Aspergillus viridinutans
  misc_feature: 34
ccttaaagaaagataaattaggagttattaaagttattttaataagtttaaattaatattaataattattaatctaacttctactcttaattagat

SEQ ID NO: 22905 - DNA, 96 bp, Aspergillus viridinutans
  misc_feature: 34
attttagtaagtagattagggcacctagcataaataatatagaggtaggtaagtataacttagctacttctttatctataactcctagggcctagg

SEQ ID NO: 22906 - DNA, 96 bp, Aspergillus viridinutans
  misc_feature: 34
ccagtcacaacgttccatctcgtatgccgtcttctgcttgaaaaaaaaaaagaactccagtcacaacgttccatctcgtatgccgtcttctgcttg

SEQ ID NO: 22907 - DNA, 96 bp, Aspergillus viridinutans
  misc_feature: 34
ccagtcacaacgttccatctcgtatgccgtatcagatcggaagagcacacgtctgaactccagtcacaacgttccatctcgtatgccgtatcattg

SEQ ID NO: 22908 - DNA, 96 bp, Aspergillus viridinutans
  misc_feature: 34
agcacacgtctgaactccagtcacaacgttccatctcggtggtcggatcggaagagcacacgtctgaactccagtcacaacgttccatctcgtatg

SEQ ID NO: 22909 - DNA, 96 bp, Aspergillus viridinutans
  misc_feature: 34
cagtcacaacgttccatctcgtatgccgtatcattgatcggaagagcacacgtctgaactccagtcacaacgttccatctcgtatgccgtctcctg

SEQ ID NO: 22910 - DNA, 96 bp, Aspergillus viridinutans
  misc_feature: 34
acaaagagatagatgaccagcacatggtcatctacactgatggcagcggctaccagggccgcgtaggcgcctcagctatctgccttcgagccgctg

SEQ ID NO: 22911 - DNA, 96 bp, Aspergillus viridinutans
  misc_feature: 34
cacgtctgaactccagtcacaacgttccatctcgtatgccgtatcattgatcggaagagcacacgtctgaactcccgtcacaacgttccatctcgt

SEQ ID NO: 22912 - DNA, 96 bp, Aspergillus viridinutans
  misc_feature: 34
cacgtctgaactccagtcacaacgttccatctcgtatgccgtatcattgatcggaagagcacacgtctgaactccagtcacaacgttccagctcgt

SEQ ID NO: 22913 - DNA, 96 bp, Aspergillus viridinutans
  misc_feature: 34
cacgtctgaactccagtcacaacgttccatctcggtggtcggatcggaagagcacacgtctgaactccagtcacaacgttccatctcgtatgccgt

SEQ ID NO: 22914 - DNA, 96 bp, Aspergillus viridinutans
  misc_feature: 34
cacatgacgatgtaacgaccttccatttctctgtctgtctctgtctctgtctctcatctctcatcatcttgtgtgtctcattgatttcctttcact

SEQ ID NO: 22915 - DNA, 96 bp, Aspergillus viridinutans
  misc_feature: 34
aggcagatagctgaggcgcctacgcggccctggtagccgctgccatcagtgtagatgaccatgtgctggtcatctatctctttgtgtatgtcattg

SEQ ID NO: 22916 - DNA, 96 bp, Aspergillus viridinutans
  misc_feature: 34
aactccagtcacaacgttccatctcggtggtgatcggaagagcacacgtctgaactccagtcacaacgttccatctcgtatgccgtcttctgcttg

SEQ ID NO: 22917 - DNA, 96 bp, Aspergillus viridinutans
  misc_feature: 34
aatatatcctatataatctatattaatatagctaataataatacctagcttatatataatatcttttatattataaggcttatagataattctaat

SEQ ID NO: 22918 - DNA, 96 bp, Aspergillus viridinutans
  misc_feature: 34
agatattaagaaaagatagattaagctatcttaatatacttatctttaatatcttattaatatatttaatctatatttagttaaaactatagtaat

SEQ ID NO: 22919 - DNA, 96 bp, Aspergillus viridinutans
  misc_feature: 34
atgttcgctgcatgtagaggcccgcaggaagatgatagctaagctacaagatgtggagggactccgggggaaactatcagattatgacgcgcttgt

SEQ ID NO: 22920 - DNA, 96 bp, Aspergillus viridinutans
  misc_feature: 34
atcttattattagtactaatcttaatcttatagacctaacaccccttaatagccttatagctagtaggcagggccttaagcatctagatatcttat

SEQ ID NO: 22921 - DNA, 96 bp, Aspergillus viridinutans
  misc_feature: 34
agtcacaacgttccatctcgtatgccgtatcattgatcggaagagcacacgtctgaactccagtcacaacgttccatctcgtatgccgtatcagat

SEQ ID NO: 22922 - DNA, 96 bp, Aspergillus viridinutans
  misc_feature: 34
agtatcgatattcctactagatgatgatttgatatccatactagttgatgattcaatattgaatactatggcattgaattgatatcctgactagat

SEQ ID NO: 22923 - DNA, 96 bp, Aspergillus viridinutans
  misc_feature: 34
atcgatattcctactagatgatgatttgatatccatactagttgatgattcaatattgaatactatggcattgaattgatatcctgactagatgat

SEQ ID NO: 22924 - DNA, 96 bp, Aspergillus viridinutans
  misc_feature: 34
actagatgacatttgatatcgattcgatattgattcaatatcaatactagatgatattcgatatccctactagatgacattcaatattgattcgat

SEQ ID NO: 22925 - DNA, 96 bp, Aspergillus viridinutans
  misc_feature: 34
agacctagatattaagaaaagatagattaagctatcttaatatacttatctttaatatcttattaatatatttaatctatatttagttaaaactat

SEQ ID NO: 22926 - DNA, 96 bp, Aspergillus viridinutans
  misc_feature: 34
atagtattcgatatcgaatcatcaactagtatgaatatcaaatcattatctagtaggaatatcaataccatagtactatactaagatatatatatt

SEQ ID NO: 22927 - DNA, 96 bp, Aspergillus viridinutans
  misc_feature: 34
agagcacacgtctgaactccagtcacaacgttccatctcggtggtcgatcggaagagcacacgtctgaactccagtcacaacgttccatctcgtat

SEQ ID NO: 22928 - DNA, 96 bp, Aspergillus viridinutans
  misc_feature: 34
ataattagaccttaaagaaagataaattaggagttattaaagttattttaataagtttaaattaatattaataattattaatctaacttctactct

SEQ ID NO: 22929 - DNA, 96 bp, Aspergillus viridinutans
  misc_feature: 34
agtactacactctttccctacacgacgctcttccgatcagatcggaagagcacacgtctgaactccagtcacaacgttccatctcgtatgccgtct

SEQ ID NO: 22930 - DNA, 96 bp, Aspergillus viridinutans
  misc_feature: 34
agatttataggtcttacttccctttattaaatagtttcttatatatatttaataattctttatctaaattaaatagctttattaatatctttattt

SEQ ID NO: 22931 - DNA, 96 bp, Aspergillus viridinutans
  misc_feature: 34
agagcacacgtctgaactccagtcacaacgttccatctcgtatgccgtatcatgatcggaagagcagatcggaagagcacacgtctgaactccagt

SEQ ID NO: 22932 - DNA, 96 bp, Aspergillus viridinutans
  misc_feature: 34
actagattctaccttaattaattctccttacttacttacttatatagcttatctctcttactagattctatcttaattaattcttcttacttactt

SEQ ID NO: 22933 - DNA, 96 bp, Aspergillus viridinutans
  misc_feature: 34
acacgtctgaactccagtcacaacgttccatctcggtggtcgatcggaagagcacacgtctgaactccagtcacaacgttccatctcgtatgccgt

SEQ ID NO: 22934 - DNA, 96 bp, Aspergillus viridinutans
  misc_feature: 34
aagagcacacgtctgaactccagtcacaacgttccatctcggtggtcggatcggaagagcacacgtctgaactccagtcacaacgttccatctcgt

SEQ ID NO: 22935 - DNA, 96 bp, Aspergillus viridinutans
  misc_feature: 33
tcacaacgttccatctcgtatgccgtagatcggaagagcacacgtctgaactccagtcacaacgttccaactcgtatgccgtcttctgcttgaaaa

SEQ ID NO: 22936 - DNA, 96 bp, Aspergillus viridinutans
  misc_feature: 33
ttttagtaagtagattagggcacctagcataaataatatagaggtaggtaagtataacttagctacttctttatctataactcctagggcctaggg

SEQ ID NO: 22937 - DNA, 96 bp, Aspergillus viridinutans
  misc_feature: 33
attcttgatagggcaggaagcgaacgttcagaccaaagctatttcagcgaaaaattgatgtcaaaggcattgactggtggcgctatgagcaagaaa

SEQ ID NO: 22938 - DNA, 96 bp, Aspergillus viridinutans
  misc_feature: 33
gtcacaacgttccatctcgtatgccgtagatcggaagagcacacgtctgaactccagtcacaacgttccaactcgtatgccgtcttctgcttgaaa

SEQ ID NO: 22939 - DNA, 96 bp, Aspergillus viridinutans
  misc_feature: 33
tttattactaacctagattatttagctatatatagttaatttataaatactactactaaataatagaaggtcttattatctttcttatatatctta

SEQ ID NO: 22940 - DNA, 96 bp, Aspergillus viridinutans
  misc_feature: 33
ggagttattaaagttattttaataagtttaaattaatattaataattattaatctaacttctactcttaattagatattattctttacttaataaa

SEQ ID NO: 22941 - DNA, 96 bp, Aspergillus viridinutans
  misc_feature: 33
atcggaagagcgtcgtgtagggaaagagtgtagtactccgtgtagatctcggtggtcgccgtatcattaaaaaaaaaaaaaaaaaaaaaaaaacaa

SEQ ID NO: 22942 - DNA, 96 bp, Aspergillus viridinutans
  misc_feature: 33
gatcggaagagcagatcggaagagcacacgtctgaactccagtcacaacgttccatctcgtatgccgtcttctgcttgaaaaaaaaaaaaacacaa

SEQ ID NO: 22943 - DNA, 96 bp, Aspergillus viridinutans
  misc_feature: 33
ttgatatcgaatcaatattgaatgtcatctagtagggatatcgaatatcatctagtattgatatcgaatcaatattgaatgtcatctagtagggat

SEQ ID NO: 22944 - DNA, 96 bp, Aspergillus viridinutans
  misc_feature: 33
ttgaatactatagtatcgatattcctactagatgatgatttgatatccatactagttgatgattcaatattgaatactatggcattgaattgatat

SEQ ID NO: 22945 - DNA, 96 bp, Aspergillus viridinutans
  misc_feature: 33
ttcaatatcaaatcatcacctagtatggatatcgattcgataccttagtattcgatattgaatcatcaactagtatggatattgattcgataccat

SEQ ID NO: 22946 - DNA, 96 bp, Aspergillus viridinutans
  misc_feature: 33
agtcacaacgttccatctcgtatgccgtcttctgcttgaaaaaaaaaaagaactccagtcacaacgttccatctcgtatgccgtcttctgcttgaa

SEQ ID NO: 22947 - DNA, 96 bp, Aspergillus viridinutans
  misc_feature: 33
agataggcctattattaaatataaagatatatctagtagttaaatagcatatattaatacatcctatataatctatattaatatagctaataataa

SEQ ID NO: 22948 - DNA, 96 bp, Aspergillus viridinutans
  misc_feature: 33
ttataggcttctaagctataattagttatctctttatctatatataaggctaaatatattactattatttatactataaaggaagctatctagctt

SEQ ID NO: 22949 - DNA, 96 bp, Aspergillus viridinutans
  misc_feature: 33
ttagtaagtagattagggcacctagcataaataatatagaggtaggtaagtataacttagctacttctttatctataactcctagggcctaggggg

SEQ ID NO: 22950 - DNA, 96 bp, Aspergillus viridinutans
  misc_feature: 33
cctataagataggcctattattaaatataaagatatatctagtagttaaatagcatatattaatacatcctatataatctatattaatatagctaa

SEQ ID NO: 22951 - DNA, 96 bp, Aspergillus viridinutans
  misc_feature: 33
attagaccttaaagaaagataaattaggagttattaaagttattttaataagtttaaattaatattaataattattaatctaacttctactcttaa

SEQ ID NO: 22952 - DNA, 96 bp, Aspergillus viridinutans
  misc_feature: 33
tgtctattcttgatagggcaggaagcgaacgttcagaccaaagctatttcagcgaaaaattgatgtcaaaggcattgactggtggcgctatgagca

SEQ ID NO: 22953 - DNA, 96 bp, Aspergillus viridinutans
  misc_feature: 33
tgaccagcacatggtcatctacactgatggcagcggctaccagggccgcgtaggcgcctcagctatctgccttcgagccgctgacagcgcgcgaca

SEQ ID NO: 22954 - DNA, 96 bp, Aspergillus viridinutans
  misc_feature: 33
tggttttaactaaatatagattaaatatattaataagatattaaagataagtatattaagatagcttaatctatcttttcttaatatctaggtcta

SEQ ID NO: 22955 - DNA, 96 bp, Aspergillus viridinutans
  misc_feature: 33
attcaatatcaaatcatcacctagtatggatatcgattcgataccttagtattcgatattgaatcatcaactagtatggatattgattcgatacca

SEQ ID NO: 22956 - DNA, 96 bp, Aspergillus viridinutans
  misc_feature: 33
tggaagaatgggaaacgcggaaagcatatgtactccccccatgggagccaccccttctttgcacgattaaggaccatgaagccgcactaataaccc

SEQ ID NO: 22957 - DNA, 96 bp, Aspergillus viridinutans
  misc_feature: 33
agagcacacgtctgaactccagtcacaacgttccatctcgtatgccgtcttctgcttgaaaaaaacacacgtctgaactccagtcacaacgttcca

SEQ ID NO: 22958 - DNA, 96 bp, Aspergillus viridinutans
  misc_feature: 33
aagagcacacgtctgaactccagtcacaacgttccatctcgtatgccgtatcatgatcggaagaacacacgtctgaactccagtcacaacgttcca

SEQ ID NO: 22959 - DNA, 96 bp, Aspergillus viridinutans
  misc_feature: 33
tgaactccagtcacaacgttccatctcgtatgccgtatcatgatcggaagagcagatcggaagagcacacgtctgaactccagtcacaacgttcca

SEQ ID NO: 22960 - DNA, 96 bp, Aspergillus viridinutans
  misc_feature: 33
atcggaagagcacacgtctgaactccagtcacaacgttccatctcgtatgccgtgatcggaagggcacacgtctgaactccagtcacaacgttcca

SEQ ID NO: 22961 - DNA, 96 bp, Aspergillus viridinutans
  misc_feature: 33
catagtattcaatatcaaatcatcatctagtcaggatatcaattcaatgccatagtattcaatattgaatcatcaactagtatggatatcaaatca

SEQ ID NO: 22962 - DNA, 96 bp, Aspergillus viridinutans
  misc_feature: 33
tgatagtttcccccggagtccctccacatcttgtagcttagctatcatcttcctgcgggcctctacatgcagcgaacattgtaggagaacatgttt

SEQ ID NO: 22963 - DNA, 96 bp, Aspergillus viridinutans
  misc_feature: 33
tgaatactatagtatcgatattcctactagatgatgatttgatatccatactagttgatgattcaatattgaatactatggcattgaattgatatc

SEQ ID NO: 22964 - DNA, 96 bp, Aspergillus viridinutans
  misc_feature: 33
tgaactccagtcacaacgttccatctcgtatgccgtatcattgatcggaagagcacacgtctgaactccagtcacaacgttccagctcgtatgccg

SEQ ID NO: 22965 - DNA, 96 bp, Aspergillus viridinutans
  misc_feature: 33
tgaactccagtcacaacgttccatctcgtatgccgtagatcggaagagcacacgtctgaactccagtcacaacgttccatctcgtatgccgtcgat

SEQ ID NO: 22966 - DNA, 96 bp, Aspergillus viridinutans
  misc_feature: 33
tacctaaggcctaccttcctggtagcctaataatataataatctaataggattaaggatggtttaagaaataatataagaataataatagtaaaga

SEQ ID NO: 22967 - DNA, 96 bp, Aspergillus viridinutans
  misc_feature: 33
gcaggaagcgaacgttcagaccaaagctatttcagcgaaaaattgatgtcaaaggcattgactggtggcgctatgagcaagaaatcttagagaaga

SEQ ID NO: 22968 - DNA, 96 bp, Aspergillus viridinutans
  misc_feature: 33
tctgtctattcttgatagggcaggaagcgaacgttcagaccaaagctatttcagcgaaaaattgatgtcaaaggcattgactggtggcgctatgag

SEQ ID NO: 22969 - DNA, 96 bp, Aspergillus viridinutans
  misc_feature: 33
tctgaactccagtcacaacgttccatctcgtatgccgtatcattgatcggaagagcacacgtctgaactccagtcacaacgttccagctcgtatgc

SEQ ID NO: 22970 - DNA, 96 bp, Aspergillus viridinutans
  misc_feature: 33
tctgaactccagtcacaacgttccatctcgtatgccgtatcatgatcggaagagcagatcggaagagcacacgtctgaactccagtcacaacgttc

SEQ ID NO: 22971 - DNA, 96 bp, Aspergillus viridinutans
  misc_feature: 33
cggaagagcacacgtctgaactccagtcacaacgttccatctcgtatgccgtatcattacggcatacgagatggaacgttgtgactggagttcaga

SEQ ID NO: 22972 - DNA, 96 bp, Aspergillus viridinutans
  misc_feature: 33
agggcaggaagcgaacgttcagaccaaagctatttcagcgaaaaattgatgtcaaaggcattgactggtggcgctatgagcaagaaatcttagaga

SEQ ID NO: 22973 - DNA, 96 bp, Aspergillus viridinutans
  misc_feature: 33
tctagtattgatatcgaatgtcatctagtattgatatcgaatcgatatcaaatgtcatctagtagggatatcgaatgtcatctagtattgatatcg

SEQ ID NO: 22974 - DNA, 96 bp, Aspergillus viridinutans
  misc_feature: 33
tctaagctataattagttatctctttatctatatataaggctaaatatattactattatttatactataaaggaagctatctagcttacctatctc

SEQ ID NO: 22975 - DNA, 96 bp, Aspergillus viridinutans
  misc_feature: 33
tcggaagagcacacgtctgaactccagtcacaacgttccatctcgtatgccgtatcatgatcggaagagcagatcggaagagcacacgtctgaact

SEQ ID NO: 22976 - DNA, 96 bp, Aspergillus viridinutans
  misc_feature: 33
tcggaagagcacacgtctgaactccagtcacaacgttccatctcgtatgccgtatcatgatcggaagaacacacgtctgaactccagtcacaacgt

SEQ ID NO: 22977 - DNA, 96 bp, Aspergillus viridinutans
  misc_feature: 33
ctagtattgatatcgaatgtcatctagtattgatatcgaatcgatatcaaatgtcatctagtagggatatcgaatgtcatctagtattgatatcga

SEQ ID NO: 22978 - DNA, 96 bp, Aspergillus viridinutans
  misc_feature: 33
tcgaatgtcatctagtattgatatcgaatgtcatctagtattgatatcgaatcgatatcaaatgtcatctagtagggatatcgaatgtcatctagt

SEQ ID NO: 22979 - DNA, 96 bp, Aspergillus viridinutans
  misc_feature: 33
tcgaatatcatctagtattgatattgaatcaatatcgaatcgatatcaaatgtcatctagtagggatatcgaatcaatattgaatgtcatctagta

SEQ ID NO: 22980 - DNA, 96 bp, Aspergillus viridinutans
  misc_feature: 33
attgatatcgaatcaatattgaatgtcatctagtagggatatcgaatatcatctagtattgatatcgaatcaatattgaatgtcatctagtaggga

SEQ ID NO: 22981 - DNA, 96 bp, Aspergillus viridinutans
  misc_feature: 33
tcatctagtattgatatcgaatcaatattgaatgtcatctagtagggatatcgaatatcatctagtattgatatcgaatcaatattgaatgtcatc

SEQ ID NO: 22982 - DNA, 96 bp, Aspergillus viridinutans
  misc_feature: 33
tactatagtatcgatattcctactagatgatgatttgatatccatactagttgatgattcaatattgaatactatggcattgaattgatatcctga

SEQ ID NO: 22983 - DNA, 96 bp, Aspergillus viridinutans
  misc_feature: 33
tcagaccaaagctatttcagcgaaaaattgatgtcaaaggcattgactggtggcgctatgagcaagaaatcttagagaagaagctattcccttatg

SEQ ID NO: 22984 - DNA, 96 bp, Aspergillus viridinutans
  misc_feature: 33
cagtcacaacgttccatctcgtatgccgtatcagatcggaagagcacacgtctgaactccagtcacaacgttccatctcgtatgccgtatcattga

SEQ ID NO: 22985 - DNA, 96 bp, Aspergillus viridinutans
  misc_feature: 33
tcaatatcgaattcttatatagtagggatattgaattgaatagtagtaatatataattcttatagaggtatagtaataggatattaaataccacta

SEQ ID NO: 22986 - DNA, 96 bp, Aspergillus viridinutans
  misc_feature: 33
tattctagataatatctctatatctaataattattttatctaataagtaagtaataataatactatctagtagaagattaacttctagacccttat

SEQ ID NO: 22987 - DNA, 96 bp, Aspergillus viridinutans
  misc_feature: 33
aagataggcctattattaaatataaagatatatctagtagttaaatagcatatattaatacatcctatataatctatattaatatagctaataata

SEQ ID NO: 22988 - DNA, 96 bp, Aspergillus viridinutans
  misc_feature: 33
atatatcctatataatctatattaatatagctaataataatacctagcttatatataatatcttttatattataaggcttatagataattctaata

SEQ ID NO: 22989 - DNA, 96 bp, Aspergillus viridinutans
  misc_feature: 33
tatatagcttatctctcttactagattctatcttaattaattcttcttacttacttacttatatagcttatctctcttactagattctatcttaat

SEQ ID NO: 22990 - DNA, 96 bp, Aspergillus viridinutans
  misc_feature: 33
tagtagggatattgaatgattcgaatcgccatatggtacctatatcgtatagatattgaatgattcaaatcatcatatagtcgggattcgaatcgt

SEQ ID NO: 22991 - DNA, 96 bp, Aspergillus viridinutans
  misc_feature: 33
aatatctaattaagagtagaagttagattaataattattaatattaatttaaacttattaaaataactttaataacttctaatttatctttctcta

SEQ ID NO: 22992 - DNA, 96 bp, Aspergillus viridinutans
  misc_feature: 33
tactacactctttccctacacgacgctcttccgatcagatcggaagagcacacgtctgaactccagtcacaacgttccatctcgtatgccgtcttc

SEQ ID NO: 22993 - DNA, 96 bp, Aspergillus viridinutans
  misc_feature: 33
gcctcctcgttcctggtcctgctccgacggctcccccagttctgcatggcggaactggccgagcaggcctgtttgatgcatgaattcggcgacgta

SEQ ID NO: 22994 - DNA, 96 bp, Aspergillus viridinutans
  misc_feature: 33
tacactctttccctacacgacgctcttccgatcagatcggaagagcacacgtctgaactccagtcacaacgttccatctcgtatgccgtcttctgc

SEQ ID NO: 22995 - DNA, 96 bp, Aspergillus viridinutans
  misc_feature: 33
taattagaccttaaagaaagataaattaggagttattaaagttattttaataagtttaaattaatattaataattattaatctaacttctactctt

SEQ ID NO: 22996 - DNA, 96 bp, Aspergillus viridinutans
  misc_feature: 33
taatatctaattaagagtagaagttagattaataattattaatattaatttaaacttattaaaataactttaataacttctaatttatctttcttt

SEQ ID NO: 22997 - DNA, 96 bp, Aspergillus viridinutans
  misc_feature: 33
taatatctaattaagagtagaagttagattaataattattaatattaatttaaacttattaaaataactttaataacttctaatttatctttctct

SEQ ID NO: 22998 - DNA, 96 bp, Aspergillus viridinutans
  misc_feature: 33
aattaggagttattaaagttattttaataagtttaaattaatattaataattattaatctaacttctactcttaattagatattattctttactta

SEQ ID NO: 22999 - DNA, 96 bp, Aspergillus viridinutans
  misc_feature: 33
aattagaccttaaagaaagataaattaggagttattaaagttattttaataagtttaaattaatattaataattattaatctaacttctactctta

SEQ ID NO: 23000 - DNA, 96 bp, Aspergillus viridinutans
  misc_feature: 33
gatttataggtcttacttccctttattaaatagtttcttatatatatttaataattctttatctaaattaaatagctttattaatatctttattta

SEQ ID NO: 23001 - DNA, 96 bp, Aspergillus viridinutans
  misc_feature: 33
agtattactataggatactaatatatttagtatatataatatacttagtagtaataacctagtataattagagttagtcccttagttaaggcttta

SEQ ID NO: 23002 - DNA, 96 bp, Aspergillus viridinutans
  misc_feature: 33
agttaatcttctactagatagtattattattacttacttattagataaaataattattagatataaagatattatctagaatacctatattcttta

SEQ ID NO: 23003 - DNA, 96 bp, Aspergillus viridinutans
  misc_feature: 33
gttgtgactggagttcagacgtgtgctcttccgagatcggaagagcgtcgtgtagggaaagagtgtagtactccgtgtagatctcggtggtcgccg

SEQ ID NO: 23004 - DNA, 96 bp, Aspergillus viridinutans
  misc_feature: 33
atcggaagagcacacgtctgaactccagtcacaacgttccatctcgtatgccgtatcatgatcggaagagcagatcggaagagcacacgtctgaac

SEQ ID NO: 23005 - DNA, 96 bp, Aspergillus viridinutans
  misc_feature: 33
caggggctaaatctaggcatgaggtatattatagttatatacttataatctatatcctccttgtatatatatacatgtagctaacataaaatacac

SEQ ID NO: 23006 - DNA, 96 bp, Aspergillus viridinutans
  misc_feature: 33
atgaccagcacatggtcatctacactgatggcagcggctaccagggccgcgtaggcgcctcagctatctgccttcgagccgctgacagcgcgcgac

SEQ ID NO: 23007 - DNA, 96 bp, Aspergillus viridinutans
  misc_feature: 33
gtcatctagtattgatatcgaatgtcatctagtattgatatcgaatcgatatcaaatgtcatctagtagggatatcgaatgtcatctagtattgat

SEQ ID NO: 23008 - DNA, 96 bp, Aspergillus viridinutans
  misc_feature: 33
gtcatctagtattgatatcgaatcaatattgaatgtcatctagtagggatatcgaatatcatctagtattgatatcgaatcaatattgaatgtcat

SEQ ID NO: 23009 - DNA, 96 bp, Aspergillus viridinutans
  misc_feature: 33
gtcacaacgttccatctcgtatgccgtatcagatcggaagagcacacgtctgaactccagtcacaacgttccatctcgtatgccgtatcattgatc

SEQ ID NO: 23010 - DNA, 96 bp, Aspergillus viridinutans
  misc_feature: 33
gtactacactctttccctacacgacgctcttccgatcagatcggaagagcacacgtctgaactccagtcacaacgttccatctcgtatgccgtctt

SEQ ID NO: 23011 - DNA, 96 bp, Aspergillus viridinutans
  misc_feature: 33
gtaaggctattagtaaactatttaatattttacttatcagcctagctacctattatctaggcatgaagatagatctagatattaagaaaagatagg

SEQ ID NO: 23012 - DNA, 96 bp, Aspergillus viridinutans
  misc_feature: 33
gggctaaatctaggcatgaggtatattatagttatatacttataatctatatcctccttgtatatatatacatgtagctaacataaaatacacctg

SEQ ID NO: 23013 - DNA, 96 bp, Aspergillus viridinutans
  misc_feature: 33
ggcctattattaaatataaagatatatctagtagttaaatagcatatattaatacatcctatataatctatattaatatagctaataataatgcct

SEQ ID NO: 23014 - DNA, 96 bp, Aspergillus viridinutans
  misc_feature: 33
aggcctattattaaatataaagatatatctagtagttaaatagcatatattaatacatcctatataatctatattaatatagctaataataatgcc

SEQ ID NO: 23015 - DNA, 96 bp, Aspergillus viridinutans
  misc_feature: 33
ctgaactccagtcacaacgttccatctcgtatgccgtatcattgatcggaagagcacacgtctgaactccagtcacaacgttccagctcgtatgcc

SEQ ID NO: 23016 - DNA, 96 bp, Aspergillus viridinutans
  misc_feature: 33
ggagataggtaagctagatagcttcctttatagtatgaataatagtaatatatttagtcttatatatagataaagagataactaattatagcttag

SEQ ID NO: 23017 - DNA, 96 bp, Aspergillus viridinutans
  misc_feature: 33
ctaagctataattagttatctctttatctatatataaggctaaatatattactattatttatactataaaggaagctatctagcttacctatctcc

SEQ ID NO: 23018 - DNA, 96 bp, Aspergillus viridinutans
  misc_feature: 33
ggaagagcacacgtctgaactccagtcacaacgttccatctcgtatgccgtcttctgcttgaaaaaaacacacgtctgaactccagtcacaacgtt

SEQ ID NO: 23019 - DNA, 96 bp, Aspergillus viridinutans
  misc_feature: 33
ggaagagcacacgtctgaactccagtcacaacgttccatctcgtatgccgtcttctgctcgaaaaaacacacgtctgaactccagtcacaacgttc

SEQ ID NO: 23020 - DNA, 96 bp, Aspergillus viridinutans
  misc_feature: 33
ggaagagcacacgtctgaactccagtcacaacgttccatctcgtatgccgtatcatgatcggaagaacacacgtctgaactccagtcacaacgttc

SEQ ID NO: 23021 - DNA, 96 bp, Aspergillus viridinutans
  misc_feature: 33
aagagcacacgtctgaactccagtcacaacgttccatctcgtatgccgtcttctgcttgaaaaaaacacacgtctgaactccagtcacaacgttcc

SEQ ID NO: 23022 - DNA, 96 bp, Aspergillus viridinutans
  misc_feature: 33
gaagagcacacgtctgaactccagtcacaacgttccatctcgtatgccgtcttctgctcgaaaaaacacacgtctgaactccagtcacaacgttcc

SEQ ID NO: 23023 - DNA, 96 bp, Aspergillus viridinutans
  misc_feature: 33
gaagagcacacgtctgaactccagtcacaacgttccatctcgtatgccgtatcatgatcggaagaacacacgtctgaactccagtcacaacgttcc

SEQ ID NO: 23024 - DNA, 96 bp, Aspergillus viridinutans
  misc_feature: 33
ctgaactccagtcacaacgttccatctcgtatgccgtatcatgatcggaagagcagatcggaagagcacacgtctgaactccagtcacaacgttcc

SEQ ID NO: 23025 - DNA, 96 bp, Aspergillus viridinutans
  misc_feature: 33
ataggtaagctagatagcttcctttatagtatgaataatagtaatatatttagtcttatatatagataaagagataactaattatagcttagaagc

SEQ ID NO: 23026 - DNA, 96 bp, Aspergillus viridinutans
  misc_feature: 33
gctcttcagtaaggcgaggcttccaggaatagcgccatctagagatgtccagagaggttagtaaggtttaatctagatcttaaagataataagggt

SEQ ID NO: 23027 - DNA, 96 bp, Aspergillus viridinutans
  misc_feature: 33
gatagatgaccagcacatggtcatctacactgatggcagcggctaccagggccgcgtaggcgcctcagctatctgccttcgagccgctgacagcgc

SEQ ID NO: 23028 - DNA, 96 bp, Aspergillus viridinutans
  misc_feature: 33
actccagtcacaacgttccatctcgtatgccgtagatcggaagagcacacgtctgaactccagtcacaacgttccagctcgtatgccgtcttctgc

SEQ ID NO: 23029 - DNA, 96 bp, Aspergillus viridinutans
  misc_feature: 33
agtcacaacgttccatctcgtatgccgtatcattgatcggaagaacacacgtctgaactccagtcacaacgttccatctcgtatgccgtcttctgc

SEQ ID NO: 23030 - DNA, 96 bp, Aspergillus viridinutans
  misc_feature: 33
ccatagtattcaatatcaaatcatcatctagtcaggatatcaattcaatgccatagtattcaatattgaatcatcaactagtatggatatcaaatc

SEQ ID NO: 23031 - DNA, 96 bp, Aspergillus viridinutans
  misc_feature: 33
gatggaacgttgtgactggagttcagacgtgtgctcttccgatagatcggaagagcgtcgtgtagggaaagagtgtagtactccgtgtagatctcg

SEQ ID NO: 23032 - DNA, 96 bp, Aspergillus viridinutans
  misc_feature: 33
atatcctatataatctatattaatatagctaataataatacctagcttatatataatatcttttatattataaggcttatagataattctaatatc

SEQ ID NO: 23033 - DNA, 96 bp, Aspergillus viridinutans
  misc_feature: 33
gataggtaagctagatagcttcctttatagtatgaataatagtaatatatttagtcttatatatagataaagagataactaattatagcttagaag

SEQ ID NO: 23034 - DNA, 96 bp, Aspergillus viridinutans
  misc_feature: 33
gataggcctattattaaatataaagatatatctagtagttaaatagcatatattaatacatcctatataatctatattaatatagctaataataat

SEQ ID NO: 23035 - DNA, 96 bp, Aspergillus viridinutans
  misc_feature: 33
aatgtcatctagtagggatatcgaatgtcatctagtattgatatcgaatcaatatcgaatgtcatctagtagggatatcgaatgtcatctagtatc

SEQ ID NO: 23036 - DNA, 96 bp, Aspergillus viridinutans
  misc_feature: 33
gagttaatcttctactagatagtattattattacttacttattagataaaataattattagatatagagatattatctagaatacctatattcttt

SEQ ID NO: 23037 - DNA, 96 bp, Aspergillus viridinutans
  misc_feature: 33
gagcacacgtctgaactccagtcacaacgttccatctcgtatgccgtatcattgatgggaagagcacacgtctgaactccagtcacaacgttccat

SEQ ID NO: 23038 - DNA, 96 bp, Aspergillus viridinutans
  misc_feature: 33
aactccagtcacaacgttccatctcgtatgccgtatcattgatcggaagagcacacgtctgaactccagtcacaacgttccagctcgtatgccgtc

SEQ ID NO: 23039 - DNA, 96 bp, Aspergillus viridinutans
  misc_feature: 33
gaattaaatagtagtaatatataattcttatagaggtatagtagtaggatattaaataccactatacttatatatattctgaatatatagtataag

SEQ ID NO: 23040 - DNA, 96 bp, Aspergillus viridinutans
  misc_feature: 33
agtcacaacgttccatctcgtatgccgtatcattgatcggaagagcacacgtctgaactccagtcacaacgttccatctcgtatgccgtatcattc

SEQ ID NO: 23041 - DNA, 96 bp, Aspergillus viridinutans
  misc_feature: 33
ctatatagtagggatttaaatcatcatatagtatggatattaaatgatttgaattgctatatagtatgtatttaaattatcatatagtagggattc

SEQ ID NO: 23042 - DNA, 96 bp, Aspergillus viridinutans
  misc_feature: 33
gaaagataaattaggagttattaaagttattttaataagtttaaattaatattaataattattaatctaacttctactcttaattagatattattc

SEQ ID NO: 23043 - DNA, 96 bp, Aspergillus viridinutans
  misc_feature: 33
gaagagcacacgtctgaactccagtcacaacgttccatctcgtatgccgtcttctgcttgaaaaaaacacacgtctgaactccagtcacaacgttc

SEQ ID NO: 23044 - DNA, 96 bp, Aspergillus viridinutans
  misc_feature: 33
gaactccagtcacaacgttccatctcgtatgccgtatcattgatcggaagagcacacgtctgaactccagtcacaacgttccagctcgtatgccgt

SEQ ID NO: 23045 - DNA, 96 bp, Aspergillus viridinutans
  misc_feature: 33
gaactccagtcacaacgttccatctcgtatgccgtagatcggaagagcacacgtctgaactccagtcacaacgttccagctcgtatgccgtcttct

SEQ ID NO: 23046 - DNA, 96 bp, Aspergillus viridinutans
  misc_feature: 33
gaactccagtcacaacgttccatctcggtggtgatcggaagagcacacgtctgaactccagtcacaacgttccatctcgtatgccgtcttctgctt

SEQ ID NO: 23047 - DNA, 96 bp, Aspergillus viridinutans
  misc_feature: 33
ataggcctatcttataggcttctaagctataattagttatctctttatctatatataagactaaatatattactattattcatactataaaggaag

SEQ ID NO: 23048 - DNA, 96 bp, Aspergillus viridinutans
  misc_feature: 33
ataggcctatcttataggcttctaagctataattagttatctctttatctatatataaggctaaatatattactattatttatactataaaggaag

SEQ ID NO: 23049 - DNA, 96 bp, Aspergillus viridinutans
  misc_feature: 33
cgaatatcatctagtattgatattgaatcaatatcgaatcgatatcaaatgtcatctagtagggatatcgaatcaatattgaatgtcatctagtag

SEQ ID NO: 23050 - DNA, 96 bp, Aspergillus viridinutans
  misc_feature: 33
ctacactctttccctacacgacgctcttccgatcagatcggaagagcacacgtctgaactccagtcacaacgttccatctcgtatgccgtcttctg

SEQ ID NO: 23051 - DNA, 96 bp, Aspergillus viridinutans
  misc_feature: 33
atcggaagagcacacgtctgaactccagtcacaacgttccatctcgtatgccgtatcatgatcggaagaacacacgtctgaactccagtcacaacg

SEQ ID NO: 23052 - DNA, 96 bp, Aspergillus viridinutans
  misc_feature: 33
cgctgcatgtagaggcccgcaggaagatgatagctaagctacaagatgtggagggactccgggggaaactatcagattatgacgcgcttgtgtccg

SEQ ID NO: 23053 - DNA, 96 bp, Aspergillus viridinutans
  misc_feature: 33
cggaagagcacacgtctgaactccagtcacaacgttccatctcgtatgccgtcttctgctcgaaaaaacacacgtctgaactccagtcacaacgtt

SEQ ID NO: 23054 - DNA, 96 bp, Aspergillus viridinutans
  misc_feature: 33
cggaagagcacacgtctgaactccagtcacaacgttccatctcgtatgccgtatcatgatcggaagaacacacgtctgaactccagtcacaacgtt

SEQ ID NO: 23055 - DNA, 96 bp, Aspergillus viridinutans
  misc_feature: 33
aatcaatattgaatgtcatctagtagggatatcgaatatcatctagtattgatattgaatcaatatcgaatcgatatcaaatgtcatctagtaggg

SEQ ID NO: 23056 - DNA, 96 bp, Aspergillus viridinutans
  misc_feature: 33
ccagtcacaacgttccatctcgtatgccgtatcattgatcggaagagcacacgtctgaactccagtcacaacgttccatctcgtatgccgtctcat

SEQ ID NO: 23057 - DNA, 96 bp, Aspergillus viridinutans
  misc_feature: 33
ccagtcacaacgttccatctcgtatgccgtatcattgatcggaagaacacacgtctgaactccagtcacaacgttccatctcgtatgccgtcttct

SEQ ID NO: 23058 - DNA, 96 bp, Aspergillus viridinutans
  misc_feature: 33
cagtcacaacgttccatctcgtatgccgtatcattgatcggaagaacacacgtctgaactccagtcacaacgttccatctcgtatgccgtcttctg

SEQ ID NO: 23059 - DNA, 96 bp, Aspergillus viridinutans
  misc_feature: 33
atactatagtatcgatattcctactagatgatgatttgatatccatactagttgatgattcaatattgaatactatggcattgaattgatatcctg

SEQ ID NO: 23060 - DNA, 96 bp, Aspergillus viridinutans
  misc_feature: 33
aactccagtcacaacgttccatctcgtatgccgtagatcggaagagcacacgtctgaactccagtcacaacgttccagctcgtatgccgtcttctg

SEQ ID NO: 23061 - DNA, 96 bp, Aspergillus viridinutans
  misc_feature: 33
attaaatagtagtaatatataattcttatagaggtatagtagtaggatattaaataccactatacttatatatattctgaatatatagtataagtg

SEQ ID NO: 23062 - DNA, 96 bp, Aspergillus viridinutans
  misc_feature: 33
cactctttccctacacgacgctcttccgatcagatcggaagagcacacgtctgaactccagtcacaacgttccatctcgtatgccgtcttctgctt

SEQ ID NO: 23063 - DNA, 96 bp, Aspergillus viridinutans
  misc_feature: 33
caatgttcgctgcatgtagaggcccgcaggaagatgatagctaagctacaagatgtggagggactccgggggaaactatcagattatgacgcgctt

SEQ ID NO: 23064 - DNA, 96 bp, Aspergillus viridinutans
  misc_feature: 33
caatatcgaattcttatatagtagggatattgaattgaatagtagtaatatataattcttatagaggtatagtaataggatattaaataccactat

SEQ ID NO: 23065 - DNA, 96 bp, Aspergillus viridinutans
  misc_feature: 33
aatgttcgctgcatgtagaggcccgcaggaagatgatagctaagctacaagatgtggagggactccgggggaaactatcagattatgacgcgcttg

SEQ ID NO: 23066 - DNA, 96 bp, Aspergillus viridinutans
  misc_feature: 33
attattattattatcctctttattattattatctaatcccttactattatccttatagaaggttattacttatatagttattacttaggtagttat

SEQ ID NO: 23067 - DNA, 96 bp, Aspergillus viridinutans
  misc_feature: 33
atcgaattcttatatagtagggatattgaattgaatagtagtaatatataattcttatagaggtatagtaataggatattaaataccactatacat

SEQ ID NO: 23068 - DNA, 96 bp, Aspergillus viridinutans
  misc_feature: 33
atcggaagagcacacgtctgaactccagtcacaacgttccatctcggtggtcggatcggaagagcacacgtctgaactccagtcacaacgttccat

SEQ ID NO: 23069 - DNA, 96 bp, Aspergillus viridinutans
  misc_feature: 33
atagtattcaatatcaaatcatcatctagtcaggatatcaattcaatgccatagtattcaatattgaatcatcaactagtatggatatcaaatcat

SEQ ID NO: 23070 - DNA, 96 bp, Aspergillus viridinutans
  misc_feature: 33
agtcacaacgttccatctcgtatgccgtatcagatcggaagagcacacgtctgaactccagtcacaacgttccatctcgtatgccgtatcattgat

SEQ ID NO: 23071 - DNA, 96 bp, Aspergillus viridinutans
  misc_feature: 33
atatcgaatgtcatctagtattgatatcgaatcaatattgaatgtcatctagtagggatatcgaatatcatctagtattgatatcgaatcaatatt

SEQ ID NO: 23072 - DNA, 96 bp, Aspergillus viridinutans
  misc_feature: 33
atatatcttagtatagtactatggtattgatattcctactagataatgatttgatattcatactagttgatgattcgatatcgaatactatggtat

SEQ ID NO: 23073 - DNA, 96 bp, Aspergillus viridinutans
  misc_feature: 33
accatagtattcgatatcgaatcatcaactagtatgaatatcaaatcattatctagtaggaatatcaataccatagtactatactaagatatatat

SEQ ID NO: 23074 - DNA, 96 bp, Aspergillus viridinutans
  misc_feature: 33
agtcgatatcctgactagttgatgattcgatatcgaatactaaggtatcaagttgatatcctgactagttgatgattcaatattgaatactatggt

SEQ ID NO: 23075 - DNA, 96 bp, Aspergillus viridinutans
  misc_feature: 33
aggagttaatcttctactagatagtattattattacttacttattagataaaataattattagatataaagatattatctagaatacctatattct

SEQ ID NO: 23076 - DNA, 96 bp, Aspergillus viridinutans
  misc_feature: 33
acactctttccctacacgacgctcttccgatcagatcggaagagcacacgtctgaactccagtcacaacgttccatctcgtatgccgtcttctgct

SEQ ID NO: 23077 - DNA, 96 bp, Aspergillus viridinutans
  misc_feature: 33
actacactctttccctacacgacgctcttccgatcagatcggaagagcacacgtctgaactccagtcacaacgttccatctcgtatgccgtcttct

SEQ ID NO: 23078 - DNA, 96 bp, Aspergillus viridinutans
  misc_feature: 33
aattaaatagtagtaatatataattcttatagaggtatagtagtaggatattaaataccactatacttatatatattctgaatatatagtataagt

SEQ ID NO: 23079 - DNA, 96 bp, Aspergillus viridinutans
  misc_feature: 32
atcggaagagcgtcgtgtagggaaagagtgtagtactccgtgtagatctcggtggtcgccgtatcattaaaaaaaaaaaaaaaaaaaaagaaaaaa

SEQ ID NO: 23080 - DNA, 96 bp, Aspergillus viridinutans
  misc_feature: 32
atcggaagagcgtcgtgtagggaaagagtgtagtactccgtgtagatctcggtggtcgccgtatcattaaaaaaaaaaaaaaaaaaaaaacaaaaa

SEQ ID NO: 23081 - DNA, 96 bp, Aspergillus viridinutans
  misc_feature: 32
atcggaagagcgtcgtgtagggaaagagtgtagtactccgtgtagatctcggtggtcgccgtatcattaaaaaaaaaaaaaaaaaaaaaagaaaaa

SEQ ID NO: 23082 - DNA, 96 bp, Aspergillus viridinutans
  misc_feature: 32
aggtatgtagtactatgtacacatttagtttttctagtttattattatttatatatataagtagctatcttttattactatctttattattagaaa

SEQ ID NO: 23083 - DNA, 96 bp, Aspergillus viridinutans
  misc_feature: 32
gtcacaacgttccatctcgtatgccgtcttctgcttgaaaaaaaaaaagaactccagtcacaacgttccatctcgtatgccgtcttctgcttgaaa

SEQ ID NO: 23084 - DNA, 96 bp, Aspergillus viridinutans
  misc_feature: 32
gaagaacatcctattaatatataaatataaagaatagtagatagaggataggattatatattatattatctactactacttatactagcttataaa

SEQ ID NO: 23085 - DNA, 96 bp, Aspergillus viridinutans
  misc_feature: 32
tttagtaagtagattagggcacctagcataaataatatagaggtaggtaagtataacttagctacttctttatctataactcctagggcctagggg

SEQ ID NO: 23086 - DNA, 96 bp, Aspergillus viridinutans
  misc_feature: 32
tatagctaataataatacctagcttatatataatatcttttatattataaggcttatagataattctaatatctagggtctaatagaagaattaaa

SEQ ID NO: 23087 - DNA, 96 bp, Aspergillus viridinutans
  misc_feature: 32
tttaatatcctattactatacctctataagaattatatattactactattcaattcaatatccctactatataagaattcgatattgatactattc

SEQ ID NO: 23088 - DNA, 96 bp, Aspergillus viridinutans
  misc_feature: 32
atatattaaatttttacttaggccttactagtatcttactaatatcttactttaaatatatttcttattattcttatacttctattatcccttaaa

SEQ ID NO: 23089 - DNA, 96 bp, Aspergillus viridinutans
  misc_feature: 32
gggcaggaagcgaacgttcagaccaaagctatttcagcgaaaaattgatgtcaaaggcattgactggtggcgctatgagcaagaaatcttagagaa

SEQ ID NO: 23090 - DNA, 96 bp, Aspergillus viridinutans
  misc_feature: 32
aaggcctaccttcctggtagcctaataatataataatctaataggattaaggatggtttaagaaataatataagaataataatagtaaagatagaa

SEQ ID NO: 23091 - DNA, 96 bp, Aspergillus viridinutans
  misc_feature: 32
ttcgataccttagtattcgatatcgaatcatcacctagtcaggatatcgattcgataccttagtatttgatatcgaatgatcacctagtatgaata

SEQ ID NO: 23092 - DNA, 96 bp, Aspergillus viridinutans
  misc_feature: 32
ttccgatcagatcggaagagcgtcgtgtagggaaagagtgtagtactccgtgtagatctcggtggtcgccgtatcattaaaaaaaaaaaaaaaaag

SEQ ID NO: 23093 - DNA, 96 bp, Aspergillus viridinutans
  misc_feature: 32
ttcagcatctctaattagtaggggtaggccctgaagatcctaggtactagggcctttaattagtagtaaagattaatatataggatcctaattaga

SEQ ID NO: 23094 - DNA, 96 bp, Aspergillus viridinutans
  misc_feature: 32
gatcggaagagcacacgtctgaactccagtcacaacgttccatctcgtatgccgtatcatgatcggaagagcagatcggaagagcacacgtctgaa

SEQ ID NO: 23095 - DNA, 96 bp, Aspergillus viridinutans
  misc_feature: 32
aactaaacaagagaaacgatcttaccatccagatactgtccagcaaagacacaagaattattcagatttcatgttttggggggctattacatataa

SEQ ID NO: 23096 - DNA, 96 bp, Aspergillus viridinutans
  misc_feature: 32
ttatatgtaagctaggcattattattagctatattaatatagattatataggatgtattaatatatgctatttaactactagatatatctttatat

SEQ ID NO: 23097 - DNA, 96 bp, Aspergillus viridinutans
  misc_feature: 32
aggttatacctcagcaaaaggaagcatttgaagttgcacagattcttcaatccatatccagagatggccgaccagctaaggtaccttactatataa

SEQ ID NO: 23098 - DNA, 96 bp, Aspergillus viridinutans
  misc_feature: 32
ttagttagtagattaatataatcttaattcttaatttatttaattataacttatataattataaataaaaatctaacttaagttagattatagtag

SEQ ID NO: 23099 - DNA, 96 bp, Aspergillus viridinutans
  misc_feature: 32
ttaggagttattaaagttattttaataagtttaaattaatattaataattattaatctaacttctactcttaattagatattattctttacttaat

SEQ ID NO: 23100 - DNA, 96 bp, Aspergillus viridinutans
  misc_feature: 32
cctaccttcctggtagcctaataatataataatctaataggattaaggatggtttaagaaataatataagaataataatagtaaagatagaagtaa

SEQ ID NO: 23101 - DNA, 96 bp, Aspergillus viridinutans
  misc_feature: 32
tagatattaagaaaagatagattaagctatcttaatatacttatctttaatatcttattaatatatttaatctatatttagttaaaactatagtaa

SEQ ID NO: 23102 - DNA, 96 bp, Aspergillus viridinutans
  misc_feature: 32
tgtaagctaggcattattattagctatattaatatagattatataggatgtattaatatatgctatttaactactagatatatctttatatttaat

SEQ ID NO: 23103 - DNA, 96 bp, Aspergillus viridinutans
  misc_feature: 32
tggtatttaatatcctattactatacctctataagaattatatattactactattcaattcaatatccctactatataagaattcgatattgatac

SEQ ID NO: 23104 - DNA, 96 bp, Aspergillus viridinutans
  misc_feature: 32
tggtattgaatcaatatcctgactagatgatgattcgatattcatactaggtgatgattcgatatcgaatactaaggtattgaatcaatatcctga

SEQ ID NO: 23105 - DNA, 96 bp, Aspergillus viridinutans
  misc_feature: 32
atcggaagagcacacgtctgaactccagtcacaacgttccatctcgtatgccgtcttctgcttgaaaaaaaaaagaactccagtcacaacgttcca

SEQ ID NO: 23106 - DNA, 96 bp, Aspergillus viridinutans
  misc_feature: 32
aagagcacacgtctgaactccagtcacaacgttccatctcgtatgccgtcttctgctcgaaaaaacacacgtctgaactccagtcacaacgttcca

SEQ ID NO: 23107 - DNA, 96 bp, Aspergillus viridinutans
  misc_feature: 32
agagcacacgtctgaactccagtcacaacgttccatctcgtatgccgtatcattgatcagaagagcacacgtctgaactccagtcacaacgttcca

SEQ ID NO: 23108 - DNA, 96 bp, Aspergillus viridinutans
  misc_feature: 32
atcggaagagcacacgtctgaactccagtcacaacgttccatctcgtatgccgtaatcggaagagcacacgtctgaactccagtcacaacgttcca

SEQ ID NO: 23109 - DNA, 96 bp, Aspergillus viridinutans
  misc_feature: 32
aagagcacacgtctgaactccagtcacaacgttccatctcgtatgccgtctcatgctcggaagagcacacgtctgaactccagtcacaacgttcca

SEQ ID NO: 23110 - DNA, 96 bp, Aspergillus viridinutans
  misc_feature: 32
agagcacacgtctgaactccagtcacaacgttccatctcgtatgccgtatcattgatcggaagagcacacgtctgaactccagtcccaacgttcca

SEQ ID NO: 23111 - DNA, 96 bp, Aspergillus viridinutans
  misc_feature: 32
tgctcttcagtaaggcgaggcttccaggaatagcgccatctagagatgtccagagaggttagtaaggtttaatctagatcttaaagataataaggg

SEQ ID NO: 23112 - DNA, 96 bp, Aspergillus viridinutans
  misc_feature: 32
tgcccatggaagaagatgcttagctagttaaattagataagcctattaaatataatcttaaacttaaaaagagatatagagtaggagttagcttag

SEQ ID NO: 23113 - DNA, 96 bp, Aspergillus viridinutans
  misc_feature: 32
tattgatatcgaatgtcatctagtattgatatcgaatcgatatcaaatgtcatctagtagggatatcgaatgtcatctagtattgatatcgaatca

SEQ ID NO: 23114 - DNA, 96 bp, Aspergillus viridinutans
  misc_feature: 32
tctgaactccagtcacaacgttccatctcgtatgccgtatcattgatgggaagagcacacgtctgaactccagtcacaacgttccatctcgtatgc

SEQ ID NO: 23115 - DNA, 96 bp, Aspergillus viridinutans
  misc_feature: 32
taaggcctaccttcctggtagcctaataatataataatctaataggattaaggatggtttaagaaataatataagaataataatagtaaagataga

SEQ ID NO: 23116 - DNA, 96 bp, Aspergillus viridinutans
  misc_feature: 32
tataagtaagtaagtaagaagaattaattaagatagaatctagtaagagagataagctatataagtaagtaagtaaggagaattaattaagataga

SEQ ID NO: 23117 - DNA, 96 bp, Aspergillus viridinutans
  misc_feature: 32
accttaaagaaagataaattaggagttattaaagttattttaataagtttaaattaatattaataattattaatctaacttctactcttaattaga

SEQ ID NO: 23118 - DNA, 96 bp, Aspergillus viridinutans
  misc_feature: 32
tcggaagagcacacgtctgaactccagtcacaacgttccatctcgtatgccgtgatcggaagggcacacgtctgaactccagtcacaacgttccat

SEQ ID NO: 23119 - DNA, 96 bp, Aspergillus viridinutans
  misc_feature: 32
tcggaagagcacacgtctgaactccagtcacaacgttccatctcgtatgccgtctcatgctcggaagagcacacgtctgaactccagtcacaacgt

SEQ ID NO: 23120 - DNA, 96 bp, Aspergillus viridinutans
  misc_feature: 32
tcggaagagcacacgtctgaactccagtcacaacgttccatctcgtatgccgtatcctggatcggaagagcacacgtctgaactccagtcacaacg

SEQ ID NO: 23121 - DNA, 96 bp, Aspergillus viridinutans
  misc_feature: 32
tcgaattcttatatagtagggatattgaattgaatagtagtaatatataattcttatagaggtatagtaataggatattaaataccactatacata

SEQ ID NO: 23122 - DNA, 96 bp, Aspergillus viridinutans
  misc_feature: 32
tcgaaagcaaaaacacagctaaagcagcctgccatccagctgcggtctcccctgcgccatcttagcgcgttaaacacctatcccacctcattctat

SEQ ID NO: 23123 - DNA, 96 bp, Aspergillus viridinutans
  misc_feature: 32
tcctggtagcctaataatataataatctaataggattaaggatggtttaagaaataatataagaataataatagtaaagatagaagtaaggcctat

SEQ ID NO: 23124 - DNA, 96 bp, Aspergillus viridinutans
  misc_feature: 32
atgggatggatgggatggatgggatggatgggatggatgggatggatgggatggatgggatggatgggatggatgggatggatgggatggatggga

SEQ ID NO: 23125 - DNA, 96 bp, Aspergillus viridinutans
  misc_feature: 32
aactccagtcacaacgttccatctcgtatgccgtgatcggaagagcacacgtctgaactccagtcacaacgttccatctcgtatgccgtatcatga

SEQ ID NO: 23126 - DNA, 96 bp, Aspergillus viridinutans
  misc_feature: 32
tcagcactgcagctgagcaatcaggcctatcaaaatctactgtctcccgcgtacggaaacgcgccaaacagcatggatggaagccaaatcagccta

SEQ ID NO: 23127 - DNA, 96 bp, Aspergillus viridinutans
  misc_feature: 32
tcacaacgttccatctcgtatgccgtatcagatcggaagagcacacgtctgaactccagtcacaacgttccatctcgtatgccgtatcattgatcg

SEQ ID NO: 23128 - DNA, 96 bp, Aspergillus viridinutans
  misc_feature: 32
tagctaataataatacctagcttatatataatatcttttatattataaggcttatagataattctaatatctagggtctaatagaagaattaaata

SEQ ID NO: 23129 - DNA, 96 bp, Aspergillus viridinutans
  misc_feature: 32
tattcaatatcaaatcatcacctagtatggatatcgattcgataccttagtattcgatattgaatcatcaactagtatggatattgattcgatacc

SEQ ID NO: 23130 - DNA, 96 bp, Aspergillus viridinutans
  misc_feature: 32
tatgtaagctaggcattattattagctatattaatatagattatataggatgtattaatatatgctatttaactactagatatatctttatattta

SEQ ID NO: 23131 - DNA, 96 bp, Aspergillus viridinutans
  misc_feature: 32
tatcttataggcttctaagctataattagttatctctttatctatatataaggctaaatatattactattatttatactataaaggaagctatcta

SEQ ID NO: 23132 - DNA, 96 bp, Aspergillus viridinutans
  misc_feature: 32
tatataagtaagtaagtaagaagaattaattaagatagaatctagtaagagagataagctatataagtaagtaagtaaggagaattaattaagata

SEQ ID NO: 23133 - DNA, 96 bp, Aspergillus viridinutans
  misc_feature: 32
tatctaattaagagtagaagttagattaataattattaatattaatttaaacttattaaaataactttaataacttctaatttatctttctctaag

SEQ ID NO: 23134 - DNA, 96 bp, Aspergillus viridinutans
  misc_feature: 32
gtggtatttaatatcctattactatacctctataagaattatatattactactattcaattcaatatccctactatataagaattcgatattgata

SEQ ID NO: 23135 - DNA, 96 bp, Aspergillus viridinutans
  misc_feature: 32
gaattcttatatagtagggatattgaattgaatagtagtaatatataattcttatagaggtatagtaataggatattaaataccactatacatata

SEQ ID NO: 23136 - DNA, 96 bp, Aspergillus viridinutans
  misc_feature: 32
tatatatcttagtatagtactatggtattgatattcctactagataatgatttgatattcatactagttgatgattcgatatcgaatactatggta

SEQ ID NO: 23137 - DNA, 96 bp, Aspergillus viridinutans
  misc_feature: 32
gaggttatacctcagcaaaaggaagcatttgaagttgcacagattcttcaatccatatccagagatggccgaccagctaaggtaccttactatata

SEQ ID NO: 23138 - DNA, 96 bp, Aspergillus viridinutans
  misc_feature: 32
tataggcttctaagctataattagttatctctttatctatatataaggctaaatatattactattatttatactataaaggaagctatctagctta

SEQ ID NO: 23139 - DNA, 96 bp, Aspergillus viridinutans
  misc_feature: 32
agcactgcagctgagcaatcaggcctatcaaaatctactgtctcccgcgtacggaaacgcgccaaacagcatggatggaagccaaatcagcctata

SEQ ID NO: 23140 - DNA, 96 bp, Aspergillus viridinutans
  misc_feature: 32
tataaagattatactactataatctaacttaagttagatttttatttataattatataagttataattaaataaattaagaattaagattatatta

SEQ ID NO: 23141 - DNA, 96 bp, Aspergillus viridinutans
  misc_feature: 32
tagtttcccagggaaccttactattagaatctttctagttatttaaattagaattagaattagattaatttaactaatttaattaatttaatttat

SEQ ID NO: 23142 - DNA, 96 bp, Aspergillus viridinutans
  misc_feature: 32
tagttagtagattaatataatcttaattcttaatttatttaattataacttatataattataaataaaaatctaacttaagttagattatagtagt

SEQ ID NO: 23143 - DNA, 96 bp, Aspergillus viridinutans
  misc_feature: 32
taggcttctaagctataattagttatctctttatctatatataaggctaaatatattactattatttatactataaaggaagctatctagcttacc

SEQ ID NO: 23144 - DNA, 96 bp, Aspergillus viridinutans
  misc_feature: 32
taggcctattattaaatataaagatatatctagtagttaaatagcatatattaatacatcctatataatctatattaatatagctaataataatgc

SEQ ID NO: 23145 - DNA, 96 bp, Aspergillus viridinutans
  misc_feature: 32
taggcctatcttataggcttctaagctataattagttatctctttatctatatataaggctaaatatattactattatttatactataaaggaagc

SEQ ID NO: 23146 - DNA, 96 bp, Aspergillus viridinutans
  misc_feature: 32
taggcctatcttataggcttctaagctataattagttatctctttatctatatataagactaaatatattactattattcatactataaaggaagc

SEQ ID NO: 23147 - DNA, 96 bp, Aspergillus viridinutans
  misc_feature: 32
gcctattattaaatataaagatatatctagtagttaaatagcatatattaatacatcctatataatctatattaatatagctaataataatgccta

SEQ ID NO: 23148 - DNA, 96 bp, Aspergillus viridinutans
  misc_feature: 32
ggcctatcttataggcttctaagctataattagttatctctttatctatatataaggctaaatatattactattatttatactataaaggaagcta

SEQ ID NO: 23149 - DNA, 96 bp, Aspergillus viridinutans
  misc_feature: 32
tagatgaccagcacatggtcatctacactgatggcagcggctaccagggccgcgtaggcgcctcagctatctgccttcgagccgctgacagcgcgc

SEQ ID NO: 23150 - DNA, 96 bp, Aspergillus viridinutans
  misc_feature: 32
tagaccttaaagaaagataaattaggagttattaaagttattttaataagtttaaattaatattaataattattaatctaacttctactcttaatt

SEQ ID NO: 23151 - DNA, 96 bp, Aspergillus viridinutans
  misc_feature: 32
agtaagtaagaagaattaattaagatagaatctagtaagagagataagctatataagtaagtaagtaaggagaattaattaagatagaatctagta

SEQ ID NO: 23152 - DNA, 96 bp, Aspergillus viridinutans
  misc_feature: 32
cgaatgtcatctagtattgatatcgaatgtcatctagtattgatatcgaatcgatatcaaatgtcatctagtagggatatcgaatgtcatctagta

SEQ ID NO: 23153 - DNA, 96 bp, Aspergillus viridinutans
  misc_feature: 32
gagcacacgtctgaactccagtcacaacgttccatctcgggatcggaagagcacacgtctgaactccagtcacaacgttccatctcgtatgccgta

SEQ ID NO: 23154 - DNA, 96 bp, Aspergillus viridinutans
  misc_feature: 32
agcacacgtctgaactccagtcacaacgttccatctcgtatgccgtagaccggaagagcacacgtctgaactccagtcacaacgttccatctcgta

SEQ ID NO: 23155 - DNA, 96 bp, Aspergillus viridinutans
  misc_feature: 32
acgtctgaactccagtcacaacgttccatctcgtatgccgtctcatggatcggaagagcacacgtctgaactccagtcacaacgttccatctcgta

SEQ ID NO: 23156 - DNA, 96 bp, Aspergillus viridinutans
  misc_feature: 32
acgtctgaactccagtcacaacgttccatctcgtatgccgtatcattgatgggaagagcacacgtctgaactccagtcacaacgttccatctcgta

SEQ ID NO: 23157 - DNA, 96 bp, Aspergillus viridinutans
  misc_feature: 32
taccttcctggtagcctaataatataataatctaataggattaaggatggtttaagaaataatataagaataataatagtaaagatagaagtaagg

SEQ ID NO: 23158 - DNA, 96 bp, Aspergillus viridinutans
  misc_feature: 32
ggttcagcatctctaattagtaggggtaggccctgaagatcctaggtactagggcctttaattagtagtaaagattaatatataggatcctaatta

SEQ ID NO: 23159 - DNA, 96 bp, Aspergillus viridinutans
  misc_feature: 32
taattaagagtagaagttagattaataattattaatattaatttaaacttattaaaataactttaataacttctaatttatctttctttaaggtta

SEQ ID NO: 23160 - DNA, 96 bp, Aspergillus viridinutans
  misc_feature: 32
taatataataaaacttaactactttatactatagtctcctatctctaactactattatactataatattaactcctctctatctattcttattagt

SEQ ID NO: 23161 - DNA, 96 bp, Aspergillus viridinutans
  misc_feature: 32
taagctataattagttatctctttatctatatataaggctaaatatattactattatttatactataaaggaagctatctagcttacctatctcct

SEQ ID NO: 23162 - DNA, 96 bp, Aspergillus viridinutans
  misc_feature: 32
atgcccatggaagaagatgcttagctagttaaattagataagcctattaaatataatcttaaacttaaaaagagatatagagtaggagttagctta

SEQ ID NO: 23163 - DNA, 96 bp, Aspergillus viridinutans
  misc_feature: 32
taaatagtagtaatatataattcttatagaggtatagtagtaggatattaaataccactatacttatatatattctgaatatatagtataagtggt

SEQ ID NO: 23164 - DNA, 96 bp, Aspergillus viridinutans
  misc_feature: 32
atcggaagagcacacgtctgaactccagtcacaacgttccatctcgtatgccgtatcctggatcggaagagcacacgtctgaactccagtcacaac

SEQ ID NO: 23165 - DNA, 96 bp, Aspergillus viridinutans
  misc_feature: 32
gttcagcatctctaattagtaggggtaggccctgaagatcctaggtactagggcctttaattagtagtaaagattaatatataggatcctaattag

SEQ ID NO: 23166 - DNA, 96 bp, Aspergillus viridinutans
  misc_feature: 32
gtctgaactccagtcacaacgttccatctcgtatgccgtctcatggatcggaagagcacacgtctgaactccagtcacaacgttccatctcgtatg

SEQ ID NO: 23167 - DNA, 96 bp, Aspergillus viridinutans
  misc_feature: 32
gtctgaactccagtcacaacgttccatctcgtatgccgtatcattgatgggaagagcacacgtctgaactccagtcacaacgttccatctcgtatg

SEQ ID NO: 23168 - DNA, 96 bp, Aspergillus viridinutans
  misc_feature: 32
gtattgatatcgaatgtcatctagtattgatatcgaatcgatatcaaatgtcatctagtagggatatcgaatgtcatctagtattgatatcgaatc

SEQ ID NO: 23169 - DNA, 96 bp, Aspergillus viridinutans
  misc_feature: 32
ataggcttctaagctataattagttatctctttatctatatataaggctaaatatattactattatttatactataaaggaagctatctagcttac

SEQ ID NO: 23170 - DNA, 96 bp, Aspergillus viridinutans
  misc_feature: 32
cttcatccgcagcctcattccccgccacacccacatgggcggggatccagtgtatcttaatgttctctggaggtagcccgcgcgcccctagggccc

SEQ ID NO: 23171 - DNA, 96 bp, Aspergillus viridinutans
  misc_feature: 32
ccttcctggtagcctaataatataataatctaataggattaaggatggtttaagaaataatataagaataataatagtaaagatagaagtaaggcc

SEQ ID NO: 23172 - DNA, 96 bp, Aspergillus viridinutans
  misc_feature: 32
cacgtctgaactccagtcacaacgttccatctcgtatgccgtagaccggaagagcacacgtctgaactccagtcacaacgttccatctcgtatgcc

SEQ ID NO: 23173 - DNA, 96 bp, Aspergillus viridinutans
  misc_feature: 32
ggcaggaagcgaacgttcagaccaaagctatttcagcgaaaaattgatgtcaaaggcattgactggtggcgctatgagcaagaaatcttagagaag

SEQ ID NO: 23174 - DNA, 96 bp, Aspergillus viridinutans
  misc_feature: 32
ggcagatagctgaggcgcctacgcggccctggtagccgctgccatcagtgtagatgaccatgtgctggtcatctatctctttgtgtatgtcattgt

SEQ ID NO: 23175 - DNA, 96 bp, Aspergillus viridinutans
  misc_feature: 32
gaatactatagtatcgatattcctactagatgatgatttgatatccatactagttgatgattcaatattgaatactatggcattgaattgatatcc

SEQ ID NO: 23176 - DNA, 96 bp, Aspergillus viridinutans
  misc_feature: 32
ggaagagcacacgtctgaactccagtcacaacgttccatctcgtatgccgtctcatgctcggaagagcacacgtctgaactccagtcacaacgttc

SEQ ID NO: 23177 - DNA, 96 bp, Aspergillus viridinutans
  misc_feature: 32
ggaagagcacacgtctgaactccagtcacaacgttccatctcgtatgccgtatcctggatcggaagagcacacgtctgaactccagtcacaacgtt

SEQ ID NO: 23178 - DNA, 96 bp, Aspergillus viridinutans
  misc_feature: 32
gatcggaagagcacacgtctgaactccagtcacaacgttccatctcgtatgccgtcttctgcttgaaaaaaaaaagaactccagtcacaacgttcc

SEQ ID NO: 23179 - DNA, 96 bp, Aspergillus viridinutans
  misc_feature: 32
aagagcacacgtctgaactccagtcacaacgttccatctcgtatgccgtatcctggatcggaagagcacacgtctgaactccagtcacaacgttcc

SEQ ID NO: 23180 - DNA, 96 bp, Aspergillus viridinutans
  misc_feature: 32
gaagagcacacgtctgaactccagtcacaacgttccatctcgtatgccgtctcatgctcggaagagcacacgtctgaactccagtcacaacgttcc

SEQ ID NO: 23181 - DNA, 96 bp, Aspergillus viridinutans
  misc_feature: 32
ctgtctattcttgatagggcaggaagcgaacgttcagaccaaagctatttcagcgaaaaattgatgtcaaaggcattgactggtggcgctatgagc

SEQ ID NO: 23182 - DNA, 96 bp, Aspergillus viridinutans
  misc_feature: 32
accttcctggtagcctaataatataataatctaataggattaaggatggtttaagaaataatataagaataataatagtaaagatagaagtaaggc

SEQ ID NO: 23183 - DNA, 96 bp, Aspergillus viridinutans
  misc_feature: 32
gcctatcttataggcttctaagctataattagttatctctttatctatatataaggctaaatatattactattatttatactataaaggaagctat

SEQ ID NO: 23184 - DNA, 96 bp, Aspergillus viridinutans
  misc_feature: 32
acacgtctgaactccagtcacaacgttccatctcgtatgccgtagaccggaagagcacacgtctgaactccagtcacaacgttccatctcgtatgc

SEQ ID NO: 23185 - DNA, 96 bp, Aspergillus viridinutans
  misc_feature: 32
cagaccaaagctatttcagcgaaaaattgatgtcaaaggcattgactggtggcgctatgagcaagaaatcttagagaagaagctattcccttatgc

SEQ ID NO: 23186 - DNA, 96 bp, Aspergillus viridinutans
  misc_feature: 32
gcagatagctgaggcgcctacgcggccctggtagccgctgccatcagtgtagatgaccatgtgctggtcatctatctctttgtgtatgtcattgtg

SEQ ID NO: 23187 - DNA, 96 bp, Aspergillus viridinutans
  misc_feature: 32
gcacacgtctgaactccagtcacaacgttccatctcgtatgccgtctcatggatcggaagagcacacgtctgaactccagtcacaacgttccatct

SEQ ID NO: 23188 - DNA, 96 bp, Aspergillus viridinutans
  misc_feature: 32
gcacacgtctgaactccagtcacaacgttccatctcgtatgccgtatcattgatgggaagagcacacgtctgaactccagtcacaacgttccatct

SEQ ID NO: 23189 - DNA, 96 bp, Aspergillus viridinutans
  misc_feature: 32
gcacacgtctgaactccagtcacaacgttccatctcgtatgccgtatcattgatcggaaaagcacacgtctgaactccagtcacaacgttccatct

SEQ ID NO: 23190 - DNA, 96 bp, Aspergillus viridinutans
  misc_feature: 32
gcacacgtctgaactccagtcacaacgttccatctcgtatgccgtagaccggaagagcacacgtctgaactccagtcacaacgttccatctcgtat

SEQ ID NO: 23191 - DNA, 96 bp, Aspergillus viridinutans
  misc_feature: 32
aaagattatactactataatctaacttaagttagatttttatttataattatataagttataattaaataaattaagaattaagattatattaatc

SEQ ID NO: 23192 - DNA, 96 bp, Aspergillus viridinutans
  misc_feature: 32
gatgggatggatgggatggatgggatggatgggatggatgggatggatgggatggatgggatggatgggatggatgggatggatgggatggatggg

SEQ ID NO: 23193 - DNA, 96 bp, Aspergillus viridinutans
  misc_feature: 32
agcacacgtctgaactccagtcacaacgttccatctcgtatgccgtatcattgatcggaaaagcacacgtctgaactccagtcacaacgttccatc

SEQ ID NO: 23194 - DNA, 96 bp, Aspergillus viridinutans
  misc_feature: 32
gatggaacgttgtgactggagttcagacgtgtgctcttccgatgatcggaagagcgtcgtgtagggaaagagtgtagtactccgtgtagatctcgg

SEQ ID NO: 23195 - DNA, 96 bp, Aspergillus viridinutans
  misc_feature: 32
agcacacgtctgaactccagtcacaacgttccatctcgtatgccgtctcatggatcggaagagcacacgtctgaactccagtcacaacgttccatc

SEQ ID NO: 23196 - DNA, 96 bp, Aspergillus viridinutans
  misc_feature: 32
gatggaacgttgtgactggagttcagacgtgtgctcttccgatcagatcggaagagcgtcgtgtagggaaagagtgtagtactccgtgtagatctc

SEQ ID NO: 23197 - DNA, 96 bp, Aspergillus viridinutans
  misc_feature: 32
agcacacgtctgaactccagtcacaacgttccatctcgtatgccgtatcattgatgggaagagcacacgtctgaactccagtcacaacgttccatc

SEQ ID NO: 23198 - DNA, 96 bp, Aspergillus viridinutans
  misc_feature: 32
caggatattgattcaataccatagtatttgatatcgaatcatcatctagtcaggatatcgattcaataccatagtatttgatattgaatcatcatc

SEQ ID NO: 23199 - DNA, 96 bp, Aspergillus viridinutans
  misc_feature: 32
cctatcttataggcttctaagctataattagttatctctttatctatatataaggctaaatatattactattatttatactataaaggaagctatc

SEQ ID NO: 23200 - DNA, 96 bp, Aspergillus viridinutans
  misc_feature: 32
gatactctaaaagattggtcaagacattgggaagactgagactgagactgagactgagaaagagagaagggaagtggaggaagagaggacgagaag

SEQ ID NO: 23201 - DNA, 96 bp, Aspergillus viridinutans
  misc_feature: 32
gagcacacgtctgaactccagtcacaacgttccatctcgtatgccgtctcatggatcggaagagcacacgtctgaactccagtcacaacgttccat

SEQ ID NO: 23202 - DNA, 96 bp, Aspergillus viridinutans
  misc_feature: 32
gagcacacgtctgaactccagtcacaacgttccatctcgtatgccgtatcattgatcggaaaagcacacgtctgaactccagtcacaacgttccat

SEQ ID NO: 23203 - DNA, 96 bp, Aspergillus viridinutans
  misc_feature: 32
gagcacacgtctgaactccagtcacaacgttccatctcgtatgccgtagaccggaagagcacacgtctgaactccagtcacaacgttccatctcgt

SEQ ID NO: 23204 - DNA, 96 bp, Aspergillus viridinutans
  misc_feature: 32
gagatggaacgttgtgactggagttcagacgtgtgctcttccgatgatcggaagagcgtcgtgtagggaaagagtgtagtactccgtgtagatctc

SEQ ID NO: 23205 - DNA, 96 bp, Aspergillus viridinutans
  misc_feature: 32
cacacgtctgaactccagtcacaacgttccatctcgtatgccgtctcatggatcggaagagcacacgtctgaactccagtcacaacgttccatctc

SEQ ID NO: 23206 - DNA, 96 bp, Aspergillus viridinutans
  misc_feature: 32
cacacgtctgaactccagtcacaacgttccatctcgtatgccgtatcattgatgggaagagcacacgtctgaactccagtcacaacgttccatctc

SEQ ID NO: 23207 - DNA, 96 bp, Aspergillus viridinutans
  misc_feature: 32
atataatctatattaatatagctaataataatacctagcttatatataatatcttttatattataaggcttatagataattctaatatctagggtc

SEQ ID NO: 23208 - DNA, 96 bp, Aspergillus viridinutans
  misc_feature: 32
gaatgggaaacgcggaaagcatatgtactccccccatgggagccaccccttctttgcacgattaaggaccatgaagccgcactaataacccacaat

SEQ ID NO: 23209 - DNA, 96 bp, Aspergillus viridinutans
  misc_feature: 32
gaatcaatattgaatgtcatctagtagggatatcgaatatcatctagtattgatattgaatcaatatcgaatcgatatcaaatgtcatctagtagg

SEQ ID NO: 23210 - DNA, 96 bp, Aspergillus viridinutans
  misc_feature: 32
gaaggcagatagctgaggcgcctacgcggccctggtagccgctgccatcagtgtagatgaccatgtgctggtcatctatctctttgtgtatgtcat

SEQ ID NO: 23211 - DNA, 96 bp, Aspergillus viridinutans
  misc_feature: 32
gaagagcacacgtctgaactccagtcacaacgttccatctcgtatgccgtatcctggatcggaagagcacacgtctgaactccagtcacaacgttc

SEQ ID NO: 23212 - DNA, 96 bp, Aspergillus viridinutans
  misc_feature: 32
gaagagcacacgtctgaactccagtcacaacgttccatctcgtatgccgtatcattacggcatacgagatggaacgttgtgactggagttcagacg

SEQ ID NO: 23213 - DNA, 96 bp, Aspergillus viridinutans
  misc_feature: 32
gaactccagtcacaacgttccatctcgtatgccgtgatcggaagagcacacgtctgaactccagtcacaacgttccatctcgtatgccgtatcatg

SEQ ID NO: 23214 - DNA, 96 bp, Aspergillus viridinutans
  misc_feature: 32
gaactccagtcacaacgttccatctcgtatgccgtatcattgatcggaagagcacacgtctgaactcccgtcacaacgttccatctcgtatgccgt

SEQ ID NO: 23215 - DNA, 96 bp, Aspergillus viridinutans
  misc_feature: 32
cttcctggtagcctaataatataataatctaataggattaaggatggtttaagaaataatataagaataataatagtaaagatagaagtaaggcct

SEQ ID NO: 23216 - DNA, 96 bp, Aspergillus viridinutans
  misc_feature: 32
cttatatttaatatatcttaataactttagtatatatactatttttaataatttaattctctaatttatactttctctaactactttactaaatct

SEQ ID NO: 23217 - DNA, 96 bp, Aspergillus viridinutans
  misc_feature: 32
ctccagtcacaacgttccatctcgtatgccgtagatcggaagagcacacgtctgaactccagtcacaacgttccagctcgtatgccgtcttctgct

SEQ ID NO: 23218 - DNA, 96 bp, Aspergillus viridinutans
  misc_feature: 32
ctaaggcctaccttcctggtagcctaataatataataatctaataggattaaggatggtttaagaaataatataagaataataatagtaaagatag

SEQ ID NO: 23219 - DNA, 96 bp, Aspergillus viridinutans
  misc_feature: 32
ctatcttataggcttctaagctataattagttatctctttatctatatataaggctaaatatattactattatttatactataaaggaagctatct

SEQ ID NO: 23220 - DNA, 96 bp, Aspergillus viridinutans
  misc_feature: 32
ctatcttataggcttctaagctataattagttatctctttatctatatataagactaaatatattactattattcatactataaaggaagctatct

SEQ ID NO: 23221 - DNA, 96 bp, Aspergillus viridinutans
  misc_feature: 32
acctagatattaagaaaagatagattaagctatcttaatatacttatctttaatatcttattaatatatttaatctatatttagttaaaactatag

SEQ ID NO: 23222 - DNA, 96 bp, Aspergillus viridinutans
  misc_feature: 32
cctattattaaatataaagatatatctagtagttaaatagcatatattaatacatcctatataatctatattaatatagctaataataatgcctag

SEQ ID NO: 23223 - DNA, 96 bp, Aspergillus viridinutans
  misc_feature: 32
atcttataggcttctaagctataattagttatctctttatctatatataaggctaaatatattactattatttatactataaaggaagctatctag

SEQ ID NO: 23224 - DNA, 96 bp, Aspergillus viridinutans
  misc_feature: 32
cctcctcgttcctggtcctgctccgacggctcccccagttctgcatggcggaactggccgagcaggcctgtttgatgcatgaattcggcgacgtag

SEQ ID NO: 23225 - DNA, 96 bp, Aspergillus viridinutans
  misc_feature: 32
cgtctgaactccagtcacaacgttccatctcgtatgccgtctcatggatcggaagagcacacgtctgaactccagtcacaacgttccatctcgtat

SEQ ID NO: 23226 - DNA, 96 bp, Aspergillus viridinutans
  misc_feature: 32
cgtctgaactccagtcacaacgttccatctcgtatgccgtatcattgatgggaagagcacacgtctgaactccagtcacaacgttccatctcgtat

SEQ ID NO: 23227 - DNA, 96 bp, Aspergillus viridinutans
  misc_feature: 32
acgtctgaactccagtcacaacgttccatctcgtatgccgtagaccggaagagcacacgtctgaactccagtcacaacgttccatctcgtatgccg

SEQ ID NO: 23228 - DNA, 96 bp, Aspergillus viridinutans
  misc_feature: 32
cggaagagcacacgtctgaactccagtcacaacgttccatctcgtatgccgtcttctgcttgaaaaaaacacacgtctgaactccagtcacaacgt

SEQ ID NO: 23229 - DNA, 96 bp, Aspergillus viridinutans
  misc_feature: 32
cggaagagcacacgtctgaactccagtcacaacgttccatctcgtatgccgtctcatgctcggaagagcacacgtctgaactccagtcacaacgtt

SEQ ID NO: 23230 - DNA, 96 bp, Aspergillus viridinutans
  misc_feature: 32
cggaagagcacacgtctgaactccagtcacaacgttccatctcgtatgccgtatcctggatcggaagagcacacgtctgaactccagtcacaacgt

SEQ ID NO: 23231 - DNA, 96 bp, Aspergillus viridinutans
  misc_feature: 32
agatgaccagcacatggtcatctacactgatggcagcggctaccagggccgcgtaggcgcctcagctatctgccttcgagccgctgacagcgcgcg

SEQ ID NO: 23232 - DNA, 96 bp, Aspergillus viridinutans
  misc_feature: 32
atagtagggatattgaatgattcgaatcgccatatggtacctatatcgtatagatattgaatgattcaaatcatcatatagtcgggattcgaatcg

SEQ ID NO: 23233 - DNA, 96 bp, Aspergillus viridinutans
  misc_feature: 32
acacgtctgaactccagtcacaacgttccatctcgtatgccgtatcattgatcggaaaagcacacgtctgaactccagtcacaacgttccatctcg

SEQ ID NO: 23234 - DNA, 96 bp, Aspergillus viridinutans
  misc_feature: 32
acacgtctgaactccagtcacaacgttccatctcgtatgccgtctcatggatcggaagagcacacgtctgaactccagtcacaacgttccatctcg

SEQ ID NO: 23235 - DNA, 96 bp, Aspergillus viridinutans
  misc_feature: 32
acacgtctgaactccagtcacaacgttccatctcgtatgccgtatcattgatgggaagagcacacgtctgaactccagtcacaacgttccatctcg

SEQ ID NO: 23236 - DNA, 96 bp, Aspergillus viridinutans
  misc_feature: 32
agatggaacgttgtgactggagttcagacgtgtgctcttccgatgatcggaagagcgtcgtgtagggaaagagtgtagtactccgtgtagatctcg

SEQ ID NO: 23237 - DNA, 96 bp, Aspergillus viridinutans
  misc_feature: 32
cgaattcttatatagtagggatattgaattgaatagtagtaatatataattcttatagaggtatagtaataggatattaaataccactatacatat

SEQ ID NO: 23238 - DNA, 96 bp, Aspergillus viridinutans
  misc_feature: 32
atcctgactagatgatgattcgatattcatactaggtgatgattcgatatcgaatactaaggtattgaatcaatatcctgactaggtgatgattcg

SEQ ID NO: 23239 - DNA, 96 bp, Aspergillus viridinutans
  misc_feature: 32
atggaacgttgtgactggagttcagacgtgtgctcttccgatagatcggaagagcgtcgtgtagggaaagagtgtagtactccgtgtagatctcgg

SEQ ID NO: 23240 - DNA, 96 bp, Aspergillus viridinutans
  misc_feature: 32
aggcgcgcgcggccagaggggcaggcaggcaggcaggcaggcaggcaaagtgggggggggacgcgcggggcccaggtcgcgggggggggggggggg

SEQ ID NO: 23241 - DNA, 96 bp, Aspergillus viridinutans
  misc_feature: 32
agtcacaacgttccatctcgtatgccgtatcattagatcggaagagcacacgtctgaactccagtcacaacgttccatctcgtatgccgtatcatg

SEQ ID NO: 23242 - DNA, 96 bp, Aspergillus viridinutans
  misc_feature: 32
cacacgtctgaactccagtcacaacgttccatctcgtatgccgtagaccggaagagcacacgtctgaactccagtcacaacgttccatctcgtatg

SEQ ID NO: 23243 - DNA, 96 bp, Aspergillus viridinutans
  misc_feature: 32
cagcactgcagctgagcaatcaggcctatcaaaatctactgtctcccgcgtacggaaacgcgccaaacagcatggatggaagccaaatcagcctat

SEQ ID NO: 23244 - DNA, 96 bp, Aspergillus viridinutans
  misc_feature: 32
ataaatttaactctttacctctctactaaaaaggtaaaatagaataaaaaatggaataaatggagtaaacggccgaagatattctgcaaacttctg

SEQ ID NO: 23245 - DNA, 96 bp, Aspergillus viridinutans
  misc_feature: 32
cacgtctgaactccagtcacaacgttccatctcgtatgccgtctcatggatcggaagagcacacgtctgaactccagtcacaacgttccatctcgt

SEQ ID NO: 23246 - DNA, 96 bp, Aspergillus viridinutans
  misc_feature: 32
cacgtctgaactccagtcacaacgttccatctcgtatgccgtatcattgatgggaagagcacacgtctgaactccagtcacaacgttccatctcgt

SEQ ID NO: 23247 - DNA, 96 bp, Aspergillus viridinutans
  misc_feature: 32
cacgtctgaactccagtcacaacgttccatctcgtatgccgtatcattgatcggaaaagcacacgtctgaactccagtcacaacgttccatctcgt

SEQ ID NO: 23248 - DNA, 96 bp, Aspergillus viridinutans
  misc_feature: 32
aattctctcagcactgcagctgagcaatcaggcctatcaaaatctactgtctcccgcgtacggaaacgcgccaaacagcatggatggaagccaaat

SEQ ID NO: 23249 - DNA, 96 bp, Aspergillus viridinutans
  misc_feature: 32
ataaataaagatattaataaagctatttaatttagataaagaattattaaatatatataagaaactatttaataaagggaagtaagacctataaat

SEQ ID NO: 23250 - DNA, 96 bp, Aspergillus viridinutans
  misc_feature: 32
atagctaataataatacctagcttatatataatatcttttatattataaggcttatagataattctaatatctagggtctaatagaagaattaaat

SEQ ID NO: 23251 - DNA, 96 bp, Aspergillus viridinutans
  misc_feature: 32
atcctgactagttgatgattcgatatcgaatactaaggtatcaagttgatatcctgactagttgatgattcaatattgaatactatggtattgaat

SEQ ID NO: 23252 - DNA, 96 bp, Aspergillus viridinutans
  misc_feature: 32
atggatgggatggatgggatggatgggatggatgggatggatgggatggatgggatggatgggatggatgggatggatgggatggatgggatggat

SEQ ID NO: 23253 - DNA, 96 bp, Aspergillus viridinutans
  misc_feature: 32
atcaatatcgaattcttatatagtagggatattgaattgaatagtagtaatatataattcttatagaggtatagtaataggatattaaataccact

SEQ ID NO: 23254 - DNA, 96 bp, Aspergillus viridinutans
  misc_feature: 32
atattagctattagatatcttattatctatatctattatataagtataattataattattagattaattagataaagacttcttattaggcttctt

SEQ ID NO: 23255 - DNA, 96 bp, Aspergillus viridinutans
  misc_feature: 32
atatagcttatctctcttactagattctatcttaattaattcttcttacttacttacttatatagcttatctctcttactagattctatcttaatt

SEQ ID NO: 23256 - DNA, 96 bp, Aspergillus viridinutans
  misc_feature: 32
aggcctatcttataggcttctaagctataattagttatctctttatctatatataaggctaaatatattactattatttatactataaaggaagct

SEQ ID NO: 23257 - DNA, 96 bp, Aspergillus viridinutans
  misc_feature: 32
aatactatagtatcgatattcctactagatgatgatttgatatccatactagttgatgattcaatattgaatactatggcattgaattgatatcct

SEQ ID NO: 23258 - DNA, 96 bp, Aspergillus viridinutans
  misc_feature: 32
aagattatactactataatctaacttaagttagatttttatttataattatataagttataattaaataaattaagaattaagattatattaatct

SEQ ID NO: 23259 - DNA, 96 bp, Aspergillus viridinutans
  misc_feature: 32
agatggaacgttgtgactggagttcagacgtgtgctcttccgatcagatcggaagagcgtcgtgtagggaaagagtgtagtactccgtgtagatct

SEQ ID NO: 23260 - DNA, 96 bp, Aspergillus viridinutans
  misc_feature: 32
aagtaagtaagaagaattaattaagatagaatctagtaagagagataagctatataagtaagtaagtaaggagaattaattaagatagaatctagt

SEQ ID NO: 23261 - DNA, 96 bp, Aspergillus viridinutans
  misc_feature: 32
acatgacgatgtaacgaccttccatttctctgtctgtctctgtctctgtctctcatctctcatcatcttgtgtgtctcattgatttcctttcactt

SEQ ID NO: 23262 - DNA, 96 bp, Aspergillus viridinutans
  misc_feature: 32
aaggcagatagctgaggcgcctacgcggccctggtagccgctgccatcagtgtagatgaccatgtgctggtcatctatctctttgtgtatgtcatt

SEQ ID NO: 23263 - DNA, 96 bp, Aspergillus viridinutans
  misc_feature: 31
gatcagatcggaagagcgtcgtgtagggaaagagtgtagtactccgtgtagatctcggtggtcgccgtatcattaaaaaaaaaaaaaaaaaaaaaa

SEQ ID NO: 23264 - DNA, 96 bp, Aspergillus viridinutans
  misc_feature: 31
ctcttccgatcagatcggaagagcgtcgtgtagggaaagagtgtagtactccgtgtagatctcggtggtcgccggatcattaaaaaaaaaaaaaaa

SEQ ID NO: 23265 - DNA, 96 bp, Aspergillus viridinutans
  misc_feature: 31
gatcggaagagcgtcgtgtagggaaagagtgtagtactccgtgtagatctcggtggtcgccgtatcattaaaaaaaaaaaaaaaaaaaaaacaaaa

SEQ ID NO: 23266 - DNA, 96 bp, Aspergillus viridinutans
  misc_feature: 31
tcacaacgttccatctcgtatgccgtcttctgcttgaaaaaaaaaaagaactccagtcacaacgttccatctcgtatgccgtcttctgcttgaaaa

SEQ ID NO: 23267 - DNA, 96 bp, Aspergillus viridinutans
  misc_feature: 31
gatcggaagagcacacgtctgaactccagtcacaacgttccatctcgtatgccgtcttctgcttgaaaaaaaaaaaaaaaaaaaaaaaaaaaacaa

SEQ ID NO: 23268 - DNA, 96 bp, Aspergillus viridinutans
  misc_feature: 31
agaatgggaaacgcggaaagcatatgtactccccccatgggagccaccccttctttgcacgattaaggaccatgaagccgcactaataacccacaa

SEQ ID NO: 23269 - DNA, 96 bp, Aspergillus viridinutans
  misc_feature: 31
atcggaagagcacacgtctgaactccagtcacaacgttccatctcgtatgccgtatcattagagcggaagagcacacgtctgaactccagtcacaa

SEQ ID NO: 23270 - DNA, 96 bp, Aspergillus viridinutans
  misc_feature: 31
ttgctataagcatagaattaagtattataagctagatctatagtaggctagctattagtattaatctacatggggtgtacactattaaagctaata

SEQ ID NO: 23271 - DNA, 96 bp, Aspergillus viridinutans
  misc_feature: 31
ttcttatatagtagggatattgaattgaatagtagtaatatataattcttatagaggtatagtaataggatattaaataccactatacatatatat

SEQ ID NO: 23272 - DNA, 96 bp, Aspergillus viridinutans
  misc_feature: 31
ttctctcagcactgcagctgagcaatcaggcctatcaaaatctactgtctcccgcgtacggaaacgcgccaaacagcatggatggaagccaaatca

SEQ ID NO: 23273 - DNA, 96 bp, Aspergillus viridinutans
  misc_feature: 31
tagtaatatatgaataatataattattcaaataattcaaattcctactatatggcgattcaaatcatttgatatccttactatatgacgattcgaa

SEQ ID NO: 23274 - DNA, 96 bp, Aspergillus viridinutans
  misc_feature: 31
aataggcctatcttataggcttctaagctataattagttatctctttatctatatataaggctaaatatattactattatttatactataaaggaa

SEQ ID NO: 23275 - DNA, 96 bp, Aspergillus viridinutans
  misc_feature: 31
ttcctggtagcctaataatataataatctaataggattaaggatggtttaagaaataatataagaataataatagtaaagatagaagtaaggccta

SEQ ID NO: 23276 - DNA, 96 bp, Aspergillus viridinutans
  misc_feature: 31
agtcacaacgttccatctcgtatgccgtgatcggaagagcacacgtctgaactccagtcacaacgttccatctcgtatgccgtatcatgatcggaa

SEQ ID NO: 23277 - DNA, 96 bp, Aspergillus viridinutans
  misc_feature: 31
ttcatccgcagcctcattccccgccacacccacatgggcggggatccagtgtatcttaatgttctctggaggtagcccgcgcgcccctagggccct

SEQ ID NO: 23278 - DNA, 96 bp, Aspergillus viridinutans
  misc_feature: 31
gtaaacccttattatctttaagatctagattaaaccttactaacctctctggacatctctagatggcgctattcctggaagcctcgccttactgaa

SEQ ID NO: 23279 - DNA, 96 bp, Aspergillus viridinutans
  misc_feature: 31
ttattctagccttatttcttaaggtttttatctttattttattagattttattactcttatagttattttattaagactacttattaatatcatgc

SEQ ID NO: 23280 - DNA, 96 bp, Aspergillus viridinutans
  misc_feature: 31
ttatatagcttatctctcttactagattctatcttaattaattcttcttacttacttacttatatagcttatctctcttactagattctatcttaa

SEQ ID NO: 23281 - DNA, 96 bp, Aspergillus viridinutans
  misc_feature: 31
gcactgcagctgagcaatcaggcctatcaaaatctactgtctcccgcgtacggaaacgcgccaaacagcatggatggaagccaaatcagcctataa

SEQ ID NO: 23282 - DNA, 96 bp, Aspergillus viridinutans
  misc_feature: 31
gaaagtataaattagagaattaaattattaaaaatagtatatatactaaagttattaagatatattaaatataagaattaattaatttagctataa

SEQ ID NO: 23283 - DNA, 96 bp, Aspergillus viridinutans
  misc_feature: 31
agaagaacatcctattaatatataaatataaagaatagtagatagaggataggattatatattatattatctactactacttatactagcttataa

SEQ ID NO: 23284 - DNA, 96 bp, Aspergillus viridinutans
  misc_feature: 31
ttagaccttaaagaaagataaattaggagttattaaagttattttaataagtttaaattaatattaataattattaatctaacttctactcttaat

SEQ ID NO: 23285 - DNA, 96 bp, Aspergillus viridinutans
  misc_feature: 31
ttaatatcctattactatacctctataagaattatatattactactattcaattcaatatccctactatataagaattcgatattgatactattca

SEQ ID NO: 23286 - DNA, 96 bp, Aspergillus viridinutans
  misc_feature: 31
ttaaatagtagtaatatataattcttatagaggtatagtagtaggatattaaataccactatacttatatatattctgaatatatagtataagtgg

SEQ ID NO: 23287 - DNA, 96 bp, Aspergillus viridinutans
  misc_feature: 31
aagaatgggaaacgcggaaagcatatgtactccccccatgggagccaccccttctttgcacgattaaggaccatgaagccgcactaataacccaca

SEQ ID NO: 23288 - DNA, 96 bp, Aspergillus viridinutans
  misc_feature: 31
tgtcatctagtagggatatcgaatgtcatctagtattgatatcgaatcaatatcgaatgtcatctagtagggatatcgaatgtcatctagtatcga

SEQ ID NO: 23289 - DNA, 96 bp, Aspergillus viridinutans
  misc_feature: 31
tgtatctgcaactaaacaagagaaacgatcttaccatccagatactgtccagcaaagacacaagaattattcagatttcatgttttggggggctat

SEQ ID NO: 23290 - DNA, 96 bp, Aspergillus viridinutans
  misc_feature: 31
ggaagaatgggaaacgcggaaagcatatgtactccccccatgggagccaccccttctttgcacgattaaggaccatgaagccgcactaataaccca

SEQ ID NO: 23291 - DNA, 96 bp, Aspergillus viridinutans
  misc_feature: 31
tggatgggatggatgggatggatgggatggatgggatggatgggatggatgggatggatgggatggatgggatggatgggatggatgggatggatg

SEQ ID NO: 23292 - DNA, 96 bp, Aspergillus viridinutans
  misc_feature: 31
tgcggctgcgcctccgcctccaggactttgcggtacaccgggaactccagtagctgaagtcactggcagagttgttgtaggtcctgcggctgcgcc

SEQ ID NO: 23293 - DNA, 96 bp, Aspergillus viridinutans
  misc_feature: 31
tgatatcgaatgtcatctagtattgatatcgaatcgatatcaaatgtcatctagtagggatatcgaatgtcatctagtattgatatcgaatcaata

SEQ ID NO: 23294 - DNA, 96 bp, Aspergillus viridinutans
  misc_feature: 31
tgaactccagtcacaacgttccatctcgtatgccgtcttctgcttgaaaaaaacacacgtctgaactccagtcacaacgttccatctcgtatgccg

SEQ ID NO: 23295 - DNA, 96 bp, Aspergillus viridinutans
  misc_feature: 31
tgaactccagtcacaacgttccatctcgtatgccgtctcatggatcggaagagcacacgtctgaactccagtcacaacgttccatctcgtatgccg

SEQ ID NO: 23296 - DNA, 96 bp, Aspergillus viridinutans
  misc_feature: 31
tgaactccagtcacaacgttccatctcgtatgccgtatccgatcggaagagcacacgtctgaactccagtcacaacgttccatctcgtatgccgtc

SEQ ID NO: 23297 - DNA, 96 bp, Aspergillus viridinutans
  misc_feature: 31
tgaactccagtcacaacgttccatctcgtatgccgtatcattgatgggaagagcacacgtctgaactccagtcacaacgttccatctcgtatgccg

SEQ ID NO: 23298 - DNA, 96 bp, Aspergillus viridinutans
  misc_feature: 31
atcggaagagcgtcgtgtagggaaagagtgtagtactccgtgtagatctcggtggtcgccgtatcattaaaaaaaaaaaagacgagtagggaaaga

SEQ ID NO: 23299 - DNA, 96 bp, Aspergillus viridinutans
  misc_feature: 31
tcacaacgttccatctcgtatgccgtgatcggaagagcacacgtctgaactccagtcacaacgttccatctcgtatgccgtatcatgatcggaaga

SEQ ID NO: 23300 - DNA, 96 bp, Aspergillus viridinutans
  misc_feature: 31
tctgatagtttcccccggagtccctccacatcttgtagcttagctatcatcttcctgcgggcctctacatgcagcgaacattgtaggagaacatgt

SEQ ID NO: 23301 - DNA, 96 bp, Aspergillus viridinutans
  misc_feature: 31
tctgaactccagtcacaacgttccatctcgtatgccgtctcatggatcggaagagcacacgtctgaactccagtcacaacgttccatctcgtatgc

SEQ ID NO: 23302 - DNA, 96 bp, Aspergillus viridinutans
  misc_feature: 31
tctgaactccagtcacaacgttccatctcgtatgccgtatcattgatcggaaaagcacacgtctgaactccagtcacaacgttccatctcgtatgc

SEQ ID NO: 23303 - DNA, 96 bp, Aspergillus viridinutans
  misc_feature: 31
tctgaactccagtcacaacgttccatctcggtggtcggatcggaagagcacacgtctgaactccagtcacaacgttccatctcgtatgccgtcttc

SEQ ID NO: 23304 - DNA, 96 bp, Aspergillus viridinutans
  misc_feature: 31
tctctcagcactgcagctgagcaatcaggcctatcaaaatctactgtctcccgcgtacggaaacgcgccaaacagcatggatggaagccaaatcag

SEQ ID NO: 23305 - DNA, 96 bp, Aspergillus viridinutans
  misc_feature: 31
tctataaagattatactactataatctaacttaagttagatttttatttataattatataagttataattaaataaattaagaattaagattatat

SEQ ID NO: 23306 - DNA, 96 bp, Aspergillus viridinutans
  misc_feature: 31
tctacacggagtactacactctttccctacacgacgctcttccgatcatcggaagagcacacgtctgaactccagtcacaacgttccatctcgtat

SEQ ID NO: 23307 - DNA, 96 bp, Aspergillus viridinutans
  misc_feature: 31
tctaattaagagtagaagttagattaataattattaatattaatttaaacttattaaaataactttaataacttctaatttatctttctttaaggt

SEQ ID NO: 23308 - DNA, 96 bp, Aspergillus viridinutans
  misc_feature: 31
tcggaagagcgtcgtgtagggaaagagtgtagtactccgtgtagatctcggtggtcgccgtatcattaaaaaaaaaaaagacgagtagggaaagag

SEQ ID NO: 23309 - DNA, 96 bp, Aspergillus viridinutans
  misc_feature: 31
tcggaagagcacacgtctgaactccagtcacaacgttccatctcgtatgccgtcttctgcttgaaaaaaaaaagaactccagtcacaacgttccat

SEQ ID NO: 23310 - DNA, 96 bp, Aspergillus viridinutans
  misc_feature: 31
tcggaagagcacacgtctgaactccagtcacaacgttccatctcgtatgccgtaatcggaagagcacacgtctgaactccagtcacaacgttccat

SEQ ID NO: 23311 - DNA, 96 bp, Aspergillus viridinutans
  misc_feature: 31
tcgactcaataccttagtatttgatatcgaatcatcaactagtcaggatatcgactcaataccttagtattcgatatcgaatcatcacctagtatg

SEQ ID NO: 23312 - DNA, 96 bp, Aspergillus viridinutans
  misc_feature: 31
gctgcggtctcccctgcgccatcttagcgcgttaaacacctatcccacctcattctatgtagtcattccaaacgtagtgcgattccgcgcctagga

SEQ ID NO: 23313 - DNA, 96 bp, Aspergillus viridinutans
  misc_feature: 31
cagtcacaacgttccatctcgtatgccgtgatcggaagagcacacgtctgaactccagtcacaacgttccatctcgtatgccgtatcatgatcgga

SEQ ID NO: 23314 - DNA, 96 bp, Aspergillus viridinutans
  misc_feature: 31
gatggatgggatggatgggatggatgggatggatgggatggatgggatggatgggatggatgggatggatgggatggatgggatggatgggatgga

SEQ ID NO: 23315 - DNA, 96 bp, Aspergillus viridinutans
  misc_feature: 31
tccagtcacaacgttccatctcgtatgccgtgatcggaagagcacacgtctgaactccagtcacaacgttccatctcgtatgccgtatcatgatcg

SEQ ID NO: 23316 - DNA, 96 bp, Aspergillus viridinutans
  misc_feature: 31
tccagtcacaacgttccatctcgtatgccgtatcagatcggaagagcacacgtctgaactccagtcacaacgttccatctcgtatgccgtatcatg

SEQ ID NO: 23317 - DNA, 96 bp, Aspergillus viridinutans
  misc_feature: 31
tcacaacgttccatctcgtatgccgtatcattgatcggaagaacacacgtctgaactccagtcacaacgttccatctcgtatgccgtcttctgctt

SEQ ID NO: 23318 - DNA, 96 bp, Aspergillus viridinutans
  misc_feature: 31
tcaaatcatcacctagtatggatatcgattcgataccttagtattcgatattgaatcatcaactagtatggatattgattcgataccatagtattc

SEQ ID NO: 23319 - DNA, 96 bp, Aspergillus viridinutans
  misc_feature: 31
atctatatcctccttgtatatatatacatgtagctaacataaaatacacctgtaattttagtaattttaacttctagatattaagagagagaaata

SEQ ID NO: 23320 - DNA, 96 bp, Aspergillus viridinutans
  misc_feature: 31
tatttaatatcctattactatacctctataagaattatatattactactattcaattcaatatccctactatataagaattcgatattgatactat

SEQ ID NO: 23321 - DNA, 96 bp, Aspergillus viridinutans
  misc_feature: 31
tattatatgtaagctaggcattattattagctatattaatatagattatataggatgtattaatatatgctatttaactactagatatatctttat

SEQ ID NO: 23322 - DNA, 96 bp, Aspergillus viridinutans
  misc_feature: 31
tattagctattagatatcttattatctatatctattatataagtataattataattattagattaattagataaagacttcttattaggcttctta

SEQ ID NO: 23323 - DNA, 96 bp, Aspergillus viridinutans
  misc_feature: 31
tatggtattgaatcaatatcctgactagatgatgattcgatattcatactaggtgatgattcgatatcgaatactaaggtattgaatcaatatcct

SEQ ID NO: 23324 - DNA, 96 bp, Aspergillus viridinutans
  misc_feature: 31
cctaaggcctaccttcctggtagcctaataatataataatctaataggattaaggatggtttaagaaataatataagaataataatagtaaagata

SEQ ID NO: 23325 - DNA, 96 bp, Aspergillus viridinutans
  misc_feature: 31
tatcttataggcttctaagctataattagttatctctttatctatatataagactaaatatattactattattcatactataaaggaagctatcta

SEQ ID NO: 23326 - DNA, 96 bp, Aspergillus viridinutans
  misc_feature: 31
tatctgcaactaaacaagagaaacgatcttaccatccagatactgtccagcaaagacacaagaattattcagatttcatgttttggggggctatta

SEQ ID NO: 23327 - DNA, 96 bp, Aspergillus viridinutans
  misc_feature: 31
tatctaattaagagtagaagttagattaataattattaatattaatttaaacttattaaaataactttaataacttctaatttatctttctttaag

SEQ ID NO: 23328 - DNA, 96 bp, Aspergillus viridinutans
  misc_feature: 31
tatcgattcgataccttagtattcgatatcgaatcatcacctagtcaggatatcgattcgataccttagtatttgatatcgaatgatcacctagta

SEQ ID NO: 23329 - DNA, 96 bp, Aspergillus viridinutans
  misc_feature: 31
tatcctgactagatgatgattcgatattcatactaggtgatgattcgatatcgaatactaaggtattgaatcaatatcctgactaggtgatgattc

SEQ ID NO: 23330 - DNA, 96 bp, Aspergillus viridinutans
  misc_feature: 31
caactaaacaagagaaacgatcttaccatccagatactgtccagcaaagacacaagaattattcagatttcatgttttggggggctattacatata

SEQ ID NO: 23331 - DNA, 96 bp, Aspergillus viridinutans
  misc_feature: 31
tatatgtaagctaggcattattattagctatattaatatagattatataggatgtattaatatatgctatttaactactagatatatctttatatt

SEQ ID NO: 23332 - DNA, 96 bp, Aspergillus viridinutans
  misc_feature: 31
tatatgaataatataattattcaaataattcaaattcctactatatggcgattcaaatcatttgatatccttactatatgacgattcgaatcattt

SEQ ID NO: 23333 - DNA, 96 bp, Aspergillus viridinutans
  misc_feature: 31
attcttatatagtagggatattgaattgaatagtagtaatatataattcttatagaggtatagtaataggatattaaataccactatacatatata

SEQ ID NO: 23334 - DNA, 96 bp, Aspergillus viridinutans
  misc_feature: 31
tatatagtagggatttaaatcatcatatagtatggatattaaatgatttgaattgctatatagtatgtatttaaattatcatatagtagggattcg

SEQ ID NO: 23335 - DNA, 96 bp, Aspergillus viridinutans
  misc_feature: 31
tatataatctatattaatatagctaataataatacctagcttatatataatatcttttatattataaggcttatagataattctaatatctagggt

SEQ ID NO: 23336 - DNA, 96 bp, Aspergillus viridinutans
  misc_feature: 31
tagaagaacatcctattaatatataaatataaagaatagtagatagaggataggattatatattatattatctactactacttatactagcttata

SEQ ID NO: 23337 - DNA, 96 bp, Aspergillus viridinutans
  misc_feature: 31
aggtatcaaatcgatatcctgactaggtgatgatttgatatcgaatactatggtattgaatcaatatcctgactagttgatgattcgatatttata

SEQ ID NO: 23338 - DNA, 96 bp, Aspergillus viridinutans
  misc_feature: 31
attatatgtaagctaggcattattattagctatattaatatagattatataggatgtattaatatatgctatttaactactagatatatctttata

SEQ ID NO: 23339 - DNA, 96 bp, Aspergillus viridinutans
  misc_feature: 31
tagtattcgatatcgaatcatcaactagtatgaatatcaaatcattatctagtaggaatatcaataccatagtactatactaagatatatatatta

SEQ ID NO: 23340 - DNA, 96 bp, Aspergillus viridinutans
  misc_feature: 31
tagtattactataggatactaatatatttagtatatataatatacttagtagtaataacctagtataattagagttagtcccttagttaaggcttt

SEQ ID NO: 23341 - DNA, 96 bp, Aspergillus viridinutans
  misc_feature: 31
actaagtaatctttttcctactatatatctatagtagaggccttataatttatagctatatctataaagtatagatataatagttaatatatacta

SEQ ID NO: 23342 - DNA, 96 bp, Aspergillus viridinutans
  misc_feature: 31
tagtaagtagattagggcacctagcataaataatatagaggtaggtaagtataacttagctacttctttatctataactcctagggcctagggggt

SEQ ID NO: 23343 - DNA, 96 bp, Aspergillus viridinutans
  misc_feature: 31
taggcgcctcagctatctgccttcgagccgctgacagcgcgcgacaggtgcagcagagccacctaggaacagagacagactcaactgtgtatgctg

SEQ ID NO: 23344 - DNA, 96 bp, Aspergillus viridinutans
  misc_feature: 31
ggcctatcttataggcttctaagctataattagttatctctttatctatatataagactaaatatattactattattcatactataaaggaagcta

SEQ ID NO: 23345 - DNA, 96 bp, Aspergillus viridinutans
  misc_feature: 31
gcctaccttcctggtagcctaataatataataatctaataggattaaggatggtttaagaaataatataagaataataatagtaaagatagaagta

SEQ ID NO: 23346 - DNA, 96 bp, Aspergillus viridinutans
  misc_feature: 31
ctagatattaagaaaagatagattaagctatcttaatatacttatctttaatatcttattaatatatttaatctatatttagttaaaactatagta

SEQ ID NO: 23347 - DNA, 96 bp, Aspergillus viridinutans
  misc_feature: 31
acgtctgaactccagtcacaacgttccatctcgtatgccgtcttctgcttgaaaaaaacacacgtctgaactccagtcacaacgttccatctcgta

SEQ ID NO: 23348 - DNA, 96 bp, Aspergillus viridinutans
  misc_feature: 31
cacgtctgaactccagtcacaacgttccatctcgtatgccgtatcatgatcggaagaacacacgtctgaactccagtcacaacgttccatctcgta

SEQ ID NO: 23349 - DNA, 96 bp, Aspergillus viridinutans
  misc_feature: 31
acgtctgaactccagtcacaacgttccatctcgtatgccgtatcattgatcggaaaagcacacgtctgaactccagtcacaacgttccatctcgta

SEQ ID NO: 23350 - DNA, 96 bp, Aspergillus viridinutans
  misc_feature: 31
gagcacacgtctgaactccagtcacaacgttccatctcgtatgccgtaatcggaagagcacacgtctgaactccagtcacaacgttccatctcgta

SEQ ID NO: 23351 - DNA, 96 bp, Aspergillus viridinutans
  misc_feature: 31
atctacacggagtactacactctttccctacacgacgctcttccgatcatcggaagagcacacgtctgaactccagtcacaacgttccatctcgta

SEQ ID NO: 23352 - DNA, 96 bp, Aspergillus viridinutans
  misc_feature: 31
ctacacggagtactacactctttccctacacgacgctcttccgatcagatcggaagagcacacgtctgaactccagtcacaacgttccatctcgta

SEQ ID NO: 23353 - DNA, 96 bp, Aspergillus viridinutans
  misc_feature: 31
tacacggagtactacactctttccctacacgacgctcttccgatcagatcggaagagcacacgtctgaactccagtcacaacgttccatctcgtat

SEQ ID NO: 23354 - DNA, 96 bp, Aspergillus viridinutans
  misc_feature: 31
cttatatagcttatctctcttactagattctatcttaattaattcttcttacttacttacttatatagcttatctctcttactagattctatctta

SEQ ID NO: 23355 - DNA, 96 bp, Aspergillus viridinutans
  misc_feature: 31
taacttatagctaaattaattaattcttatatttaatatatcttaataactttagtatatatactatttttaataatttaattctctaatttatac

SEQ ID NO: 23356 - DNA, 96 bp, Aspergillus viridinutans
  misc_feature: 31
taaattaggagttattaaagttattttaataagtttaaattaatattaataattattaatctaacttctactcttaattagatattattctttact

SEQ ID NO: 23357 - DNA, 96 bp, Aspergillus viridinutans
  misc_feature: 31
ctagtttcccagggaaccttactattagaatctttctagttatttaaattagaattagaattagattaatttaactaatttaattaatttaattta

SEQ ID NO: 23358 - DNA, 96 bp, Aspergillus viridinutans
  misc_feature: 31
aatatctaattaagagtagaagttagattaataattattaatattaatttaaacttattaaaataactttaataacttctaatttatctttcttta

SEQ ID NO: 23359 - DNA, 96 bp, Aspergillus viridinutans
  misc_feature: 31
taaacaagagaaacgatcttaccatccagatactgtccagcaaagacacaagaattattcagatttcatgttttggggggctattacatataattt

SEQ ID NO: 23360 - DNA, 96 bp, Aspergillus viridinutans
  misc_feature: 31
atcggaagagcgtcgtgtagggaaagagtgtagtactccgtgtagatctcggtggtcgccgtatcattaaaaaaaaaaaaaaaaaaaaaaaaaaac

SEQ ID NO: 23361 - DNA, 96 bp, Aspergillus viridinutans
  misc_feature: 31
gaagaatgggaaacgcggaaagcatatgtactccccccatgggagccaccccttctttgcacgattaaggaccatgaagccgcactaataacccac

SEQ ID NO: 23362 - DNA, 96 bp, Aspergillus viridinutans
  misc_feature: 31
gattataaataaataaagatattaataaagctatttaatttagataaagaattattaaatatatataagaaactatttaataaagggaagtaagac

SEQ ID NO: 23363 - DNA, 96 bp, Aspergillus viridinutans
  misc_feature: 31
gtctgaactccagtcacaacgttccatctcgtatgccgtatcattgatcggaaaagcacacgtctgaactccagtcacaacgttccatctcgtatg

SEQ ID NO: 23364 - DNA, 96 bp, Aspergillus viridinutans
  misc_feature: 31
ggaagagcacacgtctgaactccagtcacaacgttccatctcgtatgccgtatcattacggcatacgagatggaacgttgtgactggagttcagac

SEQ ID NO: 23365 - DNA, 96 bp, Aspergillus viridinutans
  misc_feature: 31
gtctgaactccagtcacaacgttccatctcggtggtcggatcggaagagcacacgtctgaactccagtcacaacgttccatctcgtatgccgtctt

SEQ ID NO: 23366 - DNA, 96 bp, Aspergillus viridinutans
  misc_feature: 31
gtcacaacgttccatctcgtatgccgtgatcggaagagcacacgtctgaactccagtcacaacgttccatctcgtatgccgtatcatgatcggaag

SEQ ID NO: 23367 - DNA, 96 bp, Aspergillus viridinutans
  misc_feature: 31
gtcacaacgttccatctcgtatgccgtatcattgatcggaagaacacacgtctgaactccagtcacaacgttccatctcgtatgccgtcttctgct

SEQ ID NO: 23368 - DNA, 96 bp, Aspergillus viridinutans
  misc_feature: 31
gtatctgcaactaaacaagagaaacgatcttaccatccagatactgtccagcaaagacacaagaattattcagatttcatgttttggggggctatt

SEQ ID NO: 23369 - DNA, 96 bp, Aspergillus viridinutans
  misc_feature: 31
atatcgaatcatcaactagtatgaatatcaaatcattatctagtaggaatatcaataccatagtactatactaagatatatatattataaatatac

SEQ ID NO: 23370 - DNA, 96 bp, Aspergillus viridinutans
  misc_feature: 31
gtagtattactataggatactaatatatttagtatatataatatacttagtagtaataacctagtataattagagttagtcccttagttaaggctt

SEQ ID NO: 23371 - DNA, 96 bp, Aspergillus viridinutans
  misc_feature: 31
gtaggcgcctcagctatctgccttcgagccgctgacagcgcgcgacaggtgcagcagagccacctaggaacagagacagactcaactgtgtatgct

SEQ ID NO: 23372 - DNA, 96 bp, Aspergillus viridinutans
  misc_feature: 31
ataaattaggagttattaaagttattttaataagtttaaattaatattaataattattaatctaacttctactcttaattagatattattctttac

SEQ ID NO: 23373 - DNA, 96 bp, Aspergillus viridinutans
  misc_feature: 31
ggtctcccctgcgccatcttagcgcgttaaacacctatcccacctcattctatgtagtcattccaaacgtagtgcgattccgcgcctaggaagacc

SEQ ID NO: 23374 - DNA, 96 bp, Aspergillus viridinutans
  misc_feature: 31
gggttcagcatctctaattagtaggggtaggccctgaagatcctaggtactagggcctttaattagtagtaaagattaatatataggatcctaatt

SEQ ID NO: 23375 - DNA, 96 bp, Aspergillus viridinutans
  misc_feature: 31
ggggggtgagccggcgcgcgcgagggtgacgagggaaggaatcgggaggggaagggcaagggaaagggagagggaggaggaggggagggaggcggt

SEQ ID NO: 23376 - DNA, 96 bp, Aspergillus viridinutans
  misc_feature: 31
ggcctaccttcctggtagcctaataatataataatctaataggattaaggatggtttaagaaataatataagaataataatagtaaagatagaagt

SEQ ID NO: 23377 - DNA, 96 bp, Aspergillus viridinutans
  misc_feature: 31
gcttcatccgcagcctcattccccgccacacccacatgggcggggatccagtgtatcttaatgttctctggaggtagcccgcgcgcccctagggcc

SEQ ID NO: 23378 - DNA, 96 bp, Aspergillus viridinutans
  misc_feature: 31
ctgaactccagtcacaacgttccatctcgtatgccgtcttctgcttgaaaaaaacacacgtctgaactccagtcacaacgttccatctcgtatgcc

SEQ ID NO: 23379 - DNA, 96 bp, Aspergillus viridinutans
  misc_feature: 31
acacgtctgaactccagtcacaacgttccatctcgtatgccgtaatcggaagagcacacgtctgaactccagtcacaacgttccatctcgtatgcc

SEQ ID NO: 23380 - DNA, 96 bp, Aspergillus viridinutans
  misc_feature: 31
ctgaactccagtcacaacgttccatctcgtatgccgtctcatggatcggaagagcacacgtctgaactccagtcacaacgttccatctcgtatgcc

SEQ ID NO: 23381 - DNA, 96 bp, Aspergillus viridinutans
  misc_feature: 31
ctgaactccagtcacaacgttccatctcgtatgccgtatcattgatgggaagagcacacgtctgaactccagtcacaacgttccatctcgtatgcc

SEQ ID NO: 23382 - DNA, 96 bp, Aspergillus viridinutans
  misc_feature: 31
ggaagagcacacgtctgaactccagtcacaacgttccatctcgtatgccgtaatcggaagagcacacgtctgaactccagtcacaacgttccatct

SEQ ID NO: 23383 - DNA, 96 bp, Aspergillus viridinutans
  misc_feature: 31
gatcggaagagcacacgtctgaactccagtcacaacgttccatctcgtatgccgtaatcggaagagcacacgtctgaactccagtcacaacgttcc

SEQ ID NO: 23384 - DNA, 96 bp, Aspergillus viridinutans
  misc_feature: 31
atactctaaaagattggtcaagacattgggaagactgagactgagactgagactgagaaagagagaagggaagtggaggaagagaggacgagaagc

SEQ ID NO: 23385 - DNA, 96 bp, Aspergillus viridinutans
  misc_feature: 31
ctctcagcactgcagctgagcaatcaggcctatcaaaatctactgtctcccgcgtacggaaacgcgccaaacagcatggatggaagccaaatcagc

SEQ ID NO: 23386 - DNA, 96 bp, Aspergillus viridinutans
  misc_feature: 31
ctattattaaatataaagatatatctagtagttaaatagcatatattaatacatcctatataatctatattaatatagctaataataatgcctagc

SEQ ID NO: 23387 - DNA, 96 bp, Aspergillus viridinutans
  misc_feature: 31
gcccatggaagaagatgcttagctagttaaattagataagcctattaaatataatcttaaacttaaaaagagatatagagtaggagttagcttagt

SEQ ID NO: 23388 - DNA, 96 bp, Aspergillus viridinutans
  misc_feature: 31
cacacgtctgaactccagtcacaacgttccatctcgtatgccgtaatcggaagagcacacgtctgaactccagtcacaacgttccatctcgtatgc

SEQ ID NO: 23389 - DNA, 96 bp, Aspergillus viridinutans
  misc_feature: 31
aggcgcctcagctatctgccttcgagccgctgacagcgcgcgacaggtgcagcagagccacctaggaacagagacagactcaactgtgtatgctgc

SEQ ID NO: 23390 - DNA, 96 bp, Aspergillus viridinutans
  misc_feature: 31
gcacacgtctgaactccagtcacaacgttccatctcgtatgccgtcttctgcttgaaaaaaacacacgtctgaactccagtcacaacgttccatct

SEQ ID NO: 23391 - DNA, 96 bp, Aspergillus viridinutans
  misc_feature: 31
gcacacgtctgaactccagtcacaacgttccatctcgtatgccgtatcatgatcggaagaacacacgtctgaactccagtcacaacgttccatctc

SEQ ID NO: 23392 - DNA, 96 bp, Aspergillus viridinutans
  misc_feature: 31
gcacacgtctgaactccagtcacaacgttccatctcgtatgccgtaatcggaagagcacacgtctgaactccagtcacaacgttccatctcgtatg

SEQ ID NO: 23393 - DNA, 96 bp, Aspergillus viridinutans
  misc_feature: 31
gcaactaaacaagagaaacgatcttaccatccagatactgtccagcaaagacacaagaattattcagatttcatgttttggggggctattacatat

SEQ ID NO: 23394 - DNA, 96 bp, Aspergillus viridinutans
  misc_feature: 31
attctctcagcactgcagctgagcaatcaggcctatcaaaatctactgtctcccgcgtacggaaacgcgccaaacagcatggatggaagccaaatc

SEQ ID NO: 23395 - DNA, 96 bp, Aspergillus viridinutans
  misc_feature: 31
agcacacgtctgaactccagtcacaacgttccatctcgtatgccgtcttctgcttgaaaaaaacacacgtctgaactccagtcacaacgttccatc

SEQ ID NO: 23396 - DNA, 96 bp, Aspergillus viridinutans
  misc_feature: 31
gagcacacgtctgaactccagtcacaacgttccatctcgtatgccgtcttctgctcgaaaaaacacacgtctgaactccagtcacaacgttccatc

SEQ ID NO: 23397 - DNA, 96 bp, Aspergillus viridinutans
  misc_feature: 31
gagcacacgtctgaactccagtcacaacgttccatctcgtatgccgtatcatgatcggaagaacacacgtctgaactccagtcacaacgttccatc

SEQ ID NO: 23398 - DNA, 96 bp, Aspergillus viridinutans
  misc_feature: 31
cggaagagcacacgtctgaactccagtcacaacgttccatctcgtatgccgtaatcggaagagcacacgtctgaactccagtcacaacgttccatc

SEQ ID NO: 23399 - DNA, 96 bp, Aspergillus viridinutans
  misc_feature: 31
gaactccagtcacaacgttccatctcgtatgccgtagatcggaagagcacacgtctgaactccagtcacaacgttccatctcgtatgccgtcgatc

SEQ ID NO: 23400 - DNA, 96 bp, Aspergillus viridinutans
  misc_feature: 31
ctccagtcacaacgttccatctcgtatgccgtgatcggaagagcacacgtctgaactccagtcacaacgttccatctcgtatgccgtatcatgatc

SEQ ID NO: 23401 - DNA, 96 bp, Aspergillus viridinutans
  misc_feature: 31
ctccagtcacaacgttccatctcgtatgccgtatcatgatcggaagagcacacgtctgaactccagtcacaacgttccatctcgtatgccgtgatc

SEQ ID NO: 23402 - DNA, 96 bp, Aspergillus viridinutans
  misc_feature: 31
gatatcctgactaggtgatgatttgatatcgaatactatggtattgaatcaatatcctgactagttgatgattcgatatttatactaggtgatgat

SEQ ID NO: 23403 - DNA, 96 bp, Aspergillus viridinutans
  misc_feature: 31
gatagctgaggcgcctacgcggccctggtagccgctgccatcagtgtagatgaccatgtgctggtcatctatctctttgtgtatgtcattgtgggt

SEQ ID NO: 23404 - DNA, 96 bp, Aspergillus viridinutans
  misc_feature: 31
gagcacacgtctgaactccagtcacaacgttccatctcgtatgccgtcttctgcttgaaaaaaacacacgtctgaactccagtcacaacgttccat

SEQ ID NO: 23405 - DNA, 96 bp, Aspergillus viridinutans
  misc_feature: 31
cacacgtctgaactccagtcacaacgttccatctcgtatgccgtcttctgcttgaaaaaaacacacgtctgaactccagtcacaacgttccatctc

SEQ ID NO: 23406 - DNA, 96 bp, Aspergillus viridinutans
  misc_feature: 31
cacacgtctgaactccagtcacaacgttccatctcgtatgccgtatcattgatcggaaaagcacacgtctgaactccagtcacaacgttccatctc

SEQ ID NO: 23407 - DNA, 96 bp, Aspergillus viridinutans
  misc_feature: 31
gaagagcacacgtctgaactccagtcacaacgttccatctcgtatgccgtaatcggaagagcacacgtctgaactccagtcacaacgttccatctc

SEQ ID NO: 23408 - DNA, 96 bp, Aspergillus viridinutans
  misc_feature: 31
cacgtctgaactccagtcacaacgttccatctcggtggtcgatcggaagagcacacgtctgaactccagtcacaacgttccatctcgtatgccgtc

SEQ ID NO: 23409 - DNA, 96 bp, Aspergillus viridinutans
  misc_feature: 31
acgtctgaactccagtcacaacgttccatctcggtggtcggatcggaagagcacacgtctgaactccagtcacaacgttccatctcgtatgccgtc

SEQ ID NO: 23410 - DNA, 96 bp, Aspergillus viridinutans
  misc_feature: 31
gaccttaaagaaagataaattaggagttattaaagttattttaataagtttaaattaatattaataattattaatctaacttctactcttaattag

SEQ ID NO: 23411 - DNA, 96 bp, Aspergillus viridinutans
  misc_feature: 31
agtaagtagattagggcacctagcataaataatatagaggtaggtaagtataacttagctacttctttatctataactcctagggcctagggggtc

SEQ ID NO: 23412 - DNA, 96 bp, Aspergillus viridinutans
  misc_feature: 31
cctgccatccagctgcggtctcccctgcgccatcttagcgcgttaaacacctatcccacctcattctatgtagtcattccaaacgtagtgcgattc

SEQ ID NO: 23413 - DNA, 96 bp, Aspergillus viridinutans
  misc_feature: 31
gaactccagtcacaacgttccatctcgtatgccgtcttctgcttgaaaaaaacacacgtctgaactccagtcacaacgttccatctcgtatgccgt

SEQ ID NO: 23414 - DNA, 96 bp, Aspergillus viridinutans
  misc_feature: 31
gaactccagtcacaacgttccatctcgtatgccgtctcatggatcggaagagcacacgtctgaactccagtcacaacgttccatctcgtatgccgt

SEQ ID NO: 23415 - DNA, 96 bp, Aspergillus viridinutans
  misc_feature: 31
gaactccagtcacaacgttccatctcgtatgccgtatccgatcggaagagcacacgtctgaactccagtcacaacgttccatctcgtatgccgtct

SEQ ID NO: 23416 - DNA, 96 bp, Aspergillus viridinutans
  misc_feature: 31
gaactccagtcacaacgttccatctcgtatgccgtatcattgatgggaagagcacacgtctgaactccagtcacaacgttccatctcgtatgccgt

SEQ ID NO: 23417 - DNA, 96 bp, Aspergillus viridinutans
  misc_feature: 31
gaactccagtcacaacgttccatctcgtatgccgtatcatgatcggaagagcagatcggaagagcacacgtctgaactccagtcacaacgttccat

SEQ ID NO: 23418 - DNA, 96 bp, Aspergillus viridinutans
  misc_feature: 31
gaaagcaaaaacacagctaaagcagcctgccatccagctgcggtctcccctgcgccatcttagcgcgttaaacacctatcccacctcattctatgt

SEQ ID NO: 23419 - DNA, 96 bp, Aspergillus viridinutans
  misc_feature: 31
aacttaggaataattccccagagctctctaagaggctccaggcttataacctatagaataagcagagagagaggtttagaatataaagattttttc

SEQ ID NO: 23420 - DNA, 96 bp, Aspergillus viridinutans
  misc_feature: 31
ctttattactaacctagattatttagctatatatagttaatttataaatactactactaaataatagaaggtcttattatctttcttatatatctt

SEQ ID NO: 23421 - DNA, 96 bp, Aspergillus viridinutans
  misc_feature: 31
cttataggcttctaagctataattagttatctctttatctatatataaggctaaatatattactattatttatactataaaggaagctatctagct

SEQ ID NO: 23422 - DNA, 96 bp, Aspergillus viridinutans
  misc_feature: 31
ctaccttcctggtagcctaataatataataatctaataggattaaggatggtttaagaaataatataagaataataatagtaaagatagaagtaag

SEQ ID NO: 23423 - DNA, 96 bp, Aspergillus viridinutans
  misc_feature: 31
ctgatagtttcccccggagtccctccacatcttgtagcttagctatcatcttcctgcgggcctctacatgcagcgaacattgtaggagaacatgtt

SEQ ID NO: 23424 - DNA, 96 bp, Aspergillus viridinutans
  misc_feature: 31
ctcagcactgcagctgagcaatcaggcctatcaaaatctactgtctcccgcgtacggaaacgcgccaaacagcatggatggaagccaaatcagcct

SEQ ID NO: 23425 - DNA, 96 bp, Aspergillus viridinutans
  misc_feature: 31
atataagtaagtaagtaagaagaattaattaagatagaatctagtaagagagataagctatataagtaagtaagtaaggagaattaattaagatag

SEQ ID NO: 23426 - DNA, 96 bp, Aspergillus viridinutans
  misc_feature: 31
ctaattaagagtagaagttagattaataattattaatattaatttaaacttattaaaataactttaataacttctaatttatctttctttaaggtt

SEQ ID NO: 23427 - DNA, 96 bp, Aspergillus viridinutans
  misc_feature: 31
ctaaacaagagaaacgatcttaccatccagatactgtccagcaaagacacaagaattattcagatttcatgttttggggggctattacatataatt

SEQ ID NO: 23428 - DNA, 96 bp, Aspergillus viridinutans
  misc_feature: 31
atcggaagagcacacgtctgaactccagtcacaacgttccatctcgtatgccgtctcatgctcggaagagcacacgtctgaactccagtcacaacg

SEQ ID NO: 23429 - DNA, 96 bp, Aspergillus viridinutans
  misc_feature: 31
cgtctgaactccagtcacaacgttccatctcgtatgccgtatcattgatcggaaaagcacacgtctgaactccagtcacaacgttccatctcgtat

SEQ ID NO: 23430 - DNA, 96 bp, Aspergillus viridinutans
  misc_feature: 31
cgtctgaactccagtcacaacgttccatctcgtatgccgtatcatgatcggaagaacacacgtctgaactccagtcacaacgttccatctcgtatg

SEQ ID NO: 23431 - DNA, 96 bp, Aspergillus viridinutans
  misc_feature: 31
cgtctgaactccagtcacaacgttccatctcgtatgccgtagaccggaagagcacacgtctgaactccagtcacaacgttccatctcgtatgccgt

SEQ ID NO: 23432 - DNA, 96 bp, Aspergillus viridinutans
  misc_feature: 31
cgtctgaactccagtcacaacgttccatctcggtggtcggatcggaagagcacacgtctgaactccagtcacaacgttccatctcgtatgccgtct

SEQ ID NO: 23433 - DNA, 96 bp, Aspergillus viridinutans
  misc_feature: 31
cacgtctgaactccagtcacaacgttccatctcgtatgccgtaatcggaagagcacacgtctgaactccagtcacaacgttccatctcgtatgccg

SEQ ID NO: 23434 - DNA, 96 bp, Aspergillus viridinutans
  misc_feature: 31
atagatgaccagcacatggtcatctacactgatggcagcggctaccagggccgcgtaggcgcctcagctatctgccttcgagccgctgacagcgcg

SEQ ID NO: 23435 - DNA, 96 bp, Aspergillus viridinutans
  misc_feature: 31
aactccagtcacaacgttccatctcgtatgccgtagatcggaagagcacacgtctgaactccagtcacaacgttccatctcgtatgccgtcgatcg

SEQ ID NO: 23436 - DNA, 96 bp, Aspergillus viridinutans
  misc_feature: 31
atgtcatctagtagggatatcgaatgtcatctagtattgatatcgaatcaatatcgaatgtcatctagtagggatatcgaatgtcatctagtatcg

SEQ ID NO: 23437 - DNA, 96 bp, Aspergillus viridinutans
  misc_feature: 31
cgataccttagtattcgatatcgaatcatcacctagtcaggatatcgattcgataccttagtatttgatatcgaatgatcacctagtatgaatatt

SEQ ID NO: 23438 - DNA, 96 bp, Aspergillus viridinutans
  misc_feature: 31
acacgtctgaactccagtcacaacgttccatctcgtatgccgtcttctgcttgaaaaaaacacacgtctgaactccagtcacaacgttccatctcg

SEQ ID NO: 23439 - DNA, 96 bp, Aspergillus viridinutans
  misc_feature: 31
cacacgtctgaactccagtcacaacgttccatctcgtatgccgtatcatgatcggaagaacacacgtctgaactccagtcacaacgttccatctcg

SEQ ID NO: 23440 - DNA, 96 bp, Aspergillus viridinutans
  misc_feature: 31
aagagcacacgtctgaactccagtcacaacgttccatctcgtatgccgtaatcggaagagcacacgtctgaactccagtcacaacgttccatctcg

SEQ ID NO: 23441 - DNA, 96 bp, Aspergillus viridinutans
  misc_feature: 31
cgagatggaacgttgtgactggagttcagacgtgtgctcttccgatgatcggaagagcgtcgtgtagggaaagagtgtagtactccgtgtagatct

SEQ ID NO: 23442 - DNA, 96 bp, Aspergillus viridinutans
  misc_feature: 31
cgaaagcaaaaacacagctaaagcagcctgccatccagctgcggtctcccctgcgccatcttagcgcgttaaacacctatcccacctcattctatg

SEQ ID NO: 23443 - DNA, 96 bp, Aspergillus viridinutans
  misc_feature: 31
atctaattaagagtagaagttagattaataattattaatattaatttaaacttattaaaataactttaataacttctaatttatctttctttaagg

SEQ ID NO: 23444 - DNA, 96 bp, Aspergillus viridinutans
  misc_feature: 31
cctggtagcctaataatataataatctaataggattaaggatggtttaagaaataatataagaataataatagtaaagatagaagtaaggcctatt

SEQ ID NO: 23445 - DNA, 96 bp, Aspergillus viridinutans
  misc_feature: 31
cctcattccccgccacacccacatgggcggggatccagtgtatcttaatgttctctggaggtagcccgcgcgcccctagggcccttactctctcat

SEQ ID NO: 23446 - DNA, 96 bp, Aspergillus viridinutans
  misc_feature: 31
actagtaattttagtaagtagattagggcacctagcataaataatatagaggtaggtaagtataacttagctacttctttatctataactcctagg

SEQ ID NO: 23447 - DNA, 96 bp, Aspergillus viridinutans
  misc_feature: 31
cctaacttatagctaaattaattaattcttatatttaatatatcttaataactttagtatatatactatttttaataatttaattctctaatttat

SEQ ID NO: 23448 - DNA, 96 bp, Aspergillus viridinutans
  misc_feature: 31
ccagtcacaacgttccatctcgtatgccgtgatcggaagagcacacgtctgaactccagtcacaacgttccatctcgtatgccgtatcatgatcgg

SEQ ID NO: 23449 - DNA, 96 bp, Aspergillus viridinutans
  misc_feature: 31
agatagctgaggcgcctacgcggccctggtagccgctgccatcagtgtagatgaccatgtgctggtcatctatctctttgtgtatgtcattgtggg

SEQ ID NO: 23450 - DNA, 96 bp, Aspergillus viridinutans
  misc_feature: 31
cagatagctgaggcgcctacgcggccctggtagccgctgccatcagtgtagatgaccatgtgctggtcatctatctctttgtgtatgtcattgtgg

SEQ ID NO: 23451 - DNA, 96 bp, Aspergillus viridinutans
  misc_feature: 31
ataggcctattattaaatataaagatatatctagtagttaaatagcatatattaatacatcctatataatctatattaatatagctaataataatg

SEQ ID NO: 23452 - DNA, 96 bp, Aspergillus viridinutans
  misc_feature: 31
catgacgatgtaacgaccttccatttctctgtctgtctctgtctctgtctctcatctctcatcatcttgtgtgtctcattgatttcctttcacttg

SEQ ID NO: 23453 - DNA, 96 bp, Aspergillus viridinutans
  misc_feature: 31
catcttcttccatgggcattactatagttttaactaaatatagattaaatatattaataagatattaaaggtaagtatattaagatagcttaacct

SEQ ID NO: 23454 - DNA, 96 bp, Aspergillus viridinutans
  misc_feature: 31
atggtattgaatcaatatcctgactagatgatgattcgatattcatactaggtgatgattcgatatcgaatactaaggtattgaatcaatatcctg

SEQ ID NO: 23455 - DNA, 96 bp, Aspergillus viridinutans
  misc_feature: 31
cacgtctgaactccagtcacaacgttccatctcgtatgccgtcttctgcttgaaaaaaacacacgtctgaactccagtcacaacgttccatctcgt

SEQ ID NO: 23456 - DNA, 96 bp, Aspergillus viridinutans
  misc_feature: 31
atatgaataatataattattcaaataattcaaattcctactatatggcgattcaaatcatttgatatccttactatatgacgattcgaatcatttg

SEQ ID NO: 23457 - DNA, 96 bp, Aspergillus viridinutans
  misc_feature: 31
aatctatatcctccttgtatatatatacatgtagctaacataaaatacacctgtaattttagtaattttaacttctagatattaagagagagaaat

SEQ ID NO: 23458 - DNA, 96 bp, Aspergillus viridinutans
  misc_feature: 31
atttaatatcctattactatacctctataagaattatatattactactattcaattcaatatccctactatataagaattcgatattgatactatt

SEQ ID NO: 23459 - DNA, 96 bp, Aspergillus viridinutans
  misc_feature: 31
agtattgatatcgaatgtcatctagtattgatatcgaatcgatatcaaatgtcatctagtagggatatcgaatgtcatctagtattgatatcgaat

SEQ ID NO: 23460 - DNA, 96 bp, Aspergillus viridinutans
  misc_feature: 31
attcgataccttagtattcgatatcgaatcatcacctagtcaggatatcgattcgataccttagtatttgatatcgaatgatcacctagtatgaat

SEQ ID NO: 23461 - DNA, 96 bp, Aspergillus viridinutans
  misc_feature: 31
actaaacaagagaaacgatcttaccatccagatactgtccagcaaagacacaagaattattcagatttcatgttttggggggctattacatataat

SEQ ID NO: 23462 - DNA, 96 bp, Aspergillus viridinutans
  misc_feature: 31
agagcacacgtctgaactccagtcacaacgttccatctcgtatgccgtcttctgctcgaaaaaacacacgtctgaactccagtcacaacgttccat

SEQ ID NO: 23463 - DNA, 96 bp, Aspergillus viridinutans
  misc_feature: 31
agagcacacgtctgaactccagtcacaacgttccatctcgtatgccgtatcatgatcggaagaacacacgtctgaactccagtcacaacgttccat

SEQ ID NO: 23464 - DNA, 96 bp, Aspergillus viridinutans
  misc_feature: 31
aatatatgaataatataattattcaaataattcaaattcctactatatggcgattcaaatcatttgatatccttactatatgacgattcgaatcat

SEQ ID NO: 23465 - DNA, 96 bp, Aspergillus viridinutans
  misc_feature: 31
acctaaggcctaccttcctggtagcctaataatataataatctaataggattaaggatggtttaagaaataatataagaataataatagtaaagat

SEQ ID NO: 23466 - DNA, 96 bp, Aspergillus viridinutans
  misc_feature: 31
atcgattcgataccttagtattcgatatcgaatcatcacctagtcaggatatcgattcgataccttagtatttgatatcgaatgatcacctagtat

SEQ ID NO: 23467 - DNA, 96 bp, Aspergillus viridinutans
  misc_feature: 31
atcgactcaataccttagtatttgatatcgaatcatcaactagtcaggatatcgactcaataccttagtattcgatatcgaatcatcacctagtat

SEQ ID NO: 23468 - DNA, 96 bp, Aspergillus viridinutans
  misc_feature: 31
actccagtcacaacgttccatctcgtatgccgtgatcggaagagcacacgtctgaactccagtcacaacgttccatctcgtatgccgtatcatgat

SEQ ID NO: 23469 - DNA, 96 bp, Aspergillus viridinutans
  misc_feature: 31
atatgtaagctaggcattattattagctatattaatatagattatataggatgtattaatatatgctatttaactactagatatatctttatattt

SEQ ID NO: 23470 - DNA, 96 bp, Aspergillus viridinutans
  misc_feature: 31
atatcctattactatacctctataagaattatatattactactattcaattcaatatccctactatataagaattcgatattgatactattcaatt

SEQ ID NO: 23471 - DNA, 96 bp, Aspergillus viridinutans
  misc_feature: 31
aattcttatatagtagggatattgaattgaatagtagtaatatataattcttatagaggtatagtaataggatattaaataccactatacatatat

SEQ ID NO: 23472 - DNA, 96 bp, Aspergillus viridinutans
  misc_feature: 31
atatatgaataatataattattcaaataattcaaattcctactatatggcgattcaaatcatttgatatccttactatatgacgattcgaatcatt

SEQ ID NO: 23473 - DNA, 96 bp, Aspergillus viridinutans
  misc_feature: 31
atagattatttaacctaggtatatacatatttagtttttataaattattattatttagatgtataaatgtctatcttttattactatctttattat

SEQ ID NO: 23474 - DNA, 96 bp, Aspergillus viridinutans
  misc_feature: 31
acgtctgaactccagtcacaacgttccatctcgtatgccgtatcatgatcggaagaacacacgtctgaactccagtcacaacgttccatctcgtat

SEQ ID NO: 23475 - DNA, 96 bp, Aspergillus viridinutans
  misc_feature: 31
agcacacgtctgaactccagtcacaacgttccatctcgtatgccgtaatcggaagagcacacgtctgaactccagtcacaacgttccatctcgtat

SEQ ID NO: 23476 - DNA, 96 bp, Aspergillus viridinutans
  misc_feature: 31
aatagcatatattaatacatcctatataatctatattaatatagctaataataatgcctagcttacatataatatcttttatgttatgaggcttat

SEQ ID NO: 23477 - DNA, 96 bp, Aspergillus viridinutans
  misc_feature: 31
aaggtatcaaatcgatatcctgactaggtgatgatttgatatcgaatactatggtattgaatcaatatcctgactagttgatgattcgatatttat

SEQ ID NO: 23478 - DNA, 96 bp, Aspergillus viridinutans
  misc_feature: 31
agtagtattactataggatactaatatatttagtatatataatatacttagtagtaataacctagtataattagagttagtcccttagttaaggct

SEQ ID NO: 23479 - DNA, 96 bp, Aspergillus viridinutans
  misc_feature: 31
aggtaagctagatagcttcctttatagtatgaataatagtaatatatttagtcttatatatagataaagagataactaattatagcttagaagcct

SEQ ID NO: 23480 - DNA, 96 bp, Aspergillus viridinutans
  misc_feature: 31
aggcctatcttataggcttctaagctataattagttatctctttatctatatataagactaaatatattactattattcatactataaaggaagct

SEQ ID NO: 23481 - DNA, 96 bp, Aspergillus viridinutans
  misc_feature: 31
agcctataagataggcctattattaaatataaagatatatctagtagttaaatagcatatattaatacatcctatataatctatattaatatagct

SEQ ID NO: 23482 - DNA, 96 bp, Aspergillus viridinutans
  misc_feature: 31
agcacacgtctgaactccagtcacaacgttccatctcgtatgccgtatcatgatcggaagaacacacgtctgaactccagtcacaacgttccatct

SEQ ID NO: 23483 - DNA, 96 bp, Aspergillus viridinutans
  misc_feature: 31
agagcacacgtctgaactccagtcacaacgttccatctcgtatgccgtaatcggaagagcacacgtctgaactccagtcacaacgttccatctcgt

SEQ ID NO: 23484 - DNA, 96 bp, Aspergillus viridinutans
  misc_feature: 31
acgtctgaactccagtcacaacgttccatctcggtggtcgatcggaagagcacacgtctgaactccagtcacaacgttccatctcgtatgccgtct

SEQ ID NO: 23485 - DNA, 96 bp, Aspergillus viridinutans
  misc_feature: 31
aatattagctattagatatcttattatctatatctattatataagtataattataattattagattaattagataaagacttcttattaggcttct

SEQ ID NO: 23486 - DNA, 96 bp, Aspergillus viridinutans
  misc_feature: 31
aattatagtagtagttatagtagttatagtagttatagtagttatagtagttatagtagttatagtagttatagtagttatagtagtcatagtagt

SEQ ID NO: 23487 - DNA, 96 bp, Aspergillus viridinutans
  misc_feature: 31
acgtctgaactccagtcacaacgttccatctcgtatgccgtaatcggaagagcacacgtctgaactccagtcacaacgttccatctcgtatgccgt

SEQ ID NO: 23488 - DNA, 96 bp, Aspergillus viridinutans
  misc_feature: 31
acggagtactacactctttccctacacgacgctcttccgatcatcggaagagcacacgtctgaactccagtcacaacgttccatctcgtatgccgt

SEQ ID NO: 23489 - DNA, 96 bp, Aspergillus viridinutans
  misc_feature: 31
acacgtctgaactccagtcacaacgttccatctcgtatgccgtatcatgatcggaagaacacacgtctgaactccagtcacaacgttccatctcgt

SEQ ID NO: 23490 - DNA, 96 bp, Aspergillus viridinutans
  misc_feature: 31
aaattaggagttattaaagttattttaataagtttaaattaatattaataattattaatctaacttctactcttaattagatattattctttactt

SEQ ID NO: 23491 - DNA, 96 bp, Aspergillus viridinutans
  misc_feature: 30
ttccgatcgatcggaagagcgtcgtgtagggaaagagtgtagtactccgtgtagatctcggtggtcgccgtatcattaaaaaaaaaaaaaaaaaaa

SEQ ID NO: 23492 - DNA, 96 bp, Aspergillus viridinutans
  misc_feature: 30
gcagatcggaagagcagatcggaagagcacacgtctgaactccagtcacaacgttccatctcgtatgccgtcttctgcttgaaaaaaaaaaaaaaa

SEQ ID NO: 23493 - DNA, 96 bp, Aspergillus viridinutans
  misc_feature: 30
tccatctcgtatgccgtagatcggaagagcgtcgtgtagggaaagagtgtagtactccgtgtagatctcggtggtcgccgtatcattaaaaaaaaa

SEQ ID NO: 23494 - DNA, 96 bp, Aspergillus viridinutans
  misc_feature: 30
tcacaacgttccatctcggtggtcggatcggaagagcacacgtctgaactccagtcacaacgttccatctcgtatgccgtcttctgcttgaaaaaa

SEQ ID NO: 23495 - DNA, 96 bp, Aspergillus viridinutans
  misc_feature: 30
gtcacaacgttccatctcggtggtcggatcggaagagcacacgtctgaactccagtcacaacgttccatctcgtatgccgtcttctgcttgaaaaa

SEQ ID NO: 23496 - DNA, 96 bp, Aspergillus viridinutans
  misc_feature: 30
agtcacaacgttccatctcggtggtcggatcggaagagcacacgtctgaactccagtcacaacgttccatctcgtatgccgtcttctgcttgaaaa

SEQ ID NO: 23497 - DNA, 96 bp, Aspergillus viridinutans
  misc_feature: 30
tttggaacgtgcgttgacatccagggagctctggattcacactcttaacctcataataaatccgtttccactccaggtttcgtgtacggcgattat

SEQ ID NO: 23498 - DNA, 96 bp, Aspergillus viridinutans
  misc_feature: 30
cagtcacaacgttccatctcggtggtcggatcggaagagcacacgtctgaactccagtcacaacgttccatctcgtatgccgtcttctgcttgaaa

SEQ ID NO: 23499 - DNA, 96 bp, Aspergillus viridinutans
  misc_feature: 30
tttattctagccttatttcttaaggtttttatctttattttattagattttattactcttatagttattttattaagactacttattaatatcatg

SEQ ID NO: 23500 - DNA, 96 bp, Aspergillus viridinutans
  misc_feature: 30
ttggaacgtgcgttgacatccagggagctctggattcacactcttaacctcataataaatccgtttccactccaggtttcgtgtacggcgattatc

SEQ ID NO: 23501 - DNA, 96 bp, Aspergillus viridinutans
  misc_feature: 30
ttgattcaataccatagtattcaatattgaatcatcaactagtcaggatatcaacttgataccttagtattcgatatcgaatcatcaactagtcag

SEQ ID NO: 23502 - DNA, 96 bp, Aspergillus viridinutans
  misc_feature: 30
aatgatcacctagtatgaatattgataccatagtattcctcatcatctagtcaggatatcgattcaataccatagtattcgatatcgaatcatcaa

SEQ ID NO: 23503 - DNA, 96 bp, Aspergillus viridinutans
  misc_feature: 30
aaatcatcacctagtatggatatcgattcgataccttagtattcgatattgaatcatcaactagtatggatattgattcgataccatagtattcaa

SEQ ID NO: 23504 - DNA, 96 bp, Aspergillus viridinutans
  misc_feature: 30
ctcttccgatcagatcggaagagcgtcgtgtagggaaagagtgtagtactccgtgtagatctcggtggtcgccgtatcattaaaaaaaaaaaagaa

SEQ ID NO: 23505 - DNA, 96 bp, Aspergillus viridinutans
  misc_feature: 30
ttcttctatagatattactatggttttaactaaatatagattaaatatattaataagatattaaagataagtatattaagatagcttaatctatct

SEQ ID NO: 23506 - DNA, 96 bp, Aspergillus viridinutans
  misc_feature: 30
ataagtaagtaagtaagaagaattaattaagatagaatctagtaagagagataagctatataagtaagtaagtaaggagaattaattaagatagaa

SEQ ID NO: 23507 - DNA, 96 bp, Aspergillus viridinutans
  misc_feature: 30
ttctatagatattactatggttttaactaaatatagattaaatatattaataagatattaaagataagtatattaagatagcttaatctatctttt

SEQ ID NO: 23508 - DNA, 96 bp, Aspergillus viridinutans
  misc_feature: 30
ttcgatatcgaatcatcacctagtcaggatatcgattcgataccttagtatttgatatcgaatgatcacctagtatgaatattgataccatagtat

SEQ ID NO: 23509 - DNA, 96 bp, Aspergillus viridinutans
  misc_feature: 30
ttcgatatcgaatcatcaactagtatgaatatcaaatcattatctagtaggaatatcaataccatagtactatactaagatatatatattataaat

SEQ ID NO: 23510 - DNA, 96 bp, Aspergillus viridinutans
  misc_feature: 30
gtcatctagtagggatatcgaatgtcatctagtattgatatcgaatcaatatcgaatgtcatctagtagggatatcgaatgtcatctagtatcgaa

SEQ ID NO: 23511 - DNA, 96 bp, Aspergillus viridinutans
  misc_feature: 30
cagtcacaacgttccatctcgtatgccgtgatcggaagagcacacgtctgaactccagtcacaacgttccatctcgtatgccgtatcagatcggaa

SEQ ID NO: 23512 - DNA, 96 bp, Aspergillus viridinutans
  misc_feature: 30
actccagtcacaacgttccatctcgtatgccgtgatcggaagagcacacgtctgaactccagtcacaacgttccatctcgtatgccgtgatcggaa

SEQ ID NO: 23513 - DNA, 96 bp, Aspergillus viridinutans
  misc_feature: 30
gattcgataccttagtattcgatatcgaatcatcacctagtcaggatatcgattcgataccttagtatttgatatcgaatgatcacctagtatgaa

SEQ ID NO: 23514 - DNA, 96 bp, Aspergillus viridinutans
  misc_feature: 30
ttcaatattgaatcattaactagtatggatattgaatcattaactagtatggatatcgaatcatcaactagtatgaatattgataccatagtattc

SEQ ID NO: 23515 - DNA, 96 bp, Aspergillus viridinutans
  misc_feature: 30
ccagtcacaacgttccatctcggtggtcggatcggaagagcacacgtctgaactccagtcacaacgttccatctcgtatgccgtcttctgcttgaa

SEQ ID NO: 23516 - DNA, 96 bp, Aspergillus viridinutans
  misc_feature: 30
caacgttccatctcgtatgccgtatcattgatcggaagagcacacgtctgaactccagtcacaacgttccatctcgtatgccgtcttctgcttgaa

SEQ ID NO: 23517 - DNA, 96 bp, Aspergillus viridinutans
  misc_feature: 30
ttattattattatcctctttattattattatctaatcccttactattatccttatagaaggttattacttatatagttattacttaggtagttatt

SEQ ID NO: 23518 - DNA, 96 bp, Aspergillus viridinutans
  misc_feature: 30
taagctaggcattattattagctatattaatatagattatataggatgtattaatatatgctatttaactactagatatatctttatatttaataa

SEQ ID NO: 23519 - DNA, 96 bp, Aspergillus viridinutans
  misc_feature: 30
ttatctttattactaacctagattatttagctatatatagttaatttataaatactactactaaataatagaaggtcttattatctttcttatata

SEQ ID NO: 23520 - DNA, 96 bp, Aspergillus viridinutans
  misc_feature: 30
ttatatttaatatatcttaataactttagtatatatactatttttaataatttaattctctaatttatactttctctaactactttactaaatctc

SEQ ID NO: 23521 - DNA, 96 bp, Aspergillus viridinutans
  misc_feature: 30
ttaggatgctaaaatattatttctctctcttaatatctagaagttaaaattactaaaattacaggtgtattttatgttagctacatgtatatatat

SEQ ID NO: 23522 - DNA, 96 bp, Aspergillus viridinutans
  misc_feature: 30
ttagctattagatatcttattatctatatctattatataagtataattataattattagattaattagataaagacttcttattaggcttcttatc

SEQ ID NO: 23523 - DNA, 96 bp, Aspergillus viridinutans
  misc_feature: 30
ttagaggagagagtaataataataagaatattaatagagaatagagaaatttagtactaagagattattaagaaagataaatatagaaataatcta

SEQ ID NO: 23524 - DNA, 96 bp, Aspergillus viridinutans
  misc_feature: 30
ataagctagtataagtagtagtagataatataatatataatcctatcctctatctactattctttatatttatatattaataggatgttcttctaa

SEQ ID NO: 23525 - DNA, 96 bp, Aspergillus viridinutans
  misc_feature: 30
ttactagtatcttactaatatcttactttaaatatatttcttattattcttatacttctattatcccttaaaccttctacttttactatctcttaa

SEQ ID NO: 23526 - DNA, 96 bp, Aspergillus viridinutans
  misc_feature: 30
ttactagtaattttagtaagtagattagggcacctagcataaataatatagaggtaggtaagtataacttagctacttctttatctataactccta

SEQ ID NO: 23527 - DNA, 96 bp, Aspergillus viridinutans
  misc_feature: 30
atatagctaataataatacctagcttatatataatatcttttatattataaggcttatagataattctaatatctagggtctaatagaagaattaa

SEQ ID NO: 23528 - DNA, 96 bp, Aspergillus viridinutans
  misc_feature: 30
ttaattaccttatagaaggaagaaggcttaataatattagtataattattactaatatatatatacctagtaataatataattctatatatacttc

SEQ ID NO: 23529 - DNA, 96 bp, Aspergillus viridinutans
  misc_feature: 30
ttaattaccttatagaaggaagaaggcttaataatattagtataattattactaatatatatatacctaataataatataattctatatatatctt

SEQ ID NO: 23530 - DNA, 96 bp, Aspergillus viridinutans
  misc_feature: 30
ataaagattatactactataatctaacttaagttagatttttatttataattatataagttataattaaataaattaagaattaagattatattaa

SEQ ID NO: 23531 - DNA, 96 bp, Aspergillus viridinutans
  misc_feature: 30
aattaagagtagaagttagattaataattattaatattaatttaaacttattaaaataactttaataacttctaatttatctttctttaaggttaa

SEQ ID NO: 23532 - DNA, 96 bp, Aspergillus viridinutans
  misc_feature: 30
atatctaattaagagtagaagttagattaataattattaatattaatttaaacttattaaaataactttaataacttctaatttatctttctttaa

SEQ ID NO: 23533 - DNA, 96 bp, Aspergillus viridinutans
  misc_feature: 30
cttccgatcagatcggaagagcgtcgtgtagggaaagagtgtagtactccgtgtagatctcggtggtcgccgtatcattaaaaaaaaaaaaaaaca

SEQ ID NO: 23534 - DNA, 96 bp, Aspergillus viridinutans
  misc_feature: 30
tgtaattttagtaattttaacttctagatattaagagagagaaataatattttagcatcctaagaaagagtatttatatacttcagactatatata

SEQ ID NO: 23535 - DNA, 96 bp, Aspergillus viridinutans
  misc_feature: 30
tgtaaggctattagtaaactatttaatattttacttatcagcctagctacctattatctaggcatgaagatagatctagatattaagaaaagatag

SEQ ID NO: 23536 - DNA, 96 bp, Aspergillus viridinutans
  misc_feature: 30
tcggaagagcacacgtctgaactccagtcacaacgttccatctcgtatgccgtagatcggaagaacacacgtctgaactccagtcacaacgttcca

SEQ ID NO: 23537 - DNA, 96 bp, Aspergillus viridinutans
  misc_feature: 30
gagcacacgtctgaactccagtcacaacgttccatctcgtatgccgtatcattagagcggaagagcacacgtctgaactccagtcacaacgttcca

SEQ ID NO: 23538 - DNA, 96 bp, Aspergillus viridinutans
  misc_feature: 30
agagcacacgtctgaactccagtcacaacgttccatctcgtatgccgtatcctggatcggaagagcacacgtctgaactccagtcacaacgttcca

SEQ ID NO: 23539 - DNA, 96 bp, Aspergillus viridinutans
  misc_feature: 30
tactctaaaagattggtcaagacattgggaagactgagactgagactgagactgagaaagagagaagggaagtggaggaagagaggacgagaagca

SEQ ID NO: 23540 - DNA, 96 bp, Aspergillus viridinutans
  misc_feature: 30
tgctataagcatagaattaagtattataagctagatctatagtaggctagctattagtattaatctacatggggtgtacactattaaagctaatat

SEQ ID NO: 23541 - DNA, 96 bp, Aspergillus viridinutans
  misc_feature: 30
tgcggtctcccctgcgccatcttagcgcgttaaacacctatcccacctcattctatgtagtcattccaaacgtagtgcgattccgcgcctaggaag

SEQ ID NO: 23542 - DNA, 96 bp, Aspergillus viridinutans
  misc_feature: 30
tgcagcattttggaacgtgcgttgacatccagggagctctggattcacactcttaacctcataataaatccgtttccactccaggtttcgtgtacg

SEQ ID NO: 23543 - DNA, 96 bp, Aspergillus viridinutans
  misc_feature: 30
tgcaactaaacaagagaaacgatcttaccatccagatactgtccagcaaagacacaagaattattcagatttcatgttttggggggctattacata

SEQ ID NO: 23544 - DNA, 96 bp, Aspergillus viridinutans
  misc_feature: 30
taatatatgaataatataattattcaaataattcaaattcctactatatggcgattcaaatcatttgatatccttactatatgacgattcgaatca

SEQ ID NO: 23545 - DNA, 96 bp, Aspergillus viridinutans
  misc_feature: 30
attttcctagtagtagcatttattttgccaacctaggctcctcgtctatgtctttgttaaccactcaatgccaacatagatagggtttgtggctca

SEQ ID NO: 23546 - DNA, 96 bp, Aspergillus viridinutans
  misc_feature: 30
gcctcattccccgccacacccacatgggcggggatccagtgtatcttaatgttctctggaggtagcccgcgcgcccctagggcccttactctctca

SEQ ID NO: 23547 - DNA, 96 bp, Aspergillus viridinutans
  misc_feature: 30
attgattcaataccatagtatttgatatcgaatcatcatctagtcaggatatcgattcaataccatagtatttgatattgaatcatcatctagtca

SEQ ID NO: 23548 - DNA, 96 bp, Aspergillus viridinutans
  misc_feature: 30
caaatcatcacctagtatggatatcgattcgataccttagtattcgatattgaatcatcaactagtatggatattgattcgataccatagtattca

SEQ ID NO: 23549 - DNA, 96 bp, Aspergillus viridinutans
  misc_feature: 30
tgaactccagtcacaacgttccatctcgtatgccgtatcattgatcggaaaagcacacgtctgaactccagtcacaacgttccatctcgtatgccg

SEQ ID NO: 23550 - DNA, 96 bp, Aspergillus viridinutans
  misc_feature: 30
tgaactccagtcacaacgttccatctcggtggtcggatcggaagagcacacgtctgaactccagtcacaacgttccatctcgtatgccgtcttctg

SEQ ID NO: 23551 - DNA, 96 bp, Aspergillus viridinutans
  misc_feature: 30
agtagtagcatttattttgccaacctaggctcctcgtctatgtctttgttaaccactcaatgccaacatagatagggtttgtggctcaggcgttca

SEQ ID NO: 23552 - DNA, 96 bp, Aspergillus viridinutans
  misc_feature: 30
cggaagagcgtcgtgtagggaaagagtgtagtactccgtgtagatctcggtggtcgccgtatcattaaaaaaaaaaaaaaaaaaaaaaaaaaaaga

SEQ ID NO: 23553 - DNA, 96 bp, Aspergillus viridinutans
  misc_feature: 30
ccgatcagatcggaagagcgtcgtgtagggaaagagtgtagtactccgtgtagatctcggtggtcgccgtatcattaaaaaaaaaaaaaaaaaaga

SEQ ID NO: 23554 - DNA, 96 bp, Aspergillus viridinutans
  misc_feature: 30
atcggaagagcgtcgtgtagggaaagagtgtagtactccgtgtagatctcggtggtcgccgtatcattaaaaaaaaaaacgacgtgtagggaaaga

SEQ ID NO: 23555 - DNA, 96 bp, Aspergillus viridinutans
  misc_feature: 30
tctttattactaacctagattatttagctatatatagttaatttataaatactactactaaataatagaaggtcttattatctttcttatatatct

SEQ ID NO: 23556 - DNA, 96 bp, Aspergillus viridinutans
  misc_feature: 30
tcttctattagaccctagatattagaattatctataagccttataatataaaagatattatatataagctaggtattattattagctatattaata

SEQ ID NO: 23557 - DNA, 96 bp, Aspergillus viridinutans
  misc_feature: 30
gcggtctcccctgcgccatcttagcgcgttaaacacctatcccacctcattctatgtagtcattccaaacgtagtgcgattccgcgcctaggaaga

SEQ ID NO: 23558 - DNA, 96 bp, Aspergillus viridinutans
  misc_feature: 30
gtcacaacgttccatctcgtatgccgtgatcggaagagcacacgtctgaactccagtcacaacgttccatctcgtatgccgtatcagatcggaaga

SEQ ID NO: 23559 - DNA, 96 bp, Aspergillus viridinutans
  misc_feature: 30
tcttataggcttctaagctataattagttatctctttatctatatataaggctaaatatattactattatttatactataaaggaagctatctagc

SEQ ID NO: 23560 - DNA, 96 bp, Aspergillus viridinutans
  misc_feature: 30
tcttagtatagtactatggtattgatattcctactagataatgatttgatattcatactagttgatgattcgatatcgaatactatggtatcaata

SEQ ID NO: 23561 - DNA, 96 bp, Aspergillus viridinutans
  misc_feature: 30
tcttaattaattctccttacttacttacttatatagcttatctctcttactagattctatcttaattaattcttcttacttacttacttatatagc

SEQ ID NO: 23562 - DNA, 96 bp, Aspergillus viridinutans
  misc_feature: 30
gaactccagtcacaacgttccatctcgtatgccgtgatcggaagagcacacgtctgaactccagtcacaacgttccatctcgtatgccgtatcaga

SEQ ID NO: 23563 - DNA, 96 bp, Aspergillus viridinutans
  misc_feature: 30
tctgaactccagtcacaacgttccatctcgtatgccgtcttctgcttgaaaaaaacacacgtctgaactccagtcacaacgttccatctcgtatgc

SEQ ID NO: 23564 - DNA, 96 bp, Aspergillus viridinutans
  misc_feature: 30
tctcctaataagagatctaaattacttaatatattttatataaagaatatagtatacttagtatataaaatatttatagtagtatctaataatagt

SEQ ID NO: 23565 - DNA, 96 bp, Aspergillus viridinutans
  misc_feature: 30
tctcagcactgcagctgagcaatcaggcctatcaaaatctactgtctcccgcgtacggaaacgcgccaaacagcatggatggaagccaaatcagcc

SEQ ID NO: 23566 - DNA, 96 bp, Aspergillus viridinutans
  misc_feature: 30
tctattagaccctagatattagaattatctataagccttataatataaaagatattatatataagctaggtattattattagctatattaatatag

SEQ ID NO: 23567 - DNA, 96 bp, Aspergillus viridinutans
  misc_feature: 30
tctatattccctctttcttagttatctaggattctattagtattagaatactaactattactattagctattaccttagggatattatttaagtat

SEQ ID NO: 23568 - DNA, 96 bp, Aspergillus viridinutans
  misc_feature: 30
ctattagaccctagatattagaattatctataagccttataatataaaagatattatatataagctaggtattattattagctatattaatataga

SEQ ID NO: 23569 - DNA, 96 bp, Aspergillus viridinutans
  misc_feature: 30
tctaggagttaatcttctactagatagtattattattacttacttattagataaaataattattagatataaagatattatctagaatacctatat

SEQ ID NO: 23570 - DNA, 96 bp, Aspergillus viridinutans
  misc_feature: 30
tcggaagagcgtcgtgtagggaaagagtgtagtactccgtgtagatctcggtggtcgccgtatcattaaaaaaaaaaacgacgtgtagggaaagag

SEQ ID NO: 23571 - DNA, 96 bp, Aspergillus viridinutans
  misc_feature: 30
tcggaagagcacacgtctgaactccagtcacaacgttccatctcgtatgccgtatcattagagcggaagagcacacgtctgaactccagtcacaac

SEQ ID NO: 23572 - DNA, 96 bp, Aspergillus viridinutans
  misc_feature: 30
gcattttggaacgtgcgttgacatccagggagctctggattcacactcttaacctcataataaatccgtttccactccaggtttcgtgtacggcga

SEQ ID NO: 23573 - DNA, 96 bp, Aspergillus viridinutans
  misc_feature: 30
cagcctgccatccagctgcggtctcccctgcgccatcttagcgcgttaaacacctatcccacctcattctatgtagtcattccaaacgtagtgcga

SEQ ID NO: 23574 - DNA, 96 bp, Aspergillus viridinutans
  misc_feature: 30
tcgattcgataccttagtattcgatatcgaatcatcacctagtcaggatatcgattcgataccttagtatttgatatcgaatgatcacctagtatg

SEQ ID NO: 23575 - DNA, 96 bp, Aspergillus viridinutans
  misc_feature: 30
tcgatatcgaatcatcacctagtcaggatatcgattcgataccttagtatttgatatcgaatgatcacctagtatgaatattgataccatagtatt

SEQ ID NO: 23576 - DNA, 96 bp, Aspergillus viridinutans
  misc_feature: 30
tcgatatcgaatcatcaactagtatgaatatcaaatcattatctagtaggaatatcaataccatagtactatactaagatatatatattataaata

SEQ ID NO: 23577 - DNA, 96 bp, Aspergillus viridinutans
  misc_feature: 30
tcgatatcctgactaggtgatgatttgatatcgaatactatggtattgaatcaatatcctgactagttgatgattcgatatttatactaggtgatg

SEQ ID NO: 23578 - DNA, 96 bp, Aspergillus viridinutans
  misc_feature: 30
tcgataccttagtattcgatatcgaatcatcacctagtcaggatatcgattcgataccttagtatttgatatcgaatgatcacctagtatgaatat

SEQ ID NO: 23579 - DNA, 96 bp, Aspergillus viridinutans
  misc_feature: 30
tcctaataagagatctaaattacttaatatattttatataaagaatatagtatacttagtatataaaatatttatagtagtatctaataatagtat

SEQ ID NO: 23580 - DNA, 96 bp, Aspergillus viridinutans
  misc_feature: 30
tccgcagcctcattccccgccacacccacatgggcggggatccagtgtatcttaatgttctctggaggtagcccgcgcgcccctagggcccttact

SEQ ID NO: 23581 - DNA, 96 bp, Aspergillus viridinutans
  misc_feature: 30
ccagtcacaacgttccatctcgtatgccgtgatcggaagagcacacgtctgaactccagtcacaacgttccatctcgtatgccgtatcagatcgga

SEQ ID NO: 23582 - DNA, 96 bp, Aspergillus viridinutans
  misc_feature: 30
aactccagtcacaacgttccatctcgtatgccgtgatcggaagagcacacgtctgaactccagtcacaacgttccatctcgtatgccgtgatcgga

SEQ ID NO: 23583 - DNA, 96 bp, Aspergillus viridinutans
  misc_feature: 30
gactcaataccttagtatttgatatcgaatcatcaactagtcaggatatcgactcaataccttagtattcgatatcgaatcatcacctagtatgga

SEQ ID NO: 23584 - DNA, 96 bp, Aspergillus viridinutans
  misc_feature: 30
tccagtcacaacgttccatctcgtatgccgtgatcggaagagcacacgtctgaactccagtcacaacgttccatctcgtatgccgtatcagatcgg

SEQ ID NO: 23585 - DNA, 96 bp, Aspergillus viridinutans
  misc_feature: 30
tccagtcacaacgttccatctcgtatgccgtatccgatcggaagagcacacgtctgaactccagtcacaacgttccatctcgtatgccgtcttctg

SEQ ID NO: 23586 - DNA, 96 bp, Aspergillus viridinutans
  misc_feature: 30
tccagtcacaacgttccatctcgtatgccgtatcatgatcggaagagcagatcggaagagcacacgtctgaactccagtcacaacgttccatctcg

SEQ ID NO: 23587 - DNA, 96 bp, Aspergillus viridinutans
  misc_feature: 30
tccagtcacaacgttccatctcgtatgccgtatcatgatcggaagagcacacgtctgaactccagtcacaacgttccatctcgtatgccgtgatcg

SEQ ID NO: 23588 - DNA, 96 bp, Aspergillus viridinutans
  misc_feature: 30
tccagtcacaacgttccatctcgtatgccgtagatcggaagagcacacgtctgaactccagtcacaacgttccatctcgtatgccgtcttctgctc

SEQ ID NO: 23589 - DNA, 96 bp, Aspergillus viridinutans
  misc_feature: 30
tccagtcacaacgttccatctcggtggtcggatcggaagagcacacgtctgaactccagtcacaacgttccatctcgtatgccgtcttctgcttga

SEQ ID NO: 23590 - DNA, 96 bp, Aspergillus viridinutans
  misc_feature: 30
atgggaaacgcggaaagcatatgtactccccccatgggagccaccccttctttgcacgattaaggaccatgaagccgcactaataacccacaatga

SEQ ID NO: 23591 - DNA, 96 bp, Aspergillus viridinutans
  misc_feature: 30
tcatccgcagcctcattccccgccacacccacatgggcggggatccagtgtatcttaatgttctctggaggtagcccgcgcgcccctagggccctt

SEQ ID NO: 23592 - DNA, 96 bp, Aspergillus viridinutans
  misc_feature: 30
cgatatcctgactaggtgatgatttgatatcgaatactatggtattgaatcaatatcctgactagttgatgattcgatatttatactaggtgatga

SEQ ID NO: 23593 - DNA, 96 bp, Aspergillus viridinutans
  misc_feature: 30
tcagaggaaacatcttataattaaaagtcttttaggagttttactaaaaaaaattagagatataagaatgtataaaatttcccttagaaaactctt

SEQ ID NO: 23594 - DNA, 96 bp, Aspergillus viridinutans
  misc_feature: 30
tcacaacgttccatctcgtatgccgtatcatgatcggaagagcagatcggaagagcacacgtctgaactccagtcacaacgttccatctcgtatgc

SEQ ID NO: 23595 - DNA, 96 bp, Aspergillus viridinutans
  misc_feature: 30
tattggtcttactttattactcctcttttcccccaacttctgttttccctcttcttcttcttcttcttcctcctcctcatcaacgaacaccagtct

SEQ ID NO: 23596 - DNA, 96 bp, Aspergillus viridinutans
  misc_feature: 30
agctaggcattattattagctatattaatatagattatataggatgtattaatatatgctatttaactactagatatatctttatatttaataata

SEQ ID NO: 23597 - DNA, 96 bp, Aspergillus viridinutans
  misc_feature: 30
gtgtaaggctattagtaaactatttaatattttacttatcagcctagctacctattatctaggcatgaagatagatctagatattaagaaaagata

SEQ ID NO: 23598 - DNA, 96 bp, Aspergillus viridinutans
  misc_feature: 30
aatatcgaatgtcatctagtagggatatcgaatgtcatctagtatcgaaatcaaattaatatcgaatggtcatctagtattgatatcgaatcgata

SEQ ID NO: 23599 - DNA, 96 bp, Aspergillus viridinutans
  misc_feature: 30
tatcctgactaggtgatgatttgatatcgaatactatggtattgaatcaatatcctgactagttgatgattcgatatttatactaggtgatgattt

SEQ ID NO: 23600 - DNA, 96 bp, Aspergillus viridinutans
  misc_feature: 30
accttagtattcgatatcgaatcatcacctagtcaggatatcgattcgataccttagtatttgatatcgaatgatcacctagtatgaatattgata

SEQ ID NO: 23601 - DNA, 96 bp, Aspergillus viridinutans
  misc_feature: 30
tatattaaatttttacttaggccttactagtatcttactaatatcttactttaaatatatttcttattattcttatacttctattatcccttaaac

SEQ ID NO: 23602 - DNA, 96 bp, Aspergillus viridinutans
  misc_feature: 30
tatatatattattagaataagtaataatattagtataggtatatataatagaagctacatatttttatagagatttttaattaattttataacctc

SEQ ID NO: 23603 - DNA, 96 bp, Aspergillus viridinutans
  misc_feature: 30
aatatcgaattcttatatagtagggatattgaattgaatagtagtaatatataattcttatagaggtatagtaataggatattaaataccactata

SEQ ID NO: 23604 - DNA, 96 bp, Aspergillus viridinutans
  misc_feature: 30
tatagattatttaacctaggtatatacatatttagtttttataaattattattatttagatgtataaatgtctatcttttattactatctttatta

SEQ ID NO: 23605 - DNA, 96 bp, Aspergillus viridinutans
  misc_feature: 30
aggtaagttaggttactcaactattaatatactatataataaactactataatgtgtaagtatttaatatttatactatctaagtatttaattata

SEQ ID NO: 23606 - DNA, 96 bp, Aspergillus viridinutans
  misc_feature: 30
gtctataaagattatactactataatctaacttaagttagatttttatttataattatataagttataattaaataaattaagaattaagattata

SEQ ID NO: 23607 - DNA, 96 bp, Aspergillus viridinutans
  misc_feature: 30
agaccctagatattagaattatctataagccttataatataaaagatattatatataagctaggtattattattagctatattaatatagattata

SEQ ID NO: 23608 - DNA, 96 bp, Aspergillus viridinutans
  misc_feature: 30
atagcatatattaatacatcctatataatctatattaatatagctaataataatgcctagcttacatataatatcttttatgttatgaggcttata

SEQ ID NO: 23609 - DNA, 96 bp, Aspergillus viridinutans
  misc_feature: 30
ctaacttatagctaaattaattaattcttatatttaatatatcttaataactttagtatatatactatttttaataatttaattctctaatttata

SEQ ID NO: 23610 - DNA, 96 bp, Aspergillus viridinutans
  misc_feature: 30
tagtatggatatcgaatcatcaactagtatgaatattgataccatagtattcaatatcaaatcatcacctagtatggatatcgattcgatacctta

SEQ ID NO: 23611 - DNA, 96 bp, Aspergillus viridinutans
  misc_feature: 30
gtatttaatatcctattactatacctctataagaattatatattactactattcaattcaatatccctactatataagaattcgatattgatacta

SEQ ID NO: 23612 - DNA, 96 bp, Aspergillus viridinutans
  misc_feature: 30
taggtaagctagatagcttcctttatagtatgaataatagtaatatatttagtcttatatatagataaagagataactaattatagcttagaagcc

SEQ ID NO: 23613 - DNA, 96 bp, Aspergillus viridinutans
  misc_feature: 30
ggtaagctagatagcttcctttatagtatgaataatagtaatatatttagtcttatatatagataaagagataactaattatagcttagaagccta

SEQ ID NO: 23614 - DNA, 96 bp, Aspergillus viridinutans
  misc_feature: 30
tagaggagagagtaataataataagaatattaatagagaatagagaaatttagtactaagagattattaagaaagataaatatagaaataatctag

SEQ ID NO: 23615 - DNA, 96 bp, Aspergillus viridinutans
  misc_feature: 30
ctcctaataagagatctaaattacttaatatattttatataaagaatatagtatacttagtatataaaatatttatagtagtatctaataatagta

SEQ ID NO: 23616 - DNA, 96 bp, Aspergillus viridinutans
  misc_feature: 30
tactagtaattttagtaagtagattagggcacctagcataaataatatagaggtaggtaagtataacttagctacttctttatctataactcctag

SEQ ID NO: 23617 - DNA, 96 bp, Aspergillus viridinutans
  misc_feature: 30
tactagattatttctatatttatctttcttaataatctcttagtactaaatttctctattctctattaatattcttattattattactctctcctc

SEQ ID NO: 23618 - DNA, 96 bp, Aspergillus viridinutans
  misc_feature: 30
gagcacacgtctgaactccagtcacaacgttccatctcgtatgccgtcttctgcttgaaaaaaaaaagaactccagtcacaacgttccatctcgta

SEQ ID NO: 23619 - DNA, 96 bp, Aspergillus viridinutans
  misc_feature: 30
cacgtctgaactccagtcacaacgttccatctcgtatgccgtcttctgctcgaaaaaacacacgtctgaactccagtcacaacgttccatctcgta

SEQ ID NO: 23620 - DNA, 96 bp, Aspergillus viridinutans
  misc_feature: 30
cagtcacaacgttccatctcgtatgccgtatcatgatcggaagagcagatcggaagagcacacgtctgaactccagtcacaacgttccatctcgta

SEQ ID NO: 23621 - DNA, 96 bp, Aspergillus viridinutans
  misc_feature: 30
tacctcttctttaatacctatagtgtgctccttatcttatatattaataatatagagattactagaccttctaagtagattgctaagggggtgtgt

SEQ ID NO: 23622 - DNA, 96 bp, Aspergillus viridinutans
  misc_feature: 30
ggggactggtttacgcttgtggttatggttatggaatgattatggttatggttgaatggtatgcatatgaatataatgaattgactgtgttatgta

SEQ ID NO: 23623 - DNA, 96 bp, Aspergillus viridinutans
  misc_feature: 30
acctcttctttaatacctatagtgtgctccttatcttatatattaataatatagagattactagaccttctaagtagattgctaagggggtgtgta

SEQ ID NO: 23624 - DNA, 96 bp, Aspergillus viridinutans
  misc_feature: 30
tacaacaactctgccagtgacttcagctactggagttcccggtgtaccgcaaagtcctggaggcggaggcgcagccgcaggacctacaacaactct

SEQ ID NO: 23625 - DNA, 96 bp, Aspergillus viridinutans
  misc_feature: 30
aatatagctaataataatacctagcttatatataatatcttttatattataaggcttatagataattctaatatctagggtctaatagaagaatta

SEQ ID NO: 23626 - DNA, 96 bp, Aspergillus viridinutans
  misc_feature: 30
taattaccttatagaaggaagaaggcttaataatattagtataattattactaatatatatatacctagtaataatataattctatatatacttct

SEQ ID NO: 23627 - DNA, 96 bp, Aspergillus viridinutans
  misc_feature: 30
taatgtgtatctgcaactaaacaagagaaacgatcttaccatccagatactgtccagcaaagacacaagaattattcagatttcatgttttggggg

SEQ ID NO: 23628 - DNA, 96 bp, Aspergillus viridinutans
  misc_feature: 30
ctggtagcctaataatataataatctaataggattaaggatggtttaagaaataatataagaataataatagtaaagatagaagtaaggcctatta

SEQ ID NO: 23629 - DNA, 96 bp, Aspergillus viridinutans
  misc_feature: 30
taagtaagtaagaagaattaattaagatagaatctagtaagagagataagctatataagtaagtaagtaaggagaattaattaagatagaatctag

SEQ ID NO: 23630 - DNA, 96 bp, Aspergillus viridinutans
  misc_feature: 30
gatatcgaatcgaatagtatcaatattgaatcaaattctcacatagtagggatatcaaatcaaatcaaatcaaatagtatcaatatcgaattctta

SEQ ID NO: 23631 - DNA, 96 bp, Aspergillus viridinutans
  misc_feature: 30
taaagattatactactataatctaacttaagttagatttttatttataattatataagttataattaaataaattaagaattaagattatattaat

SEQ ID NO: 23632 - DNA, 96 bp, Aspergillus viridinutans
  misc_feature: 30
atattatatgtaagctaggcattattattagctatattaatatagattatataggatgtattaatatatgctatttaactactagatatatcttta

SEQ ID NO: 23633 - DNA, 96 bp, Aspergillus viridinutans
  misc_feature: 30
atcggaagagcagatcggaagagcacacgtctgaactccagtcacaacgttccatctcgtatgccgtcttctgcttgaaaaaaaaaaaaaaaaaac

SEQ ID NO: 23634 - DNA, 96 bp, Aspergillus viridinutans
  misc_feature: 30
gatcggaagagcacacgtctgaactccagtcacaacgttccatctcgtatgccgtctcatgctcggaagagcacacgtctgaactccagtcacaac

SEQ ID NO: 23635 - DNA, 96 bp, Aspergillus viridinutans
  misc_feature: 30
atgatcacctagtatgaatattgataccatagtattcctcatcatctagtcaggatatcgattcaataccatagtattcgatatcgaatcatcaac

SEQ ID NO: 23636 - DNA, 96 bp, Aspergillus viridinutans
  misc_feature: 30
acggcgaccaccgagatctacacggagtactacactctttccctacacgacgctcttccgatcgatcggaagagcacacgtctgaactccagtcac

SEQ ID NO: 23637 - DNA, 96 bp, Aspergillus viridinutans
  misc_feature: 30
cggtctcccctgcgccatcttagcgcgttaaacacctatcccacctcattctatgtagtcattccaaacgtagtgcgattccgcgcctaggaagac

SEQ ID NO: 23638 - DNA, 96 bp, Aspergillus viridinutans
  misc_feature: 30
gtctgaactccagtcacaacgttccatctcgtatgccgtcttctgcttgaaaaaaacacacgtctgaactccagtcacaacgttccatctcgtatg

SEQ ID NO: 23639 - DNA, 96 bp, Aspergillus viridinutans
  misc_feature: 30
gtctgaactccagtcacaacgttccatctcgtatgccgtatcatgatcggaagaacacacgtctgaactccagtcacaacgttccatctcgtatgc

SEQ ID NO: 23640 - DNA, 96 bp, Aspergillus viridinutans
  misc_feature: 30
gtcacaacgttccatctcgtatgccgtatcatgatcggaagagcagatcggaagagcacacgtctgaactccagtcacaacgttccatctcgtatg

SEQ ID NO: 23641 - DNA, 96 bp, Aspergillus viridinutans
  misc_feature: 30
gtagtagcatttattttgccaacctaggctcctcgtctatgtctttgttaaccactcaatgccaacatagatagggtttgtggctcaggcgttcag

SEQ ID NO: 23642 - DNA, 96 bp, Aspergillus viridinutans
  misc_feature: 30
atctgcaactaaacaagagaaacgatcttaccatccagatactgtccagcaaagacacaagaattattcagatttcatgttttggggggctattac

SEQ ID NO: 23643 - DNA, 96 bp, Aspergillus viridinutans
  misc_feature: 30
gtaagtagattagggcacctagcataaataatatagaggtaggtaagtataacttagctacttctttatctataactcctagggcctagggggtcc

SEQ ID NO: 23644 - DNA, 96 bp, Aspergillus viridinutans
  misc_feature: 30
ggtatttaatatcctattactatacctctataagaattatatattactactattcaattcaatatccctactatataagaattcgatattgatact

SEQ ID NO: 23645 - DNA, 96 bp, Aspergillus viridinutans
  misc_feature: 30
ggtatgtagtactatgtacacatttagtttttctagtttattattatttatatatataagtagctatcttttattactatctttattattagaaag

SEQ ID NO: 23646 - DNA, 96 bp, Aspergillus viridinutans
  misc_feature: 30
acaggtgtattttatgttagctacatgtatatatatacaaggaggatatagattataagtatataactataatatacctcatgcctagatttagcc

SEQ ID NO: 23647 - DNA, 96 bp, Aspergillus viridinutans
  misc_feature: 30
ggcgcctcagctatctgccttcgagccgctgacagcgcgcgacaggtgcagcagagccacctaggaacagagacagactcaactgtgtatgctgct

SEQ ID NO: 23648 - DNA, 96 bp, Aspergillus viridinutans
  misc_feature: 30
ctgaactccagtcacaacgttccatctcgtatgccgtatcattgatcggaaaagcacacgtctgaactccagtcacaacgttccatctcgtatgcc

SEQ ID NO: 23649 - DNA, 96 bp, Aspergillus viridinutans
  misc_feature: 30
acacgtctgaactccagtcacaacgttccatctcgtatgccgtgatcggaagggcacacgtctgaactccagtcacaacgttccatctcgtatgcc

SEQ ID NO: 23650 - DNA, 96 bp, Aspergillus viridinutans
  misc_feature: 30
ggatatcgaatcgaatagtatcaatattgaatcaaattctcacatagtagggatatcaaatcaaatcaaatcaaatagtatcaatatcgaattctt

SEQ ID NO: 23651 - DNA, 96 bp, Aspergillus viridinutans
  misc_feature: 30
ctgccatccagctgcggtctcccctgcgccatcttagcgcgttaaacacctatcccacctcattctatgtagtcattccaaacgtagtgcgattcc

SEQ ID NO: 23652 - DNA, 96 bp, Aspergillus viridinutans
  misc_feature: 30
attattattatcctctttattattattatctaatcccttactattatccttatagaaggttattacttatatagttattacttaggtagttattcc

SEQ ID NO: 23653 - DNA, 96 bp, Aspergillus viridinutans
  misc_feature: 30
ggaagagcacacgtctgaactccagtcacaacgttccatctcgtatgccgtcttctgcttgaaaaaaaaaagaactccagtcacaacgttccatct

SEQ ID NO: 23654 - DNA, 96 bp, Aspergillus viridinutans
  misc_feature: 30
ggaagagcacacgtctgaactccagtcacaacgttccatctcgtatgccgtatcattagagcggaagagcacacgtctgaactccagtcacaacgt

SEQ ID NO: 23655 - DNA, 96 bp, Aspergillus viridinutans
  misc_feature: 30
atcggaagagcacacgtctgaactccagtcacaacgttccatctcgtatgccgtagatcggaagaacacacgtctgaactccagtcacaacgttcc

SEQ ID NO: 23656 - DNA, 96 bp, Aspergillus viridinutans
  misc_feature: 30
agagcacacgtctgaactccagtcacaacgttccatctcgtatgccgtatcattagagcggaagagcacacgtctgaactccagtcacaacgttcc

SEQ ID NO: 23657 - DNA, 96 bp, Aspergillus viridinutans
  misc_feature: 30
gctcttccgatcagatcggaagagcgtcgtgtagggaaagagtgtagtactccgtgtagatctcggtggtcgccgtatcattaaaaaaaaaaaagg

SEQ ID NO: 23658 - DNA, 96 bp, Aspergillus viridinutans
  misc_feature: 30
ccggccaactggtcgccttcgcgcgcgcgcgcgcccaccggcgcctctcccgcgggcggctcctcgacccgtccacgccgaaccccccccccccgc

SEQ ID NO: 23659 - DNA, 96 bp, Aspergillus viridinutans
  misc_feature: 30
cagcattttggaacgtgcgttgacatccagggagctctggattcacactcttaacctcataataaatccgtttccactccaggtttcgtgtacggc

SEQ ID NO: 23660 - DNA, 96 bp, Aspergillus viridinutans
  misc_feature: 30
cacacgtctgaactccagtcacaacgttccatctcgtatgccgtcttctgcttgaaaaaaaaaagaactccagtcacaacgttccatctcgtatgc

SEQ ID NO: 23661 - DNA, 96 bp, Aspergillus viridinutans
  misc_feature: 30
cacacgtctgaactccagtcacaacgttccatctcgtatgccgtgatcggaagggcacacgtctgaactccagtcacaacgttccatctcgtatgc

SEQ ID NO: 23662 - DNA, 96 bp, Aspergillus viridinutans
  misc_feature: 30
cgtaggcgcctcagctatctgccttcgagccgctgacagcgcgcgacaggtgcagcagagccacctaggaacagagacagactcaactgtgtatgc

SEQ ID NO: 23663 - DNA, 96 bp, Aspergillus viridinutans
  misc_feature: 30
ccagtcacaacgttccatctcgtatgccgtatccgatcggaagagcacacgtctgaactccagtcacaacgttccatctcgtatgccgtcttctgc

SEQ ID NO: 23664 - DNA, 96 bp, Aspergillus viridinutans
  misc_feature: 30
gaactccagtcacaacgttccatctcggtggtcggatcggaagagcacacgtctgaactccagtcacaacgttccatctcgtatgccgtcttctgc

SEQ ID NO: 23665 - DNA, 96 bp, Aspergillus viridinutans
  misc_feature: 30
gcacacgtctgaactccagtcacaacgttccatctcgtatgccgtcttctgcttgaaaaaaaaaagaactccagtcacaacgttccatctcgtatg

SEQ ID NO: 23666 - DNA, 96 bp, Aspergillus viridinutans
  misc_feature: 30
gcacacgtctgaactccagtcacaacgttccatctcgtatgccgtcttctgctcgaaaaaacacacgtctgaactccagtcacaacgttccatctc

SEQ ID NO: 23667 - DNA, 96 bp, Aspergillus viridinutans
  misc_feature: 30
gcacacgtctgaactccagtcacaacgttccatctcgtatgccgtatcattgatcagaagagcacacgtctgaactccagtcacaacgttccatct

SEQ ID NO: 23668 - DNA, 96 bp, Aspergillus viridinutans
  misc_feature: 30
gcacacgtctgaactccagtcacaacgttccatctcgtatgccgtatcattagagcggaagagcacacgtctgaactccagtcacaacgttccatc

SEQ ID NO: 23669 - DNA, 96 bp, Aspergillus viridinutans
  misc_feature: 30
atgacgatgtaacgaccttccatttctctgtctgtctctgtctctgtctctcatctctcatcatcttgtgtgtctcattgatttcctttcacttgc

SEQ ID NO: 23670 - DNA, 96 bp, Aspergillus viridinutans
  misc_feature: 30
cggaagagcacacgtctgaactccagtcacaacgttccatctcgtatgccgtcttctgcttgaaaaaaaaaagaactccagtcacaacgttccatc

SEQ ID NO: 23671 - DNA, 96 bp, Aspergillus viridinutans
  misc_feature: 30
agcacacgtctgaactccagtcacaacgttccatctcgtatgccgtatcattgatcagaagagcacacgtctgaactccagtcacaacgttccatc

SEQ ID NO: 23672 - DNA, 96 bp, Aspergillus viridinutans
  misc_feature: 30
aactccagtcacaacgttccatctcgtatgccgtatcatgatcggaagagcagatcggaagagcacacgtctgaactccagtcacaacgttccatc

SEQ ID NO: 23673 - DNA, 96 bp, Aspergillus viridinutans
  misc_feature: 30
cggaagagcacacgtctgaactccagtcacaacgttccatctcgtatgccgtgatcggaagggcacacgtctgaactccagtcacaacgttccatc

SEQ ID NO: 23674 - DNA, 96 bp, Aspergillus viridinutans
  misc_feature: 30
actccagtcacaacgttccatctcgtatgccgtgatcggaagagcacacgtctgaactccagtcacaacgttccatctcgtatgccgtatcagatc

SEQ ID NO: 23675 - DNA, 96 bp, Aspergillus viridinutans
  misc_feature: 30
gatcggaagagcgtcgtgtagggaaagagtgtagtactccgtgtagatctcggtggtcgccgtatcattaaaaaaaaaaacgacgtgtagggaaag

SEQ ID NO: 23676 - DNA, 96 bp, Aspergillus viridinutans
  misc_feature: 30
cctatcttataggcttctaagctataattagttatctctttatctatatataagactaaatatattactattattcatactataaaggaagctatc

SEQ ID NO: 23677 - DNA, 96 bp, Aspergillus viridinutans
  misc_feature: 30
gatagcagcatatactaaggatattaataccatagtattaatattaaaccatgacctaccatagtattcaatatcaaatcatcacctagtatggat

SEQ ID NO: 23678 - DNA, 96 bp, Aspergillus viridinutans
  misc_feature: 30
cctaataagagatctaaattacttaatatattttatataaagaatatagtatacttagtatataaaatatttatagtagtatctaataatagtatc

SEQ ID NO: 23679 - DNA, 96 bp, Aspergillus viridinutans
  misc_feature: 30
gataccttagtattcgatatcgaatcatcacctagtcaggatatcgattcgataccttagtatttgatatcgaatgatcacctagtatgaatattg

SEQ ID NO: 23680 - DNA, 96 bp, Aspergillus viridinutans
  misc_feature: 30
ccgcagcctcattccccgccacacccacatgggcggggatccagtgtatcttaatgttctctggaggtagcccgcgcgcccctagggcccttactc

SEQ ID NO: 23681 - DNA, 96 bp, Aspergillus viridinutans
  misc_feature: 30
gagcacacgtctgaactccagtcacaacgttccatctcgtatgccgtatcattgatcggaagagcaaacgtctgaactccagtcacaacgttccat

SEQ ID NO: 23682 - DNA, 96 bp, Aspergillus viridinutans
  misc_feature: 30
gagcacacgtctgaactccagtcacaacgttccatctcgtatgccgtatcattgatcagaagagcacacgtctgaactccagtcacaacgttccat

SEQ ID NO: 23683 - DNA, 96 bp, Aspergillus viridinutans
  misc_feature: 30
gaagagcacacgtctgaactccagtcacaacgttccatctcgtatgccgtcttctgcttgaaaaaaaaaagaactccagtcacaacgttccatctc

SEQ ID NO: 23684 - DNA, 96 bp, Aspergillus viridinutans
  misc_feature: 30
cacacgtctgaactccagtcacaacgttccatctcgtatgccgtatcattgatcagaagagcacacgtctgaactccagtcacaacgttccatctc

SEQ ID NO: 23685 - DNA, 96 bp, Aspergillus viridinutans
  misc_feature: 30
acacgtctgaactccagtcacaacgttccatctcgtatgccgtatcattagagcggaagagcacacgtctgaactccagtcacaacgttccatctc

SEQ ID NO: 23686 - DNA, 96 bp, Aspergillus viridinutans
  misc_feature: 30
ctccagtcacaacgttccatctcgtatgccgtatcatgatcggaagagcagatcggaagagcacacgtctgaactccagtcacaacgttccatctc

SEQ ID NO: 23687 - DNA, 96 bp, Aspergillus viridinutans
  misc_feature: 30
agcctcattccccgccacacccacatgggcggggatccagtgtatcttaatgttctctggaggtagcccgcgcgcccctagggcccttactctctc

SEQ ID NO: 23688 - DNA, 96 bp, Aspergillus viridinutans
  misc_feature: 30
actccagtcacaacgttccatctcgtatgccgtatcatgatcggaagagcacacgtctgaactccagtcacaacgttccatctcgtatgccgtctc

SEQ ID NO: 23689 - DNA, 96 bp, Aspergillus viridinutans
  misc_feature: 30
gaccagcacatggtcatctacactgatggcagcggctaccagggccgcgtaggcgcctcagctatctgccttcgagccgctgacagcgcgcgacag

SEQ ID NO: 23690 - DNA, 96 bp, Aspergillus viridinutans
  misc_feature: 30
gaatcatcaactagtatgaatatcaaatcattatctagtaggaatatcaataccatagtactatactaagatatatatattataaatatactgtat

SEQ ID NO: 23691 - DNA, 96 bp, Aspergillus viridinutans
  misc_feature: 30
gaagagcacacgtctgaactccagtcacaacgttccatctcgtatgccgtatcattagagcggaagagcacacgtctgaactccagtcacaacgtt

SEQ ID NO: 23692 - DNA, 96 bp, Aspergillus viridinutans
  misc_feature: 30
actccagtcacaacgttccatctcgtatgccgtatccgatcggaagagcacacgtctgaactccagtcacaacgttccatctcgtatgccgtcttc

SEQ ID NO: 23693 - DNA, 96 bp, Aspergillus viridinutans
  misc_feature: 30
gaactccagtcacaacgttccatctcgtatgccgtatcattgatcggaaaagcacacgtctgaactccagtcacaacgttccatctcgtatgccgt

SEQ ID NO: 23694 - DNA, 96 bp, Aspergillus viridinutans
  misc_feature: 30
aagagcacacgtctgaactccagtcacaacgttccatctcgtatgccgtatcattagagcggaagagcacacgtctgaactccagtcacaacgttc

SEQ ID NO: 23695 - DNA, 96 bp, Aspergillus viridinutans
  misc_feature: 30
ctttccatagatttttatatagtaaggtaccttagctggtcggccatctctggatatggattgaagaatctgtgcaacttcaaatgcttccttttg

SEQ ID NO: 23696 - DNA, 96 bp, Aspergillus viridinutans
  misc_feature: 30
ctttattctagccttatttcttaaggtttttatctttattttattagattttattactcttatagttattttattaagactacttattaatatcat

SEQ ID NO: 23697 - DNA, 96 bp, Aspergillus viridinutans
  misc_feature: 30
aggcctaccttcctggtagcctaataatataataatctaataggattaaggatggtttaagaaataatataagaataataatagtaaagatagaag

SEQ ID NO: 23698 - DNA, 96 bp, Aspergillus viridinutans
  misc_feature: 30
agtcacaacgttccatctcgtatgccgtgatcggaagagcacacgtctgaactccagtcacaacgttccatctcgtatgccgtatcagatcggaag

SEQ ID NO: 23699 - DNA, 96 bp, Aspergillus viridinutans
  misc_feature: 30
cttatagctaaattaattaattcttatatttaatatatcttaataactttagtatatatactatttttaataatttaattctctaatttatacttt

SEQ ID NO: 23700 - DNA, 96 bp, Aspergillus viridinutans
  misc_feature: 30
cttagtatagtactatggtattgatattcctactagataatgatttgatattcatactagttgatgattcgatatcgaatactatggtatcaatat

SEQ ID NO: 23701 - DNA, 96 bp, Aspergillus viridinutans
  misc_feature: 30
ctgtaattttagtaattttaacttctagatattaagagagagaaataatattttagcatcctaagaaagagtatttatatacttcagactatatat

SEQ ID NO: 23702 - DNA, 96 bp, Aspergillus viridinutans
  misc_feature: 30
ctgcaactaaacaagagaaacgatcttaccatccagatactgtccagcaaagacacaagaattattcagatttcatgttttggggggctattacat

SEQ ID NO: 23703 - DNA, 96 bp, Aspergillus viridinutans
  misc_feature: 30
cctagtcaggatatcgattcgataccttagtatttgatatcgaatgatcacctagtatgaatattgataccatagtattcctcatcatctagtcag

SEQ ID NO: 23704 - DNA, 96 bp, Aspergillus viridinutans
  misc_feature: 30
ctgaactccagtcacaacgttccatctcggtggtcggatcggaagagcacacgtctgaactccagtcacaacgttccatctcgtatgccgtcttct

SEQ ID NO: 23705 - DNA, 96 bp, Aspergillus viridinutans
  misc_feature: 30
atcggaagagcgtcgtgtagggaaagagtgtagtactccgtgtagatctcggtggtcgccgtatcattaaaaaaaaaaaaaaaaaaaaaaaaagag

SEQ ID NO: 23706 - DNA, 96 bp, Aspergillus viridinutans
  misc_feature: 30
ctccagtcacaacgttccatctcgtatgccgtgatcggaagagcacacgtctgaactccagtcacaacgttccatctcgtatgccgtatcagatcg

SEQ ID NO: 23707 - DNA, 96 bp, Aspergillus viridinutans
  misc_feature: 30
ctccagtcacaacgttccatctcgtatgccgtatccgatcggaagagcacacgtctgaactccagtcacaacgttccatctcgtatgccgtcttct

SEQ ID NO: 23708 - DNA, 96 bp, Aspergillus viridinutans
  misc_feature: 30
ctccagtcacaacgttccatctcggtggtcggatcggaagagcacacgtctgaactccagtcacaacgttccatctcgtatgccgtcttctgcttg

SEQ ID NO: 23709 - DNA, 96 bp, Aspergillus viridinutans
  misc_feature: 30
ctatattccctctttcttagttatctaggattctattagtattagaatactaactattactattagctattaccttagggatattatttaagtatt

SEQ ID NO: 23710 - DNA, 96 bp, Aspergillus viridinutans
  misc_feature: 30
ctatataatctatattaatatagctaataataatacctagcttatatataatatcttttatattataaggcttatagataattctaatatctaggg

SEQ ID NO: 23711 - DNA, 96 bp, Aspergillus viridinutans
  misc_feature: 30
ctataaagattatactactataatctaacttaagttagatttttatttataattatataagttataattaaataaattaagaattaagattatatt

SEQ ID NO: 23712 - DNA, 96 bp, Aspergillus viridinutans
  misc_feature: 30
ctaggagttaatcttctactagatagtattattattacttacttattagataaaataattattagatataaagatattatctagaatacctatatt

SEQ ID NO: 23713 - DNA, 96 bp, Aspergillus viridinutans
  misc_feature: 30
ctagagcttaaagataataataagtaggaggttaaagaggttaaagataattaatttattaataataaactctattatttagtaaagtagaaagat

SEQ ID NO: 23714 - DNA, 96 bp, Aspergillus viridinutans
  misc_feature: 30
agtatggatatcgaatcatcaactagtatgaatattgataccatagtattcaatatcaaatcatcacctagtatggatatcgattcgataccttag

SEQ ID NO: 23715 - DNA, 96 bp, Aspergillus viridinutans
  misc_feature: 30
agagagagaggaatgaagcagaaagagttcagagtaaacaaaaagaaaaagagaacagaagagaagagagaagagagacaataaggaatcccttag

SEQ ID NO: 23716 - DNA, 96 bp, Aspergillus viridinutans
  misc_feature: 30
cggaagagcacacgtctgaactccagtcacaacgttccatctcgtatgccgtatcattagagcggaagagcacacgtctgaactccagtcacaacg

SEQ ID NO: 23717 - DNA, 96 bp, Aspergillus viridinutans
  misc_feature: 30
cgtctgaactccagtcacaacgttccatctcgtatgccgtcttctgcttgaaaaaaacacacgtctgaactccagtcacaacgttccatctcgtat

SEQ ID NO: 23718 - DNA, 96 bp, Aspergillus viridinutans
  misc_feature: 30
cacgtctgaactccagtcacaacgttccatctcgtatgccgtgatcggaagggcacacgtctgaactccagtcacaacgttccatctcgtatgccg

SEQ ID NO: 23719 - DNA, 96 bp, Aspergillus viridinutans
  misc_feature: 30
agcattttggaacgtgcgttgacatccagggagctctggattcacactcttaacctcataataaatccgtttccactccaggtttcgtgtacggcg

SEQ ID NO: 23720 - DNA, 96 bp, Aspergillus viridinutans
  misc_feature: 30
cgatatcgaatcatcaactagtatgaatatcaaatcattatctagtaggaatatcaataccatagtactatactaagatatatatattataaatat

SEQ ID NO: 23721 - DNA, 96 bp, Aspergillus viridinutans
  misc_feature: 30
ccagtcacaacgttccatctcgtatgccgtagatcggaagagcacacgtctgaactccagtcacaacgttccatctcgtatgccgtcttctgctcg

SEQ ID NO: 23722 - DNA, 96 bp, Aspergillus viridinutans
  misc_feature: 30
aagagcacacgtctgaactccagtcacaacgttccatctcgtatgccgtcttctgcttgaaaaaaaaaagaactccagtcacaacgttccatctcg

SEQ ID NO: 23723 - DNA, 96 bp, Aspergillus viridinutans
  misc_feature: 30
cacacgtctgaactccagtcacaacgttccatctcgtatgccgtcttctgctcgaaaaaacacacgtctgaactccagtcacaacgttccatctcg

SEQ ID NO: 23724 - DNA, 96 bp, Aspergillus viridinutans
  misc_feature: 30
cacgtctgaactccagtcacaacgttccatctcgtatgccgtatcattagagcggaagagcacacgtctgaactccagtcacaacgttccatctcg

SEQ ID NO: 23725 - DNA, 96 bp, Aspergillus viridinutans
  misc_feature: 30
cgactcaataccttagtatttgatatcgaatcatcaactagtcaggatatcgactcaataccttagtattcgatatcgaatcatcacctagtatgg

SEQ ID NO: 23726 - DNA, 96 bp, Aspergillus viridinutans
  misc_feature: 30
ccttataatataaaagatattatatataagctaggtattattattagctatattaatatagattatataggatatattaatatatactatttaact

SEQ ID NO: 23727 - DNA, 96 bp, Aspergillus viridinutans
  misc_feature: 30
ccttactagtatcttactaatatcttactttaaatatatttcttattattcttatacttctattatcccttaaaccttctacttttactatctctt

SEQ ID NO: 23728 - DNA, 96 bp, Aspergillus viridinutans
  misc_feature: 30
cctagtatggatatcgattcgataccttagtattcgatatcgaatcatcacctagtcaggatatcgattcgataccttagtatttgatatcgaatg

SEQ ID NO: 23729 - DNA, 96 bp, Aspergillus viridinutans
  misc_feature: 30
cctagatattaagaaaagatagattaagctatcttaatatacttatctttaatatcttattaatatatttaatctatatttagttaaaactatagt

SEQ ID NO: 23730 - DNA, 96 bp, Aspergillus viridinutans
  misc_feature: 30
ccagtcacaacgttccatctcgtatgccgtatcatgatcggaagagcacacgtctgaactccagtcacaacgttccatctcgtatgccgtgatcgg

SEQ ID NO: 23731 - DNA, 96 bp, Aspergillus viridinutans
  misc_feature: 30
aatgtgtatctgcaactaaacaagagaaacgatcttaccatccagatactgtccagcaaagacacaagaattattcagatttcatgttttgggggg

SEQ ID NO: 23732 - DNA, 96 bp, Aspergillus viridinutans
  misc_feature: 30
caacgtgtatctgcgactaaacaagagaagcaatcttaccatccacatactgtccagcaaagacacaagaatcattcagatttcatgttttggggg

SEQ ID NO: 23733 - DNA, 96 bp, Aspergillus viridinutans
  misc_feature: 30
ccattaatgtgtatctgcaactaaacaagagaaacgatcttaccatccagatactgtccagcaaagacacaagaattattcagatttcatgttttg

SEQ ID NO: 23734 - DNA, 96 bp, Aspergillus viridinutans
  misc_feature: 30
ccagtcacaacgttccatctcgtatgccgtatcatgatcggaagagcagatcggaagagcacacgtctgaactccagtcacaacgttccatctcgt

SEQ ID NO: 23735 - DNA, 96 bp, Aspergillus viridinutans
  misc_feature: 30
ccagcacatggtcatctacactgatggcagcggctaccagggccgcgtaggcgcctcagctatctgccttcgagccgctgacagcgcgcgacaggt

SEQ ID NO: 23736 - DNA, 96 bp, Aspergillus viridinutans
  misc_feature: 30
cattttggaacgtgcgttgacatccagggagctctggattcacactcttaacctcataataaatccgtttccactccaggtttcgtgtacggcgat

SEQ ID NO: 23737 - DNA, 96 bp, Aspergillus viridinutans
  misc_feature: 30
aatgggaaacgcggaaagcatatgtactccccccatgggagccaccccttctttgcacgattaaggaccatgaagccgcactaataacccacaatg

SEQ ID NO: 23738 - DNA, 96 bp, Aspergillus viridinutans
  misc_feature: 30
cacacgtctgaactccagtcacaacgttccatctcgtatgccgtatcattagagcggaagagcacacgtctgaactccagtcacaacgttccatct

SEQ ID NO: 23739 - DNA, 96 bp, Aspergillus viridinutans
  misc_feature: 30
cacaacgttccatctcgtatgccgtatcattgatcggaagagcacacgtctgaactccagtcacaacgttccctctcgtatgccgtcttctgcttg

SEQ ID NO: 23740 - DNA, 96 bp, Aspergillus viridinutans
  misc_feature: 30
actctttccctacacgacgctcttccgatcagatcggaagagcacacgtctgaactccagtcacaacgttccatctcgtatgccgtcttctgcttg

SEQ ID NO: 23741 - DNA, 96 bp, Aspergillus viridinutans
  misc_feature: 30
caaatcgatatcctgactaggtgatgatttgatatcgaatactatggtattgaatcaatatcctgactagttgatgattcgatatttatactaggt

SEQ ID NO: 23742 - DNA, 96 bp, Aspergillus viridinutans
  misc_feature: 30
attttggaacgtgcgttgacatccagggagctctggattcacactcttaacctcataataaatccgtttccactccaggtttcgtgtacggcgatt

SEQ ID NO: 23743 - DNA, 96 bp, Aspergillus viridinutans
  misc_feature: 30
aagctaggcattattattagctatattaatatagattatataggatgtattaatatatgctatttaactactagatatatctttatatttaataat

SEQ ID NO: 23744 - DNA, 96 bp, Aspergillus viridinutans
  misc_feature: 30
agggttcagcatctctaattagtaggggtaggccctgaagatcctaggtactagggcctttaattagtagtaaagattaatatataggatcctaat

SEQ ID NO: 23745 - DNA, 96 bp, Aspergillus viridinutans
  misc_feature: 30
agcacacgtctgaactccagtcacaacgttccatctcgtatgccgtcttctgcttgaaaaaaaaaacacgtctgaactccagtcacaacgttccat

SEQ ID NO: 23746 - DNA, 96 bp, Aspergillus viridinutans
  misc_feature: 30
agcacacgtctgaactccagtcacaacgttccatctcgtatgccgtatcattagagcggaagagcacacgtctgaactccagtcacaacgttccat

SEQ ID NO: 23747 - DNA, 96 bp, Aspergillus viridinutans
  misc_feature: 30
atggaacgttgtgactggagttcagacgtgtgctcttccgatgatcggaagagcgtcgtgtagggaaagagtgtagtactccgtgtagatctcggt

SEQ ID NO: 23748 - DNA, 96 bp, Aspergillus viridinutans
  misc_feature: 30
aactccagtcacaacgttccatctcgtatgccgtgatcggaagagcacacgtctgaactccagtcacaacgttccatctcgtatgccgtatcagat

SEQ ID NO: 23749 - DNA, 96 bp, Aspergillus viridinutans
  misc_feature: 30
aagtatagtaatatatgaataatataattattcaaataattcaaattcctactatatggcgattcaaatcatttgatatccttactatatgacgat

SEQ ID NO: 23750 - DNA, 96 bp, Aspergillus viridinutans
  misc_feature: 30
atcgaatcgaatagtatcaatattgaatcaaattctcacatagtagggatatcaaatcaaatcaaatcaaatagtatcaatatcgaattcttatat

SEQ ID NO: 23751 - DNA, 96 bp, Aspergillus viridinutans
  misc_feature: 30
actcaataccttagtatttgatatcgaatcatcaactagtcaggatatcgactcaataccttagtattcgatatcgaatcatcacctagtatggat

SEQ ID NO: 23752 - DNA, 96 bp, Aspergillus viridinutans
  misc_feature: 30
atcatccagatgcggaccatgcgaattggcctgcgacacttcctctttaagatcaaggcctacgactcagaccagtgcagctgcggagaggggtct

SEQ ID NO: 23753 - DNA, 96 bp, Aspergillus viridinutans
  misc_feature: 30
actccagtcacaacgttccatctcgtatgccgtatcatgatcggaagagcacacgtctgaactccagtcacaacgttccatctcgtatgccgtgat

SEQ ID NO: 23754 - DNA, 96 bp, Aspergillus viridinutans
  misc_feature: 30
atatcgaatcgaatagtatcaatattgaatcaaattctcacatagtagggatatcaaatcaaatcaaatcaaatagtatcaatatcgaattcttat

SEQ ID NO: 23755 - DNA, 96 bp, Aspergillus viridinutans
  misc_feature: 30
atatcctgactaggtgatgatttgatatcgaatactatggtattgaatcaatatcctgactagttgatgattcgatatttatactaggtgatgatt

SEQ ID NO: 23756 - DNA, 96 bp, Aspergillus viridinutans
  misc_feature: 30
atatatattattagaataagtaataatattagtataggtatatataatagaagctacatatttttatagagatttttaattaattttataacctct

SEQ ID NO: 23757 - DNA, 96 bp, Aspergillus viridinutans
  misc_feature: 30
atatagattatttaacctaggtatatacatatttagtttttataaattattattatttagatgtataaatgtctatcttttattactatctttatt

SEQ ID NO: 23758 - DNA, 96 bp, Aspergillus viridinutans
  misc_feature: 30
agcacacgtctgaactccagtcacaacgttccatctcgtatgccgtcttctgcttgaaaaaaaaaagaactccagtcacaacgttccatctcgtat

SEQ ID NO: 23759 - DNA, 96 bp, Aspergillus viridinutans
  misc_feature: 30
acgtctgaactccagtcacaacgttccatctcgtatgccgtcttctgctcgaaaaaacacacgtctgaactccagtcacaacgttccatctcgtat

SEQ ID NO: 23760 - DNA, 96 bp, Aspergillus viridinutans
  misc_feature: 30
agtcacaacgttccatctcgtatgccgtatcatgatcggaagagcagatcggaagagcacacgtctgaactccagtcacaacgttccatctcgtat

SEQ ID NO: 23761 - DNA, 96 bp, Aspergillus viridinutans
  misc_feature: 30
aacttatagctaaattaattaattcttatatttaatatatcttaataactttagtatatatactatttttaataatttaattctctaatttatact

SEQ ID NO: 23762 - DNA, 96 bp, Aspergillus viridinutans
  misc_feature: 30
aactccagtcacaacgttccatctcggtggtcggatcggaagagcacacgtctgaactccagtcacaacgttccatctcgtatgccgtcttctgct

SEQ ID NO: 23763 - DNA, 96 bp, Aspergillus viridinutans
  misc_feature: 30
agcacacgtctgaactccagtcacaacgttccatctcgtatgccgtcttctgctcgaaaaaacacacgtctgaactccagtcacaacgttccatct

SEQ ID NO: 23764 - DNA, 96 bp, Aspergillus viridinutans
  misc_feature: 30
actccagtcacaacgttccatctcgtatgccgtatcatgatcggaagagcagatcggaagagcacacgtctgaactccagtcacaacgttccatct

SEQ ID NO: 23765 - DNA, 96 bp, Aspergillus viridinutans
  misc_feature: 30
acacgtctgaactccagtcacaacgttccatctcgtatgccgtcttctgcttgaaaaaaaaaaacactctttccctacacgacgctcttccgatct

SEQ ID NO: 23766 - DNA, 96 bp, Aspergillus viridinutans
  misc_feature: 30
agaggagagagtaataataataagaatattaatagagaatagagaaatttagtactaagagattattaagaaagataaatatagaaataatctagt

SEQ ID NO: 23767 - DNA, 96 bp, Aspergillus viridinutans
  misc_feature: 30
agagcacacgtctgaactccagtcacaacgttccatctcgtatgccgtcttctgcttgaaaaaaaaaagaactccagtcacaacgttccatctcgt

SEQ ID NO: 23768 - DNA, 96 bp, Aspergillus viridinutans
  misc_feature: 30
actccagtcacaacgttccatctcgtatgccgtatcattgatcggaagagcacacgtctgaactccagtcacaacgttccagctcgtatgccgtct

SEQ ID NO: 23769 - DNA, 96 bp, Aspergillus viridinutans
  misc_feature: 30
acttatagctaaattaattaattcttatatttaatatatcttaataactttagtatatatactatttttaataatttaattctctaatttatactt

SEQ ID NO: 23770 - DNA, 96 bp, Aspergillus viridinutans
  misc_feature: 30
actccagtcacaacgttccatctcggtggtcggatcggaagagcacacgtctgaactccagtcacaacgttccatctcgtatgccgtcttctgctt

SEQ ID NO: 23771 - DNA, 96 bp, Aspergillus viridinutans
  misc_feature: 30
acgtctgaactccagtcacaacgttccatctcgtatgccgtgatcggaagggcacacgtctgaactccagtcacaacgttccatctcgtatgccgt

SEQ ID NO: 23772 - DNA, 96 bp, Aspergillus viridinutans
  misc_feature: 30
aagagcacacgtctgaactccagtcacaacgttccatctcgtatgccgtatcattacggcatacgagatggaacgttgtgactggagttcagacgt

SEQ ID NO: 23773 - DNA, 96 bp, Aspergillus viridinutans
  misc_feature: 30
acacgtctgaactccagtcacaacgttccatctcgtatgccgtcttctgctcgaaaaaacacacgtctgaactccagtcacaacgttccatctcgt

SEQ ID NO: 23774 - DNA, 96 bp, Aspergillus viridinutans
  misc_feature: 30
aactccagtcacaacgttccatctcgtatgccgtatccgatcggaagagcacacgtctgaactccagtcacaacgttccatctcgtatgccgtctt

SEQ ID NO: 23775 - DNA, 96 bp, Aspergillus viridinutans
  misc_feature: 29
tcggaagagcagatcggaagagcacacgtctgaactccagtcacaacgttccatctcgtatgccgtcttctgcttgaaaaaaaaaaaaaaaaaaaa

SEQ ID NO: 23776 - DNA, 96 bp, Aspergillus viridinutans
  misc_feature: 29
actggtttacgcttgtggttatggttatggaatgattatggttatggttgaatggtatgcatatgaatataatgaattgactgtgttatgtaaaaa

SEQ ID NO: 23777 - DNA, 96 bp, Aspergillus viridinutans
  misc_feature: 29
ttttggaacgtgcgttgacatccagggagctctggattcacactcttaacctcataataaatccgtttccactccaggtttcgtgtacggcgatta

SEQ ID NO: 23778 - DNA, 96 bp, Aspergillus viridinutans
  misc_feature: 29
ttttcctagtagtagcatttattttgccaacctaggctcctcgtctatgtctttgttaaccactcaatgccaacatagatagggtttgtggctcag

SEQ ID NO: 23779 - DNA, 96 bp, Aspergillus viridinutans
  misc_feature: 29
actgcagctgagcaatcaggcctatcaaaatctactgtctcccgcgtacggaaacgcgccaaacagcatggatggaagccaaatcagcctataaaa

SEQ ID NO: 23780 - DNA, 96 bp, Aspergillus viridinutans
  misc_feature: 29
tttggacaaaatgaaaagggagagagatatagcaaaaagggcctctgcacttgccctgactgaaatttcaggcaattctctcagcactgcagctga

SEQ ID NO: 23781 - DNA, 96 bp, Aspergillus viridinutans
  misc_feature: 29
tttcttaggtaagttaggttactcaactattaatatactatataataaactactataatgtgtaagtatttaatatttatactatctaagtattta

SEQ ID NO: 23782 - DNA, 96 bp, Aspergillus viridinutans
  misc_feature: 29
tcatctagtagggatatcgaatgtcatctagtattgatatcgaatcaatatcgaatgtcatctagtagggatatcgaatgtcatctagtatcgaaa

SEQ ID NO: 23783 - DNA, 96 bp, Aspergillus viridinutans
  misc_feature: 29
tttcctagtagtagcatttattttgccaacctaggctcctcgtctatgtctttgttaaccactcaatgccaacatagatagggtttgtggctcagg

SEQ ID NO: 23784 - DNA, 96 bp, Aspergillus viridinutans
  misc_feature: 29
caaagatcgaatgaagtaaagagtcaaaaaagataagatgagacagacagacagagagacgcaaataaaaataaacgtgaaagaacaaagatgaaa

SEQ ID NO: 23785 - DNA, 96 bp, Aspergillus viridinutans
  misc_feature: 29
tttattaaagttattcttattatatctatattagtatactttattactataatatatataaggcttttaggtaaaactataactatagtttctata

SEQ ID NO: 23786 - DNA, 96 bp, Aspergillus viridinutans
  misc_feature: 29
cactgcagctgagcaatcaggcctatcaaaatctactgtctcccgcgtacggaaacgcgccaaacagcatggatggaagccaaatcagcctataaa

SEQ ID NO: 23787 - DNA, 96 bp, Aspergillus viridinutans
  misc_feature: 29
attcgatatcgaatcatcaactagtatgaatatcaaatcattatctagtaggaatatcaataccatagtactatactaagatatatatattataaa

SEQ ID NO: 23788 - DNA, 96 bp, Aspergillus viridinutans
  misc_feature: 29
atcggaagagcagatcggaagagcacacgtctgaactccagtcacaacgttccatctcgtatgccgtcttctgcttgaaaaaaaaaaaaaaaacaa

SEQ ID NO: 23789 - DNA, 96 bp, Aspergillus viridinutans
  misc_feature: 29
ttggacaaaatgaaaagggagagagatatagcaaaaagggcctctgcacttgccctgactgaaatttcaggcaattctctcagcactgcagctgag

SEQ ID NO: 23790 - DNA, 96 bp, Aspergillus viridinutans
  misc_feature: 29
actctaaaagattggtcaagacattgggaagactgagactgagactgagactgagaaagagagaagggaagtggaggaagagaggacgagaagcaa

SEQ ID NO: 23791 - DNA, 96 bp, Aspergillus viridinutans
  misc_feature: 29
ttgatatctcaacaaccacgcatctacaggggctaaatctaggcatgaggtatattatagttatatacttataatctatatcctccttgtatatat

SEQ ID NO: 23792 - DNA, 96 bp, Aspergillus viridinutans
  misc_feature: 29
ttgaatactatggtattgaatcaacatccatactaggtgatgattcgatatcgaatactaaggtattgagtcgatatcctgactaggtgatgattt

SEQ ID NO: 23793 - DNA, 96 bp, Aspergillus viridinutans
  misc_feature: 29
agatactctaaaagattggtcaagacattgggaagactgagactgagactgagactgagaaagagagaagggaagtggaggaagagaggacgagaa

SEQ ID NO: 23794 - DNA, 96 bp, Aspergillus viridinutans
  misc_feature: 29
taggtatgtagtactatgtacacatttagtttttctagtttattattatttatatatataagtagctatcttttattactatctttattattagaa

SEQ ID NO: 23795 - DNA, 96 bp, Aspergillus viridinutans
  misc_feature: 29
agtcacaacgttccatctcgtatgccgtagatcggaagagcacacgtctgaactccagtcacaacgttccatctcgtatgccgtcttctgctcgaa

SEQ ID NO: 23796 - DNA, 96 bp, Aspergillus viridinutans
  misc_feature: 29
ttcctagtagtagcatttattttgccaacctaggctcctcgtctatgtctttgttaaccactcaatgccaacatagatagggtttgtggctcaggc

SEQ ID NO: 23797 - DNA, 96 bp, Aspergillus viridinutans
  misc_feature: 29
gaactccagtcacaacgttccatctcgtatgccgtcttctgcttgaaaaaaaaaaacactctttccctacacgacgctcttccgatctgatcggaa

SEQ ID NO: 23798 - DNA, 96 bp, Aspergillus viridinutans
  misc_feature: 29
agtcacaacgttccatctcgtatgccgtatcatgatcggaagagcacacgtctgaactccagtcacaacgttccatctcgtatgccgtgatcggaa

SEQ ID NO: 23799 - DNA, 96 bp, Aspergillus viridinutans
  misc_feature: 29
ttccaggtttcgtgtacggcgattatctcgaatcgaacagccaatataacgtttatctcggttagatagaaccttaggccttcctgaacaagcctc

SEQ ID NO: 23800 - DNA, 96 bp, Aspergillus viridinutans
  misc_feature: 29
acaaagatcgaatgaagtaaagagtcaaaaaagataagatgagacagacagacagagagacgcaaataaaaataaacgtgaaagaacaaagatgaa

SEQ ID NO: 23801 - DNA, 96 bp, Aspergillus viridinutans
  misc_feature: 29
aggaataactacctaagtaataactatataagtaataaccttctataaggataatagtaagggattagataataataataaagaggataataataa

SEQ ID NO: 23802 - DNA, 96 bp, Aspergillus viridinutans
  misc_feature: 29
tattcgatatcgaatcatcaactagtatgaatatcaaatcattatctagtaggaatatcaataccatagtactatactaagatatatatattataa

SEQ ID NO: 23803 - DNA, 96 bp, Aspergillus viridinutans
  misc_feature: 29
aggatatatatattattagaataagtaataatattagtataggtatatataatagaagctacatatttttatagagatttttaattaattttataa

SEQ ID NO: 23804 - DNA, 96 bp, Aspergillus viridinutans
  misc_feature: 29
aatatctttaaggagataggtaagctagatagcttcctttatagtataaataatagtaatatatttagccttatatatagataaagagataactaa

SEQ ID NO: 23805 - DNA, 96 bp, Aspergillus viridinutans
  misc_feature: 29
ctaagtaatctttttcctactatatatctatagtagaggccttataatttatagctatatctataaagtatagatataatagttaatatatactaa

SEQ ID NO: 23806 - DNA, 96 bp, Aspergillus viridinutans
  misc_feature: 29
ttagtatagtactatggtattgatattcctactagataatgatttgatattcatactagttgatgattcgatatcgaatactatggtatcaatatt

SEQ ID NO: 23807 - DNA, 96 bp, Aspergillus viridinutans
  misc_feature: 29
tagggttcagcatctctaattagtaggggtaggccctgaagatcctaggtactagggcctttaattagtagtaaagattaatatataggatcctaa

SEQ ID NO: 23808 - DNA, 96 bp, Aspergillus viridinutans
  misc_feature: 29
ttagcttaagctatactagctaggtagctttagctagatatattagctagctagtacttagtataagctatatagtctactaaatatactatttct

SEQ ID NO: 23809 - DNA, 96 bp, Aspergillus viridinutans
  misc_feature: 29
ttagaccctagatattagaattatctataagccttataatataaaagatattatatataagctaggtattattattagctatattaatatagatta

SEQ ID NO: 23810 - DNA, 96 bp, Aspergillus viridinutans
  misc_feature: 29
gggactggtttacgcttgtggttatggttatggaatgattatggttatggttgaatggtatgcatatgaatataatgaattgactgtgttatgtaa

SEQ ID NO: 23811 - DNA, 96 bp, Aspergillus viridinutans
  misc_feature: 29
tggtagcctaataatataataatctaataggattaaggatggtttaagaaataatataagaataataatagtaaagatagaagtaaggcctattaa

SEQ ID NO: 23812 - DNA, 96 bp, Aspergillus viridinutans
  misc_feature: 29
aatatattaaatttttacttaggccttactagtatcttactaatatcttactttaaatatatttcttattattcttatacttctattatcccttaa

SEQ ID NO: 23813 - DNA, 96 bp, Aspergillus viridinutans
  misc_feature: 29
tgttattggtcttactttattactcctcttttcccccaacttctgttttccctcttcttcttcttcttcttcctcctcctcatcaacgaacaccag

SEQ ID NO: 23814 - DNA, 96 bp, Aspergillus viridinutans
  misc_feature: 29
ccccatgggagccaccccttctttgcacgattaaggaccatgaagccgcactaataacccacaatgacatacacaaagagatagatgaccagcaca

SEQ ID NO: 23815 - DNA, 96 bp, Aspergillus viridinutans
  misc_feature: 29
tctgcgactaaacaagagaagcaatcttaccatccacatactgtccagcaaagacacaagaatcattcagatttcatgttttggggggctattaca

SEQ ID NO: 23816 - DNA, 96 bp, Aspergillus viridinutans
  misc_feature: 29
tctgcaactaaacaagagaaacgatcttaccatccagatactgtccagcaaagacacaagaattattcagatttcatgttttggggggctattaca

SEQ ID NO: 23817 - DNA, 96 bp, Aspergillus viridinutans
  misc_feature: 29
gatcggaagagcagatcggaagagcacacgtctgaactccagtcacaacgttccatctcgtatgccgtcttctgcttgaaaaaaaaaaaaaaacca

SEQ ID NO: 23818 - DNA, 96 bp, Aspergillus viridinutans
  misc_feature: 29
tggaacgttgtgactggagttcagacgtgtgctcttccgatgatcggaagagcgtcgtgtagggaaagagtgtagtactccgtgtagatctcggtg

SEQ ID NO: 23819 - DNA, 96 bp, Aspergillus viridinutans
  misc_feature: 29
tggaacgttgtgactggagttcagacgtgtgctcttccgatagatcggaagagcgtcgtgtagggaaagagtgtagtactccgtgtagatctcggt

SEQ ID NO: 23820 - DNA, 96 bp, Aspergillus viridinutans
  misc_feature: 29
agataatcgccgtacacgaaacctggagtggaaacggatttattatgaggttaagagtgtgaatccagagctccctggatgtcaacgcacgttcca

SEQ ID NO: 23821 - DNA, 96 bp, Aspergillus viridinutans
  misc_feature: 29
ccccccatgggagccaccccttctttgcacgattaaggaccatgaagccgcactaataacccacaatgacatacacaaagagatagatgaccagca

SEQ ID NO: 23822 - DNA, 96 bp, Aspergillus viridinutans
  misc_feature: 29
agtcacaacgttccatctcgtatgccgtgatcggaagagcacacgtctgaactccagtcacaacgttccatctcgtatgccgtgatcggaagagca

SEQ ID NO: 23823 - DNA, 96 bp, Aspergillus viridinutans
  misc_feature: 29
tgatatctcaacaaccacgcatctacaggggctaaatctaggcatgaggtatattatagttatatacttataatctatatcctccttgtatatata

SEQ ID NO: 23824 - DNA, 96 bp, Aspergillus viridinutans
  misc_feature: 29
ctgagcgagatcacatgatcagatctccgccatactgagtatggccacattaatgtcaaattctcatatagtaaggatatcgatcgaatagtatca

SEQ ID NO: 23825 - DNA, 96 bp, Aspergillus viridinutans
  misc_feature: 29
attcaatattgaatcatcaactagtatggatatcaaatcatcatctagtaggaatatcgatactatagtattcaatatcaaatcatcatctagtca

SEQ ID NO: 23826 - DNA, 96 bp, Aspergillus viridinutans
  misc_feature: 29
agtatagtactatggtattgatattcctactagataatgatttgatattcatactagttgatgattcgatatcgaatactatggtatcaatattca

SEQ ID NO: 23827 - DNA, 96 bp, Aspergillus viridinutans
  misc_feature: 29
tcaatattgaatcattaactagtatggatattgaatcattaactagtatggatatcgaatcatcaactagtatgaatattgataccatagtattca

SEQ ID NO: 23828 - DNA, 96 bp, Aspergillus viridinutans
  misc_feature: 29
tgaactccagtcacaacgttccatctcgtatgccgtgatcggaagagcacacgtctgaactccagtcacaacgttccatctcgtatgccgtatcag

SEQ ID NO: 23829 - DNA, 96 bp, Aspergillus viridinutans
  misc_feature: 29
tgaactccagtcacaacgttccatctcgtatgccgtcttctgcttgaaaaaaaaaaacactctttccctacacgacgctcttccgatctgatcgga

SEQ ID NO: 23830 - DNA, 96 bp, Aspergillus viridinutans
  misc_feature: 29
tgaactccagtcacaacgttccatctcgtatgccgtatcattgatcggaagagcaaacgtctgaactccagtcacaacgttccatctcgtatgccg

SEQ ID NO: 23831 - DNA, 96 bp, Aspergillus viridinutans
  misc_feature: 29
tgaactccagtcacaacgttccatctcgtatgccgtatcattagagcggaagagcacacgtctgaactccagtcacaacgttccatctcgtatgcc

SEQ ID NO: 23832 - DNA, 96 bp, Aspergillus viridinutans
  misc_feature: 29
tgaactccagtcacaacgttccatctcgtatgccgtatcagatcggaagagcacacgtctgaactccagtcacaacgttccatctcgtatgccgtg

SEQ ID NO: 23833 - DNA, 96 bp, Aspergillus viridinutans
  misc_feature: 29
acttaggaataattccccagagctctctaagaggctccaggcttataacctatagaataagcagagagagaggtttagaatataaagattttttca

SEQ ID NO: 23834 - DNA, 96 bp, Aspergillus viridinutans
  misc_feature: 29
tctttaaggagataggtaagctagatagcttcctttatagtataaataatagtaatatatttagccttatatatagataaagagataactaattat

SEQ ID NO: 23835 - DNA, 96 bp, Aspergillus viridinutans
  misc_feature: 29
tcttctatagatattactatggttttaactaaatatagattaaatatattaataagatattaaagataagtatattaagatagcttaatctatctt

SEQ ID NO: 23836 - DNA, 96 bp, Aspergillus viridinutans
  misc_feature: 29
actccagtcacaacgttccatctcgtatgccgtcttctgcttgaaaaaaaaaaacactctttccctacacgacgctcttccgatctgatcggaaga

SEQ ID NO: 23837 - DNA, 96 bp, Aspergillus viridinutans
  misc_feature: 29
tcacaacgttccatctcgtatgccgtatcatgatcggaagagcacacgtctgaactccagtcacaacgttccatctcgtatgccgtgatcggaaga

SEQ ID NO: 23838 - DNA, 96 bp, Aspergillus viridinutans
  misc_feature: 29
tccagtcacaacgttccatctcgtatgccgtgatcggaagagcacacgtctgaactccagtcacaacgttccatctcgtatgccgtgatcggaaga

SEQ ID NO: 23839 - DNA, 96 bp, Aspergillus viridinutans
  misc_feature: 29
gctagatagcttcctttatagtatgaataatagtaatatatttagtcttatatatagataaagagataactaattatagcttagaagcctataaga

SEQ ID NO: 23840 - DNA, 96 bp, Aspergillus viridinutans
  misc_feature: 29
tctgaactccagtcacaacgttccatctcgtatgccgtcttctgcttgaaaaaaaaaaacactctttccctacacgacgctcttccgatctgatcg

SEQ ID NO: 23841 - DNA, 96 bp, Aspergillus viridinutans
  misc_feature: 29
tctgaactccagtcacaacgttccatctcgtatgccgtatcattgatcggaagagcaaacgtctgaactccagtcacaacgttccatctcgtatgc

SEQ ID NO: 23842 - DNA, 96 bp, Aspergillus viridinutans
  misc_feature: 29
tctgaactccagtcacaacgttccatctcgtatgccgtatcattagagcggaagagcacacgtctgaactccagtcacaacgttccatctcgtatg

SEQ ID NO: 23843 - DNA, 96 bp, Aspergillus viridinutans
  misc_feature: 29
tctaggtatgtagtactatgtacacatttagtttttctagtttattattatttatatatataagtagctatcttttattactatctttattattag

SEQ ID NO: 23844 - DNA, 96 bp, Aspergillus viridinutans
  misc_feature: 29
taaatctgaactagataaagctaaatctaaacctaaagctaaacccagcctaggggctaaaactaatactagaactaaagctagagtcaccctaga

SEQ ID NO: 23845 - DNA, 96 bp, Aspergillus viridinutans
  misc_feature: 29
ctaggtatgtagtactatgtacacatttagtttttctagtttattattatttatatatataagtagctatcttttattactatctttattattaga

SEQ ID NO: 23846 - DNA, 96 bp, Aspergillus viridinutans
  misc_feature: 29
aatagatactctaaaagattggtcaagacattgggaagactgagactgagactgagactgagaaagagagaagggaagtggaggaagagaggacga

SEQ ID NO: 23847 - DNA, 96 bp, Aspergillus viridinutans
  misc_feature: 29
caaatgaaagattgagatgattcgaagagaacgaagaaaaggggcaaagaagaaggaaagatgaaaaaaggtggtcaatgatgaaccgcctcgcga

SEQ ID NO: 23848 - DNA, 96 bp, Aspergillus viridinutans
  misc_feature: 29
cagtcacaacgttccatctcgtatgccgtagatcggaagagcacacgtctgaactccagtcacaacgttccatctcgtatgccgtcttctgctcga

SEQ ID NO: 23849 - DNA, 96 bp, Aspergillus viridinutans
  misc_feature: 29
atatagtagggatttaaatcatcatatagtatggatattaaatgatttgaattgctatatagtatgtatttaaattatcatatagtagggattcga

SEQ ID NO: 23850 - DNA, 96 bp, Aspergillus viridinutans
  misc_feature: 29
tcctgactagatgatgattcgatattcatactaggtgatgattcgatatcgaatactaaggtattgaatcaatatcctgactaggtgatgattcga

SEQ ID NO: 23851 - DNA, 96 bp, Aspergillus viridinutans
  misc_feature: 29
tcctgcggctgcgcctccgcctccaggactttgcggtacaccgggaactccagtagctgaagtcactggcagagttgttgtaggtcctgcggctgc

SEQ ID NO: 23852 - DNA, 96 bp, Aspergillus viridinutans
  misc_feature: 29
cagtcacaacgttccatctcgtatgccgtatcatgatcggaagagcacacgtctgaactccagtcacaacgttccatctcgtatgccgtgatcgga

SEQ ID NO: 23853 - DNA, 96 bp, Aspergillus viridinutans
  misc_feature: 29
gctggtcatctatctctttgtgtatgtcattgtgggttattagtgcggcttcatggtccttaatcgtgcaaagaaggggtggctcccatgggggga

SEQ ID NO: 23854 - DNA, 96 bp, Aspergillus viridinutans
  misc_feature: 29
agatagcagcatatactaaggatattaataccatagtattaatattaaaccatgacctaccatagtattcaatatcaaatcatcacctagtatgga

SEQ ID NO: 23855 - DNA, 96 bp, Aspergillus viridinutans
  misc_feature: 29
tccagtcacaacgttccatctcgtatgccgtatcattgatcggaagagcacacgtctgaactccagtcacaacgttccagctcgtatgccgtcttc

SEQ ID NO: 23856 - DNA, 96 bp, Aspergillus viridinutans
  misc_feature: 29
tccagtcacaacgttccatctcgtatgccgtagatcggaagagcacacgtctgaactccagtcacaacgttccagctcgtatgccgtcttctgctt

SEQ ID NO: 23857 - DNA, 96 bp, Aspergillus viridinutans
  misc_feature: 29
ggctatagaaaagtatatatagaattatattattattaggtatatatatattagtgataattatactaatattattaagccttcttccttctatga

SEQ ID NO: 23858 - DNA, 96 bp, Aspergillus viridinutans
  misc_feature: 29
cgattcgataccttagtattcgatatcgaatcatcacctagtcaggatatcgattcgataccttagtatttgatatcgaatgatcacctagtatga

SEQ ID NO: 23859 - DNA, 96 bp, Aspergillus viridinutans
  misc_feature: 29
ggtaaacccttattatctttaagatctagattaaaccttactaacctctctggacatctctagatggcgctattcctggaagcctcgccttactga

SEQ ID NO: 23860 - DNA, 96 bp, Aspergillus viridinutans
  misc_feature: 29
aactccagtcacaacgttccatctcgtatgccgtatcatgatcggaagagcacacgtctgaactccagtcacaacgttccatctcgtatgccgtga

SEQ ID NO: 23861 - DNA, 96 bp, Aspergillus viridinutans
  misc_feature: 29
tcacaacgttccatctcgtatgccgtgatcggaagagcacacgtctgaactccagtcacaacgttccatctcgtatgccgtatcagatcggaagag

SEQ ID NO: 23862 - DNA, 96 bp, Aspergillus viridinutans
  misc_feature: 29
tcaaatcgatatcctgactaggtgatgatttgatatcgaatactatggtattgaatcaatatcctgactagttgatgattcgatatttatactagg

SEQ ID NO: 23863 - DNA, 96 bp, Aspergillus viridinutans
  misc_feature: 29
tcaaatcatcacctagtatggatatcgattcgataccttagtattcgatatcgaatcatcacctagtcaggatatcgattcgataccttagtattt

SEQ ID NO: 23864 - DNA, 96 bp, Aspergillus viridinutans
  misc_feature: 29
tattgaatcattaactagtatggatattgaatcattaactagtatggatatcgaatcatcaactagtatgaatattgataccatagtattcaatat

SEQ ID NO: 23865 - DNA, 96 bp, Aspergillus viridinutans
  misc_feature: 29
atattgaatcattaactagtatggatattgaatcattaactagtatggatatcgaatcatcaactagtatgaatattgataccatagtattcaata

SEQ ID NO: 23866 - DNA, 96 bp, Aspergillus viridinutans
  misc_feature: 29
tattctagataatatctctatatctaataattattttatctaataagtaagtgataataatactatctagtagaagattaactcttagacccttat

SEQ ID NO: 23867 - DNA, 96 bp, Aspergillus viridinutans
  misc_feature: 29
tattattattatcctctttattattattatctaatcccttactattatccttatagaaggttattacttatatagttattacttaggtagttattc

SEQ ID NO: 23868 - DNA, 96 bp, Aspergillus viridinutans
  misc_feature: 29
tattattagatactactataaatattttatatactaagtatactatattctttatataaaatatattaagtaatttagatctcttattaggagatt

SEQ ID NO: 23869 - DNA, 96 bp, Aspergillus viridinutans
  misc_feature: 29
ctagaggaataactacctaagtaataactatataagtaataaccttctataaggataatagtaagggattagataataataataaagaggataata

SEQ ID NO: 23870 - DNA, 96 bp, Aspergillus viridinutans
  misc_feature: 29
gtaagctaggcattattattagctatattaatatagattatataggatgtattaatatatgctatttaactactagatatatctttatatttaata

SEQ ID NO: 23871 - DNA, 96 bp, Aspergillus viridinutans
  misc_feature: 29
ctcattccccgccacacccacatgggcggggatccagtgtatcttaatgttctctggaggtagcccgcgcgcccctagggcccttactctctcata

SEQ ID NO: 23872 - DNA, 96 bp, Aspergillus viridinutans
  misc_feature: 29
tatctttattactaacctagattatttagctatatatagttaatttataaatactactactaaataatagaaggtcttattatctttcttatatat

SEQ ID NO: 23873 - DNA, 96 bp, Aspergillus viridinutans
  misc_feature: 29
gtcatctagtattgatatcgaatcgatatcaaatgtcatctagtatcgatatcgaatcaatatcgaatgtcatctagtatcaatatcgaatcgata

SEQ ID NO: 23874 - DNA, 96 bp, Aspergillus viridinutans
  misc_feature: 29
tatcgaatcgaatagtatcaatattgaatcaaattctcacatagtagggatatcaaatcaaatcaaatcaaatagtatcaatatcgaattcttata

SEQ ID NO: 23875 - DNA, 96 bp, Aspergillus viridinutans
  misc_feature: 29
atagcagcatatactaaggatattaataccatagtattaatattaaaccatgacctaccatagtattcaatatcaaatcatcacctagtatggata

SEQ ID NO: 23876 - DNA, 96 bp, Aspergillus viridinutans
  misc_feature: 29
tatattccctctttcttagttatctaggattctattagtattagaatactaactattactattagctattaccttagggatattatttaagtattt

SEQ ID NO: 23877 - DNA, 96 bp, Aspergillus viridinutans
  misc_feature: 29
agaagcctataagataggcctattattaaatataaagatatatctagtagttaaatagcatatattaatacatcctatataatctatattaatata

SEQ ID NO: 23878 - DNA, 96 bp, Aspergillus viridinutans
  misc_feature: 29
taggatgctaaaatattatttctctctcttaatatctagaagttaaaattactaaaattacaggtgtattttatgttagctacatgtatatatata

SEQ ID NO: 23879 - DNA, 96 bp, Aspergillus viridinutans
  misc_feature: 29
gtctaggagttaatcttctactagatagtattattattacttacttattagataaaataattattagatataaagatattatctagaatacctata

SEQ ID NO: 23880 - DNA, 96 bp, Aspergillus viridinutans
  misc_feature: 29
agaaagtataaattagagaattaaattattaaaaatagtatatatactaaagttattaagatatattaaatataagaattaattaatttagctata

SEQ ID NO: 23881 - DNA, 96 bp, Aspergillus viridinutans
  misc_feature: 29
ctttaaggagataggtaagctagatagcttcctttatagtataaataatagtaatatatttagccttatatatagataaagagataactaattata

SEQ ID NO: 23882 - DNA, 96 bp, Aspergillus viridinutans
  misc_feature: 29
tagtatagtactatggtattgatattcctactagataatgatttgatattcatactagttgatgattcgatatcgaatactatggtatcaatattc

SEQ ID NO: 23883 - DNA, 96 bp, Aspergillus viridinutans
  misc_feature: 29
tagtagtagcatttattttgccaacctaggctcctcgtctatgtctttgttaaccactcaatgccaacatagatagggtttgtggctcaggcgttc

SEQ ID NO: 23884 - DNA, 96 bp, Aspergillus viridinutans
  misc_feature: 29
cttaggccttactagtatcttactaatatcttactttaaatatatttcttattattcttatacttctattatcccttaaaccttctacttttacta

SEQ ID NO: 23885 - DNA, 96 bp, Aspergillus viridinutans
  misc_feature: 29
ctagggttcagcatctctaattagtaggggtaggccctgaagatcctaggtactagggcctttaattagtagtaaagattaatatataggatccta

SEQ ID NO: 23886 - DNA, 96 bp, Aspergillus viridinutans
  misc_feature: 29
tagctgaggcgcctacgcggccctggtagccgctgccatcagtgtagatgaccatgtgctggtcatctatctctttgtgtatgtcattgtgggtta

SEQ ID NO: 23887 - DNA, 96 bp, Aspergillus viridinutans
  misc_feature: 29
agagaaagtataaattagagaattaaattattaaaaatagtatatatactaaagttattaagatatattaaatataagaattaattaatttagcta

SEQ ID NO: 23888 - DNA, 96 bp, Aspergillus viridinutans
  misc_feature: 29
tagcctaataatataataatctaataggattaaggatggtttaagaaataatataagaataataatagtaaagatagaagtaaggcctattaagta

SEQ ID NO: 23889 - DNA, 96 bp, Aspergillus viridinutans
  misc_feature: 29
gtgtatctgcaactaaacaagagaaacgatcttaccatccagatactgtccagcaaagacacaagaattattcagatttcatgttttggggggcta

SEQ ID NO: 23890 - DNA, 96 bp, Aspergillus viridinutans
  misc_feature: 29
tagcatttattttgccaacctaggctcctcgtctatgtctttgttaaccactcaatgccaacatagatagggtttgtggctcaggcgttcaggctt

SEQ ID NO: 23891 - DNA, 96 bp, Aspergillus viridinutans
  misc_feature: 29
tagcagcatatactaaggatattaataccatagtattaatattaaaccatgacctaccatagtattcaatatcaaatcatcacctagtatggatat

SEQ ID NO: 23892 - DNA, 96 bp, Aspergillus viridinutans
  misc_feature: 29
tagattatttaacctaggtatatacatatttagtttttataaattattattatttagatgtataaatgtctatcttttattactatctttattatt

SEQ ID NO: 23893 - DNA, 96 bp, Aspergillus viridinutans
  misc_feature: 29
aatatcctctacttctttctataatactttatctttctttttctatttactaaatctattaatctttctaatagcttcctagataatatatatcta

SEQ ID NO: 23894 - DNA, 96 bp, Aspergillus viridinutans
  misc_feature: 29
tagaagcctataagataggcctattattaaatataaagatatatctagtagttaaatagcatatattaatacatcctatataatctatattaatat

SEQ ID NO: 23895 - DNA, 96 bp, Aspergillus viridinutans
  misc_feature: 29
gtctatattccctctttcttagttatctaggattctattagtattagaatactaactattactattagctattaccttagggatattatttaagta

SEQ ID NO: 23896 - DNA, 96 bp, Aspergillus viridinutans
  misc_feature: 29
gtattcaatattgaatcattaactagtatggatattgaatcattaactagtatggatatcgaatcatcaactagtatgaatattgataccatagta

SEQ ID NO: 23897 - DNA, 96 bp, Aspergillus viridinutans
  misc_feature: 29
atcggaagagcgtcgtgtagggaaagagtgtagtactccgtgtagatctcggtggtcgccgtatcattaaaaaaaaaaaagggaaagagtgtagta

SEQ ID NO: 23898 - DNA, 96 bp, Aspergillus viridinutans
  misc_feature: 29
acgtctgaactccagtcacaacgttccatctcgtatgccgtatcattgatcggaagagcaaacgtctgaactccagtcacaacgttccatctcgta

SEQ ID NO: 23899 - DNA, 96 bp, Aspergillus viridinutans
  misc_feature: 29
agcacacgtctgaactccagtcacaacgttccatctcgtatgccgtagatcggaagaacacacgtctgaactccagtcacaacgttccatctcgta

SEQ ID NO: 23900 - DNA, 96 bp, Aspergillus viridinutans
  misc_feature: 29
acgtctgaactccagtcacaacgttccatctcgtatgccgtatcattgatcagaagagcacacgtctgaactccagtcacaacgttccatctcgta

SEQ ID NO: 23901 - DNA, 96 bp, Aspergillus viridinutans
  misc_feature: 29
cgtctgaactccagtcacaacgttccatctcgtatgccgtatcattagagcggaagagcacacgtctgaactccagtcacaacgttccatctcgta

SEQ ID NO: 23902 - DNA, 96 bp, Aspergillus viridinutans
  misc_feature: 29
gagcacacgtctgaactccagtcacaacgttccatctcgtatgccgtgatcggaagggcacacgtctgaactccagtcacaacgttccatctcgta

SEQ ID NO: 23903 - DNA, 96 bp, Aspergillus viridinutans
  misc_feature: 29
atctttaaggagataggtaagctagatagcttcctttatagtataaataatagtaatatatttagccttatatatagataaagagataactaatta

SEQ ID NO: 23904 - DNA, 96 bp, Aspergillus viridinutans
  misc_feature: 29
taattaccttatagaaggaagaaggcttaataatattagtataattattactaatatatatatacctaataataatataattctatatatatcttt

SEQ ID NO: 23905 - DNA, 96 bp, Aspergillus viridinutans
  misc_feature: 29
aggtctataaagattatactactataatctaacttaagttagatttttatttataattatataagttataattaaataaattaagaattaagatta

SEQ ID NO: 23906 - DNA, 96 bp, Aspergillus viridinutans
  misc_feature: 29
taatatagctaataataatacctagcttatatataatatcttttatattataaggcttatagataattctaatatctagggtctaatagaagaatt

SEQ ID NO: 23907 - DNA, 96 bp, Aspergillus viridinutans
  misc_feature: 29
cctctttcttagttatctaggattctattagtattagaatactaactattactattagctattaccttagggatattatttaagtatttattatta

SEQ ID NO: 23908 - DNA, 96 bp, Aspergillus viridinutans
  misc_feature: 29
taagtaatctttttcctactatatatctatagtagaggccttataatttatagctatatctataaagtatagatataatagttaatatatactaat

SEQ ID NO: 23909 - DNA, 96 bp, Aspergillus viridinutans
  misc_feature: 29
taagtaagtaagtaagaagaattaattaagatagaatctagtaagagagataagctatataagtaagtaagtaaggagaattaattaagatagaat

SEQ ID NO: 23910 - DNA, 96 bp, Aspergillus viridinutans
  misc_feature: 29
taaggtatcaaatcgatatcctgactaggtgatgatttgatatcgaatactatggtattgaatcaatatcctgactagttgatgattcgatattta

SEQ ID NO: 23911 - DNA, 96 bp, Aspergillus viridinutans
  misc_feature: 29
gtattctagataatatctctatatctaataattattttatctaataagtaagtgataataatactatctagtagaagattaactcttagaccctta

SEQ ID NO: 23912 - DNA, 96 bp, Aspergillus viridinutans
  misc_feature: 29
cttactagtatcttactaatatcttactttaaatatatttcttattattcttatacttctattatcccttaaaccttctacttttactatctctta

SEQ ID NO: 23913 - DNA, 96 bp, Aspergillus viridinutans
  misc_feature: 29
aaacaagagaaacgatcttaccatccagatactgtccagcaaagacacaagaattattcagatttcatgttttggggggctattacatataattta

SEQ ID NO: 23914 - DNA, 96 bp, Aspergillus viridinutans
  misc_feature: 29
actattattatacttaaagtataattagaagagaataaagattaagatatattattaaatagattaagatagctctactctctactctaaagttta

SEQ ID NO: 23915 - DNA, 96 bp, Aspergillus viridinutans
  misc_feature: 29
aaagatcgaatgaagtaaagagtcaaaaaagataagatgagacagacagacagagagacgcaaataaaaataaacgtgaaagaacaaagatgaaac

SEQ ID NO: 23916 - DNA, 96 bp, Aspergillus viridinutans
  misc_feature: 29
gccttataatataaaagatattatatataagctaggtattattattagctatattaatatagattatataggatatattaatatatactatttaac

SEQ ID NO: 23917 - DNA, 96 bp, Aspergillus viridinutans
  misc_feature: 29
cccccatgggagccaccccttctttgcacgattaaggaccatgaagccgcactaataacccacaatgacatacacaaagagatagatgaccagcac

SEQ ID NO: 23918 - DNA, 96 bp, Aspergillus viridinutans
  misc_feature: 29
gtctgaactccagtcacaacgttccatctcgtatgccgtatcattgatcggaagagcaaacgtctgaactccagtcacaacgttccatctcgtatg

SEQ ID NO: 23919 - DNA, 96 bp, Aspergillus viridinutans
  misc_feature: 29
gtctgaactccagtcacaacgttccatctcgtatgccgtatcattagagcggaagagcacacgtctgaactccagtcacaacgttccatctcgtat

SEQ ID NO: 23920 - DNA, 96 bp, Aspergillus viridinutans
  misc_feature: 29
gtctgaactccagtcacaacgttccatctcggtggtcgatcggaagagcacacgtctgaactccagtcacaacgttccatctcgtatgccgtcttc

SEQ ID NO: 23921 - DNA, 96 bp, Aspergillus viridinutans
  misc_feature: 29
gtcctgcggctgcgcctccgcctccaggactttgcggtacaccgggaactccagtagctgaagtcactggcagagttgttgtaggtcctgcggctg

SEQ ID NO: 23922 - DNA, 96 bp, Aspergillus viridinutans
  misc_feature: 29
gtcacaacgttccatctcgtatgccgtatccgatcggaagagcacacgtctgaactccagtcacaacgttccatctcgtatgccgtcttctgcttg

SEQ ID NO: 23923 - DNA, 96 bp, Aspergillus viridinutans
  misc_feature: 29
gtcacaacgttccatctcgtatgccgtatcatgatcggaagagcacacgtctgaactccagtcacaacgttccatctcgtatgccgtgatcggaag

SEQ ID NO: 23924 - DNA, 96 bp, Aspergillus viridinutans
  misc_feature: 29
ccttagtattcgatatcgaatcatcacctagtcaggatatcgattcgataccttagtatttgatatcgaatgatcacctagtatgaatattgatac

SEQ ID NO: 23925 - DNA, 96 bp, Aspergillus viridinutans
  misc_feature: 29
gtatcaaatcgatatcctgactaggtgatgatttgatatcgaatactatggtattgaatcaatatcctgactagttgatgattcgatatttatact

SEQ ID NO: 23926 - DNA, 96 bp, Aspergillus viridinutans
  misc_feature: 29
gtaggtattctagataatatctctatatctaataattattttatctaataagtaagtgataataatactatctagtagaagattaactcttagacc

SEQ ID NO: 23927 - DNA, 96 bp, Aspergillus viridinutans
  misc_feature: 29
gtaattttagtaattttaacttctagatattaagagagagaaataatattttagcatcctaagaaagagtatttatatacttcagactatatatat

SEQ ID NO: 23928 - DNA, 96 bp, Aspergillus viridinutans
  misc_feature: 29
gtaatatatgaataatataattattcaaataattcaaattcctactatatggcgattcaaatcatttgatatccttactatatgacgattcgaatc

SEQ ID NO: 23929 - DNA, 96 bp, Aspergillus viridinutans
  misc_feature: 29
atctgcgactaaacaagagaagcaatcttaccatccacatactgtccagcaaagacacaagaatcattcagatttcatgttttggggggctattac

SEQ ID NO: 23930 - DNA, 96 bp, Aspergillus viridinutans
  misc_feature: 29
gtaagctagatagcttcctttatagtatgaataatagtaatatatttagtcttatatatagataaagagataactaattatagcttagaagcctat

SEQ ID NO: 23931 - DNA, 96 bp, Aspergillus viridinutans
  misc_feature: 29
gtaaatattaatagagaattaggaagatataaggcctaaggcttatttatataaatatatatcttttaatatttactttctttatacttagtaaat

SEQ ID NO: 23932 - DNA, 96 bp, Aspergillus viridinutans
  misc_feature: 29
ggtcctgcggctgcgcctccgcctccaggactttgcggtacaccgggaactccagtagctgaagtcactggcagagttgttgtaggtcctgcggct

SEQ ID NO: 23933 - DNA, 96 bp, Aspergillus viridinutans
  misc_feature: 29
cttagtattcgatatcgaatcatcacctagtcaggatatcgattcgataccttagtatttgatatcgaatgatcacctagtatgaatattgatacc

SEQ ID NO: 23934 - DNA, 96 bp, Aspergillus viridinutans
  misc_feature: 29
ggtaagttaggttactcaactattaatatactatataataaactactataatgtgtaagtatttaatatttatactatctaagtatttaattatat

SEQ ID NO: 23935 - DNA, 96 bp, Aspergillus viridinutans
  misc_feature: 29
acacgtctgaactccagtcacaacgttccatctcgtatgccgtcttctgcttgaaaaaaaaaagaactccagtcacaacgttccatctcgtatgcc

SEQ ID NO: 23936 - DNA, 96 bp, Aspergillus viridinutans
  misc_feature: 29
ctgaactccagtcacaacgttccatctcgtatgccgtatcattgatcggaagagcaaacgtctgaactccagtcacaacgttccatctcgtatgcc

SEQ ID NO: 23937 - DNA, 96 bp, Aspergillus viridinutans
  misc_feature: 29
cacgtctgaactccagtcacaacgttccatctcgtatgccgtagatcggaagaacacacgtctgaactccagtcacaacgttccatctcgtatgcc

SEQ ID NO: 23938 - DNA, 96 bp, Aspergillus viridinutans
  misc_feature: 29
ggaagagcacacgtctgaactccagtcacaacgttccatctcgtatgccgtgatcggaagggcacacgtctgaactccagtcacaacgttccatct

SEQ ID NO: 23939 - DNA, 96 bp, Aspergillus viridinutans
  misc_feature: 29
ggaacgttgtgactggagttcagacgtgtgctcttccgatgatcggaagagcgtcgtgtagggaaagagtgtagtactccgtgtagatctcggtgg

SEQ ID NO: 23940 - DNA, 96 bp, Aspergillus viridinutans
  misc_feature: 29
ggaacgttgtgactggagttcagacgtgtgctcttccgatagatcggaagagcgtcgtgtagggaaagagtgtagtactccgtgtagatctcggtg

SEQ ID NO: 23941 - DNA, 96 bp, Aspergillus viridinutans
  misc_feature: 29
gctgaggcgcctacgcggccctggtagccgctgccatcagtgtagatgaccatgtgctggtcatctatctctttgtgtatgtcattgtgggttatt

SEQ ID NO: 23942 - DNA, 96 bp, Aspergillus viridinutans
  misc_feature: 29
cagtcacaacgttccatctcgtatgccgtgatcggaagagcacacgtctgaactccagtcacaacgttccatctcgtatgccgtgatcggaagagc

SEQ ID NO: 23943 - DNA, 96 bp, Aspergillus viridinutans
  misc_feature: 29
aagcctataagataggcctattattaaatataaagatatatctagtagttaaatagcatatattaatacatcctatataatctatattaatatagc

SEQ ID NO: 23944 - DNA, 96 bp, Aspergillus viridinutans
  misc_feature: 29
gctatagaaaagtatatatagaattatattattattaggtatatatatattagtgataattatactaatattattaagccttcttccttctatgag

SEQ ID NO: 23945 - DNA, 96 bp, Aspergillus viridinutans
  misc_feature: 29
gcgtaggcgcctcagctatctgccttcgagccgctgacagcgcgcgacaggtgcagcagagccacctaggaacagagacagactcaactgtgtatg

SEQ ID NO: 23946 - DNA, 96 bp, Aspergillus viridinutans
  misc_feature: 29
gcgcctcagctatctgccttcgagccgctgacagcgcgcgacaggtgcagcagagccacctaggaacagagacagactcaactgtgtatgctgctg

SEQ ID NO: 23947 - DNA, 96 bp, Aspergillus viridinutans
  misc_feature: 29
gcgcctacgcggccctggtagccgctgccatcagtgtagatgaccatgtgctggtcatctatctctttgtgtatgtcattgtgggttattagtgcg

SEQ ID NO: 23948 - DNA, 96 bp, Aspergillus viridinutans
  misc_feature: 29
gccttactagtatcttactaatatcttactttaaatatatttcttattattcttatacttctattatcccttaaaccttctacttttactatctct

SEQ ID NO: 23949 - DNA, 96 bp, Aspergillus viridinutans
  misc_feature: 29
aagtagtattactataggatactaatatatttagtatatataatatacttagtagtaataacctagtataattagagttagtcccttagttaaggc

SEQ ID NO: 23950 - DNA, 96 bp, Aspergillus viridinutans
  misc_feature: 29
gcctcagctatctgccttcgagccgctgacagcgcgcgacaggtgcagcagagccacctaggaacagagacagactcaactgtgtatgctgctgag

SEQ ID NO: 23951 - DNA, 96 bp, Aspergillus viridinutans
  misc_feature: 29
gcctatcttataggcttctaagctataattagttatctctttatctatatataagactaaatatattactattattcatactataaaggaagctat

SEQ ID NO: 23952 - DNA, 96 bp, Aspergillus viridinutans
  misc_feature: 29
aggtcctgcggctgcgcctccgcctccaggactttgcggtacaccgggaactccagtagctgaagtcactggcagagttgttgtaggtcctgcggc

SEQ ID NO: 23953 - DNA, 96 bp, Aspergillus viridinutans
  misc_feature: 29
atgtgtatctgcaactaaacaagagaaacgatcttaccatccagatactgtccagcaaagacacaagaattattcagatttcatgttttggggggc

SEQ ID NO: 23954 - DNA, 96 bp, Aspergillus viridinutans
  misc_feature: 29
acacgtctgaactccagtcacaacgttccatctcgtatgccgtagatcggaagaacacacgtctgaactccagtcacaacgttccatctcgtatgc

SEQ ID NO: 23955 - DNA, 96 bp, Aspergillus viridinutans
  misc_feature: 29
ctgaactccagtcacaacgttccatctcgtatgccgtatcattagagcggaagagcacacgtctgaactccagtcacaacgttccatctcgtatgc

SEQ ID NO: 23956 - DNA, 96 bp, Aspergillus viridinutans
  misc_feature: 29
agtcacaacgttccatctcgtatgccgtatcattgatcggaagagcacacgtctgaactccagtcacaacgttccatctcgtatgccgtctcctgc

SEQ ID NO: 23957 - DNA, 96 bp, Aspergillus viridinutans
  misc_feature: 29
gcagcctgccatccagctgcggtctcccctgcgccatcttagcgcgttaaacacctatcccacctcattctatgtagtcattccaaacgtagtgcg

SEQ ID NO: 23958 - DNA, 96 bp, Aspergillus viridinutans
  misc_feature: 29
gcagcctcattccccgccacacccacatgggcggggatccagtgtatcttaatgttctctggaggtagcccgcgcgcccctagggcccttactctc

SEQ ID NO: 23959 - DNA, 96 bp, Aspergillus viridinutans
  misc_feature: 29
gcagcattttggaacgtgcgttgacatccagggagctctggattcacactcttaacctcataataaatccgtttccactccaggtttcgtgtacgg

SEQ ID NO: 23960 - DNA, 96 bp, Aspergillus viridinutans
  misc_feature: 29
gcacacgtctgaactccagtcacaacgttccatctcgtatgccgtgatcggaagggcacacgtctgaactccagtcacaacgttccatctcgtatg

SEQ ID NO: 23961 - DNA, 96 bp, Aspergillus viridinutans
  misc_feature: 29
gcacacgtctgaactccagtcacaacgttccatctcgtatgccgtcttctgcttgaaaaaaaaaacacgtctgaactccagtcacaacgttccatc

SEQ ID NO: 23962 - DNA, 96 bp, Aspergillus viridinutans
  misc_feature: 29
gcacacgtctgaactccagtcacaacgttccatctcgtatgccgtagatcggaagaacacacgtctgaactccagtcacaacgttccatctcgtat

SEQ ID NO: 23963 - DNA, 96 bp, Aspergillus viridinutans
  misc_feature: 29
aagtaagtaagtaagaagaattaattaagatagaatctagtaagagagataagctatataagtaagtaagtaaggagaattaattaagatagaatc

SEQ ID NO: 23964 - DNA, 96 bp, Aspergillus viridinutans
  misc_feature: 29
agcacacgtctgaactccagtcacaacgttccatctcgtatgccgtatcattgatcggaagagcacacgtctgaactccagtcaccacgttccatc

SEQ ID NO: 23965 - DNA, 96 bp, Aspergillus viridinutans
  misc_feature: 29
acgagatggaacgttgtgactggagttcagacgtgtgctcttccgatgatcggaagagcgtcgtgtagggaaagagtgtagtactccgtgtagatc

SEQ ID NO: 23966 - DNA, 96 bp, Aspergillus viridinutans
  misc_feature: 29
gatcggaagagcgtcgtgtagggaaagagtgtagtactccgtgtagatctcggtggtcgccgtatcattaaaaaaaaaaaagggaaagagtgtagt

SEQ ID NO: 23967 - DNA, 96 bp, Aspergillus viridinutans
  misc_feature: 29
gatcggaagagcgtcgtgtagggaaagagtgtagtactccgtgtagatctcggtggtcgccgtatcattaaaaaaaaaaaagacgagtagggaaag

SEQ ID NO: 23968 - DNA, 96 bp, Aspergillus viridinutans
  misc_feature: 29
gatcggaagagcacacgtctgaactccagtcacaacgttccatctcgtatgccgtagatcggaagaacacacgtctgaactccagtcacaacgttc

SEQ ID NO: 23969 - DNA, 96 bp, Aspergillus viridinutans
  misc_feature: 29
gatattatatgtaagctaggcattattattagctatattaatatagattatataggatgtattaatatatgctatttaactactagatatatcttt

SEQ ID NO: 23970 - DNA, 96 bp, Aspergillus viridinutans
  misc_feature: 29
agcagcatatactaaggatattaataccatagtattaatattaaaccatgacctaccatagtattcaatatcaaatcatcacctagtatggatatc

SEQ ID NO: 23971 - DNA, 96 bp, Aspergillus viridinutans
  misc_feature: 29
gatagattaagctatcttaatatacttatctttaatatcttattaatatatttaatctatatttagttaaaactatagtaatacctatagaagaag

SEQ ID NO: 23972 - DNA, 96 bp, Aspergillus viridinutans
  misc_feature: 29
actgagcgagatcacatgatcagatctccgccatactgagtatggccacattaatgtcaaattctcatatagtaaggatatcgatcgaatagtatc

SEQ ID NO: 23973 - DNA, 96 bp, Aspergillus viridinutans
  misc_feature: 29
gataaatttaactctttacctctctactaaaaaggtaaaatagaataaaaaatggaataaatggagtaaacggccgaagatattctgcaaacttct

SEQ ID NO: 23974 - DNA, 96 bp, Aspergillus viridinutans
  misc_feature: 29
agtttcccagggaaccttactattagaatctttctagttatttaaattagaattagaattagattaatttaactaatttaattaatttaatttatc

SEQ ID NO: 23975 - DNA, 96 bp, Aspergillus viridinutans
  misc_feature: 29
gagcacacgtctgaactccagtcacaacgttccatctcgtatgccgtatcattgatcggaagagcacacgtctgaactccagtcaccacgttccat

SEQ ID NO: 23976 - DNA, 96 bp, Aspergillus viridinutans
  misc_feature: 29
gagcacacgtctgaactccagtcacaacgttccatctcgtatgccgtagatcggaagaacacacgtctgaactccagtcacaacgttccatctcgt

SEQ ID NO: 23977 - DNA, 96 bp, Aspergillus viridinutans
  misc_feature: 29
acacgtctgaactccagtcacaacgttccatctcgtatgccgtcttctgcttgaaaaaaaaaacacgtctgaactccagtcacaacgttccatctc

SEQ ID NO: 23978 - DNA, 96 bp, Aspergillus viridinutans
  misc_feature: 29
gaagagcacacgtctgaactccagtcacaacgttccatctcgtatgccgtgatcggaagggcacacgtctgaactccagtcacaacgttccatctc

SEQ ID NO: 23979 - DNA, 96 bp, Aspergillus viridinutans
  misc_feature: 29
gagaaagtataaattagagaattaaattattaaaaatagtatatatactaaagttattaagatatattaaatataagaattaattaatttagctat

SEQ ID NO: 23980 - DNA, 96 bp, Aspergillus viridinutans
  misc_feature: 29
cgatatcgaatcatcacctagtcaggatatcgattcgataccttagtatttgatatcgaatgatcacctagtatgaatattgataccatagtattc

SEQ ID NO: 23981 - DNA, 96 bp, Aspergillus viridinutans
  misc_feature: 29
gaagcctataagataggcctattattaaatataaagatatatctagtagttaaatagcatatattaatacatcctatataatctatattaatatag

SEQ ID NO: 23982 - DNA, 96 bp, Aspergillus viridinutans
  misc_feature: 29
aaatattagctattagatatcttattatctatatctattatataagtataattataattattagattaattagataaagacttcttattaggcttc

SEQ ID NO: 23983 - DNA, 96 bp, Aspergillus viridinutans
  misc_feature: 29
gaactccagtcacaacgttccatctcgtatgccgtatcattagagcggaagagcacacgtctgaactccagtcacaacgttccatctcgtatgccg

SEQ ID NO: 23984 - DNA, 96 bp, Aspergillus viridinutans
  misc_feature: 29
gaactccagtcacaacgttccatctcgtatgccgtatcatgatcggaagagcacacgtctgaactccagtcacaacgttccatctcgtatgccgtg

SEQ ID NO: 23985 - DNA, 96 bp, Aspergillus viridinutans
  misc_feature: 29
gaacgttgtgactggagttcagacgtgtgctcttccgatagatcggaagagcgtcgtgtagggaaagagtgtagtactccgtgtagatctcggtgg

SEQ ID NO: 23986 - DNA, 96 bp, Aspergillus viridinutans
  misc_feature: 29
ctggtttacgcttgtggttatggttatggaatgattatggttatggttgaatggtatgcatatgaatataatgaattgactgtgttatgtaaaaag

SEQ ID NO: 23987 - DNA, 96 bp, Aspergillus viridinutans
  misc_feature: 29
cttctattagaccctagatattagaattatctataagccttataatataaaagatattatatataagctaggtattattattagctatattaatat

SEQ ID NO: 23988 - DNA, 96 bp, Aspergillus viridinutans
  misc_feature: 29
aactccagtcacaacgttccatctcgtatgccgtcttctgcttgaaaaaaaaaaacactctttccctacacgacgctcttccgatctgatcggaag

SEQ ID NO: 23989 - DNA, 96 bp, Aspergillus viridinutans
  misc_feature: 29
ctccagtcacaacgttccatctcgtatgccgtgatcggaagagcacacgtctgaactccagtcacaacgttccatctcgtatgccgtgatcggaag

SEQ ID NO: 23990 - DNA, 96 bp, Aspergillus viridinutans
  misc_feature: 29
aaaaaggtctataaagattatactactataatctaacttaagttagatttttatttataattatataagttataattaaataaattaagaattaag

SEQ ID NO: 23991 - DNA, 96 bp, Aspergillus viridinutans
  misc_feature: 29
ctggggactggtttacgcttgtggttatggttatggaatgattatggttatggttgaatggtatgcatatgaatataatgaattgactgtgttatg

SEQ ID NO: 23992 - DNA, 96 bp, Aspergillus viridinutans
  misc_feature: 29
ctgcgcggaatacagaggttatacctcagcaaaaggaagcatttgaagttgcacagattcttcaatccatatccagagatggccgaccagctaagg

SEQ ID NO: 23993 - DNA, 96 bp, Aspergillus viridinutans
  misc_feature: 29
ctgaactccagtcacaacgttccatctcgtatgccgtcttctgcttgaaaaaaaaaaacactctttccctacacgacgctcttccgatctgatcgg

SEQ ID NO: 23994 - DNA, 96 bp, Aspergillus viridinutans
  misc_feature: 29
ctaaaagattggtcaagacattgggaagactgagactgagactgagactgagaaagagagaagggaagtggaggaagagaggacgagaagcaagag

SEQ ID NO: 23995 - DNA, 96 bp, Aspergillus viridinutans
  misc_feature: 29
ccagtcacaacgttccatctcgtatgccgtgatcggaagagcacacgtctgaactccagtcacaacgttccatctcgtatgccgtgatcggaagag

SEQ ID NO: 23996 - DNA, 96 bp, Aspergillus viridinutans
  misc_feature: 29
ctccagtcacaacgttccatctcgtatgccgtatcattgatcggaagagcacacgtctgaactccagtcacaacgttccagctcgtatgccgtctt

SEQ ID NO: 23997 - DNA, 96 bp, Aspergillus viridinutans
  misc_feature: 29
ctcaataccttagtatttgatatcgaatcatcaactagtcaggatatcgactcaataccttagtattcgatatcgaatcatcacctagtatggatg

SEQ ID NO: 23998 - DNA, 96 bp, Aspergillus viridinutans
  misc_feature: 29
ctattattagatactactataaatattttatatactaagtatactatattctttatataaaatatattaagtaatttagatctcttattaggagat

SEQ ID NO: 23999 - DNA, 96 bp, Aspergillus viridinutans
  misc_feature: 29
agtaatctttttcctactatatatctatagtagaggccttataatttatagctatatctataaagtatagatataatagttaatatatactaatag

SEQ ID NO: 24000 - DNA, 96 bp, Aspergillus viridinutans
  misc_feature: 29
atcttaattaattctccttacttacttacttatatagcttatctctcttactagattctatcttaattaattcttcttacttacttacttatatag

SEQ ID NO: 24001 - DNA, 96 bp, Aspergillus viridinutans
  misc_feature: 29
ctagtcaggatatcgattcgataccttagtatttgatatcgaatgatcacctagtatgaatattgataccatagtattcctcatcatctagtcagg

SEQ ID NO: 24002 - DNA, 96 bp, Aspergillus viridinutans
  misc_feature: 29
ctagtatggatatcgaatcatcaactagtatgaatattgataccatagtattcaatatcaaatcatcacctagtatggatatcgattcgatacctt

SEQ ID NO: 24003 - DNA, 96 bp, Aspergillus viridinutans
  misc_feature: 29
ctagtagtagcatttattttgccaacctaggctcctcgtctatgtctttgttaaccactcaatgccaacatagatagggtttgtggctcaggcgtt

SEQ ID NO: 24004 - DNA, 96 bp, Aspergillus viridinutans
  misc_feature: 29
atatcctctacttctttctataatactttatctttctttttctatttactaaatctattaatctttctaatagcttcctagataatatatatctag

SEQ ID NO: 24005 - DNA, 96 bp, Aspergillus viridinutans
  misc_feature: 29
ctagatagcttcctttatagtatgaataatagtaatatatttagtcttatatatagataaagagataactaattatagcttagaagcctataagat

SEQ ID NO: 24006 - DNA, 96 bp, Aspergillus viridinutans
  misc_feature: 29
agatctacacggagtactacactctttccctacacgacgctcttccgatcgatcggaagagcgtcgtgtagggaaagagtgtagtactccgtgtag

SEQ ID NO: 24007 - DNA, 96 bp, Aspergillus viridinutans
  misc_feature: 29
cgtctgaactccagtcacaacgttccatctcgtatgccgtcttctgctcgaaaaaacacacgtctgaactccagtcacaacgttccatctcgtatg

SEQ ID NO: 24008 - DNA, 96 bp, Aspergillus viridinutans
  misc_feature: 29
cgtctgaactccagtcacaacgttccatctcgtatgccgtatcattgatcggaagagcaaacgtctgaactccagtcacaacgttccatctcgtat

SEQ ID NO: 24009 - DNA, 96 bp, Aspergillus viridinutans
  misc_feature: 29
cgtctgaactccagtcacaacgttccatctcgtatgccgtagatcggaagaacacacgtctgaactccagtcacaacgttccatctcgtatgccgt

SEQ ID NO: 24010 - DNA, 96 bp, Aspergillus viridinutans
  misc_feature: 29
cgtctgaactccagtcacaacgttccatctcggtggtcgatcggaagagcacacgtctgaactccagtcacaacgttccatctcgtatgccgtctt

SEQ ID NO: 24011 - DNA, 96 bp, Aspergillus viridinutans
  misc_feature: 29
ccaagtatagtaatatatgaataatataattattcaaataattcaaattcctactatatggcgattcaaatcatttgatatccttactatatgacg

SEQ ID NO: 24012 - DNA, 96 bp, Aspergillus fumigatus
  misc_feature: 4683
gtcatttaaatttaaactaaacataattaatagcattaatgtttataaaatttatatagttattaattagtcgaaagataaactcgaattatcact

SEQ ID NO: 24013 - DNA, 96 bp, Aspergillus fumigatus
  misc_feature: 4673
agtcatttaaatttaaactaaacataattaatagcattaatgtttataaaatttatatagttattaattagtcgaaagataaactcgaattatcac

SEQ ID NO: 24014 - DNA, 96 bp, Aspergillus fumigatus
  misc_feature: 4659
tagtcatttaaatttaaactaaacataattaatagcattaatgtttataaaatttatatagttattaattagtcgaaagataaactcgaattatca

SEQ ID NO: 24015 - DNA, 96 bp, Aspergillus fumigatus
  misc_feature: 4644
attagtcatttaaatttaaactaaacataattaatagcattaatgtttataaaatttatatagttattaattagtcgaaagataaactcgaattat

SEQ ID NO: 24016 - DNA, 96 bp, Aspergillus fumigatus
  misc_feature: 4639
aattagtcatttaaatttaaactaaacataattaatagcattaatgtttataaaatttatatagttattaattagtcgaaagataaactcgaatta

SEQ ID NO: 24017 - DNA, 96 bp, Aspergillus fumigatus
  misc_feature: 4638
ttagtcatttaaatttaaactaaacataattaatagcattaatgtttataaaatttatatagttattaattagtcgaaagataaactcgaattatc

SEQ ID NO: 24018 - DNA, 96 bp, Aspergillus fumigatus
  misc_feature: 4638
taattagtcatttaaatttaaactaaacataattaatagcattaatgtttataaaatttatatagttattaattagtcgaaagataaactcgaatt

SEQ ID NO: 24019 - DNA, 96 bp, Aspergillus fumigatus
  misc_feature: 4638
agaaaaaagaggatatctgacaatatagtatatatgatatatacactaaaccatacaatcctttaggcaatagacctcctatgtgtgatagacaat

SEQ ID NO: 24020 - DNA, 96 bp, Aspergillus fumigatus
  misc_feature: 4635
gaaaaaagaggatatctgacaatatagtatatatgatatatacactaaaccatacaatcctttaggcaatagacctcctatgtgtgatagacaatt

SEQ ID NO: 24021 - DNA, 96 bp, Aspergillus fumigatus
  misc_feature: 4630
tataatttgtattaattaatacaaattataattattattatagaataatttgtaattattacaaattattattataatataatgatctaatcctgt

SEQ ID NO: 24022 - DNA, 96 bp, Aspergillus fumigatus
  misc_feature: 4626
tttgtattaattaatacaaattataattattattatagaataatttgtaattattacaaattattattataatataatgatctaatcctgtgtagt

SEQ ID NO: 24023 - DNA, 96 bp, Aspergillus fumigatus
  misc_feature: 4624
ataatttgtattaattaatacaaattataattattattatagaataatttgtaattattacaaattattattataatataatgatctaatcctgtg

SEQ ID NO: 24024 - DNA, 96 bp, Aspergillus fumigatus
  misc_feature: 4623
ttataatttgtattaattaatacaaattataattattattatagaataatttgtaattattacaaattattattataatataatgatctaatcctg

SEQ ID NO: 24025 - DNA, 96 bp, Aspergillus fumigatus
  misc_feature: 4621
ttaaatgactaattaattactaattaaaatttaattattaattattaatactattagttatagttagtttaaatttaactgtcgctttatacatat

SEQ ID NO: 24026 - DNA, 96 bp, Aspergillus fumigatus
  misc_feature: 4620
taatttgtattaattaatacaaattataattattattatagaataatttgtaattattacaaattattattataatataatgatctaatcctgtgt

SEQ ID NO: 24027 - DNA, 96 bp, Aspergillus fumigatus
  misc_feature: 4619
atttgtattaattaatacaaattataattattattatagaataatttgtaattattacaaattattattataatataatgatctaatcctgtgtag

SEQ ID NO: 24028 - DNA, 96 bp, Aspergillus fumigatus
  misc_feature: 4617
aatttgtattaattaatacaaattataattattattatagaataatttgtaattattacaaattattattataatataatgatctaatcctgtgta

SEQ ID NO: 24029 - DNA, 96 bp, Aspergillus fumigatus
  misc_feature: 4615
taattaattactaattaaaatttaattattaattattaatactattagttatagttagtttaaatttaactgtcgctttatacatataaagtcggg

SEQ ID NO: 24030 - DNA, 96 bp, Aspergillus fumigatus
  misc_feature: 4612
aatgactaattaattactaattaaaatttaattattaattattaatactattagttatagttagtttaaatttaactgtcgctttatacatataaa

SEQ ID NO: 24031 - DNA, 96 bp, Aspergillus fumigatus
  misc_feature: 4612
ttgtattaattaatacaaattataattattattatagaataatttgtaattattacaaattattattataatataatgatctaatcctgtgtagtc

SEQ ID NO: 24032 - DNA, 96 bp, Aspergillus fumigatus
  misc_feature: 4612
tgtattaattaatacaaattataattattattatagaataatttgtaattattacaaattattattataatataatgatctaatcctgtgtagtct

SEQ ID NO: 24033 - DNA, 96 bp, Aspergillus fumigatus
  misc_feature: 4610
tttaaatgactaattaattactaattaaaatttaattattaattattaatactattagttatagttagtttaaatttaactgtcgctttatacata

SEQ ID NO: 24034 - DNA, 96 bp, Aspergillus fumigatus
  misc_feature: 4607
atttaaatgactaattaattactaattaaaatttaattattaattattaatactattagttatagttagtttaaatttaactgtcgctttatacat

SEQ ID NO: 24035 - DNA, 96 bp, Aspergillus fumigatus
  misc_feature: 4605
taatataaatataaatattatattaataattaatcaaaatttagttaatttataaggaagaaaaatttagttctcactatagtaatgtatattata

SEQ ID NO: 24036 - DNA, 96 bp, Aspergillus fumigatus
  misc_feature: 4600
ttaattagtcatttaaatttaaactaaacataattaatagcattaatgtttataaaatttatatagttattaattagtcgaaagataaactcgaat

SEQ ID NO: 24037 - DNA, 96 bp, Aspergillus fumigatus
  misc_feature: 4599
ttaatataaatataaatattatattaataattaatcaaaatttagttaatttataaggaagaaaaatttagttctcactatagtaatgtatattat

SEQ ID NO: 24038 - DNA, 96 bp, Aspergillus fumigatus
  misc_feature: 4598
tattaattaatacaaattataattattattatagaataatttgtaattattacaaattattattataatataatgatctaatcctgtgtagtcttt

SEQ ID NO: 24039 - DNA, 96 bp, Aspergillus fumigatus
  misc_feature: 4598
taaatgactaattaattactaattaaaatttaattattaattattaatactattagttatagttagtttaaatttaactgtcgctttatacatata

SEQ ID NO: 24040 - DNA, 96 bp, Aspergillus fumigatus
  misc_feature: 4597
aaatgactaattaattactaattaaaatttaattattaattattaatactattagttatagttagtttaaatttaactgtcgctttatacatataa

SEQ ID NO: 24041 - DNA, 96 bp, Aspergillus fumigatus
  misc_feature: 4594
gtattaattaatacaaattataattattattatagaataatttgtaattattacaaattattattataatataatgatctaatcctgtgtagtctt

SEQ ID NO: 24042 - DNA, 96 bp, Aspergillus fumigatus
  misc_feature: 4592
cttataatttgtattaattaatacaaattataattattattatagaataatttgtaattattacaaattattattataatataatgatctaatcct

SEQ ID NO: 24043 - DNA, 96 bp, Aspergillus fumigatus
  misc_feature: 4587
gcttataatttgtattaattaatacaaattataattattattatagaataatttgtaattattacaaattattattataatataatgatctaatcc

SEQ ID NO: 24044 - DNA, 96 bp, Aspergillus fumigatus
  misc_feature: 4584
attaattagtcatttaaatttaaactaaacataattaatagcattaatgtttataaaatttatatagttattaattagtcgaaagataaactcgaa

SEQ ID NO: 24045 - DNA, 96 bp, Aspergillus fumigatus
  misc_feature: 4584
atgactaattaattactaattaaaatttaattattaattattaatactattagttatagttagtttaaatttaactgtcgctttatacatataaag

SEQ ID NO: 24046 - DNA, 96 bp, Aspergillus fumigatus
  misc_feature: 4584
attaattaatacaaattataattattattatagaataatttgtaattattacaaattattattataatataatgatctaatcctgtgtagtctttt

SEQ ID NO: 24047 - DNA, 96 bp, Aspergillus fumigatus
  misc_feature: 4582
ctaattaattactaattaaaatttaattattaattattaatactattagttatagttagtttaaatttaactgtcgctttatacatataaagtcgg

SEQ ID NO: 24048 - DNA, 96 bp, Aspergillus fumigatus
  misc_feature: 4577
aatttaaatgactaattaattactaattaaaatttaattattaattattaatactattagttatagttagtttaaatttaactgtcgctttataca

SEQ ID NO: 24049 - DNA, 96 bp, Aspergillus fumigatus
  misc_feature: 4574
tgactaattaattactaattaaaatttaattattaattattaatactattagttatagttagtttaaatttaactgtcgctttatacatataaagt

SEQ ID NO: 24050 - DNA, 96 bp, Aspergillus fumigatus
  misc_feature: 4573
taactattctatgttaattatatatttaaaaaattgattattaaaaaattattcttaattttttatgaaattatatattatttcatttgtatatta

SEQ ID NO: 24051 - DNA, 96 bp, Aspergillus fumigatus
  misc_feature: 4569
actaattaattactaattaaaatttaattattaattattaatactattagttatagttagtttaaatttaactgtcgctttatacatataaagtcg

SEQ ID NO: 24052 - DNA, 96 bp, Aspergillus fumigatus
  misc_feature: 4567
tagatcattatattataataataatttgtaataattacaaattattctataataataattataatttgtattaattaatacaaattataagcgtgt

SEQ ID NO: 24053 - DNA, 96 bp, Aspergillus fumigatus
  misc_feature: 4564
ttaattaatacaaattataattattattatagaataatttgtaattattacaaattattattataatataatgatctaatcctgtgtagtctttta

SEQ ID NO: 24054 - DNA, 96 bp, Aspergillus fumigatus
  misc_feature: 4560
aaatttaaatgactaattaattactaattaaaatttaattattaattattaatactattagttatagttagtttaaatttaactgtcgctttatac

SEQ ID NO: 24055 - DNA, 96 bp, Aspergillus fumigatus
  misc_feature: 4558
ttagatcattatattataataataatttgtaataattacaaattattctataataataattataatttgtattaattaatacaaattataagcgtg

SEQ ID NO: 24056 - DNA, 96 bp, Aspergillus fumigatus
  misc_feature: 4553
agatcattatattataataataatttgtaataattacaaattattctataataataattataatttgtattaattaatacaaattataagcgtgtt

SEQ ID NO: 24057 - DNA, 96 bp, Aspergillus fumigatus
  misc_feature: 4551
aactattctatgttaattatatatttaaaaaattgattattaaaaaattattcttaattttttatgaaattatatattatttcatttgtatattaa

SEQ ID NO: 24058 - DNA, 96 bp, Aspergillus fumigatus
  misc_feature: 4551
gactaattaattactaattaaaatttaattattaattattaatactattagttatagttagtttaaatttaactgtcgctttatacatataaagtc

SEQ ID NO: 24059 - DNA, 96 bp, Aspergillus fumigatus
  misc_feature: 4550
gattagatcattatattataataataatttgtaataattacaaattattctataataataattataatttgtattaattaatacaaattataagcg

SEQ ID NO: 24060 - DNA, 96 bp, Aspergillus fumigatus
  misc_feature: 4549
attagatcattatattataataataatttgtaataattacaaattattctataataataattataatttgtattaattaatacaaattataagcgt

SEQ ID NO: 24061 - DNA, 96 bp, Aspergillus fumigatus
  misc_feature: 4544
ctattctatgttaattatatatttaaaaaattgattattaaaaaattattcttaattttttatgaaattatatattatttcatttgtatattaatt

SEQ ID NO: 24062 - DNA, 96 bp, Aspergillus fumigatus
  misc_feature: 4536
gatcattatattataataataatttgtaataattacaaattattctataataataattataatttgtattaattaatacaaattataagcgtgtta

SEQ ID NO: 24063 - DNA, 96 bp, Aspergillus fumigatus
  misc_feature: 4536
actattctatgttaattatatatttaaaaaattgattattaaaaaattattcttaattttttatgaaattatatattatttcatttgtatattaat

SEQ ID NO: 24064 - DNA, 96 bp, Aspergillus fumigatus
  misc_feature: 4532
aggttatgaatataatttatttattattctattagtataaaactataaaagaattaataatattttattatttaaacaggtaaatttatttcttct

SEQ ID NO: 24065 - DNA, 96 bp, Aspergillus fumigatus
  misc_feature: 4529
attctatgttaattatatatttaaaaaattgattattaaaaaattattcttaattttttatgaaattatatattatttcatttgtatattaattat

SEQ ID NO: 24066 - DNA, 96 bp, Aspergillus fumigatus
  misc_feature: 4525
taattaatacaaattataattattattatagaataatttgtaattattacaaattattattataatataatgatctaatcctgtgtagtcttttat

SEQ ID NO: 24067 - DNA, 96 bp, Aspergillus fumigatus
  misc_feature: 4524
tattctatgttaattatatatttaaaaaattgattattaaaaaattattcttaattttttatgaaattatatattatttcatttgtatattaatta

SEQ ID NO: 24068 - DNA, 96 bp, Aspergillus fumigatus
  misc_feature: 4518
ttctatgttaattatatatttaaaaaattgattattaaaaaattattcttaattttttatgaaattatatattatttcatttgtatattaattata

SEQ ID NO: 24069 - DNA, 96 bp, Aspergillus fumigatus
  misc_feature: 4511
ggttatgaatataatttatttattattctattagtataaaactataaaagaattaataatattttattatttaaacaggtaaatttatttcttctt

SEQ ID NO: 24070 - DNA, 96 bp, Aspergillus fumigatus
  misc_feature: 4503
tgtaataattacaaattattctataataataattataatttgtattaattaatacaaattataagcgtgttaattcaatggtagaatctcgtgcta

SEQ ID NO: 24071 - DNA, 96 bp, Aspergillus fumigatus
  misc_feature: 4500
ttgtaataattacaaattattctataataataattataatttgtattaattaatacaaattataagcgtgttaattcaatggtagaatctcgtgct

SEQ ID NO: 24072 - DNA, 96 bp, Aspergillus fumigatus
  misc_feature: 4497
atcattatattataataataatttgtaataattacaaattattctataataataattataatttgtattaattaatacaaattataagcgtgttaa

SEQ ID NO: 24073 - DNA, 96 bp, Aspergillus fumigatus
  misc_feature: 4497
aaggttatgaatataatttatttattattctattagtataaaactataaaagaattaataatattttattatttaaacaggtaaatttatttcttc

SEQ ID NO: 24074 - DNA, 96 bp, Aspergillus fumigatus
  misc_feature: 4494
tttgtaataattacaaattattctataataataattataatttgtattaattaatacaaattataagcgtgttaattcaatggtagaatctcgtgc

SEQ ID NO: 24075 - DNA, 96 bp, Aspergillus fumigatus
  misc_feature: 4494
gtaataattacaaattattctataataataattataatttgtattaattaatacaaattataagcgtgttaattcaatggtagaatctcgtgctac

SEQ ID NO: 24076 - DNA, 96 bp, Aspergillus fumigatus
  misc_feature: 4491
tcattatattataataataatttgtaataattacaaattattctataataataattataatttgtattaattaatacaaattataagcgtgttaat

SEQ ID NO: 24077 - DNA, 96 bp, Aspergillus fumigatus
  misc_feature: 4490
tctatgttaattatatatttaaaaaattgattattaaaaaattattcttaattttttatgaaattatatattatttcatttgtatattaattatat

SEQ ID NO: 24078 - DNA, 96 bp, Aspergillus fumigatus
  misc_feature: 4486
taaggttatgaatataatttatttattattctattagtataaaactataaaagaattaataatattttattatttaaacaggtaaatttatttctt

SEQ ID NO: 24079 - DNA, 96 bp, Aspergillus fumigatus
  misc_feature: 4485
atttgtaataattacaaattattctataataataattataatttgtattaattaatacaaattataagcgtgttaattcaatggtagaatctcgtg

SEQ ID NO: 24080 - DNA, 96 bp, Aspergillus fumigatus
  misc_feature: 4480
attaatacaaattataattattattatagaataatttgtaattattacaaattattattataatataatgatctaatcctgtgtagtcttttatac

SEQ ID NO: 24081 - DNA, 96 bp, Aspergillus fumigatus
  misc_feature: 4479
ataaggttatgaatataatttatttattattctattagtataaaactataaaagaattaataatattttattatttaaacaggtaaatttatttct

SEQ ID NO: 24082 - DNA, 96 bp, Aspergillus fumigatus
  misc_feature: 4478
aattaatacaaattataattattattatagaataatttgtaattattacaaattattattataatataatgatctaatcctgtgtagtcttttata

SEQ ID NO: 24083 - DNA, 96 bp, Aspergillus fumigatus
  misc_feature: 4477
tgaatataatttatttattattctattagtataaaactataaaagaattaataatattttattatttaaacaggtaaatttatttcttcttacctt

SEQ ID NO: 24084 - DNA, 96 bp, Aspergillus fumigatus
  misc_feature: 4474
ctatgttaattatatatttaaaaaattgattattaaaaaattattcttaattttttatgaaattatatattatttcatttgtatattaattatatt

SEQ ID NO: 24085 - DNA, 96 bp, Aspergillus fumigatus
  misc_feature: 4473
gaatataatttatttattattctattagtataaaactataaaagaattaataatattttattatttaaacaggtaaatttatttcttcttaccttt

SEQ ID NO: 24086 - DNA, 96 bp, Aspergillus fumigatus
  misc_feature: 4471
aatttgtaataattacaaattattctataataataattataatttgtattaattaatacaaattataagcgtgttaattcaatggtagaatctcgt

SEQ ID NO: 24087 - DNA, 96 bp, Aspergillus fumigatus
  misc_feature: 4466
taataattacaaattattctataataataattataatttgtattaattaatacaaattataagcgtgttaattcaatggtagaatctcgtgctacg

SEQ ID NO: 24088 - DNA, 96 bp, Aspergillus fumigatus
  misc_feature: 4465
gttatgaatataatttatttattattctattagtataaaactataaaagaattaataatattttattatttaaacaggtaaatttatttcttctta

SEQ ID NO: 24089 - DNA, 96 bp, Aspergillus fumigatus
  misc_feature: 4462
tataaggttatgaatataatttatttattattctattagtataaaactataaaagaattaataatattttattatttaaacaggtaaatttatttc

SEQ ID NO: 24090 - DNA, 96 bp, Aspergillus fumigatus
  misc_feature: 4462
taatttgtaataattacaaattattctataataataattataatttgtattaattaatacaaattataagcgtgttaattcaatggtagaatctcg

SEQ ID NO: 24091 - DNA, 96 bp, Aspergillus fumigatus
  misc_feature: 4460
ttaaatataataatttaatataattaatatacaaatgaaataatatataatttcataaaaaattaagaataattttttaataatcaattttttaaa

SEQ ID NO: 24092 - DNA, 96 bp, Aspergillus fumigatus
  misc_feature: 4460
atgaatataatttatttattattctattagtataaaactataaaagaattaataatattttattatttaaacaggtaaatttatttcttcttacct

SEQ ID NO: 24093 - DNA, 96 bp, Aspergillus fumigatus
  misc_feature: 4459
cattatattataataataatttgtaataattacaaattattctataataataattataatttgtattaattaatacaaattataagcgtgttaatt

SEQ ID NO: 24094 - DNA, 96 bp, Aspergillus fumigatus
  misc_feature: 4456
ataatttgtaataattacaaattattctataataataattataatttgtattaattaatacaaattataagcgtgttaattcaatggtagaatctc

SEQ ID NO: 24095 - DNA, 96 bp, Aspergillus fumigatus
  misc_feature: 4449
aataattacaaattattctataataataattataatttgtattaattaatacaaattataagcgtgttaattcaatggtagaatctcgtgctacgg

SEQ ID NO: 24096 - DNA, 96 bp, Aspergillus fumigatus
  misc_feature: 4444
tatgttaattatatatttaaaaaattgattattaaaaaattattcttaattttttatgaaattatatattatttcatttgtatattaattatatta

SEQ ID NO: 24097 - DNA, 96 bp, Aspergillus fumigatus
  misc_feature: 4439
aaatataataatttaatataattaatatacaaatgaaataatatataatttcataaaaaattaagaataattttttaataatcaattttttaaata

SEQ ID NO: 24098 - DNA, 96 bp, Aspergillus fumigatus
  misc_feature: 4439
gtataaggttatgaatataatttatttattattctattagtataaaactataaaagaattaataatattttattatttaaacaggtaaatttattt

SEQ ID NO: 24099 - DNA, 96 bp, Aspergillus fumigatus
  misc_feature: 4438
taaatataataatttaatataattaatatacaaatgaaataatatataatttcataaaaaattaagaataattttttaataatcaattttttaaat

SEQ ID NO: 24100 - DNA, 96 bp, Aspergillus fumigatus
  misc_feature: 4438
attatattataataataatttgtaataattacaaattattctataataataattataatttgtattaattaatacaaattataagcgtgttaattc

SEQ ID NO: 24101 - DNA, 96 bp, Aspergillus fumigatus
  misc_feature: 4436
atgttaattatatatttaaaaaattgattattaaaaaattattcttaattttttatgaaattatatattatttcatttgtatattaattatattaa

SEQ ID NO: 24102 - DNA, 96 bp, Aspergillus fumigatus
  misc_feature: 4436
tatgaatataatttatttattattctattagtataaaactataaaagaattaataatattttattatttaaacaggtaaatttatttcttcttacc

SEQ ID NO: 24103 - DNA, 96 bp, Aspergillus fumigatus
  misc_feature: 4435
ttatgaatataatttatttattattctattagtataaaactataaaagaattaataatattttattatttaaacaggtaaatttatttcttcttac

SEQ ID NO: 24104 - DNA, 96 bp, Aspergillus fumigatus
  misc_feature: 4432
tgtataaggttatgaatataatttatttattattctattagtataaaactataaaagaattaataatattttattatttaaacaggtaaatttatt

SEQ ID NO: 24105 - DNA, 96 bp, Aspergillus fumigatus
  misc_feature: 4429
atattataataataatttgtaataattacaaattattctataataataattataatttgtattaattaatacaaattataagcgtgttaattcaat

SEQ ID NO: 24106 - DNA, 96 bp, Aspergillus fumigatus
  misc_feature: 4426
tattataataataatttgtaataattacaaattattctataataataattataatttgtattaattaatacaaattataagcgtgttaattcaatg

SEQ ID NO: 24107 - DNA, 96 bp, Aspergillus fumigatus
  misc_feature: 4424
aataatttgtaataattacaaattattctataataataattataatttgtattaattaatacaaattataagcgtgttaattcaatggtagaatct

SEQ ID NO: 24108 - DNA, 96 bp, Aspergillus fumigatus
  misc_feature: 4423
ttaattatatatttaaaaaattgattattaaaaaattattcttaattttttatgaaattatatattatttcatttgtatattaattatattaaatt

SEQ ID NO: 24109 - DNA, 96 bp, Aspergillus fumigatus
  misc_feature: 4422
taattatatatttaaaaaattgattattaaaaaattattcttaattttttatgaaattatatattatttcatttgtatattaattatattaaatta

SEQ ID NO: 24110 - DNA, 96 bp, Aspergillus fumigatus
  misc_feature: 4419
tatattataataataatttgtaataattacaaattattctataataataattataatttgtattaattaatacaaattataagcgtgttaattcaa

SEQ ID NO: 24111 - DNA, 96 bp, Aspergillus fumigatus
  misc_feature: 4418
ttatattataataataatttgtaataattacaaattattctataataataattataatttgtattaattaatacaaattataagcgtgttaattca

SEQ ID NO: 24112 - DNA, 96 bp, Aspergillus fumigatus
  misc_feature: 4415
aatataataatttaatataattaatatacaaatgaaataatatataatttcataaaaaattaagaataattttttaataatcaattttttaaatat

SEQ ID NO: 24113 - DNA, 96 bp, Aspergillus fumigatus
  misc_feature: 4413
taataatttgtaataattacaaattattctataataataattataatttgtattaattaatacaaattataagcgtgttaattcaatggtagaatc

SEQ ID NO: 24114 - DNA, 96 bp, Aspergillus fumigatus
  misc_feature: 4412
tataataatttaatataattaatatacaaatgaaataatatataatttcataaaaaattaagaataattttttaataatcaattttttaaatatat

SEQ ID NO: 24115 - DNA, 96 bp, Aspergillus fumigatus
  misc_feature: 4406
tgttaattatatatttaaaaaattgattattaaaaaattattcttaattttttatgaaattatatattatttcatttgtatattaattatattaaa

SEQ ID NO: 24116 - DNA, 96 bp, Aspergillus fumigatus
  misc_feature: 4406
ataataatttaatataattaatatacaaatgaaataatatataatttcataaaaaattaagaataattttttaataatcaattttttaaatatata

SEQ ID NO: 24117 - DNA, 96 bp, Aspergillus fumigatus
  misc_feature: 4401
atataataatttaatataattaatatacaaatgaaataatatataatttcataaaaaattaagaataattttttaataatcaattttttaaatata

SEQ ID NO: 24118 - DNA, 96 bp, Aspergillus fumigatus
  misc_feature: 4398
attataataataatttgtaataattacaaattattctataataataattataatttgtattaattaatacaaattataagcgtgttaattcaatgg

SEQ ID NO: 24119 - DNA, 96 bp, Aspergillus fumigatus
  misc_feature: 4397
ttttaatttaaactgtgcgttattttatttttataataaaaatttttggagggggttttatttttatttaatcatagatagattataattataaaa

SEQ ID NO: 24120 - DNA, 96 bp, Aspergillus fumigatus
  misc_feature: 4393
tttttaatttaaactgtgcgttattttatttttataataaaaatttttggagggggttttatttttatttaatcatagatagattataattataaa

SEQ ID NO: 24121 - DNA, 96 bp, Aspergillus fumigatus
  misc_feature: 4392
gttaattatatatttaaaaaattgattattaaaaaattattcttaattttttatgaaattatatattatttcatttgtatattaattatattaaat

SEQ ID NO: 24122 - DNA, 96 bp, Aspergillus fumigatus
  misc_feature: 4388
ttttttaatttaaactgtgcgttattttatttttataataaaaatttttggagggggttttatttttatttaatcatagatagattataattataa

SEQ ID NO: 24123 - DNA, 96 bp, Aspergillus fumigatus
  misc_feature: 4387
tttaatttaaactgtgcgttattttatttttataataaaaatttttggagggggttttatttttatttaatcatagatagattataattataaaat

SEQ ID NO: 24124 - DNA, 96 bp, Aspergillus fumigatus
  misc_feature: 4387
taataatttaatataattaatatacaaatgaaataatatataatttcataaaaaattaagaataattttttaataatcaattttttaaatatataa

SEQ ID NO: 24125 - DNA, 96 bp, Aspergillus fumigatus
  misc_feature: 4387
ataataatttgtaataattacaaattattctataataataattataatttgtattaattaatacaaattataagcgtgttaattcaatggtagaat

SEQ ID NO: 24126 - DNA, 96 bp, Aspergillus fumigatus
  misc_feature: 4375
ttataataataatttgtaataattacaaattattctataataataattataatttgtattaattaatacaaattataagcgtgttaattcaatggt

SEQ ID NO: 24127 - DNA, 96 bp, Aspergillus fumigatus
  misc_feature: 4375
attttttaatttaaactgtgcgttattttatttttataataaaaatttttggagggggttttatttttatttaatcatagatagattataattata

SEQ ID NO: 24128 - DNA, 96 bp, Aspergillus fumigatus
  misc_feature: 4374
ataatttaatataattaatatacaaatgaaataatatataatttcataaaaaattaagaataattttttaataatcaattttttaaatatataatt

SEQ ID NO: 24129 - DNA, 96 bp, Aspergillus fumigatus
  misc_feature: 4372
tataataataatttgtaataattacaaattattctataataataattataatttgtattaattaatacaaattataagcgtgttaattcaatggta

SEQ ID NO: 24130 - DNA, 96 bp, Aspergillus fumigatus
  misc_feature: 4369
aataatttaatataattaatatacaaatgaaataatatataatttcataaaaaattaagaataattttttaataatcaattttttaaatatataat

SEQ ID NO: 24131 - DNA, 96 bp, Aspergillus fumigatus
  misc_feature: 4361
aataataatttgtaataattacaaattattctataataataattataatttgtattaattaatacaaattataagcgtgttaattcaatggtagaa

SEQ ID NO: 24132 - DNA, 96 bp, Aspergillus fumigatus
  misc_feature: 4356
aattttttaatttaaactgtgcgttattttatttttataataaaaatttttggagggggttttatttttatttaatcatagatagattataattat

SEQ ID NO: 24133 - DNA, 96 bp, Aspergillus fumigatus
  misc_feature: 4348
taataataatttgtaataattacaaattattctataataataattataatttgtattaattaatacaaattataagcgtgttaattcaatggtaga

SEQ ID NO: 24134 - DNA, 96 bp, Aspergillus fumigatus
  misc_feature: 4341
aagaattttgatatatttttcataagttgtaaaatcaatattaccccatgcctttttacacatagaactagccatcgaaagatttcccttaacacg

SEQ ID NO: 24135 - DNA, 96 bp, Aspergillus fumigatus
  misc_feature: 4339
ataataataatttgtaataattacaaattattctataataataattataatttgtattaattaatacaaattataagcgtgttaattcaatggtag

SEQ ID NO: 24136 - DNA, 96 bp, Aspergillus fumigatus
  misc_feature: 4335
agaattttgatatatttttcataagttgtaaaatcaatattaccccatgcctttttacacatagaactagccatcgaaagatttcccttaacacgt

SEQ ID NO: 24137 - DNA, 96 bp, Aspergillus fumigatus
  misc_feature: 4326
gaattttgatatatttttcataagttgtaaaatcaatattaccccatgcctttttacacatagaactagccatcgaaagatttcccttaacacgtc

SEQ ID NO: 24138 - DNA, 96 bp, Aspergillus fumigatus
  misc_feature: 4111
taatctagttctctttaattattttaggattaataatttttaataaaataatataatgtaacccaagataatattaacaaagatataaaattttat

SEQ ID NO: 24139 - DNA, 96 bp, Aspergillus fumigatus
  misc_feature: 4095
atctagttctctttaattattttaggattaataatttttaataaaataatataatgtaacccaagataatattaacaaagatataaaattttatga

SEQ ID NO: 24140 - DNA, 96 bp, Aspergillus fumigatus
  misc_feature: 4093
aatctagttctctttaattattttaggattaataatttttaataaaataatataatgtaacccaagataatattaacaaagatataaaattttatg

SEQ ID NO: 24141 - DNA, 96 bp, Aspergillus fumigatus
  misc_feature: 4071
cttgataatgtagctaataaaataggtaaataaatattttatataataaaaaaaattttcatattcatatatgaaggtgggtatagttcaatggta

SEQ ID NO: 24142 - DNA, 96 bp, Aspergillus fumigatus
  misc_feature: 4050
tcttgataatgtagctaataaaataggtaaataaatattttatataataaaaaaaattttcatattcatatatgaaggtgggtatagttcaatggt

SEQ ID NO: 24143 - DNA, 96 bp, Aspergillus fumigatus
  misc_feature: 4008
ttcttgataatgtagctaataaaataggtaaataaatattttatataataaaaaaaattttcatattcatatatgaaggtgggtatagttcaatgg

SEQ ID NO: 24144 - DNA, 96 bp, Aspergillus fumigatus
  misc_feature: 3961
aaaaaattatataatatatatataataaaatattattgtattttattatattatcatgtttaataataactaaccttccatttgatctcttaatca

SEQ ID NO: 24145 - DNA, 96 bp, Aspergillus fumigatus
  misc_feature: 3954
tattaaacatgataatataataaaatacaataatattttattatatatatattatataattttttatttgttaaagttgttttactttatgtaatt

SEQ ID NO: 24146 - DNA, 96 bp, Aspergillus fumigatus
  misc_feature: 3946
ttattaaacatgataatataataaaatacaataatattttattatatatatattatataattttttatttgttaaagttgttttactttatgtaat

SEQ ID NO: 24147 - DNA, 96 bp, Aspergillus fumigatus
  misc_feature: 3944
taaaaaattatataatatatatataataaaatattattgtattttattatattatcatgtttaataataactaaccttccatttgatctcttaatc

SEQ ID NO: 24148 - DNA, 96 bp, Aspergillus fumigatus
  misc_feature: 3941
ataaaaaattatataatatatatataataaaatattattgtattttattatattatcatgtttaataataactaaccttccatttgatctcttaat

SEQ ID NO: 24149 - DNA, 96 bp, Aspergillus fumigatus
  misc_feature: 3921
aataaaaaattatataatatatatataataaaatattattgtattttattatattatcatgtttaataataactaaccttccatttgatctcttaa

SEQ ID NO: 24150 - DNA, 96 bp, Aspergillus fumigatus
  misc_feature: 3921
aaataaaaaattatataatatatatataataaaatattattgtattttattatattatcatgtttaataataactaaccttccatttgatctctta

SEQ ID NO: 24151 - DNA, 96 bp, Aspergillus fumigatus
  misc_feature: 3919
attattaaacatgataatataataaaatacaataatattttattatatatatattatataattttttatttgttaaagttgttttactttatgtaa

SEQ ID NO: 24152 - DNA, 96 bp, Aspergillus fumigatus
  misc_feature: 3908
caaataaaaaattatataatatatatataataaaatattattgtattttattatattatcatgtttaataataactaaccttccatttgatctctt

SEQ ID NO: 24153 - DNA, 96 bp, Aspergillus fumigatus
  misc_feature: 3896
gttattattaaacatgataatataataaaatacaataatattttattatatatatattatataattttttatttgttaaagttgttttactttatg

SEQ ID NO: 24154 - DNA, 96 bp, Aspergillus fumigatus
  misc_feature: 3896
agttattattaaacatgataatataataaaatacaataatattttattatatatatattatataattttttatttgttaaagttgttttactttat

SEQ ID NO: 24155 - DNA, 96 bp, Aspergillus fumigatus
  misc_feature: 3887
ttattattaaacatgataatataataaaatacaataatattttattatatatatattatataattttttatttgttaaagttgttttactttatgt

SEQ ID NO: 24156 - DNA, 96 bp, Aspergillus fumigatus
  misc_feature: 3887
tattattaaacatgataatataataaaatacaataatattttattatatatatattatataattttttatttgttaaagttgttttactttatgta

SEQ ID NO: 24157 - DNA, 96 bp, Aspergillus fumigatus
  misc_feature: 3886
aacaaataaaaaattatataatatatatataataaaatattattgtattttattatattatcatgtttaataataactaaccttccatttgatctc

SEQ ID NO: 24158 - DNA, 96 bp, Aspergillus fumigatus
  misc_feature: 3884
acaaataaaaaattatataatatatatataataaaatattattgtattttattatattatcatgtttaataataactaaccttccatttgatctct

SEQ ID NO: 24159 - DNA, 96 bp, Aspergillus fumigatus
  misc_feature: 3872
tagttattattaaacatgataatataataaaatacaataatattttattatatatatattatataattttttatttgttaaagttgttttacttta

SEQ ID NO: 24160 - DNA, 96 bp, Aspergillus fumigatus
  misc_feature: 3863
taacaaataaaaaattatataatatatatataataaaatattattgtattttattatattatcatgtttaataataactaaccttccatttgatct

SEQ ID NO: 24161 - DNA, 96 bp, Aspergillus fumigatus
  misc_feature: 3843
ttagttattattaaacatgataatataataaaatacaataatattttattatatatatattatataattttttatttgttaaagttgttttacttt

SEQ ID NO: 24162 - DNA, 96 bp, Aspergillus fumigatus
  misc_feature: 3838
gttagttattattaaacatgataatataataaaatacaataatattttattatatatatattatataattttttatttgttaaagttgttttactt

SEQ ID NO: 24163 - DNA, 96 bp, Aspergillus fumigatus
  misc_feature: 3826
gatcaaatggaaggttagttattattaaacatgataatataataaaatacaataatattttattatatatatattatataattttttatttgttaa

SEQ ID NO: 24164 - DNA, 96 bp, Aspergillus fumigatus
  misc_feature: 3826
ggttagttattattaaacatgataatataataaaatacaataatattttattatatatatattatataattttttatttgttaaagttgttttact

SEQ ID NO: 24165 - DNA, 96 bp, Aspergillus fumigatus
  misc_feature: 3822
aggttagttattattaaacatgataatataataaaatacaataatattttattatatatatattatataattttttatttgttaaagttgttttac

SEQ ID NO: 24166 - DNA, 96 bp, Aspergillus fumigatus
  misc_feature: 3820
atcaaatggaaggttagttattattaaacatgataatataataaaatacaataatattttattatatatatattatataattttttatttgttaaa

SEQ ID NO: 24167 - DNA, 96 bp, Aspergillus fumigatus
  misc_feature: 3820
aaggttagttattattaaacatgataatataataaaatacaataatattttattatatatatattatataattttttatttgttaaagttgtttta

SEQ ID NO: 24168 - DNA, 96 bp, Aspergillus fumigatus
  misc_feature: 3811
aaatggaaggttagttattattaaacatgataatataataaaatacaataatattttattatatatatattatataattttttatttgttaaagtt

SEQ ID NO: 24169 - DNA, 96 bp, Aspergillus fumigatus
  misc_feature: 3802
atggaaggttagttattattaaacatgataatataataaaatacaataatattttattatatatatattatataattttttatttgttaaagttgt

SEQ ID NO: 24170 - DNA, 96 bp, Aspergillus fumigatus
  misc_feature: 3801
aatggaaggttagttattattaaacatgataatataataaaatacaataatattttattatatatatattatataattttttatttgttaaagttg

SEQ ID NO: 24171 - DNA, 96 bp, Aspergillus fumigatus
  misc_feature: 3798
tcaaatggaaggttagttattattaaacatgataatataataaaatacaataatattttattatatatatattatataattttttatttgttaaag

SEQ ID NO: 24172 - DNA, 96 bp, Aspergillus fumigatus
  misc_feature: 3798
caaatggaaggttagttattattaaacatgataatataataaaatacaataatattttattatatatatattatataattttttatttgttaaagt

SEQ ID NO: 24173 - DNA, 96 bp, Aspergillus fumigatus
  misc_feature: 3793
gaaggttagttattattaaacatgataatataataaaatacaataatattttattatatatatattatataattttttatttgttaaagttgtttt

SEQ ID NO: 24174 - DNA, 96 bp, Aspergillus fumigatus
  misc_feature: 3792
tggaaggttagttattattaaacatgataatataataaaatacaataatattttattatatatatattatataattttttatttgttaaagttgtt

SEQ ID NO: 24175 - DNA, 96 bp, Aspergillus fumigatus
  misc_feature: 3791
ggaaggttagttattattaaacatgataatataataaaatacaataatattttattatatatatattatataattttttatttgttaaagttgttt

SEQ ID NO: 24176 - DNA, 96 bp, Aspergillus fumigatus
  misc_feature: 3714
tgttctaccattaaactactttggctcttaaaatataatttaattaaatattaaatataattttttattaaaaaataaaaattatgttggggcgac

SEQ ID NO: 24177 - DNA, 96 bp, Aspergillus fumigatus
  misc_feature: 3685
gttctaccattaaactactttggctcttaaaatataatttaattaaatattaaatataattttttattaaaaaataaaaattatgttggggcgact

SEQ ID NO: 24178 - DNA, 96 bp, Aspergillus fumigatus
  misc_feature: 3658
ttctaccattaaactactttggctcttaaaatataatttaattaaatattaaatataattttttattaaaaaataaaaattatgttggggcgactc

SEQ ID NO: 24179 - DNA, 96 bp, Aspergillus fumigatus
  misc_feature: 3655
tatatattttttttgcaaatataaattcatatataatatgaaaaaaaaaaaattaaaaataaaagaatataaatataaaaataattctttttttta

SEQ ID NO: 24180 - DNA, 96 bp, Aspergillus fumigatus
  misc_feature: 3627
tctaccattaaactactttggctcttaaaatataatttaattaaatattaaatataattttttattaaaaaataaaaattatgttggggcgactcg

SEQ ID NO: 24181 - DNA, 96 bp, Aspergillus fumigatus
  misc_feature: 3599
ctaccattaaactactttggctcttaaaatataatttaattaaatattaaatataattttttattaaaaaataaaaattatgttggggcgactcga

SEQ ID NO: 24182 - DNA, 96 bp, Aspergillus fumigatus
  misc_feature: 3592
taccattaaactactttggctcttaaaatataatttaattaaatattaaatataattttttattaaaaaataaaaattatgttggggcgactcgaa

SEQ ID NO: 24183 - DNA, 96 bp, Aspergillus fumigatus
  misc_feature: 3585
cattaaactactttggctcttaaaatataatttaattaaatattaaatataattttttattaaaaaataaaaattatgttggggcgactcgaacac

SEQ ID NO: 24184 - DNA, 96 bp, Aspergillus fumigatus
  misc_feature: 3583
atatattttttttgcaaatataaattcatatataatatgaaaaaaaaaaaattaaaaataaaagaatataaatataaaaataattcttttttttac

SEQ ID NO: 24185 - DNA, 96 bp, Aspergillus fumigatus
  misc_feature: 3582
accattaaactactttggctcttaaaatataatttaattaaatattaaatataattttttattaaaaaataaaaattatgttggggcgactcgaac

SEQ ID NO: 24186 - DNA, 96 bp, Aspergillus fumigatus
  misc_feature: 3569
ttaaactactttggctcttaaaatataatttaattaaatattaaatataattttttattaaaaaataaaaattatgttggggcgactcgaacaccc

SEQ ID NO: 24187 - DNA, 96 bp, Aspergillus fumigatus
  misc_feature: 3568
attaaactactttggctcttaaaatataatttaattaaatattaaatataattttttattaaaaaataaaaattatgttggggcgactcgaacacc

SEQ ID NO: 24188 - DNA, 96 bp, Aspergillus fumigatus
  misc_feature: 3565
tatattttttttgcaaatataaattcatatataatatgaaaaaaaaaaaattaaaaataaaagaatataaatataaaaataattcttttttttact

SEQ ID NO: 24189 - DNA, 96 bp, Aspergillus fumigatus
  misc_feature: 3564
taaactactttggctcttaaaatataatttaattaaatattaaatataattttttattaaaaaataaaaattatgttggggcgactcgaacaccca

SEQ ID NO: 24190 - DNA, 96 bp, Aspergillus fumigatus
  misc_feature: 3554
aaactactttggctcttaaaatataatttaattaaatattaaatataattttttattaaaaaataaaaattatgttggggcgactcgaacacccaa

SEQ ID NO: 24191 - DNA, 96 bp, Aspergillus fumigatus
  misc_feature: 3554
atattttttttgcaaatataaattcatatataatatgaaaaaaaaaaaattaaaaataaaagaatataaatataaaaataattcttttttttacta

SEQ ID NO: 24192 - DNA, 96 bp, Aspergillus fumigatus
  misc_feature: 3553
attttttttgcaaatataaattcatatataatatgaaaaaaaaaaaattaaaaataaaagaatataaatataaaaataattcttttttttactaaa

SEQ ID NO: 24193 - DNA, 96 bp, Aspergillus fumigatus
  misc_feature: 3549
ccattaaactactttggctcttaaaatataatttaattaaatattaaatataattttttattaaaaaataaaaattatgttggggcgactcgaaca

SEQ ID NO: 24194 - DNA, 96 bp, Aspergillus fumigatus
  misc_feature: 3548
tattttttttgcaaatataaattcatatataatatgaaaaaaaaaaaattaaaaataaaagaatataaatataaaaataattcttttttttactaa

SEQ ID NO: 24195 - DNA, 96 bp, Aspergillus fumigatus
  misc_feature: 3547
attaatattttatttagtaaaaaaaagaattatttttatatttatattcttttatttttaattttttttttttcatattatatatgaatttatatt

SEQ ID NO: 24196 - DNA, 96 bp, Aspergillus fumigatus
  misc_feature: 3530
aactactttggctcttaaaatataatttaattaaatattaaatataattttttattaaaaaataaaaattatgttggggcgactcgaacacccaat

SEQ ID NO: 24197 - DNA, 96 bp, Aspergillus fumigatus
  misc_feature: 3527
ttaatattttatttagtaaaaaaaagaattatttttatatttatattcttttatttttaattttttttttttcatattatatatgaatttatattt

SEQ ID NO: 24198 - DNA, 96 bp, Aspergillus fumigatus
  misc_feature: 3502
tttttttgcaaatataaattcatatataatatgaaaaaaaaaaaattaaaaataaaagaatataaatataaaaataattcttttttttactaaata

SEQ ID NO: 24199 - DNA, 96 bp, Aspergillus fumigatus
  misc_feature: 3501
ttttttttgcaaatataaattcatatataatatgaaaaaaaaaaaattaaaaataaaagaatataaatataaaaataattcttttttttactaaat

SEQ ID NO: 24200 - DNA, 96 bp, Aspergillus fumigatus
  misc_feature: 3501
taatattttatttagtaaaaaaaagaattatttttatatttatattcttttatttttaattttttttttttcatattatatatgaatttatatttg

SEQ ID NO: 24201 - DNA, 96 bp, Aspergillus fumigatus
  misc_feature: 3495
actactttggctcttaaaatataatttaattaaatattaaatataattttttattaaaaaataaaaattatgttggggcgactcgaacacccaata

SEQ ID NO: 24202 - DNA, 96 bp, Aspergillus fumigatus
  misc_feature: 3489
tgcaaatataaattcatatataatatgaaaaaaaaaaaattaaaaataaaagaatataaatataaaaataattcttttttttactaaataaaatat

SEQ ID NO: 24203 - DNA, 96 bp, Aspergillus fumigatus
  misc_feature: 3485
gcaaatataaattcatatataatatgaaaaaaaaaaaattaaaaataaaagaatataaatataaaaataattcttttttttactaaataaaatatt

SEQ ID NO: 24204 - DNA, 96 bp, Aspergillus fumigatus
  misc_feature: 3457
ctactttggctcttaaaatataatttaattaaatattaaatataattttttattaaaaaataaaaattatgttggggcgactcgaacacccaatag

SEQ ID NO: 24205 - DNA, 96 bp, Aspergillus fumigatus
  misc_feature: 3454
tactttggctcttaaaatataatttaattaaatattaaatataattttttattaaaaaataaaaattatgttggggcgactcgaacacccaatagt

SEQ ID NO: 24206 - DNA, 96 bp, Aspergillus fumigatus
  misc_feature: 2940
ccggtcccctccgcgcgcgcggcccatcgctcgctgcggcagggcgcgcgcgcccggcctatatcggccgcggggtctgtgtgtctgtccgtgtat

SEQ ID NO: 24207 - DNA, 96 bp, Aspergillus fumigatus
  misc_feature: 2934
ctgcccaccggtcccctccgcgcgcgcggcccatcgctcgctgcggcagggcgcgcgcgcccggcctatatcggccgcggggtctgtgtgtctgtc

SEQ ID NO: 24208 - DNA, 96 bp, Aspergillus fumigatus
  misc_feature: 2933
cgcctgcccaccggtcccctccgcgcgcgcggcccatcgctcgctgcggcagggcgcgcgcgcccggcctatatcggccgcggggtctgtgtgtct

SEQ ID NO: 24209 - DNA, 96 bp, Aspergillus fumigatus
  misc_feature: 2926
cctgcccaccggtcccctccgcgcgcgcggcccatcgctcgctgcggcagggcgcgcgcgcccggcctatatcggccgcggggtctgtgtgtctgt

SEQ ID NO: 24210 - DNA, 96 bp, Aspergillus fumigatus
  misc_feature: 2925
gcctgcccaccggtcccctccgcgcgcgcggcccatcgctcgctgcggcagggcgcgcgcgcccggcctatatcggccgcggggtctgtgtgtctg

SEQ ID NO: 24211 - DNA, 96 bp, Aspergillus fumigatus
  misc_feature: 2924
cggtcccctccgcgcgcgcggcccatcgctcgctgcggcagggcgcgcgcgcccggcctatatcggccgcggggtctgtgtgtctgtccgtgtatc

SEQ ID NO: 24212 - DNA, 96 bp, Aspergillus fumigatus
  misc_feature: 2923
tgcccaccggtcccctccgcgcgcgcggcccatcgctcgctgcggcagggcgcgcgcgcccggcctatatcggccgcggggtctgtgtgtctgtcc

SEQ ID NO: 24213 - DNA, 96 bp, Aspergillus fumigatus
  misc_feature: 2923
ggtcccctccgcgcgcgcggcccatcgctcgctgcggcagggcgcgcgcgcccggcctatatcggccgcggggtctgtgtgtctgtccgtgtatcg

SEQ ID NO: 24214 - DNA, 96 bp, Aspergillus fumigatus
  misc_feature: 2922
ccgcctgcccaccggtcccctccgcgcgcgcggcccatcgctcgctgcggcagggcgcgcgcgcccggcctatatcggccgcggggtctgtgtgtc

SEQ ID NO: 24215 - DNA, 96 bp, Aspergillus fumigatus
  misc_feature: 2904
accggtcccctccgcgcgcgcggcccatcgctcgctgcggcagggcgcgcgcgcccggcctatatcggccgcggggtctgtgtgtctgtccgtgta

SEQ ID NO: 24216 - DNA, 96 bp, Aspergillus fumigatus
  misc_feature: 2902
gtcccctccgcgcgcgcggcccatcgctcgctgcggcagggcgcgcgcgcccggcctatatcggccgcggggtctgtgtgtctgtccgtgtatcgc

SEQ ID NO: 24217 - DNA, 96 bp, Aspergillus fumigatus
  misc_feature: 2892
cccgcctgcccaccggtcccctccgcgcgcgcggcccatcgctcgctgcggcagggcgcgcgcgcccggcctatatcggccgcggggtctgtgtgt

SEQ ID NO: 24218 - DNA, 96 bp, Aspergillus fumigatus
  misc_feature: 2889
gcgcccgcctgcccaccggtcccctccgcgcgcgcggcccatcgctcgctgcggcagggcgcgcgcgcccggcctatatcggccgcggggtctgtg

SEQ ID NO: 24219 - DNA, 96 bp, Aspergillus fumigatus
  misc_feature: 2889
ccaccggtcccctccgcgcgcgcggcccatcgctcgctgcggcagggcgcgcgcgcccggcctatatcggccgcggggtctgtgtgtctgtccgtg

SEQ ID NO: 24220 - DNA, 96 bp, Aspergillus fumigatus
  misc_feature: 2887
gcccaccggtcccctccgcgcgcgcggcccatcgctcgctgcggcagggcgcgcgcgcccggcctatatcggccgcggggtctgtgtgtctgtccg

SEQ ID NO: 24221 - DNA, 96 bp, Aspergillus fumigatus
  misc_feature: 2887
caccggtcccctccgcgcgcgcggcccatcgctcgctgcggcagggcgcgcgcgcccggcctatatcggccgcggggtctgtgtgtctgtccgtgt

SEQ ID NO: 24222 - DNA, 96 bp, Aspergillus fumigatus
  misc_feature: 2886
gcccgcctgcccaccggtcccctccgcgcgcgcggcccatcgctcgctgcggcagggcgcgcgcgcccggcctatatcggccgcggggtctgtgtg

SEQ ID NO: 24223 - DNA, 96 bp, Aspergillus fumigatus
  misc_feature: 2881
tcccctccgcgcgcgcggcccatcgctcgctgcggcagggcgcgcgcgcccggcctatatcggccgcggggtctgtgtgtctgtccgtgtatcgcg

SEQ ID NO: 24224 - DNA, 96 bp, Aspergillus fumigatus
  misc_feature: 2873
cccaccggtcccctccgcgcgcgcggcccatcgctcgctgcggcagggcgcgcgcgcccggcctatatcggccgcggggtctgtgtgtctgtccgt

SEQ ID NO: 24225 - DNA, 96 bp, Aspergillus fumigatus
  misc_feature: 2869
cgcccgcctgcccaccggtcccctccgcgcgcgcggcccatcgctcgctgcggcagggcgcgcgcgcccggcctatatcggccgcggggtctgtgt

SEQ ID NO: 24226 - DNA, 96 bp, Aspergillus fumigatus
  misc_feature: 2845
acagaccccgcggccgatataggccgggcgcgcgcgccctgccgcagcgagcgatgggccgcgcgcgcggaggggaccggtgggcaggcgggcgca

SEQ ID NO: 24227 - DNA, 96 bp, Aspergillus fumigatus
  misc_feature: 1830
tcgccctcccttcgtcgccctcgcgcgcgcgactctctgctcgcctcgagggcgcgcgcctaccgggcccccagcccccctcaaccgactcccctc

SEQ ID NO: 24228 - DNA, 96 bp, Aspergillus fumigatus
  misc_feature: 1807
ctcgccctcccttcgtcgccctcgcgcgcgcgactctctgctcgcctcgagggcgcgcgcctaccgggcccccagcccccctcaaccgactcccct

SEQ ID NO: 24229 - DNA, 96 bp, Aspergillus fumigatus
  misc_feature: 1788
cctcgccctcccttcgtcgccctcgcgcgcgcgactctctgctcgcctcgagggcgcgcgcctaccgggcccccagcccccctcaaccgactcccc

SEQ ID NO: 24230 - DNA, 96 bp, Aspergillus fumigatus
  misc_feature: 1744
tcctcgccctcccttcgtcgccctcgcgcgcgcgactctctgctcgcctcgagggcgcgcgcctaccgggcccccagcccccctcaaccgactccc

SEQ ID NO: 24231 - DNA, 96 bp, Aspergillus fumigatus
  misc_feature: 1730
ctcctcgccctcccttcgtcgccctcgcgcgcgcgactctctgctcgcctcgagggcgcgcgcctaccgggcccccagcccccctcaaccgactcc

SEQ ID NO: 24232 - DNA, 96 bp, Aspergillus fumigatus
  misc_feature: 1691
cctcctcgccctcccttcgtcgccctcgcgcgcgcgactctctgctcgcctcgagggcgcgcgcctaccgggcccccagcccccctcaaccgactc

SEQ ID NO: 24233 - DNA, 96 bp, Aspergillus fumigatus
  misc_feature: 1662
ccctcctcgccctcccttcgtcgccctcgcgcgcgcgactctctgctcgcctcgagggcgcgcgcctaccgggcccccagcccccctcaaccgact

SEQ ID NO: 24234 - DNA, 96 bp, Aspergillus fumigatus
  misc_feature: 1645
gccctcctcgccctcccttcgtcgccctcgcgcgcgcgactctctgctcgcctcgagggcgcgcgcctaccgggcccccagcccccctcaaccgac

SEQ ID NO: 24235 - DNA, 96 bp, Aspergillus fumigatus
  misc_feature: 1613
ctcgccctcctcgccctcccttcgtcgccctcgcgcgcgcgactctctgctcgcctcgagggcgcgcgcctaccgggcccccagcccccctcaacc

SEQ ID NO: 24236 - DNA, 96 bp, Aspergillus fumigatus
  misc_feature: 1611
cgccctcctcgccctcccttcgtcgccctcgcgcgcgcgactctctgctcgcctcgagggcgcgcgcctaccgggcccccagcccccctcaaccga

SEQ ID NO: 24237 - DNA, 96 bp, Aspergillus fumigatus
  misc_feature: 1610
cctcgccctcctcgccctcccttcgtcgccctcgcgcgcgcgactctctgctcgcctcgagggcgcgcgcctaccgggcccccagcccccctcaac

SEQ ID NO: 24238 - DNA, 96 bp, Aspergillus fumigatus
  misc_feature: 1601
tcgccctcctcgccctcccttcgtcgccctcgcgcgcgcgactctctgctcgcctcgagggcgcgcgcctaccgggcccccagcccccctcaaccg

SEQ ID NO: 24239 - DNA, 96 bp, Aspergillus fumigatus
  misc_feature: 1589
tcctcgccctcctcgccctcccttcgtcgccctcgcgcgcgcgactctctgctcgcctcgagggcgcgcgcctaccgggcccccagcccccctcaa

SEQ ID NO: 24240 - DNA, 96 bp, Aspergillus fumigatus
  misc_feature: 1579
ctcctcgccctcctcgccctcccttcgtcgccctcgcgcgcgcgactctctgctcgcctcgagggcgcgcgcctaccgggcccccagcccccctca

SEQ ID NO: 24241 - DNA, 96 bp, Aspergillus fumigatus
  misc_feature: 1560
cctcctcgccctcctcgccctcccttcgtcgccctcgcgcgcgcgactctctgctcgcctcgagggcgcgcgcctaccgggcccccagcccccctc

SEQ ID NO: 24242 - DNA, 96 bp, Aspergillus fumigatus
  misc_feature: 1516
ccctcctcgccctcctcgccctcccttcgtcgccctcgcgcgcgcgactctctgctcgcctcgagggcgcgcgcctaccgggcccccagcccccct

SEQ ID NO: 24243 - DNA, 96 bp, Aspergillus fumigatus
  misc_feature: 1513
gccctcctcgccctcctcgccctcccttcgtcgccctcgcgcgcgcgactctctgctcgcctcgagggcgcgcgcctaccgggcccccagcccccc

SEQ ID NO: 24244 - DNA, 96 bp, Aspergillus fumigatus
  misc_feature: 1481
cgccctcctcgccctcctcgccctcccttcgtcgccctcgcgcgcgcgactctctgctcgcctcgagggcgcgcgcctaccgggcccccagccccc

SEQ ID NO: 24245 - DNA, 96 bp, Aspergillus fumigatus
  misc_feature: 1468
tcgccctcctcgccctcctcgccctcccttcgtcgccctcgcgcgcgcgactctctgctcgcctcgagggcgcgcgcctaccgggcccccagcccc

SEQ ID NO: 24246 - DNA, 96 bp, Aspergillus fumigatus
  misc_feature: 1466
ctcgccctcctcgccctcctcgccctcccttcgtcgccctcgcgcgcgcgactctctgctcgcctcgagggcgcgcgcctaccgggcccccagccc

SEQ ID NO: 24247 - DNA, 96 bp, Aspergillus fumigatus
  misc_feature: 1447
cctcgccctcctcgccctcctcgccctcccttcgtcgccctcgcgcgcgcgactctctgctcgcctcgagggcgcgcgcctaccgggcccccagcc

SEQ ID NO: 24248 - DNA, 96 bp, Aspergillus fumigatus
  misc_feature: 1420
tcctcgccctcctcgccctcctcgccctcccttcgtcgccctcgcgcgcgcgactctctgctcgcctcgagggcgcgcgcctaccgggcccccagc

SEQ ID NO: 24249 - DNA, 96 bp, Aspergillus fumigatus
  misc_feature: 1398
cctcctcgccctcctcgccctcctcgccctcccttcgtcgccctcgcgcgcgcgactctctgctcgcctcgagggcgcgcgcctaccgggccccca

SEQ ID NO: 24250 - DNA, 96 bp, Aspergillus fumigatus
  misc_feature: 1398
ctcctcgccctcctcgccctcctcgccctcccttcgtcgccctcgcgcgcgcgactctctgctcgcctcgagggcgcgcgcctaccgggcccccag

SEQ ID NO: 24251 - DNA, 96 bp, Aspergillus fumigatus
  misc_feature: 1380
ccctcctcgccctcctcgccctcctcgccctcccttcgtcgccctcgcgcgcgcgactctctgctcgcctcgagggcgcgcgcctaccgggccccc

SEQ ID NO: 24252 - DNA, 96 bp, Aspergillus fumigatus
  misc_feature: 1364
gccctcctcgccctcctcgccctcctcgccctcccttcgtcgccctcgcgcgcgcgactctctgctcgcctcgagggcgcgcgcctaccgggcccc

SEQ ID NO: 24253 - DNA, 96 bp, Aspergillus fumigatus
  misc_feature: 1336
cgccctcctcgccctcctcgccctcctcgccctcccttcgtcgccctcgcgcgcgcgactctctgctcgcctcgagggcgcgcgcctaccgggccc

SEQ ID NO: 24254 - DNA, 96 bp, Aspergillus fumigatus
  misc_feature: 1324
ggcccggtaggcgcgcgccctcgaggcgagcagagagtcgcgcgcgcgagggcgacgaagggagggcgaggagggcgaggagggcgaggagggcga

SEQ ID NO: 24255 - DNA, 96 bp, Aspergillus fumigatus
  misc_feature: 1296
gcccggtaggcgcgcgccctcgaggcgagcagagagtcgcgcgcgcgagggcgacgaagggagggcgaggagggcgaggagggcgaggagggcgag

SEQ ID NO: 24256 - DNA, 96 bp, Aspergillus fumigatus
  misc_feature: 1289
cccggtaggcgcgcgccctcgaggcgagcagagagtcgcgcgcgcgagggcgacgaagggagggcgaggagggcgaggagggcgaggagggcgagg

SEQ ID NO: 24257 - DNA, 96 bp, Aspergillus fumigatus
  misc_feature: 1287
cggtaggcgcgcgccctcgaggcgagcagagagtcgcgcgcgcgagggcgacgaagggagggcgaggagggcgaggagggcgaggagggcgaggag

SEQ ID NO: 24258 - DNA, 96 bp, Aspergillus fumigatus
  misc_feature: 1285
ggtaggcgcgcgccctcgaggcgagcagagagtcgcgcgcgcgagggcgacgaagggagggcgaggagggcgaggagggcgaggagggcgaggagg

SEQ ID NO: 24259 - DNA, 96 bp, Aspergillus fumigatus
  misc_feature: 1277
ccggtaggcgcgcgccctcgaggcgagcagagagtcgcgcgcgcgagggcgacgaagggagggcgaggagggcgaggagggcgaggagggcgagga

SEQ ID NO: 24260 - DNA, 96 bp, Aspergillus fumigatus
  misc_feature: 1167
actcggccagccaactggccgccgcgcgctcgcctgcgcgcctccccctcctcctcctcctcgccctcctcgccctcctcgccctcctcgccctcc

SEQ ID NO: 24261 - DNA, 96 bp, Aspergillus fumigatus
  misc_feature: 1167
aactcggccagccaactggccgccgcgcgctcgcctgcgcgcctccccctcctcctcctcctcgccctcctcgccctcctcgccctcctcgccctc

SEQ ID NO: 24262 - DNA, 96 bp, Aspergillus fumigatus
  misc_feature: 1148
caactcggccagccaactggccgccgcgcgctcgcctgcgcgcctccccctcctcctcctcctcgccctcctcgccctcctcgccctcctcgccct

SEQ ID NO: 24263 - DNA, 96 bp, Aspergillus fumigatus
  misc_feature: 1127
cgcgccaactcggccagccaactggccgccgcgcgctcgcctgcgcgcctccccctcctcctcctcctcgccctcctcgccctcctcgccctcctc

SEQ ID NO: 24264 - DNA, 96 bp, Aspergillus fumigatus
  misc_feature: 1126
ccaactcggccagccaactggccgccgcgcgctcgcctgcgcgcctccccctcctcctcctcctcgccctcctcgccctcctcgccctcctcgccc

SEQ ID NO: 24265 - DNA, 96 bp, Aspergillus fumigatus
  misc_feature: 1122
ccccccgccgcgccaactcggccagccaactggccgccgcgcgctcgcctgcgcgcctccccctcctcctcctcctcgccctcctcgccctcctcg

SEQ ID NO: 24266 - DNA, 96 bp, Aspergillus fumigatus
  misc_feature: 1119
gccgcgccaactcggccagccaactggccgccgcgcgctcgcctgcgcgcctccccctcctcctcctcctcgccctcctcgccctcctcgccctcc

SEQ ID NO: 24267 - DNA, 96 bp, Aspergillus fumigatus
  misc_feature: 1119
gccccccgccgcgccaactcggccagccaactggccgccgcgcgctcgcctgcgcgcctccccctcctcctcctcctcgccctcctcgccctcctc

SEQ ID NO: 24268 - DNA, 96 bp, Aspergillus fumigatus
  misc_feature: 1119
ccgcgccaactcggccagccaactggccgccgcgcgctcgcctgcgcgcctccccctcctcctcctcctcgccctcctcgccctcctcgccctcct

SEQ ID NO: 24269 - DNA, 96 bp, Aspergillus fumigatus
  misc_feature: 1118
gcgccccccgccgcgccaactcggccagccaactggccgccgcgcgctcgcctgcgcgcctccccctcctcctcctcctcgccctcctcgccctcc

SEQ ID NO: 24270 - DNA, 96 bp, Aspergillus fumigatus
  misc_feature: 1111
cgccccccgccgcgccaactcggccagccaactggccgccgcgcgctcgcctgcgcgcctccccctcctcctcctcctcgccctcctcgccctcct

SEQ ID NO: 24271 - DNA, 96 bp, Aspergillus fumigatus
  misc_feature: 1107
cgccgcgccaactcggccagccaactggccgccgcgcgctcgcctgcgcgcctccccctcctcctcctcctcgccctcctcgccctcctcgccctc

SEQ ID NO: 24272 - DNA, 96 bp, Aspergillus fumigatus
  misc_feature: 1106
gccaactcggccagccaactggccgccgcgcgctcgcctgcgcgcctccccctcctcctcctcctcgccctcctcgccctcctcgccctcctcgcc

SEQ ID NO: 24273 - DNA, 96 bp, Aspergillus fumigatus
  misc_feature: 1084
cgccaactcggccagccaactggccgccgcgcgctcgcctgcgcgcctccccctcctcctcctcctcgccctcctcgccctcctcgccctcctcgc

SEQ ID NO: 24274 - DNA, 96 bp, Aspergillus fumigatus
  misc_feature: 1082
gcgccaactcggccagccaactggccgccgcgcgctcgcctgcgcgcctccccctcctcctcctcctcgccctcctcgccctcctcgccctcctcg

SEQ ID NO: 24275 - DNA, 96 bp, Aspergillus fumigatus
  misc_feature: 959
aaaataaatggaaaaataaatggaaaaataaatggaaaaataaatggaaaaataaatggaaaaataaatggaaaaataaatggaaaaataaatgga

SEQ ID NO: 24276 - DNA, 96 bp, Aspergillus fumigatus
  misc_feature: 946
aaataaatggaaaaataaatggaaaaataaatggaaaaataaatggaaaaataaatggaaaaataaatggaaaaataaatggaaaaataaatggaa

SEQ ID NO: 24277 - DNA, 96 bp, Aspergillus fumigatus
  misc_feature: 944
ataaatggaaaaataaatggaaaaataaatggaaaaataaatggaaaaataaatggaaaaataaatggaaaaataaatggaaaaataaatggaaaa

SEQ ID NO: 24278 - DNA, 96 bp, Aspergillus fumigatus
  misc_feature: 943
aataaatggaaaaataaatggaaaaataaatggaaaaataaatggaaaaataaatggaaaaataaatggaaaaataaatggaaaaataaatggaaa

SEQ ID NO: 24279 - DNA, 96 bp, Aspergillus fumigatus
  misc_feature: 935
taaatggaaaaataaatggaaaaataaatggaaaaataaatggaaaaataaatggaaaaataaatggaaaaataaatggaaaaataaatggaaaaa

SEQ ID NO: 24280 - DNA, 96 bp, Aspergillus fumigatus
  misc_feature: 883
ggaaaaataaatggaaaaataaatggaaaaataaatggaaaaataaatggaaaaataaatggaaaaataaatggaaaaataaatggaaaaataaat

SEQ ID NO: 24281 - DNA, 96 bp, Aspergillus fumigatus
  misc_feature: 882
gaaaaataaatggaaaaataaatggaaaaataaatggaaaaataaatggaaaaataaatggaaaaataaatggaaaaataaatggaaaaataaatg

SEQ ID NO: 24282 - DNA, 96 bp, Aspergillus fumigatus
  misc_feature: 881
tggaaaaataaatggaaaaataaatggaaaaataaatggaaaaataaatggaaaaataaatggaaaaataaatggaaaaataaatggaaaaataaa

SEQ ID NO: 24283 - DNA, 96 bp, Aspergillus fumigatus
  misc_feature: 881
aaaaataaatggaaaaataaatggaaaaataaatggaaaaataaatggaaaaataaatggaaaaataaatggaaaaataaatggaaaaataaatgg

SEQ ID NO: 24284 - DNA, 96 bp, Aspergillus fumigatus
  misc_feature: 877
atggaaaaataaatggaaaaataaatggaaaaataaatggaaaaataaatggaaaaataaatggaaaaataaatggaaaaataaatggaaaaataa

SEQ ID NO: 24285 - DNA, 96 bp, Aspergillus fumigatus
  misc_feature: 877
aaatggaaaaataaatggaaaaataaatggaaaaataaatggaaaaataaatggaaaaataaatggaaaaataaatggaaaaataaatggaaaaat

SEQ ID NO: 24286 - DNA, 96 bp, Aspergillus fumigatus
  misc_feature: 873
aatggaaaaataaatggaaaaataaatggaaaaataaatggaaaaataaatggaaaaataaatggaaaaataaatggaaaaataaatggaaaaata

SEQ ID NO: 24287 - DNA, 96 bp, Aspergillus fumigatus
  misc_feature: 867
cgcgcgccctcgaggcgagcagagagtcgcgcgcgcgagggcgacgaagggagggcgaggagggcgaggagggcgaggagggcgaggaggaggagg

SEQ ID NO: 24288 - DNA, 96 bp, Aspergillus fumigatus
  misc_feature: 863
cgcgccctcgaggcgagcagagagtcgcgcgcgcgagggcgacgaagggagggcgaggagggcgaggagggcgaggagggcgaggaggaggaggag

SEQ ID NO: 24289 - DNA, 96 bp, Aspergillus fumigatus
  misc_feature: 862
gcgcgccctcgaggcgagcagagagtcgcgcgcgcgagggcgacgaagggagggcgaggagggcgaggagggcgaggagggcgaggaggaggagga

SEQ ID NO: 24290 - DNA, 96 bp, Aspergillus fumigatus
  misc_feature: 862
gcgccctcgaggcgagcagagagtcgcgcgcgcgagggcgacgaagggagggcgaggagggcgaggagggcgaggagggcgaggaggaggaggagg

SEQ ID NO: 24291 - DNA, 96 bp, Aspergillus fumigatus
  misc_feature: 860
ggcgcgcgccctcgaggcgagcagagagtcgcgcgcgcgagggcgacgaagggagggcgaggagggcgaggagggcgaggagggcgaggaggagga

SEQ ID NO: 24292 - DNA, 96 bp, Aspergillus fumigatus
  misc_feature: 860
gcgcgcgccctcgaggcgagcagagagtcgcgcgcgcgagggcgacgaagggagggcgaggagggcgaggagggcgaggagggcgaggaggaggag

SEQ ID NO: 24293 - DNA, 96 bp, Aspergillus fumigatus
  misc_feature: 857
aggcgcgcgccctcgaggcgagcagagagtcgcgcgcgcgagggcgacgaagggagggcgaggagggcgaggagggcgaggagggcgaggaggagg

SEQ ID NO: 24294 - DNA, 96 bp, Aspergillus fumigatus
  misc_feature: 850
ggcgagcagagagtcgcgcgcgcgagggcgacgaagggagggcgaggagggcgaggagggcgaggagggcgaggaggaggaggagggggaggcgcg

SEQ ID NO: 24295 - DNA, 96 bp, Aspergillus fumigatus
  misc_feature: 848
taggcgcgcgccctcgaggcgagcagagagtcgcgcgcgcgagggcgacgaagggagggcgaggagggcgaggagggcgaggagggcgaggaggag

SEQ ID NO: 24296 - DNA, 96 bp, Aspergillus fumigatus
  misc_feature: 846
gagcagagagtcgcgcgcgcgagggcgacgaagggagggcgaggagggcgaggagggcgaggagggcgaggaggaggaggagggggaggcgcgcag

SEQ ID NO: 24297 - DNA, 96 bp, Aspergillus fumigatus
  misc_feature: 844
gccctcgaggcgagcagagagtcgcgcgcgcgagggcgacgaagggagggcgaggagggcgaggagggcgaggagggcgaggaggaggaggagggg

SEQ ID NO: 24298 - DNA, 96 bp, Aspergillus fumigatus
  misc_feature: 844
cgccctcgaggcgagcagagagtcgcgcgcgcgagggcgacgaagggagggcgaggagggcgaggagggcgaggagggcgaggaggaggaggaggg

SEQ ID NO: 24299 - DNA, 96 bp, Aspergillus fumigatus
  misc_feature: 841
cgagcagagagtcgcgcgcgcgagggcgacgaagggagggcgaggagggcgaggagggcgaggagggcgaggaggaggaggagggggaggcgcgca

SEQ ID NO: 24300 - DNA, 96 bp, Aspergillus fumigatus
  misc_feature: 841
aggcgagcagagagtcgcgcgcgcgagggcgacgaagggagggcgaggagggcgaggagggcgaggagggcgaggaggaggaggagggggaggcgc

SEQ ID NO: 24301 - DNA, 96 bp, Aspergillus fumigatus
  misc_feature: 840
gagagtcgcgcgcgcgagggcgacgaagggagggcgaggagggcgaggagggcgaggagggcgaggaggaggaggagggggaggcgcgcaggcgag

SEQ ID NO: 24302 - DNA, 96 bp, Aspergillus fumigatus
  misc_feature: 839
gcgagcagagagtcgcgcgcgcgagggcgacgaagggagggcgaggagggcgaggagggcgaggagggcgaggaggaggaggagggggaggcgcgc

SEQ ID NO: 24303 - DNA, 96 bp, Aspergillus fumigatus
  misc_feature: 838
cagagagtcgcgcgcgcgagggcgacgaagggagggcgaggagggcgaggagggcgaggagggcgaggaggaggaggagggggaggcgcgcaggcg

SEQ ID NO: 24304 - DNA, 96 bp, Aspergillus fumigatus
  misc_feature: 838
ccctcgaggcgagcagagagtcgcgcgcgcgagggcgacgaagggagggcgaggagggcgaggagggcgaggagggcgaggaggaggaggaggggg

SEQ ID NO: 24305 - DNA, 96 bp, Aspergillus fumigatus
  misc_feature: 836
agagagtcgcgcgcgcgagggcgacgaagggagggcgaggagggcgaggagggcgaggagggcgaggaggaggaggagggggaggcgcgcaggcga

SEQ ID NO: 24306 - DNA, 96 bp, Aspergillus fumigatus
  misc_feature: 836
gtaggcgcgcgccctcgaggcgagcagagagtcgcgcgcgcgagggcgacgaagggagggcgaggagggcgaggagggcgaggagggcgaggagga

SEQ ID NO: 24307 - DNA, 96 bp, Aspergillus fumigatus
  misc_feature: 836
agcagagagtcgcgcgcgcgagggcgacgaagggagggcgaggagggcgaggagggcgaggagggcgaggaggaggaggagggggaggcgcgcagg

SEQ ID NO: 24308 - DNA, 96 bp, Aspergillus fumigatus
  misc_feature: 835
ctcgaggcgagcagagagtcgcgcgcgcgagggcgacgaagggagggcgaggagggcgaggagggcgaggagggcgaggaggaggaggagggggag

SEQ ID NO: 24309 - DNA, 96 bp, Aspergillus fumigatus
  misc_feature: 833
gaggcgagcagagagtcgcgcgcgcgagggcgacgaagggagggcgaggagggcgaggagggcgaggagggcgaggaggaggaggagggggaggcg

SEQ ID NO: 24310 - DNA, 96 bp, Aspergillus fumigatus
  misc_feature: 832
cctcgaggcgagcagagagtcgcgcgcgcgagggcgacgaagggagggcgaggagggcgaggagggcgaggagggcgaggaggaggaggaggggga

SEQ ID NO: 24311 - DNA, 96 bp, Aspergillus fumigatus
  misc_feature: 832
ctcggccagccaactggccgccgcgcgctcgcctgcgcgcctccccctcctcctcctcctcgccctcctcgccctcctcgccctcctcgccctccc

SEQ ID NO: 24312 - DNA, 96 bp, Aspergillus fumigatus
  misc_feature: 832
agagtcgcgcgcgcgagggcgacgaagggagggcgaggagggcgaggagggcgaggagggcgaggaggaggaggagggggaggcgcgcaggcgagc

SEQ ID NO: 24313 - DNA, 96 bp, Aspergillus fumigatus
  misc_feature: 830
cgaggcgagcagagagtcgcgcgcgcgagggcgacgaagggagggcgaggagggcgaggagggcgaggagggcgaggaggaggaggagggggaggc

SEQ ID NO: 24314 - DNA, 96 bp, Aspergillus fumigatus
  misc_feature: 829
gagtcgcgcgcgcgagggcgacgaagggagggcgaggagggcgaggagggcgaggagggcgaggaggaggaggagggggaggcgcgcaggcgagcg

SEQ ID NO: 24315 - DNA, 96 bp, Aspergillus fumigatus
  misc_feature: 828
tcgaggcgagcagagagtcgcgcgcgcgagggcgacgaagggagggcgaggagggcgaggagggcgaggagggcgaggaggaggaggagggggagg

SEQ ID NO: 24316 - DNA, 96 bp, Aspergillus fumigatus
  misc_feature: 827
agtcgcgcgcgcgagggcgacgaagggagggcgaggagggcgaggagggcgaggagggcgaggaggaggaggagggggaggcgcgcaggcgagcgc

SEQ ID NO: 24317 - DNA, 96 bp, Aspergillus fumigatus
  misc_feature: 824
gtcgcgcgcgcgagggcgacgaagggagggcgaggagggcgaggagggcgaggagggcgaggaggaggaggagggggaggcgcgcaggcgagcgcg

SEQ ID NO: 24318 - DNA, 96 bp, Aspergillus fumigatus
  misc_feature: 822
gcagagagtcgcgcgcgcgagggcgacgaagggagggcgaggagggcgaggagggcgaggagggcgaggaggaggaggagggggaggcgcgcaggc

SEQ ID NO: 24319 - DNA, 96 bp, Aspergillus fumigatus
  misc_feature: 822
gagggcgacgaagggagggcgaggagggcgaggagggcgaggagggcgaggaggaggaggagggggaggcgcgcaggcgagcgcgcggcggccagt

SEQ ID NO: 24320 - DNA, 96 bp, Aspergillus fumigatus
  misc_feature: 822
cgcgcgcgcgagggcgacgaagggagggcgaggagggcgaggagggcgaggagggcgaggaggaggaggagggggaggcgcgcaggcgagcgcgcg

SEQ ID NO: 24321 - DNA, 96 bp, Aspergillus fumigatus
  misc_feature: 821
gcgagggcgacgaagggagggcgaggagggcgaggagggcgaggagggcgaggaggaggaggagggggaggcgcgcaggcgagcgcgcggcggcca

SEQ ID NO: 24322 - DNA, 96 bp, Aspergillus fumigatus
  misc_feature: 821
tcgcgcgcgcgagggcgacgaagggagggcgaggagggcgaggagggcgaggagggcgaggaggaggaggagggggaggcgcgcaggcgagcgcgc

SEQ ID NO: 24323 - DNA, 96 bp, Aspergillus fumigatus
  misc_feature: 821
cggccagccaactggccgccgcgcgctcgcctgcgcgcctccccctcctcctcctcctcgccctcctcgccctcctcgccctcctcgccctccctt

SEQ ID NO: 24324 - DNA, 96 bp, Aspergillus fumigatus
  misc_feature: 819
ggccagccaactggccgccgcgcgctcgcctgcgcgcctccccctcctcctcctcctcgccctcctcgccctcctcgccctcctcgccctcccttc

SEQ ID NO: 24325 - DNA, 96 bp, Aspergillus fumigatus
  misc_feature: 819
gcgcgcgcgagggcgacgaagggagggcgaggagggcgaggagggcgaggagggcgaggaggaggaggagggggaggcgcgcaggcgagcgcgcgg

SEQ ID NO: 24326 - DNA, 96 bp, Aspergillus fumigatus
  misc_feature: 816
tcggccagccaactggccgccgcgcgctcgcctgcgcgcctccccctcctcctcctcctcgccctcctcgccctcctcgccctcctcgccctccct

SEQ ID NO: 24327 - DNA, 96 bp, Aspergillus fumigatus
  misc_feature: 816
cgcgcgcgagggcgacgaagggagggcgaggagggcgaggagggcgaggagggcgaggaggaggaggagggggaggcgcgcaggcgagcgcgcggc

SEQ ID NO: 24328 - DNA, 96 bp, Aspergillus fumigatus
  misc_feature: 814
cgagggcgacgaagggagggcgaggagggcgaggagggcgaggagggcgaggaggaggaggagggggaggcgcgcaggcgagcgcgcggcggccag

SEQ ID NO: 24329 - DNA, 96 bp, Aspergillus fumigatus
  misc_feature: 813
gcgcgcgagggcgacgaagggagggcgaggagggcgaggagggcgaggagggcgaggaggaggaggagggggaggcgcgcaggcgagcgcgcggcg

SEQ ID NO: 24330 - DNA, 96 bp, Aspergillus fumigatus
  misc_feature: 812
cgcgagggcgacgaagggagggcgaggagggcgaggagggcgaggagggcgaggaggaggaggagggggaggcgcgcaggcgagcgcgcggcggcc

SEQ ID NO: 24331 - DNA, 96 bp, Aspergillus fumigatus
  misc_feature: 810
agggcgacgaagggagggcgaggagggcgaggagggcgaggagggcgaggaggaggaggagggggaggcgcgcaggcgagcgcgcggcggccagtt

SEQ ID NO: 24332 - DNA, 96 bp, Aspergillus fumigatus
  misc_feature: 807
gcgcgagggcgacgaagggagggcgaggagggcgaggagggcgaggagggcgaggaggaggaggagggggaggcgcgcaggcgagcgcgcggcggc

SEQ ID NO: 24333 - DNA, 96 bp, Aspergillus fumigatus
  misc_feature: 806
cgcgcgagggcgacgaagggagggcgaggagggcgaggagggcgaggagggcgaggaggaggaggagggggaggcgcgcaggcgagcgcgcggcgg

SEQ ID NO: 24334 - DNA, 96 bp, Aspergillus fumigatus
  misc_feature: 805
gggcgacgaagggagggcgaggagggcgaggagggcgaggagggcgaggaggaggaggagggggaggcgcgcaggcgagcgcgcggcggccagttg

SEQ ID NO: 24335 - DNA, 96 bp, Aspergillus fumigatus
  misc_feature: 796
cgaagggagggcgaggagggcgaggagggcgaggagggcgaggaggaggaggagggggaggcgcgcaggcgagcgcgcggcggccagttggctggc

SEQ ID NO: 24336 - DNA, 96 bp, Aspergillus fumigatus
  misc_feature: 796
acgaagggagggcgaggagggcgaggagggcgaggagggcgaggaggaggaggagggggaggcgcgcaggcgagcgcgcggcggccagttggctgg

SEQ ID NO: 24337 - DNA, 96 bp, Aspergillus fumigatus
  misc_feature: 795
ggcgacgaagggagggcgaggagggcgaggagggcgaggagggcgaggaggaggaggagggggaggcgcgcaggcgagcgcgcggcggccagttgg

SEQ ID NO: 24338 - DNA, 96 bp, Aspergillus fumigatus
  misc_feature: 795
gacgaagggagggcgaggagggcgaggagggcgaggagggcgaggaggaggaggagggggaggcgcgcaggcgagcgcgcggcggccagttggctg

SEQ ID NO: 24339 - DNA, 96 bp, Aspergillus fumigatus
  misc_feature: 787
gcgacgaagggagggcgaggagggcgaggagggcgaggagggcgaggaggaggaggagggggaggcgcgcaggcgagcgcgcggcggccagttggc

SEQ ID NO: 24340 - DNA, 96 bp, Aspergillus fumigatus
  misc_feature: 779
cgacgaagggagggcgaggagggcgaggagggcgaggagggcgaggaggaggaggagggggaggcgcgcaggcgagcgcgcggcggccagttggct

SEQ ID NO: 24341 - DNA, 96 bp, Aspergillus fumigatus
  misc_feature: 730
tcttgttcccttacgtgaatatcttgttcccttacgtgaatatcttgttcccttacgtgaatatcttgttcccttacgtgaatatcttgttccctt

SEQ ID NO: 24342 - DNA, 96 bp, Aspergillus fumigatus
  misc_feature: 725
cttgttcccttacgtgaatatcttgttcccttacgtgaatatcttgttcccttacgtgaatatcttgttcccttacgtgaatatcttgttccctta

SEQ ID NO: 24343 - DNA, 96 bp, Aspergillus fumigatus
  misc_feature: 719
atatcttgttcccttacgtgaatatcttgttcccttacgtgaatatcttgttcccttacgtgaatatcttgttcccttacgtgaatatcttgttcc

SEQ ID NO: 24344 - DNA, 96 bp, Aspergillus fumigatus
  misc_feature: 718
aatatcttgttcccttacgtgaatatcttgttcccttacgtgaatatcttgttcccttacgtgaatatcttgttcccttacgtgaatatcttgttc

SEQ ID NO: 24345 - DNA, 96 bp, Aspergillus fumigatus
  misc_feature: 718
atcttgttcccttacgtgaatatcttgttcccttacgtgaatatcttgttcccttacgtgaatatcttgttcccttacgtgaatatcttgttccct

SEQ ID NO: 24346 - DNA, 96 bp, Aspergillus fumigatus
  misc_feature: 717
tatcttgttcccttacgtgaatatcttgttcccttacgtgaatatcttgttcccttacgtgaatatcttgttcccttacgtgaatatcttgttccc

SEQ ID NO: 24347 - DNA, 96 bp, Aspergillus fumigatus
  misc_feature: 715
tgaatatcttgttcccttacgtgaatatcttgttcccttacgtgaatatcttgttcccttacgtgaatatcttgttcccttacgtgaatatcttgt

SEQ ID NO: 24348 - DNA, 96 bp, Aspergillus fumigatus
  misc_feature: 715
gaatatcttgttcccttacgtgaatatcttgttcccttacgtgaatatcttgttcccttacgtgaatatcttgttcccttacgtgaatatcttgtt

SEQ ID NO: 24349 - DNA, 96 bp, Aspergillus fumigatus
  misc_feature: 711
gtgaatatcttgttcccttacgtgaatatcttgttcccttacgtgaatatcttgttcccttacgtgaatatcttgttcccttacgtgaatatcttg

SEQ ID NO: 24350 - DNA, 96 bp, Aspergillus fumigatus
  misc_feature: 634
ttgttcccttacgtgaatatcttgttcccttacgtgaatatcttgttcccttacgtgaatatcttgttcccttacgtgaatatcttgttcccttac

SEQ ID NO: 24351 - DNA, 96 bp, Aspergillus fumigatus
  misc_feature: 633
tgttcccttacgtgaatatcttgttcccttacgtgaatatcttgttcccttacgtgaatatcttgttcccttacgtgaatatcttgttcccttacg

SEQ ID NO: 24352 - DNA, 96 bp, Aspergillus fumigatus
  misc_feature: 630
cgtgaatatcttgttcccttacgtgaatatcttgttcccttacgtgaatatcttgttcccttacgtgaatatcttgttcccttacgtgaatatctt

SEQ ID NO: 24353 - DNA, 96 bp, Aspergillus fumigatus
  misc_feature: 628
ccttacgtgaatatcttgttcccttacgtgaatatcttgttcccttacgtgaatatcttgttcccttacgtgaatatcttgttcccttacgtgaat

SEQ ID NO: 24354 - DNA, 96 bp, Aspergillus fumigatus
  misc_feature: 627
cttacgtgaatatcttgttcccttacgtgaatatcttgttcccttacgtgaatatcttgttcccttacgtgaatatcttgttcccttacgtgaata

SEQ ID NO: 24355 - DNA, 96 bp, Aspergillus fumigatus
  misc_feature: 625
ttacgtgaatatcttgttcccttacgtgaatatcttgttcccttacgtgaatatcttgttcccttacgtgaatatcttgttcccttacgtgaatat

SEQ ID NO: 24356 - DNA, 96 bp, Aspergillus fumigatus
  misc_feature: 624
acgtgaatatcttgttcccttacgtgaatatcttgttcccttacgtgaatatcttgttcccttacgtgaatatcttgttcccttacgtgaatatct

SEQ ID NO: 24357 - DNA, 96 bp, Aspergillus fumigatus
  misc_feature: 622
tacgtgaatatcttgttcccttacgtgaatatcttgttcccttacgtgaatatcttgttcccttacgtgaatatcttgttcccttacgtgaatatc

SEQ ID NO: 24358 - DNA, 96 bp, Aspergillus fumigatus
  misc_feature: 621
tcccttacgtgaatatcttgttcccttacgtgaatatcttgttcccttacgtgaatatcttgttcccttacgtgaatatcttgttcccttacgtga

SEQ ID NO: 24359 - DNA, 96 bp, Aspergillus fumigatus
  misc_feature: 619
ttcccttacgtgaatatcttgttcccttacgtgaatatcttgttcccttacgtgaatatcttgttcccttacgtgaatatcttgttcccttacgtg

SEQ ID NO: 24360 - DNA, 96 bp, Aspergillus fumigatus
  misc_feature: 619
cccttacgtgaatatcttgttcccttacgtgaatatcttgttcccttacgtgaatatcttgttcccttacgtgaatatcttgttcccttacgtgaa

SEQ ID NO: 24361 - DNA, 96 bp, Aspergillus fumigatus
  misc_feature: 616
gttcccttacgtgaatatcttgttcccttacgtgaatatcttgttcccttacgtgaatatcttgttcccttacgtgaatatcttgttcccttacgt

SEQ ID NO: 24362 - DNA, 96 bp, Aspergillus fumigatus
  misc_feature: 522
gagaaaaagaaggagaaaaagaaggagaaaaagaaggagaaaaagaaggagaaaaagaaggagaaaaagaaggagaaaaagaaggagaaaaagaag

SEQ ID NO: 24363 - DNA, 96 bp, Aspergillus fumigatus
  misc_feature: 517
ggagaaaaagaaggagaaaaagaaggagaaaaagaaggagaaaaagaaggagaaaaagaaggagaaaaagaaggagaaaaagaaggagaaaaagaa

SEQ ID NO: 24364 - DNA, 96 bp, Aspergillus fumigatus
  misc_feature: 512
aggagaaaaagaaggagaaaaagaaggagaaaaagaaggagaaaaagaaggagaaaaagaaggagaaaaagaaggagaaaaagaaggagaaaaaga

SEQ ID NO: 24365 - DNA, 96 bp, Aspergillus fumigatus
  misc_feature: 505
aaggagaaaaagaaggagaaaaagaaggagaaaaagaaggagaaaaagaaggagaaaaagaaggagaaaaagaaggagaaaaagaaggagaaaaag

SEQ ID NO: 24366 - DNA, 96 bp, Aspergillus fumigatus
  misc_feature: 496
gaaggagaaaaagaaggagaaaaagaaggagaaaaagaaggagaaaaagaaggagaaaaagaaggagaaaaagaaggagaaaaagaaggagaaaaa

SEQ ID NO: 24367 - DNA, 96 bp, Aspergillus fumigatus
  misc_feature: 492
aaaaagaaggagaaaaagaaggagaaaaagaaggagaaaaagaaggagaaaaagaaggagaaaaagaaggagaaaaagaaggagaaaaagaaggag

SEQ ID NO: 24368 - DNA, 96 bp, Aspergillus fumigatus
  misc_feature: 490
agaaggagaaaaagaaggagaaaaagaaggagaaaaagaaggagaaaaagaaggagaaaaagaaggagaaaaagaaggagaaaaagaaggagaaaa

SEQ ID NO: 24369 - DNA, 96 bp, Aspergillus fumigatus
  misc_feature: 488
aaaagaaggagaaaaagaaggagaaaaagaaggagaaaaagaaggagaaaaagaaggagaaaaagaaggagaaaaagaaggagaaaaagaaggaga

SEQ ID NO: 24370 - DNA, 96 bp, Aspergillus fumigatus
  misc_feature: 485
aaagaaggagaaaaagaaggagaaaaagaaggagaaaaagaaggagaaaaagaaggagaaaaagaaggagaaaaagaaggagaaaaagaaggagaa

SEQ ID NO: 24371 - DNA, 96 bp, Aspergillus fumigatus
  misc_feature: 484
gaaaaagaaggagaaaaagaaggagaaaaagaaggagaaaaagaaggagaaaaagaaggagaaaaagaaggagaaaaagaaggagaaaaagaagga

SEQ ID NO: 24372 - DNA, 96 bp, Aspergillus fumigatus
  misc_feature: 482
aagaaggagaaaaagaaggagaaaaagaaggagaaaaagaaggagaaaaagaaggagaaaaagaaggagaaaaagaaggagaaaaagaaggagaaa

SEQ ID NO: 24373 - DNA, 96 bp, Aspergillus fumigatus
  misc_feature: 481
agaaaaagaaggagaaaaagaaggagaaaaagaaggagaaaaagaaggagaaaaagaaggagaaaaagaaggagaaaaagaaggagaaaaagaagg

SEQ ID NO: 24374 - DNA, 96 bp, Aspergillus fumigatus
  misc_feature: 465
tattatctttataattttctctcttttcttattattatccttctaaatctctctatcttctcttttatttcttttctacctgattctcttcttttc

SEQ ID NO: 24375 - DNA, 96 bp, Aspergillus fumigatus
  misc_feature: 462
ctattatctttataattttctctcttttcttattattatccttctaaatctctctatcttctcttttatttcttttctacctgattctcttctttt

SEQ ID NO: 24376 - DNA, 96 bp, Aspergillus fumigatus
  misc_feature: 461
gtataagttgaatatattttatcatgattctatatatatatttttaaatatagaaggctacccctaaatctagatcatatcaatatatatattcac

SEQ ID NO: 24377 - DNA, 96 bp, Aspergillus fumigatus
  misc_feature: 460
agtataagttgaatatattttatcatgattctatatatatatttttaaatatagaaggctacccctaaatctagatcatatcaatatatatattca

SEQ ID NO: 24378 - DNA, 96 bp, Aspergillus fumigatus
  misc_feature: 459
tctattatctttataattttctctcttttcttattattatccttctaaatctctctatcttctcttttatttcttttctacctgattctcttcttt

SEQ ID NO: 24379 - DNA, 96 bp, Aspergillus fumigatus
  misc_feature: 458
ttatctttataattttctctcttttcttattattatccttctaaatctctctatcttctcttttatttcttttctacctgattctcttcttttctt

SEQ ID NO: 24380 - DNA, 96 bp, Aspergillus fumigatus
  misc_feature: 458
agtgaatatatatattgatatgatctagatttaggggtagccttctatatttaaaaatatatatatagaatcatgataaaatatattcaacttata

SEQ ID NO: 24381 - DNA, 96 bp, Aspergillus fumigatus
  misc_feature: 458
gctagtataagttgaatatattttatcatgattctatatatatatttttaaatatagaaggctacccctaaatctagatcatatcaatatatatat

SEQ ID NO: 24382 - DNA, 96 bp, Aspergillus fumigatus
  misc_feature: 458
ctaggcctagtgaatatatatattgatatgatctagatttaggggtagccttctatatttaaaaatatatatatagaatcatgataaaatatattc

SEQ ID NO: 24383 - DNA, 96 bp, Aspergillus fumigatus
  misc_feature: 458
ctagtataagttgaatatattttatcatgattctatatatatatttttaaatatagaaggctacccctaaatctagatcatatcaatatatatatt

SEQ ID NO: 24384 - DNA, 96 bp, Aspergillus fumigatus
  misc_feature: 457
taggcctagtgaatatatatattgatatgatctagatttaggggtagccttctatatttaaaaatatatatatagaatcatgataaaatatattca

SEQ ID NO: 24385 - DNA, 96 bp, Aspergillus fumigatus
  misc_feature: 457
tctttataattttctctcttttcttattattatccttctaaatctctctatcttctcttttatttcttttctacctgattctcttcttttctttat

SEQ ID NO: 24386 - DNA, 96 bp, Aspergillus fumigatus
  misc_feature: 456
aggcctagtgaatatatatattgatatgatctagatttaggggtagccttctatatttaaaaatatatatatagaatcatgataaaatatattcaa

SEQ ID NO: 24387 - DNA, 96 bp, Aspergillus fumigatus
  misc_feature: 456
ttctattatctttataattttctctcttttcttattattatccttctaaatctctctatcttctcttttatttcttttctacctgattctcttctt

SEQ ID NO: 24388 - DNA, 96 bp, Aspergillus fumigatus
  misc_feature: 456
tatctttataattttctctcttttcttattattatccttctaaatctctctatcttctcttttatttcttttctacctgattctcttcttttcttt

SEQ ID NO: 24389 - DNA, 96 bp, Aspergillus fumigatus
  misc_feature: 456
tagtgaatatatatattgatatgatctagatttaggggtagccttctatatttaaaaatatatatatagaatcatgataaaatatattcaacttat

SEQ ID NO: 24390 - DNA, 96 bp, Aspergillus fumigatus
  misc_feature: 456
tagtataagttgaatatattttatcatgattctatatatatatttttaaatatagaaggctacccctaaatctagatcatatcaatatatatattc

SEQ ID NO: 24391 - DNA, 96 bp, Aspergillus fumigatus
  misc_feature: 456
ctagtgaatatatatattgatatgatctagatttaggggtagccttctatatttaaaaatatatatatagaatcatgataaaatatattcaactta

SEQ ID NO: 24392 - DNA, 96 bp, Aspergillus fumigatus
  misc_feature: 456
cctagtgaatatatatattgatatgatctagatttaggggtagccttctatatttaaaaatatatatatagaatcatgataaaatatattcaactt

SEQ ID NO: 24393 - DNA, 96 bp, Aspergillus fumigatus
  misc_feature: 455
tctaggcctagtgaatatatatattgatatgatctagatttaggggtagccttctatatttaaaaatatatatatagaatcatgataaaatatatt

SEQ ID NO: 24394 - DNA, 96 bp, Aspergillus fumigatus
  misc_feature: 454
tttataattttctctcttttcttattattatccttctaaatctctctatcttctcttttatttcttttctacctgattctcttcttttctttatct

SEQ ID NO: 24395 - DNA, 96 bp, Aspergillus fumigatus
  misc_feature: 454
atctttataattttctctcttttcttattattatccttctaaatctctctatcttctcttttatttcttttctacctgattctcttcttttcttta

SEQ ID NO: 24396 - DNA, 96 bp, Aspergillus fumigatus
  misc_feature: 454
ctttataattttctctcttttcttattattatccttctaaatctctctatcttctcttttatttcttttctacctgattctcttcttttctttatc

SEQ ID NO: 24397 - DNA, 96 bp, Aspergillus fumigatus
  misc_feature: 454
attatctttataattttctctcttttcttattattatccttctaaatctctctatcttctcttttatttcttttctacctgattctcttcttttct

SEQ ID NO: 24398 - DNA, 96 bp, Aspergillus fumigatus
  misc_feature: 454
atgtctaggcctagtgaatatatatattgatatgatctagatttaggggtagccttctatatttaaaaatatatatatagaatcatgataaaatat

SEQ ID NO: 24399 - DNA, 96 bp, Aspergillus fumigatus
  misc_feature: 452
tgtctaggcctagtgaatatatatattgatatgatctagatttaggggtagccttctatatttaaaaatatatatatagaatcatgataaaatata

SEQ ID NO: 24400 - DNA, 96 bp, Aspergillus fumigatus
  misc_feature: 452
ggctagtataagttgaatatattttatcatgattctatatatatatttttaaatatagaaggctacccctaaatctagatcatatcaatatatata

SEQ ID NO: 24401 - DNA, 96 bp, Aspergillus fumigatus
  misc_feature: 452
gtctaggcctagtgaatatatatattgatatgatctagatttaggggtagccttctatatttaaaaatatatatatagaatcatgataaaatatat

SEQ ID NO: 24402 - DNA, 96 bp, Aspergillus fumigatus
  misc_feature: 449
ggcctagtgaatatatatattgatatgatctagatttaggggtagccttctatatttaaaaatatatatatagaatcatgataaaatatattcaac

SEQ ID NO: 24403 - DNA, 96 bp, Aspergillus fumigatus
  misc_feature: 448
ctagtatgtctaggcctagtgaatatatatattgatatgatctagatttaggggtagccttctatatttaaaaatatatatatagaatcatgataa

SEQ ID NO: 24404 - DNA, 96 bp, Aspergillus fumigatus
  misc_feature: 448
gcctagtgaatatatatattgatatgatctagatttaggggtagccttctatatttaaaaatatatatatagaatcatgataaaatatattcaact

SEQ ID NO: 24405 - DNA, 96 bp, Aspergillus fumigatus
  misc_feature: 447
ttataattttctctcttttcttattattatccttctaaatctctctatcttctcttttatttcttttctacctgattctcttcttttctttatcta

SEQ ID NO: 24406 - DNA, 96 bp, Aspergillus fumigatus
  misc_feature: 445
tagtatgtctaggcctagtgaatatatatattgatatgatctagatttaggggtagccttctatatttaaaaatatatatatagaatcatgataaa

SEQ ID NO: 24407 - DNA, 96 bp, Aspergillus fumigatus
  misc_feature: 445
tctagtatgtctaggcctagtgaatatatatattgatatgatctagatttaggggtagccttctatatttaaaaatatatatatagaatcatgata

SEQ ID NO: 24408 - DNA, 96 bp, Aspergillus fumigatus
  misc_feature: 444
tatgtctaggcctagtgaatatatatattgatatgatctagatttaggggtagccttctatatttaaaaatatatatatagaatcatgataaaata

SEQ ID NO: 24409 - DNA, 96 bp, Aspergillus fumigatus
  misc_feature: 443
gtatgtctaggcctagtgaatatatatattgatatgatctagatttaggggtagccttctatatttaaaaatatatatatagaatcatgataaaat

SEQ ID NO: 24410 - DNA, 96 bp, Aspergillus fumigatus
  misc_feature: 443
attctattatctttataattttctctcttttcttattattatccttctaaatctctctatcttctcttttatttcttttctacctgattctcttct

SEQ ID NO: 24411 - DNA, 96 bp, Aspergillus fumigatus
  misc_feature: 442
ccctcctcgccctcctcgccctcctcgccctcctcgccctcccttcgtcgccctcgcgcgcgcgactctctgctcgcctcgagggcgcgcgcctac

SEQ ID NO: 24412 - DNA, 96 bp, Aspergillus fumigatus
  misc_feature: 441
agtatgtctaggcctagtgaatatatatattgatatgatctagatttaggggtagccttctatatttaaaaatatatatatagaatcatgataaaa

SEQ ID NO: 24413 - DNA, 96 bp, Aspergillus fumigatus
  misc_feature: 441
atctagtatgtctaggcctagtgaatatatatattgatatgatctagatttaggggtagccttctatatttaaaaatatatatatagaatcatgat

SEQ ID NO: 24414 - DNA, 96 bp, Aspergillus fumigatus
  misc_feature: 439
tattctattatctttataattttctctcttttcttattattatccttctaaatctctctatcttctcttttatttcttttctacctgattctcttc

SEQ ID NO: 24415 - DNA, 96 bp, Aspergillus fumigatus
  misc_feature: 438
tataattttctctcttttcttattattatccttctaaatctctctatcttctcttttatttcttttctacctgattctcttcttttctttatctaa

SEQ ID NO: 24416 - DNA, 96 bp, Aspergillus fumigatus
  misc_feature: 436
tctttattctattatctttataattttctctcttttcttattattatccttctaaatctctctatcttctcttttatttcttttctacctgattct

SEQ ID NO: 24417 - DNA, 96 bp, Aspergillus fumigatus
  misc_feature: 436
tcctctttattctattatctttataattttctctcttttcttattattatccttctaaatctctctatcttctcttttatttcttttctacctgat

SEQ ID NO: 24418 - DNA, 96 bp, Aspergillus fumigatus
  misc_feature: 435
ataattttctctcttttcttattattatccttctaaatctctctatcttctcttttatttcttttctacctgattctcttcttttctttatctaaa

SEQ ID NO: 24419 - DNA, 96 bp, Aspergillus fumigatus
  misc_feature: 434
ttattctattatctttataattttctctcttttcttattattatccttctaaatctctctatcttctcttttatttcttttctacctgattctctt

SEQ ID NO: 24420 - DNA, 96 bp, Aspergillus fumigatus
  misc_feature: 433
atcctaatctatcctctttattctattatctttataattttctctcttttcttattattatccttctaaatctctctatcttctcttttatttctt

SEQ ID NO: 24421 - DNA, 96 bp, Aspergillus fumigatus
  misc_feature: 432
ctctttattctattatctttataattttctctcttttcttattattatccttctaaatctctctatcttctcttttatttcttttctacctgattc

SEQ ID NO: 24422 - DNA, 96 bp, Aspergillus fumigatus
  misc_feature: 431
tatcctaatctatcctctttattctattatctttataattttctctcttttcttattattatccttctaaatctctctatcttctcttttatttct

SEQ ID NO: 24423 - DNA, 96 bp, Aspergillus fumigatus
  misc_feature: 430
tcctaatctatcctctttattctattatctttataattttctctcttttcttattattatccttctaaatctctctatcttctcttttatttcttt

SEQ ID NO: 24424 - DNA, 96 bp, Aspergillus fumigatus
  misc_feature: 430
atcctctttattctattatctttataattttctctcttttcttattattatccttctaaatctctctatcttctcttttatttcttttctacctga

SEQ ID NO: 24425 - DNA, 96 bp, Aspergillus fumigatus
  misc_feature: 430
tatcctctttattctattatctttataattttctctcttttcttattattatccttctaaatctctctatcttctcttttatttcttttctacctg

SEQ ID NO: 24426 - DNA, 96 bp, Aspergillus fumigatus
  misc_feature: 430
taattttctctcttttcttattattatccttctaaatctctctatcttctcttttatttcttttctacctgattctcttcttttctttatctaaat

SEQ ID NO: 24427 - DNA, 96 bp, Aspergillus fumigatus
  misc_feature: 430
ctatcctctttattctattatctttataattttctctcttttcttattattatccttctaaatctctctatcttctcttttatttcttttctacct

SEQ ID NO: 24428 - DNA, 96 bp, Aspergillus fumigatus
  misc_feature: 430
cctaatctatcctctttattctattatctttataattttctctcttttcttattattatccttctaaatctctctatcttctcttttatttctttt

SEQ ID NO: 24429 - DNA, 96 bp, Aspergillus fumigatus
  misc_feature: 429
taataaagaagagtatggattataaagatttagataaagaaaagaagagaatcaggtagaaaagaaataaaagagaagatagagagatttagaagg

SEQ ID NO: 24430 - DNA, 96 bp, Aspergillus fumigatus
  misc_feature: 428
tttattctattatctttataattttctctcttttcttattattatccttctaaatctctctatcttctcttttatttcttttctacctgattctct

SEQ ID NO: 24431 - DNA, 96 bp, Aspergillus fumigatus
  misc_feature: 428
ctttattctattatctttataattttctctcttttcttattattatccttctaaatctctctatcttctcttttatttcttttctacctgattctc

SEQ ID NO: 24432 - DNA, 96 bp, Aspergillus fumigatus
  misc_feature: 428
atatcctaatctatcctctttattctattatctttataattttctctcttttcttattattatccttctaaatctctctatcttctcttttatttc

SEQ ID NO: 24433 - DNA, 96 bp, Aspergillus fumigatus
  misc_feature: 428
ctctgaatatcctaatctatcctctttattctattatctttataattttctctcttttcttattattatccttctaaatctctctatcttctcttt

SEQ ID NO: 24434 - DNA, 96 bp, Aspergillus fumigatus
  misc_feature: 428
agatttagaaggataataataagaaaagagagaaaattataaagataatagaataaagaggatagattaggatattcagagagagaatagagagag

SEQ ID NO: 24435 - DNA, 96 bp, Aspergillus fumigatus
  misc_feature: 427
ttttctctcttttcttattattatccttctaaatctctctatcttctcttttatttcttttctacctgattctcttcttttctttatctaaatctt

SEQ ID NO: 24436 - DNA, 96 bp, Aspergillus fumigatus
  misc_feature: 427
tttctctcttttcttattattatccttctaaatctctctatcttctcttttatttcttttctacctgattctcttcttttctttatctaaatcttt

SEQ ID NO: 24437 - DNA, 96 bp, Aspergillus fumigatus
  misc_feature: 427
aataaagaagagtatggattataaagatttagataaagaaaagaagagaatcaggtagaaaagaaataaaagagaagatagagagatttagaagga

SEQ ID NO: 24438 - DNA, 96 bp, Aspergillus fumigatus
  misc_feature: 427
agagatttagaaggataataataagaaaagagagaaaattataaagataatagaataaagaggatagattaggatattcagagagagaatagagag

SEQ ID NO: 24439 - DNA, 96 bp, Aspergillus fumigatus
  misc_feature: 427
aatatcctaatctatcctctttattctattatctttataattttctctcttttcttattattatccttctaaatctctctatcttctcttttattt

SEQ ID NO: 24440 - DNA, 96 bp, Aspergillus fumigatus
  misc_feature: 426
tctgaatatcctaatctatcctctttattctattatctttataattttctctcttttcttattattatccttctaaatctctctatcttctctttt

SEQ ID NO: 24441 - DNA, 96 bp, Aspergillus fumigatus
  misc_feature: 426
tctctcttttcttattattatccttctaaatctctctatcttctcttttatttcttttctacctgattctcttcttttctttatctaaatctttat

SEQ ID NO: 24442 - DNA, 96 bp, Aspergillus fumigatus
  misc_feature: 426
gagatttagaaggataataataagaaaagagagaaaattataaagataatagaataaagaggatagattaggatattcagagagagaatagagaga

SEQ ID NO: 24443 - DNA, 96 bp, Aspergillus fumigatus
  misc_feature: 426
atctatcctctttattctattatctttataattttctctcttttcttattattatccttctaaatctctctatcttctcttttatttcttttctac

SEQ ID NO: 24444 - DNA, 96 bp, Aspergillus fumigatus
  misc_feature: 425
ctaatctatcctctttattctattatctttataattttctctcttttcttattattatccttctaaatctctctatcttctcttttatttcttttc

SEQ ID NO: 24445 - DNA, 96 bp, Aspergillus fumigatus
  misc_feature: 425
cctctttattctattatctttataattttctctcttttcttattattatccttctaaatctctctatcttctcttttatttcttttctacctgatt

SEQ ID NO: 24446 - DNA, 96 bp, Aspergillus fumigatus
  misc_feature: 425
attttctctcttttcttattattatccttctaaatctctctatcttctcttttatttcttttctacctgattctcttcttttctttatctaaatct

SEQ ID NO: 24447 - DNA, 96 bp, Aspergillus fumigatus
  misc_feature: 424
ttctctcttttcttattattatccttctaaatctctctatcttctcttttatttcttttctacctgattctcttcttttctttatctaaatcttta

SEQ ID NO: 24448 - DNA, 96 bp, Aspergillus fumigatus
  misc_feature: 424
taatctatcctctttattctattatctttataattttctctcttttcttattattatccttctaaatctctctatcttctcttttatttcttttct

SEQ ID NO: 24449 - DNA, 96 bp, Aspergillus fumigatus
  misc_feature: 424
ataaagaagagtatggattataaagatttagataaagaaaagaagagaatcaggtagaaaagaaataaaagagaagatagagagatttagaaggat

SEQ ID NO: 24450 - DNA, 96 bp, Aspergillus fumigatus
  misc_feature: 423
tgaatatcctaatctatcctctttattctattatctttataattttctctcttttcttattattatccttctaaatctctctatcttctcttttat

SEQ ID NO: 24451 - DNA, 96 bp, Aspergillus fumigatus
  misc_feature: 423
tctatcctctttattctattatctttataattttctctcttttcttattattatccttctaaatctctctatcttctcttttatttcttttctacc

SEQ ID NO: 24452 - DNA, 96 bp, Aspergillus fumigatus
  misc_feature: 423
taaagaagagtatggattataaagatttagataaagaaaagaagagaatcaggtagaaaagaaataaaagagaagatagagagatttagaaggata

SEQ ID NO: 24453 - DNA, 96 bp, Aspergillus fumigatus
  misc_feature: 423
gccctcctcgccctcctcgccctcctcgccctcctcgccctcccttcgtcgccctcgcgcgcgcgactctctgctcgcctcgagggcgcgcgccta

SEQ ID NO: 24454 - DNA, 96 bp, Aspergillus fumigatus
  misc_feature: 423
gaatatcctaatctatcctctttattctattatctttataattttctctcttttcttattattatccttctaaatctctctatcttctcttttatt

SEQ ID NO: 24455 - DNA, 96 bp, Aspergillus fumigatus
  misc_feature: 423
aggcgcgcgccctcgaggcgagcagagagtcgcgcgcgcgagggcgacgaagggagggcgaggagggcgaggagggcgaggagggcgaggagggcg

SEQ ID NO: 24456 - DNA, 96 bp, Aspergillus fumigatus
  misc_feature: 422
aataataaagaagagtatggattataaagatttagataaagaaaagaagagaatcaggtagaaaagaaataaaagagaagatagagagatttagaa

SEQ ID NO: 24457 - DNA, 96 bp, Aspergillus fumigatus
  misc_feature: 422
aaagaagagtatggattataaagatttagataaagaaaagaagagaatcaggtagaaaagaaataaaagagaagatagagagatttagaaggataa

SEQ ID NO: 24458 - DNA, 96 bp, Aspergillus fumigatus
  misc_feature: 422
tctctgaatatcctaatctatcctctttattctattatctttataattttctctcttttcttattattatccttctaaatctctctatcttctctt

SEQ ID NO: 24459 - DNA, 96 bp, Aspergillus fumigatus
  misc_feature: 422
gagagatttagaaggataataataagaaaagagagaaaattataaagataatagaataaagaggatagattaggatattcagagagagaatagaga

SEQ ID NO: 24460 - DNA, 96 bp, Aspergillus fumigatus
  misc_feature: 422
aatctatcctctttattctattatctttataattttctctcttttcttattattatccttctaaatctctctatcttctcttttatttcttttcta

SEQ ID NO: 24461 - DNA, 96 bp, Aspergillus fumigatus
  misc_feature: 421
aattttctctcttttcttattattatccttctaaatctctctatcttctcttttatttcttttctacctgattctcttcttttctttatctaaatc

SEQ ID NO: 24462 - DNA, 96 bp, Aspergillus fumigatus
  misc_feature: 421
ataataaagaagagtatggattataaagatttagataaagaaaagaagagaatcaggtagaaaagaaataaaagagaagatagagagatttagaag

SEQ ID NO: 24463 - DNA, 96 bp, Aspergillus fumigatus
  misc_feature: 420
ctctcttttcttattattatccttctaaatctctctatcttctcttttatttcttttctacctgattctcttcttttctttatctaaatctttata

SEQ ID NO: 24464 - DNA, 96 bp, Aspergillus fumigatus
  misc_feature: 420
ctgaatatcctaatctatcctctttattctattatctttataattttctctcttttcttattattatccttctaaatctctctatcttctctttta

SEQ ID NO: 24465 - DNA, 96 bp, Aspergillus fumigatus
  misc_feature: 420
ctctctctgaatatcctaatctatcctctttattctattatctttataattttctctcttttcttattattatccttctaaatctctctatcttct

SEQ ID NO: 24466 - DNA, 96 bp, Aspergillus fumigatus
  misc_feature: 419
tattattatccttctaaatctctctatcttctcttttatttcttttctacctgattctcttcttttctttatctaaatctttataatccatactct

SEQ ID NO: 24467 - DNA, 96 bp, Aspergillus fumigatus
  misc_feature: 418
ttctctctctgaatatcctaatctatcctctttattctattatctttataattttctctcttttcttattattatccttctaaatctctctatctt

SEQ ID NO: 24468 - DNA, 96 bp, Aspergillus fumigatus
  misc_feature: 418
tctcttttcttattattatccttctaaatctctctatcttctcttttatttcttttctacctgattctcttcttttctttatctaaatctttataa

SEQ ID NO: 24469 - DNA, 96 bp, Aspergillus fumigatus
  misc_feature: 418
tcttattattatccttctaaatctctctatcttctcttttatttcttttctacctgattctcttcttttctttatctaaatctttataatccatac

SEQ ID NO: 24470 - DNA, 96 bp, Aspergillus fumigatus
  misc_feature: 418
attagttagtatagaatcaatagattaatagaatcaatagatcaatagatttaatagataagatagatagcttacctgagataaagcagatcaggc

SEQ ID NO: 24471 - DNA, 96 bp, Aspergillus fumigatus
  misc_feature: 418
attattatccttctaaatctctctatcttctcttttatttcttttctacctgattctcttcttttctttatctaaatctttataatccatactctt

SEQ ID NO: 24472 - DNA, 96 bp, Aspergillus fumigatus
  misc_feature: 418
aagaagagtatggattataaagatttagataaagaaaagaagagaatcaggtagaaaagaaataaaagagaagatagagagatttagaaggataat

SEQ ID NO: 24473 - DNA, 96 bp, Aspergillus fumigatus
  misc_feature: 417
tctctctctgaatatcctaatctatcctctttattctattatctttataattttctctcttttcttattattatccttctaaatctctctatcttc

SEQ ID NO: 24474 - DNA, 96 bp, Aspergillus fumigatus
  misc_feature: 417
ctcttttcttattattatccttctaaatctctctatcttctcttttatttcttttctacctgattctcttcttttctttatctaaatctttataat

SEQ ID NO: 24475 - DNA, 96 bp, Aspergillus fumigatus
  misc_feature: 416
ttattattatccttctaaatctctctatcttctcttttatttcttttctacctgattctcttcttttctttatctaaatctttataatccatactc

SEQ ID NO: 24476 - DNA, 96 bp, Aspergillus fumigatus
  misc_feature: 416
ttagttagtatagaatcaatagattaatagaatcaatagatcaatagatttaatagataagatagatagcttacctgagataaagcagatcaggca

SEQ ID NO: 24477 - DNA, 96 bp, Aspergillus fumigatus
  misc_feature: 416
agaagagtatggattataaagatttagataaagaaaagaagagaatcaggtagaaaagaaataaaagagaagatagagagatttagaaggataata

SEQ ID NO: 24478 - DNA, 96 bp, Aspergillus fumigatus
  misc_feature: 416
gcgcgcgccctcgaggcgagcagagagtcgcgcgcgcgagggcgacgaagggagggcgaggagggcgaggagggcgaggagggcgaggagggcgag

SEQ ID NO: 24479 - DNA, 96 bp, Aspergillus fumigatus
  misc_feature: 416
cttattattatccttctaaatctctctatcttctcttttatttcttttctacctgattctcttcttttctttatctaaatctttataatccatact

SEQ ID NO: 24480 - DNA, 96 bp, Aspergillus fumigatus
  misc_feature: 416
ctctctgaatatcctaatctatcctctttattctattatctttataattttctctcttttcttattattatccttctaaatctctctatcttctct

SEQ ID NO: 24481 - DNA, 96 bp, Aspergillus fumigatus
  misc_feature: 416
agagagatttagaaggataataataagaaaagagagaaaattataaagataatagaataaagaggatagattaggatattcagagagagaatagag

SEQ ID NO: 24482 - DNA, 96 bp, Aspergillus fumigatus
  misc_feature: 415
ttattatccttctaaatctctctatcttctcttttatttcttttctacctgattctcttcttttctttatctaaatctttataatccatactcttc

SEQ ID NO: 24483 - DNA, 96 bp, Aspergillus fumigatus
  misc_feature: 415
tctctctgaatatcctaatctatcctctttattctattatctttataattttctctcttttcttattattatccttctaaatctctctatcttctc

SEQ ID NO: 24484 - DNA, 96 bp, Aspergillus fumigatus
  misc_feature: 415
ggcgcgcgccctcgaggcgagcagagagtcgcgcgcgcgagggcgacgaagggagggcgaggagggcgaggagggcgaggagggcgaggagggcga

SEQ ID NO: 24485 - DNA, 96 bp, Aspergillus fumigatus
  misc_feature: 415
cttttcttattattatccttctaaatctctctatcttctcttttatttcttttctacctgattctcttcttttctttatctaaatctttataatcc

SEQ ID NO: 24486 - DNA, 96 bp, Aspergillus fumigatus
  misc_feature: 415
cattagttagtatagaatcaatagattaatagaatcaatagatcaatagatttaatagataagatagatagcttacctgagataaagcagatcagg

SEQ ID NO: 24487 - DNA, 96 bp, Aspergillus fumigatus
  misc_feature: 415
agatcattagttagtatagaatcaatagattaatagaatcaatagatcaatagatttaatagataagatagatagcttacctgagataaagcagat

SEQ ID NO: 24488 - DNA, 96 bp, Aspergillus fumigatus
  misc_feature: 414
tcttttcttattattatccttctaaatctctctatcttctcttttatttcttttctacctgattctcttcttttctttatctaaatctttataatc

SEQ ID NO: 24489 - DNA, 96 bp, Aspergillus fumigatus
  misc_feature: 414
attctctctctgaatatcctaatctatcctctttattctattatctttataattttctctcttttcttattattatccttctaaatctctctatct

SEQ ID NO: 24490 - DNA, 96 bp, Aspergillus fumigatus
  misc_feature: 413
gcgcgccctcgaggcgagcagagagtcgcgcgcgcgagggcgacgaagggagggcgaggagggcgaggagggcgaggagggcgaggagggcgagga

SEQ ID NO: 24491 - DNA, 96 bp, Aspergillus fumigatus
  misc_feature: 413
cgcgcgccctcgaggcgagcagagagtcgcgcgcgcgagggcgacgaagggagggcgaggagggcgaggagggcgaggagggcgaggagggcgagg

SEQ ID NO: 24492 - DNA, 96 bp, Aspergillus fumigatus
  misc_feature: 412
ttttcttattattatccttctaaatctctctatcttctcttttatttcttttctacctgattctcttcttttctttatctaaatctttataatcca

SEQ ID NO: 24493 - DNA, 96 bp, Aspergillus fumigatus
  misc_feature: 412
ctattctctctctgaatatcctaatctatcctctttattctattatctttataattttctctcttttcttattattatccttctaaatctctctat

SEQ ID NO: 24494 - DNA, 96 bp, Aspergillus fumigatus
  misc_feature: 411
tagatcattagttagtatagaatcaatagattaatagaatcaatagatcaatagatttaatagataagatagatagcttacctgagataaagcaga

SEQ ID NO: 24495 - DNA, 96 bp, Aspergillus fumigatus
  misc_feature: 410
taataataaagaagagtatggattataaagatttagataaagaaaagaagagaatcaggtagaaaagaaataaaagagaagatagagagatttaga

SEQ ID NO: 24496 - DNA, 96 bp, Aspergillus fumigatus
  misc_feature: 410
tcattagttagtatagaatcaatagattaatagaatcaatagatcaatagatttaatagataagatagatagcttacctgagataaagcagatcag

SEQ ID NO: 24497 - DNA, 96 bp, Aspergillus fumigatus
  misc_feature: 410
tattctctctctgaatatcctaatctatcctctttattctattatctttataattttctctcttttcttattattatccttctaaatctctctatc

SEQ ID NO: 24498 - DNA, 96 bp, Aspergillus fumigatus
  misc_feature: 410
cgcgccctcgaggcgagcagagagtcgcgcgcgcgagggcgacgaagggagggcgaggagggcgaggagggcgaggagggcgaggagggcgaggag

SEQ ID NO: 24499 - DNA, 96 bp, Aspergillus fumigatus
  misc_feature: 409
tttcttattattatccttctaaatctctctatcttctcttttatttcttttctacctgattctcttcttttctttatctaaatctttataatccat

SEQ ID NO: 24500 - DNA, 96 bp, Aspergillus fumigatus
  misc_feature: 409
ttcttattattatccttctaaatctctctatcttctcttttatttcttttctacctgattctcttcttttctttatctaaatctttataatccata

SEQ ID NO: 24501 - DNA, 96 bp, Aspergillus fumigatus
  misc_feature: 408
atcattagttagtatagaatcaatagattaatagaatcaatagatcaatagatttaatagataagatagatagcttacctgagataaagcagatca

SEQ ID NO: 24502 - DNA, 96 bp, Aspergillus fumigatus
  misc_feature: 408
tctattctctctctgaatatcctaatctatcctctttattctattatctttataattttctctcttttcttattattatccttctaaatctctcta

SEQ ID NO: 24503 - DNA, 96 bp, Aspergillus fumigatus
  misc_feature: 406
gatcattagttagtatagaatcaatagattaatagaatcaatagatcaatagatttaatagataagatagatagcttacctgagataaagcagatc

SEQ ID NO: 24504 - DNA, 96 bp, Aspergillus fumigatus
  misc_feature: 406
ataataataaagaagagtatggattataaagatttagataaagaaaagaagagaatcaggtagaaaagaaataaaagagaagatagagagatttag

SEQ ID NO: 24505 - DNA, 96 bp, Aspergillus fumigatus
  misc_feature: 405
gcgccctcgaggcgagcagagagtcgcgcgcgcgagggcgacgaagggagggcgaggagggcgaggagggcgaggagggcgaggagggcgaggagg

SEQ ID NO: 24506 - DNA, 96 bp, Aspergillus fumigatus
  misc_feature: 403
ccttatcagtgaggtgttcatcttctagatcattagttagtatagaatcaatagattaatagaatcaatagatcaatagatttaatagataagata

SEQ ID NO: 24507 - DNA, 96 bp, Aspergillus fumigatus
  misc_feature: 403
cttctagatcattagttagtatagaatcaatagattaatagaatcaatagatcaatagatttaatagataagatagatagcttacctgagataaag

SEQ ID NO: 24508 - DNA, 96 bp, Aspergillus fumigatus
  misc_feature: 403
cttatcagtgaggtgttcatcttctagatcattagttagtatagaatcaatagattaatagaatcaatagatcaatagatttaatagataagatag

SEQ ID NO: 24509 - DNA, 96 bp, Aspergillus fumigatus
  misc_feature: 402
tctagatcattagttagtatagaatcaatagattaatagaatcaatagatcaatagatttaatagataagatagatagcttacctgagataaagca

SEQ ID NO: 24510 - DNA, 96 bp, Aspergillus fumigatus
  misc_feature: 401
ttctagatcattagttagtatagaatcaatagattaatagaatcaatagatcaatagatttaatagataagatagatagcttacctgagataaagc

SEQ ID NO: 24511 - DNA, 96 bp, Aspergillus fumigatus
  misc_feature: 401
tatcagtgaggtgttcatcttctagatcattagttagtatagaatcaatagattaatagaatcaatagatcaatagatttaatagataagatagat

SEQ ID NO: 24512 - DNA, 96 bp, Aspergillus fumigatus
  misc_feature: 400
tcttctagatcattagttagtatagaatcaatagattaatagaatcaatagatcaatagatttaatagataagatagatagcttacctgagataaa

SEQ ID NO: 24513 - DNA, 96 bp, Aspergillus fumigatus
  misc_feature: 400
ctagatcattagttagtatagaatcaatagattaatagaatcaatagatcaatagatttaatagataagatagatagcttacctgagataaagcag

SEQ ID NO: 24514 - DNA, 96 bp, Aspergillus fumigatus
  misc_feature: 398
atcttctagatcattagttagtatagaatcaatagattaatagaatcaatagatcaatagatttaatagataagatagatagcttacctgagataa

SEQ ID NO: 24515 - DNA, 96 bp, Aspergillus fumigatus
  misc_feature: 398
gccctcgaggcgagcagagagtcgcgcgcgcgagggcgacgaagggagggcgaggagggcgaggagggcgaggagggcgaggagggcgaggagggc

SEQ ID NO: 24516 - DNA, 96 bp, Aspergillus fumigatus
  misc_feature: 397
ttatcagtgaggtgttcatcttctagatcattagttagtatagaatcaatagattaatagaatcaatagatcaatagatttaatagataagataga

SEQ ID NO: 24517 - DNA, 96 bp, Aspergillus fumigatus
  misc_feature: 397
atcagtgaggtgttcatcttctagatcattagttagtatagaatcaatagattaatagaatcaatagatcaatagatttaatagataagatagata

SEQ ID NO: 24518 - DNA, 96 bp, Aspergillus fumigatus
  misc_feature: 397
gcagagagtcgcgcgcgcgagggcgacgaagggagggcgaggagggcgaggagggcgaggagggcgaggagggcgaggagggcgaggaggaggagg

SEQ ID NO: 24519 - DNA, 96 bp, Aspergillus fumigatus
  misc_feature: 396
cgccctcgaggcgagcagagagtcgcgcgcgcgagggcgacgaagggagggcgaggagggcgaggagggcgaggagggcgaggagggcgaggaggg

SEQ ID NO: 24520 - DNA, 96 bp, Aspergillus fumigatus
  misc_feature: 395
tccatactcttctttattattatttcctctattattctttttcttgcttatatctctacctaactaattattatatatataatcctggaactatat

SEQ ID NO: 24521 - DNA, 96 bp, Aspergillus fumigatus
  misc_feature: 395
catcttctagatcattagttagtatagaatcaatagattaatagaatcaatagatcaatagatttaatagataagatagatagcttacctgagata

SEQ ID NO: 24522 - DNA, 96 bp, Aspergillus fumigatus
  misc_feature: 395
aggtgttcatcttctagatcattagttagtatagaatcaatagattaatagaatcaatagatcaatagatttaatagataagatagatagcttacc

SEQ ID NO: 24523 - DNA, 96 bp, Aspergillus fumigatus
  misc_feature: 394
gtgaggtgttcatcttctagatcattagttagtatagaatcaatagattaatagaatcaatagatcaatagatttaatagataagatagatagctt

SEQ ID NO: 24524 - DNA, 96 bp, Aspergillus fumigatus
  misc_feature: 394
agcagagagtcgcgcgcgcgagggcgacgaagggagggcgaggagggcgaggagggcgaggagggcgaggagggcgaggagggcgaggaggaggag

SEQ ID NO: 24525 - DNA, 96 bp, Aspergillus fumigatus
  misc_feature: 394
aatccatactcttctttattattatttcctctattattctttttcttgcttatatctctacctaactaattattatatatataatcctggaactat

SEQ ID NO: 24526 - DNA, 96 bp, Aspergillus fumigatus
  misc_feature: 394
agtgaggtgttcatcttctagatcattagttagtatagaatcaatagattaatagaatcaatagatcaatagatttaatagataagatagatagct

SEQ ID NO: 24527 - DNA, 96 bp, Aspergillus fumigatus
  misc_feature: 393
catactcttctttattattatttcctctattattctttttcttgcttatatctctacctaactaattattatatatataatcctggaactatatca

SEQ ID NO: 24528 - DNA, 96 bp, Aspergillus fumigatus
  misc_feature: 393
cagagagtcgcgcgcgcgagggcgacgaagggagggcgaggagggcgaggagggcgaggagggcgaggagggcgaggagggcgaggaggaggagga

SEQ ID NO: 24529 - DNA, 96 bp, Aspergillus fumigatus
  misc_feature: 393
gaggtgttcatcttctagatcattagttagtatagaatcaatagattaatagaatcaatagatcaatagatttaatagataagatagatagcttac

SEQ ID NO: 24530 - DNA, 96 bp, Aspergillus fumigatus
  misc_feature: 393
ccatactcttctttattattatttcctctattattctttttcttgcttatatctctacctaactaattattatatatataatcctggaactatatc

SEQ ID NO: 24531 - DNA, 96 bp, Aspergillus fumigatus
  misc_feature: 392
ttcatcttctagatcattagttagtatagaatcaatagattaatagaatcaatagatcaatagatttaatagataagatagatagcttacctgaga

SEQ ID NO: 24532 - DNA, 96 bp, Aspergillus fumigatus
  misc_feature: 392
tcagtgaggtgttcatcttctagatcattagttagtatagaatcaatagattaatagaatcaatagatcaatagatttaatagataagatagatag

SEQ ID NO: 24533 - DNA, 96 bp, Aspergillus fumigatus
  misc_feature: 392
atccatactcttctttattattatttcctctattattctttttcttgcttatatctctacctaactaattattatatatataatcctggaactata

SEQ ID NO: 24534 - DNA, 96 bp, Aspergillus fumigatus
  misc_feature: 392
agagagtcgcgcgcgcgagggcgacgaagggagggcgaggagggcgaggagggcgaggagggcgaggagggcgaggagggcgaggaggaggaggag

SEQ ID NO: 24535 - DNA, 96 bp, Aspergillus fumigatus
  misc_feature: 391
tcttctttattattatttcctctattattctttttcttgcttatatctctacctaactaattattatatatataatcctggaactatatcaacgat

SEQ ID NO: 24536 - DNA, 96 bp, Aspergillus fumigatus
  misc_feature: 391
gttcatcttctagatcattagttagtatagaatcaatagattaatagaatcaatagatcaatagatttaatagataagatagatagcttacctgag

SEQ ID NO: 24537 - DNA, 96 bp, Aspergillus fumigatus
  misc_feature: 391
gagagtcgcgcgcgcgagggcgacgaagggagggcgaggagggcgaggagggcgaggagggcgaggagggcgaggagggcgaggaggaggaggagg

SEQ ID NO: 24538 - DNA, 96 bp, Aspergillus fumigatus
  misc_feature: 391
ataatccatactcttctttattattatttcctctattattctttttcttgcttatatctctacctaactaattattatatatataatcctggaact

SEQ ID NO: 24539 - DNA, 96 bp, Aspergillus fumigatus
  misc_feature: 390
atactcttctttattattatttcctctattattctttttcttgcttatatctctacctaactaattattatatatataatcctggaactatatcaa

SEQ ID NO: 24540 - DNA, 96 bp, Aspergillus fumigatus
  misc_feature: 390
tcatcttctagatcattagttagtatagaatcaatagattaatagaatcaatagatcaatagatttaatagataagatagatagcttacctgagat

SEQ ID NO: 24541 - DNA, 96 bp, Aspergillus fumigatus
  misc_feature: 390
ggtgttcatcttctagatcattagttagtatagaatcaatagattaatagaatcaatagatcaatagatttaatagataagatagatagcttacct

SEQ ID NO: 24542 - DNA, 96 bp, Aspergillus fumigatus
  misc_feature: 389
gagcagagagtcgcgcgcgcgagggcgacgaagggagggcgaggagggcgaggagggcgaggagggcgaggagggcgaggagggcgaggaggagga

SEQ ID NO: 24543 - DNA, 96 bp, Aspergillus fumigatus
  misc_feature: 389
tataatccatactcttctttattattatttcctctattattctttttcttgcttatatctctacctaactaattattatatatataatcctggaac

SEQ ID NO: 24544 - DNA, 96 bp, Aspergillus fumigatus
  misc_feature: 389
taatccatactcttctttattattatttcctctattattctttttcttgcttatatctctacctaactaattattatatatataatcctggaacta

SEQ ID NO: 24545 - DNA, 96 bp, Aspergillus fumigatus
  misc_feature: 388
tttataatccatactcttctttattattatttcctctattattctttttcttgcttatatctctacctaactaattattatatatataatcctgga

SEQ ID NO: 24546 - DNA, 96 bp, Aspergillus fumigatus
  misc_feature: 388
ttataatccatactcttctttattattatttcctctattattctttttcttgcttatatctctacctaactaattattatatatataatcctggaa

SEQ ID NO: 24547 - DNA, 96 bp, Aspergillus fumigatus
  misc_feature: 388
tgaggtgttcatcttctagatcattagttagtatagaatcaatagattaatagaatcaatagatcaatagatttaatagataagatagatagctta

SEQ ID NO: 24548 - DNA, 96 bp, Aspergillus fumigatus
  misc_feature: 388
tctaaatctttataatccatactcttctttattattatttcctctattattctttttcttgcttatatctctacctaactaattattatatatata

SEQ ID NO: 24549 - DNA, 96 bp, Aspergillus fumigatus
  misc_feature: 388
ctcttctttattattatttcctctattattctttttcttgcttatatctctacctaactaattattatatatataatcctggaactatatcaacga

SEQ ID NO: 24550 - DNA, 96 bp, Aspergillus fumigatus
  misc_feature: 388
cttctttattattatttcctctattattctttttcttgcttatatctctacctaactaattattatatatataatcctggaactatatcaacgata

SEQ ID NO: 24551 - DNA, 96 bp, Aspergillus fumigatus
  misc_feature: 388
cagtgaggtgttcatcttctagatcattagttagtatagaatcaatagattaatagaatcaatagatcaatagatttaatagataagatagatagc

SEQ ID NO: 24552 - DNA, 96 bp, Aspergillus fumigatus
  misc_feature: 388
gagtcgcgcgcgcgagggcgacgaagggagggcgaggagggcgaggagggcgaggagggcgaggagggcgaggagggcgaggaggaggaggagggg

SEQ ID NO: 24553 - DNA, 96 bp, Aspergillus fumigatus
  misc_feature: 388
gaggcgagcagagagtcgcgcgcgcgagggcgacgaagggagggcgaggagggcgaggagggcgaggagggcgaggagggcgaggagggcgaggag

SEQ ID NO: 24554 - DNA, 96 bp, Aspergillus fumigatus
  misc_feature: 388
actcttctttattattatttcctctattattctttttcttgcttatatctctacctaactaattattatatatataatcctggaactatatcaacg

SEQ ID NO: 24555 - DNA, 96 bp, Aspergillus fumigatus
  misc_feature: 388
agagtcgcgcgcgcgagggcgacgaagggagggcgaggagggcgaggagggcgaggagggcgaggagggcgaggagggcgaggaggaggaggaggg

SEQ ID NO: 24556 - DNA, 96 bp, Aspergillus fumigatus
  misc_feature: 386
ttctttattattatttcctctattattctttttcttgcttatatctctacctaactaattattatatatataatcctggaactatatcaacgatat

SEQ ID NO: 24557 - DNA, 96 bp, Aspergillus fumigatus
  misc_feature: 386
ataaagaagaagaagaatatatatatattagggagaggtagataaaatggaaagtgaatatatataagtcaatatatatatataaagagacaaaag

SEQ ID NO: 24558 - DNA, 96 bp, Aspergillus fumigatus
  misc_feature: 386
cgcgcgcgcgagggcgacgaagggagggcgaggagggcgaggagggcgaggagggcgaggagggcgaggagggcgaggaggaggaggagggggagg

SEQ ID NO: 24559 - DNA, 96 bp, Aspergillus fumigatus
  misc_feature: 385
tgttcatcttctagatcattagttagtatagaatcaatagattaatagaatcaatagatcaatagatttaatagataagatagatagcttacctga

SEQ ID NO: 24560 - DNA, 96 bp, Aspergillus fumigatus
  misc_feature: 385
tactcttctttattattatttcctctattattctttttcttgcttatatctctacctaactaattattatatatataatcctggaactatatcaac

SEQ ID NO: 24561 - DNA, 96 bp, Aspergillus fumigatus
  misc_feature: 384
gaataaagaagaagaagaatatatatatattagggagaggtagataaaatggaaagtgaatatatataagtcaatatatatatataaagagacaaa

SEQ ID NO: 24562 - DNA, 96 bp, Aspergillus fumigatus
  misc_feature: 384
gtgttcatcttctagatcattagttagtatagaatcaatagattaatagaatcaatagatcaatagatttaatagataagatagatagcttacctg

SEQ ID NO: 24563 - DNA, 96 bp, Aspergillus fumigatus
  misc_feature: 384
aatctttataatccatactcttctttattattatttcctctattattctttttcttgcttatatctctacctaactaattattatatatataatcc

SEQ ID NO: 24564 - DNA, 96 bp, Aspergillus fumigatus
  misc_feature: 384
aggcgagcagagagtcgcgcgcgcgagggcgacgaagggagggcgaggagggcgaggagggcgaggagggcgaggagggcgaggagggcgaggagg

SEQ ID NO: 24565 - DNA, 96 bp, Aspergillus fumigatus
  misc_feature: 383
aataaagaagaagaagaatatatatatattagggagaggtagataaaatggaaagtgaatatatataagtcaatatatatatataaagagacaaaa

SEQ ID NO: 24566 - DNA, 96 bp, Aspergillus fumigatus
  misc_feature: 383
cctcgaggcgagcagagagtcgcgcgcgcgagggcgacgaagggagggcgaggagggcgaggagggcgaggagggcgaggagggcgaggagggcga

SEQ ID NO: 24567 - DNA, 96 bp, Aspergillus fumigatus
  misc_feature: 382
tcgaggcgagcagagagtcgcgcgcgcgagggcgacgaagggagggcgaggagggcgaggagggcgaggagggcgaggagggcgaggagggcgagg

SEQ ID NO: 24568 - DNA, 96 bp, Aspergillus fumigatus
  misc_feature: 382
cgaggcgagcagagagtcgcgcgcgcgagggcgacgaagggagggcgaggagggcgaggagggcgaggagggcgaggagggcgaggagggcgagga

SEQ ID NO: 24569 - DNA, 96 bp, Aspergillus fumigatus
  misc_feature: 382
ggcgagcagagagtcgcgcgcgcgagggcgacgaagggagggcgaggagggcgaggagggcgaggagggcgaggagggcgaggagggcgaggagga

SEQ ID NO: 24570 - DNA, 96 bp, Aspergillus fumigatus
  misc_feature: 382
ctttataatccatactcttctttattattatttcctctattattctttttcttgcttatatctctacctaactaattattatatatataatcctgg

SEQ ID NO: 24571 - DNA, 96 bp, Aspergillus fumigatus
  misc_feature: 382
ccctcgaggcgagcagagagtcgcgcgcgcgagggcgacgaagggagggcgaggagggcgaggagggcgaggagggcgaggagggcgaggagggcg

SEQ ID NO: 24572 - DNA, 96 bp, Aspergillus fumigatus
  misc_feature: 382
cgagcagagagtcgcgcgcgcgagggcgacgaagggagggcgaggagggcgaggagggcgaggagggcgaggagggcgaggagggcgaggaggagg

SEQ ID NO: 24573 - DNA, 96 bp, Aspergillus fumigatus
  misc_feature: 382
agtcgcgcgcgcgagggcgacgaagggagggcgaggagggcgaggagggcgaggagggcgaggagggcgaggagggcgaggaggaggaggaggggg

SEQ ID NO: 24574 - DNA, 96 bp, Aspergillus fumigatus
  misc_feature: 382
atctttataatccatactcttctttattattatttcctctattattctttttcttgcttatatctctacctaactaattattatatatataatcct

SEQ ID NO: 24575 - DNA, 96 bp, Aspergillus fumigatus
  misc_feature: 380
ctaaatctttataatccatactcttctttattattatttcctctattattctttttcttgcttatatctctacctaactaattattatatatataa

SEQ ID NO: 24576 - DNA, 96 bp, Aspergillus fumigatus
  misc_feature: 380
ataggtgaatgaataaagaagaagaagaatatatatatattagggagaggtagataaaatggaaagtgaatatatataagtcaatatatatatata

SEQ ID NO: 24577 - DNA, 96 bp, Aspergillus fumigatus
  misc_feature: 379
aggtgaatgaataaagaagaagaagaatatatatatattagggagaggtagataaaatggaaagtgaatatatataagtcaatatatatatataaa

SEQ ID NO: 24578 - DNA, 96 bp, Aspergillus fumigatus
  misc_feature: 379
gtcgcgcgcgcgagggcgacgaagggagggcgaggagggcgaggagggcgaggagggcgaggagggcgaggagggcgaggaggaggaggaggggga

SEQ ID NO: 24579 - DNA, 96 bp, Aspergillus fumigatus
  misc_feature: 379
taaatctttataatccatactcttctttattattatttcctctattattctttttcttgcttatatctctacctaactaattattatatatataat

SEQ ID NO: 24580 - DNA, 96 bp, Aspergillus fumigatus
  misc_feature: 379
gcgagcagagagtcgcgcgcgcgagggcgacgaagggagggcgaggagggcgaggagggcgaggagggcgaggagggcgaggagggcgaggaggag

SEQ ID NO: 24581 - DNA, 96 bp, Aspergillus fumigatus
  misc_feature: 379
aaatctttataatccatactcttctttattattatttcctctattattctttttcttgcttatatctctacctaactaattattatatatataatc

SEQ ID NO: 24582 - DNA, 96 bp, Aspergillus fumigatus
  misc_feature: 379
ctcgaggcgagcagagagtcgcgcgcgcgagggcgacgaagggagggcgaggagggcgaggagggcgaggagggcgaggagggcgaggagggcgag

SEQ ID NO: 24583 - DNA, 96 bp, Aspergillus fumigatus
  misc_feature: 378
taggtgaatgaataaagaagaagaagaatatatatatattagggagaggtagataaaatggaaagtgaatatatataagtcaatatatatatataa

SEQ ID NO: 24584 - DNA, 96 bp, Aspergillus fumigatus
  misc_feature: 378
gtgaatgaataaagaagaagaagaatatatatatattagggagaggtagataaaatggaaagtgaatatatataagtcaatatatatatataaaga

SEQ ID NO: 24585 - DNA, 96 bp, Aspergillus fumigatus
  misc_feature: 378
tcgcgcgcgcgagggcgacgaagggagggcgaggagggcgaggagggcgaggagggcgaggagggcgaggagggcgaggaggaggaggagggggag

SEQ ID NO: 24586 - DNA, 96 bp, Aspergillus fumigatus
  misc_feature: 378
ggtgaatgaataaagaagaagaagaatatatatatattagggagaggtagataaaatggaaagtgaatatatataagtcaatatatatatataaag

SEQ ID NO: 24587 - DNA, 96 bp, Aspergillus fumigatus
  misc_feature: 378
gcgcgcgcgagggcgacgaagggagggcgaggagggcgaggagggcgaggagggcgaggagggcgaggagggcgaggaggaggaggagggggaggc

SEQ ID NO: 24588 - DNA, 96 bp, Aspergillus fumigatus
  misc_feature: 377
tgaataaagaagaagaagaatatatatatattagggagaggtagataaaatggaaagtgaatatatataagtcaatatatatatataaagagacaa

SEQ ID NO: 24589 - DNA, 96 bp, Aspergillus fumigatus
  misc_feature: 377
taaagaagaagaagaatatatatatattagggagaggtagataaaatggaaagtgaatatatataagtcaatatatatatataaagagacaaaaga

SEQ ID NO: 24590 - DNA, 96 bp, Aspergillus fumigatus
  misc_feature: 375
tgaatgaataaagaagaagaagaatatatatatattagggagaggtagataaaatggaaagtgaatatatataagtcaatatatatatataaagag

SEQ ID NO: 24591 - DNA, 96 bp, Aspergillus fumigatus
  misc_feature: 375
aatgaataaagaagaagaagaatatatatatattagggagaggtagataaaatggaaagtgaatatatataagtcaatatatatatataaagagac

SEQ ID NO: 24592 - DNA, 96 bp, Aspergillus fumigatus
  misc_feature: 374
atgaataaagaagaagaagaatatatatatattagggagaggtagataaaatggaaagtgaatatatataagtcaatatatatatataaagagaca

SEQ ID NO: 24593 - DNA, 96 bp, Aspergillus fumigatus
  misc_feature: 374
tctttataatccatactcttctttattattatttcctctattattctttttcttgcttatatctctacctaactaattattatatatataatcctg

SEQ ID NO: 24594 - DNA, 96 bp, Aspergillus fumigatus
  misc_feature: 373
gaatgaataaagaagaagaagaatatatatatattagggagaggtagataaaatggaaagtgaatatatataagtcaatatatatatataaagaga

SEQ ID NO: 24595 - DNA, 96 bp, Aspergillus fumigatus
  misc_feature: 373
cgcgcgcgagggcgacgaagggagggcgaggagggcgaggagggcgaggagggcgaggagggcgaggagggcgaggaggaggaggagggggaggcg

SEQ ID NO: 24596 - DNA, 96 bp, Aspergillus fumigatus
  misc_feature: 371
aatctagtatgtctaggcctagtgaatatatatattgatatgatctagatttaggggtagccttctatatttaaaaatatatatatagaatcatga

SEQ ID NO: 24597 - DNA, 96 bp, Aspergillus fumigatus
  misc_feature: 371
taatctagtatgtctaggcctagtgaatatatatattgatatgatctagatttaggggtagccttctatatttaaaaatatatatatagaatcatg

SEQ ID NO: 24598 - DNA, 96 bp, Aspergillus fumigatus
  misc_feature: 369
ttaatctagtatgtctaggcctagtgaatatatatattgatatgatctagatttaggggtagccttctatatttaaaaatatatatatagaatcat

SEQ ID NO: 24599 - DNA, 96 bp, Aspergillus fumigatus
  misc_feature: 369
gagggcgacgaagggagggcgaggagggcgaggagggcgaggagggcgaggagggcgaggagggcgaggaggaggaggagggggaggcgcgcaggc

SEQ ID NO: 24600 - DNA, 96 bp, Aspergillus fumigatus
  misc_feature: 367
ggcgacgaagggagggcgaggagggcgaggagggcgaggagggcgaggagggcgaggagggcgaggaggaggaggagggggaggcgcgcaggcgag

SEQ ID NO: 24601 - DNA, 96 bp, Aspergillus fumigatus
  misc_feature: 367
gcgagggcgacgaagggagggcgaggagggcgaggagggcgaggagggcgaggagggcgaggagggcgaggaggaggaggagggggaggcgcgcag

SEQ ID NO: 24602 - DNA, 96 bp, Aspergillus fumigatus
  misc_feature: 367
ctcggccagccaactggccgccgcgcgctcgcctgcgcgcctccccctcctcctcctcctcgccctcctcgccctcctcgccctcctcgccctcct

SEQ ID NO: 24603 - DNA, 96 bp, Aspergillus fumigatus
  misc_feature: 366
cgcgagggcgacgaagggagggcgaggagggcgaggagggcgaggagggcgaggagggcgaggagggcgaggaggaggaggagggggaggcgcgca

SEQ ID NO: 24604 - DNA, 96 bp, Aspergillus fumigatus
  misc_feature: 366
ccgccgcgcgctcgcctgcgcgcctccccctcctcctcctcctcgccctcctcgccctcctcgccctcctcgccctcctcgccctcctcgccctcc

SEQ ID NO: 24605 - DNA, 96 bp, Aspergillus fumigatus
  misc_feature: 366
gcgcgcgagggcgacgaagggagggcgaggagggcgaggagggcgaggagggcgaggagggcgaggagggcgaggaggaggaggagggggaggcgc

SEQ ID NO: 24606 - DNA, 96 bp, Aspergillus fumigatus
  misc_feature: 365
cgccgcgcgctcgcctgcgcgcctccccctcctcctcctcctcgccctcctcgccctcctcgccctcctcgccctcctcgccctcctcgccctccc

SEQ ID NO: 24607 - DNA, 96 bp, Aspergillus fumigatus
  misc_feature: 365
gcgcgctcgcctgcgcgcctccccctcctcctcctcctcgccctcctcgccctcctcgccctcctcgccctcctcgccctcctcgccctcccttcg

SEQ ID NO: 24608 - DNA, 96 bp, Aspergillus fumigatus
  misc_feature: 365
gcgcgagggcgacgaagggagggcgaggagggcgaggagggcgaggagggcgaggagggcgaggagggcgaggaggaggaggagggggaggcgcgc

SEQ ID NO: 24609 - DNA, 96 bp, Aspergillus fumigatus
  misc_feature: 365
cgcgcgctcgcctgcgcgcctccccctcctcctcctcctcgccctcctcgccctcctcgccctcctcgccctcctcgccctcctcgccctcccttc

SEQ ID NO: 24610 - DNA, 96 bp, Aspergillus fumigatus
  misc_feature: 364
gggcgacgaagggagggcgaggagggcgaggagggcgaggagggcgaggagggcgaggagggcgaggaggaggaggagggggaggcgcgcaggcga

SEQ ID NO: 24611 - DNA, 96 bp, Aspergillus fumigatus
  misc_feature: 364
cgagggcgacgaagggagggcgaggagggcgaggagggcgaggagggcgaggagggcgaggagggcgaggaggaggaggagggggaggcgcgcagg

SEQ ID NO: 24612 - DNA, 96 bp, Aspergillus fumigatus
  misc_feature: 363
gcgctcgcctgcgcgcctccccctcctcctcctcctcgccctcctcgccctcctcgccctcctcgccctcctcgccctcctcgccctcccttcgtc

SEQ ID NO: 24613 - DNA, 96 bp, Aspergillus fumigatus
  misc_feature: 362
tcggccagccaactggccgccgcgcgctcgcctgcgcgcctccccctcctcctcctcctcgccctcctcgccctcctcgccctcctcgccctcctc

SEQ ID NO: 24614 - DNA, 96 bp, Aspergillus fumigatus
  misc_feature: 362
gctcgcctgcgcgcctccccctcctcctcctcctcgccctcctcgccctcctcgccctcctcgccctcctcgccctcctcgccctcccttcgtcgc

SEQ ID NO: 24615 - DNA, 96 bp, Aspergillus fumigatus
  misc_feature: 362
gccgccgcgcgctcgcctgcgcgcctccccctcctcctcctcctcgccctcctcgccctcctcgccctcctcgccctcctcgccctcctcgccctc

SEQ ID NO: 24616 - DNA, 96 bp, Aspergillus fumigatus
  misc_feature: 361
cgcgcgagggcgacgaagggagggcgaggagggcgaggagggcgaggagggcgaggagggcgaggagggcgaggaggaggaggagggggaggcgcg

SEQ ID NO: 24617 - DNA, 96 bp, Aspergillus fumigatus
  misc_feature: 360
tggccgccgcgcgctcgcctgcgcgcctccccctcctcctcctcctcgccctcctcgccctcctcgccctcctcgccctcctcgccctcctcgccc

SEQ ID NO: 24618 - DNA, 96 bp, Aspergillus fumigatus
  misc_feature: 360
gccgcgcgctcgcctgcgcgcctccccctcctcctcctcctcgccctcctcgccctcctcgccctcctcgccctcctcgccctcctcgccctccct

SEQ ID NO: 24619 - DNA, 96 bp, Aspergillus fumigatus
  misc_feature: 360
agggcgacgaagggagggcgaggagggcgaggagggcgaggagggcgaggagggcgaggagggcgaggaggaggaggagggggaggcgcgcaggcg

SEQ ID NO: 24620 - DNA, 96 bp, Aspergillus fumigatus
  misc_feature: 359
ggccgccgcgcgctcgcctgcgcgcctccccctcctcctcctcctcgccctcctcgccctcctcgccctcctcgccctcctcgccctcctcgccct

SEQ ID NO: 24621 - DNA, 96 bp, Aspergillus fumigatus
  misc_feature: 359
caactggccgccgcgcgctcgcctgcgcgcctccccctcctcctcctcctcgccctcctcgccctcctcgccctcctcgccctcctcgccctcctc

SEQ ID NO: 24622 - DNA, 96 bp, Aspergillus fumigatus
  misc_feature: 358
cgcgctcgcctgcgcgcctccccctcctcctcctcctcgccctcctcgccctcctcgccctcctcgccctcctcgccctcctcgccctcccttcgt

SEQ ID NO: 24623 - DNA, 96 bp, Aspergillus fumigatus
  misc_feature: 358
ccgcgcgctcgcctgcgcgcctccccctcctcctcctcctcgccctcctcgccctcctcgccctcctcgccctcctcgccctcctcgccctccctt

SEQ ID NO: 24624 - DNA, 96 bp, Aspergillus fumigatus
  misc_feature: 354
gaatcagaagtacagagtagaattatttcgaagataggataaggattagggaatgaataatagttagaaataaagaaaggattttaataaattgaa

SEQ ID NO: 24625 - DNA, 96 bp, Aspergillus fumigatus
  misc_feature: 353
ctggccgccgcgcgctcgcctgcgcgcctccccctcctcctcctcctcgccctcctcgccctcctcgccctcctcgccctcctcgccctcctcgcc

SEQ ID NO: 24626 - DNA, 96 bp, Aspergillus fumigatus
  misc_feature: 352
cgctcgcctgcgcgcctccccctcctcctcctcctcgccctcctcgccctcctcgccctcctcgccctcctcgccctcctcgccctcccttcgtcg

SEQ ID NO: 24627 - DNA, 96 bp, Aspergillus fumigatus
  misc_feature: 351
gagaatcagaagtacagagtagaattatttcgaagataggataaggattagggaatgaataatagttagaaataaagaaaggattttaataaattg

SEQ ID NO: 24628 - DNA, 96 bp, Aspergillus fumigatus
  misc_feature: 350
agaatcagaagtacagagtagaattatttcgaagataggataaggattagggaatgaataatagttagaaataaagaaaggattttaataaattga

SEQ ID NO: 24629 - DNA, 96 bp, Aspergillus fumigatus
  misc_feature: 350
actggccgccgcgcgctcgcctgcgcgcctccccctcctcctcctcctcgccctcctcgccctcctcgccctcctcgccctcctcgccctcctcgc

SEQ ID NO: 24630 - DNA, 96 bp, Aspergillus fumigatus
  misc_feature: 350
cggccagccaactggccgccgcgcgctcgcctgcgcgcctccccctcctcctcctcctcgccctcctcgccctcctcgccctcctcgccctcctcg

SEQ ID NO: 24631 - DNA, 96 bp, Aspergillus fumigatus
  misc_feature: 349
ccaactggccgccgcgcgctcgcctgcgcgcctccccctcctcctcctcctcgccctcctcgccctcctcgccctcctcgccctcctcgccctcct

SEQ ID NO: 24632 - DNA, 96 bp, Aspergillus fumigatus
  misc_feature: 348
aactggccgccgcgcgctcgcctgcgcgcctccccctcctcctcctcctcgccctcctcgccctcctcgccctcctcgccctcctcgccctcctcg

SEQ ID NO: 24633 - DNA, 96 bp, Aspergillus fumigatus
  misc_feature: 347
tgccttatcagtgaggtgttcatcttctagatcattagttagtatagaatcaatagattaatagaatcaatagatcaatagatttaatagataaga

SEQ ID NO: 24634 - DNA, 96 bp, Aspergillus fumigatus
  misc_feature: 347
gccttatcagtgaggtgttcatcttctagatcattagttagtatagaatcaatagattaatagaatcaatagatcaatagatttaatagataagat

SEQ ID NO: 24635 - DNA, 96 bp, Aspergillus fumigatus
  misc_feature: 347
cagccaactggccgccgcgcgctcgcctgcgcgcctccccctcctcctcctcctcgccctcctcgccctcctcgccctcctcgccctcctcgccct

SEQ ID NO: 24636 - DNA, 96 bp, Aspergillus fumigatus
  misc_feature: 346
ccagccaactggccgccgcgcgctcgcctgcgcgcctccccctcctcctcctcctcgccctcctcgccctcctcgccctcctcgccctcctcgccc

SEQ ID NO: 24637 - DNA, 96 bp, Aspergillus fumigatus
  misc_feature: 346
gccagccaactggccgccgcgcgctcgcctgcgcgcctccccctcctcctcctcctcgccctcctcgccctcctcgccctcctcgccctcctcgcc

SEQ ID NO: 24638 - DNA, 96 bp, Aspergillus fumigatus
  misc_feature: 345
ggccagccaactggccgccgcgcgctcgcctgcgcgcctccccctcctcctcctcctcgccctcctcgccctcctcgccctcctcgccctcctcgc

SEQ ID NO: 24639 - DNA, 96 bp, Aspergillus fumigatus
  misc_feature: 344
gccaactggccgccgcgcgctcgcctgcgcgcctccccctcctcctcctcctcgccctcctcgccctcctcgccctcctcgccctcctcgccctcc

SEQ ID NO: 24640 - DNA, 96 bp, Aspergillus fumigatus
  misc_feature: 343
atatacttcttaaatacctcaccctatctacctctttcctaatctacctactaatctccttactactattattctatctatctctctaccttttta

SEQ ID NO: 24641 - DNA, 96 bp, Aspergillus fumigatus
  misc_feature: 339
agccaactggccgccgcgcgctcgcctgcgcgcctccccctcctcctcctcctcgccctcctcgccctcctcgccctcctcgccctcctcgccctc

SEQ ID NO: 24642 - DNA, 96 bp, Aspergillus fumigatus
  misc_feature: 338
atacttcttaaatacctcaccctatctacctctttcctaatctacctactaatctccttactactattattctatctatctctctacctttttatc

SEQ ID NO: 24643 - DNA, 96 bp, Aspergillus fumigatus
  misc_feature: 337
tatatacttcttaaatacctcaccctatctacctctttcctaatctacctactaatctccttactactattattctatctatctctctaccttttt

SEQ ID NO: 24644 - DNA, 96 bp, Aspergillus fumigatus
  misc_feature: 337
tatacttcttaaatacctcaccctatctacctctttcctaatctacctactaatctccttactactattattctatctatctctctacctttttat

SEQ ID NO: 24645 - DNA, 96 bp, Aspergillus fumigatus
  misc_feature: 337
atatatacttcttaaatacctcaccctatctacctctttcctaatctacctactaatctccttactactattattctatctatctctctacctttt

SEQ ID NO: 24646 - DNA, 96 bp, Aspergillus fumigatus
  misc_feature: 335
acttcttaaatacctcaccctatctacctctttcctaatctacctactaatctccttactactattattctatctatctctctacctttttatcta

SEQ ID NO: 24647 - DNA, 96 bp, Aspergillus fumigatus
  misc_feature: 335
tacttcttaaatacctcaccctatctacctctttcctaatctacctactaatctccttactactattattctatctatctctctacctttttatct

SEQ ID NO: 24648 - DNA, 96 bp, Aspergillus fumigatus
  misc_feature: 334
ggattagggaatgaataatagttagaaataaagaaaggattttaataaattgaaaagagagaaagtaaaaaagagagaaaatcagggtaaaaaaaa

SEQ ID NO: 24649 - DNA, 96 bp, Aspergillus fumigatus
  misc_feature: 334
aaggattagggaatgaataatagttagaaataaagaaaggattttaataaattgaaaagagagaaagtaaaaaagagagaaaatcagggtaaaaaa

SEQ ID NO: 24650 - DNA, 96 bp, Aspergillus fumigatus
  misc_feature: 334
aaaggtagagagatagatagaataatagtagtaaggagattagtaggtagattaggaaagaggtagatagggtgaggtatttaagaagtatatatc

SEQ ID NO: 24651 - DNA, 96 bp, Aspergillus fumigatus
  misc_feature: 334
aaggtagagagatagatagaataatagtagtaaggagattagtaggtagattaggaaagaggtagatagggtgaggtatttaagaagtatatatcg

SEQ ID NO: 24652 - DNA, 96 bp, Aspergillus fumigatus
  misc_feature: 333
cttcttaaatacctcaccctatctacctctttcctaatctacctactaatctccttactactattattctatctatctctctacctttttatctac

SEQ ID NO: 24653 - DNA, 96 bp, Aspergillus fumigatus
  misc_feature: 333
aggtagagagatagatagaataatagtagtaaggagattagtaggtagattaggaaagaggtagatagggtgaggtatttaagaagtatatatcgt

SEQ ID NO: 24654 - DNA, 96 bp, Aspergillus fumigatus
  misc_feature: 332
aggattagggaatgaataatagttagaaataaagaaaggattttaataaattgaaaagagagaaagtaaaaaagagagaaaatcagggtaaaaaaa

SEQ ID NO: 24655 - DNA, 96 bp, Aspergillus fumigatus
  misc_feature: 332
ataaggattagggaatgaataatagttagaaataaagaaaggattttaataaattgaaaagagagaaagtaaaaaagagagaaaatcagggtaaaa

SEQ ID NO: 24656 - DNA, 96 bp, Aspergillus fumigatus
  misc_feature: 332
ttcttaaatacctcaccctatctacctctttcctaatctacctactaatctccttactactattattctatctatctctctacctttttatctacc

SEQ ID NO: 24657 - DNA, 96 bp, Aspergillus fumigatus
  misc_feature: 331
taaggattagggaatgaataatagttagaaataaagaaaggattttaataaattgaaaagagagaaagtaaaaaagagagaaaatcagggtaaaaa

SEQ ID NO: 24658 - DNA, 96 bp, Aspergillus fumigatus
  misc_feature: 331
gataaggattagggaatgaataatagttagaaataaagaaaggattttaataaattgaaaagagagaaagtaaaaaagagagaaaatcagggtaaa

SEQ ID NO: 24659 - DNA, 96 bp, Aspergillus fumigatus
  misc_feature: 331
gattagggaatgaataatagttagaaataaagaaaggattttaataaattgaaaagagagaaagtaaaaaagagagaaaatcagggtaaaaaaaag

SEQ ID NO: 24660 - DNA, 96 bp, Aspergillus fumigatus
  misc_feature: 331
agggaatgaataatagttagaaataaagaaaggattttaataaattgaaaagagagaaagtaaaaaagagagaaaatcagggtaaaaaaaagtaag

SEQ ID NO: 24661 - DNA, 96 bp, Aspergillus fumigatus
  misc_feature: 331
attagggaatgaataatagttagaaataaagaaaggattttaataaattgaaaagagagaaagtaaaaaagagagaaaatcagggtaaaaaaaagt

SEQ ID NO: 24662 - DNA, 96 bp, Aspergillus fumigatus
  misc_feature: 330
tagggaatgaataatagttagaaataaagaaaggattttaataaattgaaaagagagaaagtaaaaaagagagaaaatcagggtaaaaaaaagtaa

SEQ ID NO: 24663 - DNA, 96 bp, Aspergillus fumigatus
  misc_feature: 329
ttagggaatgaataatagttagaaataaagaaaggattttaataaattgaaaagagagaaagtaaaaaagagagaaaatcagggtaaaaaaaagta

SEQ ID NO: 24664 - DNA, 96 bp, Aspergillus fumigatus
  misc_feature: 329
ggataaggattagggaatgaataatagttagaaataaagaaaggattttaataaattgaaaagagagaaagtaaaaaagagagaaaatcagggtaa

SEQ ID NO: 24665 - DNA, 96 bp, Aspergillus fumigatus
  misc_feature: 329
taggataaggattagggaatgaataatagttagaaataaagaaaggattttaataaattgaaaagagagaaagtaaaaaagagagaaaatcagggt

SEQ ID NO: 24666 - DNA, 96 bp, Aspergillus fumigatus
  misc_feature: 329
aggataaggattagggaatgaataatagttagaaataaagaaaggattttaataaattgaaaagagagaaagtaaaaaagagagaaaatcagggta

SEQ ID NO: 24667 - DNA, 96 bp, Aspergillus fumigatus
  misc_feature: 328
gaagataggataaggattagggaatgaataatagttagaaataaagaaaggattttaataaattgaaaagagagaaagtaaaaaagagagaaaatc

SEQ ID NO: 24668 - DNA, 96 bp, Aspergillus fumigatus
  misc_feature: 328
gataggataaggattagggaatgaataatagttagaaataaagaaaggattttaataaattgaaaagagagaaagtaaaaaagagagaaaatcagg

SEQ ID NO: 24669 - DNA, 96 bp, Aspergillus fumigatus
  misc_feature: 327
ttcgaagataggataaggattagggaatgaataatagttagaaataaagaaaggattttaataaattgaaaagagagaaagtaaaaaagagagaaa

SEQ ID NO: 24670 - DNA, 96 bp, Aspergillus fumigatus
  misc_feature: 327
tttcgaagataggataaggattagggaatgaataatagttagaaataaagaaaggattttaataaattgaaaagagagaaagtaaaaaagagagaa

SEQ ID NO: 24671 - DNA, 96 bp, Aspergillus fumigatus
  misc_feature: 326
gggaatgaataatagttagaaataaagaaaggattttaataaattgaaaagagagaaagtaaaaaagagagaaaatcagggtaaaaaaaagtaaga

SEQ ID NO: 24672 - DNA, 96 bp, Aspergillus fumigatus
  misc_feature: 326
atttcgaagataggataaggattagggaatgaataatagttagaaataaagaaaggattttaataaattgaaaagagagaaagtaaaaaagagaga

SEQ ID NO: 24673 - DNA, 96 bp, Aspergillus fumigatus
  misc_feature: 325
aagataggataaggattagggaatgaataatagttagaaataaagaaaggattttaataaattgaaaagagagaaagtaaaaaagagagaaaatca

SEQ ID NO: 24674 - DNA, 96 bp, Aspergillus fumigatus
  misc_feature: 325
tcttaaatacctcaccctatctacctctttcctaatctacctactaatctccttactactattattctatctatctctctacctttttatctacct

SEQ ID NO: 24675 - DNA, 96 bp, Aspergillus fumigatus
  misc_feature: 325
agataggataaggattagggaatgaataatagttagaaataaagaaaggattttaataaattgaaaagagagaaagtaaaaaagagagaaaatcag

SEQ ID NO: 24676 - DNA, 96 bp, Aspergillus fumigatus
  misc_feature: 325
cgaagataggataaggattagggaatgaataatagttagaaataaagaaaggattttaataaattgaaaagagagaaagtaaaaaagagagaaaat

SEQ ID NO: 24677 - DNA, 96 bp, Aspergillus fumigatus
  misc_feature: 325
ataggataaggattagggaatgaataatagttagaaataaagaaaggattttaataaattgaaaagagagaaagtaaaaaagagagaaaatcaggg

SEQ ID NO: 24678 - DNA, 96 bp, Aspergillus fumigatus
  misc_feature: 324
tcgaagataggataaggattagggaatgaataatagttagaaataaagaaaggattttaataaattgaaaagagagaaagtaaaaaagagagaaaa

SEQ ID NO: 24679 - DNA, 96 bp, Aspergillus fumigatus
  misc_feature: 323
tttttcttacttttttttaccctgattttctctcttttttactttctctcttttcaatttattaaaatcctttctttatttctaactattattcat

SEQ ID NO: 24680 - DNA, 96 bp, Aspergillus fumigatus
  misc_feature: 322
aatgaataatagttagaaataaagaaaggattttaataaattgaaaagagagaaagtaaaaaagagagaaaatcagggtaaaaaaaagtaagaaaa

SEQ ID NO: 24681 - DNA, 96 bp, Aspergillus fumigatus
  misc_feature: 322
tatttcgaagataggataaggattagggaatgaataatagttagaaataaagaaaggattttaataaattgaaaagagagaaagtaaaaaagagag

SEQ ID NO: 24682 - DNA, 96 bp, Aspergillus fumigatus
  misc_feature: 322
ataggcccataggaagttccaatataaggtagataaaaaggtagagagatagatagaataatagtagtaaggagattagtaggtagattaggaaag

SEQ ID NO: 24683 - DNA, 96 bp, Aspergillus fumigatus
  misc_feature: 322
cttaaatacctcaccctatctacctctttcctaatctacctactaatctccttactactattattctatctatctctctacctttttatctacctt

SEQ ID NO: 24684 - DNA, 96 bp, Aspergillus fumigatus
  misc_feature: 322
acctcaccctatctacctctttcctaatctacctactaatctccttactactattattctatctatctctctacctttttatctaccttatattgg

SEQ ID NO: 24685 - DNA, 96 bp, Aspergillus fumigatus
  misc_feature: 322
agttccaatataaggtagataaaaaggtagagagatagatagaataatagtagtaaggagattagtaggtagattaggaaagaggtagatagggtg

SEQ ID NO: 24686 - DNA, 96 bp, Aspergillus fumigatus
  misc_feature: 321
ttaaatacctcaccctatctacctctttcctaatctacctactaatctccttactactattattctatctatctctctacctttttatctacctta

SEQ ID NO: 24687 - DNA, 96 bp, Aspergillus fumigatus
  misc_feature: 321
cctcaccctatctacctctttcctaatctacctactaatctccttactactattattctatctatctctctacctttttatctaccttatattgga

SEQ ID NO: 24688 - DNA, 96 bp, Aspergillus fumigatus
  misc_feature: 320
tctttttcttacttttttttaccctgattttctctcttttttactttctctcttttcaatttattaaaatcctttctttatttctaactattattc

SEQ ID NO: 24689 - DNA, 96 bp, Aspergillus fumigatus
  misc_feature: 320
ataggaagttccaatataaggtagataaaaaggtagagagatagatagaataatagtagtaaggagattagtaggtagattaggaaagaggtagat

SEQ ID NO: 24690 - DNA, 96 bp, Aspergillus fumigatus
  misc_feature: 319
ttctttttcttacttttttttaccctgattttctctcttttttactttctctcttttcaatttattaaaatcctttctttatttctaactattatt

SEQ ID NO: 24691 - DNA, 96 bp, Aspergillus fumigatus
  misc_feature: 319
tctttttctccttctttttctccttctttttctccttctttttctccttctttttcttcttatcttccttcttatcttccttcttccctttccaat

SEQ ID NO: 24692 - DNA, 96 bp, Aspergillus fumigatus
  misc_feature: 319
taggcccataggaagttccaatataaggtagataaaaaggtagagagatagatagaataatagtagtaaggagattagtaggtagattaggaaaga

SEQ ID NO: 24693 - DNA, 96 bp, Aspergillus fumigatus
  misc_feature: 319
gttccaatataaggtagataaaaaggtagagagatagatagaataatagtagtaaggagattagtaggtagattaggaaagaggtagatagggtga

SEQ ID NO: 24694 - DNA, 96 bp, Aspergillus fumigatus
  misc_feature: 319
tacctcaccctatctacctctttcctaatctacctactaatctccttactactattattctatctatctctctacctttttatctaccttatattg

SEQ ID NO: 24695 - DNA, 96 bp, Aspergillus fumigatus
  misc_feature: 319
ggaagttccaatataaggtagataaaaaggtagagagatagatagaataatagtagtaaggagattagtaggtagattaggaaagaggtagatagg

SEQ ID NO: 24696 - DNA, 96 bp, Aspergillus fumigatus
  misc_feature: 319
aggcccataggaagttccaatataaggtagataaaaaggtagagagatagatagaataatagtagtaaggagattagtaggtagattaggaaagag

SEQ ID NO: 24697 - DNA, 96 bp, Aspergillus fumigatus
  misc_feature: 319
aggaagttccaatataaggtagataaaaaggtagagagatagatagaataatagtagtaaggagattagtaggtagattaggaaagaggtagatag

SEQ ID NO: 24698 - DNA, 96 bp, Aspergillus fumigatus
  misc_feature: 319
atacctcaccctatctacctctttcctaatctacctactaatctccttactactattattctatctatctctctacctttttatctaccttatatt

SEQ ID NO: 24699 - DNA, 96 bp, Aspergillus fumigatus
  misc_feature: 319
aagttccaatataaggtagataaaaaggtagagagatagatagaataatagtagtaaggagattagtaggtagattaggaaagaggtagatagggt

SEQ ID NO: 24700 - DNA, 96 bp, Aspergillus fumigatus
  misc_feature: 318
ttttctccttctttttctccttctttttctccttctttttctccttctttttcttcttatcttccttcttatcttccttcttccctttccaatctt

SEQ ID NO: 24701 - DNA, 96 bp, Aspergillus fumigatus
  misc_feature: 318
gataggcccataggaagttccaatataaggtagataaaaaggtagagagatagatagaataatagtagtaaggagattagtaggtagattaggaaa

SEQ ID NO: 24702 - DNA, 96 bp, Aspergillus fumigatus
  misc_feature: 318
taggaagttccaatataaggtagataaaaaggtagagagatagatagaataatagtagtaaggagattagtaggtagattaggaaagaggtagata

SEQ ID NO: 24703 - DNA, 96 bp, Aspergillus fumigatus
  misc_feature: 318
gaagttccaatataaggtagataaaaaggtagagagatagatagaataatagtagtaaggagattagtaggtagattaggaaagaggtagataggg

SEQ ID NO: 24704 - DNA, 96 bp, Aspergillus fumigatus
  misc_feature: 318
ccataggaagttccaatataaggtagataaaaaggtagagagatagatagaataatagtagtaaggagattagtaggtagattaggaaagaggtag

SEQ ID NO: 24705 - DNA, 96 bp, Aspergillus fumigatus
  misc_feature: 317
tttttctccttctttttctccttctttttctccttctttttctccttctttttcttcttatcttccttcttatcttccttcttccctttccaatct

SEQ ID NO: 24706 - DNA, 96 bp, Aspergillus fumigatus
  misc_feature: 317
gaatgaataatagttagaaataaagaaaggattttaataaattgaaaagagagaaagtaaaaaagagagaaaatcagggtaaaaaaaagtaagaaa

SEQ ID NO: 24707 - DNA, 96 bp, Aspergillus fumigatus
  misc_feature: 317
ctttttcttacttttttttaccctgattttctctcttttttactttctctcttttcaatttattaaaatcctttctttatttctaactattattca

SEQ ID NO: 24708 - DNA, 96 bp, Aspergillus fumigatus
  misc_feature: 317
ctttttctccttctttttctccttctttttctccttctttttctccttctttttcttcttatcttccttcttatcttccttcttccctttccaatc

SEQ ID NO: 24709 - DNA, 96 bp, Aspergillus fumigatus
  misc_feature: 316
ctcaccctatctacctctttcctaatctacctactaatctccttactactattattctatctatctctctacctttttatctaccttatattggaa

SEQ ID NO: 24710 - DNA, 96 bp, Aspergillus fumigatus
  misc_feature: 316
taaatacctcaccctatctacctctttcctaatctacctactaatctccttactactattattctatctatctctctacctttttatctaccttat

SEQ ID NO: 24711 - DNA, 96 bp, Aspergillus fumigatus
  misc_feature: 315
ttctttttctccttctttttctccttctttttctccttctttttctccttctttttcttcttatcttccttcttatcttccttcttccctttccaa

SEQ ID NO: 24712 - DNA, 96 bp, Aspergillus fumigatus
  misc_feature: 315
ggaatgaataatagttagaaataaagaaaggattttaataaattgaaaagagagaaagtaaaaaagagagaaaatcagggtaaaaaaaagtaagaa

SEQ ID NO: 24713 - DNA, 96 bp, Aspergillus fumigatus
  misc_feature: 315
agataggcccataggaagttccaatataaggtagataaaaaggtagagagatagatagaataatagtagtaaggagattagtaggtagattaggaa

SEQ ID NO: 24714 - DNA, 96 bp, Aspergillus fumigatus
  misc_feature: 315
cataggaagttccaatataaggtagataaaaaggtagagagatagatagaataatagtagtaaggagattagtaggtagattaggaaagaggtaga

SEQ ID NO: 24715 - DNA, 96 bp, Aspergillus fumigatus
  misc_feature: 315
aaatacctcaccctatctacctctttcctaatctacctactaatctccttactactattattctatctatctctctacctttttatctaccttata

SEQ ID NO: 24716 - DNA, 96 bp, Aspergillus fumigatus
  misc_feature: 315
ggcccataggaagttccaatataaggtagataaaaaggtagagagatagatagaataatagtagtaaggagattagtaggtagattaggaaagagg

SEQ ID NO: 24717 - DNA, 96 bp, Aspergillus fumigatus
  misc_feature: 314
cttctttttcttacttttttttaccctgattttctctcttttttactttctctcttttcaatttattaaaatcctttctttatttctaactattat

SEQ ID NO: 24718 - DNA, 96 bp, Aspergillus fumigatus
  misc_feature: 313
cccataggaagttccaatataaggtagataaaaaggtagagagatagatagaataatagtagtaaggagattagtaggtagattaggaaagaggta

SEQ ID NO: 24719 - DNA, 96 bp, Aspergillus fumigatus
  misc_feature: 313
aatacctcaccctatctacctctttcctaatctacctactaatctccttactactattattctatctatctctctacctttttatctaccttatat

SEQ ID NO: 24720 - DNA, 96 bp, Aspergillus fumigatus
  misc_feature: 312
tcttctttttcttacttttttttaccctgattttctctcttttttactttctctcttttcaatttattaaaatcctttctttatttctaactatta

SEQ ID NO: 24721 - DNA, 96 bp, Aspergillus fumigatus
  misc_feature: 310
ttcttctttttcttacttttttttaccctgattttctctcttttttactttctctcttttcaatttattaaaatcctttctttatttctaactatt

SEQ ID NO: 24722 - DNA, 96 bp, Aspergillus fumigatus
  misc_feature: 310
gcccataggaagttccaatataaggtagataaaaaggtagagagatagatagaataatagtagtaaggagattagtaggtagattaggaaagaggt

SEQ ID NO: 24723 - DNA, 96 bp, Aspergillus fumigatus
  misc_feature: 309
tagataggcccataggaagttccaatataaggtagataaaaaggtagagagatagatagaataatagtagtaaggagattagtaggtagattagga

SEQ ID NO: 24724 - DNA, 96 bp, Aspergillus fumigatus
  misc_feature: 309
tccctcaacgattccctcaacgattccctcaacgattccctcaacgattccctcaacgattccctcaacgattccctcaacgattccctcaacgat

SEQ ID NO: 24725 - DNA, 96 bp, Aspergillus fumigatus
  misc_feature: 308
tccttctttttctccttctttttctccttctttttctccttctttttctccttctttttcttcttatcttccttcttatcttccttcttccctttc

SEQ ID NO: 24726 - DNA, 96 bp, Aspergillus fumigatus
  misc_feature: 307
tttctccttctttttctccttctttttctccttctttttctccttctttttcttcttatcttccttcttatcttccttcttccctttccaatctta

SEQ ID NO: 24727 - DNA, 96 bp, Aspergillus fumigatus
  misc_feature: 307
ttctccttctttttctccttctttttctccttctttttctccttctttttctccttctttttcttcttatcttccttcttatcttccttcttccct

SEQ ID NO: 24728 - DNA, 96 bp, Aspergillus fumigatus
  misc_feature: 306
cttctttttctccttctttttctccttctttttctccttctttttctccttctttttcttcttatcttccttcttatcttccttcttccctttcca

SEQ ID NO: 24729 - DNA, 96 bp, Aspergillus fumigatus
  misc_feature: 306
cttcttctttttcttacttttttttaccctgattttctctcttttttactttctctcttttcaatttattaaaatcctttctttatttctaactat

SEQ ID NO: 24730 - DNA, 96 bp, Aspergillus fumigatus
  misc_feature: 306
ctccttctttttctccttctttttctccttctttttctccttctttttctccttctttttcttcttatcttccttcttatcttccttcttcccttt

SEQ ID NO: 24731 - DNA, 96 bp, Aspergillus fumigatus
  misc_feature: 305
ccctcaacgattccctcaacgattccctcaacgattccctcaacgattccctcaacgattccctcaacgattccctcaacgattccctcaacgatt

SEQ ID NO: 24732 - DNA, 96 bp, Aspergillus fumigatus
  misc_feature: 304
tttctccttctttttctccttctttttctccttctttttctccttctttttctccttctttttcttcttatcttccttcttatcttccttcttccc

SEQ ID NO: 24733 - DNA, 96 bp, Aspergillus fumigatus
  misc_feature: 304
ttctccttctttttctccttctttttctccttctttttctccttctttttcttcttatcttccttcttatcttccttcttccctttccaatcttat

SEQ ID NO: 24734 - DNA, 96 bp, Aspergillus fumigatus
  misc_feature: 304
ttccctcaacgattccctcaacgattccctcaacgattccctcaacgattccctcaacgattccctcaacgattccctcaacgattccctcaacga

SEQ ID NO: 24735 - DNA, 96 bp, Aspergillus fumigatus
  misc_feature: 304
tctccttctttttctccttctttttctccttctttttctccttctttttctccttctttttcttcttatcttccttcttatcttccttcttccctt

SEQ ID NO: 24736 - DNA, 96 bp, Aspergillus fumigatus
  misc_feature: 304
gtagataggcccataggaagttccaatataaggtagataaaaaggtagagagatagatagaataatagtagtaaggagattagtaggtagattagg

SEQ ID NO: 24737 - DNA, 96 bp, Aspergillus fumigatus
  misc_feature: 303
gattccctcaacgattccctcaacgattccctcaacgattccctcaacgattccctcaacgattccctcaacgattccctcaacgattccctcaac

SEQ ID NO: 24738 - DNA, 96 bp, Aspergillus fumigatus
  misc_feature: 303
ccttctttttctccttctttttctccttctttttctccttctttttctccttctttttcttcttatcttccttcttatcttccttcttccctttcc

SEQ ID NO: 24739 - DNA, 96 bp, Aspergillus fumigatus
  misc_feature: 302
ttttctccttctttttctccttctttttctccttctttttctccttctttttctccttctttttcttcttatcttccttcttatcttccttcttcc

SEQ ID NO: 24740 - DNA, 96 bp, Aspergillus fumigatus
  misc_feature: 302
tctccttctttttctccttctttttctccttctttttctccttctttttcttcttatcttccttcttatcttccttcttccctttccaatcttatt

SEQ ID NO: 24741 - DNA, 96 bp, Aspergillus fumigatus
  misc_feature: 302
attccctcaacgattccctcaacgattccctcaacgattccctcaacgattccctcaacgattccctcaacgattccctcaacgattccctcaacg

SEQ ID NO: 24742 - DNA, 96 bp, Aspergillus fumigatus
  misc_feature: 301
ctccttctttttctccttctttttctccttctttttctccttctttttcttcttatcttccttcttatcttccttcttccctttccaatcttattt

SEQ ID NO: 24743 - DNA, 96 bp, Aspergillus fumigatus
  misc_feature: 300
ttctttttctccttctttttctccttctttttctccttctttttcttcttatcttccttcttatcttccttcttccctttccaatcttatttattc

SEQ ID NO: 24744 - DNA, 96 bp, Aspergillus fumigatus
  misc_feature: 300
tctttttctccttctttttctccttctttttctccttctttttcttcttatcttccttcttatcttccttcttccctttccaatcttatttattct

SEQ ID NO: 24745 - DNA, 96 bp, Aspergillus fumigatus
  misc_feature: 300
tcttcttctttttcttacttttttttaccctgattttctctcttttttactttctctcttttcaatttattaaaatcctttctttatttctaacta

SEQ ID NO: 24746 - DNA, 96 bp, Aspergillus fumigatus
  misc_feature: 300
tagtgctcaggctagtgctcaggctagtgctcaggctagtgctcaggctagtgctagtgctaggactagggctaatgtgatcatcttctgccgaac

SEQ ID NO: 24747 - DNA, 96 bp, Aspergillus fumigatus
  misc_feature: 300
cctcaacgattccctcaacgattccctcaacgattccctcaacgattccctcaacgattccctcaacgattccctcaacgattccctcaacgattc

SEQ ID NO: 24748 - DNA, 96 bp, Aspergillus fumigatus
  misc_feature: 300
agcctgcgcccgcctgcccaccggtcccctccgcgcgcgcggcccatcgctcgctgcggcagggcgcgcgcgcccggcctatatcggccgcggggg

SEQ ID NO: 24749 - DNA, 96 bp, Aspergillus fumigatus
  misc_feature: 299
tactcttcttctttttcttacttttttttaccctgattttctctcttttttactttctctcttttcaatttattaaaatcctttctttatttctaa

SEQ ID NO: 24750 - DNA, 96 bp, Aspergillus fumigatus
  misc_feature: 299
tccttctttttctccttctttttctccttctttttctccttctttttcttcttatcttccttcttatcttccttcttccctttccaatcttattta

SEQ ID NO: 24751 - DNA, 96 bp, Aspergillus fumigatus
  misc_feature: 299
cttctttttctccttctttttctccttctttttctccttctttttcttcttatcttccttcttatcttccttcttccctttccaatcttatttatt

SEQ ID NO: 24752 - DNA, 96 bp, Aspergillus fumigatus
  misc_feature: 299
cttctttttctccttctttttctccttctttttctccttctttttctccttctttttctccttctttttcttcttatcttccttcttatcttcctt

SEQ ID NO: 24753 - DNA, 96 bp, Aspergillus fumigatus
  misc_feature: 298
tttttctccttctttttctccttctttttctccttctttttctccttctttttctccttctttttcttcttatcttccttcttatcttccttcttc

SEQ ID NO: 24754 - DNA, 96 bp, Aspergillus fumigatus
  misc_feature: 298
ttccttcttatcttccttcttccctttccaatcttatttattctctctttacttacttaaactctctttatcttatatatctcttcgtcctattct

SEQ ID NO: 24755 - DNA, 96 bp, Aspergillus fumigatus
  misc_feature: 298
tctttttcttcttatcttccttcttatcttccttcttccctttccaatcttatttattctctctttacttacttaaactctctttatcttatatat

SEQ ID NO: 24756 - DNA, 96 bp, Aspergillus fumigatus
  misc_feature: 297
ttctttttctccttctttttctccttctttttctccttctttttctccttctttttctccttctttttcttcttatcttccttcttatcttccttc

SEQ ID NO: 24757 - DNA, 96 bp, Aspergillus fumigatus
  misc_feature: 297
tcaacgattccctcaacgattccctcaacgattccctcaacgattccctcaacgattccctcaacgattccctcaacgattccctcaacgattccc

SEQ ID NO: 24758 - DNA, 96 bp, Aspergillus fumigatus
  misc_feature: 297
ctcaacgattccctcaacgattccctcaacgattccctcaacgattccctcaacgattccctcaacgattccctcaacgattccctcaacgattcc

SEQ ID NO: 24759 - DNA, 96 bp, Aspergillus fumigatus
  misc_feature: 297
ccttctttttctccttctttttctccttctttttctccttctttttcttcttatcttccttcttatcttccttcttccctttccaatcttatttat

SEQ ID NO: 24760 - DNA, 96 bp, Aspergillus fumigatus
  misc_feature: 296
tttttcttcttatcttccttcttatcttccttcttccctttccaatcttatttattctctctttacttacttaaactctctttatcttatatatct

SEQ ID NO: 24761 - DNA, 96 bp, Aspergillus fumigatus
  misc_feature: 296
ctagtgctcaggctagtgctcaggctagtgctcaggctagtgctcaggctagtgctagtgctaggactagggctaatgtgatcatcttctgccgaa

SEQ ID NO: 24762 - DNA, 96 bp, Aspergillus fumigatus
  misc_feature: 296
tgctcaggctagtgctcaggctagtgctcaggctagtgctcaggctagtgctcaggctagtgctagtgctaggactagggctaatgtgatcatctt

SEQ ID NO: 24763 - DNA, 96 bp, Aspergillus fumigatus
  misc_feature: 296
gcctgcgcccgcctgcccaccggtcccctccgcgcgcgcggcccatcgctcgctgcggcagggcgcgcgcgcccggcctatatcggccgcgggggc

SEQ ID NO: 24764 - DNA, 96 bp, Aspergillus fumigatus
  misc_feature: 296
ctttttcttcttatcttccttcttatcttccttcttccctttccaatcttatttattctctctttacttacttaaactctctttatcttatatatc

SEQ ID NO: 24765 - DNA, 96 bp, Aspergillus fumigatus
  misc_feature: 295
tttttctccttctttttctccttctttttctccttctttttcttcttatcttccttcttatcttccttcttccctttccaatcttatttattctct

SEQ ID NO: 24766 - DNA, 96 bp, Aspergillus fumigatus
  misc_feature: 295
ttactcttcttctttttcttacttttttttaccctgattttctctcttttttactttctctcttttcaatttattaaaatcctttctttatttcta

SEQ ID NO: 24767 - DNA, 96 bp, Aspergillus fumigatus
  misc_feature: 295
tccttctttttcttcttatcttccttcttatcttccttcttccctttccaatcttatttattctctctttacttacttaaactctctttatcttat

SEQ ID NO: 24768 - DNA, 96 bp, Aspergillus fumigatus
  misc_feature: 295
actcttcttctttttcttacttttttttaccctgattttctctcttttttactttctctcttttcaatttattaaaatcctttctttatttctaac

SEQ ID NO: 24769 - DNA, 96 bp, Aspergillus fumigatus
  misc_feature: 295
gctcaggctagtgctcaggctagtgctcaggctagtgctcaggctagtgctcaggctagtgctagtgctaggactagggctaatgtgatcatcttc

SEQ ID NO: 24770 - DNA, 96 bp, Aspergillus fumigatus
  misc_feature: 295
ctttttctccttctttttctccttctttttctccttctttttcttcttatcttccttcttatcttccttcttccctttccaatcttatttattctc

SEQ ID NO: 24771 - DNA, 96 bp, Aspergillus fumigatus
  misc_feature: 295
ctttttctccttctttttctccttctttttctccttctttttctccttctttttctccttctttttcttcttatcttccttcttatcttccttctt

SEQ ID NO: 24772 - DNA, 96 bp, Aspergillus fumigatus
  misc_feature: 295
ctcttcttctttttcttacttttttttaccctgattttctctcttttttactttctctcttttcaatttattaaaatcctttctttatttctaact

SEQ ID NO: 24773 - DNA, 96 bp, Aspergillus fumigatus
  misc_feature: 295
ctcaggctagtgctcaggctagtgctcaggctagtgctcaggctagtgctcaggctagtgctagtgctaggactagggctaatgtgatcatcttct

SEQ ID NO: 24774 - DNA, 96 bp, Aspergillus fumigatus
  misc_feature: 294
ttttcttcttatcttccttcttatcttccttcttccctttccaatcttatttattctctctttacttacttaaactctctttatcttatatatctc

SEQ ID NO: 24775 - DNA, 96 bp, Aspergillus fumigatus
  misc_feature: 294
ttcttcttatcttccttcttatcttccttcttccctttccaatcttatttattctctctttacttacttaaactctctttatcttatatatctctt

SEQ ID NO: 24776 - DNA, 96 bp, Aspergillus fumigatus
  misc_feature: 294
tctttttctccttctttttctccttctttttctccttctttttctccttctttttctccttctttttcttcttatcttccttcttatcttccttct

SEQ ID NO: 24777 - DNA, 96 bp, Aspergillus fumigatus
  misc_feature: 294
tcttcttatcttccttcttatcttccttcttccctttccaatcttatttattctctctttacttacttaaactctctttatcttatatatctcttc

SEQ ID NO: 24778 - DNA, 96 bp, Aspergillus fumigatus
  misc_feature: 294
ctccttctttttcttcttatcttccttcttatcttccttcttccctttccaatcttatttattctctctttacttacttaaactctctttatctta

SEQ ID NO: 24779 - DNA, 96 bp, Aspergillus fumigatus
  misc_feature: 294
ggctagtgctcaggctagtgctcaggctagtgctcaggctagtgctcaggctagtgctagtgctaggactagggctaatgtgatcatcttctgccg

SEQ ID NO: 24780 - DNA, 96 bp, Aspergillus fumigatus
  misc_feature: 294
cttccttcttatcttccttcttccctttccaatcttatttattctctctttacttacttaaactctctttatcttatatatctcttcgtcctattc

SEQ ID NO: 24781 - DNA, 96 bp, Aspergillus fumigatus
  misc_feature: 293
gctagtgctcaggctagtgctcaggctagtgctcaggctagtgctcaggctagtgctagtgctaggactagggctaatgtgatcatcttctgccga

SEQ ID NO: 24782 - DNA, 96 bp, Aspergillus fumigatus
  misc_feature: 293
ccttctttttcttcttatcttccttcttatcttccttcttccctttccaatcttatttattctctctttacttacttaaactctctttatcttata

SEQ ID NO: 24783 - DNA, 96 bp, Aspergillus fumigatus
  misc_feature: 293
cttctttttcttcttatcttccttcttatcttccttcttccctttccaatcttatttattctctctttacttacttaaactctctttatcttatat

SEQ ID NO: 24784 - DNA, 96 bp, Aspergillus fumigatus
  misc_feature: 293
cctgcgcccgcctgcccaccggtcccctccgcgcgcgcggcccatcgctcgctgcggcagggcgcgcgcgcccggcctatatcggccgcgggggct

SEQ ID NO: 24785 - DNA, 96 bp, Aspergillus fumigatus
  misc_feature: 292
tttcttcttatcttccttcttatcttccttcttccctttccaatcttatttattctctctttacttacttaaactctctttatcttatatatctct

SEQ ID NO: 24786 - DNA, 96 bp, Aspergillus fumigatus
  misc_feature: 292
aggctagtgctcaggctagtgctcaggctagtgctcaggctagtgctcaggctagtgctagtgctaggactagggctaatgtgatcatcttctgcc

SEQ ID NO: 24787 - DNA, 96 bp, Aspergillus fumigatus
  misc_feature: 292
caacgattccctcaacgattccctcaacgattccctcaacgattccctcaacgattccctcaacgattccctcaacgattccctcaacgattccct

SEQ ID NO: 24788 - DNA, 96 bp, Aspergillus fumigatus
  misc_feature: 291
ttctttttcttcttatcttccttcttatcttccttcttccctttccaatcttatttattctctctttacttacttaaactctctttatcttatata

SEQ ID NO: 24789 - DNA, 96 bp, Aspergillus fumigatus
  misc_feature: 290
tttttttactcttcttctttttcttacttttttttaccctgattttctctcttttttactttctctcttttcaatttattaaaatcctttctttat

SEQ ID NO: 24790 - DNA, 96 bp, Aspergillus fumigatus
  misc_feature: 290
tcaggctagtgctcaggctagtgctcaggctagtgctcaggctagtgctcaggctagtgctagtgctaggactagggctaatgtgatcatcttctg

SEQ ID NO: 24791 - DNA, 96 bp, Aspergillus fumigatus
  misc_feature: 290
caggctagtgctcaggctagtgctcaggctagtgctcaggctagtgctcaggctagtgctagtgctaggactagggctaatgtgatcatcttctgc

SEQ ID NO: 24792 - DNA, 96 bp, Aspergillus fumigatus
  misc_feature: 289
ttttactcttcttctttttcttacttttttttaccctgattttctctcttttttactttctctcttttcaatttattaaaatcctttctttatttc

SEQ ID NO: 24793 - DNA, 96 bp, Aspergillus fumigatus
  misc_feature: 289
tttactcttcttctttttcttacttttttttaccctgattttctctcttttttactttctctcttttcaatttattaaaatcctttctttatttct

SEQ ID NO: 24794 - DNA, 96 bp, Aspergillus fumigatus
  misc_feature: 288
tttttactcttcttctttttcttacttttttttaccctgattttctctcttttttactttctctcttttcaatttattaaaatcctttctttattt

SEQ ID NO: 24795 - DNA, 96 bp, Aspergillus fumigatus
  misc_feature: 288
ttttctccttctttttctccttctttttctccttctttttcttcttatcttccttcttatcttccttcttccctttccaatcttatttattctctc

SEQ ID NO: 24796 - DNA, 96 bp, Aspergillus fumigatus
  misc_feature: 288
agaagaagaagaatatatatatattagggagaggtagataaaatggaaagtgaatatatataagtcaatatatatatataaagagacaaaagagat

SEQ ID NO: 24797 - DNA, 96 bp, Aspergillus fumigatus
  misc_feature: 287
ttttttactcttcttctttttcttacttttttttaccctgattttctctcttttttactttctctcttttcaatttattaaaatcctttctttatt

SEQ ID NO: 24798 - DNA, 96 bp, Aspergillus fumigatus
  misc_feature: 287
aacgattccctcaacgattccctcaacgattccctcaacgattccctcaacgattccctcaacgattccctcaacgattccctcaacgattccctc

SEQ ID NO: 24799 - DNA, 96 bp, Aspergillus fumigatus
  misc_feature: 286
ttttttttactcttcttctttttcttacttttttttaccctgattttctctcttttttactttctctcttttcaatttattaaaatcctttcttta

SEQ ID NO: 24800 - DNA, 96 bp, Aspergillus fumigatus
  misc_feature: 286
ttctccttctttttcttcttatcttccttcttatcttccttcttccctttccaatcttatttattctctctttacttacttaaactctctttatct

SEQ ID NO: 24801 - DNA, 96 bp, Aspergillus fumigatus
  misc_feature: 286
tcttccttcttatcttccttcttccctttccaatcttatttattctctctttacttacttaaactctctttatcttatatatctcttcgtcctatt

SEQ ID NO: 24802 - DNA, 96 bp, Aspergillus fumigatus
  misc_feature: 286
aaagaagaagaagaatatatatatattagggagaggtagataaaatggaaagtgaatatatataagtcaatatatatatataaagagacaaaagag

SEQ ID NO: 24803 - DNA, 96 bp, Aspergillus fumigatus
  misc_feature: 285
ttctccttctttttctccttctttttctccttctttttcttcttatcttccttcttatcttccttcttccctttccaatcttatttattctctctt

SEQ ID NO: 24804 - DNA, 96 bp, Aspergillus fumigatus
  misc_feature: 285
aagaagaagaagaatatatatatattagggagaggtagataaaatggaaagtgaatatatataagtcaatatatatatataaagagacaaaagaga

SEQ ID NO: 24805 - DNA, 96 bp, Aspergillus fumigatus
  misc_feature: 285
gaagaagaagaatatatatatattagggagaggtagataaaatggaaagtgaatatatataagtcaatatatatatataaagagacaaaagagatg

SEQ ID NO: 24806 - DNA, 96 bp, Aspergillus fumigatus
  misc_feature: 285
cttttttttactcttcttctttttcttacttttttttaccctgattttctctcttttttactttctctcttttcaatttattaaaatcctttcttt

SEQ ID NO: 24807 - DNA, 96 bp, Aspergillus fumigatus
  misc_feature: 284
tttctccttctttttctccttctttttctccttctttttcttcttatcttccttcttatcttccttcttccctttccaatcttatttattctctct

SEQ ID NO: 24808 - DNA, 96 bp, Aspergillus fumigatus
  misc_feature: 283
tttctccttctttttcttcttatcttccttcttatcttccttcttccctttccaatcttatttattctctctttacttacttaaactctctttatc

SEQ ID NO: 24809 - DNA, 96 bp, Aspergillus fumigatus
  misc_feature: 283
tcttttttttactcttcttctttttcttacttttttttaccctgattttctctcttttttactttctctcttttcaatttattaaaatcctttctt

SEQ ID NO: 24810 - DNA, 96 bp, Aspergillus fumigatus
  misc_feature: 283
tctccttctttttcttcttatcttccttcttatcttccttcttccctttccaatcttatttattctctctttacttacttaaactctctttatctt

SEQ ID NO: 24811 - DNA, 96 bp, Aspergillus fumigatus
  misc_feature: 283
cttcttatcttccttcttatcttccttcttccctttccaatcttatttattctctctttacttacttaaactctctttatcttatatatctcttcg

SEQ ID NO: 24812 - DNA, 96 bp, Aspergillus fumigatus
  misc_feature: 283
ctcttttttttactcttcttctttttcttacttttttttaccctgattttctctcttttttactttctctcttttcaatttattaaaatcctttct

SEQ ID NO: 24813 - DNA, 96 bp, Aspergillus fumigatus
  misc_feature: 282
ttcttatcttccttcttatcttccttcttccctttccaatcttatttattctctctttacttacttaaactctctttatcttatatatctcttcgt

SEQ ID NO: 24814 - DNA, 96 bp, Aspergillus fumigatus
  misc_feature: 282
ctttttctccttctttttcttcttatcttccttcttatcttccttcttccctttccaatcttatttattctctctttacttacttaaactctcttt

SEQ ID NO: 24815 - DNA, 96 bp, Aspergillus fumigatus
  misc_feature: 281
tttttctccttctttttcttcttatcttccttcttatcttccttcttccctttccaatcttatttattctctctttacttacttaaactctcttta

SEQ ID NO: 24816 - DNA, 96 bp, Aspergillus fumigatus
  misc_feature: 281
tctccttctttttctccttctttttctccttctttttcttcttatcttccttcttatcttccttcttccctttccaatcttatttattctctcttt

SEQ ID NO: 24817 - DNA, 96 bp, Aspergillus fumigatus
  misc_feature: 280
tctttttctccttctttttcttcttatcttccttcttatcttccttcttccctttccaatcttatttattctctctttacttacttaaactctctt

SEQ ID NO: 24818 - DNA, 96 bp, Aspergillus fumigatus
  misc_feature: 280
tctcttttttttactcttcttctttttcttacttttttttaccctgattttctctcttttttactttctctcttttcaatttattaaaatcctttc

SEQ ID NO: 24819 - DNA, 96 bp, Aspergillus fumigatus
  misc_feature: 280
aagaagaagaatatatatatattagggagaggtagataaaatggaaagtgaatatatataagtcaatatatatatataaagagacaaaagagatga

SEQ ID NO: 24820 - DNA, 96 bp, Aspergillus fumigatus
  misc_feature: 279
ttttctccttctttttcttcttatcttccttcttatcttccttcttccctttccaatcttatttattctctctttacttacttaaactctctttat

SEQ ID NO: 24821 - DNA, 96 bp, Aspergillus fumigatus
  misc_feature: 279
tgcgcccgcctgcccaccggtcccctccgcgcgcgcggcccatcgctcgctgcggcagggcgcgcgcgcccggcctatatcggccgcgggggctgt

SEQ ID NO: 24822 - DNA, 96 bp, Aspergillus fumigatus
  misc_feature: 279
ctctcttttttttactcttcttctttttcttacttttttttaccctgattttctctcttttttactttctctcttttcaatttattaaaatccttt

SEQ ID NO: 24823 - DNA, 96 bp, Aspergillus fumigatus
  misc_feature: 279
atcttccttcttatcttccttcttccctttccaatcttatttattctctctttacttacttaaactctctttatcttatatatctcttcgtcctat

SEQ ID NO: 24824 - DNA, 96 bp, Aspergillus fumigatus
  misc_feature: 279
agaagaagaatatatatatattagggagaggtagataaaatggaaagtgaatatatataagtcaatatatatatataaagagacaaaagagatgat

SEQ ID NO: 24825 - DNA, 96 bp, Aspergillus fumigatus
  misc_feature: 278
ttcttcttctttttcttcttctttttctccttctttttctccttctttttctccttctttttctccttctttttctccttctttttctccttcttt

SEQ ID NO: 24826 - DNA, 96 bp, Aspergillus fumigatus
  misc_feature: 278
tatcttccttcttatcttccttcttccctttccaatcttatttattctctctttacttacttaaactctctttatcttatatatctcttcgtccta

SEQ ID NO: 24827 - DNA, 96 bp, Aspergillus fumigatus
  misc_feature: 278
cttctttttctccttctttttcttcttatcttccttcttatcttccttcttccctttccaatcttatttattctctctttacttacttaaactctc

SEQ ID NO: 24828 - DNA, 96 bp, Aspergillus fumigatus
  misc_feature: 277
ttctttttctccttctttttcttcttatcttccttcttatcttccttcttccctttccaatcttatttattctctctttacttacttaaactctct

SEQ ID NO: 24829 - DNA, 96 bp, Aspergillus fumigatus
  misc_feature: 277
cttatcttccttcttatcttccttcttccctttccaatcttatttattctctctttacttacttaaactctctttatcttatatatctcttcgtcc

SEQ ID NO: 24830 - DNA, 96 bp, Aspergillus fumigatus
  misc_feature: 276
tcttcttctttttcttcttctttttctccttctttttctccttctttttctccttctttttctccttctttttctccttctttttctccttctttt

SEQ ID NO: 24831 - DNA, 96 bp, Aspergillus fumigatus
  misc_feature: 276
tcttatcttccttcttatcttccttcttccctttccaatcttatttattctctctttacttacttaaactctctttatcttatatatctcttcgtc

SEQ ID NO: 24832 - DNA, 96 bp, Aspergillus fumigatus
  misc_feature: 275
cttcttctttttcttcttctttttctccttctttttctccttctttttctccttctttttctccttctttttctccttctttttctccttcttttt

SEQ ID NO: 24833 - DNA, 96 bp, Aspergillus fumigatus
  misc_feature: 274
tttcttcttctttttcttcttctttttctccttctttttctccttctttttctccttctttttctccttctttttctccttctttttctccttctt

SEQ ID NO: 24834 - DNA, 96 bp, Aspergillus fumigatus
  misc_feature: 274
ttatcttccttcttatcttccttcttccctttccaatcttatttattctctctttacttacttaaactctctttatcttatatatctcttcgtcct

SEQ ID NO: 24835 - DNA, 96 bp, Aspergillus fumigatus
  misc_feature: 274
gcgcccgcctgcccaccggtcccctccgcgcgcgcggcccatcgctcgctgcggcagggcgcgcgcgcccggcctatatcggccgcgggggctgtg

SEQ ID NO: 24836 - DNA, 96 bp, Aspergillus fumigatus
  misc_feature: 273
ctccttctttttctccttctttttctccttctttttcttcttatcttccttcttatcttccttcttccctttccaatcttatttattctctcttta

SEQ ID NO: 24837 - DNA, 96 bp, Aspergillus fumigatus
  misc_feature: 273
ccggggtccacagcctggctgccctggcttccctgggggtcggggtcggggctgcctgcacgctggctagctagctgccatagctggcgccatttc

SEQ ID NO: 24838 - DNA, 96 bp, Aspergillus fumigatus
  misc_feature: 273
actctcttttttttactcttcttctttttcttacttttttttaccctgattttctctcttttttactttctctcttttcaatttattaaaatcctt

SEQ ID NO: 24839 - DNA, 96 bp, Aspergillus fumigatus
  misc_feature: 272
gaagaagaatatatatatattagggagaggtagataaaatggaaagtgaatatatataagtcaatatatatatataaagagacaaaagagatgatg

SEQ ID NO: 24840 - DNA, 96 bp, Aspergillus fumigatus
  misc_feature: 272
ccttctttttctccttctttttcttcttatcttccttcttatcttccttcttccctttccaatcttatttattctctctttacttacttaaactct

SEQ ID NO: 24841 - DNA, 96 bp, Aspergillus fumigatus
  misc_feature: 271
ttcttctttttcttcttctttttctccttctttttctccttctttttctccttctttttctccttctttttctccttctttttctccttctttttc

SEQ ID NO: 24842 - DNA, 96 bp, Aspergillus fumigatus
  misc_feature: 271
agaaaaagaaggagaaaaagaaggagaaaaagaaggagaaaaagaaggagaaaaagaaggagaaaaagaaggagaaaaagaagaagaaaaagaaga

SEQ ID NO: 24843 - DNA, 96 bp, Aspergillus fumigatus
  misc_feature: 271
agaagaatatatatatattagggagaggtagataaaatggaaagtgaatatatataagtcaatatatatatataaagagacaaaagagatgatgac

SEQ ID NO: 24844 - DNA, 96 bp, Aspergillus fumigatus
  misc_feature: 271
cctttcttcttctttttcttcttctttttctccttctttttctccttctttttctccttctttttctccttctttttctccttctttttctccttc

SEQ ID NO: 24845 - DNA, 96 bp, Aspergillus fumigatus
  misc_feature: 271
ctttcttcttctttttcttcttctttttctccttctttttctccttctttttctccttctttttctccttctttttctccttctttttctccttct

SEQ ID NO: 24846 - DNA, 96 bp, Aspergillus fumigatus
  misc_feature: 271
cttctttttctccttctttttctccttctttttcttcttatcttccttcttatcttccttcttccctttccaatcttatttattctctctttactt

SEQ ID NO: 24847 - DNA, 96 bp, Aspergillus fumigatus
  misc_feature: 271
ctccttctttttctccttctttttcttcttatcttccttcttatcttccttcttccctttccaatcttatttattctctctttacttacttaaact

SEQ ID NO: 24848 - DNA, 96 bp, Aspergillus fumigatus
  misc_feature: 270
tccttctttttctccttctttttctccttctttttcttcttatcttccttcttatcttccttcttccctttccaatcttatttattctctctttac

SEQ ID NO: 24849 - DNA, 96 bp, Aspergillus fumigatus
  misc_feature: 270
tactctcttttttttactcttcttctttttcttacttttttttaccctgattttctctcttttttactttctctcttttcaatttattaaaatcct

SEQ ID NO: 24850 - DNA, 96 bp, Aspergillus fumigatus
  misc_feature: 270
ccttctttttctccttctttttctccttctttttcttcttatcttccttcttatcttccttcttccctttccaatcttatttattctctctttact

SEQ ID NO: 24851 - DNA, 96 bp, Aspergillus fumigatus
  misc_feature: 269
tttttccctttcttcttctttttcttcttctttttctccttctttttctccttctttttctccttctttttctccttctttttctccttctttttc

SEQ ID NO: 24852 - DNA, 96 bp, Aspergillus fumigatus
  misc_feature: 269
ttttccctttcttcttctttttcttcttctttttctccttctttttctccttctttttctccttctttttctccttctttttctccttctttttct

SEQ ID NO: 24853 - DNA, 96 bp, Aspergillus fumigatus
  misc_feature: 269
ttctttttctccttctttttctccttctttttcttcttatcttccttcttatcttccttcttccctttccaatcttatttattctctctttactta

SEQ ID NO: 24854 - DNA, 96 bp, Aspergillus fumigatus
  misc_feature: 269
cggggtccacagcctggctgccctggcttccctgggggtcggggtcggggctgcctgcacgctggctagctagctgccatagctggcgccatttca

SEQ ID NO: 24855 - DNA, 96 bp, Aspergillus fumigatus
  misc_feature: 269
tcatgtgacccagcaggccctagattctattagggttgctgccctgactactagtcataatcagattatgactgaacagcctattcacccgatttc

SEQ ID NO: 24856 - DNA, 96 bp, Aspergillus fumigatus
  misc_feature: 268
catgtgacccagcaggccctagattctattagggttgctgccctgactactagtcataatcagattatgactgaacagcctattcacccgatttca

SEQ ID NO: 24857 - DNA, 96 bp, Aspergillus fumigatus
  misc_feature: 268
aagaagaatatatatatattagggagaggtagataaaatggaaagtgaatatatataagtcaatatatatatataaagagacaaaagagatgatga

SEQ ID NO: 24858 - DNA, 96 bp, Aspergillus fumigatus
  misc_feature: 267
tttctccttctttttctccttctttttcttcttatcttccttcttatcttccttcttccctttccaatcttatttattctctctttacttacttaa

SEQ ID NO: 24859 - DNA, 96 bp, Aspergillus fumigatus
  misc_feature: 267
tctccttctttttctccttctttttcttcttatcttccttcttatcttccttcttccctttccaatcttatttattctctctttacttacttaaac

SEQ ID NO: 24860 - DNA, 96 bp, Aspergillus fumigatus
  misc_feature: 267
tccttctttttctccttctttttcttcttatcttccttcttatcttccttcttccctttccaatcttatttattctctctttacttacttaaactc

SEQ ID NO: 24861 - DNA, 96 bp, Aspergillus fumigatus
  misc_feature: 266
gaagaatatatatatattagggagaggtagataaaatggaaagtgaatatatataagtcaatatatatatataaagagacaaaagagatgatgaca

SEQ ID NO: 24862 - DNA, 96 bp, Aspergillus fumigatus
  misc_feature: 266
tctttttctccttctttttctccttctttttcttcttatcttccttcttatcttccttcttccctttccaatcttatttattctctctttacttac

SEQ ID NO: 24863 - DNA, 96 bp, Aspergillus fumigatus
  misc_feature: 266
tccctttcttcttctttttcttcttctttttctccttctttttctccttctttttctccttctttttctccttctttttctccttctttttctcct

SEQ ID NO: 24864 - DNA, 96 bp, Aspergillus fumigatus
  misc_feature: 266
ctttttctccttctttttctccttctttttcttcttatcttccttcttatcttccttcttccctttccaatcttatttattctctctttacttact

SEQ ID NO: 24865 - DNA, 96 bp, Aspergillus fumigatus
  misc_feature: 266
aagaatatatatatattagggagaggtagataaaatggaaagtgaatatatataagtcaatatatatatataaagagacaaaagagatgatgacag

SEQ ID NO: 24866 - DNA, 96 bp, Aspergillus fumigatus
  misc_feature: 266
ctcatgtgacccagcaggccctagattctattagggttgctgccctgactactagtcataatcagattatgactgaacagcctattcacccgattt

SEQ ID NO: 24867 - DNA, 96 bp, Aspergillus fumigatus
  misc_feature: 265
ttttctccttctttttctccttctttttcttcttatcttccttcttatcttccttcttccctttccaatcttatttattctctctttacttactta

SEQ ID NO: 24868 - DNA, 96 bp, Aspergillus fumigatus
  misc_feature: 265
ggggtccacagcctggctgccctggcttccctgggggtcggggtcggggctgcctgcacgctggctagctagctgccatagctggcgccatttcaa

SEQ ID NO: 24869 - DNA, 96 bp, Aspergillus fumigatus
  misc_feature: 265
ttactctcttttttttactcttcttctttttcttacttttttttaccctgattttctctcttttttactttctctcttttcaatttattaaaatcc

SEQ ID NO: 24870 - DNA, 96 bp, Aspergillus fumigatus
  misc_feature: 265
agaatatatatatattagggagaggtagataaaatggaaagtgaatatatataagtcaatatatatatataaagagacaaaagagatgatgacagg

SEQ ID NO: 24871 - DNA, 96 bp, Aspergillus fumigatus
  misc_feature: 265
ccctttcttcttctttttcttcttctttttctccttctttttctccttctttttctccttctttttctccttctttttctccttctttttctcctt

SEQ ID NO: 24872 - DNA, 96 bp, Aspergillus fumigatus
  misc_feature: 265
aatatatatatattagggagaggtagataaaatggaaagtgaatatatataagtcaatatatatatataaagagacaaaagagatgatgacaggtg

SEQ ID NO: 24873 - DNA, 96 bp, Aspergillus fumigatus
  misc_feature: 264
tttccctttcttcttctttttcttcttctttttctccttctttttctccttctttttctccttctttttctccttctttttctccttctttttctc

SEQ ID NO: 24874 - DNA, 96 bp, Aspergillus fumigatus
  misc_feature: 264
tatttttccctttcttcttctttttcttcttctttttctccttctttttctccttctttttctccttctttttctccttctttttctccttctttt

SEQ ID NO: 24875 - DNA, 96 bp, Aspergillus fumigatus
  misc_feature: 264
agaggtagataaaatggaaagtgaatatatataagtcaatatatatatataaagagacaaaagagatgatgacaggtgaatatatatatatatata

SEQ ID NO: 24876 - DNA, 96 bp, Aspergillus fumigatus
  misc_feature: 264
atttttccctttcttcttctttttcttcttctttttctccttctttttctccttctttttctccttctttttctccttctttttctccttcttttt

SEQ ID NO: 24877 - DNA, 96 bp, Aspergillus fumigatus
  misc_feature: 263
tttttctccttctttttctccttctttttcttcttatcttccttcttatcttccttcttccctttccaatcttatttattctctctttacttactt

SEQ ID NO: 24878 - DNA, 96 bp, Aspergillus fumigatus
  misc_feature: 263
ttctccttctttttctccttctttttcttcttatcttccttcttatcttccttcttccctttccaatcttatttattctctctttacttacttaaa

SEQ ID NO: 24879 - DNA, 96 bp, Aspergillus fumigatus
  misc_feature: 263
gaggtagataaaatggaaagtgaatatatataagtcaatatatatatataaagagacaaaagagatgatgacaggtgaatatatatatatatatat

SEQ ID NO: 24880 - DNA, 96 bp, Aspergillus fumigatus
  misc_feature: 263
gaatatatatatattagggagaggtagataaaatggaaagtgaatatatataagtcaatatatatatataaagagacaaaagagatgatgacaggt

SEQ ID NO: 24881 - DNA, 96 bp, Aspergillus fumigatus
  misc_feature: 261
atttctaatctaatctatatttttccctttcttcttctttttcttcttctttttctccttctttttctccttctttttctccttctttttctcctt

SEQ ID NO: 24882 - DNA, 96 bp, Aspergillus fumigatus
  misc_feature: 261
aggtagataaaatggaaagtgaatatatataagtcaatatatatatataaagagacaaaagagatgatgacaggtgaatatatatatatatatatt

SEQ ID NO: 24883 - DNA, 96 bp, Aspergillus fumigatus
  misc_feature: 260
ttctaatctaatctatatttttccctttcttcttctttttcttcttctttttctccttctttttctccttctttttctccttctttttctccttct

SEQ ID NO: 24884 - DNA, 96 bp, Aspergillus fumigatus
  misc_feature: 260
ttccctttcttcttctttttcttcttctttttctccttctttttctccttctttttctccttctttttctccttctttttctccttctttttctcc

SEQ ID NO: 24885 - DNA, 96 bp, Aspergillus fumigatus
  misc_feature: 260
tatatttttccctttcttcttctttttcttcttctttttctccttctttttctccttctttttctccttctttttctccttctttttctccttctt

SEQ ID NO: 24886 - DNA, 96 bp, Aspergillus fumigatus
  misc_feature: 260
gagaggtagataaaatggaaagtgaatatatataagtcaatatatatatataaagagacaaaagagatgatgacaggtgaatatatatatatatat

SEQ ID NO: 24887 - DNA, 96 bp, Aspergillus fumigatus
  misc_feature: 260
ctatatttttccctttcttcttctttttcttcttctttttctccttctttttctccttctttttctccttctttttctccttctttttctccttct

SEQ ID NO: 24888 - DNA, 96 bp, Aspergillus fumigatus
  misc_feature: 260
atctatatttttccctttcttcttctttttcttcttctttttctccttctttttctccttctttttctccttctttttctccttctttttctcctt

SEQ ID NO: 24889 - DNA, 96 bp, Aspergillus fumigatus
  misc_feature: 260
aatttctaatctaatctatatttttccctttcttcttctttttcttcttctttttctccttctttttctccttctttttctccttctttttctcct

SEQ ID NO: 24890 - DNA, 96 bp, Aspergillus fumigatus
  misc_feature: 259
tttctaatctaatctatatttttccctttcttcttctttttcttcttctttttctccttctttttctccttctttttctccttctttttctccttc

SEQ ID NO: 24891 - DNA, 96 bp, Aspergillus fumigatus
  misc_feature: 259
ggagaggtagataaaatggaaagtgaatatatataagtcaatatatatatataaagagacaaaagagatgatgacaggtgaatatatatatatata

SEQ ID NO: 24892 - DNA, 96 bp, Aspergillus fumigatus
  misc_feature: 259
atatttttccctttcttcttctttttcttcttctttttctccttctttttctccttctttttctccttctttttctccttctttttctccttcttt

SEQ ID NO: 24893 - DNA, 96 bp, Aspergillus fumigatus
  misc_feature: 258
tttactctcttttttttactcttcttctttttcttacttttttttaccctgattttctctcttttttactttctctcttttcaatttattaaaatc

SEQ ID NO: 24894 - DNA, 96 bp, Aspergillus fumigatus
  misc_feature: 258
tctatatttttccctttcttcttctttttcttcttctttttctccttctttttctccttctttttctccttctttttctccttctttttctccttc

SEQ ID NO: 24895 - DNA, 96 bp, Aspergillus fumigatus
  misc_feature: 258
ggtagataaaatggaaagtgaatatatataagtcaatatatatatataaagagacaaaagagatgatgacaggtgaatatatatatatatatattt

SEQ ID NO: 24896 - DNA, 96 bp, Aspergillus fumigatus
  misc_feature: 258
gaatttctaatctaatctatatttttccctttcttcttctttttcttcttctttttctccttctttttctccttctttttctccttctttttctcc

SEQ ID NO: 24897 - DNA, 96 bp, Aspergillus fumigatus
  misc_feature: 258
aatctatatttttccctttcttcttctttttcttcttctttttctccttctttttctccttctttttctccttctttttctccttctttttctcct

SEQ ID NO: 24898 - DNA, 96 bp, Aspergillus fumigatus
  misc_feature: 257
ttcttctctttcttctctttcttctctttcttctatatattaattcttattctctctctattctctctctgaatatcctaatctatcctctttatt

SEQ ID NO: 24899 - DNA, 96 bp, Aspergillus fumigatus
  misc_feature: 257
tgaatttctaatctaatctatatttttccctttcttcttctttttcttcttctttttctccttctttttctccttctttttctccttctttttctc

SEQ ID NO: 24900 - DNA, 96 bp, Aspergillus fumigatus
  misc_feature: 257
taatctatatttttccctttcttcttctttttcttcttctttttctccttctttttctccttctttttctccttctttttctccttctttttctcc

SEQ ID NO: 24901 - DNA, 96 bp, Aspergillus fumigatus
  misc_feature: 257
ctaatctatatttttccctttcttcttctttttcttcttctttttctccttctttttctccttctttttctccttctttttctccttctttttctc

SEQ ID NO: 24902 - DNA, 96 bp, Aspergillus fumigatus
  misc_feature: 256
tctaatctaatctatatttttccctttcttcttctttttcttcttctttttctccttctttttctccttctttttctccttctttttctccttctt

SEQ ID NO: 24903 - DNA, 96 bp, Aspergillus fumigatus
  misc_feature: 256
gggagaggtagataaaatggaaagtgaatatatataagtcaatatatatatataaagagacaaaagagatgatgacaggtgaatatatatatatat

SEQ ID NO: 24904 - DNA, 96 bp, Aspergillus fumigatus
  misc_feature: 256
atctaatctatatttttccctttcttcttctttttcttcttctttttctccttctttttctccttctttttctccttctttttctccttctttttc

SEQ ID NO: 24905 - DNA, 96 bp, Aspergillus fumigatus
  misc_feature: 256
cttctctttcttctctttcttctctttcttctatatattaattcttattctctctctattctctctctgaatatcctaatctatcctctttattct

SEQ ID NO: 24906 - DNA, 96 bp, Aspergillus fumigatus
  misc_feature: 255
taatagaataaagaggatagattaggatattcagagagagaatagagagagaataagaattaatatatagaagaaagagaagaaagagaagaaaga

SEQ ID NO: 24907 - DNA, 96 bp, Aspergillus fumigatus
  misc_feature: 255
tcttctctttcttctctttcttctctttcttctatatattaattcttattctctctctattctctctctgaatatcctaatctatcctctttattc

SEQ ID NO: 24908 - DNA, 96 bp, Aspergillus fumigatus
  misc_feature: 255
tctaatctatatttttccctttcttcttctttttcttcttctttttctccttctttttctccttctttttctccttctttttctccttctttttct

SEQ ID NO: 24909 - DNA, 96 bp, Aspergillus fumigatus
  misc_feature: 255
gtagataaaatggaaagtgaatatatataagtcaatatatatatataaagagacaaaagagatgatgacaggtgaatatatatatatatatattta

SEQ ID NO: 24910 - DNA, 96 bp, Aspergillus fumigatus
  misc_feature: 255
ctttcttctctttcttctctttcttctctttcttctatatattaattcttattctctctctattctctctctgaatatcctaatctatcctcttta

SEQ ID NO: 24911 - DNA, 96 bp, Aspergillus fumigatus
  misc_feature: 255
gcccgcctgcccaccggtcccctccgcgcgcgcggcccatcgctcgctgcggcagggcgcgcgcgcccggcctatatcggccgcgggggctgtgtg

SEQ ID NO: 24912 - DNA, 96 bp, Aspergillus fumigatus
  misc_feature: 255
aatctaatctatatttttccctttcttcttctttttcttcttctttttctccttctttttctccttctttttctccttctttttctccttcttttt

SEQ ID NO: 24913 - DNA, 96 bp, Aspergillus fumigatus
  misc_feature: 254
tagataaaatggaaagtgaatatatataagtcaatatatatatataaagagacaaaagagatgatgacaggtgaatatatatatatatatatttaa

SEQ ID NO: 24914 - DNA, 96 bp, Aspergillus fumigatus
  misc_feature: 254
tcttctctttcttctctttcttctctttcttctctttcttctatatattaattcttattctctctctattctctctctgaatatcctaatctatcc

SEQ ID NO: 24915 - DNA, 96 bp, Aspergillus fumigatus
  misc_feature: 254
ctaatctaatctatatttttccctttcttcttctttttcttcttctttttctccttctttttctccttctttttctccttctttttctccttcttt

SEQ ID NO: 24916 - DNA, 96 bp, Aspergillus fumigatus
  misc_feature: 253
ttttactctcttttttttactcttcttctttttcttacttttttttaccctgattttctctcttttttactttctctcttttcaatttattaaaat

SEQ ID NO: 24917 - DNA, 96 bp, Aspergillus fumigatus
  misc_feature: 253
gataatagaataaagaggatagattaggatattcagagagagaatagagagagaataagaattaatatatagaagaaagagaagaaagagaagaaa

SEQ ID NO: 24918 - DNA, 96 bp, Aspergillus fumigatus
  misc_feature: 253
cgattccctcaacgattccctcaacgattccctcaacgattccctcaacgattccctcaacgattccctcaacgattccctcaacgattccctcaa

SEQ ID NO: 24919 - DNA, 96 bp, Aspergillus fumigatus
  misc_feature: 253
tctttcttctctttcttctctttcttctctttcttctatatattaattcttattctctctctattctctctctgaatatcctaatctatcctcttt

SEQ ID NO: 24920 - DNA, 96 bp, Aspergillus fumigatus
  misc_feature: 253
ataatagaataaagaggatagattaggatattcagagagagaatagagagagaataagaattaatatatagaagaaagagaagaaagagaagaaag

SEQ ID NO: 24921 - DNA, 96 bp, Aspergillus fumigatus
  misc_feature: 253
aatagaataaagaggatagattaggatattcagagagagaatagagagagaataagaattaatatatagaagaaagagaagaaagagaagaaagag

SEQ ID NO: 24922 - DNA, 96 bp, Aspergillus fumigatus
  misc_feature: 252
tttcttctctttcttctctttcttctctttcttctctttcttctatatattaattcttattctctctctattctctctctgaatatcctaatctat

SEQ ID NO: 24923 - DNA, 96 bp, Aspergillus fumigatus
  misc_feature: 252
atagaataaagaggatagattaggatattcagagagagaatagagagagaataagaattaatatatagaagaaagagaagaaagagaagaaagaga

SEQ ID NO: 24924 - DNA, 96 bp, Aspergillus fumigatus
  misc_feature: 252
taatctaatctatatttttccctttcttcttctttttcttcttctttttctccttctttttctccttctttttctccttctttttctccttctttt

SEQ ID NO: 24925 - DNA, 96 bp, Aspergillus fumigatus
  misc_feature: 252
cttctctttcttctctttcttctctttcttctctttcttctatatattaattcttattctctctctattctctctctgaatatcctaatctatcct

SEQ ID NO: 24926 - DNA, 96 bp, Aspergillus fumigatus
  misc_feature: 252
catacacatatatatatatataatcaagtatcaggggaagatatataatattaaggcagctagagaggcgccatgcaaggcaggtagtaagtacgg

SEQ ID NO: 24927 - DNA, 96 bp, Aspergillus fumigatus
  misc_feature: 252
agataaaatggaaagtgaatatatataagtcaatatatatatataaagagacaaaagagatgatgacaggtgaatatatatatatatatatttaat

SEQ ID NO: 24928 - DNA, 96 bp, Aspergillus fumigatus
  misc_feature: 251
gcctctttatatacaaaacaaaaaaaaaaaatgttgttgtttattaaaatttaattgtaattactattgaaatcttatctaaaaaaaaaaataaaa

SEQ ID NO: 24929 - DNA, 96 bp, Aspergillus fumigatus
  misc_feature: 251
agataatagaataaagaggatagattaggatattcagagagagaatagagagagaataagaattaatatatagaagaaagagaagaaagagaagaa

SEQ ID NO: 24930 - DNA, 96 bp, Aspergillus fumigatus
  misc_feature: 251
tagaataaagaggatagattaggatattcagagagagaatagagagagaataagaattaatatatagaagaaagagaagaaagagaagaaagagaa

SEQ ID NO: 24931 - DNA, 96 bp, Aspergillus fumigatus
  misc_feature: 251
ctttcttctctttcttctctttcttctctttcttctctttcttctatatattaattcttattctctctctattctctctctgaatatcctaatcta

SEQ ID NO: 24932 - DNA, 96 bp, Aspergillus fumigatus
  misc_feature: 251
acatacacatatatatatatataatcaagtatcaggggaagatatataatattaaggcagctagagaggcgccatgcaaggcaggtagtaagtacg

SEQ ID NO: 24933 - DNA, 96 bp, Aspergillus fumigatus
  misc_feature: 251
cgcccgcctgcccaccggtcccctccgcgcgcgcggcccatcgctcgctgcggcagggcgcgcgcgcccggcctatatcggccgcgggggctgtgt

SEQ ID NO: 24934 - DNA, 96 bp, Aspergillus fumigatus
  misc_feature: 250
ttcttctctttcttctctttcttctctttcttctctttcttctatatattaattcttattctctctctattctctctctgaatatcctaatctatc

SEQ ID NO: 24935 - DNA, 96 bp, Aspergillus fumigatus
  misc_feature: 250
aatggaaagtgaatatatataagtcaatatatatatataaagagacaaaagagatgatgacaggtgaatatatatatatatatatttaatgtgaga

SEQ ID NO: 24936 - DNA, 96 bp, Aspergillus fumigatus
  misc_feature: 249
tttttactctcttttttttactcttcttctttttcttacttttttttaccctgattttctctcttttttactttctctcttttcaatttattaaaa

SEQ ID NO: 24937 - DNA, 96 bp, Aspergillus fumigatus
  misc_feature: 249
tttcttctctttcttctctttcttctctttcttctatatattaattcttattctctctctattctctctctgaatatcctaatctatcctctttat

SEQ ID NO: 24938 - DNA, 96 bp, Aspergillus fumigatus
  misc_feature: 249
ttctctttcttctctttcttctctttcttctctttcttctatatattaattcttattctctctctattctctctctgaatatcctaatctatcctc

SEQ ID NO: 24939 - DNA, 96 bp, Aspergillus fumigatus
  misc_feature: 249
ctctttcttctctttcttctctttcttctctttcttctatatattaattcttattctctctctattctctctctgaatatcctaatctatcctctt

SEQ ID NO: 24940 - DNA, 96 bp, Aspergillus fumigatus
  misc_feature: 249
aaatggaaagtgaatatatataagtcaatatatatatataaagagacaaaagagatgatgacaggtgaatatatatatatatatatttaatgtgag

SEQ ID NO: 24941 - DNA, 96 bp, Aspergillus fumigatus
  misc_feature: 248
tctttcttctctttcttctctttcttctctttcttctctttcttctatatattaattcttattctctctctattctctctctgaatatcctaatct

SEQ ID NO: 24942 - DNA, 96 bp, Aspergillus fumigatus
  misc_feature: 248
tacatacacatatatatatatataatcaagtatcaggggaagatatataatattaaggcagctagagaggcgccatgcaaggcaggtagtaagtac

SEQ ID NO: 24943 - DNA, 96 bp, Aspergillus fumigatus
  misc_feature: 248
gataaaatggaaagtgaatatatataagtcaatatatatatataaagagacaaaagagatgatgacaggtgaatatatatatatatatatttaatg

SEQ ID NO: 24944 - DNA, 96 bp, Aspergillus fumigatus
  misc_feature: 248
atggaaagtgaatatatataagtcaatatatatatataaagagacaaaagagatgatgacaggtgaatatatatatatatatatttaatgtgagag

SEQ ID NO: 24945 - DNA, 96 bp, Aspergillus fumigatus
  misc_feature: 247
ttctttcttctctttcttctctttcttctctttcttctctttcttctatatattaattcttattctctctctattctctctctgaatatcctaatc

SEQ ID NO: 24946 - DNA, 96 bp, Aspergillus fumigatus
  misc_feature: 247
acgattccctcaacgattccctcaacgattccctcaacgattccctcaacgattccctcaacgattccctcaacgattccctcaacgattccctca

SEQ ID NO: 24947 - DNA, 96 bp, Aspergillus fumigatus
  misc_feature: 247
aaaatggaaagtgaatatatataagtcaatatatatatataaagagacaaaagagatgatgacaggtgaatatatatatatatatatttaatgtga

SEQ ID NO: 24948 - DNA, 96 bp, Aspergillus fumigatus
  misc_feature: 247
tatcaagccaccctgtcagctagatcacctagtccaatattactaatatacatagaacacaagaataagatattcacttactagttctaggccttc

SEQ ID NO: 24949 - DNA, 96 bp, Aspergillus fumigatus
  misc_feature: 246
tctctttcttctctttcttctctttcttctctttcttctatatattaattcttattctctctctattctctctctgaatatcctaatctatcctct

SEQ ID NO: 24950 - DNA, 96 bp, Aspergillus fumigatus
  misc_feature: 245
ttttttactctcttttttttactcttcttctttttcttacttttttttaccctgattttctctcttttttactttctctcttttcaatttattaaa

SEQ ID NO: 24951 - DNA, 96 bp, Aspergillus fumigatus
  misc_feature: 245
cttttttactctcttttttttactcttcttctttttcttacttttttttaccctgattttctctcttttttactttctctcttttcaatttattaa

SEQ ID NO: 24952 - DNA, 96 bp, Aspergillus fumigatus
  misc_feature: 244
ccttttttactctcttttttttactcttcttctttttcttacttttttttaccctgattttctctcttttttactttctctcttttcaatttatta

SEQ ID NO: 24953 - DNA, 96 bp, Aspergillus fumigatus
  misc_feature: 244
taaaatggaaagtgaatatatataagtcaatatatatatataaagagacaaaagagatgatgacaggtgaatatatatatatatatatttaatgtg

SEQ ID NO: 24954 - DNA, 96 bp, Aspergillus fumigatus
  misc_feature: 244
cccttttttactctcttttttttactcttcttctttttcttacttttttttaccctgattttctctcttttttactttctctcttttcaatttatt

SEQ ID NO: 24955 - DNA, 96 bp, Aspergillus fumigatus
  misc_feature: 244
cccgcctgcccaccggtcccctccgcgcgcgcggcccatcgctcgctgcggcagggcgcgcgcgcccggcctatatcggccgcgggggctgtgtgt

SEQ ID NO: 24956 - DNA, 96 bp, Aspergillus fumigatus
  misc_feature: 244
ataaaatggaaagtgaatatatataagtcaatatatatatataaagagacaaaagagatgatgacaggtgaatatatatatatatatatttaatgt

SEQ ID NO: 24957 - DNA, 96 bp, Aspergillus fumigatus
  misc_feature: 243
atcaagccaccctgtcagctagatcacctagtccaatattactaatatacatagaacacaagaataagatattcacttactagttctaggccttca

SEQ ID NO: 24958 - DNA, 96 bp, Aspergillus fumigatus
  misc_feature: 242
aagataatagaataaagaggatagattaggatattcagagagagaatagagagagaataagaattaatatatagaagaaagagaagaaagagaaga

SEQ ID NO: 24959 - DNA, 96 bp, Aspergillus fumigatus
  misc_feature: 242
tcaagccaccctgtcagctagatcacctagtccaatattactaatatacatagaacacaagaataagatattcacttactagttctaggccttcat

SEQ ID NO: 24960 - DNA, 96 bp, Aspergillus fumigatus
  misc_feature: 242
atagattgatagaccattgtttatttttttttttagataagatttcaatagtaattacaattaaattttaataaacaacaacattttttttttttt

SEQ ID NO: 24961 - DNA, 96 bp, Aspergillus fumigatus
  misc_feature: 240
gcctgcccaccggtcccctccgcgcgcgcggcccatcgctcgctgcggcagggcgcgcgcgcccggcctatatcggccgcgggggctgtgtgtctg

SEQ ID NO: 24962 - DNA, 96 bp, Aspergillus fumigatus
  misc_feature: 240
ccgcctgcccaccggtcccctccgcgcgcgcggcccatcgctcgctgcggcagggcgcgcgcgcccggcctatatcggccgcgggggctgtgtgtc

SEQ ID NO: 24963 - DNA, 96 bp, Aspergillus fumigatus
  misc_feature: 240
aaagataatagaataaagaggatagattaggatattcagagagagaatagagagagaataagaattaatatatagaagaaagagaagaaagagaag

SEQ ID NO: 24964 - DNA, 96 bp, Aspergillus fumigatus
  misc_feature: 240
acccttttttactctcttttttttactcttcttctttttcttacttttttttaccctgattttctctcttttttactttctctcttttcaatttat

SEQ ID NO: 24965 - DNA, 96 bp, Aspergillus fumigatus
  misc_feature: 239
ctcaggctagtgctcaggctagtgctcaggctagtgctcaggctagtgctagtgctaggactagggctaatgtgatcatcttctgccgaacaaagc

SEQ ID NO: 24966 - DNA, 96 bp, Aspergillus fumigatus
  misc_feature: 238
aacccttttttactctcttttttttactcttcttctttttcttacttttttttaccctgattttctctcttttttactttctctcttttcaattta

SEQ ID NO: 24967 - DNA, 96 bp, Aspergillus fumigatus
  misc_feature: 237
cctctttatatacaaaacaaaaaaaaaaaatgttgttgtttattaaaatttaattgtaattactattgaaatcttatctaaaaaaaaaaataaaaa

SEQ ID NO: 24968 - DNA, 96 bp, Aspergillus fumigatus
  misc_feature: 237
aaagtgaatatatataagtcaatatatatatataaagagacaaaagagatgatgacaggtgaatatatatatatatatatttaatgtgagagtaaa

SEQ ID NO: 24969 - DNA, 96 bp, Aspergillus fumigatus
  misc_feature: 237
ataaagataatagaataaagaggatagattaggatattcagagagagaatagagagagaataagaattaatatatagaagaaagagaagaaagaga

SEQ ID NO: 24970 - DNA, 96 bp, Aspergillus fumigatus
  misc_feature: 237
cgcctgcccaccggtcccctccgcgcgcgcggcccatcgctcgctgcggcagggcgcgcgcgcccggcctatatcggccgcgggggctgtgtgtct

SEQ ID NO: 24971 - DNA, 96 bp, Aspergillus fumigatus
  misc_feature: 236
taaagataatagaataaagaggatagattaggatattcagagagagaatagagagagaataagaattaatatatagaagaaagagaagaaagagaa

SEQ ID NO: 24972 - DNA, 96 bp, Aspergillus fumigatus
  misc_feature: 236
gaaagtgaatatatataagtcaatatatatatataaagagacaaaagagatgatgacaggtgaatatatatatatatatatttaatgtgagagtaa

SEQ ID NO: 24973 - DNA, 96 bp, Aspergillus fumigatus
  misc_feature: 236
agtgctcaggctagtgctcaggctagtgctcaggctagtgctcaggctagtgctagtgctaggactagggctaatgtgatcatcttctgccgaaca

SEQ ID NO: 24974 - DNA, 96 bp, Aspergillus fumigatus
  misc_feature: 236
tggaaagtgaatatatataagtcaatatatatatataaagagacaaaagagatgatgacaggtgaatatatatatatatatatttaatgtgagagt

SEQ ID NO: 24975 - DNA, 96 bp, Aspergillus fumigatus
  misc_feature: 236
tatatattttttttgcaaatataaattcatatataatatgaaaaaaaaaaaattaaaaataaaaaaatataaatataaaaataattctttttttta

SEQ ID NO: 24976 - DNA, 96 bp, Aspergillus fumigatus
  misc_feature: 236
agaataaagaggatagattaggatattcagagagagaatagagagaggataagaattaatatatagaagaaagagaagaaagagaagaaagaagat

SEQ ID NO: 24977 - DNA, 96 bp, Aspergillus fumigatus
  misc_feature: 235
gtgctcaggctagtgctcaggctagtgctcaggctagtgctcaggctagtgctagtgctaggactagggctaatgtgatcatcttctgccgaacaa

SEQ ID NO: 24978 - DNA, 96 bp, Aspergillus fumigatus
  misc_feature: 235
agaaaagagagaaaattataaagataatagaataaagaggatagattaggatattcagagagagaatagagagagaataagaattaatatatagaa

SEQ ID NO: 24979 - DNA, 96 bp, Aspergillus fumigatus
  misc_feature: 235
taacccttttttactctcttttttttactcttcttctttttcttacttttttttaccctgattttctctcttttttactttctctcttttcaattt

SEQ ID NO: 24980 - DNA, 96 bp, Aspergillus fumigatus
  misc_feature: 235
gctcaggctagtgctcaggctagtgctcaggctagtgctcaggctagtgctagtgctaggactagggctaatgtgatcatcttctgccgaacaaag

SEQ ID NO: 24981 - DNA, 96 bp, Aspergillus fumigatus
  misc_feature: 234
tataaagataatagaataaagaggatagattaggatattcagagagagaatagagagagaataagaattaatatatagaagaaagagaagaaagag

SEQ ID NO: 24982 - DNA, 96 bp, Aspergillus fumigatus
  misc_feature: 234
ggaaagtgaatatatataagtcaatatatatatataaagagacaaaagagatgatgacaggtgaatatatatatatatatatttaatgtgagagta

SEQ ID NO: 24983 - DNA, 96 bp, Aspergillus fumigatus
  misc_feature: 234
gaaaattataaagataatagaataaagaggatagattaggatattcagagagagaatagagagagaataagaattaatatatagaagaaagagaag

SEQ ID NO: 24984 - DNA, 96 bp, Aspergillus fumigatus
  misc_feature: 234
ataaagaggatagattaggatattcagagagagaatagagagaggataagaattaatatatagaagaaagagaagaaagagaagaaagaagataat

SEQ ID NO: 24985 - DNA, 96 bp, Aspergillus fumigatus
  misc_feature: 233
aagtgaatatatataagtcaatatatatatataaagagacaaaagagatgatgacaggtgaatatatatatatatatatttaatgtgagagtaaaa

SEQ ID NO: 24986 - DNA, 96 bp, Aspergillus fumigatus
  misc_feature: 233
tgctcaggctagtgctcaggctagtgctcaggctagtgctcaggctagtgctagtgctaggactagggctaatgtgatcatcttctgccgaacaaa

SEQ ID NO: 24987 - DNA, 96 bp, Aspergillus fumigatus
  misc_feature: 233
aataaagaggatagattaggatattcagagagagaatagagagaggataagaattaatatatagaagaaagagaagaaagagaagaaagaagataa

SEQ ID NO: 24988 - DNA, 96 bp, Aspergillus fumigatus
  misc_feature: 233
ttaacccttttttactctcttttttttactcttcttctttttcttacttttttttaccctgattttctctcttttttactttctctcttttcaatt

SEQ ID NO: 24989 - DNA, 96 bp, Aspergillus fumigatus
  misc_feature: 233
gtgaatatatataagtcaatatatatatataaagagacaaaagagatgatgacaggtgaatatatatatatatatatttaatgtgagagtaaaaga

SEQ ID NO: 24990 - DNA, 96 bp, Aspergillus fumigatus
  misc_feature: 233
gaataaagaggatagattaggatattcagagagagaatagagagaggataagaattaatatatagaagaaagagaagaaagagaagaaagaagata

SEQ ID NO: 24991 - DNA, 96 bp, Aspergillus fumigatus
  misc_feature: 232
ctctttatatacaaaacaaaaaaaaaaaatgttgttgtttattaaaatttaattgtaattactattgaaatcttatctaaaaaaaaaaataaaaaa

SEQ ID NO: 24992 - DNA, 96 bp, Aspergillus fumigatus
  misc_feature: 232
agaaaattataaagataatagaataaagaggatagattaggatattcagagagagaatagagagagaataagaattaatatatagaagaaagagaa

SEQ ID NO: 24993 - DNA, 96 bp, Aspergillus fumigatus
  misc_feature: 232
aggtataattggtgaatggttgatgtcccaggctgatctggtgaatggaccctagaccgctggatagaaggtccaggggttgaaccaatcagggaa

SEQ ID NO: 24994 - DNA, 96 bp, Aspergillus fumigatus
  misc_feature: 232
tagaataaagaggatagattaggatattcagagagagaatagagagaggataagaattaatatatagaagaaagagaagaaagagaagaaagaaga

SEQ ID NO: 24995 - DNA, 96 bp, Aspergillus fumigatus
  misc_feature: 232
aaaagagagaaaattataaagataatagaataaagaggatagattaggatattcagagagagaatagagagagaataagaattaatatatagaaga

SEQ ID NO: 24996 - DNA, 96 bp, Aspergillus fumigatus
  misc_feature: 232
atataagtcaatatatatatataaagagacaaaagagatgatgacaggtgaatatatatatatatatatttaatgtgagagtaaaagataagatga

SEQ ID NO: 24997 - DNA, 96 bp, Aspergillus fumigatus
  misc_feature: 232
agtgaatatatataagtcaatatatatatataaagagacaaaagagatgatgacaggtgaatatatatatatatatatttaatgtgagagtaaaag

SEQ ID NO: 24998 - DNA, 96 bp, Aspergillus fumigatus
  misc_feature: 232
ataatagaataaagaggatagattaggatattcagagagagaatagagagaggataagaattaatatatagaagaaagagaagaaagagaagaaag

SEQ ID NO: 24999 - DNA, 96 bp, Aspergillus fumigatus
  misc_feature: 231
gataatagaataaagaggatagattaggatattcagagagagaatagagagaggataagaattaatatatagaagaaagagaagaaagagaagaaa

SEQ ID NO: 25000 - DNA, 96 bp, Aspergillus fumigatus
  misc_feature: 231
gatttagaaggataataataagaaaagagagaaaattataaagataatagaataaagaggatagattaggatattcagagagagaatagagagaga

SEQ ID NO: 25001 - DNA, 96 bp, Aspergillus fumigatus
  misc_feature: 231
aagaaaagagagaaaattataaagataatagaataaagaggatagattaggatattcagagagagaatagagagagaataagaattaatatataga

SEQ ID NO: 25002 - DNA, 96 bp, Aspergillus fumigatus
  misc_feature: 230
ttataaagataatagaataaagaggatagattaggatattcagagagagaatagagagagaataagaattaatatatagaagaaagagaagaaaga

SEQ ID NO: 25003 - DNA, 96 bp, Aspergillus fumigatus
  misc_feature: 230
aaaattataaagataatagaataaagaggatagattaggatattcagagagagaatagagagagaataagaattaatatatagaagaaagagaaga

SEQ ID NO: 25004 - DNA, 96 bp, Aspergillus fumigatus
  misc_feature: 230
gaaaagagagaaaattataaagataatagaataaagaggatagattaggatattcagagagagaatagagagagaataagaattaatatatagaag

SEQ ID NO: 25005 - DNA, 96 bp, Aspergillus fumigatus
  misc_feature: 230
attataaagataatagaataaagaggatagattaggatattcagagagagaatagagagagaataagaattaatatatagaagaaagagaagaaag

SEQ ID NO: 25006 - DNA, 96 bp, Aspergillus fumigatus
  misc_feature: 230
atagaataaagaggatagattaggatattcagagagagaatagagagaggataagaattaatatatagaagaaagagaagaaagagaagaaagaag

SEQ ID NO: 25007 - DNA, 96 bp, Aspergillus fumigatus
  misc_feature: 230
ctagctaggtatatactaatatattaattactagacctaaaactactatacctactactaatctaccctatcttataaagtctactaagaagtact

SEQ ID NO: 25008 - DNA, 96 bp, Aspergillus fumigatus
  misc_feature: 230
agctaggtatatactaatatattaattactagacctaaaactactatacctactactaatctaccctatcttataaagtctactaagaagtactat

SEQ ID NO: 25009 - DNA, 96 bp, Aspergillus fumigatus
  misc_feature: 229
taaagataatagaataaagaggatagattaggatattcagagagagaatagagagaggataagaattaatatatagaagaaagagaagaaagagaa

SEQ ID NO: 25010 - DNA, 96 bp, Aspergillus fumigatus
  misc_feature: 229
gagagaaaattataaagataatagaataaagaggatagattaggatattcagagagagaatagagagagaataagaattaatatatagaagaaaga

SEQ ID NO: 25011 - DNA, 96 bp, Aspergillus fumigatus
  misc_feature: 229
ggttaggttagtataagaatattagtataagtaatggtttaggtagatatgcatacatacacatatatatatatataatcaagtatcaggggaaga

SEQ ID NO: 25012 - DNA, 96 bp, Aspergillus fumigatus
  misc_feature: 229
ataaagataatagaataaagaggatagattaggatattcagagagagaatagagagaggataagaattaatatatagaagaaagagaagaaagaga

SEQ ID NO: 25013 - DNA, 96 bp, Aspergillus fumigatus
  misc_feature: 229
gagaaaattataaagataatagaataaagaggatagattaggatattcagagagagaatagagagagaataagaattaatatatagaagaaagaga

SEQ ID NO: 25014 - DNA, 96 bp, Aspergillus fumigatus
  misc_feature: 229
tactcttactcttaacccttttttactctcttttttttactcttcttctttttcttacttttttttaccctgattttctctcttttttactttctc

SEQ ID NO: 25015 - DNA, 96 bp, Aspergillus fumigatus
  misc_feature: 229
taagaaaagagagaaaattataaagataatagaataaagaggatagattaggatattcagagagagaatagagagagaataagaattaatatatag

SEQ ID NO: 25016 - DNA, 96 bp, Aspergillus fumigatus
  misc_feature: 229
cttaacccttttttactctcttttttttactcttcttctttttcttacttttttttaccctgattttctctcttttttactttctctcttttcaat

SEQ ID NO: 25017 - DNA, 96 bp, Aspergillus fumigatus
  misc_feature: 228
aatagaataaagaggatagattaggatattcagagagagaatagagagaggataagaattaatatatagaagaaagagaagaaagagaagaaagaa

SEQ ID NO: 25018 - DNA, 96 bp, Aspergillus fumigatus
  misc_feature: 228
aaattataaagataatagaataaagaggatagattaggatattcagagagagaatagagagagaataagaattaatatatagaagaaagagaagaa

SEQ ID NO: 25019 - DNA, 96 bp, Aspergillus fumigatus
  misc_feature: 228
ttagaaggataataataagaaaagagagaaaattataaagataatagaataaagaggatagattaggatattcagagagagaatagagagagaata

SEQ ID NO: 25020 - DNA, 96 bp, Aspergillus fumigatus
  misc_feature: 228
ttactcttactcttaacccttttttactctcttttttttactcttcttctttttcttacttttttttaccctgattttctctcttttttactttct

SEQ ID NO: 25021 - DNA, 96 bp, Aspergillus fumigatus
  misc_feature: 228
tcttactcttaacccttttttactctcttttttttactcttcttctttttcttacttttttttaccctgattttctctcttttttactttctctct

SEQ ID NO: 25022 - DNA, 96 bp, Aspergillus fumigatus
  misc_feature: 228
taaagaggatagattaggatattcagagagagaatagagagaggataagaattaatatatagaagaaagagaagaaagagaagaaagaagataata

SEQ ID NO: 25023 - DNA, 96 bp, Aspergillus fumigatus
  misc_feature: 228
ataagaaaagagagaaaattataaagataatagaataaagaggatagattaggatattcagagagagaatagagagagaataagaattaatatata

SEQ ID NO: 25024 - DNA, 96 bp, Aspergillus fumigatus
  misc_feature: 228
tagctaggtatatactaatatattaattactagacctaaaactactatacctactactaatctaccctatcttataaagtctactaagaagtacta

SEQ ID NO: 25025 - DNA, 96 bp, Aspergillus fumigatus
  misc_feature: 228
tagattgatagaccattgtttatttttttttttagataagatttcaatagtaattacaattaaattttaataaacaacaacatttttttttttttt

SEQ ID NO: 25026 - DNA, 96 bp, Aspergillus fumigatus
  misc_feature: 228
gttaggttagtataagaatattagtataagtaatggtttaggtagatatgcatacatacacatatatatatatataatcaagtatcaggggaagat

SEQ ID NO: 25027 - DNA, 96 bp, Aspergillus fumigatus
  misc_feature: 228
agagagaaaattataaagataatagaataaagaggatagattaggatattcagagagagaatagagagagaataagaattaatatatagaagaaag

SEQ ID NO: 25028 - DNA, 96 bp, Aspergillus fumigatus
  misc_feature: 228
aataagaaaagagagaaaattataaagataatagaataaagaggatagattaggatattcagagagagaatagagagagaataagaattaatatat

SEQ ID NO: 25029 - DNA, 96 bp, Aspergillus fumigatus
  misc_feature: 227
aattataaagataatagaataaagaggatagattaggatattcagagagagaatagagagagaataagaattaatatatagaagaaagagaagaaa

SEQ ID NO: 25030 - DNA, 96 bp, Aspergillus fumigatus
  misc_feature: 227
aattataaagataatagaataaagaggatagattaggatattcagagagagaatagagagaggataagaattaatatatagaagaaagagaagaaa

SEQ ID NO: 25031 - DNA, 96 bp, Aspergillus fumigatus
  misc_feature: 227
tcttaacccttttttactctcttttttttactcttcttctttttcttacttttttttaccctgattttctctcttttttactttctctcttttcaa

SEQ ID NO: 25032 - DNA, 96 bp, Aspergillus fumigatus
  misc_feature: 227
aaattataaagataatagaataaagaggatagattaggatattcagagagagaatagagagaggataagaattaatatatagaagaaagagaagaa

SEQ ID NO: 25033 - DNA, 96 bp, Aspergillus fumigatus
  misc_feature: 227
aaaattataaagataatagaataaagaggatagattaggatattcagagagagaatagagagaggataagaattaatatatagaagaaagagaaga

SEQ ID NO: 25034 - DNA, 96 bp, Aspergillus fumigatus
  misc_feature: 227
tataaagataatagaataaagaggatagattaggatattcagagagagaatagagagaggataagaattaatatatagaagaaagagaagaaagag

SEQ ID NO: 25035 - DNA, 96 bp, Aspergillus fumigatus
  misc_feature: 227
actagctaggtatatactaatatattaattactagacctaaaactactatacctactactaatctaccctatcttataaagtctactaagaagtac

SEQ ID NO: 25036 - DNA, 96 bp, Aspergillus fumigatus
  misc_feature: 227
aggttaggttagtataagaatattagtataagtaatggtttaggtagatatgcatacatacacatatatatatatataatcaagtatcaggggaag

SEQ ID NO: 25037 - DNA, 96 bp, Aspergillus fumigatus
  misc_feature: 227
agagaaaattataaagataatagaataaagaggatagattaggatattcagagagagaatagagagaggataagaattaatatatagaagaaagag

SEQ ID NO: 25038 - DNA, 96 bp, Aspergillus fumigatus
  misc_feature: 227
cctgcccaccggtcccctccgcgcgcgcggcccatcgctcgctgcggcagggcgcgcgcgcccggcctatatcggccgcgggggctgtgtgtctgt

SEQ ID NO: 25039 - DNA, 96 bp, Aspergillus fumigatus
  misc_feature: 227
aggataataataagaaaagagagaaaattataaagataatagaataaagaggatagattaggatattcagagagagaatagagagagaataagaat

SEQ ID NO: 25040 - DNA, 96 bp, Aspergillus fumigatus
  misc_feature: 226
aagagagaaaattataaagataatagaataaagaggatagattaggatattcagagagagaatagagagagaataagaattaatatatagaagaaa

SEQ ID NO: 25041 - DNA, 96 bp, Aspergillus fumigatus
  misc_feature: 226
tttagaaggataataataagaaaagagagaaaattataaagataatagaataaagaggatagattaggatattcagagagagaatagagagagaat

SEQ ID NO: 25042 - DNA, 96 bp, Aspergillus fumigatus
  misc_feature: 226
agataatagaataaagaggatagattaggatattcagagagagaatagagagaggataagaattaatatatagaagaaagagaagaaagagaagaa

SEQ ID NO: 25043 - DNA, 96 bp, Aspergillus fumigatus
  misc_feature: 226
aaagagagaaaattataaagataatagaataaagaggatagattaggatattcagagagagaatagagagagaataagaattaatatatagaagaa

SEQ ID NO: 25044 - DNA, 96 bp, Aspergillus fumigatus
  misc_feature: 226
aaggataataataagaaaagagagaaaattataaagataatagaataaagaggatagattaggatattcagagagagaatagagagagaataagaa

SEQ ID NO: 25045 - DNA, 96 bp, Aspergillus fumigatus
  misc_feature: 226
aaagaggatagattaggatattcagagagagaatagagagaggataagaattaatatatagaagaaagagaagaaagagaagaaagaagataataa

SEQ ID NO: 25046 - DNA, 96 bp, Aspergillus fumigatus
  misc_feature: 226
tgaatatatataagtcaatatatatatataaagagacaaaagagatgatgacaggtgaatatatatatatatatatttaatgtgagagtaaaagat

SEQ ID NO: 25047 - DNA, 96 bp, Aspergillus fumigatus
  misc_feature: 226
ctcttaacccttttttactctcttttttttactcttcttctttttcttacttttttttaccctgattttctctcttttttactttctctcttttca

SEQ ID NO: 25048 - DNA, 96 bp, Aspergillus fumigatus
  misc_feature: 226
taatagaataaagaggatagattaggatattcagagagagaatagagagaggataagaattaatatatagaagaaagagaagaaagagaagaaaga

SEQ ID NO: 25049 - DNA, 96 bp, Aspergillus fumigatus
  misc_feature: 226
acctagtagggatagtagatatatatatatattagtctactagatagaggtaaggtataagagaaatatatatatttagaaagtcagagagaggta

SEQ ID NO: 25050 - DNA, 96 bp, Aspergillus fumigatus
  misc_feature: 226
ccttccctgattggttcaacccctggaccttctatccagcggtctagggtccattcaccagatcagcctgggacatcaaccattcaccaattatac

SEQ ID NO: 25051 - DNA, 96 bp, Aspergillus fumigatus
  misc_feature: 226
ggtatatactaatatattaattactagacctaaaactactatacctactactaatctaccctatcttataaagtctactaagaagtactatatctg

SEQ ID NO: 25052 - DNA, 96 bp, Aspergillus fumigatus
  misc_feature: 226
cttccctgattggttcaacccctggaccttctatccagcggtctagggtccattcaccagatcagcctgggacatcaaccattcaccaattatacc

SEQ ID NO: 25053 - DNA, 96 bp, Aspergillus fumigatus
  misc_feature: 226
ctcttactcttaacccttttttactctcttttttttactcttcttctttttcttacttttttttaccctgattttctctcttttttactttctctc

SEQ ID NO: 25054 - DNA, 96 bp, Aspergillus fumigatus
  misc_feature: 226
ctgcccaccggtcccctccgcgcgcgcggcccatcgctcgctgcggcagggcgcgcgcgcccggcctatatcggccgcgggggctgtgtgtctgtc

SEQ ID NO: 25055 - DNA, 96 bp, Aspergillus fumigatus
  misc_feature: 226
atatataagtcaatatatatatataaagagacaaaagagatgatgacaggtgaatatatatatatatatatttaatgtgagagtaaaagataagat

SEQ ID NO: 25056 - DNA, 96 bp, Aspergillus fumigatus
  misc_feature: 225
aagaggatagattaggatattcagagagagaatagagagaggataagaattaatatatagaagaaagagaagaaagagaagaaagaagataataaa

SEQ ID NO: 25057 - DNA, 96 bp, Aspergillus fumigatus
  misc_feature: 225
tagaaggataataataagaaaagagagaaaattataaagataatagaataaagaggatagattaggatattcagagagagaatagagagagaataa

SEQ ID NO: 25058 - DNA, 96 bp, Aspergillus fumigatus
  misc_feature: 225
cctagtagggatagtagatatatatatatattagtctactagatagaggtaaggtataagagaaatatatatatttagaaagtcagagagaggtaa

SEQ ID NO: 25059 - DNA, 96 bp, Aspergillus fumigatus
  misc_feature: 225
gaatatatataagtcaatatatatatataaagagacaaaagagatgatgacaggtgaatatatatatatatatatttaatgtgagagtaaaagata

SEQ ID NO: 25060 - DNA, 96 bp, Aspergillus fumigatus
  misc_feature: 225
taataagaaaagagagaaaattataaagataatagaataaagaggatagattaggatattcagagagagaatagagagagaataagaattaatata

SEQ ID NO: 25061 - DNA, 96 bp, Aspergillus fumigatus
  misc_feature: 225
agaaggataataataagaaaagagagaaaattataaagataatagaataaagaggatagattaggatattcagagagagaatagagagagaataag

SEQ ID NO: 25062 - DNA, 96 bp, Aspergillus fumigatus
  misc_feature: 225
ctaggtatatactaatatattaattactagacctaaaactactatacctactactaatctaccctatcttataaagtctactaagaagtactatat

SEQ ID NO: 25063 - DNA, 96 bp, Aspergillus fumigatus
  misc_feature: 225
actcttactcttaacccttttttactctcttttttttactcttcttctttttcttacttttttttaccctgattttctctcttttttactttctct

SEQ ID NO: 25064 - DNA, 96 bp, Aspergillus fumigatus
  misc_feature: 224
agaggatagattaggatattcagagagagaatagagagaggataagaattaatatatagaagaaagagaagaaagagaagaaagaagataataaaa

SEQ ID NO: 25065 - DNA, 96 bp, Aspergillus fumigatus
  misc_feature: 224
agaaaattataaagataatagaataaagaggatagattaggatattcagagagagaatagagagaggataagaattaatatatagaagaaagagaa

SEQ ID NO: 25066 - DNA, 96 bp, Aspergillus fumigatus
  misc_feature: 224
atttagaaggataataataagaaaagagagaaaattataaagataatagaataaagaggatagattaggatattcagagagagaatagagagagaa

SEQ ID NO: 25067 - DNA, 96 bp, Aspergillus fumigatus
  misc_feature: 224
ttataaagataatagaataaagaggatagattaggatattcagagagagaatagagagaggataagaattaatatatagaagaaagagaagaaaga

SEQ ID NO: 25068 - DNA, 96 bp, Aspergillus fumigatus
  misc_feature: 224
gaaggataataataagaaaagagagaaaattataaagataatagaataaagaggatagattaggatattcagagagagaatagagagagaataaga

SEQ ID NO: 25069 - DNA, 96 bp, Aspergillus fumigatus
  misc_feature: 224
tatatataagtcaatatatatatataaagagacaaaagagatgatgacaggtgaatatatatatatatatatttaatgtgagagtaaaagataaga

SEQ ID NO: 25070 - DNA, 96 bp, Aspergillus fumigatus
  misc_feature: 224
taggtatatactaatatattaattactagacctaaaactactatacctactactaatctaccctatcttataaagtctactaagaagtactatatc

SEQ ID NO: 25071 - DNA, 96 bp, Aspergillus fumigatus
  misc_feature: 224
gaggatagattaggatattcagagagagaatagagagaggataagaattaatatatagaagaaagagaagaaagagaagaaagaagataataaaag

SEQ ID NO: 25072 - DNA, 96 bp, Aspergillus fumigatus
  misc_feature: 224
cttactcttactcttaacccttttttactctcttttttttactcttcttctttttcttacttttttttaccctgattttctctcttttttactttc

SEQ ID NO: 25073 - DNA, 96 bp, Aspergillus fumigatus
  misc_feature: 224
gaaaattataaagataatagaataaagaggatagattaggatattcagagagagaatagagagaggataagaattaatatatagaagaaagagaag

SEQ ID NO: 25074 - DNA, 96 bp, Aspergillus fumigatus
  misc_feature: 224
agagaaaattataaagataatagaataaagaggatagattaggatattcagagagagaatagagagagaataagaattaatatatagaagaaagag

SEQ ID NO: 25075 - DNA, 96 bp, Aspergillus fumigatus
  misc_feature: 224
aggtatatactaatatattaattactagacctaaaactactatacctactactaatctaccctatcttataaagtctactaagaagtactatatct

SEQ ID NO: 25076 - DNA, 96 bp, Aspergillus fumigatus
  misc_feature: 223
ctagtagggatagtagatatatatatatattagtctactagatagaggtaaggtataagagaaatatatatatttagaaagtcagagagaggtaaa

SEQ ID NO: 25077 - DNA, 96 bp, Aspergillus fumigatus
  misc_feature: 223
ttactcttaacccttttttactctcttttttttactcttcttctttttcttacttttttttaccctgattttctctcttttttactttctctcttt

SEQ ID NO: 25078 - DNA, 96 bp, Aspergillus fumigatus
  misc_feature: 223
aagataatagaataaagaggatagattaggatattcagagagagaatagagagaggataagaattaatatatagaagaaagagaagaaagagaaga

SEQ ID NO: 25079 - DNA, 96 bp, Aspergillus fumigatus
  misc_feature: 223
gagaaaattataaagataatagaataaagaggatagattaggatattcagagagagaatagagagaggataagaattaatatatagaagaaagaga

SEQ ID NO: 25080 - DNA, 96 bp, Aspergillus fumigatus
  misc_feature: 223
tatataagtcaatatatatatataaagagacaaaagagatgatgacaggtgaatatatatatatatatatttaatgtgagagtaaaagataagatg

SEQ ID NO: 25081 - DNA, 96 bp, Aspergillus fumigatus
  misc_feature: 223
tactagctaggtatatactaatatattaattactagacctaaaactactatacctactactaatctaccctatcttataaagtctactaagaagta

SEQ ID NO: 25082 - DNA, 96 bp, Aspergillus fumigatus
  misc_feature: 223
gggactagctatctctttagggtaaaccctccagccacgatgcctaatcaggcatccactagcaccctggctagccgaaaacgaactagggaacct

SEQ ID NO: 25083 - DNA, 96 bp, Aspergillus fumigatus
  misc_feature: 223
ggactagctatctctttagggtaaaccctccagccacgatgcctaatcaggcatccactagcaccctggctagccgaaaacgaactagggaacctt

SEQ ID NO: 25084 - DNA, 96 bp, Aspergillus fumigatus
  misc_feature: 223
gacctagtagggatagtagatatatatatatattagtctactagatagaggtaaggtataagagaaatatatatatttagaaagtcagagagaggt

SEQ ID NO: 25085 - DNA, 96 bp, Aspergillus fumigatus
  misc_feature: 223
attataaagataatagaataaagaggatagattaggatattcagagagagaatagagagaggataagaattaatatatagaagaaagagaagaaag

SEQ ID NO: 25086 - DNA, 96 bp, Aspergillus fumigatus
  misc_feature: 223
aaagataatagaataaagaggatagattaggatattcagagagagaatagagagaggataagaattaatatatagaagaaagagaagaaagagaag

SEQ ID NO: 25087 - DNA, 96 bp, Aspergillus fumigatus
  misc_feature: 222
aatatatataagtcaatatatatatataaagagacaaaagagatgatgacaggtgaatatatatatatatatatttaatgtgagagtaaaagataa

SEQ ID NO: 25088 - DNA, 96 bp, Aspergillus fumigatus
  misc_feature: 222
gagagaaaattataaagataatagaataaagaggatagattaggatattcagagagagaatagagagaggataagaattaatatatagaagaaaga

SEQ ID NO: 25089 - DNA, 96 bp, Aspergillus fumigatus
  misc_feature: 222
ggataataataagaaaagagagaaaattataaagataatagaataaagaggatagattaggatattcagagagagaatagagagagaataagaatt

SEQ ID NO: 25090 - DNA, 96 bp, Aspergillus fumigatus
  misc_feature: 222
atatactaatatattaattactagacctaaaactactatacctactactaatctaccctatcttataaagtctactaagaagtactatatctgctc

SEQ ID NO: 25091 - DNA, 96 bp, Aspergillus fumigatus
  misc_feature: 222
actcttaacccttttttactctcttttttttactcttcttctttttcttacttttttttaccctgattttctctcttttttactttctctcttttc

SEQ ID NO: 25092 - DNA, 96 bp, Aspergillus fumigatus
  misc_feature: 222
agtagggatagtagatatatatatatattagtctactagatagaggtaaggtataagagaaatatatatatttagaaagtcagagagaggtaaaag

SEQ ID NO: 25093 - DNA, 96 bp, Aspergillus fumigatus
  misc_feature: 222
atatatataagtcaatatatatatataaagagacaaaagagatgatgacaggtgaatatatatatatatatatttaatgtgagagtaaaagataag

SEQ ID NO: 25094 - DNA, 96 bp, Aspergillus fumigatus
  misc_feature: 222
agacctagtagggatagtagatatatatatatattagtctactagatagaggtaaggtataagagaaatatatatatttagaaagtcagagagagg

SEQ ID NO: 25095 - DNA, 96 bp, Aspergillus fumigatus
  misc_feature: 222
ataataagaaaagagagaaaattataaagataatagaataaagaggatagattaggatattcagagagagaatagagagagaataagaattaatat

SEQ ID NO: 25096 - DNA, 96 bp, Aspergillus fumigatus
  misc_feature: 221
tagtagggatagtagatatatatatatattagtctactagatagaggtaaggtataagagaaatatatatatttagaaagtcagagagaggtaaaa

SEQ ID NO: 25097 - DNA, 96 bp, Aspergillus fumigatus
  misc_feature: 221
ttctatatattaattcttatcctctctctattctctctctgaatatcctaatctatcctctttattctattatctttataattttctctcttttct

SEQ ID NO: 25098 - DNA, 96 bp, Aspergillus fumigatus
  misc_feature: 221
ttaggatattcagagagagaatagagagaggataagaattaatatatagaagaaagagaagaaagagaagaaagaagataataaaagaaaggataa

SEQ ID NO: 25099 - DNA, 96 bp, Aspergillus fumigatus
  misc_feature: 221
ttactagctaggtatatactaatatattaattactagacctaaaactactatacctactactaatctaccctatcttataaagtctactaagaagt

SEQ ID NO: 25100 - DNA, 96 bp, Aspergillus fumigatus
  misc_feature: 221
tatatactaatatattaattactagacctaaaactactatacctactactaatctaccctatcttataaagtctactaagaagtactatatctgct

SEQ ID NO: 25101 - DNA, 96 bp, Aspergillus fumigatus
  misc_feature: 221
tagacctagtagggatagtagatatatatatatattagtctactagatagaggtaaggtataagagaaatatatatatttagaaagtcagagagag

SEQ ID NO: 25102 - DNA, 96 bp, Aspergillus fumigatus
  misc_feature: 220
ttcttctatatattaattcttatcctctctctattctctctctgaatatcctaatctatcctctttattctattatctttataattttctctcttt

SEQ ID NO: 25103 - DNA, 96 bp, Aspergillus fumigatus
  misc_feature: 220
tattactagctaggtatatactaatatattaattactagacctaaaactactatacctactactaatctaccctatcttataaagtctactaagaa

SEQ ID NO: 25104 - DNA, 96 bp, Aspergillus fumigatus
  misc_feature: 220
aggatagattaggatattcagagagagaatagagagaggataagaattaatatatagaagaaagagaagaaagagaagaaagaagataataaaaga

SEQ ID NO: 25105 - DNA, 96 bp, Aspergillus fumigatus
  misc_feature: 220
tcttctatatattaattcttatcctctctctattctctctctgaatatcctaatctatcctctttattctattatctttataattttctctctttt

SEQ ID NO: 25106 - DNA, 96 bp, Aspergillus fumigatus
  misc_feature: 220
atagacctagtagggatagtagatatatatatatattagtctactagatagaggtaaggtataagagaaatatatatatttagaaagtcagagaga

SEQ ID NO: 25107 - DNA, 96 bp, Aspergillus fumigatus
  misc_feature: 220
tatactaatatattaattactagacctaaaactactatacctactactaatctaccctatcttataaagtctactaagaagtactatatctgctcc

SEQ ID NO: 25108 - DNA, 96 bp, Aspergillus fumigatus
  misc_feature: 220
tagtaggtatagtagttttaggtctagtaattaatatattagtatatacctagctagtaatattcttatactattaacttatataacttatacttt

SEQ ID NO: 25109 - DNA, 96 bp, Aspergillus fumigatus
  misc_feature: 220
tactaatatattaattactagacctaaaactactatacctactactaatctaccctatcttataaagtctactaagaagtactatatctgctccta

SEQ ID NO: 25110 - DNA, 96 bp, Aspergillus fumigatus
  misc_feature: 220
tagattaggatattcagagagagaatagagagaggataagaattaatatatagaagaaagagaagaaagagaagaaagaagataataaaagaaagg

SEQ ID NO: 25111 - DNA, 96 bp, Aspergillus fumigatus
  misc_feature: 220
tactcttaacccttttttactctcttttttttactcttcttctttttcttacttttttttaccctgattttctctcttttttactttctctctttt

SEQ ID NO: 25112 - DNA, 96 bp, Aspergillus fumigatus
  misc_feature: 220
gactagctatctctttagggtaaaccctccagccacgatgcctaatcaggcatccactagcaccctggctagccgaaaacgaactagggaaccttc

SEQ ID NO: 25113 - DNA, 96 bp, Aspergillus fumigatus
  misc_feature: 220
agagagaaaattataaagataatagaataaagaggatagattaggatattcagagagagaatagagagaggataagaattaatatatagaagaaag

SEQ ID NO: 25114 - DNA, 96 bp, Aspergillus fumigatus
  misc_feature: 220
cttactcttaacccttttttactctcttttttttactcttcttctttttcttacttttttttaccctgattttctctcttttttactttctctctt

SEQ ID NO: 25115 - DNA, 96 bp, Aspergillus fumigatus
  misc_feature: 220
atactaatatattaattactagacctaaaactactatacctactactaatctaccctatcttataaagtctactaagaagtactatatctgctcct

SEQ ID NO: 25116 - DNA, 96 bp, Aspergillus fumigatus
  misc_feature: 219
tgctgcctgctgtgctgcctgctgttctgcctatcttatatataacctctctggggccttataacctgcttcactaccgtacttactacctgcctt

SEQ ID NO: 25117 - DNA, 96 bp, Aspergillus fumigatus
  misc_feature: 219
tctttttctccttctttttctccttctttttctccttctttttctccttctttttctccttctttttctccttctttttcttcttatcttccttct

SEQ ID NO: 25118 - DNA, 96 bp, Aspergillus fumigatus
  misc_feature: 219
atattactagctaggtatatactaatatattaattactagacctaaaactactatacctactactaatctaccctatcttataaagtctactaaga

SEQ ID NO: 25119 - DNA, 96 bp, Aspergillus fumigatus
  misc_feature: 219
agattaggatattcagagagagaatagagagaggataagaattaatatatagaagaaagagaagaaagagaagaaagaagataataaaagaaagga

SEQ ID NO: 25120 - DNA, 96 bp, Aspergillus fumigatus
  misc_feature: 219
aataataagaaaagagagaaaattataaagataatagaataaagaggatagattaggatattcagagagagaatagagagagaataagaattaata

SEQ ID NO: 25121 - DNA, 96 bp, Aspergillus fumigatus
  misc_feature: 219
gataataataagaaaagagagaaaattataaagataatagaataaagaggatagattaggatattcagagagagaatagagagagaataagaatta

SEQ ID NO: 25122 - DNA, 96 bp, Aspergillus fumigatus
  misc_feature: 219
gattaggatattcagagagagaatagagagaggataagaattaatatatagaagaaagagaagaaagagaagaaagaagataataaaagaaaggat

SEQ ID NO: 25123 - DNA, 96 bp, Aspergillus fumigatus
  misc_feature: 219
attactagctaggtatatactaatatattaattactagacctaaaactactatacctactactaatctaccctatcttataaagtctactaagaag

SEQ ID NO: 25124 - DNA, 96 bp, Aspergillus fumigatus
  misc_feature: 218
ttctttttctccttctttttctccttctttttctccttctttttctccttctttttctccttctttttctccttctttttcttcttatcttccttc

SEQ ID NO: 25125 - DNA, 96 bp, Aspergillus fumigatus
  misc_feature: 218
actaatatattaattactagacctaaaactactatacctactactaatctaccctatcttataaagtctactaagaagtactatatctgctcctaa

SEQ ID NO: 25126 - DNA, 96 bp, Aspergillus fumigatus
  misc_feature: 218
tgcccaccggtcccctccgcgcgcgcggcccatcgctcgctgcggcagggcgcgcgcgcccggcctatatcggccgcgggggctgtgtgtctgtcc

SEQ ID NO: 25127 - DNA, 96 bp, Aspergillus fumigatus
  misc_feature: 218
gtagggatagtagatatatatatatattagtctactagatagaggtaaggtataagagaaatatatatatttagaaagtcagagagaggtaaaaga

SEQ ID NO: 25128 - DNA, 96 bp, Aspergillus fumigatus
  misc_feature: 218
tataatagacctagtagggatagtagatatatatatatattagtctactagatagaggtaaggtataagagaaatatatatatttagaaagtcaga

SEQ ID NO: 25129 - DNA, 96 bp, Aspergillus fumigatus
  misc_feature: 218
tagggatagtagatatatatatatattagtctactagatagaggtaaggtataagagaaatatatatatttagaaagtcagagagaggtaaaagag

SEQ ID NO: 25130 - DNA, 96 bp, Aspergillus fumigatus
  misc_feature: 218
ctttttctccttctttttctccttctttttctccttctttttctccttctttttctccttctttttctccttctttttcttcttatcttccttctt

SEQ ID NO: 25131 - DNA, 96 bp, Aspergillus fumigatus
  misc_feature: 218
cttctttttctccttctttttctccttctttttctccttctttttctccttctttttctccttctttttctccttctttttcttcttatcttcctt

SEQ ID NO: 25132 - DNA, 96 bp, Aspergillus fumigatus
  misc_feature: 218
ctataatagacctagtagggatagtagatatatatatatattagtctactagatagaggtaaggtataagagaaatatatatatttagaaagtcag

SEQ ID NO: 25133 - DNA, 96 bp, Aspergillus fumigatus
  misc_feature: 218
acccttactcttactcttaacccttttttactctcttttttttactcttcttctttttcttacttttttttaccctgattttctctcttttttact

SEQ ID NO: 25134 - DNA, 96 bp, Aspergillus fumigatus
  misc_feature: 217
tttcttctatatattaattcttatcctctctctattctctctctgaatatcctaatctatcctctttattctattatctttataattttctctctt

SEQ ID NO: 25135 - DNA, 96 bp, Aspergillus fumigatus
  misc_feature: 217
gaatattactagctaggtatatactaatatattaattactagacctaaaactactatacctactactaatctaccctatcttataaagtctactaa

SEQ ID NO: 25136 - DNA, 96 bp, Aspergillus fumigatus
  misc_feature: 217
attaggatattcagagagagaatagagagaggataagaattaatatatagaagaaagagaagaaagagaagaaagaagataataaaagaaaggata

SEQ ID NO: 25137 - DNA, 96 bp, Aspergillus fumigatus
  misc_feature: 217
gtgctgcctgctgtgctgcctgctgttctgcctatcttatatataacctctctggggccttataacctgcttcactaccgtacttactacctgcct

SEQ ID NO: 25138 - DNA, 96 bp, Aspergillus fumigatus
  misc_feature: 217
gtatatactaatatattaattactagacctaaaactactatacctactactaatctaccctatcttataaagtctactaagaagtactatatctgc

SEQ ID NO: 25139 - DNA, 96 bp, Aspergillus fumigatus
  misc_feature: 217
ctccttctttttctccttctttttctccttctttttctccttctttttctccttctttttctccttctttttcttcttatcttccttcttatcttc

SEQ ID NO: 25140 - DNA, 96 bp, Aspergillus fumigatus
  misc_feature: 217
agtaggtatagtagttttaggtctagtaattaatatattagtatatacctagctagtaatattcttatactattaacttatataacttatactttc

SEQ ID NO: 25141 - DNA, 96 bp, Aspergillus fumigatus
  misc_feature: 217
cttctatatattaattcttatcctctctctattctctctctgaatatcctaatctatcctctttattctattatctttataattttctctcttttc

SEQ ID NO: 25142 - DNA, 96 bp, Aspergillus fumigatus
  misc_feature: 217
ataatagacctagtagggatagtagatatatatatatattagtctactagatagaggtaaggtataagagaaatatatatatttagaaagtcagag

SEQ ID NO: 25143 - DNA, 96 bp, Aspergillus fumigatus
  misc_feature: 217
ccttactcttactcttaacccttttttactctcttttttttactcttcttctttttcttacttttttttaccctgattttctctcttttttacttt

SEQ ID NO: 25144 - DNA, 96 bp, Aspergillus fumigatus
  misc_feature: 216
taggatattcagagagagaatagagagaggataagaattaatatatagaagaaagagaagaaagagaagaaagaagataataaaagaaaggataag

SEQ ID NO: 25145 - DNA, 96 bp, Aspergillus fumigatus
  misc_feature: 216
aatagacctagtagggatagtagatatatatatatattagtctactagatagaggtaaggtataagagaaatatatatatttagaaagtcagagag

SEQ ID NO: 25146 - DNA, 96 bp, Aspergillus fumigatus
  misc_feature: 215
ggatagattaggatattcagagagagaatagagagaggataagaattaatatatagaagaaagagaagaaagagaagaaagaagataataaaagaa

SEQ ID NO: 25147 - DNA, 96 bp, Aspergillus fumigatus
  misc_feature: 215
tctatatattaattcttatcctctctctattctctctctgaatatcctaatctatcctctttattctattatctttataattttctctcttttctt

SEQ ID NO: 25148 - DNA, 96 bp, Aspergillus fumigatus
  misc_feature: 215
agaatattactagctaggtatatactaatatattaattactagacctaaaactactatacctactactaatctaccctatcttataaagtctacta

SEQ ID NO: 25149 - DNA, 96 bp, Aspergillus fumigatus
  misc_feature: 215
taagaatattactagctaggtatatactaatatattaattactagacctaaaactactatacctactactaatctaccctatcttataaagtctac

SEQ ID NO: 25150 - DNA, 96 bp, Aspergillus fumigatus
  misc_feature: 215
atagattaggatattcagagagagaatagagagaggataagaattaatatatagaagaaagagaagaaagagaagaaagaagataataaaagaaag

SEQ ID NO: 25151 - DNA, 96 bp, Aspergillus fumigatus
  misc_feature: 215
aatattactagctaggtatatactaatatattaattactagacctaaaactactatacctactactaatctaccctatcttataaagtctactaag

SEQ ID NO: 25152 - DNA, 96 bp, Aspergillus fumigatus
  misc_feature: 215
ccttctttttctccttctttttctccttctttttctccttctttttctccttctttttctccttctttttcttcttatcttccttcttatcttcct

SEQ ID NO: 25153 - DNA, 96 bp, Aspergillus fumigatus
  misc_feature: 215
cccttactcttactcttaacccttttttactctcttttttttactcttcttctttttcttacttttttttaccctgattttctctcttttttactt

SEQ ID NO: 25154 - DNA, 96 bp, Aspergillus fumigatus
  misc_feature: 214
ataataataagaaaagagagaaaattataaagataatagaataaagaggatagattaggatattcagagagagaatagagagagaataagaattaa

SEQ ID NO: 25155 - DNA, 96 bp, Aspergillus fumigatus
  misc_feature: 214
taatagacctagtagggatagtagatatatatatatattagtctactagatagaggtaaggtataagagaaatatatatatttagaaagtcagaga

SEQ ID NO: 25156 - DNA, 96 bp, Aspergillus fumigatus
  misc_feature: 214
tccttctttttctccttctttttctccttctttttctccttctttttctccttctttttctccttctttttcttcttatcttccttcttatcttcc

SEQ ID NO: 25157 - DNA, 96 bp, Aspergillus fumigatus
  misc_feature: 214
aacccttactcttactcttaacccttttttactctcttttttttactcttcttctttttcttacttttttttaccctgattttctctcttttttac

SEQ ID NO: 25158 - DNA, 96 bp, Aspergillus fumigatus
  misc_feature: 213
ttctagaatatagtaataaactaagggctatagtctaatactattattcttagtaggctatatagcttctatatataatagatatataatcaggct

SEQ ID NO: 25159 - DNA, 96 bp, Aspergillus fumigatus
  misc_feature: 213
tgtgctgcctgctgtgctgcctgctgttctgcctatcttatatataacctctctggggccttataacctgcttcactaccgtacttactacctgcc

SEQ ID NO: 25160 - DNA, 96 bp, Aspergillus fumigatus
  misc_feature: 213
taatatattaattactagacctaaaactactatacctactactaatctaccctatcttataaagtctactaagaagtactatatctgctcctaata

SEQ ID NO: 25161 - DNA, 96 bp, Aspergillus fumigatus
  misc_feature: 213
tatattaattcttatcctctctctattctctctctgaatatcctaatctatcctctttattctattatctttataattttctctcttttcttatta

SEQ ID NO: 25162 - DNA, 96 bp, Aspergillus fumigatus
  misc_feature: 213
tatatattaattcttatcctctctctattctctctctgaatatcctaatctatcctctttattctattatctttataattttctctcttttcttat

SEQ ID NO: 25163 - DNA, 96 bp, Aspergillus fumigatus
  misc_feature: 213
ataagaatattactagctaggtatatactaatatattaattactagacctaaaactactatacctactactaatctaccctatcttataaagtcta

SEQ ID NO: 25164 - DNA, 96 bp, Aspergillus fumigatus
  misc_feature: 213
aatatattaattactagacctaaaactactatacctactactaatctaccctatcttataaagtctactaagaagtactatatctgctcctaatac

SEQ ID NO: 25165 - DNA, 96 bp, Aspergillus fumigatus
  misc_feature: 213
ctaatatattaattactagacctaaaactactatacctactactaatctaccctatcttataaagtctactaagaagtactatatctgctcctaat

SEQ ID NO: 25166 - DNA, 96 bp, Aspergillus fumigatus
  misc_feature: 213
aagaatattactagctaggtatatactaatatattaattactagacctaaaactactatacctactactaatctaccctatcttataaagtctact

SEQ ID NO: 25167 - DNA, 96 bp, Aspergillus fumigatus
  misc_feature: 212
tctccttctttttctccttctttttctccttctttttctccttctttttctccttctttttctccttctttttcttcttatcttccttcttatctt

SEQ ID NO: 25168 - DNA, 96 bp, Aspergillus fumigatus
  misc_feature: 212
tctagaatatagtaataaactaagggctatagtctaatactattattcttagtaggctatatagcttctatatataatagatatataatcaggcta

SEQ ID NO: 25169 - DNA, 96 bp, Aspergillus fumigatus
  misc_feature: 212
tccttacttattattatccttttaaatctttctctcttttcttttatttcttttctattttattctctttcttctttattaaaaccttcttaatct

SEQ ID NO: 25170 - DNA, 96 bp, Aspergillus fumigatus
  misc_feature: 212
tatattaattactagacctaaaactactatacctactactaatctaccctatcttataaagtctactaagaagtactatatctgctcctaatacct

SEQ ID NO: 25171 - DNA, 96 bp, Aspergillus fumigatus
  misc_feature: 212
ctgcctgctgtgctgcctgctgttctgcctatcttatatataacctctctggggccttataacctgcttcactaccgtacttactacctgccttgc

SEQ ID NO: 25172 - DNA, 96 bp, Aspergillus fumigatus
  misc_feature: 212
gatatataatattaaggcagctagagaggcgccatgcaaggcaggtagtaagtacggtagtgaagcaggttataaggccccagagaggttatatat

SEQ ID NO: 25173 - DNA, 96 bp, Aspergillus fumigatus
  misc_feature: 212
ccttacttattattatccttttaaatctttctctcttttcttttatttcttttctattttattctctttcttctttattaaaaccttcttaatctt

SEQ ID NO: 25174 - DNA, 96 bp, Aspergillus fumigatus
  misc_feature: 211
tttttctccttctttttctccttctttttctccttctttttctccttctttttctccttctttttctccttctttttcttcttatcttccttctta

SEQ ID NO: 25175 - DNA, 96 bp, Aspergillus fumigatus
  misc_feature: 211
gatagattaggatattcagagagagaatagagagaggataagaattaatatatagaagaaagagaagaaagagaagaaagaagataataaaagaaa

SEQ ID NO: 25176 - DNA, 96 bp, Aspergillus fumigatus
  misc_feature: 211
tttccttacttattattatccttttaaatctttctctcttttcttttatttcttttctattttattctctttcttctttattaaaaccttcttaat

SEQ ID NO: 25177 - DNA, 96 bp, Aspergillus fumigatus
  misc_feature: 211
atttccttacttattattatccttttaaatctttctctcttttcttttatttcttttctattttattctctttcttctttattaaaaccttcttaa

SEQ ID NO: 25178 - DNA, 96 bp, Aspergillus fumigatus
  misc_feature: 211
taataataagaaaagagagaaaattataaagataatagaataaagaggatagattaggatattcagagagagaatagagagagaataagaattaat

SEQ ID NO: 25179 - DNA, 96 bp, Aspergillus fumigatus
  misc_feature: 211
ctatatattaattcttatcctctctctattctctctctgaatatcctaatctatcctctttattctattatctttataattttctctcttttctta

SEQ ID NO: 25180 - DNA, 96 bp, Aspergillus fumigatus
  misc_feature: 211
gtataagaatattactagctaggtatatactaatatattaattactagacctaaaactactatacctactactaatctaccctatcttataaagtc

SEQ ID NO: 25181 - DNA, 96 bp, Aspergillus fumigatus
  misc_feature: 211
atatattaattactagacctaaaactactatacctactactaatctaccctatcttataaagtctactaagaagtactatatctgctcctaatacc

SEQ ID NO: 25182 - DNA, 96 bp, Aspergillus fumigatus
  misc_feature: 210
ttttctccttctttttctccttctttttctccttctttttctccttctttttctccttctttttctccttctttttcttcttatcttccttcttat

SEQ ID NO: 25183 - DNA, 96 bp, Aspergillus fumigatus
  misc_feature: 210
ttccttacttattattatccttttaaatctttctctcttttcttttatttcttttctattttattctctttcttctttattaaaaccttcttaatc

SEQ ID NO: 25184 - DNA, 96 bp, Aspergillus fumigatus
  misc_feature: 210
tataagaatattactagctaggtatatactaatatattaattactagacctaaaactactatacctactactaatctaccctatcttataaagtct

SEQ ID NO: 25185 - DNA, 96 bp, Aspergillus fumigatus
  misc_feature: 210
aaacccttactcttactcttaacccttttttactctcttttttttactcttcttctttttcttacttttttttaccctgattttctctctttttta

SEQ ID NO: 25186 - DNA, 96 bp, Aspergillus fumigatus
  misc_feature: 210
gcctgctgtgctgcctgctgttctgcctatcttatatataacctctctggggccttataacctgcttcactaccgtacttactacctgccttgcat

SEQ ID NO: 25187 - DNA, 96 bp, Aspergillus fumigatus
  misc_feature: 210
atattaattcttatcctctctctattctctctctgaatatcctaatctatcctctttattctattatctttataattttctctcttttcttattat

SEQ ID NO: 25188 - DNA, 96 bp, Aspergillus fumigatus
  misc_feature: 210
atatattaattcttatcctctctctattctctctctgaatatcctaatctatcctctttattctattatctttataattttctctcttttcttatt

SEQ ID NO: 25189 - DNA, 96 bp, Aspergillus fumigatus
  misc_feature: 209
tttctccttctttttctccttctttttctccttctttttctccttctttttctccttctttttctccttctttttcttcttatcttccttcttatc

SEQ ID NO: 25190 - DNA, 96 bp, Aspergillus fumigatus
  misc_feature: 209
ttattatccttttaaatctttctctcttttcttttatttcttttctattttattctctttcttctttattaaaaccttcttaatctttactcttct

SEQ ID NO: 25191 - DNA, 96 bp, Aspergillus fumigatus
  misc_feature: 209
tgcctgctgtgctgcctgctgttctgcctatcttatatataacctctctggggccttataacctgcttcactaccgtacttactacctgccttgca

SEQ ID NO: 25192 - DNA, 96 bp, Aspergillus fumigatus
  misc_feature: 209
taagaaggttttaataaagaagaaagagaataaaatagaaaagaaataaaagaaaagagagaaagatttaaaaggataataataagtaaggaaatt

SEQ ID NO: 25193 - DNA, 96 bp, Aspergillus fumigatus
  misc_feature: 209
gctgcctgctgtgctgcctgctgttctgcctatcttatatataacctctctggggccttataacctgcttcactaccgtacttactacctgccttg

SEQ ID NO: 25194 - DNA, 96 bp, Aspergillus fumigatus
  misc_feature: 209
gcccaccggtcccctccgcgcgcgcggcccatcgctcgctgcggcagggcgcgcgcgcccggcctatatcggccgcgggggctgtgtgtctgtccg

SEQ ID NO: 25195 - DNA, 96 bp, Aspergillus fumigatus
  misc_feature: 209
aggatattcagagagagaatagagagaggataagaattaatatatagaagaaagagaagaaagagaagaaagaagataataaaagaaaggataagt

SEQ ID NO: 25196 - DNA, 96 bp, Aspergillus fumigatus
  misc_feature: 208
ttctccttctttttctccttctttttctccttctttttctccttctttttctccttctttttctccttctttttcttcttatcttccttcttatct

SEQ ID NO: 25197 - DNA, 96 bp, Aspergillus fumigatus
  misc_feature: 208
tctcttgtcctctcttgtcctctcttgtcctctcttgtcctctcttgtcctctcttgtcctctcttgtcctctcttgtcctctcttgtcctctctt

SEQ ID NO: 25198 - DNA, 96 bp, Aspergillus fumigatus
  misc_feature: 208
tacttattattatccttttaaatctttctctcttttcttttatttcttttctattttattctctttcttctttattaaaaccttcttaatctttac

SEQ ID NO: 25199 - DNA, 96 bp, Aspergillus fumigatus
  misc_feature: 208
aagaaggttttaataaagaagaaagagaataaaatagaaaagaaataaaagaaaagagagaaagatttaaaaggataataataagtaaggaaatta

SEQ ID NO: 25200 - DNA, 96 bp, Aspergillus fumigatus
  misc_feature: 208
taaacccttactcttactcttaacccttttttactctcttttttttactcttcttctttttcttacttttttttaccctgattttctctctttttt

SEQ ID NO: 25201 - DNA, 96 bp, Aspergillus fumigatus
  misc_feature: 208
gtaggtatagtagttttaggtctagtaattaatatattagtatatacctagctagtaatattcttatactattaacttatataacttatactttct

SEQ ID NO: 25202 - DNA, 96 bp, Aspergillus fumigatus
  misc_feature: 208
gctgtgctgcctgctgtgctgcctgctgttctgcctatcttatatataacctctctggggccttataacctgcttcactaccgtacttactacctg

SEQ ID NO: 25203 - DNA, 96 bp, Aspergillus fumigatus
  misc_feature: 208
ctgtgctgcctgctgtgctgcctgctgttctgcctatcttatatataacctctctggggccttataacctgcttcactaccgtacttactacctgc

SEQ ID NO: 25204 - DNA, 96 bp, Aspergillus fumigatus
  misc_feature: 208
attattatccttttaaatctttctctcttttcttttatttcttttctattttattctctttcttctttattaaaaccttcttaatctttactcttc

SEQ ID NO: 25205 - DNA, 96 bp, Aspergillus fumigatus
  misc_feature: 208
atccttttaaatctttctctcttttcttttatttcttttctattttattctctttcttctttattaaaaccttcttaatctttactcttctttatt

SEQ ID NO: 25206 - DNA, 96 bp, Aspergillus fumigatus
  misc_feature: 207
ttattattatccttttaaatctttctctcttttcttttatttcttttctattttattctctttcttctttattaaaaccttcttaatctttactct

SEQ ID NO: 25207 - DNA, 96 bp, Aspergillus fumigatus
  misc_feature: 207
tattaattcttatcctctctctattctctctctgaatatcctaatctatcctctttattctattatctttataattttctctcttttcttattatt

SEQ ID NO: 25208 - DNA, 96 bp, Aspergillus fumigatus
  misc_feature: 207
atattaattactagacctaaaactactatacctactactaatctaccctatcttataaagtctactaagaagtactatatctgctcctaataccta

SEQ ID NO: 25209 - DNA, 96 bp, Aspergillus fumigatus
  misc_feature: 207
taggtatagtagttttaggtctagtaattaatatattagtatatacctagctagtaatattcttatactattaacttatataacttatactttcta

SEQ ID NO: 25210 - DNA, 96 bp, Aspergillus fumigatus
  misc_feature: 207
cctgctgtgctgcctgctgtgctgcctgctgttctgcctatcttatatataacctctctggggccttataacctgcttcactaccgtacttactac

SEQ ID NO: 25211 - DNA, 96 bp, Aspergillus fumigatus
  misc_feature: 207
atatattttttttgcaaatataaattcatatataatatgaaaaaaaaaaaattaaaaataaaaaaatataaatataaaaataattcttttttttac

SEQ ID NO: 25212 - DNA, 96 bp, Aspergillus fumigatus
  misc_feature: 207
ctgctgtgctgcctgctgtgctgcctgctgttctgcctatcttatatataacctctctggggccttataacctgcttcactaccgtacttactacc

SEQ ID NO: 25213 - DNA, 96 bp, Aspergillus fumigatus
  misc_feature: 207
cttattattatccttttaaatctttctctcttttcttttatttcttttctattttattctctttcttctttattaaaaccttcttaatctttactc

SEQ ID NO: 25214 - DNA, 96 bp, Aspergillus fumigatus
  misc_feature: 207
cttacttattattatccttttaaatctttctctcttttcttttatttcttttctattttattctctttcttctttattaaaaccttcttaatcttt

SEQ ID NO: 25215 - DNA, 96 bp, Aspergillus fumigatus
  misc_feature: 207
attatccttttaaatctttctctcttttcttttatttcttttctattttattctctttcttctttattaaaaccttcttaatctttactcttcttt

SEQ ID NO: 25216 - DNA, 96 bp, Aspergillus fumigatus
  misc_feature: 207
atctaaactaactaacccttactctatctaaactgactaaccctgactctatctaaactatctaaccctaactctatcttactaaaactaacttat

SEQ ID NO: 25217 - DNA, 96 bp, Aspergillus fumigatus
  misc_feature: 207
ataaacccttactcttactcttaacccttttttactctcttttttttactcttcttctttttcttacttttttttaccctgattttctctcttttt

SEQ ID NO: 25218 - DNA, 96 bp, Aspergillus fumigatus
  misc_feature: 206
ttgtcctctcttgtcctctcttgtcctctcttgtcctctcttgtcctctcttgtcctctcttgtcctctcttgtcctctcttgtcctctcttgtcc

SEQ ID NO: 25219 - DNA, 96 bp, Aspergillus fumigatus
  misc_feature: 206
ttatccttttaaatctttctctcttttcttttatttcttttctattttattctctttcttctttattaaaaccttcttaatctttactcttcttta

SEQ ID NO: 25220 - DNA, 96 bp, Aspergillus fumigatus
  misc_feature: 206
ttacttattattatccttttaaatctttctctcttttcttttatttcttttctattttattctctttcttctttattaaaaccttcttaatcttta

SEQ ID NO: 25221 - DNA, 96 bp, Aspergillus fumigatus
  misc_feature: 206
tgtcctctcttgtcctctcttgtcctctcttgtcctctcttgtcctctcttgtcctctcttgtcctctcttgtcctctcttgtcctctcttgtcct

SEQ ID NO: 25222 - DNA, 96 bp, Aspergillus fumigatus
  misc_feature: 206
tgctgtgctgcctgctgtgctgcctgctgttctgcctatcttatatataacctctctggggccttataacctgcttcactaccgtacttactacct

SEQ ID NO: 25223 - DNA, 96 bp, Aspergillus fumigatus
  misc_feature: 206
tctaaactaactaacccttactctatctaaactgactaaccctgactctatctaaactatctaaccctaactctatcttactaaaactaacttatt

SEQ ID NO: 25224 - DNA, 96 bp, Aspergillus fumigatus
  misc_feature: 206
tattattatccttttaaatctttctctcttttcttttatttcttttctattttattctctttcttctttattaaaaccttcttaatctttactctt

SEQ ID NO: 25225 - DNA, 96 bp, Aspergillus fumigatus
  misc_feature: 206
tattatccttttaaatctttctctcttttcttttatttcttttctattttattctctttcttctttattaaaaccttcttaatctttactcttctt

SEQ ID NO: 25226 - DNA, 96 bp, Aspergillus fumigatus
  misc_feature: 206
tatccttttaaatctttctctcttttcttttatttcttttctattttattctctttcttctttattaaaaccttcttaatctttactcttctttat

SEQ ID NO: 25227 - DNA, 96 bp, Aspergillus fumigatus
  misc_feature: 206
agatatataatattaaggcagctagagaggcgccatgcaaggcaggtagtaagtacggtagtgaagcaggttataaggccccagagaggttatata

SEQ ID NO: 25228 - DNA, 96 bp, Aspergillus fumigatus
  misc_feature: 206
aagatatataatattaaggcagctagagaggcgccatgcaaggcaggtagtaagtacggtagtgaagcaggttataaggccccagagaggttatat

SEQ ID NO: 25229 - DNA, 96 bp, Aspergillus fumigatus
  misc_feature: 206
agtataagaatattactagctaggtatatactaatatattaattactagacctaaaactactatacctactactaatctaccctatcttataaagt

SEQ ID NO: 25230 - DNA, 96 bp, Aspergillus fumigatus
  misc_feature: 205
tattaattactagacctaaaactactatacctactactaatctaccctatcttataaagtctactaagaagtactatatctgctcctaatacctaa

SEQ ID NO: 25231 - DNA, 96 bp, Aspergillus fumigatus
  misc_feature: 205
tcttgtcctctcttgtcctctcttgtcctctcttgtcctctcttgtcctctcttgtcctctcttgtcctctcttgtcctctcttgtcctctcttgt

SEQ ID NO: 25232 - DNA, 96 bp, Aspergillus fumigatus
  misc_feature: 205
tctatctaaactaactaacccttactctatctaaactgactaaccctgactctatctaaactatctaaccctaactctatcttactaaaactaact

SEQ ID NO: 25233 - DNA, 96 bp, Aspergillus fumigatus
  misc_feature: 205
tatctaaactaactaacccttactctatctaaactgactaaccctgactctatctaaactatctaaccctaactctatcttactaaaactaactta

SEQ ID NO: 25234 - DNA, 96 bp, Aspergillus fumigatus
  misc_feature: 205
ctatctaaactaactaacccttactctatctaaactgactaaccctgactctatctaaactatctaaccctaactctatcttactaaaactaactt

SEQ ID NO: 25235 - DNA, 96 bp, Aspergillus fumigatus
  misc_feature: 205
ctaaactaactaacccttactctatctaaactgactaaccctgactctatctaaactatctaaccctaactctatcttactaaaactaacttattt

SEQ ID NO: 25236 - DNA, 96 bp, Aspergillus fumigatus
  misc_feature: 204
tccttttaaatctttctctcttttcttttatttcttttctattttattctctttcttctttattaaaaccttcttaatctttactcttctttatta

SEQ ID NO: 25237 - DNA, 96 bp, Aspergillus fumigatus
  misc_feature: 204
tattataaacccttactcttactcttaacccttttttactctcttttttttactcttcttctttttcttacttttttttaccctgattttctctct

SEQ ID NO: 25238 - DNA, 96 bp, Aspergillus fumigatus
  misc_feature: 204
tatattttttttgcaaatataaattcatatataatatgaaaaaaaaaaaattaaaaataaaaaaatataaatataaaaataattcttttttttact

SEQ ID NO: 25239 - DNA, 96 bp, Aspergillus fumigatus
  misc_feature: 204
aggtatagtagttttaggtctagtaattaatatattagtatatacctagctagtaatattcttatactattaacttatataacttatactttctag

SEQ ID NO: 25240 - DNA, 96 bp, Aspergillus fumigatus
  misc_feature: 204
agaaggttttaataaagaagaaagagaataaaatagaaaagaaataaaagaaaagagagaaagatttaaaaggataataataagtaaggaaattat

SEQ ID NO: 25241 - DNA, 96 bp, Aspergillus fumigatus
  misc_feature: 204
acttattattatccttttaaatctttctctcttttcttttatttcttttctattttattctctttcttctttattaaaaccttcttaatctttact

SEQ ID NO: 25242 - DNA, 96 bp, Aspergillus fumigatus
  misc_feature: 203
ttattataaacccttactcttactcttaacccttttttactctcttttttttactcttcttctttttcttacttttttttaccctgattttctctc

SEQ ID NO: 25243 - DNA, 96 bp, Aspergillus fumigatus
  misc_feature: 203
ttataaacccttactcttactcttaacccttttttactctcttttttttactcttcttctttttcttacttttttttaccctgattttctctcttt

SEQ ID NO: 25244 - DNA, 96 bp, Aspergillus fumigatus
  misc_feature: 203
tataatttccttacttattattatccttttaaatctttctctcttttcttttatttcttttctattttattctctttcttctttattaaaaccttc

SEQ ID NO: 25245 - DNA, 96 bp, Aspergillus fumigatus
  misc_feature: 203
attaattcttatcctctctctattctctctctgaatatcctaatctatcctctttattctattatctttataattttctctcttttcttattatta

SEQ ID NO: 25246 - DNA, 96 bp, Aspergillus fumigatus
  misc_feature: 203
atagttaatttagccttctagatatacttatatactaggtagtagtatttatactatttagtactatagctagtaatatacttagagaactcttta

SEQ ID NO: 25247 - DNA, 96 bp, Aspergillus fumigatus
  misc_feature: 203
ctctatctaaactaactaacccttactctatctaaactgactaaccctgactctatctaaactatctaaccctaactctatcttactaaaactaac

SEQ ID NO: 25248 - DNA, 96 bp, Aspergillus fumigatus
  misc_feature: 203
cttgtcctctcttgtcctctcttgtcctctcttgtcctctcttgtcctctcttgtcctctcttgtcctctcttgtcctctcttgtcctctcttgtc

SEQ ID NO: 25249 - DNA, 96 bp, Aspergillus fumigatus
  misc_feature: 203
ctcttgtcctctcttgtcctctcttgtcctctcttgtcctctcttgtcctctcttgtcctctcttgtcctctcttgtcctctcttgtcctctcttg

SEQ ID NO: 25250 - DNA, 96 bp, Aspergillus fumigatus
  misc_feature: 203
attataaacccttactcttactcttaacccttttttactctcttttttttactcttcttctttttcttacttttttttaccctgattttctctctt

SEQ ID NO: 25251 - DNA, 96 bp, Aspergillus fumigatus
  misc_feature: 202
attaattactagacctaaaactactatacctactactaatctaccctatcttataaagtctactaagaagtactatatctgctcctaatacctaaa

SEQ ID NO: 25252 - DNA, 96 bp, Aspergillus fumigatus
  misc_feature: 202
agaagaaaaagaagaagaaagggaaaaatatagattagattagaaattcaagttaaaataagaataattagataaagaagattataaaagaaagaa

SEQ ID NO: 25253 - DNA, 96 bp, Aspergillus fumigatus
  misc_feature: 202
tcttttctattttattctctttcttctttattaaaaccttcttaatctttactcttctttattattattttctctattattctattcttatgttta

SEQ ID NO: 25254 - DNA, 96 bp, Aspergillus fumigatus
  misc_feature: 202
ataattaaagaaaagaaaagaggagattaatatttaaataataatagtttaagaatgaaggaaagggaggtaataaggattagtagtaataagaga

SEQ ID NO: 25255 - DNA, 96 bp, Aspergillus fumigatus
  misc_feature: 202
aattaaagaaaagaaaagaggagattaatatttaaataataatagtttaagaatgaaggaaagggaggtaataaggattagtagtaataagagaga

SEQ ID NO: 25256 - DNA, 96 bp, Aspergillus fumigatus
  misc_feature: 202
tagtataagaatattactagctaggtatatactaatatattaattactagacctaaaactactatacctactactaatctaccctatcttataaag

SEQ ID NO: 25257 - DNA, 96 bp, Aspergillus fumigatus
  misc_feature: 202
ggtatagtagttttaggtctagtaattaatatattagtatatacctagctagtaatattcttatactattaacttatataacttatactttctagg

SEQ ID NO: 25258 - DNA, 96 bp, Aspergillus fumigatus
  misc_feature: 202
ccttttaaatctttctctcttttcttttatttcttttctattttattctctttcttctttattaaaaccttcttaatctttactcttctttattat

SEQ ID NO: 25259 - DNA, 96 bp, Aspergillus fumigatus
  misc_feature: 201
ttcttttctattttattctctttcttctttattaaaaccttcttaatctttactcttctttattattattttctctattattctattcttatgttt

SEQ ID NO: 25260 - DNA, 96 bp, Aspergillus fumigatus
  misc_feature: 201
ttaattactagacctaaaactactatacctactactaatctaccctatcttataaagtctactaagaagtactatatctgctcctaatacctaaat

SEQ ID NO: 25261 - DNA, 96 bp, Aspergillus fumigatus
  misc_feature: 201
aagaagaaaaagaagaagaaagggaaaaatatagattagattagaaattcaagttaaaataagaataattagataaagaagattataaaagaaaga

SEQ ID NO: 25262 - DNA, 96 bp, Aspergillus fumigatus
  misc_feature: 201
tactactcaacaacccttcttctctattaaatcatatctattgaatcatcgtatctattaaatctatctattgaatcatatcgattaaatcatcgt

SEQ ID NO: 25263 - DNA, 96 bp, Aspergillus fumigatus
  misc_feature: 201
ggatattcagagagagaatagagagaggataagaattaatatatagaagaaagagaagaaagagaagaaagaagataataaaagaaaggataagtt

SEQ ID NO: 25264 - DNA, 96 bp, Aspergillus fumigatus
  misc_feature: 201
cttttaaatctttctctcttttcttttatttcttttctattttattctctttcttctttattaaaaccttcttaatctttactcttctttattatt

SEQ ID NO: 25265 - DNA, 96 bp, Aspergillus fumigatus
  misc_feature: 201
cttctttatctaattattcttattttaacttgaatttctaatctaatctatatttttccctttcttcttctttttcttcttctttttctccttctt

SEQ ID NO: 25266 - DNA, 96 bp, Aspergillus fumigatus
  misc_feature: 201
ctactactcaacaacccttcttctctattaaatcatatctattgaatcatcgtatctattaaatctatctattgaatcatatcgattaaatcatcg

SEQ ID NO: 25267 - DNA, 96 bp, Aspergillus fumigatus
  misc_feature: 201
agaaaaagaagaagaaagggaaaaatatagattagattagaaattcaagttaaaataagaataattagataaagaagattataaaagaaagaaaat

SEQ ID NO: 25268 - DNA, 96 bp, Aspergillus fumigatus
  misc_feature: 201
aatagttaatttagccttctagatatacttatatactaggtagtagtatttatactatttagtactatagctagtaatatacttagagaactcttt

SEQ ID NO: 25269 - DNA, 96 bp, Aspergillus fumigatus
  misc_feature: 200
ttttaaatctttctctcttttcttttatttcttttctattttattctctttcttctttattaaaaccttcttaatctttactcttctttattatta

SEQ ID NO: 25270 - DNA, 96 bp, Aspergillus fumigatus
  misc_feature: 200
gaagaaaaagaagaagaaagggaaaaatatagattagattagaaattcaagttaaaataagaataattagataaagaagattataaaagaaagaaa

SEQ ID NO: 25271 - DNA, 96 bp, Aspergillus fumigatus
  misc_feature: 200
agaaaaagaagaagaaaaagaagaagaaagggaaaaatatagattagattagaaattcaagttaaaataagaataattagataaagaagattataa

SEQ ID NO: 25272 - DNA, 96 bp, Aspergillus fumigatus
  misc_feature: 200
actctatctaaactaactaacccttactctatctaaactgactaaccctgactctatctaaactatctaaccctaactctatcttactaaaactaa

SEQ ID NO: 25273 - DNA, 96 bp, Aspergillus fumigatus
  misc_feature: 200
tataaacccttactcttactcttaacccttttttactctcttttttttactcttcttctttttcttacttttttttaccctgattttctctctttt

SEQ ID NO: 25274 - DNA, 96 bp, Aspergillus fumigatus
  misc_feature: 200
taattaaagaaaagaaaagaggagattaatatttaaataataatagtttaagaatgaaggaaagggaggtaataaggattagtagtaataagagag

SEQ ID NO: 25275 - DNA, 96 bp, Aspergillus fumigatus
  misc_feature: 200
taatagttaatttagccttctagatatacttatatactaggtagtagtatttatactatttagtactatagctagtaatatacttagagaactctt

SEQ ID NO: 25276 - DNA, 96 bp, Aspergillus fumigatus
  misc_feature: 200
gtatagtagttttaggtctagtaattaatatattagtatatacctagctagtaatattcttatactattaacttatataacttatactttctaggg

SEQ ID NO: 25277 - DNA, 96 bp, Aspergillus fumigatus
  misc_feature: 200
gaagaagaaaaagaagaagaaagggaaaaatatagattagattagaaattcaagttaaaataagaataattagataaagaagattataaaagaaag

SEQ ID NO: 25278 - DNA, 96 bp, Aspergillus fumigatus
  misc_feature: 200
aaaagaagaagaaaaagaagaagaaagggaaaaatatagattagattagaaattcaagttaaaataagaataattagataaagaagattataaaag

SEQ ID NO: 25279 - DNA, 96 bp, Aspergillus fumigatus
  misc_feature: 200
cccaccggtcccctccgcgcgcgcggcccatcgctcgctgcggcagggcgcgcgcgcccggcctatatcggccgcgggggctgtgtgtctgtccgt

SEQ ID NO: 25280 - DNA, 96 bp, Aspergillus fumigatus
  misc_feature: 200
actttatcttaactaatgaacccttcctctatccaaactaactaaccctaactctatcttactaaaaaattaacttatcctttcttttattatctt

SEQ ID NO: 25281 - DNA, 96 bp, Aspergillus fumigatus
  misc_feature: 199
aagaaaaagaagaagaaagggaaaaatatagattagattagaaattcaagttaaaataagaataattagataaagaagattataaaagaaagaaaa

SEQ ID NO: 25282 - DNA, 96 bp, Aspergillus fumigatus
  misc_feature: 199
aaaaagaagaagaaaaagaagaagaaagggaaaaatatagattagattagaaattcaagttaaaataagaataattagataaagaagattataaaa

SEQ ID NO: 25283 - DNA, 96 bp, Aspergillus fumigatus
  misc_feature: 199
agaagaagaaaaagaagaagaaagggaaaaatatagattagattagaaattcaagttaaaataagaataattagataaagaagattataaaagaaa

SEQ ID NO: 25284 - DNA, 96 bp, Aspergillus fumigatus
  misc_feature: 199
aagaagaagaaaaagaagaagaaagggaaaaatatagattagattagaaattcaagttaaaataagaataattagataaagaagattataaaagaa

SEQ ID NO: 25285 - DNA, 96 bp, Aspergillus fumigatus
  misc_feature: 199
ttctttatctaattattcttattttaacttgaatttctaatctaatctatatttttccctttcttcttctttttcttcttctttttctccttcttt

SEQ ID NO: 25286 - DNA, 96 bp, Aspergillus fumigatus
  misc_feature: 199
gaaaaagaagaagaaagggaaaaatatagattagattagaaattcaagttaaaataagaataattagataaagaagattataaaagaaagaaaata

SEQ ID NO: 25287 - DNA, 96 bp, Aspergillus fumigatus
  misc_feature: 199
atattttttttgcaaatataaattcatatataatatgaaaaaaaaaaaattaaaaataaaaaaatataaatataaaaataattcttttttttacta

SEQ ID NO: 25288 - DNA, 96 bp, Aspergillus fumigatus
  misc_feature: 199
aaatataatttccttacttattattatccttttaaatctttctctcttttcttttatttcttttctattttattctctttcttctttattaaaacc

SEQ ID NO: 25289 - DNA, 96 bp, Aspergillus fumigatus
  misc_feature: 199
aattattataaacccttactcttactcttaacccttttttactctcttttttttactcttcttctttttcttacttttttttaccctgattttctc

SEQ ID NO: 25290 - DNA, 96 bp, Aspergillus fumigatus
  misc_feature: 199
atcttctttatctaattattcttattttaacttgaatttctaatctaatctatatttttccctttcttcttctttttcttcttctttttctccttc

SEQ ID NO: 25291 - DNA, 96 bp, Aspergillus fumigatus
  misc_feature: 199
ccaccggtcccctccgcgcgcgcggcccatcgctcgctgcggcagggcgcgcgcgcccggcctatatcggccgcgggggctgtgtgtctgtccgtg

SEQ ID NO: 25292 - DNA, 96 bp, Aspergillus fumigatus
  misc_feature: 199
attattataaacccttactcttactcttaacccttttttactctcttttttttactcttcttctttttcttacttttttttaccctgattttctct

SEQ ID NO: 25293 - DNA, 96 bp, Aspergillus fumigatus
  misc_feature: 199
aaattattataaacccttactcttactcttaacccttttttactctcttttttttactcttcttctttttcttacttttttttaccctgattttct

SEQ ID NO: 25294 - DNA, 96 bp, Aspergillus fumigatus
  misc_feature: 198
ttttatttcttttctattttattctctttcttctttattaaaaccttcttaatctttactcttctttattattattttctctattattctattctt

SEQ ID NO: 25295 - DNA, 96 bp, Aspergillus fumigatus
  misc_feature: 198
gaagaagaaagggaaaaatatagattagattagaaattcaagttaaaataagaataattagataaagaagattataaaagaaagaaaataaagaaa

SEQ ID NO: 25296 - DNA, 96 bp, Aspergillus fumigatus
  misc_feature: 198
gaaaaagaagaagaaaaagaagaagaaagggaaaaatatagattagattagaaattcaagttaaaataagaataattagataaagaagattataaa

SEQ ID NO: 25297 - DNA, 96 bp, Aspergillus fumigatus
  misc_feature: 198
atagtataagaatattactagctaggtatatactaatatattaattactagacctaaaactactatacctactactaatctaccctatcttataaa

SEQ ID NO: 25298 - DNA, 96 bp, Aspergillus fumigatus
  misc_feature: 198
ttatttcttttctattttattctctttcttctttattaaaaccttcttaatctttactcttctttattattattttctctattattctattcttat

SEQ ID NO: 25299 - DNA, 96 bp, Aspergillus fumigatus
  misc_feature: 198
aaagaagaagaaaaagaagaagaaagggaaaaatatagattagattagaaattcaagttaaaataagaataattagataaagaagattataaaaga

SEQ ID NO: 25300 - DNA, 96 bp, Aspergillus fumigatus
  misc_feature: 198
tcttctttatctaattattcttattttaacttgaatttctaatctaatctatatttttccctttcttcttctttttcttcttctttttctccttct

SEQ ID NO: 25301 - DNA, 96 bp, Aspergillus fumigatus
  misc_feature: 198
actactcaacaacccttcttctctattaaatcatatctattgaatcatcgtatctattaaatctatctattgaatcatatcgattaaatcatcgta

SEQ ID NO: 25302 - DNA, 96 bp, Aspergillus fumigatus
  misc_feature: 198
aaaattattataaacccttactcttactcttaacccttttttactctcttttttttactcttcttctttttcttacttttttttaccctgattttc

SEQ ID NO: 25303 - DNA, 96 bp, Aspergillus fumigatus
  misc_feature: 198
aataattaaagaaaagaaaagaggagattaatatttaaataataatagtttaagaatgaaggaaagggaggtaataaggattagtagtaataagag

SEQ ID NO: 25304 - DNA, 96 bp, Aspergillus fumigatus
  misc_feature: 197
aagaagaaagggaaaaatatagattagattagaaattcaagttaaaataagaataattagataaagaagattataaaagaaagaaaataaagaaaa

SEQ ID NO: 25305 - DNA, 96 bp, Aspergillus fumigatus
  misc_feature: 197
ttttctattttattctctttcttctttattaaaaccttcttaatctttactcttctttattattattttctctattattctattcttatgtttatc

SEQ ID NO: 25306 - DNA, 96 bp, Aspergillus fumigatus
  misc_feature: 197
cctaactctatctaaactaactaacccttactctatctaaactgactaaccctgactctatctaaactatctaaccctaactctatcttactaaaa

SEQ ID NO: 25307 - DNA, 96 bp, Aspergillus fumigatus
  misc_feature: 197
tttctattttattctctttcttctttattaaaaccttcttaatctttactcttctttattattattttctctattattctattcttatgtttatct

SEQ ID NO: 25308 - DNA, 96 bp, Aspergillus fumigatus
  misc_feature: 197
aaaagaagaagaaagggaaaaatatagattagattagaaattcaagttaaaataagaataattagataaagaagattataaaagaaagaaaataaa

SEQ ID NO: 25309 - DNA, 96 bp, Aspergillus fumigatus
  misc_feature: 197
tttatttcttttctattttattctctttcttctttattaaaaccttcttaatctttactcttctttattattattttctctattattctattctta

SEQ ID NO: 25310 - DNA, 96 bp, Aspergillus fumigatus
  misc_feature: 197
tatcctctctctattctctctctgaatatcctaatctatcctctttattctattatctttataattttctctcttttcttattattatccttctaa

SEQ ID NO: 25311 - DNA, 96 bp, Aspergillus fumigatus
  misc_feature: 197
aaaagaaggagaaaaagaaggagaaaaagaaggagaaaaagaaggagaaaaagaaggagaaaaagaaggagaaaaagaaggagaaaaagaagaaga

SEQ ID NO: 25312 - DNA, 96 bp, Aspergillus fumigatus
  misc_feature: 197
gaataattaaagaaaagaaaagaggagattaatatttaaataataatagtttaagaatgaaggaaagggaggtaataaggattagtagtaataaga

SEQ ID NO: 25313 - DNA, 96 bp, Aspergillus fumigatus
  misc_feature: 197
gtagagataaacataagaatagaataatagagaaaataataataaagaagagtaaagattaagaaggttttaataaagaagaaagagaataaaata

SEQ ID NO: 25314 - DNA, 96 bp, Aspergillus fumigatus
  misc_feature: 197
taattactagacctaaaactactatacctactactaatctaccctatcttataaagtctactaagaagtactatatctgctcctaatacctaaata

SEQ ID NO: 25315 - DNA, 96 bp, Aspergillus fumigatus
  misc_feature: 197
tatagtagttttaggtctagtaattaatatattagtatatacctagctagtaatattcttatactattaacttatataacttatactttctagggt

SEQ ID NO: 25316 - DNA, 96 bp, Aspergillus fumigatus
  misc_feature: 197
gagaaaaagaagaagaaaaagaagaagaaagggaaaaatatagattagattagaaattcaagttaaaataagaataattagataaagaagattata

SEQ ID NO: 25317 - DNA, 96 bp, Aspergillus fumigatus
  misc_feature: 197
aactctatctaaactaactaacccttactctatctaaactgactaaccctgactctatctaaactatctaaccctaactctatcttactaaaacta

SEQ ID NO: 25318 - DNA, 96 bp, Aspergillus fumigatus
  misc_feature: 197
tactttatcttaactaatgaacccttcctctatccaaactaactaaccctaactctatcttactaaaaaattaacttatcctttcttttattatct

SEQ ID NO: 25319 - DNA, 96 bp, Aspergillus fumigatus
  misc_feature: 197
taactctatctaaactaactaacccttactctatctaaactgactaaccctgactctatctaaactatctaaccctaactctatcttactaaaact

SEQ ID NO: 25320 - DNA, 96 bp, Aspergillus fumigatus
  misc_feature: 197
gagtcagggttagtcagtttagatagagtaagggttagttagtttagatagagttaggattattcagtttagacagagtaagggttagttagttta

SEQ ID NO: 25321 - DNA, 96 bp, Aspergillus fumigatus
  misc_feature: 197
aaagaagaagaaagggaaaaatatagattagattagaaattcaagttaaaataagaataattagataaagaagattataaaagaaagaaaataaag

SEQ ID NO: 25322 - DNA, 96 bp, Aspergillus fumigatus
  misc_feature: 197
atataatttccttacttattattatccttttaaatctttctctcttttcttttatttcttttctattttattctctttcttctttattaaaacctt

SEQ ID NO: 25323 - DNA, 96 bp, Aspergillus fumigatus
  misc_feature: 197
aatataatttccttacttattattatccttttaaatctttctctcttttcttttatttcttttctattttattctctttcttctttattaaaacct

SEQ ID NO: 25324 - DNA, 96 bp, Aspergillus fumigatus
  misc_feature: 197
aaggagaaaaagaagaagaaaaagaagaagaaagggaaaaatatagattagattagaaattcaagttaaaataagaataattagataaagaagatt

SEQ ID NO: 25325 - DNA, 96 bp, Aspergillus fumigatus
  misc_feature: 196
tttatctaattattcttattttaacttgaatttctaatctaatctatatttttccctttcttcttctttttcttcttctttttctccttctttttc

SEQ ID NO: 25326 - DNA, 96 bp, Aspergillus fumigatus
  misc_feature: 196
tttaaatctttctctcttttcttttatttcttttctattttattctctttcttctttattaaaaccttcttaatctttactcttctttattattat

SEQ ID NO: 25327 - DNA, 96 bp, Aspergillus fumigatus
  misc_feature: 196
attaaagaaaagaaaagaggagattaatatttaaataataatagtttaagaatgaaggaaagggaggtaataaggattagtagtaataagagagaa

SEQ ID NO: 25328 - DNA, 96 bp, Aspergillus fumigatus
  misc_feature: 196
aaaaagaagaagaaagggaaaaatatagattagattagaaattcaagttaaaataagaataattagataaagaagattataaaagaaagaaaataa

SEQ ID NO: 25329 - DNA, 96 bp, Aspergillus fumigatus
  misc_feature: 196
aattactagacctaaaactactatacctactactaatctaccctatcttataaagtctactaagaagtactatatctgctcctaatacctaaataa

SEQ ID NO: 25330 - DNA, 96 bp, Aspergillus fumigatus
  misc_feature: 196
ttaatagttaatttagccttctagatatacttatatactaggtagtagtatttatactatttagtactatagctagtaatatacttagagaactct

SEQ ID NO: 25331 - DNA, 96 bp, Aspergillus fumigatus
  misc_feature: 196
tctttatctaattattcttattttaacttgaatttctaatctaatctatatttttccctttcttcttctttttcttcttctttttctccttctttt

SEQ ID NO: 25332 - DNA, 96 bp, Aspergillus fumigatus
  misc_feature: 196
agagataaacataagaatagaataatagagaaaataataataaagaagagtaaagattaagaaggttttaataaagaagaaagagaataaaataga

SEQ ID NO: 25333 - DNA, 96 bp, Aspergillus fumigatus
  misc_feature: 196
tagagataaacataagaatagaataatagagaaaataataataaagaagagtaaagattaagaaggttttaataaagaagaaagagaataaaatag

SEQ ID NO: 25334 - DNA, 96 bp, Aspergillus fumigatus
  misc_feature: 196
taaatataatttccttacttattattatccttttaaatctttctctcttttcttttatttcttttctattttattctctttcttctttattaaaac

SEQ ID NO: 25335 - DNA, 96 bp, Aspergillus fumigatus
  misc_feature: 196
taaactaactaacccttactctatctaaactgactaaccctgactctatctaaactatctaaccctaactctatcttactaaaactaacttatttt

SEQ ID NO: 25336 - DNA, 96 bp, Aspergillus fumigatus
  misc_feature: 196
cttttctattttattctctttcttctttattaaaaccttcttaatctttactcttctttattattattttctctattattctattcttatgtttat

SEQ ID NO: 25337 - DNA, 96 bp, Aspergillus fumigatus
  misc_feature: 196
caccggtcccctccgcgcgcgcggcccatcgctcgctgcggcagggcgcgcgcgcccggcctatatcggccgcgggggctgtgtgtctgtccgtgt

SEQ ID NO: 25338 - DNA, 96 bp, Aspergillus fumigatus
  misc_feature: 196
atctttctctcttttcttttatttcttttctattttattctctttcttctttattaaaaccttcttaatctttactcttctttattattattttct

SEQ ID NO: 25339 - DNA, 96 bp, Aspergillus fumigatus
  misc_feature: 195
tttcttttctattttattctctttcttctttattaaaaccttcttaatctttactcttctttattattattttctctattattctattcttatgtt

SEQ ID NO: 25340 - DNA, 96 bp, Aspergillus fumigatus
  misc_feature: 195
tcctaactctatctaaactaactaacccttactctatctaaactgactaaccctgactctatctaaactatctaaccctaactctatcttactaaa

SEQ ID NO: 25341 - DNA, 96 bp, Aspergillus fumigatus
  misc_feature: 195
gaaaaagaaggagaaaaagaaggagaaaaagaaggagaaaaagaaggagaaaaagaaggagaaaaagaaggagaaaaagaaggagaaaaagaagaa

SEQ ID NO: 25342 - DNA, 96 bp, Aspergillus fumigatus
  misc_feature: 195
aaagaaggagaaaaagaaggagaaaaagaaggagaaaaagaaggagaaaaagaaggagaaaaagaaggagaaaaagaaggagaaaaagaagaagaa

SEQ ID NO: 25343 - DNA, 96 bp, Aspergillus fumigatus
  misc_feature: 195
ttctattttattctctttcttctttattaaaaccttcttaatctttactcttctttattattattttctctattattctattcttatgtttatctc

SEQ ID NO: 25344 - DNA, 96 bp, Aspergillus fumigatus
  misc_feature: 195
tattttttttgcaaatataaattcatatataatatgaaaaaaaaaaaattaaaaataaaaaaatataaatataaaaataattcttttttttactaa

SEQ ID NO: 25345 - DNA, 96 bp, Aspergillus fumigatus
  misc_feature: 195
ttaattcttatcctctctctattctctctctgaatatcctaatctatcctctttattctattatctttataattttctctcttttcttattattat

SEQ ID NO: 25346 - DNA, 96 bp, Aspergillus fumigatus
  misc_feature: 195
ttaaagaaaagaaaagaggagattaatatttaaataataatagtttaagaatgaaggaaagggaggtaataaggattagtagtaataagagagaag

SEQ ID NO: 25347 - DNA, 96 bp, Aspergillus fumigatus
  misc_feature: 195
agaaaaagaaggagaaaaagaaggagaaaaagaaggagaaaaagaaggagaaaaagaaggagaaaaagaaggagaaaaagaaggagaaaaagaaga

SEQ ID NO: 25348 - DNA, 96 bp, Aspergillus fumigatus
  misc_feature: 195
tctctcttttcttttatttcttttctattttattctctttcttctttattaaaaccttcttaatctttactcttctttattattattttctctatt

SEQ ID NO: 25349 - DNA, 96 bp, Aspergillus fumigatus
  misc_feature: 195
tataagatagggtagattagtagtaggtatagtagttttaggtctagtaattaatatattagtatatacctagctagtaatattcttatactatta

SEQ ID NO: 25350 - DNA, 96 bp, Aspergillus fumigatus
  misc_feature: 195
aggagaaaaagaagaagaaaaagaagaagaaagggaaaaatatagattagattagaaattcaagttaaaataagaataattagataaagaagatta

SEQ ID NO: 25351 - DNA, 96 bp, Aspergillus fumigatus
  misc_feature: 195
gatattcagagagagaatagagagaggataagaattaatatatagaagaaagagaagaaagagaagaaagaagataataaaagaaaggataagtta

SEQ ID NO: 25352 - DNA, 96 bp, Aspergillus fumigatus
  misc_feature: 195
taaatctttctctcttttcttttatttcttttctattttattctctttcttctttattaaaaccttcttaatctttactcttctttattattattt

SEQ ID NO: 25353 - DNA, 96 bp, Aspergillus fumigatus
  misc_feature: 195
ggagaaaaagaagaagaaaaagaagaagaaagggaaaaatatagattagattagaaattcaagttaaaataagaataattagataaagaagattat

SEQ ID NO: 25354 - DNA, 96 bp, Aspergillus fumigatus
  misc_feature: 195
gatagagtcagggttagtcagtttagatagagtaagggttagttagtttagatagagttaggattattcagtttagacagagtaagggttagttag

SEQ ID NO: 25355 - DNA, 96 bp, Aspergillus fumigatus
  misc_feature: 195
ctttatctaattattcttattttaacttgaatttctaatctaatctatatttttccctttcttcttctttttcttcttctttttctccttcttttt

SEQ ID NO: 25356 - DNA, 96 bp, Aspergillus fumigatus
  misc_feature: 195
aaaaagaaggagaaaaagaaggagaaaaagaaggagaaaaagaaggagaaaaagaaggagaaaaagaaggagaaaaagaaggagaaaaagaagaag

SEQ ID NO: 25357 - DNA, 96 bp, Aspergillus fumigatus
  misc_feature: 195
atagagtcagggttagtcagtttagatagagtaagggttagttagtttagatagagttaggattattcagtttagacagagtaagggttagttagt

SEQ ID NO: 25358 - DNA, 96 bp, Aspergillus fumigatus
  misc_feature: 195
agagtcagggttagtcagtttagatagagtaagggttagttagtttagatagagttaggattattcagtttagacagagtaagggttagttagttt

SEQ ID NO: 25359 - DNA, 96 bp, Aspergillus fumigatus
  misc_feature: 195
aaatctttctctcttttcttttatttcttttctattttattctctttcttctttattaaaaccttcttaatctttactcttctttattattatttt

SEQ ID NO: 25360 - DNA, 96 bp, Aspergillus fumigatus
  misc_feature: 194
ttaaatataatttccttacttattattatccttttaaatctttctctcttttcttttatttcttttctattttattctctttcttctttattaaaa

SEQ ID NO: 25361 - DNA, 96 bp, Aspergillus fumigatus
  misc_feature: 194
aagaaggagaaaaagaaggagaaaaagaaggagaaaaagaaggagaaaaagaaggagaaaaagaaggagaaaaagaaggagaaaaagaagaagaaa

SEQ ID NO: 25362 - DNA, 96 bp, Aspergillus fumigatus
  misc_feature: 194
aataaaaataaaaataaaaataaaaataaaaataaaaataaaaataaaaataaaaataaaaataaaaataaaaataaaaataaaaataaaaataaa

SEQ ID NO: 25363 - DNA, 96 bp, Aspergillus fumigatus
  misc_feature: 194
agaagaagaaagggaaaaatatagattagattagaaattcaagttaaaataagaataattagataaagaagattataaaagaaagaaaataaagaa

SEQ ID NO: 25364 - DNA, 96 bp, Aspergillus fumigatus
  misc_feature: 194
ttactttatcttaactaatgaacccttcctctatccaaactaactaaccctaactctatcttactaaaaaattaacttatcctttcttttattatc

SEQ ID NO: 25365 - DNA, 96 bp, Aspergillus fumigatus
  misc_feature: 194
tctttctctcttttcttttatttcttttctattttattctctttcttctttattaaaaccttcttaatctttactcttctttattattattttctc

SEQ ID NO: 25366 - DNA, 96 bp, Aspergillus fumigatus
  misc_feature: 194
aagaagaagaaagggaaaaatatagattagattagaaattcaagttaaaataagaataattagataaagaagattataaaagaaagaaaataaaga

SEQ ID NO: 25367 - DNA, 96 bp, Aspergillus fumigatus
  misc_feature: 194
ggtagagataaacataagaatagaataatagagaaaataataataaagaagagtaaagattaagaaggttttaataaagaagaaagagaataaaat

SEQ ID NO: 25368 - DNA, 96 bp, Aspergillus fumigatus
  misc_feature: 194
aatctttctctcttttcttttatttcttttctattttattctctttcttctttattaaaaccttcttaatctttactcttctttattattattttc

SEQ ID NO: 25369 - DNA, 96 bp, Aspergillus fumigatus
  misc_feature: 194
cttttatttcttttctattttattctctttcttctttattaaaaccttcttaatctttactcttctttattattattttctctattattctattct

SEQ ID NO: 25370 - DNA, 96 bp, Aspergillus fumigatus
  misc_feature: 194
ctaaactgaataatcctaactctatctaaactaactaacccttactctatctaaactgactaaccctgactctatctaaactatctaaccctaact

SEQ ID NO: 25371 - DNA, 96 bp, Aspergillus fumigatus
  misc_feature: 194
ctaaaattattataaacccttactcttactcttaacccttttttactctcttttttttactcttcttctttttcttacttttttttaccctgattt

SEQ ID NO: 25372 - DNA, 96 bp, Aspergillus fumigatus
  misc_feature: 194
atttcttttctattttattctctttcttctttattaaaaccttcttaatctttactcttctttattattattttctctattattctattcttatgt

SEQ ID NO: 25373 - DNA, 96 bp, Aspergillus fumigatus
  misc_feature: 193
agaaggagaaaaagaaggagaaaaagaaggagaaaaagaaggagaaaaagaaggagaaaaagaaggagaaaaagaaggagaaaaagaagaagaaaa

SEQ ID NO: 25374 - DNA, 96 bp, Aspergillus fumigatus
  misc_feature: 193
attttttttgcaaatataaattcatatataatatgaaaaaaaaaaaattaaaaataaaaaaatataaatataaaaataattcttttttttactaaa

SEQ ID NO: 25375 - DNA, 96 bp, Aspergillus fumigatus
  misc_feature: 193
atcctctctctattctctctctgaatatcctaatctatcctctttattctattatctttataattttctctcttttcttattattatccttctaaa

SEQ ID NO: 25376 - DNA, 96 bp, Aspergillus fumigatus
  misc_feature: 193
ttattaatagttaatttagccttctagatatacttatatactaggtagtagtatttatactatttagtactatagctagtaatatacttagagaac

SEQ ID NO: 25377 - DNA, 96 bp, Aspergillus fumigatus
  misc_feature: 193
aatagtataagaatattactagctaggtatatactaatatattaattactagacctaaaactactatacctactactaatctaccctatcttataa

SEQ ID NO: 25378 - DNA, 96 bp, Aspergillus fumigatus
  misc_feature: 193
ttagatagagtcagggttagtcagtttagatagagtaagggttagttagtttagatagagttaggattattcagtttagacagagtaagggttagt

SEQ ID NO: 25379 - DNA, 96 bp, Aspergillus fumigatus
  misc_feature: 193
ttaaatctttctctcttttcttttatttcttttctattttattctctttcttctttattaaaaccttcttaatctttactcttctttattattatt

SEQ ID NO: 25380 - DNA, 96 bp, Aspergillus fumigatus
  misc_feature: 193
tcttatcctctctctattctctctctgaatatcctaatctatcctctttattctattatctttataattttctctcttttcttattattatccttc

SEQ ID NO: 25381 - DNA, 96 bp, Aspergillus fumigatus
  misc_feature: 193
tatttcttttctattttattctctttcttctttattaaaaccttcttaatctttactcttctttattattattttctctattattctattcttatg

SEQ ID NO: 25382 - DNA, 96 bp, Aspergillus fumigatus
  misc_feature: 193
tagagtcagggttagtcagtttagatagagtaagggttagttagtttagatagagttaggattattcagtttagacagagtaagggttagttagtt

SEQ ID NO: 25383 - DNA, 96 bp, Aspergillus fumigatus
  misc_feature: 193
tagaaaaaagtaaggatttggatatttaaagagagaatcaagagagtataagaattaatatatagaaggaagagagaaaagagttaataaaaaaat

SEQ ID NO: 25384 - DNA, 96 bp, Aspergillus fumigatus
  misc_feature: 193
taaactgaataatcctaactctatctaaactaactaacccttactctatctaaactgactaaccctgactctatctaaactatctaaccctaactc

SEQ ID NO: 25385 - DNA, 96 bp, Aspergillus fumigatus
  misc_feature: 193
taaaattattataaacccttactcttactcttaacccttttttactctcttttttttactcttcttctttttcttacttttttttaccctgatttt

SEQ ID NO: 25386 - DNA, 96 bp, Aspergillus fumigatus
  misc_feature: 193
ctaactctatctaaactaactaacccttactctatctaaactgactaaccctgactctatctaaactatctaaccctaactctatcttactaaaac

SEQ ID NO: 25387 - DNA, 96 bp, Aspergillus fumigatus
  misc_feature: 193
aaggagaaaaagaaggagaaaaagaaggagaaaaagaaggagaaaaagaaggagaaaaagaaggagaaaaagaaggagaaaaagaagaagaaaaag

SEQ ID NO: 25388 - DNA, 96 bp, Aspergillus fumigatus
  misc_feature: 193
agtcagggttagtcagtttagatagagtaagggttagttagtttagatagagttaggattattcagtttagacagagtaagggttagttagtttag

SEQ ID NO: 25389 - DNA, 96 bp, Aspergillus fumigatus
  misc_feature: 193
aaactgaataatcctaactctatctaaactaactaacccttactctatctaaactgactaaccctgactctatctaaactatctaaccctaactct

SEQ ID NO: 25390 - DNA, 96 bp, Aspergillus fumigatus
  misc_feature: 192
gaaggagaaaaagaaggagaaaaagaaggagaaaaagaaggagaaaaagaaggagaaaaagaaggagaaaaagaaggagaaaaagaagaagaaaaa

SEQ ID NO: 25391 - DNA, 96 bp, Aspergillus fumigatus
  misc_feature: 192
ttatcctctctctattctctctctgaatatcctaatctatcctctttattctattatctttataattttctctcttttcttattattatccttcta

SEQ ID NO: 25392 - DNA, 96 bp, Aspergillus fumigatus
  misc_feature: 192
aataagaataattaaagaaaagaaaagaggagattaatatttaaataataatagtttaagaatgaaggaaagggaggtaataaggattagtagtaa

SEQ ID NO: 25393 - DNA, 96 bp, Aspergillus fumigatus
  misc_feature: 192
ataagatagggtagattagtagtaggtatagtagttttaggtctagtaattaatatattagtatatacctagctagtaatattcttatactattaa

SEQ ID NO: 25394 - DNA, 96 bp, Aspergillus fumigatus
  misc_feature: 192
atattcagagagagaatagagagaggataagaattaatatatagaagaaagagaagaaagagaagaaagaagataataaaagaaaggataagttaa

SEQ ID NO: 25395 - DNA, 96 bp, Aspergillus fumigatus
  misc_feature: 192
tcagagagagaatagagagaggataagaattaatatatagaagaaagagaagaaagagaagaaagaagataataaaagaaaggataagttaatttt

SEQ ID NO: 25396 - DNA, 96 bp, Aspergillus fumigatus
  misc_feature: 192
agaaaaaagtaaggatttggatatttaaagagagaatcaagagagtataagaattaatatatagaaggaagagagaaaagagttaataaaaaaata

SEQ ID NO: 25397 - DNA, 96 bp, Aspergillus fumigatus
  misc_feature: 192
tattcagagagagaatagagagaggataagaattaatatatagaagaaagagaagaaagagaagaaagaagataataaaagaaaggataagttaat

SEQ ID NO: 25398 - DNA, 96 bp, Aspergillus fumigatus
  misc_feature: 192
tagggtagattagtagtaggtatagtagttttaggtctagtaattaatatattagtatatacctagctagtaatattcttatactattaacttata

SEQ ID NO: 25399 - DNA, 96 bp, Aspergillus fumigatus
  misc_feature: 192
tagatagagtcagggttagtcagtttagatagagtaagggttagttagtttagatagagttaggattattcagtttagacagagtaagggttagtt

SEQ ID NO: 25400 - DNA, 96 bp, Aspergillus fumigatus
  misc_feature: 192
aaataagaataattaaagaaaagaaaagaggagattaatatttaaataataatagtttaagaatgaaggaaagggaggtaataaggattagtagta

SEQ ID NO: 25401 - DNA, 96 bp, Aspergillus fumigatus
  misc_feature: 192
accggtcccctccgcgcgcgcggcccatcgctcgctgcggcagggcgcgcgcgcccggcctatatcggccgcgggggctgtgtgtctgtccgtgta

SEQ ID NO: 25402 - DNA, 96 bp, Aspergillus fumigatus
  misc_feature: 192
gttaaaataagaataattaaagaaaagaaaagaggagattaatatttaaataataatagtttaagaatgaaggaaagggaggtaataaggattagt

SEQ ID NO: 25403 - DNA, 96 bp, Aspergillus fumigatus
  misc_feature: 192
agaagaaagggaaaaatatagattagattagaaattcaagttaaaataagaataattagataaagaagattataaaagaaagaaaataaagaaaag

SEQ ID NO: 25404 - DNA, 96 bp, Aspergillus fumigatus
  misc_feature: 192
cttatcctctctctattctctctctgaatatcctaatctatcctctttattctattatctttataattttctctcttttcttattattatccttct

SEQ ID NO: 25405 - DNA, 96 bp, Aspergillus fumigatus
  misc_feature: 192
ctgtctaaactgaataatcctaactctatctaaactaactaacccttactctatctaaactgactaaccctgactctatctaaactatctaaccct

SEQ ID NO: 25406 - DNA, 96 bp, Aspergillus fumigatus
  misc_feature: 192
cagagagagaatagagagaggataagaattaatatatagaagaaagagaagaaagagaagaaagaagataataaaagaaaggataagttaattttt

SEQ ID NO: 25407 - DNA, 96 bp, Aspergillus fumigatus
  misc_feature: 192
attcagagagagaatagagagaggataagaattaatatatagaagaaagagaagaaagagaagaaagaagataataaaagaaaggataagttaatt

SEQ ID NO: 25408 - DNA, 96 bp, Aspergillus fumigatus
  misc_feature: 192
attactagacctaaaactactatacctactactaatctaccctatcttataaagtctactaagaagtactatatctgctcctaatacctaaataat

SEQ ID NO: 25409 - DNA, 96 bp, Aspergillus fumigatus
  misc_feature: 192
ataagaataattaaagaaaagaaaagaggagattaatatttaaataataatagtttaagaatgaaggaaagggaggtaataaggattagtagtaat

SEQ ID NO: 25410 - DNA, 96 bp, Aspergillus fumigatus
  misc_feature: 192
aaaataagaataattaaagaaaagaaaagaggagattaatatttaaataataatagtttaagaatgaaggaaagggaggtaataaggattagtagt

SEQ ID NO: 25411 - DNA, 96 bp, Aspergillus fumigatus
  misc_feature: 192
actaaaattattataaacccttactcttactcttaacccttttttactctcttttttttactcttcttctttttcttacttttttttaccctgatt

SEQ ID NO: 25412 - DNA, 96 bp, Aspergillus fumigatus
  misc_feature: 191
aggtagagataaacataagaatagaataatagagaaaataataataaagaagagtaaagattaagaaggttttaataaagaagaaagagaataaaa

SEQ ID NO: 25413 - DNA, 96 bp, Aspergillus fumigatus
  misc_feature: 191
tttattaatagttaatttagccttctagatatacttatatactaggtagtagtatttatactatttagtactatagctagtaatatacttagagaa

SEQ ID NO: 25414 - DNA, 96 bp, Aspergillus fumigatus
  misc_feature: 191
aagaaagggaaaaatatagattagattagaaattcaagttaaaataagaataattagataaagaagattataaaagaaagaaaataaagaaaagaa

SEQ ID NO: 25415 - DNA, 96 bp, Aspergillus fumigatus
  misc_feature: 191
ttctctcttttcttttatttcttttctattttattctctttcttctttattaaaaccttcttaatctttactcttctttattattattttctctat

SEQ ID NO: 25416 - DNA, 96 bp, Aspergillus fumigatus
  misc_feature: 191
ttcagagagagaatagagagaggataagaattaatatatagaagaaagagaagaaagagaagaaagaagataataaaagaaaggataagttaattt

SEQ ID NO: 25417 - DNA, 96 bp, Aspergillus fumigatus
  misc_feature: 191
ttatctaattattcttattttaacttgaatttctaatctaatctatatttttccctttcttcttctttttcttcttctttttctccttctttttct

SEQ ID NO: 25418 - DNA, 96 bp, Aspergillus fumigatus
  misc_feature: 191
ttactagacctaaaactactatacctactactaatctaccctatcttataaagtctactaagaagtactatatctgctcctaatacctaaataatt

SEQ ID NO: 25419 - DNA, 96 bp, Aspergillus fumigatus
  misc_feature: 191
aggagaaaaagaaggagaaaaagaaggagaaaaagaaggagaaaaagaaggagaaaaagaaggagaaaaagaaggagaaaaagaagaagaaaaaga

SEQ ID NO: 25420 - DNA, 96 bp, Aspergillus fumigatus
  misc_feature: 191
tctaaactgaataatcctaactctatctaaactaactaacccttactctatctaaactgactaaccctgactctatctaaactatctaaccctaac

SEQ ID NO: 25421 - DNA, 96 bp, Aspergillus fumigatus
  misc_feature: 191
gtcagggttagtcagtttagatagagtaagggttagttagtttagatagagttaggattattcagtttagacagagtaagggttagttagtttaga

SEQ ID NO: 25422 - DNA, 96 bp, Aspergillus fumigatus
  misc_feature: 191
tattatcttaaatataatttccttacttattattatccttttaaatctttctctcttttcttttatttcttttctattttattctctttcttcttt

SEQ ID NO: 25423 - DNA, 96 bp, Aspergillus fumigatus
  misc_feature: 191
taagaataattaaagaaaagaaaagaggagattaatatttaaataataatagtttaagaatgaaggaaagggaggtaataaggattagtagtaata

SEQ ID NO: 25424 - DNA, 96 bp, Aspergillus fumigatus
  misc_feature: 191
tattaatagttaatttagccttctagatatacttatatactaggtagtagtatttatactatttagtactatagctagtaatatacttagagaact

SEQ ID NO: 25425 - DNA, 96 bp, Aspergillus fumigatus
  misc_feature: 191
agatagagtcagggttagtcagtttagatagagtaagggttagttagtttagatagagttaggattattcagtttagacagagtaagggttagtta

SEQ ID NO: 25426 - DNA, 96 bp, Aspergillus fumigatus
  misc_feature: 191
cctctctctattctctctctgaatatcctaatctatcctctttattctattatctttataattttctctcttttcttattattatccttctaaatc

SEQ ID NO: 25427 - DNA, 96 bp, Aspergillus fumigatus
  misc_feature: 191
attaatagttaatttagccttctagatatacttatatactaggtagtagtatttatactatttagtactatagctagtaatatacttagagaactc

SEQ ID NO: 25428 - DNA, 96 bp, Aspergillus fumigatus
  misc_feature: 191
ctaattattcttattttaacttgaatttctaatctaatctatatttttccctttcttcttctttttcttcttctttttctccttctttttctcctt

SEQ ID NO: 25429 - DNA, 96 bp, Aspergillus fumigatus
  misc_feature: 191
attcttatcctctctctattctctctctgaatatcctaatctatcctctttattctattatctttataattttctctcttttcttattattatcct

SEQ ID NO: 25430 - DNA, 96 bp, Aspergillus fumigatus
  misc_feature: 190
atagaaaaaagtaaggatttggatatttaaagagagaatcaagagagtataagaattaatatatagaaggaagagagaaaagagttaataaaaaaa

SEQ ID NO: 25431 - DNA, 96 bp, Aspergillus fumigatus
  misc_feature: 190
taggtagagataaacataagaatagaataatagagaaaataataataaagaagagtaaagattaagaaggttttaataaagaagaaagagaataaa

SEQ ID NO: 25432 - DNA, 96 bp, Aspergillus fumigatus
  misc_feature: 190
tttagatagagtcagggttagtcagtttagatagagtaagggttagttagtttagatagagttaggattattcagtttagacagagtaagggttag

SEQ ID NO: 25433 - DNA, 96 bp, Aspergillus fumigatus
  misc_feature: 190
atcctaactctatctaaactaactaacccttactctatctaaactgactaaccctgactctatctaaactatctaaccctaactctatcttactaa

SEQ ID NO: 25434 - DNA, 96 bp, Aspergillus fumigatus
  misc_feature: 190
gtctaaactgaataatcctaactctatctaaactaactaacccttactctatctaaactgactaaccctgactctatctaaactatctaaccctaa

SEQ ID NO: 25435 - DNA, 96 bp, Aspergillus fumigatus
  misc_feature: 190
tagatagtttagatagagtcagggttagtcagtttagatagagtaagggttagttagtttagatagagttaggattattcagtttagacagagtaa

SEQ ID NO: 25436 - DNA, 96 bp, Aspergillus fumigatus
  misc_feature: 190
tcttttcttttatttcttttctattttattctctttcttctttattaaaaccttcttaatctttactcttctttattattattttctctattattc

SEQ ID NO: 25437 - DNA, 96 bp, Aspergillus fumigatus
  misc_feature: 190
gaagaaagggaaaaatatagattagattagaaattcaagttaaaataagaataattagataaagaagattataaaagaaagaaaataaagaaaaga

SEQ ID NO: 25438 - DNA, 96 bp, Aspergillus fumigatus
  misc_feature: 190
tctgtctaaactgaataatcctaactctatctaaactaactaacccttactctatctaaactgactaaccctgactctatctaaactatctaaccc

SEQ ID NO: 25439 - DNA, 96 bp, Aspergillus fumigatus
  misc_feature: 190
tctaattattcttattttaacttgaatttctaatctaatctatatttttccctttcttcttctttttcttcttctttttctccttctttttctcct

SEQ ID NO: 25440 - DNA, 96 bp, Aspergillus fumigatus
  misc_feature: 190
tactagacctaaaactactatacctactactaatctaccctatcttataaagtctactaagaagtactatatctgctcctaatacctaaataatta

SEQ ID NO: 25441 - DNA, 96 bp, Aspergillus fumigatus
  misc_feature: 190
taattcttatcctctctctattctctctctgaatatcctaatctatcctctttattctattatctttataattttctctcttttcttattattatc

SEQ ID NO: 25442 - DNA, 96 bp, Aspergillus fumigatus
  misc_feature: 190
gacatgatgacaggtgaatatatatatatatatatttaatgtgagagtaaaagataagatgaaagtgaatattttcgtcgatatacagaagggaac

SEQ ID NO: 25443 - DNA, 96 bp, Aspergillus fumigatus
  misc_feature: 190
ggttagatagtttagatagagtcagggttagtcagtttagatagagtaagggttagttagtttagatagagttaggattattcagtttagacagag

SEQ ID NO: 25444 - DNA, 96 bp, Aspergillus fumigatus
  misc_feature: 190
ctgaataatcctaactctatctaaactaactaacccttactctatctaaactgactaaccctgactctatctaaactatctaaccctaactctatc

SEQ ID NO: 25445 - DNA, 96 bp, Aspergillus fumigatus
  misc_feature: 190
ctttctctcttttcttttatttcttttctattttattctctttcttctttattaaaaccttcttaatctttactcttctttattattattttctct

SEQ ID NO: 25446 - DNA, 96 bp, Aspergillus fumigatus
  misc_feature: 190
aaaaaagtaaggatttggatatttaaagagagaatcaagagagtataagaattaatatatagaaggaagagagaaaagagttaataaaaaaataag

SEQ ID NO: 25447 - DNA, 96 bp, Aspergillus fumigatus
  misc_feature: 190
ctcttttcttttatttcttttctattttattctctttcttctttattaaaaccttcttaatctttactcttctttattattattttctctattatt

SEQ ID NO: 25448 - DNA, 96 bp, Aspergillus fumigatus
  misc_feature: 190
atctctacctaactcacaattatatatatataattctaaaactatatctataatatctacttctgggatacctctctatctatctactaatctcct

SEQ ID NO: 25449 - DNA, 96 bp, Aspergillus fumigatus
  misc_feature: 190
actgaataatcctaactctatctaaactaactaacccttactctatctaaactgactaaccctgactctatctaaactatctaaccctaactctat

SEQ ID NO: 25450 - DNA, 96 bp, Aspergillus fumigatus
  misc_feature: 190
agtttagatagagtcagggttagtcagtttagatagagtaagggttagttagtttagatagagttaggattattcagtttagacagagtaagggtt

SEQ ID NO: 25451 - DNA, 96 bp, Aspergillus fumigatus
  misc_feature: 190
acatgatgacaggtgaatatatatatatatatatttaatgtgagagtaaaagataagatgaaagtgaatattttcgtcgatatacagaagggaact

SEQ ID NO: 25452 - DNA, 96 bp, Aspergillus fumigatus
  misc_feature: 190
aagatagggtagattagtagtaggtatagtagttttaggtctagtaattaatatattagtatatacctagctagtaatattcttatactattaact

SEQ ID NO: 25453 - DNA, 96 bp, Aspergillus fumigatus
  misc_feature: 189
tttctctcttttcttttatttcttttctattttattctctttcttctttattaaaaccttcttaatctttactcttctttattattattttctcta

SEQ ID NO: 25454 - DNA, 96 bp, Aspergillus fumigatus
  misc_feature: 189
ttcttatcctctctctattctctctctgaatatcctaatctatcctctttattctattatctttataattttctctcttttcttattattatcctt

SEQ ID NO: 25455 - DNA, 96 bp, Aspergillus fumigatus
  misc_feature: 189
ttagatagtttagatagagtcagggttagtcagtttagatagagtaagggttagttagtttagatagagttaggattattcagtttagacagagta

SEQ ID NO: 25456 - DNA, 96 bp, Aspergillus fumigatus
  misc_feature: 189
tgtttatctctacctaactcacaattatatatatataattctaaaactatatctataatatctacttctgggatacctctctatctatctactaat

SEQ ID NO: 25457 - DNA, 96 bp, Aspergillus fumigatus
  misc_feature: 189
tgaataatcctaactctatctaaactaactaacccttactctatctaaactgactaaccctgactctatctaaactatctaaccctaactctatct

SEQ ID NO: 25458 - DNA, 96 bp, Aspergillus fumigatus
  misc_feature: 189
tcctctctctattctctctctgaatatcctaatctatcctctttattctattatctttataattttctctcttttcttattattatccttctaaat

SEQ ID NO: 25459 - DNA, 96 bp, Aspergillus fumigatus
  misc_feature: 189
tatctaattattcttattttaacttgaatttctaatctaatctatatttttccctttcttcttctttttcttcttctttttctccttctttttctc

SEQ ID NO: 25460 - DNA, 96 bp, Aspergillus fumigatus
  misc_feature: 189
catgatgacaggtgaatatatatatatatatatttaatgtgagagtaaaagataagatgaaagtgaatattttcgtcgatatacagaagggaacta

SEQ ID NO: 25461 - DNA, 96 bp, Aspergillus fumigatus
  misc_feature: 189
tagatgtattaattatccttagattataatataataatacttaaataggattataatagaaatttaaaaatagttagtatactttaggatactaac

SEQ ID NO: 25462 - DNA, 96 bp, Aspergillus fumigatus
  misc_feature: 189
aactgaataatcctaactctatctaaactaactaacccttactctatctaaactgactaaccctgactctatctaaactatctaaccctaactcta

SEQ ID NO: 25463 - DNA, 96 bp, Aspergillus fumigatus
  misc_feature: 189
gtttagatagagtcagggttagtcagtttagatagagtaagggttagttagtttagatagagttaggattattcagtttagacagagtaagggtta

SEQ ID NO: 25464 - DNA, 96 bp, Aspergillus fumigatus
  misc_feature: 189
taaaataagaataattaaagaaaagaaaagaggagattaatatttaaataataatagtttaagaatgaaggaaagggaggtaataaggattagtag

SEQ ID NO: 25465 - DNA, 96 bp, Aspergillus fumigatus
  misc_feature: 189
cttccctttccaatcttatttattctctctttacttacttaaactctctttatcttatatatctcttcgtcctattcttatcttaaacttgctaac

SEQ ID NO: 25466 - DNA, 96 bp, Aspergillus fumigatus
  misc_feature: 189
agatagtttagatagagtcagggttagtcagtttagatagagtaagggttagttagtttagatagagttaggattattcagtttagacagagtaag

SEQ ID NO: 25467 - DNA, 96 bp, Aspergillus fumigatus
  misc_feature: 189
ctattatcttaaatataatttccttacttattattatccttttaaatctttctctcttttcttttatttcttttctattttattctctttcttctt

SEQ ID NO: 25468 - DNA, 96 bp, Aspergillus fumigatus
  misc_feature: 189
aaaatatagattagattagaaattcaagttaaaataagaataattagataaagaagattataaaagaaagaaaataaagaaaagaaaagaggagat

SEQ ID NO: 25469 - DNA, 96 bp, Aspergillus fumigatus
  misc_feature: 188
ggagaaaaagaaggagaaaaagaaggagaaaaagaaggagaaaaagaaggagaaaaagaaggagaaaaagaaggagaaaaagaagaagaaaaagaa

SEQ ID NO: 25470 - DNA, 96 bp, Aspergillus fumigatus
  misc_feature: 188
ttccttcttccctttccaatcttatttattctctctttacttacttaaactctctttatcttatatatctcttcgtcctattcttatcttaaactt

SEQ ID NO: 25471 - DNA, 96 bp, Aspergillus fumigatus
  misc_feature: 188
ttccctttccaatcttatttattctctctttacttacttaaactctctttatcttatatatctcttcgtcctattcttatcttaaacttgctaacc

SEQ ID NO: 25472 - DNA, 96 bp, Aspergillus fumigatus
  misc_feature: 188
gaaaaaagtaaggatttggatatttaaagagagaatcaagagagtataagaattaatatatagaaggaagagagaaaagagttaataaaaaaataa

SEQ ID NO: 25473 - DNA, 96 bp, Aspergillus fumigatus
  misc_feature: 188
atatagattagattagaaattcaagttaaaataagaataattagataaagaagattataaaagaaagaaaataaagaaaagaaaagaggagattaa

SEQ ID NO: 25474 - DNA, 96 bp, Aspergillus fumigatus
  misc_feature: 188
ttaaaataagaataattaaagaaaagaaaagaggagattaatatttaaataataatagtttaagaatgaaggaaagggaggtaataaggattagta

SEQ ID NO: 25475 - DNA, 96 bp, Aspergillus fumigatus
  misc_feature: 188
tgtctaaactgaataatcctaactctatctaaactaactaacccttactctatctaaactgactaaccctgactctatctaaactatctaacccta

SEQ ID NO: 25476 - DNA, 96 bp, Aspergillus fumigatus
  misc_feature: 188
tcttttatttcttttctattttattctctttcttctttattaaaaccttcttaatctttactcttctttattattattttctctattattctattc

SEQ ID NO: 25477 - DNA, 96 bp, Aspergillus fumigatus
  misc_feature: 188
tctaaactgactaaccctgactctatctaaactatctaaccctaactctatcttactaaaactaacttatttttttattaactcttttctctcttc

SEQ ID NO: 25478 - DNA, 96 bp, Aspergillus fumigatus
  misc_feature: 188
tatctctacctaactcacaattatatatatataattctaaaactatatctataatatctacttctgggatacctctctatctatctactaatctcc

SEQ ID NO: 25479 - DNA, 96 bp, Aspergillus fumigatus
  misc_feature: 188
tagtttagatagagtcagggttagtcagtttagatagagtaagggttagttagtttagatagagttaggattattcagtttagacagagtaagggt

SEQ ID NO: 25480 - DNA, 96 bp, Aspergillus fumigatus
  misc_feature: 188
tactaaaattattataaacccttactcttactcttaacccttttttactctcttttttttactcttcttctttttcttacttttttttaccctgat

SEQ ID NO: 25481 - DNA, 96 bp, Aspergillus fumigatus
  misc_feature: 188
taatcctaactctatctaaactaactaacccttactctatctaaactgactaaccctgactctatctaaactatctaaccctaactctatcttact

SEQ ID NO: 25482 - DNA, 96 bp, Aspergillus fumigatus
  misc_feature: 188
ctctcttttcttttatttcttttctattttattctctttcttctttattaaaaccttcttaatctttactcttctttattattattttctctatta

SEQ ID NO: 25483 - DNA, 96 bp, Aspergillus fumigatus
  misc_feature: 188
taagatagggtagattagtagtaggtatagtagttttaggtctagtaattaatatattagtatatacctagctagtaatattcttatactattaac

SEQ ID NO: 25484 - DNA, 96 bp, Aspergillus fumigatus
  misc_feature: 188
attatcttaaatataatttccttacttattattatccttttaaatctttctctcttttcttttatttcttttctattttattctctttcttcttta

SEQ ID NO: 25485 - DNA, 96 bp, Aspergillus fumigatus
  misc_feature: 188
gttagatagtttagatagagtcagggttagtcagtttagatagagtaagggttagttagtttagatagagttaggattattcagtttagacagagt

SEQ ID NO: 25486 - DNA, 96 bp, Aspergillus fumigatus
  misc_feature: 188
gtgagttaggtagagataaacataagaatagaataatagagaaaataataataaagaagagtaaagattaagaaggttttaataaagaagaaagag

SEQ ID NO: 25487 - DNA, 96 bp, Aspergillus fumigatus
  misc_feature: 188
ctctacctaactcacaattatatatatataattctaaaactatatctataatatctacttctgggatacctctctatctatctactaatctcctac

SEQ ID NO: 25488 - DNA, 96 bp, Aspergillus fumigatus
  misc_feature: 188
aattcttatcctctctctattctctctctgaatatcctaatctatcctctttattctattatctttataattttctctcttttcttattattatcc

SEQ ID NO: 25489 - DNA, 96 bp, Aspergillus fumigatus
  misc_feature: 188
gatagtttagatagagtcagggttagtcagtttagatagagtaagggttagttagtttagatagagttaggattattcagtttagacagagtaagg

SEQ ID NO: 25490 - DNA, 96 bp, Aspergillus fumigatus
  misc_feature: 188
ccggtcccctccgcgcgcgcggcccatcgctcgctgcggcagggcgcgcgcgcccggcctatatcggccgcgggggctgtgtgtctgtccgtgtat

SEQ ID NO: 25491 - DNA, 96 bp, Aspergillus fumigatus
  misc_feature: 188
atagttttagaattatatatatataattgtgagttaggtagagataaacataagaatagaataatagagaaaataataataaagaagagtaaagat

SEQ ID NO: 25492 - DNA, 96 bp, Aspergillus fumigatus
  misc_feature: 188
agggtagattagtagtaggtatagtagttttaggtctagtaattaatatattagtatatacctagctagtaatattcttatactattaacttatat

SEQ ID NO: 25493 - DNA, 96 bp, Aspergillus fumigatus
  misc_feature: 188
actgactaaccctgactctatctaaactatctaaccctaactctatcttactaaaactaacttatttttttattaactcttttctctcttccttct

SEQ ID NO: 25494 - DNA, 96 bp, Aspergillus fumigatus
  misc_feature: 187
cttaaatataatttccttacttattattatccttttaaatctttctctcttttcttttatttcttttctattttattctctttcttctttattaaa

SEQ ID NO: 25495 - DNA, 96 bp, Aspergillus fumigatus
  misc_feature: 187
ttcttttatttcttttctattttattctctttcttctttattaaaaccttcttaatctttactcttctttattattattttctctattattctatt

SEQ ID NO: 25496 - DNA, 96 bp, Aspergillus fumigatus
  misc_feature: 187
ttagatgtattaattatccttagattataatataataatacttaaataggattataatagaaatttaaaaatagttagtatactttaggatactaa

SEQ ID NO: 25497 - DNA, 96 bp, Aspergillus fumigatus
  misc_feature: 187
ttagtagatagatagagaggtatcccagaagtagatattatagatatagttttagaattatatatatataattgtgagttaggtagagataaacat

SEQ ID NO: 25498 - DNA, 96 bp, Aspergillus fumigatus
  misc_feature: 187
ttagccctagtcctagcactagcactagcctgagcactagcctgagcactagcctgagcactagcctgagcactagcctgagcactagcctgagca

SEQ ID NO: 25499 - DNA, 96 bp, Aspergillus fumigatus
  misc_feature: 187
tcttccctttccaatcttatttattctctctttacttacttaaactctctttatcttatatatctcttcgtcctattcttatcttaaacttgctaa

SEQ ID NO: 25500 - DNA, 96 bp, Aspergillus fumigatus
  misc_feature: 187
tctcttttcttttatttcttttctattttattctctttcttctttattaaaaccttcttaatctttactcttctttattattattttctctattat

SEQ ID NO: 25501 - DNA, 96 bp, Aspergillus fumigatus
  misc_feature: 187
tctctacctaactcacaattatatatatataattctaaaactatatctataatatctacttctgggatacctctctatctatctactaatctccta

SEQ ID NO: 25502 - DNA, 96 bp, Aspergillus fumigatus
  misc_feature: 187
aaaaatatagattagattagaaattcaagttaaaataagaataattagataaagaagattataaaagaaagaaaataaagaaaagaaaagaggaga

SEQ ID NO: 25503 - DNA, 96 bp, Aspergillus fumigatus
  misc_feature: 187
tcagggttagtcagtttagatagagtaagggttagttagtttagatagagttaggattattcagtttagacagagtaagggttagttagtttagat

SEQ ID NO: 25504 - DNA, 96 bp, Aspergillus fumigatus
  misc_feature: 187
tagtagatagatagagaggtatcccagaagtagatattatagatatagttttagaattatatatatataattgtgagttaggtagagataaacata

SEQ ID NO: 25505 - DNA, 96 bp, Aspergillus fumigatus
  misc_feature: 187
aatcctaactctatctaaactaactaacccttactctatctaaactgactaaccctgactctatctaaactatctaaccctaactctatcttacta

SEQ ID NO: 25506 - DNA, 96 bp, Aspergillus fumigatus
  misc_feature: 187
taattattcttattttaacttgaatttctaatctaatctatatttttccctttcttcttctttttcttcttctttttctccttctttttctccttc

SEQ ID NO: 25507 - DNA, 96 bp, Aspergillus fumigatus
  misc_feature: 187
aataatcctaactctatctaaactaactaacccttactctatctaaactgactaaccctgactctatctaaactatctaaccctaactctatctta

SEQ ID NO: 25508 - DNA, 96 bp, Aspergillus fumigatus
  misc_feature: 187
gtttatctctacctaactcacaattatatatatataattctaaaactatatctataatatctacttctgggatacctctctatctatctactaatc

SEQ ID NO: 25509 - DNA, 96 bp, Aspergillus fumigatus
  misc_feature: 187
ataatcctaactctatctaaactaactaacccttactctatctaaactgactaaccctgactctatctaaactatctaaccctaactctatcttac

SEQ ID NO: 25510 - DNA, 96 bp, Aspergillus fumigatus
  misc_feature: 187
ctaaactgactaaccctgactctatctaaactatctaaccctaactctatcttactaaaactaacttatttttttattaactcttttctctcttcc

SEQ ID NO: 25511 - DNA, 96 bp, Aspergillus fumigatus
  misc_feature: 187
ccttcttccctttccaatcttatttattctctctttacttacttaaactctctttatcttatatatctcttcgtcctattcttatcttaaacttgc

SEQ ID NO: 25512 - DNA, 96 bp, Aspergillus fumigatus
  misc_feature: 187
cttttcttttatttcttttctattttattctctttcttctttattaaaaccttcttaatctttactcttctttattattattttctctattattct

SEQ ID NO: 25513 - DNA, 96 bp, Aspergillus fumigatus
  misc_feature: 187
cttcttccctttccaatcttatttattctctctttacttacttaaactctctttatcttatatatctcttcgtcctattcttatcttaaacttgct

SEQ ID NO: 25514 - DNA, 96 bp, Aspergillus fumigatus
  misc_feature: 187
ctaccttcctaaatacctctttccctacctcacttactaccttactaccttgctcactaccttacttactacctcactatctatcttactgcctgt

SEQ ID NO: 25515 - DNA, 96 bp, Aspergillus fumigatus
  misc_feature: 187
atagtttagatagagtcagggttagtcagtttagatagagtaagggttagttagtttagatagagttaggattattcagtttagacagagtaaggg

SEQ ID NO: 25516 - DNA, 96 bp, Aspergillus fumigatus
  misc_feature: 187
atagggtagattagtagtaggtatagtagttttaggtctagtaattaatatattagtatatacctagctagtaatattcttatactattaacttat

SEQ ID NO: 25517 - DNA, 96 bp, Aspergillus fumigatus
  misc_feature: 187
aaatatagattagattagaaattcaagttaaaataagaataattagataaagaagattataaaagaaagaaaataaagaaaagaaaagaggagatt

SEQ ID NO: 25518 - DNA, 96 bp, Aspergillus fumigatus
  misc_feature: 187
aaactaactaacccttactctatctaaactgactaaccctgactctatctaaactatctaaccctaactctatcttactaaaactaacttattttt

SEQ ID NO: 25519 - DNA, 96 bp, Aspergillus fumigatus
  misc_feature: 186
agaaagggaaaaatatagattagattagaaattcaagttaaaataagaataattagataaagaagattataaaagaaagaaaataaagaaaagaaa

SEQ ID NO: 25520 - DNA, 96 bp, Aspergillus fumigatus
  misc_feature: 186
tttcttttatttcttttctattttattctctttcttctttattaaaaccttcttaatctttactcttctttattattattttctctattattctat

SEQ ID NO: 25521 - DNA, 96 bp, Aspergillus fumigatus
  misc_feature: 186
tttatctctacctaactcacaattatatatatataattctaaaactatatctataatatctacttctgggatacctctctatctatctactaatct

SEQ ID NO: 25522 - DNA, 96 bp, Aspergillus fumigatus
  misc_feature: 186
ttcttccctttccaatcttatttattctctctttacttacttaaactctctttatcttatatatctcttcgtcctattcttatcttaaacttgcta

SEQ ID NO: 25523 - DNA, 96 bp, Aspergillus fumigatus
  misc_feature: 186
gagttaggtagagataaacataagaatagaataatagagaaaataataataaagaagagtaaagattaagaaggttttaataaagaagaaagagaa

SEQ ID NO: 25524 - DNA, 96 bp, Aspergillus fumigatus
  misc_feature: 186
ttatcttaaatataatttccttacttattattatccttttaaatctttctctcttttcttttatttcttttctattttattctctttcttctttat

SEQ ID NO: 25525 - DNA, 96 bp, Aspergillus fumigatus
  misc_feature: 186
tcttaaatataatttccttacttattattatccttttaaatctttctctcttttcttttatttcttttctattttattctctttcttctttattaa

SEQ ID NO: 25526 - DNA, 96 bp, Aspergillus fumigatus
  misc_feature: 186
tgtgagttaggtagagataaacataagaatagaataatagagaaaataataataaagaagagtaaagattaagaaggttttaataaagaagaaaga

SEQ ID NO: 25527 - DNA, 96 bp, Aspergillus fumigatus
  misc_feature: 186
tctacctaactcacaattatatatatataattctaaaactatatctataatatctacttctgggatacctctctatctatctactaatctcctact

SEQ ID NO: 25528 - DNA, 96 bp, Aspergillus fumigatus
  misc_feature: 186
tccttcttccctttccaatcttatttattctctctttacttacttaaactctctttatcttatatatctcttcgtcctattcttatcttaaacttg

SEQ ID NO: 25529 - DNA, 96 bp, Aspergillus fumigatus
  misc_feature: 186
tatagattagattagaaattcaagttaaaataagaataattagataaagaagattataaaagaaagaaaataaagaaaagaaaagaggagattaat

SEQ ID NO: 25530 - DNA, 96 bp, Aspergillus fumigatus
  misc_feature: 186
tagttttagaattatatatatataattgtgagttaggtagagataaacataagaatagaataatagagaaaataataataaagaagagtaaagatt

SEQ ID NO: 25531 - DNA, 96 bp, Aspergillus fumigatus
  misc_feature: 186
tagcactagcactagcctgagcactagcctgagcactagcctgagcactagcctgagcactagcctgagcactagcctgagcagtagtactagacc

SEQ ID NO: 25532 - DNA, 96 bp, Aspergillus fumigatus
  misc_feature: 186
atctaattattcttattttaacttgaatttctaatctaatctatatttttccctttcttcttctttttcttcttctttttctccttctttttctcc

SEQ ID NO: 25533 - DNA, 96 bp, Aspergillus fumigatus
  misc_feature: 186
gatgatcacattagccctagtcctagcactagcactagcctgagcactagcctgagcactagcctgagcactagcctgagcactagcctgagcact

SEQ ID NO: 25534 - DNA, 96 bp, Aspergillus fumigatus
  misc_feature: 186
gaataatcctaactctatctaaactaactaacccttactctatctaaactgactaaccctgactctatctaaactatctaaccctaactctatctt

SEQ ID NO: 25535 - DNA, 96 bp, Aspergillus fumigatus
  misc_feature: 186
gaaaaatatagattagattagaaattcaagttaaaataagaataattagataaagaagattataaaagaaagaaaataaagaaaagaaaagaggag

SEQ ID NO: 25536 - DNA, 96 bp, Aspergillus fumigatus
  misc_feature: 186
acctcactatctatcttactgcctgtctcactgcctgccttactatctcacttactaccttattatctaccttactacctgcctcaccatctaccg

SEQ ID NO: 25537 - DNA, 96 bp, Aspergillus fumigatus
  misc_feature: 186
ccctttccaatcttatttattctctctttacttacttaaactctctttatcttatatatctcttcgtcctattcttatcttaaacttgctaaccct

SEQ ID NO: 25538 - DNA, 96 bp, Aspergillus fumigatus
  misc_feature: 186
agtaaggatttggatatttaaagagagaatcaagagagtataagaattaatatatagaaggaagagagaaaagagttaataaaaaaataagttagt

SEQ ID NO: 25539 - DNA, 96 bp, Aspergillus fumigatus
  misc_feature: 186
agcactagcactagcctgagcactagcctgagcactagcctgagcactagcctgagcactagcctgagcactagcctgagcagtagtactagacct

SEQ ID NO: 25540 - DNA, 96 bp, Aspergillus fumigatus
  misc_feature: 186
agagagagaatagagagaggataagaattaatatatagaagaaagagaagaaagagaagaaagaagataataaaagaaaggataagttaatttttt

SEQ ID NO: 25541 - DNA, 96 bp, Aspergillus fumigatus
  misc_feature: 186
aaaaagtaaggatttggatatttaaagagagaatcaagagagtataagaattaatatatagaaggaagagagaaaagagttaataaaaaaataagt

SEQ ID NO: 25542 - DNA, 96 bp, Aspergillus fumigatus
  misc_feature: 185
attgtgagttaggtagagataaacataagaatagaataatagagaaaataataataaagaagagtaaagattaagaaggttttaataaagaagaaa

SEQ ID NO: 25543 - DNA, 96 bp, Aspergillus fumigatus
  misc_feature: 185
ttctattatcttaaatataatttccttacttattattatccttttaaatctttctctcttttcttttatttcttttctattttattctctttcttc

SEQ ID NO: 25544 - DNA, 96 bp, Aspergillus fumigatus
  misc_feature: 185
aaataaaaataaaaataaaaataaaaataaaaataaaaataaaaataaaaataaaaataaaaataaaaataaaaataaaaataaaaataaaaataa

SEQ ID NO: 25545 - DNA, 96 bp, Aspergillus fumigatus
  misc_feature: 185
ttaggtagagataaacataagaatagaataatagagaaaataataataaagaagagtaaagattaagaaggttttaataaagaagaaagagaataa

SEQ ID NO: 25546 - DNA, 96 bp, Aspergillus fumigatus
  misc_feature: 185
ttatctctacctaactcacaattatatatatataattctaaaactatatctataatatctacttctgggatacctctctatctatctactaatctc

SEQ ID NO: 25547 - DNA, 96 bp, Aspergillus fumigatus
  misc_feature: 185
tgatcacattagccctagtcctagcactagcactagcctgagcactagcctgagcactagcctgagcactagcctgagcactagcctgagcactag

SEQ ID NO: 25548 - DNA, 96 bp, Aspergillus fumigatus
  misc_feature: 185
tccctttccaatcttatttattctctctttacttacttaaactctctttatcttatatatctcttcgtcctattcttatcttaaacttgctaaccc

SEQ ID NO: 25549 - DNA, 96 bp, Aspergillus fumigatus
  misc_feature: 185
gtactaaaattattataaacccttactcttactcttaacccttttttactctcttttttttactcttcttctttttcttacttttttttaccctga

SEQ ID NO: 25550 - DNA, 96 bp, Aspergillus fumigatus
  misc_feature: 185
tatcttaaatataatttccttacttattattatccttttaaatctttctctcttttcttttatttcttttctattttattctctttcttctttatt

SEQ ID NO: 25551 - DNA, 96 bp, Aspergillus fumigatus
  misc_feature: 185
gggtagattagtagtaggtatagtagttttaggtctagtaattaatatattagtatatacctagctagtaatattcttatactattaacttatata

SEQ ID NO: 25552 - DNA, 96 bp, Aspergillus fumigatus
  misc_feature: 185
ctacctaactcacaattatatatatataattctaaaactatatctataatatctacttctgggatacctctctatctatctactaatctcctacta

SEQ ID NO: 25553 - DNA, 96 bp, Aspergillus fumigatus
  misc_feature: 185
gagaataaaatagaaaagaaataaaagaaaagagagaaagatttaaaaggataataataagtaaggaaattatatttaagataatagaaaaaagta

SEQ ID NO: 25554 - DNA, 96 bp, Aspergillus fumigatus
  misc_feature: 185
aatatagattagattagaaattcaagttaaaataagaataattagataaagaagattataaaagaaagaaaataaagaaaagaaaagaggagatta

SEQ ID NO: 25555 - DNA, 96 bp, Aspergillus fumigatus
  misc_feature: 185
agatgatcacattagccctagtcctagcactagcactagcctgagcactagcctgagcactagcctgagcactagcctgagcactagcctgagcac

SEQ ID NO: 25556 - DNA, 96 bp, Aspergillus fumigatus
  misc_feature: 185
attagccctagtcctagcactagcactagcctgagcactagcctgagcactagcctgagcactagcctgagcactagcctgagcactagcctgagc

SEQ ID NO: 25557 - DNA, 96 bp, Aspergillus fumigatus
  misc_feature: 185
gagaaaaagaaggagaaaaagaaggagaaaaagaaggagaaaaagaaggagaaaaagaaggagaaaaagaaggagaaaaagaagaagaaaaagaag

SEQ ID NO: 25558 - DNA, 96 bp, Aspergillus fumigatus
  misc_feature: 185
aactgactaaccctgactctatctaaactatctaaccctaactctatcttactaaaactaacttatttttttattaactcttttctctcttccttc

SEQ ID NO: 25559 - DNA, 96 bp, Aspergillus fumigatus
  misc_feature: 185
cttccttcttccctttccaatcttatttattctctctttacttacttaaactctctttatcttatatatctcttcgtcctattcttatcttaaact

SEQ ID NO: 25560 - DNA, 96 bp, Aspergillus fumigatus
  misc_feature: 185
cctcactatctatcttactgcctgtctcactgcctgccttactatctcacttactaccttattatctaccttactacctgcctcaccatctaccgt

SEQ ID NO: 25561 - DNA, 96 bp, Aspergillus fumigatus
  misc_feature: 185
agttaggtagagataaacataagaatagaataatagagaaaataataataaagaagagtaaagattaagaaggttttaataaagaagaaagagaat

SEQ ID NO: 25562 - DNA, 96 bp, Aspergillus fumigatus
  misc_feature: 185
actagacctaaaactactatacctactactaatctaccctatcttataaagtctactaagaagtactatatctgctcctaatacctaaataattat

SEQ ID NO: 25563 - DNA, 96 bp, Aspergillus fumigatus
  misc_feature: 185
agatagggtagattagtagtaggtatagtagttttaggtctagtaattaatatattagtatatacctagctagtaatattcttatactattaactt

SEQ ID NO: 25564 - DNA, 96 bp, Aspergillus fumigatus
  misc_feature: 185
aactaactaacccttactctatctaaactgactaaccctgactctatctaaactatctaaccctaactctatcttactaaaactaacttatttttt

SEQ ID NO: 25565 - DNA, 96 bp, Aspergillus fumigatus
  misc_feature: 184
gaaagagaataaaatagaaaagaaataaaagaaaagagagaaagatttaaaaggataataataagtaaggaaattatatttaagataatagaaaaa

SEQ ID NO: 25566 - DNA, 96 bp, Aspergillus fumigatus
  misc_feature: 184
ttttagaattatatatatataattgtgagttaggtagagataaacataagaatagaataatagagaaaataataataaagaagagtaaagattaag

SEQ ID NO: 25567 - DNA, 96 bp, Aspergillus fumigatus
  misc_feature: 184
aagaaagagaataaaatagaaaagaaataaaagaaaagagagaaagatttaaaaggataataataagtaaggaaattatatttaagataatagaaa

SEQ ID NO: 25568 - DNA, 96 bp, Aspergillus fumigatus
  misc_feature: 184
tgagttaggtagagataaacataagaatagaataatagagaaaataataataaagaagagtaaagattaagaaggttttaataaagaagaaagaga

SEQ ID NO: 25569 - DNA, 96 bp, Aspergillus fumigatus
  misc_feature: 184
tctattatcttaaatataatttccttacttattattatccttttaaatctttctctcttttcttttatttcttttctattttattctctttcttct

SEQ ID NO: 25570 - DNA, 96 bp, Aspergillus fumigatus
  misc_feature: 184
tcacattagccctagtcctagcactagcactagcctgagcactagcctgagcactagcctgagcactagcctgagcactagcctgagcactagcct

SEQ ID NO: 25571 - DNA, 96 bp, Aspergillus fumigatus
  misc_feature: 184
atagattagattagaaattcaagttaaaataagaataattagataaagaagattataaaagaaagaaaataaagaaaagaaaagaggagattaata

SEQ ID NO: 25572 - DNA, 96 bp, Aspergillus fumigatus
  misc_feature: 184
cagggttagtcagtttagatagagtaagggttagttagtttagatagagttaggattattcagtttagacagagtaagggttagttagtttagata

SEQ ID NO: 25573 - DNA, 96 bp, Aspergillus fumigatus
  misc_feature: 184
atgatcacattagccctagtcctagcactagcactagcctgagcactagcctgagcactagcctgagcactagcctgagcactagcctgagcacta

SEQ ID NO: 25574 - DNA, 96 bp, Aspergillus fumigatus
  misc_feature: 184
cctaactcacaattatatatatataattctaaaactatatctataatatctacttctgggatacctctctatctatctactaatctcctactacta

SEQ ID NO: 25575 - DNA, 96 bp, Aspergillus fumigatus
  misc_feature: 184
gtcctagcactagcactagcctgagcactagcctgagcactagcctgagcactagcctgagcactagcctgagcactagcctgagcagtagtacta

SEQ ID NO: 25576 - DNA, 96 bp, Aspergillus fumigatus
  misc_feature: 184
taaactgactaaccctgactctatctaaactatctaaccctaactctatcttactaaaactaacttatttttttattaactcttttctctcttcct

SEQ ID NO: 25577 - DNA, 96 bp, Aspergillus fumigatus
  misc_feature: 184
gagagagaatagagagaggataagaattaatatatagaagaaagagaagaaagagaagaaagaagataataaaagaaaggataagttaatttttta

SEQ ID NO: 25578 - DNA, 96 bp, Aspergillus fumigatus
  misc_feature: 184
ggtcccctccgcgcgcgcggcccatcgctcgctgcggcagggcgcgcgcgcccggcctatatcggccgcgggggctgtgtgtctgtccgtgtatcg

SEQ ID NO: 25579 - DNA, 96 bp, Aspergillus fumigatus
  misc_feature: 184
cggtcccctccgcgcgcgcggcccatcgctcgctgcggcagggcgcgcgcgcccggcctatatcggccgcgggggctgtgtgtctgtccgtgtatc

SEQ ID NO: 25580 - DNA, 96 bp, Aspergillus fumigatus
  misc_feature: 184
aagagaataaaatagaaaagaaataaaagaaaagagagaaagatttaaaaggataataataagtaaggaaattatatttaagataatagaaaaaag

SEQ ID NO: 25581 - DNA, 96 bp, Aspergillus fumigatus
  misc_feature: 184
agggttagtcagtttagatagagtaagggttagttagtttagatagagttaggattattcagtttagacagagtaagggttagttagtttagatag

SEQ ID NO: 25582 - DNA, 96 bp, Aspergillus fumigatus
  misc_feature: 184
atctaaactgactaaccctgactctatctaaactatctaaccctaactctatcttactaaaactaacttatttttttattaactcttttctctctt

SEQ ID NO: 25583 - DNA, 96 bp, Aspergillus fumigatus
  misc_feature: 184
agatgtattaattatccttagattataatataataatacttaaataggattataatagaaatttaaaaatagttagtatactttaggatactaact

SEQ ID NO: 25584 - DNA, 96 bp, Aspergillus fumigatus
  misc_feature: 184
agagaataaaatagaaaagaaataaaagaaaagagagaaagatttaaaaggataataataagtaaggaaattatatttaagataatagaaaaaagt

SEQ ID NO: 25585 - DNA, 96 bp, Aspergillus fumigatus
  misc_feature: 184
actctatctaaactgactaaccctgactctatctaaactatctaaccctaactctatcttactaaaactaacttatttttttattaactcttttct

SEQ ID NO: 25586 - DNA, 96 bp, Aspergillus fumigatus
  misc_feature: 184
aaaagtaaggatttggatatttaaagagagaatcaagagagtataagaattaatatatagaaggaagagagaaaagagttaataaaaaaataagtt

SEQ ID NO: 25587 - DNA, 96 bp, Aspergillus fumigatus
  misc_feature: 183
gaaagggaaaaatatagattagattagaaattcaagttaaaataagaataattagataaagaagattataaaagaaagaaaataaagaaaagaaaa

SEQ ID NO: 25588 - DNA, 96 bp, Aspergillus fumigatus
  misc_feature: 183
ttttcttttatttcttttctattttattctctttcttctttattaaaaccttcttaatctttactcttctttattattattttctctattattcta

SEQ ID NO: 25589 - DNA, 96 bp, Aspergillus fumigatus
  misc_feature: 183
agaaagagaataaaatagaaaagaaataaaagaaaagagagaaagatttaaaaggataataataagtaaggaaattatatttaagataatagaaaa

SEQ ID NO: 25590 - DNA, 96 bp, Aspergillus fumigatus
  misc_feature: 183
tttagatgtattaattatccttagattataatataataatacttaaataggattataatagaaatttaaaaatagttagtatactttaggatacta

SEQ ID NO: 25591 - DNA, 96 bp, Aspergillus fumigatus
  misc_feature: 183
gatatagttttagaattatatatatataattgtgagttaggtagagataaacataagaatagaataatagagaaaataataataaagaagagtaaa

SEQ ID NO: 25592 - DNA, 96 bp, Aspergillus fumigatus
  misc_feature: 183
ttgtgagttaggtagagataaacataagaatagaataatagagaaaataataataaagaagagtaaagattaagaaggttttaataaagaagaaag

SEQ ID NO: 25593 - DNA, 96 bp, Aspergillus fumigatus
  misc_feature: 183
agaataaaatagaaaagaaataaaagaaaagagagaaagatttaaaaggataataataagtaaggaaattatatttaagataatagaaaaaagtaa

SEQ ID NO: 25594 - DNA, 96 bp, Aspergillus fumigatus
  misc_feature: 183
tctatctaaactgactaaccctgactctatctaaactatctaaccctaactctatcttactaaaactaacttatttttttattaactcttttctct

SEQ ID NO: 25595 - DNA, 96 bp, Aspergillus fumigatus
  misc_feature: 183
gatgtattaattatccttagattataatataataatacttaaataggattataatagaaatttaaaaatagttagtatactttaggatactaacta

SEQ ID NO: 25596 - DNA, 96 bp, Aspergillus fumigatus
  misc_feature: 183
agttttagaattatatatatataattgtgagttaggtagagataaacataagaatagaataatagagaaaataataataaagaagagtaaagatta

SEQ ID NO: 25597 - DNA, 96 bp, Aspergillus fumigatus
  misc_feature: 183
atcttaaatataatttccttacttattattatccttttaaatctttctctcttttcttttatttcttttctattttattctctttcttctttatta

SEQ ID NO: 25598 - DNA, 96 bp, Aspergillus fumigatus
  misc_feature: 183
atgtattaattatccttagattataatataataatacttaaataggattataatagaaatttaaaaatagttagtatactttaggatactaactac

SEQ ID NO: 25599 - DNA, 96 bp, Aspergillus fumigatus
  misc_feature: 183
gtaattagatctagttactataatagacctagtagggatagtagatatatatatatattagtctactaggtagaggtaaggtataagagaaatatc

SEQ ID NO: 25600 - DNA, 96 bp, Aspergillus fumigatus
  misc_feature: 183
gatcacattagccctagtcctagcactagcactagcctgagcactagcctgagcactagcctgagcactagcctgagcactagcctgagcactagc

SEQ ID NO: 25601 - DNA, 96 bp, Aspergillus fumigatus
  misc_feature: 183
cctctcttgtcctctcttgtcctctcttgtcctctcttgtcctctcttgtcctctcttgtcctctcttgtcctctcttgtcctctcttgtcctctc

SEQ ID NO: 25602 - DNA, 96 bp, Aspergillus fumigatus
  misc_feature: 183
ctatctaaactgactaaccctgactctatctaaactatctaaccctaactctatcttactaaaactaacttatttttttattaactcttttctctc

SEQ ID NO: 25603 - DNA, 96 bp, Aspergillus fumigatus
  misc_feature: 183
aaagggaaaaatatagattagattagaaattcaagttaaaataagaataattagataaagaagattataaaagaaagaaaataaagaaaagaaaag

SEQ ID NO: 25604 - DNA, 96 bp, Aspergillus fumigatus
  misc_feature: 183
agagagaatagagagaggataagaattaatatatagaagaaagagaagaaagagaagaaagaagataataaaagaaaggataagttaattttttag

SEQ ID NO: 25605 - DNA, 96 bp, Aspergillus fumigatus
  misc_feature: 183
cctttccaatcttatttattctctctttacttacttaaactctctttatcttatatatctcttcgtcctattcttatcttaaacttgctaaccctt

SEQ ID NO: 25606 - DNA, 96 bp, Aspergillus fumigatus
  misc_feature: 183
aattattcttattttaacttgaatttctaatctaatctatatttttccctttcttcttctttttcttcttctttttctccttctttttctccttct

SEQ ID NO: 25607 - DNA, 96 bp, Aspergillus fumigatus
  misc_feature: 183
actaactaacccttactctatctaaactgactaaccctgactctatctaaactatctaaccctaactctatcttactaaaactaacttattttttt

SEQ ID NO: 25608 - DNA, 96 bp, Aspergillus fumigatus
  misc_feature: 183
aaactgactaaccctgactctatctaaactatctaaccctaactctatcttactaaaactaacttatttttttattaactcttttctctcttcctt

SEQ ID NO: 25609 - DNA, 96 bp, Aspergillus fumigatus
  misc_feature: 182
ttttagatgtattaattatccttagattataatataataatacttaaataggattataatagaaatttaaaaatagttagtatactttaggatact

SEQ ID NO: 25610 - DNA, 96 bp, Aspergillus fumigatus
  misc_feature: 182
tttccaatcttatttattctctctttacttacttaaactctctttatcttatatatctcttcgtcctattcttatcttaaacttgctaacccttat

SEQ ID NO: 25611 - DNA, 96 bp, Aspergillus fumigatus
  misc_feature: 182
ttatagatatagttttagaattatatatatataattgtgagttaggtagagataaacataagaatagaataatagagaaaataataataaagaaga

SEQ ID NO: 25612 - DNA, 96 bp, Aspergillus fumigatus
  misc_feature: 182
gttttagaattatatatatataattgtgagttaggtagagataaacataagaatagaataatagagaaaataataataaagaagagtaaagattaa

SEQ ID NO: 25613 - DNA, 96 bp, Aspergillus fumigatus
  misc_feature: 182
atataattgtgagttaggtagagataaacataagaatagaataatagagaaaataataataaagaagagtaaagattaagaaggttttaataaaga

SEQ ID NO: 25614 - DNA, 96 bp, Aspergillus fumigatus
  misc_feature: 182
taattgtgagttaggtagagataaacataagaatagaataatagagaaaataataataaagaagagtaaagattaagaaggttttaataaagaaga

SEQ ID NO: 25615 - DNA, 96 bp, Aspergillus fumigatus
  misc_feature: 182
cctagcactagcactagcctgagcactagcctgagcactagcctgagcactagcctgagcactagcctgagcactagcctgagcagtagtactaga

SEQ ID NO: 25616 - DNA, 96 bp, Aspergillus fumigatus
  misc_feature: 182
ggaaaaatatagattagattagaaattcaagttaaaataagaataattagataaagaagattataaaagaaagaaaataaagaaaagaaaagagga

SEQ ID NO: 25617 - DNA, 96 bp, Aspergillus fumigatus
  misc_feature: 182
gttaggtagagataaacataagaatagaataatagagaaaataataataaagaagagtaaagattaagaaggttttaataaagaagaaagagaata

SEQ ID NO: 25618 - DNA, 96 bp, Aspergillus fumigatus
  misc_feature: 182
atatatataattgtgagttaggtagagataaacataagaatagaataatagagaaaataataataaagaagagtaaagattaagaaggttttaata

SEQ ID NO: 25619 - DNA, 96 bp, Aspergillus fumigatus
  misc_feature: 182
tatctaaactgactaaccctgactctatctaaactatctaaccctaactctatcttactaaaactaacttatttttttattaactcttttctctct

SEQ ID NO: 25620 - DNA, 96 bp, Aspergillus fumigatus
  misc_feature: 182
ctagacctaaaactactatacctactactaatctaccctatcttataaagtctactaagaagtactatatctgctcctaatacctaaataattata

SEQ ID NO: 25621 - DNA, 96 bp, Aspergillus fumigatus
  misc_feature: 182
gcactagcactagcctgagcactagcctgagcactagcctgagcactagcctgagcactagcctgagcactagcctgagcagtagtactagaccta

SEQ ID NO: 25622 - DNA, 96 bp, Aspergillus fumigatus
  misc_feature: 182
tagattagattagaaattcaagttaaaataagaataattagataaagaagattataaaagaaagaaaataaagaaaagaaaagaggagattaatat

SEQ ID NO: 25623 - DNA, 96 bp, Aspergillus fumigatus
  misc_feature: 182
aattagatctagttactataatagacctagtagggatagtagatatatatatatattagtctactaggtagaggtaaggtataagagaaatatcta

SEQ ID NO: 25624 - DNA, 96 bp, Aspergillus fumigatus
  misc_feature: 182
tagacctaaaactactatacctactactaatctaccctatcttataaagtctactaagaagtactatatctgctcctaatacctaaataattatag

SEQ ID NO: 25625 - DNA, 96 bp, Aspergillus fumigatus
  misc_feature: 182
taccttcctaaatacctctttccctacctcacttactaccttactaccttgctcactaccttacttactacctcactatctatcttactgcctgtc

SEQ ID NO: 25626 - DNA, 96 bp, Aspergillus fumigatus
  misc_feature: 182
taattagatctagttactataatagacctagtagggatagtagatatatatatatattagtctactaggtagaggtaaggtataagagaaatatct

SEQ ID NO: 25627 - DNA, 96 bp, Aspergillus fumigatus
  misc_feature: 182
aaagtaaggatttggatatttaaagagagaatcaagagagtataagaattaatatatagaaggaagagagaaaagagttaataaaaaaataagtta

SEQ ID NO: 25628 - DNA, 96 bp, Aspergillus fumigatus
  misc_feature: 182
atcacattagccctagtcctagcactagcactagcctgagcactagcctgagcactagcctgagcactagcctgagcactagcctgagcactagcc

SEQ ID NO: 25629 - DNA, 96 bp, Aspergillus fumigatus
  misc_feature: 182
ctctatctaaactgactaaccctgactctatctaaactatctaaccctaactctatcttactaaaactaacttatttttttattaactcttttctc

SEQ ID NO: 25630 - DNA, 96 bp, Aspergillus fumigatus
  misc_feature: 182
cattagccctagtcctagcactagcactagcctgagcactagcctgagcactagcctgagcactagcctgagcactagcctgagcactagcctgag

SEQ ID NO: 25631 - DNA, 96 bp, Aspergillus fumigatus
  misc_feature: 182
aataaaatagaaaagaaataaaagaaaagagagaaagatttaaaaggataataataagtaaggaaattatatttaagataatagaaaaaagtaagg

SEQ ID NO: 25632 - DNA, 96 bp, Aspergillus fumigatus
  misc_feature: 182
atttatgaaataattgattttccatggtgattattatgaatatgaatgaatatgaataaatatgaatgattgcaaaatacctttacccctgaattt

SEQ ID NO: 25633 - DNA, 96 bp, Aspergillus fumigatus
  misc_feature: 181
tttttagatgtattaattatccttagattataatataataatacttaaataggattataatagaaatttaaaaatagttagtatactttaggatac

SEQ ID NO: 25634 - DNA, 96 bp, Aspergillus fumigatus
  misc_feature: 181
ttcctaaatacctctttccctacctcacttactaccttactaccttgctcactaccttacttactacctcactatctatcttactgcctgtctcac

SEQ ID NO: 25635 - DNA, 96 bp, Aspergillus fumigatus
  misc_feature: 181
agatatagttttagaattatatatatataattgtgagttaggtagagataaacataagaatagaataatagagaaaataataataaagaagagtaa

SEQ ID NO: 25636 - DNA, 96 bp, Aspergillus fumigatus
  misc_feature: 181
cttcctaaatacctctttccctacctcacttactaccttactaccttgctcactaccttacttactacctcactatctatcttactgcctgtctca

SEQ ID NO: 25637 - DNA, 96 bp, Aspergillus fumigatus
  misc_feature: 181
tatagttttagaattatatatatataattgtgagttaggtagagataaacataagaatagaataatagagaaaataataataaagaagagtaaaga

SEQ ID NO: 25638 - DNA, 96 bp, Aspergillus fumigatus
  misc_feature: 181
acattagccctagtcctagcactagcactagcctgagcactagcctgagcactagcctgagcactagcctgagcactagcctgagcactagcctga

SEQ ID NO: 25639 - DNA, 96 bp, Aspergillus fumigatus
  misc_feature: 181
aaaataaaaataaaaataaaaataaaaataaaaataaaaataaaaataaaaataaaaataaaaataaaaataaaaataaaaataaaaataaaaata

SEQ ID NO: 25640 - DNA, 96 bp, Aspergillus fumigatus
  misc_feature: 181
tatatatataattgtgagttaggtagagataaacataagaatagaataatagagaaaataataataaagaagagtaaagattaagaaggttttaat

SEQ ID NO: 25641 - DNA, 96 bp, Aspergillus fumigatus
  misc_feature: 181
tatagatatagttttagaattatatatatataattgtgagttaggtagagataaacataagaatagaataatagagaaaataataataaagaagag

SEQ ID NO: 25642 - DNA, 96 bp, Aspergillus fumigatus
  misc_feature: 181
tagatatagttttagaattatatatatataattgtgagttaggtagagataaacataagaatagaataatagagaaaataataataaagaagagta

SEQ ID NO: 25643 - DNA, 96 bp, Aspergillus fumigatus
  misc_feature: 181
ctagtcctagcactagcactagcctgagcactagcctgagcactagcctgagcactagcctgagcactagcctgagcactagcctgagcagtagta

SEQ ID NO: 25644 - DNA, 96 bp, Aspergillus fumigatus
  misc_feature: 181
tacctaactcacaattatatatatataattctaaaactatatctataatatctacttctgggatacctctctatctatctactaatctcctactac

SEQ ID NO: 25645 - DNA, 96 bp, Aspergillus fumigatus
  misc_feature: 181
gatagggtagattagtagtaggtatagtagttttaggtctagtaattaatatattagtatatacctagctagtaatattcttatactattaactta

SEQ ID NO: 25646 - DNA, 96 bp, Aspergillus fumigatus
  misc_feature: 181
ctttccaatcttatttattctctctttacttacttaaactctctttatcttatatatctcttcgtcctattcttatcttaaacttgctaaccctta

SEQ ID NO: 25647 - DNA, 96 bp, Aspergillus fumigatus
  misc_feature: 181
ctagcactagcactagcctgagcactagcctgagcactagcctgagcactagcctgagcactagcctgagcactagcctgagcagtagtactagac

SEQ ID NO: 25648 - DNA, 96 bp, Aspergillus fumigatus
  misc_feature: 181
gtcctattcttatcttaaacttgctaacccttatgctatcttaactaataaacccttcctctatctaaacttactaacccttactttatcttaact

SEQ ID NO: 25649 - DNA, 96 bp, Aspergillus fumigatus
  misc_feature: 181
gtcccctccgcgcgcgcggcccatcgctcgctgcggcagggcgcgcgcgcccggcctatatcggccgcgggggctgtgtgtctgtccgtgtatcgc

SEQ ID NO: 25650 - DNA, 96 bp, Aspergillus fumigatus
  misc_feature: 181
gggaaaaatatagattagattagaaattcaagttaaaataagaataattagataaagaagattataaaagaaagaaaataaagaaaagaaaagagg

SEQ ID NO: 25651 - DNA, 96 bp, Aspergillus fumigatus
  misc_feature: 181
gcactagcctgagcactagcctgagcactagcctgagcactagcctgagcactagcctgagcactagcctgagcagtagtactagacctaaatggg

SEQ ID NO: 25652 - DNA, 96 bp, Aspergillus fumigatus
  misc_feature: 181
atatagttttagaattatatatatataattgtgagttaggtagagataaacataagaatagaataatagagaaaataataataaagaagagtaaag

SEQ ID NO: 25653 - DNA, 96 bp, Aspergillus fumigatus
  misc_feature: 181
ataattgtgagttaggtagagataaacataagaatagaataatagagaaaataataataaagaagagtaaagattaagaaggttttaataaagaag

SEQ ID NO: 25654 - DNA, 96 bp, Aspergillus fumigatus
  misc_feature: 181
cttactctatctaaactgactaaccctgactctatctaaactatctaaccctaactctatcttactaaaactaacttatttttttattaactcttt

SEQ ID NO: 25655 - DNA, 96 bp, Aspergillus fumigatus
  misc_feature: 181
agggaaaaatatagattagattagaaattcaagttaaaataagaataattagataaagaagattataaaagaaagaaaataaagaaaagaaaagag

SEQ ID NO: 25656 - DNA, 96 bp, Aspergillus fumigatus
  misc_feature: 181
cgtactaaaattattataaacccttactcttactcttaacccttttttactctcttttttttactcttcttctttttcttacttttttttaccctg

SEQ ID NO: 25657 - DNA, 96 bp, Aspergillus fumigatus
  misc_feature: 181
agtcctagcactagcactagcctgagcactagcctgagcactagcctgagcactagcctgagcactagcctgagcactagcctgagcagtagtact

SEQ ID NO: 25658 - DNA, 96 bp, Aspergillus fumigatus
  misc_feature: 181
acctaactcacaattatatatatataattctaaaactatatctataatatctacttctgggatacctctctatctatctactaatctcctactact

SEQ ID NO: 25659 - DNA, 96 bp, Aspergillus fumigatus
  misc_feature: 181
accttcctaaatacctctttccctacctcacttactaccttactaccttgctcactaccttacttactacctcactatctatcttactgcctgtct

SEQ ID NO: 25660 - DNA, 96 bp, Aspergillus fumigatus
  misc_feature: 180
aaagagaataaaatagaaaagaaataaaagaaaagagagaaagatttaaaaggataataataagtaaggaaattatatttaagataatagaaaaaa

SEQ ID NO: 25661 - DNA, 96 bp, Aspergillus fumigatus
  misc_feature: 180
tataattgtgagttaggtagagataaacataagaatagaataatagagaaaataataataaagaagagtaaagattaagaaggttttaataaagaa

SEQ ID NO: 25662 - DNA, 96 bp, Aspergillus fumigatus
  misc_feature: 180
tagatattatagatatagttttagaattatatatatataattgtgagttaggtagagataaacataagaatagaataatagagaaaataataataa

SEQ ID NO: 25663 - DNA, 96 bp, Aspergillus fumigatus
  misc_feature: 180
ggtagattagtagtaggtatagtagttttaggtctagtaattaatatattagtatatacctagctagtaatattcttatactattaacttatataa

SEQ ID NO: 25664 - DNA, 96 bp, Aspergillus fumigatus
  misc_feature: 180
ttactctatctaaactgactaaccctgactctatctaaactatctaaccctaactctatcttactaaaactaacttatttttttattaactctttt

SEQ ID NO: 25665 - DNA, 96 bp, Aspergillus fumigatus
  misc_feature: 180
atatatatataattgtgagttaggtagagataaacataagaatagaataatagagaaaataataataaagaagagtaaagattaagaaggttttaa

SEQ ID NO: 25666 - DNA, 96 bp, Aspergillus fumigatus
  misc_feature: 180
ccatctaccgtactgcctatcttactacctaccttactcactaccttgcttactgcctcactgcctgtcttactacctgccttacttactacctca

SEQ ID NO: 25667 - DNA, 96 bp, Aspergillus fumigatus
  misc_feature: 180
aagggaaaaatatagattagattagaaattcaagttaaaataagaataattagataaagaagattataaaagaaagaaaataaagaaaagaaaaga

SEQ ID NO: 25668 - DNA, 96 bp, Aspergillus fumigatus
  misc_feature: 180
tcctagcactagcactagcctgagcactagcctgagcactagcctgagcactagcctgagcactagcctgagcactagcctgagcagtagtactag

SEQ ID NO: 25669 - DNA, 96 bp, Aspergillus fumigatus
  misc_feature: 180
tcccctccgcgcgcgcggcccatcgctcgctgcggcagggcgcgcgcgcccggcctatatcggccgcgggggctgtgtgtctgtccgtgtatcgcg

SEQ ID NO: 25670 - DNA, 96 bp, Aspergillus fumigatus
  misc_feature: 180
tagtcctagcactagcactagcctgagcactagcctgagcactagcctgagcactagcctgagcactagcctgagcactagcctgagcagtagtac

SEQ ID NO: 25671 - DNA, 96 bp, Aspergillus fumigatus
  misc_feature: 180
tagccctagtcctagcactagcactagcctgagcactagcctgagcactagcctgagcactagcctgagcactagcctgagcactagcctgagcag

SEQ ID NO: 25672 - DNA, 96 bp, Aspergillus fumigatus
  misc_feature: 180
tagaattatatatatataattgtgagttaggtagagataaacataagaatagaataatagagaaaataataataaagaagagtaaagattaagaag

SEQ ID NO: 25673 - DNA, 96 bp, Aspergillus fumigatus
  misc_feature: 180
agagaatagagagaggataagaattaatatatagaagaaagagaagaaagagaagaaagaagataataaaagaaaggataagttaattttttagta

SEQ ID NO: 25674 - DNA, 96 bp, Aspergillus fumigatus
  misc_feature: 180
ctcactatctatcttactgcctgtctcactgcctgccttactatctcacttactaccttattatctaccttactacctgcctcaccatctaccgta

SEQ ID NO: 25675 - DNA, 96 bp, Aspergillus fumigatus
  misc_feature: 180
gagagaatagagagaggataagaattaatatatagaagaaagagaagaaagagaagaaagaagataataaaagaaaggataagttaattttttagt

SEQ ID NO: 25676 - DNA, 96 bp, Aspergillus fumigatus
  misc_feature: 180
gaattatatatatataattgtgagttaggtagagataaacataagaatagaataatagagaaaataataataaagaagagtaaagattaagaaggt

SEQ ID NO: 25677 - DNA, 96 bp, Aspergillus fumigatus
  misc_feature: 180
gaataaaatagaaaagaaataaaagaaaagagagaaagatttaaaaggataataataagtaaggaaattatatttaagataatagaaaaaagtaag

SEQ ID NO: 25678 - DNA, 96 bp, Aspergillus fumigatus
  misc_feature: 180
ctacccctgttagtataaaaataagagatatttaatataatcttaatagttattaattaatatataaaaatagctaaatatatctctattaaaaag

SEQ ID NO: 25679 - DNA, 96 bp, Aspergillus fumigatus
  misc_feature: 180
aagtaaggatttggatatttaaagagagaatcaagagagtataagaattaatatatagaaggaagagagaaaagagttaataaaaaaataagttag

SEQ ID NO: 25680 - DNA, 96 bp, Aspergillus fumigatus
  misc_feature: 180
ctaactcacaattatatatatataattctaaaactatatctataatatctacttctgggatacctctctatctatctactaatctcctactactat

SEQ ID NO: 25681 - DNA, 96 bp, Aspergillus fumigatus
  misc_feature: 180
agaattatatatatataattgtgagttaggtagagataaacataagaatagaataatagagaaaataataataaagaagagtaaagattaagaagg

SEQ ID NO: 25682 - DNA, 96 bp, Aspergillus fumigatus
  misc_feature: 180
cctagtcctagcactagcactagcctgagcactagcctgagcactagcctgagcactagcctgagcactagcctgagcactagcctgagcagtagt

SEQ ID NO: 25683 - DNA, 96 bp, Aspergillus fumigatus
  misc_feature: 180
attatatatatataattgtgagttaggtagagataaacataagaatagaataatagagaaaataataataaagaagagtaaagattaagaaggttt

SEQ ID NO: 25684 - DNA, 96 bp, Aspergillus fumigatus
  misc_feature: 180
atagatatagttttagaattatatatatataattgtgagttaggtagagataaacataagaatagaataatagagaaaataataataaagaagagt

SEQ ID NO: 25685 - DNA, 96 bp, Aspergillus fumigatus
  misc_feature: 179
ttttttttgcaaatataaattcatatataatatgaaaaaaaaaaaattaaaaataaaaaaatataaatataaaaataattcttttttttactaaat

SEQ ID NO: 25686 - DNA, 96 bp, Aspergillus fumigatus
  misc_feature: 179
actagcactagcctgagcactagcctgagcactagcctgagcactagcctgagcactagcctgagcactagcctgagcagtagtactagacctaaa

SEQ ID NO: 25687 - DNA, 96 bp, Aspergillus fumigatus
  misc_feature: 179
ttatttattctctctttacttacttaaactctctttatcttatatatctcttcgtcctattcttatcttaaacttgctaacccttatgctatctta

SEQ ID NO: 25688 - DNA, 96 bp, Aspergillus fumigatus
  misc_feature: 179
tatatataattgtgagttaggtagagataaacataagaatagaataatagagaaaataataataaagaagagtaaagattaagaaggttttaataa

SEQ ID NO: 25689 - DNA, 96 bp, Aspergillus fumigatus
  misc_feature: 179
tcttccttcttccctttccaatcttatttattctctctttacttacttaaactctctttatcttatatatctcttcgtcctattcttatcttaaac

SEQ ID NO: 25690 - DNA, 96 bp, Aspergillus fumigatus
  misc_feature: 179
tctaccgtactgcctatcttactacctaccttactcactaccttgcttactgcctcactgcctgtcttactacctgccttacttactacctcacta

SEQ ID NO: 25691 - DNA, 96 bp, Aspergillus fumigatus
  misc_feature: 179
ataaaatagaaaagaaataaaagaaaagagagaaagatttaaaaggataataataagtaaggaaattatatttaagataatagaaaaaagtaagga

SEQ ID NO: 25692 - DNA, 96 bp, Aspergillus fumigatus
  misc_feature: 179
tcctctcttgtcctctcttgtcctctcttgtcctctcttgtcctctcttgtcctctcttgtcctctcttgtcctctcttgtcctctcttgtcctct

SEQ ID NO: 25693 - DNA, 96 bp, Aspergillus fumigatus
  misc_feature: 179
gatatttaaagagagaatcaagagagtataagaattaatatatagaaggaagagagaaaagagttaataaaaaaataagttagttttagtaagata

SEQ ID NO: 25694 - DNA, 96 bp, Aspergillus fumigatus
  misc_feature: 179
tactctatctaaactgactaaccctgactctatctaaactatctaaccctaactctatcttactaaaactaacttatttttttattaactcttttc

SEQ ID NO: 25695 - DNA, 96 bp, Aspergillus fumigatus
  misc_feature: 179
taagtaaggcaggtagtaagacaggcagtgaggcagtaagcaaggtagtgagtaaggtaggtagtaagataggcagtacggtagatggtgaggcag

SEQ ID NO: 25696 - DNA, 96 bp, Aspergillus fumigatus
  misc_feature: 179
ctaactaacccttactctatctaaactgactaaccctgactctatctaaactatctaaccctaactctatcttactaaaactaacttattttttta

SEQ ID NO: 25697 - DNA, 96 bp, Aspergillus fumigatus
  misc_feature: 179
catctaccgtactgcctatcttactacctaccttactcactaccttgcttactgcctcactgcctgtcttactacctgccttacttactacctcac

SEQ ID NO: 25698 - DNA, 96 bp, Aspergillus fumigatus
  misc_feature: 179
gtaaggatttggatatttaaagagagaatcaagagagtataagaattaatatatagaaggaagagagaaaagagttaataaaaaaataagttagtt

SEQ ID NO: 25699 - DNA, 96 bp, Aspergillus fumigatus
  misc_feature: 179
cactagcctgagcactagcctgagcactagcctgagcactagcctgagcactagcctgagcactagcctgagcagtagtactagacctaaatgggc

SEQ ID NO: 25700 - DNA, 96 bp, Aspergillus fumigatus
  misc_feature: 179
ccttcctaaatacctctttccctacctcacttactaccttactaccttgctcactaccttacttactacctcactatctatcttactgcctgtctc

SEQ ID NO: 25701 - DNA, 96 bp, Aspergillus fumigatus
  misc_feature: 179
ctctcttgtcctctcttgtcctctcttgtcctctcttgtcctctcttgtcctctcttgtcctctcttgtcctctcttgtcctctcttgtcctctct

SEQ ID NO: 25702 - DNA, 96 bp, Aspergillus fumigatus
  misc_feature: 179
ccctagtcctagcactagcactagcctgagcactagcctgagcactagcctgagcactagcctgagcactagcctgagcactagcctgagcagtag

SEQ ID NO: 25703 - DNA, 96 bp, Aspergillus fumigatus
  misc_feature: 179
cctgttagtataaaaataagagatatttaatataatcttaatagttattaattaatatataaaaatagctaaatatatctctattaaaaagataat

SEQ ID NO: 25704 - DNA, 96 bp, Aspergillus fumigatus
  misc_feature: 179
aagtaaggcaggtagtaagacaggcagtgaggcagtaagcaaggtagtgagtaaggtaggtagtaagataggcagtacggtagatggtgaggcagg

SEQ ID NO: 25705 - DNA, 96 bp, Aspergillus fumigatus
  misc_feature: 179
agcactagcctgagcactagcctgagcactagcctgagcactagcctgagcactagcctgagcactagcctgagcagtagtactagacctaaatgg

SEQ ID NO: 25706 - DNA, 96 bp, Aspergillus fumigatus
  misc_feature: 179
attattcttattttaacttgaatttctaatctaatctatatttttccctttcttcttctttttcttcttctttttctccttctttttctccttctt

SEQ ID NO: 25707 - DNA, 96 bp, Aspergillus fumigatus
  misc_feature: 179
attagtagtaggtatagtagttttaggtctagtaattaatatattagtatatacctagctagtaatattcttatactattaacttatataacttat

SEQ ID NO: 25708 - DNA, 96 bp, Aspergillus fumigatus
  misc_feature: 179
atctaccgtactgcctatcttactacctaccttactcactaccttgcttactgcctcactgcctgtcttactacctgccttacttactacctcact

SEQ ID NO: 25709 - DNA, 96 bp, Aspergillus fumigatus
  misc_feature: 179
aatttttagatgtattaattatccttagattataatataataatacttaaataggattataatagaaatttaaaaatagttagtatactttaggat

SEQ ID NO: 25710 - DNA, 96 bp, Aspergillus fumigatus
  misc_feature: 179
agccctagtcctagcactagcactagcctgagcactagcctgagcactagcctgagcactagcctgagcactagcctgagcactagcctgagcagt

SEQ ID NO: 25711 - DNA, 96 bp, Aspergillus fumigatus
  misc_feature: 179
aattatatatatataattgtgagttaggtagagataaacataagaatagaataatagagaaaataataataaagaagagtaaagattaagaaggtt

SEQ ID NO: 25712 - DNA, 96 bp, Aspergillus fumigatus
  misc_feature: 178
actacccctgttagtataaaaataagagatatttaatataatcttaatagttattaattaatatataaaaatagctaaatatatctctattaaaaa

SEQ ID NO: 25713 - DNA, 96 bp, Aspergillus fumigatus
  misc_feature: 178
tactacccctgttagtataaaaataagagatatttaatataatcttaatagttattaattaatatataaaaatagctaaatatatctctattaaaa

SEQ ID NO: 25714 - DNA, 96 bp, Aspergillus fumigatus
  misc_feature: 178
atatataattgtgagttaggtagagataaacataagaatagaataatagagaaaataataataaagaagagtaaagattaagaaggttttaataaa

SEQ ID NO: 25715 - DNA, 96 bp, Aspergillus fumigatus
  misc_feature: 178
tttagaattatatatatataattgtgagttaggtagagataaacataagaatagaataatagagaaaataataataaagaagagtaaagattaaga

SEQ ID NO: 25716 - DNA, 96 bp, Aspergillus fumigatus
  misc_feature: 178
aattgtgagttaggtagagataaacataagaatagaataatagagaaaataataataaagaagagtaaagattaagaaggttttaataaagaagaa

SEQ ID NO: 25717 - DNA, 96 bp, Aspergillus fumigatus
  misc_feature: 178
ttagaattatatatatataattgtgagttaggtagagataaacataagaatagaataatagagaaaataataataaagaagagtaaagattaagaa

SEQ ID NO: 25718 - DNA, 96 bp, Aspergillus fumigatus
  misc_feature: 178
ttccaatcttatttattctctctttacttacttaaactctctttatcttatatatctcttcgtcctattcttatcttaaacttgctaacccttatg

SEQ ID NO: 25719 - DNA, 96 bp, Aspergillus fumigatus
  misc_feature: 178
cactagcactagcctgagcactagcctgagcactagcctgagcactagcctgagcactagcctgagcactagcctgagcagtagtactagacctaa

SEQ ID NO: 25720 - DNA, 96 bp, Aspergillus fumigatus
  misc_feature: 178
tatataattgtgagttaggtagagataaacataagaatagaataatagagaaaataataataaagaagagtaaagattaagaaggttttaataaag

SEQ ID NO: 25721 - DNA, 96 bp, Aspergillus fumigatus
  misc_feature: 178
taaggatttggatatttaaagagagaatcaagagagtataagaattaatatatagaaggaagagagaaaagagttaataaaaaaataagttagttt

SEQ ID NO: 25722 - DNA, 96 bp, Aspergillus fumigatus
  misc_feature: 178
attagattagaaattcaagttaaaataagaataattagataaagaagattataaaagaaagaaaataaagaaaagaaaagaggagattaatattta

SEQ ID NO: 25723 - DNA, 96 bp, Aspergillus fumigatus
  misc_feature: 178
cgtcctattcttatcttaaacttgctaacccttatgctatcttaactaataaacccttcctctatctaaacttactaacccttactttatcttaac

SEQ ID NO: 25724 - DNA, 96 bp, Aspergillus fumigatus
  misc_feature: 178
ggatatttaaagagagaatcaagagagtataagaattaatatatagaaggaagagagaaaagagttaataaaaaaataagttagttttagtaagat

SEQ ID NO: 25725 - DNA, 96 bp, Aspergillus fumigatus
  misc_feature: 178
attatagatatagttttagaattatatatatataattgtgagttaggtagagataaacataagaatagaataatagagaaaataataataaagaag

SEQ ID NO: 25726 - DNA, 96 bp, Aspergillus fumigatus
  misc_feature: 178
ccttactctatctaaactgactaaccctgactctatctaaactatctaaccctaactctatcttactaaaactaacttatttttttattaactctt

SEQ ID NO: 25727 - DNA, 96 bp, Aspergillus fumigatus
  misc_feature: 178
aattcaagttaaaataagaataattagataaagaagattataaaagaaagaaaataaagaaaagaaaagaggagattaatatttaaataataatgg

SEQ ID NO: 25728 - DNA, 96 bp, Aspergillus fumigatus
  misc_feature: 178
cattattatttaaatattaatctcctcttttcttttctttattttctttcttttataatcttctttatctaattattcttattttaacttgaattt

SEQ ID NO: 25729 - DNA, 96 bp, Aspergillus fumigatus
  misc_feature: 178
cacattagccctagtcctagcactagcactagcctgagcactagcctgagcactagcctgagcactagcctgagcactagcctgagcactagcctg

SEQ ID NO: 25730 - DNA, 96 bp, Aspergillus fumigatus
  misc_feature: 178
attcaagttaaaataagaataattagataaagaagattataaaagaaagaaaataaagaaaagaaaagaggagattaatatttaaataataatggt

SEQ ID NO: 25731 - DNA, 96 bp, Aspergillus fumigatus
  misc_feature: 178
aatttatgaaataattgattttccatggtgattattatgaatatgaatgaatatgaataaatatgaatgattgcaaaatacctttacccctgaatt

SEQ ID NO: 25732 - DNA, 96 bp, Aspergillus fumigatus
  misc_feature: 178
aaaatagaaaagaaataaaagaaaagagagaaagatttaaaaggataataataagtaaggaaattatatttaagataatagaaaaaagtaaggatt

SEQ ID NO: 25733 - DNA, 96 bp, Aspergillus fumigatus
  misc_feature: 177
tagattagaaattcaagttaaaataagaataattagataaagaagattataaaagaaagaaaataaagaaaagaaaagaggagattaatatttaaa

SEQ ID NO: 25734 - DNA, 96 bp, Aspergillus fumigatus
  misc_feature: 177
ccctgttagtataaaaataagagatatttaatataatcttaatagttattaattaatatataaaaatagctaaatatatctctattaaaaagataa

SEQ ID NO: 25735 - DNA, 96 bp, Aspergillus fumigatus
  misc_feature: 177
ttatatatatataattgtgagttaggtagagataaacataagaatagaataatagagaaaataataataaagaagagtaaagattaagaaggtttt

SEQ ID NO: 25736 - DNA, 96 bp, Aspergillus fumigatus
  misc_feature: 177
tatttattctctctttacttacttaaactctctttatcttatatatctcttcgtcctattcttatcttaaacttgctaacccttatgctatcttaa

SEQ ID NO: 25737 - DNA, 96 bp, Aspergillus fumigatus
  misc_feature: 177
tcgtcctattcttatcttaaacttgctaacccttatgctatcttaactaataaacccttcctctatctaaacttactaacccttactttatcttaa

SEQ ID NO: 25738 - DNA, 96 bp, Aspergillus fumigatus
  misc_feature: 177
gggttagtcagtttagatagagtaagggttagttagtttagatagagttaggattattcagtttagacagagtaagggttagttagtttagataga

SEQ ID NO: 25739 - DNA, 96 bp, Aspergillus fumigatus
  misc_feature: 177
gtagatattatagatatagttttagaattatatatatataattgtgagttaggtagagataaacataagaatagaataatagagaaaataataata

SEQ ID NO: 25740 - DNA, 96 bp, Aspergillus fumigatus
  misc_feature: 177
ccgtactgcctatcttactacctaccttactcactaccttgcttactgcctcactgcctgtcttactacctgccttacttactacctcactatcta

SEQ ID NO: 25741 - DNA, 96 bp, Aspergillus fumigatus
  misc_feature: 177
taactaacccttactctatctaaactgactaaccctgactctatctaaactatctaaccctaactctatcttactaaaactaacttatttttttat

SEQ ID NO: 25742 - DNA, 96 bp, Aspergillus fumigatus
  misc_feature: 177
gtcctctcttgtcctctcttgtcctctcttgtcctctcttgtcctctcttgtcctctcttgtcctctcttgtcctctcttgtcctctcttgtcctc

SEQ ID NO: 25743 - DNA, 96 bp, Aspergillus fumigatus
  misc_feature: 177
cccgtactaaaattattataaacccttactcttactcttaacccttttttactctcttttttttactcttcttctttttcttacttttttttaccc

SEQ ID NO: 25744 - DNA, 96 bp, Aspergillus fumigatus
  misc_feature: 177
accatctaccgtactgcctatcttactacctaccttactcactaccttgcttactgcctcactgcctgtcttactacctgccttacttactacctc

SEQ ID NO: 25745 - DNA, 96 bp, Aspergillus fumigatus
  misc_feature: 177
ctgttagtataaaaataagagatatttaatataatcttaatagttattaattaatatataaaaatagctaaatatatctctattaaaaagataatt

SEQ ID NO: 25746 - DNA, 96 bp, Aspergillus fumigatus
  misc_feature: 177
ctagaatatagtaataaactaagagctatagtctaatactattattcttagtaggctatatagcttctatatataatagatatataattaggctat

SEQ ID NO: 25747 - DNA, 96 bp, Aspergillus fumigatus
  misc_feature: 177
cccttactctatctaaactgactaaccctgactctatctaaactatctaaccctaactctatcttactaaaactaacttatttttttattaactct

SEQ ID NO: 25748 - DNA, 96 bp, Aspergillus fumigatus
  misc_feature: 177
agtagatattatagatatagttttagaattatatatatataattgtgagttaggtagagataaacataagaatagaataatagagaaaataataat

SEQ ID NO: 25749 - DNA, 96 bp, Aspergillus fumigatus
  misc_feature: 177
agtaaggcaggtagtaagacaggcagtgaggcagtaagcaaggtagtgagtaaggtaggtagtaagataggcagtacggtagatggtgaggcaggt

SEQ ID NO: 25750 - DNA, 96 bp, Aspergillus fumigatus
  misc_feature: 176
tattatagatatagttttagaattatatatatataattgtgagttaggtagagataaacataagaatagaataatagagaaaataataataaagaa

SEQ ID NO: 25751 - DNA, 96 bp, Aspergillus fumigatus
  misc_feature: 176
gagaatagagagaggataagaattaatatatagaagaaagagaagaaagagaagaaagaagataataaaagaaaggataagttaattttttagtaa

SEQ ID NO: 25752 - DNA, 96 bp, Aspergillus fumigatus
  misc_feature: 176
ctaacccttactctatctaaactgactaaccctgactctatctaaactatctaaccctaactctatcttactaaaactaacttatttttttattaa

SEQ ID NO: 25753 - DNA, 96 bp, Aspergillus fumigatus
  misc_feature: 176
tgttagtataaaaataagagatatttaatataatcttaatagttattaattaatatataaaaatagctaaatatatctctattaaaaagataatta

SEQ ID NO: 25754 - DNA, 96 bp, Aspergillus fumigatus
  misc_feature: 176
gtaagtaaggcaggtagtaagacaggcagtgaggcagtaagcaaggtagtgagtaaggtaggtagtaagataggcagtacggtagatggtgaggca

SEQ ID NO: 25755 - DNA, 96 bp, Aspergillus fumigatus
  misc_feature: 176
tcctaaatacctctttccctacctcacttactaccttactaccttgctcactaccttacttactacctcactatctatcttactgcctgtctcact

SEQ ID NO: 25756 - DNA, 96 bp, Aspergillus fumigatus
  misc_feature: 176
tccaatcttatttattctctctttacttacttaaactctctttatcttatatatctcttcgtcctattcttatcttaaacttgctaacccttatgc

SEQ ID NO: 25757 - DNA, 96 bp, Aspergillus fumigatus
  misc_feature: 176
tatatatatataattgtgagttaggtagagataaacataagaatagaataatagagaaaataataataaagaagagtaaagattaagaaggtttta

SEQ ID NO: 25758 - DNA, 96 bp, Aspergillus fumigatus
  misc_feature: 176
gccctagtcctagcactagcactagcctgagcactagcctgagcactagcctgagcactagcctgagcactagcctgagcactagcctgagcagta

SEQ ID NO: 25759 - DNA, 96 bp, Aspergillus fumigatus
  misc_feature: 176
taatttatgaaataattgattttccatggtgattattatgaatatgaatgaatatgaataaatatgaatgattgcaaaatacctttacccctgaat

SEQ ID NO: 25760 - DNA, 96 bp, Aspergillus fumigatus
  misc_feature: 176
taatacctagggtaggtaatttatgaaataattgattttccatggtgattattatgaatatgaatgaatatgaataaatatgaatgattgcaaaat

SEQ ID NO: 25761 - DNA, 96 bp, Aspergillus fumigatus
  misc_feature: 176
taaatacctctttccctacctcacttactaccttactaccttgctcactaccttacttactacctcactatctatcttactgcctgtctcactgcc

SEQ ID NO: 25762 - DNA, 96 bp, Aspergillus fumigatus
  misc_feature: 176
taaaatagaaaagaaataaaagaaaagagagaaagatttaaaaggataataataagtaaggaaattatatttaagataatagaaaaaagtaaggat

SEQ ID NO: 25763 - DNA, 96 bp, Aspergillus fumigatus
  misc_feature: 176
actagcctgagcactagcctgagcactagcctgagcactagcctgagcactagcctgagcactagcctgagcagtagtactagacctaaatgggcc

SEQ ID NO: 25764 - DNA, 96 bp, Aspergillus fumigatus
  misc_feature: 176
ctaaatacctctttccctacctcacttactaccttactaccttgctcactaccttacttactacctcactatctatcttactgcctgtctcactgc

SEQ ID NO: 25765 - DNA, 96 bp, Aspergillus fumigatus
  misc_feature: 176
gattagattagaaattcaagttaaaataagaataattagataaagaagattataaaagaaagaaaataaagaaaagaaaagaggagattaatattt

SEQ ID NO: 25766 - DNA, 96 bp, Aspergillus fumigatus
  misc_feature: 176
acccttactctatctaaactgactaaccctgactctatctaaactatctaaccctaactctatcttactaaaactaacttatttttttattaactc

SEQ ID NO: 25767 - DNA, 96 bp, Aspergillus fumigatus
  misc_feature: 176
atatttaaagagagaatcaagagagtataagaattaatatatagaaggaagagagaaaagagttaataaaaaaataagttagttttagtaagatag

SEQ ID NO: 25768 - DNA, 96 bp, Aspergillus fumigatus
  misc_feature: 176
ctagcactagcctgagcactagcctgagcactagcctgagcactagcctgagcactagcctgagcactagcctgagcagtagtactagacctaaat

SEQ ID NO: 25769 - DNA, 96 bp, Aspergillus fumigatus
  misc_feature: 176
ccaatcttatttattctctctttacttacttaaactctctttatcttatatatctcttcgtcctattcttatcttaaacttgctaacccttatgct

SEQ ID NO: 25770 - DNA, 96 bp, Aspergillus fumigatus
  misc_feature: 175
ttttattatcttactacccctgttagtataaaaataagagatatttaatataatcttaatagttattaattaatatataaaaatagctaaatatat

SEQ ID NO: 25771 - DNA, 96 bp, Aspergillus fumigatus
  misc_feature: 175
tttaaagagagaatcaagagagtataagaattaatatatagaaggaagagagaaaagagttaataaaaaaataagttagttttagtaagatagagt

SEQ ID NO: 25772 - DNA, 96 bp, Aspergillus fumigatus
  misc_feature: 175
ttggatatttaaagagagaatcaagagagtataagaattaatatatagaaggaagagagaaaagagttaataaaaaaataagttagttttagtaag

SEQ ID NO: 25773 - DNA, 96 bp, Aspergillus fumigatus
  misc_feature: 175
ttattcttattttaacttgaatttctaatctaatctatatttttccctttcttcttctttttcttcttctttttctccttctttttctccttcttt

SEQ ID NO: 25774 - DNA, 96 bp, Aspergillus fumigatus
  misc_feature: 175
tacccctgttagtataaaaataagagatatttaatataatcttaatagttattaattaatatataaaaatagctaaatatatctctattaaaaaga

SEQ ID NO: 25775 - DNA, 96 bp, Aspergillus fumigatus
  misc_feature: 175
tctagaatatagtaataaactaagagctatagtctaatactattattcttagtaggctatatagcttctatatataatagatatataattaggcta

SEQ ID NO: 25776 - DNA, 96 bp, Aspergillus fumigatus
  misc_feature: 175
tccttcttatcttccttcttccctttccaatcttatttattctctctttacttacttaaactctctttatcttatatatctcttcgtcctattctt

SEQ ID NO: 25777 - DNA, 96 bp, Aspergillus fumigatus
  misc_feature: 175
cccctgttagtataaaaataagagatatttaatataatcttaatagttattaattaatatataaaaatagctaaatatatctctattaaaaagata

SEQ ID NO: 25778 - DNA, 96 bp, Aspergillus fumigatus
  misc_feature: 175
atttttagatgtattaattatccttagattataatataataatacttaaataggattataatagaaatttaaaaatagttagtatactttaggata

SEQ ID NO: 25779 - DNA, 96 bp, Aspergillus fumigatus
  misc_feature: 175
attttattatcttactacccctgttagtataaaaataagagatatttaatataatcttaatagttattaattaatatataaaaatagctaaatata

SEQ ID NO: 25780 - DNA, 96 bp, Aspergillus fumigatus
  misc_feature: 175
caatcttatttattctctctttacttacttaaactctctttatcttatatatctcttcgtcctattcttatcttaaacttgctaacccttatgcta

SEQ ID NO: 25781 - DNA, 96 bp, Aspergillus fumigatus
  misc_feature: 175
ctctttccctacctcacttactaccttactaccttgctcactaccttacttactacctcactatctatcttactgcctgtctcactgcctgcctta

SEQ ID NO: 25782 - DNA, 96 bp, Aspergillus fumigatus
  misc_feature: 175
ctctttactctcttctatattataatttattccttctattatactaatccttaccttctctcttattactactaatccttattacctccctttcct

SEQ ID NO: 25783 - DNA, 96 bp, Aspergillus fumigatus
  misc_feature: 175
ctaccgtactgcctatcttactacctaccttactcactaccttgcttactgcctcactgcctgtcttactacctgccttacttactacctcactat

SEQ ID NO: 25784 - DNA, 96 bp, Aspergillus fumigatus
  misc_feature: 175
ccgtactaaaattattataaacccttactcttactcttaacccttttttactctcttttttttactcttcttctttttcttacttttttttaccct

SEQ ID NO: 25785 - DNA, 96 bp, Aspergillus fumigatus
  misc_feature: 175
ccctccgcgcgcgcggcccatcgctcgctgcggcagggcgcgcgcgcccggcctatatcggccgcgggggctgtgtgtctgtccgtgtatcgcgat

SEQ ID NO: 25786 - DNA, 96 bp, Aspergillus fumigatus
  misc_feature: 175
aaaaataaaaataaaaataaaaataaaaataaaaataaaaataaaaataaaaataaaaataaaaataaaaataaaaataaaaataaaaataaaaat

SEQ ID NO: 25787 - DNA, 96 bp, Aspergillus fumigatus
  misc_feature: 175
aatagagagaggataagaattaatatatagaagaaagagaagaaagagaagaaagaagataataaaagaaaggataagttaattttttagtaagat

SEQ ID NO: 25788 - DNA, 96 bp, Aspergillus fumigatus
  misc_feature: 175
agattagattagaaattcaagttaaaataagaataattagataaagaagattataaaagaaagaaaataaagaaaagaaaagaggagattaatatt

SEQ ID NO: 25789 - DNA, 96 bp, Aspergillus fumigatus
  misc_feature: 175
accgtactgcctatcttactacctaccttactcactaccttgcttactgcctcactgcctgtcttactacctgccttacttactacctcactatct

SEQ ID NO: 25790 - DNA, 96 bp, Aspergillus fumigatus
  misc_feature: 174
tttttttgcaaatataaattcatatataatatgaaaaaaaaaaaattaaaaataaaaaaatataaatataaaaataattcttttttttactaaata

SEQ ID NO: 25791 - DNA, 96 bp, Aspergillus fumigatus
  misc_feature: 174
agatattatagatatagttttagaattatatatatataattgtgagttaggtagagataaacataagaatagaataatagagaaaataataataaa

SEQ ID NO: 25792 - DNA, 96 bp, Aspergillus fumigatus
  misc_feature: 174
atcttccttcttccctttccaatcttatttattctctctttacttacttaaactctctttatcttatatatctcttcgtcctattcttatcttaaa

SEQ ID NO: 25793 - DNA, 96 bp, Aspergillus fumigatus
  misc_feature: 174
tatcttccttcttccctttccaatcttatttattctctctttacttacttaaactctctttatcttatatatctcttcgtcctattcttatcttaa

SEQ ID NO: 25794 - DNA, 96 bp, Aspergillus fumigatus
  misc_feature: 174
aatacctagggtaggtaatttatgaaataattgattttccatggtgattattatgaatatgaatgaatatgaataaatatgaatgattgcaaaata

SEQ ID NO: 25795 - DNA, 96 bp, Aspergillus fumigatus
  misc_feature: 174
tattcttattttaacttgaatttctaatctaatctatatttttccctttcttcttctttttcttcttctttttctccttctttttctccttctttt

SEQ ID NO: 25796 - DNA, 96 bp, Aspergillus fumigatus
  misc_feature: 174
gaagtagatattatagatatagttttagaattatatatatataattgtgagttaggtagagataaacataagaatagaataatagagaaaataata

SEQ ID NO: 25797 - DNA, 96 bp, Aspergillus fumigatus
  misc_feature: 174
taactcacaattatatatatataattctaaaactatatctataatatctacttctgggatacctctctatctatctactaatctcctactactatt

SEQ ID NO: 25798 - DNA, 96 bp, Aspergillus fumigatus
  misc_feature: 174
taacccttactctatctaaactgactaaccctgactctatctaaactatctaaccctaactctatcttactaaaactaacttatttttttattaac

SEQ ID NO: 25799 - DNA, 96 bp, Aspergillus fumigatus
  misc_feature: 174
cgtactgcctatcttactacctaccttactcactaccttgcttactgcctcactgcctgtcttactacctgccttacttactacctcactatctac

SEQ ID NO: 25800 - DNA, 96 bp, Aspergillus fumigatus
  misc_feature: 174
acccgtactaaaattattataaacccttactcttactcttaacccttttttactctcttttttttactcttcttctttttcttacttttttttacc

SEQ ID NO: 25801 - DNA, 96 bp, Aspergillus fumigatus
  misc_feature: 174
ggatttggatatttaaagagagaatcaagagagtataagaattaatatatagaaggaagagagaaaagagttaataaaaaaataagttagttttag

SEQ ID NO: 25802 - DNA, 96 bp, Aspergillus fumigatus
  misc_feature: 174
agtaagtaaggcaggtagtaagacaggcagtgaggcagtaagcaaggtagtgagtaaggtaggtagtaagataggcagtacggtagatggtgaggc

SEQ ID NO: 25803 - DNA, 96 bp, Aspergillus fumigatus
  misc_feature: 174
cttatttattctctctttacttacttaaactctctttatcttatatatctcttcgtcctattcttatcttaaacttgctaacccttatgctatctt

SEQ ID NO: 25804 - DNA, 96 bp, Aspergillus fumigatus
  misc_feature: 174
agaatagagagaggataagaattaatatatagaagaaagagaagaaagagaagaaagaagataataaaagaaaggataagttaattttttagtaag

SEQ ID NO: 25805 - DNA, 96 bp, Aspergillus fumigatus
  misc_feature: 174
cctaaatacctctttccctacctcacttactaccttactaccttgctcactaccttacttactacctcactatctatcttactgcctgtctcactg

SEQ ID NO: 25806 - DNA, 96 bp, Aspergillus fumigatus
  misc_feature: 174
aggtagtaagtaaggcaggtagtaagacaggcagtgaggcagtaagcaaggtagtgagtaaggtaggtagtaagataggcagtacggtagatggtg

SEQ ID NO: 25807 - DNA, 96 bp, Aspergillus fumigatus
  misc_feature: 174
agattagaaattcaagttaaaataagaataattagataaagaagattataaaagaaagaaaataaagaaaagaaaagaggagattaatatttaaat

SEQ ID NO: 25808 - DNA, 96 bp, Aspergillus fumigatus
  misc_feature: 174
attctctctttacttacttaaactctctttatcttatatatctcttcgtcctattcttatcttaaacttgctaacccttatgctatcttaactaat

SEQ ID NO: 25809 - DNA, 96 bp, Aspergillus fumigatus
  misc_feature: 174
attatcttactacccctgttagtataaaaataagagatatttaatataatcttaatagttattaattaatatataaaaatagctaaatatatctct

SEQ ID NO: 25810 - DNA, 96 bp, Aspergillus fumigatus
  misc_feature: 174
aatcttatttattctctctttacttacttaaactctctttatcttatatatctcttcgtcctattcttatcttaaacttgctaacccttatgctat

SEQ ID NO: 25811 - DNA, 96 bp, Aspergillus fumigatus
  misc_feature: 174
aacccttactctatctaaactgactaaccctgactctatctaaactatctaaccctaactctatcttactaaaactaacttatttttttattaact

SEQ ID NO: 25812 - DNA, 96 bp, Aspergillus fumigatus
  misc_feature: 174
aaggatttggatatttaaagagagaatcaagagagtataagaattaatatatagaaggaagagagaaaagagttaataaaaaaataagttagtttt

SEQ ID NO: 25813 - DNA, 96 bp, Aspergillus fumigatus
  misc_feature: 174
aaatagaaaagaaataaaagaaaagagagaaagatttaaaaggataataataagtaaggaaattatatttaagataatagaaaaaagtaaggattt

SEQ ID NO: 25814 - DNA, 96 bp, Aspergillus fumigatus
  misc_feature: 173
attagaaattcaagttaaaataagaataattagataaagaagattataaaagaaagaaaataaagaaaagaaaagaggagattaatatttaaataa

SEQ ID NO: 25815 - DNA, 96 bp, Aspergillus fumigatus
  misc_feature: 173
agaaattcaagttaaaataagaataattagataaagaagattataaaagaaagaaaataaagaaaagaaaagaggagattaatatttaaataataa

SEQ ID NO: 25816 - DNA, 96 bp, Aspergillus fumigatus
  misc_feature: 173
ttagtagtaggtatagtagttttaggtctagtaattaatatattagtatatacctagctagtaatattcttatactattaacttatataacttata

SEQ ID NO: 25817 - DNA, 96 bp, Aspergillus fumigatus
  misc_feature: 173
ttagattagaaattcaagttaaaataagaataattagataaagaagattataaaagaaagaaaataaagaaaagaaaagaggagattaatatttaa

SEQ ID NO: 25818 - DNA, 96 bp, Aspergillus fumigatus
  misc_feature: 173
gaaataaaagaaaagagagaaagatttaaaaggataataataagtaaggaaattatatttaagataatagaaaaaagtaaggatttggatatttaa

SEQ ID NO: 25819 - DNA, 96 bp, Aspergillus fumigatus
  misc_feature: 173
ttaaagagagaatcaagagagtataagaattaatatatagaaggaagagagaaaagagttaataaaaaaataagttagttttagtaagatagagtt

SEQ ID NO: 25820 - DNA, 96 bp, Aspergillus fumigatus
  misc_feature: 173
ctagcctgagcactagcctgagcactagcctgagcactagcctgagcactagcctgagcactagcctgagcagtagtactagacctaaatgggcca

SEQ ID NO: 25821 - DNA, 96 bp, Aspergillus fumigatus
  misc_feature: 173
atattatagatatagttttagaattatatatatataattgtgagttaggtagagataaacataagaatagaataatagagaaaataataataaaga

SEQ ID NO: 25822 - DNA, 96 bp, Aspergillus fumigatus
  misc_feature: 173
gaatagagagaggataagaattaatatatagaagaaagagaagaaagagaagaaagaagataataaaagaaaggataagttaattttttagtaaga

SEQ ID NO: 25823 - DNA, 96 bp, Aspergillus fumigatus
  misc_feature: 173
cccctccgcgcgcgcggcccatcgctcgctgcggcagggcgcgcgcgcccggcctatatcggccgcgggggctgtgtgtctgtccgtgtatcgcga

SEQ ID NO: 25824 - DNA, 96 bp, Aspergillus fumigatus
  misc_feature: 173
ggtagtaagtaaggcaggtagtaagacaggcagtgaggcagtaagcaaggtagtgagtaaggtaggtagtaagataggcagtacggtagatggtga

SEQ ID NO: 25825 - DNA, 96 bp, Aspergillus fumigatus
  misc_feature: 173
gattagaaattcaagttaaaataagaataattagataaagaagattataaaagaaagaaaataaagaaaagaaaagaggagattaatatttaaata

SEQ ID NO: 25826 - DNA, 96 bp, Aspergillus fumigatus
  misc_feature: 173
tatcttactacctaccttactcactaccttgcttactgcctcactgcctgtcttactacctgccttacttactacctcactatctaccttaccatc

SEQ ID NO: 25827 - DNA, 96 bp, Aspergillus fumigatus
  misc_feature: 173
tagtaagtaaggcaggtagtaagacaggcagtgaggcagtaagcaaggtagtgagtaaggtaggtagtaagataggcagtacggtagatggtgagg

SEQ ID NO: 25828 - DNA, 96 bp, Aspergillus fumigatus
  misc_feature: 173
taccgtactgcctatcttactacctaccttactcactaccttgcttactgcctcactgcctgtcttactacctgccttacttactacctcactatc

SEQ ID NO: 25829 - DNA, 96 bp, Aspergillus fumigatus
  misc_feature: 173
actaacccttactctatctaaactgactaaccctgactctatctaaactatctaaccctaactctatcttactaaaactaacttatttttttatta

SEQ ID NO: 25830 - DNA, 96 bp, Aspergillus fumigatus
  misc_feature: 173
gatttggatatttaaagagagaatcaagagagtataagaattaatatatagaaggaagagagaaaagagttaataaaaaaataagttagttttagt

SEQ ID NO: 25831 - DNA, 96 bp, Aspergillus fumigatus
  misc_feature: 173
ctatcttactacctaccttactcactaccttgcttactgcctcactgcctgtcttactacctgccttacttactacctcactatctaccttaccat

SEQ ID NO: 25832 - DNA, 96 bp, Aspergillus fumigatus
  misc_feature: 173
cctctttccctacctcacttactaccttactaccttgctcactaccttacttactacctcactatctatcttactgcctgtctcactgcctgcctt

SEQ ID NO: 25833 - DNA, 96 bp, Aspergillus fumigatus
  misc_feature: 173
cctccgcgcgcgcggcccatcgctcgctgcggcagggcgcgcgcgcccggcctatatcggccgcgggggctgtgtgtctgtccgtgtatcgcgatg

SEQ ID NO: 25834 - DNA, 96 bp, Aspergillus fumigatus
  misc_feature: 173
aatagaaaagaaataaaagaaaagagagaaagatttaaaaggataataataagtaaggaaattatatttaagataatagaaaaaagtaaggatttg

SEQ ID NO: 25835 - DNA, 96 bp, Aspergillus fumigatus
  misc_feature: 173
acccctgttagtataaaaataagagatatttaatataatcttaatagttattaattaatatataaaaatagctaaatatatctctattaaaaagat

SEQ ID NO: 25836 - DNA, 96 bp, Aspergillus fumigatus
  misc_feature: 173
atcttactacctaccttactcactaccttgcttactgcctcactgcctgtcttactacctgccttacttactacctcactatctaccttaccatct

SEQ ID NO: 25837 - DNA, 96 bp, Aspergillus fumigatus
  misc_feature: 173
aaatacctctttccctacctcacttactaccttactaccttgctcactaccttacttactacctcactatctatcttactgcctgtctcactgcct

SEQ ID NO: 25838 - DNA, 96 bp, Aspergillus fumigatus
  misc_feature: 173
aaagaaataaaagaaaagagagaaagatttaaaaggataataataagtaaggaaattatatttaagataatagaaaaaagtaaggatttggatatt

SEQ ID NO: 25839 - DNA, 96 bp, Aspergillus fumigatus
  misc_feature: 173
aactaacccttactctatctaaactgactaaccctgactctatctaaactatctaaccctaactctatcttactaaaactaacttatttttttatt

SEQ ID NO: 25840 - DNA, 96 bp, Aspergillus fumigatus
  misc_feature: 172
ctaatacctagggtaggtaatttatgaaataattgattttccatggtgattattatgaatatgaatgaatatgaataaatatgaatgattgcaaaa

SEQ ID NO: 25841 - DNA, 96 bp, Aspergillus fumigatus
  misc_feature: 172
tttattatcttactacccctgttagtataaaaataagagatatttaatataatcttaatagttattaattaatatataaaaatagctaaatatatc

SEQ ID NO: 25842 - DNA, 96 bp, Aspergillus fumigatus
  misc_feature: 172
ttactacccctgttagtataaaaataagagatatttaatataatcttaatagttattaattaatatataaaaatagctaaatatatctctattaaa

SEQ ID NO: 25843 - DNA, 96 bp, Aspergillus fumigatus
  misc_feature: 172
ttcttatcttccttcttccctttccaatcttatttattctctctttacttacttaaactctctttatcttatatatctcttcgtcctattcttatc

SEQ ID NO: 25844 - DNA, 96 bp, Aspergillus fumigatus
  misc_feature: 172
gtaatttatgaaataattgattttccatggtgattattatgaatatgaatgaatatgaataaatatgaatgattgcaaaatacctttacccctgaa

SEQ ID NO: 25845 - DNA, 96 bp, Aspergillus fumigatus
  misc_feature: 172
aagtagatattatagatatagttttagaattatatatatataattgtgagttaggtagagataaacataagaatagaataatagagaaaataataa

SEQ ID NO: 25846 - DNA, 96 bp, Aspergillus fumigatus
  misc_feature: 172
ttatcttccttcttccctttccaatcttatttattctctctttacttacttaaactctctttatcttatatatctcttcgtcctattcttatctta

SEQ ID NO: 25847 - DNA, 96 bp, Aspergillus fumigatus
  misc_feature: 172
ttatcttactacccctgttagtataaaaataagagatatttaatataatcttaatagttattaattaatatataaaaatagctaaatatatctcta

SEQ ID NO: 25848 - DNA, 96 bp, Aspergillus fumigatus
  misc_feature: 172
tattctctctttacttacttaaactctctttatcttatatatctcttcgtcctattcttatcttaaacttgctaacccttatgctatcttaactaa

SEQ ID NO: 25849 - DNA, 96 bp, Aspergillus fumigatus
  misc_feature: 172
tcttatcttccttcttccctttccaatcttatttattctctctttacttacttaaactctctttatcttatatatctcttcgtcctattcttatct

SEQ ID NO: 25850 - DNA, 96 bp, Aspergillus fumigatus
  misc_feature: 172
tatttaaagagagaatcaagagagtataagaattaatatatagaaggaagagagaaaagagttaataaaaaaataagttagttttagtaagataga

SEQ ID NO: 25851 - DNA, 96 bp, Aspergillus fumigatus
  misc_feature: 172
tccctacctcacttactaccttactaccttgctcactaccttacttactacctcactatctatcttactgcctgtctcactgcctgccttactatc

SEQ ID NO: 25852 - DNA, 96 bp, Aspergillus fumigatus
  misc_feature: 172
tagaaaagaaataaaagaaaagagagaaagatttaaaaggataataataagtaaggaaattatatttaagataatagaaaaaagtaaggatttgga

SEQ ID NO: 25853 - DNA, 96 bp, Aspergillus fumigatus
  misc_feature: 172
tagaaattcaagttaaaataagaataattagataaagaagattataaaagaaagaaaataaagaaaagaaaagaggagattaatatttaaataata

SEQ ID NO: 25854 - DNA, 96 bp, Aspergillus fumigatus
  misc_feature: 172
tattatcttactacccctgttagtataaaaataagagatatttaatataatcttaatagttattaattaatatataaaaatagctaaatatatctc

SEQ ID NO: 25855 - DNA, 96 bp, Aspergillus fumigatus
  misc_feature: 172
atagagagaggataagaattaatatatagaagaaagagaagaaagagaagaaagaagataataaaagaaaggataagttaattttttagtaagata

SEQ ID NO: 25856 - DNA, 96 bp, Aspergillus fumigatus
  misc_feature: 172
tagtataaaaataagagatatttaatataatcttaatagttattaattaatatataaaaatagctaaatatatctctattaaaaagataattacta

SEQ ID NO: 25857 - DNA, 96 bp, Aspergillus fumigatus
  misc_feature: 172
atttggatatttaaagagagaatcaagagagtataagaattaatatatagaaggaagagagaaaagagttaataaaaaaataagttagttttagta

SEQ ID NO: 25858 - DNA, 96 bp, Aspergillus fumigatus
  misc_feature: 172
ccttcttatcttccttcttccctttccaatcttatttattctctctttacttacttaaactctctttatcttatatatctcttcgtcctattctta

SEQ ID NO: 25859 - DNA, 96 bp, Aspergillus fumigatus
  misc_feature: 172
taacttgaatttctaatctaatctatatttttccctttcttcttctttttcttcttctttttctccttctttttctccttctttttctccttcttt

SEQ ID NO: 25860 - DNA, 96 bp, Aspergillus fumigatus
  misc_feature: 172
agaaataaaagaaaagagagaaagatttaaaaggataataataagtaaggaaattatatttaagataatagaaaaaagtaaggatttggatattta

SEQ ID NO: 25861 - DNA, 96 bp, Aspergillus fumigatus
  misc_feature: 172
gtagtaagtaaggcaggtagtaagacaggcagtgaggcagtaagcaaggtagtgagtaaggtaggtagtaagataggcagtacggtagatggtgag

SEQ ID NO: 25862 - DNA, 96 bp, Aspergillus fumigatus
  misc_feature: 172
gtactgcctatcttactacctaccttactcactaccttgcttactgcctcactgcctgtcttactacctgccttacttactacctcactatctacc

SEQ ID NO: 25863 - DNA, 96 bp, Aspergillus fumigatus
  misc_feature: 172
atttaaagagagaatcaagagagtataagaattaatatatagaaggaagagagaaaagagttaataaaaaaataagttagttttagtaagatagag

SEQ ID NO: 25864 - DNA, 96 bp, Aspergillus fumigatus
  misc_feature: 172
atagaaaagaaataaaagaaaagagagaaagatttaaaaggataataataagtaaggaaattatatttaagataatagaaaaaagtaaggatttgg

SEQ ID NO: 25865 - DNA, 96 bp, Aspergillus fumigatus
  misc_feature: 172
aaaagaaataaaagaaaagagagaaagatttaaaaggataataataagtaaggaaattatatttaagataatagaaaaaagtaaggatttggatat

SEQ ID NO: 25866 - DNA, 96 bp, Aspergillus fumigatus
  misc_feature: 172
aagaaataaaagaaaagagagaaagatttaaaaggataataataagtaaggaaattatatttaagataatagaaaaaagtaaggatttggatattt

SEQ ID NO: 25867 - DNA, 96 bp, Aspergillus fumigatus
  misc_feature: 171
tttggatatttaaagagagaatcaagagagtataagaattaatatatagaaggaagagagaaaagagttaataaaaaaataagttagttttagtaa

SEQ ID NO: 25868 - DNA, 96 bp, Aspergillus fumigatus
  misc_feature: 171
ttattatcttactacccctgttagtataaaaataagagatatttaatataatcttaatagttattaattaatatataaaaatagctaaatatatct

SEQ ID NO: 25869 - DNA, 96 bp, Aspergillus fumigatus
  misc_feature: 171
ttagtataaaaataagagatatttaatataatcttaatagttattaattaatatataaaaatagctaaatatatctctattaaaaagataattact

SEQ ID NO: 25870 - DNA, 96 bp, Aspergillus fumigatus
  misc_feature: 171
cctatcttactacctaccttactcactaccttgcttactgcctcactgcctgtcttactacctgccttacttactacctcactatctaccttacca

SEQ ID NO: 25871 - DNA, 96 bp, Aspergillus fumigatus
  misc_feature: 171
tggatatttaaagagagaatcaagagagtataagaattaatatatagaaggaagagagaaaagagttaataaaaaaataagttagttttagtaaga

SEQ ID NO: 25872 - DNA, 96 bp, Aspergillus fumigatus
  misc_feature: 171
tctttactctcttctatattataatttattccttctattatactaatccttaccttctctcttattactactaatccttattacctccctttcctt

SEQ ID NO: 25873 - DNA, 96 bp, Aspergillus fumigatus
  misc_feature: 171
tcttactacctaccttactcactaccttgcttactgcctcactgcctgtcttactacctgccttacttactacctcactatctaccttaccatcta

SEQ ID NO: 25874 - DNA, 96 bp, Aspergillus fumigatus
  misc_feature: 171
tcttactacccctgttagtataaaaataagagatatttaatataatcttaatagttattaattaatatataaaaatagctaaatatatctctatta

SEQ ID NO: 25875 - DNA, 96 bp, Aspergillus fumigatus
  misc_feature: 171
atagtagatatgaaatatatatatttaggcagaatgactcgatatagtagagaatcaaggaatattcaggccggtaggcagcaaaaatagatacga

SEQ ID NO: 25876 - DNA, 96 bp, Aspergillus fumigatus
  misc_feature: 171
tagtagtaggtatagtagttttaggtctagtaattaatatattagtatatacctagctagtaatattcttatactattaacttatataacttatac

SEQ ID NO: 25877 - DNA, 96 bp, Aspergillus fumigatus
  misc_feature: 171
tagcctgagcactagcctgagcactagcctgagcactagcctgagcactagcctgagcactagcctgagcagtagtactagacctaaatgggccat

SEQ ID NO: 25878 - DNA, 96 bp, Aspergillus fumigatus
  misc_feature: 171
tactgcctatcttactacctaccttactcactaccttgcttactgcctcactgcctgtcttactacctgccttacttactacctcactatctacct

SEQ ID NO: 25879 - DNA, 96 bp, Aspergillus fumigatus
  misc_feature: 171
tacctagggtaggtaatttatgaaataattgattttccatggtgattattatgaatatgaatgaatatgaataaatatgaatgattgcaaaatacc

SEQ ID NO: 25880 - DNA, 96 bp, Aspergillus fumigatus
  misc_feature: 171
ctgcctatcttactacctaccttactcactaccttgcttactgcctcactgcctgtcttactacctgccttacttactacctcactatctacctta

SEQ ID NO: 25881 - DNA, 96 bp, Aspergillus fumigatus
  misc_feature: 171
taaagagagaatcaagagagtataagaattaatatatagaaggaagagagaaaagagttaataaaaaaataagttagttttagtaagatagagtta

SEQ ID NO: 25882 - DNA, 96 bp, Aspergillus fumigatus
  misc_feature: 171
gttagtataaaaataagagatatttaatataatcttaatagttattaattaatatataaaaatagctaaatatatctctattaaaaagataattac

SEQ ID NO: 25883 - DNA, 96 bp, Aspergillus fumigatus
  misc_feature: 171
ctctctatctatctactaatctcctactactattattctatctatctctctaccttattatctaccttctatcggaacttcctatgggccttctac

SEQ ID NO: 25884 - DNA, 96 bp, Aspergillus fumigatus
  misc_feature: 171
agggtaggtaatttatgaaataattgattttccatggtgattattatgaatatgaatgaatatgaataaatatgaatgattgcaaaatacctttac

SEQ ID NO: 25885 - DNA, 96 bp, Aspergillus fumigatus
  misc_feature: 171
ggttagtcagtttagatagagtaagggttagttagtttagatagagttaggattattcagtttagacagagtaagggttagttagtttagatagag

SEQ ID NO: 25886 - DNA, 96 bp, Aspergillus fumigatus
  misc_feature: 171
ggatacctctctatctatctactaatctcctactactattattctatctatctctctaccttattatctaccttctatcggaacttcctatgggcc

SEQ ID NO: 25887 - DNA, 96 bp, Aspergillus fumigatus
  misc_feature: 171
atcttatttattctctctttacttacttaaactctctttatcttatatatctcttcgtcctattcttatcttaaacttgctaacccttatgctatc

SEQ ID NO: 25888 - DNA, 96 bp, Aspergillus fumigatus
  misc_feature: 171
gatagagtaagggttagttagtttagatagagttaggattattcagtttagacagagtaagggttagttagtttagatagagccaggattattcag

SEQ ID NO: 25889 - DNA, 96 bp, Aspergillus fumigatus
  misc_feature: 171
aattatatatatataattctaaaactatatctataatatctacttctgggatacctctctatctatctactaatctcctactactattattctatc

SEQ ID NO: 25890 - DNA, 96 bp, Aspergillus fumigatus
  misc_feature: 171
aactctatcttactaaaaaattaacttatcctttcttttattatcttctttcttctctttcttctctttcttctatatattaattcttatcctctc

SEQ ID NO: 25891 - DNA, 96 bp, Aspergillus fumigatus
  misc_feature: 171
gaaattcaagttaaaataagaataattagataaagaagattataaaagaaagaaaataaagaaaagaaaagaggagattaatatttaaataataat

SEQ ID NO: 25892 - DNA, 96 bp, Aspergillus fumigatus
  misc_feature: 171
ctttccctacctcacttactaccttactaccttgctcactaccttacttactacctcactatctatcttactgcctgtctcactgcctgccttact

SEQ ID NO: 25893 - DNA, 96 bp, Aspergillus fumigatus
  misc_feature: 171
ctccgcgcgcgcggcccatcgctcgctgcggcagggcgcgcgcgcccggcctatatcggccgcgggggctgtgtgtctgtccgtgtatcgcgatgg

SEQ ID NO: 25894 - DNA, 96 bp, Aspergillus fumigatus
  misc_feature: 171
attcttattttaacttgaatttctaatctaatctatatttttccctttcttcttctttttcttcttctttttctccttctttttctccttcttttt

SEQ ID NO: 25895 - DNA, 96 bp, Aspergillus fumigatus
  misc_feature: 171
actcacaattatatatatataattctaaaactatatctataatatctacttctgggatacctctctatctatctactaatctcctactactattat

SEQ ID NO: 25896 - DNA, 96 bp, Aspergillus fumigatus
  misc_feature: 170
ttcttattttaacttgaatttctaatctaatctatatttttccctttcttcttctttttcttcttctttttctccttctttttctccttctttttc

SEQ ID NO: 25897 - DNA, 96 bp, Aspergillus fumigatus
  misc_feature: 170
ttctagaatatagtaataaactaagagctatagtctaatactattattcttagtaggctatatagcttctatatataatagatatataattaggct

SEQ ID NO: 25898 - DNA, 96 bp, Aspergillus fumigatus
  misc_feature: 170
ttccctacctcacttactaccttactaccttgctcactaccttacttactacctcactatctatcttactgcctgtctcactgcctgccttactat

SEQ ID NO: 25899 - DNA, 96 bp, Aspergillus fumigatus
  misc_feature: 170
ttaggtatatctctaatatctaattctagtattctatctagttatctatttataaataaaaagctatatttatttcttaatccttaaagatctata

SEQ ID NO: 25900 - DNA, 96 bp, Aspergillus fumigatus
  misc_feature: 170
ttagaaattcaagttaaaataagaataattagataaagaagattataaaagaaagaaaataaagaaaagaaaagaggagattaatatttaaataat

SEQ ID NO: 25901 - DNA, 96 bp, Aspergillus fumigatus
  misc_feature: 170
gtataaaaataagagatatttaatataatcttaatagttattaattaatatataaaaatagctaaatatatctctattaaaaagataattactaca

SEQ ID NO: 25902 - DNA, 96 bp, Aspergillus fumigatus
  misc_feature: 170
tgcctatcttactacctaccttactcactaccttgcttactgcctcactgcctgtcttactacctgccttacttactacctcactatctaccttac

SEQ ID NO: 25903 - DNA, 96 bp, Aspergillus fumigatus
  misc_feature: 170
tcttatttattctctctttacttacttaaactctctttatcttatatatctcttcgtcctattcttatcttaaacttgctaacccttatgctatct

SEQ ID NO: 25904 - DNA, 96 bp, Aspergillus fumigatus
  misc_feature: 170
ggtaatttatgaaataattgattttccatggtgattattatgaatatgaatgaatatgaataaatatgaatgattgcaaaatacctttacccctga

SEQ ID NO: 25905 - DNA, 96 bp, Aspergillus fumigatus
  misc_feature: 170
tatcttactacccctgttagtataaaaataagagatatttaatataatcttaatagttattaattaatatataaaaatagctaaatatatctctat

SEQ ID NO: 25906 - DNA, 96 bp, Aspergillus fumigatus
  misc_feature: 170
tataaaaataagagatatttaatataatcttaatagttattaattaatatataaaaatagctaaatatatctctattaaaaagataattactacag

SEQ ID NO: 25907 - DNA, 96 bp, Aspergillus fumigatus
  misc_feature: 170
tagggtaggtaatttatgaaataattgattttccatggtgattattatgaatatgaatgaatatgaataaatatgaatgattgcaaaataccttta

SEQ ID NO: 25908 - DNA, 96 bp, Aspergillus fumigatus
  misc_feature: 170
tacctctttccctacctcacttactaccttactaccttgctcactaccttacttactacctcactatctatcttactgcctgtctcactgcctgcc

SEQ ID NO: 25909 - DNA, 96 bp, Aspergillus fumigatus
  misc_feature: 170
taactctatcttactaaaaaattaacttatcctttcttttattatcttctttcttctctttcttctctttcttctatatattaattcttatcctct

SEQ ID NO: 25910 - DNA, 96 bp, Aspergillus fumigatus
  misc_feature: 170
aggatttggatatttaaagagagaatcaagagagtataagaattaatatatagaaggaagagagaaaagagttaataaaaaaataagttagtttta

SEQ ID NO: 25911 - DNA, 96 bp, Aspergillus fumigatus
  misc_feature: 170
atacctagggtaggtaatttatgaaataattgattttccatggtgattattatgaatatgaatgaatatgaataaatatgaatgattgcaaaatac

SEQ ID NO: 25912 - DNA, 96 bp, Aspergillus fumigatus
  misc_feature: 170
cttactacctaccttactcactaccttgcttactgcctcactgcctgtcttactacctgccttacttactacctcactatctaccttaccatctac

SEQ ID NO: 25913 - DNA, 96 bp, Aspergillus fumigatus
  misc_feature: 170
gcctatcttactacctaccttactcactaccttgcttactgcctcactgcctgtcttactacctgccttacttactacctcactatctaccttacc

SEQ ID NO: 25914 - DNA, 96 bp, Aspergillus fumigatus
  misc_feature: 170
gatattatagatatagttttagaattatatatatataattgtgagttaggtagagataaacataagaatagaataatagagaaaataataataaag

SEQ ID NO: 25915 - DNA, 96 bp, Aspergillus fumigatus
  misc_feature: 170
gatacctctctatctatctactaatctcctactactattattctatctatctctctaccttattatctaccttctatcggaacttcctatgggcct

SEQ ID NO: 25916 - DNA, 96 bp, Aspergillus fumigatus
  misc_feature: 170
cttcttatcttccttcttccctttccaatcttatttattctctctttacttacttaaactctctttatcttatatatctcttcgtcctattcttat

SEQ ID NO: 25917 - DNA, 96 bp, Aspergillus fumigatus
  misc_feature: 170
ctgggatacctctctatctatctactaatctcctactactattattctatctatctctctaccttattatctaccttctatcggaacttcctatgg

SEQ ID NO: 25918 - DNA, 96 bp, Aspergillus fumigatus
  misc_feature: 170
acctctttccctacctcacttactaccttactaccttgctcactaccttacttactacctcactatctatcttactgcctgtctcactgcctgcct

SEQ ID NO: 25919 - DNA, 96 bp, Aspergillus fumigatus
  misc_feature: 170
acctctctatctatctactaatctcctactactattattctatctatctctctaccttattatctaccttctatcggaacttcctatgggccttct

SEQ ID NO: 25920 - DNA, 96 bp, Aspergillus fumigatus
  misc_feature: 170
actgcctatcttactacctaccttactcactaccttgcttactgcctcactgcctgtcttactacctgccttacttactacctcactatctacctt

SEQ ID NO: 25921 - DNA, 96 bp, Aspergillus fumigatus
  misc_feature: 169
cctaatacctagggtaggtaatttatgaaataattgattttccatggtgattattatgaatatgaatgaatatgaataaatatgaatgattgcaaa

SEQ ID NO: 25922 - DNA, 96 bp, Aspergillus fumigatus
  misc_feature: 169
cttactacccctgttagtataaaaataagagatatttaatataatcttaatagttattaattaatatataaaaatagctaaatatatctctattaa

SEQ ID NO: 25923 - DNA, 96 bp, Aspergillus fumigatus
  misc_feature: 169
tgggatacctctctatctatctactaatctcctactactattattctatctatctctctaccttattatctaccttctatcggaacttcctatggg

SEQ ID NO: 25924 - DNA, 96 bp, Aspergillus fumigatus
  misc_feature: 169
tctttccctacctcacttactaccttactaccttgctcactaccttacttactacctcactatctatcttactgcctgtctcactgcctgccttac

SEQ ID NO: 25925 - DNA, 96 bp, Aspergillus fumigatus
  misc_feature: 169
tcttattttaacttgaatttctaatctaatctatatttttccctttcttcttctttttcttcttctttttctccttctttttctccttctttttct

SEQ ID NO: 25926 - DNA, 96 bp, Aspergillus fumigatus
  misc_feature: 169
tctctatctatctactaatctcctactactattattctatctatctctctaccttattatctaccttctatcggaacttcctatgggccttctacc

SEQ ID NO: 25927 - DNA, 96 bp, Aspergillus fumigatus
  misc_feature: 169
cctagccgctttgttcggcagaagatgatcacattagccctagtcctagcactagcactagcctgagcactagcctgagcactagcctgagcacta

SEQ ID NO: 25928 - DNA, 96 bp, Aspergillus fumigatus
  misc_feature: 169
tagcactagcctgagcactagcctgagcactagcctgagcactagcctgagcactagcctgagcactagcctgagcagtagtactagacctaaatg

SEQ ID NO: 25929 - DNA, 96 bp, Aspergillus fumigatus
  misc_feature: 169
tagagagaggataagaattaatatatagaagaaagagaagaaagagaagaaagaagataataaaagaaaggataagttaattttttagtaagatag

SEQ ID NO: 25930 - DNA, 96 bp, Aspergillus fumigatus
  misc_feature: 169
aactcacaattatatatatataattctaaaactatatctataatatctacttctgggatacctctctatctatctactaatctcctactactatta

SEQ ID NO: 25931 - DNA, 96 bp, Aspergillus fumigatus
  misc_feature: 169
gttagtcagtttagatagagtaagggttagttagtttagatagagttaggattattcagtttagacagagtaagggttagttagtttagatagagc

SEQ ID NO: 25932 - DNA, 96 bp, Aspergillus fumigatus
  misc_feature: 169
gaatagtagatatgaaatatatatatttaggcagaatgactcgatatagtagagaatcaaggaatattcaggccggtaggcagcaaaaatagatac

SEQ ID NO: 25933 - DNA, 96 bp, Aspergillus fumigatus
  misc_feature: 169
gtaattaatatattagtatatacctagctagtaatattcttatactattaacttatataacttatactttctagggtatttagtagtaggcttatt

SEQ ID NO: 25934 - DNA, 96 bp, Aspergillus fumigatus
  misc_feature: 169
gggatacctctctatctatctactaatctcctactactattattctatctatctctctaccttattatctaccttctatcggaacttcctatgggc

SEQ ID NO: 25935 - DNA, 96 bp, Aspergillus fumigatus
  misc_feature: 169
gcctgagcactagcctgagcactagcctgagcactagcctgagcactagcctgagcactagcctgagcagtagtactagacctaaatgggccatgt

SEQ ID NO: 25936 - DNA, 96 bp, Aspergillus fumigatus
  misc_feature: 169
atacctctttccctacctcacttactaccttactaccttgctcactaccttacttactacctcactatctatcttactgcctgtctcactgcctgc

SEQ ID NO: 25937 - DNA, 96 bp, Aspergillus fumigatus
  misc_feature: 169
cttatcttccttcttccctttccaatcttatttattctctctttacttacttaaactctctttatcttatatatctcttcgtcctattcttatctt

SEQ ID NO: 25938 - DNA, 96 bp, Aspergillus fumigatus
  misc_feature: 169
ctagggtaggtaatttatgaaataattgattttccatggtgattattatgaatatgaatgaatatgaataaatatgaatgattgcaaaataccttt

SEQ ID NO: 25939 - DNA, 96 bp, Aspergillus fumigatus
  misc_feature: 169
aatagtagatatgaaatatatatatttaggcagaatgactcgatatagtagagaatcaaggaatattcaggccggtaggcagcaaaaatagatacg

SEQ ID NO: 25940 - DNA, 96 bp, Aspergillus fumigatus
  misc_feature: 169
cacaattatatatatataattctaaaactatatctataatatctacttctgggatacctctctatctatctactaatctcctactactattattct

SEQ ID NO: 25941 - DNA, 96 bp, Aspergillus fumigatus
  misc_feature: 168
ttactacctaccttactcactaccttgcttactgcctcactgcctgtcttactacctgccttacttactacctcactatctaccttaccatctacc

SEQ ID NO: 25942 - DNA, 96 bp, Aspergillus fumigatus
  misc_feature: 168
ataaaaataagagatatttaatataatcttaatagttattaattaatatataaaaatagctaaatatatctctattaaaaagataattactacaga

SEQ ID NO: 25943 - DNA, 96 bp, Aspergillus fumigatus
  misc_feature: 168
agagagaggataagaattaatatatagaagaaagagaagaaagagaagaaagaagataataaaagaaaggataagttaattttttagtaagataga

SEQ ID NO: 25944 - DNA, 96 bp, Aspergillus fumigatus
  misc_feature: 168
gaaaagaaataaaagaaaagagagaaagatttaaaaggataataataagtaaggaaattatatttaagataatagaaaaaagtaaggatttggata

SEQ ID NO: 25945 - DNA, 96 bp, Aspergillus fumigatus
  misc_feature: 168
tacctctctatctatctactaatctcctactactattattctatctatctctctaccttattatctaccttctatcggaacttcctatgggccttc

SEQ ID NO: 25946 - DNA, 96 bp, Aspergillus fumigatus
  misc_feature: 168
tacccgtactaaaattattataaacccttactcttactcttaacccttttttactctcttttttttactcttcttctttttcttacttttttttac

SEQ ID NO: 25947 - DNA, 96 bp, Aspergillus fumigatus
  misc_feature: 168
gggtaggtaatttatgaaataattgattttccatggtgattattatgaatatgaatgaatatgaataaatatgaatgattgcaaaatacctttacc

SEQ ID NO: 25948 - DNA, 96 bp, Aspergillus fumigatus
  misc_feature: 168
ctaactctatcttactaaaaaattaacttatcctttcttttattatcttctttcttctctttcttctctttcttctatatattaattcttatcctc

SEQ ID NO: 25949 - DNA, 96 bp, Aspergillus fumigatus
  misc_feature: 168
cttattttaacttgaatttctaatctaatctatatttttccctttcttcttctttttcttcttctttttctccttctttttctccttctttttctc

SEQ ID NO: 25950 - DNA, 96 bp, Aspergillus fumigatus
  misc_feature: 168
cttaggtatatctctaatatctaattctagtattctatctagttatctatttataaataaaaagctatatttatttcttaatccttaaagatctat

SEQ ID NO: 25951 - DNA, 96 bp, Aspergillus fumigatus
  misc_feature: 168
ctctatctatctactaatctcctactactattattctatctatctctctaccttattatctaccttctatcggaacttcctatgggccttctacct

SEQ ID NO: 25952 - DNA, 96 bp, Aspergillus fumigatus
  misc_feature: 168
ccctagccgctttgttcggcagaagatgatcacattagccctagtcctagcactagcactagcctgagcactagcctgagcactagcctgagcact

SEQ ID NO: 25953 - DNA, 96 bp, Aspergillus fumigatus
  misc_feature: 168
agcctgagcactagcctgagcactagcctgagcactagcctgagcactagcctgagcactagcctgagcagtagtactagacctaaatgggccatg

SEQ ID NO: 25954 - DNA, 96 bp, Aspergillus fumigatus
  misc_feature: 168
aggtaatttatgaaataattgattttccatggtgattattatgaatatgaatgaatatgaataaatatgaatgattgcaaaatacctttacccctg

SEQ ID NO: 25955 - DNA, 96 bp, Aspergillus fumigatus
  misc_feature: 168
aatacctctttccctacctcacttactaccttactaccttgctcactaccttacttactacctcactatctatcttactgcctgtctcactgcctg

SEQ ID NO: 25956 - DNA, 96 bp, Aspergillus fumigatus
  misc_feature: 168
atctacttctgggatacctctctatctatctactaatctcctactactattattctatctatctctctaccttattatctaccttctatcggaact

SEQ ID NO: 25957 - DNA, 96 bp, Aspergillus fumigatus
  misc_feature: 168
agaaaagaaataaaagaaaagagagaaagatttaaaaggataataataagtaaggaaattatatttaagataatagaaaaaagtaaggatttggat

SEQ ID NO: 25958 - DNA, 96 bp, Aspergillus fumigatus
  misc_feature: 168
atagagtaagggttagttagtttagatagagttaggattattcagtttagacagagtaagggttagttagtttagatagagccaggattattcagt

SEQ ID NO: 25959 - DNA, 96 bp, Aspergillus fumigatus
  misc_feature: 168
atacctctctatctatctactaatctcctactactattattctatctatctctctaccttattatctaccttctatcggaacttcctatgggcctt

SEQ ID NO: 25960 - DNA, 96 bp, Aspergillus fumigatus
  misc_feature: 168
acctagggtaggtaatttatgaaataattgattttccatggtgattattatgaatatgaatgaatatgaataaatatgaatgattgcaaaatacct

SEQ ID NO: 25961 - DNA, 96 bp, Aspergillus fumigatus
  misc_feature: 168
aacttgaatttctaatctaatctatatttttccctttcttcttctttttcttcttctttttctccttctttttctccttctttttctccttctttt

SEQ ID NO: 25962 - DNA, 96 bp, Aspergillus fumigatus
  misc_feature: 167
tttccctacctcacttactaccttactaccttgctcactaccttacttactacctcactatctatcttactgcctgtctcactgcctgccttacta

SEQ ID NO: 25963 - DNA, 96 bp, Aspergillus fumigatus
  misc_feature: 167
aagggttagttagtttagatagagttaggattattcagtttagacagagtaagggttagttagtttagatagagccaggattattcagtttagaca

SEQ ID NO: 25964 - DNA, 96 bp, Aspergillus fumigatus
  misc_feature: 167
tagtcagtttagatagagtaagggttagttagtttagatagagttaggattattcagtttagacagagtaagggttagttagtttagatagagcca

SEQ ID NO: 25965 - DNA, 96 bp, Aspergillus fumigatus
  misc_feature: 167
aaaataagagatatttaatataatcttaatagttattaattaatatataaaaatagctaaatatatctctattaaaaagataattactacagagga

SEQ ID NO: 25966 - DNA, 96 bp, Aspergillus fumigatus
  misc_feature: 167
tcacaattatatatatataattctaaaactatatctataatatctacttctgggatacctctctatctatctactaatctcctactactattattc

SEQ ID NO: 25967 - DNA, 96 bp, Aspergillus fumigatus
  misc_feature: 167
tagagtaagggttagttagtttagatagagttaggattattcagtttagacagagtaagggttagttagtttagatagagccaggattattcagtt

SEQ ID NO: 25968 - DNA, 96 bp, Aspergillus fumigatus
  misc_feature: 167
cctctctatctatctactaatctcctactactattattctatctatctctctaccttattatctaccttctatcggaacttcctatgggccttcta

SEQ ID NO: 25969 - DNA, 96 bp, Aspergillus fumigatus
  misc_feature: 167
tactacctaccttactcactaccttgcttactgcctcactgcctgtcttactacctgccttacttactacctcactatctaccttaccatctacct

SEQ ID NO: 25970 - DNA, 96 bp, Aspergillus fumigatus
  misc_feature: 167
agctaaaggtatattattactaattaaagttataactaattactataatctaaaatatattatatctactaagctacttaatagataataagctta

SEQ ID NO: 25971 - DNA, 96 bp, Aspergillus fumigatus
  misc_feature: 167
gagtaagggttagttagtttagatagagttaggattattcagtttagacagagtaagggttagttagtttagatagagccaggattattcagttta

SEQ ID NO: 25972 - DNA, 96 bp, Aspergillus fumigatus
  misc_feature: 167
agtataaaaataagagatatttaatataatcttaatagttattaattaatatataaaaatagctaaatatatctctattaaaaagataattactac

SEQ ID NO: 25973 - DNA, 96 bp, Aspergillus fumigatus
  misc_feature: 167
gagagaggataagaattaatatatagaagaaagagaagaaagagaagaaagaagataataaaagaaaggataagttaattttttagtaagatagag

SEQ ID NO: 25974 - DNA, 96 bp, Aspergillus fumigatus
  misc_feature: 167
agtcagtttagatagagtaagggttagttagtttagatagagttaggattattcagtttagacagagtaagggttagttagtttagatagagccag

SEQ ID NO: 25975 - DNA, 96 bp, Aspergillus fumigatus
  misc_feature: 167
ctcacaattatatatatataattctaaaactatatctataatatctacttctgggatacctctctatctatctactaatctcctactactattatt

SEQ ID NO: 25976 - DNA, 96 bp, Aspergillus fumigatus
  misc_feature: 167
ctaaaggtatattattactaattaaagttataactaattactataatctaaaatatattatatctactaagctacttaatagataataagcttatt

SEQ ID NO: 25977 - DNA, 96 bp, Aspergillus fumigatus
  misc_feature: 167
agtaagggttagttagtttagatagagttaggattattcagtttagacagagtaagggttagttagtttagatagagccaggattattcagtttag

SEQ ID NO: 25978 - DNA, 96 bp, Aspergillus fumigatus
  misc_feature: 167
attatatatatataattctaaaactatatctataatatctacttctgggatacctctctatctatctactaatctcctactactattattctatct

SEQ ID NO: 25979 - DNA, 96 bp, Aspergillus fumigatus
  misc_feature: 167
atcttactacccctgttagtataaaaataagagatatttaatataatcttaatagttattaattaatatataaaaatagctaaatatatctctatt

SEQ ID NO: 25980 - DNA, 96 bp, Aspergillus fumigatus
  misc_feature: 167
acttctgggatacctctctatctatctactaatctcctactactattattctatctatctctctaccttattatctaccttctatcggaacttcct

SEQ ID NO: 25981 - DNA, 96 bp, Aspergillus fumigatus
  misc_feature: 167
agagaggataagaattaatatatagaagaaagagaagaaagagaagaaagaagataataaaagaaaggataagttaattttttagtaagatagagt

SEQ ID NO: 25982 - DNA, 96 bp, Aspergillus fumigatus
  misc_feature: 166
aaataagagatatttaatataatcttaatagttattaattaatatataaaaatagctaaatatatctctattaaaaagataattactacagaggaa

SEQ ID NO: 25983 - DNA, 96 bp, Aspergillus fumigatus
  misc_feature: 166
accctaatacctagggtaggtaatttatgaaataattgattttccatggtgattattatgaatatgaatgaatatgaataaatatgaatgattgca

SEQ ID NO: 25984 - DNA, 96 bp, Aspergillus fumigatus
  misc_feature: 166
agatagagtaagggttagttagtttagatagagttaggattattcagtttagacagagtaagggttagttagtttagatagagccaggattattca

SEQ ID NO: 25985 - DNA, 96 bp, Aspergillus fumigatus
  misc_feature: 166
tctatctatctactaatctcctactactattattctatctatctctctaccttattatctaccttctatcggaacttcctatgggccttctaccta

SEQ ID NO: 25986 - DNA, 96 bp, Aspergillus fumigatus
  misc_feature: 166
gacctagcctagacagcctgctctgcctactagatcactatgcctaggcctactctatagatttcttttacctctctctgactttctaaatataga

SEQ ID NO: 25987 - DNA, 96 bp, Aspergillus fumigatus
  misc_feature: 166
tatctacttctgggatacctctctatctatctactaatctcctactactattattctatctatctctctaccttattatctaccttctatcggaac

SEQ ID NO: 25988 - DNA, 96 bp, Aspergillus fumigatus
  misc_feature: 166
taggtaatttatgaaataattgattttccatggtgattattatgaatatgaatgaatatgaataaatatgaatgattgcaaaatacctttacccct

SEQ ID NO: 25989 - DNA, 96 bp, Aspergillus fumigatus
  misc_feature: 166
aggtcataataagtgcatggacatatatattatagatttagtagatgaatattttagcataagcagtggttttatatatatatatacatttatcta

SEQ ID NO: 25990 - DNA, 96 bp, Aspergillus fumigatus
  misc_feature: 166
acaattatatatatataattctaaaactatatctataatatctacttctgggatacctctctatctatctactaatctcctactactattattcta

SEQ ID NO: 25991 - DNA, 96 bp, Aspergillus fumigatus
  misc_feature: 166
taaaggtatattattactaattaaagttataactaattactataatctaaaatatattatatctactaagctacttaatagataataagcttatta

SEQ ID NO: 25992 - DNA, 96 bp, Aspergillus fumigatus
  misc_feature: 166
taaaaataagagatatttaatataatcttaatagttattaattaatatataaaaatagctaaatatatctctattaaaaagataattactacagag

SEQ ID NO: 25993 - DNA, 96 bp, Aspergillus fumigatus
  misc_feature: 166
gtcagtttagatagagtaagggttagttagtttagatagagttaggattattcagtttagacagagtaagggttagttagtttagatagagccagg

SEQ ID NO: 25994 - DNA, 96 bp, Aspergillus fumigatus
  misc_feature: 166
ctatctatctactaatctcctactactattattctatctatctctctaccttattatctaccttctatcggaacttcctatgggccttctacctac

SEQ ID NO: 25995 - DNA, 96 bp, Aspergillus fumigatus
  misc_feature: 166
ggtaggtaatttatgaaataattgattttccatggtgattattatgaatatgaatgaatatgaataaatatgaatgattgcaaaatacctttaccc

SEQ ID NO: 25996 - DNA, 96 bp, Aspergillus fumigatus
  misc_feature: 166
cgaagaactaacacatgacctagaggtgattctgattggccagtgaagtgattggtcatccaatttcggatgaaaacagccatagattccggctgc

SEQ ID NO: 25997 - DNA, 96 bp, Aspergillus fumigatus
  misc_feature: 166
aaaaataagagatatttaatataatcttaatagttattaattaatatataaaaatagctaaatatatctctattaaaaagataattactacagagg

SEQ ID NO: 25998 - DNA, 96 bp, Aspergillus fumigatus
  misc_feature: 166
cctagggtaggtaatttatgaaataattgattttccatggtgattattatgaatatgaatgaatatgaataaatatgaatgattgcaaaatacctt

SEQ ID NO: 25999 - DNA, 96 bp, Aspergillus fumigatus
  misc_feature: 166
caattatatatatataattctaaaactatatctataatatctacttctgggatacctctctatctatctactaatctcctactactattattctat

SEQ ID NO: 26000 - DNA, 96 bp, Aspergillus fumigatus
  misc_feature: 166
agagtaagggttagttagtttagatagagttaggattattcagtttagacagagtaagggttagttagtttagatagagccaggattattcagttt

SEQ ID NO: 26001 - DNA, 96 bp, Aspergillus fumigatus
  misc_feature: 166
aatcaaggtcataataagtgcatggacatatatattatagatttagtagatgaatattttagcataagcagtggttttatatatatatatacattt

SEQ ID NO: 26002 - DNA, 96 bp, Aspergillus fumigatus
  misc_feature: 166
aagctaaaggtatattattactaattaaagttataactaattactataatctaaaatatattatatctactaagctacttaatagataataagctt

SEQ ID NO: 26003 - DNA, 96 bp, Aspergillus fumigatus
  misc_feature: 165
atatctacttctgggatacctctctatctatctactaatctcctactactattattctatctatctctctaccttattatctaccttctatcggaa

SEQ ID NO: 26004 - DNA, 96 bp, Aspergillus fumigatus
  misc_feature: 165
agggcataaccgctaatcggtatcggatatgtcggggagggagatagagcgcgaagcgtaaccgctgtcgggtatgttgttagggttagggcataa

SEQ ID NO: 26005 - DNA, 96 bp, Aspergillus fumigatus
  misc_feature: 165
gtgccttaagctaaaggtatattattactaattaaagttataactaattactataatctaaaatatattatatctactaagctacttaatagataa

SEQ ID NO: 26006 - DNA, 96 bp, Aspergillus fumigatus
  misc_feature: 165
tctgggatacctctctatctatctactaatctcctactactattattctatctatctctctaccttattatctaccttctatcggaacttcctatg

SEQ ID NO: 26007 - DNA, 96 bp, Aspergillus fumigatus
  misc_feature: 165
tcagtttagatagagtaagggttagttagtttagatagagttaggattattcagtttagacagagtaagggttagttagtttagatagagccagga

SEQ ID NO: 26008 - DNA, 96 bp, Aspergillus fumigatus
  misc_feature: 165
agtgccttaagctaaaggtatattattactaattaaagttataactaattactataatctaaaatatattatatctactaagctacttaatagata

SEQ ID NO: 26009 - DNA, 96 bp, Aspergillus fumigatus
  misc_feature: 165
tagtaattaatatattagtatatacctagctagtaatattcttatactattaacttatataacttatactttctagggtatttagtagtaggctta

SEQ ID NO: 26010 - DNA, 96 bp, Aspergillus fumigatus
  misc_feature: 165
ggtgtagttatatataaactttactatctataactatatagcctaattatcttactaataattaataaatattcttaggtatatctctaatatcta

SEQ ID NO: 26011 - DNA, 96 bp, Aspergillus fumigatus
  misc_feature: 165
tacttctgggatacctctctatctatctactaatctcctactactattattctatctatctctctaccttattatctaccttctatcggaacttcc

SEQ ID NO: 26012 - DNA, 96 bp, Aspergillus fumigatus
  misc_feature: 165
atcaaggtcataataagtgcatggacatatatattatagatttagtagatgaatattttagcataagcagtggttttatatatatatatacattta

SEQ ID NO: 26013 - DNA, 96 bp, Aspergillus fumigatus
  misc_feature: 165
gctaaaggtatattattactaattaaagttataactaattactataatctaaaatatattatatctactaagctacttaatagataataagcttat

SEQ ID NO: 26014 - DNA, 96 bp, Aspergillus fumigatus
  misc_feature: 165
ctacttctgggatacctctctatctatctactaatctcctactactattattctatctatctctctaccttattatctaccttctatcggaacttc

SEQ ID NO: 26015 - DNA, 96 bp, Aspergillus fumigatus
  misc_feature: 165
ctttactctcttctatattataatttattccttctattatactaatccttaccttctctcttattactactaatccttattacctccctttccttc

SEQ ID NO: 26016 - DNA, 96 bp, Aspergillus fumigatus
  misc_feature: 165
cttgaatttctaatctaatctatatttttccctttcttcttctttttcttcttctttttctccttctttttctccttctttttctccttctttttc

SEQ ID NO: 26017 - DNA, 96 bp, Aspergillus fumigatus
  misc_feature: 165
ctagtaattaatatattagtatatacctagctagtaatattcttatactattaacttatataacttatactttctagggtatttagtagtaggctt

SEQ ID NO: 26018 - DNA, 96 bp, Aspergillus fumigatus
  misc_feature: 165
cctaactctatcttactaaaaaattaacttatcctttcttttattatcttctttcttctctttcttctctttcttctatatattaattcttatcct

SEQ ID NO: 26019 - DNA, 96 bp, Aspergillus fumigatus
  misc_feature: 165
aaaccctaatacctagggtaggtaatttatgaaataattgattttccatggtgattattatgaatatgaatgaatatgaataaatatgaatgattg

SEQ ID NO: 26020 - DNA, 96 bp, Aspergillus fumigatus
  misc_feature: 165
acttgaatttctaatctaatctatatttttccctttcttcttctttttcttcttctttttctccttctttttctccttctttttctccttcttttt

SEQ ID NO: 26021 - DNA, 96 bp, Aspergillus fumigatus
  misc_feature: 164
ttagtcagtttagatagagtaagggttagttagtttagatagagttaggattattcagtttagacagagtaagggttagttagtttagatagagcc

SEQ ID NO: 26022 - DNA, 96 bp, Aspergillus fumigatus
  misc_feature: 164
tcttaggtatatctctaatatctaattctagtattctatctagttatctatttataaataaaaagctatatttatttcttaatccttaaagatcta

SEQ ID NO: 26023 - DNA, 96 bp, Aspergillus fumigatus
  misc_feature: 164
tatatatataattctaaaactatatctataatatctacttctgggatacctctctatctatctactaatctcctactactattattctatctatct

SEQ ID NO: 26024 - DNA, 96 bp, Aspergillus fumigatus
  misc_feature: 164
taatataatcttaatagttattaattaatatataaaaatagctaaatatatctctattaaaaagataattactacagaggaacttgctaatatatt

SEQ ID NO: 26025 - DNA, 96 bp, Aspergillus fumigatus
  misc_feature: 164
taagggttagttagtttagatagagttaggattattcagtttagacagagtaagggttagttagtttagatagagccaggattattcagtttagac

SEQ ID NO: 26026 - DNA, 96 bp, Aspergillus fumigatus
  misc_feature: 164
taagctaaaggtatattattactaattaaagttataactaattactataatctaaaatatattatatctactaagctacttaatagataataagct

SEQ ID NO: 26027 - DNA, 96 bp, Aspergillus fumigatus
  misc_feature: 164
gggcataaccgctaatcggtatcggatatgtcggggagggagatagagcgcgaagcgtaaccgctgtcgggtatgttgttagggttagggcataac

SEQ ID NO: 26028 - DNA, 96 bp, Aspergillus fumigatus
  misc_feature: 164
gtagagagagaaagaaatatatatattagtagctgagatatatattatatattttattagtatagaatagctaggccaaatccatggtttacacac

SEQ ID NO: 26029 - DNA, 96 bp, Aspergillus fumigatus
  misc_feature: 164
cccctagccgctttgttcggcagaagatgatcacattagccctagtcctagcactagcactagcctgagcactagcctgagcactagcctgagcac

SEQ ID NO: 26030 - DNA, 96 bp, Aspergillus fumigatus
  misc_feature: 164
gtaggtaatttatgaaataattgattttccatggtgattattatgaatatgaatgaatatgaataaatatgaatgattgcaaaatacctttacccc

SEQ ID NO: 26031 - DNA, 96 bp, Aspergillus fumigatus
  misc_feature: 164
gggtgtagttatatataaactttactatctataactatatagcctaattatcttactaataattaataaatattcttaggtatatctctaatatct

SEQ ID NO: 26032 - DNA, 96 bp, Aspergillus fumigatus
  misc_feature: 164
gaagaactaacacatgacctagaggtgattctgattggccagtgaagtgattggtcatccaatttcggatgaaaacagccatagattccggctgcc

SEQ ID NO: 26033 - DNA, 96 bp, Aspergillus fumigatus
  misc_feature: 164
agggtgtagttatatataaactttactatctataactatatagcctaattatcttactaataattaataaatattcttaggtatatctctaatatc

SEQ ID NO: 26034 - DNA, 96 bp, Aspergillus fumigatus
  misc_feature: 164
atttaatataatcttaatagttattaattaatatataaaaatagctaaatatatctctattaaaaagataattactacagaggaacttgctaatat

SEQ ID NO: 26035 - DNA, 96 bp, Aspergillus fumigatus
  misc_feature: 164
acctagcctagacagcctgctctgcctactagatcactatgcctaggcctactctatagatttcttttacctctctctgactttctaaatatagat

SEQ ID NO: 26036 - DNA, 96 bp, Aspergillus fumigatus
  misc_feature: 164
atataatcttaatagttattaattaatatataaaaatagctaaatatatctctattaaaaagataattactacagaggaacttgctaatatattct

SEQ ID NO: 26037 - DNA, 96 bp, Aspergillus fumigatus
  misc_feature: 164
agtaattaatatattagtatatacctagctagtaatattcttatactattaacttatataacttatactttctagggtatttagtagtaggcttat

SEQ ID NO: 26038 - DNA, 96 bp, Aspergillus fumigatus
  misc_feature: 164
agtttagatagagtaagggttagttagtttagatagagttaggattattcagtttagacagagtaagggttagttagtttagatagagccaggatt

SEQ ID NO: 26039 - DNA, 96 bp, Aspergillus fumigatus
  misc_feature: 164
aaggtcataataagtgcatggacatatatattatagatttagtagatgaatattttagcataagcagtggttttatatatatatatacatttatct

SEQ ID NO: 26040 - DNA, 96 bp, Aspergillus fumigatus
  misc_feature: 163
ccctaatacctagggtaggtaatttatgaaataattgattttccatggtgattattatgaatatgaatgaatatgaataaatatgaatgattgcaa

SEQ ID NO: 26041 - DNA, 96 bp, Aspergillus fumigatus
  misc_feature: 163
ttacccgtactaaaattattataaacccttactcttactcttaacccttttttactctcttttttttactcttcttctttttcttactttttttta

SEQ ID NO: 26042 - DNA, 96 bp, Aspergillus fumigatus
  misc_feature: 163
ttaagctaaaggtatattattactaattaaagttataactaattactataatctaaaatatattatatctactaagctacttaatagataataagc

SEQ ID NO: 26043 - DNA, 96 bp, Aspergillus fumigatus
  misc_feature: 163
tgccttaagctaaaggtatattattactaattaaagttataactaattactataatctaaaatatattatatctactaagctacttaatagataat

SEQ ID NO: 26044 - DNA, 96 bp, Aspergillus fumigatus
  misc_feature: 163
atagtgccttaagctaaaggtatattattactaattaaagttataactaattactataatctaaaatatattatatctactaagctacttaataga

SEQ ID NO: 26045 - DNA, 96 bp, Aspergillus fumigatus
  misc_feature: 163
tctacttctgggatacctctctatctatctactaatctcctactactattattctatctatctctctaccttattatctaccttctatcggaactt

SEQ ID NO: 26046 - DNA, 96 bp, Aspergillus fumigatus
  misc_feature: 163
gtaagggttagttagtttagatagagttaggattattcagtttagacagagtaagggttagttagtttagatagagccaggattattcagtttaga

SEQ ID NO: 26047 - DNA, 96 bp, Aspergillus fumigatus
  misc_feature: 163
tcaaggtcataataagtgcatggacatatatattatagatttagtagatgaatattttagcataagcagtggttttatatatatatatacatttat

SEQ ID NO: 26048 - DNA, 96 bp, Aspergillus fumigatus
  misc_feature: 163
cttctgggatacctctctatctatctactaatctcctactactattattctatctatctctctaccttattatctaccttctatcggaacttccta

SEQ ID NO: 26049 - DNA, 96 bp, Aspergillus fumigatus
  misc_feature: 163
taatatctacttctgggatacctctctatctatctactaatctcctactactattattctatctatctctctaccttattatctaccttctatcgg

SEQ ID NO: 26050 - DNA, 96 bp, Aspergillus fumigatus
  misc_feature: 163
aataagagatatttaatataatcttaatagttattaattaatatataaaaatagctaaatatatctctattaaaaagataattactacagaggaac

SEQ ID NO: 26051 - DNA, 96 bp, Aspergillus fumigatus
  misc_feature: 163
ggcataaccgctaatcggtatcggatatgtcggggagggagatagagcgcgaagcgtaaccgctgtcgggtatgttgttagggttagggcataacc

SEQ ID NO: 26052 - DNA, 96 bp, Aspergillus fumigatus
  misc_feature: 163
ggtcataataagtgcatggacatatatattatagatttagtagatgaatattttagcataagcagtggttttatatatatatatacatttatctat

SEQ ID NO: 26053 - DNA, 96 bp, Aspergillus fumigatus
  misc_feature: 163
aatataatcttaatagttattaattaatatataaaaatagctaaatatatctctattaaaaagataattactacagaggaacttgctaatatattc

SEQ ID NO: 26054 - DNA, 96 bp, Aspergillus fumigatus
  misc_feature: 163
cagtttagatagagtaagggttagttagtttagatagagttaggattattcagtttagacagagtaagggttagttagtttagatagagccaggat

SEQ ID NO: 26055 - DNA, 96 bp, Aspergillus fumigatus
  misc_feature: 163
aagaactaacacatgacctagaggtgattctgattggccagtgaagtgattggtcatccaatttcggatgaaaacagccatagattccggctgcct

SEQ ID NO: 26056 - DNA, 96 bp, Aspergillus fumigatus
  misc_feature: 162
tttagatagagtaagggttagttagtttagatagagttaggattattcagtttagacagagtaagggttagttagtttagatagagccaggattat

SEQ ID NO: 26057 - DNA, 96 bp, Aspergillus fumigatus
  misc_feature: 162
tttaatataatcttaatagttattaattaatatataaaaatagctaaatatatctctattaaaaagataattactacagaggaacttgctaatata

SEQ ID NO: 26058 - DNA, 96 bp, Aspergillus fumigatus
  misc_feature: 162
ttatatatatataattctaaaactatatctataatatctacttctgggatacctctctatctatctactaatctcctactactattattctatcta

SEQ ID NO: 26059 - DNA, 96 bp, Aspergillus fumigatus
  misc_feature: 162
tatatattcactaggcctagacatactagattaactagcctagtcagcctatatcactgagcctagaccccctgcgcaggcacctctggcagctaa

SEQ ID NO: 26060 - DNA, 96 bp, Aspergillus fumigatus
  misc_feature: 162
gtgtagttatatataaactttactatctataactatatagcctaattatcttactaataattaataaatattcttaggtatatctctaatatctaa

SEQ ID NO: 26061 - DNA, 96 bp, Aspergillus fumigatus
  misc_feature: 162
ttaatataatcttaatagttattaattaatatataaaaatagctaaatatatctctattaaaaagataattactacagaggaacttgctaatatat

SEQ ID NO: 26062 - DNA, 96 bp, Aspergillus fumigatus
  misc_feature: 162
ggtagagagagaaagaaatatatatattagtagctgagatatatattatatattttattagtatagaatagctaggccaaatccatggtttacaca

SEQ ID NO: 26063 - DNA, 96 bp, Aspergillus fumigatus
  misc_feature: 162
tgacctagcctagacagcctgctctgcctactagatcactatgcctaggcctactctatagatttcttttacctctctctgactttctaaatatag

SEQ ID NO: 26064 - DNA, 96 bp, Aspergillus fumigatus
  misc_feature: 162
aatatctacttctgggatacctctctatctatctactaatctcctactactattattctatctatctctctaccttattatctaccttctatcgga

SEQ ID NO: 26065 - DNA, 96 bp, Aspergillus fumigatus
  misc_feature: 162
tatttaatataatcttaatagttattaattaatatataaaaatagctaaatatatctctattaaaaagataattactacagaggaacttgctaata

SEQ ID NO: 26066 - DNA, 96 bp, Aspergillus fumigatus
  misc_feature: 162
gtcataataagtgcatggacatatatattatagatttagtagatgaatattttagcataagcagtggttttatatatatatatacatttatctata

SEQ ID NO: 26067 - DNA, 96 bp, Aspergillus fumigatus
  misc_feature: 162
tagtgccttaagctaaaggtatattattactaattaaagttataactaattactataatctaaaatatattatatctactaagctacttaatagat

SEQ ID NO: 26068 - DNA, 96 bp, Aspergillus fumigatus
  misc_feature: 162
taggtctagtaattaatatattagtatatacctagctagtaatattcttatactattaacttatataacttatactttctagggtatttagtagta

SEQ ID NO: 26069 - DNA, 96 bp, Aspergillus fumigatus
  misc_feature: 162
tagggtgtagttatatataaactttactatctataactatatagcctaattatcttactaataattaataaatattcttaggtatatctctaatat

SEQ ID NO: 26070 - DNA, 96 bp, Aspergillus fumigatus
  misc_feature: 162
atatatattcactaggcctagacatactagattaactagcctagtcagcctatatcactgagcctagaccccctgcgcaggcacctctggcagcta

SEQ ID NO: 26071 - DNA, 96 bp, Aspergillus fumigatus
  misc_feature: 162
agatatttaatataatcttaatagttattaattaatatataaaaatagctaaatatatctctattaaaaagataattactacagaggaacttgcta

SEQ ID NO: 26072 - DNA, 96 bp, Aspergillus fumigatus
  misc_feature: 162
tagatagagtaagggttagttagtttagatagagttaggattattcagtttagacagagtaagggttagttagtttagatagagccaggattattc

SEQ ID NO: 26073 - DNA, 96 bp, Aspergillus fumigatus
  misc_feature: 162
ctacctaccttactcactaccttgcttactgcctcactgcctgtcttactacctgccttacttactacctcactatctaccttaccatctacctta

SEQ ID NO: 26074 - DNA, 96 bp, Aspergillus fumigatus
  misc_feature: 162
taagagatatttaatataatcttaatagttattaattaatatataaaaatagctaaatatatctctattaaaaagataattactacagaggaactt

SEQ ID NO: 26075 - DNA, 96 bp, Aspergillus fumigatus
  misc_feature: 162
ccctaactctatcttactaaaaaattaacttatcctttcttttattatcttctttcttctctttcttctctttcttctatatattaattcttatcc

SEQ ID NO: 26076 - DNA, 96 bp, Aspergillus fumigatus
  misc_feature: 162
aaccctaatacctagggtaggtaatttatgaaataattgattttccatggtgattattatgaatatgaatgaatatgaataaatatgaatgattgc

SEQ ID NO: 26077 - DNA, 96 bp, Aspergillus fumigatus
  misc_feature: 162
agagatatttaatataatcttaatagttattaattaatatataaaaatagctaaatatatctctattaaaaagataattactacagaggaacttgc

SEQ ID NO: 26078 - DNA, 96 bp, Aspergillus fumigatus
  misc_feature: 162
atatatatataattctaaaactatatctataatatctacttctgggatacctctctatctatctactaatctcctactactattattctatctatc

SEQ ID NO: 26079 - DNA, 96 bp, Aspergillus fumigatus
  misc_feature: 162
gagatatttaatataatcttaatagttattaattaatatataaaaatagctaaatatatctctattaaaaagataattactacagaggaacttgct

SEQ ID NO: 26080 - DNA, 96 bp, Aspergillus fumigatus
  misc_feature: 162
cttaagctaaaggtatattattactaattaaagttataactaattactataatctaaaatatattatatctactaagctacttaatagataataag

SEQ ID NO: 26081 - DNA, 96 bp, Aspergillus fumigatus
  misc_feature: 162
ctataatatctacttctgggatacctctctatctatctactaatctcctactactattattctatctatctctctaccttattatctaccttctat

SEQ ID NO: 26082 - DNA, 96 bp, Aspergillus fumigatus
  misc_feature: 162
ataatatctacttctgggatacctctctatctatctactaatctcctactactattattctatctatctctctaccttattatctaccttctatcg

SEQ ID NO: 26083 - DNA, 96 bp, Aspergillus fumigatus
  misc_feature: 162
aagagatatttaatataatcttaatagttattaattaatatataaaaatagctaaatatatctctattaaaaagataattactacagaggaacttg

SEQ ID NO: 26084 - DNA, 96 bp, Aspergillus fumigatus
  misc_feature: 162
atatttaatataatcttaatagttattaattaatatataaaaatagctaaatatatctctattaaaaagataattactacagaggaacttgctaat

SEQ ID NO: 26085 - DNA, 96 bp, Aspergillus fumigatus
  misc_feature: 161
ttgaatttctaatctaatctatatttttccctttcttcttctttttcttcttctttttctccttctttttctccttctttttctccttctttttct

SEQ ID NO: 26086 - DNA, 96 bp, Aspergillus fumigatus
  misc_feature: 161
ttcttaggtatatctctaatatctaattctagtattctatctagttatctatttataaataaaaagctatatttatttcttaatccttaaagatct

SEQ ID NO: 26087 - DNA, 96 bp, Aspergillus fumigatus
  misc_feature: 161
ttctgggatacctctctatctatctactaatctcctactactattattctatctatctctctaccttattatctaccttctatcggaacttcctat

SEQ ID NO: 26088 - DNA, 96 bp, Aspergillus fumigatus
  misc_feature: 161
gatatttaatataatcttaatagttattaattaatatataaaaatagctaaatatatctctattaaaaagataattactacagaggaacttgctaa

SEQ ID NO: 26089 - DNA, 96 bp, Aspergillus fumigatus
  misc_feature: 161
tagagagagaaagaaatatatatattagtagctgagatatatattatatattttattagtatagaatagctaggccaaatccatggtttacacaca

SEQ ID NO: 26090 - DNA, 96 bp, Aspergillus fumigatus
  misc_feature: 161
tctataatatctacttctgggatacctctctatctatctactaatctcctactactattattctatctatctctctaccttattatctaccttcta

SEQ ID NO: 26091 - DNA, 96 bp, Aspergillus fumigatus
  misc_feature: 161
tccaaactaactaaccctaactctatcttactaaaaaattaacttatcctttcttttattatcttctttcttctctttcttctctttcttctatat

SEQ ID NO: 26092 - DNA, 96 bp, Aspergillus fumigatus
  misc_feature: 161
tatatatatataattctaaaactatatctataatatctacttctgggatacctctctatctatctactaatctcctactactattattctatctat

SEQ ID NO: 26093 - DNA, 96 bp, Aspergillus fumigatus
  misc_feature: 161
gtttagatagagtaagggttagttagtttagatagagttaggattattcagtttagacagagtaagggttagttagtttagatagagccaggatta

SEQ ID NO: 26094 - DNA, 96 bp, Aspergillus fumigatus
  misc_feature: 161
taaccctaactctatcttactaaaaaattaacttatcctttcttttattatcttctttcttctctttcttctctttcttctatatattaattctta

SEQ ID NO: 26095 - DNA, 96 bp, Aspergillus fumigatus
  misc_feature: 161
accctaactctatcttactaaaaaattaacttatcctttcttttattatcttctttcttctctttcttctctttcttctatatattaattcttatc

SEQ ID NO: 26096 - DNA, 96 bp, Aspergillus fumigatus
  misc_feature: 161
atttaagtaggtagagagagaaagaaatatatatattagtagctgagatatatattatatattttattagtatagaatagctaggccaaatccatg

SEQ ID NO: 26097 - DNA, 96 bp, Aspergillus fumigatus
  misc_feature: 161
ataagagatatttaatataatcttaatagttattaattaatatataaaaatagctaaatatatctctattaaaaagataattactacagaggaact

SEQ ID NO: 26098 - DNA, 96 bp, Aspergillus fumigatus
  misc_feature: 161
aaccctaactctatcttactaaaaaattaacttatcctttcttttattatcttctttcttctctttcttctctttcttctatatattaattcttat

SEQ ID NO: 26099 - DNA, 96 bp, Aspergillus fumigatus
  misc_feature: 161
actacctaccttactcactaccttgcttactgcctcactgcctgtcttactacctgccttacttactacctcactatctaccttaccatctacctt

SEQ ID NO: 26100 - DNA, 96 bp, Aspergillus fumigatus
  misc_feature: 161
aagtaggtagagagagaaagaaatatatatattagtagctgagatatatattatatattttattagtatagaatagctaggccaaatccatggttt

SEQ ID NO: 26101 - DNA, 96 bp, Aspergillus fumigatus
  misc_feature: 160
atatattcactaggcctagacatactagattaactagcctagtcagcctatatcactgagcctagaccccctgcgcaggcacctctggcagctaaa

SEQ ID NO: 26102 - DNA, 96 bp, Aspergillus fumigatus
  misc_feature: 160
tttaagtaggtagagagagaaagaaatatatatattagtagctgagatatatattatatattttattagtatagaatagctaggccaaatccatgg

SEQ ID NO: 26103 - DNA, 96 bp, Aspergillus fumigatus
  misc_feature: 160
tcataataagtgcatggacatatatattatagatttagtagatgaatattttagcataagcagtggttttatatatatatatacatttatctataa

SEQ ID NO: 26104 - DNA, 96 bp, Aspergillus fumigatus
  misc_feature: 160
ttagatagagtaagggttagttagtttagatagagttaggattattcagtttagacagagtaagggttagttagtttagatagagccaggattatt

SEQ ID NO: 26105 - DNA, 96 bp, Aspergillus fumigatus
  misc_feature: 160
ttaagtaggtagagagagaaagaaatatatatattagtagctgagatatatattatatattttattagtatagaatagctaggccaaatccatggt

SEQ ID NO: 26106 - DNA, 96 bp, Aspergillus fumigatus
  misc_feature: 160
atagggtgtagttatatataaactttactatctataactatatagcctaattatcttactaataattaataaatattcttaggtatatctctaata

SEQ ID NO: 26107 - DNA, 96 bp, Aspergillus fumigatus
  misc_feature: 160
atccaaactaactaaccctaactctatcttactaaaaaattaacttatcctttcttttattatcttctttcttctctttcttctctttcttctata

SEQ ID NO: 26108 - DNA, 96 bp, Aspergillus fumigatus
  misc_feature: 160
aagatactaagaagtcttagtcttctaatatactatatatatagatatattctttaatattatactatatatccccttctgttagaatttatacta

SEQ ID NO: 26109 - DNA, 96 bp, Aspergillus fumigatus
  misc_feature: 160
taagtaggtagagagagaaagaaatatatatattagtagctgagatatatattatatattttattagtatagaatagctaggccaaatccatggtt

SEQ ID NO: 26110 - DNA, 96 bp, Aspergillus fumigatus
  misc_feature: 160
cctcacttactaccttgctacctaccttgctacctaccttgctaccttacttactacctaactatctacctcactgcctgtctcactgcctgctta

SEQ ID NO: 26111 - DNA, 96 bp, Aspergillus fumigatus
  misc_feature: 160
gtctagtaattaatatattagtatatacctagctagtaatattcttatactattaacttatataacttatactttctagggtatttagtagtaggc

SEQ ID NO: 26112 - DNA, 96 bp, Aspergillus fumigatus
  misc_feature: 160
gtagttatatataaactttactatctataactatatagcctaattatcttactaataattaataaatattcttaggtatatctctaatatctaatt

SEQ ID NO: 26113 - DNA, 96 bp, Aspergillus fumigatus
  misc_feature: 160
ctatatctataatatctacttctgggatacctctctatctatctactaatctcctactactattattctatctatctctctaccttattatctacc

SEQ ID NO: 26114 - DNA, 96 bp, Aspergillus fumigatus
  misc_feature: 160
caaggtcataataagtgcatggacatatatattatagatttagtagatgaatattttagcataagcagtggttttatatatatatatacatttatc

SEQ ID NO: 26115 - DNA, 96 bp, Aspergillus fumigatus
  misc_feature: 159
ccttaagctaaaggtatattattactaattaaagttataactaattactataatctaaaatatattatatctactaagctacttaatagataataa

SEQ ID NO: 26116 - DNA, 96 bp, Aspergillus fumigatus
  misc_feature: 159
tgtagttatatataaactttactatctataactatatagcctaattatcttactaataattaataaatattcttaggtatatctctaatatctaat

SEQ ID NO: 26117 - DNA, 96 bp, Aspergillus fumigatus
  misc_feature: 159
tctagtaattaatatattagtatatacctagctagtaatattcttatactattaacttatataacttatactttctagggtatttagtagtaggct

SEQ ID NO: 26118 - DNA, 96 bp, Aspergillus fumigatus
  misc_feature: 159
tatttaagtaggtagagagagaaagaaatatatatattagtagctgagatatatattatatattttattagtatagaatagctaggccaaatccat

SEQ ID NO: 26119 - DNA, 96 bp, Aspergillus fumigatus
  misc_feature: 159
tagggcataaccgctaatcggtatcggatatgtcggggagggagatagagcgcgaagcgtaaccgctgtcgggtatgttgttagggttagggcata

SEQ ID NO: 26120 - DNA, 96 bp, Aspergillus fumigatus
  misc_feature: 159
tatctataatatctacttctgggatacctctctatctatctactaatctcctactactattattctatctatctctctaccttattatctaccttc

SEQ ID NO: 26121 - DNA, 96 bp, Aspergillus fumigatus
  misc_feature: 159
tatatataattctaaaactatatctataatatctacttctgggatacctctctatctatctactaatctcctactactattattctatctatctct

SEQ ID NO: 26122 - DNA, 96 bp, Aspergillus fumigatus
  misc_feature: 159
tatagggtgtagttatatataaactttactatctataactatatagcctaattatcttactaataattaataaatattcttaggtatatctctaat

SEQ ID NO: 26123 - DNA, 96 bp, Aspergillus fumigatus
  misc_feature: 159
aggtagagagagaaagaaatatatatattagtagctgagatatatattatatattttattagtatagaatagctaggccaaatccatggtttacac

SEQ ID NO: 26124 - DNA, 96 bp, Aspergillus fumigatus
  misc_feature: 159
aggtctagtaattaatatattagtatatacctagctagtaatattcttatactattaacttatataacttatactttctagggtatttagtagtag

SEQ ID NO: 26125 - DNA, 96 bp, Aspergillus fumigatus
  misc_feature: 159
cctctatccaaactaactaaccctaactctatcttactaaaaaattaacttatcctttcttttattatcttctttcttctctttcttctctttctt

SEQ ID NO: 26126 - DNA, 96 bp, Aspergillus fumigatus
  misc_feature: 159
aattaataaatattcttaggtatatctctaatatctaattctagtattctatctagttatctatttataaataaaaagctatatttatttcttaat

SEQ ID NO: 26127 - DNA, 96 bp, Aspergillus fumigatus
  misc_feature: 159
atctataatatctacttctgggatacctctctatctatctactaatctcctactactattattctatctatctctctaccttattatctaccttct

SEQ ID NO: 26128 - DNA, 96 bp, Aspergillus fumigatus
  misc_feature: 158
tttaggtctagtaattaatatattagtatatacctagctagtaatattcttatactattaacttatataacttatactttctagggtatttagtag

SEQ ID NO: 26129 - DNA, 96 bp, Aspergillus fumigatus
  misc_feature: 158
ttaggtctagtaattaatatattagtatatacctagctagtaatattcttatactattaacttatataacttatactttctagggtatttagtagt

SEQ ID NO: 26130 - DNA, 96 bp, Aspergillus fumigatus
  misc_feature: 158
taattaataaatattcttaggtatatctctaatatctaattctagtattctatctagttatctatttataaataaaaagctatatttatttcttaa

SEQ ID NO: 26131 - DNA, 96 bp, Aspergillus fumigatus
  misc_feature: 158
taggtagagagagaaagaaatatatatattagtagctgagatatatattatatattttattagtatagaatagctaggccaaatccatggtttaca

SEQ ID NO: 26132 - DNA, 96 bp, Aspergillus fumigatus
  misc_feature: 158
gccttaagctaaaggtatattattactaattaaagttataactaattactataatctaaaatatattatatctactaagctacttaatagataata

SEQ ID NO: 26133 - DNA, 96 bp, Aspergillus fumigatus
  misc_feature: 158
ataataagtgcatggacatatatattatagatttagtagatgaatattttagcataagcagtggttttatatatatatatacatttatctataata

SEQ ID NO: 26134 - DNA, 96 bp, Aspergillus fumigatus
  misc_feature: 158
tataatatctacttctgggatacctctctatctatctactaatctcctactactattattctatctatctctctaccttattatctaccttctatc

SEQ ID NO: 26135 - DNA, 96 bp, Aspergillus fumigatus
  misc_feature: 158
tactaataattaataaatattcttaggtatatctctaatatctaattctagtattctatctagttatctatttataaataaaaagctatatttatt

SEQ ID NO: 26136 - DNA, 96 bp, Aspergillus fumigatus
  misc_feature: 158
agtaggtagagagagaaagaaatatatatattagtagctgagatatatattatatattttattagtatagaatagctaggccaaatccatggttta

SEQ ID NO: 26137 - DNA, 96 bp, Aspergillus fumigatus
  misc_feature: 158
gttttaggtctagtaattaatatattagtatatacctagctagtaatattcttatactattaacttatataacttatactttctagggtatttagt

SEQ ID NO: 26138 - DNA, 96 bp, Aspergillus fumigatus
  misc_feature: 158
ctcacttactaccttgctacctaccttgctacctaccttgctaccttacttactacctaactatctacctcactgcctgtctcactgcctgcttac

SEQ ID NO: 26139 - DNA, 96 bp, Aspergillus fumigatus
  misc_feature: 158
ggttagggcataaccgctaatcggtatcggatatgtcggggagggagatagagcgcgaagcgtaaccgctgtcgggtatgttgttagggttagggc

SEQ ID NO: 26140 - DNA, 96 bp, Aspergillus fumigatus
  misc_feature: 158
ggtctagtaattaatatattagtatatacctagctagtaatattcttatactattaacttatataacttatactttctagggtatttagtagtagg

SEQ ID NO: 26141 - DNA, 96 bp, Aspergillus fumigatus
  misc_feature: 158
attaataaatattcttaggtatatctctaatatctaattctagtattctatctagttatctatttataaataaaaagctatatttatttcttaatc

SEQ ID NO: 26142 - DNA, 96 bp, Aspergillus fumigatus
  misc_feature: 158
atatatataattctaaaactatatctataatatctacttctgggatacctctctatctatctactaatctcctactactattattctatctatctc

SEQ ID NO: 26143 - DNA, 96 bp, Aspergillus fumigatus
  misc_feature: 158
ctctatccaaactaactaaccctaactctatcttactaaaaaattaacttatcctttcttttattatcttctttcttctctttcttctctttcttc

SEQ ID NO: 26144 - DNA, 96 bp, Aspergillus fumigatus
  misc_feature: 158
aatagtgccttaagctaaaggtatattattactaattaaagttataactaattactataatctaaaatatattatatctactaagctacttaatag

SEQ ID NO: 26145 - DNA, 96 bp, Aspergillus fumigatus
  misc_feature: 158
cataataagtgcatggacatatatattatagatttagtagatgaatattttagcataagcagtggttttatatatatatatacatttatctataat

SEQ ID NO: 26146 - DNA, 96 bp, Aspergillus fumigatus
  misc_feature: 158
atatctataatatctacttctgggatacctctctatctatctactaatctcctactactattattctatctatctctctaccttattatctacctt

SEQ ID NO: 26147 - DNA, 96 bp, Aspergillus fumigatus
  misc_feature: 158
ataaaatagggaccttactatactagtaataattatatattataaaaaaataactaaatataggaagaattattaatttttattattattagattt

SEQ ID NO: 26148 - DNA, 96 bp, Aspergillus fumigatus
  misc_feature: 157
tcacttactaccttgctacctaccttgctacctaccttgctaccttacttactacctaactatctacctcactgcctgtctcactgcctgcttact

SEQ ID NO: 26149 - DNA, 96 bp, Aspergillus fumigatus
  misc_feature: 157
tataaaatagggaccttactatactagtaataattatatattataaaaaaataactaaatataggaagaattattaatttttattattattagatt

SEQ ID NO: 26150 - DNA, 96 bp, Aspergillus fumigatus
  misc_feature: 157
gtaggtagagagagaaagaaatatatatattagtagctgagatatatattatatattttattagtatagaatagctaggccaaatccatggtttac

SEQ ID NO: 26151 - DNA, 96 bp, Aspergillus fumigatus
  misc_feature: 157
acctcacttactaccttgctacctaccttgctacctaccttgctaccttacttactacctaactatctacctcactgcctgtctcactgcctgctt

SEQ ID NO: 26152 - DNA, 96 bp, Aspergillus fumigatus
  misc_feature: 156
ttttagaactttattaaggatactagtaaatctaataataataaaaattaataattcttcctatatttagttatttttttataatatataattatt

SEQ ID NO: 26153 - DNA, 96 bp, Aspergillus fumigatus
  misc_feature: 156
taataagtgcatggacatatatattatagatttagtagatgaatattttagcataagcagtggttttatatatatatatacatttatctataataa

SEQ ID NO: 26154 - DNA, 96 bp, Aspergillus fumigatus
  misc_feature: 156
ttagggcataaccgctaatcggtatcggatatgtcggggagggagatagagcgcgaagcgtaaccgctgtcgggtatgttgttagggttagggcat

SEQ ID NO: 26155 - DNA, 96 bp, Aspergillus fumigatus
  misc_feature: 156
gttagggcataaccgctaatcggtatcggatatgtcggggagggagatagagcgcgaagcgtaaccgctgtcgggtatgttgttagggttagggca

SEQ ID NO: 26156 - DNA, 96 bp, Aspergillus fumigatus
  misc_feature: 156
tctatccaaactaactaaccctaactctatcttactaaaaaattaacttatcctttcttttattatcttctttcttctctttcttctctttcttct

SEQ ID NO: 26157 - DNA, 96 bp, Aspergillus fumigatus
  misc_feature: 156
aaatagtgccttaagctaaaggtatattattactaattaaagttataactaattactataatctaaaatatattatatctactaagctacttaata

SEQ ID NO: 26158 - DNA, 96 bp, Aspergillus fumigatus
  misc_feature: 156
tatccaaactaactaaccctaactctatcttactaaaaaattaacttatcctttcttttattatcttctttcttctctttcttctctttcttctat

SEQ ID NO: 26159 - DNA, 96 bp, Aspergillus fumigatus
  misc_feature: 156
tatatctataatatctacttctgggatacctctctatctatctactaatctcctactactattattctatctatctctctaccttattatctacct

SEQ ID NO: 26160 - DNA, 96 bp, Aspergillus fumigatus
  misc_feature: 156
ccaaactaactaaccctaactctatcttactaaaaaattaacttatcctttcttttattatcttctttcttctctttcttctctttcttctatata

SEQ ID NO: 26161 - DNA, 96 bp, Aspergillus fumigatus
  misc_feature: 156
tatataattctaaaactatatctataatatctacttctgggatacctctctatctatctactaatctcctactactattattctatctatctctct

SEQ ID NO: 26162 - DNA, 96 bp, Aspergillus fumigatus
  misc_feature: 156
ctatccaaactaactaaccctaactctatcttactaaaaaattaacttatcctttcttttattatcttctttcttctctttcttctctttcttcta

SEQ ID NO: 26163 - DNA, 96 bp, Aspergillus fumigatus
  misc_feature: 156
aagtgcatggacatatatattatagatttagtagatgaatattttagcataagcagtggttttatatatatatatacatttatctataataaagta

SEQ ID NO: 26164 - DNA, 96 bp, Aspergillus fumigatus
  misc_feature: 156
taagtgcatggacatatatattatagatttagtagatgaatattttagcataagcagtggttttatatatatatatacatttatctataataaagt

SEQ ID NO: 26165 - DNA, 96 bp, Aspergillus fumigatus
  misc_feature: 156
taaggattaagaaataaatatagctttttatttataaatagataactagatagaatactagaattagatattagagatatacctaagaatatttat

SEQ ID NO: 26166 - DNA, 96 bp, Aspergillus fumigatus
  misc_feature: 156
actatatctataatatctacttctgggatacctctctatctatctactaatctcctactactattattctatctatctctctaccttattatctac

SEQ ID NO: 26167 - DNA, 96 bp, Aspergillus fumigatus
  misc_feature: 156
atatataattctaaaactatatctataatatctacttctgggatacctctctatctatctactaatctcctactactattattctatctatctctc

SEQ ID NO: 26168 - DNA, 96 bp, Aspergillus fumigatus
  misc_feature: 156
ctttattaaggatactagtaaatctaataataataaaaattaataattcttcctatatttagttatttttttataatatataattattactagtat

SEQ ID NO: 26169 - DNA, 96 bp, Aspergillus fumigatus
  misc_feature: 156
agatactaagaagtcttagtcttctaatatactatatatatagatatattctttaatattatactatatatccccttctgttagaatttatactag

SEQ ID NO: 26170 - DNA, 96 bp, Aspergillus fumigatus
  misc_feature: 156
aaactaactaaccctaactctatcttactaaaaaattaacttatcctttcttttattatcttctttcttctctttcttctctttcttctatatatt

SEQ ID NO: 26171 - DNA, 96 bp, Aspergillus fumigatus
  misc_feature: 156
aaggattaagaaataaatatagctttttatttataaatagataactagatagaatactagaattagatattagagatatacctaagaatatttatt

SEQ ID NO: 26172 - DNA, 96 bp, Aspergillus fumigatus
  misc_feature: 155
atatagggtgtagttatatataaactttactatctataactatatagcctaattatcttactaataattaataaatattcttaggtatatctctaa

SEQ ID NO: 26173 - DNA, 96 bp, Aspergillus fumigatus
  misc_feature: 155
ggattaagaaataaatatagctttttatttataaatagataactagatagaatactagaattagatattagagatatacctaagaatatttattaa

SEQ ID NO: 26174 - DNA, 96 bp, Aspergillus fumigatus
  misc_feature: 155
ttaaggattaagaaataaatatagctttttatttataaatagataactagatagaatactagaattagatattagagatatacctaagaatattta

SEQ ID NO: 26175 - DNA, 96 bp, Aspergillus fumigatus
  misc_feature: 155
tcgtcctattctgatcttaaacttgctaacccttatgctatcttaactaataaacccttcctctatctaaacttactaacccttactttatcttaa

SEQ ID NO: 26176 - DNA, 96 bp, Aspergillus fumigatus
  misc_feature: 155
ttaagaaatagtgccttaagctaaaggtatattattactaattaaagttataactaattactataatctaaaatatattatatctactaagctact

SEQ ID NO: 26177 - DNA, 96 bp, Aspergillus fumigatus
  misc_feature: 155
gatactaagaagtcttagtcttctaatatactatatatatagatatattctttaatattatactatatatccccttctgttagaatttatactaga

SEQ ID NO: 26178 - DNA, 96 bp, Aspergillus fumigatus
  misc_feature: 155
actttattaaggatactagtaaatctaataataataaaaattaataattcttcctatatttagttatttttttataatatataattattactagta

SEQ ID NO: 26179 - DNA, 96 bp, Aspergillus fumigatus
  misc_feature: 155
ataattaataaatattcttaggtatatctctaatatctaattctagtattctatctagttatctatttataaataaaaagctatatttatttctta

SEQ ID NO: 26180 - DNA, 96 bp, Aspergillus fumigatus
  misc_feature: 155
cgtcctattctgatcttaaacttgctaacccttatgctatcttaactaataaacccttcctctatctaaacttactaacccttactttatcttaac

SEQ ID NO: 26181 - DNA, 96 bp, Aspergillus fumigatus
  misc_feature: 155
gtcctattctgatcttaaacttgctaacccttatgctatcttaactaataaacccttcctctatctaaacttactaacccttactttatcttaact

SEQ ID NO: 26182 - DNA, 96 bp, Aspergillus fumigatus
  misc_feature: 155
aactaaccctaactctatcttactaaaaaattaacttatcctttcttttattatcttctttcttctctttcttctctttcttctatatattaattc

SEQ ID NO: 26183 - DNA, 96 bp, Aspergillus fumigatus
  misc_feature: 155
ataagtgcatggacatatatattatagatttagtagatgaatattttagcataagcagtggttttatatatatatatacatttatctataataaag

SEQ ID NO: 26184 - DNA, 96 bp, Aspergillus fumigatus
  misc_feature: 155
agttttaggtctagtaattaatatattagtatatacctagctagtaatattcttatactattaacttatataacttatactttctagggtatttag

SEQ ID NO: 26185 - DNA, 96 bp, Aspergillus fumigatus
  misc_feature: 155
ccttactgtctacctcactgcctgtcttatgcactaccttgctcactgcctcactgtctaccttactgtctaccttactccctgtcttgctgccgg

SEQ ID NO: 26186 - DNA, 96 bp, Aspergillus fumigatus
  misc_feature: 155
caaactaactaaccctaactctatcttactaaaaaattaacttatcctttcttttattatcttctttcttctctttcttctctttcttctatatat

SEQ ID NO: 26187 - DNA, 96 bp, Aspergillus fumigatus
  misc_feature: 155
attttagaactttattaaggatactagtaaatctaataataataaaaattaataattcttcctatatttagttatttttttataatatataattat

SEQ ID NO: 26188 - DNA, 96 bp, Aspergillus fumigatus
  misc_feature: 154
aataagtgcatggacatatatattatagatttagtagatgaatattttagcataagcagtggttttatatatatatatacatttatctataataaa

SEQ ID NO: 26189 - DNA, 96 bp, Aspergillus fumigatus
  misc_feature: 154
tttagaactttattaaggatactagtaaatctaataataataaaaattaataattcttcctatatttagttatttttttataatatataattatta

SEQ ID NO: 26190 - DNA, 96 bp, Aspergillus fumigatus
  misc_feature: 154
tttaaggattaagaaataaatatagctttttatttataaatagataactagatagaatactagaattagatattagagatatacctaagaatattt

SEQ ID NO: 26191 - DNA, 96 bp, Aspergillus fumigatus
  misc_feature: 154
ttattaaggatactagtaaatctaataataataaaaattaataattcttcctatatttagttatttttttataatatataattattactagtatag

SEQ ID NO: 26192 - DNA, 96 bp, Aspergillus fumigatus
  misc_feature: 154
tattcttaggtatatctctaatatctaattctagtattctatctagttatctatttataaataaaaagctatatttatttcttaatccttaaagat

SEQ ID NO: 26193 - DNA, 96 bp, Aspergillus fumigatus
  misc_feature: 154
tagtagttttaggtctagtaattaatatattagtatatacctagctagtaatattcttatactattaacttatataacttatactttctagggtat

SEQ ID NO: 26194 - DNA, 96 bp, Aspergillus fumigatus
  misc_feature: 154
taataattaataaatattcttaggtatatctctaatatctaattctagtattctatctagttatctatttataaataaaaagctatatttatttct

SEQ ID NO: 26195 - DNA, 96 bp, Aspergillus fumigatus
  misc_feature: 154
aggattaagaaataaatatagctttttatttataaatagataactagatagaatactagaattagatattagagatatacctaagaatatttatta

SEQ ID NO: 26196 - DNA, 96 bp, Aspergillus fumigatus
  misc_feature: 154
taactaaccctaactctatcttactaaaaaattaacttatcctttcttttattatcttctttcttctctttcttctctttcttctatatattaatt

SEQ ID NO: 26197 - DNA, 96 bp, Aspergillus fumigatus
  misc_feature: 154
taaatctaataataataaaaattaataattcttcctatatttagttatttttttataatatataattattactagtatagtaaggtccctatttta

SEQ ID NO: 26198 - DNA, 96 bp, Aspergillus fumigatus
  misc_feature: 154
agtgcatggacatatatattatagatttagtagatgaatattttagcataagcagtggttttatatatatatatacatttatctataataaagtat

SEQ ID NO: 26199 - DNA, 96 bp, Aspergillus fumigatus
  misc_feature: 154
actaaccctaactctatcttactaaaaaattaacttatcctttcttttattatcttctttcttctctttcttctctttcttctatatattaattct

SEQ ID NO: 26200 - DNA, 96 bp, Aspergillus fumigatus
  misc_feature: 154
actaataattaataaatattcttaggtatatctctaatatctaattctagtattctatctagttatctatttataaataaaaagctatatttattt

SEQ ID NO: 26201 - DNA, 96 bp, Aspergillus fumigatus
  misc_feature: 153
ttttaggtctagtaattaatatattagtatatacctagctagtaatattcttatactattaacttatataacttatactttctagggtatttagta

SEQ ID NO: 26202 - DNA, 96 bp, Aspergillus fumigatus
  misc_feature: 153
tttattaaggatactagtaaatctaataataataaaaattaataattcttcctatatttagttatttttttataatatataattattactagtata

SEQ ID NO: 26203 - DNA, 96 bp, Aspergillus fumigatus
  misc_feature: 153
tttaggaaggtaggaagtaaggtagtaagtaggttataagaaaggttgcaatgccccagagaggttatatataagatagagagtaaggtagatagc

SEQ ID NO: 26204 - DNA, 96 bp, Aspergillus fumigatus
  misc_feature: 153
ttagaactttattaaggatactagtaaatctaataataataaaaattaataattcttcctatatttagttatttttttataatatataattattac

SEQ ID NO: 26205 - DNA, 96 bp, Aspergillus fumigatus
  misc_feature: 153
actaactaaccctaactctatcttactaaaaaattaacttatcctttcttttattatcttctttcttctctttcttctctttcttctatatattaa

SEQ ID NO: 26206 - DNA, 96 bp, Aspergillus fumigatus
  misc_feature: 153
tatatagggtgtagttatatataaactttactatctataactatatagcctaattatcttactaataattaataaatattcttaggtatatctcta

SEQ ID NO: 26207 - DNA, 96 bp, Aspergillus fumigatus
  misc_feature: 153
tagaactttattaaggatactagtaaatctaataataataaaaattaataattcttcctatatttagttatttttttataatatataattattact

SEQ ID NO: 26208 - DNA, 96 bp, Aspergillus fumigatus
  misc_feature: 153
tacctcacttactaccttgctacctaccttgctacctaccttgctaccttacttactacctaactatctacctcactgcctgtctcactgcctgct

SEQ ID NO: 26209 - DNA, 96 bp, Aspergillus fumigatus
  misc_feature: 153
aactaactaaccctaactctatcttactaaaaaattaacttatcctttcttttattatcttctttcttctctttcttctctttcttctatatatta

SEQ ID NO: 26210 - DNA, 96 bp, Aspergillus fumigatus
  misc_feature: 153
aagaaatagtgccttaagctaaaggtatattattactaattaaagttataactaattactataatctaaaatatattatatctactaagctactta

SEQ ID NO: 26211 - DNA, 96 bp, Aspergillus fumigatus
  misc_feature: 153
taagaaatagtgccttaagctaaaggtatattattactaattaaagttataactaattactataatctaaaatatattatatctactaagctactt

SEQ ID NO: 26212 - DNA, 96 bp, Aspergillus fumigatus
  misc_feature: 153
gtatatagggtgtagttatatataaactttactatctataactatatagcctaattatcttactaataattaataaatattcttaggtatatctct

SEQ ID NO: 26213 - DNA, 96 bp, Aspergillus fumigatus
  misc_feature: 153
gtaaatctaataataataaaaattaataattcttcctatatttagttatttttttataatatataattattactagtatagtaaggtccctatttt

SEQ ID NO: 26214 - DNA, 96 bp, Aspergillus fumigatus
  misc_feature: 153
attcttaggtatatctctaatatctaattctagtattctatctagttatctatttataaataaaaagctatatttatttcttaatccttaaagatc

SEQ ID NO: 26215 - DNA, 96 bp, Aspergillus fumigatus
  misc_feature: 153
caggtatatagggtgtagttatatataaactttactatctataactatatagcctaattatcttactaataattaataaatattcttaggtatatc

SEQ ID NO: 26216 - DNA, 96 bp, Aspergillus fumigatus
  misc_feature: 153
gaaatagtgccttaagctaaaggtatattattactaattaaagttataactaattactataatctaaaatatattatatctactaagctacttaat

SEQ ID NO: 26217 - DNA, 96 bp, Aspergillus fumigatus
  misc_feature: 153
cttactgtctacctcactgcctgtcttatgcactaccttgctcactgcctcactgtctaccttactgtctaccttactccctgtcttgctgccggt

SEQ ID NO: 26218 - DNA, 96 bp, Aspergillus fumigatus
  misc_feature: 153
ctagtaaatctaataataataaaaattaataattcttcctatatttagttatttttttataatatataattattactagtatagtaaggtccctat

SEQ ID NO: 26219 - DNA, 96 bp, Aspergillus fumigatus
  misc_feature: 153
ctaaccctaactctatcttactaaaaaattaacttatcctttcttttattatcttctttcttctctttcttctctttcttctatatattaattctt

SEQ ID NO: 26220 - DNA, 96 bp, Aspergillus fumigatus
  misc_feature: 153
aaggatactagtaaatctaataataataaaaattaataattcttcctatatttagttatttttttataatatataattattactagtatagtaagg

SEQ ID NO: 26221 - DNA, 96 bp, Aspergillus fumigatus
  misc_feature: 153
aggtatatagggtgtagttatatataaactttactatctataactatatagcctaattatcttactaataattaataaatattcttaggtatatct

SEQ ID NO: 26222 - DNA, 96 bp, Aspergillus fumigatus
  misc_feature: 153
aactttattaaggatactagtaaatctaataataataaaaattaataattcttcctatatttagttatttttttataatatataattattactagt

SEQ ID NO: 26223 - DNA, 96 bp, Aspergillus fumigatus
  misc_feature: 153
aataattaataaatattcttaggtatatctctaatatctaattctagtattctatctagttatctatttataaataaaaagctatatttatttctt

SEQ ID NO: 26224 - DNA, 96 bp, Aspergillus fumigatus
  misc_feature: 152
tactagattaactagcctagtcagcctatatcactgagcctagaccccctgcgcaggcacctctggcagctaaatcaccaagcctagccatatcaa

SEQ ID NO: 26225 - DNA, 96 bp, Aspergillus fumigatus
  misc_feature: 152
atactaagaagtcttagtcttctaatatactatatatatagatatattctttaatattatactatatatccccttctgttagaatttatactagaa

SEQ ID NO: 26226 - DNA, 96 bp, Aspergillus fumigatus
  misc_feature: 152
agaaatagtgccttaagctaaaggtatattattactaattaaagttataactaattactataatctaaaatatattatatctactaagctacttaa

SEQ ID NO: 26227 - DNA, 96 bp, Aspergillus fumigatus
  misc_feature: 152
atactagattaactagcctagtcagcctatatcactgagcctagaccccctgcgcaggcacctctggcagctaaatcaccaagcctagccatatca

SEQ ID NO: 26228 - DNA, 96 bp, Aspergillus fumigatus
  misc_feature: 152
tctttaaggattaagaaataaatatagctttttatttataaatagataactagatagaatactagaattagatattagagatatacctaagaatat

SEQ ID NO: 26229 - DNA, 96 bp, Aspergillus fumigatus
  misc_feature: 152
tatccaggtatatagggtgtagttatatataaactttactatctataactatatagcctaattatcttactaataattaataaatattcttaggta

SEQ ID NO: 26230 - DNA, 96 bp, Aspergillus fumigatus
  misc_feature: 152
tagttttaggtctagtaattaatatattagtatatacctagctagtaatattcttatactattaacttatataacttatactttctagggtattta

SEQ ID NO: 26231 - DNA, 96 bp, Aspergillus fumigatus
  misc_feature: 152
tagtaaatctaataataataaaaattaataattcttcctatatttagttatttttttataatatataattattactagtatagtaaggtccctatt

SEQ ID NO: 26232 - DNA, 96 bp, Aspergillus fumigatus
  misc_feature: 152
gtgcatggacatatatattatagatttagtagatgaatattttagcataagcagtggttttatatatatatatacatttatctataataaagtatt

SEQ ID NO: 26233 - DNA, 96 bp, Aspergillus fumigatus
  misc_feature: 152
ctaataattaataaatattcttaggtatatctctaatatctaattctagtattctatctagttatctatttataaataaaaagctatatttatttc

SEQ ID NO: 26234 - DNA, 96 bp, Aspergillus fumigatus
  misc_feature: 152
ctttaaggattaagaaataaatatagctttttatttataaatagataactagatagaatactagaattagatattagagatatacctaagaatatt

SEQ ID NO: 26235 - DNA, 96 bp, Aspergillus fumigatus
  misc_feature: 152
agtaaggtagtaagtgaggtagggaaagaggtatttaggaaggtaggaagtaaggtagtaagtaggttataagaaaggttgcaatgccccagagag

SEQ ID NO: 26236 - DNA, 96 bp, Aspergillus fumigatus
  misc_feature: 152
accttactgtctacctcactgcctgtcttatgcactaccttgctcactgcctcactgtctaccttactgtctaccttactccctgtcttgctgccg

SEQ ID NO: 26237 - DNA, 96 bp, Aspergillus fumigatus
  misc_feature: 151
tccaggtatatagggtgtagttatatataaactttactatctataactatatagcctaattatcttactaataattaataaatattcttaggtata

SEQ ID NO: 26238 - DNA, 96 bp, Aspergillus fumigatus
  misc_feature: 151
tattaaggatactagtaaatctaataataataaaaattaataattcttcctatatttagttatttttttataatatataattattactagtatagt

SEQ ID NO: 26239 - DNA, 96 bp, Aspergillus fumigatus
  misc_feature: 151
actagtaaatctaataataataaaaattaataattcttcctatatttagttatttttttataatatataattattactagtatagtaaggtcccta

SEQ ID NO: 26240 - DNA, 96 bp, Aspergillus fumigatus
  misc_feature: 151
taggaaggtaggaagtaaggtagtaagtaggttataagaaaggttgcaatgccccagagaggttatatataagatagagagtaaggtagatagcat

SEQ ID NO: 26241 - DNA, 96 bp, Aspergillus fumigatus
  misc_feature: 151
gtgcctgctgccttaatattatatatatccccctaatactttattatagataaatgtatatatatatataaaaccactgcttatgctaaaatattc

SEQ ID NO: 26242 - DNA, 96 bp, Aspergillus fumigatus
  misc_feature: 151
ggtatatagggtgtagttatatataaactttactatctataactatatagcctaattatcttactaataattaataaatattcttaggtatatctc

SEQ ID NO: 26243 - DNA, 96 bp, Aspergillus fumigatus
  misc_feature: 151
aaaactatatctataatatctacttctgggatacctctctatctatctactaatctcctactactattattctatctatctctctaccttattatc

SEQ ID NO: 26244 - DNA, 96 bp, Aspergillus fumigatus
  misc_feature: 151
gaactttattaaggatactagtaaatctaataataataaaaattaataattcttcctatatttagttatttttttataatatataattattactag

SEQ ID NO: 26245 - DNA, 96 bp, Aspergillus fumigatus
  misc_feature: 151
cttattatctaccttctatcggaacttcctatgggccttctacctacctctatctactattctacctattctacctatcttaatcctatctgatat

SEQ ID NO: 26246 - DNA, 96 bp, Aspergillus fumigatus
  misc_feature: 151
ctatacccttactctgtgcctgctgccttaatattatatatatccccctaatactttattatagataaatgtatatatatatataaaaccactgct

SEQ ID NO: 26247 - DNA, 96 bp, Aspergillus fumigatus
  misc_feature: 151
ctaactaaccctaactctatcttactaaaaaattaacttatcctttcttttattatcttctttcttctctttcttctctttcttctatatattaat

SEQ ID NO: 26248 - DNA, 96 bp, Aspergillus fumigatus
  misc_feature: 151
ataaaggcacccacagtggcccatatcagataggattaagataggtagaataggtagaatagtagatagaggtaggtagaaggcccataggaagtt

SEQ ID NO: 26249 - DNA, 96 bp, Aspergillus fumigatus
  misc_feature: 151
agtaaatctaataataataaaaattaataattcttcctatatttagttatttttttataatatataattattactagtatagtaaggtccctattt

SEQ ID NO: 26250 - DNA, 96 bp, Aspergillus fumigatus
  misc_feature: 150
tgcctgctgccttaatattatatatatccccctaatactttattatagataaatgtatatatatatataaaaccactgcttatgctaaaatattca

SEQ ID NO: 26251 - DNA, 96 bp, Aspergillus fumigatus
  misc_feature: 150
tgcatggacatatatattatagatttagtagatgaatattttagcataagcagtggttttatatatatatatacatttatctataataaagtatta

SEQ ID NO: 26252 - DNA, 96 bp, Aspergillus fumigatus
  misc_feature: 150
tatacccttactctgtgcctgctgccttaatattatatatatccccctaatactttattatagataaatgtatatatatatataaaaccactgctt

SEQ ID NO: 26253 - DNA, 96 bp, Aspergillus fumigatus
  misc_feature: 150
agaactttattaaggatactagtaaatctaataataataaaaattaataattcttcctatatttagttatttttttataatatataattattacta

SEQ ID NO: 26254 - DNA, 96 bp, Aspergillus fumigatus
  misc_feature: 150
atataattctaaaactatatctataatatctacttctgggatacctctctatctatctactaatctcctactactattattctatctatctctcta

SEQ ID NO: 26255 - DNA, 96 bp, Aspergillus fumigatus
  misc_feature: 150
atagtagttttaggtctagtaattaatatattagtatatacctagctagtaatattcttatactattaacttatataacttatactttctagggta

SEQ ID NO: 26256 - DNA, 96 bp, Aspergillus fumigatus
  misc_feature: 150
atacccttactctgtgcctgctgccttaatattatatatatccccctaatactttattatagataaatgtatatatatatataaaaccactgctta

SEQ ID NO: 26257 - DNA, 96 bp, Aspergillus fumigatus
  misc_feature: 150
gtagttttaggtctagtaattaatatattagtatatacctagctagtaatattcttatactattaacttatataacttatactttctagggtattt

SEQ ID NO: 26258 - DNA, 96 bp, Aspergillus fumigatus
  misc_feature: 150
gtaaggtagtaagtgaggtagggaaagaggtatttaggaaggtaggaagtaaggtagtaagtaggttataagaaaggttgcaatgccccagagagg

SEQ ID NO: 26259 - DNA, 96 bp, Aspergillus fumigatus
  misc_feature: 150
ctacctcacttactaccttgctacctaccttgctacctaccttgctaccttacttactacctaactatctacctcactgcctgtctcactgcctgc

SEQ ID NO: 26260 - DNA, 96 bp, Aspergillus fumigatus
  misc_feature: 150
agtgaggtagggaaagaggtatttaggaaggtaggaagtaaggtagtaagtaggttataagaaaggttgcaatgccccagagaggttatatataag

SEQ ID NO: 26261 - DNA, 96 bp, Aspergillus fumigatus
  misc_feature: 150
atccaggtatatagggtgtagttatatataaactttactatctataactatatagcctaattatcttactaataattaataaatattcttaggtat

SEQ ID NO: 26262 - DNA, 96 bp, Aspergillus fumigatus
  misc_feature: 150
agtagttttaggtctagtaattaatatattagtatatacctagctagtaatattcttatactattaacttatataacttatactttctagggtatt

SEQ ID NO: 26263 - DNA, 96 bp, Aspergillus fumigatus
  misc_feature: 149
ttattatctaccttctatcggaacttcctatgggccttctacctacctctatctactattctacctattctacctatcttaatcctatctgatatg

SEQ ID NO: 26264 - DNA, 96 bp, Aspergillus fumigatus
  misc_feature: 149
ttatctaccttctatcggaacttcctatgggccttctacctacctctatctactattctacctattctacctatcttaatcctatctgatatgggc

SEQ ID NO: 26265 - DNA, 96 bp, Aspergillus fumigatus
  misc_feature: 149
ttatccaggtatatagggtgtagttatatataaactttactatctataactatatagcctaattatcttactaataattaataaatattcttaggt

SEQ ID NO: 26266 - DNA, 96 bp, Aspergillus fumigatus
  misc_feature: 149
ttaggaaggtaggaagtaaggtagtaagtaggttataagaaaggttgcaatgccccagagaggttatatataagatagagagtaaggtagatagca

SEQ ID NO: 26267 - DNA, 96 bp, Aspergillus fumigatus
  misc_feature: 149
ttaaggatactagtaaatctaataataataaaaattaataattcttcctatatttagttatttttttataatatataattattactagtatagtaa

SEQ ID NO: 26268 - DNA, 96 bp, Aspergillus fumigatus
  misc_feature: 149
tctaccttctatcggaacttcctatgggccttctacctacctctatctactattctacctattctacctatcttaatcctatctgatatgggccac

SEQ ID NO: 26269 - DNA, 96 bp, Aspergillus fumigatus
  misc_feature: 149
tattatctaccttctatcggaacttcctatgggccttctacctacctctatctactattctacctattctacctatcttaatcctatctgatatgg

SEQ ID NO: 26270 - DNA, 96 bp, Aspergillus fumigatus
  misc_feature: 149
aactatatctataatatctacttctgggatacctctctatctatctactaatctcctactactattattctatctatctctctaccttattatcta

SEQ ID NO: 26271 - DNA, 96 bp, Aspergillus fumigatus
  misc_feature: 149
tactacctcacttactaccttgctacctaccttgctacctaccttgctaccttacttactacctaactatctacctcactgcctgtctcactgcct

SEQ ID NO: 26272 - DNA, 96 bp, Aspergillus fumigatus
  misc_feature: 149
taaggtagtaagtgaggtagggaaagaggtatttaggaaggtaggaagtaaggtagtaagtaggttataagaaaggttgcaatgccccagagaggt

SEQ ID NO: 26273 - DNA, 96 bp, Aspergillus fumigatus
  misc_feature: 149
taaggatactagtaaatctaataataataaaaattaataattcttcctatatttagttatttttttataatatataattattactagtatagtaag

SEQ ID NO: 26274 - DNA, 96 bp, Aspergillus fumigatus
  misc_feature: 149
ggtagtaagtgaggtagggaaagaggtatttaggaaggtaggaagtaaggtagtaagtaggttataagaaaggttgcaatgccccagagaggttat

SEQ ID NO: 26275 - DNA, 96 bp, Aspergillus fumigatus
  misc_feature: 149
ataattctaaaactatatctataatatctacttctgggatacctctctatctatctactaatctcctactactattattctatctatctctctacc

SEQ ID NO: 26276 - DNA, 96 bp, Aspergillus fumigatus
  misc_feature: 149
atttaggaaggtaggaagtaaggtagtaagtaggttataagaaaggttgcaatgccccagagaggttatatataagatagagagtaaggtagatag

SEQ ID NO: 26277 - DNA, 96 bp, Aspergillus fumigatus
  misc_feature: 149
ccaggtatatagggtgtagttatatataaactttactatctataactatatagcctaattatcttactaataattaataaatattcttaggtatat

SEQ ID NO: 26278 - DNA, 96 bp, Aspergillus fumigatus
  misc_feature: 149
aaactatatctataatatctacttctgggatacctctctatctatctactaatctcctactactattattctatctatctctctaccttattatct

SEQ ID NO: 26279 - DNA, 96 bp, Aspergillus fumigatus
  misc_feature: 148
actagattaactagcctagtcagcctatatcactgagcctagaccccctgcgcaggcacctctggcagctaaatcaccaagcctagccatatcaaa

SEQ ID NO: 26280 - DNA, 96 bp, Aspergillus fumigatus
  misc_feature: 148
tgtgcctgctgccttaatattatatatatccccctaatactttattatagataaatgtatatatatatataaaaccactgcttatgctaaaatatt

SEQ ID NO: 26281 - DNA, 96 bp, Aspergillus fumigatus
  misc_feature: 148
atctaccttctatcggaacttcctatgggccttctacctacctctatctactattctacctattctacctatcttaatcctatctgatatgggcca

SEQ ID NO: 26282 - DNA, 96 bp, Aspergillus fumigatus
  misc_feature: 148
tgcaaatataaattcatatataatatgaaaaaaaaaaaattaaaaataaaaaaatataaatataaaaataattcttttttttactaaataaaatat

SEQ ID NO: 26283 - DNA, 96 bp, Aspergillus fumigatus
  misc_feature: 148
tataattctaaaactatatctataatatctacttctgggatacctctctatctatctactaatctcctactactattattctatctatctctctac

SEQ ID NO: 26284 - DNA, 96 bp, Aspergillus fumigatus
  misc_feature: 148
cttactctgtgcctgctgccttaatattatatatatccccctaatactttattatagataaatgtatatatatatataaaaccactgcttatgcta

SEQ ID NO: 26285 - DNA, 96 bp, Aspergillus fumigatus
  misc_feature: 148
attaaggatactagtaaatctaataataataaaaattaataattcttcctatatttagttatttttttataatatataattattactagtatagta

SEQ ID NO: 26286 - DNA, 96 bp, Aspergillus fumigatus
  misc_feature: 148
taattctaaaactatatctataatatctacttctgggatacctctctatctatctactaatctcctactactattattctatctatctctctacct

SEQ ID NO: 26287 - DNA, 96 bp, Aspergillus fumigatus
  misc_feature: 148
ggatactagtaaatctaataataataaaaattaataattcttcctatatttagttatttttttataatatataattattactagtatagtaaggtc

SEQ ID NO: 26288 - DNA, 96 bp, Aspergillus fumigatus
  misc_feature: 148
gcatggacatatatattatagatttagtagatgaatattttagcataagcagtggttttatatatatatatacatttatctataataaagtattag

SEQ ID NO: 26289 - DNA, 96 bp, Aspergillus fumigatus
  misc_feature: 148
aagaaaaagaaggagaaaaagaaggagaaaaagaaggagaaaaagaaggagaaaaagaaggagaaaaagaaggagaaaaagaaggagaaaaagaag

SEQ ID NO: 26290 - DNA, 96 bp, Aspergillus fumigatus
  misc_feature: 148
ctgtgcctgctgccttaatattatatatatccccctaatactttattatagataaatgtatatatatatataaaaccactgcttatgctaaaatat

SEQ ID NO: 26291 - DNA, 96 bp, Aspergillus fumigatus
  misc_feature: 148
ctaccttctatcggaacttcctatgggccttctacctacctctatctactattctacctattctacctatcttaatcctatctgatatgggccact

SEQ ID NO: 26292 - DNA, 96 bp, Aspergillus fumigatus
  misc_feature: 148
acccttactctgtgcctgctgccttaatattatatatatccccctaatactttattatagataaatgtatatatatatataaaaccactgcttatg

SEQ ID NO: 26293 - DNA, 96 bp, Aspergillus fumigatus
  misc_feature: 148
actacctcacttactaccttgctacctaccttgctacctaccttgctaccttacttactacctaactatctacctcactgcctgtctcactgcctg

SEQ ID NO: 26294 - DNA, 96 bp, Aspergillus fumigatus
  misc_feature: 148
aattctaaaactatatctataatatctacttctgggatacctctctatctatctactaatctcctactactattattctatctatctctctacctt

SEQ ID NO: 26295 - DNA, 96 bp, Aspergillus fumigatus
  misc_feature: 147
tttatccaggtatatagggtgtagttatatataaactttactatctataactatatagcctaattatcttactaataattaataaatattcttagg

SEQ ID NO: 26296 - DNA, 96 bp, Aspergillus fumigatus
  misc_feature: 147
gaagaaaaagaaggagaaaaagaaggagaaaaagaaggagaaaaagaaggagaaaaagaaggagaaaaagaaggagaaaaagaaggagaaaaagaa

SEQ ID NO: 26297 - DNA, 96 bp, Aspergillus fumigatus
  misc_feature: 147
ttactctgtgcctgctgccttaatattatatatatccccctaatactttattatagataaatgtatatatatatataaaaccactgcttatgctaa

SEQ ID NO: 26298 - DNA, 96 bp, Aspergillus fumigatus
  misc_feature: 147
ggtagtaaggtagtaagtgaggtagggaaagaggtatttaggaaggtaggaagtaaggtagtaagtaggttataagaaaggttgcaatgccccaga

SEQ ID NO: 26299 - DNA, 96 bp, Aspergillus fumigatus
  misc_feature: 147
tagtaaggtagtaagtgaggtagggaaagaggtatttaggaaggtaggaagtaaggtagtaagtaggttataagaaaggttgcaatgccccagaga

SEQ ID NO: 26300 - DNA, 96 bp, Aspergillus fumigatus
  misc_feature: 147
tatttaggaaggtaggaagtaaggtagtaagtaggttataagaaaggttgcaatgccccagagaggttatatataagatagagagtaaggtagata

SEQ ID NO: 26301 - DNA, 96 bp, Aspergillus fumigatus
  misc_feature: 147
tacccttactctgtgcctgctgccttaatattatatatatccccctaatactttattatagataaatgtatatatatatataaaaccactgcttat

SEQ ID NO: 26302 - DNA, 96 bp, Aspergillus fumigatus
  misc_feature: 147
aggtagtaagtgaggtagggaaagaggtatttaggaaggtaggaagtaaggtagtaagtaggttataagaaaggttgcaatgccccagagaggtta

SEQ ID NO: 26303 - DNA, 96 bp, Aspergillus fumigatus
  misc_feature: 147
atactagtaaatctaataataataaaaattaataattcttcctatatttagttatttttttataatatataattattactagtatagtaaggtccc

SEQ ID NO: 26304 - DNA, 96 bp, Aspergillus fumigatus
  misc_feature: 147
gatactagtaaatctaataataataaaaattaataattcttcctatatttagttatttttttataatatataattattactagtatagtaaggtcc

SEQ ID NO: 26305 - DNA, 96 bp, Aspergillus fumigatus
  misc_feature: 147
gcgcgccctgccgcagcgagcgatgggccgcgcgcgcggaggggaccggtgggcaggcgggcgcaggcttcgagggccgaccggcccggcgcgagg

SEQ ID NO: 26306 - DNA, 96 bp, Aspergillus fumigatus
  misc_feature: 147
gcgagcttccagggggttagggctgacatccagatagccctagttacctttagtcagcgatggcatgcctatctaggcctagctcctgaccagttc

SEQ ID NO: 26307 - DNA, 96 bp, Aspergillus fumigatus
  misc_feature: 147
aggtagtaaggtagtaagtgaggtagggaaagaggtatttaggaaggtaggaagtaaggtagtaagtaggttataagaaaggttgcaatgccccag

SEQ ID NO: 26308 - DNA, 96 bp, Aspergillus fumigatus
  misc_feature: 147
ctctgtgcctgctgccttaatattatatatatccccctaatactttattatagataaatgtatatatatatataaaaccactgcttatgctaaaat

SEQ ID NO: 26309 - DNA, 96 bp, Aspergillus fumigatus
  misc_feature: 147
cgcgccctgccgcagcgagcgatgggccgcgcgcgcggaggggaccggtgggcaggcgggcgcaggcttcgagggccgaccggcccggcgcgaggg

SEQ ID NO: 26310 - DNA, 96 bp, Aspergillus fumigatus
  misc_feature: 147
attatctaccttctatcggaacttcctatgggccttctacctacctctatctactattctacctattctacctatcttaatcctatctgatatggg

SEQ ID NO: 26311 - DNA, 96 bp, Aspergillus fumigatus
  misc_feature: 147
aggatactagtaaatctaataataataaaaattaataattcttcctatatttagttatttttttataatatataattattactagtatagtaaggt

SEQ ID NO: 26312 - DNA, 96 bp, Aspergillus fumigatus
  misc_feature: 146
taagaatatttattaattattagtaagataattaggctatatagttatagatagtaaagtttatatataactacaccctatatacctggataaaaa

SEQ ID NO: 26313 - DNA, 96 bp, Aspergillus fumigatus
  misc_feature: 146
ctaagaatatttattaattattagtaagataattaggctatatagttatagatagtaaagtttatatataactacaccctatatacctggataaaa

SEQ ID NO: 26314 - DNA, 96 bp, Aspergillus fumigatus
  misc_feature: 146
actctgtgcctgctgccttaatattatatatatccccctaatactttattatagataaatgtatatatatatataaaaccactgcttatgctaaaa

SEQ ID NO: 26315 - DNA, 96 bp, Aspergillus fumigatus
  misc_feature: 146
tactctgtgcctgctgccttaatattatatatatccccctaatactttattatagataaatgtatatatatatataaaaccactgcttatgctaaa

SEQ ID NO: 26316 - DNA, 96 bp, Aspergillus fumigatus
  misc_feature: 146
aagtgaggtagggaaagaggtatttaggaaggtaggaagtaaggtagtaagtaggttataagaaaggttgcaatgccccagagaggttatatataa

SEQ ID NO: 26317 - DNA, 96 bp, Aspergillus fumigatus
  misc_feature: 146
ttactacctcacttactaccttgctacctaccttgctacctaccttgctaccttacttactacctaactatctacctcactgcctgtctcactgcc

SEQ ID NO: 26318 - DNA, 96 bp, Aspergillus fumigatus
  misc_feature: 146
aaggtagtaaggtagtaagtgaggtagggaaagaggtatttaggaaggtaggaagtaaggtagtaagtaggttataagaaaggttgcaatgcccca

SEQ ID NO: 26319 - DNA, 96 bp, Aspergillus fumigatus
  misc_feature: 146
agaagaaaaagaaggagaaaaagaaggagaaaaagaaggagaaaaagaaggagaaaaagaaggagaaaaagaaggagaaaaagaaggagaaaaaga

SEQ ID NO: 26320 - DNA, 96 bp, Aspergillus fumigatus
  misc_feature: 146
tctgtgcctgctgccttaatattatatatatccccctaatactttattatagataaatgtatatatatatataaaaccactgcttatgctaaaata

SEQ ID NO: 26321 - DNA, 96 bp, Aspergillus fumigatus
  misc_feature: 146
tatctaccttctatcggaacttcctatgggccttctacctacctctatctactattctacctattctacctatcttaatcctatctgatatgggcc

SEQ ID NO: 26322 - DNA, 96 bp, Aspergillus fumigatus
  misc_feature: 146
ccttattatctaccttctatcggaacttcctatgggccttctacctacctctatctactattctacctattctacctatcttaatcctatctgata

SEQ ID NO: 26323 - DNA, 96 bp, Aspergillus fumigatus
  misc_feature: 146
gaacttcctatgggccttctacctacctctatctactattctacctattctacctatcttaatcctatctgatatgggccactgtgggtgccttta

SEQ ID NO: 26324 - DNA, 96 bp, Aspergillus fumigatus
  misc_feature: 146
taaaactatatctataatatctacttctgggatacctctctatctatctactaatctcctactactattattctatctatctctctaccttattat

SEQ ID NO: 26325 - DNA, 96 bp, Aspergillus fumigatus
  misc_feature: 146
gcaaatataaattcatatataatatgaaaaaaaaaaaattaaaaataaaaaaatataaatataaaaataattcttttttttactaaataaaatatt

SEQ ID NO: 26326 - DNA, 96 bp, Aspergillus fumigatus
  misc_feature: 146
gagcttccagggggttagggctgacatccagatagccctagttacctttagtcagcgatggcatgcctatctaggcctagctcctgaccagttcat

SEQ ID NO: 26327 - DNA, 96 bp, Aspergillus fumigatus
  misc_feature: 146
acttactacctcacttactaccttgctacctaccttgctacctaccttgctaccttacttactacctaactatctacctcactgcctgtctcactg

SEQ ID NO: 26328 - DNA, 96 bp, Aspergillus fumigatus
  misc_feature: 146
aagaatatttattaattattagtaagataattaggctatatagttatagatagtaaagtttatatataactacaccctatatacctggataaaaat

SEQ ID NO: 26329 - DNA, 96 bp, Aspergillus fumigatus
  misc_feature: 146
aaggtagtaagtgaggtagggaaagaggtatttaggaaggtaggaagtaaggtagtaagtaggttataagaaaggttgcaatgccccagagaggtt

SEQ ID NO: 26330 - DNA, 96 bp, Aspergillus fumigatus
  misc_feature: 145
agtaagtgaggtagggaaagaggtatttaggaaggtaggaagtaaggtagtaagtaggttataagaaaggttgcaatgccccagagaggttatata

SEQ ID NO: 26331 - DNA, 96 bp, Aspergillus fumigatus
  misc_feature: 145
gtagtaagtgaggtagggaaagaggtatttaggaaggtaggaagtaaggtagtaagtaggttataagaaaggttgcaatgccccagagaggttata

SEQ ID NO: 26332 - DNA, 96 bp, Aspergillus fumigatus
  misc_feature: 145
tactagtaaatctaataataataaaaattaataattcttcctatatttagttatttttttataatatataattattactagtatagtaaggtccct

SEQ ID NO: 26333 - DNA, 96 bp, Aspergillus fumigatus
  misc_feature: 145
taccttctatcggaacttcctatgggccttctacctacctctatctactattctacctattctacctatcttaatcctatctgatatgggccactg

SEQ ID NO: 26334 - DNA, 96 bp, Aspergillus fumigatus
  misc_feature: 145
gtatttaggaaggtaggaagtaaggtagtaagtaggttataagaaaggttgcaatgccccagagaggttatatataagatagagagtaaggtagat

SEQ ID NO: 26335 - DNA, 96 bp, Aspergillus fumigatus
  misc_feature: 145
cttactacctcacttactaccttgctacctaccttgctacctaccttgctaccttacttactacctaactatctacctcactgcctgtctcactgc

SEQ ID NO: 26336 - DNA, 96 bp, Aspergillus fumigatus
  misc_feature: 145
accttattatctaccttctatcggaacttcctatgggccttctacctacctctatctactattctacctattctacctatcttaatcctatctgat

SEQ ID NO: 26337 - DNA, 96 bp, Aspergillus fumigatus
  misc_feature: 145
accttctatcggaacttcctatgggccttctacctacctctatctactattctacctattctacctatcttaatcctatctgatatgggccactgt

SEQ ID NO: 26338 - DNA, 96 bp, Aspergillus fumigatus
  misc_feature: 144
ttctatcggaacttcctatgggccttctacctacctctatctactattctacctattctacctatcttaatcctatctgatatgggccactgtggg

SEQ ID NO: 26339 - DNA, 96 bp, Aspergillus fumigatus
  misc_feature: 144
gtgaggtagggaaagaggtatttaggaaggtaggaagtaaggtagtaagtaggttataagaaaggttgcaatgccccagagaggttatatataaga

SEQ ID NO: 26340 - DNA, 96 bp, Aspergillus fumigatus
  misc_feature: 144
catggacatatatattatagatttagtagatgaatattttagcataagcagtggttttatatatatatatacatttatctataataaagtattagg

SEQ ID NO: 26341 - DNA, 96 bp, Aspergillus fumigatus
  misc_feature: 143
ttctaaaactatatctataatatctacttctgggatacctctctatctatctactaatctcctactactattattctatctatctctctaccttat

SEQ ID NO: 26342 - DNA, 96 bp, Aspergillus fumigatus
  misc_feature: 143
tatcggaacttcctatgggccttctacctacctctatctactattctacctattctacctatcttaatcctatctgatatgggccactgtgggtgc

SEQ ID NO: 26343 - DNA, 96 bp, Aspergillus fumigatus
  misc_feature: 143
taagtgaggtagggaaagaggtatttaggaaggtaggaagtaaggtagtaagtaggttataagaaaggttgcaatgccccagagaggttatatata

SEQ ID NO: 26344 - DNA, 96 bp, Aspergillus fumigatus
  misc_feature: 143
tagtaagtgaggtagggaaagaggtatttaggaaggtaggaagtaaggtagtaagtaggttataagaaaggttgcaatgccccagagaggttatat

SEQ ID NO: 26345 - DNA, 96 bp, Aspergillus fumigatus
  misc_feature: 143
ctacttactacctcacttactaccttgctacctaccttgctacctaccttgctaccttacttactacctaactatctacctcactgcctgtctcac

SEQ ID NO: 26346 - DNA, 96 bp, Aspergillus fumigatus
  misc_feature: 143
gtagtaaggtagtaagtgaggtagggaaagaggtatttaggaaggtaggaagtaaggtagtaagtaggttataagaaaggttgcaatgccccagag

SEQ ID NO: 26347 - DNA, 96 bp, Aspergillus fumigatus
  misc_feature: 143
gtaagtgaggtagggaaagaggtatttaggaaggtaggaagtaaggtagtaagtaggttataagaaaggttgcaatgccccagagaggttatatat

SEQ ID NO: 26348 - DNA, 96 bp, Aspergillus fumigatus
  misc_feature: 143
cccttactctgtgcctgctgccttaatattatatatatccccctaatactttattatagataaatgtatatatatatataaaaccactgcttatgc

SEQ ID NO: 26349 - DNA, 96 bp, Aspergillus fumigatus
  misc_feature: 143
aagaagaaaaagaaggagaaaaagaaggagaaaaagaaggagaaaaagaaggagaaaaagaaggagaaaaagaaggagaaaaagaaggagaaaaag

SEQ ID NO: 26350 - DNA, 96 bp, Aspergillus fumigatus
  misc_feature: 143
cggaacttcctatgggccttctacctacctctatctactattctacctattctacctatcttaatcctatctgatatgggccactgtgggtgcctt

SEQ ID NO: 26351 - DNA, 96 bp, Aspergillus fumigatus
  misc_feature: 143
ccttctatcggaacttcctatgggccttctacctacctctatctactattctacctattctacctatcttaatcctatctgatatgggccactgtg

SEQ ID NO: 26352 - DNA, 96 bp, Aspergillus fumigatus
  misc_feature: 143
ccttactctgtgcctgctgccttaatattatatatatccccctaatactttattatagataaatgtatatatatatataaaaccactgcttatgct

SEQ ID NO: 26353 - DNA, 96 bp, Aspergillus fumigatus
  misc_feature: 142
ttcttccctttccaatcttatttattctctctttacttacttaaactctctttatcttatatatctcttcgtcctattctgatcttaaacttgcta

SEQ ID NO: 26354 - DNA, 96 bp, Aspergillus fumigatus
  misc_feature: 142
ttataacctacttactaccttacttcctaccttcctaaatacctctttccctacctcacttactaccttactaccttgctcactaccttacttact

SEQ ID NO: 26355 - DNA, 96 bp, Aspergillus fumigatus
  misc_feature: 142
tcttccctttccaatcttatttattctctctttacttacttaaactctctttatcttatatatctcttcgtcctattctgatcttaaacttgctaa

SEQ ID NO: 26356 - DNA, 96 bp, Aspergillus fumigatus
  misc_feature: 142
cgagcttccagggggttagggctgacatccagatagccctagttacctttagtcagcgatggcatgcctatctaggcctagctcctgaccagttca

SEQ ID NO: 26357 - DNA, 96 bp, Aspergillus fumigatus
  misc_feature: 142
tcggaacttcctatgggccttctacctacctctatctactattctacctattctacctatcttaatcctatctgatatgggccactgtgggtgcct

SEQ ID NO: 26358 - DNA, 96 bp, Aspergillus fumigatus
  misc_feature: 142
taccttattatctaccttctatcggaacttcctatgggccttctacctacctctatctactattctacctattctacctatcttaatcctatctga

SEQ ID NO: 26359 - DNA, 96 bp, Aspergillus fumigatus
  misc_feature: 142
tacttactacctcacttactaccttgctacctaccttgctacctaccttgctaccttacttactacctaactatctacctcactgcctgtctcact

SEQ ID NO: 26360 - DNA, 96 bp, Aspergillus fumigatus
  misc_feature: 142
caaatataaattcatatataatatgaaaaaaaaaaaattaaaaataaaaaaatataaatataaaaataattcttttttttactaaataaaatatta

SEQ ID NO: 26361 - DNA, 96 bp, Aspergillus fumigatus
  misc_feature: 142
ctaaaactatatctataatatctacttctgggatacctctctatctatctactaatctcctactactattattctatctatctctctaccttatta

SEQ ID NO: 26362 - DNA, 96 bp, Aspergillus fumigatus
  misc_feature: 142
cctttcttataacctacttactaccttacttcctaccttcctaaatacctctttccctacctcacttactaccttactaccttgctcactacctta

SEQ ID NO: 26363 - DNA, 96 bp, Aspergillus fumigatus
  misc_feature: 142
attctaaaactatatctataatatctacttctgggatacctctctatctatctactaatctcctactactattattctatctatctctctacctta

SEQ ID NO: 26364 - DNA, 96 bp, Aspergillus fumigatus
  misc_feature: 142
taacctacttactaccttacttcctaccttcctaaatacctctttccctacctcacttactaccttactaccttgctcactaccttacttactacc

SEQ ID NO: 26365 - DNA, 96 bp, Aspergillus fumigatus
  misc_feature: 142
ataacctacttactaccttacttcctaccttcctaaatacctctttccctacctcacttactaccttactaccttgctcactaccttacttactac

SEQ ID NO: 26366 - DNA, 96 bp, Aspergillus fumigatus
  misc_feature: 142
atcggaacttcctatgggccttctacctacctctatctactattctacctattctacctatcttaatcctatctgatatgggccactgtgggtgcc

SEQ ID NO: 26367 - DNA, 96 bp, Aspergillus fumigatus
  misc_feature: 142
cttcttccctttccaatcttatttattctctctttacttacttaaactctctttatcttatatatctcttcgtcctattctgatcttaaacttgct

SEQ ID NO: 26368 - DNA, 96 bp, Aspergillus fumigatus
  misc_feature: 142
atggacatatatattatagatttagtagatgaatattttagcataagcagtggttttatatatatatatacatttatctataataaagtattaggg

SEQ ID NO: 26369 - DNA, 96 bp, Aspergillus fumigatus
  misc_feature: 142
acctttcttataacctacttactaccttacttcctaccttcctaaatacctctttccctacctcacttactaccttactaccttgctcactacctt

SEQ ID NO: 26370 - DNA, 96 bp, Aspergillus fumigatus
  misc_feature: 141
cctacttactacctcacttactaccttgctacctaccttgctacctaccttgctaccttacttactacctaactatctacctcactgcctgtctca

SEQ ID NO: 26371 - DNA, 96 bp, Aspergillus fumigatus
  misc_feature: 141
tctaaaactatatctataatatctacttctgggatacctctctatctatctactaatctcctactactattattctatctatctctctaccttatt

SEQ ID NO: 26372 - DNA, 96 bp, Aspergillus fumigatus
  misc_feature: 141
ctttcttataacctacttactaccttacttcctaccttcctaaatacctctttccctacctcacttactaccttactaccttgctcactaccttac

SEQ ID NO: 26373 - DNA, 96 bp, Aspergillus fumigatus
  misc_feature: 141
acctacttactacctcacttactaccttgctacctaccttgctacctaccttgctaccttacttactacctaactatctacctcactgcctgtctc

SEQ ID NO: 26374 - DNA, 96 bp, Aspergillus fumigatus
  misc_feature: 141
cttctatcggaacttcctatgggccttctacctacctctatctactattctacctattctacctatcttaatcctatctgatatgggccactgtgg

SEQ ID NO: 26375 - DNA, 96 bp, Aspergillus fumigatus
  misc_feature: 141
aacctacttactaccttacttcctaccttcctaaatacctctttccctacctcacttactaccttactaccttgctcactaccttacttactacct

SEQ ID NO: 26376 - DNA, 96 bp, Aspergillus fumigatus
  misc_feature: 140
tttcttataacctacttactaccttacttcctaccttcctaaatacctctttccctacctcacttactaccttactaccttgctcactaccttact

SEQ ID NO: 26377 - DNA, 96 bp, Aspergillus fumigatus
  misc_feature: 140
ttcttataacctacttactaccttacttcctaccttcctaaatacctctttccctacctcacttactaccttactaccttgctcactaccttactt

SEQ ID NO: 26378 - DNA, 96 bp, Aspergillus fumigatus
  misc_feature: 140
aaatataaattcatatataatatgaaaaaaaaaaaattaaaaataaaaaaatataaatataaaaataattcttttttttactaaataaaatattaa

SEQ ID NO: 26379 - DNA, 96 bp, Aspergillus fumigatus
  misc_feature: 140
tgatttgatatagctaggttgggtgatttgatatggctaggcttggtgatttagctgccagaggtgcctgcgcagggggtctaggctcagtgatat

SEQ ID NO: 26380 - DNA, 96 bp, Aspergillus fumigatus
  misc_feature: 140
tgaggtagggaaagaggtatttaggaaggtaggaagtaaggtagtaagtaggttataagaaaggttgcaatgccccagagaggttatatataagat

SEQ ID NO: 26381 - DNA, 96 bp, Aspergillus fumigatus
  misc_feature: 140
tataacctacttactaccttacttcctaccttcctaaatacctctttccctacctcacttactaccttactaccttgctcactaccttacttacta

SEQ ID NO: 26382 - DNA, 96 bp, Aspergillus fumigatus
  misc_feature: 140
cttccctttccaatcttatttattctctctttacttacttaaactctctttatcttatatatctcttcgtcctattctgatcttaaacttgctaac

SEQ ID NO: 26383 - DNA, 96 bp, Aspergillus fumigatus
  misc_feature: 140
caaggtagtaaggtagtaagtgaggtagggaaagaggtatttaggaaggtaggaagtaaggtagtaagtaggttataagaaaggttgcaatgcccc

SEQ ID NO: 26384 - DNA, 96 bp, Aspergillus fumigatus
  misc_feature: 140
gcaaggtagtaaggtagtaagtgaggtagggaaagaggtatttaggaaggtaggaagtaaggtagtaagtaggttataagaaaggttgcaatgccc

SEQ ID NO: 26385 - DNA, 96 bp, Aspergillus fumigatus
  misc_feature: 140
ggaacttcctatgggccttctacctacctctatctactattctacctattctacctatcttaatcctatctgatatgggccactgtgggtgccttt

SEQ ID NO: 26386 - DNA, 96 bp, Aspergillus fumigatus
  misc_feature: 140
acctacttactaccttacttcctaccttcctaaatacctctttccctacctcacttactaccttactaccttgctcactaccttacttactacctc

SEQ ID NO: 26387 - DNA, 96 bp, Aspergillus fumigatus
  misc_feature: 139
tttgatatagctaggttgggtgatttgatatggctaggcttggtgatttagctgccagaggtgcctgcgcagggggtctaggctcagtgatatagg

SEQ ID NO: 26388 - DNA, 96 bp, Aspergillus fumigatus
  misc_feature: 139
tcttataacctacttactaccttacttcctaccttcctaaatacctctttccctacctcacttactaccttactaccttgctcactaccttactta

SEQ ID NO: 26389 - DNA, 96 bp, Aspergillus fumigatus
  misc_feature: 139
tctatcggaacttcctatgggccttctacctacctctatctactattctacctattctacctatcttaatcctatctgatatgggccactgtgggt

SEQ ID NO: 26390 - DNA, 96 bp, Aspergillus fumigatus
  misc_feature: 139
tccttcttccctttccaatcttatttattctctctttacttacttaaactctctttatcttatatatctcttcgtcctattctgatcttaaacttg

SEQ ID NO: 26391 - DNA, 96 bp, Aspergillus fumigatus
  misc_feature: 139
gatttgatatagctaggttgggtgatttgatatggctaggcttggtgatttagctgccagaggtgcctgcgcagggggtctaggctcagtgatata

SEQ ID NO: 26392 - DNA, 96 bp, Aspergillus fumigatus
  misc_feature: 139
taatactagggctattatagtactatataataagatagagataataataagctttatatctaaggataatataggtagggttatttatactctata

SEQ ID NO: 26393 - DNA, 96 bp, Aspergillus fumigatus
  misc_feature: 139
agcaaggtagtaaggtagtaagtgaggtagggaaagaggtatttaggaaggtaggaagtaaggtagtaagtaggttataagaaaggttgcaatgcc

SEQ ID NO: 26394 - DNA, 96 bp, Aspergillus fumigatus
  misc_feature: 139
attggatggggtgggactggctccctccctcgctaccatgctacctgattcgcatgcggcctccctcgctgcctccctcgctaccatgctgcctgc

SEQ ID NO: 26395 - DNA, 96 bp, Aspergillus fumigatus
  misc_feature: 139
ctatcggaacttcctatgggccttctacctacctctatctactattctacctattctacctatcttaatcctatctgatatgggccactgtgggtg

SEQ ID NO: 26396 - DNA, 96 bp, Aspergillus fumigatus
  misc_feature: 139
aacctttcttataacctacttactaccttacttcctaccttcctaaatacctctttccctacctcacttactaccttactaccttgctcactacct

SEQ ID NO: 26397 - DNA, 96 bp, Aspergillus fumigatus
  misc_feature: 138
ttgatatagctaggttgggtgatttgatatggctaggcttggtgatttagctgccagaggtgcctgcgcagggggtctaggctcagtgatataggc

SEQ ID NO: 26398 - DNA, 96 bp, Aspergillus fumigatus
  misc_feature: 138
tattctctctttacttacttaaactctctttatcttatatatctcttcgtcctattctgatcttaaacttgctaacccttatgctatcttaactaa

SEQ ID NO: 26399 - DNA, 96 bp, Aspergillus fumigatus
  misc_feature: 138
tatcttccttcttccctttccaatcttatttattctctctttacttacttaaactctctttatcttatatatctcttcgtcctattctgatcttaa

SEQ ID NO: 26400 - DNA, 96 bp, Aspergillus fumigatus
  misc_feature: 138
tggacatatatattatagatttagtagatgaatattttagcataagcagtggttttatatatatatatacatttatctataataaagtattagggg

SEQ ID NO: 26401 - DNA, 96 bp, Aspergillus fumigatus
  misc_feature: 138
tctctaccttattatctaccttctatcggaacttcctatgggccttctacctacctctatctactattctacctattctacctatcttaatcctat

SEQ ID NO: 26402 - DNA, 96 bp, Aspergillus fumigatus
  misc_feature: 138
tctaccttattatctaccttctatcggaacttcctatgggccttctacctacctctatctactattctacctattctacctatcttaatcctatct

SEQ ID NO: 26403 - DNA, 96 bp, Aspergillus fumigatus
  misc_feature: 138
gcgccctgccgcagcgagcgatgggccgcgcgcgcggaggggaccggtgggcaggcgggcgcaggcttcgagggccgaccggcccggcgcgaggga

SEQ ID NO: 26404 - DNA, 96 bp, Aspergillus fumigatus
  misc_feature: 138
gaggtagggaaagaggtatttaggaaggtaggaagtaaggtagtaagtaggttataagaaaggttgcaatgccccagagaggttatatataagata

SEQ ID NO: 26405 - DNA, 96 bp, Aspergillus fumigatus
  misc_feature: 138
tacttactaccttacttcctaccttcctaaatacctctttccctacctcacttactaccttactaccttgctcactaccttacttactacctcact

SEQ ID NO: 26406 - DNA, 96 bp, Aspergillus fumigatus
  misc_feature: 138
attgcaacctttcttataacctacttactaccttacttcctaccttcctaaatacctctttccctacctcacttactaccttactaccttgctcac

SEQ ID NO: 26407 - DNA, 96 bp, Aspergillus fumigatus
  misc_feature: 138
gagcaaggtagtaaggtagtaagtgaggtagggaaagaggtatttaggaaggtaggaagtaaggtagtaagtaggttataagaaaggttgcaatgc

SEQ ID NO: 26408 - DNA, 96 bp, Aspergillus fumigatus
  misc_feature: 138
ccttcttccctttccaatcttatttattctctctttacttacttaaactctctttatcttatatatctcttcgtcctattctgatcttaaacttgc

SEQ ID NO: 26409 - DNA, 96 bp, Aspergillus fumigatus
  misc_feature: 138
ctaccttattatctaccttctatcggaacttcctatgggccttctacctacctctatctactattctacctattctacctatcttaatcctatctg

SEQ ID NO: 26410 - DNA, 96 bp, Aspergillus fumigatus
  misc_feature: 138
ataatactagggctattatagtactatataataagatagagataataataagctttatatctaaggataatataggtagggttatttatactctat

SEQ ID NO: 26411 - DNA, 96 bp, Aspergillus fumigatus
  misc_feature: 138
agaggtatttaggaaggtaggaagtaaggtagtaagtaggttataagaaaggttgcaatgccccagagaggttatatataagatagagagtaaggt

SEQ ID NO: 26412 - DNA, 96 bp, Aspergillus fumigatus
  misc_feature: 137
ttggatggggtgggactggctccctccctcgctaccatgctacctgattcgcatgcggcctccctcgctgcctccctcgctaccatgctgcctgcc

SEQ ID NO: 26413 - DNA, 96 bp, Aspergillus fumigatus
  misc_feature: 137
ttgcaacctttcttataacctacttactaccttacttcctaccttcctaaatacctctttccctacctcacttactaccttactaccttgctcact

SEQ ID NO: 26414 - DNA, 96 bp, Aspergillus fumigatus
  misc_feature: 137
ttatcttccttcttccctttccaatcttatttattctctctttacttacttaaactctctttatcttatatatctcttcgtcctattctgatctta

SEQ ID NO: 26415 - DNA, 96 bp, Aspergillus fumigatus
  misc_feature: 137
cctacttactaccttacttcctaccttcctaaatacctctttccctacctcacttactaccttactaccttgctcactaccttacttactacctca

SEQ ID NO: 26416 - DNA, 96 bp, Aspergillus fumigatus
  misc_feature: 137
ctacttactaccttacttcctaccttcctaaatacctctttccctacctcacttactaccttactaccttgctcactaccttacttactacctcac

SEQ ID NO: 26417 - DNA, 96 bp, Aspergillus fumigatus
  misc_feature: 137
gcaacctttcttataacctacttactaccttacttcctaccttcctaaatacctctttccctacctcacttactaccttactaccttgctcactac

SEQ ID NO: 26418 - DNA, 96 bp, Aspergillus fumigatus
  misc_feature: 137
cttataacctacttactaccttacttcctaccttcctaaatacctctttccctacctcacttactaccttactaccttgctcactaccttacttac

SEQ ID NO: 26419 - DNA, 96 bp, Aspergillus fumigatus
  misc_feature: 137
caacctttcttataacctacttactaccttacttcctaccttcctaaatacctctttccctacctcacttactaccttactaccttgctcactacc

SEQ ID NO: 26420 - DNA, 96 bp, Aspergillus fumigatus
  misc_feature: 137
ctctaccttattatctaccttctatcggaacttcctatgggccttctacctacctctatctactattctacctattctacctatcttaatcctatc

SEQ ID NO: 26421 - DNA, 96 bp, Aspergillus fumigatus
  misc_feature: 137
gacaaggtactttatcccctattagactatctataatgctaaagatatagcctaactatatatctattatatatagaagctatatagcctactaag

SEQ ID NO: 26422 - DNA, 96 bp, Aspergillus fumigatus
  misc_feature: 137
aagaggtatttaggaaggtaggaagtaaggtagtaagtaggttataagaaaggttgcaatgccccagagaggttatatataagatagagagtaagg

SEQ ID NO: 26423 - DNA, 96 bp, Aspergillus fumigatus
  misc_feature: 137
attctctctttacttacttaaactctctttatcttatatatctcttcgtcctattctgatcttaaacttgctaacccttatgctatcttaactaat

SEQ ID NO: 26424 - DNA, 96 bp, Aspergillus fumigatus
  misc_feature: 136
atcttccttcttccctttccaatcttatttattctctctttacttacttaaactctctttatcttatatatctcttcgtcctattctgatcttaaa

SEQ ID NO: 26425 - DNA, 96 bp, Aspergillus fumigatus
  misc_feature: 136
ttgatagaccattgtttatttttttttttagataagatttcaatagtaattacaattaaattttaataaacaacaacatttttttttttttttttt

SEQ ID NO: 26426 - DNA, 96 bp, Aspergillus fumigatus
  misc_feature: 136
ttccttcttccctttccaatcttatttattctctctttacttacttaaactctctttatcttatatatctcttcgtcctattctgatcttaaactt

SEQ ID NO: 26427 - DNA, 96 bp, Aspergillus fumigatus
  misc_feature: 136
aatactagggctattatagtactatataataagatagagataataataagctttatatctaaggataatataggtagggttatttatactctataa

SEQ ID NO: 26428 - DNA, 96 bp, Aspergillus fumigatus
  misc_feature: 136
agacaaggtactttatcccctattagactatctataatgctaaagatatagcctaactatatatctattatatatagaagctatatagcctactaa

SEQ ID NO: 26429 - DNA, 96 bp, Aspergillus fumigatus
  misc_feature: 136
gaaagaggtatttaggaaggtaggaagtaaggtagtaagtaggttataagaaaggttgcaatgccccagagaggttatatataagatagagagtaa

SEQ ID NO: 26430 - DNA, 96 bp, Aspergillus fumigatus
  misc_feature: 136
tgcaacctttcttataacctacttactaccttacttcctaccttcctaaatacctctttccctacctcacttactaccttactaccttgctcacta

SEQ ID NO: 26431 - DNA, 96 bp, Aspergillus fumigatus
  misc_feature: 136
tgagcaaggtagtaaggtagtaagtgaggtagggaaagaggtatttaggaaggtaggaagtaaggtagtaagtaggttataagaaaggttgcaatg

SEQ ID NO: 26432 - DNA, 96 bp, Aspergillus fumigatus
  misc_feature: 136
tcttatcttccttcttccctttccaatcttatttattctctctttacttacttaaactctctttatcttatatatctcttcgtcctattctgatct

SEQ ID NO: 26433 - DNA, 96 bp, Aspergillus fumigatus
  misc_feature: 136
acaaggtactttatcccctattagactatctataatgctaaagatatagcctaactatatatctattatatatagaagctatatagcctactaaga

SEQ ID NO: 26434 - DNA, 96 bp, Aspergillus fumigatus
  misc_feature: 136
tctccttctttttctccttctttttctccttctttttctccttctttttctccttctttttctccttctttttctccttctttttcttcttatctt

SEQ ID NO: 26435 - DNA, 96 bp, Aspergillus fumigatus
  misc_feature: 136
ggaaagaggtatttaggaaggtaggaagtaaggtagtaagtaggttataagaaaggttgcaatgccccagagaggttatatataagatagagagta

SEQ ID NO: 26436 - DNA, 96 bp, Aspergillus fumigatus
  misc_feature: 136
gaggtatttaggaaggtaggaagtaaggtagtaagtaggttataagaaaggttgcaatgccccagagaggttatatataagatagagagtaaggta

SEQ ID NO: 26437 - DNA, 96 bp, Aspergillus fumigatus
  misc_feature: 136
gtataatactagggctattatagtactatataataagatagagataataataagctttatatctaaggataatataggtagggttatttatactct

SEQ ID NO: 26438 - DNA, 96 bp, Aspergillus fumigatus
  misc_feature: 136
agtataatactagggctattatagtactatataataagatagagataataataagctttatatctaaggataatataggtagggttatttatactc

SEQ ID NO: 26439 - DNA, 96 bp, Aspergillus fumigatus
  misc_feature: 136
aaagaggtatttaggaaggtaggaagtaaggtagtaagtaggttataagaaaggttgcaatgccccagagaggttatatataagatagagagtaag

SEQ ID NO: 26440 - DNA, 96 bp, Aspergillus fumigatus
  misc_feature: 136
aacctacttactacctcacttactaccttgctacctaccttgctacctaccttgctaccttacttactacctaactatctacctcactgcctgtct

SEQ ID NO: 26441 - DNA, 96 bp, Aspergillus fumigatus
  misc_feature: 135
gataagaagaaaaagaaggagaaaaagaaggagaaaaagaaggagaaaaagaaggagaaaaagaaggagaaaaagaaggagaaaaagaaggagaaa

SEQ ID NO: 26442 - DNA, 96 bp, Aspergillus fumigatus
  misc_feature: 135
tggatggggtgggactggctccctccctcgctaccatgctacctgattcgcatgcggcctccctcgctgcctccctcgctaccatgctgcctgcct

SEQ ID NO: 26443 - DNA, 96 bp, Aspergillus fumigatus
  misc_feature: 135
tcttccttcttccctttccaatcttatttattctctctttacttacttaaactctctttatcttatatatctcttcgtcctattctgatcttaaac

SEQ ID NO: 26444 - DNA, 96 bp, Aspergillus fumigatus
  misc_feature: 135
tagggaaagaggtatttaggaaggtaggaagtaaggtagtaagtaggttataagaaaggttgcaatgccccagagaggttatatataagatagaga

SEQ ID NO: 26445 - DNA, 96 bp, Aspergillus fumigatus
  misc_feature: 135
cccactggatgatcgaccggctgcgggctgagccggctatgcaggcaggccatgcagggaagccagaccgcgcagggaagccaggccatgcaggga

SEQ ID NO: 26446 - DNA, 96 bp, Aspergillus fumigatus
  misc_feature: 135
ctctctaccttattatctaccttctatcggaacttcctatgggccttctacctacctctatctactattctacctattctacctatcttaatccta

SEQ ID NO: 26447 - DNA, 96 bp, Aspergillus fumigatus
  misc_feature: 135
tactagggctattatagtactatataataagatagagataataataagctttatatctaaggataatataggtagggttatttatactctataatt

SEQ ID NO: 26448 - DNA, 96 bp, Aspergillus fumigatus
  misc_feature: 135
ataaactaagggctatagtctaatactattattcttagtaggctatatagcttctatatataatagatatataatcaggctatacctttagcatta

SEQ ID NO: 26449 - DNA, 96 bp, Aspergillus fumigatus
  misc_feature: 135
ctggatgatcgaccggctgcgggctgagccggctatgcaggcaggccatgcagggaagccagaccgcgcagggaagccaggccatgcagggaagcc

SEQ ID NO: 26450 - DNA, 96 bp, Aspergillus fumigatus
  misc_feature: 135
cttccttcttccctttccaatcttatttattctctctttacttacttaaactctctttatcttatatatctcttcgtcctattctgatcttaaact

SEQ ID NO: 26451 - DNA, 96 bp, Aspergillus fumigatus
  misc_feature: 135
cttatcttccttcttccctttccaatcttatttattctctctttacttacttaaactctctttatcttatatatctcttcgtcctattctgatctt

SEQ ID NO: 26452 - DNA, 96 bp, Aspergillus fumigatus
  misc_feature: 135
aggtagggaaagaggtatttaggaaggtaggaagtaaggtagtaagtaggttataagaaaggttgcaatgccccagagaggttatatataagatag

SEQ ID NO: 26453 - DNA, 96 bp, Aspergillus fumigatus
  misc_feature: 135
aatataaattcatatataatatgaaaaaaaaaaaattaaaaataaaaaaatataaatataaaaataattcttttttttactaaataaaatattaat

SEQ ID NO: 26454 - DNA, 96 bp, Aspergillus fumigatus
  misc_feature: 134
caaggtactttatcccctattagactatctataatgctaaagatatagcctaactatatatctattatatatagaagctatatagcctactaagaa

SEQ ID NO: 26455 - DNA, 96 bp, Aspergillus fumigatus
  misc_feature: 134
tctatctctctaccttattatctaccttctatcggaacttcctatgggccttctacctacctctatctactattctacctattctacctatcttaa

SEQ ID NO: 26456 - DNA, 96 bp, Aspergillus fumigatus
  misc_feature: 134
tatcccctattagactatctataatgctaaagatatagcctaactatatatctattatatatagaagctatatagcctactaagaataatagtatt

SEQ ID NO: 26457 - DNA, 96 bp, Aspergillus fumigatus
  misc_feature: 134
aaactaagggctatagtctaatactattattcttagtaggctatatagcttctatatataatagatatataatcaggctatacctttagcattata

SEQ ID NO: 26458 - DNA, 96 bp, Aspergillus fumigatus
  misc_feature: 134
tataatactagggctattatagtactatataataagatagagataataataagctttatatctaaggataatataggtagggttatttatactcta

SEQ ID NO: 26459 - DNA, 96 bp, Aspergillus fumigatus
  misc_feature: 134
actagggctattatagtactatataataagatagagataataataagctttatatctaaggataatataggtagggttatttatactctataatta

SEQ ID NO: 26460 - DNA, 96 bp, Aspergillus fumigatus
  misc_feature: 134
atcccctattagactatctataatgctaaagatatagcctaactatatatctattatatatagaagctatatagcctactaagaataatagtatta

SEQ ID NO: 26461 - DNA, 96 bp, Aspergillus fumigatus
  misc_feature: 134
taaactaagggctatagtctaatactattattcttagtaggctatatagcttctatatataatagatatataatcaggctatacctttagcattat

SEQ ID NO: 26462 - DNA, 96 bp, Aspergillus fumigatus
  misc_feature: 134
aagtataatactagggctattatagtactatataataagatagagataataataagctttatatctaaggataatataggtagggttatttatact

SEQ ID NO: 26463 - DNA, 96 bp, Aspergillus fumigatus
  misc_feature: 133
ataagaagaaaaagaaggagaaaaagaaggagaaaaagaaggagaaaaagaaggagaaaaagaaggagaaaaagaaggagaaaaagaaggagaaaa

SEQ ID NO: 26464 - DNA, 96 bp, Aspergillus fumigatus
  misc_feature: 133
tggatgatcgaccggctgcgggctgagccggctatgcaggcaggccatgcagggaagccagaccgcgcagggaagccaggccatgcagggaagcca

SEQ ID NO: 26465 - DNA, 96 bp, Aspergillus fumigatus
  misc_feature: 133
tctctctaccttattatctaccttctatcggaacttcctatgggccttctacctacctctatctactattctacctattctacctatcttaatcct

SEQ ID NO: 26466 - DNA, 96 bp, Aspergillus fumigatus
  misc_feature: 133
ggtagggaaagaggtatttaggaaggtaggaagtaaggtagtaagtaggttataagaaaggttgcaatgccccagagaggttatatataagataga

SEQ ID NO: 26467 - DNA, 96 bp, Aspergillus fumigatus
  misc_feature: 133
tatatagcttctatatataatagatatatagttaggctatatctttagcattatagatagtctaataggggataaagtaccttgtctttataagtt

SEQ ID NO: 26468 - DNA, 96 bp, Aspergillus fumigatus
  misc_feature: 133
tataacctacttactacctcacttactaccttgctacctaccttgctacctaccttgctaccttacttactacctaactatctacctcactgcctg

SEQ ID NO: 26469 - DNA, 96 bp, Aspergillus fumigatus
  misc_feature: 133
atctatctctctaccttattatctaccttctatcggaacttcctatgggccttctacctacctctatctactattctacctattctacctatctta

SEQ ID NO: 26470 - DNA, 96 bp, Aspergillus fumigatus
  misc_feature: 133
actggatgatcgaccggctgcgggctgagccggctatgcaggcaggccatgcagggaagccagaccgcgcagggaagccaggccatgcagggaagc

SEQ ID NO: 26471 - DNA, 96 bp, Aspergillus fumigatus
  misc_feature: 133
agggaaagaggtatttaggaaggtaggaagtaaggtagtaagtaggttataagaaaggttgcaatgccccagagaggttatatataagatagagag

SEQ ID NO: 26472 - DNA, 96 bp, Aspergillus fumigatus
  misc_feature: 133
atactagggctattatagtactatataataagatagagataataataagctttatatctaaggataatataggtagggttatttatactctataat

SEQ ID NO: 26473 - DNA, 96 bp, Aspergillus fumigatus
  misc_feature: 132
ttcttatcttccttcttccctttccaatcttatttattctctctttacttacttaaactctctttatcttatatatctcttcgtcctattctgatc

SEQ ID NO: 26474 - DNA, 96 bp, Aspergillus fumigatus
  misc_feature: 132
ttctccttctttttctccttctttttctccttctttttctccttctttttctccttctttttctccttctttttctccttctttttcttcttatct

SEQ ID NO: 26475 - DNA, 96 bp, Aspergillus fumigatus
  misc_feature: 132
ccactggatgatcgaccggctgcgggctgagccggctatgcaggcaggccatgcagggaagccagaccgcgcagggaagccaggccatgcagggaa

SEQ ID NO: 26476 - DNA, 96 bp, Aspergillus fumigatus
  misc_feature: 132
ttactaccttacttcctaccttcctaaatacctctttccctacctcacttactaccttactaccttgctcactaccttacttactacctcactatc

SEQ ID NO: 26477 - DNA, 96 bp, Aspergillus fumigatus
  misc_feature: 132
tactttatcccctattagactatctataatgctaaagatatagcctaactatatatctattatatatagaagctatatagcctactaagaataata

SEQ ID NO: 26478 - DNA, 96 bp, Aspergillus fumigatus
  misc_feature: 132
acttactaccttacttcctaccttcctaaatacctctttccctacctcacttactaccttactaccttgctcactaccttacttactacctcacta

SEQ ID NO: 26479 - DNA, 96 bp, Aspergillus fumigatus
  misc_feature: 132
tactaccttacttcctaccttcctaaatacctctttccctacctcacttactaccttactaccttgctcactaccttacttactacctcactatct

SEQ ID NO: 26480 - DNA, 96 bp, Aspergillus fumigatus
  misc_feature: 132
gtagggaaagaggtatttaggaaggtaggaagtaaggtagtaagtaggttataagaaaggttgcaatgccccagagaggttatatataagatagag

SEQ ID NO: 26481 - DNA, 96 bp, Aspergillus fumigatus
  misc_feature: 132
gggaaagaggtatttaggaaggtaggaagtaaggtagtaagtaggttataagaaaggttgcaatgccccagagaggttatatataagatagagagt

SEQ ID NO: 26482 - DNA, 96 bp, Aspergillus fumigatus
  misc_feature: 132
ggatgatcgaccggctgcgggctgagccggctatgcaggcaggccatgcagggaagccagaccgcgcagggaagccaggccatgcagggaagccag

SEQ ID NO: 26483 - DNA, 96 bp, Aspergillus fumigatus
  misc_feature: 132
gacccactggatgatcgaccggctgcgggctgagccggctatgcaggcaggccatgcagggaagccagaccgcgcagggaagccaggccatgcagg

SEQ ID NO: 26484 - DNA, 96 bp, Aspergillus fumigatus
  misc_feature: 132
ctccttctttttctccttctttttctccttctttttctccttctttttctccttctttttctccttctttttctccttctttttcttcttatcttc

SEQ ID NO: 26485 - DNA, 96 bp, Aspergillus fumigatus
  misc_feature: 132
aactaagggctatagtctaatactattattcttagtaggctatatagcttctatatataatagatatataatcaggctatacctttagcattatag

SEQ ID NO: 26486 - DNA, 96 bp, Aspergillus fumigatus
  misc_feature: 132
acccactggatgatcgaccggctgcgggctgagccggctatgcaggcaggccatgcagggaagccagaccgcgcagggaagccaggccatgcaggg

SEQ ID NO: 26487 - DNA, 96 bp, Aspergillus fumigatus
  misc_feature: 132
acagcaggttgaatagtaggttaaatagtaggttgaacagcaggtcaaacagcaggtcgaacagcaggttgaacagcaggcagaatggcaggcagt

SEQ ID NO: 26488 - DNA, 96 bp, Aspergillus fumigatus
  misc_feature: 131
taagaagaaaaagaaggagaaaaagaaggagaaaaagaaggagaaaaagaaggagaaaaagaaggagaaaaagaaggagaaaaagaaggagaaaaa

SEQ ID NO: 26489 - DNA, 96 bp, Aspergillus fumigatus
  misc_feature: 131
ttccttataacctacttactacctcacttactaccttgctacctaccttgctacctaccttgctaccttacttactacctaactatctacctcact

SEQ ID NO: 26490 - DNA, 96 bp, Aspergillus fumigatus
  misc_feature: 131
ggtactttatcccctattagactatctataatgctaaagatatagcctaactatatatctattatatatagaagctatatagcctactaagaataa

SEQ ID NO: 26491 - DNA, 96 bp, Aspergillus fumigatus
  misc_feature: 131
ttatcccctattagactatctataatgctaaagatatagcctaactatatatctattatatatagaagctatatagcctactaagaataatagtat

SEQ ID NO: 26492 - DNA, 96 bp, Aspergillus fumigatus
  misc_feature: 131
ttataacctacttactacctcacttactaccttgctacctaccttgctacctaccttgctaccttacttactacctaactatctacctcactgcct

SEQ ID NO: 26493 - DNA, 96 bp, Aspergillus fumigatus
  misc_feature: 131
tgatcgaccggctgcgggctgagccggctatgcaggcaggccatgcagggaagccagaccgcgcagggaagccaggccatgcagggaagccagacc

SEQ ID NO: 26494 - DNA, 96 bp, Aspergillus fumigatus
  misc_feature: 131
tctctggggcattataaccttccttataacctacttactacctcacttactaccttgctacctaccttgctacctaccttgctaccttacttacta

SEQ ID NO: 26495 - DNA, 96 bp, Aspergillus fumigatus
  misc_feature: 131
tccttctttttctccttctttttctccttctttttctccttctttttctccttctttttctccttctttttctccttctttttcttcttatcttcc

SEQ ID NO: 26496 - DNA, 96 bp, Aspergillus fumigatus
  misc_feature: 131
tcccctattagactatctataatgctaaagatatagcctaactatatatctattatatatagaagctatatagcctactaagaataatagtattag

SEQ ID NO: 26497 - DNA, 96 bp, Aspergillus fumigatus
  misc_feature: 131
aggtactttatcccctattagactatctataatgctaaagatatagcctaactatatatctattatatatagaagctatatagcctactaagaata

SEQ ID NO: 26498 - DNA, 96 bp, Aspergillus fumigatus
  misc_feature: 131
tatctctctaccttattatctaccttctatcggaacttcctatgggccttctacctacctctatctactattctacctattctacctatcttaatc

SEQ ID NO: 26499 - DNA, 96 bp, Aspergillus fumigatus
  misc_feature: 131
aagacaaggtactttatcccctattagactatctataatgctaaagatatagcctaactatatatctattatatatagaagctatatagcctacta

SEQ ID NO: 26500 - DNA, 96 bp, Aspergillus fumigatus
  misc_feature: 131
taacctacttactacctcacttactaccttgctacctaccttgctacctaccttgctaccttacttactacctaactatctacctcactgcctgtc

SEQ ID NO: 26501 - DNA, 96 bp, Aspergillus fumigatus
  misc_feature: 131
gttaaacagcaggttgaatagtaggttaaatagtaggttgaacagcaggtcaaacagcaggtcgaacagcaggttgaacagcaggcagaatggcag

SEQ ID NO: 26502 - DNA, 96 bp, Aspergillus fumigatus
  misc_feature: 131
cttataacctacttactacctcacttactaccttgctacctaccttgctacctaccttgctaccttacttactacctaactatctacctcactgcc

SEQ ID NO: 26503 - DNA, 96 bp, Aspergillus fumigatus
  misc_feature: 131
ctttatcccctattagactatctataatgctaaagatatagcctaactatatatctattatatatagaagctatatagcctactaagaataatagt

SEQ ID NO: 26504 - DNA, 96 bp, Aspergillus fumigatus
  misc_feature: 131
cttcttatcttccttcttccctttccaatcttatttattctctctttacttacttaaactctctttatcttatatatctcttcgtcctattctgat

SEQ ID NO: 26505 - DNA, 96 bp, Aspergillus fumigatus
  misc_feature: 131
cactggatgatcgaccggctgcgggctgagccggctatgcaggcaggccatgcagggaagccagaccgcgcagggaagccaggccatgcagggaag

SEQ ID NO: 26506 - DNA, 96 bp, Aspergillus fumigatus
  misc_feature: 131
cttactaccttacttcctaccttcctaaatacctctttccctacctcacttactaccttactaccttgctcactaccttacttactacctcactat

SEQ ID NO: 26507 - DNA, 96 bp, Aspergillus fumigatus
  misc_feature: 131
actttatcccctattagactatctataatgctaaagatatagcctaactatatatctattatatatagaagctatatagcctactaagaataatag

SEQ ID NO: 26508 - DNA, 96 bp, Aspergillus fumigatus
  misc_feature: 131
ctatatagcttctatatataatagatatatagttaggctatatctttagcattatagatagtctaataggggataaagtaccttgtctttataagt

SEQ ID NO: 26509 - DNA, 96 bp, Aspergillus fumigatus
  misc_feature: 131
ccttctttttctccttctttttctccttctttttctccttctttttctccttctttttctccttctttttctccttctttttcttcttatcttcct

SEQ ID NO: 26510 - DNA, 96 bp, Aspergillus fumigatus
  misc_feature: 130
tctggggcattataaccttccttataacctacttactacctcacttactaccttgctacctaccttgctacctaccttgctaccttacttactacc

SEQ ID NO: 26511 - DNA, 96 bp, Aspergillus fumigatus
  misc_feature: 130
cccctattagactatctataatgctaaagatatagcctaactatatatctattatatatagaagctatatagcctactaagaataatagtattaga

SEQ ID NO: 26512 - DNA, 96 bp, Aspergillus fumigatus
  misc_feature: 130
tccttataacctacttactacctcacttactaccttgctacctaccttgctacctaccttgctaccttacttactacctaactatctacctcactg

SEQ ID NO: 26513 - DNA, 96 bp, Aspergillus fumigatus
  misc_feature: 130
aactattaataaagtaaactaataagctaaataatctaagatctaacttctaaaactctagtataaacttactaccttagagtagaggtataaata

SEQ ID NO: 26514 - DNA, 96 bp, Aspergillus fumigatus
  misc_feature: 130
tatctataatgctaaagatatagcctaactatatatctattatatatagaagctatatagcctactaagaataatagtattagactatagccctta

SEQ ID NO: 26515 - DNA, 96 bp, Aspergillus fumigatus
  misc_feature: 130
ctaagtataatactagggctattatagtactatataataagatagagataataataagctttatatctaaggataatataggtagggttatttata

SEQ ID NO: 26516 - DNA, 96 bp, Aspergillus fumigatus
  misc_feature: 130
taggctatatagcttctatatataatagatatatagttaggctatatctttagcattatagatagtctaataggggataaagtaccttgtctttat

SEQ ID NO: 26517 - DNA, 96 bp, Aspergillus fumigatus
  misc_feature: 130
taccttacttcctaccttcctaaatacctctttccctacctcacttactaccttactaccttgctcactaccttacttactacctcactatctatc

SEQ ID NO: 26518 - DNA, 96 bp, Aspergillus fumigatus
  misc_feature: 130
taagtataatactagggctattatagtactatataataagatagagataataataagctttatatctaaggataatataggtagggttatttatac

SEQ ID NO: 26519 - DNA, 96 bp, Aspergillus fumigatus
  misc_feature: 130
atatagcttctatatataatagatatatagttaggctatatctttagcattatagatagtctaataggggataaagtaccttgtctttataagtta

SEQ ID NO: 26520 - DNA, 96 bp, Aspergillus fumigatus
  misc_feature: 130
atgatcgaccggctgcgggctgagccggctatgcaggcaggccatgcagggaagccagaccgcgcagggaagccaggccatgcagggaagccagac

SEQ ID NO: 26521 - DNA, 96 bp, Aspergillus fumigatus
  misc_feature: 130
ccctattagactatctataatgctaaagatatagcctaactatatatctattatatatagaagctatatagcctactaagaataatagtattagac

SEQ ID NO: 26522 - DNA, 96 bp, Aspergillus fumigatus
  misc_feature: 130
ctctggggcattataaccttccttataacctacttactacctcacttactaccttgctacctaccttgctacctaccttgctaccttacttactac

SEQ ID NO: 26523 - DNA, 96 bp, Aspergillus fumigatus
  misc_feature: 130
gtactttatcccctattagactatctataatgctaaagatatagcctaactatatatctattatatatagaagctatatagcctactaagaataat

SEQ ID NO: 26524 - DNA, 96 bp, Aspergillus fumigatus
  misc_feature: 130
gctatatagcttctatatataatagatatatagttaggctatatctttagcattatagatagtctaataggggataaagtaccttgtctttataag

SEQ ID NO: 26525 - DNA, 96 bp, Aspergillus fumigatus
  misc_feature: 130
ccttataacctacttactacctcacttactaccttgctacctaccttgctacctaccttgctaccttacttactacctaactatctacctcactgc

SEQ ID NO: 26526 - DNA, 96 bp, Aspergillus fumigatus
  misc_feature: 130
ctctctggggcattataaccttccttataacctacttactacctcacttactaccttgctacctaccttgctacctaccttgctaccttacttact

SEQ ID NO: 26527 - DNA, 96 bp, Aspergillus fumigatus
  misc_feature: 130
ctatctctctaccttattatctaccttctatcggaacttcctatgggccttctacctacctctatctactattctacctattctacctatcttaat

SEQ ID NO: 26528 - DNA, 96 bp, Aspergillus fumigatus
  misc_feature: 130
atctataatgctaaagatatagcctaactatatatctattatatatagaagctatatagcctactaagaataatagtattagactatagcccttag

SEQ ID NO: 26529 - DNA, 96 bp, Aspergillus fumigatus
  misc_feature: 130
aaggtactttatcccctattagactatctataatgctaaagatatagcctaactatatatctattatatatagaagctatatagcctactaagaat

SEQ ID NO: 26530 - DNA, 96 bp, Aspergillus fumigatus
  misc_feature: 130
accttacttcctaccttcctaaatacctctttccctacctcacttactaccttactaccttgctcactaccttacttactacctcactatctatct

SEQ ID NO: 26531 - DNA, 96 bp, Aspergillus fumigatus
  misc_feature: 130
aataaactaagggctatagtctaatactattattcttagtaggctatatagcttctatatataatagatatataatcaggctatacctttagcatt

SEQ ID NO: 26532 - DNA, 96 bp, Aspergillus fumigatus
  misc_feature: 129
tttatcccctattagactatctataatgctaaagatatagcctaactatatatctattatatatagaagctatatagcctactaagaataatagta

SEQ ID NO: 26533 - DNA, 96 bp, Aspergillus fumigatus
  misc_feature: 129
gaactactagccagaacacaataatcagactagggtcaaaacacctagtgatatctgcctgagctagggctcccttgcaaaccctagtagggagaa

SEQ ID NO: 26534 - DNA, 96 bp, Aspergillus fumigatus
  misc_feature: 129
ttaaacagcaggttgaatagtaggttaaatagtaggttgaacagcaggtcaaacagcaggtcgaacagcaggttgaacagcaggcagaatggcagg

SEQ ID NO: 26535 - DNA, 96 bp, Aspergillus fumigatus
  misc_feature: 129
aaacagcaggttaaacagcaggttgaatagtaggttaaatagtaggttgaacagcaggtcaaacagcaggtcgaacagcaggttgaacagcaggca

SEQ ID NO: 26536 - DNA, 96 bp, Aspergillus fumigatus
  misc_feature: 129
tgcctgctgtgctgcctgctgtgctgcctgctgttctgcctatcttatatataacctctctggggccttataacctgcttcactaccgtacttact

SEQ ID NO: 26537 - DNA, 96 bp, Aspergillus fumigatus
  misc_feature: 129
ggttaaacagcaggttgaatagtaggttaaatagtaggttgaacagcaggtcaaacagcaggtcgaacagcaggttgaacagcaggcagaatggca

SEQ ID NO: 26538 - DNA, 96 bp, Aspergillus fumigatus
  misc_feature: 129
tccttcttatcttccttcttccctttccaatcttatttattctctctttacttacttaaactctctttatcttatatatctcttcgtcctattctg

SEQ ID NO: 26539 - DNA, 96 bp, Aspergillus fumigatus
  misc_feature: 129
actaccttacttcctaccttcctaaatacctctttccctacctcacttactaccttactaccttgctcactaccttacttactacctcactatcta

SEQ ID NO: 26540 - DNA, 96 bp, Aspergillus fumigatus
  misc_feature: 129
taataaactaagggctatagtctaatactattattcttagtaggctatatagcttctatatataatagatatataatcaggctatacctttagcat

SEQ ID NO: 26541 - DNA, 96 bp, Aspergillus fumigatus
  misc_feature: 129
gtaggctatatagcttctatatataatagatatatagttaggctatatctttagcattatagatagtctaataggggataaagtaccttgtcttta

SEQ ID NO: 26542 - DNA, 96 bp, Aspergillus fumigatus
  misc_feature: 129
taaacagcaggttaaacagcaggttgaatagtaggttaaatagtaggttgaacagcaggtcaaacagcaggtcgaacagcaggttgaacagcaggc

SEQ ID NO: 26543 - DNA, 96 bp, Aspergillus fumigatus
  misc_feature: 129
ggttaaataggaggttaaataggaggttaaataggaggttaaataggaggttaaatagcaggtagaataggcagaagagcaggttaaatagtagat

SEQ ID NO: 26544 - DNA, 96 bp, Aspergillus fumigatus
  misc_feature: 129
atctctctaccttattatctaccttctatcggaacttcctatgggccttctacctacctctatctactattctacctattctacctatcttaatcc

SEQ ID NO: 26545 - DNA, 96 bp, Aspergillus fumigatus
  misc_feature: 129
ggacccactggatgatcgaccggctgcgggctgagccggctatgcaggcaggccatgcagggaagccagaccgcgcagggaagccaggccatgcag

SEQ ID NO: 26546 - DNA, 96 bp, Aspergillus fumigatus
  misc_feature: 129
ctaccttacttcctaccttcctaaatacctctttccctacctcacttactaccttactaccttgctcactaccttacttactacctcactatctat

SEQ ID NO: 26547 - DNA, 96 bp, Aspergillus fumigatus
  misc_feature: 129
attactaagtataatactagggctattatagtactatataataagatagagataataataagctttatatctaaggataatataggtagggttatt

SEQ ID NO: 26548 - DNA, 96 bp, Aspergillus fumigatus
  misc_feature: 129
ataacctacttactacctcacttactaccttgctacctaccttgctacctaccttgctaccttacttactacctaactatctacctcactgcctgt

SEQ ID NO: 26549 - DNA, 96 bp, Aspergillus fumigatus
  misc_feature: 129
aaagacaaggtactttatcccctattagactatctataatgctaaagatatagcctaactatatatctattatatatagaagctatatagcctact

SEQ ID NO: 26550 - DNA, 96 bp, Aspergillus fumigatus
  misc_feature: 128
ggctatatagcttctatatataatagatatatagttaggctatatctttagcattatagatagtctaataggggataaagtaccttgtctttataa

SEQ ID NO: 26551 - DNA, 96 bp, Aspergillus fumigatus
  misc_feature: 128
ttactaagtataatactagggctattatagtactatataataagatagagataataataagctttatatctaaggataatataggtagggttattt

SEQ ID NO: 26552 - DNA, 96 bp, Aspergillus fumigatus
  misc_feature: 128
gttgaatagtaggttaaatagtaggttgaacagcaggtcaaacagcaggtcgaacagcaggttgaacagcaggcagaatggcaggcagtgaggtaa

SEQ ID NO: 26553 - DNA, 96 bp, Aspergillus fumigatus
  misc_feature: 128
ttaattactaagtataatactagggctattatagtactatataataagatagagataataataagctttatatctaaggataatataggtagggtt

SEQ ID NO: 26554 - DNA, 96 bp, Aspergillus fumigatus
  misc_feature: 128
tggggcattataaccttccttataacctacttactacctcacttactaccttgctacctaccttgctacctaccttgctaccttacttactaccta

SEQ ID NO: 26555 - DNA, 96 bp, Aspergillus fumigatus
  misc_feature: 128
gtaataaactaagggctatagtctaatactattattcttagtaggctatatagcttctatatataatagatatataatcaggctatacctttagca

SEQ ID NO: 26556 - DNA, 96 bp, Aspergillus fumigatus
  misc_feature: 128
gatgatcgaccggctgcgggctgagccggctatgcaggcaggccatgcagggaagccagaccgcgcagggaagccaggccatgcagggaagccaga

SEQ ID NO: 26557 - DNA, 96 bp, Aspergillus fumigatus
  misc_feature: 128
ccttcttatcttccttcttccctttccaatcttatttattctctctttacttacttaaactctctttatcttatatatctcttcgtcctattctga

SEQ ID NO: 26558 - DNA, 96 bp, Aspergillus fumigatus
  misc_feature: 128
agcaggttgaatagtaggttaaatagtaggttgaacagcaggtcaaacagcaggtcgaacagcaggttgaacagcaggcagaatggcaggcagtga

SEQ ID NO: 26559 - DNA, 96 bp, Aspergillus fumigatus
  misc_feature: 128
gcctgctgtgctgcctgctgtgctgcctgctgttctgcctatcttatatataacctctctggggccttataacctgcttcactaccgtacttacta

SEQ ID NO: 26560 - DNA, 96 bp, Aspergillus fumigatus
  misc_feature: 128
tactaagtataatactagggctattatagtactatataataagatagagataataataagctttatatctaaggataatataggtagggttattta

SEQ ID NO: 26561 - DNA, 96 bp, Aspergillus fumigatus
  misc_feature: 128
ggttgaatagtaggttaaatagtaggttgaacagcaggtcaaacagcaggtcgaacagcaggttgaacagcaggcagaatggcaggcagtgaggta

SEQ ID NO: 26562 - DNA, 96 bp, Aspergillus fumigatus
  misc_feature: 128
taactattaataaagtaaactaataagctaaataatctaagatctaacttctaaaactctagtataaacttactaccttagagtagaggtataaat

SEQ ID NO: 26563 - DNA, 96 bp, Aspergillus fumigatus
  misc_feature: 128
cttccttataacctacttactacctcacttactaccttgctacctaccttgctacctaccttgctaccttacttactacctaactatctacctcac

SEQ ID NO: 26564 - DNA, 96 bp, Aspergillus fumigatus
  misc_feature: 128
aggttaaacagcaggttgaatagtaggttaaatagtaggttgaacagcaggtcaaacagcaggtcgaacagcaggttgaacagcaggcagaatggc

SEQ ID NO: 26565 - DNA, 96 bp, Aspergillus fumigatus
  misc_feature: 128
gcaggttgaatagtaggttaaatagtaggttgaacagcaggtcaaacagcaggtcgaacagcaggttgaacagcaggcagaatggcaggcagtgag

SEQ ID NO: 26566 - DNA, 96 bp, Aspergillus fumigatus
  misc_feature: 128
gatcgaccggctgcgggctgagccggctatgcaggcaggccatgcagggaagccagaccgcgcagggaagccaggccatgcagggaagccagaccg

SEQ ID NO: 26567 - DNA, 96 bp, Aspergillus fumigatus
  misc_feature: 128
ctggggcattataaccttccttataacctacttactacctcacttactaccttgctacctaccttgctacctaccttgctaccttacttactacct

SEQ ID NO: 26568 - DNA, 96 bp, Aspergillus fumigatus
  misc_feature: 128
actaagggctatagtctaatactattattcttagtaggctatatagcttctatatataatagatatataatcaggctatacctttagcattatagg

SEQ ID NO: 26569 - DNA, 96 bp, Aspergillus fumigatus
  misc_feature: 128
cagcaggttgaatagtaggttaaatagtaggttgaacagcaggtcaaacagcaggtcgaacagcaggttgaacagcaggcagaatggcaggcagtg

SEQ ID NO: 26570 - DNA, 96 bp, Aspergillus fumigatus
  misc_feature: 128
aattactaagtataatactagggctattatagtactatataataagatagagataataataagctttatatctaaggataatataggtagggttat

SEQ ID NO: 26571 - DNA, 96 bp, Aspergillus fumigatus
  misc_feature: 128
actaagtataatactagggctattatagtactatataataagatagagataataataagctttatatctaaggataatataggtagggttatttat

SEQ ID NO: 26572 - DNA, 96 bp, Aspergillus fumigatus
  misc_feature: 127
ttaactattaataaagtaaactaataagctaaataatctaagatctaacttctaaaactctagtataaacttactaccttagagtagaggtataaa

SEQ ID NO: 26573 - DNA, 96 bp, Aspergillus fumigatus
  misc_feature: 127
ttgaatagtaggttaaatagtaggttgaacagcaggtcaaacagcaggtcgaacagcaggttgaacagcaggcagaatggcaggcagtgaggtaaa

SEQ ID NO: 26574 - DNA, 96 bp, Aspergillus fumigatus
  misc_feature: 127
gaatactactagcctaatatatactaatatatactaatatattaattactagacctaaaactactatacctactactgatctaccctgtcctataa

SEQ ID NO: 26575 - DNA, 96 bp, Aspergillus fumigatus
  misc_feature: 127
ggggcattataaccttccttataacctacttactacctcacttactaccttgctacctaccttgctacctaccttgctaccttacttactacctaa

SEQ ID NO: 26576 - DNA, 96 bp, Aspergillus fumigatus
  misc_feature: 127
agaatactactagcctaatatatactaatatatactaatatattaattactagacctaaaactactatacctactactgatctaccctgtcctata

SEQ ID NO: 26577 - DNA, 96 bp, Aspergillus fumigatus
  misc_feature: 127
aggctatatagcttctatatataatagatatatagttaggctatatctttagcattatagatagtctaataggggataaagtaccttgtctttata

SEQ ID NO: 26578 - DNA, 96 bp, Aspergillus fumigatus
  misc_feature: 127
ctattagactatctataatgctaaagatatagcctaactatatatctattatatatagaagctatatagcctactaagaataatagtattagacta

SEQ ID NO: 26579 - DNA, 96 bp, Aspergillus fumigatus
  misc_feature: 127
gggcattataaccttccttataacctacttactacctcacttactaccttgctacctaccttgctacctaccttgctaccttacttactacctaac

SEQ ID NO: 26580 - DNA, 96 bp, Aspergillus fumigatus
  misc_feature: 127
ggcattataaccttccttataacctacttactacctcacttactaccttgctacctaccttgctacctaccttgctaccttacttactacctaact

SEQ ID NO: 26581 - DNA, 96 bp, Aspergillus fumigatus
  misc_feature: 127
ctagaatatagtaataaactaagggctatagtctaatactattattcttagtaggctatatagcttctatatataatagatatataatcaggctat

SEQ ID NO: 26582 - DNA, 96 bp, Aspergillus fumigatus
  misc_feature: 127
caggttgaatagtaggttaaatagtaggttgaacagcaggtcaaacagcaggtcgaacagcaggttgaacagcaggcagaatggcaggcagtgagg

SEQ ID NO: 26583 - DNA, 96 bp, Aspergillus fumigatus
  misc_feature: 127
cctattagactatctataatgctaaagatatagcctaactatatatctattatatatagaagctatatagcctactaagaataatagtattagact

SEQ ID NO: 26584 - DNA, 96 bp, Aspergillus fumigatus
  misc_feature: 127
agttaatttagccttctagatatacttatatactaggtagtagtatttatactatttagtactatagctagtaatatacttagagaactctttagg

SEQ ID NO: 26585 - DNA, 96 bp, Aspergillus fumigatus
  misc_feature: 127
atagtaggttaaatagtaggttgaacagcaggtcaaacagcaggtcgaacagcaggttgaacagcaggcagaatggcaggcagtgaggtaaatagt

SEQ ID NO: 26586 - DNA, 96 bp, Aspergillus fumigatus
  misc_feature: 126
taaaaataaaaataaaaataaaaataaaaataaaaataaaaataaaaataaaaataaaaataaaaataaaaataaaaataaaaataaaaataaaaa

SEQ ID NO: 26587 - DNA, 96 bp, Aspergillus fumigatus
  misc_feature: 126
tttaattactaagtataatactagggctattatagtactatataataagatagagataataataagctttatatctaaggataatataggtagggt

SEQ ID NO: 26588 - DNA, 96 bp, Aspergillus fumigatus
  misc_feature: 126
attaactattaataaagtaaactaataagctaaataatctaagatctaacttctaaaactctagtataaacttactaccttagagtagaggtataa

SEQ ID NO: 26589 - DNA, 96 bp, Aspergillus fumigatus
  misc_feature: 126
tagaattttaatttaactaataagaatatatatacagaacatattttaaaatatagaatatagggaatagagataaagataaagatctccttataa

SEQ ID NO: 26590 - DNA, 96 bp, Aspergillus fumigatus
  misc_feature: 126
tatagcttctatatataatagatatatagttaggctatatctttagcattatagatagtctaataggggataaagtaccttgtctttataagttaa

SEQ ID NO: 26591 - DNA, 96 bp, Aspergillus fumigatus
  misc_feature: 126
tgaatagtaggttaaatagtaggttgaacagcaggtcaaacagcaggtcgaacagcaggttgaacagcaggcagaatggcaggcagtgaggtaaat

SEQ ID NO: 26592 - DNA, 96 bp, Aspergillus fumigatus
  misc_feature: 126
aggctaaattaactattaataaagtaaactaataagctaaataatctaagatctaacttctaaaactctagtataaacttactaccttagagtaga

SEQ ID NO: 26593 - DNA, 96 bp, Aspergillus fumigatus
  misc_feature: 126
aggttaaataggaggttaaataggaggttaaataggaggttaaataggaggttaaatagcaggtagaataggcagaagagcaggttaaatagtaga

SEQ ID NO: 26594 - DNA, 96 bp, Aspergillus fumigatus
  misc_feature: 126
ggatttcctctttaaacttattctattttagattttctttcctttaattagaattattagatttatctcctatattctttataagaaaggctagga

SEQ ID NO: 26595 - DNA, 96 bp, Aspergillus fumigatus
  misc_feature: 126
attagactatctataatgctaaagatatagcctaactatatatctattatatatagaagctatatagcctactaagaataatagtattagactata

SEQ ID NO: 26596 - DNA, 96 bp, Aspergillus fumigatus
  misc_feature: 126
aattaactattaataaagtaaactaataagctaaataatctaagatctaacttctaaaactctagtataaacttactaccttagagtagaggtata

SEQ ID NO: 26597 - DNA, 96 bp, Aspergillus fumigatus
  misc_feature: 126
tagttaatttagccttctagatatacttatatactaggtagtagtatttatactatttagtactatagctagtaatatacttagagaactctttag

SEQ ID NO: 26598 - DNA, 96 bp, Aspergillus fumigatus
  misc_feature: 126
tagtggatttcctctttaaacttattctattttagattttctttcctttaattagaattattagatttatctcctatattctttataagaaaggct

SEQ ID NO: 26599 - DNA, 96 bp, Aspergillus fumigatus
  misc_feature: 126
tagtaggttaaatagtaggttgaacagcaggtcaaacagcaggtcgaacagcaggttgaacagcaggcagaatggcaggcagtgaggtaaatagta

SEQ ID NO: 26600 - DNA, 96 bp, Aspergillus fumigatus
  misc_feature: 126
agttagaattttaatttaactaataagaatatatatacagaacatattttaaaatatagaatatagggaatagagataaagataaagatctcctta

SEQ ID NO: 26601 - DNA, 96 bp, Aspergillus fumigatus
  misc_feature: 126
ctgcctgctgtgctgcctgctgtgctgcctgctgttctgcctatcttatatataacctctctggggccttataacctgcttcactaccgtacttac

SEQ ID NO: 26602 - DNA, 96 bp, Aspergillus fumigatus
  misc_feature: 126
gcaggttaaacagcaggttgaatagtaggttaaatagtaggttgaacagcaggtcaaacagcaggtcgaacagcaggttgaacagcaggcagaatg

SEQ ID NO: 26603 - DNA, 96 bp, Aspergillus fumigatus
  misc_feature: 126
accttccttataacctacttactacctcacttactaccttgctacctaccttgctacctaccttgctaccttacttactacctaactatctacctc

SEQ ID NO: 26604 - DNA, 96 bp, Aspergillus fumigatus
  misc_feature: 126
atactactagcctaatatatactaatatatactaatatattaattactagacctaaaactactatacctactactgatctaccctgtcctataaag

SEQ ID NO: 26605 - DNA, 96 bp, Aspergillus fumigatus
  misc_feature: 126
atgcaggcaggccatgcagggaagccagaccgcgcagggaagccaggccatgcagggaagccagaccgcgcagggaagccaggccgcgcagggaag

SEQ ID NO: 26606 - DNA, 96 bp, Aspergillus fumigatus
  misc_feature: 126
ctatctataatgctaaagatatagcctaactatatatctattatatatagaagctatatagcctactaagaataatagtattagactatagccctt

SEQ ID NO: 26607 - DNA, 96 bp, Aspergillus fumigatus
  misc_feature: 126
ctaaattaactattaataaagtaaactaataagctaaataatctaagatctaacttctaaaactctagtataaacttactaccttagagtagaggt

SEQ ID NO: 26608 - DNA, 96 bp, Aspergillus fumigatus
  misc_feature: 126
ccttacttcctaccttcctaaatacctctttccctacctcacttactaccttactaccttgctcactaccttacttactacctcactatctatctt

SEQ ID NO: 26609 - DNA, 96 bp, Aspergillus fumigatus
  misc_feature: 126
actaggctaggtgatttgatatagctaggttgggtgatttgatatggctaggcttggtgatttagctgccagaggtgcctgcgcagggggtctagg

SEQ ID NO: 26610 - DNA, 96 bp, Aspergillus fumigatus
  misc_feature: 126
agcaggttaaacagcaggttgaatagtaggttaaatagtaggttgaacagcaggtcaaacagcaggtcgaacagcaggttgaacagcaggcagaat

SEQ ID NO: 26611 - DNA, 96 bp, Aspergillus fumigatus
  misc_feature: 126
aggttgaatagtaggttaaatagtaggttgaacagcaggtcaaacagcaggtcgaacagcaggttgaacagcaggcagaatggcaggcagtgaggt

SEQ ID NO: 26612 - DNA, 96 bp, Aspergillus fumigatus
  misc_feature: 126
actatctataatgctaaagatatagcctaactatatatctattatatatagaagctatatagcctactaagaataatagtattagactatagccct

SEQ ID NO: 26613 - DNA, 96 bp, Aspergillus fumigatus
  misc_feature: 125
gtaggttaaatagtaggttgaacagcaggtcaaacagcaggtcgaacagcaggttgaacagcaggcagaatggcaggcagtgaggtaaatagtaaa

SEQ ID NO: 26614 - DNA, 96 bp, Aspergillus fumigatus
  misc_feature: 125
tatgcaggcaggccatgcagggaagccagaccgcgcagggaagccaggccatgcagggaagccagaccgcgcagggaagccaggccgcgcagggaa

SEQ ID NO: 26615 - DNA, 96 bp, Aspergillus fumigatus
  misc_feature: 125
tggatttcctctttaaacttattctattttagattttctttcctttaattagaattattagatttatctcctatattctttataagaaaggctagg

SEQ ID NO: 26616 - DNA, 96 bp, Aspergillus fumigatus
  misc_feature: 125
acagcaggttaaacagcaggttgaatagtaggttaaatagtaggttgaacagcaggtcaaacagcaggtcgaacagcaggttgaacagcaggcaga

SEQ ID NO: 26617 - DNA, 96 bp, Aspergillus fumigatus
  misc_feature: 125
cgaactactagccagaacacaataatcagactagggtcaaaacacctagtgatatctgcctgagctagggctcccttgcaaaccctagtagggaga

SEQ ID NO: 26618 - DNA, 96 bp, Aspergillus fumigatus
  misc_feature: 125
tctaagtatattactagctatagtactaaataatataaatactactatctagtatataagtatatctagaaggctaaattaactattaataaagta

SEQ ID NO: 26619 - DNA, 96 bp, Aspergillus fumigatus
  misc_feature: 125
gaattttaatttaactaataagaatatatatacagaacatattttaaaatatagaatatagggaatagagataaagataaagatctccttataata

SEQ ID NO: 26620 - DNA, 96 bp, Aspergillus fumigatus
  misc_feature: 125
tattagactatctataatgctaaagatatagcctaactatatatctattatatatagaagctatatagcctactaagaataatagtattagactat

SEQ ID NO: 26621 - DNA, 96 bp, Aspergillus fumigatus
  misc_feature: 125
gttaaataggaggttaaataggaggttaaataggaggttaaataggaggttaaatagcaggtagaataggcagaagagcaggttaaatagtagata

SEQ ID NO: 26622 - DNA, 96 bp, Aspergillus fumigatus
  misc_feature: 125
tagttagaattttaatttaactaataagaatatatatacagaacatattttaaaatatagaatatagggaatagagataaagataaagatctcctt

SEQ ID NO: 26623 - DNA, 96 bp, Aspergillus fumigatus
  misc_feature: 125
taagaatactactagcctaatatatactaatatatactaatatattaattactagacctaaaactactatacctactactgatctaccctgtccta

SEQ ID NO: 26624 - DNA, 96 bp, Aspergillus fumigatus
  misc_feature: 125
agtggatttcctctttaaacttattctattttagattttctttcctttaattagaattattagatttatctcctatattctttataagaaaggcta

SEQ ID NO: 26625 - DNA, 96 bp, Aspergillus fumigatus
  misc_feature: 125
tagactatctataatgctaaagatatagcctaactatatatctattatatatagaagctatatagcctactaagaataatagtattagactatagc

SEQ ID NO: 26626 - DNA, 96 bp, Aspergillus fumigatus
  misc_feature: 125
taaattaactattaataaagtaaactaataagctaaataatctaagatctaacttctaaaactctagtataaacttactaccttagagtagaggta

SEQ ID NO: 26627 - DNA, 96 bp, Aspergillus fumigatus
  misc_feature: 125
taattactaagtataatactagggctattatagtactatataataagatagagataataataagctttatatctaaggataatataggtagggtta

SEQ ID NO: 26628 - DNA, 96 bp, Aspergillus fumigatus
  misc_feature: 125
taactctagggctaggcctaactatatattatactaatttataatatagaataggtactaatttaaaaatagtataatacttccttctatagaact

SEQ ID NO: 26629 - DNA, 96 bp, Aspergillus fumigatus
  misc_feature: 125
gttagaattttaatttaactaataagaatatatatacagaacatattttaaaatatagaatatagggaatagagataaagataaagatctccttat

SEQ ID NO: 26630 - DNA, 96 bp, Aspergillus fumigatus
  misc_feature: 125
agactatctataatgctaaagatatagcctaactatatatctattatatatagaagctatatagcctactaagaataatagtattagactatagcc

SEQ ID NO: 26631 - DNA, 96 bp, Aspergillus fumigatus
  misc_feature: 125
ggctaaattaactattaataaagtaaactaataagctaaataatctaagatctaacttctaaaactctagtataaacttactaccttagagtagag

SEQ ID NO: 26632 - DNA, 96 bp, Aspergillus fumigatus
  misc_feature: 125
aacagcaggttaaacagcaggttgaatagtaggttaaatagtaggttgaacagcaggtcaaacagcaggtcgaacagcaggttgaacagcaggcag

SEQ ID NO: 26633 - DNA, 96 bp, Aspergillus fumigatus
  misc_feature: 125
caggttaaacagcaggttgaatagtaggttaaatagtaggttgaacagcaggtcaaacagcaggtcgaacagcaggttgaacagcaggcagaatgg

SEQ ID NO: 26634 - DNA, 96 bp, Aspergillus fumigatus
  misc_feature: 125
aagaatactactagcctaatatatactaatatatactaatatattaattactagacctaaaactactatacctactactgatctaccctgtcctat

SEQ ID NO: 26635 - DNA, 96 bp, Aspergillus fumigatus
  misc_feature: 125
aaattaactattaataaagtaaactaataagctaaataatctaagatctaacttctaaaactctagtataaacttactaccttagagtagaggtat

SEQ ID NO: 26636 - DNA, 96 bp, Aspergillus fumigatus
  misc_feature: 124
aatactactagcctaatatatactaatatatactaatatattaattactagacctaaaactactatacctactactgatctaccctgtcctataaa

SEQ ID NO: 26637 - DNA, 96 bp, Aspergillus fumigatus
  misc_feature: 124
ttcttaactctagggctaggcctaactatatattatactaatttataatatagaataggtactaatttaaaaatagtataatacttccttctatag

SEQ ID NO: 26638 - DNA, 96 bp, Aspergillus fumigatus
  misc_feature: 124
cttaactctagggctaggcctaactatatattatactaatttataatatagaataggtactaatttaaaaatagtataatacttccttctatagaa

SEQ ID NO: 26639 - DNA, 96 bp, Aspergillus fumigatus
  misc_feature: 124
gatttcctctttaaacttattctattttagattttctttcctttaattagaattattagatttatctcctatattctttataagaaaggctaggaa

SEQ ID NO: 26640 - DNA, 96 bp, Aspergillus fumigatus
  misc_feature: 124
ttcagccaacatattcaaacttcatgtataatatatatctctgcgctatgataccatctaaaatatatatattcattcacctaatatattaatgct

SEQ ID NO: 26641 - DNA, 96 bp, Aspergillus fumigatus
  misc_feature: 124
agtaggttaaatagtaggttgaacagcaggtcaaacagcaggtcgaacagcaggttgaacagcaggcagaatggcaggcagtgaggtaaatagtaa

SEQ ID NO: 26642 - DNA, 96 bp, Aspergillus fumigatus
  misc_feature: 124
accctaaagagttctctaagtatattactagctatagtactaaataatataaatactactatctagtatataagtatatctagaaggctaaattaa

SEQ ID NO: 26643 - DNA, 96 bp, Aspergillus fumigatus
  misc_feature: 124
agagttctctaagtatattactagctatagtactaaataatataaatactactatctagtatataagtatatctagaaggctaaattaactattaa

SEQ ID NO: 26644 - DNA, 96 bp, Aspergillus fumigatus
  misc_feature: 124
ttaactctagggctaggcctaactatatattatactaatttataatatagaataggtactaatttaaaaatagtataatacttccttctatagaac

SEQ ID NO: 26645 - DNA, 96 bp, Aspergillus fumigatus
  misc_feature: 124
ttaaataggaggttaaataggaggttaaataggaggttaaataggaggttaaatagcaggtagaataggcagaagagcaggttaaatagtagatag

SEQ ID NO: 26646 - DNA, 96 bp, Aspergillus fumigatus
  misc_feature: 124
ccttccttataacctacttactacctcacttactaccttgctacctaccttgctacctaccttgctaccttacttactacctaactatctacctca

SEQ ID NO: 26647 - DNA, 96 bp, Aspergillus fumigatus
  misc_feature: 124
tctataatgctaaagatatagcctaactatatatctattatatatagaagctatatagcctactaagaataatagtattagactatagcccttagt

SEQ ID NO: 26648 - DNA, 96 bp, Aspergillus fumigatus
  misc_feature: 124
ctatgcaggcaggccatgcagggaagccagaccgcgcagggaagccaggccatgcagggaagccagaccgcgcagggaagccaggccgcgcaggga

SEQ ID NO: 26649 - DNA, 96 bp, Aspergillus fumigatus
  misc_feature: 124
tcagccaacatattcaaacttcatgtataatatatatctctgcgctatgataccatctaaaatatatatattcattcacctaatatattaatgctg

SEQ ID NO: 26650 - DNA, 96 bp, Aspergillus fumigatus
  misc_feature: 124
gaatagtaggttaaatagtaggttgaacagcaggtcaaacagcaggtcgaacagcaggttgaacagcaggcagaatggcaggcagtgaggtaaata

SEQ ID NO: 26651 - DNA, 96 bp, Aspergillus fumigatus
  misc_feature: 124
tagaatatagtaataaactaagggctatagtctaatactattattcttagtaggctatatagcttctatatataatagatatataatcaggctata

SEQ ID NO: 26652 - DNA, 96 bp, Aspergillus fumigatus
  misc_feature: 124
gcattataaccttccttataacctacttactacctcacttactaccttgctacctaccttgctacctaccttgctaccttacttactacctaacta

SEQ ID NO: 26653 - DNA, 96 bp, Aspergillus fumigatus
  misc_feature: 124
taggttaaatagtaggttgaacagcaggtcaaacagcaggtcgaacagcaggttgaacagcaggcagaatggcaggcagtgaggtaaatagtaaag

SEQ ID NO: 26654 - DNA, 96 bp, Aspergillus fumigatus
  misc_feature: 124
gctgcctgctgtgctgcctgctgtgctgcctgctgttctgcctatcttatatataacctctctggggccttataacctgcttcactaccgtactta

SEQ ID NO: 26655 - DNA, 96 bp, Aspergillus fumigatus
  misc_feature: 124
ctctagggctaggcctaactatatattatactaatttataatatagaataggtactaatttaaaaatagtataatacttccttctatagaacttac

SEQ ID NO: 26656 - DNA, 96 bp, Aspergillus fumigatus
  misc_feature: 124
cctctctggggcattataaccttccttataacctacttactacctcacttactaccttgctacctaccttgctacctaccttgctaccttacttac

SEQ ID NO: 26657 - DNA, 96 bp, Aspergillus fumigatus
  misc_feature: 124
ggctatgcaggcaggccatgcagggaagccagaccgcgcagggaagccaggccatgcagggaagccagaccgcgcagggaagccaggccgcgcagg

SEQ ID NO: 26658 - DNA, 96 bp, Aspergillus fumigatus
  misc_feature: 124
gctatgcaggcaggccatgcagggaagccagaccgcgcagggaagccaggccatgcagggaagccagaccgcgcagggaagccaggccgcgcaggg

SEQ ID NO: 26659 - DNA, 96 bp, Aspergillus fumigatus
  misc_feature: 124
atcgaccggctgcgggctgagccggctatgcaggcaggccatgcagggaagccagaccgcgcagggaagccaggccatgcagggaagccagaccgc

SEQ ID NO: 26660 - DNA, 96 bp, Aspergillus fumigatus
  misc_feature: 124
ccgaactactagccagaacacaataatcagactagggtcaaaacacctagtgatatctgcctgagctagggctcccttgcaaaccctagtagggag

SEQ ID NO: 26661 - DNA, 96 bp, Aspergillus fumigatus
  misc_feature: 124
aatagtaggttaaatagtaggttgaacagcaggtcaaacagcaggtcgaacagcaggttgaacagcaggcagaatggcaggcagtgaggtaaatag

SEQ ID NO: 26662 - DNA, 96 bp, Aspergillus fumigatus
  misc_feature: 124
cattataaccttccttataacctacttactacctcacttactaccttgctacctaccttgctacctaccttgctaccttacttactacctaactat

SEQ ID NO: 26663 - DNA, 96 bp, Aspergillus fumigatus
  misc_feature: 124
agaattttaatttaactaataagaatatatatacagaacatattttaaaatatagaatatagggaatagagataaagataaagatctccttataat

SEQ ID NO: 26664 - DNA, 96 bp, Aspergillus fumigatus
  misc_feature: 124
atagcttctatatataatagatatatagttaggctatatctttagcattatagatagtctaataggggataaagtaccttgtctttataagttaat

SEQ ID NO: 26665 - DNA, 96 bp, Aspergillus fumigatus
  misc_feature: 124
aaagagttctctaagtatattactagctatagtactaaataatataaatactactatctagtatataagtatatctagaaggctaaattaactatt

SEQ ID NO: 26666 - DNA, 96 bp, Aspergillus fumigatus
  misc_feature: 123
ataaaaataaaaataaaaataaaaataaaaataaaaataaaaataaaaataaaaataaaaataaaaataaaaataaaaataaaaataaaaataaaa

SEQ ID NO: 26667 - DNA, 96 bp, Aspergillus fumigatus
  misc_feature: 123
cagcaggttaaacagcaggttgaatagtaggttaaatagtaggttgaacagcaggtcaaacagcaggtcgaacagcaggttgaacagcaggcagaa

SEQ ID NO: 26668 - DNA, 96 bp, Aspergillus fumigatus
  misc_feature: 123
gttctctaagtatattactagctatagtactaaataatataaatactactatctagtatataagtatatctagaaggctaaattaactattaataa

SEQ ID NO: 26669 - DNA, 96 bp, Aspergillus fumigatus
  misc_feature: 123
ttagactatctataatgctaaagatatagcctaactatatatctattatatatagaagctatatagcctactaagaataatagtattagactatag

SEQ ID NO: 26670 - DNA, 96 bp, Aspergillus fumigatus
  misc_feature: 123
tactagcctaatatatactaatatatactaatatattaattactagacctaaaactactatacctactactgatctaccctgtcctataaagccta

SEQ ID NO: 26671 - DNA, 96 bp, Aspergillus fumigatus
  misc_feature: 123
tactactagcctaatatatactaatatatactaatatattaattactagacctaaaactactatacctactactgatctaccctgtcctataaagc

SEQ ID NO: 26672 - DNA, 96 bp, Aspergillus fumigatus
  misc_feature: 123
aagagttctctaagtatattactagctatagtactaaataatataaatactactatctagtatataagtatatctagaaggctaaattaactatta

SEQ ID NO: 26673 - DNA, 96 bp, Aspergillus fumigatus
  misc_feature: 123
acctctctggggcattataaccttccttataacctacttactacctcacttactaccttgctacctaccttgctacctaccttgctaccttactta

SEQ ID NO: 26674 - DNA, 96 bp, Aspergillus fumigatus
  misc_feature: 123
cttacttcctaccttcctaaatacctctttccctacctcacttactaccttactaccttgctcactaccttacttactacctcactatctatctta

SEQ ID NO: 26675 - DNA, 96 bp, Aspergillus fumigatus
  misc_feature: 123
gtggatttcctctttaaacttattctattttagattttctttcctttaattagaattattagatttatctcctatattctttataagaaaggctag

SEQ ID NO: 26676 - DNA, 96 bp, Aspergillus fumigatus
  misc_feature: 123
gtgctgcctgctgtgctgcctgctgtgctgcctgctgttctgcctatcttatatataacctctctggggccttataacctgcttcactaccgtact

SEQ ID NO: 26677 - DNA, 96 bp, Aspergillus fumigatus
  misc_feature: 123
gactatctataatgctaaagatatagcctaactatatatctattatatatagaagctatatagcctactaagaataatagtattagactatagccc

SEQ ID NO: 26678 - DNA, 96 bp, Aspergillus fumigatus
  misc_feature: 123
aggttaaatagtaggttgaacagcaggtcaaacagcaggtcgaacagcaggttgaacagcaggcagaatggcaggcagtgaggtaaatagtaaagc

SEQ ID NO: 26679 - DNA, 96 bp, Aspergillus fumigatus
  misc_feature: 123
gctaaattaactattaataaagtaaactaataagctaaataatctaagatctaacttctaaaactctagtataaacttactaccttagagtagagg

SEQ ID NO: 26680 - DNA, 96 bp, Aspergillus fumigatus
  misc_feature: 123
agtaataaactaagggctatagtctaatactattattcttagtaggctatatagcttctatatataatagatatataatcaggctatacctttagc

SEQ ID NO: 26681 - DNA, 96 bp, Aspergillus fumigatus
  misc_feature: 123
attcagccaacatattcaaacttcatgtataatatatatctctgcgctatgataccatctaaaatatatatattcattcacctaatatattaatgc

SEQ ID NO: 26682 - DNA, 96 bp, Aspergillus fumigatus
  misc_feature: 123
attataaccttccttataacctacttactacctcacttactaccttgctacctaccttgctacctaccttgctaccttacttactacctaactatc

SEQ ID NO: 26683 - DNA, 96 bp, Aspergillus fumigatus
  misc_feature: 123
gagttctctaagtatattactagctatagtactaaataatataaatactactatctagtatataagtatatctagaaggctaaattaactattaat

SEQ ID NO: 26684 - DNA, 96 bp, Aspergillus fumigatus
  misc_feature: 123
atttcctctttaaacttattctattttagattttctttcctttaattagaattattagatttatctcctatattctttataagaaaggctaggaag

SEQ ID NO: 26685 - DNA, 96 bp, Aspergillus fumigatus
  misc_feature: 123
attttaatttaactaataagaatatatatacagaacatattttaaaatatagaatatagggaatagagataaagataaagatctccttataataag

SEQ ID NO: 26686 - DNA, 96 bp, Aspergillus fumigatus
  misc_feature: 123
ctataatgctaaagatatagcctaactatatatctattatatatagaagctatatagcctactaagaataatagtattagactatagcccttagtt

SEQ ID NO: 26687 - DNA, 96 bp, Aspergillus fumigatus
  misc_feature: 123
atagttagaattttaatttaactaataagaatatatatacagaacatattttaaaatatagaatatagggaatagagataaagataaagatctcct

SEQ ID NO: 26688 - DNA, 96 bp, Aspergillus fumigatus
  misc_feature: 123
aaccttccttataacctacttactacctcacttactaccttgctacctaccttgctacctaccttgctaccttacttactacctaactatctacct

SEQ ID NO: 26689 - DNA, 96 bp, Aspergillus fumigatus
  misc_feature: 122
ctattttataattctaaaaagaatagctataagagaaaaagtagtagtatataaaagctattataaaaaaaaactagctaaaccttcttagtaaaa

SEQ ID NO: 26690 - DNA, 96 bp, Aspergillus fumigatus
  misc_feature: 122
tttatatagttagaattttaatttaactaataagaatatatatacagaacatattttaaaatatagaatatagggaatagagataaagataaagat

SEQ ID NO: 26691 - DNA, 96 bp, Aspergillus fumigatus
  misc_feature: 122
aattttaatttaactaataagaatatatatacagaacatattttaaaatatagaatatagggaatagagataaagataaagatctccttataataa

SEQ ID NO: 26692 - DNA, 96 bp, Aspergillus fumigatus
  misc_feature: 122
ttatatagttagaattttaatttaactaataagaatatatatacagaacatattttaaaatatagaatatagggaatagagataaagataaagatc

SEQ ID NO: 26693 - DNA, 96 bp, Aspergillus fumigatus
  misc_feature: 122
ttataaccttccttataacctacttactacctcacttactaccttgctacctaccttgctacctaccttgctaccttacttactacctaactatct

SEQ ID NO: 26694 - DNA, 96 bp, Aspergillus fumigatus
  misc_feature: 122
ttagtggatttcctctttaaacttattctattttagattttctttcctttaattagaattattagatttatctcctatattctttataagaaaggc

SEQ ID NO: 26695 - DNA, 96 bp, Aspergillus fumigatus
  misc_feature: 122
ttagaattttaatttaactaataagaatatatatacagaacatattttaaaatatagaatatagggaatagagataaagataaagatctccttata

SEQ ID NO: 26696 - DNA, 96 bp, Aspergillus fumigatus
  misc_feature: 122
ttaccttagctaattatagataataagaaagctatctatactactataaatacttatatatccctaactataataagctaagagcctagttattat

SEQ ID NO: 26697 - DNA, 96 bp, Aspergillus fumigatus
  misc_feature: 122
cagccaacatattcaaacttcatgtataatatatatctctgcgctatgataccatctaaaatatatatattcattcacctaatatattaatgctga

SEQ ID NO: 26698 - DNA, 96 bp, Aspergillus fumigatus
  misc_feature: 122
agttctctaagtatattactagctatagtactaaataatataaatactactatctagtatataagtatatctagaaggctaaattaactattaata

SEQ ID NO: 26699 - DNA, 96 bp, Aspergillus fumigatus
  misc_feature: 122
tatatagttagaattttaatttaactaataagaatatatatacagaacatattttaaaatatagaatatagggaatagagataaagataaagatct

SEQ ID NO: 26700 - DNA, 96 bp, Aspergillus fumigatus
  misc_feature: 122
tatagttagaattttaatttaactaataagaatatatatacagaacatattttaaaatatagaatatagggaatagagataaagataaagatctcc

SEQ ID NO: 26701 - DNA, 96 bp, Aspergillus fumigatus
  misc_feature: 122
tatagcctaattatatatctattatatatagaagctatatagcctactaagaataatagtattagactatagctcttagtttattactatattcta

SEQ ID NO: 26702 - DNA, 96 bp, Aspergillus fumigatus
  misc_feature: 122
cttcttaactctagggctaggcctaactatatattatactaatttataatatagaataggtactaatttaaaaatagtataatacttccttctata

SEQ ID NO: 26703 - DNA, 96 bp, Aspergillus fumigatus
  misc_feature: 122
tataagaatactactagcctaatatatactaatatatactaatatattaattactagacctaaaactactatacctactactgatctaccctgtcc

SEQ ID NO: 26704 - DNA, 96 bp, Aspergillus fumigatus
  misc_feature: 122
tagtaataaactaagggctatagtctaatactattattcttagtaggctatatagcttctatatataatagatatataatcaggctatacctttag

SEQ ID NO: 26705 - DNA, 96 bp, Aspergillus fumigatus
  misc_feature: 122
tagcttctatatataatagatatatagttaggctatatctttagcattatagatagtctaataggggataaagtaccttgtctttataagttaatt

SEQ ID NO: 26706 - DNA, 96 bp, Aspergillus fumigatus
  misc_feature: 122
ctgtgctgcctgctgtgctgcctgctgtgctgcctgctgttctgcctatcttatatataacctctctggggccttataacctgcttcactaccgta

SEQ ID NO: 26707 - DNA, 96 bp, Aspergillus fumigatus
  misc_feature: 122
aaccctaaagagttctctaagtatattactagctatagtactaaataatataaatactactatctagtatataagtatatctagaaggctaaatta

SEQ ID NO: 26708 - DNA, 96 bp, Aspergillus fumigatus
  misc_feature: 122
actagcctaatatatactaatatatactaatatattaattactagacctaaaactactatacctactactgatctaccctgtcctataaagcctac

SEQ ID NO: 26709 - DNA, 96 bp, Aspergillus fumigatus
  misc_feature: 122
ataaccttccttataacctacttactacctcacttactaccttgctacctaccttgctacctaccttgctaccttacttactacctaactatctac

SEQ ID NO: 26710 - DNA, 96 bp, Aspergillus fumigatus
  misc_feature: 122
gaatatagtaataaactaagggctatagtctaatactattattcttagtaggctatatagcttctatatataatagatatataatcaggctatacc

SEQ ID NO: 26711 - DNA, 96 bp, Aspergillus fumigatus
  misc_feature: 122
actactagcctaatatatactaatatatactaatatattaattactagacctaaaactactatacctactactgatctaccctgtcctataaagcc

SEQ ID NO: 26712 - DNA, 96 bp, Aspergillus fumigatus
  misc_feature: 122
ggcccatttaggtctagtactactgctcaggctagtgctcaggctagtgctcaggctagtgctcaggctagtgctcaggctagtgctagtgctagg

SEQ ID NO: 26713 - DNA, 96 bp, Aspergillus fumigatus
  misc_feature: 122
gcttcttaactctagggctaggcctaactatatattatactaatttataatatagaataggtactaatttaaaaatagtataatacttccttctat

SEQ ID NO: 26714 - DNA, 96 bp, Aspergillus fumigatus
  misc_feature: 122
gctgtgctgcctgctgtgctgcctgctgtgctgcctgctgttctgcctatcttatatataacctctctggggccttataacctgcttcactaccgt

SEQ ID NO: 26715 - DNA, 96 bp, Aspergillus fumigatus
  misc_feature: 122
gctaggcctaactatatattatactaatttataatatagaataggtactaatttaaaaatagtataatacttccttctatagaacttactaatagc

SEQ ID NO: 26716 - DNA, 96 bp, Aspergillus fumigatus
  misc_feature: 122
attattactattattaagaagtagatatataccctatatttattaaaattatatagataaatctatcctaccttctatatatcccttcttaagaag

SEQ ID NO: 26717 - DNA, 96 bp, Aspergillus fumigatus
  misc_feature: 122
aaggctaaattaactattaataaagtaaactaataagctaaataatctaagatctaacttctaaaactctagtataaacttactaccttagagtag

SEQ ID NO: 26718 - DNA, 96 bp, Aspergillus fumigatus
  misc_feature: 122
ctactagcctaatatatactaatatatactaatatattaattactagacctaaaactactatacctactactgatctaccctgtcctataaagcct

SEQ ID NO: 26719 - DNA, 96 bp, Aspergillus fumigatus
  misc_feature: 122
agccggctatgcaggcaggccatgcagggaagccagaccgcgcagggaagccaggccatgcagggaagccagaccgcgcagggaagccaggccgcg

SEQ ID NO: 26720 - DNA, 96 bp, Aspergillus fumigatus
  misc_feature: 122
ccggctgcgggctgagccggctatgcaggcaggccatgcagggaagccagaccgcgcagggaagccaggccatgcagggaagccagaccgcgcagg

SEQ ID NO: 26721 - DNA, 96 bp, Aspergillus fumigatus
  misc_feature: 122
attattaagaagtagatatataccctatatttattaaaattatatagataaatctatcctaccttctatatatcccttcttaagaagtagaaccct

SEQ ID NO: 26722 - DNA, 96 bp, Aspergillus fumigatus
  misc_feature: 122
agatattatagttaagactaactcttctaattatatatctactagtataatatcttaatataataaataataaagaagtcctataccctgttatat

SEQ ID NO: 26723 - DNA, 96 bp, Aspergillus fumigatus
  misc_feature: 122
ataagaatactactagcctaatatatactaatatatactaatatattaattactagacctaaaactactatacctactactgatctaccctgtcct

SEQ ID NO: 26724 - DNA, 96 bp, Aspergillus fumigatus
  misc_feature: 122
aactctagggctaggcctaactatatattatactaatttataatatagaataggtactaatttaaaaatagtataatacttccttctatagaactt

SEQ ID NO: 26725 - DNA, 96 bp, Aspergillus fumigatus
  misc_feature: 122
aacctctctggggcattataaccttccttataacctacttactacctcacttactaccttgctacctaccttgctacctaccttgctaccttactt

SEQ ID NO: 26726 - DNA, 96 bp, Aspergillus fumigatus
  misc_feature: 121
aattattactattattaagaagtagatatataccctatatttattaaaattatatagataaatctatcctaccttctatatatcccttcttaagaa

SEQ ID NO: 26727 - DNA, 96 bp, Aspergillus fumigatus
  misc_feature: 121
gctgcgggctgagccggctatgcaggcaggccatgcagggaagccagaccgcgcagggaagccaggccatgcagggaagccagaccgcgcagggaa

SEQ ID NO: 26728 - DNA, 96 bp, Aspergillus fumigatus
  misc_feature: 121
ttattaagaagtagatatataccctatatttattaaaattatatagataaatctatcctaccttctatatatcccttcttaagaagtagaaccctt

SEQ ID NO: 26729 - DNA, 96 bp, Aspergillus fumigatus
  misc_feature: 121
tagggctaggcctaactatatattatactaatttataatatagaataggtactaatttaaaaatagtataatacttccttctatagaacttactaa

SEQ ID NO: 26730 - DNA, 96 bp, Aspergillus fumigatus
  misc_feature: 121
cgggctgagccggctatgcaggcaggccatgcagggaagccagaccgcgcagggaagccaggccatgcagggaagccagaccgcgcagggaagcca

SEQ ID NO: 26731 - DNA, 96 bp, Aspergillus fumigatus
  misc_feature: 121
ggttaaatagtaggttgaacagcaggtcaaacagcaggtcgaacagcaggttgaacagcaggcagaatggcaggcagtgaggtaaatagtaaagca

SEQ ID NO: 26732 - DNA, 96 bp, Aspergillus fumigatus
  misc_feature: 121
tgctgtgctgcctgctgtgctgcctgctgtgctgcctgctgttctgcctatcttatatataacctctctggggccttataacctgcttcactaccg

SEQ ID NO: 26733 - DNA, 96 bp, Aspergillus fumigatus
  misc_feature: 121
tgctgcctgctgtgctgcctgctgtgctgcctgctgttctgcctatcttatatataacctctctggggccttataacctgcttcactaccgtactt

SEQ ID NO: 26734 - DNA, 96 bp, Aspergillus fumigatus
  misc_feature: 121
ccggctatgcaggcaggccatgcagggaagccagaccgcgcagggaagccaggccatgcagggaagccagaccgcgcagggaagccaggccgcgca

SEQ ID NO: 26735 - DNA, 96 bp, Aspergillus fumigatus
  misc_feature: 121
tcttttctcttccttctctagggttatagatagtattatagcttttaattattatatttattttttaagattaagtccataaacagtagtagcaga

SEQ ID NO: 26736 - DNA, 96 bp, Aspergillus fumigatus
  misc_feature: 121
tcttaactctagggctaggcctaactatatattatactaatttataatatagaataggtactaatttaaaaatagtataatacttccttctataga

SEQ ID NO: 26737 - DNA, 96 bp, Aspergillus fumigatus
  misc_feature: 121
tctagggctaggcctaactatatattatactaatttataatatagaataggtactaatttaaaaatagtataatacttccttctatagaacttact

SEQ ID NO: 26738 - DNA, 96 bp, Aspergillus fumigatus
  misc_feature: 121
tcgaccggctgcgggctgagccggctatgcaggcaggccatgcagggaagccagaccgcgcagggaagccaggccatgcagggaagccagaccgcg

SEQ ID NO: 26739 - DNA, 96 bp, Aspergillus fumigatus
  misc_feature: 121
gggctaggcctaactatatattatactaatttataatatagaataggtactaatttaaaaatagtataatacttccttctatagaacttactaata

SEQ ID NO: 26740 - DNA, 96 bp, Aspergillus fumigatus
  misc_feature: 121
gtagcaaggtaggtagcaaggtaggtagcaaggtagtaagtgaggtagtaagtaggttataaggaaggttataatgccccagagaggttatatata

SEQ ID NO: 26741 - DNA, 96 bp, Aspergillus fumigatus
  misc_feature: 121
tataataactaggctcttagcttattatagttagggatatataagtatttatagtagtatagatagctttcttattatctataattagctaaggta

SEQ ID NO: 26742 - DNA, 96 bp, Aspergillus fumigatus
  misc_feature: 121
ctagggctaggcctaactatatattatactaatttataatatagaataggtactaatttaaaaatagtataatacttccttctatagaacttacta

SEQ ID NO: 26743 - DNA, 96 bp, Aspergillus fumigatus
  misc_feature: 121
taggcctaactatatattatactaatttataatatagaataggtactaatttaaaaatagtataatacttccttctatagaacttactaatagctt

SEQ ID NO: 26744 - DNA, 96 bp, Aspergillus fumigatus
  misc_feature: 121
tagaaggctaaattaactattaataaagtaaactaataagctaaataatctaagatctaacttctaaaactctagtataaacttactaccttagag

SEQ ID NO: 26745 - DNA, 96 bp, Aspergillus fumigatus
  misc_feature: 121
agcttctatatataatagatatatagttaggctatatctttagcattatagatagtctaataggggataaagtaccttgtctttataagttaatta

SEQ ID NO: 26746 - DNA, 96 bp, Aspergillus fumigatus
  misc_feature: 121
aagcttaccttagctaattatagataataagaaagctatctatactactataaatacttatatatccctaactataataagctaagagcctagtta

SEQ ID NO: 26747 - DNA, 96 bp, Aspergillus fumigatus
  misc_feature: 121
taaagagttctctaagtatattactagctatagtactaaataatataaatactactatctagtatataagtatatctagaaggctaaattaactat

SEQ ID NO: 26748 - DNA, 96 bp, Aspergillus fumigatus
  misc_feature: 121
ccctaaagagttctctaagtatattactagctatagtactaaataatataaatactactatctagtatataagtatatctagaaggctaaattaac

SEQ ID NO: 26749 - DNA, 96 bp, Aspergillus fumigatus
  misc_feature: 121
agaatatagtaataaactaagggctatagtctaatactattattcttagtaggctatatagcttctatatataatagatatataatcaggctatac

SEQ ID NO: 26750 - DNA, 96 bp, Aspergillus fumigatus
  misc_feature: 121
gtatagcctaattatatatctattatatatagaagctatatagcctactaagaataatagtattagactatagctcttagtttattactatattct

SEQ ID NO: 26751 - DNA, 96 bp, Aspergillus fumigatus
  misc_feature: 121
gagccggctatgcaggcaggccatgcagggaagccagaccgcgcagggaagccaggccatgcagggaagccagaccgcgcagggaagccaggccgc

SEQ ID NO: 26752 - DNA, 96 bp, Aspergillus fumigatus
  misc_feature: 121
gccggctatgcaggcaggccatgcagggaagccagaccgcgcagggaagccaggccatgcagggaagccagaccgcgcagggaagccaggccgcgc

SEQ ID NO: 26753 - DNA, 96 bp, Aspergillus fumigatus
  misc_feature: 121
atatagttagaattttaatttaactaataagaatatatatacagaacatattttaaaatatagaatatagggaatagagataaagataaagatctc

SEQ ID NO: 26754 - DNA, 96 bp, Aspergillus fumigatus
  misc_feature: 121
cggctatgcaggcaggccatgcagggaagccagaccgcgcagggaagccaggccatgcagggaagccagaccgcgcagggaagccaggccgcgcag

SEQ ID NO: 26755 - DNA, 96 bp, Aspergillus fumigatus
  misc_feature: 121
ctctaagtatattactagctatagtactaaataatataaatactactatctagtatataagtatatctagaaggctaaattaactattaataaagt

SEQ ID NO: 26756 - DNA, 96 bp, Aspergillus fumigatus
  misc_feature: 121
cggctgcgggctgagccggctatgcaggcaggccatgcagggaagccagaccgcgcagggaagccaggccatgcagggaagccagaccgcgcaggg

SEQ ID NO: 26757 - DNA, 96 bp, Aspergillus fumigatus
  misc_feature: 121
attatagttaagactaactcttctaattatatatctactagtataatatcttaatataataaataataaagaagtcctataccctgttatattctt

SEQ ID NO: 26758 - DNA, 96 bp, Aspergillus fumigatus
  misc_feature: 121
agccaacatattcaaacttcatgtataatatatatctctgcgctatgataccatctaaaatatatatattcattcacctaatatattaatgctgat

SEQ ID NO: 26759 - DNA, 96 bp, Aspergillus fumigatus
  misc_feature: 120
tattttataattctaaaaagaatagctataagagaaaaagtagtagtatataaaagctattataaaaaaaaactagctaaaccttcttagtaaaaa

SEQ ID NO: 26760 - DNA, 96 bp, Aspergillus fumigatus
  misc_feature: 120
ttctctaagtatattactagctatagtactaaataatataaatactactatctagtatataagtatatctagaaggctaaattaactattaataaa

SEQ ID NO: 26761 - DNA, 96 bp, Aspergillus fumigatus
  misc_feature: 120
ttcttttctcttccttctctagggttatagatagtattatagcttttaattattatatttattttttaagattaagtccataaacagtagtagcag

SEQ ID NO: 26762 - DNA, 96 bp, Aspergillus fumigatus
  misc_feature: 120
ttataataactaggctcttagcttattatagttagggatatataagtatttatagtagtatagatagctttcttattatctataattagctaaggt

SEQ ID NO: 26763 - DNA, 96 bp, Aspergillus fumigatus
  misc_feature: 120
tgtgctgcctgctgtgctgcctgctgtgctgcctgctgttctgcctatcttatatataacctctctggggccttataacctgcttcactaccgtac

SEQ ID NO: 26764 - DNA, 96 bp, Aspergillus fumigatus
  misc_feature: 120
tgcttcttaactctagggctaggcctaactatatattatactaatttataatatagaataggtactaatttaaaaatagtataatacttccttcta

SEQ ID NO: 26765 - DNA, 96 bp, Aspergillus fumigatus
  misc_feature: 120
attcttttctcttccttctctagggttatagatagtattatagcttttaattattatatttattttttaagattaagtccataaacagtagtagca

SEQ ID NO: 26766 - DNA, 96 bp, Aspergillus fumigatus
  misc_feature: 120
gaccggctgcgggctgagccggctatgcaggcaggccatgcagggaagccagaccgcgcagggaagccaggccatgcagggaagccagaccgcgca

SEQ ID NO: 26767 - DNA, 96 bp, Aspergillus fumigatus
  misc_feature: 120
tctctaagtatattactagctatagtactaaataatataaatactactatctagtatataagtatatctagaaggctaaattaactattaataaag

SEQ ID NO: 26768 - DNA, 96 bp, Aspergillus fumigatus
  misc_feature: 120
tctagaaggctaaattaactattaataaagtaaactaataagctaaataatctaagatctaacttctaaaactctagtataaacttactaccttag

SEQ ID NO: 26769 - DNA, 96 bp, Aspergillus fumigatus
  misc_feature: 120
ggctgcgggctgagccggctatgcaggcaggccatgcagggaagccagaccgcgcagggaagccaggccatgcagggaagccagaccgcgcaggga

SEQ ID NO: 26770 - DNA, 96 bp, Aspergillus fumigatus
  misc_feature: 120
tattcttttctcttccttctctagggttatagatagtattatagcttttaattattatatttattttttaagattaagtccataaacagtagtagc

SEQ ID NO: 26771 - DNA, 96 bp, Aspergillus fumigatus
  misc_feature: 120
tattattaagaagtagatatataccctatatttattaaaattatatagataaatctatcctaccttctatatatcccttcttaagaagtagaaccc

SEQ ID NO: 26772 - DNA, 96 bp, Aspergillus fumigatus
  misc_feature: 120
tattatagttaagactaactcttctaattatatatctactagtataatatcttaatataataaataataaagaagtcctataccctgttatattct

SEQ ID NO: 26773 - DNA, 96 bp, Aspergillus fumigatus
  misc_feature: 120
tataatgctaaagatatagcctaactatatatctattatatatagaagctatatagcctactaagaataatagtattagactatagcccttagttt

SEQ ID NO: 26774 - DNA, 96 bp, Aspergillus fumigatus
  misc_feature: 120
ctaaagagttctctaagtatattactagctatagtactaaataatataaatactactatctagtatataagtatatctagaaggctaaattaacta

SEQ ID NO: 26775 - DNA, 96 bp, Aspergillus fumigatus
  misc_feature: 120
tagtaggctttataggacagggtagatcagtagtaggtatagtagttttaggtctagtaattaatatattagtatatattagtatatattaggcta

SEQ ID NO: 26776 - DNA, 96 bp, Aspergillus fumigatus
  misc_feature: 120
gaaggctaaattaactattaataaagtaaactaataagctaaataatctaagatctaacttctaaaactctagtataaacttactaccttagagta

SEQ ID NO: 26777 - DNA, 96 bp, Aspergillus fumigatus
  misc_feature: 120
gggctattttataattctaaaaagaatagctataagagaaaaagtagtagtatataaaagctattataaaaaaaaactagctaaaccttcttagta

SEQ ID NO: 26778 - DNA, 96 bp, Aspergillus fumigatus
  misc_feature: 120
aatatattagcaagttcctctgtagtaattatctttttaatagagatatatttagctatttttatatattaattaataattactagaattatatta

SEQ ID NO: 26779 - DNA, 96 bp, Aspergillus fumigatus
  misc_feature: 120
actctagggctaggcctaactatatattatactaatttataatatagaataggtactaatttaaaaatagtataatacttccttctatagaactta

SEQ ID NO: 26780 - DNA, 96 bp, Aspergillus fumigatus
  misc_feature: 120
taaccttccttataacctacttactacctcacttactaccttgctacctaccttgctacctaccttgctaccttacttactacctaactatctacc

SEQ ID NO: 26781 - DNA, 96 bp, Aspergillus fumigatus
  misc_feature: 120
taaccctaaagagttctctaagtatattactagctatagtactaaataatataaatactactatctagtatataagtatatctagaaggctaaatt

SEQ ID NO: 26782 - DNA, 96 bp, Aspergillus fumigatus
  misc_feature: 120
ggctgagccggctatgcaggcaggccatgcagggaagccagaccgcgcagggaagccaggccatgcagggaagccagaccgcgcagggaagccagg

SEQ ID NO: 26783 - DNA, 96 bp, Aspergillus fumigatus
  misc_feature: 120
ggctaggcctaactatatattatactaatttataatatagaataggtactaatttaaaaatagtataatacttccttctatagaacttactaatag

SEQ ID NO: 26784 - DNA, 96 bp, Aspergillus fumigatus
  misc_feature: 120
cgaccggctgcgggctgagccggctatgcaggcaggccatgcagggaagccagaccgcgcagggaagccaggccatgcagggaagccagaccgcgc

SEQ ID NO: 26785 - DNA, 96 bp, Aspergillus fumigatus
  misc_feature: 120
gatattatagttaagactaactcttctaattatatatctactagtataatatcttaatataataaataataaagaagtcctataccctgttatatt

SEQ ID NO: 26786 - DNA, 96 bp, Aspergillus fumigatus
  misc_feature: 120
cttagtggatttcctctttaaacttattctattttagattttctttcctttaattagaattattagatttatctcctatattctttataagaaagg

SEQ ID NO: 26787 - DNA, 96 bp, Aspergillus fumigatus
  misc_feature: 120
ctaggcctaactatatattatactaatttataatatagaataggtactaatttaaaaatagtataatacttccttctatagaacttactaatagct

SEQ ID NO: 26788 - DNA, 96 bp, Aspergillus fumigatus
  misc_feature: 120
cctaccttcctaaatacctctttccctacctcacttactaccttactaccttgctcactaccttacttactacctcactatctatcttactgcctg

SEQ ID NO: 26789 - DNA, 96 bp, Aspergillus fumigatus
  misc_feature: 120
cctaaagagttctctaagtatattactagctatagtactaaataatataaatactactatctagtatataagtatatctagaaggctaaattaact

SEQ ID NO: 26790 - DNA, 96 bp, Aspergillus fumigatus
  misc_feature: 120
caagttcctctgtagtaattatctttttaatagagatatatttagctatttttatatattaattaataattactagaattatattaaatacctctt

SEQ ID NO: 26791 - DNA, 96 bp, Aspergillus fumigatus
  misc_feature: 120
agggctaggcctaactatatattatactaatttataatatagaataggtactaatttaaaaatagtataatacttccttctatagaacttactaat

SEQ ID NO: 26792 - DNA, 96 bp, Aspergillus fumigatus
  misc_feature: 120
agcttaccttagctaattatagataataagaaagctatctatactactataaatacttatatatccctaactataataagctaagagcctagttat

SEQ ID NO: 26793 - DNA, 96 bp, Aspergillus fumigatus
  misc_feature: 120
agaaggctaaattaactattaataaagtaaactaataagctaaataatctaagatctaacttctaaaactctagtataaacttactaccttagagt

SEQ ID NO: 26794 - DNA, 96 bp, Aspergillus fumigatus
  misc_feature: 120
aatgctaaagatatagcctaactatatatctattatatatagaagctatatagcctactaagaataatagtattagactatagcccttagtttatt

SEQ ID NO: 26795 - DNA, 96 bp, Aspergillus fumigatus
  misc_feature: 119
ttttaatttaactaataagaatatatatacagaacatattttaaaatatagaatatagggaatagagataaagataaagatctccttataataagc

SEQ ID NO: 26796 - DNA, 96 bp, Aspergillus fumigatus
  misc_feature: 119
tttaggtctagtactactgctcaggctagtgctcaggctagtgctcaggctagtgctcaggctagtgctcaggctagtgctagtgctaggactagg

SEQ ID NO: 26797 - DNA, 96 bp, Aspergillus fumigatus
  misc_feature: 119
gctattttataattctaaaaagaatagctataagagaaaaagtagtagtatataaaagctattataaaaaaaaactagctaaaccttcttagtaaa

SEQ ID NO: 26798 - DNA, 96 bp, Aspergillus fumigatus
  misc_feature: 119
ttcctaccttcctaaatacctctttccctacctcacttactaccttactaccttgctcactaccttacttactacctcactatctatcttactgcc

SEQ ID NO: 26799 - DNA, 96 bp, Aspergillus fumigatus
  misc_feature: 119
ttattcttttctcttccttctctagggttatagatagtattatagcttttaattattatatttattttttaagattaagtccataaacagtagtag

SEQ ID NO: 26800 - DNA, 96 bp, Aspergillus fumigatus
  misc_feature: 119
ttattactattattaagaagtagatatataccctatatttattaaaattatatagataaatctatcctaccttctatatatcccttcttaagaagt

SEQ ID NO: 26801 - DNA, 96 bp, Aspergillus fumigatus
  misc_feature: 119
tgctaaagatatagcctaactatatatctattatatatagaagctatatagcctactaagaataatagtattagactatagcccttagtttattac

SEQ ID NO: 26802 - DNA, 96 bp, Aspergillus fumigatus
  misc_feature: 119
tgcgggctgagccggctatgcaggcaggccatgcagggaagccagaccgcgcagggaagccaggccatgcagggaagccagaccgcgcagggaagc

SEQ ID NO: 26803 - DNA, 96 bp, Aspergillus fumigatus
  misc_feature: 119
ctagaaggctaaattaactattaataaagtaaactaataagctaaataatctaagatctaacttctaaaactctagtataaacttactaccttaga

SEQ ID NO: 26804 - DNA, 96 bp, Aspergillus fumigatus
  misc_feature: 119
gcccatttaggtctagtactactgctcaggctagtgctcaggctagtgctcaggctagtgctcaggctagtgctcaggctagtgctagtgctagga

SEQ ID NO: 26805 - DNA, 96 bp, Aspergillus fumigatus
  misc_feature: 119
aggtagcaaggtaggtagcaaggtaggtagcaaggtagtaagtgaggtagtaagtaggttataaggaaggttataatgccccagagaggttatata

SEQ ID NO: 26806 - DNA, 96 bp, Aspergillus fumigatus
  misc_feature: 119
tataaccttccttataacctacttactacctcacttactaccttgctacctaccttgctacctaccttgctaccttacttactacctaactatcta

SEQ ID NO: 26807 - DNA, 96 bp, Aspergillus fumigatus
  misc_feature: 119
taatgctaaagatatagcctaactatatatctattatatatagaagctatatagcctactaagaataatagtattagactatagcccttagtttat

SEQ ID NO: 26808 - DNA, 96 bp, Aspergillus fumigatus
  misc_feature: 119
cttaccttagctaattatagataataagaaagctatctatactactataaatacttatatatccctaactataataagctaagagcctagttatta

SEQ ID NO: 26809 - DNA, 96 bp, Aspergillus fumigatus
  misc_feature: 119
atagtaataaactaagggctatagtctaatactattattcttagtaggctatatagcttctatatataatagatatataatcaggctataccttta

SEQ ID NO: 26810 - DNA, 96 bp, Aspergillus fumigatus
  misc_feature: 119
ataatgctaaagatatagcctaactatatatctattatatatagaagctatatagcctactaagaataatagtattagactatagcccttagttta

SEQ ID NO: 26811 - DNA, 96 bp, Aspergillus fumigatus
  misc_feature: 119
gttaaatagtaggttgaacagcaggtcaaacagcaggtcgaacagcaggttgaacagcaggcagaatggcaggcagtgaggtaaatagtaaagcag

SEQ ID NO: 26812 - DNA, 96 bp, Aspergillus fumigatus
  misc_feature: 119
gtgcttcttaactctagggctaggcctaactatatattatactaatttataatatagaataggtactaatttaaaaatagtataatacttccttct

SEQ ID NO: 26813 - DNA, 96 bp, Aspergillus fumigatus
  misc_feature: 119
cccatttaggtctagtactactgctcaggctagtgctcaggctagtgctcaggctagtgctcaggctagtgctcaggctagtgctagtgctaggac

SEQ ID NO: 26814 - DNA, 96 bp, Aspergillus fumigatus
  misc_feature: 119
gtataagaatactactagcctaatatatactaatatatactaatatattaattactagacctaaaactactatacctactactgatctaccctgtc

SEQ ID NO: 26815 - DNA, 96 bp, Aspergillus fumigatus
  misc_feature: 119
gtaaggtagcaaggtaggtagcaaggtaggtagcaaggtagtaagtgaggtagtaagtaggttataaggaaggttataatgccccagagaggttat

SEQ ID NO: 26816 - DNA, 96 bp, Aspergillus fumigatus
  misc_feature: 119
ctgctgtgctgcctgctgtgctgcctgctgtgctgcctgctgttctgcctatcttatatataacctctctggggccttataacctgcttcactacc

SEQ ID NO: 26817 - DNA, 96 bp, Aspergillus fumigatus
  misc_feature: 119
ggtagcaaggtaggtagcaaggtaggtagcaaggtagtaagtgaggtagtaagtaggttataaggaaggttataatgccccagagaggttatatat

SEQ ID NO: 26818 - DNA, 96 bp, Aspergillus fumigatus
  misc_feature: 119
gggctgagccggctatgcaggcaggccatgcagggaagccagaccgcgcagggaagccaggccatgcagggaagccagaccgcgcagggaagccag

SEQ ID NO: 26819 - DNA, 96 bp, Aspergillus fumigatus
  misc_feature: 119
gcgggctgagccggctatgcaggcaggccatgcagggaagccagaccgcgcagggaagccaggccatgcagggaagccagaccgcgcagggaagcc

SEQ ID NO: 26820 - DNA, 96 bp, Aspergillus fumigatus
  misc_feature: 119
cttcctaccttcctaaatacctctttccctacctcacttactaccttactaccttgctcactaccttacttactacctcactatctatcttactgc

SEQ ID NO: 26821 - DNA, 96 bp, Aspergillus fumigatus
  misc_feature: 119
acatggcccatttaggtctagtactactgctcaggctagtgctcaggctagtgctcaggctagtgctcaggctagtgctcaggctagtgctagtgc

SEQ ID NO: 26822 - DNA, 96 bp, Aspergillus fumigatus
  misc_feature: 119
agcaagttcctctgtagtaattatctttttaatagagatatatttagctatttttatatattaattaataattactagaattatattaaatacctc

SEQ ID NO: 26823 - DNA, 96 bp, Aspergillus fumigatus
  misc_feature: 119
atattatagttaagactaactcttctaattatatatctactagtataatatcttaatataataaataataaagaagtcctataccctgttatattc

SEQ ID NO: 26824 - DNA, 96 bp, Aspergillus fumigatus
  misc_feature: 119
acttagtggatttcctctttaaacttattctattttagattttctttcctttaattagaattattagatttatctcctatattctttataagaaag

SEQ ID NO: 26825 - DNA, 96 bp, Aspergillus fumigatus
  misc_feature: 119
agtaggctttataggacagggtagatcagtagtaggtatagtagttttaggtctagtaattaatatattagtatatattagtatatattaggctag

SEQ ID NO: 26826 - DNA, 96 bp, Aspergillus fumigatus
  misc_feature: 119
attaatagttaatttagccttctagatatacttatatactagatagtagtatttatattatttagtgctatagctagtaatatacttagagaactt

SEQ ID NO: 26827 - DNA, 96 bp, Aspergillus fumigatus
  misc_feature: 119
atatagtaataaactaagggctatagtctaatactattattcttagtaggctatatagcttctatatataatagatatataatcaggctatacctt

SEQ ID NO: 26828 - DNA, 96 bp, Aspergillus fumigatus
  misc_feature: 119
aaggtagcaaggtaggtagcaaggtaggtagcaaggtagtaagtgaggtagtaagtaggttataaggaaggttataatgccccagagaggttatat

SEQ ID NO: 26829 - DNA, 96 bp, Aspergillus fumigatus
  misc_feature: 119
atagtaggttgaacagcaggtcaaacagcaggtcgaacagcaggttgaacagcaggcagaatggcaggcagtgaggtaaatagtaaagcaggcagt

SEQ ID NO: 26830 - DNA, 96 bp, Aspergillus fumigatus
  misc_feature: 118
agtaaccctaaagagttctctaagtatattactagctatagtactaaataatataaatactactatctagtatataagtatatctagaaggctaaa

SEQ ID NO: 26831 - DNA, 96 bp, Aspergillus fumigatus
  misc_feature: 118
tttaatttaactaataagaatatatatacagaacatattttaaaatatagaatatagggaatagagataaagataaagatctccttataataagct

SEQ ID NO: 26832 - DNA, 96 bp, Aspergillus fumigatus
  misc_feature: 118
tatattagcaagttcctctgtagtaattatctttttaatagagatatatttagctatttttatatattaattaataattactagaattatattaaa

SEQ ID NO: 26833 - DNA, 96 bp, Aspergillus fumigatus
  misc_feature: 118
tttaaatttaaaatattagaactaagtatagatattagctaaggctatctattagctagctattattatttttatatttattataaagttatttag

SEQ ID NO: 26834 - DNA, 96 bp, Aspergillus fumigatus
  misc_feature: 118
taacttagtggatttcctctttaaacttattctattttagattttctttcctttaattagaattattagatttatctcctatattctttataagaa

SEQ ID NO: 26835 - DNA, 96 bp, Aspergillus fumigatus
  misc_feature: 118
ttaggtctagtactactgctcaggctagtgctcaggctagtgctcaggctagtgctcaggctagtgctcaggctagtgctagtgctaggactaggg

SEQ ID NO: 26836 - DNA, 96 bp, Aspergillus fumigatus
  misc_feature: 118
tagtaaccctaaagagttctctaagtatattactagctatagtactaaataatataaatactactatctagtatataagtatatctagaaggctaa

SEQ ID NO: 26837 - DNA, 96 bp, Aspergillus fumigatus
  misc_feature: 118
ttacttcctaccttcctaaatacctctttccctacctcacttactaccttactaccttgctcactaccttacttactacctcactatctatcttac

SEQ ID NO: 26838 - DNA, 96 bp, Aspergillus fumigatus
  misc_feature: 118
ggctattttataattctaaaaagaatagctataagagaaaaagtagtagtatataaaagctattataaaaaaaaactagctaaaccttcttagtaa

SEQ ID NO: 26839 - DNA, 96 bp, Aspergillus fumigatus
  misc_feature: 118
ttaatagttaatttagccttctagatatacttatatactagatagtagtatttatattatttagtgctatagctagtaatatacttagagaacttt

SEQ ID NO: 26840 - DNA, 96 bp, Aspergillus fumigatus
  misc_feature: 118
tggcccatttaggtctagtactactgctcaggctagtgctcaggctagtgctcaggctagtgctcaggctagtgctcaggctagtgctagtgctag

SEQ ID NO: 26841 - DNA, 96 bp, Aspergillus fumigatus
  misc_feature: 118
tgagccggctatgcaggcaggccatgcagggaagccagaccgcgcagggaagccaggccatgcagggaagccagaccgcgcagggaagccaggccg

SEQ ID NO: 26842 - DNA, 96 bp, Aspergillus fumigatus
  misc_feature: 118
tctagatatacttatatactagatagtagtatttatattatttagtgctatagctagtaatatacttagagaactttttaagattactaggtagga

SEQ ID NO: 26843 - DNA, 96 bp, Aspergillus fumigatus
  misc_feature: 118
tcctctgtagtaattatctttttaatagagatatatttagctatttttatatattaattaataattactagaattatattaaatacctcttaacct

SEQ ID NO: 26844 - DNA, 96 bp, Aspergillus fumigatus
  misc_feature: 118
tcctaccttcctaaatacctctttccctacctcacttactaccttactaccttgctcactaccttacttactacctcactatctatcttactgcct

SEQ ID NO: 26845 - DNA, 96 bp, Aspergillus fumigatus
  misc_feature: 118
tagtaggttgaacagcaggtcaaacagcaggtcgaacagcaggttgaacagcaggcagaatggcaggcagtgaggtaaatagtaaagcaggcagtg

SEQ ID NO: 26846 - DNA, 96 bp, Aspergillus fumigatus
  misc_feature: 118
ctaaagatatagcctaactatatatctattatatatagaagctatatagcctactaagaataatagtattagactatagcccttagtttattacta

SEQ ID NO: 26847 - DNA, 96 bp, Aspergillus fumigatus
  misc_feature: 118
taggttgaacagcaggtcaaacagcaggtcgaacagcaggttgaacagcaggcagaatggcaggcagtgaggtaaatagtaaagcaggcagtgagg

SEQ ID NO: 26848 - DNA, 96 bp, Aspergillus fumigatus
  misc_feature: 118
tagccttctagatatacttatatactagatagtagtatttatattatttagtgctatagctagtaatatacttagagaactttttaagattactag

SEQ ID NO: 26849 - DNA, 96 bp, Aspergillus fumigatus
  misc_feature: 118
atggcccatttaggtctagtactactgctcaggctagtgctcaggctagtgctcaggctagtgctcaggctagtgctcaggctagtgctagtgcta

SEQ ID NO: 26850 - DNA, 96 bp, Aspergillus fumigatus
  misc_feature: 118
taatagttaatttagccttctagatatacttatatactagatagtagtatttatattatttagtgctatagctagtaatatacttagagaactttt

SEQ ID NO: 26851 - DNA, 96 bp, Aspergillus fumigatus
  misc_feature: 118
atactaaaggtatagcctaattatatatctattatatatagaagctatatagcctactaagaataatagtattagactatggcccttagtttatta

SEQ ID NO: 26852 - DNA, 96 bp, Aspergillus fumigatus
  misc_feature: 118
taagcttaccttagctaattatagataataagaaagctatctatactactataaatacttatatatccctaactataataagctaagagcctagtt

SEQ ID NO: 26853 - DNA, 96 bp, Aspergillus fumigatus
  misc_feature: 118
taacctctctggggcattataaccttccttataacctacttactacctcacttactaccttgctacctaccttgctacctaccttgctaccttact

SEQ ID NO: 26854 - DNA, 96 bp, Aspergillus fumigatus
  misc_feature: 118
taaatttaaaatattagaactaagtatagatattagctaaggctatctattagctagctattattatttttatatttattataaagttatttagat

SEQ ID NO: 26855 - DNA, 96 bp, Aspergillus fumigatus
  misc_feature: 118
gtaggttgaacagcaggtcaaacagcaggtcgaacagcaggttgaacagcaggcagaatggcaggcagtgaggtaaatagtaaagcaggcagtgag

SEQ ID NO: 26856 - DNA, 96 bp, Aspergillus fumigatus
  misc_feature: 118
acacaatcttataggtatctaactcttatatatacctattaatattataatagcctataattttataattaactataaactaggatagcttaaccc

SEQ ID NO: 26857 - DNA, 96 bp, Aspergillus fumigatus
  misc_feature: 118
gcttaccttagctaattatagataataagaaagctatctatactactataaatacttatatatccctaactataataagctaagagcctagttatt

SEQ ID NO: 26858 - DNA, 96 bp, Aspergillus fumigatus
  misc_feature: 118
gctaaagatatagcctaactatatatctattatatatagaagctatatagcctactaagaataatagtattagactatagcccttagtttattact

SEQ ID NO: 26859 - DNA, 96 bp, Aspergillus fumigatus
  misc_feature: 118
attttataattctaaaaagaatagctataagagaaaaagtagtagtatataaaagctattataaaaaaaaactagctaaaccttcttagtaaaaag

SEQ ID NO: 26860 - DNA, 96 bp, Aspergillus fumigatus
  misc_feature: 118
accggctgcgggctgagccggctatgcaggcaggccatgcagggaagccagaccgcgcagggaagccaggccatgcagggaagccagaccgcgcag

SEQ ID NO: 26861 - DNA, 96 bp, Aspergillus fumigatus
  misc_feature: 118
aatagtaggttgaacagcaggtcaaacagcaggtcgaacagcaggttgaacagcaggcagaatggcaggcagtgaggtaaatagtaaagcaggcag

SEQ ID NO: 26862 - DNA, 96 bp, Aspergillus fumigatus
  misc_feature: 118
ctaagcttaccttagctaattatagataataagaaagctatctatactactataaatacttatatatccctaactataataagctaagagcctagt

SEQ ID NO: 26863 - DNA, 96 bp, Aspergillus fumigatus
  misc_feature: 118
atattagcaagttcctctgtagtaattatctttttaatagagatatatttagctatttttatatattaattaataattactagaattatattaaat

SEQ ID NO: 26864 - DNA, 96 bp, Aspergillus fumigatus
  misc_feature: 118
atatctagaaggctaaattaactattaataaagtaaactaataagctaaataatctaagatctaacttctaaaactctagtataaacttactacct

SEQ ID NO: 26865 - DNA, 96 bp, Aspergillus fumigatus
  misc_feature: 118
actaaaggtatagcctaattatatatctattatatatagaagctatatagcctactaagaataatagtattagactatggcccttagtttattact

SEQ ID NO: 26866 - DNA, 96 bp, Aspergillus fumigatus
  misc_feature: 118
acagcggttacgcttcgcgctctatctccctccccgacatatccgataccgattagcggttatgccctaaccctaacaacatacccgacagcggtt

SEQ ID NO: 26867 - DNA, 96 bp, Aspergillus fumigatus
  misc_feature: 117
aacttagtggatttcctctttaaacttattctattttagattttctttcctttaattagaattattagatttatctcctatattctttataagaaa

SEQ ID NO: 26868 - DNA, 96 bp, Aspergillus fumigatus
  misc_feature: 117
ttataggtatctaactcttatatatacctattaatattataatagcctataattttataattaactataaactaggatagcttaaccctatagatg

SEQ ID NO: 26869 - DNA, 96 bp, Aspergillus fumigatus
  misc_feature: 117
ttagccttctagatatacttatatactagatagtagtatttatattatttagtgctatagctagtaatatacttagagaactttttaagattacta

SEQ ID NO: 26870 - DNA, 96 bp, Aspergillus fumigatus
  misc_feature: 117
ttaaatttaaaatattagaactaagtatagatattagctaaggctatctattagctagctattattatttttatatttattataaagttatttaga

SEQ ID NO: 26871 - DNA, 96 bp, Aspergillus fumigatus
  misc_feature: 117
ttaaatagtaggttgaacagcaggtcaaacagcaggtcgaacagcaggttgaacagcaggcagaatggcaggcagtgaggtaaatagtaaagcagg

SEQ ID NO: 26872 - DNA, 96 bp, Aspergillus fumigatus
  misc_feature: 117
aaatagtaggttgaacagcaggtcaaacagcaggtcgaacagcaggttgaacagcaggcagaatggcaggcagtgaggtaaatagtaaagcaggca

SEQ ID NO: 26873 - DNA, 96 bp, Aspergillus fumigatus
  misc_feature: 117
taataccctaagcttaccttagctaattatagataataagaaagctatctatactactataaatacttatatatccctaactataataagctaaga

SEQ ID NO: 26874 - DNA, 96 bp, Aspergillus fumigatus
  misc_feature: 117
tattaatagttaatttagccttctagatatacttatatactagatagtagtatttatattatttagtgctatagctagtaatatacttagagaact

SEQ ID NO: 26875 - DNA, 96 bp, Aspergillus fumigatus
  misc_feature: 117
taaggtagcaaggtaggtagcaaggtaggtagcaaggtagtaagtgaggtagtaagtaggttataaggaaggttataatgccccagagaggttata

SEQ ID NO: 26876 - DNA, 96 bp, Aspergillus fumigatus
  misc_feature: 117
taggtctagtactactgctcaggctagtgctcaggctagtgctcaggctagtgctcaggctagtgctcaggctagtgctagtgctaggactagggc

SEQ ID NO: 26877 - DNA, 96 bp, Aspergillus fumigatus
  misc_feature: 117
ccctaagcttaccttagctaattatagataataagaaagctatctatactactataaatacttatatatccctaactataataagctaagagccta

SEQ ID NO: 26878 - DNA, 96 bp, Aspergillus fumigatus
  misc_feature: 117
tactaaaggtatagcctaattatatatctattatatatagaagctatatagcctactaagaataatagtattagactatggcccttagtttattac

SEQ ID NO: 26879 - DNA, 96 bp, Aspergillus fumigatus
  misc_feature: 117
tacctagtaaccctaaagagttctctaagtatattactagctatagtactaaataatataaatactactatctagtatataagtatatctagaagg

SEQ ID NO: 26880 - DNA, 96 bp, Aspergillus fumigatus
  misc_feature: 117
atgctaaagatatagcctaactatatatctattatatatagaagctatatagcctactaagaataatagtattagactatagcccttagtttatta

SEQ ID NO: 26881 - DNA, 96 bp, Aspergillus fumigatus
  misc_feature: 117
atctagaaggctaaattaactattaataaagtaaactaataagctaaataatctaagatctaacttctaaaactctagtataaacttactacctta

SEQ ID NO: 26882 - DNA, 96 bp, Aspergillus fumigatus
  misc_feature: 117
atttaaatttaaaatattagaactaagtatagatattagctaaggctatctattagctagctattattatttttatatttattataaagttattta

SEQ ID NO: 26883 - DNA, 96 bp, Aspergillus fumigatus
  misc_feature: 117
actattattaagaagtagatatataccctatatttattaaaattatatagataaatctatcctaccttctatatatcccttcttaagaagtagaac

SEQ ID NO: 26884 - DNA, 96 bp, Aspergillus fumigatus
  misc_feature: 117
gtaaccctaaagagttctctaagtatattactagctatagtactaaataatataaatactactatctagtatataagtatatctagaaggctaaat

SEQ ID NO: 26885 - DNA, 96 bp, Aspergillus fumigatus
  misc_feature: 117
ggtgcttcttaactctagggctaggcctaactatatattatactaatttataatatagaataggtactaatttaaaaatagtataatacttccttc

SEQ ID NO: 26886 - DNA, 96 bp, Aspergillus fumigatus
  misc_feature: 117
ctgagccggctatgcaggcaggccatgcagggaagccagaccgcgcagggaagccaggccatgcagggaagccagaccgcgcagggaagccaggcc

SEQ ID NO: 26887 - DNA, 96 bp, Aspergillus fumigatus
  misc_feature: 117
gccaacatattcaaacttcatgtataatatatatctctgcgctatgataccatctaaaatatatatattcattcacctaatatattaatgctgatt

SEQ ID NO: 26888 - DNA, 96 bp, Aspergillus fumigatus
  misc_feature: 117
gcaagttcctctgtagtaattatctttttaatagagatatatttagctatttttatatattaattaataattactagaattatattaaatacctct

SEQ ID NO: 26889 - DNA, 96 bp, Aspergillus fumigatus
  misc_feature: 117
ctgcgggctgagccggctatgcaggcaggccatgcagggaagccagaccgcgcagggaagccaggccatgcagggaagccagaccgcgcagggaag

SEQ ID NO: 26890 - DNA, 96 bp, Aspergillus fumigatus
  misc_feature: 117
cttataggtatctaactcttatatatacctattaatattataatagcctataattttataattaactataaactaggatagcttaaccctatagat

SEQ ID NO: 26891 - DNA, 96 bp, Aspergillus fumigatus
  misc_feature: 117
aataccctaagcttaccttagctaattatagataataagaaagctatctatactactataaatacttatatatccctaactataataagctaagag

SEQ ID NO: 26892 - DNA, 96 bp, Aspergillus fumigatus
  misc_feature: 117
cctaagcttaccttagctaattatagataataagaaagctatctatactactataaatacttatatatccctaactataataagctaagagcctag

SEQ ID NO: 26893 - DNA, 96 bp, Aspergillus fumigatus
  misc_feature: 117
agtattcttataataactaggctcttagcttattatagttagggatatataagtatttatagtagtatagatagctttcttattatctataattag

SEQ ID NO: 26894 - DNA, 96 bp, Aspergillus fumigatus
  misc_feature: 117
aatatagtaataaactaagggctatagtctaatactattattcttagtaggctatatagcttctatatataatagatatataatcaggctatacct

SEQ ID NO: 26895 - DNA, 96 bp, Aspergillus fumigatus
  misc_feature: 117
agggctattttataattctaaaaagaatagctataagagaaaaagtagtagtatataaaagctattataaaaaaaaactagctaaaccttcttagt

SEQ ID NO: 26896 - DNA, 96 bp, Aspergillus fumigatus
  misc_feature: 116
tctctgctactactgtttatggacttaatcttaaaaaataaatataataattaaaagctataatactatctataaccctagagaaggaagagaaaa

SEQ ID NO: 26897 - DNA, 96 bp, Aspergillus fumigatus
  misc_feature: 116
atccttaggtggtttagcctatctaactattatctctatactatactatataataataagaagatactctctaattctattaataaggctataaaa

SEQ ID NO: 26898 - DNA, 96 bp, Aspergillus fumigatus
  misc_feature: 116
tttattaatagttaatttagccttctagatatacttatatactagatagtagtatttatattatttagtgctatagctagtaatatacttagagaa

SEQ ID NO: 26899 - DNA, 96 bp, Aspergillus fumigatus
  misc_feature: 116
tttagccttctagatatacttatatactagatagtagtatttatattatttagtgctatagctagtaatatacttagagaactttttaagattact

SEQ ID NO: 26900 - DNA, 96 bp, Aspergillus fumigatus
  misc_feature: 116
ttctagatatacttatatactagatagtagtatttatattatttagtgctatagctagtaatatacttagagaactttttaagattactaggtagg

SEQ ID NO: 26901 - DNA, 96 bp, Aspergillus fumigatus
  misc_feature: 116
tactattattaagaagtagatatataccctatatttattaaaattatatagataaatctatcctaccttctatatatcccttcttaagaagtagaa

SEQ ID NO: 26902 - DNA, 96 bp, Aspergillus fumigatus
  misc_feature: 116
ttattaatagttaatttagccttctagatatacttatatactagatagtagtatttatattatttagtgctatagctagtaatatacttagagaac

SEQ ID NO: 26903 - DNA, 96 bp, Aspergillus fumigatus
  misc_feature: 116
ttagcaagttcctctgtagtaattatctttttaatagagatatatttagctatttttatatattaattaataattactagaattatattaaatacc

SEQ ID NO: 26904 - DNA, 96 bp, Aspergillus fumigatus
  misc_feature: 116
ttaatttaactaataagaatatatatacagaacatattttaaaatatagaatatagggaatagagataaagataaagatctccttataataagcta

SEQ ID NO: 26905 - DNA, 96 bp, Aspergillus fumigatus
  misc_feature: 116
atatattagcaagttcctctgtagtaattatctttttaatagagatatatttagctatttttatatattaattaataattactagaattatattaa

SEQ ID NO: 26906 - DNA, 96 bp, Aspergillus fumigatus
  misc_feature: 116
ttaagaagtagatatataccctatatttattaaaattatatagataaatctatcctaccttctatatatcccttcttaagaagtagaacccttagg

SEQ ID NO: 26907 - DNA, 96 bp, Aspergillus fumigatus
  misc_feature: 116
tgatagaccattgtttatttttttttttagataagatttcaatagtaattacaattaaattttaataaacaacaacattttttttttttttttttt

SEQ ID NO: 26908 - DNA, 96 bp, Aspergillus fumigatus
  misc_feature: 116
tgatactaaaggtatagcctaattatatatctattatatatagaagctatatagcctactaagaataatagtattagactatggcccttagtttat

SEQ ID NO: 26909 - DNA, 96 bp, Aspergillus fumigatus
  misc_feature: 116
ccttaggtggtttagcctatctaactattatctctatactatactatataataataagaagatactctctaattctattaataaggctataaaaga

SEQ ID NO: 26910 - DNA, 96 bp, Aspergillus fumigatus
  misc_feature: 116
tcttataataactaggctcttagcttattatagttagggatatataagtatttatagtagtatagatagctttcttattatctataattagctaag

SEQ ID NO: 26911 - DNA, 96 bp, Aspergillus fumigatus
  misc_feature: 116
aaattattactattattaagaagtagatatataccctatatttattaaaattatatagataaatctatcctaccttctatatatcccttcttaaga

SEQ ID NO: 26912 - DNA, 96 bp, Aspergillus fumigatus
  misc_feature: 116
ctttattaatagttaatttagccttctagatatacttatatactaggtagtagtatttatactatttagtactatagctagtaatatacttagaga

SEQ ID NO: 26913 - DNA, 96 bp, Aspergillus fumigatus
  misc_feature: 116
agtaggttgaacagcaggtcaaacagcaggtcgaacagcaggttgaacagcaggcagaatggcaggcagtgaggtaaatagtaaagcaggcagtga

SEQ ID NO: 26914 - DNA, 96 bp, Aspergillus fumigatus
  misc_feature: 116
caacatattcaaacttcatgtataatatatatctctgcgctatgataccatctaaaatatatatattcattcacctaatatattaatgctgattga

SEQ ID NO: 26915 - DNA, 96 bp, Aspergillus fumigatus
  misc_feature: 116
tattactattattaagaagtagatatataccctatatttattaaaattatatagataaatctatcctaccttctatatatcccttcttaagaagta

SEQ ID NO: 26916 - DNA, 96 bp, Aspergillus fumigatus
  misc_feature: 116
tatatctagaaggctaaattaactattaataaagtaaactaataagctaaataatctaagatctaacttctaaaactctagtataaacttactacc

SEQ ID NO: 26917 - DNA, 96 bp, Aspergillus fumigatus
  misc_feature: 116
tatagtaataaactaagggctatagtctaatactattattcttagtaggctatatagcttctatatataatagatatataatcaggctataccttt

SEQ ID NO: 26918 - DNA, 96 bp, Aspergillus fumigatus
  misc_feature: 116
tataggtatctaactcttatatatacctattaatattataatagcctataattttataattaactataaactaggatagcttaaccctatagatgt

SEQ ID NO: 26919 - DNA, 96 bp, Aspergillus fumigatus
  misc_feature: 116
aatcttataggtatctaactcttatatatacctattaatattataatagcctataattttataattaactataaactaggatagcttaaccctata

SEQ ID NO: 26920 - DNA, 96 bp, Aspergillus fumigatus
  misc_feature: 116
aagatccttaggtggtttagcctatctaactattatctctatactatactatataataataagaagatactctctaattctattaataaggctata

SEQ ID NO: 26921 - DNA, 96 bp, Aspergillus fumigatus
  misc_feature: 116
ctaaaggtatagcctaattatatatctattatatatagaagctatatagcctactaagaataatagtattagactatggcccttagtttattacta

SEQ ID NO: 26922 - DNA, 96 bp, Aspergillus fumigatus
  misc_feature: 116
taggatattattaaaatagatagtatagaagatattaagataatcttataaaatattattaataaattactaaaaggttacaggtgcttctattag

SEQ ID NO: 26923 - DNA, 96 bp, Aspergillus fumigatus
  misc_feature: 116
tagcaagttcctctgtagtaattatctttttaatagagatatatttagctatttttatatattaattaataattactagaattatattaaatacct

SEQ ID NO: 26924 - DNA, 96 bp, Aspergillus fumigatus
  misc_feature: 116
taccctaagcttaccttagctaattatagataataagaaagctatctatactactataaatacttatatatccctaactataataagctaagagcc

SEQ ID NO: 26925 - DNA, 96 bp, Aspergillus fumigatus
  misc_feature: 116
tacacaatcttataggtatctaactcttatatatacctattaatattataatagcctataattttataattaactataaactaggatagcttaacc

SEQ ID NO: 26926 - DNA, 96 bp, Aspergillus fumigatus
  misc_feature: 116
taagggctattttataattctaaaaagaatagctataagagaaaaagtagtagtatataaaagctattataaaaaaaaactagctaaaccttctta

SEQ ID NO: 26927 - DNA, 96 bp, Aspergillus fumigatus
  misc_feature: 116
cagcggttacgcttcgcgctctatctccctccccgacatatccgataccgattagcggttatgccctaaccctaacaacatacccgacagcggtta

SEQ ID NO: 26928 - DNA, 96 bp, Aspergillus fumigatus
  misc_feature: 116
taaatagtaggttgaacagcaggtcaaacagcaggtcgaacagcaggttgaacagcaggcagaatggcaggcagtgaggtaaatagtaaagcaggc

SEQ ID NO: 26929 - DNA, 96 bp, Aspergillus fumigatus
  misc_feature: 116
taaagatatagcctaactatatatctattatatatagaagctatatagcctactaagaataatagtattagactatagcccttagtttattactat

SEQ ID NO: 26930 - DNA, 96 bp, Aspergillus fumigatus
  misc_feature: 116
cctgctgtgctgcctgctgtgctgcctgctgtgctgcctgctgttctgcctatcttatatataacctctctggggccttataacctgcttcactac

SEQ ID NO: 26931 - DNA, 96 bp, Aspergillus fumigatus
  misc_feature: 116
gctgagccggctatgcaggcaggccatgcagggaagccagaccgcgcagggaagccaggccatgcagggaagccagaccgcgcagggaagccaggc

SEQ ID NO: 26932 - DNA, 96 bp, Aspergillus fumigatus
  misc_feature: 116
ataccctaagcttaccttagctaattatagataataagaaagctatctatactactataaatacttatatatccctaactataataagctaagagc

SEQ ID NO: 26933 - DNA, 96 bp, Aspergillus fumigatus
  misc_feature: 116
gatactaaaggtatagcctaattatatatctattatatatagaagctatatagcctactaagaataatagtattagactatggcccttagtttatt

SEQ ID NO: 26934 - DNA, 96 bp, Aspergillus fumigatus
  misc_feature: 116
cttttctcttccttctctagggttatagatagtattatagcttttaattattatatttattttttaagattaagtccataaacagtagtagcagag

SEQ ID NO: 26935 - DNA, 96 bp, Aspergillus fumigatus
  misc_feature: 116
ctacctagtaaccctaaagagttctctaagtatattactagctatagtactaaataatataaatactactatctagtatataagtatatctagaag

SEQ ID NO: 26936 - DNA, 96 bp, Aspergillus fumigatus
  misc_feature: 116
ccatttaggtctagtactactgctcaggctagtgctcaggctagtgctcaggctagtgctcaggctagtgctcaggctagtgctagtgctaggact

SEQ ID NO: 26937 - DNA, 96 bp, Aspergillus fumigatus
  misc_feature: 116
catggcccatttaggtctagtactactgctcaggctagtgctcaggctagtgctcaggctagtgctcaggctagtgctcaggctagtgctagtgct

SEQ ID NO: 26938 - DNA, 96 bp, Aspergillus fumigatus
  misc_feature: 116
caatcttataggtatctaactcttatatatacctattaatattataatagcctataattttataattaactataaactaggatagcttaaccctat

SEQ ID NO: 26939 - DNA, 96 bp, Aspergillus fumigatus
  misc_feature: 116
aactaggatattattaaaatagatagtatagaagatattaagataatcttataaaatattattaataaattactaaaaggttacaggtgcttctat

SEQ ID NO: 26940 - DNA, 96 bp, Aspergillus fumigatus
  misc_feature: 116
atactaggtaataagggaacaagatattcacttaagggaacaagatattcacgtaagggaacaagatattcacgtaagggaacaagatattcacgt

SEQ ID NO: 26941 - DNA, 96 bp, Aspergillus fumigatus
  misc_feature: 116
acttcttagtaggctttataggacagggtagatcagtagtaggtatagtagttttaggtctagtaattaatatattagtatatattagtatatatt

SEQ ID NO: 26942 - DNA, 96 bp, Aspergillus fumigatus
  misc_feature: 115
ttttataattctaaaaagaatagctataagagaaaaagtagtagtatataaaagctattataaaaaaaaactagctaaaccttcttagtaaaaaga

SEQ ID NO: 26943 - DNA, 96 bp, Aspergillus fumigatus
  misc_feature: 115
gatccttaggtggtttagcctatctaactattatctctatactatactatataataataagaagatactctctaattctattaataaggctataaa

SEQ ID NO: 26944 - DNA, 96 bp, Aspergillus fumigatus
  misc_feature: 115
tttataattctaaaaagaatagctataagagaaaaagtagtagtatataaaagctattataaaaaaaaactagctaaaccttcttagtaaaaagag

SEQ ID NO: 26945 - DNA, 96 bp, Aspergillus fumigatus
  misc_feature: 115
ttcttataataactaggctcttagcttattatagttagggatatataagtatttatagtagtatagatagctttcttattatctataattagctaa

SEQ ID NO: 26946 - DNA, 96 bp, Aspergillus fumigatus
  misc_feature: 115
ttagtaggctttataggacagggtagatcagtagtaggtatagtagttttaggtctagtaattaatatattagtatatattagtatatattaggct

SEQ ID NO: 26947 - DNA, 96 bp, Aspergillus fumigatus
  misc_feature: 115
ttactattattaagaagtagatatataccctatatttattaaaattatatagataaatctatcctaccttctatatatcccttcttaagaagtaga

SEQ ID NO: 26948 - DNA, 96 bp, Aspergillus fumigatus
  misc_feature: 115
ttaacttagtggatttcctctttaaacttattctattttagattttctttcctttaattagaattattagatttatctcctatattctttataaga

SEQ ID NO: 26949 - DNA, 96 bp, Aspergillus fumigatus
  misc_feature: 115
tcttaattattatatataattttaagttctagtagttatataatatactaggaatacaagtatataatagcatccttatttaaggaatagggggag

SEQ ID NO: 26950 - DNA, 96 bp, Aspergillus fumigatus
  misc_feature: 115
tctctaagtaagatagtaaagaatagattagtttatctttatatattctatttttacttataggttataagcccttatagcttattataaggagat

SEQ ID NO: 26951 - DNA, 96 bp, Aspergillus fumigatus
  misc_feature: 115
ctctctaagtaagatagtaaagaatagattagtttatctttatatattctatttttacttataggttataagcccttatagcttattataaggaga

SEQ ID NO: 26952 - DNA, 96 bp, Aspergillus fumigatus
  misc_feature: 115
tctagtactactgctcaggctagtgctcaggctagtgctcaggctagtgctcaggctagtgctcaggctagtgctagtgctaggactagggctaat

SEQ ID NO: 26953 - DNA, 96 bp, Aspergillus fumigatus
  misc_feature: 115
tactttattaatagttaatttagccttctagatatacttatatactaggtagtagtatttatactatttagtactatagctagtaatatacttaga

SEQ ID NO: 26954 - DNA, 96 bp, Aspergillus fumigatus
  misc_feature: 115
tactttattaatagttaatttagccttctagatatacttatatactagatagtagtatttatattatttagtgctatagctagtaatatacttaga

SEQ ID NO: 26955 - DNA, 96 bp, Aspergillus fumigatus
  misc_feature: 115
tccttaggtggtttagcctatctaactattatctctatactatactatataataataagaagatactctctaattctattaataaggctataaaag

SEQ ID NO: 26956 - DNA, 96 bp, Aspergillus fumigatus
  misc_feature: 115
tattagcaagttcctctgtagtaattatctttttaatagagatatatttagctatttttatatattaattaataattactagaattatattaaata

SEQ ID NO: 26957 - DNA, 96 bp, Aspergillus fumigatus
  misc_feature: 115
tattcttataataactaggctcttagcttattatagttagggatatataagtatttatagtagtatagatagctttcttattatctataattagct

SEQ ID NO: 26958 - DNA, 96 bp, Aspergillus fumigatus
  misc_feature: 115
tattactagctatagtactaaatagtataaatactactgcctaatatataagtatatttaaaaaactaaattaactattaataaagtaaactaata

SEQ ID NO: 26959 - DNA, 96 bp, Aspergillus fumigatus
  misc_feature: 115
tattaagaagtagatatataccctatatttattaaaattatatagataaatctatcctaccttctatatatcccttcttaagaagtagaaccctta

SEQ ID NO: 26960 - DNA, 96 bp, Aspergillus fumigatus
  misc_feature: 115
tatctagaaggctaaattaactattaataaagtaaactaataagctaaataatctaagatctaacttctaaaactctagtataaacttactacctt

SEQ ID NO: 26961 - DNA, 96 bp, Aspergillus fumigatus
  misc_feature: 115
tagggtatagataataatagacaagaaatataattatttaatactactttaaggttattactaactaggtatatatataagtattttataattata

SEQ ID NO: 26962 - DNA, 96 bp, Aspergillus fumigatus
  misc_feature: 115
gagttaacttagtggatttcctctttaaacttattctattttagattttctttcctttaattagaattattagatttatctcctatattctttata

SEQ ID NO: 26963 - DNA, 96 bp, Aspergillus fumigatus
  misc_feature: 115
catttaggtctagtactactgctcaggctagtgctcaggctagtgctcaggctagtgctcaggctagtgctcaggctagtgctagtgctaggacta

SEQ ID NO: 26964 - DNA, 96 bp, Aspergillus fumigatus
  misc_feature: 115
tagtattcttataataactaggctcttagcttattatagttagggatatataagtatttatagtagtatagatagctttcttattatctataatta

SEQ ID NO: 26965 - DNA, 96 bp, Aspergillus fumigatus
  misc_feature: 115
acaatcttataggtatctaactcttatatatacctattaatattataatagcctataattttataattaactataaactaggatagcttaacccta

SEQ ID NO: 26966 - DNA, 96 bp, Aspergillus fumigatus
  misc_feature: 115
ccttctagatatacttatatactagatagtagtatttatattatttagtgctatagctagtaatatacttagagaactttttaagattactaggta

SEQ ID NO: 26967 - DNA, 96 bp, Aspergillus fumigatus
  misc_feature: 115
aatttagccttctagatatacttatatactagatagtagtatttatattatttagtgctatagctagtaatatacttagagaactttttaagatta

SEQ ID NO: 26968 - DNA, 96 bp, Aspergillus fumigatus
  misc_feature: 115
taatataggtagggttatttatactctataattaattaactataatttatttaagctttatattactataaatataattataggatacctagctcc

SEQ ID NO: 26969 - DNA, 96 bp, Aspergillus fumigatus
  misc_feature: 115
ctaggatattattaaaatagatagtatagaagatattaagataatcttataaaatattattaataaattactaaaaggttacaggtgcttctatta

SEQ ID NO: 26970 - DNA, 96 bp, Aspergillus fumigatus
  misc_feature: 115
taagctaagggctattttataattctaaaaagaatagctataagagaaaaagtagtagtatataaaagctattataaaaaaaaactagctaaacct

SEQ ID NO: 26971 - DNA, 96 bp, Aspergillus fumigatus
  misc_feature: 115
aagttcctctgtagtaattatctttttaatagagatatatttagctatttttatatattaattaataattactagaattatattaaatacctctta

SEQ ID NO: 26972 - DNA, 96 bp, Aspergillus fumigatus
  misc_feature: 115
attagcaagttcctctgtagtaattatctttttaatagagatatatttagctatttttatatattaattaataattactagaattatattaaatac

SEQ ID NO: 26973 - DNA, 96 bp, Aspergillus fumigatus
  misc_feature: 115
gtattcttataataactaggctcttagcttattatagttagggatatataagtatttatagtagtatagatagctttcttattatctataattagc

SEQ ID NO: 26974 - DNA, 96 bp, Aspergillus fumigatus
  misc_feature: 115
ctattattaagaagtagatatataccctatatttattaaaattatatagataaatctatcctaccttctatatatcccttcttaagaagtagaacc

SEQ ID NO: 26975 - DNA, 96 bp, Aspergillus fumigatus
  misc_feature: 115
gccttctagatatacttatatactagatagtagtatttatattatttagtgctatagctagtaatatacttagagaactttttaagattactaggt

SEQ ID NO: 26976 - DNA, 96 bp, Aspergillus fumigatus
  misc_feature: 115
acctagtaaccctaaagagttctctaagtatattactagctatagtactaaataatataaatactactatctagtatataagtatatctagaaggc

SEQ ID NO: 26977 - DNA, 96 bp, Aspergillus fumigatus
  misc_feature: 115
cttagtaggctttataggacagggtagatcagtagtaggtatagtagttttaggtctagtaattaatatattagtatatattagtatatattaggc

SEQ ID NO: 26978 - DNA, 96 bp, Aspergillus fumigatus
  misc_feature: 115
ctctaagtaagatagtaaagaatagattagtttatctttatatattctatttttacttataggttataagcccttatagcttattataaggagatc

SEQ ID NO: 26979 - DNA, 96 bp, Aspergillus fumigatus
  misc_feature: 115
gacagcggttacgcttcgcgctctatctccctccccgacatatccgataccgattagcggttatgccctaaccctaacaacatacccgacagcggt

SEQ ID NO: 26980 - DNA, 96 bp, Aspergillus fumigatus
  misc_feature: 115
agctaagggctattttataattctaaaaagaatagctataagagaaaaagtagtagtatataaaagctattataaaaaaaaactagctaaaccttc

SEQ ID NO: 26981 - DNA, 96 bp, Aspergillus fumigatus
  misc_feature: 115
cttctagatatacttatatactagatagtagtatttatattatttagtgctatagctagtaatatacttagagaactttttaagattactaggtag

SEQ ID NO: 26982 - DNA, 96 bp, Aspergillus fumigatus
  misc_feature: 115
atttaggtctagtactactgctcaggctagtgctcaggctagtgctcaggctagtgctcaggctagtgctcaggctagtgctagtgctaggactag

SEQ ID NO: 26983 - DNA, 96 bp, Aspergillus fumigatus
  misc_feature: 115
attaagaagtagatatataccctatatttattaaaattatatagataaatctatcctaccttctatatatcccttcttaagaagtagaacccttag

SEQ ID NO: 26984 - DNA, 96 bp, Aspergillus fumigatus
  misc_feature: 115
ctaagggctattttataattctaaaaagaatagctataagagaaaaagtagtagtatataaaagctattataaaaaaaaactagctaaaccttctt

SEQ ID NO: 26985 - DNA, 96 bp, Aspergillus fumigatus
  misc_feature: 115
aagggctattttataattctaaaaagaatagctataagagaaaaagtagtagtatataaaagctattataaaaaaaaactagctaaaccttcttag

SEQ ID NO: 26986 - DNA, 96 bp, Aspergillus fumigatus
  misc_feature: 115
agccttctagatatacttatatactagatagtagtatttatattatttagtgctatagctagtaatatacttagagaactttttaagattactagg

SEQ ID NO: 26987 - DNA, 96 bp, Aspergillus fumigatus
  misc_feature: 115
ccaacatattcaaacttcatgtataatatatatctctgcgctatgataccatctaaaatatatatattcattcacctaatatattaatgctgattg

SEQ ID NO: 26988 - DNA, 96 bp, Aspergillus fumigatus
  misc_feature: 115
acttcctaccttcctaaatacctctttccctacctcacttactaccttactaccttgctcactaccttacttactacctcactatctatcttactg

SEQ ID NO: 26989 - DNA, 96 bp, Aspergillus fumigatus
  misc_feature: 115
agtataagaatactactagcctaatatatactaatatatactaatatattaattactagacctaaaactactatacctactactgatctaccctgt

SEQ ID NO: 26990 - DNA, 96 bp, Aspergillus fumigatus
  misc_feature: 115
aggtgcttcttaactctagggctaggcctaactatatattatactaatttataatatagaataggtactaatttaaaaatagtataatacttcctt

SEQ ID NO: 26991 - DNA, 96 bp, Aspergillus fumigatus
  misc_feature: 115
accctaagcttaccttagctaattatagataataagaaagctatctatactactataaatacttatatatccctaactataataagctaagagcct

SEQ ID NO: 26992 - DNA, 96 bp, Aspergillus fumigatus
  misc_feature: 115
aatataggtagggttatttatactctataattaattaactataatttatttaagctttatattactataaatataattataggatacctagctcct

SEQ ID NO: 26993 - DNA, 96 bp, Aspergillus fumigatus
  misc_feature: 115
aatagttaatttagccttctagatatacttatatactagatagtagtatttatattatttagtgctatagctagtaatatacttagagaacttttt

SEQ ID NO: 26994 - DNA, 96 bp, Aspergillus fumigatus
  misc_feature: 114
atctctgctactactgtttatggacttaatcttaaaaaataaatataataattaaaagctataatactatctataaccctagagaaggaagagaaa

SEQ ID NO: 26995 - DNA, 96 bp, Aspergillus fumigatus
  misc_feature: 114
cctacctagtaaccctaaagagttctctaagtatattactagctatagtactaaataatataaatactactatctagtatataagtatatctagaa

SEQ ID NO: 26996 - DNA, 96 bp, Aspergillus fumigatus
  misc_feature: 114
ttcctctgtagtaattatctttttaatagagatatatttagctatttttatatattaattaataattactagaattatattaaatacctcttaacc

SEQ ID NO: 26997 - DNA, 96 bp, Aspergillus fumigatus
  misc_feature: 114
agatccttaggtggtttagcctatctaactattatctctatactatactatataataataagaagatactctctaattctattaataaggctataa

SEQ ID NO: 26998 - DNA, 96 bp, Aspergillus fumigatus
  misc_feature: 114
tcttataggtatctaactcttatatatacctattaatattataatagcctataattttataattaactataaactaggatagcttaaccctataga

SEQ ID NO: 26999 - DNA, 96 bp, Aspergillus fumigatus
  misc_feature: 114
tcttagtaggctttataggacagggtagatcagtagtaggtatagtagttttaggtctagtaattaatatattagtatatattagtatatattagg

SEQ ID NO: 27000 - DNA, 96 bp, Aspergillus fumigatus
  misc_feature: 114
ctttattaatagttaatttagccttctagatatacttatatactagatagtagtatttatattatttagtgctatagctagtaatatacttagaga

SEQ ID NO: 27001 - DNA, 96 bp, Aspergillus fumigatus
  misc_feature: 114
tcctacctagtaaccctaaagagttctctaagtatattactagctatagtactaaataatataaatactactatctagtatataagtatatctaga

SEQ ID NO: 27002 - DNA, 96 bp, Aspergillus fumigatus
  misc_feature: 114
agtatatctagaaggctaaattaactattaataaagtaaactaataagctaaataatctaagatctaacttctaaaactctagtataaacttacta

SEQ ID NO: 27003 - DNA, 96 bp, Aspergillus fumigatus
  misc_feature: 114
attcttataataactaggctcttagcttattatagttagggatatataagtatttatagtagtatagatagctttcttattatctataattagcta

SEQ ID NO: 27004 - DNA, 96 bp, Aspergillus fumigatus
  misc_feature: 114
ggtctagtactactgctcaggctagtgctcaggctagtgctcaggctagtgctcaggctagtgctcaggctagtgctagtgctaggactagggcta

SEQ ID NO: 27005 - DNA, 96 bp, Aspergillus fumigatus
  misc_feature: 114
aaactaggatattattaaaatagatagtatagaagatattaagataatcttataaaatattattaataaattactaaaaggttacaggtgcttcta

SEQ ID NO: 27006 - DNA, 96 bp, Aspergillus fumigatus
  misc_feature: 114
tactaggtaataagggaacaagatattcacttaagggaacaagatattcacgtaagggaacaagatattcacgtaagggaacaagatattcacgta

SEQ ID NO: 27007 - DNA, 96 bp, Aspergillus fumigatus
  misc_feature: 114
cttcttagtaggctttataggacagggtagatcagtagtaggtatagtagttttaggtctagtaattaatatattagtatatattagtatatatta

SEQ ID NO: 27008 - DNA, 96 bp, Aspergillus fumigatus
  misc_feature: 114
atagttaatttagccttctagatatacttatatactagatagtagtatttatattatttagtgctatagctagtaatatacttagagaacttttta

SEQ ID NO: 27009 - DNA, 96 bp, Aspergillus fumigatus
  misc_feature: 114
gtatatctagaaggctaaattaactattaataaagtaaactaataagctaaataatctaagatctaacttctaaaactctagtataaacttactac

SEQ ID NO: 27010 - DNA, 96 bp, Aspergillus fumigatus
  misc_feature: 114
atttagccttctagatatacttatatactagatagtagtatttatattatttagtgctatagctagtaatatacttagagaactttttaagattac

SEQ ID NO: 27011 - DNA, 96 bp, Aspergillus fumigatus
  misc_feature: 114
ctaagctaagggctattttataattctaaaaagaatagctataagagaaaaagtagtagtatataaaagctattataaaaaaaaactagctaaacc

SEQ ID NO: 27012 - DNA, 96 bp, Aspergillus fumigatus
  misc_feature: 114
ctttagaggtaggagctaggtatcctataattatatttatagtaatataaagcttaaataaattatagttaattaattatagagtataaataaccc

SEQ ID NO: 27013 - DNA, 96 bp, Aspergillus fumigatus
  misc_feature: 114
ataatataggtagggttatttatactctataattaattaactataatttatttaagctttatattactataaatataattataggatacctagctc

SEQ ID NO: 27014 - DNA, 96 bp, Aspergillus fumigatus
  misc_feature: 114
gaaagggactaagcctattacttagctacccctactataaatatacctatacctatacctatatataactctattactaaaaagcctgtagttact

SEQ ID NO: 27015 - DNA, 96 bp, Aspergillus fumigatus
  misc_feature: 114
cttaggtggtttagcctatctaactattatctctatactatactatataataataagaagatactctctaattctattaataaggctataaaagat

SEQ ID NO: 27016 - DNA, 96 bp, Aspergillus fumigatus
  misc_feature: 114
ctgctcaggctagtgctcaggctagtgctcaggctagtgctcaggctagtgctcaggctagtgctagtgctaggactagggctaatgtgatcatct

SEQ ID NO: 27017 - DNA, 96 bp, Aspergillus fumigatus
  misc_feature: 114
actttattaatagttaatttagccttctagatatacttatatactaggtagtagtatttatactatttagtactatagctagtaatatacttagag

SEQ ID NO: 27018 - DNA, 96 bp, Aspergillus fumigatus
  misc_feature: 114
actttattaatagttaatttagccttctagatatacttatatactagatagtagtatttatattatttagtgctatagctagtaatatacttagag

SEQ ID NO: 27019 - DNA, 96 bp, Aspergillus fumigatus
  misc_feature: 114
ctagtactactgctcaggctagtgctcaggctagtgctcaggctagtgctcaggctagtgctcaggctagtgctagtgctaggactagggctaatg

SEQ ID NO: 27020 - DNA, 96 bp, Aspergillus fumigatus
  misc_feature: 114
attactattattaagaagtagatatataccctatatttattaaaattatatagataaatctatcctaccttctatatatcccttcttaagaagtag

SEQ ID NO: 27021 - DNA, 96 bp, Aspergillus fumigatus
  misc_feature: 114
aatactaggtaataagggaacaagatattcacttaagggaacaagatattcacgtaagggaacaagatattcacgtaagggaacaagatattcacg

SEQ ID NO: 27022 - DNA, 96 bp, Aspergillus fumigatus
  misc_feature: 114
attcttaattattatatataattttaagttctagtagttatataatatactaggaatacaagtatataatagcatccttatttaaggaataggggg

SEQ ID NO: 27023 - DNA, 96 bp, Aspergillus fumigatus
  misc_feature: 114
cacaatcttataggtatctaactcttatatatacctattaatattataatagcctataattttataattaactataaactaggatagcttaaccct

SEQ ID NO: 27024 - DNA, 96 bp, Aspergillus fumigatus
  misc_feature: 114
atagtattcttataataactaggctcttagcttattatagttagggatatataagtatttatagtagtatagatagctttcttattatctataatt

SEQ ID NO: 27025 - DNA, 96 bp, Aspergillus fumigatus
  misc_feature: 114
agagttaacttagtggatttcctctttaaacttattctattttagattttctttcctttaattagaattattagatttatctcctatattctttat

SEQ ID NO: 27026 - DNA, 96 bp, Aspergillus fumigatus
  misc_feature: 114
agtaaagaatagattagtttatctttatatattctatttttacttataggttataagcccttatagcttattataaggagatctttatctttatct

SEQ ID NO: 27027 - DNA, 96 bp, Aspergillus fumigatus
  misc_feature: 114
aggtctagtactactgctcaggctagtgctcaggctagtgctcaggctagtgctcaggctagtgctcaggctagtgctagtgctaggactagggct

SEQ ID NO: 27028 - DNA, 96 bp, Aspergillus fumigatus
  misc_feature: 114
actaggatattattaaaatagatagtatagaagatattaagataatcttataaaatattattaataaattactaaaaggttacaggtgcttctatt

SEQ ID NO: 27029 - DNA, 96 bp, Aspergillus fumigatus
  misc_feature: 114
aagctaagggctattttataattctaaaaagaatagctataagagaaaaagtagtagtatataaaagctattataaaaaaaaactagctaaacctt

SEQ ID NO: 27030 - DNA, 96 bp, Aspergillus fumigatus
  misc_feature: 113
tttagaggtaggagctaggtatcctataattatatttatagtaatataaagcttaaataaattatagttaattaattatagagtataaataaccct

SEQ ID NO: 27031 - DNA, 96 bp, Aspergillus fumigatus
  misc_feature: 113
ttcttaattattatatataattttaagttctagtagttatataatatactaggaatacaagtatataatagcatccttatttaaggaataggggga

SEQ ID NO: 27032 - DNA, 96 bp, Aspergillus fumigatus
  misc_feature: 113
aatctctgctactactgtttatggacttaatcttaaaaaataaatataataattaaaagctataatactatctataaccctagagaaggaagagaa

SEQ ID NO: 27033 - DNA, 96 bp, Aspergillus fumigatus
  misc_feature: 113
agggtatagataataatagacaagaaatataattatttaatactactttaaggttattactaactaggtatatatataagtattttataattataa

SEQ ID NO: 27034 - DNA, 96 bp, Aspergillus fumigatus
  misc_feature: 113
ttaggtggtttagcctatctaactattatctctatactatactatataataataagaagatactctctaattctattaataaggctataaaagata

SEQ ID NO: 27035 - DNA, 96 bp, Aspergillus fumigatus
  misc_feature: 113
ttacacaatcttataggtatctaactcttatatatacctattaatattataatagcctataattttataattaactataaactaggatagcttaac

SEQ ID NO: 27036 - DNA, 96 bp, Aspergillus fumigatus
  misc_feature: 113
agttcctctgtagtaattatctttttaatagagatatatttagctatttttatatattaattaataattactagaattatattaaatacctcttaa

SEQ ID NO: 27037 - DNA, 96 bp, Aspergillus fumigatus
  misc_feature: 113
tgcctgctgtgctgcctgctgtgctgcctgctgtgctgcctgctgttctgcctatcttatatataacctctctggggccttataacctgcttcact

SEQ ID NO: 27038 - DNA, 96 bp, Aspergillus fumigatus
  misc_feature: 113
tcttgttcccttacgtgaatatcttgttcccttacgtgaatatcttgttcccttacgtgaatatcttgttcccttaagtgaatatcttgttccctt

SEQ ID NO: 27039 - DNA, 96 bp, Aspergillus fumigatus
  misc_feature: 113
tatagtattcttataataactaggctcttagcttattatagttagggatatataagtatttatagtagtatagatagctttcttattatctataat

SEQ ID NO: 27040 - DNA, 96 bp, Aspergillus fumigatus
  misc_feature: 113
aaagatatagcctaactatatatctattatatatagaagctatatagcctactaagaataatagtattagactatagcccttagtttattactata

SEQ ID NO: 27041 - DNA, 96 bp, Aspergillus fumigatus
  misc_feature: 113
aatttaactaataagaatatatatacagaacatattttaaaatatagaatatagggaatagagataaagataaagatctccttataataagctata

SEQ ID NO: 27042 - DNA, 96 bp, Aspergillus fumigatus
  misc_feature: 113
gcctgctgtgctgcctgctgtgctgcctgctgtgctgcctgctgttctgcctatcttatatataacctctctggggccttataacctgcttcacta

SEQ ID NO: 27043 - DNA, 96 bp, Aspergillus fumigatus
  misc_feature: 113
tagtaaagaatagattagtttatctttatatattctatttttacttataggttataagcccttatagcttattataaggagatctttatctttatc

SEQ ID NO: 27044 - DNA, 96 bp, Aspergillus fumigatus
  misc_feature: 113
taaagatccttaggtggtttagcctatctaactattatctctatactatactatataataataagaagatactctctaattctattaataaggcta

SEQ ID NO: 27045 - DNA, 96 bp, Aspergillus fumigatus
  misc_feature: 113
taatttagccttctagatatacttatatactagatagtagtatttatattatttagtgctatagctagtaatatacttagagaactttttaagatt

SEQ ID NO: 27046 - DNA, 96 bp, Aspergillus fumigatus
  misc_feature: 113
taatttaactaataagaatatatatacagaacatattttaaaatatagaatatagggaatagagataaagataaagatctccttataataagctat

SEQ ID NO: 27047 - DNA, 96 bp, Aspergillus fumigatus
  misc_feature: 113
gtttaaaattattactattattaagaagtagatatataccctatatttattaaaattatatagataaatctatcctaccttctatatatcccttct

SEQ ID NO: 27048 - DNA, 96 bp, Aspergillus fumigatus
  misc_feature: 113
gttcctctgtagtaattatctttttaatagagatatatttagctatttttatatattaattaataattactagaattatattaaatacctcttaac

SEQ ID NO: 27049 - DNA, 96 bp, Aspergillus fumigatus
  misc_feature: 113
atctttagaggtaggagctaggtatcctataattatatttatagtaatataaagcttaaataaattatagttaattaattatagagtataaataac

SEQ ID NO: 27050 - DNA, 96 bp, Aspergillus fumigatus
  misc_feature: 113
gttaacttagtggatttcctctttaaacttattctattttagattttctttcctttaattagaattattagatttatctcctatattctttataag

SEQ ID NO: 27051 - DNA, 96 bp, Aspergillus fumigatus
  misc_feature: 113
ctgcctgctgtgctgcctgctgtgctgcctgctgtgctgcctgctgttctgcctatcttatatataacctctctggggccttataacctgcttcac

SEQ ID NO: 27052 - DNA, 96 bp, Aspergillus fumigatus
  misc_feature: 113
gctaagggctattttataattctaaaaagaatagctataagagaaaaagtagtagtatataaaagctattataaaaaaaaactagctaaaccttct

SEQ ID NO: 27053 - DNA, 96 bp, Aspergillus fumigatus
  misc_feature: 113
cctaaagatccttaggtggtttagcctatctaactattatctctatactatactatataataataagaagatactctctaattctattaataaggc

SEQ ID NO: 27054 - DNA, 96 bp, Aspergillus fumigatus
  misc_feature: 113
gccgtttaaaattattactattattaagaagtagatatataccctatatttattaaaattatatagataaatctatcctaccttctatatatccct

SEQ ID NO: 27055 - DNA, 96 bp, Aspergillus fumigatus
  misc_feature: 113
gatatccttagatatttctccttctactattcttctctattttactactattccttctattcttcctttatacctaggcaagccatctattcccct

SEQ ID NO: 27056 - DNA, 96 bp, Aspergillus fumigatus
  misc_feature: 113
cgtttaaaattattactattattaagaagtagatatataccctatatttattaaaattatatagataaatctatcctaccttctatatatcccttc

SEQ ID NO: 27057 - DNA, 96 bp, Aspergillus fumigatus
  misc_feature: 113
atcctaaagatccttaggtggtttagcctatctaactattatctctatactatactatataataataagaagatactctctaattctattaataag

SEQ ID NO: 27058 - DNA, 96 bp, Aspergillus fumigatus
  misc_feature: 113
cttataataactaggctcttagcttattatagttagggatatataagtatttatagtagtatagatagctttcttattatctataattagctaagg

SEQ ID NO: 27059 - DNA, 96 bp, Aspergillus fumigatus
  misc_feature: 113
atcttataggtatctaactcttatatatacctattaatattataatagcctataattttataattaactataaactaggatagcttaaccctatag

SEQ ID NO: 27060 - DNA, 96 bp, Aspergillus fumigatus
  misc_feature: 113
ctaaagatccttaggtggtttagcctatctaactattatctctatactatactatataataataagaagatactctctaattctattaataaggct

SEQ ID NO: 27061 - DNA, 96 bp, Aspergillus fumigatus
  misc_feature: 113
atattactagctatagtactaaatagtataaatactactgcctaatatataagtatatttaaaaaactaaattaactattaataaagtaaactaat

SEQ ID NO: 27062 - DNA, 96 bp, Aspergillus fumigatus
  misc_feature: 113
aagatatagcctaactatatatctattatatatagaagctatatagcctactaagaataatagtattagactatagcccttagtttattactatat

SEQ ID NO: 27063 - DNA, 96 bp, Aspergillus fumigatus
  misc_feature: 113
atatagcctaactatatatctattatatatagaagctatatagcctactaagaataatagtattagactatagcccttagtttattactatattct

SEQ ID NO: 27064 - DNA, 96 bp, Aspergillus fumigatus
  misc_feature: 113
aaagatccttaggtggtttagcctatctaactattatctctatactatactatataataataagaagatactctctaattctattaataaggctat

SEQ ID NO: 27065 - DNA, 96 bp, Aspergillus fumigatus
  misc_feature: 113
aagtatatctagaaggctaaattaactattaataaagtaaactaataagctaaataatctaagatctaacttctaaaactctagtataaacttact

SEQ ID NO: 27066 - DNA, 96 bp, Aspergillus fumigatus
  misc_feature: 113
agatatagcctaactatatatctattatatatagaagctatatagcctactaagaataatagtattagactatagcccttagtttattactatatt

SEQ ID NO: 27067 - DNA, 96 bp, Aspergillus fumigatus
  misc_feature: 112
ttgttcccttacgtgaatatcttgttcccttacgtgaatatcttgttcccttacgtgaatatcttgttcccttaagtgaatatcttgttcccttat

SEQ ID NO: 27068 - DNA, 96 bp, Aspergillus fumigatus
  misc_feature: 112
ttcttagtaggctttataggacagggtagatcagtagtaggtatagtagttttaggtctagtaattaatatattagtatatattagtatatattag

SEQ ID NO: 27069 - DNA, 96 bp, Aspergillus fumigatus
  misc_feature: 112
attactagctatagtactaaatagtataaatactactgcctaatatataagtatatttaaaaaactaaattaactattaataaagtaaactaataa

SEQ ID NO: 27070 - DNA, 96 bp, Aspergillus fumigatus
  misc_feature: 112
ttatatctaaggataatataggtagggttatttatactctataattaattaactataatttatttaagctttatattactataaatataattatag

SEQ ID NO: 27071 - DNA, 96 bp, Aspergillus fumigatus
  misc_feature: 112
atttaactaataagaatatatatacagaacatattttaaaatatagaatatagggaatagagataaagataaagatctccttataataagctataa

SEQ ID NO: 27072 - DNA, 96 bp, Aspergillus fumigatus
  misc_feature: 112
actaggtaataagggaacaagatattcacttaagggaacaagatattcacgtaagggaacaagatattcacgtaagggaacaagatattcacgtaa

SEQ ID NO: 27073 - DNA, 96 bp, Aspergillus fumigatus
  misc_feature: 112
accctgcttagcaccgagaatactaggtaataagggaacaagatattcacttaagggaacaagatattcacgtaagggaacaagatattcacgtaa

SEQ ID NO: 27074 - DNA, 96 bp, Aspergillus fumigatus
  misc_feature: 112
tagttaatttagccttctagatatacttatatactagatagtagtatttatattatttagtgctatagctagtaatatacttagagaactttttaa

SEQ ID NO: 27075 - DNA, 96 bp, Aspergillus fumigatus
  misc_feature: 112
tgcctgtcttactgcctgcctcactatataccaactatggttaatattatatatcccccactgattatatatatatatatgcatgtgtacaaacca

SEQ ID NO: 27076 - DNA, 96 bp, Aspergillus fumigatus
  misc_feature: 112
tgctgcctgctgtgctgcctgctgtgctgcctgctgtgctgcctgctgttctgcctatcttatatataacctctctggggccttataacctgcttc

SEQ ID NO: 27077 - DNA, 96 bp, Aspergillus fumigatus
  misc_feature: 112
gctgcctgctgtgctgcctgctgtgctgcctgctgtgctgcctgctgttctgcctatcttatatataacctctctggggccttataacctgcttca

SEQ ID NO: 27078 - DNA, 96 bp, Aspergillus fumigatus
  misc_feature: 112
tctttagaggtaggagctaggtatcctataattatatttatagtaatataaagcttaaataaattatagttaattaattatagagtataaataacc

SEQ ID NO: 27079 - DNA, 96 bp, Aspergillus fumigatus
  misc_feature: 112
tctgtctacctcactgcctgtcttactgcctgcctcactatataccaactatggttaatattatatatcccccactgattatatatatatatatgc

SEQ ID NO: 27080 - DNA, 96 bp, Aspergillus fumigatus
  misc_feature: 112
tctaagtaagatagtaaagaatagattagtttatctttatatattctatttttacttataggttataagcccttatagcttattataaggagatct

SEQ ID NO: 27081 - DNA, 96 bp, Aspergillus fumigatus
  misc_feature: 112
tcctaaagatccttaggtggtttagcctatctaactattatctctatactatactatataataataagaagatactctctaattctattaataagg

SEQ ID NO: 27082 - DNA, 96 bp, Aspergillus fumigatus
  misc_feature: 112
ggtggtttagcctatctaactattatctctatactatactatataataataagaagatactctctaattctattaataaggctataaaagataata

SEQ ID NO: 27083 - DNA, 96 bp, Aspergillus fumigatus
  misc_feature: 112
tataaactaggatattattaaaatagatagtatagaagatattaagataatcttataaaatattattaataaattactaaaaggttacaggtgctt

SEQ ID NO: 27084 - DNA, 96 bp, Aspergillus fumigatus
  misc_feature: 112
ctagtaaccctaaagagttctctaagtatattactagctatagtactaaataatataaatactactatctagtatataagtatatctagaaggcta

SEQ ID NO: 27085 - DNA, 96 bp, Aspergillus fumigatus
  misc_feature: 112
tagaaagggactaagcctattacttagctacccctactataaatatacctatacctatacctatatataactctattactaaaaagcctgtagtta

SEQ ID NO: 27086 - DNA, 96 bp, Aspergillus fumigatus
  misc_feature: 112
tacttcctaccttcctaaatacctctttccctacctcacttactaccttactaccttgctcactaccttacttactacctcactatctatcttact

SEQ ID NO: 27087 - DNA, 96 bp, Aspergillus fumigatus
  misc_feature: 112
ataagtatatctagaaggctaaattaactattaataaagtaaactaataagctaaataatctaagatctaacttctaaaactctagtataaactta

SEQ ID NO: 27088 - DNA, 96 bp, Aspergillus fumigatus
  misc_feature: 112
cttgttcccttacgtgaatatcttgttcccttacgtgaatatcttgttcccttacgtgaatatcttgttcccttaagtgaatatcttgttccctta

SEQ ID NO: 27089 - DNA, 96 bp, Aspergillus fumigatus
  misc_feature: 112
taagatgatttaatagatatgattcaatagatagatttaatagatacgatgattcaatagatatgatttaatagagaagaagggttgttgagtagt

SEQ ID NO: 27090 - DNA, 96 bp, Aspergillus fumigatus
  misc_feature: 112
taagatagtaaagaatagattagtttatctttatatattctatttttacttataggttataagcccttatagcttattataaggagatctttatct

SEQ ID NO: 27091 - DNA, 96 bp, Aspergillus fumigatus
  misc_feature: 112
taaactaggatattattaaaatagatagtatagaagatattaagataatcttataaaatattattaataaattactaaaaggttacaggtgcttct

SEQ ID NO: 27092 - DNA, 96 bp, Aspergillus fumigatus
  misc_feature: 112
actaagctaagggctattttataattctaaaaagaatagctataagagaaaaagtagtagtatataaaagctattataaaaaaaaactagctaaac

SEQ ID NO: 27093 - DNA, 96 bp, Aspergillus fumigatus
  misc_feature: 112
gtgctgcctgctgtgctgcctgctgtgctgcctgctgtgctgcctgctgttctgcctatcttatatataacctctctggggccttataacctgctt

SEQ ID NO: 27094 - DNA, 96 bp, Aspergillus fumigatus
  misc_feature: 112
aacatattcaaacttcatgtataatatatatctctgcgctatgataccatctaaaatatatatattcattcacctaatatattaatgctgattgac

SEQ ID NO: 27095 - DNA, 96 bp, Aspergillus fumigatus
  misc_feature: 112
agaaagggactaagcctattacttagctacccctactataaatatacctatacctatacctatatataactctattactaaaaagcctgtagttac

SEQ ID NO: 27096 - DNA, 96 bp, Aspergillus fumigatus
  misc_feature: 112
ggtaggagctaggtatcctataattatatttatagtaatataaagcttaaataaattatagttaattaattatagagtataaataaccctacctat

SEQ ID NO: 27097 - DNA, 96 bp, Aspergillus fumigatus
  misc_feature: 112
gcctgtcttactgcctgcctcactatataccaactatggttaatattatatatcccccactgattatatatatatatatgcatgtgtacaaaccat

SEQ ID NO: 27098 - DNA, 96 bp, Aspergillus fumigatus
  misc_feature: 112
gatattacacaatcttataggtatctaactcttatatatacctattaatattataatagcctataattttataattaactataaactaggatagct

SEQ ID NO: 27099 - DNA, 96 bp, Aspergillus fumigatus
  misc_feature: 112
gatatagcctaactatatatctattatatatagaagctatatagcctactaagaataatagtattagactatagcccttagtttattactatattc

SEQ ID NO: 27100 - DNA, 96 bp, Aspergillus fumigatus
  misc_feature: 112
ataaactaggatattattaaaatagatagtatagaagatattaagataatcttataaaatattattaataaattactaaaaggttacaggtgcttc

SEQ ID NO: 27101 - DNA, 96 bp, Aspergillus fumigatus
  misc_feature: 112
aaaattattactattattaagaagtagatatataccctatatttattaaaattatatagataaatctatcctaccttctatatatcccttcttaag

SEQ ID NO: 27102 - DNA, 96 bp, Aspergillus fumigatus
  misc_feature: 112
agttaatttagccttctagatatacttatatactagatagtagtatttatattatttagtgctatagctagtaatatacttagagaactttttaag

SEQ ID NO: 27103 - DNA, 96 bp, Aspergillus fumigatus
  misc_feature: 112
cctgtcttactgcctgcctcactatataccaactatggttaatattatatatcccccactgattatatatatatatatgcatgtgtacaaaccatg

SEQ ID NO: 27104 - DNA, 96 bp, Aspergillus fumigatus
  misc_feature: 112
ccgtttaaaattattactattattaagaagtagatatataccctatatttattaaaattatatagataaatctatcctaccttctatatatccctt

SEQ ID NO: 27105 - DNA, 96 bp, Aspergillus fumigatus
  misc_feature: 112
atcttgttcccttacgtgaatatcttgttcccttacgtgaatatcttgttcccttacgtgaatatcttgttcccttaagtgaatatcttgttccct

SEQ ID NO: 27106 - DNA, 96 bp, Aspergillus fumigatus
  misc_feature: 112
aatagacttaggaagagtataatattagtaccttataaataaataaatttagaaatagtaatatagctattaattaattaatttattagctactat

SEQ ID NO: 27107 - DNA, 96 bp, Aspergillus fumigatus
  misc_feature: 112
aagatagtaaagaatagattagtttatctttatatattctatttttacttataggttataagcccttatagcttattataaggagatctttatctt

SEQ ID NO: 27108 - DNA, 96 bp, Aspergillus fumigatus
  misc_feature: 111
tactaagctaagggctattttataattctaaaaagaatagctataagagaaaaagtagtagtatataaaagctattataaaaaaaaactagctaaa

SEQ ID NO: 27109 - DNA, 96 bp, Aspergillus fumigatus
  misc_feature: 111
ttcccttacgtgaatatcttgttcccttacgtgaatatcttgttcccttacgtgaatatcttgttcccttaagtgaatatcttgttcccttattac

SEQ ID NO: 27110 - DNA, 96 bp, Aspergillus fumigatus
  misc_feature: 111
agttaacttagtggatttcctctttaaacttattctattttagattttctttcctttaattagaattattagatttatctcctatattctttataa

SEQ ID NO: 27111 - DNA, 96 bp, Aspergillus fumigatus
  misc_feature: 111
gtctagtactactgctcaggctagtgctcaggctagtgctcaggctagtgctcaggctagtgctcaggctagtgctagtgctaggactagggctaa

SEQ ID NO: 27112 - DNA, 96 bp, Aspergillus fumigatus
  misc_feature: 111
ttaaaattattactattattaagaagtagatatataccctatatttattaaaattatatagataaatctatcctaccttctatatatcccttctta

SEQ ID NO: 27113 - DNA, 96 bp, Aspergillus fumigatus
  misc_feature: 111
ctactgctcaggctagtgctcaggctagtgctcaggctagtgctcaggctagtgctcaggctagtgctagtgctaggactagggctaatgtgatca

SEQ ID NO: 27114 - DNA, 96 bp, Aspergillus fumigatus
  misc_feature: 111
tgaatatcttgttcccttacgtgaatatcttgttcccttacgtgaatatcttgttcccttacgtgaatatcttgttcccttaagtgaatatcttgt

SEQ ID NO: 27115 - DNA, 96 bp, Aspergillus fumigatus
  misc_feature: 111
gttaatttagccttctagatatacttatatactagatagtagtatttatattatttagtgctatagctagtaatatacttagagaactttttaaga

SEQ ID NO: 27116 - DNA, 96 bp, Aspergillus fumigatus
  misc_feature: 111
tattcttaattattatatataattttaagttctagtagttatataatatactaggaatacaagtatataatagcatccttatttaaggaatagggg

SEQ ID NO: 27117 - DNA, 96 bp, Aspergillus fumigatus
  misc_feature: 111
tattattatttttatatttattataaagttatttagataagggatatctttaattaattaaagaaataagtaatatttaatctagtctagtagatc

SEQ ID NO: 27118 - DNA, 96 bp, Aspergillus fumigatus
  misc_feature: 111
tattagtatatattagtatatattaggctagtagtattcttatactattaacttatataacttatactttctagaatatctagtagcaggcttatt

SEQ ID NO: 27119 - DNA, 96 bp, Aspergillus fumigatus
  misc_feature: 111
tatataagttaatagtataagaatactactagcctaatatatactaatatatactaatatattaattactagacctaaaactactatacctactac

SEQ ID NO: 27120 - DNA, 96 bp, Aspergillus fumigatus
  misc_feature: 111
gtaggagctaggtatcctataattatatttatagtaatataaagcttaaataaattatagttaattaattatagagtataaataaccctacctata

SEQ ID NO: 27121 - DNA, 96 bp, Aspergillus fumigatus
  misc_feature: 111
tataagtatatctagaaggctaaattaactattaataaagtaaactaataagctaaataatctaagatctaacttctaaaactctagtataaactt

SEQ ID NO: 27122 - DNA, 96 bp, Aspergillus fumigatus
  misc_feature: 111
tagtagctaataaattaattaattaatagctatattactatttctaaatttatttatttataaggtactaatattatactcttcctaagtctatta

SEQ ID NO: 27123 - DNA, 96 bp, Aspergillus fumigatus
  misc_feature: 111
atataggtagggttatttatactctataattaattaactataatttatttaagctttatattactataaatataattataggatacctagctccta

SEQ ID NO: 27124 - DNA, 96 bp, Aspergillus fumigatus
  misc_feature: 111
tactgctcaggctagtgctcaggctagtgctcaggctagtgctcaggctagtgctcaggctagtgctagtgctaggactagggctaatgtgatcat

SEQ ID NO: 27125 - DNA, 96 bp, Aspergillus fumigatus
  misc_feature: 111
aaccctgcttagcaccgagaatactaggtaataagggaacaagatattcacttaagggaacaagatattcacgtaagggaacaagatattcacgta

SEQ ID NO: 27126 - DNA, 96 bp, Aspergillus fumigatus
  misc_feature: 111
taagtatatctagaaggctaaattaactattaataaagtaaactaataagctaaataatctaagatctaacttctaaaactctagtataaacttac

SEQ ID NO: 27127 - DNA, 96 bp, Aspergillus fumigatus
  misc_feature: 111
gatagtaaagaatagattagtttatctttatatattctatttttacttataggttataagcccttatagcttattataaggagatctttatcttta

SEQ ID NO: 27128 - DNA, 96 bp, Aspergillus fumigatus
  misc_feature: 111
gagagttaacttagtggatttcctctttaaacttattctattttagattttctttcctttaattagaattattagatttatctcctatattcttta

SEQ ID NO: 27129 - DNA, 96 bp, Aspergillus fumigatus
  misc_feature: 111
gtaaagaatagattagtttatctttatatattctatttttacttataggttataagcccttatagcttattataaggagatctttatctttatctc

SEQ ID NO: 27130 - DNA, 96 bp, Aspergillus fumigatus
  misc_feature: 111
ctgcctgtcttactgcctgcctcactatataccaactatggttaatattatatatcccccactgattatatatatatatatgcatgtgtacaaacc

SEQ ID NO: 27131 - DNA, 96 bp, Aspergillus fumigatus
  misc_feature: 111
ggataatataggtagggttatttatactctataattaattaactataatttatttaagctttatattactataaatataattataggatacctagc

SEQ ID NO: 27132 - DNA, 96 bp, Aspergillus fumigatus
  misc_feature: 111
actgctcaggctagtgctcaggctagtgctcaggctagtgctcaggctagtgctcaggctagtgctagtgctaggactagggctaatgtgatcatc

SEQ ID NO: 27133 - DNA, 96 bp, Aspergillus fumigatus
  misc_feature: 111
actactgctcaggctagtgctcaggctagtgctcaggctagtgctcaggctagtgctcaggctagtgctagtgctaggactagggctaatgtgatc

SEQ ID NO: 27134 - DNA, 96 bp, Aspergillus fumigatus
  misc_feature: 111
gataatataggtagggttatttatactctataattaattaactataatttatttaagctttatattactataaatataattataggatacctagct

SEQ ID NO: 27135 - DNA, 96 bp, Aspergillus fumigatus
  misc_feature: 111
aaagggactaagcctattacttagctacccctactataaatatacctatacctatacctatatataactctattactaaaaagcctgtagttactc

SEQ ID NO: 27136 - DNA, 96 bp, Aspergillus fumigatus
  misc_feature: 111
gaggtaggagctaggtatcctataattatatttatagtaatataaagcttaaataaattatagttaattaattatagagtataaataaccctacct

SEQ ID NO: 27137 - DNA, 96 bp, Aspergillus fumigatus
  misc_feature: 111
cttattcttaattattatatataattttaagttctagtagttatataatatactaggaatacaagtatataatagcatccttatttaaggaatagg

SEQ ID NO: 27138 - DNA, 96 bp, Aspergillus fumigatus
  misc_feature: 111
cttaattattatatataattttaagttctagtagttatataatatactaggaatacaagtatataatagcatccttatttaaggaatagggggagg

SEQ ID NO: 27139 - DNA, 96 bp, Aspergillus fumigatus
  misc_feature: 111
ataagatgatttaatagatatgattcaatagatagatttaatagatacgatgattcaatagatatgatttaatagagaagaagggttgttgagtag

SEQ ID NO: 27140 - DNA, 96 bp, Aspergillus fumigatus
  misc_feature: 111
ctaagtaagatagtaaagaatagattagtttatctttatatattctatttttacttataggttataagcccttatagcttattataaggagatctt

SEQ ID NO: 27141 - DNA, 96 bp, Aspergillus fumigatus
  misc_feature: 111
cctagtaaccctaaagagttctctaagtatattactagctatagtactaaataatataaatactactatctagtatataagtatatctagaaggct

SEQ ID NO: 27142 - DNA, 96 bp, Aspergillus fumigatus
  misc_feature: 111
aagatgatttaatagatatgattcaatagatagatttaatagatacgatgattcaatagatatgatttaatagagaagaagggttgttgagtagtg

SEQ ID NO: 27143 - DNA, 96 bp, Aspergillus fumigatus
  misc_feature: 111
agtactactgctcaggctagtgctcaggctagtgctcaggctagtgctcaggctagtgctcaggctagtgctagtgctaggactagggctaatgtg

SEQ ID NO: 27144 - DNA, 96 bp, Aspergillus fumigatus
  misc_feature: 111
aggtggtttagcctatctaactattatctctatactatactatataataataagaagatactctctaattctattaataaggctataaaagataat

SEQ ID NO: 27145 - DNA, 96 bp, Aspergillus fumigatus
  misc_feature: 111
ataatagtaataattttaaacagcctattatatttattattaactttcttatatagatattatatttttaagtttcttaagaagaatagtatcttt

SEQ ID NO: 27146 - DNA, 96 bp, Aspergillus fumigatus
  misc_feature: 111
agatagtaaagaatagattagtttatctttatatattctatttttacttataggttataagcccttatagcttattataaggagatctttatcttt

SEQ ID NO: 27147 - DNA, 96 bp, Aspergillus fumigatus
  misc_feature: 110
ttttaaaaattcatagaagtaaatgtttcgtggatttcatagagatatatagtagggaggggtcagactagagggattagttaggtagatagtaac

SEQ ID NO: 27148 - DNA, 96 bp, Aspergillus fumigatus
  misc_feature: 110
ttattcttaattattatatataattttaagttctagtagttatataatatactaggaatacaagtatataatagcatccttatttaaggaataggg

SEQ ID NO: 27149 - DNA, 96 bp, Aspergillus fumigatus
  misc_feature: 110
taggtggtttagcctatctaactattatctctatactatactatataataataagaagatactctctaattctattaataaggctataaaagataa

SEQ ID NO: 27150 - DNA, 96 bp, Aspergillus fumigatus
  misc_feature: 110
ttatagtattcttataataactaggctcttagcttattatagttagggatatataagtatttatagtagtatagatagctttcttattatctataa

SEQ ID NO: 27151 - DNA, 96 bp, Aspergillus fumigatus
  misc_feature: 110
ttagtgcaggtcttactataaactaggatattattaaaatagatagtatagaagatattaagataatcttataaaatattattaataaattactaa

SEQ ID NO: 27152 - DNA, 96 bp, Aspergillus fumigatus
  misc_feature: 110
ttagatatttctccttctactattcttctctattttactactattccttctattcttcctttatacctaggcaagccatctattcccctccatatt

SEQ ID NO: 27153 - DNA, 96 bp, Aspergillus fumigatus
  misc_feature: 110
ttactgcctgcctcactatataccaactatggttaatattatatatcccccactgattatatatatatatatgcatgtgtacaaaccatggattca

SEQ ID NO: 27154 - DNA, 96 bp, Aspergillus fumigatus
  misc_feature: 110
ttactataaactaggatattattaaaatagatagtatagaagatattaagataatcttataaaatattattaataaattactaaaaggttacaggt

SEQ ID NO: 27155 - DNA, 96 bp, Aspergillus fumigatus
  misc_feature: 110
ttaatttagccttctagatatacttatatactagatagtagtatttatattatttagtgctatagctagtaatatacttagagaactttttaagat

SEQ ID NO: 27156 - DNA, 96 bp, Aspergillus fumigatus
  misc_feature: 110
taaaattattactattattaagaagtagatatataccctatatttattaaaattatatagataaatctatcctaccttctatatatcccttcttaa

SEQ ID NO: 27157 - DNA, 96 bp, Aspergillus fumigatus
  misc_feature: 110
tgtgctgcctgctgtgctgcctgctgtgctgcctgctgtgctgcctgctgttctgcctatcttatatataacctctctggggccttataacctgct

SEQ ID NO: 27158 - DNA, 96 bp, Aspergillus fumigatus
  misc_feature: 110
tggtttagcctatctaactattatctctatactatactatataataataagaagatactctctaattctattaataaggctataaaagataatatt

SEQ ID NO: 27159 - DNA, 96 bp, Aspergillus fumigatus
  misc_feature: 110
tgctgtgctgcctgctgtgctgcctgctgtgctgcctgctgtgctgcctgctgttctgcctatcttatatataacctctctggggccttataacct

SEQ ID NO: 27160 - DNA, 96 bp, Aspergillus fumigatus
  misc_feature: 110
gctattattatttttatatttattataaagttatttagataagggatatctttaattaattaaagaaataagtaatatttaatctagtctagtaga

SEQ ID NO: 27161 - DNA, 96 bp, Aspergillus turcosus
  misc_feature: 4945
tataggttcgtatgtccaccaggcacccagcagcctctgtaatctccctgcctccctgcccaacggcctcggccaactggtcaccgctgcgcgcgc

SEQ ID NO: 27162 - DNA, 96 bp, Aspergillus turcosus
  misc_feature: 4909
ttcgtatgtccaccaggcacccagcagcctctgtaatctccctgcctccctgcccaacggcctcggccaactggtcaccgctgcgcgcgcagccta

SEQ ID NO: 27163 - DNA, 96 bp, Aspergillus turcosus
  misc_feature: 4901
gttcgtatgtccaccaggcacccagcagcctctgtaatctccctgcctccctgcccaacggcctcggccaactggtcaccgctgcgcgcgcagcct

SEQ ID NO: 27164 - DNA, 96 bp, Aspergillus turcosus
  misc_feature: 4897
ataggttcgtatgtccaccaggcacccagcagcctctgtaatctccctgcctccctgcccaacggcctcggccaactggtcaccgctgcgcgcgca

SEQ ID NO: 27165 - DNA, 96 bp, Aspergillus turcosus
  misc_feature: 4862
ggttcgtatgtccaccaggcacccagcagcctctgtaatctccctgcctccctgcccaacggcctcggccaactggtcaccgctgcgcgcgcagcc

SEQ ID NO: 27166 - DNA, 96 bp, Aspergillus turcosus
  misc_feature: 4836
aggttcgtatgtccaccaggcacccagcagcctctgtaatctccctgcctccctgcccaacggcctcggccaactggtcaccgctgcgcgcgcagc

SEQ ID NO: 27167 - DNA, 96 bp, Aspergillus turcosus
  misc_feature: 4834
taggttcgtatgtccaccaggcacccagcagcctctgtaatctccctgcctccctgcccaacggcctcggccaactggtcaccgctgcgcgcgcag

SEQ ID NO: 27168 - DNA, 96 bp, Aspergillus turcosus
  misc_feature: 4823
atataggttcgtatgtccaccaggcacccagcagcctctgtaatctccctgcctccctgcccaacggcctcggccaactggtcaccgctgcgcgcg

SEQ ID NO: 27169 - DNA, 96 bp, Aspergillus turcosus
  misc_feature: 4602
tcgtatgtccaccaggcacccagcagcctctgtaatctccctgcctccctgcccaacggcctcggccaactggtcaccgctgcgcgcgcagcctat

SEQ ID NO: 27170 - DNA, 96 bp, Aspergillus turcosus
  misc_feature: 4522
tatataggttcgtatgtccaccaggcacccagcagcctctgtaatctccctgcctccctgcccaacggcctcggccaactggtcaccgctgcgcgc

SEQ ID NO: 27171 - DNA, 96 bp, Aspergillus turcosus
  misc_feature: 4458
atatataggttcgtatgtccaccaggcacccagcagcctctgtaatctccctgcctccctgcccaacggcctcggccaactggtcaccgctgcgcg

SEQ ID NO: 27172 - DNA, 96 bp, Aspergillus turcosus
  misc_feature: 4199
cgtatgtccaccaggcacccagcagcctctgtaatctccctgcctccctgcccaacggcctcggccaactggtcaccgctgcgcgcgcagcctatt

SEQ ID NO: 27173 - DNA, 96 bp, Aspergillus turcosus
  misc_feature: 4171
gtatgtccaccaggcacccagcagcctctgtaatctccctgcctccctgcccaacggcctcggccaactggtcaccgctgcgcgcgcagcctattg

SEQ ID NO: 27174 - DNA, 96 bp, Aspergillus turcosus
  misc_feature: 4156
gcgcagcggtgaccagttggccgaggccgttgggcagggaggcagggagattacagaggctgctgggtgcctggtggacatacgaacctatatatc

SEQ ID NO: 27175 - DNA, 96 bp, Aspergillus turcosus
  misc_feature: 4079
gcagcggtgaccagttggccgaggccgttgggcagggaggcagggagattacagaggctgctgggtgcctggtggacatacgaacctatatatcgg

SEQ ID NO: 27176 - DNA, 96 bp, Aspergillus turcosus
  misc_feature: 4070
ggtgggccatgccgatatataggttcgtatgtccaccaggcacccagcagcctctgtaatctccctgcctccctgcccaacggcctcggccaactg

SEQ ID NO: 27177 - DNA, 96 bp, Aspergillus turcosus
  misc_feature: 4067
cgcagcggtgaccagttggccgaggccgttgggcagggaggcagggagattacagaggctgctgggtgcctggtggacatacgaacctatatatcg

SEQ ID NO: 27178 - DNA, 96 bp, Aspergillus turcosus
  misc_feature: 4038
atgccgatatataggttcgtatgtccaccaggcacccagcagcctctgtaatctccctgcctccctgcccaacggcctcggccaactggtcaccgc

SEQ ID NO: 27179 - DNA, 96 bp, Aspergillus turcosus
  misc_feature: 4034
caggtgggccatgccgatatataggttcgtatgtccaccaggcacccagcagcctctgtaatctccctgcctccctgcccaacggcctcggccaac

SEQ ID NO: 27180 - DNA, 96 bp, Aspergillus turcosus
  misc_feature: 4034
gtgggccatgccgatatataggttcgtatgtccaccaggcacccagcagcctctgtaatctccctgcctccctgcccaacggcctcggccaactgg

SEQ ID NO: 27181 - DNA, 96 bp, Aspergillus turcosus
  misc_feature: 4026
ccatgccgatatataggttcgtatgtccaccaggcacccagcagcctctgtaatctccctgcctccctgcccaacggcctcggccaactggtcacc

SEQ ID NO: 27182 - DNA, 96 bp, Aspergillus turcosus
  misc_feature: 4013
gccatgccgatatataggttcgtatgtccaccaggcacccagcagcctctgtaatctccctgcctccctgcccaacggcctcggccaactggtcac

SEQ ID NO: 27183 - DNA, 96 bp, Aspergillus turcosus
  misc_feature: 4012
aggtgggccatgccgatatataggttcgtatgtccaccaggcacccagcagcctctgtaatctccctgcctccctgcccaacggcctcggccaact

SEQ ID NO: 27184 - DNA, 96 bp, Aspergillus turcosus
  misc_feature: 4006
ggccatgccgatatataggttcgtatgtccaccaggcacccagcagcctctgtaatctccctgcctccctgcccaacggcctcggccaactggtca

SEQ ID NO: 27185 - DNA, 96 bp, Aspergillus turcosus
  misc_feature: 4002
catgccgatatataggttcgtatgtccaccaggcacccagcagcctctgtaatctccctgcctccctgcccaacggcctcggccaactggtcaccg

SEQ ID NO: 27186 - DNA, 96 bp, Aspergillus turcosus
  misc_feature: 3964
agcggtgaccagttggccgaggccgttgggcagggaggcagggagattacagaggctgctgggtgcctggtggacatacgaacctatatatcggca

SEQ ID NO: 27187 - DNA, 96 bp, Aspergillus turcosus
  misc_feature: 3962
cagcggtgaccagttggccgaggccgttgggcagggaggcagggagattacagaggctgctgggtgcctggtggacatacgaacctatatatcggc

SEQ ID NO: 27188 - DNA, 96 bp, Aspergillus turcosus
  misc_feature: 3953
gggccatgccgatatataggttcgtatgtccaccaggcacccagcagcctctgtaatctccctgcctccctgcccaacggcctcggccaactggtc

SEQ ID NO: 27189 - DNA, 96 bp, Aspergillus turcosus
  misc_feature: 3949
tgggccatgccgatatataggttcgtatgtccaccaggcacccagcagcctctgtaatctccctgcctccctgcccaacggcctcggccaactggt

SEQ ID NO: 27190 - DNA, 96 bp, Aspergillus turcosus
  misc_feature: 3941
cacaggtgggccatgccgatatataggttcgtatgtccaccaggcacccagcagcctctgtaatctccctgcctccctgcccaacggcctcggcca

SEQ ID NO: 27191 - DNA, 96 bp, Aspergillus turcosus
  misc_feature: 3932
acaggtgggccatgccgatatataggttcgtatgtccaccaggcacccagcagcctctgtaatctccctgcctccctgcccaacggcctcggccaa

SEQ ID NO: 27192 - DNA, 96 bp, Aspergillus turcosus
  misc_feature: 3922
gcacaggtgggccatgccgatatataggttcgtatgtccaccaggcacccagcagcctctgtaatctccctgcctccctgcccaacggcctcggcc

SEQ ID NO: 27193 - DNA, 96 bp, Aspergillus turcosus
  misc_feature: 3834
agcacaggtgggccatgccgatatataggttcgtatgtccaccaggcacccagcagcctctgtaatctccctgcctccctgcccaacggcctcggc

SEQ ID NO: 27194 - DNA, 96 bp, Aspergillus turcosus
  misc_feature: 3803
tatgtccaccaggcacccagcagcctctgtaatctccctgcctccctgcccaacggcctcggccaactggtcaccgctgcgcgcgcagcctattgc

SEQ ID NO: 27195 - DNA, 96 bp, Aspergillus turcosus
  misc_feature: 3798
gtacagcacaggtgggccatgccgatatataggttcgtatgtccaccaggcacccagcagcctctgtaatctccctgcctccctgcccaacggcct

SEQ ID NO: 27196 - DNA, 96 bp, Aspergillus turcosus
  misc_feature: 3781
tacagcacaggtgggccatgccgatatataggttcgtatgtccaccaggcacccagcagcctctgtaatctccctgcctccctgcccaacggcctc

SEQ ID NO: 27197 - DNA, 96 bp, Aspergillus turcosus
  misc_feature: 3756
cagcacaggtgggccatgccgatatataggttcgtatgtccaccaggcacccagcagcctctgtaatctccctgcctccctgcccaacggcctcgg

SEQ ID NO: 27198 - DNA, 96 bp, Aspergillus turcosus
  misc_feature: 3718
acagcacaggtgggccatgccgatatataggttcgtatgtccaccaggcacccagcagcctctgtaatctccctgcctccctgcccaacggcctcg

SEQ ID NO: 27199 - DNA, 96 bp, Aspergillus turcosus
  misc_feature: 3715
atgtccaccaggcacccagcagcctctgtaatctccctgcctccctgcccaacggcctcggccaactggtcaccgctgcgcgcgcagcctattgct

SEQ ID NO: 27200 - DNA, 96 bp, Aspergillus turcosus
  misc_feature: 3674
gatgtacagcacaggtgggccatgccgatatataggttcgtatgtccaccaggcacccagcagcctctgtaatctccctgcctccctgcccaacgg

SEQ ID NO: 27201 - DNA, 96 bp, Aspergillus turcosus
  misc_feature: 3672
atgtacagcacaggtgggccatgccgatatataggttcgtatgtccaccaggcacccagcagcctctgtaatctccctgcctccctgcccaacggc

SEQ ID NO: 27202 - DNA, 96 bp, Aspergillus turcosus
  misc_feature: 3634
tgtacagcacaggtgggccatgccgatatataggttcgtatgtccaccaggcacccagcagcctctgtaatctccctgcctccctgcccaacggcc

SEQ ID NO: 27203 - DNA, 96 bp, Aspergillus turcosus
  misc_feature: 3528
cggatgtacagcacaggtgggccatgccgatatataggttcgtatgtccaccaggcacccagcagcctctgtaatctccctgcctccctgcccaac

SEQ ID NO: 27204 - DNA, 96 bp, Aspergillus turcosus
  misc_feature: 3516
ggatgtacagcacaggtgggccatgccgatatataggttcgtatgtccaccaggcacccagcagcctctgtaatctccctgcctccctgcccaacg

SEQ ID NO: 27205 - DNA, 96 bp, Aspergillus turcosus
  misc_feature: 3505
tcgatcaatatatctggttccattcatccctcgttgaattccctatcaccaaccattccattcagctctagaccccccgaggagtagggccggcgc

SEQ ID NO: 27206 - DNA, 96 bp, Aspergillus turcosus
  misc_feature: 3493
cgatcaatatatctggttccattcatccctcgttgaattccctatcaccaaccattccattcagctctagaccccccgaggagtagggccggcgcg

SEQ ID NO: 27207 - DNA, 96 bp, Aspergillus turcosus
  misc_feature: 3448
atcgatcaatatatctggttccattcatccctcgttgaattccctatcaccaaccattccattcagctctagaccccccgaggagtagggccggcg

SEQ ID NO: 27208 - DNA, 96 bp, Aspergillus turcosus
  misc_feature: 3217
tgcggatgtacagcacaggtgggccatgccgatatataggttcgtatgtccaccaggcacccagcagcctctgtaatctccctgcctccctgccca

SEQ ID NO: 27209 - DNA, 96 bp, Aspergillus turcosus
  misc_feature: 3208
gcggatgtacagcacaggtgggccatgccgatatataggttcgtatgtccaccaggcacccagcagcctctgtaatctccctgcctccctgcccaa

SEQ ID NO: 27210 - DNA, 96 bp, Aspergillus turcosus
  misc_feature: 3208
gtgcggatgtacagcacaggtgggccatgccgatatataggttcgtatgtccaccaggcacccagcagcctctgtaatctccctgcctccctgccc

SEQ ID NO: 27211 - DNA, 96 bp, Aspergillus turcosus
  misc_feature: 3200
tatatgtgcggatgtacagcacaggtgggccatgccgatatataggttcgtatgtccaccaggcacccagcagcctctgtaatctccctgcctccc

SEQ ID NO: 27212 - DNA, 96 bp, Aspergillus turcosus
  misc_feature: 3200
atatgtgcggatgtacagcacaggtgggccatgccgatatataggttcgtatgtccaccaggcacccagcagcctctgtaatctccctgcctccct

SEQ ID NO: 27213 - DNA, 96 bp, Aspergillus turcosus
  misc_feature: 3186
ggccaccataaggccgcgcgccggccctactcctcggggggtctagagctgaatggaatggttggtgatagggaattcaacgagggatgaatggaa

SEQ ID NO: 27214 - DNA, 96 bp, Aspergillus turcosus
  misc_feature: 3176
atgtgcggatgtacagcacaggtgggccatgccgatatataggttcgtatgtccaccaggcacccagcagcctctgtaatctccctgcctccctgc

SEQ ID NO: 27215 - DNA, 96 bp, Aspergillus turcosus
  misc_feature: 3165
tgtgcggatgtacagcacaggtgggccatgccgatatataggttcgtatgtccaccaggcacccagcagcctctgtaatctccctgcctccctgcc

SEQ ID NO: 27216 - DNA, 96 bp, Aspergillus turcosus
  misc_feature: 3164
tggccaccataaggccgcgcgccggccctactcctcggggggtctagagctgaatggaatggttggtgatagggaattcaacgagggatgaatgga

SEQ ID NO: 27217 - DNA, 96 bp, Aspergillus turcosus
  misc_feature: 3162
atatatgtgcggatgtacagcacaggtgggccatgccgatatataggttcgtatgtccaccaggcacccagcagcctctgtaatctccctgcctcc

SEQ ID NO: 27218 - DNA, 96 bp, Aspergillus turcosus
  misc_feature: 3134
tatgtgcggatgtacagcacaggtgggccatgccgatatataggttcgtatgtccaccaggcacccagcagcctctgtaatctccctgcctccctg

SEQ ID NO: 27219 - DNA, 96 bp, Aspergillus turcosus
  misc_feature: 3096
gttccattcatccctcgttgaattccctatcaccaaccattccattcagctctagaccccccgaggagtagggccggcgcgcggccttatggtggc

SEQ ID NO: 27220 - DNA, 96 bp, Aspergillus turcosus
  misc_feature: 3091
gtccaccaggcacccagcagcctctgtaatctccctgcctccctgcccaacggcctcggccaactggtcaccgctgcgcgcgcagcctattgctca

SEQ ID NO: 27221 - DNA, 96 bp, Aspergillus turcosus
  misc_feature: 3089
tatatatgtgcggatgtacagcacaggtgggccatgccgatatataggttcgtatgtccaccaggcacccagcagcctctgtaatctccctgcctc

SEQ ID NO: 27222 - DNA, 96 bp, Aspergillus turcosus
  misc_feature: 3083
tgtccaccaggcacccagcagcctctgtaatctccctgcctccctgcccaacggcctcggccaactggtcaccgctgcgcgcgcagcctattgctc

SEQ ID NO: 27223 - DNA, 96 bp, Aspergillus turcosus
  misc_feature: 3040
atatatatgtgcggatgtacagcacaggtgggccatgccgatatataggttcgtatgtccaccaggcacccagcagcctctgtaatctccctgcct

SEQ ID NO: 27224 - DNA, 96 bp, Aspergillus turcosus
  misc_feature: 3029
tccaccaggcacccagcagcctctgtaatctccctgcctccctgcccaacggcctcggccaactggtcaccgctgcgcgcgcagcctattgctcac

SEQ ID NO: 27225 - DNA, 96 bp, Aspergillus turcosus
  misc_feature: 3015
accaggcacccagcagcctctgtaatctccctgcctccctgcccaacggcctcggccaactggtcaccgctgcgcgcgcagcctattgctcaccgt

SEQ ID NO: 27226 - DNA, 96 bp, Aspergillus turcosus
  misc_feature: 3001
ccaccaggcacccagcagcctctgtaatctccctgcctccctgcccaacggcctcggccaactggtcaccgctgcgcgcgcagcctattgctcacc

SEQ ID NO: 27227 - DNA, 96 bp, Aspergillus turcosus
  misc_feature: 2994
caccaggcacccagcagcctctgtaatctccctgcctccctgcccaacggcctcggccaactggtcaccgctgcgcgcgcagcctattgctcaccg

SEQ ID NO: 27228 - DNA, 96 bp, Aspergillus turcosus
  misc_feature: 2979
ccaggcacccagcagcctctgtaatctccctgcctccctgcccaacggcctcggccaactggtcaccgctgcgcgcgcagcctattgctcaccgta

SEQ ID NO: 27229 - DNA, 96 bp, Aspergillus turcosus
  misc_feature: 2978
caggcacccagcagcctctgtaatctccctgcctccctgcccaacggcctcggccaactggtcaccgctgcgcgcgcagcctattgctcaccgtag

SEQ ID NO: 27230 - DNA, 96 bp, Aspergillus turcosus
  misc_feature: 2939
aggcacccagcagcctctgtaatctccctgcctccctgcccaacggcctcggccaactggtcaccgctgcgcgcgcagcctattgctcaccgtagg

SEQ ID NO: 27231 - DNA, 96 bp, Aspergillus turcosus
  misc_feature: 2899
gcacccagcagcctctgtaatctccctgcctccctgcccaacggcctcggccaactggtcaccgctgcgcgcgcagcctattgctcaccgtaggag

SEQ ID NO: 27232 - DNA, 96 bp, Aspergillus turcosus
  misc_feature: 2882
ggcacccagcagcctctgtaatctccctgcctccctgcccaacggcctcggccaactggtcaccgctgcgcgcgcagcctattgctcaccgtagga

SEQ ID NO: 27233 - DNA, 96 bp, Aspergillus turcosus
  misc_feature: 2629
acccagcagcctctgtaatctccctgcctccctgcccaacggcctcggccaactggtcaccgctgcgcgcgcagcctattgctcaccgtaggaggg

SEQ ID NO: 27234 - DNA, 96 bp, Aspergillus turcosus
  misc_feature: 2603
ctatatatatgtgcggatgtacagcacaggtgggccatgccgatatataggttcgtatgtccaccaggcacccagcagcctctgtaatctccctgc

SEQ ID NO: 27235 - DNA, 96 bp, Aspergillus turcosus
  misc_feature: 2589
acacgccctcctacggtgagcaataggctgcgcgcgcagcggtgaccagttggccgaggccgttgggcagggaggcagggagattacagaggctgc

SEQ ID NO: 27236 - DNA, 96 bp, Aspergillus turcosus
  misc_feature: 2587
cacccagcagcctctgtaatctccctgcctccctgcccaacggcctcggccaactggtcaccgctgcgcgcgcagcctattgctcaccgtaggagg

SEQ ID NO: 27237 - DNA, 96 bp, Aspergillus turcosus
  misc_feature: 2583
cacacgccctcctacggtgagcaataggctgcgcgcgcagcggtgaccagttggccgaggccgttgggcagggaggcagggagattacagaggctg

SEQ ID NO: 27238 - DNA, 96 bp, Aspergillus turcosus
  misc_feature: 2572
tatatatatgtgcggatgtacagcacaggtgggccatgccgatatataggttcgtatgtccaccaggcacccagcagcctctgtaatctccctgcc

SEQ ID NO: 27239 - DNA, 96 bp, Aspergillus turcosus
  misc_feature: 2536
gcggactgcacacgccctcctacggtgagcaataggctgcgcgcgcagcggtgaccagttggccgaggccgttgggcagggaggcagggagattac

SEQ ID NO: 27240 - DNA, 96 bp, Aspergillus turcosus
  misc_feature: 2535
gcacacgccctcctacggtgagcaataggctgcgcgcgcagcggtgaccagttggccgaggccgttgggcagggaggcagggagattacagaggct

SEQ ID NO: 27241 - DNA, 96 bp, Aspergillus turcosus
  misc_feature: 2531
cgcggactgcacacgccctcctacggtgagcaataggctgcgcgcgcagcggtgaccagttggccgaggccgttgggcagggaggcagggagatta

SEQ ID NO: 27242 - DNA, 96 bp, Aspergillus turcosus
  misc_feature: 2516
cccagcagcctctgtaatctccctgcctccctgcccaacggcctcggccaactggtcaccgctgcgcgcgcagcctattgctcaccgtaggagggc

SEQ ID NO: 27243 - DNA, 96 bp, Aspergillus turcosus
  misc_feature: 2515
ccagcagcctctgtaatctccctgcctccctgcccaacggcctcggccaactggtcaccgctgcgcgcgcagcctattgctcaccgtaggagggcg

SEQ ID NO: 27244 - DNA, 96 bp, Aspergillus turcosus
  misc_feature: 2512
ctcgcggactgcacacgccctcctacggtgagcaataggctgcgcgcgcagcggtgaccagttggccgaggccgttgggcagggaggcagggagat

SEQ ID NO: 27245 - DNA, 96 bp, Aspergillus turcosus
  misc_feature: 2511
cagcagcctctgtaatctccctgcctccctgcccaacggcctcggccaactggtcaccgctgcgcgcgcagcctattgctcaccgtaggagggcgt

SEQ ID NO: 27246 - DNA, 96 bp, Aspergillus turcosus
  misc_feature: 2508
tcgcggactgcacacgccctcctacggtgagcaataggctgcgcgcgcagcggtgaccagttggccgaggccgttgggcagggaggcagggagatt

SEQ ID NO: 27247 - DNA, 96 bp, Aspergillus turcosus
  misc_feature: 2508
ggactgcacacgccctcctacggtgagcaataggctgcgcgcgcagcggtgaccagttggccgaggccgttgggcagggaggcagggagattacag

SEQ ID NO: 27248 - DNA, 96 bp, Aspergillus turcosus
  misc_feature: 2496
cggactgcacacgccctcctacggtgagcaataggctgcgcgcgcagcggtgaccagttggccgaggccgttgggcagggaggcagggagattaca

SEQ ID NO: 27249 - DNA, 96 bp, Aspergillus turcosus
  misc_feature: 2475
actcgcggactgcacacgccctcctacggtgagcaataggctgcgcgcgcagcggtgaccagttggccgaggccgttgggcagggaggcagggaga

SEQ ID NO: 27250 - DNA, 96 bp, Aspergillus turcosus
  misc_feature: 2465
tgcacacgccctcctacggtgagcaataggctgcgcgcgcagcggtgaccagttggccgaggccgttgggcagggaggcagggagattacagaggc

SEQ ID NO: 27251 - DNA, 96 bp, Aspergillus turcosus
  misc_feature: 2416
gactgcacacgccctcctacggtgagcaataggctgcgcgcgcagcggtgaccagttggccgaggccgttgggcagggaggcagggagattacaga

SEQ ID NO: 27252 - DNA, 96 bp, Aspergillus turcosus
  misc_feature: 2412
ctgcacacgccctcctacggtgagcaataggctgcgcgcgcagcggtgaccagttggccgaggccgttgggcagggaggcagggagattacagagg

SEQ ID NO: 27253 - DNA, 96 bp, Aspergillus turcosus
  misc_feature: 2376
actgcacacgccctcctacggtgagcaataggctgcgcgcgcagcggtgaccagttggccgaggccgttgggcagggaggcagggagattacagag

SEQ ID NO: 27254 - DNA, 96 bp, Aspergillus turcosus
  misc_feature: 2375
atggatatatcccctttccacccccagaatcccacggaagatagagcaaggctatatataaataataccaatggacaatagatcggtagtaatatc

SEQ ID NO: 27255 - DNA, 96 bp, Aspergillus turcosus
  misc_feature: 2364
ggatatatcccctttccacccccagaatcccacggaagatagagcaaggctatatataaataataccaatggacaatagatcggtagtaatatcga

SEQ ID NO: 27256 - DNA, 96 bp, Aspergillus turcosus
  misc_feature: 2363
gtctatatatatgtgcggatgtacagcacaggtgggccatgccgatatataggttcgtatgtccaccaggcacccagcagcctctgtaatctccct

SEQ ID NO: 27257 - DNA, 96 bp, Aspergillus turcosus
  misc_feature: 2347
tggatatatcccctttccacccccagaatcccacggaagatagagcaaggctatatataaataataccaatggacaatagatcggtagtaatatcg

SEQ ID NO: 27258 - DNA, 96 bp, Aspergillus turcosus
  misc_feature: 2347
agcagcctctgtaatctccctgcctccctgcccaacggcctcggccaactggtcaccgctgcgcgcgcagcctattgctcaccgtaggagggcgtg

SEQ ID NO: 27259 - DNA, 96 bp, Aspergillus turcosus
  misc_feature: 2223
tatagacatgtccccttcagacctctaagctcccgtggaagatggagcaaggttatagtaccgatgtagatcaatatatctagttgaattcatccc

SEQ ID NO: 27260 - DNA, 96 bp, Aspergillus turcosus
  misc_feature: 2220
atatagacatgtccccttcagacctctaagctcccgtggaagatggagcaaggttatagtaccgatgtagatcaatatatctagttgaattcatcc

SEQ ID NO: 27261 - DNA, 96 bp, Aspergillus turcosus
  misc_feature: 2201
agacatgtccccttcagacctctaagctcccgtggaagatggagcaaggttatagtaccgatgtagatcaatatatctagttgaattcatccctgt

SEQ ID NO: 27262 - DNA, 96 bp, Aspergillus turcosus
  misc_feature: 2194
tagacatgtccccttcagacctctaagctcccgtggaagatggagcaaggttatagtaccgatgtagatcaatatatctagttgaattcatccctg

SEQ ID NO: 27263 - DNA, 96 bp, Aspergillus turcosus
  misc_feature: 2190
cctctaagctcccgtggaagatggagcaaggttatagtaccgatgtagatcaatatatctagttgaattcatccctgttcgaattccctcccacgg

SEQ ID NO: 27264 - DNA, 96 bp, Aspergillus turcosus
  misc_feature: 2188
ctctaagctcccgtggaagatggagcaaggttatagtaccgatgtagatcaatatatctagttgaattcatccctgttcgaattccctcccacggc

SEQ ID NO: 27265 - DNA, 96 bp, Aspergillus turcosus
  misc_feature: 2186
ccctgcccaacggcctcggccaactggtcaccgctgcgcgcgcagcctattgctcaccgtaggagggcgtgtgcagtccgcgagtcactctacggg

SEQ ID NO: 27266 - DNA, 96 bp, Aspergillus turcosus
  misc_feature: 2179
ctaagctcccgtggaagatggagcaaggttatagtaccgatgtagatcaatatatctagttgaattcatccctgttcgaattccctcccacggcca

SEQ ID NO: 27267 - DNA, 96 bp, Aspergillus turcosus
  misc_feature: 2175
tccctgcccaacggcctcggccaactggtcaccgctgcgcgcgcagcctattgctcaccgtaggagggcgtgtgcagtccgcgagtcactctacgg

SEQ ID NO: 27268 - DNA, 96 bp, Aspergillus turcosus
  misc_feature: 2173
tctaagctcccgtggaagatggagcaaggttatagtaccgatgtagatcaatatatctagttgaattcatccctgttcgaattccctcccacggcc

SEQ ID NO: 27269 - DNA, 96 bp, Aspergillus turcosus
  misc_feature: 2161
atagacatgtccccttcagacctctaagctcccgtggaagatggagcaaggttatagtaccgatgtagatcaatatatctagttgaattcatccct

SEQ ID NO: 27270 - DNA, 96 bp, Aspergillus turcosus
  misc_feature: 2159
tctatatatatgtgcggatgtacagcacaggtgggccatgccgatatataggttcgtatgtccaccaggcacccagcagcctctgtaatctccctg

SEQ ID NO: 27271 - DNA, 96 bp, Aspergillus turcosus
  misc_feature: 2134
gacctctaagctcccgtggaagatggagcaaggttatagtaccgatgtagatcaatatatctagttgaattcatccctgttcgaattccctcccac

SEQ ID NO: 27272 - DNA, 96 bp, Aspergillus turcosus
  misc_feature: 2131
acctctaagctcccgtggaagatggagcaaggttatagtaccgatgtagatcaatatatctagttgaattcatccctgttcgaattccctcccacg

SEQ ID NO: 27273 - DNA, 96 bp, Aspergillus turcosus
  misc_feature: 2127
agctcccgtggaagatggagcaaggttatagtaccgatgtagatcaatatatctagttgaattcatccctgttcgaattccctcccacggccagca

SEQ ID NO: 27274 - DNA, 96 bp, Aspergillus turcosus
  misc_feature: 2121
aagctcccgtggaagatggagcaaggttatagtaccgatgtagatcaatatatctagttgaattcatccctgttcgaattccctcccacggccagc

SEQ ID NO: 27275 - DNA, 96 bp, Aspergillus turcosus
  misc_feature: 2120
ccgtggaagatggagcaaggttatagtaccgatgtagatcaatatatctagttgaattcatccctgttcgaattccctcccacggccagcaatcgg

SEQ ID NO: 27276 - DNA, 96 bp, Aspergillus turcosus
  misc_feature: 2119
taagctcccgtggaagatggagcaaggttatagtaccgatgtagatcaatatatctagttgaattcatccctgttcgaattccctcccacggccag

SEQ ID NO: 27277 - DNA, 96 bp, Aspergillus turcosus
  misc_feature: 2119
cccgtggaagatggagcaaggttatagtaccgatgtagatcaatatatctagttgaattcatccctgttcgaattccctcccacggccagcaatcg

SEQ ID NO: 27278 - DNA, 96 bp, Aspergillus turcosus
  misc_feature: 2108
ctcccgtggaagatggagcaaggttatagtaccgatgtagatcaatatatctagttgaattcatccctgttcgaattccctcccacggccagcaat

SEQ ID NO: 27279 - DNA, 96 bp, Aspergillus turcosus
  misc_feature: 2105
gctcccgtggaagatggagcaaggttatagtaccgatgtagatcaatatatctagttgaattcatccctgttcgaattccctcccacggccagcaa

SEQ ID NO: 27280 - DNA, 96 bp, Aspergillus turcosus
  misc_feature: 2100
agacctctaagctcccgtggaagatggagcaaggttatagtaccgatgtagatcaatatatctagttgaattcatccctgttcgaattccctccca

SEQ ID NO: 27281 - DNA, 96 bp, Aspergillus turcosus
  misc_feature: 2095
tcagacctctaagctcccgtggaagatggagcaaggttatagtaccgatgtagatcaatatatctagttgaattcatccctgttcgaattccctcc

SEQ ID NO: 27282 - DNA, 96 bp, Aspergillus turcosus
  misc_feature: 2091
cagacctctaagctcccgtggaagatggagcaaggttatagtaccgatgtagatcaatatatctagttgaattcatccctgttcgaattccctccc

SEQ ID NO: 27283 - DNA, 96 bp, Aspergillus turcosus
  misc_feature: 2090
gtccccttcagacctctaagctcccgtggaagatggagcaaggttatagtaccgatgtagatcaatatatctagttgaattcatccctgttcgaat

SEQ ID NO: 27284 - DNA, 96 bp, Aspergillus turcosus
  misc_feature: 2081
cttcagacctctaagctcccgtggaagatggagcaaggttatagtaccgatgtagatcaatatatctagttgaattcatccctgttcgaattccct

SEQ ID NO: 27285 - DNA, 96 bp, Aspergillus turcosus
  misc_feature: 2076
ttcagacctctaagctcccgtggaagatggagcaaggttatagtaccgatgtagatcaatatatctagttgaattcatccctgttcgaattccctc

SEQ ID NO: 27286 - DNA, 96 bp, Aspergillus turcosus
  misc_feature: 2070
tccccttcagacctctaagctcccgtggaagatggagcaaggttatagtaccgatgtagatcaatatatctagttgaattcatccctgttcgaatt

SEQ ID NO: 27287 - DNA, 96 bp, Aspergillus turcosus
  misc_feature: 2064
ccccttcagacctctaagctcccgtggaagatggagcaaggttatagtaccgatgtagatcaatatatctagttgaattcatccctgttcgaattc

SEQ ID NO: 27288 - DNA, 96 bp, Aspergillus turcosus
  misc_feature: 2063
tcccgtggaagatggagcaaggttatagtaccgatgtagatcaatatatctagttgaattcatccctgttcgaattccctcccacggccagcaatc

SEQ ID NO: 27289 - DNA, 96 bp, Aspergillus turcosus
  misc_feature: 2040
cgtggaagatggagcaaggttatagtaccgatgtagatcaatatatctagttgaattcatccctgttcgaattccctcccacggccagcaatcggc

SEQ ID NO: 27290 - DNA, 96 bp, Aspergillus turcosus
  misc_feature: 2028
gtggaagatggagcaaggttatagtaccgatgtagatcaatatatctagttgaattcatccctgttcgaattccctcccacggccagcaatcggcc

SEQ ID NO: 27291 - DNA, 96 bp, Aspergillus turcosus
  misc_feature: 2019
tatatagacatgtccccttcagacctctaagctcccgtggaagatggagcaaggttatagtaccgatgtagatcaatatatctagttgaattcatc

SEQ ID NO: 27292 - DNA, 96 bp, Aspergillus turcosus
  misc_feature: 2019
ccttcagacctctaagctcccgtggaagatggagcaaggttatagtaccgatgtagatcaatatatctagttgaattcatccctgttcgaattccc

SEQ ID NO: 27293 - DNA, 96 bp, Aspergillus turcosus
  misc_feature: 2017
tggaagatggagcaaggttatagtaccgatgtagatcaatatatctagttgaattcatccctgttcgaattccctcccacggccagcaatcggccg

SEQ ID NO: 27294 - DNA, 96 bp, Aspergillus turcosus
  misc_feature: 1991
gaagatggagcaaggttatagtaccgatgtagatcaatatatctagttgaattcatccctgttcgaattccctcccacggccagcaatcggccgcg

SEQ ID NO: 27295 - DNA, 96 bp, Aspergillus turcosus
  misc_feature: 1984
ggaagatggagcaaggttatagtaccgatgtagatcaatatatctagttgaattcatccctgttcgaattccctcccacggccagcaatcggccgc

SEQ ID NO: 27296 - DNA, 96 bp, Aspergillus turcosus
  misc_feature: 1967
gcttagaggtctgaaggggacatgtctatatatatgtgcggatgtacagcacaggtgggccatgccgatatataggttcgtatgtccaccaggcac

SEQ ID NO: 27297 - DNA, 96 bp, Aspergillus turcosus
  misc_feature: 1965
gatggagcaaggttatagtaccgatgtagatcaatatatctagttgaattcatccctgttcgaattccctcccacggccagcaatcggccgcgcgc

SEQ ID NO: 27298 - DNA, 96 bp, Aspergillus turcosus
  misc_feature: 1962
agatggagcaaggttatagtaccgatgtagatcaatatatctagttgaattcatccctgttcgaattccctcccacggccagcaatcggccgcgcg

SEQ ID NO: 27299 - DNA, 96 bp, Aspergillus turcosus
  misc_feature: 1952
gagcaaggttatagtaccgatgtagatcaatatatctagttgaattcatccctgttcgaattccctcccacggccagcaatcggccgcgcgcgcgg

SEQ ID NO: 27300 - DNA, 96 bp, Aspergillus turcosus
  misc_feature: 1948
atggagcaaggttatagtaccgatgtagatcaatatatctagttgaattcatccctgttcgaattccctcccacggccagcaatcggccgcgcgcg

SEQ ID NO: 27301 - DNA, 96 bp, Aspergillus turcosus
  misc_feature: 1946
aagatggagcaaggttatagtaccgatgtagatcaatatatctagttgaattcatccctgttcgaattccctcccacggccagcaatcggccgcgc

SEQ ID NO: 27302 - DNA, 96 bp, Aspergillus turcosus
  misc_feature: 1943
tggagcaaggttatagtaccgatgtagatcaatatatctagttgaattcatccctgttcgaattccctcccacggccagcaatcggccgcgcgcgc

SEQ ID NO: 27303 - DNA, 96 bp, Aspergillus turcosus
  misc_feature: 1936
gccaactggtcaccgctgcgcgcgcagcctattgctcaccgtaggagggcgtgtgcagtccgcgagtcactctacgggctgtgtgtcgctggctgg

SEQ ID NO: 27304 - DNA, 96 bp, Aspergillus turcosus
  misc_feature: 1934
ggagcaaggttatagtaccgatgtagatcaatatatctagttgaattcatccctgttcgaattccctcccacggccagcaatcggccgcgcgcgcg

SEQ ID NO: 27305 - DNA, 96 bp, Aspergillus turcosus
  misc_feature: 1924
gcaaggttatagtaccgatgtagatcaatatatctagttgaattcatccctgttcgaattccctcccacggccagcaatcggccgcgcgcgcggac

SEQ ID NO: 27306 - DNA, 96 bp, Aspergillus turcosus
  misc_feature: 1919
agcaaggttatagtaccgatgtagatcaatatatctagttgaattcatccctgttcgaattccctcccacggccagcaatcggccgcgcgcgcgga

SEQ ID NO: 27307 - DNA, 96 bp, Aspergillus turcosus
  misc_feature: 1916
cttagaggtctgaaggggacatgtctatatatatgtgcggatgtacagcacaggtgggccatgccgatatataggttcgtatgtccaccaggcacc

SEQ ID NO: 27308 - DNA, 96 bp, Aspergillus turcosus
  misc_feature: 1904
cctgcccaacggcctcggccaactggtcaccgctgcgcgcgcagcctattgctcaccgtaggagggcgtgtgcagtccgcgagtcactctacgggc

SEQ ID NO: 27309 - DNA, 96 bp, Aspergillus turcosus
  misc_feature: 1902
tgtctatatatatgtgcggatgtacagcacaggtgggccatgccgatatataggttcgtatgtccaccaggcacccagcagcctctgtaatctccc

SEQ ID NO: 27310 - DNA, 96 bp, Aspergillus turcosus
  misc_feature: 1900
ccaactggtcaccgctgcgcgcgcagcctattgctcaccgtaggagggcgtgtgcagtccgcgagtcactctacgggctgtgtgtcgctggctggc

SEQ ID NO: 27311 - DNA, 96 bp, Aspergillus turcosus
  misc_feature: 1898
caactggtcaccgctgcgcgcgcagcctattgctcaccgtaggagggcgtgtgcagtccgcgagtcactctacgggctgtgtgtcgctggctggcc

SEQ ID NO: 27312 - DNA, 96 bp, Aspergillus turcosus
  misc_feature: 1898
caaggttatagtaccgatgtagatcaatatatctagttgaattcatccctgttcgaattccctcccacggccagcaatcggccgcgcgcgcggacg

SEQ ID NO: 27313 - DNA, 96 bp, Aspergillus turcosus
  misc_feature: 1884
agcttagaggtctgaaggggacatgtctatatatatgtgcggatgtacagcacaggtgggccatgccgatatataggttcgtatgtccaccaggca

SEQ ID NO: 27314 - DNA, 96 bp, Aspergillus turcosus
  misc_feature: 1869
aaggttatagtaccgatgtagatcaatatatctagttgaattcatccctgttcgaattccctcccacggccagcaatcggccgcgcgcgcggacgg

SEQ ID NO: 27315 - DNA, 96 bp, Aspergillus turcosus
  misc_feature: 1839
ggtctgaaggggacatgtctatatatatgtgcggatgtacagcacaggtgggccatgccgatatataggttcgtatgtccaccaggcacccagcag

SEQ ID NO: 27316 - DNA, 96 bp, Aspergillus turcosus
  misc_feature: 1836
agaggtctgaaggggacatgtctatatatatgtgcggatgtacagcacaggtgggccatgccgatatataggttcgtatgtccaccaggcacccag

SEQ ID NO: 27317 - DNA, 96 bp, Aspergillus turcosus
  misc_feature: 1830
ggttatagtaccgatgtagatcaatatatctagttgaattcatccctgttcgaattccctcccacggccagcaatcggccgcgcgcgcggacggga

SEQ ID NO: 27318 - DNA, 96 bp, Aspergillus turcosus
  misc_feature: 1776
gaggtctgaaggggacatgtctatatatatgtgcggatgtacagcacaggtgggccatgccgatatataggttcgtatgtccaccaggcacccagc

SEQ ID NO: 27319 - DNA, 96 bp, Aspergillus turcosus
  misc_feature: 1773
gtctgaaggggacatgtctatatatatgtgcggatgtacagcacaggtgggccatgccgatatataggttcgtatgtccaccaggcacccagcagc

SEQ ID NO: 27320 - DNA, 96 bp, Aspergillus turcosus
  misc_feature: 1771
aacggcctcggccaactggtcaccgctgcgcgcgcagcctattgctcaccgtaggagggcgtgtgcagtccgcgagtcactctacgggctgtgtgt

SEQ ID NO: 27321 - DNA, 96 bp, Aspergillus turcosus
  misc_feature: 1761
tctgaaggggacatgtctatatatatgtgcggatgtacagcacaggtgggccatgccgatatataggttcgtatgtccaccaggcacccagcagcc

SEQ ID NO: 27322 - DNA, 96 bp, Aspergillus turcosus
  misc_feature: 1756
aggttatagtaccgatgtagatcaatatatctagttgaattcatccctgttcgaattccctcccacggccagcaatcggccgcgcgcgcggacggg

SEQ ID NO: 27323 - DNA, 96 bp, Aspergillus turcosus
  misc_feature: 1753
acggcctcggccaactggtcaccgctgcgcgcgcagcctattgctcaccgtaggagggcgtgtgcagtccgcgagtcactctacgggctgtgtgtc

SEQ ID NO: 27324 - DNA, 96 bp, Aspergillus turcosus
  misc_feature: 1750
aggtctgaaggggacatgtctatatatatgtgcggatgtacagcacaggtgggccatgccgatatataggttcgtatgtccaccaggcacccagca

SEQ ID NO: 27325 - DNA, 96 bp, Aspergillus turcosus
  misc_feature: 1746
ctgaaggggacatgtctatatatatgtgcggatgtacagcacaggtgggccatgccgatatataggttcgtatgtccaccaggcacccagcagcct

SEQ ID NO: 27326 - DNA, 96 bp, Aspergillus turcosus
  misc_feature: 1738
cggcctcggccaactggtcaccgctgcgcgcgcagcctattgctcaccgtaggagggcgtgtgcagtccgcgagtcactctacgggctgtgtgtcg

SEQ ID NO: 27327 - DNA, 96 bp, Aspergillus turcosus
  misc_feature: 1719
ttatagtaccgatgtagatcaatatatctagttgaattcatccctgttcgaattccctcccacggccagcaatcggccgcgcgcgcggacgggacc

SEQ ID NO: 27328 - DNA, 96 bp, Aspergillus turcosus
  misc_feature: 1719
atatatagacatgtccccttcagacctctaagctcccgtggaagatggagcaaggttatagtaccgatgtagatcaatatatctagttgaattcat

SEQ ID NO: 27329 - DNA, 96 bp, Aspergillus turcosus
  misc_feature: 1713
gttatagtaccgatgtagatcaatatatctagttgaattcatccctgttcgaattccctcccacggccagcaatcggccgcgcgcgcggacgggac

SEQ ID NO: 27330 - DNA, 96 bp, Aspergillus turcosus
  misc_feature: 1709
ggacatgtctatatatatgtgcggatgtacagcacaggtgggccatgccgatatataggttcgtatgtccaccaggcacccagcagcctctgtaat

SEQ ID NO: 27331 - DNA, 96 bp, Aspergillus turcosus
  misc_feature: 1690
gacatgtctatatatatgtgcggatgtacagcacaggtgggccatgccgatatataggttcgtatgtccaccaggcacccagcagcctctgtaatc

SEQ ID NO: 27332 - DNA, 96 bp, Aspergillus turcosus
  misc_feature: 1661
tatatatagacatgtccccttcagacctctaagctcccgtggaagatggagcaaggttatagtaccgatgtagatcaatatatctagttgaattca

SEQ ID NO: 27333 - DNA, 96 bp, Aspergillus turcosus
  misc_feature: 1612
ccctgttcgaattccctcccacggccagcaatcggccgcgcgcgcggacgggaccagttggccggcatccttgggcaagcaggcaggccgcggcgg

SEQ ID NO: 27334 - DNA, 96 bp, Aspergillus turcosus
  misc_feature: 1599
acatgtctatatatatgtgcggatgtacagcacaggtgggccatgccgatatataggttcgtatgtccaccaggcacccagcagcctctgtaatct

SEQ ID NO: 27335 - DNA, 96 bp, Aspergillus turcosus
  misc_feature: 1573
tccctgttcgaattccctcccacggccagcaatcggccgcgcgcgcggacgggaccagttggccggcatccttgggcaagcaggcaggccgcggcg

SEQ ID NO: 27336 - DNA, 96 bp, Aspergillus turcosus
  misc_feature: 1571
gcccacctgtgctgtacatccgcacatatatatagacatgtccccttcagacctctaagctcccgtggaagatggagcaaggttatagtaccgatg

SEQ ID NO: 27337 - DNA, 96 bp, Aspergillus turcosus
  misc_feature: 1555
atgtctatatatatgtgcggatgtacagcacaggtgggccatgccgatatataggttcgtatgtccaccaggcacccagcagcctctgtaatctcc

SEQ ID NO: 27338 - DNA, 96 bp, Aspergillus turcosus
  misc_feature: 1544
atccctgttcgaattccctcccacggccagcaatcggccgcgcgcgcggacgggaccagttggccggcatccttgggcaagcaggcaggccgcggc

SEQ ID NO: 27339 - DNA, 96 bp, Aspergillus turcosus
  misc_feature: 1493
cctgtgctgtacatccgcacatatatatagacatgtccccttcagacctctaagctcccgtggaagatggagcaaggttatagtaccgatgtagat

SEQ ID NO: 27340 - DNA, 96 bp, Aspergillus turcosus
  misc_feature: 1478
cccacctgtgctgtacatccgcacatatatatagacatgtccccttcagacctctaagctcccgtggaagatggagcaaggttatagtaccgatgt

SEQ ID NO: 27341 - DNA, 96 bp, Aspergillus turcosus
  misc_feature: 1461
ctgtgctgtacatccgcacatatatatagacatgtccccttcagacctctaagctcccgtggaagatggagcaaggttatagtaccgatgtagatc

SEQ ID NO: 27342 - DNA, 96 bp, Aspergillus turcosus
  misc_feature: 1461
ctgtacatccgcacatatatatagacatgtccccttcagacctctaagctcccgtggaagatggagcaaggttatagtaccgatgtagatcaatat

SEQ ID NO: 27343 - DNA, 96 bp, Aspergillus turcosus
  misc_feature: 1456
cacctgtgctgtacatccgcacatatatatagacatgtccccttcagacctctaagctcccgtggaagatggagcaaggttatagtaccgatgtag

SEQ ID NO: 27344 - DNA, 96 bp, Aspergillus turcosus
  misc_feature: 1453
acctgtgctgtacatccgcacatatatatagacatgtccccttcagacctctaagctcccgtggaagatggagcaaggttatagtaccgatgtaga

SEQ ID NO: 27345 - DNA, 96 bp, Aspergillus turcosus
  misc_feature: 1448
ccacctgtgctgtacatccgcacatatatatagacatgtccccttcagacctctaagctcccgtggaagatggagcaaggttatagtaccgatgta

SEQ ID NO: 27346 - DNA, 96 bp, Aspergillus turcosus
  misc_feature: 1445
tgctgtacatccgcacatatatatagacatgtccccttcagacctctaagctcccgtggaagatggagcaaggttatagtaccgatgtagatcaat

SEQ ID NO: 27347 - DNA, 96 bp, Aspergillus turcosus
  misc_feature: 1433
catatatatagacatgtccccttcagacctctaagctcccgtggaagatggagcaaggttatagtaccgatgtagatcaatatatctagttgaatt

SEQ ID NO: 27348 - DNA, 96 bp, Aspergillus turcosus
  misc_feature: 1427
tatagtaccgatgtagatcaatatatctagttgaattcatccctgttcgaattccctcccacggccagcaatcggccgcgcgcgcggacgggacca

SEQ ID NO: 27349 - DNA, 96 bp, Aspergillus turcosus
  misc_feature: 1427
gctgtacatccgcacatatatatagacatgtccccttcagacctctaagctcccgtggaagatggagcaaggttatagtaccgatgtagatcaata

SEQ ID NO: 27350 - DNA, 96 bp, Aspergillus turcosus
  misc_feature: 1427
atatatatagacatgtccccttcagacctctaagctcccgtggaagatggagcaaggttatagtaccgatgtagatcaatatatctagttgaattc

SEQ ID NO: 27351 - DNA, 96 bp, Aspergillus turcosus
  misc_feature: 1426
gtgctgtacatccgcacatatatatagacatgtccccttcagacctctaagctcccgtggaagatggagcaaggttatagtaccgatgtagatcaa

SEQ ID NO: 27352 - DNA, 96 bp, Aspergillus turcosus
  misc_feature: 1401
gtacatccgcacatatatatagacatgtccccttcagacctctaagctcccgtggaagatggagcaaggttatagtaccgatgtagatcaatatat

SEQ ID NO: 27353 - DNA, 96 bp, Aspergillus turcosus
  misc_feature: 1372
tacatccgcacatatatatagacatgtccccttcagacctctaagctcccgtggaagatggagcaaggttatagtaccgatgtagatcaatatatc

SEQ ID NO: 27354 - DNA, 96 bp, Aspergillus turcosus
  misc_feature: 1348
tgtacatccgcacatatatatagacatgtccccttcagacctctaagctcccgtggaagatggagcaaggttatagtaccgatgtagatcaatata

SEQ ID NO: 27355 - DNA, 96 bp, Aspergillus turcosus
  misc_feature: 1339
tgtgctgtacatccgcacatatatatagacatgtccccttcagacctctaagctcccgtggaagatggagcaaggttatagtaccgatgtagatca

SEQ ID NO: 27356 - DNA, 96 bp, Aspergillus turcosus
  misc_feature: 1296
acatccgcacatatatatagacatgtccccttcagacctctaagctcccgtggaagatggagcaaggttatagtaccgatgtagatcaatatatct

SEQ ID NO: 27357 - DNA, 96 bp, Aspergillus turcosus
  misc_feature: 1243
gtcttcggcgggcgcgggcccgggggcgcgagggcctccccggcggccgttcgagaacggcgggcccgccgaagcaacaaggtacaatagacacgg

SEQ ID NO: 27358 - DNA, 96 bp, Aspergillus turcosus
  misc_feature: 1242
catccgcacatatatatagacatgtccccttcagacctctaagctcccgtggaagatggagcaaggttatagtaccgatgtagatcaatatatcta

SEQ ID NO: 27359 - DNA, 96 bp, Aspergillus turcosus
  misc_feature: 1225
atccgcacatatatatagacatgtccccttcagacctctaagctcccgtggaagatggagcaaggttatagtaccgatgtagatcaatatatctag

SEQ ID NO: 27360 - DNA, 96 bp, Aspergillus turcosus
  misc_feature: 1224
agtaccgatgtagatcaatatatctagttgaattcatccctgttcgaattccctcccacggccagcaatcggccgcgcgcgcggacgggaccagtt

SEQ ID NO: 27361 - DNA, 96 bp, Aspergillus turcosus
  misc_feature: 1220
tccgcacatatatatagacatgtccccttcagacctctaagctcccgtggaagatggagcaaggttatagtaccgatgtagatcaatatatctagt

SEQ ID NO: 27362 - DNA, 96 bp, Aspergillus turcosus
  misc_feature: 1208
atagtaccgatgtagatcaatatatctagttgaattcatccctgttcgaattccctcccacggccagcaatcggccgcgcgcgcggacgggaccag

SEQ ID NO: 27363 - DNA, 96 bp, Aspergillus turcosus
  misc_feature: 1206
tagtaccgatgtagatcaatatatctagttgaattcatccctgttcgaattccctcccacggccagcaatcggccgcgcgcgcggacgggaccagt

SEQ ID NO: 27364 - DNA, 96 bp, Aspergillus turcosus
  misc_feature: 1182
cgcacatatatatagacatgtccccttcagacctctaagctcccgtggaagatggagcaaggttatagtaccgatgtagatcaatatatctagttg

SEQ ID NO: 27365 - DNA, 96 bp, Aspergillus turcosus
  misc_feature: 1177
cacatatatatagacatgtccccttcagacctctaagctcccgtggaagatggagcaaggttatagtaccgatgtagatcaatatatctagttgaa

SEQ ID NO: 27366 - DNA, 96 bp, Aspergillus turcosus
  misc_feature: 1173
ccgcacatatatatagacatgtccccttcagacctctaagctcccgtggaagatggagcaaggttatagtaccgatgtagatcaatatatctagtt

SEQ ID NO: 27367 - DNA, 96 bp, Aspergillus turcosus
  misc_feature: 1173
acatatatatagacatgtccccttcagacctctaagctcccgtggaagatggagcaaggttatagtaccgatgtagatcaatatatctagttgaat

SEQ ID NO: 27368 - DNA, 96 bp, Aspergillus turcosus
  misc_feature: 1142
tcttcggcgggcgcgggcccgggggcgcgagggcctccccggcggccgttcgagaacggcgggcccgccgaagcaacaaggtacaatagacacggg

SEQ ID NO: 27369 - DNA, 96 bp, Aspergillus turcosus
  misc_feature: 1140
gcacatatatatagacatgtccccttcagacctctaagctcccgtggaagatggagcaaggttatagtaccgatgtagatcaatatatctagttga

SEQ ID NO: 27370 - DNA, 96 bp, Aspergillus turcosus
  misc_feature: 1139
gcagggaggcgcgcgcgcgccctataggcagccgagagccgcgcgcgcgaacagtacggaggctgccggtcgcttgacggggcgtcccgacatata

SEQ ID NO: 27371 - DNA, 96 bp, Aspergillus turcosus
  misc_feature: 1137
ggcagggaggcgcgcgcgcgccctataggcagccgagagccgcgcgcgcgaacagtacggaggctgccggtcgcttgacggggcgtcccgacatat

SEQ ID NO: 27372 - DNA, 96 bp, Aspergillus turcosus
  misc_feature: 1129
aggcagggaggcgcgcgcgcgccctataggcagccgagagccgcgcgcgcgaacagtacggaggctgccggtcgcttgacggggcgtcccgacata

SEQ ID NO: 27373 - DNA, 96 bp, Aspergillus turcosus
  misc_feature: 1106
cagggaggcgcgcgcgcgccctataggcagccgagagccgcgcgcgcgaacagtacggaggctgccggtcgcttgacggggcgtcccgacatatat

SEQ ID NO: 27374 - DNA, 96 bp, Aspergillus turcosus
  misc_feature: 1075
cgcgcggccgtaccggggccggcgcccttggccgggaccggcccgacacacgcagaccagacggccagaacgaccaagaccccttgcggcccaagc

SEQ ID NO: 27375 - DNA, 96 bp, Aspergillus turcosus
  misc_feature: 1074
cgcgcgcgccctataggcagccgagagccgcgcgcgcgaacagtacggaggctgccggtcgcttgacggggcgtcccgacatatatcagcgtggcc

SEQ ID NO: 27376 - DNA, 96 bp, Aspergillus turcosus
  misc_feature: 1068
agggaggcgcgcgcgcgccctataggcagccgagagccgcgcgcgcgaacagtacggaggctgccggtcgcttgacggggcgtcccgacatatatc

SEQ ID NO: 27377 - DNA, 96 bp, Aspergillus turcosus
  misc_feature: 1054
gcgcgcggccgtaccggggccggcgcccttggccgggaccggcccgacacacgcagaccagacggccagaacgaccaagaccccttgcggcccaag

SEQ ID NO: 27378 - DNA, 96 bp, Aspergillus turcosus
  misc_feature: 1052
cggccgcgcgcgcggacgggaccagttggccggcatccttgggcaagcaggcaggccgcggcggccgcgcgcgccttcgagagcccaccgggccgg

SEQ ID NO: 27379 - DNA, 96 bp, Aspergillus turcosus
  misc_feature: 1047
gcgcgcgcgccctataggcagccgagagccgcgcgcgcgaacagtacggaggctgccggtcgcttgacggggcgtcccgacatatatcagcgtggc

SEQ ID NO: 27380 - DNA, 96 bp, Aspergillus turcosus
  misc_feature: 1046
cgcgcgcggccgtaccggggccggcgcccttggccgggaccggcccgacacacgcagaccagacggccagaacgaccaagaccccttgcggcccaa

SEQ ID NO: 27381 - DNA, 96 bp, Aspergillus turcosus
  misc_feature: 1045
tcggccgcgcgcgcggacgggaccagttggccggcatccttgggcaagcaggcaggccgcggcggccgcgcgcgccttcgagagcccaccgggccg

SEQ ID NO: 27382 - DNA, 96 bp, Aspergillus turcosus
  misc_feature: 1024
cgcgcgcgcgccctataggcagccgagagccgcgcgcgcgaacagtacggaggctgccggtcgcttgacggggcgtcccgacatatatcagcgtgg

SEQ ID NO: 27383 - DNA, 96 bp, Aspergillus turcosus
  misc_feature: 986
gggaggcgcgcgcgcgccctataggcagccgagagccgcgcgcgcgaacagtacggaggctgccggtcgcttgacggggcgtcccgacatatatca

SEQ ID NO: 27384 - DNA, 96 bp, Aspergillus turcosus
  misc_feature: 982
ggaggcgcgcgcgcgccctataggcagccgagagccgcgcgcgcgaacagtacggaggctgccggtcgcttgacggggcgtcccgacatatatcag

SEQ ID NO: 27385 - DNA, 96 bp, Aspergillus turcosus
  misc_feature: 973
gccgcgcgcgcggacgggaccagttggccggcatccttgggcaagcaggcaggccgcggcggccgcgcgcgccttcgagagcccaccgggccggcg

SEQ ID NO: 27386 - DNA, 96 bp, Aspergillus turcosus
  misc_feature: 970
aggcgcgcgcgcgccctataggcagccgagagccgcgcgcgcgaacagtacggaggctgccggtcgcttgacggggcgtcccgacatatatcagcg

SEQ ID NO: 27387 - DNA, 96 bp, Aspergillus turcosus
  misc_feature: 968
gcgcgcgcgcgccctataggcagccgagagccgcgcgcgcgaacagtacggaggctgccggtcgcttgacggggcgtcccgacatatatcagcgtg

SEQ ID NO: 27388 - DNA, 96 bp, Aspergillus turcosus
  misc_feature: 967
gaggcgcgcgcgcgccctataggcagccgagagccgcgcgcgcgaacagtacggaggctgccggtcgcttgacggggcgtcccgacatatatcagc

SEQ ID NO: 27389 - DNA, 96 bp, Aspergillus turcosus
  misc_feature: 963
ggcgcgcgcgcgccctataggcagccgagagccgcgcgcgcgaacagtacggaggctgccggtcgcttgacggggcgtcccgacatatatcagcgt

SEQ ID NO: 27390 - DNA, 96 bp, Aspergillus turcosus
  misc_feature: 941
cgcgcgcgcggacgggaccagttggccggcatccttgggcaagcaggcaggccgcggcggccgcgcgcgccttcgagagcccaccgggccggcgcg

SEQ ID NO: 27391 - DNA, 96 bp, Aspergillus turcosus
  misc_feature: 940
ccgcgcgcgcggacgggaccagttggccggcatccttgggcaagcaggcaggccgcggcggccgcgcgcgccttcgagagcccaccgggccggcgc

SEQ ID NO: 27392 - DNA, 96 bp, Aspergillus turcosus
  misc_feature: 918
gcgcgcgcggacgggaccagttggccggcatccttgggcaagcaggcaggccgcggcggccgcgcgcgccttcgagagcccaccgggccggcgcgc

SEQ ID NO: 27393 - DNA, 96 bp, Aspergillus turcosus
  misc_feature: 918
cgcgcgcggacgggaccagttggccggcatccttgggcaagcaggcaggccgcggcggccgcgcgcgccttcgagagcccaccgggccggcgcgcg

SEQ ID NO: 27394 - DNA, 96 bp, Aspergillus turcosus
  misc_feature: 903
atcggccgcgcgcgcggacgggaccagttggccggcatccttgggcaagcaggcaggccgcggcggccgcgcgcgccttcgagagcccaccgggcc

SEQ ID NO: 27395 - DNA, 96 bp, Aspergillus turcosus
  misc_feature: 840
ctcaccgggcccaggcaggcccgcgcgcggccgtaccggggccggcgcccttggccgggaccggcccgacacacgcagaccagacggccagaacga

SEQ ID NO: 27396 - DNA, 96 bp, Aspergillus turcosus
  misc_feature: 834
ccgcgcgcgcgggcttgcctgggccctagcgccggtgcgcgcgcgcggccggtccagccccgcggcgccggctccccggcctccctcctgcccgcg

SEQ ID NO: 27397 - DNA, 96 bp, Aspergillus turcosus
  misc_feature: 815
cgcgcgggcttgcctgggccctagcgccggtgcgcgcgcgcggccggtccagccccgcggcgccggctccccggcctccctcctgcccgcgcgcgc

SEQ ID NO: 27398 - DNA, 96 bp, Aspergillus turcosus
  misc_feature: 814
cgcgcgcgggcttgcctgggccctagcgccggtgcgcgcgcgcggccggtccagccccgcggcgccggctccccggcctccctcctgcccgcgcgc

SEQ ID NO: 27399 - DNA, 96 bp, Aspergillus turcosus
  misc_feature: 812
gcgcgcgggcttgcctgggccctagcgccggtgcgcgcgcgcggccggtccagccccgcggcgccggctccccggcctccctcctgcccgcgcgcg

SEQ ID NO: 27400 - DNA, 96 bp, Aspergillus turcosus
  misc_feature: 810
gccgcgcgcgcgggcttgcctgggccctagcgccggtgcgcgcgcgcggccggtccagccccgcggcgccggctccccggcctccctcctgcccgc

SEQ ID NO: 27401 - DNA, 96 bp, Aspergillus turcosus
  misc_feature: 807
ccctggtccccatcggccgcgcgcgcgggcttgcctgggccctagcgccggtgcgcgcgcgcggccggtccagccccgcggcgccggctccccggc

SEQ ID NO: 27402 - DNA, 96 bp, Aspergillus turcosus
  misc_feature: 805
ggccgcgcgcgcgggcttgcctgggccctagcgccggtgcgcgcgcgcggccggtccagccccgcggcgccggctccccggcctccctcctgcccg

SEQ ID NO: 27403 - DNA, 96 bp, Aspergillus turcosus
  misc_feature: 804
ggctcaccgggcccaggcaggcccgcgcgcggccgtaccggggccggcgcccttggccgggaccggcccgacacacgcagaccagacggccagaac

SEQ ID NO: 27404 - DNA, 96 bp, Aspergillus turcosus
  misc_feature: 803
cgcgcgcgcgggcttgcctgggccctagcgccggtgcgcgcgcgcggccggtccagccccgcggcgccggctccccggcctccctcctgcccgcgc

SEQ ID NO: 27405 - DNA, 96 bp, Aspergillus turcosus
  misc_feature: 802
gctcaccgggcccaggcaggcccgcgcgcggccgtaccggggccggcgcccttggccgggaccggcccgacacacgcagaccagacggccagaacg

SEQ ID NO: 27406 - DNA, 96 bp, Aspergillus turcosus
  misc_feature: 799
gcgcgcgcgggcttgcctgggccctagcgccggtgcgcgcgcgcggccggtccagccccgcggcgccggctccccggcctccctcctgcccgcgcg

SEQ ID NO: 27407 - DNA, 96 bp, Aspergillus turcosus
  misc_feature: 798
cggccgcgcgcgcgggcttgcctgggccctagcgccggtgcgcgcgcgcggccggtccagccccgcggcgccggctccccggcctccctcctgccc

SEQ ID NO: 27408 - DNA, 96 bp, Aspergillus turcosus
  misc_feature: 797
cctggtccccatcggccgcgcgcgcgggcttgcctgggccctagcgccggtgcgcgcgcgcggccggtccagccccgcggcgccggctccccggcc

SEQ ID NO: 27409 - DNA, 96 bp, Aspergillus turcosus
  misc_feature: 797
cccatcggccgcgcgcgcgggcttgcctgggccctagcgccggtgcgcgcgcgcggccggtccagccccgcggcgccggctccccggcctccctcc

SEQ ID NO: 27410 - DNA, 96 bp, Aspergillus turcosus
  misc_feature: 796
gtccccatcggccgcgcgcgcgggcttgcctgggccctagcgccggtgcgcgcgcgcggccggtccagccccgcggcgccggctccccggcctccc

SEQ ID NO: 27411 - DNA, 96 bp, Aspergillus turcosus
  misc_feature: 794
tcggccgcgcgcgcgggcttgcctgggccctagcgccggtgcgcgcgcgcggccggtccagccccgcggcgccggctccccggcctccctcctgcc

SEQ ID NO: 27412 - DNA, 96 bp, Aspergillus turcosus
  misc_feature: 793
atcggccgcgcgcgcgggcttgcctgggccctagcgccggtgcgcgcgcgcggccggtccagccccgcggcgccggctccccggcctccctcctgc

SEQ ID NO: 27413 - DNA, 96 bp, Aspergillus turcosus
  misc_feature: 790
catcggccgcgcgcgcgggcttgcctgggccctagcgccggtgcgcgcgcgcggccggtccagccccgcggcgccggctccccggcctccctcctg

SEQ ID NO: 27414 - DNA, 96 bp, Aspergillus turcosus
  misc_feature: 786
ccatcggccgcgcgcgcgggcttgcctgggccctagcgccggtgcgcgcgcgcggccggtccagccccgcggcgccggctccccggcctccctcct

SEQ ID NO: 27415 - DNA, 96 bp, Aspergillus turcosus
  misc_feature: 783
ggtccccatcggccgcgcgcgcgggcttgcctgggccctagcgccggtgcgcgcgcgcggccggtccagccccgcggcgccggctccccggcctcc

SEQ ID NO: 27416 - DNA, 96 bp, Aspergillus turcosus
  misc_feature: 781
ccccatcggccgcgcgcgcgggcttgcctgggccctagcgccggtgcgcgcgcgcggccggtccagccccgcggcgccggctccccggcctccctc

SEQ ID NO: 27417 - DNA, 96 bp, Aspergillus turcosus
  misc_feature: 774
tccccatcggccgcgcgcgcgggcttgcctgggccctagcgccggtgcgcgcgcgcggccggtccagccccgcggcgccggctccccggcctccct

SEQ ID NO: 27418 - DNA, 96 bp, Aspergillus turcosus
  misc_feature: 773
cccgcgcgcgcgcgccggcccggtgggctctcgaaggcgcgcgcggccgccgcggcctgcctgcttgcccaaggatgccggccaactggtcccgtc

SEQ ID NO: 27419 - DNA, 96 bp, Aspergillus turcosus
  misc_feature: 769
gcctgggccctagcgccggtgcgcgcgcgcggccggtccagccccgcggcgccggctccccggcctccctcctgcccgcgcgcgcgcgccggcccg

SEQ ID NO: 27420 - DNA, 96 bp, Aspergillus turcosus
  misc_feature: 766
tccctggtccccatcggccgcgcgcgcgggcttgcctgggccctagcgccggtgcgcgcgcgcggccggtccagccccgcggcgccggctccccgg

SEQ ID NO: 27421 - DNA, 96 bp, Aspergillus turcosus
  misc_feature: 766
cctgggccctagcgccggtgcgcgcgcgcggccggtccagccccgcggcgccggctccccggcctccctcctgcccgcgcgcgcgcgccggcccgg

SEQ ID NO: 27422 - DNA, 96 bp, Aspergillus turcosus
  misc_feature: 763
tggtccccatcggccgcgcgcgcgggcttgcctgggccctagcgccggtgcgcgcgcgcggccggtccagccccgcggcgccggctccccggcctc

SEQ ID NO: 27423 - DNA, 96 bp, Aspergillus turcosus
  misc_feature: 763
cagggaaggcccacacactcggctcaccgggcccaggcaggcccgcgcgcggccgtaccggggccggcgcccttggccgggaccggcccgacacac

SEQ ID NO: 27424 - DNA, 96 bp, Aspergillus turcosus
  misc_feature: 761
ccagggaaggcccacacactcggctcaccgggcccaggcaggcccgcgcgcggccgtaccggggccggcgcccttggccgggaccggcccgacaca

SEQ ID NO: 27425 - DNA, 96 bp, Aspergillus turcosus
  misc_feature: 760
agggaaggcccacacactcggctcaccgggcccaggcaggcccgcgcgcggccgtaccggggccggcgcccttggccgggaccggcccgacacacg

SEQ ID NO: 27426 - DNA, 96 bp, Aspergillus turcosus
  misc_feature: 758
ctggtccccatcggccgcgcgcgcgggcttgcctgggccctagcgccggtgcgcgcgcgcggccggtccagccccgcggcgccggctccccggcct

SEQ ID NO: 27427 - DNA, 96 bp, Aspergillus turcosus
  misc_feature: 757
ccgcgcgcgcgcgccggcccggtgggctctcgaaggcgcgcgcggccgccgcggcctgcctgcttgcccaaggatgccggccaactggtcccgtcc

SEQ ID NO: 27428 - DNA, 96 bp, Aspergillus turcosus
  misc_feature: 748
ctgggccctagcgccggtgcgcgcgcgcggccggtccagccccgcggcgccggctccccggcctccctcctgcccgcgcgcgcgcgccggcccggt

SEQ ID NO: 27429 - DNA, 96 bp, Aspergillus turcosus
  misc_feature: 741
tgggccctagcgccggtgcgcgcgcgcggccggtccagccccgcggcgccggctccccggcctccctcctgcccgcgcgcgcgcgccggcccggtg

SEQ ID NO: 27430 - DNA, 96 bp, Aspergillus turcosus
  misc_feature: 741
tgcctgggccctagcgccggtgcgcgcgcgcggccggtccagccccgcggcgccggctccccggcctccctcctgcccgcgcgcgcgcgccggccc

SEQ ID NO: 27431 - DNA, 96 bp, Aspergillus turcosus
  misc_feature: 738
ccctagcgccggtgcgcgcgcgcggccggtccagccccgcggcgccggctccccggcctccctcctgcccgcgcgcgcgcgccggcccggtgggct

SEQ ID NO: 27432 - DNA, 96 bp, Aspergillus turcosus
  misc_feature: 735
gccctagcgccggtgcgcgcgcgcggccggtccagccccgcggcgccggctccccggcctccctcctgcccgcgcgcgcgcgccggcccggtgggc

SEQ ID NO: 27433 - DNA, 96 bp, Aspergillus turcosus
  misc_feature: 734
ggccttccctggtccccatcggccgcgcgcgcgggcttgcctgggccctagcgccggtgcgcgcgcgcggccggtccagccccgcggcgccggctc

SEQ ID NO: 27434 - DNA, 96 bp, Aspergillus turcosus
  misc_feature: 730
gccttccctggtccccatcggccgcgcgcgcgggcttgcctgggccctagcgccggtgcgcgcgcgcggccggtccagccccgcggcgccggctcc

SEQ ID NO: 27435 - DNA, 96 bp, Aspergillus turcosus
  misc_feature: 726
gggccctagcgccggtgcgcgcgcgcggccggtccagccccgcggcgccggctccccggcctccctcctgcccgcgcgcgcgcgccggcccggtgg

SEQ ID NO: 27436 - DNA, 96 bp, Aspergillus turcosus
  misc_feature: 724
ggccctagcgccggtgcgcgcgcgcggccggtccagccccgcggcgccggctccccggcctccctcctgcccgcgcgcgcgcgccggcccggtggg

SEQ ID NO: 27437 - DNA, 96 bp, Aspergillus turcosus
  misc_feature: 724
cctagcgccggtgcgcgcgcgcggccggtccagccccgcggcgccggctccccggcctccctcctgcccgcgcgcgcgcgccggcccggtgggctc

SEQ ID NO: 27438 - DNA, 96 bp, Aspergillus turcosus
  misc_feature: 718
ccttccctggtccccatcggccgcgcgcgcgggcttgcctgggccctagcgccggtgcgcgcgcgcggccggtccagccccgcggcgccggctccc

SEQ ID NO: 27439 - DNA, 96 bp, Aspergillus turcosus
  misc_feature: 713
cttccctggtccccatcggccgcgcgcgcgggcttgcctgggccctagcgccggtgcgcgcgcgcggccggtccagccccgcggcgccggctcccc

SEQ ID NO: 27440 - DNA, 96 bp, Aspergillus turcosus
  misc_feature: 708
ctagcgccggtgcgcgcgcgcggccggtccagccccgcggcgccggctccccggcctccctcctgcccgcgcgcgcgcgccggcccggtgggctct

SEQ ID NO: 27441 - DNA, 96 bp, Aspergillus turcosus
  misc_feature: 706
cttgcctgggccctagcgccggtgcgcgcgcgcggccggtccagccccgcggcgccggctccccggcctccctcctgcccgcgcgcgcgcgccggc

SEQ ID NO: 27442 - DNA, 96 bp, Aspergillus turcosus
  misc_feature: 705
ttccctggtccccatcggccgcgcgcgcgggcttgcctgggccctagcgccggtgcgcgcgcgcggccggtccagccccgcggcgccggctccccg

SEQ ID NO: 27443 - DNA, 96 bp, Aspergillus turcosus
  misc_feature: 704
ttgcctgggccctagcgccggtgcgcgcgcgcggccggtccagccccgcggcgccggctccccggcctccctcctgcccgcgcgcgcgcgccggcc

SEQ ID NO: 27444 - DNA, 96 bp, Aspergillus turcosus
  misc_feature: 704
tgggccttccctggtccccatcggccgcgcgcgcgggcttgcctgggccctagcgccggtgcgcgcgcgcggccggtccagccccgcggcgccggc

SEQ ID NO: 27445 - DNA, 96 bp, Aspergillus turcosus
  misc_feature: 704
gtgggccttccctggtccccatcggccgcgcgcgcgggcttgcctgggccctagcgccggtgcgcgcgcgcggccggtccagccccgcggcgccgg

SEQ ID NO: 27446 - DNA, 96 bp, Aspergillus turcosus
  misc_feature: 702
gggccttccctggtccccatcggccgcgcgcgcgggcttgcctgggccctagcgccggtgcgcgcgcgcggccggtccagccccgcggcgccggct

SEQ ID NO: 27447 - DNA, 96 bp, Aspergillus turcosus
  misc_feature: 701
gcttgcctgggccctagcgccggtgcgcgcgcgcggccggtccagccccgcggcgccggctccccggcctccctcctgcccgcgcgcgcgcgccgg

SEQ ID NO: 27448 - DNA, 96 bp, Aspergillus turcosus
  misc_feature: 700
ggcttgcctgggccctagcgccggtgcgcgcgcgcggccggtccagccccgcggcgccggctccccggcctccctcctgcccgcgcgcgcgcgccg

SEQ ID NO: 27449 - DNA, 96 bp, Aspergillus turcosus
  misc_feature: 689
tagcgccggtgcgcgcgcgcggccggtccagccccgcggcgccggctccccggcctccctcctgcccgcgcgcgcgcgccggcccggtgggctctc

SEQ ID NO: 27450 - DNA, 96 bp, Aspergillus turcosus
  misc_feature: 683
gtgtgggccttccctggtccccatcggccgcgcgcgcgggcttgcctgggccctagcgccggtgcgcgcgcgcggccggtccagccccgcggcgcc

SEQ ID NO: 27451 - DNA, 96 bp, Aspergillus turcosus
  misc_feature: 681
cgggcttgcctgggccctagcgccggtgcgcgcgcgcggccggtccagccccgcggcgccggctccccggcctccctcctgcccgcgcgcgcgcgc

SEQ ID NO: 27452 - DNA, 96 bp, Aspergillus turcosus
  misc_feature: 678
tgtgggccttccctggtccccatcggccgcgcgcgcgggcttgcctgggccctagcgccggtgcgcgcgcgcggccggtccagccccgcggcgccg

SEQ ID NO: 27453 - DNA, 96 bp, Aspergillus turcosus
  misc_feature: 678
agcgccggtgcgcgcgcgcggccggtccagccccgcggcgccggctccccggcctccctcctgcccgcgcgcgcgcgccggcccggtgggctctcg

SEQ ID NO: 27454 - DNA, 96 bp, Aspergillus turcosus
  misc_feature: 673
gggcttgcctgggccctagcgccggtgcgcgcgcgcggccggtccagccccgcggcgccggctccccggcctccctcctgcccgcgcgcgcgcgcc

SEQ ID NO: 27455 - DNA, 96 bp, Aspergillus turcosus
  misc_feature: 662
cctatagggcgcgcgcgcgcctccctgcctccctgcccaacggcctcggccaactggtcaccgctgcgcgcgcgccagcccaccctcctcgaccgg

SEQ ID NO: 27456 - DNA, 96 bp, Aspergillus turcosus
  misc_feature: 661
tatagggcgcgcgcgcgcctccctgcctccctgcccaacggcctcggccaactggtcaccgctgcgcgcgcgccagcccaccctcctcgaccggac

SEQ ID NO: 27457 - DNA, 96 bp, Aspergillus turcosus
  misc_feature: 657
ctatagggcgcgcgcgcgcctccctgcctccctgcccaacggcctcggccaactggtcaccgctgcgcgcgcgccagcccaccctcctcgaccgga

SEQ ID NO: 27458 - DNA, 96 bp, Aspergillus turcosus
  misc_feature: 652
ccccgcggcgccggctccccggcctccctcctgcccgcgcgcgcgcgccggcccggtgggctctcgaaggcgcgcgcggccgccgcggcctgcctg

SEQ ID NO: 27459 - DNA, 96 bp, Aspergillus turcosus
  misc_feature: 649
gccccgcggcgccggctccccggcctccctcctgcccgcgcgcgcgcgccggcccggtgggctctcgaaggcgcgcgcggccgccgcggcctgcct

SEQ ID NO: 27460 - DNA, 96 bp, Aspergillus turcosus
  misc_feature: 649
ccgcggcgccggctccccggcctccctcctgcccgcgcgcgcgcgccggcccggtgggctctcgaaggcgcgcgcggccgccgcggcctgcctgct

SEQ ID NO: 27461 - DNA, 96 bp, Aspergillus turcosus
  misc_feature: 644
tggaccggccgcgcgcgcgcaccggcgctagggcccaggcaagcccgcgcgcgcggccgatggggaccagggaaggcccacacactcggctcaccg

SEQ ID NO: 27462 - DNA, 96 bp, Aspergillus turcosus
  misc_feature: 643
cgcggcgccggctccccggcctccctcctgcccgcgcgcgcgcgccggcccggtgggctctcgaaggcgcgcgcggccgccgcggcctgcctgctt

SEQ ID NO: 27463 - DNA, 96 bp, Aspergillus turcosus
  misc_feature: 639
gcgccggtgcgcgcgcgcggccggtccagccccgcggcgccggctccccggcctccctcctgcccgcgcgcgcgcgccggcccggtgggctctcga

SEQ ID NO: 27464 - DNA, 96 bp, Aspergillus turcosus
  misc_feature: 639
gggctggaccggccgcgcgcgcgcaccggcgctagggcccaggcaagcccgcgcgcgcggccgatggggaccagggaaggcccacacactcggctc

SEQ ID NO: 27465 - DNA, 96 bp, Aspergillus turcosus
  misc_feature: 639
agccccgcggcgccggctccccggcctccctcctgcccgcgcgcgcgcgccggcccggtgggctctcgaaggcgcgcgcggccgccgcggcctgcc

SEQ ID NO: 27466 - DNA, 96 bp, Aspergillus turcosus
  misc_feature: 639
gcggcgccggctccccggcctccctcctgcccgcgcgcgcgcgccggcccggtgggctctcgaaggcgcgcgcggccgccgcggcctgcctgcttg

SEQ ID NO: 27467 - DNA, 96 bp, Aspergillus turcosus
  misc_feature: 639
cccgcggcgccggctccccggcctccctcctgcccgcgcgcgcgcgccggcccggtgggctctcgaaggcgcgcgcggccgccgcggcctgcctgc

SEQ ID NO: 27468 - DNA, 96 bp, Aspergillus turcosus
  misc_feature: 638
cggcgccggctccccggcctccctcctgcccgcgcgcgcgcgccggcccggtgggctctcgaaggcgcgcgcggccgccgcggcctgcctgcttgc

SEQ ID NO: 27469 - DNA, 96 bp, Aspergillus turcosus
  misc_feature: 637
gctggaccggccgcgcgcgcgcaccggcgctagggcccaggcaagcccgcgcgcgcggccgatggggaccagggaaggcccacacactcggctcac

SEQ ID NO: 27470 - DNA, 96 bp, Aspergillus turcosus
  misc_feature: 637
ggcgccggctccccggcctccctcctgcccgcgcgcgcgcgccggcccggtgggctctcgaaggcgcgcgcggccgccgcggcctgcctgcttgcc

SEQ ID NO: 27471 - DNA, 96 bp, Aspergillus turcosus
  misc_feature: 634
gcgccggctccccggcctccctcctgcccgcgcgcgcgcgccggcccggtgggctctcgaaggcgcgcgcggccgccgcggcctgcctgcttgccc

SEQ ID NO: 27472 - DNA, 96 bp, Aspergillus turcosus
  misc_feature: 633
cgccggtgcgcgcgcgcggccggtccagccccgcggcgccggctccccggcctccctcctgcccgcgcgcgcgcgccggcccggtgggctctcgaa

SEQ ID NO: 27473 - DNA, 96 bp, Aspergillus turcosus
  misc_feature: 633
ggctggaccggccgcgcgcgcgcaccggcgctagggcccaggcaagcccgcgcgcgcggccgatggggaccagggaaggcccacacactcggctca

SEQ ID NO: 27474 - DNA, 96 bp, Aspergillus turcosus
  misc_feature: 625
ctggaccggccgcgcgcgcgcaccggcgctagggcccaggcaagcccgcgcgcgcggccgatggggaccagggaaggcccacacactcggctcacc

SEQ ID NO: 27475 - DNA, 96 bp, Aspergillus turcosus
  misc_feature: 624
cgccggctccccggcctccctcctgcccgcgcgcgcgcgccggcccggtgggctctcgaaggcgcgcgcggccgccgcggcctgcctgcttgccca

SEQ ID NO: 27476 - DNA, 96 bp, Aspergillus turcosus
  misc_feature: 624
tccagccccgcggcgccggctccccggcctccctcctgcccgcgcgcgcgcgccggcccggtgggctctcgaaggcgcgcgcggccgccgcggcct

SEQ ID NO: 27477 - DNA, 96 bp, Aspergillus turcosus
  misc_feature: 624
cagccccgcggcgccggctccccggcctccctcctgcccgcgcgcgcgcgccggcccggtgggctctcgaaggcgcgcgcggccgccgcggcctgc

SEQ ID NO: 27478 - DNA, 96 bp, Aspergillus turcosus
  misc_feature: 624
ccagccccgcggcgccggctccccggcctccctcctgcccgcgcgcgcgcgccggcccggtgggctctcgaaggcgcgcgcggccgccgcggcctg

SEQ ID NO: 27479 - DNA, 96 bp, Aspergillus turcosus
  misc_feature: 622
gtccagccccgcggcgccggctccccggcctccctcctgcccgcgcgcgcgcgccggcccggtgggctctcgaaggcgcgcgcggccgccgcggcc

SEQ ID NO: 27480 - DNA, 96 bp, Aspergillus turcosus
  misc_feature: 622
gcgcgcgcgcctccctgcctccctgcccaacggcctcggccaactggtcaccgctgcgcgcgcgccagcccaccctcctcgaccggactgactgac

SEQ ID NO: 27481 - DNA, 96 bp, Aspergillus turcosus
  misc_feature: 620
gggcgcgcgcgcgcctccctgcctccctgcccaacggcctcggccaactggtcaccgctgcgcgcgcgccagcccaccctcctcgaccggactgac

SEQ ID NO: 27482 - DNA, 96 bp, Aspergillus turcosus
  misc_feature: 617
cggtcgaggagggtgggctggcgcgcgcgcagcggtgaccagttggccgaggccgttgggcagggaggcagggaggcgcgcgcgcgccctataggc

SEQ ID NO: 27483 - DNA, 96 bp, Aspergillus turcosus
  misc_feature: 616
tagggcgcgcgcgcgcctccctgcctccctgcccaacggcctcggccaactggtcaccgctgcgcgcgcgccagcccaccctcctcgaccggactg

SEQ ID NO: 27484 - DNA, 96 bp, Aspergillus turcosus
  misc_feature: 614
ggcgcgcgcgcgcctccctgcctccctgcccaacggcctcggccaactggtcaccgctgcgcgcgcgccagcccaccctcctcgaccggactgact

SEQ ID NO: 27485 - DNA, 96 bp, Aspergillus turcosus
  misc_feature: 614
gcgcgcgcgcgcctccctgcctccctgcccaacggcctcggccaactggtcaccgctgcgcgcgcgccagcccaccctcctcgaccggactgactg

SEQ ID NO: 27486 - DNA, 96 bp, Aspergillus turcosus
  misc_feature: 614
atagggcgcgcgcgcgcctccctgcctccctgcccaacggcctcggccaactggtcaccgctgcgcgcgcgccagcccaccctcctcgaccggact

SEQ ID NO: 27487 - DNA, 96 bp, Aspergillus turcosus
  misc_feature: 613
tgtgtgggccttccctggtccccatcggccgcgcgcgcgggcttgcctgggccctagcgccggtgcgcgcgcgcggccggtccagccccgcggcgc

SEQ ID NO: 27488 - DNA, 96 bp, Aspergillus turcosus
  misc_feature: 612
agggcgcgcgcgcgcctccctgcctccctgcccaacggcctcggccaactggtcaccgctgcgcgcgcgccagcccaccctcctcgaccggactga

SEQ ID NO: 27489 - DNA, 96 bp, Aspergillus turcosus
  misc_feature: 611
gtgtgtgggccttccctggtccccatcggccgcgcgcgcgggcttgcctgggccctagcgccggtgcgcgcgcgcggccggtccagccccgcggcg

SEQ ID NO: 27490 - DNA, 96 bp, Aspergillus turcosus
  misc_feature: 610
cgcgcgcgcgcctccctgcctccctgcccaacggcctcggccaactggtcaccgctgcgcgcgcgccagcccaccctcctcgaccggactgactga

SEQ ID NO: 27491 - DNA, 96 bp, Aspergillus turcosus
  misc_feature: 600
ccggtgcgcgcgcgcggccggtccagccccgcggcgccggctccccggcctccctcctgcccgcgcgcgcgcgccggcccggtgggctctcgaagg

SEQ ID NO: 27492 - DNA, 96 bp, Aspergillus turcosus
  misc_feature: 595
cggtgcgcgcgcgcggccggtccagccccgcggcgccggctccccggcctccctcctgcccgcgcgcgcgcgccggcccggtgggctctcgaaggc

SEQ ID NO: 27493 - DNA, 96 bp, Aspergillus turcosus
  misc_feature: 594
gccggtgcgcgcgcgcggccggtccagccccgcggcgccggctccccggcctccctcctgcccgcgcgcgcgcgccggcccggtgggctctcgaag

SEQ ID NO: 27494 - DNA, 96 bp, Aspergillus turcosus
  misc_feature: 590
ggtcgaggagggtgggctggcgcgcgcgcagcggtgaccagttggccgaggccgttgggcagggaggcagggaggcgcgcgcgcgccctataggca

SEQ ID NO: 27495 - DNA, 96 bp, Aspergillus turcosus
  misc_feature: 588
gccggctccccggcctccctcctgcccgcgcgcgcgcgccggcccggtgggctctcgaaggcgcgcgcggccgccgcggcctgcctgcttgcccaa

SEQ ID NO: 27496 - DNA, 96 bp, Aspergillus turcosus
  misc_feature: 588
ccggctccccggcctccctcctgcccgcgcgcgcgcgccggcccggtgggctctcgaaggcgcgcgcggccgccgcggcctgcctgcttgcccaag

SEQ ID NO: 27497 - DNA, 96 bp, Aspergillus turcosus
  misc_feature: 587
ggctccccggcctccctcctgcccgcgcgcgcgcgccggcccggtgggctctcgaaggcgcgcgcggccgccgcggcctgcctgcttgcccaagga

SEQ ID NO: 27498 - DNA, 96 bp, Aspergillus turcosus
  misc_feature: 587
cggctccccggcctccctcctgcccgcgcgcgcgcgccggcccggtgggctctcgaaggcgcgcgcggccgccgcggcctgcctgcttgcccaagg

SEQ ID NO: 27499 - DNA, 96 bp, Aspergillus turcosus
  misc_feature: 586
cgcgcgcgcctccctgcctccctgcccaacggcctcggccaactggtcaccgctgcgcgcgcgccagcccaccctcctcgaccggactgactgact

SEQ ID NO: 27500 - DNA, 96 bp, Aspergillus turcosus
  misc_feature: 585
cgcgcgcgcggccggtccagccccgcggcgccggctccccggcctccctcctgcccgcgcgcgcgcgccggcccggtgggctctcgaaggcgcgcg

SEQ ID NO: 27501 - DNA, 96 bp, Aspergillus turcosus
  misc_feature: 582
gcgcgcgcgcggccggtccagccccgcggcgccggctccccggcctccctcctgcccgcgcgcgcgcgccggcccggtgggctctcgaaggcgcgc

SEQ ID NO: 27502 - DNA, 96 bp, Aspergillus turcosus
  misc_feature: 570
gtgcgcgcgcgcggccggtccagccccgcggcgccggctccccggcctccctcctgcccgcgcgcgcgcgccggcccggtgggctctcgaaggcgc

SEQ ID NO: 27503 - DNA, 96 bp, Aspergillus turcosus
  misc_feature: 568
gagtgtgtgggccttccctggtccccatcggccgcgcgcgcgggcttgcctgggccctagcgccggtgcgcgcgcgcggccggtccagccccgcgg

SEQ ID NO: 27504 - DNA, 96 bp, Aspergillus turcosus
  misc_feature: 567
tgcgcgcgcgcggccggtccagccccgcggcgccggctccccggcctccctcctgcccgcgcgcgcgcgccggcccggtgggctctcgaaggcgcg

SEQ ID NO: 27505 - DNA, 96 bp, Aspergillus turcosus
  misc_feature: 567
ggtgcgcgcgcgcggccggtccagccccgcggcgccggctccccggcctccctcctgcccgcgcgcgcgcgccggcccggtgggctctcgaaggcg

SEQ ID NO: 27506 - DNA, 96 bp, Aspergillus turcosus
  misc_feature: 563
agtgtgtgggccttccctggtccccatcggccgcgcgcgcgggcttgcctgggccctagcgccggtgcgcgcgcgcggccggtccagccccgcggc

SEQ ID NO: 27507 - DNA, 96 bp, Aspergillus turcosus
  misc_feature: 554
gctccccggcctccctcctgcccgcgcgcgcgcgccggcccggtgggctctcgaaggcgcgcgcggccgccgcggcctgcctgcttgcccaaggat

SEQ ID NO: 27508 - DNA, 96 bp, Aspergillus turcosus
  misc_feature: 547
cgagtgtgtgggccttccctggtccccatcggccgcgcgcgcgggcttgcctgggccctagcgccggtgcgcgcgcgcggccggtccagccccgcg

SEQ ID NO: 27509 - DNA, 96 bp, Aspergillus turcosus
  misc_feature: 546
ccggcctccctcctgcccgcgcgcgcgcgccggcccggtgggctctcgaaggcgcgcgcggccgccgcggcctgcctgcttgcccaaggatgccgg

SEQ ID NO: 27510 - DNA, 96 bp, Aspergillus turcosus
  misc_feature: 544
cccggcctccctcctgcccgcgcgcgcgcgccggcccggtgggctctcgaaggcgcgcgcggccgccgcggcctgcctgcttgcccaaggatgccg

SEQ ID NO: 27511 - DNA, 96 bp, Aspergillus turcosus
  misc_feature: 542
gcctccctcctgcccgcgcgcgcgcgccggcccggtgggctctcgaaggcgcgcgcggccgccgcggcctgcctgcttgcccaaggatgccggcca

SEQ ID NO: 27512 - DNA, 96 bp, Aspergillus turcosus
  misc_feature: 541
ccccggcctccctcctgcccgcgcgcgcgcgccggcccggtgggctctcgaaggcgcgcgcggccgccgcggcctgcctgcttgcccaaggatgcc

SEQ ID NO: 27513 - DNA, 96 bp, Aspergillus turcosus
  misc_feature: 539
ggcctccctcctgcccgcgcgcgcgcgccggcccggtgggctctcgaaggcgcgcgcggccgccgcggcctgcctgcttgcccaaggatgccggcc

SEQ ID NO: 27514 - DNA, 96 bp, Aspergillus turcosus
  misc_feature: 539
gccgagtgtgtgggccttccctggtccccatcggccgcgcgcgcgggcttgcctgggccctagcgccggtgcgcgcgcgcggccggtccagccccg

SEQ ID NO: 27515 - DNA, 96 bp, Aspergillus turcosus
  misc_feature: 536
gcgcgcgcggccggtccagccccgcggcgccggctccccggcctccctcctgcccgcgcgcgcgcgccggcccggtgggctctcgaaggcgcgcgc

SEQ ID NO: 27516 - DNA, 96 bp, Aspergillus turcosus
  misc_feature: 536
cggcctccctcctgcccgcgcgcgcgcgccggcccggtgggctctcgaaggcgcgcgcggccgccgcggcctgcctgcttgcccaaggatgccggc

SEQ ID NO: 27517 - DNA, 96 bp, Aspergillus turcosus
  misc_feature: 535
ccgagtgtgtgggccttccctggtccccatcggccgcgcgcgcgggcttgcctgggccctagcgccggtgcgcgcgcgcggccggtccagccccgc

SEQ ID NO: 27518 - DNA, 96 bp, Aspergillus turcosus
  misc_feature: 533
agccgagtgtgtgggccttccctggtccccatcggccgcgcgcgcgggcttgcctgggccctagcgccggtgcgcgcgcgcggccggtccagcccc

SEQ ID NO: 27519 - DNA, 96 bp, Aspergillus turcosus
  misc_feature: 532
tccccggcctccctcctgcccgcgcgcgcgcgccggcccggtgggctctcgaaggcgcgcgcggccgccgcggcctgcctgcttgcccaaggatgc

SEQ ID NO: 27520 - DNA, 96 bp, Aspergillus turcosus
  misc_feature: 528
ctccccggcctccctcctgcccgcgcgcgcgcgccggcccggtgggctctcgaaggcgcgcgcggccgccgcggcctgcctgcttgcccaaggatg

SEQ ID NO: 27521 - DNA, 96 bp, Aspergillus turcosus
  misc_feature: 448
cgcggccggtccagccccgcggcgccggctccccggcctccctcctgcccgcgcgcgcgcgccggcccggtgggctctcgaaggcgcgcgcggccg

SEQ ID NO: 27522 - DNA, 96 bp, Aspergillus turcosus
  misc_feature: 441
cggccggtccagccccgcggcgccggctccccggcctccctcctgcccgcgcgcgcgcgccggcccggtgggctctcgaaggcgcgcgcggccgcc

SEQ ID NO: 27523 - DNA, 96 bp, Aspergillus turcosus
  misc_feature: 436
gcggccggtccagccccgcggcgccggctccccggcctccctcctgcccgcgcgcgcgcgccggcccggtgggctctcgaaggcgcgcgcggccgc

SEQ ID NO: 27524 - DNA, 96 bp, Aspergillus turcosus
  misc_feature: 433
gccggtccagccccgcggcgccggctccccggcctccctcctgcccgcgcgcgcgcgccggcccggtgggctctcgaaggcgcgcgcggccgccgc

SEQ ID NO: 27525 - DNA, 96 bp, Aspergillus turcosus
  misc_feature: 427
ccggtccagccccgcggcgccggctccccggcctccctcctgcccgcgcgcgcgcgccggcccggtgggctctcgaaggcgcgcgcggccgccgcg

SEQ ID NO: 27526 - DNA, 96 bp, Aspergillus turcosus
  misc_feature: 422
ggtccagccccgcggcgccggctccccggcctccctcctgcccgcgcgcgcgcgccggcccggtgggctctcgaaggcgcgcgcggccgccgcggc

SEQ ID NO: 27527 - DNA, 96 bp, Aspergillus turcosus
  misc_feature: 417
cggtccagccccgcggcgccggctccccggcctccctcctgcccgcgcgcgcgcgccggcccggtgggctctcgaaggcgcgcgcggccgccgcgg

SEQ ID NO: 27528 - DNA, 96 bp, Aspergillus turcosus
  misc_feature: 416
ggtgacgagtgggccggcgcgcgggtcagtccggtcaggtcagtcagtcagtcagtcagtcagtcagtccggtcgaggagggtgggctggcgcgcg

SEQ ID NO: 27529 - DNA, 96 bp, Aspergillus turcosus
  misc_feature: 384
gggtgacgagtgggccggcgcgcgggtcagtccggtcaggtcagtcagtcagtcagtcagtcagtcagtccggtcgaggagggtgggctggcgcgc

SEQ ID NO: 27530 - DNA, 96 bp, Aspergillus turcosus
  misc_feature: 371
agggtgacgagtgggccggcgcgcgggtcagtccggtcaggtcagtcagtcagtcagtcagtcagtcagtccggtcgaggagggtgggctggcgcg

SEQ ID NO: 27531 - DNA, 96 bp, Aspergillus turcosus
  misc_feature: 364
gagggtgacgagtgggccggcgcgcgggtcagtccggtcaggtcagtcagtcagtcagtcagtcagtcagtccggtcgaggagggtgggctggcgc

SEQ ID NO: 27532 - DNA, 96 bp, Aspergillus turcosus
  misc_feature: 281
tattgaagttctctggtatgctcttaaagttagtcatttatcaagcatacttctaccattagacccattgaccattaaatgaccatttgcaagatc

SEQ ID NO: 27533 - DNA, 96 bp, Aspergillus turcosus
  misc_feature: 280
attgaagttctctggtatgctcttaaagttagtcatttatcaagcatacttctaccattagacccattgaccattaaatgaccatttgcaagatca

SEQ ID NO: 27534 - DNA, 96 bp, Aspergillus turcosus
  misc_feature: 280
gttctctggtatgctcttaaagttagtcatttatcaagcatacttctaccattagacccattgaccattaaatgaccatttgcaagatcatgtcgt

SEQ ID NO: 27535 - DNA, 96 bp, Aspergillus turcosus
  misc_feature: 274
ttgaagttctctggtatgctcttaaagttagtcatttatcaagcatacttctaccattagacccattgaccattaaatgaccatttgcaagatcat

SEQ ID NO: 27536 - DNA, 96 bp, Aspergillus turcosus
  misc_feature: 274
tgaagttctctggtatgctcttaaagttagtcatttatcaagcatacttctaccattagacccattgaccattaaatgaccatttgcaagatcatg

SEQ ID NO: 27537 - DNA, 96 bp, Aspergillus turcosus
  misc_feature: 270
agttctctggtatgctcttaaagttagtcatttatcaagcatacttctaccattagacccattgaccattaaatgaccatttgcaagatcatgtcg

SEQ ID NO: 27538 - DNA, 96 bp, Aspergillus turcosus
  misc_feature: 269
gaagttctctggtatgctcttaaagttagtcatttatcaagcatacttctaccattagacccattgaccattaaatgaccatttgcaagatcatgt

SEQ ID NO: 27539 - DNA, 96 bp, Aspergillus turcosus
  misc_feature: 268
aagttctctggtatgctcttaaagttagtcatttatcaagcatacttctaccattagacccattgaccattaaatgaccatttgcaagatcatgtc

SEQ ID NO: 27540 - DNA, 96 bp, Aspergillus turcosus
  misc_feature: 267
ttattgaagttctctggtatgctcttaaagttagtcatttatcaagcatacttctaccattagacccattgaccattaaatgaccatttgcaagat

SEQ ID NO: 27541 - DNA, 96 bp, Aspergillus turcosus
  misc_feature: 267
gttattgaagttctctggtatgctcttaaagttagtcatttatcaagcatacttctaccattagacccattgaccattaaatgaccatttgcaaga

SEQ ID NO: 27542 - DNA, 96 bp, Aspergillus turcosus
  misc_feature: 264
attctttacatttcctttattttatcgatacatccttgagtttttatacattcacgtatataaccttatgggtccatttgtaaaataactggctag

SEQ ID NO: 27543 - DNA, 96 bp, Aspergillus turcosus
  misc_feature: 263
ttctctggtatgctcttaaagttagtcatttatcaagcatacttctaccattagacccattgaccattaaatgaccatttgcaagatcatgtcgta

SEQ ID NO: 27544 - DNA, 96 bp, Aspergillus turcosus
  misc_feature: 262
ttctttacatttcctttattttatcgatacatccttgagtttttatacattcacgtatataaccttatgggtccatttgtaaaataactggctagt

SEQ ID NO: 27545 - DNA, 96 bp, Aspergillus turcosus
  misc_feature: 261
ctttacatttcctttattttatcgatacatccttgagtttttatacattcacgtatataaccttatgggtccatttgtaaaataactggctagttg

SEQ ID NO: 27546 - DNA, 96 bp, Aspergillus turcosus
  misc_feature: 260
tttacatttcctttattttatcgatacatccttgagtttttatacattcacgtatataaccttatgggtccatttgtaaaataactggctagttgt

SEQ ID NO: 27547 - DNA, 96 bp, Aspergillus turcosus
  misc_feature: 260
acatttcctttattttatcgatacatccttgagtttttatacattcacgtatataaccttatgggtccatttgtaaaataactggctagttgtact

SEQ ID NO: 27548 - DNA, 96 bp, Aspergillus turcosus
  misc_feature: 259
tctttacatttcctttattttatcgatacatccttgagtttttatacattcacgtatataaccttatgggtccatttgtaaaataactggctagtt

SEQ ID NO: 27549 - DNA, 96 bp, Aspergillus turcosus
  misc_feature: 259
aagtacaactagccagttattttacaaatggacccataaggttatatacgtgaatgtataaaaactcaaggatgtatcgataaaataaaggaaatg

SEQ ID NO: 27550 - DNA, 96 bp, Aspergillus turcosus
  misc_feature: 258
ttacatttcctttattttatcgatacatccttgagtttttatacattcacgtatataaccttatgggtccatttgtaaaataactggctagttgta

SEQ ID NO: 27551 - DNA, 96 bp, Aspergillus turcosus
  misc_feature: 257
tacatttcctttattttatcgatacatccttgagtttttatacattcacgtatataaccttatgggtccatttgtaaaataactggctagttgtac

SEQ ID NO: 27552 - DNA, 96 bp, Aspergillus turcosus
  misc_feature: 257
agttattgaagttctctggtatgctcttaaagttagtcatttatcaagcatacttctaccattagacccattgaccattaaatgaccatttgcaag

SEQ ID NO: 27553 - DNA, 96 bp, Aspergillus turcosus
  misc_feature: 256
aaaagtacaactagccagttattttacaaatggacccataaggttatatacgtgaatgtataaaaactcaaggatgtatcgataaaataaaggaaa

SEQ ID NO: 27554 - DNA, 96 bp, Aspergillus turcosus
  misc_feature: 256
tagttattgaagttctctggtatgctcttaaagttagtcatttatcaagcatacttctaccattagacccattgaccattaaatgaccatttgcaa

SEQ ID NO: 27555 - DNA, 96 bp, Aspergillus turcosus
  misc_feature: 256
taaaagtacaactagccagttattttacaaatggacccataaggttatatacgtgaatgtataaaaactcaaggatgtatcgataaaataaaggaa

SEQ ID NO: 27556 - DNA, 96 bp, Aspergillus turcosus
  misc_feature: 255
aaagtacaactagccagttattttacaaatggacccataaggttatatacgtgaatgtataaaaactcaaggatgtatcgataaaataaaggaaat

SEQ ID NO: 27557 - DNA, 96 bp, Aspergillus turcosus
  misc_feature: 251
atagttattgaagttctctggtatgctcttaaagttagtcatttatcaagcatacttctaccattagacccattgaccattaaatgaccatttgca

SEQ ID NO: 27558 - DNA, 96 bp, Aspergillus turcosus
  misc_feature: 248
tattctttacatttcctttattttatcgatacatccttgagtttttatacattcacgtatataaccttatgggtccatttgtaaaataactggcta

SEQ ID NO: 27559 - DNA, 96 bp, Aspergillus turcosus
  misc_feature: 248
cctctattctttacatttcctttattttatcgatacatccttgagtttttatacattcacgtatataaccttatgggtccatttgtaaaataactg

SEQ ID NO: 27560 - DNA, 96 bp, Aspergillus turcosus
  misc_feature: 247
ctctattctttacatttcctttattttatcgatacatccttgagtttttatacattcacgtatataaccttatgggtccatttgtaaaataactgg

SEQ ID NO: 27561 - DNA, 96 bp, Aspergillus turcosus
  misc_feature: 247
ctattctttacatttcctttattttatcgatacatccttgagtttttatacattcacgtatataaccttatgggtccatttgtaaaataactggct

SEQ ID NO: 27562 - DNA, 96 bp, Aspergillus turcosus
  misc_feature: 245
tctattctttacatttcctttattttatcgatacatccttgagtttttatacattcacgtatataaccttatgggtccatttgtaaaataactggc

SEQ ID NO: 27563 - DNA, 96 bp, Aspergillus turcosus
  misc_feature: 245
ctaatagttattgaagttctctggtatgctcttaaagttagtcatttatcaagcatacttctaccattagacccattgaccattaaatgaccattt

SEQ ID NO: 27564 - DNA, 96 bp, Aspergillus turcosus
  misc_feature: 244
taggtcttaagggtgaagttcattataaatgtgcgtataaatttgaaggggctgaaatttattttccaattaaaactaaaatagaaatctatgacg

SEQ ID NO: 27565 - DNA, 96 bp, Aspergillus turcosus
  misc_feature: 242
actaatagttattgaagttctctggtatgctcttaaagttagtcatttatcaagcatacttctaccattagacccattgaccattaaatgaccatt

SEQ ID NO: 27566 - DNA, 96 bp, Aspergillus turcosus
  misc_feature: 241
taatagttattgaagttctctggtatgctcttaaagttagtcatttatcaagcatacttctaccattagacccattgaccattaaatgaccatttg

SEQ ID NO: 27567 - DNA, 96 bp, Aspergillus turcosus
  misc_feature: 236
tactaatagttattgaagttctctggtatgctcttaaagttagtcatttatcaagcatacttctaccattagacccattgaccattaaatgaccat

SEQ ID NO: 27568 - DNA, 96 bp, Aspergillus turcosus
  misc_feature: 234
aatagttattgaagttctctggtatgctcttaaagttagtcatttatcaagcatacttctaccattagacccattgaccattaaatgaccatttgc

SEQ ID NO: 27569 - DNA, 96 bp, Aspergillus turcosus
  misc_feature: 233
ccctctattctttacatttcctttattttatcgatacatccttgagtttttatacattcacgtatataaccttatgggtccatttgtaaaataact

SEQ ID NO: 27570 - DNA, 96 bp, Aspergillus turcosus
  misc_feature: 231
tccctctattctttacatttcctttattttatcgatacatccttgagtttttatacattcacgtatataaccttatgggtccatttgtaaaataac

SEQ ID NO: 27571 - DNA, 96 bp, Aspergillus turcosus
  misc_feature: 230
atccctctattctttacatttcctttattttatcgatacatccttgagtttttatacattcacgtatataaccttatgggtccatttgtaaaataa

SEQ ID NO: 27572 - DNA, 96 bp, Aspergillus turcosus
  misc_feature: 230
aatccctctattctttacatttcctttattttatcgatacatccttgagtttttatacattcacgtatataaccttatgggtccatttgtaaaata

SEQ ID NO: 27573 - DNA, 96 bp, Aspergillus turcosus
  misc_feature: 230
aaatccctctattctttacatttcctttattttatcgatacatccttgagtttttatacattcacgtatataaccttatgggtccatttgtaaaat

SEQ ID NO: 27574 - DNA, 96 bp, Aspergillus turcosus
  misc_feature: 229
gaaatccctctattctttacatttcctttattttatcgatacatccttgagtttttatacattcacgtatataaccttatgggtccatttgtaaaa

SEQ ID NO: 27575 - DNA, 96 bp, Aspergillus turcosus
  misc_feature: 229
ggaaatccctctattctttacatttcctttattttatcgatacatccttgagtttttatacattcacgtatataaccttatgggtccatttgtaaa

SEQ ID NO: 27576 - DNA, 96 bp, Aspergillus turcosus
  misc_feature: 229
tgaaggaaatccctctattctttacatttcctttattttatcgatacatccttgagtttttatacattcacgtatataaccttatgggtccatttg

SEQ ID NO: 27577 - DNA, 96 bp, Aspergillus turcosus
  misc_feature: 229
gtaaaagtacaactagccagttattttacaaatggacccataaggttatatacgtgaatgtataaaaactcaaggatgtatcgataaaataaagga

SEQ ID NO: 27578 - DNA, 96 bp, Aspergillus turcosus
  misc_feature: 229
aaggaaatccctctattctttacatttcctttattttatcgatacatccttgagtttttatacattcacgtatataaccttatgggtccatttgta

SEQ ID NO: 27579 - DNA, 96 bp, Aspergillus turcosus
  misc_feature: 229
gaaggaaatccctctattctttacatttcctttattttatcgatacatccttgagtttttatacattcacgtatataaccttatgggtccatttgt

SEQ ID NO: 27580 - DNA, 96 bp, Aspergillus turcosus
  misc_feature: 228
aggaaatccctctattctttacatttcctttattttatcgatacatccttgagtttttatacattcacgtatataaccttatgggtccatttgtaa

SEQ ID NO: 27581 - DNA, 96 bp, Aspergillus turcosus
  misc_feature: 225
gtgaaggaaatccctctattctttacatttcctttattttatcgatacatccttgagtttttatacattcacgtatataaccttatgggtccattt

SEQ ID NO: 27582 - DNA, 96 bp, Aspergillus turcosus
  misc_feature: 223
ttactaatagttattgaagttctctggtatgctcttaaagttagtcatttatcaagcatacttctaccattagacccattgaccattaaatgacca

SEQ ID NO: 27583 - DNA, 96 bp, Aspergillus turcosus
  misc_feature: 222
ggtgaaggaaatccctctattctttacatttcctttattttatcgatacatccttgagtttttatacattcacgtatataaccttatgggtccatt

SEQ ID NO: 27584 - DNA, 96 bp, Aspergillus turcosus
  misc_feature: 220
gcgcgcgcgagcgggcgggcgtttgggagcggcggtccggggcaggcaggcgcgcgcgaggagggagggtgacgagtgggccggcgcgcgggtcag

SEQ ID NO: 27585 - DNA, 96 bp, Aspergillus turcosus
  misc_feature: 220
agtaaaagtacaactagccagttattttacaaatggacccataaggttatatacgtgaatgtataaaaactcaaggatgtatcgataaaataaagg

SEQ ID NO: 27586 - DNA, 96 bp, Aspergillus turcosus
  misc_feature: 219
cgcgcgcgcgagcgggcgggcgtttgggagcggcggtccggggcaggcaggcgcgcgcgaggagggagggtgacgagtgggccggcgcgcgggtca

SEQ ID NO: 27587 - DNA, 96 bp, Aspergillus turcosus
  misc_feature: 210
tattactaatagttattgaagttctctggtatgctcttaaagttagtcatttatcaagcatacttctaccattagacccattgaccattaaatgac

SEQ ID NO: 27588 - DNA, 96 bp, Aspergillus turcosus
  misc_feature: 208
tgtaaaataactggctagttgtacttttactcaatagttataggctaaaatatgtctacaaaaagtatcttcgtcatagatttctattttagtttt

SEQ ID NO: 27589 - DNA, 96 bp, Aspergillus turcosus
  misc_feature: 208
gtaaaataactggctagttgtacttttactcaatagttataggctaaaatatgtctacaaaaagtatcttcgtcatagatttctattttagtttta

SEQ ID NO: 27590 - DNA, 96 bp, Aspergillus turcosus
  misc_feature: 208
aggtgaaggaaatccctctattctttacatttcctttattttatcgatacatccttgagtttttatacattcacgtatataaccttatgggtccat

SEQ ID NO: 27591 - DNA, 96 bp, Aspergillus turcosus
  misc_feature: 207
tttgtaaaataactggctagttgtacttttactcaatagttataggctaaaatatgtctacaaaaagtatcttcgtcatagatttctattttagtt

SEQ ID NO: 27592 - DNA, 96 bp, Aspergillus turcosus
  misc_feature: 207
taaaataactggctagttgtacttttactcaatagttataggctaaaatatgtctacaaaaagtatcttcgtcatagatttctattttagttttaa

SEQ ID NO: 27593 - DNA, 96 bp, Aspergillus turcosus
  misc_feature: 207
taggtgaaggaaatccctctattctttacatttcctttattttatcgatacatccttgagtttttatacattcacgtatataaccttatgggtcca

SEQ ID NO: 27594 - DNA, 96 bp, Aspergillus turcosus
  misc_feature: 207
attactaatagttattgaagttctctggtatgctcttaaagttagtcatttatcaagcatacttctaccattagacccattgaccattaaatgacc

SEQ ID NO: 27595 - DNA, 96 bp, Aspergillus turcosus
  misc_feature: 207
aaaataactggctagttgtacttttactcaatagttataggctaaaatatgtctacaaaaagtatcttcgtcatagatttctattttagttttaat

SEQ ID NO: 27596 - DNA, 96 bp, Aspergillus turcosus
  misc_feature: 206
atttgtaaaataactggctagttgtacttttactcaatagttataggctaaaatatgtctacaaaaagtatcttcgtcatagatttctattttagt

SEQ ID NO: 27597 - DNA, 96 bp, Aspergillus turcosus
  misc_feature: 205
ttgtaaaataactggctagttgtacttttactcaatagttataggctaaaatatgtctacaaaaagtatcttcgtcatagatttctattttagttt

SEQ ID NO: 27598 - DNA, 96 bp, Aspergillus turcosus
  misc_feature: 205
atattactaatagttattgaagttctctggtatgctcttaaagttagtcatttatcaagcatacttctaccattagacccattgaccattaaatga

SEQ ID NO: 27599 - DNA, 96 bp, Aspergillus turcosus
  misc_feature: 205
catttgtaaaataactggctagttgtacttttactcaatagttataggctaaaatatgtctacaaaaagtatcttcgtcatagatttctattttag

SEQ ID NO: 27600 - DNA, 96 bp, Aspergillus turcosus
  misc_feature: 205
aaataactggctagttgtacttttactcaatagttataggctaaaatatgtctacaaaaagtatcttcgtcatagatttctattttagttttaatt

SEQ ID NO: 27601 - DNA, 96 bp, Aspergillus turcosus
  misc_feature: 203
ttaggtgaaggaaatccctctattctttacatttcctttattttatcgatacatccttgagtttttatacattcacgtatataaccttatgggtcc

SEQ ID NO: 27602 - DNA, 96 bp, Aspergillus turcosus
  misc_feature: 203
ccatttgtaaaataactggctagttgtacttttactcaatagttataggctaaaatatgtctacaaaaagtatcttcgtcatagatttctatttta

SEQ ID NO: 27603 - DNA, 96 bp, Aspergillus turcosus
  misc_feature: 201
tattgagtaaaagtacaactagccagttattttacaaatggacccataaggttatatacgtgaatgtataaaaactcaaggatgtatcgataaaat

SEQ ID NO: 27604 - DNA, 96 bp, Aspergillus turcosus
  misc_feature: 199
acatattactaatagttattgaagttctctggtatgctcttaaagttagtcatttatcaagcatacttctaccattagacccattgaccattaaat

SEQ ID NO: 27605 - DNA, 96 bp, Aspergillus turcosus
  misc_feature: 198
catattactaatagttattgaagttctctggtatgctcttaaagttagtcatttatcaagcatacttctaccattagacccattgaccattaaatg

SEQ ID NO: 27606 - DNA, 96 bp, Aspergillus turcosus
  misc_feature: 197
tgagtaaaagtacaactagccagttattttacaaatggacccataaggttatatacgtgaatgtataaaaactcaaggatgtatcgataaaataaa

SEQ ID NO: 27607 - DNA, 96 bp, Aspergillus turcosus
  misc_feature: 197
ttgagtaaaagtacaactagccagttattttacaaatggacccataaggttatatacgtgaatgtataaaaactcaaggatgtatcgataaaataa

SEQ ID NO: 27608 - DNA, 96 bp, Aspergillus turcosus
  misc_feature: 197
attgagtaaaagtacaactagccagttattttacaaatggacccataaggttatatacgtgaatgtataaaaactcaaggatgtatcgataaaata

SEQ ID NO: 27609 - DNA, 96 bp, Aspergillus turcosus
  misc_feature: 197
gagtaaaagtacaactagccagttattttacaaatggacccataaggttatatacgtgaatgtataaaaactcaaggatgtatcgataaaataaag

SEQ ID NO: 27610 - DNA, 96 bp, Aspergillus turcosus
  misc_feature: 191
ttattaggtgaaggaaatccctctattctttacatttcctttattttatcgatacatccttgagtttttatacattcacgtatataaccttatggg

SEQ ID NO: 27611 - DNA, 96 bp, Aspergillus turcosus
  misc_feature: 191
attaggtgaaggaaatccctctattctttacatttcctttattttatcgatacatccttgagtttttatacattcacgtatataaccttatgggtc

SEQ ID NO: 27612 - DNA, 96 bp, Aspergillus turcosus
  misc_feature: 190
tattaggtgaaggaaatccctctattctttacatttcctttattttatcgatacatccttgagtttttatacattcacgtatataaccttatgggt

SEQ ID NO: 27613 - DNA, 96 bp, Aspergillus turcosus
  misc_feature: 189
cataaggttatatacgtgaatgtataaaaactcaaggatgtatcgataaaataaaggaaatgtaaagaatagagggatttccttcacctaataaag

SEQ ID NO: 27614 - DNA, 96 bp, Aspergillus turcosus
  misc_feature: 188
tttattaggtgaaggaaatccctctattctttacatttcctttattttatcgatacatccttgagtttttatacattcacgtatataaccttatgg

SEQ ID NO: 27615 - DNA, 96 bp, Aspergillus turcosus
  misc_feature: 187
ttatgggtccatttgtaaaataactggctagttgtacttttactcaatagttataggctaaaatatgtctacaaaaagtatcttcgtcatagattt

SEQ ID NO: 27616 - DNA, 96 bp, Aspergillus turcosus
  misc_feature: 187
tatgggtccatttgtaaaataactggctagttgtacttttactcaatagttataggctaaaatatgtctacaaaaagtatcttcgtcatagatttc

SEQ ID NO: 27617 - DNA, 96 bp, Aspergillus turcosus
  misc_feature: 187
cttatgggtccatttgtaaaataactggctagttgtacttttactcaatagttataggctaaaatatgtctacaaaaagtatcttcgtcatagatt

SEQ ID NO: 27618 - DNA, 96 bp, Aspergillus turcosus
  misc_feature: 187
ccttatgggtccatttgtaaaataactggctagttgtacttttactcaatagttataggctaaaatatgtctacaaaaagtatcttcgtcatagat

SEQ ID NO: 27619 - DNA, 96 bp, Aspergillus turcosus
  misc_feature: 183
atgggtccatttgtaaaataactggctagttgtacttttactcaatagttataggctaaaatatgtctacaaaaagtatcttcgtcatagatttct

SEQ ID NO: 27620 - DNA, 96 bp, Aspergillus turcosus
  misc_feature: 182
tccatttgtaaaataactggctagttgtacttttactcaatagttataggctaaaatatgtctacaaaaagtatcttcgtcatagatttctatttt

SEQ ID NO: 27621 - DNA, 96 bp, Aspergillus turcosus
  misc_feature: 182
gtccatttgtaaaataactggctagttgtacttttactcaatagttataggctaaaatatgtctacaaaaagtatcttcgtcatagatttctattt

SEQ ID NO: 27622 - DNA, 96 bp, Aspergillus turcosus
  misc_feature: 182
gggtccatttgtaaaataactggctagttgtacttttactcaatagttataggctaaaatatgtctacaaaaagtatcttcgtcatagatttctat

SEQ ID NO: 27623 - DNA, 96 bp, Aspergillus turcosus
  misc_feature: 181
aacatattactaatagttattgaagttctctggtatgctcttaaagttagtcatttatcaagcatacttctaccattagacccattgaccattaaa

SEQ ID NO: 27624 - DNA, 96 bp, Aspergillus turcosus
  misc_feature: 181
tgggtccatttgtaaaataactggctagttgtacttttactcaatagttataggctaaaatatgtctacaaaaagtatcttcgtcatagatttcta

SEQ ID NO: 27625 - DNA, 96 bp, Aspergillus turcosus
  misc_feature: 180
ctattgagtaaaagtacaactagccagttattttacaaatggacccataaggttatatacgtgaatgtataaaaactcaaggatgtatcgataaaa

SEQ ID NO: 27626 - DNA, 96 bp, Aspergillus turcosus
  misc_feature: 179
ataaggttatatacgtgaatgtataaaaactcaaggatgtatcgataaaataaaggaaatgtaaagaatagagggatttccttcacctaataaaga

SEQ ID NO: 27627 - DNA, 96 bp, Aspergillus turcosus
  misc_feature: 179
ctctttaagttcaaagatttccatttgaccatttttaatttttgtgattatttcaatttttctttgcactaattgttgtttcattgttgaaatttg

SEQ ID NO: 27628 - DNA, 96 bp, Aspergillus turcosus
  misc_feature: 178
ggtccatttgtaaaataactggctagttgtacttttactcaatagttataggctaaaatatgtctacaaaaagtatcttcgtcatagatttctatt

SEQ ID NO: 27629 - DNA, 96 bp, Aspergillus turcosus
  misc_feature: 178
cctctttaagttcaaagatttccatttgaccatttttaatttttgtgattatttcaatttttctttgcactaattgttgtttcattgttgaaattt

SEQ ID NO: 27630 - DNA, 96 bp, Aspergillus turcosus
  misc_feature: 175
ttgcctctttaagttcaaagatttccatttgaccatttttaatttttgtgattatttcaatttttctttgcactaattgttgtttcattgttgaaa

SEQ ID NO: 27631 - DNA, 96 bp, Aspergillus turcosus
  misc_feature: 175
aattgcctctttaagttcaaagatttccatttgaccatttttaatttttgtgattatttcaatttttctttgcactaattgttgtttcattgttga

SEQ ID NO: 27632 - DNA, 96 bp, Aspergillus turcosus
  misc_feature: 174
attgcctctttaagttcaaagatttccatttgaccatttttaatttttgtgattatttcaatttttctttgcactaattgttgtttcattgttgaa

SEQ ID NO: 27633 - DNA, 96 bp, Aspergillus turcosus
  misc_feature: 174
tgcctctttaagttcaaagatttccatttgaccatttttaatttttgtgattatttcaatttttctttgcactaattgttgtttcattgttgaaat

SEQ ID NO: 27634 - DNA, 96 bp, Aspergillus turcosus
  misc_feature: 174
tcatcaattgcctctttaagttcaaagatttccatttgaccatttttaatttttgtgattatttcaatttttctttgcactaattgttgtttcatt

SEQ ID NO: 27635 - DNA, 96 bp, Aspergillus turcosus
  misc_feature: 174
catcaattgcctctttaagttcaaagatttccatttgaccatttttaatttttgtgattatttcaatttttctttgcactaattgttgtttcattg

SEQ ID NO: 27636 - DNA, 96 bp, Aspergillus turcosus
  misc_feature: 174
caattgcctctttaagttcaaagatttccatttgaccatttttaatttttgtgattatttcaatttttctttgcactaattgttgtttcattgttg

SEQ ID NO: 27637 - DNA, 96 bp, Aspergillus turcosus
  misc_feature: 173
tcaattgcctctttaagttcaaagatttccatttgaccatttttaatttttgtgattatttcaatttttctttgcactaattgttgtttcattgtt

SEQ ID NO: 27638 - DNA, 96 bp, Aspergillus turcosus
  misc_feature: 173
gcctctttaagttcaaagatttccatttgaccatttttaatttttgtgattatttcaatttttctttgcactaattgttgtttcattgttgaaatt

SEQ ID NO: 27639 - DNA, 96 bp, Aspergillus turcosus
  misc_feature: 172
atcaattgcctctttaagttcaaagatttccatttgaccatttttaatttttgtgattatttcaatttttctttgcactaattgttgtttcattgt

SEQ ID NO: 27640 - DNA, 96 bp, Aspergillus turcosus
  misc_feature: 169
gttatatacgtgaatgtataaaaactcaaggatgtatcgataaaataaaggaaatgtaaagaatagagggatttccttcacctaataaagatatta

SEQ ID NO: 27641 - DNA, 96 bp, Aspergillus turcosus
  misc_feature: 168
taaggttatatacgtgaatgtataaaaactcaaggatgtatcgataaaataaaggaaatgtaaagaatagagggatttccttcacctaataaagat

SEQ ID NO: 27642 - DNA, 96 bp, Aspergillus turcosus
  misc_feature: 167
ggttatatacgtgaatgtataaaaactcaaggatgtatcgataaaataaaggaaatgtaaagaatagagggatttccttcacctaataaagatatt

SEQ ID NO: 27643 - DNA, 96 bp, Aspergillus turcosus
  misc_feature: 164
ttatatacgtgaatgtataaaaactcaaggatgtatcgataaaataaaggaaatgtaaagaatagagggatttccttcacctaataaagatattag

SEQ ID NO: 27644 - DNA, 96 bp, Aspergillus turcosus
  misc_feature: 164
atatacgtgaatgtataaaaactcaaggatgtatcgataaaataaaggaaatgtaaagaatagagggatttccttcacctaataaagatattagac

SEQ ID NO: 27645 - DNA, 96 bp, Aspergillus turcosus
  misc_feature: 164
gcgcgcgcgcgagcgggcgggcgtttgggagcggcggtccggggcaggcaggcgcgcgcgaggagggagggtgacgagtgggccggcgcgcgggtc

SEQ ID NO: 27646 - DNA, 96 bp, Aspergillus turcosus
  misc_feature: 163
accttatgggtccatttgtaaaataactggctagttgtacttttactcaatagttataggctaaaatatgtctacaaaaagtatcttcgtcataga

SEQ ID NO: 27647 - DNA, 96 bp, Aspergillus turcosus
  misc_feature: 163
tatatacgtgaatgtataaaaactcaaggatgtatcgataaaataaaggaaatgtaaagaatagagggatttccttcacctaataaagatattaga

SEQ ID NO: 27648 - DNA, 96 bp, Aspergillus turcosus
  misc_feature: 163
aaggttatatacgtgaatgtataaaaactcaaggatgtatcgataaaataaaggaaatgtaaagaatagagggatttccttcacctaataaagata

SEQ ID NO: 27649 - DNA, 96 bp, Aspergillus turcosus
  misc_feature: 163
cgcgcgcgcgcgagcgggcgggcgtttgggagcggcggtccggggcaggcaggcgcgcgcgaggagggagggtgacgagtgggccggcgcgcgggt

SEQ ID NO: 27650 - DNA, 96 bp, Aspergillus turcosus
  misc_feature: 163
aggttatatacgtgaatgtataaaaactcaaggatgtatcgataaaataaaggaaatgtaaagaatagagggatttccttcacctaataaagatat

SEQ ID NO: 27651 - DNA, 96 bp, Aspergillus turcosus
  misc_feature: 162
atataaccttatgggtccatttgtaaaataactggctagttgtacttttactcaatagttataggctaaaatatgtctacaaaaagtatcttcgtc

SEQ ID NO: 27652 - DNA, 96 bp, Aspergillus turcosus
  misc_feature: 160
tataaccttatgggtccatttgtaaaataactggctagttgtacttttactcaatagttataggctaaaatatgtctacaaaaagtatcttcgtca

SEQ ID NO: 27653 - DNA, 96 bp, Aspergillus turcosus
  misc_feature: 160
aaccttatgggtccatttgtaaaataactggctagttgtacttttactcaatagttataggctaaaatatgtctacaaaaagtatcttcgtcatag

SEQ ID NO: 27654 - DNA, 96 bp, Aspergillus turcosus
  misc_feature: 160
ataaccttatgggtccatttgtaaaataactggctagttgtacttttactcaatagttataggctaaaatatgtctacaaaaagtatcttcgtcat

SEQ ID NO: 27655 - DNA, 96 bp, Aspergillus turcosus
  misc_feature: 157
actattgagtaaaagtacaactagccagttattttacaaatggacccataaggttatatacgtgaatgtataaaaactcaaggatgtatcgataaa

SEQ ID NO: 27656 - DNA, 96 bp, Aspergillus turcosus
  misc_feature: 157
aactattgagtaaaagtacaactagccagttattttacaaatggacccataaggttatatacgtgaatgtataaaaactcaaggatgtatcgataa

SEQ ID NO: 27657 - DNA, 96 bp, Aspergillus turcosus
  misc_feature: 157
gctacaaatttcaacaatgaaacaacaattagtgcaaagaaaaattgaaataatcacaaaaattaaaaatggtcaaatggaaatctttgaacttaa

SEQ ID NO: 27658 - DNA, 96 bp, Aspergillus turcosus
  misc_feature: 157
taaccttatgggtccatttgtaaaataactggctagttgtacttttactcaatagttataggctaaaatatgtctacaaaaagtatcttcgtcata

SEQ ID NO: 27659 - DNA, 96 bp, Aspergillus turcosus
  misc_feature: 157
taactattgagtaaaagtacaactagccagttattttacaaatggacccataaggttatatacgtgaatgtataaaaactcaaggatgtatcgata

SEQ ID NO: 27660 - DNA, 96 bp, Aspergillus turcosus
  misc_feature: 156
taacaccatcacgttcagaatcattataaatagttaaatatgtatgaaaatcataaggtggaccagttggtccacctgaaccaggtgaacctccta

SEQ ID NO: 27661 - DNA, 96 bp, Aspergillus turcosus
  misc_feature: 156
aacaccatcacgttcagaatcattataaatagttaaatatgtatgaaaatcataaggtggaccagttggtccacctgaaccaggtgaacctcctat

SEQ ID NO: 27662 - DNA, 96 bp, Aspergillus turcosus
  misc_feature: 155
ttaacaccatcacgttcagaatcattataaatagttaaatatgtatgaaaatcataaggtggaccagttggtccacctgaaccaggtgaacctcct

SEQ ID NO: 27663 - DNA, 96 bp, Aspergillus turcosus
  misc_feature: 155
acaccatcacgttcagaatcattataaatagttaaatatgtatgaaaatcataaggtggaccagttggtccacctgaaccaggtgaacctcctatc

SEQ ID NO: 27664 - DNA, 96 bp, Aspergillus turcosus
  misc_feature: 154
tgctacaaatttcaacaatgaaacaacaattagtgcaaagaaaaattgaaataatcacaaaaattaaaaatggtcaaatggaaatctttgaactta

SEQ ID NO: 27665 - DNA, 96 bp, Aspergillus turcosus
  misc_feature: 153
tttaacaccatcacgttcagaatcattataaatagttaaatatgtatgaaaatcataaggtggaccagttggtccacctgaaccaggtgaacctcc

SEQ ID NO: 27666 - DNA, 96 bp, Aspergillus turcosus
  misc_feature: 153
tataactattgagtaaaagtacaactagccagttattttacaaatggacccataaggttatatacgtgaatgtataaaaactcaaggatgtatcga

SEQ ID NO: 27667 - DNA, 96 bp, Aspergillus turcosus
  misc_feature: 153
tacaaatttcaacaatgaaacaacaattagtgcaaagaaaaattgaaataatcacaaaaattaaaaatggtcaaatggaaatctttgaacttaaag

SEQ ID NO: 27668 - DNA, 96 bp, Aspergillus turcosus
  misc_feature: 153
acgttcagaatcattataaatagttaaatatgtatgaaaatcataaggtggaccagttggtccacctgaaccaggtgaacctcctatcgatatttc

SEQ ID NO: 27669 - DNA, 96 bp, Aspergillus turcosus
  misc_feature: 153
ctataactattgagtaaaagtacaactagccagttattttacaaatggacccataaggttatatacgtgaatgtataaaaactcaaggatgtatcg

SEQ ID NO: 27670 - DNA, 96 bp, Aspergillus turcosus
  misc_feature: 153
ccatcacgttcagaatcattataaatagttaaatatgtatgaaaatcataaggtggaccagttggtccacctgaaccaggtgaacctcctatcgat

SEQ ID NO: 27671 - DNA, 96 bp, Aspergillus turcosus
  misc_feature: 153
cacgttcagaatcattataaatagttaaatatgtatgaaaatcataaggtggaccagttggtccacctgaaccaggtgaacctcctatcgatattt

SEQ ID NO: 27672 - DNA, 96 bp, Aspergillus turcosus
  misc_feature: 152
ctacaaatttcaacaatgaaacaacaattagtgcaaagaaaaattgaaataatcacaaaaattaaaaatggtcaaatggaaatctttgaacttaaa

SEQ ID NO: 27673 - DNA, 96 bp, Aspergillus turcosus
  misc_feature: 152
acaaatttcaacaatgaaacaacaattagtgcaaagaaaaattgaaataatcacaaaaattaaaaatggtcaaatggaaatctttgaacttaaaga

SEQ ID NO: 27674 - DNA, 96 bp, Aspergillus turcosus
  misc_feature: 152
tcacgttcagaatcattataaatagttaaatatgtatgaaaatcataaggtggaccagttggtccacctgaaccaggtgaacctcctatcgatatt

SEQ ID NO: 27675 - DNA, 96 bp, Aspergillus turcosus
  misc_feature: 152
cctataactattgagtaaaagtacaactagccagttattttacaaatggacccataaggttatatacgtgaatgtataaaaactcaaggatgtatc

SEQ ID NO: 27676 - DNA, 96 bp, Aspergillus turcosus
  misc_feature: 152
ataactattgagtaaaagtacaactagccagttattttacaaatggacccataaggttatatacgtgaatgtataaaaactcaaggatgtatcgat

SEQ ID NO: 27677 - DNA, 96 bp, Aspergillus turcosus
  misc_feature: 152
atcacgttcagaatcattataaatagttaaatatgtatgaaaatcataaggtggaccagttggtccacctgaaccaggtgaacctcctatcgatat

SEQ ID NO: 27678 - DNA, 96 bp, Aspergillus turcosus
  misc_feature: 151
catcacgttcagaatcattataaatagttaaatatgtatgaaaatcataaggtggaccagttggtccacctgaaccaggtgaacctcctatcgata

SEQ ID NO: 27679 - DNA, 96 bp, Aspergillus turcosus
  misc_feature: 151
tatataaccttatgggtccatttgtaaaataactggctagttgtacttttactcaatagttataggctaaaatatgtctacaaaaagtatcttcgt

SEQ ID NO: 27680 - DNA, 96 bp, Aspergillus turcosus
  misc_feature: 151
gcgcgcgcgcgcgagcgggcgggcgtttgggagcggcggtccggggcaggcaggcgcgcgcgaggagggagggtgacgagtgggccggcgcgcggg

SEQ ID NO: 27681 - DNA, 96 bp, Aspergillus turcosus
  misc_feature: 151
cgttcagaatcattataaatagttaaatatgtatgaaaatcataaggtggaccagttggtccacctgaaccaggtgaacctcctatcgatatttct

SEQ ID NO: 27682 - DNA, 96 bp, Aspergillus turcosus
  misc_feature: 151
caccatcacgttcagaatcattataaatagttaaatatgtatgaaaatcataaggtggaccagttggtccacctgaaccaggtgaacctcctatcg

SEQ ID NO: 27683 - DNA, 96 bp, Aspergillus turcosus
  misc_feature: 150
ttcagaatcattataaatagttaaatatgtatgaaaatcataaggtggaccagttggtccacctgaaccaggtgaacctcctatcgatatttctgg

SEQ ID NO: 27684 - DNA, 96 bp, Aspergillus turcosus
  misc_feature: 150
gttcagaatcattataaatagttaaatatgtatgaaaatcataaggtggaccagttggtccacctgaaccaggtgaacctcctatcgatatttctg

SEQ ID NO: 27685 - DNA, 96 bp, Aspergillus turcosus
  misc_feature: 149
accatcacgttcagaatcattataaatagttaaatatgtatgaaaatcataaggtggaccagttggtccacctgaaccaggtgaacctcctatcga

SEQ ID NO: 27686 - DNA, 96 bp, Aspergillus turcosus
  misc_feature: 149
gcctataactattgagtaaaagtacaactagccagttattttacaaatggacccataaggttatatacgtgaatgtataaaaactcaaggatgtat

SEQ ID NO: 27687 - DNA, 96 bp, Aspergillus turcosus
  misc_feature: 149
cgcgcgcgcgcgcgagcgggcgggcgtttgggagcggcggtccggggcaggcaggcgcgcgcgaggagggagggtgacgagtgggccggcgcgcgg

SEQ ID NO: 27688 - DNA, 96 bp, Aspergillus turcosus
  misc_feature: 146
ttttaacaccatcacgttcagaatcattataaatagttaaatatgtatgaaaatcataaggtggaccagttggtccacctgaaccaggtgaacctc

SEQ ID NO: 27689 - DNA, 96 bp, Aspergillus turcosus
  misc_feature: 146
gaatcattataaatagttaaatatgtatgaaaatcataaggtggaccagttggtccacctgaaccaggtgaacctcctatcgatatttctggtaca

SEQ ID NO: 27690 - DNA, 96 bp, Aspergillus turcosus
  misc_feature: 146
tcagaatcattataaatagttaaatatgtatgaaaatcataaggtggaccagttggtccacctgaaccaggtgaacctcctatcgatatttctggt

SEQ ID NO: 27691 - DNA, 96 bp, Aspergillus turcosus
  misc_feature: 146
cagaatcattataaatagttaaatatgtatgaaaatcataaggtggaccagttggtccacctgaaccaggtgaacctcctatcgatatttctggta

SEQ ID NO: 27692 - DNA, 96 bp, Aspergillus turcosus
  misc_feature: 146
agaatcattataaatagttaaatatgtatgaaaatcataaggtggaccagttggtccacctgaaccaggtgaacctcctatcgatatttctggtac

SEQ ID NO: 27693 - DNA, 96 bp, Aspergillus turcosus
  misc_feature: 142
ctttttaacaccatcacgttcagaatcattataaatagttaaatatgtatgaaaatcataaggtggaccagttggtccacctgaaccaggtgaacc

SEQ ID NO: 27694 - DNA, 96 bp, Aspergillus turcosus
  misc_feature: 141
tttttaacaccatcacgttcagaatcattataaatagttaaatatgtatgaaaatcataaggtggaccagttggtccacctgaaccaggtgaacct

SEQ ID NO: 27695 - DNA, 96 bp, Aspergillus turcosus
  misc_feature: 140
tatacgtgaatgtataaaaactcaaggatgtatcgataaaataaaggaaatgtaaagaatagagggatttccttcacctaataaagatattagacc

SEQ ID NO: 27696 - DNA, 96 bp, Aspergillus turcosus
  misc_feature: 140
ctggtagttttgtaccagaaatatcgataggaggttcacctggttcaggtggaccaactggtccaccttatgattttcatacatatttaactattt

SEQ ID NO: 27697 - DNA, 96 bp, Aspergillus turcosus
  misc_feature: 139
taattctggtagttttgtaccagaaatatcgataggaggttcacctggttcaggtggaccaactggtccaccttatgattttcatacatatttaac

SEQ ID NO: 27698 - DNA, 96 bp, Aspergillus turcosus
  misc_feature: 138
agcctataactattgagtaaaagtacaactagccagttattttacaaatggacccataaggttatatacgtgaatgtataaaaactcaaggatgta

SEQ ID NO: 27699 - DNA, 96 bp, Aspergillus turcosus
  misc_feature: 137
tgttaaccgtttgttgttaaccgtttgttgttaaccgtttgttgttaaccgtttgttgttaaccgtttgttgttaaccgtttgttgttaaccgttt

SEQ ID NO: 27700 - DNA, 96 bp, Aspergillus turcosus
  misc_feature: 137
atgctacaaatttcaacaatgaaacaacaattagtgcaaagaaaaattgaaataatcacaaaaattaaaaatggtcaaatggaaatctttgaactt

SEQ ID NO: 27701 - DNA, 96 bp, Aspergillus turcosus
  misc_feature: 136
ttgttaaccgtttgttgttaaccgtttgttgttaaccgtttgttgttaaccgtttgttgttaaccgtttgttgttaaccgtttgttgttaaccgtt

SEQ ID NO: 27702 - DNA, 96 bp, Aspergillus turcosus
  misc_feature: 136
tataaatagttaaatatgtatgaaaatcataaggtggaccagttggtccacctgaaccaggtgaacctcctatcgatatttctggtacaaaactac

SEQ ID NO: 27703 - DNA, 96 bp, Aspergillus turcosus
  misc_feature: 134
ttttagcctataactattgagtaaaagtacaactagccagttattttacaaatggacccataaggttatatacgtgaatgtataaaaactcaagga

SEQ ID NO: 27704 - DNA, 96 bp, Aspergillus turcosus
  misc_feature: 134
tggtagttttgtaccagaaatatcgataggaggttcacctggttcaggtggaccaactggtccaccttatgattttcatacatatttaactattta

SEQ ID NO: 27705 - DNA, 96 bp, Aspergillus turcosus
  misc_feature: 134
cgtttgttgttaaccgtttgttgttaaccgtttgttgttaaccgtttgttgttaaccgtttgttgttaaccgtttgttgttaaccgtttgttgtta

SEQ ID NO: 27706 - DNA, 96 bp, Aspergillus turcosus
  misc_feature: 134
ataaatagttaaatatgtatgaaaatcataaggtggaccagttggtccacctgaaccaggtgaacctcctatcgatatttctggtacaaaactacc

SEQ ID NO: 27707 - DNA, 96 bp, Aspergillus turcosus
  misc_feature: 134
attttagcctataactattgagtaaaagtacaactagccagttattttacaaatggacccataaggttatatacgtgaatgtataaaaactcaagg

SEQ ID NO: 27708 - DNA, 96 bp, Aspergillus turcosus
  misc_feature: 133
tttgttgttaaccgtttgttgttaaccgtttgttgttaaccgtttgttgttaaccgtttgttgttaaccgtttgttgttaaccgtttgttgttaac

SEQ ID NO: 27709 - DNA, 96 bp, Aspergillus turcosus
  misc_feature: 133
ttctggtagttttgtaccagaaatatcgataggaggttcacctggttcaggtggaccaactggtccaccttatgattttcatacatatttaactat

SEQ ID NO: 27710 - DNA, 96 bp, Aspergillus turcosus
  misc_feature: 133
tctggtagttttgtaccagaaatatcgataggaggttcacctggttcaggtggaccaactggtccaccttatgattttcatacatatttaactatt

SEQ ID NO: 27711 - DNA, 96 bp, Aspergillus turcosus
  misc_feature: 133
aattctggtagttttgtaccagaaatatcgataggaggttcacctggttcaggtggaccaactggtccaccttatgattttcatacatatttaact

SEQ ID NO: 27712 - DNA, 96 bp, Aspergillus turcosus
  misc_feature: 132
attctggtagttttgtaccagaaatatcgataggaggttcacctggttcaggtggaccaactggtccaccttatgattttcatacatatttaacta

SEQ ID NO: 27713 - DNA, 96 bp, Aspergillus turcosus
  misc_feature: 132
gttgttaaccgtttgttgttaaccgtttgttgttaaccgtttgttgttaaccgtttgttgttaaccgtttgttgttaaccgtttgttgttaaccgt

SEQ ID NO: 27714 - DNA, 96 bp, Aspergillus turcosus
  misc_feature: 131
gtttgttgttaaccgtttgttgttaaccgtttgttgttaaccgtttgttgttaaccgtttgttgttaaccgtttgttgttaaccgtttgttgttaa

SEQ ID NO: 27715 - DNA, 96 bp, Aspergillus turcosus
  misc_feature: 131
tatgctacaaatttcaacaatgaaacaacaattagtgcaaagaaaaattgaaataatcacaaaaattaaaaatggtcaaatggaaatctttgaact

SEQ ID NO: 27716 - DNA, 96 bp, Aspergillus turcosus
  misc_feature: 128
cctttttaacaccatcacgttcagaatcattataaatagttaaatatgtatgaaaatcataaggtggaccagttggtccacctgaaccaggtgaac

SEQ ID NO: 27717 - DNA, 96 bp, Aspergillus turcosus
  misc_feature: 127
ttagcctataactattgagtaaaagtacaactagccagttattttacaaatggacccataaggttatatacgtgaatgtataaaaactcaaggatg

SEQ ID NO: 27718 - DNA, 96 bp, Aspergillus turcosus
  misc_feature: 127
tagcctataactattgagtaaaagtacaactagccagttattttacaaatggacccataaggttatatacgtgaatgtataaaaactcaaggatgt

SEQ ID NO: 27719 - DNA, 96 bp, Aspergillus turcosus
  misc_feature: 126
tttagcctataactattgagtaaaagtacaactagccagttattttacaaatggacccataaggttatatacgtgaatgtataaaaactcaaggat

SEQ ID NO: 27720 - DNA, 96 bp, Aspergillus turcosus
  misc_feature: 125
ctaattctggtagttttgtaccagaaatatcgataggaggttcacctggttcaggtggaccaactggtccaccttatgattttcatacatatttaa

SEQ ID NO: 27721 - DNA, 96 bp, Aspergillus turcosus
  misc_feature: 124
acctttttaacaccatcacgttcagaatcattataaatagttaaatatgtatgaaaatcataaggtggaccagttggtccacctgaaccaggtgaa

SEQ ID NO: 27722 - DNA, 96 bp, Aspergillus turcosus
  misc_feature: 123
ttatgctacaaatttcaacaatgaaacaacaattagtgcaaagaaaaattgaaataatcacaaaaattaaaaatggtcaaatggaaatctttgaac

SEQ ID NO: 27723 - DNA, 96 bp, Aspergillus turcosus
  misc_feature: 123
gcgcgcgcgcgcgcgagcgggcgggcgtttgggagcggcggtccggggcaggcaggcgcgcgcgaggagggagggtgacgagtgggccggcgcgcg

SEQ ID NO: 27724 - DNA, 96 bp, Aspergillus turcosus
  misc_feature: 122
tttatgctacaaatttcaacaatgaaacaacaattagtgcaaagaaaaattgaaataatcacaaaaattaaaaatggtcaaatggaaatctttgaa

SEQ ID NO: 27725 - DNA, 96 bp, Aspergillus turcosus
  misc_feature: 122
ttgttgttaaccgtttgttgttaaccgtttgttgttaaccgtttgttgttaaccgtttgttgttaaccgtttgttgttaaccgtttgttgttaacc

SEQ ID NO: 27726 - DNA, 96 bp, Aspergillus turcosus
  misc_feature: 122
caatatccacctttttaacaccatcacgttcagaatcattataaatagttaaatatgtatgaaaatcataaggtggaccagttggtccacctgaac

SEQ ID NO: 27727 - DNA, 96 bp, Aspergillus turcosus
  misc_feature: 122
gtatataaccttatgggtccatttgtaaaataactggctagttgtacttttactcaatagttataggctaaaatatgtctacaaaaagtatcttcg

SEQ ID NO: 27728 - DNA, 96 bp, Aspergillus turcosus
  misc_feature: 121
tgttgttaaccgtttgttgttaaccgtttgttgttaaccgtttgttgttaaccgtttgttgttaaccgtttgttgttaaccgtttgttgttaaccg

SEQ ID NO: 27729 - DNA, 96 bp, Aspergillus turcosus
  misc_feature: 121
tattttagcctataactattgagtaaaagtacaactagccagttattttacaaatggacccataaggttatatacgtgaatgtataaaaactcaag

SEQ ID NO: 27730 - DNA, 96 bp, Aspergillus turcosus
  misc_feature: 120
tcaatatccacctttttaacaccatcacgttcagaatcattataaatagttaaatatgtatgaaaatcataaggtggaccagttggtccacctgaa

SEQ ID NO: 27731 - DNA, 96 bp, Aspergillus turcosus
  misc_feature: 120
ttaaccgtttgttgttaaccgtttgttgttaaccgtttgttgttaaccgtttgttgttaaccgtttgttgttaaccgtttgttgttaaccgtttgt

SEQ ID NO: 27732 - DNA, 96 bp, Aspergillus turcosus
  misc_feature: 120
atatccacctttttaacaccatcacgttcagaatcattataaatagttaaatatgtatgaaaatcataaggtggaccagttggtccacctgaacca

SEQ ID NO: 27733 - DNA, 96 bp, Aspergillus turcosus
  misc_feature: 120
atcaatatccacctttttaacaccatcacgttcagaatcattataaatagttaaatatgtatgaaaatcataaggtggaccagttggtccacctga

SEQ ID NO: 27734 - DNA, 96 bp, Aspergillus turcosus
  misc_feature: 120
tatttatgctacaaatttcaacaatgaaacaacaattagtgcaaagaaaaattgaaataatcacaaaaattaaaaatggtcaaatggaaatctttg

SEQ ID NO: 27735 - DNA, 96 bp, Aspergillus turcosus
  misc_feature: 120
gttaaccgtttgttgttaaccgtttgttgttaaccgtttgttgttaaccgtttgttgttaaccgtttgttgttaaccgtttgttgttaaccgtttg

SEQ ID NO: 27736 - DNA, 96 bp, Aspergillus turcosus
  misc_feature: 120
aatatccacctttttaacaccatcacgttcagaatcattataaatagttaaatatgtatgaaaatcataaggtggaccagttggtccacctgaacc

SEQ ID NO: 27737 - DNA, 96 bp, Aspergillus turcosus
  misc_feature: 118
atattttagcctataactattgagtaaaagtacaactagccagttattttacaaatggacccataaggttatatacgtgaatgtataaaaactcaa

SEQ ID NO: 27738 - DNA, 96 bp, Aspergillus turcosus
  misc_feature: 118
atttatgctacaaatttcaacaatgaaacaacaattagtgcaaagaaaaattgaaataatcacaaaaattaaaaatggtcaaatggaaatctttga

SEQ ID NO: 27739 - DNA, 96 bp, Aspergillus turcosus
  misc_feature: 118
cgtgaatgtataaaaactcaaggatgtatcgataaaataaaggaaatgtaaagaatagagggatttccttcacctaataaagatattagacctata

SEQ ID NO: 27740 - DNA, 96 bp, Aspergillus turcosus
  misc_feature: 118
taaccgtttgttgttaaccgtttgttgttaaccgtttgttgttaaccgtttgttgttaaccgtttgttgttaaccgtttgttgttaaccgtttgtt

SEQ ID NO: 27741 - DNA, 96 bp, Aspergillus turcosus
  misc_feature: 117
catattttagcctataactattgagtaaaagtacaactagccagttattttacaaatggacccataaggttatatacgtgaatgtataaaaactca

SEQ ID NO: 27742 - DNA, 96 bp, Aspergillus turcosus
  misc_feature: 117
tccacctttttaacaccatcacgttcagaatcattataaatagttaaatatgtatgaaaatcataaggtggaccagttggtccacctgaaccaggt

SEQ ID NO: 27743 - DNA, 96 bp, Aspergillus turcosus
  misc_feature: 117
cacctttttaacaccatcacgttcagaatcattataaatagttaaatatgtatgaaaatcataaggtggaccagttggtccacctgaaccaggtga

SEQ ID NO: 27744 - DNA, 96 bp, Aspergillus turcosus
  misc_feature: 117
ccacctttttaacaccatcacgttcagaatcattataaatagttaaatatgtatgaaaatcataaggtggaccagttggtccacctgaaccaggtg

SEQ ID NO: 27745 - DNA, 96 bp, Aspergillus turcosus
  misc_feature: 117
acgtgaatgtataaaaactcaaggatgtatcgataaaataaaggaaatgtaaagaatagagggatttccttcacctaataaagatattagacctat

SEQ ID NO: 27746 - DNA, 96 bp, Aspergillus turcosus
  misc_feature: 117
atacgtgaatgtataaaaactcaaggatgtatcgataaaataaaggaaatgtaaagaatagagggatttccttcacctaataaagatattagacct

SEQ ID NO: 27747 - DNA, 96 bp, Aspergillus turcosus
  misc_feature: 116
tacgtgaatgtataaaaactcaaggatgtatcgataaaataaaggaaatgtaaagaatagagggatttccttcacctaataaagatattagaccta

SEQ ID NO: 27748 - DNA, 96 bp, Aspergillus turcosus
  misc_feature: 115
tatccacctttttaacaccatcacgttcagaatcattataaatagttaaatatgtatgaaaatcataaggtggaccagttggtccacctgaaccag

SEQ ID NO: 27749 - DNA, 96 bp, Aspergillus turcosus
  misc_feature: 114
ggcgcgcgcagcggtgaccagttggccgaggccgttgggcagggaggcagggaggcgcgcgcgcgccctataggcagccgagagccgcgcgcgcga

SEQ ID NO: 27750 - DNA, 96 bp, Aspergillus turcosus
  misc_feature: 114
taagagctagctactaatctctctaatatagcagtactagaggtgtggaagaatagacttattatttttagttctagctagactagctaaagagta

SEQ ID NO: 27751 - DNA, 96 bp, Aspergillus turcosus
  misc_feature: 114
ctttttgtagacatattttagcctataactattgagtaaaagtacaactagccagttattttacaaatggacccataaggttatatacgtgaatgt

SEQ ID NO: 27752 - DNA, 96 bp, Aspergillus turcosus
  misc_feature: 114
aagagctagctactaatctctctaatatagcagtactagaggtgtggaagaatagacttattatttttagttctagctagactagctaaagagtag

SEQ ID NO: 27753 - DNA, 96 bp, Aspergillus turcosus
  misc_feature: 114
atccacctttttaacaccatcacgttcagaatcattataaatagttaaatatgtatgaaaatcataaggtggaccagttggtccacctgaaccagg

SEQ ID NO: 27754 - DNA, 96 bp, Aspergillus turcosus
  misc_feature: 114
actttttgtagacatattttagcctataactattgagtaaaagtacaactagccagttattttacaaatggacccataaggttatatacgtgaatg

SEQ ID NO: 27755 - DNA, 96 bp, Aspergillus turcosus
  misc_feature: 114
aaccgtttgttgttaaccgtttgttgttaaccgtttgttgttaaccgtttgttgttaaccgtttgttgttaaccgtttgttgttaaccgtttgttg

SEQ ID NO: 27756 - DNA, 96 bp, Aspergillus turcosus
  misc_feature: 114
agagctagctactaatctctctaatatagcagtactagaggtgtggaagaatagacttattatttttagttctagctagactagctaaagagtagt

SEQ ID NO: 27757 - DNA, 96 bp, Aspergillus turcosus
  misc_feature: 113
tatcaatatccacctttttaacaccatcacgttcagaatcattataaatagttaaatatgtatgaaaatcataaggtggaccagttggtccacctg

SEQ ID NO: 27758 - DNA, 96 bp, Aspergillus turcosus
  misc_feature: 113
gtgaatgtataaaaactcaaggatgtatcgataaaataaaggaaatgtaaagaatagagggatttccttcacctaataaagatattagacctatag

SEQ ID NO: 27759 - DNA, 96 bp, Aspergillus turcosus
  misc_feature: 113
gggcgcgcgcagcggtgaccagttggccgaggccgttgggcagggaggcagggaggcgcgcgcgcgccctataggcagccgagagccgcgcgcgcg

SEQ ID NO: 27760 - DNA, 96 bp, Aspergillus turcosus
  misc_feature: 113
gaagatactttttgtagacatattttagcctataactattgagtaaaagtacaactagccagttattttacaaatggacccataaggttatatacg

SEQ ID NO: 27761 - DNA, 96 bp, Aspergillus turcosus
  misc_feature: 113
ctatcaatatccacctttttaacaccatcacgttcagaatcattataaatagttaaatatgtatgaaaatcataaggtggaccagttggtccacct

SEQ ID NO: 27762 - DNA, 96 bp, Aspergillus turcosus
  misc_feature: 113
ccgtttgttgttaaccgtttgttgttaaccgtttgttgttaaccgtttgttgttaaccgtttgttgttaaccgtttgttgttaaccgtttgttgtt

SEQ ID NO: 27763 - DNA, 96 bp, Aspergillus turcosus
  misc_feature: 113
atatttatgctacaaatttcaacaatgaaacaacaattagtgcaaagaaaaattgaaataatcacaaaaattaaaaatggtcaaatggaaatcttt

SEQ ID NO: 27764 - DNA, 96 bp, Aspergillus turcosus
  misc_feature: 112
agatactttttgtagacatattttagcctataactattgagtaaaagtacaactagccagttattttacaaatggacccataaggttatatacgtg

SEQ ID NO: 27765 - DNA, 96 bp, Aspergillus turcosus
  misc_feature: 112
accgtttgttgttaaccgtttgttgttaaccgtttgttgttaaccgtttgttgttaaccgtttgttgttaaccgtttgttgttaaccgtttgttgt

SEQ ID NO: 27766 - DNA, 96 bp, Aspergillus turcosus
  misc_feature: 111
tttttgtagacatattttagcctataactattgagtaaaagtacaactagccagttattttacaaatggacccataaggttatatacgtgaatgta

SEQ ID NO: 27767 - DNA, 96 bp, Aspergillus turcosus
  misc_feature: 111
tgtagacatattttagcctataactattgagtaaaagtacaactagccagttattttacaaatggacccataaggttatatacgtgaatgtataaa

SEQ ID NO: 27768 - DNA, 96 bp, Aspergillus turcosus
  misc_feature: 111
tactttttgtagacatattttagcctataactattgagtaaaagtacaactagccagttattttacaaatggacccataaggttatatacgtgaat

SEQ ID NO: 27769 - DNA, 96 bp, Aspergillus turcosus
  misc_feature: 110
ttttgtagacatattttagcctataactattgagtaaaagtacaactagccagttattttacaaatggacccataaggttatatacgtgaatgtat

SEQ ID NO: 27770 - DNA, 96 bp, Aspergillus turcosus
  misc_feature: 110
tttgtagacatattttagcctataactattgagtaaaagtacaactagccagttattttacaaatggacccataaggttatatacgtgaatgtata

SEQ ID NO: 27771 - DNA, 96 bp, Aspergillus turcosus
  misc_feature: 110
ttgtagacatattttagcctataactattgagtaaaagtacaactagccagttattttacaaatggacccataaggttatatacgtgaatgtataa

SEQ ID NO: 27772 - DNA, 96 bp, Aspergillus turcosus
  misc_feature: 110
aagatactttttgtagacatattttagcctataactattgagtaaaagtacaactagccagttattttacaaatggacccataaggttatatacgt

SEQ ID NO: 27773 - DNA, 96 bp, Aspergillus turcosus
  misc_feature: 109
tagacatattttagcctataactattgagtaaaagtacaactagccagttattttacaaatggacccataaggttatatacgtgaatgtataaaaa

SEQ ID NO: 27774 - DNA, 96 bp, Aspergillus turcosus
  misc_feature: 109
tattaaaattattaccccttaatgggcttagccagtgctaaaattactactctttagctagtctagctagaactaaaaataataagtctattcttc

SEQ ID NO: 27775 - DNA, 96 bp, Aspergillus turcosus
  misc_feature: 109
gtattaaaattattaccccttaatgggcttagccagtgctaaaattactactctttagctagtctagctagaactaaaaataataagtctattctt

SEQ ID NO: 27776 - DNA, 96 bp, Aspergillus turcosus
  misc_feature: 109
agaatagacttattatttttagttctagctagactagctaaagagtagtaattttagcactggctaagcccattaaggggtaataattttaatact

SEQ ID NO: 27777 - DNA, 96 bp, Aspergillus turcosus
  misc_feature: 109
aaatatttatgctacaaatttcaacaatgaaacaacaattagtgcaaagaaaaattgaaataatcacaaaaattaaaaatggtcaaatggaaatct

SEQ ID NO: 27778 - DNA, 96 bp, Aspergillus turcosus
  misc_feature: 108
gtagacatattttagcctataactattgagtaaaagtacaactagccagttattttacaaatggacccataaggttatatacgtgaatgtataaaa

SEQ ID NO: 27779 - DNA, 96 bp, Aspergillus turcosus
  misc_feature: 108
gtatagtttttactaccttctaatctagcaaaatatttatgatatgtactatcaatatccacctttttaacaccatcacgttcagaatcattataa

SEQ ID NO: 27780 - DNA, 96 bp, Aspergillus turcosus
  misc_feature: 108
taaaattattaccccttaatgggcttagccagtgctaaaattactactctttagctagtctagctagaactaaaaataataagtctattcttccac

SEQ ID NO: 27781 - DNA, 96 bp, Aspergillus turcosus
  misc_feature: 108
aatatttatgctacaaatttcaacaatgaaacaacaattagtgcaaagaaaaattgaaataatcacaaaaattaaaaatggtcaaatggaaatctt

SEQ ID NO: 27782 - DNA, 96 bp, Aspergillus turcosus
  misc_feature: 107
ttaaaattattaccccttaatgggcttagccagtgctaaaattactactctttagctagtctagctagaactaaaaataataagtctattcttcca

SEQ ID NO: 27783 - DNA, 96 bp, Aspergillus turcosus
  misc_feature: 107
tagggcgcgcgcagcggtgaccagttggccgaggccgttgggcagggaggcagggaggcgcgcgcgcgccctataggcagccgagagccgcgcgcg

SEQ ID NO: 27784 - DNA, 96 bp, Aspergillus turcosus
  misc_feature: 107
attaaaattattaccccttaatgggcttagccagtgctaaaattactactctttagctagtctagctagaactaaaaataataagtctattcttcc

SEQ ID NO: 27785 - DNA, 96 bp, Aspergillus turcosus
  misc_feature: 107
agggcgcgcgcagcggtgaccagttggccgaggccgttgggcagggaggcagggaggcgcgcgcgcgccctataggcagccgagagccgcgcgcgc

SEQ ID NO: 27786 - DNA, 96 bp, Aspergillus turcosus
  misc_feature: 106
attaaatatttatgctacaaatttcaacaatgaaacaacaattagtgcaaagaaaaattgaaataatcacaaaaattaaaaatggtcaaatggaaa

SEQ ID NO: 27787 - DNA, 96 bp, Aspergillus turcosus
  misc_feature: 106
ttaaatatttatgctacaaatttcaacaatgaaacaacaattagtgcaaagaaaaattgaaataatcacaaaaattaaaaatggtcaaatggaaat

SEQ ID NO: 27788 - DNA, 96 bp, Aspergillus turcosus
  misc_feature: 106
atagggcgcgcgcagcggtgaccagttggccgaggccgttgggcagggaggcagggaggcgcgcgcgcgccctataggcagccgagagccgcgcgc

SEQ ID NO: 27789 - DNA, 96 bp, Aspergillus turcosus
  misc_feature: 106
acatattttagcctataactattgagtaaaagtacaactagccagttattttacaaatggacccataaggttatatacgtgaatgtataaaaactc

SEQ ID NO: 27790 - DNA, 96 bp, Aspergillus turcosus
  misc_feature: 105
tatagtttttactaccttctaatctagcaaaatatttatgatatgtactatcaatatccacctttttaacaccatcacgttcagaatcattataaa

SEQ ID NO: 27791 - DNA, 96 bp, Aspergillus turcosus
  misc_feature: 105
tatagggcgcgcgcagcggtgaccagttggccgaggccgttgggcagggaggcagggaggcgcgcgcgcgccctataggcagccgagagccgcgcg

SEQ ID NO: 27792 - DNA, 96 bp, Aspergillus turcosus
  misc_feature: 105
taaatatttatgctacaaatttcaacaatgaaacaacaattagtgcaaagaaaaattgaaataatcacaaaaattaaaaatggtcaaatggaaatc

SEQ ID NO: 27793 - DNA, 96 bp, Aspergillus turcosus
  misc_feature: 104
cctaatcctgtatagtttttactaccttctaatctagcaaaatatttatgatatgtactatcaatatccacctttttaacaccatcacgttcagaa

SEQ ID NO: 27794 - DNA, 96 bp, Aspergillus turcosus
  misc_feature: 104
gaatagacttattatttttagttctagctagactagctaaagagtagtaattttagcactggctaagcccattaaggggtaataattttaatacta

SEQ ID NO: 27795 - DNA, 96 bp, Aspergillus turcosus
  misc_feature: 104
agacatattttagcctataactattgagtaaaagtacaactagccagttattttacaaatggacccataaggttatatacgtgaatgtataaaaac

SEQ ID NO: 27796 - DNA, 96 bp, Aspergillus turcosus
  misc_feature: 104
ccacctaattctggtagttttgtaccagaaatatcgataggaggttcacctggttcaggtggaccaactggtccaccttatgattttcatacatat

SEQ ID NO: 27797 - DNA, 96 bp, Aspergillus turcosus
  misc_feature: 103
actagaggtgtggaagaatagacttattatttttagttctagctagactagctaaagagtagtaattttagcactggctaagcccattaaggggta

SEQ ID NO: 27798 - DNA, 96 bp, Aspergillus turcosus
  misc_feature: 103
ctatagggcgcgcgcagcggtgaccagttggccgaggccgttgggcagggaggcagggaggcgcgcgcgcgccctataggcagccgagagccgcgc

SEQ ID NO: 27799 - DNA, 96 bp, Aspergillus turcosus
  misc_feature: 103
gacatattttagcctataactattgagtaaaagtacaactagccagttattttacaaatggacccataaggttatatacgtgaatgtataaaaact

SEQ ID NO: 27800 - DNA, 96 bp, Aspergillus turcosus
  misc_feature: 103
cacctaattctggtagttttgtaccagaaatatcgataggaggttcacctggttcaggtggaccaactggtccaccttatgattttcatacatatt

SEQ ID NO: 27801 - DNA, 96 bp, Aspergillus turcosus
  misc_feature: 102
tattaaatatttatgctacaaatttcaacaatgaaacaacaattagtgcaaagaaaaattgaaataatcacaaaaattaaaaatggtcaaatggaa

SEQ ID NO: 27802 - DNA, 96 bp, Aspergillus turcosus
  misc_feature: 102
atactttttgtagacatattttagcctataactattgagtaaaagtacaactagccagttattttacaaatggacccataaggttatatacgtgaa

SEQ ID NO: 27803 - DNA, 96 bp, Aspergillus turcosus
  misc_feature: 102
gatactttttgtagacatattttagcctataactattgagtaaaagtacaactagccagttattttacaaatggacccataaggttatatacgtga

SEQ ID NO: 27804 - DNA, 96 bp, Aspergillus turcosus
  misc_feature: 102
ctaatcctgtatagtttttactaccttctaatctagcaaaatatttatgatatgtactatcaatatccacctttttaacaccatcacgttcagaat

SEQ ID NO: 27805 - DNA, 96 bp, Aspergillus turcosus
  misc_feature: 102
atatattaaatatttatgctacaaatttcaacaatgaaacaacaattagtgcaaagaaaaattgaaataatcacaaaaattaaaaatggtcaaatg

SEQ ID NO: 27806 - DNA, 96 bp, Aspergillus turcosus
  misc_feature: 101
atattaaatatttatgctacaaatttcaacaatgaaacaacaattagtgcaaagaaaaattgaaataatcacaaaaattaaaaatggtcaaatgga

SEQ ID NO: 27807 - DNA, 96 bp, Aspergillus turcosus
  misc_feature: 101
tatattaaatatttatgctacaaatttcaacaatgaaacaacaattagtgcaaagaaaaattgaaataatcacaaaaattaaaaatggtcaaatgg

SEQ ID NO: 27808 - DNA, 96 bp, Aspergillus turcosus
  misc_feature: 101
cctgtatagtttttactaccttctaatctagcaaaatatttatgatatgtactatcaatatccacctttttaacaccatcacgttcagaatcatta

SEQ ID NO: 27809 - DNA, 96 bp, Aspergillus turcosus
  misc_feature: 101
atagtttttactaccttctaatctagcaaaatatttatgatatgtactatcaatatccacctttttaacaccatcacgttcagaatcattataaat

SEQ ID NO: 27810 - DNA, 96 bp, Aspergillus turcosus
  misc_feature: 100
ctatataagagctagctactaatctctctaatatagcagtactagaggtgtggaagaatagacttattatttttagttctagctagactagctaaa

SEQ ID NO: 27811 - DNA, 96 bp, Aspergillus turcosus
  misc_feature: 100
tgtatagtttttactaccttctaatctagcaaaatatttatgatatgtactatcaatatccacctttttaacaccatcacgttcagaatcattata

SEQ ID NO: 27812 - DNA, 96 bp, Aspergillus turcosus
  misc_feature: 100
tatataagagctagctactaatctctctaatatagcagtactagaggtgtggaagaatagacttattatttttagttctagctagactagctaaag

SEQ ID NO: 27813 - DNA, 96 bp, Aspergillus turcosus
  misc_feature: 100
aaagagaaaatataaatattcttggtcgacaattactaagaaacggttatctacgataattaaaattttatattatatttcatattaaaataatat

SEQ ID NO: 27814 - DNA, 96 bp, Aspergillus turcosus
  misc_feature: 99
ataaatcggaagcagatagggatgaaggaagaagaaagatagagaaaggagaaagagtagaaaaagtcgaaaagtcgaagaagactggcgcaacaa

SEQ ID NO: 27815 - DNA, 96 bp, Aspergillus turcosus
  misc_feature: 99
aataaatcggaagcagatagggatgaaggaagaagaaagatagagaaaggagaaagagtagaaaaagtcgaaaagtcgaagaagactggcgcaaca

SEQ ID NO: 27816 - DNA, 96 bp, Aspergillus turcosus
  misc_feature: 99
tcctgtatagtttttactaccttctaatctagcaaaatatttatgatatgtactatcaatatccacctttttaacaccatcacgttcagaatcatt

SEQ ID NO: 27817 - DNA, 96 bp, Aspergillus turcosus
  misc_feature: 99
gaataaatcggaagcagatagggatgaaggaagaagaaagatagagaaaggagaaagagtagaaaaagtcgaaaagtcgaagaagactggcgcaac

SEQ ID NO: 27818 - DNA, 96 bp, Aspergillus turcosus
  misc_feature: 99
gactacggctgcatattgccaccatctctcgtcttcttcgttgccttttatcatcatttctccttttcctccttttttctttctctctttcttggg

SEQ ID NO: 27819 - DNA, 96 bp, Aspergillus turcosus
  misc_feature: 99
ctgtatagtttttactaccttctaatctagcaaaatatttatgatatgtactatcaatatccacctttttaacaccatcacgttcagaatcattat

SEQ ID NO: 27820 - DNA, 96 bp, Aspergillus turcosus
  misc_feature: 99
aagagaaaatataaatattcttggtcgacaattactaagaaacggttatctacgataattaaaattttatattatatttcatattaaaataatatg

SEQ ID NO: 27821 - DNA, 96 bp, Aspergillus turcosus
  misc_feature: 99
atcctgtatagtttttactaccttctaatctagcaaaatatttatgatatgtactatcaatatccacctttttaacaccatcacgttcagaatcat

SEQ ID NO: 27822 - DNA, 96 bp, Aspergillus turcosus
  misc_feature: 98
taatcctgtatagtttttactaccttctaatctagcaaaatatttatgatatgtactatcaatatccacctttttaacaccatcacgttcagaatc

SEQ ID NO: 27823 - DNA, 96 bp, Aspergillus turcosus
  misc_feature: 98
catgagagcatgagagcatgagagcatgagagcatgagagcatgagagcatgagagcatgagagcatgagagcatgagagcatgagagcatgagag

SEQ ID NO: 27824 - DNA, 96 bp, Aspergillus turcosus
  misc_feature: 98
ctcatgctctcatgctctcatgctctcatgctctcatgctctcatgctctcatgctctcatgctctcatgctctcatgctctcatgctctcatgct

SEQ ID NO: 27825 - DNA, 96 bp, Aspergillus turcosus
  misc_feature: 98
ctaccctatataagagctagctactaatctctctaatatagcagtactagaggtgtggaagaatagacttattatttttagttctagctagactag

SEQ ID NO: 27826 - DNA, 96 bp, Aspergillus turcosus
  misc_feature: 97
actacggctgcatattgccaccatctctcgtcttcttcgttgccttttatcatcatttctccttttcctccttttttctttctctctttcttggga

SEQ ID NO: 27827 - DNA, 96 bp, Aspergillus turcosus
  misc_feature: 97
actaccctatataagagctagctactaatctctctaatatagcagtactagaggtgtggaagaatagacttattatttttagttctagctagacta

SEQ ID NO: 27828 - DNA, 96 bp, Aspergillus turcosus
  misc_feature: 97
gaacagaataaatcggaagcagatagggatgaaggaagaagaaagatagagaaaggagaaagagtagaaaaagtcgaaaagtcgaagaagactggc

SEQ ID NO: 27829 - DNA, 96 bp, Aspergillus turcosus
  misc_feature: 97
aacagaataaatcggaagcagatagggatgaaggaagaagaaagatagagaaaggagaaagagtagaaaaagtcgaaaagtcgaagaagactggcg

SEQ ID NO: 27830 - DNA, 96 bp, Aspergillus turcosus
  misc_feature: 97
aatatattaaatatttatgctacaaatttcaacaatgaaacaacaattagtgcaaagaaaaattgaaataatcacaaaaattaaaaatggtcaaat

SEQ ID NO: 27831 - DNA, 96 bp, Aspergillus turcosus
  misc_feature: 96
gaatatattaaatatttatgctacaaatttcaacaatgaaacaacaattagtgcaaagaaaaattgaaataatcacaaaaattaaaaatggtcaaa

SEQ ID NO: 27832 - DNA, 96 bp, Aspergillus turcosus
  misc_feature: 96
agaataaatcggaagcagatagggatgaaggaagaagaaagatagagaaaggagaaagagtagaaaaagtcgaaaagtcgaagaagactggcgcaa

SEQ ID NO: 27833 - DNA, 96 bp, Aspergillus turcosus
  misc_feature: 96
cagaataaatcggaagcagatagggatgaaggaagaagaaagatagagaaaggagaaagagtagaaaaagtcgaaaagtcgaagaagactggcgca

SEQ ID NO: 27834 - DNA, 96 bp, Aspergillus turcosus
  misc_feature: 96
aatcctgtatagtttttactaccttctaatctagcaaaatatttatgatatgtactatcaatatccacctttttaacaccatcacgttcagaatca

SEQ ID NO: 27835 - DNA, 96 bp, Aspergillus turcosus
  misc_feature: 96
tctaactactgttgtatgcccatagtcttgtggtgcttgcctagtgtgtcatgtgacatttgcacttcatatcatagcttagctttagcttagata

SEQ ID NO: 27836 - DNA, 96 bp, Aspergillus turcosus
  misc_feature: 96
tcatgctctcatgctctcatgctctcatgctctcatgctctcatgctctcatgctctcatgctctcatgctctcatgctctcatgctctcatgctc

SEQ ID NO: 27837 - DNA, 96 bp, Aspergillus turcosus
  misc_feature: 96
cggctgcatattgccaccatctctcgtcttcttcgttgccttttatcatcatttctccttttcctccttttttctttctctctttcttgggaggtc

SEQ ID NO: 27838 - DNA, 96 bp, Aspergillus turcosus
  misc_feature: 96
gaaaatataaatattcttggtcgacaattactaagaaacggttatctacgataattaaaattttatattatatttcatattaaaataatatgaaag

SEQ ID NO: 27839 - DNA, 96 bp, Aspergillus turcosus
  misc_feature: 96
ctaactactgttgtatgcccatagtcttgtggtgcttgcctagtgtgtcatgtgacatttgcacttcatatcatagcttagctttagcttagatag

SEQ ID NO: 27840 - DNA, 96 bp, Aspergillus turcosus
  misc_feature: 96
cctatagggcgcgcgcagcggtgaccagttggccgaggccgttgggcagggaggcagggaggcgcgcgcgcgccctataggcagccgagagccgcg

SEQ ID NO: 27841 - DNA, 96 bp, Aspergillus turcosus
  misc_feature: 96
cgactacggctgcatattgccaccatctctcgtcttcttcgttgccttttatcatcatttctccttttcctccttttttctttctctctttcttgg

SEQ ID NO: 27842 - DNA, 96 bp, Aspergillus turcosus
  misc_feature: 96
atataattgaccacctaattctggtagttttgtaccagaaatatcgataggaggttcacctggttcaggtggaccaactggtccaccttatgattt

SEQ ID NO: 27843 - DNA, 96 bp, Aspergillus turcosus
  misc_feature: 96
acggctgcatattgccaccatctctcgtcttcttcgttgccttttatcatcatttctccttttcctccttttttctttctctctttcttgggaggt

SEQ ID NO: 27844 - DNA, 96 bp, Aspergillus turcosus
  misc_feature: 95
tgaatatattaaatatttatgctacaaatttcaacaatgaaacaacaattagtgcaaagaaaaattgaaataatcacaaaaattaaaaatggtcaa

SEQ ID NO: 27845 - DNA, 96 bp, Aspergillus turcosus
  misc_feature: 95
ttcgagaacagaataaatcggaagcagatagggatgaaggaagaagaaagatagagaaaggagaaagagtagaaaaagtcgaaaagtcgaagaaga

SEQ ID NO: 27846 - DNA, 96 bp, Aspergillus turcosus
  misc_feature: 95
aacaaagagaaaatataaatattcttggtcgacaattactaagaaacggttatctacgataattaaaattttatattatatttcatattaaaataa

SEQ ID NO: 27847 - DNA, 96 bp, Aspergillus turcosus
  misc_feature: 95
gcatgagagcatgagagcatgagagcatgagagcatgagagcatgagagcatgagagcatgagagcatgagagcatgagagcatgagagcatgaga

SEQ ID NO: 27848 - DNA, 96 bp, Aspergillus turcosus
  misc_feature: 95
tatctaactactgttgtatgcccatagtcttgtggtgcttgcctagtgtgtcatgtgacatttgcacttcatatcatagcttagctttagcttaga

SEQ ID NO: 27849 - DNA, 96 bp, Aspergillus turcosus
  misc_feature: 95
tcggaagcagatagggatgaaggaagaagaaagatagagaaaggagaaagagtagaaaaagtcgaaaagtcgaagaagactggcgcaacaaagagc

SEQ ID NO: 27850 - DNA, 96 bp, Aspergillus turcosus
  misc_feature: 95
tcgagaacagaataaatcggaagcagatagggatgaaggaagaagaaagatagagaaaggagaaagagtagaaaaagtcgaaaagtcgaagaagac

SEQ ID NO: 27851 - DNA, 96 bp, Aspergillus turcosus
  misc_feature: 95
tagctaaagagtagtaattttagcactggctaagcccattaaggggtaataattttaatactagttagggacacctaatttagaaaagaaagggga

SEQ ID NO: 27852 - DNA, 96 bp, Aspergillus turcosus
  misc_feature: 95
tacggctgcatattgccaccatctctcgtcttcttcgttgccttttatcatcatttctccttttcctccttttttctttctctctttcttgggagg

SEQ ID NO: 27853 - DNA, 96 bp, Aspergillus turcosus
  misc_feature: 95
acagaataaatcggaagcagatagggatgaaggaagaagaaagatagagaaaggagaaagagtagaaaaagtcgaaaagtcgaagaagactggcgc

SEQ ID NO: 27854 - DNA, 96 bp, Aspergillus turcosus
  misc_feature: 95
gagaacagaataaatcggaagcagatagggatgaaggaagaagaaagatagagaaaggagaaagagtagaaaaagtcgaaaagtcgaagaagactg

SEQ ID NO: 27855 - DNA, 96 bp, Aspergillus turcosus
  misc_feature: 95
atcggaagcagatagggatgaaggaagaagaaagatagagaaaggagaaagagtagaaaaagtcgaaaagtcgaagaagactggcgcaacaaagag

SEQ ID NO: 27856 - DNA, 96 bp, Aspergillus turcosus
  misc_feature: 95
agaacagaataaatcggaagcagatagggatgaaggaagaagaaagatagagaaaggagaaagagtagaaaaagtcgaaaagtcgaagaagactgg

SEQ ID NO: 27857 - DNA, 96 bp, Aspergillus turcosus
  misc_feature: 95
acgactacggctgcatattgccaccatctctcgtcttcttcgttgccttttatcatcatttctccttttcctccttttttctttctctctttcttg

SEQ ID NO: 27858 - DNA, 96 bp, Aspergillus turcosus
  misc_feature: 95
acaaagagaaaatataaatattcttggtcgacaattactaagaaacggttatctacgataattaaaattttatattatatttcatattaaaataat

SEQ ID NO: 27859 - DNA, 96 bp, Aspergillus turcosus
  misc_feature: 95
atctaactactgttgtatgcccatagtcttgtggtgcttgcctagtgtgtcatgtgacatttgcacttcatatcatagcttagctttagcttagat

SEQ ID NO: 27860 - DNA, 96 bp, Aspergillus turcosus
  misc_feature: 95
agctaaagagtagtaattttagcactggctaagcccattaaggggtaataattttaatactagttagggacacctaatttagaaaagaaaggggat

SEQ ID NO: 27861 - DNA, 96 bp, Aspergillus turcosus
  misc_feature: 94
tttttagttctagctagactagctaaagagtagtaattttagcactggctaagcccattaaggggtaataattttaatactagttagggacaccta

SEQ ID NO: 27862 - DNA, 96 bp, Aspergillus turcosus
  misc_feature: 94
agaaaatataaatattcttggtcgacaattactaagaaacggttatctacgataattaaaattttatattatatttcatattaaaataatatgaaa

SEQ ID NO: 27863 - DNA, 96 bp, Aspergillus turcosus
  misc_feature: 94
gagaaaatataaatattcttggtcgacaattactaagaaacggttatctacgataattaaaattttatattatatttcatattaaaataatatgaa

SEQ ID NO: 27864 - DNA, 96 bp, Aspergillus turcosus
  misc_feature: 94
aagtagaagactatactaaagatctagtagaaggtgctttttgcctattcttttaataagatgaagctggtataggaatgtgatatcgttggtgaa

SEQ ID NO: 27865 - DNA, 96 bp, Aspergillus turcosus
  misc_feature: 94
ttatctaactactgttgtatgcccatagtcttgtggtgcttgcctagtgtgtcatgtgacatttgcacttcatatcatagcttagctttagcttag

SEQ ID NO: 27866 - DNA, 96 bp, Aspergillus turcosus
  misc_feature: 94
cctatataagagctagctactaatctctctaatatagcagtactagaggtgtggaagaatagacttattatttttagttctagctagactagctaa

SEQ ID NO: 27867 - DNA, 96 bp, Aspergillus turcosus
  misc_feature: 94
agagaaaatataaatattcttggtcgacaattactaagaaacggttatctacgataattaaaattttatattatatttcatattaaaataatatga

SEQ ID NO: 27868 - DNA, 96 bp, Aspergillus turcosus
  misc_feature: 94
accacctaattctggtagttttgtaccagaaatatcgataggaggttcacctggttcaggtggaccaactggtccaccttatgattttcatacata

SEQ ID NO: 27869 - DNA, 96 bp, Aspergillus turcosus
  misc_feature: 94
gctaaagagtagtaattttagcactggctaagcccattaaggggtaataattttaatactagttagggacacctaatttagaaaagaaaggggata

SEQ ID NO: 27870 - DNA, 96 bp, Aspergillus turcosus
  misc_feature: 94
tagaagactatactaaagatctagtagaaggtgctttttgcctattcttttaataagatgaagctggtataggaatgtgatatcgttggtgaacat

SEQ ID NO: 27871 - DNA, 96 bp, Aspergillus turcosus
  misc_feature: 94
tacgactacggctgcatattgccaccatctctcgtcttcttcgttgccttttatcatcatttctccttttcctccttttttctttctctctttctt

SEQ ID NO: 27872 - DNA, 96 bp, Aspergillus turcosus
  misc_feature: 94
gttatctaactactgttgtatgcccatagtcttgtggtgcttgcctagtgtgtcatgtgacatttgcacttcatatcatagcttagctttagctta

SEQ ID NO: 27873 - DNA, 96 bp, Aspergillus turcosus
  misc_feature: 94
ggttatctaactactgttgtatgcccatagtcttgtggtgcttgcctagtgtgtcatgtgacatttgcacttcatatcatagcttagctttagctt

SEQ ID NO: 27874 - DNA, 96 bp, Aspergillus turcosus
  misc_feature: 94
gggttatctaactactgttgtatgcccatagtcttgtggtgcttgcctagtgtgtcatgtgacatttgcacttcatatcatagcttagctttagct

SEQ ID NO: 27875 - DNA, 96 bp, Aspergillus turcosus
  misc_feature: 94
atgagagcatgagagcatgagagcatgagagcatgagagcatgagagcatgagagcatgagagcatgagagcatgagagcatgagagcatgagagc

SEQ ID NO: 27876 - DNA, 96 bp, Aspergillus turcosus
  misc_feature: 94
agggttatctaactactgttgtatgcccatagtcttgtggtgcttgcctagtgtgtcatgtgacatttgcacttcatatcatagcttagctttagc

SEQ ID NO: 27877 - DNA, 96 bp, Aspergillus turcosus
  misc_feature: 94
gaccacctaattctggtagttttgtaccagaaatatcgataggaggttcacctggttcaggtggaccaactggtccaccttatgattttcatacat

SEQ ID NO: 27878 - DNA, 96 bp, Aspergillus turcosus
  misc_feature: 94
ctacggctgcatattgccaccatctctcgtcttcttcgttgccttttatcatcatttctccttttcctccttttttctttctctctttcttgggag

SEQ ID NO: 27879 - DNA, 96 bp, Aspergillus turcosus
  misc_feature: 94
cgagaacagaataaatcggaagcagatagggatgaaggaagaagaaagatagagaaaggagaaagagtagaaaaagtcgaaaagtcgaagaagact

SEQ ID NO: 27880 - DNA, 96 bp, Aspergillus turcosus
  misc_feature: 93
ttttagttctagctagactagctaaagagtagtaattttagcactggctaagcccattaaggggtaataattttaatactagttagggacacctaa

SEQ ID NO: 27881 - DNA, 96 bp, Aspergillus turcosus
  misc_feature: 93
tttagttctagctagactagctaaagagtagtaattttagcactggctaagcccattaaggggtaataattttaatactagttagggacacctaat

SEQ ID NO: 27882 - DNA, 96 bp, Aspergillus turcosus
  misc_feature: 93
ttgaccacctaattctggtagttttgtaccagaaatatcgataggaggttcacctggttcaggtggaccaactggtccaccttatgattttcatac

SEQ ID NO: 27883 - DNA, 96 bp, Aspergillus turcosus
  misc_feature: 93
aactactgttgtatgcccatagtcttgtggtgcttgcctagtgtgtcatgtgacatttgcacttcatatcatagcttagctttagcttagatagaa

SEQ ID NO: 27884 - DNA, 96 bp, Aspergillus turcosus
  misc_feature: 93
ttctagctagactagctaaagagtagtaattttagcactggctaagcccattaaggggtaataattttaatactagttagggacacctaatttaga

SEQ ID NO: 27885 - DNA, 96 bp, Aspergillus turcosus
  misc_feature: 93
tctagctagactagctaaagagtagtaattttagcactggctaagcccattaaggggtaataattttaatactagttagggacacctaatttagaa

SEQ ID NO: 27886 - DNA, 96 bp, Aspergillus turcosus
  misc_feature: 93
ttattatttttagttctagctagactagctaaagagtagtaattttagcactggctaagcccattaaggggtaataattttaatactagttaggga

SEQ ID NO: 27887 - DNA, 96 bp, Aspergillus turcosus
  misc_feature: 93
ttagttctagctagactagctaaagagtagtaattttagcactggctaagcccattaaggggtaataattttaatactagttagggacacctaatt

SEQ ID NO: 27888 - DNA, 96 bp, Aspergillus turcosus
  misc_feature: 93
gtagaagactatactaaagatctagtagaaggtgctttttgcctattcttttaataagatgaagctggtataggaatgtgatatcgttggtgaaca

SEQ ID NO: 27889 - DNA, 96 bp, Aspergillus turcosus
  misc_feature: 93
cggaagcagatagggatgaaggaagaagaaagatagagaaaggagaaagagtagaaaaagtcgaaaagtcgaagaagactggcgcaacaaagagca

SEQ ID NO: 27890 - DNA, 96 bp, Aspergillus turcosus
  misc_feature: 93
caaagagaaaatataaatattcttggtcgacaattactaagaaacggttatctacgataattaaaattttatattatatttcatattaaaataata

SEQ ID NO: 27891 - DNA, 96 bp, Aspergillus turcosus
  misc_feature: 93
tagttctagctagactagctaaagagtagtaattttagcactggctaagcccattaaggggtaataattttaatactagttagggacacctaattt

SEQ ID NO: 27892 - DNA, 96 bp, Aspergillus turcosus
  misc_feature: 93
gttctagctagactagctaaagagtagtaattttagcactggctaagcccattaaggggtaataattttaatactagttagggacacctaatttag

SEQ ID NO: 27893 - DNA, 96 bp, Aspergillus turcosus
  misc_feature: 93
gaagactatactaaagatctagtagaaggtgctttttgcctattcttttaataagatgaagctggtataggaatgtgatatcgttggtgaacatat

SEQ ID NO: 27894 - DNA, 96 bp, Aspergillus turcosus
  misc_feature: 93
actactgttgtatgcccatagtcttgtggtgcttgcctagtgtgtcatgtgacatttgcacttcatatcatagcttagctttagcttagatagaag

SEQ ID NO: 27895 - DNA, 96 bp, Aspergillus turcosus
  misc_feature: 93
cttattatttttagttctagctagactagctaaagagtagtaattttagcactggctaagcccattaaggggtaataattttaatactagttaggg

SEQ ID NO: 27896 - DNA, 96 bp, Aspergillus turcosus
  misc_feature: 93
acttattatttttagttctagctagactagctaaagagtagtaattttagcactggctaagcccattaaggggtaataattttaatactagttagg

SEQ ID NO: 27897 - DNA, 96 bp, Aspergillus turcosus
  misc_feature: 93
atttttagttctagctagactagctaaagagtagtaattttagcactggctaagcccattaaggggtaataattttaatactagttagggacacct

SEQ ID NO: 27898 - DNA, 96 bp, Aspergillus turcosus
  misc_feature: 92
taaccgtttcttagtaattgtcgaccaagaatatttatattttctctttgttccactatccttattctatttatctcatactgatatacctcagaa

SEQ ID NO: 27899 - DNA, 96 bp, Aspergillus turcosus
  misc_feature: 92
ataaattcgagaacagaataaatcggaagcagatagggatgaaggaagaagaaagatagagaaaggagaaagagtagaaaaagtcgaaaagtcgaa

SEQ ID NO: 27900 - DNA, 96 bp, Aspergillus turcosus
  misc_feature: 92
ctaaagagtagtaattttagcactggctaagcccattaaggggtaataattttaatactagttagggacacctaatttagaaaagaaaggggataa

SEQ ID NO: 27901 - DNA, 96 bp, Aspergillus turcosus
  misc_feature: 92
gaccggactgacccgcgcgcgcgaacagtacggaggctgccggtcgcttgacggggcgtcccgacatatatcagcgtggcccacccgtgccgtaca

SEQ ID NO: 27902 - DNA, 96 bp, Aspergillus turcosus
  misc_feature: 92
aaaatataaatattcttggtcgacaattactaagaaacggttatctacgataattaaaattttatattatatttcatattaaaataatatgaaaga

SEQ ID NO: 27903 - DNA, 96 bp, Aspergillus turcosus
  misc_feature: 92
aaattcgagaacagaataaatcggaagcagatagggatgaaggaagaagaaagatagagaaaggagaaagagtagaaaaagtcgaaaagtcgaaga

SEQ ID NO: 27904 - DNA, 96 bp, Aspergillus turcosus
  misc_feature: 92
gaagcagatagggatgaaggaagaagaaagatagagaaaggagaaagagtagaaaaagtcgaaaagtcgaagaagactggcgcaacaaagagcaga

SEQ ID NO: 27905 - DNA, 96 bp, Aspergillus turcosus
  misc_feature: 92
ataaccgtttcttagtaattgtcgaccaagaatatttatattttctctttgttccactatccttattctatttatctcatactgatatacctcaga

SEQ ID NO: 27906 - DNA, 96 bp, Aspergillus turcosus
  misc_feature: 92
agcagatagggatgaaggaagaagaaagatagagaaaggagaaagagtagaaaaagtcgaaaagtcgaagaagactggcgcaacaaagagcagaga

SEQ ID NO: 27907 - DNA, 96 bp, Aspergillus turcosus
  misc_feature: 92
gaacaaagagaaaatataaatattcttggtcgacaattactaagaaacggttatctacgataattaaaattttatattatatttcatattaaaata

SEQ ID NO: 27908 - DNA, 96 bp, Aspergillus turcosus
  misc_feature: 92
agaagactatactaaagatctagtagaaggtgctttttgcctattcttttaataagatgaagctggtataggaatgtgatatcgttggtgaacata

SEQ ID NO: 27909 - DNA, 96 bp, Aspergillus turcosus
  misc_feature: 92
attgaccacctaattctggtagttttgtaccagaaatatcgataggaggttcacctggttcaggtggaccaactggtccaccttatgattttcata

SEQ ID NO: 27910 - DNA, 96 bp, Aspergillus turcosus
  misc_feature: 92
tagggttatctaactactgttgtatgcccatagtcttgtggtgcttgcctagtgtgtcatgtgacatttgcacttcatatcatagcttagctttag

SEQ ID NO: 27911 - DNA, 96 bp, Aspergillus turcosus
  misc_feature: 92
taaattcgagaacagaataaatcggaagcagatagggatgaaggaagaagaaagatagagaaaggagaaagagtagaaaaagtcgaaaagtcgaag

SEQ ID NO: 27912 - DNA, 96 bp, Aspergillus turcosus
  misc_feature: 92
agttctagctagactagctaaagagtagtaattttagcactggctaagcccattaaggggtaataattttaatactagttagggacacctaattta

SEQ ID NO: 27913 - DNA, 96 bp, Aspergillus turcosus
  misc_feature: 92
taaagagtagtaattttagcactggctaagcccattaaggggtaataattttaatactagttagggacacctaatttagaaaagaaaggggataat

SEQ ID NO: 27914 - DNA, 96 bp, Aspergillus turcosus
  misc_feature: 92
ggaacaaagagaaaatataaatattcttggtcgacaattactaagaaacggttatctacgataattaaaattttatattatatttcatattaaaat

SEQ ID NO: 27915 - DNA, 96 bp, Aspergillus turcosus
  misc_feature: 92
gagagcatgagagcatgagagcatgagagcatgagagcatgagagcatgagagcatgagagcatgagagcatgagagcatgagagcatgagagcat

SEQ ID NO: 27916 - DNA, 96 bp, Aspergillus turcosus
  misc_feature: 92
aagcagatagggatgaaggaagaagaaagatagagaaaggagaaagagtagaaaaagtcgaaaagtcgaagaagactggcgcaacaaagagcagag

SEQ ID NO: 27917 - DNA, 96 bp, Aspergillus turcosus
  misc_feature: 92
ctatactaaagatctagtagaaggtgctttttgcctattcttttaataagatgaagctggtataggaatgtgatatcgttggtgaacatatggctt

SEQ ID NO: 27918 - DNA, 96 bp, Aspergillus turcosus
  misc_feature: 92
aaagctgtctaacaatacatttctcttataacactgtctcaataacatggatgttacttttccttaaaccccccataatgttacgttctcatgtat

SEQ ID NO: 27919 - DNA, 96 bp, Aspergillus turcosus
  misc_feature: 91
tagctagactagctaaagagtagtaattttagcactggctaagcccattaaggggtaataattttaatactagttagggacacctaatttagaaaa

SEQ ID NO: 27920 - DNA, 96 bp, Aspergillus turcosus
  misc_feature: 91
taaatcggaagcagatagggatgaaggaagaagaaagatagagaaaggagaaagagtagaaaaagtcgaaaagtcgaagaagactggcgcaacaaa

SEQ ID NO: 27921 - DNA, 96 bp, Aspergillus turcosus
  misc_feature: 91
ctagctagactagctaaagagtagtaattttagcactggctaagcccattaaggggtaataattttaatactagttagggacacctaatttagaaa

SEQ ID NO: 27922 - DNA, 96 bp, Aspergillus turcosus
  misc_feature: 91
aattcgagaacagaataaatcggaagcagatagggatgaaggaagaagaaagatagagaaaggagaaagagtagaaaaagtcgaaaagtcgaagaa

SEQ ID NO: 27923 - DNA, 96 bp, Aspergillus turcosus
  misc_feature: 91
ttatataattgaccacctaattctggtagttttgtaccagaaatatcgataggaggttcacctggttcaggtggaccaactggtccaccttatgat

SEQ ID NO: 27924 - DNA, 96 bp, Aspergillus turcosus
  misc_feature: 91
aatcaacttaccataacaaatcataagaactgccacagtccataaggataatttacagggatcttccaaccttattaatgcatttaaccatcctaa

SEQ ID NO: 27925 - DNA, 96 bp, Aspergillus turcosus
  misc_feature: 91
ccggactgacccgcgcgcgcgaacagtacggaggctgccggtcgcttgacggggcgtcccgacatatatcagcgtggcccacccgtgccgtacaca

SEQ ID NO: 27926 - DNA, 96 bp, Aspergillus turcosus
  misc_feature: 91
tgaccacctaattctggtagttttgtaccagaaatatcgataggaggttcacctggttcaggtggaccaactggtccaccttatgattttcataca

SEQ ID NO: 27927 - DNA, 96 bp, Aspergillus turcosus
  misc_feature: 91
tgagagcatgagagcatgagagcatgagagcatgagagcatgagagcatgagagcatgagagcatgagagcatgagagcatgagagcatgagagca

SEQ ID NO: 27928 - DNA, 96 bp, Aspergillus turcosus
  misc_feature: 91
tgatcggtgatctcattcttcatttctcattccatgatttccatccatcattccccctttcttcccatctaaatctctctcactattcccagttgg

SEQ ID NO: 27929 - DNA, 96 bp, Aspergillus turcosus
  misc_feature: 91
aatcggaagcagatagggatgaaggaagaagaaagatagagaaaggagaaagagtagaaaaagtcgaaaagtcgaagaagactggcgcaacaaaga

SEQ ID NO: 27930 - DNA, 96 bp, Aspergillus turcosus
  misc_feature: 91
gataaattcgagaacagaataaatcggaagcagatagggatgaaggaagaagaaagatagagaaaggagaaagagtagaaaaagtcgaaaagtcga

SEQ ID NO: 27931 - DNA, 96 bp, Aspergillus turcosus
  misc_feature: 91
tatactaaagatctagtagaaggtgctttttgcctattcttttaataagatgaagctggtataggaatgtgatatcgttggtgaacatatggcttt

SEQ ID NO: 27932 - DNA, 96 bp, Aspergillus turcosus
  misc_feature: 91
agtagaagactatactaaagatctagtagaaggtgctttttgcctattcttttaataagatgaagctggtataggaatgtgatatcgttggtgaac

SEQ ID NO: 27933 - DNA, 96 bp, Aspergillus turcosus
  misc_feature: 91
accggactgacccgcgcgcgcgaacagtacggaggctgccggtcgcttgacggggcgtcccgacatatatcagcgtggcccacccgtgccgtacac

SEQ ID NO: 27934 - DNA, 96 bp, Aspergillus turcosus
  misc_feature: 91
ggaagcagatagggatgaaggaagaagaaagatagagaaaggagaaagagtagaaaaagtcgaaaagtcgaagaagactggcgcaacaaagagcag

SEQ ID NO: 27935 - DNA, 96 bp, Aspergillus turcosus
  misc_feature: 91
gactatactaaagatctagtagaaggtgctttttgcctattcttttaataagatgaagctggtataggaatgtgatatcgttggtgaacatatggc

SEQ ID NO: 27936 - DNA, 96 bp, Aspergillus turcosus
  misc_feature: 91
gataaccgtttcttagtaattgtcgaccaagaatatttatattttctctttgttccactatccttattctatttatctcatactgatatacctcag

SEQ ID NO: 27937 - DNA, 96 bp, Aspergillus turcosus
  misc_feature: 91
gaataaggatagtggaacaaagagaaaatataaatattcttggtcgacaattactaagaaacggttatctacgataattaaaattttatattatat

SEQ ID NO: 27938 - DNA, 96 bp, Aspergillus turcosus
  misc_feature: 91
attcgagaacagaataaatcggaagcagatagggatgaaggaagaagaaagatagagaaaggagaaagagtagaaaaagtcgaaaagtcgaagaag

SEQ ID NO: 27939 - DNA, 96 bp, Aspergillus turcosus
  misc_feature: 91
actagctaaagagtagtaattttagcactggctaagcccattaaggggtaataattttaatactagttagggacacctaatttagaaaagaaaggg

SEQ ID NO: 27940 - DNA, 96 bp, Aspergillus turcosus
  misc_feature: 91
agactatactaaagatctagtagaaggtgctttttgcctattcttttaataagatgaagctggtataggaatgtgatatcgttggtgaacatatgg

SEQ ID NO: 27941 - DNA, 96 bp, Aspergillus turcosus
  misc_feature: 91
catgctctcatgctctcatgctctcatgctctcatgctctcatgctctcatgctctcatgctctcatgctctcatgctctcatgctctcatgctct

SEQ ID NO: 27942 - DNA, 96 bp, Aspergillus turcosus
  misc_feature: 91
aagactatactaaagatctagtagaaggtgctttttgcctattcttttaataagatgaagctggtataggaatgtgatatcgttggtgaacatatg

SEQ ID NO: 27943 - DNA, 96 bp, Aspergillus turcosus
  misc_feature: 91
aaccgtttcttagtaattgtcgaccaagaatatttatattttctctttgttccactatccttattctatttatctcatactgatatacctcagaat

SEQ ID NO: 27944 - DNA, 96 bp, Aspergillus turcosus
  misc_feature: 91
atcaacttaccataacaaatcataagaactgccacagtccataaggataatttacagggatcttccaaccttattaatgcatttaaccatcctaat

SEQ ID NO: 27945 - DNA, 96 bp, Aspergillus turcosus
  misc_feature: 90
tgataaattcgagaacagaataaatcggaagcagatagggatgaaggaagaagaaagatagagaaaggagaaagagtagaaaaagtcgaaaagtcg

SEQ ID NO: 27946 - DNA, 96 bp, Aspergillus turcosus
  misc_feature: 90
atgaatatattaaatatttatgctacaaatttcaacaatgaaacaacaattagtgcaaagaaaaattgaaataatcacaaaaattaaaaatggtca

SEQ ID NO: 27947 - DNA, 96 bp, Aspergillus turcosus
  misc_feature: 90
tgaatgtataaaaactcaaggatgtatcgataaaataaaggaaatgtaaagaatagagggatttccttcacctaataaagatattagacctatagg

SEQ ID NO: 27948 - DNA, 96 bp, Aspergillus turcosus
  misc_feature: 90
taattgaccacctaattctggtagttttgtaccagaaatatcgataggaggttcacctggttcaggtggaccaactggtccaccttatgattttca

SEQ ID NO: 27949 - DNA, 96 bp, Aspergillus turcosus
  misc_feature: 90
tagacttattatttttagttctagctagactagctaaagagtagtaattttagcactggctaagcccattaaggggtaataattttaatactagtt

SEQ ID NO: 27950 - DNA, 96 bp, Aspergillus turcosus
  misc_feature: 90
gtgataaattcgagaacagaataaatcggaagcagatagggatgaaggaagaagaaagatagagaaaggagaaagagtagaaaaagtcgaaaagtc

SEQ ID NO: 27951 - DNA, 96 bp, Aspergillus turcosus
  misc_feature: 90
gatcggtgatctcattcttcatttctcattccatgatttccatccatcattccccctttcttcccatctaaatctctctcactattcccagttggg

SEQ ID NO: 27952 - DNA, 96 bp, Aspergillus turcosus
  misc_feature: 90
gacttattatttttagttctagctagactagctaaagagtagtaattttagcactggctaagcccattaaggggtaataattttaatactagttag

SEQ ID NO: 27953 - DNA, 96 bp, Aspergillus turcosus
  misc_feature: 90
gactagctaaagagtagtaattttagcactggctaagcccattaaggggtaataattttaatactagttagggacacctaatttagaaaagaaagg

SEQ ID NO: 27954 - DNA, 96 bp, Aspergillus turcosus
  misc_feature: 90
catgaatatattaaatatttatgctacaaatttcaacaatgaaacaacaattagtgcaaagaaaaattgaaataatcacaaaaattaaaaatggtc

SEQ ID NO: 27955 - DNA, 96 bp, Aspergillus turcosus
  misc_feature: 90
aaatcggaagcagatagggatgaaggaagaagaaagatagagaaaggagaaagagtagaaaaagtcgaaaagtcgaagaagactggcgcaacaaag

SEQ ID NO: 27956 - DNA, 96 bp, Aspergillus turcosus
  misc_feature: 90
ctagctaaagagtagtaattttagcactggctaagcccattaaggggtaataattttaatactagttagggacacctaatttagaaaagaaagggg

SEQ ID NO: 27957 - DNA, 96 bp, Aspergillus turcosus
  misc_feature: 90
aataaagctgtctaacaatacatttctcttataacactgtctcaataacatggatgttacttttccttaaaccccccataatgttacgttctcatg

SEQ ID NO: 27958 - DNA, 96 bp, Aspergillus turcosus
  misc_feature: 90
atactaaagatctagtagaaggtgctttttgcctattcttttaataagatgaagctggtataggaatgtgatatcgttggtgaacatatggctttg

SEQ ID NO: 27959 - DNA, 96 bp, Aspergillus turcosus
  misc_feature: 90
aattgaccacctaattctggtagttttgtaccagaaatatcgataggaggttcacctggttcaggtggaccaactggtccaccttatgattttcat

SEQ ID NO: 27960 - DNA, 96 bp, Aspergillus turcosus
  misc_feature: 90
actatactaaagatctagtagaaggtgctttttgcctattcttttaataagatgaagctggtataggaatgtgatatcgttggtgaacatatggct

SEQ ID NO: 27961 - DNA, 96 bp, Aspergillus turcosus
  misc_feature: 89
tggaacaaagagaaaatataaatattcttggtcgacaattactaagaaacggttatctacgataattaaaattttatattatatttcatattaaaa

SEQ ID NO: 27962 - DNA, 96 bp, Aspergillus turcosus
  misc_feature: 89
gtggaacaaagagaaaatataaatattcttggtcgacaattactaagaaacggttatctacgataattaaaattttatattatatttcatattaaa

SEQ ID NO: 27963 - DNA, 96 bp, Aspergillus turcosus
  misc_feature: 89
ttcaatcaacttaccataacaaatcataagaactgccacagtccataaggataatttacagggatcttccaaccttattaatgcatttaaccatcc

SEQ ID NO: 27964 - DNA, 96 bp, Aspergillus turcosus
  misc_feature: 89
tcaatcaacttaccataacaaatcataagaactgccacagtccataaggataatttacagggatcttccaaccttattaatgcatttaaccatcct

SEQ ID NO: 27965 - DNA, 96 bp, Aspergillus turcosus
  misc_feature: 89
tatataattgaccacctaattctggtagttttgtaccagaaatatcgataggaggttcacctggttcaggtggaccaactggtccaccttatgatt

SEQ ID NO: 27966 - DNA, 96 bp, Aspergillus turcosus
  misc_feature: 89
caatcaacttaccataacaaatcataagaactgccacagtccataaggataatttacagggatcttccaaccttattaatgcatttaaccatccta

SEQ ID NO: 27967 - DNA, 96 bp, Aspergillus turcosus
  misc_feature: 89
agacttattatttttagttctagctagactagctaaagagtagtaattttagcactggctaagcccattaaggggtaataattttaatactagtta

SEQ ID NO: 27968 - DNA, 96 bp, Aspergillus turcosus
  misc_feature: 89
accgtttcttagtaattgtcgaccaagaatatttatattttctctttgttccactatccttattctatttatctcatactgatatacctcagaatc

SEQ ID NO: 27969 - DNA, 96 bp, Aspergillus turcosus
  misc_feature: 89
gatgtgtgtacggcacgggtgggccacgctgatatatgtcgggacgccccgtcaagcgaccggcagcctccgtactgttcgcgcgcgcgggtcagt

SEQ ID NO: 27970 - DNA, 96 bp, Aspergillus turcosus
  misc_feature: 89
aagagaatagacttactatttttagccctagtcaggctaactaaaaagcagcaattttagctctagctaagtctactagggaggtaataatttcag

SEQ ID NO: 27971 - DNA, 96 bp, Aspergillus turcosus
  misc_feature: 89
ataaggatagtggaacaaagagaaaatataaatattcttggtcgacaattactaagaaacggttatctacgataattaaaattttatattatattt

SEQ ID NO: 27972 - DNA, 96 bp, Aspergillus turcosus
  misc_feature: 89
aataaggatagtggaacaaagagaaaatataaatattcttggtcgacaattactaagaaacggttatctacgataattaaaattttatattatatt

SEQ ID NO: 27973 - DNA, 96 bp, Aspergillus turcosus
  misc_feature: 88
gcagtgataaattcgagaacagaataaatcggaagcagatagggatgaaggaagaagaaagatagagaaaggagaaagagtagaaaaagtcgaaaa

SEQ ID NO: 27974 - DNA, 96 bp, Aspergillus turcosus
  misc_feature: 88
tttactaccttctaatctagcaaaatatttatgatatgtactatcaatatccacctttttaacaccatcacgttcagaatcattataaatagttaa

SEQ ID NO: 27975 - DNA, 96 bp, Aspergillus turcosus
  misc_feature: 88
ttactaccttctaatctagcaaaatatttatgatatgtactatcaatatccacctttttaacaccatcacgttcagaatcattataaatagttaaa

SEQ ID NO: 27976 - DNA, 96 bp, Aspergillus turcosus
  misc_feature: 88
tgtgatgtgtgtacggcacgggtgggccacgctgatatatgtcgggacgccccgtcaagcgaccggcagcctccgtactgttcgcgcgcgcgggtc

SEQ ID NO: 27977 - DNA, 96 bp, Aspergillus turcosus
  misc_feature: 88
tataattgaccacctaattctggtagttttgtaccagaaatatcgataggaggttcacctggttcaggtggaccaactggtccaccttatgatttt

SEQ ID NO: 27978 - DNA, 96 bp, Aspergillus turcosus
  misc_feature: 88
tactaaagatctagtagaaggtgctttttgcctattcttttaataagatgaagctggtataggaatgtgatatcgttggtgaacatatggctttgg

SEQ ID NO: 27979 - DNA, 96 bp, Aspergillus turcosus
  misc_feature: 88
ctaaagatctagtagaaggtgctttttgcctattcttttaataagatgaagctggtataggaatgtgatatcgttggtgaacatatggctttggta

SEQ ID NO: 27980 - DNA, 96 bp, Aspergillus turcosus
  misc_feature: 88
taaggatagtggaacaaagagaaaatataaatattcttggtcgacaattactaagaaacggttatctacgataattaaaattttatattatatttc

SEQ ID NO: 27981 - DNA, 96 bp, Aspergillus turcosus
  misc_feature: 88
gatagtggaacaaagagaaaatataaatattcttggtcgacaattactaagaaacggttatctacgataattaaaattttatattatatttcatat

SEQ ID NO: 27982 - DNA, 96 bp, Aspergillus turcosus
  misc_feature: 88
gactgacccgcgcgcgcgaacagtacggaggctgccggtcgcttgacggggcgtcccgacatatatcagcgtggcccacccgtgccgtacacacat

SEQ ID NO: 27983 - DNA, 96 bp, Aspergillus turcosus
  misc_feature: 88
ataattgaccacctaattctggtagttttgtaccagaaatatcgataggaggttcacctggttcaggtggaccaactggtccaccttatgattttc

SEQ ID NO: 27984 - DNA, 96 bp, Aspergillus turcosus
  misc_feature: 88
cagtgataaattcgagaacagaataaatcggaagcagatagggatgaaggaagaagaaagatagagaaaggagaaagagtagaaaaagtcgaaaag

SEQ ID NO: 27985 - DNA, 96 bp, Aspergillus turcosus
  misc_feature: 88
atgtgatgtgtgtacggcacgggtgggccacgctgatatatgtcgggacgccccgtcaagcgaccggcagcctccgtactgttcgcgcgcgcgggt

SEQ ID NO: 27986 - DNA, 96 bp, Aspergillus turcosus
  misc_feature: 88
atagtggaacaaagagaaaatataaatattcttggtcgacaattactaagaaacggttatctacgataattaaaattttatattatatttcatatt

SEQ ID NO: 27987 - DNA, 96 bp, Aspergillus turcosus
  misc_feature: 88
atagacttattatttttagttctagctagactagctaaagagtagtaattttagcactggctaagcccattaaggggtaataattttaatactagt

SEQ ID NO: 27988 - DNA, 96 bp, Aspergillus turcosus
  misc_feature: 88
ataaagctgtctaacaatacatttctcttataacactgtctcaataacatggatgttacttttccttaaaccccccataatgttacgttctcatgt

SEQ ID NO: 27989 - DNA, 96 bp, Aspergillus turcosus
  misc_feature: 88
actaaagatctagtagaaggtgctttttgcctattcttttaataagatgaagctggtataggaatgtgatatcgttggtgaacatatggctttggt

SEQ ID NO: 27990 - DNA, 96 bp, Aspergillus turcosus
  misc_feature: 87
cagaaaacgcagtgataaattcgagaacagaataaatcggaagcagatagggatgaaggaagaagaaagatagagaaaggagaaagagtagaaaaa

SEQ ID NO: 27991 - DNA, 96 bp, Aspergillus turcosus
  misc_feature: 87
ttttactaccttctaatctagcaaaatatttatgatatgtactatcaatatccacctttttaacaccatcacgttcagaatcattataaatagtta

SEQ ID NO: 27992 - DNA, 96 bp, Aspergillus turcosus
  misc_feature: 87
tttcttagtaattgtcgaccaagaatatttatattttctctttgttccactatccttattctatttatctcatactgatatacctcagaatctaat

SEQ ID NO: 27993 - DNA, 96 bp, Aspergillus turcosus
  misc_feature: 87
ggactgacccgcgcgcgcgaacagtacggaggctgccggtcgcttgacggggcgtcccgacatatatcagcgtggcccacccgtgccgtacacaca

SEQ ID NO: 27994 - DNA, 96 bp, Aspergillus turcosus
  misc_feature: 87
ggatagtggaacaaagagaaaatataaatattcttggtcgacaattactaagaaacggttatctacgataattaaaattttatattatatttcata

SEQ ID NO: 27995 - DNA, 96 bp, Aspergillus turcosus
  misc_feature: 87
taaatagaataaggatagtggaacaaagagaaaatataaatattcttggtcgacaattactaagaaacggttatctacgataattaaaattttata

SEQ ID NO: 27996 - DNA, 96 bp, Aspergillus turcosus
  misc_feature: 87
tagtggaacaaagagaaaatataaatattcttggtcgacaattactaagaaacggttatctacgataattaaaattttatattatatttcatatta

SEQ ID NO: 27997 - DNA, 96 bp, Aspergillus turcosus
  misc_feature: 87
taaagctgtctaacaatacatttctcttataacactgtctcaataacatggatgttacttttccttaaaccccccataatgttacgttctcatgta

SEQ ID NO: 27998 - DNA, 96 bp, Aspergillus turcosus
  misc_feature: 87
attcaatcaacttaccataacaaatcataagaactgccacagtccataaggataatttacagggatcttccaaccttattaatgcatttaaccatc

SEQ ID NO: 27999 - DNA, 96 bp, Aspergillus turcosus
  misc_feature: 87
agaaaacgcagtgataaattcgagaacagaataaatcggaagcagatagggatgaaggaagaagaaagatagagaaaggagaaagagtagaaaaag

SEQ ID NO: 28000 - DNA, 96 bp, Aspergillus turcosus
  misc_feature: 87
ctcaataacatggatgttacttttccttaaaccccccataatgttacgttctcatgtatggtattatatcattcttgcacctctggttcccccagt

SEQ ID NO: 28001 - DNA, 96 bp, Aspergillus turcosus
  misc_feature: 87
ataaatagaataaggatagtggaacaaagagaaaatataaatattcttggtcgacaattactaagaaacggttatctacgataattaaaattttat

SEQ ID NO: 28002 - DNA, 96 bp, Aspergillus turcosus
  misc_feature: 87
agtgataaattcgagaacagaataaatcggaagcagatagggatgaaggaagaagaaagatagagaaaggagaaagagtagaaaaagtcgaaaagt

SEQ ID NO: 28003 - DNA, 96 bp, Aspergillus turcosus
  misc_feature: 86
tttttactaccttctaatctagcaaaatatttatgatatgtactatcaatatccacctttttaacaccatcacgttcagaatcattataaatagtt

SEQ ID NO: 28004 - DNA, 96 bp, Aspergillus turcosus
  misc_feature: 86
gcagaaaacgcagtgataaattcgagaacagaataaatcggaagcagatagggatgaaggaagaagaaagatagagaaaggagaaagagtagaaaa

SEQ ID NO: 28005 - DNA, 96 bp, Aspergillus turcosus
  misc_feature: 86
tagactagctaaagagtagtaattttagcactggctaagcccattaaggggtaataattttaatactagttagggacacctaatttagaaaagaaa

SEQ ID NO: 28006 - DNA, 96 bp, Aspergillus turcosus
  misc_feature: 86
cgcagtgataaattcgagaacagaataaatcggaagcagatagggatgaaggaagaagaaagatagagaaaggagaaagagtagaaaaagtcgaaa

SEQ ID NO: 28007 - DNA, 96 bp, Aspergillus turcosus
  misc_feature: 86
acgcagtgataaattcgagaacagaataaatcggaagcagatagggatgaaggaagaagaaagatagagaaaggagaaagagtagaaaaagtcgaa

SEQ ID NO: 28008 - DNA, 96 bp, Aspergillus turcosus
  misc_feature: 86
ttatttttagttctagctagactagctaaagagtagtaattttagcactggctaagcccattaaggggtaataattttaatactagttagggacac

SEQ ID NO: 28009 - DNA, 96 bp, Aspergillus turcosus
  misc_feature: 86
ttatagggttatctaactactgttgtatgcccatagtcttgtggtgcttgcctagtgtgtcatgtgacatttgcacttcatatcatagcttagctt

SEQ ID NO: 28010 - DNA, 96 bp, Aspergillus turcosus
  misc_feature: 86
agataattcaatcaacttaccataacaaatcataagaactgccacagtccataaggataatttacagggatcttccaaccttattaatgcatttaa

SEQ ID NO: 28011 - DNA, 96 bp, Aspergillus turcosus
  misc_feature: 86
tataggttttctttatctttggtttatctagtattcccatgcttaagggtagaggtgataagcattttcctttacccttatcttatatatcaacca

SEQ ID NO: 28012 - DNA, 96 bp, Aspergillus turcosus
  misc_feature: 86
tgatgtgtgtacggcacgggtgggccacgctgatatatgtcgggacgccccgtcaagcgaccggcagcctccgtactgttcgcgcgcgcgggtcag

SEQ ID NO: 28013 - DNA, 96 bp, Aspergillus turcosus
  misc_feature: 86
gctagactagctaaagagtagtaattttagcactggctaagcccattaaggggtaataattttaatactagttagggacacctaatttagaaaaga

SEQ ID NO: 28014 - DNA, 96 bp, Aspergillus turcosus
  misc_feature: 86
tctaatctagcaaaatatttatgatatgtactatcaatatccacctttttaacaccatcacgttcagaatcattataaatagttaaatatgtatga

SEQ ID NO: 28015 - DNA, 96 bp, Aspergillus turcosus
  misc_feature: 86
aacgcagtgataaattcgagaacagaataaatcggaagcagatagggatgaaggaagaagaaagatagagaaaggagaaagagtagaaaaagtcga

SEQ ID NO: 28016 - DNA, 96 bp, Aspergillus turcosus
  misc_feature: 86
tatttttagttctagctagactagctaaagagtagtaattttagcactggctaagcccattaaggggtaataattttaatactagttagggacacc

SEQ ID NO: 28017 - DNA, 96 bp, Aspergillus turcosus
  misc_feature: 86
tattatttttagttctagctagactagctaaagagtagtaattttagcactggctaagcccattaaggggtaataattttaatactagttagggac

SEQ ID NO: 28018 - DNA, 96 bp, Aspergillus turcosus
  misc_feature: 86
taggttttctttatctttggtttatctagtattcccatgcttaagggtagaggtgataagcattttcctttacccttatcttatatatcaaccata

SEQ ID NO: 28019 - DNA, 96 bp, Aspergillus turcosus
  misc_feature: 86
tatagggttatctaactactgttgtatgcccatagtcttgtggtgcttgcctagtgtgtcatgtgacatttgcacttcatatcatagcttagcttt

SEQ ID NO: 28020 - DNA, 96 bp, Aspergillus turcosus
  misc_feature: 86
tactagaggtgtggaagaatagacttattatttttagttctagctagactagctaaagagtagtaattttagcactggctaagcccattaaggggt

SEQ ID NO: 28021 - DNA, 96 bp, Aspergillus turcosus
  misc_feature: 86
tactaccttctaatctagcaaaatatttatgatatgtactatcaatatccacctttttaacaccatcacgttcagaatcattataaatagttaaat

SEQ ID NO: 28022 - DNA, 96 bp, Aspergillus turcosus
  misc_feature: 86
taataaagctgtctaacaatacatttctcttataacactgtctcaataacatggatgttacttttccttaaaccccccataatgttacgttctcat

SEQ ID NO: 28023 - DNA, 96 bp, Aspergillus turcosus
  misc_feature: 86
atagggttatctaactactgttgtatgcccatagtcttgtggtgcttgcctagtgtgtcatgtgacatttgcacttcatatcatagcttagcttta

SEQ ID NO: 28024 - DNA, 96 bp, Aspergillus turcosus
  misc_feature: 86
taaagatctagtagaaggtgctttttgcctattcttttaataagatgaagctggtataggaatgtgatatcgttggtgaacatatggctttggtag

SEQ ID NO: 28025 - DNA, 96 bp, Aspergillus turcosus
  misc_feature: 86
ggtataggttttctttatctttggtttatctagtattcccatgcttaagggtagaggtgataagcattttcctttacccttatcttatatatcaac

SEQ ID NO: 28026 - DNA, 96 bp, Aspergillus turcosus
  misc_feature: 86
gataattcaatcaacttaccataacaaatcataagaactgccacagtccataaggataatttacagggatcttccaaccttattaatgcatttaac

SEQ ID NO: 28027 - DNA, 96 bp, Aspergillus turcosus
  misc_feature: 86
gtataggttttctttatctttggtttatctagtattcccatgcttaagggtagaggtgataagcattttcctttacccttatcttatatatcaacc

SEQ ID NO: 28028 - DNA, 96 bp, Aspergillus turcosus
  misc_feature: 86
ggttttctttatctttggtttatctagtattcccatgcttaagggtagaggtgataagcattttcctttacccttatcttatatatcaaccatatt

SEQ ID NO: 28029 - DNA, 96 bp, Aspergillus turcosus
  misc_feature: 86
ataattcaatcaacttaccataacaaatcataagaactgccacagtccataaggataatttacagggatcttccaaccttattaatgcatttaacc

SEQ ID NO: 28030 - DNA, 96 bp, Aspergillus turcosus
  misc_feature: 86
actatcaatatccacctttttaacaccatcacgttcagaatcattataaatagttaaatatgtatgaaaatcataaggtggaccagttggtccacc

SEQ ID NO: 28031 - DNA, 96 bp, Aspergillus turcosus
  misc_feature: 86
ggctgcatattgccaccatctctcgtcttcttcgttgccttttatcatcatttctccttttcctccttttttctttctctctttcttgggaggtct

SEQ ID NO: 28032 - DNA, 96 bp, Aspergillus turcosus
  misc_feature: 86
aaaacgcagtgataaattcgagaacagaataaatcggaagcagatagggatgaaggaagaagaaagatagagaaaggagaaagagtagaaaaagtc

SEQ ID NO: 28033 - DNA, 96 bp, Aspergillus turcosus
  misc_feature: 86
gaaaacgcagtgataaattcgagaacagaataaatcggaagcagatagggatgaaggaagaagaaagatagagaaaggagaaagagtagaaaaagt

SEQ ID NO: 28034 - DNA, 96 bp, Aspergillus turcosus
  misc_feature: 86
agctagactagctaaagagtagtaattttagcactggctaagcccattaaggggtaataattttaatactagttagggacacctaatttagaaaag

SEQ ID NO: 28035 - DNA, 96 bp, Aspergillus turcosus
  misc_feature: 86
agactagctaaagagtagtaattttagcactggctaagcccattaaggggtaataattttaatactagttagggacacctaatttagaaaagaaag

SEQ ID NO: 28036 - DNA, 96 bp, Aspergillus turcosus
  misc_feature: 86
aaacgcagtgataaattcgagaacagaataaatcggaagcagatagggatgaaggaagaagaaagatagagaaaggagaaagagtagaaaaagtcg

SEQ ID NO: 28037 - DNA, 96 bp, Aspergillus turcosus
  misc_feature: 86
ataggttttctttatctttggtttatctagtattcccatgcttaagggtagaggtgataagcattttcctttacccttatcttatatatcaaccat

SEQ ID NO: 28038 - DNA, 96 bp, Aspergillus turcosus
  misc_feature: 86
aattcaatcaacttaccataacaaatcataagaactgccacagtccataaggataatttacagggatcttccaaccttattaatgcatttaaccat

SEQ ID NO: 28039 - DNA, 96 bp, Aspergillus turcosus
  misc_feature: 86
aggttttctttatctttggtttatctagtattcccatgcttaagggtagaggtgataagcattttcctttacccttatcttatatatcaaccatat

SEQ ID NO: 28040 - DNA, 96 bp, Aspergillus turcosus
  misc_feature: 86
aacaatacatttctcttataacactgtctcaataacatggatgttacttttccttaaaccccccataatgttacgttctcatgtatggtattatat

SEQ ID NO: 28041 - DNA, 96 bp, Aspergillus turcosus
  misc_feature: 85
tttcttttttaagaaataataaatatggattattaataaactaaacagggaaaattaaattaatccattaatataatccaagagagaatgctgaca

SEQ ID NO: 28042 - DNA, 96 bp, Aspergillus turcosus
  misc_feature: 85
gtatgagataaatagaataaggatagtggaacaaagagaaaatataaatattcttggtcgacaattactaagaaacggttatctacgataattaaa

SEQ ID NO: 28043 - DNA, 96 bp, Aspergillus turcosus
  misc_feature: 85
gtttcttagtaattgtcgaccaagaatatttatattttctctttgttccactatccttattctatttatctcatactgatatacctcagaatctaa

SEQ ID NO: 28044 - DNA, 96 bp, Aspergillus turcosus
  misc_feature: 85
taattcaatcaacttaccataacaaatcataagaactgccacagtccataaggataatttacagggatcttccaaccttattaatgcatttaacca

SEQ ID NO: 28045 - DNA, 96 bp, Aspergillus turcosus
  misc_feature: 85
gtgatgtgtgtacggcacgggtgggccacgctgatatatgtcgggacgccccgtcaagcgaccggcagcctccgtactgttcgcgcgcgcgggtca

SEQ ID NO: 28046 - DNA, 96 bp, Aspergillus turcosus
  misc_feature: 85
aaagatctagtagaaggtgctttttgcctattcttttaataagatgaagctggtataggaatgtgatatcgttggtgaacatatggctttggtaga

SEQ ID NO: 28047 - DNA, 96 bp, Aspergillus turcosus
  misc_feature: 85
gaagtagaagactatactaaagatctagtagaaggtgctttttgcctattcttttaataagatgaagctggtataggaatgtgatatcgttggtga

SEQ ID NO: 28048 - DNA, 96 bp, Aspergillus turcosus
  misc_feature: 85
tcaacttaccataacaaatcataagaactgccacagtccataaggataatttacagggatcttccaaccttattaatgcatttaaccatcctaata

SEQ ID NO: 28049 - DNA, 96 bp, Aspergillus turcosus
  misc_feature: 85
tactatcaatatccacctttttaacaccatcacgttcagaatcattataaatagttaaatatgtatgaaaatcataaggtggaccagttggtccac

SEQ ID NO: 28050 - DNA, 96 bp, Aspergillus turcosus
  misc_feature: 85
gtttttactaccttctaatctagcaaaatatttatgatatgtactatcaatatccacctttttaacaccatcacgttcagaatcattataaatagt

SEQ ID NO: 28051 - DNA, 96 bp, Aspergillus turcosus
  misc_feature: 85
cggactgacccgcgcgcgcgaacagtacggaggctgccggtcgcttgacggggcgtcccgacatatatcagcgtggcccacccgtgccgtacacac

SEQ ID NO: 28052 - DNA, 96 bp, Aspergillus turcosus
  misc_feature: 85
aagatctagtagaaggtgctttttgcctattcttttaataagatgaagctggtataggaatgtgatatcgttggtgaacatatggctttggtagac

SEQ ID NO: 28053 - DNA, 96 bp, Aspergillus turcosus
  misc_feature: 85
aggtatatcagtatgagataaatagaataaggatagtggaacaaagagaaaatataaatattcttggtcgacaattactaagaaacggttatctac

SEQ ID NO: 28054 - DNA, 96 bp, Aspergillus turcosus
  misc_feature: 85
agatctagtagaaggtgctttttgcctattcttttaataagatgaagctggtataggaatgtgatatcgttggtgaacatatggctttggtagacc

SEQ ID NO: 28055 - DNA, 96 bp, Aspergillus turcosus
  misc_feature: 85
cactgtctcaataacatggatgttacttttccttaaaccccccataatgttacgttctcatgtatggtattatatcattcttgcacctctggttcc

SEQ ID NO: 28056 - DNA, 96 bp, Aspergillus turcosus
  misc_feature: 85
gctgcatattgccaccatctctcgtcttcttcgttgccttttatcatcatttctccttttcctccttttttctttctctctttcttgggaggtctt

SEQ ID NO: 28057 - DNA, 96 bp, Aspergillus turcosus
  misc_feature: 85
acactgtctcaataacatggatgttacttttccttaaaccccccataatgttacgttctcatgtatggtattatatcattcttgcacctctggttc

SEQ ID NO: 28058 - DNA, 96 bp, Aspergillus turcosus
  misc_feature: 85
acttaccataacaaatcataagaactgccacagtccataaggataatttacagggatcttccaaccttattaatgcatttaaccatcctaataaag

SEQ ID NO: 28059 - DNA, 96 bp, Aspergillus turcosus
  misc_feature: 85
ctgtgagatgatgacactagataagtagtaagaatcagacttccaagctaattttgacacgtagatacagaagaagtagaagactatactaaagat

SEQ ID NO: 28060 - DNA, 96 bp, Aspergillus turcosus
  misc_feature: 85
ccgtttcttagtaattgtcgaccaagaatatttatattttctctttgttccactatccttattctatttatctcatactgatatacctcagaatct

SEQ ID NO: 28061 - DNA, 96 bp, Aspergillus turcosus
  misc_feature: 85
aaatagaataaggatagtggaacaaagagaaaatataaatattcttggtcgacaattactaagaaacggttatctacgataattaaaattttatat

SEQ ID NO: 28062 - DNA, 96 bp, Aspergillus turcosus
  misc_feature: 85
aacactgtctcaataacatggatgttacttttccttaaaccccccataatgttacgttctcatgtatggtattatatcattcttgcacctctggtt

SEQ ID NO: 28063 - DNA, 96 bp, Aspergillus turcosus
  misc_feature: 84
ctagactagctaaagagtagtaattttagcactggctaagcccattaaggggtaataattttaatactagttagggacacctaatttagaaaagaa

SEQ ID NO: 28064 - DNA, 96 bp, Aspergillus turcosus
  misc_feature: 84
agtggaacaaagagaaaatataaatattcttggtcgacaattactaagaaacggttatctacgataattaaaattttatattatatttcatattaa

SEQ ID NO: 28065 - DNA, 96 bp, Aspergillus turcosus
  misc_feature: 84
attatttttagttctagctagactagctaaagagtagtaattttagcactggctaagcccattaaggggtaataattttaatactagttagggaca

SEQ ID NO: 28066 - DNA, 96 bp, Aspergillus turcosus
  misc_feature: 84
gtactatcaatatccacctttttaacaccatcacgttcagaatcattataaatagttaaatatgtatgaaaatcataaggtggaccagttggtcca

SEQ ID NO: 28067 - DNA, 96 bp, Aspergillus turcosus
  misc_feature: 84
aaggatagtggaacaaagagaaaatataaatattcttggtcgacaattactaagaaacggttatctacgataattaaaattttatattatatttca

SEQ ID NO: 28068 - DNA, 96 bp, Aspergillus turcosus
  misc_feature: 84
aaagagtagtaattttagcactggctaagcccattaaggggtaataattttaatactagttagggacacctaatttagaaaagaaaggggataata

SEQ ID NO: 28069 - DNA, 96 bp, Aspergillus turcosus
  misc_feature: 84
tatgtgatgtgtgtacggcacgggtgggccacgctgatatatgtcgggacgccccgtcaagcgaccggcagcctccgtactgttcgcgcgcgcggg

SEQ ID NO: 28070 - DNA, 96 bp, Aspergillus turcosus
  misc_feature: 84
cgtttcttagtaattgtcgaccaagaatatttatattttctctttgttccactatccttattctatttatctcatactgatatacctcagaatcta

SEQ ID NO: 28071 - DNA, 96 bp, Aspergillus turcosus
  misc_feature: 84
aataacatggatgttacttttccttaaaccccccataatgttacgttctcatgtatggtattatatcattcttgcacctctggttcccccagtcta

SEQ ID NO: 28072 - DNA, 96 bp, Aspergillus turcosus
  misc_feature: 84
ataacatggatgttacttttccttaaaccccccataatgttacgttctcatgtatggtattatatcattcttgcacctctggttcccccagtctac

SEQ ID NO: 28073 - DNA, 96 bp, Aspergillus turcosus
  misc_feature: 84
atagatatgatcggtgatctcattcttcatttctcattccatgatttccatccatcattccccctttcttcccatctaaatctctctcactattcc

SEQ ID NO: 28074 - DNA, 96 bp, Aspergillus turcosus
  misc_feature: 84
ggaagaggggaatgaagcagaaggacagaaaaagaaaagaaaacagaagagaagagagaagagagaagcaggagacaatcaggaactcccttagtt

SEQ ID NO: 28075 - DNA, 96 bp, Aspergillus turcosus
  misc_feature: 84
gagaggaagaggggaatgaagcagaaggacagaaaaagaaaagaaaacagaagagaagagagaagagagaagcaggagacaatcaggaactccctt

SEQ ID NO: 28076 - DNA, 96 bp, Aspergillus turcosus
  misc_feature: 84
agtttttactaccttctaatctagcaaaatatttatgatatgtactatcaatatccacctttttaacaccatcacgttcagaatcattataaatag

SEQ ID NO: 28077 - DNA, 96 bp, Aspergillus turcosus
  misc_feature: 84
ctatggagtagatagatatgatcggtgatctcattcttcatttctcattccatgatttccatccatcattccccctttcttcccatctaaatctct

SEQ ID NO: 28078 - DNA, 96 bp, Aspergillus turcosus
  misc_feature: 84
caataacatggatgttacttttccttaaaccccccataatgttacgttctcatgtatggtattatatcattcttgcacctctggttcccccagtct

SEQ ID NO: 28079 - DNA, 96 bp, Aspergillus turcosus
  misc_feature: 84
aggatagtggaacaaagagaaaatataaatattcttggtcgacaattactaagaaacggttatctacgataattaaaattttatattatatttcat

SEQ ID NO: 28080 - DNA, 96 bp, Aspergillus turcosus
  misc_feature: 84
acatggatgttacttttccttaaaccccccataatgttacgttctcatgtatggtattatatcattcttgcacctctggttcccccagtctactat

SEQ ID NO: 28081 - DNA, 96 bp, Aspergillus turcosus
  misc_feature: 83
ttttctttatctttggtttatctagtattcccatgcttaagggtagaggtgataagcattttcctttacccttatcttatatatcaaccatattgt

SEQ ID NO: 28082 - DNA, 96 bp, Aspergillus turcosus
  misc_feature: 83
caacttaccataacaaatcataagaactgccacagtccataaggataatttacagggatcttccaaccttattaatgcatttaaccatcctaataa

SEQ ID NO: 28083 - DNA, 96 bp, Aspergillus turcosus
  misc_feature: 83
tgatcaatgagagtgaggagcagcagcaacagcaacaacagcggcagtacgaggaggagcaggaggagcggttccaggatgaaggggatgttagtc

SEQ ID NO: 28084 - DNA, 96 bp, Aspergillus turcosus
  misc_feature: 83
tgaccggactgacccgcgcgcgcgaacagtacggaggctgccggtcgcttgacggggcgtcccgacatatatcagcgtggcccacccgtgccgtac

SEQ ID NO: 28085 - DNA, 96 bp, Aspergillus turcosus
  misc_feature: 83
tcaataacatggatgttacttttccttaaaccccccataatgttacgttctcatgtatggtattatatcattcttgcacctctggttcccccagtc

SEQ ID NO: 28086 - DNA, 96 bp, Aspergillus turcosus
  misc_feature: 83
tagtttttactaccttctaatctagcaaaatatttatgatatgtactatcaatatccacctttttaacaccatcacgttcagaatcattataaata

SEQ ID NO: 28087 - DNA, 96 bp, Aspergillus turcosus
  misc_feature: 83
actaccttctaatctagcaaaatatttatgatatgtactatcaatatccacctttttaacaccatcacgttcagaatcattataaatagttaaata

SEQ ID NO: 28088 - DNA, 96 bp, Aspergillus turcosus
  misc_feature: 83
aacatggatgttacttttccttaaaccccccataatgttacgttctcatgtatggtattatatcattcttgcacctctggttcccccagtctacta

SEQ ID NO: 28089 - DNA, 96 bp, Aspergillus turcosus
  misc_feature: 83
gaggtatatcagtatgagataaatagaataaggatagtggaacaaagagaaaatataaatattcttggtcgacaattactaagaaacggttatcta

SEQ ID NO: 28090 - DNA, 96 bp, Aspergillus turcosus
  misc_feature: 83
taacatggatgttacttttccttaaaccccccataatgttacgttctcatgtatggtattatatcattcttgcacctctggttcccccagtctact

SEQ ID NO: 28091 - DNA, 96 bp, Aspergillus turcosus
  misc_feature: 83
gataaatagaataaggatagtggaacaaagagaaaatataaatattcttggtcgacaattactaagaaacggttatctacgataattaaaatttta

SEQ ID NO: 28092 - DNA, 96 bp, Aspergillus turcosus
  misc_feature: 83
gttttctttatctttggtttatctagtattcccatgcttaagggtagaggtgataagcattttcctttacccttatcttatatatcaaccatattg

SEQ ID NO: 28093 - DNA, 96 bp, Aspergillus turcosus
  misc_feature: 83
gttgagatgctggctgccttcttcatggagagagggtgtgggagagaaggaaagcaaagagaagagaagagaagagacataaggtagtagccagcc

SEQ ID NO: 28094 - DNA, 96 bp, Aspergillus turcosus
  misc_feature: 83
gtactagaggtgtggaagaatagacttattatttttagttctagctagactagctaaagagtagtaattttagcactggctaagcccattaagggg

SEQ ID NO: 28095 - DNA, 96 bp, Aspergillus turcosus
  misc_feature: 83
ggtaggctataactaccctatataagagctagctactaatctctctaatatagcagtactagaggtgtggaagaatagacttattatttttagttc

SEQ ID NO: 28096 - DNA, 96 bp, Aspergillus turcosus
  misc_feature: 83
cttaccataacaaatcataagaactgccacagtccataaggataatttacagggatcttccaaccttattaatgcatttaaccatcctaataaagc

SEQ ID NO: 28097 - DNA, 96 bp, Aspergillus turcosus
  misc_feature: 83
gaggaagaggggaatgaagcagaaggacagaaaaagaaaagaaaacagaagagaagagagaagagagaagcaggagacaatcaggaactcccttag

SEQ ID NO: 28098 - DNA, 96 bp, Aspergillus turcosus
  misc_feature: 83
cttctaatctagcaaaatatttatgatatgtactatcaatatccacctttttaacaccatcacgttcagaatcattataaatagttaaatatgtat

SEQ ID NO: 28099 - DNA, 96 bp, Aspergillus turcosus
  misc_feature: 83
aggaagaggggaatgaagcagaaggacagaaaaagaaaagaaaacagaagagaagagagaagagagaagcaggagacaatcaggaactcccttagt

SEQ ID NO: 28100 - DNA, 96 bp, Aspergillus turcosus
  misc_feature: 82
tatgagataaatagaataaggatagtggaacaaagagaaaatataaatattcttggtcgacaattactaagaaacggttatctacgataattaaaa

SEQ ID NO: 28101 - DNA, 96 bp, Fusarium azukicola
  misc_feature: 4075
ttctctcctttcttaaccttccttacttctctcctttcttaaccttccttacttctctcctttcttaaccttccttacttctctcctttcttaacc

SEQ ID NO: 28102 - DNA, 96 bp, Fusarium azukicola
  misc_feature: 4075
ggagagaagtaaggaaggttaagaaaggagagaagtaaggaaggttaagaaaggagagaagtaaggaaggttaagaaaggagagaagtaaggaagg

SEQ ID NO: 28103 - DNA, 96 bp, Fusarium azukicola
  misc_feature: 3999
aggagagaagtaaggaaggttaagaaaggagagaagtaaggaaggttaagaaaggagagaagtaaggaaggttaagaaaggagagaagtaaggaag

SEQ ID NO: 28104 - DNA, 96 bp, Fusarium azukicola
  misc_feature: 3730
cttctctcctttcttaaccttccttacttctctcctttcttaaccttccttacttctctcctttcttaaccttccttacttctctcctttcttaac

SEQ ID NO: 28105 - DNA, 96 bp, Fusarium azukicola
  misc_feature: 3671
aaggagagaagtaaggaaggttaagaaaggagagaagtaaggaaggttaagaaaggagagaagtaaggaaggttaagaaaggagagaagtaaggaa

SEQ ID NO: 28106 - DNA, 96 bp, Fusarium azukicola
  misc_feature: 3642
ggaaggttaagaaaggagagaagtaaggaaggttaagaaaggagagaagtaaggaaggttaagaaaggagagaagtaaggaaggttaagaaaggag

SEQ ID NO: 28107 - DNA, 96 bp, Fusarium azukicola
  misc_feature: 3642
ctctcctttcttaaccttccttacttctctcctttcttaaccttccttacttctctcctttcttaaccttccttacttctctcctttcttaacctt

SEQ ID NO: 28108 - DNA, 96 bp, Fusarium azukicola
  misc_feature: 3606
tatagtgatatatccctataaaccatatattatattatagaatttttactctatttttaggtatatttacctaacctatagctactataggtagct

SEQ ID NO: 28109 - DNA, 96 bp, Fusarium azukicola
  misc_feature: 3561
tctctcctttcttaaccttccttacttctctcctttcttaaccttccttacttctctcctttcttaaccttccttacttctctcctttcttaacct

SEQ ID NO: 28110 - DNA, 96 bp, Fusarium azukicola
  misc_feature: 3553
tccttacttctctcctttcttaaccttccttacttctctcctttcttaaccttccttacttctctcctttcttaaccttccttacttctctccttt

SEQ ID NO: 28111 - DNA, 96 bp, Fusarium azukicola
  misc_feature: 3531
agagaagtaaggaaggttaagaaaggagagaagtaaggaaggttaagaaaggagagaagtaaggaaggttaagaaaggagagaagtaaggaaggtt

SEQ ID NO: 28112 - DNA, 96 bp, Fusarium azukicola
  misc_feature: 3511
gaaggttaagaaaggagagaagtaaggaaggttaagaaaggagagaagtaaggaaggttaagaaaggagagaagtaaggaaggttaagaaaggaga

SEQ ID NO: 28113 - DNA, 96 bp, Fusarium azukicola
  misc_feature: 3499
atattaccaactatagtgatatatccctataaaccatatattatattatagaatttttactctatttttaggtatatttacctaacctatagctac

SEQ ID NO: 28114 - DNA, 96 bp, Fusarium azukicola
  misc_feature: 3454
ttatattaccaactatagtgatatatccctataaaccatatattatattatagaatttttactctatttttaggtatatttacctaacctatagct

SEQ ID NO: 28115 - DNA, 96 bp, Fusarium azukicola
  misc_feature: 3444
ccttacttctctcctttcttaaccttccttacttctctcctttcttaaccttccttacttctctcctttcttaaccttccttacttctctcctttc

SEQ ID NO: 28116 - DNA, 96 bp, Fusarium azukicola
  misc_feature: 3433
tattaccaactatagtgatatatccctataaaccatatattatattatagaatttttactctatttttaggtatatttacctaacctatagctact

SEQ ID NO: 28117 - DNA, 96 bp, Fusarium azukicola
  misc_feature: 3414
attatattaccaactatagtgatatatccctataaaccatatattatattatagaatttttactctatttttaggtatatttacctaacctatagc

SEQ ID NO: 28118 - DNA, 96 bp, Fusarium azukicola
  misc_feature: 3401
tctatattatattaccaactatagtgatatatccctataaaccatatattatattatagaatttttactctatttttaggtatatttacctaacct

SEQ ID NO: 28119 - DNA, 96 bp, Fusarium azukicola
  misc_feature: 3390
tatattaccaactatagtgatatatccctataaaccatatattatattatagaatttttactctatttttaggtatatttacctaacctatagcta

SEQ ID NO: 28120 - DNA, 96 bp, Fusarium azukicola
  misc_feature: 3381
cttacttctctcctttcttaaccttccttacttctctcctttcttaaccttccttacttctctcctttcttaaccttccttacttctctcctttct

SEQ ID NO: 28121 - DNA, 96 bp, Fusarium azukicola
  misc_feature: 3362
agaagtaaggaaggttaagaaaggagagaagtaaggaaggttaagaaaggagagaagtaaggaaggttaagaaaggagagaagtaaggaaggttaa

SEQ ID NO: 28122 - DNA, 96 bp, Fusarium azukicola
  misc_feature: 3361
gagagaagtaaggaaggttaagaaaggagagaagtaaggaaggttaagaaaggagagaagtaaggaaggttaagaaaggagagaagtaaggaaggt

SEQ ID NO: 28123 - DNA, 96 bp, Fusarium azukicola
  misc_feature: 3342
ttacttctctcctttcttaaccttccttacttctctcctttcttaaccttccttacttctctcctttcttaaccttccttacttctctcctttctt

SEQ ID NO: 28124 - DNA, 96 bp, Fusarium azukicola
  misc_feature: 3326
acttctctcctttcttaaccttccttacttctctcctttcttaaccttccttacttctctcctttcttaaccttccttacttctctcctttcttaa

SEQ ID NO: 28125 - DNA, 96 bp, Fusarium azukicola
  misc_feature: 3325
aggaaggttaagaaaggagagaagtaaggaaggttaagaaaggagagaagtaaggaaggttaagaaaggagagaagtaaggaaggttaagaaagga

SEQ ID NO: 28126 - DNA, 96 bp, Fusarium azukicola
  misc_feature: 3300
gagaagtaaggaaggttaagaaaggagagaagtaaggaaggttaagaaaggagagaagtaaggaaggttaagaaaggagagaagtaaggaaggtta

SEQ ID NO: 28127 - DNA, 96 bp, Fusarium azukicola
  misc_feature: 3297
tattatattaccaactatagtgatatatccctataaaccatatattatattatagaatttttactctatttttaggtatatttacctaacctatag

SEQ ID NO: 28128 - DNA, 96 bp, Fusarium azukicola
  misc_feature: 3281
atattatattaccaactatagtgatatatccctataaaccatatattatattatagaatttttactctatttttaggtatatttacctaacctata

SEQ ID NO: 28129 - DNA, 96 bp, Fusarium azukicola
  misc_feature: 3274
tatattatattaccaactatagtgatatatccctataaaccatatattatattatagaatttttactctatttttaggtatatttacctaacctat

SEQ ID NO: 28130 - DNA, 96 bp, Fusarium azukicola
  misc_feature: 3250
ctatagtgatatatccctataaaccatatattatattatagaatttttactctatttttaggtatatttacctaacctatagctactataggtagc

SEQ ID NO: 28131 - DNA, 96 bp, Fusarium azukicola
  misc_feature: 3248
cctttcttaaccttccttacttctctcctttcttaaccttccttacttctctcctttcttaaccttccttacttctctcctttcttaaccttcctt

SEQ ID NO: 28132 - DNA, 96 bp, Fusarium azukicola
  misc_feature: 3224
attaccaactatagtgatatatccctataaaccatatattatattatagaatttttactctatttttaggtatatttacctaacctatagctacta

SEQ ID NO: 28133 - DNA, 96 bp, Fusarium azukicola
  misc_feature: 3213
tacttctctcctttcttaaccttccttacttctctcctttcttaaccttccttacttctctcctttcttaaccttccttacttctctcctttctta

SEQ ID NO: 28134 - DNA, 96 bp, Fusarium azukicola
  misc_feature: 3195
ctatattatattaccaactatagtgatatatccctataaaccatatattatattatagaatttttactctatttttaggtatatttacctaaccta

SEQ ID NO: 28135 - DNA, 96 bp, Fusarium azukicola
  misc_feature: 3145
ttctatattatattaccaactatagtgatatatccctataaaccatatattatattatagaatttttactctatttttaggtatatttacctaacc

SEQ ID NO: 28136 - DNA, 96 bp, Fusarium azukicola
  misc_feature: 3087
ttaccaactatagtgatatatccctataaaccatatattatattatagaatttttactctatttttaggtatatttacctaacctatagctactat

SEQ ID NO: 28137 - DNA, 96 bp, Fusarium azukicola
  misc_feature: 3087
gttctatattatattaccaactatagtgatatatccctataaaccatatattatattatagaatttttactctatttttaggtatatttacctaac

SEQ ID NO: 28138 - DNA, 96 bp, Fusarium azukicola
  misc_feature: 3074
actttgatgcattgatgacggcagtcatgaaggtctgtaggaacctttttaaccaattagaataatacccttaatatctagctacctatagtagct

SEQ ID NO: 28139 - DNA, 96 bp, Fusarium azukicola
  misc_feature: 3030
atgttctatattatattaccaactatagtgatatatccctataaaccatatattatattatagaatttttactctatttttaggtatatttaccta

SEQ ID NO: 28140 - DNA, 96 bp, Fusarium azukicola
  misc_feature: 2995
actatagtgatatatccctataaaccatatattatattatagaatttttactctatttttaggtatatttacctaacctatagctactataggtag

SEQ ID NO: 28141 - DNA, 96 bp, Fusarium azukicola
  misc_feature: 2975
agatattaagggtattattctaattggttaaaaaggttcctacagaccttcatgactgccgtcatcaatgcatcaaagtataataactgccgattg

SEQ ID NO: 28142 - DNA, 96 bp, Fusarium azukicola
  misc_feature: 2973
tgttctatattatattaccaactatagtgatatatccctataaaccatatattatattatagaatttttactctatttttaggtatatttacctaa

SEQ ID NO: 28143 - DNA, 96 bp, Fusarium azukicola
  misc_feature: 2964
ctttgatgcattgatgacggcagtcatgaaggtctgtaggaacctttttaaccaattagaataatacccttaatatctagctacctatagtagcta

SEQ ID NO: 28144 - DNA, 96 bp, Fusarium azukicola
  misc_feature: 2921
aactatagtgatatatccctataaaccatatattatattatagaatttttactctatttttaggtatatttacctaacctatagctactataggta

SEQ ID NO: 28145 - DNA, 96 bp, Fusarium azukicola
  misc_feature: 2920
tatttttaggtatatttacctaacctatagctactataggtagctagatattaagggtattattctaattggttaaaaaggttcctacagaccttc

SEQ ID NO: 28146 - DNA, 96 bp, Fusarium azukicola
  misc_feature: 2911
taatgttctatattatattaccaactatagtgatatatccctataaaccatatattatattatagaatttttactctatttttaggtatatttacc

SEQ ID NO: 28147 - DNA, 96 bp, Fusarium azukicola
  misc_feature: 2901
atattaagggtattattctaattggttaaaaaggttcctacagaccttcatgactgccgtcatcaatgcatcaaagtataataactgccgattggc

SEQ ID NO: 28148 - DNA, 96 bp, Fusarium azukicola
  misc_feature: 2878
atttttaggtatatttacctaacctatagctactataggtagctagatattaagggtattattctaattggttaaaaaggttcctacagaccttca

SEQ ID NO: 28149 - DNA, 96 bp, Fusarium azukicola
  misc_feature: 2878
aatgttctatattatattaccaactatagtgatatatccctataaaccatatattatattatagaatttttactctatttttaggtatatttacct

SEQ ID NO: 28150 - DNA, 96 bp, Fusarium azukicola
  misc_feature: 2844
tttcttaaccttccttacttctctcctttcttaaccttccttacttctctcctttcttaaccttccttacttctctcctttcttaaccttccttac

SEQ ID NO: 28151 - DNA, 96 bp, Fusarium azukicola
  misc_feature: 2816
ttaatgttctatattatattaccaactatagtgatatatccctataaaccatatattatattatagaatttttactctatttttaggtatatttac

SEQ ID NO: 28152 - DNA, 96 bp, Fusarium azukicola
  misc_feature: 2774
atagctactataggtagctagatattaagggtattattctaattggttaaaaaggttcctacagaccttcatgactgccgtcatcaatgcatcaaa

SEQ ID NO: 28153 - DNA, 96 bp, Fusarium azukicola
  misc_feature: 2718
ctttcttaaccttccttacttctctcctttcttaaccttccttacttctctcctttcttaaccttccttacttctctcctttcttaaccttcctta

SEQ ID NO: 28154 - DNA, 96 bp, Fusarium azukicola
  misc_feature: 2697
tttttaggtatatttacctaacctatagctactataggtagctagatattaagggtattattctaattggttaaaaaggttcctacagaccttcat

SEQ ID NO: 28155 - DNA, 96 bp, Fusarium azukicola
  misc_feature: 2681
gatattaagggtattattctaattggttaaaaaggttcctacagaccttcatgactgccgtcatcaatgcatcaaagtataataactgccgattgg

SEQ ID NO: 28156 - DNA, 96 bp, Fusarium azukicola
  misc_feature: 2651
cttaaccttccttacttctctcctttcttaaccttccttacttctctcctttcttaaccttccttacttctctcctttcttaaccttccttacttc

SEQ ID NO: 28157 - DNA, 96 bp, Fusarium azukicola
  misc_feature: 2645
cctaacctatagctactataggtagctagatattaagggtattattctaattggttaaaaaggttcctacagaccttcatgactgccgtcatcaat

SEQ ID NO: 28158 - DNA, 96 bp, Fusarium azukicola
  misc_feature: 2644
ttcttaaccttccttacttctctcctttcttaaccttccttacttctctcctttcttaaccttccttacttctctcctttcttaaccttccttact

SEQ ID NO: 28159 - DNA, 96 bp, Fusarium azukicola
  misc_feature: 2634
accaactatagtgatatatccctataaaccatatattatattatagaatttttactctatttttaggtatatttacctaacctatagctactatag

SEQ ID NO: 28160 - DNA, 96 bp, Fusarium azukicola
  misc_feature: 2622
taccaactatagtgatatatccctataaaccatatattatattatagaatttttactctatttttaggtatatttacctaacctatagctactata

SEQ ID NO: 28161 - DNA, 96 bp, Fusarium azukicola
  misc_feature: 2608
tgttaatgttctatattatattaccaactatagtgatatatccctataaaccatatattatattatagaatttttactctatttttaggtatattt

SEQ ID NO: 28162 - DNA, 96 bp, Fusarium azukicola
  misc_feature: 2599
tcttaaccttccttacttctctcctttcttaaccttccttacttctctcctttcttaaccttccttacttctctcctttcttaaccttccttactt

SEQ ID NO: 28163 - DNA, 96 bp, Fusarium azukicola
  misc_feature: 2598
gttaatgttctatattatattaccaactatagtgatatatccctataaaccatatattatattatagaatttttactctatttttaggtatattta

SEQ ID NO: 28164 - DNA, 96 bp, Fusarium azukicola
  misc_feature: 2349
acctaacctatagctactataggtagctagatattaagggtattattctaattggttaaaaaggttcctacagaccttcatgactgccgtcatcaa

SEQ ID NO: 28165 - DNA, 96 bp, Fusarium azukicola
  misc_feature: 2313
tacctaacctatagctactataggtagctagatattaagggtattattctaattggttaaaaaggttcctacagaccttcatgactgccgtcatca

SEQ ID NO: 28166 - DNA, 96 bp, Fusarium azukicola
  misc_feature: 2281
ccaactatagtgatatatccctataaaccatatattatattatagaatttttactctatttttaggtatatttacctaacctatagctactatagg

SEQ ID NO: 28167 - DNA, 96 bp, Fusarium azukicola
  misc_feature: 2175
caactatagtgatatatccctataaaccatatattatattatagaatttttactctatttttaggtatatttacctaacctatagctactataggt

SEQ ID NO: 28168 - DNA, 96 bp, Fusarium azukicola
  misc_feature: 2174
ttttactttaccctatactctcttctctcttttactttaccctatactctcttctctcttttactttaccctatactctcttctctcttttacttt

SEQ ID NO: 28169 - DNA, 96 bp, Fusarium azukicola
  misc_feature: 2094
ataccgtcggatagcccggagaatgcgctttataatgatatataatctattactaaagccttataaatggcttagttatagcaaaaaccggttttg

SEQ ID NO: 28170 - DNA, 96 bp, Fusarium azukicola
  misc_feature: 2062
tttactttaccctatactctcttctctcttttactttaccctatactctcttctctcttttactttaccctatactctcttctctcttttacttta

SEQ ID NO: 28171 - DNA, 96 bp, Fusarium azukicola
  misc_feature: 2032
accgtcggatagcccggagaatgcgctttataatgatatataatctattactaaagccttataaatggcttagttatagcaaaaaccggttttgat

SEQ ID NO: 28172 - DNA, 96 bp, Fusarium azukicola
  misc_feature: 2027
atatacctaaaaatagagtaaaaattctataatataatatgtggtttatagggatatatcactatagttggtaatataatatagaacattaacaat

SEQ ID NO: 28173 - DNA, 96 bp, Fusarium azukicola
  misc_feature: 1985
aaaataagaataaaatcagttttctcagataatgcaaaggaatatatatataagctaagaccctattgtataaagaatggaataaaatataataca

SEQ ID NO: 28174 - DNA, 96 bp, Fusarium azukicola
  misc_feature: 1978
agagaagagagtatagggtaaagtaaaagagagaagagagtatagggtaaagtaaaagagagaagagagtatagggtaaagtaaaagagagaagag

SEQ ID NO: 28175 - DNA, 96 bp, Fusarium azukicola
  misc_feature: 1958
aaataagaataaaatcagttttctcagataatgcaaaggaatatatatataagctaagaccctattgtataaagaatggaataaaatataatacaa

SEQ ID NO: 28176 - DNA, 96 bp, Fusarium azukicola
  misc_feature: 1952
taaaataagaataaaatcagttttctcagataatgcaaaggaatatatatataagctaagaccctattgtataaagaatggaataaaatataatac

SEQ ID NO: 28177 - DNA, 96 bp, Fusarium azukicola
  misc_feature: 1917
agaggtttaattttttcctctaataataagaacgtataaagctataacccttataagattataactttaaaggaggctgttaatgttctatattat

SEQ ID NO: 28178 - DNA, 96 bp, Fusarium azukicola
  misc_feature: 1909
ttactttaccctatactctcttctctcttttactttaccctatactctcttctctcttttactttaccctatactctcttctctcttttactttac

SEQ ID NO: 28179 - DNA, 96 bp, Fusarium azukicola
  misc_feature: 1905
taccgtcggatagcccggagaatgcgctttataatgatatataatctattactaaagccttataaatggcttagttatagcaaaaaccggttttga

SEQ ID NO: 28180 - DNA, 96 bp, Fusarium azukicola
  misc_feature: 1903
gagagaagagagtatagggtaaagtaaaagagagaagagagtatagggtaaagtaaaagagagaagagagtatagggtaaagtaaaagagagaaga

SEQ ID NO: 28181 - DNA, 96 bp, Fusarium azukicola
  misc_feature: 1896
gagaagagagtatagggtaaagtaaaagagagaagagagtatagggtaaagtaaaagagagaagagagtatagggtaaagtaaaagagagaagaga

SEQ ID NO: 28182 - DNA, 96 bp, Fusarium azukicola
  misc_feature: 1892
atagaggtttaattttttcctctaataataagaacgtataaagctataacccttataagattataactttaaaggaggctgttaatgttctatatt

SEQ ID NO: 28183 - DNA, 96 bp, Fusarium azukicola
  misc_feature: 1873
tcttattttattaggattattttctatttcttttctaaattccttgaattttataatagcttctgacttattccttaatagatagacttttagata

SEQ ID NO: 28184 - DNA, 96 bp, Fusarium azukicola
  misc_feature: 1871
aatagaggtttaattttttcctctaataataagaacgtataaagctataacccttataagattataactttaaaggaggctgttaatgttctatat

SEQ ID NO: 28185 - DNA, 96 bp, Fusarium azukicola
  misc_feature: 1870
agagagaagagagtatagggtaaagtaaaagagagaagagagtatagggtaaagtaaaagagagaagagagtatagggtaaagtaaaagagagaag

SEQ ID NO: 28186 - DNA, 96 bp, Fusarium azukicola
  misc_feature: 1867
ttaagggtattattctaattggttaaaaaggttcctacagaccttcatgactgccgtcatcaatgcatcaaagtataataactgccgattggctaa

SEQ ID NO: 28187 - DNA, 96 bp, Fusarium azukicola
  misc_feature: 1863
ataatagaggtttaattttttcctctaataataagaacgtataaagctataacccttataagattataactttaaaggaggctgttaatgttctat

SEQ ID NO: 28188 - DNA, 96 bp, Fusarium azukicola
  misc_feature: 1862
cttattttattaggattattttctatttcttttctaaattccttgaattttataatagcttctgacttattccttaatagatagacttttagatat

SEQ ID NO: 28189 - DNA, 96 bp, Fusarium azukicola
  misc_feature: 1861
ctctcttctctcttttactttaccctatactctcttctctcttttactttaccctatactctcttctctcttttactttaccctatactctcttct

SEQ ID NO: 28190 - DNA, 96 bp, Fusarium azukicola
  misc_feature: 1857
tattaaggaataagtcagaagctattataaaattcaaggaatttagaaaagaaatagaaaataatcctaataaaataagaataaaatcagttttct

SEQ ID NO: 28191 - DNA, 96 bp, Fusarium azukicola
  misc_feature: 1854
aataataatagaggtttaattttttcctctaataataagaacgtataaagctataacccttataagattataactttaaaggaggctgttaatgtt

SEQ ID NO: 28192 - DNA, 96 bp, Fusarium azukicola
  misc_feature: 1840
gaacattaacagcctcctttaaagttataatcttataagggttatagctttatacgttcttattattagaggaaaaaattaaacctctattattat

SEQ ID NO: 28193 - DNA, 96 bp, Fusarium azukicola
  misc_feature: 1838
aaaagagagaagagagtatagggtaaagtaaaagagagaagagagtatagggtaaagtaaaagagagaagagagtatagggtaaagtaaaagagag

SEQ ID NO: 28194 - DNA, 96 bp, Fusarium azukicola
  misc_feature: 1837
aaagagagaagagagtatagggtaaagtaaaagagagaagagagtatagggtaaagtaaaagagagaagagagtatagggtaaagtaaaagagaga

SEQ ID NO: 28195 - DNA, 96 bp, Fusarium azukicola
  misc_feature: 1833
atctattaaggaataagtcagaagctattataaaattcaaggaatttagaaaagaaatagaaaataatcctaataaaataagaataaaatcagttt

SEQ ID NO: 28196 - DNA, 96 bp, Fusarium azukicola
  misc_feature: 1832
ggttaattggttgaaattagggttaggggtagtagtagagttaagggttagggttaattggttgaaattagggttaggggtagtagtagagttaag

SEQ ID NO: 28197 - DNA, 96 bp, Fusarium azukicola
  misc_feature: 1832
gagatatatttttctaagacttctaagccttggaaaaagaagaaaactgccttaaaatgcagttattgcaaactgccaggtcataaagacccagat

SEQ ID NO: 28198 - DNA, 96 bp, Fusarium azukicola
  misc_feature: 1831
ttattttattaggattattttctatttcttttctaaattccttgaattttataatagcttctgacttattccttaatagatagacttttagatatc

SEQ ID NO: 28199 - DNA, 96 bp, Fusarium azukicola
  misc_feature: 1831
tactttaccctatactctcttctctcttttactttaccctatactctcttctctcttttactttaccctatactctcttctctcttttactttacc

SEQ ID NO: 28200 - DNA, 96 bp, Fusarium azukicola
  misc_feature: 1830
tagaggtttaattttttcctctaataataagaacgtataaagctataacccttataagattataactttaaaggaggctgttaatgttctatatta

SEQ ID NO: 28201 - DNA, 96 bp, Fusarium azukicola
  misc_feature: 1826
tattcttattttattaggattattttctatttcttttctaaattccttgaattttataatagcttctgacttattccttaatagatagacttttag

SEQ ID NO: 28202 - DNA, 96 bp, Fusarium azukicola
  misc_feature: 1817
tataataataatagaggtttaattttttcctctaataataagaacgtataaagctataacccttataagattataactttaaaggaggctgttaat

SEQ ID NO: 28203 - DNA, 96 bp, Fusarium azukicola
  misc_feature: 1817
agggtaaagtaaaagagagaagagagtatagggtaaagtaaaagagagaagagagtatagggtaaagtaaaagagagaagagagtatagggtaaag

SEQ ID NO: 28204 - DNA, 96 bp, Fusarium azukicola
  misc_feature: 1812
gttaattggttgaaattagggttaggggtagtagtagagttaagggttagggttaattggttgaaattagggttaggggtagtagtagagttaagg

SEQ ID NO: 28205 - DNA, 96 bp, Fusarium azukicola
  misc_feature: 1807
ttaagggtattattctaattggttaaaaaggttcctacagacctttatgactgccgtcatctatgcatcaaagtataataactgccgattggctaa

SEQ ID NO: 28206 - DNA, 96 bp, Fusarium azukicola
  misc_feature: 1803
aagagagaagagagtatagggtaaagtaaaagagagaagagagtatagggtaaagtaaaagagagaagagagtatagggtaaagtaaaagagagaa

SEQ ID NO: 28207 - DNA, 96 bp, Fusarium azukicola
  misc_feature: 1799
gttaagggttagggttaattggttgaaattagggttaggggtagtagtagagttaagggttagggttaattggttgaaattagggttaggggtagt

SEQ ID NO: 28208 - DNA, 96 bp, Fusarium azukicola
  misc_feature: 1797
gggtaaagtaaaagagagaagagagtatagggtaaagtaaaagagagaagagagtatagggtaaagtaaaagagagaagagagtatagggtaaagt

SEQ ID NO: 28209 - DNA, 96 bp, Fusarium azukicola
  misc_feature: 1789
aacccttaactctactactacccctaaccctaatttcaaccaattaaccctaacccttaactctactactacccctaaccctaatttcaaccaatt

SEQ ID NO: 28210 - DNA, 96 bp, Fusarium azukicola
  misc_feature: 1787
agaacattaacagcctcctttaaagttataatcttataagggttatagctttatacgttcttattattagaggaaaaaattaaacctctattatta

SEQ ID NO: 28211 - DNA, 96 bp, Fusarium azukicola
  misc_feature: 1780
aataatagaggtttaattttttcctctaataataagaacgtataaagctataacccttataagattataactttaaaggaggctgttaatgttcta

SEQ ID NO: 28212 - DNA, 96 bp, Fusarium azukicola
  misc_feature: 1778
aagggttagggttaattggttgaaattagggttaggggtagtagtagagttaagggttagggttaattggttgaaattagggttaggggtagtagt

SEQ ID NO: 28213 - DNA, 96 bp, Fusarium azukicola
  misc_feature: 1770
taataataatagaggtttaattttttcctctaataataagaacgtataaagctataacccttataagattataactttaaaggaggctgttaatgt

SEQ ID NO: 28214 - DNA, 96 bp, Fusarium azukicola
  misc_feature: 1760
aataaacaagaaataggaacttccaaagtacctattaaatttgcagaaagactcttaaaatctaaagaaccttcttctccagaagatataaagcaa

SEQ ID NO: 28215 - DNA, 96 bp, Fusarium azukicola
  misc_feature: 1756
atataataataatagaggtttaattttttcctctaataataagaacgtataaagctataacccttataagattataactttaaaggaggctgttaa

SEQ ID NO: 28216 - DNA, 96 bp, Fusarium azukicola
  misc_feature: 1753
ctattaaggaataagtcagaagctattataaaattcaaggaatttagaaaagaaatagaaaataatcctaataaaataagaataaaatcagttttc

SEQ ID NO: 28217 - DNA, 96 bp, Fusarium azukicola
  misc_feature: 1752
taatagaggtttaattttttcctctaataataagaacgtataaagctataacccttataagattataactttaaaggaggctgttaatgttctata

SEQ ID NO: 28218 - DNA, 96 bp, Fusarium azukicola
  misc_feature: 1746
ataataataatagaggtttaattttttcctctaataataagaacgtataaagctataacccttataagattataactttaaaggaggctgttaatg

SEQ ID NO: 28219 - DNA, 96 bp, Fusarium azukicola
  misc_feature: 1731
aatatctcacaagctttaaggagtaatcctgaggcttataacctagaatcactttcttctagccttatagatgaatctaagagactagaaaaaaca

SEQ ID NO: 28220 - DNA, 96 bp, Fusarium azukicola
  misc_feature: 1728
atgagatatatttttctaagacttctaagccttggaaaaagaagaaaactgccttaaaatgcagttattgcaaactgccaggtcataaagacccag

SEQ ID NO: 28221 - DNA, 96 bp, Fusarium azukicola
  misc_feature: 1725
tatctattaaggaataagtcagaagctattataaaattcaaggaatttagaaaagaaatagaaaataatcctaataaaataagaataaaatcagtt

SEQ ID NO: 28222 - DNA, 96 bp, Fusarium azukicola
  misc_feature: 1723
atatatttttctaagacttctaagccttggaaaaagaagaaaactgccttaaaatgcagttattgcaaactgccaggtcataaagacccagattgc

SEQ ID NO: 28223 - DNA, 96 bp, Fusarium azukicola
  misc_feature: 1719
gatatatttttctaagacttctaagccttggaaaaagaagaaaactgccttaaaatgcagttattgcaaactgccaggtcataaagacccagattg

SEQ ID NO: 28224 - DNA, 96 bp, Fusarium azukicola
  misc_feature: 1715
gaggtttaattttttcctctaataataagaacgtataaagctataacccttataagattataactttaaaggaggctgttaatgttctatattata

SEQ ID NO: 28225 - DNA, 96 bp, Fusarium azukicola
  misc_feature: 1707
ctatctattaaggaataagtcagaagctattataaaattcaaggaatttagaaaagaaatagaaaataatcctaataaaataagaataaaatcagt

SEQ ID NO: 28226 - DNA, 96 bp, Fusarium azukicola
  misc_feature: 1706
tctattaaggaataagtcagaagctattataaaattcaaggaatttagaaaagaaatagaaaataatcctaataaaataagaataaaatcagtttt

SEQ ID NO: 28227 - DNA, 96 bp, Fusarium azukicola
  misc_feature: 1705
gaaaaggcaatattatataataataataataataaacagaaattcactatcgaaattcctaaaaagccagctgatttctataaagattataaggaa

SEQ ID NO: 28228 - DNA, 96 bp, Fusarium azukicola
  misc_feature: 1704
gttagggttaattggttgaaattagggttaggggtagtagtagagttaagggttagggttaattggttgaaattagggttaggggtagtagtagag

SEQ ID NO: 28229 - DNA, 96 bp, Fusarium azukicola
  misc_feature: 1701
ttaagggttagggttaattggttgaaattagggttaggggtagtagtagagttaagggttagggttaattggttgaaattagggttaggggtagta

SEQ ID NO: 28230 - DNA, 96 bp, Fusarium azukicola
  misc_feature: 1696
aacagaaattcactatcgaaattcctaaaaagccagctgatttctataaagattataaggaatatcctactcttatagctcaagagaataataacc

SEQ ID NO: 28231 - DNA, 96 bp, Fusarium azukicola
  misc_feature: 1695
gggttagggttaattggttgaaattagggttaggggtagtagtagagttaagggttagggttaattggttgaaattagggttaggggtagtagtag

SEQ ID NO: 28232 - DNA, 96 bp, Fusarium azukicola
  misc_feature: 1694
tatatttttctaagacttctaagccttggaaaaagaagaaaactgccttaaaatgcagttattgcaaactgccaggtcataaagacccagattgct

SEQ ID NO: 28233 - DNA, 96 bp, Fusarium azukicola
  misc_feature: 1691
ctgttttttctagtctcttagattcatctataaggctagaagaaagtgattctaggttataagcctcaggattactccttaaagcttgtgagatat

SEQ ID NO: 28234 - DNA, 96 bp, Fusarium azukicola
  misc_feature: 1684
gagaaaactgattttattcttattttattaggattattttctatttcttttctaaattccttgaattttataatagcttctgacttattccttaat

SEQ ID NO: 28235 - DNA, 96 bp, Fusarium azukicola
  misc_feature: 1681
aataagaacgtataaagctataacccttataagattataactttaaaggaggctgttaatgttctatattatattaccaactatagtgatatatcc

SEQ ID NO: 28236 - DNA, 96 bp, Fusarium azukicola
  misc_feature: 1679
taataaacaagaaataggaacttccaaagtacctattaaatttgcagaaagactcttaaaatctaaagaaccttcttctccagaagatataaagca

SEQ ID NO: 28237 - DNA, 96 bp, Fusarium azukicola
  misc_feature: 1679
ataagaacgtataaagctataacccttataagattataactttaaaggaggctgttaatgttctatattatattaccaactatagtgatatatccc

SEQ ID NO: 28238 - DNA, 96 bp, Fusarium azukicola
  misc_feature: 1678
taaaagagagaagagagtatagggtaaagtaaaagagagaagagagtatagggtaaagtaaaagagagaagagagtatagggtaaagtaaaagaga

SEQ ID NO: 28239 - DNA, 96 bp, Fusarium azukicola
  misc_feature: 1676
ttaaggaataagtcagaagctattataaaattcaaggaatttagaaaagaaatagaaaataatcctaataaaataagaataaaatcagttttctca

SEQ ID NO: 28240 - DNA, 96 bp, Fusarium azukicola
  misc_feature: 1674
cccttaactctactactacccctaaccctaatttcaaccaattaaccctaacccttaactctactactacccctaaccctaatttcaaccaattaa

SEQ ID NO: 28241 - DNA, 96 bp, Fusarium azukicola
  misc_feature: 1673
gggttaattggttgaaattagggttaggggtagtagtagagttaagggttagggttaattggttgaaattagggttaggggtagtagtagagttaa

SEQ ID NO: 28242 - DNA, 96 bp, Fusarium azukicola
  misc_feature: 1666
atatttttctaagacttctaagccttggaaaaagaagaaaactgccttaaaatgcagttattgcaaactgccaggtcataaagacccagattgcta

SEQ ID NO: 28243 - DNA, 96 bp, Fusarium azukicola
  misc_feature: 1661
taaggaataagtcagaagctattataaaattcaaggaatttagaaaagaaatagaaaataatcctaataaaataagaataaaatcagttttctcag

SEQ ID NO: 28244 - DNA, 96 bp, Fusarium azukicola
  misc_feature: 1660
ataaatcccctctagaagttagagataatatttccttagatattaaggaattagataaaataaaaacctttgggtctatagtttattataagaacc

SEQ ID NO: 28245 - DNA, 96 bp, Fusarium azukicola
  misc_feature: 1660
ataataaacaagaaataggaacttccaaagtacctattaaatttgcagaaagactcttaaaatctaaagaaccttcttctccagaagatataaagc

SEQ ID NO: 28246 - DNA, 96 bp, Fusarium azukicola
  misc_feature: 1659
taagggttagggttaattggttgaaattagggttaggggtagtagtagagttaagggttagggttaattggttgaaattagggttaggggtagtag

SEQ ID NO: 28247 - DNA, 96 bp, Fusarium azukicola
  misc_feature: 1659
aggaataagtcagaagctattataaaattcaaggaatttagaaaagaaatagaaaataatcctaataaaataagaataaaatcagttttctcagat

SEQ ID NO: 28248 - DNA, 96 bp, Fusarium azukicola
  misc_feature: 1657
ctaagggtttatacttaaaagaagattatacttcttttttaagtcttttctaagactttatacctccttaagtcttctttaagactttataactgc

SEQ ID NO: 28249 - DNA, 96 bp, Fusarium azukicola
  misc_feature: 1656
taagaacgtataaagctataacccttataagattataactttaaaggaggctgttaatgttctatattatattaccaactatagtgatatatccct

SEQ ID NO: 28250 - DNA, 96 bp, Fusarium azukicola
  misc_feature: 1652
agggttaattggttgaaattagggttaggggtagtagtagagttaagggttagggttaattggttgaaattagggttaggggtagtagtagagtta

SEQ ID NO: 28251 - DNA, 96 bp, Fusarium azukicola
  misc_feature: 1651
taaaagtctatctattaaggaataagtcagaagctattataaaattcaaggaatttagaaaagaaatagaaaataatcctaataaaataagaataa

SEQ ID NO: 28252 - DNA, 96 bp, Fusarium azukicola
  misc_feature: 1649
gtagagttaagggttagggttaattggttgaaattagggttaggggtagtagtagagttaagggttagggttaattggttgaaattagggttaggg

SEQ ID NO: 28253 - DNA, 96 bp, Fusarium azukicola
  misc_feature: 1648
ataataagaacgtataaagctataacccttataagattataactttaaaggaggctgttaatgttctatattatattaccaactatagtgatatat

SEQ ID NO: 28254 - DNA, 96 bp, Fusarium azukicola
  misc_feature: 1643
tactactacccctaaccctaatttcaaccaattaaccctaacccttaactctactactacccctaaccctaatttcaaccaattaaccctaaccct

SEQ ID NO: 28255 - DNA, 96 bp, Fusarium azukicola
  misc_feature: 1638
taatatctcacaagctttaaggagtaatcctgaggcttataacctagaatcactttcttctagccttatagatgaatctaagagactagaaaaaac

SEQ ID NO: 28256 - DNA, 96 bp, Fusarium azukicola
  misc_feature: 1638
atatataataataatagaggtttaattttttcctctaataataagaacgtataaagctataacccttataagattataactttaaaggaggctgtt

SEQ ID NO: 28257 - DNA, 96 bp, Fusarium azukicola
  misc_feature: 1638
aaccctaatttcaaccaattaaccctaacccttaactctactactacccctaaccctaatttcaaccaattaaccctaacccttaactctactact

SEQ ID NO: 28258 - DNA, 96 bp, Fusarium azukicola
  misc_feature: 1637
tgagatatatttttctaagacttctaagccttggaaaaagaagaaaactgccttaaaatgcagttattgcaaactgccaggtcataaagacccaga

SEQ ID NO: 28259 - DNA, 96 bp, Fusarium azukicola
  misc_feature: 1637
tatataataataatagaggtttaattttttcctctaataataagaacgtataaagctataacccttataagattataactttaaaggaggctgtta

SEQ ID NO: 28260 - DNA, 96 bp, Fusarium azukicola
  misc_feature: 1637
aagaacgtataaagctataacccttataagattataactttaaaggaggctgttaatgttctatattatattaccaactatagtgatatatcccta

SEQ ID NO: 28261 - DNA, 96 bp, Fusarium azukicola
  misc_feature: 1636
acagaaattcactatcgaaattcctaaaaagccagctgatttctataaagattataaggaatatcctactcttatagctcaagagaataataacct

SEQ ID NO: 28262 - DNA, 96 bp, Fusarium azukicola
  misc_feature: 1635
tagggtaaagtaaaagagagaagagagtatagggtaaagtaaaagagagaagagagtatagggtaaagtaaaagagagaagagagtatagggtaaa

SEQ ID NO: 28263 - DNA, 96 bp, Fusarium azukicola
  misc_feature: 1635
ataatcttataagggttatagctttatacgttcttattattagaggaaaaaattaaacctctattattattatatatatcttagtaaaaacccctt

SEQ ID NO: 28264 - DNA, 96 bp, Fusarium azukicola
  misc_feature: 1633
tcttaaaatctaaagaaccttcttctccagaagatataaagcaattccaaaaggaaataggttctttaatatttctagctataaaaactagacctg

SEQ ID NO: 28265 - DNA, 96 bp, Fusarium azukicola
  misc_feature: 1633
ggttagggttaattggttgaaattagggttaggggtagtagtagagttaagggttagggttaattggttgaaattagggttaggggtagtagtaga

SEQ ID NO: 28266 - DNA, 96 bp, Fusarium azukicola
  misc_feature: 1633
atcttataagggttatagctttatacgttcttattattagaggaaaaaattaaacctctattattattatatatatcttagtaaaaacccctttat

SEQ ID NO: 28267 - DNA, 96 bp, Fusarium azukicola
  misc_feature: 1627
aaggaataagtcagaagctattataaaattcaaggaatttagaaaagaaatagaaaataatcctaataaaataagaataaaatcagttttctcaga

SEQ ID NO: 28268 - DNA, 96 bp, Fusarium azukicola
  misc_feature: 1626
taatgagatatatttttctaagacttctaagccttggaaaaagaagaaaactgccttaaaatgcagttattgcaaactgccaggtcataaagaccc

SEQ ID NO: 28269 - DNA, 96 bp, Fusarium azukicola
  misc_feature: 1623
atgcaaaggaatatatatataagctaagaccctattgtataaagaatggaataaaatataatacaagtccgcctcataataaacaagctaatggct

SEQ ID NO: 28270 - DNA, 96 bp, Fusarium azukicola
  misc_feature: 1619
aatcttataagggttatagctttatacgttcttattattagaggaaaaaattaaacctctattattattatatatatcttagtaaaaaccccttta

SEQ ID NO: 28271 - DNA, 96 bp, Fusarium azukicola
  misc_feature: 1610
acccttaactctactactacccctaaccctaatttcaaccaattaaccctaacccttaactctactactacccctaaccctaatttcaaccaatta

SEQ ID NO: 28272 - DNA, 96 bp, Fusarium azukicola
  misc_feature: 1610
attacttggggaaaagccgcttctcttcctatattaggaatcggtgacttaataattaagttcctagataaagatacctatataataaggaattgc

SEQ ID NO: 28273 - DNA, 96 bp, Fusarium azukicola
  misc_feature: 1608
gtaaaagagagaagagagtatagggtaaagtaaaagagagaagagagtatagggtaaagtaaaagagagaagagagtatagggtaaagtaaaagag

SEQ ID NO: 28274 - DNA, 96 bp, Fusarium azukicola
  misc_feature: 1607
tatttttctaagacttctaagccttggaaaaagaagaaaactgccttaaaatgcagttattgcaaactgccaggtcataaagacccagattgctat

SEQ ID NO: 28275 - DNA, 96 bp, Fusarium azukicola
  misc_feature: 1605
cctaaccctaatttcaaccaattaaccctaacccttaactctactactacccctaaccctaatttcaaccaattaaccctaacccttaactctact

SEQ ID NO: 28276 - DNA, 96 bp, Fusarium azukicola
  misc_feature: 1603
ataataaggaaatataataaacaagaaataggaacttccaaagtacctattaaatttgcagaaagactcttaaaatctaaagaaccttcttctcca

SEQ ID NO: 28277 - DNA, 96 bp, Fusarium azukicola
  misc_feature: 1601
taataagaacgtataaagctataacccttataagattataactttaaaggaggctgttaatgttctatattatattaccaactatagtgatatatc

SEQ ID NO: 28278 - DNA, 96 bp, Fusarium azukicola
  misc_feature: 1595
aaaagtctatctattaaggaataagtcagaagctattataaaattcaaggaatttagaaaagaaatagaaaataatcctaataaaataagaataaa

SEQ ID NO: 28279 - DNA, 96 bp, Fusarium azukicola
  misc_feature: 1594
taataaggaaatataataaacaagaaataggaacttccaaagtacctattaaatttgcagaaagactcttaaaatctaaagaaccttcttctccag

SEQ ID NO: 28280 - DNA, 96 bp, Fusarium azukicola
  misc_feature: 1592
tgggtctttatgacctggcagtttgcaataactgcattttaaggcagttttcttctttttccaaggcttagaagtcttagaaaaatatatctcatt

SEQ ID NO: 28281 - DNA, 96 bp, Fusarium azukicola
  misc_feature: 1580
taacccttaactctactactacccctaaccctaatttcaaccaattaaccctaacccttaactctactactacccctaaccctaatttcaaccaat

SEQ ID NO: 28282 - DNA, 96 bp, Fusarium azukicola
  misc_feature: 1578
aggtttaattttttcctctaataataagaacgtataaagctataacccttataagattataactttaaaggaggctgttaatgttctatattatat

SEQ ID NO: 28283 - DNA, 96 bp, Fusarium azukicola
  misc_feature: 1575
ggggtctcagaaagggaaattaggtcttcctcggctttaggagatgacgaagaagaagaattagctataaatagcttttcttgtttcttttctctt

SEQ ID NO: 28284 - DNA, 96 bp, Fusarium azukicola
  misc_feature: 1575
agcataagctatatcaggtctagtttttatagctagaaatattaaagaacctatttccttttggaattgctttatatcttctggagaagaaggttc

SEQ ID NO: 28285 - DNA, 96 bp, Fusarium azukicola
  misc_feature: 1574
aagtaaaagagagaagagagtatagggtaaagtaaaagagagaagagagtatagggtaaagtaaaagagagaagagagtatagggtaaagtaaaag

SEQ ID NO: 28286 - DNA, 96 bp, Fusarium azukicola
  misc_feature: 1572
taagggtttatacttaaaagaagattatacttcttttttaagtcttttctaagactttatacctccttaagtcttctttaagactttataactgct

SEQ ID NO: 28287 - DNA, 96 bp, Fusarium azukicola
  misc_feature: 1572
agaacgtataaagctataacccttataagattataactttaaaggaggctgttaatgttctatattatattaccaactatagtgatatatccctat

SEQ ID NO: 28288 - DNA, 96 bp, Fusarium azukicola
  misc_feature: 1569
caaaggtttttattttatctaattccttaatatctaaggaaatattatctctaacttctagaggggatttattatttaaagccgaatgcgggcttc

SEQ ID NO: 28289 - DNA, 96 bp, Fusarium azukicola
  misc_feature: 1567
agtaaaagagagaagagagtatagggtaaagtaaaagagagaagagagtatagggtaaagtaaaagagagaagagagtatagggtaaagtaaaaga

SEQ ID NO: 28290 - DNA, 96 bp, Fusarium azukicola
  misc_feature: 1567
gaatctaagagactagaaaaaacagattctaatgagatatatttttctaagacttctaagccttggaaaaagaagaaaactgccttaaaatgcagt

SEQ ID NO: 28291 - DNA, 96 bp, Fusarium azukicola
  misc_feature: 1564
aataataaggaaatataataaacaagaaataggaacttccaaagtacctattaaatttgcagaaagactcttaaaatctaaagaaccttcttctcc

SEQ ID NO: 28292 - DNA, 96 bp, Fusarium azukicola
  misc_feature: 1563
ttaaaatctaaagaaccttcttctccagaagatataaagcaattccaaaaggaaataggttctttaatatttctagctataaaaactagacctgat

SEQ ID NO: 28293 - DNA, 96 bp, Fusarium azukicola
  misc_feature: 1563
cagaaattcactatcgaaattcctaaaaagccagctgatttctataaagattataaggaatatcctactcttatagctcaagagaataataacctt

SEQ ID NO: 28294 - DNA, 96 bp, Fusarium azukicola
  misc_feature: 1562
atgaaaaggcaatattatataataataataataataaacagaaattcactatcgaaattcctaaaaagccagctgatttctataaagattataagg

SEQ ID NO: 28295 - DNA, 96 bp, Fusarium azukicola
  misc_feature: 1562
aagaaccttcttctccagaagatataaagcaattccaaaaggaaataggttctttaatatttctagctataaaaactagacctgatatagcttatg

SEQ ID NO: 28296 - DNA, 96 bp, Fusarium azukicola
  misc_feature: 1560
tggggtctcagaaagggaaattaggtcttcctcggctttaggagatgacgaagaagaagaattagctataaatagcttttcttgtttcttttctct

SEQ ID NO: 28297 - DNA, 96 bp, Fusarium azukicola
  misc_feature: 1559
aaagtctatctattaaggaataagtcagaagctattataaaattcaaggaatttagaaaagaaatagaaaataatcctaataaaataagaataaaa

SEQ ID NO: 28298 - DNA, 96 bp, Fusarium azukicola
  misc_feature: 1558
cttaaaatctaaagaaccttcttctccagaagatataaagcaattccaaaaggaaataggttctttaatatttctagctataaaaactagacctga

SEQ ID NO: 28299 - DNA, 96 bp, Fusarium azukicola
  misc_feature: 1553
atttttctaagacttctaagccttggaaaaagaagaaaactgccttaaaatgcagttattgcaaactgccaggtcataaagacccagattgctatt

SEQ ID NO: 28300 - DNA, 96 bp, Fusarium azukicola
  misc_feature: 1552
tatatataataataatagaggtttaattttttcctctaataataagaacgtataaagctataacccttataagattataactttaaaggaggctgt

SEQ ID NO: 28301 - DNA, 96 bp, Fusarium azukicola
  misc_feature: 1551
tagggttaattggttgaaattagggttaggggtagtagtagagttaagggttagggttaattggttgaaattagggttaggggtagtagtagagtt

SEQ ID NO: 28302 - DNA, 96 bp, Fusarium azukicola
  misc_feature: 1551
cccaaaggtttttattttatctaattccttaatatctaaggaaatattatctctaacttctagaggggatttattatttaaagccgaatgcgggct

SEQ ID NO: 28303 - DNA, 96 bp, Fusarium azukicola
  misc_feature: 1551
aagctattataaaattcaaggaatttagaaaagaaatagaaaataatcctaataaaataagaataaaatcagttttctcagataatgcaaaggaat

SEQ ID NO: 28304 - DNA, 96 bp, Fusarium azukicola
  misc_feature: 1550
atcagttttctcagataatgcaaaggaatatatatataagctaagaccctattgtataaagaatggaataaaatataatacaagtccgcctcataa

SEQ ID NO: 28305 - DNA, 96 bp, Fusarium azukicola
  misc_feature: 1549
aaaatcagttttctcagataatgcaaaggaatatatatataagctaagaccctattgtataaagaatggaataaaatataatacaagtccgcctca

SEQ ID NO: 28306 - DNA, 96 bp, Fusarium azukicola
  misc_feature: 1544
ttacttggggaaaagccgcttctcttcctatattaggaatcggtgacttaataattaagttcctagataaagatacctatataataaggaattgct

SEQ ID NO: 28307 - DNA, 96 bp, Fusarium azukicola
  misc_feature: 1542
agaaccttcttctccagaagatataaagcaattccaaaaggaaataggttctttaatatttctagctataaaaactagacctgatatagcttatgc

SEQ ID NO: 28308 - DNA, 96 bp, Fusarium azukicola
  misc_feature: 1540
gttgaaattagggttaggggtagtagtagagttaagggttagggttaattggttgaaattagggttaggggtagtagtagagttaagggttagggt

SEQ ID NO: 28309 - DNA, 96 bp, Fusarium azukicola
  misc_feature: 1538
gaagtaaataataaagctctaaccttttctaatatagtcctatttatcctttctacaaagccattagcttgtttattatgaggcggacttgtatta

SEQ ID NO: 28310 - DNA, 96 bp, Fusarium azukicola
  misc_feature: 1536
ccttttctaatatagtcctatttatcctttctacaaagccattagcttgtttattatgaggcggacttgtattatattttattccattctttatac

SEQ ID NO: 28311 - DNA, 96 bp, Fusarium azukicola
  misc_feature: 1534
taatcttataagggttatagctttatacgttcttattattagaggaaaaaattaaacctctattattattatatatatcttagtaaaaaccccttt

SEQ ID NO: 28312 - DNA, 96 bp, Fusarium azukicola
  misc_feature: 1532
aaattagggttaggggtagtagtagagttaagggttagggttaattggttgaaattagggttaggggtagtagtagagttaagggttagggttaat

SEQ ID NO: 28313 - DNA, 96 bp, Fusarium azukicola
  misc_feature: 1532
aatttcaaccaattaaccctaacccttaactctactactacccctaaccctaatttcaaccaattaaccctaacccttaactctactactacccct

SEQ ID NO: 28314 - DNA, 96 bp, Fusarium azukicola
  misc_feature: 1529
taaatcccctctagaagttagagataatatttccttagatattaaggaattagataaaataaaaacctttgggtctatagtttattataagaacca

SEQ ID NO: 28315 - DNA, 96 bp, Fusarium azukicola
  misc_feature: 1528
atatatataataataatagaggtttaattttttcctctaataataagaacgtataaagctataacccttataagattataactttaaaggaggctg

SEQ ID NO: 28316 - DNA, 96 bp, Fusarium azukicola
  misc_feature: 1526
aaatcagttttctcagataatgcaaaggaatatatatataagctaagaccctattgtataaagaatggaataaaatataatacaagtccgcctcat

SEQ ID NO: 28317 - DNA, 96 bp, Fusarium azukicola
  misc_feature: 1524
aaatcccctctagaagttagagataatatttccttagatattaaggaattagataaaataaaaacctttgggtctatagtttattataagaaccat

SEQ ID NO: 28318 - DNA, 96 bp, Fusarium azukicola
  misc_feature: 1521
tgaaaaggcaatattatataataataataataataaacagaaattcactatcgaaattcctaaaaagccagctgatttctataaagattataagga

SEQ ID NO: 28319 - DNA, 96 bp, Fusarium azukicola
  misc_feature: 1518
taataataagaacgtataaagctataacccttataagattataactttaaaggaggctgttaatgttctatattatattaccaactatagtgatat

SEQ ID NO: 28320 - DNA, 96 bp, Fusarium azukicola
  misc_feature: 1518
acagattctaatgagatatatttttctaagacttctaagccttggaaaaagaagaaaactgccttaaaatgcagttattgcaaactgccaggtcat

SEQ ID NO: 28321 - DNA, 96 bp, Fusarium azukicola
  misc_feature: 1517
tgcaaaggaatatatatataagctaagaccctattgtataaagaatggaataaaatataatacaagtccgcctcataataaacaagctaatggctt

SEQ ID NO: 28322 - DNA, 96 bp, Fusarium azukicola
  misc_feature: 1516
aatctaagagactagaaaaaacagattctaatgagatatatttttctaagacttctaagccttggaaaaagaagaaaactgccttaaaatgcagtt

SEQ ID NO: 28323 - DNA, 96 bp, Fusarium azukicola
  misc_feature: 1515
ggtttaattttttcctctaataataagaacgtataaagctataacccttataagattataactttaaaggaggctgttaatgttctatattatatt

SEQ ID NO: 28324 - DNA, 96 bp, Fusarium azukicola
  misc_feature: 1512
ttaccctatactctcttctctcttttactttaccctatactctcttctctcttttactttaccctatactctcttctctcttttactttaccctat

SEQ ID NO: 28325 - DNA, 96 bp, Fusarium azukicola
  misc_feature: 1510
aattagggttaggggtagtagtagagttaagggttagggttaattggttgaaattagggttaggggtagtagtagagttaagggttagggttaatt

SEQ ID NO: 28326 - DNA, 96 bp, Fusarium azukicola
  misc_feature: 1509
ttagggttaattggttgaaattagggttaggggtagtagtagagttaagggttagggttaattggttgaaattagggttaggggtagtagtagagt

SEQ ID NO: 28327 - DNA, 96 bp, Fusarium azukicola
  misc_feature: 1509
aatcagttttctcagataatgcaaaggaatatatatataagctaagaccctattgtataaagaatggaataaaatataatacaagtccgcctcata

SEQ ID NO: 28328 - DNA, 96 bp, Fusarium azukicola
  misc_feature: 1509
gttgtacaagggtttttacaaattcaaggtattaactatgaagaaacctatgcttgtactataagacctgagactctaagacttttctttataatt

SEQ ID NO: 28329 - DNA, 96 bp, Fusarium azukicola
  misc_feature: 1507
agttaagggttagggttaattggttgaaattagggttaggggtagtagtagagttaagggttagggttaattggttgaaattagggttaggggtag

SEQ ID NO: 28330 - DNA, 96 bp, Fusarium azukicola
  misc_feature: 1506
gaagagagtatagggtaaagtaaaagagagaagagagtatagggtaaagtaaaagagagaagagagtatagggtaaagtaaaagagagaagagagt

SEQ ID NO: 28331 - DNA, 96 bp, Fusarium azukicola
  misc_feature: 1504
gatatatataataataatagaggtttaattttttcctctaataataagaacgtataaagctataacccttataagattataactttaaaggaggct

SEQ ID NO: 28332 - DNA, 96 bp, Fusarium azukicola
  misc_feature: 1503
tgaatctaagagactagaaaaaacagattctaatgagatatatttttctaagacttctaagccttggaaaaagaagaaaactgccttaaaatgcag

SEQ ID NO: 28333 - DNA, 96 bp, Fusarium azukicola
  misc_feature: 1503
tcttataagggttatagctttatacgttcttattattagaggaaaaaattaaacctctattattattatatatatcttagtaaaaacccctttatt

SEQ ID NO: 28334 - DNA, 96 bp, Fusarium azukicola
  misc_feature: 1503
tataatcttataagggttatagctttatacgttcttattattagaggaaaaaattaaacctctattattattatatatatcttagtaaaaacccct

SEQ ID NO: 28335 - DNA, 96 bp, Fusarium azukicola
  misc_feature: 1500
taagggtattattctaattggttaaaaaggttcctacagacctttatgactgccgtcatctatgcatcaaagtataataactgccgattggctaaa

SEQ ID NO: 28336 - DNA, 96 bp, Fusarium azukicola
  misc_feature: 1500
aaacagattctaatgagatatatttttctaagacttctaagccttggaaaaagaagaaaactgccttaaaatgcagttattgcaaactgccaggtc

SEQ ID NO: 28337 - DNA, 96 bp, Fusarium azukicola
  misc_feature: 1499
tttaataggtactttggaagttcctatttcttgtttattatatttccttattattttatttgtatattttgcttgtgaaaaagatatgctcttatt

SEQ ID NO: 28338 - DNA, 96 bp, Fusarium azukicola
  misc_feature: 1497
ccaaaggtttttattttatctaattccttaatatctaaggaaatattatctctaacttctagaggggatttattatttaaagccgaatgcgggctt

SEQ ID NO: 28339 - DNA, 96 bp, Fusarium azukicola
  misc_feature: 1496
aaccaattaaccctaacccttaactctactactacccctaaccctaatttcaaccaattaaccctaacccttaactctactactacccctaaccct

SEQ ID NO: 28340 - DNA, 96 bp, Fusarium azukicola
  misc_feature: 1495
agggtattattctaattggttaaaaaggttcctacagaccttcatgactgccgtcatcaatgcatcaaagtataataactgccgattggctaaaaa

SEQ ID NO: 28341 - DNA, 96 bp, Fusarium azukicola
  misc_feature: 1494
tgttgtacaagggtttttacaaattcaaggtattaactatgaagaaacctatgcttgtactataagacctgagactctaagacttttctttataat

SEQ ID NO: 28342 - DNA, 96 bp, Fusarium azukicola
  misc_feature: 1493
cagcataagctatatcaggtctagtttttatagctagaaatattaaagaacctatttccttttggaattgctttatatcttctggagaagaaggtt

SEQ ID NO: 28343 - DNA, 96 bp, Fusarium azukicola
  misc_feature: 1493
aagtctatctattaaggaataagtcagaagctattataaaattcaaggaatttagaaaagaaatagaaaataatcctaataaaataagaataaaat

SEQ ID NO: 28344 - DNA, 96 bp, Fusarium azukicola
  misc_feature: 1491
ttaataggtactttggaagttcctatttcttgtttattatatttccttattattttatttgtatattttgcttgtgaaaaagatatgctcttattc

SEQ ID NO: 28345 - DNA, 96 bp, Fusarium azukicola
  misc_feature: 1491
ggaataagtcagaagctattataaaattcaaggaatttagaaaagaaatagaaaataatcctaataaaataagaataaaatcagttttctcagata

SEQ ID NO: 28346 - DNA, 96 bp, Fusarium azukicola
  misc_feature: 1490
agggtattattctaattggttaaaaaggttcctacagacctttatgactgccgtcatctatgcatcaaagtataataactgccgattggctaaaaa

SEQ ID NO: 28347 - DNA, 96 bp, Fusarium azukicola
  misc_feature: 1490
agaagtaaataataaagctctaaccttttctaatatagtcctatttatcctttctacaaagccattagcttgtttattatgaggcggacttgtatt

SEQ ID NO: 28348 - DNA, 96 bp, Fusarium azukicola
  misc_feature: 1487
atgttgtacaagggtttttacaaattcaaggtattaactatgaagaaacctatgcttgtactataagacctgagactctaagacttttctttataa

SEQ ID NO: 28349 - DNA, 96 bp, Fusarium azukicola
  misc_feature: 1485
aacagattctaatgagatatatttttctaagacttctaagccttggaaaaagaagaaaactgccttaaaatgcagttattgcaaactgccaggtca

SEQ ID NO: 28350 - DNA, 96 bp, Fusarium azukicola
  misc_feature: 1482
ttatatatatattcctttgcattatctgagaaaactgattttattcttattttattaggattattttctatttcttttctaaattccttgaatttt

SEQ ID NO: 28351 - DNA, 96 bp, Fusarium azukicola
  misc_feature: 1482
ccctaacccttaactctactactacccctaaccctaatttcaaccaattaaccctaacccttaactctactactacccctaaccctaatttcaacc

SEQ ID NO: 28352 - DNA, 96 bp, Fusarium azukicola
  misc_feature: 1479
gaggcggacttgtattatattttattccattctttatacaatagggtcttagcttatatatatattcctttgcattatctgagaaaactgatttta

SEQ ID NO: 28353 - DNA, 96 bp, Fusarium azukicola
  misc_feature: 1476
aagagagtatagggtaaagtaaaagagagaagagagtatagggtaaagtaaaagagagaagagagtatagggtaaagtaaaagagagaagagagta

SEQ ID NO: 28354 - DNA, 96 bp, Fusarium azukicola
  misc_feature: 1476
ataagagcatatctttttcacaagcaaaatatacaaataaaataataaggaaatataataaacaagaaataggaacttccaaagtacctattaaat

SEQ ID NO: 28355 - DNA, 96 bp, Fusarium azukicola
  misc_feature: 1474
tattacttggggaaaagccgcttctcttcctatattaggaatcggtgacttaataattaagttcctagataaagatacctatataataaggaattg

SEQ ID NO: 28356 - DNA, 96 bp, Fusarium azukicola
  misc_feature: 1473
ctggggtctcagaaagggaaattaggtcttcctcggctttaggagatgacgaagaagaagaattagctataaatagcttttcttgtttcttttctc

SEQ ID NO: 28357 - DNA, 96 bp, Fusarium azukicola
  misc_feature: 1471
taatgcaaaggaatatatatataagctaagaccctattgtataaagaatggaataaaatataatacaagtccgcctcataataaacaagctaatgg

SEQ ID NO: 28358 - DNA, 96 bp, Fusarium azukicola
  misc_feature: 1469
aaaacagataataataataatataattaaatataaatccagatatgttgtacaagggtttttacaaattcaaggtattaactatgaagaaacctat

SEQ ID NO: 28359 - DNA, 96 bp, Fusarium azukicola
  misc_feature: 1467
gaagctattataaaattcaaggaatttagaaaagaaatagaaaataatcctaataaaataagaataaaatcagttttctcagataatgcaaaggaa

SEQ ID NO: 28360 - DNA, 96 bp, Fusarium azukicola
  misc_feature: 1464
tataagctaagaccctattgtataaagaatggaataaaatataatacaagtccgcctcataataaacaagctaatggctttgtagaaaggataaat

SEQ ID NO: 28361 - DNA, 96 bp, Fusarium azukicola
  misc_feature: 1463
ataatataacttctattataaataaacaagaagtccttcttttaaataagcaaggaaaaataatatcacaaggaaaagagaaaaataacctatata

SEQ ID NO: 28362 - DNA, 96 bp, Fusarium azukicola
  misc_feature: 1463
ccctaatttcaaccaattaaccctaacccttaactctactactacccctaaccctaatttcaaccaattaaccctaacccttaactctactactac

SEQ ID NO: 28363 - DNA, 96 bp, Fusarium azukicola
  misc_feature: 1462
ataataaaggggtttttactaagatatatataataataatagaggtttaattttttcctctaataataagaacgtataaagctataacccttataa

SEQ ID NO: 28364 - DNA, 96 bp, Fusarium azukicola
  misc_feature: 1460
gatattatttttccttgcttatttaaaagaaggacttcttgtttatttataatagaagttatattataaagagaagattgacttattaagttaaca

SEQ ID NO: 28365 - DNA, 96 bp, Fusarium azukicola
  misc_feature: 1460
agtctatctattaaggaataagtcagaagctattataaaattcaaggaatttagaaaagaaatagaaaataatcctaataaaataagaataaaatc

SEQ ID NO: 28366 - DNA, 96 bp, Fusarium azukicola
  misc_feature: 1457
tataatataacttctattataaataaacaagaagtccttcttttaaataagcaaggaaaaataatatcacaaggaaaagagaaaaataacctatat

SEQ ID NO: 28367 - DNA, 96 bp, Fusarium azukicola
  misc_feature: 1457
gccattagcttgtttattatgaggcggacttgtattatattttattccattctttatacaatagggtcttagcttatatatatattcctttgcatt

SEQ ID NO: 28368 - DNA, 96 bp, Fusarium azukicola
  misc_feature: 1456
agagagtatagggtaaagtaaaagagagaagagagtatagggtaaagtaaaagagagaagagagtatagggtaaagtaaaagagagaagagagtat

SEQ ID NO: 28369 - DNA, 96 bp, Fusarium azukicola
  misc_feature: 1454
tgtataaagaatggaataaaatataatacaagtccgcctcataataaacaagctaatggctttgtagaaaggataaataggactatattagaaaag

SEQ ID NO: 28370 - DNA, 96 bp, Fusarium azukicola
  misc_feature: 1452
cagattctaatgagatatatttttctaagacttctaagccttggaaaaagaagaaaactgccttaaaatgcagttattgcaaactgccaggtcata

SEQ ID NO: 28371 - DNA, 96 bp, Fusarium azukicola
  misc_feature: 1450
taagggtattattctaattggttaaaaaggttcctacagaccttcatgactgccgtcatcaatgcatcaaagtataataactgccgattggctaaa

SEQ ID NO: 28372 - DNA, 96 bp, Fusarium azukicola
  misc_feature: 1450
atatataagctaagaccctattgtataaagaatggaataaaatataatacaagtccgcctcataataaacaagctaatggctttgtagaaaggata

SEQ ID NO: 28373 - DNA, 96 bp, Fusarium azukicola
  misc_feature: 1449
atcactttttcaggaatagtgatttctctagcttctagctcatttttaacctcttttatcttattaagatatatttctatattctcaaaagatgaa

SEQ ID NO: 28374 - DNA, 96 bp, Fusarium azukicola
  misc_feature: 1449
ttataatcttataagggttatagctttatacgttcttattattagaggaaaaaattaaacctctattattattatatatatcttagtaaaaacccc

SEQ ID NO: 28375 - DNA, 96 bp, Fusarium azukicola
  misc_feature: 1449
aagcttttctttaaccaagaaagcttccattctcaaagcccaagtaatataattctcgcttccaataagccgggaaatattatacttagtggccat

SEQ ID NO: 28376 - DNA, 96 bp, Fusarium azukicola
  misc_feature: 1448
gcaaaggaatatatatataagctaagaccctattgtataaagaatggaataaaatataatacaagtccgcctcataataaacaagctaatggcttt

SEQ ID NO: 28377 - DNA, 96 bp, Fusarium azukicola
  misc_feature: 1447
gaataagtcagaagctattataaaattcaaggaatttagaaaagaaatagaaaataatcctaataaaataagaataaaatcagttttctcagataa

SEQ ID NO: 28378 - DNA, 96 bp, Fusarium azukicola
  misc_feature: 1445
aagggtattattctaattggttaaaaaggttcctacagaccttcatgactgccgtcatcaatgcatcaaagtataataactgccgattggctaaaa

SEQ ID NO: 28379 - DNA, 96 bp, Fusarium azukicola
  misc_feature: 1444
tatatatatattcctttgcattatctgagaaaactgattttattcttattttattaggattattttctatttcttttctaaattccttgaatttta

SEQ ID NO: 28380 - DNA, 96 bp, Fusarium azukicola
  misc_feature: 1444
agaccctattgtataaagaatggaataaaatataatacaagtccgcctcataataaacaagctaatggctttgtagaaaggataaataggactata

SEQ ID NO: 28381 - DNA, 96 bp, Fusarium azukicola
  misc_feature: 1444
taaccctaatttcaaccaattaaccctaacccttaactctactactacccctaaccctaatttcaaccaattaaccctaacccttaactctactac

SEQ ID NO: 28382 - DNA, 96 bp, Fusarium azukicola
  misc_feature: 1444
ataaaattcaaggaatttagaaaagaaatagaaaataatcctaataaaataagaataaaatcagttttctcagataatgcaaaggaatatatatat

SEQ ID NO: 28383 - DNA, 96 bp, Fusarium azukicola
  misc_feature: 1442
aagaccctattgtataaagaatggaataaaatataatacaagtccgcctcataataaacaagctaatggctttgtagaaaggataaataggactat

SEQ ID NO: 28384 - DNA, 96 bp, Fusarium azukicola
  misc_feature: 1440
ttgaaattagggttaggggtagtagtagagttaagggttagggttaattggttgaaattagggttaggggtagtagtagagttaagggttagggtt

SEQ ID NO: 28385 - DNA, 96 bp, Fusarium azukicola
  misc_feature: 1439
cctaagggtttatacttaaaagaagattatacttcttttttaagtcttttctaagactttatacctccttaagtcttctttaagactttataactg

SEQ ID NO: 28386 - DNA, 96 bp, Fusarium azukicola
  misc_feature: 1438
aataataagaacgtataaagctataacccttataagattataactttaaaggaggctgttaatgttctatattatattaccaactatagtgatata

SEQ ID NO: 28387 - DNA, 96 bp, Fusarium azukicola
  misc_feature: 1436
ctaacccttaactctactactacccctaaccctaatttcaaccaattaaccctaacccttaactctactactacccctaaccctaatttcaaccaa

SEQ ID NO: 28388 - DNA, 96 bp, Fusarium azukicola
  misc_feature: 1436
taataaaggggtttttactaagatatatataataataatagaggtttaattttttcctctaataataagaacgtataaagctataacccttataag

SEQ ID NO: 28389 - DNA, 96 bp, Fusarium azukicola
  misc_feature: 1436
attagaaataaccttagctgttattatatataggttatttttctcttttccttgtgatattatttttccttgcttatttaaaagaaggacttcttg

SEQ ID NO: 28390 - DNA, 96 bp, Fusarium azukicola
  misc_feature: 1435
aaagcttttctttaaccaagaaagcttccattctcaaagcccaagtaatataattctcgcttccaataagccgggaaatattatacttagtggcca

SEQ ID NO: 28391 - DNA, 96 bp, Fusarium azukicola
  misc_feature: 1434
accctaatttcaaccaattaaccctaacccttaactctactactacccctaaccctaatttcaaccaattaaccctaacccttaactctactacta

SEQ ID NO: 28392 - DNA, 96 bp, Fusarium azukicola
  misc_feature: 1434
accctatactctcttctctcttttactttaccctatactctcttctctcttttactttaccctatactctcttctctcttttactttaccctatac

SEQ ID NO: 28393 - DNA, 96 bp, Fusarium azukicola
  misc_feature: 1433
agctattataaaattcaaggaatttagaaaagaaatagaaaataatcctaataaaataagaataaaatcagttttctcagataatgcaaaggaata

SEQ ID NO: 28394 - DNA, 96 bp, Fusarium azukicola
  misc_feature: 1433
ctaatttcaaccaattaaccctaacccttaactctactactacccctaaccctaatttcaaccaattaaccctaacccttaactctactactaccc

SEQ ID NO: 28395 - DNA, 96 bp, Fusarium azukicola
  misc_feature: 1432
aagggtattattctaattggttaaaaaggttcctacagacctttatgactgccgtcatctatgcatcaaagtataataactgccgattggctaaaa

SEQ ID NO: 28396 - DNA, 96 bp, Fusarium azukicola
  misc_feature: 1432
tctaataataagaacgtataaagctataacccttataagattataactttaaaggaggctgttaatgttctatattatattaccaactatagtgat

SEQ ID NO: 28397 - DNA, 96 bp, Fusarium azukicola
  misc_feature: 1431
ccctattgtataaagaatggaataaaatataatacaagtccgcctcataataaacaagctaatggctttgtagaaaggataaataggactatatta

SEQ ID NO: 28398 - DNA, 96 bp, Fusarium azukicola
  misc_feature: 1431
acagcataagctatatcaggtctagtttttatagctagaaatattaaagaacctatttccttttggaattgctttatatcttctggagaagaaggt

SEQ ID NO: 28399 - DNA, 96 bp, Fusarium azukicola
  misc_feature: 1430
attatctgagaaaactgattttattcttattttattaggattattttctatttcttttctaaattccttgaattttataatagcttctgacttatt

SEQ ID NO: 28400 - DNA, 96 bp, Fusarium azukicola
  misc_feature: 1425
ataagctaagaccctattgtataaagaatggaataaaatataatacaagtccgcctcataataaacaagctaatggctttgtagaaaggataaata

SEQ ID NO: 28401 - DNA, 96 bp, Fusarium azukicola
  misc_feature: 1425
ctaaccctaatttcaaccaattaaccctaacccttaactctactactacccctaaccctaatttcaaccaattaaccctaacccttaactctacta

SEQ ID NO: 28402 - DNA, 96 bp, Fusarium azukicola
  misc_feature: 1421
taagaccctattgtataaagaatggaataaaatataatacaagtccgcctcataataaacaagctaatggctttgtagaaaggataaataggacta

SEQ ID NO: 28403 - DNA, 96 bp, Fusarium azukicola
  misc_feature: 1420
ggtctataataaaggggtttttactaagatatatataataataatagaggtttaattttttcctctaataataagaacgtataaagctataaccct

SEQ ID NO: 28404 - DNA, 96 bp, Fusarium azukicola
  misc_feature: 1419
atattatttttccttgcttatttaaaagaaggacttcttgtttatttataatagaagttatattataaagagaagattgacttattaagttaacag

SEQ ID NO: 28405 - DNA, 96 bp, Fusarium azukicola
  misc_feature: 1412
tcagttttctcagataatgcaaaggaatatatatataagctaagaccctattgtataaagaatggaataaaatataatacaagtccgcctcataat

SEQ ID NO: 28406 - DNA, 96 bp, Fusarium azukicola
  misc_feature: 1412
aaatttaataggtactttggaagttcctatttcttgtttattatatttccttattattttatttgtatattttgcttgtgaaaaagatatgctctt

SEQ ID NO: 28407 - DNA, 96 bp, Fusarium azukicola
  misc_feature: 1411
agtataatatttcccggcttattggaagcgagaattatattacttgggctttgagaatggaagctttcttggttaaagaaaagctttctagtacta

SEQ ID NO: 28408 - DNA, 96 bp, Fusarium azukicola
  misc_feature: 1411
ctaagaccctattgtataaagaatggaataaaatataatacaagtccgcctcataataaacaagctaatggctttgtagaaaggataaataggact

SEQ ID NO: 28409 - DNA, 96 bp, Fusarium azukicola
  misc_feature: 1407
gaacgtataaagctataacccttataagattataactttaaaggaggctgttaatgttctatattatattaccaactatagtgatatatccctata

SEQ ID NO: 28410 - DNA, 96 bp, Fusarium azukicola
  misc_feature: 1407
acttctaagccttggaaaaagaagaaaactgccttaaaatgcagttattgcaaactgccaggtcataaagacccagattgctattttttgcaccct

SEQ ID NO: 28411 - DNA, 96 bp, Fusarium azukicola
  misc_feature: 1406
cctatataataaggaattgctattgcattcctaagttagctgttaacttaataagtcaatcttctctttataatataacttctattataaataaac

SEQ ID NO: 28412 - DNA, 96 bp, Fusarium azukicola
  misc_feature: 1406
cctaatttcaaccaattaaccctaacccttaactctactactacccctaaccctaatttcaaccaattaaccctaacccttaactctactactacc

SEQ ID NO: 28413 - DNA, 96 bp, Fusarium azukicola
  misc_feature: 1405
caaccaattaaccctaacccttaactctactactacccctaaccctaatttcaaccaattaaccctaacccttaactctactactacccctaaccc

SEQ ID NO: 28414 - DNA, 96 bp, Fusarium azukicola
  misc_feature: 1404
tagaagtaaataataaagctctaaccttttctaatatagtcctatttatcctttctacaaagccattagcttgtttattatgaggcggacttgtat

SEQ ID NO: 28415 - DNA, 96 bp, Fusarium azukicola
  misc_feature: 1404
ccttcttctccagaagatataaagcaattccaaaaggaaataggttctttaatatttctagctataaaaactagacctgatatagcttatgctgta

SEQ ID NO: 28416 - DNA, 96 bp, Fusarium azukicola
  misc_feature: 1401
ttcaaccaattaaccctaacccttaactctactactacccctaaccctaatttcaaccaattaaccctaacccttaactctactactacccctaac

SEQ ID NO: 28417 - DNA, 96 bp, Fusarium azukicola
  misc_feature: 1401
tgatattatttttccttgcttatttaaaagaaggacttcttgtttatttataatagaagttatattataaagagaagattgacttattaagttaac

SEQ ID NO: 28418 - DNA, 96 bp, Fusarium azukicola
  misc_feature: 1401
agtaaataataaagctctaaccttttctaatatagtcctatttatcctttctacaaagccattagcttgtttattatgaggcggacttgtattata

SEQ ID NO: 28419 - DNA, 96 bp, Fusarium azukicola
  misc_feature: 1399
aacctaattctaagaaggaagaaagagaaaagaaacaagaaaagctatttatagctaattcttcttcttcgtcatctcctaaagccgaggaagacc

SEQ ID NO: 28420 - DNA, 96 bp, Fusarium azukicola
  misc_feature: 1398
gaccctattgtataaagaatggaataaaatataatacaagtccgcctcataataaacaagctaatggctttgtagaaaggataaataggactatat

SEQ ID NO: 28421 - DNA, 96 bp, Fusarium azukicola
  misc_feature: 1397
caaataactacagcataagctatatcaggtctagtttttatagctagaaatattaaagaacctatttccttttggaattgctttatatcttctgga

SEQ ID NO: 28422 - DNA, 96 bp, Fusarium azukicola
  misc_feature: 1397
gtaaataataaagctctaaccttttctaatatagtcctatttatcctttctacaaagccattagcttgtttattatgaggcggacttgtattatat

SEQ ID NO: 28423 - DNA, 96 bp, Fusarium azukicola
  misc_feature: 1396
ttggggaaaagccgcttctcttcctatattaggaatcggtgacttaataattaagttcctagataaagatacctatataataaggaattgctattg

SEQ ID NO: 28424 - DNA, 96 bp, Fusarium azukicola
  misc_feature: 1396
atgaatctaagagactagaaaaaacagattctaatgagatatatttttctaagacttctaagccttggaaaaagaagaaaactgccttaaaatgca

SEQ ID NO: 28425 - DNA, 96 bp, Fusarium azukicola
  misc_feature: 1396
tattataaaattcaaggaatttagaaaagaaatagaaaataatcctaataaaataagaataaaatcagttttctcagataatgcaaaggaatatat

SEQ ID NO: 28426 - DNA, 96 bp, Fusarium azukicola
  misc_feature: 1396
taagctaagaccctattgtataaagaatggaataaaatataatacaagtccgcctcataataaacaagctaatggctttgtagaaaggataaatag

SEQ ID NO: 28427 - DNA, 96 bp, Fusarium azukicola
  misc_feature: 1394
tctaagccttggaaaaagaagaaaactgccttaaaatgcagttattgcaaactgccaggtcataaagacccagattgctattttttgcaccctaat

SEQ ID NO: 28428 - DNA, 96 bp, Fusarium azukicola
  misc_feature: 1394
taaataataaagctctaaccttttctaatatagtcctatttatcctttctacaaagccattagcttgtttattatgaggcggacttgtattatatt

SEQ ID NO: 28429 - DNA, 96 bp, Fusarium azukicola
  misc_feature: 1393
gaaagcttttctttaaccaagaaagcttccattctcaaagcccaagtaatataattctcgcttccaataagccgggaaatattatacttagtggcc

SEQ ID NO: 28430 - DNA, 96 bp, Fusarium azukicola
  misc_feature: 1391
tattcttaaaatcccaaatcttataagaattaggaagataaccgattatagctcctttataagctctagtttctagtttatctaagggagaatggt

SEQ ID NO: 28431 - DNA, 96 bp, Fusarium azukicola
  misc_feature: 1391
tatatataagctaagaccctattgtataaagaatggaataaaatataatacaagtccgcctcataataaacaagctaatggctttgtagaaaggat

SEQ ID NO: 28432 - DNA, 96 bp, Fusarium azukicola
  misc_feature: 1388
gtttaattttttcctctaataataagaacgtataaagctataacccttataagattataactttaaaggaggctgttaatgttctatattatatta

SEQ ID NO: 28433 - DNA, 96 bp, Fusarium azukicola
  misc_feature: 1388
aagctaagaccctattgtataaagaatggaataaaatataatacaagtccgcctcataataaacaagctaatggctttgtagaaaggataaatagg

SEQ ID NO: 28434 - DNA, 96 bp, Fusarium azukicola
  misc_feature: 1387
gtgatattatttttccttgcttatttaaaagaaggacttcttgtttatttataatagaagttatattataaagagaagattgacttattaagttaa

SEQ ID NO: 28435 - DNA, 96 bp, Fusarium azukicola
  misc_feature: 1386
aggaatttagaaaagaaatagaaaataatcctaataaaataagaataaaatcagttttctcagataatgcaaaggaatatatatataagctaagac

SEQ ID NO: 28436 - DNA, 96 bp, Fusarium azukicola
  misc_feature: 1385
aggtctataataaaggggtttttactaagatatatataataataatagaggtttaattttttcctctaataataagaacgtataaagctataaccc

SEQ ID NO: 28437 - DNA, 96 bp, Fusarium azukicola
  misc_feature: 1383
agaagctattataaaattcaaggaatttagaaaagaaatagaaaataatcctaataaaataagaataaaatcagttttctcagataatgcaaagga

SEQ ID NO: 28438 - DNA, 96 bp, Fusarium azukicola
  misc_feature: 1383
tataaaattcaaggaatttagaaaagaaatagaaaataatcctaataaaataagaataaaatcagttttctcagataatgcaaaggaatatatata

SEQ ID NO: 28439 - DNA, 96 bp, Fusarium azukicola
  misc_feature: 1383
catctataaggctagaagaaagtgattctaggttataagcctcaggattactccttaaagcttgtgagatattagttatatagctggaatagctat

SEQ ID NO: 28440 - DNA, 96 bp, Fusarium azukicola
  misc_feature: 1382
ctaataataagaacgtataaagctataacccttataagattataactttaaaggaggctgttaatgttctatattatattaccaactatagtgata

SEQ ID NO: 28441 - DNA, 96 bp, Fusarium azukicola
  misc_feature: 1382
gtataaagctataacccttataagattataactttaaaggaggctgttaatgttctatattatattaccaactatagtgatatatccctataaacc

SEQ ID NO: 28442 - DNA, 96 bp, Fusarium azukicola
  misc_feature: 1375
taagagcatatctttttcacaagcaaaatatacaaataaaataataaggaaatataataaacaagaaataggaacttccaaagtacctattaaatt

SEQ ID NO: 28443 - DNA, 96 bp, Fusarium azukicola
  misc_feature: 1374
tggggaaaagccgcttctcttcctatattaggaatcggtgacttaataattaagttcctagataaagatacctatataataaggaattgctattgc

SEQ ID NO: 28444 - DNA, 96 bp, Fusarium azukicola
  misc_feature: 1374
caaggaatttagaaaagaaatagaaaataatcctaataaaataagaataaaatcagttttctcagataatgcaaaggaatatatatataagctaag

SEQ ID NO: 28445 - DNA, 96 bp, Fusarium azukicola
  misc_feature: 1373
ttagaaataaccttagctgttattatatataggttatttttctcttttccttgtgatattatttttccttgcttatttaaaagaaggacttcttgt

SEQ ID NO: 28446 - DNA, 96 bp, Fusarium azukicola
  misc_feature: 1373
aacaaataactacagcataagctatatcaggtctagtttttatagctagaaatattaaagaacctatttccttttggaattgctttatatcttctg

SEQ ID NO: 28447 - DNA, 96 bp, Fusarium azukicola
  misc_feature: 1372
cttctaagccttggaaaaagaagaaaactgccttaaaatgcagttattgcaaactgccaggtcataaagacccagattgctattttttgcacccta

SEQ ID NO: 28448 - DNA, 96 bp, Fusarium azukicola
  misc_feature: 1371
ctatagttggtaatataatatagaacattaacagcctcctttaaagttataatcttataagggttatagctttatacgttcttattattagaggaa

SEQ ID NO: 28449 - DNA, 96 bp, Fusarium azukicola
  misc_feature: 1371
cctaacccttaactctactactacccctaaccctaatttcaaccaattaaccctaacccttaactctactactacccctaaccctaatttcaacca

SEQ ID NO: 28450 - DNA, 96 bp, Fusarium azukicola
  misc_feature: 1370
ttgctattgcattcctaagttagctgttaacttaataagtcaatcttctctttataatataacttctattataaataaacaagaagtccttctttt

SEQ ID NO: 28451 - DNA, 96 bp, Fusarium azukicola
  misc_feature: 1369
tatataagctaagaccctattgtataaagaatggaataaaatataatacaagtccgcctcataataaacaagctaatggctttgtagaaaggataa

SEQ ID NO: 28452 - DNA, 96 bp, Fusarium azukicola
  misc_feature: 1369
aaacctaattctaagaaggaagaaagagaaaagaaacaagaaaagctatttatagctaattcttcttcttcgtcatctcctaaagccgaggaagac

SEQ ID NO: 28453 - DNA, 96 bp, Fusarium azukicola
  misc_feature: 1368
gtctataataaaggggtttttactaagatatatataataataatagaggtttaattttttcctctaataataagaacgtataaagctataaccctt

SEQ ID NO: 28454 - DNA, 96 bp, Fusarium azukicola
  misc_feature: 1368
ataaaaacagataataataataatataattaaatataaatccagatatgttgtacaagggtttttacaaattcaaggtattaactatgaagaaacc

SEQ ID NO: 28455 - DNA, 96 bp, Fusarium azukicola
  misc_feature: 1367
aatatatatataagctaagaccctattgtataaagaatggaataaaatataatacaagtccgcctcataataaacaagctaatggctttgtagaaa

SEQ ID NO: 28456 - DNA, 96 bp, Fusarium azukicola
  misc_feature: 1367
ctataataaaggggtttttactaagatatatataataataatagaggtttaattttttcctctaataataagaacgtataaagctataacccttat

SEQ ID NO: 28457 - DNA, 96 bp, Fusarium azukicola
  misc_feature: 1366
ctattataaaattcaaggaatttagaaaagaaatagaaaataatcctaataaaataagaataaaatcagttttctcagataatgcaaaggaatata

SEQ ID NO: 28458 - DNA, 96 bp, Fusarium azukicola
  misc_feature: 1366
gggtgcaaaaaatagcaatctgggtctttatgacctggcagtttgcaataactgcattttaaggcagttttcttctttttccaaggcttagaagtc

SEQ ID NO: 28459 - DNA, 96 bp, Fusarium azukicola
  misc_feature: 1365
aagttataatcttataagggttatagctttatacgttcttattattagaggaaaaaattaaacctctattattattatatatatcttagtaaaaac

SEQ ID NO: 28460 - DNA, 96 bp, Fusarium azukicola
  misc_feature: 1365
caattaaccctaacccttaactctactactacccctaaccctaatttcaaccaattaaccctaacccttaactctactactacccctaaccctaat

SEQ ID NO: 28461 - DNA, 96 bp, Fusarium azukicola
  misc_feature: 1364
ttattcttaaaatcccaaatcttataagaattaggaagataaccgattatagctcctttataagctctagtttctagtttatctaagggagaatgg

SEQ ID NO: 28462 - DNA, 96 bp, Fusarium azukicola
  misc_feature: 1364
caaaggaatatatatataagctaagaccctattgtataaagaatggaataaaatataatacaagtccgcctcataataaacaagctaatggctttg

SEQ ID NO: 28463 - DNA, 96 bp, Fusarium azukicola
  misc_feature: 1362
acaagtccgcctcataataaacaagctaatggctttgtagaaaggataaataggactatattagaaaaggttagagctttattatttacttctaac

SEQ ID NO: 28464 - DNA, 96 bp, Fusarium azukicola
  misc_feature: 1361
aaggaatatatatataagctaagaccctattgtataaagaatggaataaaatataatacaagtccgcctcataataaacaagctaatggctttgta

SEQ ID NO: 28465 - DNA, 96 bp, Fusarium azukicola
  misc_feature: 1360
tataataaaggggtttttactaagatatatataataataatagaggtttaattttttcctctaataataagaacgtataaagctataacccttata

SEQ ID NO: 28466 - DNA, 96 bp, Fusarium azukicola
  misc_feature: 1360
acagataataataataatataattaaatataaatccagatatgttgtacaagggtttttacaaattcaaggtattaactatgaagaaacctatgct

SEQ ID NO: 28467 - DNA, 96 bp, Fusarium azukicola
  misc_feature: 1359
gtctatctattaaggaataagtcagaagctattataaaattcaaggaatttagaaaagaaatagaaaataatcctaataaaataagaataaaatca

SEQ ID NO: 28468 - DNA, 96 bp, Fusarium azukicola
  misc_feature: 1359
tcaaccaattaaccctaacccttaactctactactacccctaaccctaatttcaaccaattaaccctaacccttaactctactactacccctaacc

SEQ ID NO: 28469 - DNA, 96 bp, Fusarium azukicola
  misc_feature: 1359
tagaaataaccttagctgttattatatataggttatttttctcttttccttgtgatattatttttccttgcttatttaaaagaaggacttcttgtt

SEQ ID NO: 28470 - DNA, 96 bp, Fusarium azukicola
  misc_feature: 1359
caaaaccggtttttgctataactaagccatttataaggctttagtaatagattataaagcgcatcttccgggctatccgacggtataatcttggtc

SEQ ID NO: 28471 - DNA, 96 bp, Fusarium azukicola
  misc_feature: 1359
aaattcaaggaatttagaaaagaaatagaaaataatcctaataaaataagaataaaatcagttttctcagataatgcaaaggaatatatatataag

SEQ ID NO: 28472 - DNA, 96 bp, Fusarium azukicola
  misc_feature: 1358
caataactgcattttaaggcagttttcttctttttccaaggcttagaagtcttagaaaaatatatctcattagaatctgttttttctagtctctta

SEQ ID NO: 28473 - DNA, 96 bp, Fusarium azukicola
  misc_feature: 1357
attataaaattcaaggaatttagaaaagaaatagaaaataatcctaataaaataagaataaaatcagttttctcagataatgcaaaggaatatata

SEQ ID NO: 28474 - DNA, 96 bp, Fusarium azukicola
  misc_feature: 1356
gctaagaccctattgtataaagaatggaataaaatataatacaagtccgcctcataataaacaagctaatggctttgtagaaaggataaataggac

SEQ ID NO: 28475 - DNA, 96 bp, Fusarium azukicola
  misc_feature: 1355
gcaataactgcattttaaggcagttttcttctttttccaaggcttagaagtcttagaaaaatatatctcattagaatctgttttttctagtctctt

SEQ ID NO: 28476 - DNA, 96 bp, Fusarium azukicola
  misc_feature: 1355
cattatctgagaaaactgattttattcttattttattaggattattttctatttcttttctaaattccttgaattttataatagcttctgacttat

SEQ ID NO: 28477 - DNA, 96 bp, Fusarium azukicola
  misc_feature: 1353
ttgtataaagaatggaataaaatataatacaagtccgcctcataataaacaagctaatggctttgtagaaaggataaataggactatattagaaaa

SEQ ID NO: 28478 - DNA, 96 bp, Fusarium azukicola
  misc_feature: 1352
ttagaagtaaataataaagctctaaccttttctaatatagtcctatttatcctttctacaaagccattagcttgtttattatgaggcggacttgta

SEQ ID NO: 28479 - DNA, 96 bp, Fusarium azukicola
  misc_feature: 1352
aaacagataataataataatataattaaatataaatccagatatgttgtacaagggtttttacaaattcaaggtattaactatgaagaaacctatg

SEQ ID NO: 28480 - DNA, 96 bp, Fusarium azukicola
  misc_feature: 1350
atttcaaccaattaaccctaacccttaactctactactacccctaaccctaatttcaaccaattaaccctaacccttaactctactactaccccta

SEQ ID NO: 28481 - DNA, 96 bp, Fusarium azukicola
  misc_feature: 1350
agacttctaagccttggaaaaagaagaaaactgccttaaaatgcagttattgcaaactgccaggtcataaagacccagattgctattttttgcacc

SEQ ID NO: 28482 - DNA, 96 bp, Fusarium azukicola
  misc_feature: 1350
atcaaaaccggtttttgctataactaagccatttataaggctttagtaatagattataaagcgcatcttccgggctatccgacggtataatcttgg

SEQ ID NO: 28483 - DNA, 96 bp, Fusarium azukicola
  misc_feature: 1349
accctattgtataaagaatggaataaaatataatacaagtccgcctcataataaacaagctaatggctttgtagaaaggataaataggactatatt

SEQ ID NO: 28484 - DNA, 96 bp, Fusarium azukicola
  misc_feature: 1348
ttcatctataaggctagaagaaagtgattctaggttataagcctcaggattactccttaaagcttgtgagatattagttatatagctggaatagct

SEQ ID NO: 28485 - DNA, 96 bp, Fusarium azukicola
  misc_feature: 1347
tgtacaagggtttttacaaattcaaggtattaactatgaagaaacctatgcttgtactataagacctgagactctaagacttttctttataatttc

SEQ ID NO: 28486 - DNA, 96 bp, Fusarium azukicola
  misc_feature: 1345
aaaaacagataataataataatataattaaatataaatccagatatgttgtacaagggtttttacaaattcaaggtattaactatgaagaaaccta

SEQ ID NO: 28487 - DNA, 96 bp, Fusarium azukicola
  misc_feature: 1344
atagttggtaatataatatagaacattaacagcctcctttaaagttataatcttataagggttatagctttatacgttcttattattagaggaaaa

SEQ ID NO: 28488 - DNA, 96 bp, Fusarium azukicola
  misc_feature: 1343
tttttctaagacttctaagccttggaaaaagaagaaaactgccttaaaatgcagttattgcaaactgccaggtcataaagacccagattgctattt

SEQ ID NO: 28489 - DNA, 96 bp, Fusarium azukicola
  misc_feature: 1343
ctcggctttaggagatgacgaagaagaagaattagctataaatagcttttcttgtttcttttctctttcttccttcttagaattaggtttagattc

SEQ ID NO: 28490 - DNA, 96 bp, Fusarium azukicola
  misc_feature: 1342
tataaagctataacccttataagattataactttaaaggaggctgttaatgttctatattatattaccaactatagtgatatatccctataaacca

SEQ ID NO: 28491 - DNA, 96 bp, Fusarium azukicola
  misc_feature: 1342
taccctatactctcttctctcttttactttaccctatactctcttctctcttttactttaccctatactctcttctctcttttactttaccctata

SEQ ID NO: 28492 - DNA, 96 bp, Fusarium azukicola
  misc_feature: 1341
atataagctaagaccctattgtataaagaatggaataaaatataatacaagtccgcctcataataaacaagctaatggctttgtagaaaggataaa

SEQ ID NO: 28493 - DNA, 96 bp, Fusarium azukicola
  misc_feature: 1341
cctctaataataagaacgtataaagctataacccttataagattataactttaaaggaggctgttaatgttctatattatattaccaactatagtg

SEQ ID NO: 28494 - DNA, 96 bp, Fusarium azukicola
  misc_feature: 1339
ctatataataaggaattgctattgcattcctaagttagctgttaacttaataagtcaatcttctctttataatataacttctattataaataaaca

SEQ ID NO: 28495 - DNA, 96 bp, Fusarium azukicola
  misc_feature: 1339
gttataatcttataagggttatagctttatacgttcttattattagaggaaaaaattaaacctctattattattatatatatcttagtaaaaaccc

SEQ ID NO: 28496 - DNA, 96 bp, Fusarium azukicola
  misc_feature: 1339
agtactagaaagcttttctttaaccaagaaagcttccattctcaaagcccaagtaatataattctcgcttccaataagccgggaaatattatactt

SEQ ID NO: 28497 - DNA, 96 bp, Fusarium azukicola
  misc_feature: 1335
ctctaataataagaacgtataaagctataacccttataagattataactttaaaggaggctgttaatgttctatattatattaccaactatagtga

SEQ ID NO: 28498 - DNA, 96 bp, Fusarium azukicola
  misc_feature: 1335
taatttcaaccaattaaccctaacccttaactctactactacccctaaccctaatttcaaccaattaaccctaacccttaactctactactacccc

SEQ ID NO: 28499 - DNA, 96 bp, Fusarium azukicola
  misc_feature: 1334
ttataaaattcaaggaatttagaaaagaaatagaaaataatcctaataaaataagaataaaatcagttttctcagataatgcaaaggaatatatat

SEQ ID NO: 28500 - DNA, 96 bp, Fusarium azukicola
  misc_feature: 1334
agatatatataataataatagaggtttaattttttcctctaataataagaacgtataaagctataacccttataagattataactttaaaggaggc

SEQ ID NO: 28501 - DNA, 96 bp, Fusarium azukicola
  misc_feature: 1333
aaagttataatcttataagggttatagctttatacgttcttattattagaggaaaaaattaaacctctattattattatatatatcttagtaaaaa

SEQ ID NO: 28502 - DNA, 96 bp, Fusarium azukicola
  misc_feature: 1333
atattcctttgcattatctgagaaaactgattttattcttattttattaggattattttctatttcttttctaaattccttgaattttataatagc

SEQ ID NO: 28503 - DNA, 96 bp, Fusarium azukicola
  misc_feature: 1333
attagaggaaaaaattaaacctctattattattatatatatcttagtaaaaacccctttattatagacctgatattataagggaaaatctaagatt

SEQ ID NO: 28504 - DNA, 96 bp, Fusarium azukicola
  misc_feature: 1332
cagttttctcagataatgcaaaggaatatatatataagctaagaccctattgtataaagaatggaataaaatataatacaagtccgcctcataata

SEQ ID NO: 28505 - DNA, 96 bp, Fusarium azukicola
  misc_feature: 1332
ctaagccttggaaaaagaagaaaactgccttaaaatgcagttattgcaaactgccaggtcataaagacccagattgctattttttgcaccctaata

SEQ ID NO: 28506 - DNA, 96 bp, Fusarium azukicola
  misc_feature: 1332
gataaaaacagataataataataatataattaaatataaatccagatatgttgtacaagggtttttacaaattcaaggtattaactatgaagaaac

SEQ ID NO: 28507 - DNA, 96 bp, Fusarium azukicola
  misc_feature: 1331
taaaaacagataataataataatataattaaatataaatccagatatgttgtacaagggtttttacaaattcaaggtattaactatgaagaaacct

SEQ ID NO: 28508 - DNA, 96 bp, Fusarium azukicola
  misc_feature: 1330
gaaattagggttaggggtagtagtagagttaagggttagggttaattggttgaaattagggttaggggtagtagtagagttaagggttagggttaa

SEQ ID NO: 28509 - DNA, 96 bp, Fusarium azukicola
  misc_feature: 1329
acctaattctaagaaggaagaaagagaaaagaaacaagaaaagctatttatagctaattcttcttcttcgtcatctcctaaagccgaggaagacct

SEQ ID NO: 28510 - DNA, 96 bp, Fusarium azukicola
  misc_feature: 1328
aaaggaatatatatataagctaagaccctattgtataaagaatggaataaaatataatacaagtccgcctcataataaacaagctaatggctttgt

SEQ ID NO: 28511 - DNA, 96 bp, Fusarium azukicola
  misc_feature: 1325
agagttaagggttagggttaattggttgaaattagggttaggggtagtagtagagttaagggttagggttaattggttgaaattagggttaggggt

SEQ ID NO: 28512 - DNA, 96 bp, Fusarium azukicola
  misc_feature: 1322
ggaatttagaaaagaaatagaaaataatcctaataaaataagaataaaatcagttttctcagataatgcaaaggaatatatatataagctaagacc

SEQ ID NO: 28513 - DNA, 96 bp, Fusarium azukicola
  misc_feature: 1321
tttcaaccaattaaccctaacccttaactctactactacccctaaccctaatttcaaccaattaaccctaacccttaactctactactacccctaa

SEQ ID NO: 28514 - DNA, 96 bp, Fusarium azukicola
  misc_feature: 1321
ttgtacaagggtttttacaaattcaaggtattaactatgaagaaacctatgcttgtactataagacctgagactctaagacttttctttataattt

SEQ ID NO: 28515 - DNA, 96 bp, Fusarium azukicola
  misc_feature: 1318
aagatatatataataataatagaggtttaattttttcctctaataataagaacgtataaagctataacccttataagattataactttaaaggagg

SEQ ID NO: 28516 - DNA, 96 bp, Fusarium azukicola
  misc_feature: 1318
attcaaggaatttagaaaagaaatagaaaataatcctaataaaataagaataaaatcagttttctcagataatgcaaaggaatatatatataagct

SEQ ID NO: 28517 - DNA, 96 bp, Fusarium azukicola
  misc_feature: 1316
tcggctttaggagatgacgaagaagaagaattagctataaatagcttttcttgtttcttttctctttcttccttcttagaattaggtttagattcc

SEQ ID NO: 28518 - DNA, 96 bp, Fusarium azukicola
  misc_feature: 1316
gtttgcaataactgcattttaaggcagttttcttctttttccaaggcttagaagtcttagaaaaatatatctcattagaatctgttttttctagtc

SEQ ID NO: 28519 - DNA, 96 bp, Fusarium azukicola
  misc_feature: 1315
ttctaagccttggaaaaagaagaaaactgccttaaaatgcagttattgcaaactgccaggtcataaagacccagattgctattttttgcaccctaa

SEQ ID NO: 28520 - DNA, 96 bp, Fusarium azukicola
  misc_feature: 1314
aacagataataataataatataattaaatataaatccagatatgttgtacaagggtttttacaaattcaaggtattaactatgaagaaacctatgc

SEQ ID NO: 28521 - DNA, 96 bp, Fusarium azukicola
  misc_feature: 1313
tttcttcatagttaataccttgaatttgtaaaaacccttgtacaacatatctggatttatatttaattatattattattattatctgtttttatct

SEQ ID NO: 28522 - DNA, 96 bp, Fusarium azukicola
  misc_feature: 1312
aaggaatttagaaaagaaatagaaaataatcctaataaaataagaataaaatcagttttctcagataatgcaaaggaatatatatataagctaaga

SEQ ID NO: 28523 - DNA, 96 bp, Fusarium azukicola
  misc_feature: 1312
tcatctataaggctagaagaaagtgattctaggttataagcctcaggattactccttaaagcttgtgagatattagttatatagctggaatagcta

SEQ ID NO: 28524 - DNA, 96 bp, Fusarium azukicola
  misc_feature: 1312
acaaggaaaagagaaaaataacctatatataataacagctaaggttatttctaataagaataactatagactaagagataacttagatcttcctat

SEQ ID NO: 28525 - DNA, 96 bp, Fusarium azukicola
  misc_feature: 1310
aacgtataaagctataacccttataagattataactttaaaggaggctgttaatgttctatattatattaccaactatagtgatatatccctataa

SEQ ID NO: 28526 - DNA, 96 bp, Fusarium azukicola
  misc_feature: 1308
tctataataaaggggtttttactaagatatatataataataatagaggtttaattttttcctctaataataagaacgtataaagctataaccctta

SEQ ID NO: 28527 - DNA, 96 bp, Fusarium azukicola
  misc_feature: 1308
atcaaaatccatttcatctggggtctcagaaagggaaattaggtcttcctcggctttaggagatgacgaagaagaagaattagctataaatagctt

SEQ ID NO: 28528 - DNA, 96 bp, Fusarium azukicola
  misc_feature: 1307
accaattaaccctaacccttaactctactactacccctaaccctaatttcaaccaattaaccctaacccttaactctactactacccctaacccta

SEQ ID NO: 28529 - DNA, 96 bp, Fusarium azukicola
  misc_feature: 1307
gtacaagggtttttacaaattcaaggtattaactatgaagaaacctatgcttgtactataagacctgagactctaagacttttctttataatttct

SEQ ID NO: 28530 - DNA, 96 bp, Fusarium azukicola
  misc_feature: 1307
aagaggggttatttccttcgagaaagctattttctattatagttatatccttagagataactagttttttattcttaaaatcccaaatcttataag

SEQ ID NO: 28531 - DNA, 96 bp, Fusarium azukicola
  misc_feature: 1304
gagagtatagggtaaagtaaaagagagaagagagtatagggtaaagtaaaagagagaagagagtatagggtaaagtaaaagagagaagagagtata

SEQ ID NO: 28532 - DNA, 96 bp, Fusarium azukicola
  misc_feature: 1304
aaaacagattctaatgagatatatttttctaagacttctaagccttggaaaaagaagaaaactgccttaaaatgcagttattgcaaactgccaggt

SEQ ID NO: 28533 - DNA, 96 bp, Fusarium azukicola
  misc_feature: 1302
tcaaaaccggtttttgctataactaagccatttataaggctttagtaatagattataaagcgcatcttccgggctatccgacggtataatcttggt

SEQ ID NO: 28534 - DNA, 96 bp, Fusarium azukicola
  misc_feature: 1302
gcttgtttattatgaggcggacttgtattatattttattccattctttatacaatagggtcttagcttatatatatattcctttgcattatctgag

SEQ ID NO: 28535 - DNA, 96 bp, Fusarium azukicola
  misc_feature: 1302
aattcaaggaatttagaaaagaaatagaaaataatcctaataaaataagaataaaatcagttttctcagataatgcaaaggaatatatatataagc

SEQ ID NO: 28536 - DNA, 96 bp, Fusarium azukicola
  misc_feature: 1295
tctatctattaaggaataagtcagaagctattataaaattcaaggaatttagaaaagaaatagaaaataatcctaataaaataagaataaaatcag

SEQ ID NO: 28537 - DNA, 96 bp, Fusarium azukicola
  misc_feature: 1294
ttatacttaaaagaagattatacttcttttttaagtcttttctaagactttatacctccttaagtcttctttaagactttataactgctttttgag

SEQ ID NO: 28538 - DNA, 96 bp, Fusarium azukicola
  misc_feature: 1294
tctcttagtctatagttattcttattagaaataaccttagctgttattatatataggttatttttctcttttccttgtgatattatttttccttgc

SEQ ID NO: 28539 - DNA, 96 bp, Fusarium azukicola
  misc_feature: 1294
agttataatcttataagggttatagctttatacgttcttattattagaggaaaaaattaaacctctattattattatatatatcttagtaaaaacc

SEQ ID NO: 28540 - DNA, 96 bp, Fusarium azukicola
  misc_feature: 1292
ttgtttatttataatagaagttatattataaagagaagattgacttattaagttaacagctaacttaggaatgcaatagcaattccttattatata

SEQ ID NO: 28541 - DNA, 96 bp, Fusarium azukicola
  misc_feature: 1292
agctaagaccctattgtataaagaatggaataaaatataatacaagtccgcctcataataaacaagctaatggctttgtagaaaggataaatagga

SEQ ID NO: 28542 - DNA, 96 bp, Fusarium azukicola
  misc_feature: 1290
atatatataagctaagaccctattgtataaagaatggaataaaatataatacaagtccgcctcataataaacaagctaatggctttgtagaaagga

SEQ ID NO: 28543 - DNA, 96 bp, Fusarium azukicola
  misc_feature: 1288
gatgaatctaagagactagaaaaaacagattctaatgagatatatttttctaagacttctaagccttggaaaaagaagaaaactgccttaaaatgc

SEQ ID NO: 28544 - DNA, 96 bp, Fusarium azukicola
  misc_feature: 1287
tcctctaataataagaacgtataaagctataacccttataagattataactttaaaggaggctgttaatgttctatattatattaccaactatagt

SEQ ID NO: 28545 - DNA, 96 bp, Fusarium azukicola
  misc_feature: 1287
cacaaggaaaagagaaaaataacctatatataataacagctaaggttatttctaataagaataactatagactaagagataacttagatcttccta

SEQ ID NO: 28546 - DNA, 96 bp, Fusarium azukicola
  misc_feature: 1286
taagccttggaaaaagaagaaaactgccttaaaatgcagttattgcaaactgccaggtcataaagacccagattgctattttttgcaccctaataa

SEQ ID NO: 28547 - DNA, 96 bp, Fusarium azukicola
  misc_feature: 1286
agaggggttatttccttcgagaaagctattttctattatagttatatccttagagataactagttttttattcttaaaatcccaaatcttataaga

SEQ ID NO: 28548 - DNA, 96 bp, Fusarium azukicola
  misc_feature: 1285
ctcttagtctatagttattcttattagaaataaccttagctgttattatatataggttatttttctcttttccttgtgatattatttttccttgct

SEQ ID NO: 28549 - DNA, 96 bp, Fusarium azukicola
  misc_feature: 1284
taatcttagattttcccttataatatcaggtctataataaaggggtttttactaagatatatataataataatagaggtttaattttttcctctaa

SEQ ID NO: 28550 - DNA, 96 bp, Fusarium azukicola
  misc_feature: 1284
atatatatataagctaagaccctattgtataaagaatggaataaaatataatacaagtccgcctcataataaacaagctaatggctttgtagaaag

SEQ ID NO: 28551 - DNA, 96 bp, Fusarium azukicola
  misc_feature: 1284
acaaataactacagcataagctatatcaggtctagtttttatagctagaaatattaaagaacctatttccttttggaattgctttatatcttctgg

SEQ ID NO: 28552 - DNA, 96 bp, Fusarium azukicola
  misc_feature: 1283
gaatatatatataagctaagaccctattgtataaagaatggaataaaatataatacaagtccgcctcataataaacaagctaatggctttgtagaa

SEQ ID NO: 28553 - DNA, 96 bp, Fusarium azukicola
  misc_feature: 1283
tattgtataaagaatggaataaaatataatacaagtccgcctcataataaacaagctaatggctttgtagaaaggataaataggactatattagaa

SEQ ID NO: 28554 - DNA, 96 bp, Fusarium azukicola
  misc_feature: 1282
tttattcttaaaatcccaaatcttataagaattaggaagataaccgattatagctcctttataagctctagtttctagtttatctaagggagaatg

SEQ ID NO: 28555 - DNA, 96 bp, Fusarium azukicola
  misc_feature: 1282
cagaagctattataaaattcaaggaatttagaaaagaaatagaaaataatcctaataaaataagaataaaatcagttttctcagataatgcaaagg

SEQ ID NO: 28556 - DNA, 96 bp, Fusarium azukicola
  misc_feature: 1279
tatacctaaaaatagagtaaaaattctataatataatatgtggtttatagggatatatcactatagttggtaatataatatagaacattaacaata

SEQ ID NO: 28557 - DNA, 96 bp, Fusarium azukicola
  misc_feature: 1279
tatatatataagctaagaccctattgtataaagaatggaataaaatataatacaagtccgcctcataataaacaagctaatggctttgtagaaagg

SEQ ID NO: 28558 - DNA, 96 bp, Fusarium azukicola
  misc_feature: 1279
atggctttgtagaaaggataaataggactatattagaaaaggttagagctttattatttacttctaacctacctaaatacctttggggagaggctg

SEQ ID NO: 28559 - DNA, 96 bp, Fusarium azukicola
  misc_feature: 1278
gatacaggtgctactaggcatattgtatgtagaaaagaatttctagttaattttagaaaaataaataaaaatattacttggggaaaagccgcttct

SEQ ID NO: 28560 - DNA, 96 bp, Fusarium azukicola
  misc_feature: 1278
cagataataataataatataattaaatataaatccagatatgttgtacaagggtttttacaaattcaaggtattaactatgaagaaacctatgctt

SEQ ID NO: 28561 - DNA, 96 bp, Fusarium azukicola
  misc_feature: 1277
tattagaggaaaaaattaaacctctattattattatatatatcttagtaaaaacccctttattatagacctgatattataagggaaaatctaagat

SEQ ID NO: 28562 - DNA, 96 bp, Fusarium azukicola
  misc_feature: 1276
aaagatcctctctttaaatatactagtgaggacctatatcaagtcaaaaactgcgaaaactgcaaactaggaaaattaactaaaaataatataaat

SEQ ID NO: 28563 - DNA, 96 bp, Fusarium azukicola
  misc_feature: 1274
tgtgatattatttttccttgcttatttaaaagaaggacttcttgtttatttataatagaagttatattataaagagaagattgacttattaagtta

SEQ ID NO: 28564 - DNA, 96 bp, Fusarium azukicola
  misc_feature: 1274
tagtatatttaaagagaggatcttttatttttatatatttaattagacttcttaagttaagatgacttagtcttttatgccagtcaaaaagactag

SEQ ID NO: 28565 - DNA, 96 bp, Fusarium azukicola
  misc_feature: 1274
tacaagggtttttacaaattcaaggtattaactatgaagaaacctatgcttgtactataagacctgagactctaagacttttctttataatttcta

SEQ ID NO: 28566 - DNA, 96 bp, Fusarium azukicola
  misc_feature: 1272
ttgcttatttaaaagaaggacttcttgtttatttataatagaagttatattataaagagaagattgacttattaagttaacagctaacttaggaat

SEQ ID NO: 28567 - DNA, 96 bp, Fusarium azukicola
  misc_feature: 1271
ctaattctaagaaggaagaaagagaaaagaaacaagaaaagctatttatagctaattcttcttcttcgtcatctcctaaagccgaggaagacctaa

SEQ ID NO: 28568 - DNA, 96 bp, Fusarium azukicola
  misc_feature: 1271
tgcaataactgcattttaaggcagttttcttctttttccaaggcttagaagtcttagaaaaatatatctcattagaatctgttttttctagtctct

SEQ ID NO: 28569 - DNA, 96 bp, Fusarium azukicola
  misc_feature: 1271
ataatcttagattttcccttataatatcaggtctataataaaggggtttttactaagatatatataataataatagaggtttaattttttcctcta

SEQ ID NO: 28570 - DNA, 96 bp, Fusarium azukicola
  misc_feature: 1271
cctcggctttaggagatgacgaagaagaagaattagctataaatagcttttcttgtttcttttctctttcttccttcttagaattaggtttagatt

SEQ ID NO: 28571 - DNA, 96 bp, Fusarium azukicola
  misc_feature: 1270
tttgcaataactgcattttaaggcagttttcttctttttccaaggcttagaagtcttagaaaaatatatctcattagaatctgttttttctagtct

SEQ ID NO: 28572 - DNA, 96 bp, Fusarium azukicola
  misc_feature: 1270
actagtctttttgactggcataaaagactaagtcatcttaacttaagaagtctaattaaatatataaaaataaaagatcctctctttaaatatact

SEQ ID NO: 28573 - DNA, 96 bp, Fusarium azukicola
  misc_feature: 1267
ggggaaaagccgcttctcttcctatattaggaatcggtgacttaataattaagttcctagataaagatacctatataataaggaattgctattgca

SEQ ID NO: 28574 - DNA, 96 bp, Fusarium azukicola
  misc_feature: 1266
cctattgtataaagaatggaataaaatataatacaagtccgcctcataataaacaagctaatggctttgtagaaaggataaataggactatattag

SEQ ID NO: 28575 - DNA, 96 bp, Fusarium azukicola
  misc_feature: 1264
atctcttagtctatagttattcttattagaaataaccttagctgttattatatataggttatttttctcttttccttgtgatattatttttccttg

SEQ ID NO: 28576 - DNA, 96 bp, Fusarium azukicola
  misc_feature: 1262
tagcttgtttattatgaggcggacttgtattatattttattccattctttatacaatagggtcttagcttatatatatattcctttgcattatctg

SEQ ID NO: 28577 - DNA, 96 bp, Fusarium azukicola
  misc_feature: 1262
aaacaagctaatggctttgtagaaaggataaataggactatattagaaaaggttagagctttattatttacttctaacctacctaaatacctttgg

SEQ ID NO: 28578 - DNA, 96 bp, Fusarium azukicola
  misc_feature: 1260
aactagtctttttgactggcataaaagactaagtcatcttaacttaagaagtctaattaaatatataaaaataaaagatcctctctttaaatatac

SEQ ID NO: 28579 - DNA, 96 bp, Fusarium azukicola
  misc_feature: 1259
ttgtgatattatttttccttgcttatttaaaagaaggacttcttgtttatttataatagaagttatattataaagagaagattgacttattaagtt

SEQ ID NO: 28580 - DNA, 96 bp, Fusarium azukicola
  misc_feature: 1259
tgaaattagggttaggggtagtagtagagttaagggttagggttaattggttgaaattagggttaggggtagtagtagagttaagggttagggtta

SEQ ID NO: 28581 - DNA, 96 bp, Fusarium azukicola
  misc_feature: 1258
aagataaaaacagataataataataatataattaaatataaatccagatatgttgtacaagggtttttacaaattcaaggtattaactatgaagaa

SEQ ID NO: 28582 - DNA, 96 bp, Fusarium azukicola
  misc_feature: 1257
ttttctaagacttctaagccttggaaaaagaagaaaactgccttaaaatgcagttattgcaaactgccaggtcataaagacccagattgctatttt

SEQ ID NO: 28583 - DNA, 96 bp, Fusarium azukicola
  misc_feature: 1257
acgtataaagctataacccttataagattataactttaaaggaggctgttaatgttctatattatattaccaactatagtgatatatccctataaa

SEQ ID NO: 28584 - DNA, 96 bp, Fusarium azukicola
  misc_feature: 1252
gcttatttaaaagaaggacttcttgtttatttataatagaagttatattataaagagaagattgacttattaagttaacagctaacttaggaatgc

SEQ ID NO: 28585 - DNA, 96 bp, Fusarium azukicola
  misc_feature: 1252
acaagggtttttacaaattcaaggtattaactatgaagaaacctatgcttgtactataagacctgagactctaagacttttctttataatttctat

SEQ ID NO: 28586 - DNA, 96 bp, Fusarium azukicola
  misc_feature: 1251
attattagaggaaaaaattaaacctctattattattatatatatcttagtaaaaacccctttattatagacctgatattataagggaaaatctaag

SEQ ID NO: 28587 - DNA, 96 bp, Fusarium azukicola
  misc_feature: 1251
agagtatagggtaaagtaaaagagagaagagagtatagggtaaagtaaaagagagaagagagtatagggtaaagtaaaagagagaagagagtatag

SEQ ID NO: 28588 - DNA, 96 bp, Fusarium azukicola
  misc_feature: 1250
aagacttctaagccttggaaaaagaagaaaactgccttaaaatgcagttattgcaaactgccaggtcataaagacccagattgctattttttgcac

SEQ ID NO: 28589 - DNA, 96 bp, Fusarium azukicola
  misc_feature: 1249
aggctgttaatgttctatattatattaccaactatagtgatatatccctataaaccacatattatattatagaatttttactctatttttaggtat

SEQ ID NO: 28590 - DNA, 96 bp, Fusarium azukicola
  misc_feature: 1248
tatagaaattataaagaaaagtcttagagtctcaggtcttatagtacaagcataggtttcttcatagttaataccttgaatttgtaaaaacccttg

SEQ ID NO: 28591 - DNA, 96 bp, Fusarium azukicola
  misc_feature: 1247
ctttgcattatctgagaaaactgattttattcttattttattaggattattttctatttcttttctaaattccttgaattttataatagcttctga

SEQ ID NO: 28592 - DNA, 96 bp, Fusarium azukicola
  misc_feature: 1247
taagatatatataataataatagaggtttaattttttcctctaataataagaacgtataaagctataacccttataagattataactttaaaggag

SEQ ID NO: 28593 - DNA, 96 bp, Fusarium azukicola
  misc_feature: 1246
cctaattctaagaaggaagaaagagaaaagaaacaagaaaagctatttatagctaattcttcttcttcgtcatctcctaaagccgaggaagaccta

SEQ ID NO: 28594 - DNA, 96 bp, Fusarium azukicola
  misc_feature: 1241
gttggtaatataatatagaacattaacagcctcctttaaagttataatcttataagggttatagctttatacgttcttattattagaggaaaaaat

SEQ ID NO: 28595 - DNA, 96 bp, Fusarium azukicola
  misc_feature: 1241
aactaattttatatatgatacaggtgctactaggcatattgtatgtagaaaagaatttctagttaattttagaaaaataaataaaaatattacttg

SEQ ID NO: 28596 - DNA, 96 bp, Fusarium azukicola
  misc_feature: 1238
ttgcaataactgcattttaaggcagttttcttctttttccaaggcttagaagtcttagaaaaatatatctcattagaatctgttttttctagtctc

SEQ ID NO: 28597 - DNA, 96 bp, Fusarium azukicola
  misc_feature: 1238
gctgttaatgttctatattatattaccaactatagtgatatatccctataaaccacatattatattatagaatttttactctatttttaggtatat

SEQ ID NO: 28598 - DNA, 96 bp, Fusarium azukicola
  misc_feature: 1238
aggaatatatatataagctaagaccctattgtataaagaatggaataaaatataatacaagtccgcctcataataaacaagctaatggctttgtag

SEQ ID NO: 28599 - DNA, 96 bp, Fusarium azukicola
  misc_feature: 1235
tgctattgcattcctaagttagctgttaacttaataagtcaatcttctctttataatataacttctattataaataaacaagaagtccttctttta

SEQ ID NO: 28600 - DNA, 96 bp, Fusarium azukicola
  misc_feature: 1235
cgtataaagctataacccttataagattataactttaaaggaggctgttaatgttctatattatattaccaactatagtgatatatccctataaac

SEQ ID NO: 28601 - DNA, 96 bp, Fusarium azukicola
  misc_feature: 1234
gctattgcattcctaagttagctgttaacttaataagtcaatcttctctttataatataacttctattataaataaacaagaagtccttcttttaa

SEQ ID NO: 28602 - DNA, 96 bp, Fusarium azukicola
  misc_feature: 1234
ggttagaagtaaataataaagctctaaccttttctaatatagtcctatttatcctttctacaaagccattagcttgtttattatgaggcggacttg

SEQ ID NO: 28603 - DNA, 96 bp, Fusarium azukicola
  misc_feature: 1233
gtatttaggtaggttagaagtaaataataaagctctaaccttttctaatatagtcctatttatcctttctacaaagccattagcttgtttattatg

SEQ ID NO: 28604 - DNA, 96 bp, Fusarium azukicola
  misc_feature: 1232
ttattagaggaaaaaattaaacctctattattattatatatatcttagtaaaaacccctttattatagacctgatattataagggaaaatctaaga

SEQ ID NO: 28605 - DNA, 96 bp, Fusarium azukicola
  misc_feature: 1232
ctgacttattccttaatagatagacttttagatatctagtagccctatctaggaaggtaataaagtatatatatttattataggtagggattctag

SEQ ID NO: 28606 - DNA, 96 bp, Fusarium azukicola
  misc_feature: 1231
agcttgtttattatgaggcggacttgtattatattttattccattctttatacaatagggtcttagcttatatatatattcctttgcattatctga

SEQ ID NO: 28607 - DNA, 96 bp, Fusarium azukicola
  misc_feature: 1231
agatgaatctaagagactagaaaaaacagattctaatgagatatatttttctaagacttctaagccttggaaaaagaagaaaactgccttaaaatg

SEQ ID NO: 28608 - DNA, 96 bp, Fusarium azukicola
  misc_feature: 1229
tataatcttagattttcccttataatatcaggtctataataaaggggtttttactaagatatatataataataatagaggtttaattttttcctct

SEQ ID NO: 28609 - DNA, 96 bp, Fusarium azukicola
  misc_feature: 1229
gcattatctgagaaaactgattttattcttattttattaggattattttctatttcttttctaaattccttgaattttataatagcttctgactta

SEQ ID NO: 28610 - DNA, 96 bp, Fusarium azukicola
  misc_feature: 1227
tttgcattatctgagaaaactgattttattcttattttattaggattattttctatttcttttctaaattccttgaattttataatagcttctgac

SEQ ID NO: 28611 - DNA, 96 bp, Fusarium azukicola
  misc_feature: 1227
tatagttggtaatataatatagaacattaacagcctcctttaaagttataatcttataagggttatagctttatacgttcttattattagaggaaa

SEQ ID NO: 28612 - DNA, 96 bp, Fusarium azukicola
  misc_feature: 1226
taattctaagaaggaagaaagagaaaagaaacaagaaaagctatttatagctaattcttcttcttcgtcatctcctaaagccgaggaagacctaat

SEQ ID NO: 28613 - DNA, 96 bp, Fusarium azukicola
  misc_feature: 1223
taactttaaaggaggctgttaatgttctatattatattaccaactatagtgatatatccctataaaccacatattatattatagaatttttactct

SEQ ID NO: 28614 - DNA, 96 bp, Fusarium azukicola
  misc_feature: 1222
aaagctatttatagctaattcttcttcttcgtcatctcctaaagccgaggaagacctaatttccctttctgagaccccagatgaaatggattttga

SEQ ID NO: 28615 - DNA, 96 bp, Fusarium azukicola
  misc_feature: 1221
tcctcggctttaggagatgacgaagaagaagaattagctataaatagcttttcttgtttcttttctctttcttccttcttagaattaggtttagat

SEQ ID NO: 28616 - DNA, 96 bp, Fusarium azukicola
  misc_feature: 1220
taaagttataatcttataagggttatagctttatacgttcttattattagaggaaaaaattaaacctctattattattatatatatcttagtaaaa

SEQ ID NO: 28617 - DNA, 96 bp, Fusarium azukicola
  misc_feature: 1220
gaggggttatttccttcgagaaagctattttctattatagttatatccttagagataactagttttttattcttaaaatcccaaatcttataagaa

SEQ ID NO: 28618 - DNA, 96 bp, Fusarium azukicola
  misc_feature: 1218
taaacaagctaatggctttgtagaaaggataaataggactatattagaaaaggttagagctttattatttacttctaacctacctaaatacctttg

SEQ ID NO: 28619 - DNA, 96 bp, Fusarium azukicola
  misc_feature: 1217
agttggtaatataatatagaacattaacagcctcctttaaagttataatcttataagggttatagctttatacgttcttattattagaggaaaaaa

SEQ ID NO: 28620 - DNA, 96 bp, Fusarium azukicola
  misc_feature: 1216
aagatcctctctttaaatatactagtgaggacctatatcaagtcaaaaactgcgaaaactgcaaactaggaaaattaactaaaaataatataaata

SEQ ID NO: 28621 - DNA, 96 bp, Fusarium azukicola
  misc_feature: 1215
gtcttttttaagactatatctcaactatggccactaagtataatatttcccggcttattggaagcgagaattatattacttgggctttgagaatgg

SEQ ID NO: 28622 - DNA, 96 bp, Fusarium azukicola
  misc_feature: 1214
atttaggtaggttagaagtaaataataaagctctaaccttttctaatatagtcctatttatcctttctacaaagccattagcttgtttattatgag

SEQ ID NO: 28623 - DNA, 96 bp, Fusarium azukicola
  misc_feature: 1211
tcaaggaatttagaaaagaaatagaaaataatcctaataaaataagaataaaatcagttttctcagataatgcaaaggaatatatatataagctaa

SEQ ID NO: 28624 - DNA, 96 bp, Fusarium azukicola
  misc_feature: 1210
agccttatagatgaatctaagagactagaaaaaacagattctaatgagatatatttttctaagacttctaagccttggaaaaagaagaaaactgcc

SEQ ID NO: 28625 - DNA, 96 bp, Fusarium azukicola
  misc_feature: 1209
agtcttttttaagactatatctcaactatggccactaagtataatatttcccggcttattggaagcgagaattatattacttgggctttgagaatg

SEQ ID NO: 28626 - DNA, 96 bp, Fusarium azukicola
  misc_feature: 1208
tgcttatttaaaagaaggacttcttgtttatttataatagaagttatattataaagagaagattgacttattaagttaacagctaacttaggaatg

SEQ ID NO: 28627 - DNA, 96 bp, Fusarium azukicola
  misc_feature: 1208
cctagaatcactttcttctagccttatagatgaatctaagagactagaaaaaacagattctaatgagatatatttttctaagacttctaagccttg

SEQ ID NO: 28628 - DNA, 96 bp, Fusarium azukicola
  misc_feature: 1207
gtactagaaagcttttctttaaccaagaaagcttccattctcaaagcccaagtaatataattctcgcttccaataagccgggaaatattatactta

SEQ ID NO: 28629 - DNA, 96 bp, Fusarium azukicola
  misc_feature: 1205
ctattgtataaagaatggaataaaatataatacaagtccgcctcataataaacaagctaatggctttgtagaaaggataaataggactatattaga

SEQ ID NO: 28630 - DNA, 96 bp, Fusarium azukicola
  misc_feature: 1205
cattaaaagaggggttatttccttcgagaaagctattttctattatagttatatccttagagataactagttttttattcttaaaatcccaaatct

SEQ ID NO: 28631 - DNA, 96 bp, Fusarium azukicola
  misc_feature: 1204
ccaattaaccctaacccttaactctactactacccctaaccctaatttcaaccaattaaccctaacccttaactctactactacccctaaccctaa

SEQ ID NO: 28632 - DNA, 96 bp, Fusarium azukicola
  misc_feature: 1201
aaaaacagattctaatgagatatatttttctaagacttctaagccttggaaaaagaagaaaactgccttaaaatgcagttattgcaaactgccagg

SEQ ID NO: 28633 - DNA, 96 bp, Fusarium azukicola
  misc_feature: 1198
aagaattaggaagataaccgattatagctcctttataagctctagtttctagtttatctaagggagaatggttcttataataaactatagacccaa

SEQ ID NO: 28634 - DNA, 96 bp, Fusarium azukicola
  misc_feature: 1195
ttcaaggaatttagaaaagaaatagaaaataatcctaataaaataagaataaaatcagttttctcagataatgcaaaggaatatatatataagcta

SEQ ID NO: 28635 - DNA, 96 bp, Fusarium azukicola
  misc_feature: 1194
gagttaagggttagggttaattggttgaaattagggttaggggtagtagtagagttaagggttagggttaattggttgaaattagggttaggggta

SEQ ID NO: 28636 - DNA, 96 bp, Fusarium azukicola
  misc_feature: 1192
ttttctcagataatgcaaaggaatatatatataagctaagaccctattgtataaagaatggaataaaatataatacaagtccgcctcataataaac

SEQ ID NO: 28637 - DNA, 96 bp, Fusarium azukicola
  misc_feature: 1191
actttaaaggaggctgttaatgttctatattatattaccaactatagtgatatatccctataaaccacatattatattatagaatttttactctat

SEQ ID NO: 28638 - DNA, 96 bp, Fusarium azukicola
  misc_feature: 1190
ttgcattatctgagaaaactgattttattcttattttattaggattattttctatttcttttctaaattccttgaattttataatagcttctgact

SEQ ID NO: 28639 - DNA, 96 bp, Fusarium azukicola
  misc_feature: 1189
ctttaaagttataatcttataagggttatagctttatacgttcttattattagaggaaaaaattaaacctctattattattatatatatcttagta

SEQ ID NO: 28640 - DNA, 96 bp, Fusarium azukicola
  misc_feature: 1188
ataagaattaggaagataaccgattatagctcctttataagctctagtttctagtttatctaagggagaatggttcttataataaactatagaccc

SEQ ID NO: 28641 - DNA, 96 bp, Fusarium azukicola
  misc_feature: 1184
tcttcctcggctttaggagatgacgaagaagaagaattagctataaatagcttttcttgtttcttttctctttcttccttcttagaattaggttta

SEQ ID NO: 28642 - DNA, 96 bp, Fusarium azukicola
  misc_feature: 1184
tagagttaagggttagggttaattggttgaaattagggttaggggtagtagtagagttaagggttagggttaattggttgaaattagggttagggg

SEQ ID NO: 28643 - DNA, 96 bp, Fusarium azukicola
  misc_feature: 1184
acctaaaaatagagtaaaaattctataatataatatgtggtttatagggatatatcactatagttggtaatataatatagaacattaacagcctcc

SEQ ID NO: 28644 - DNA, 96 bp, Fusarium azukicola
  misc_feature: 1184
aaagctataacccttataagattataactttaaaggaggctgttaatgttctatattatattaccaactatagtgatatatccctataaaccacat

SEQ ID NO: 28645 - DNA, 96 bp, Fusarium azukicola
  misc_feature: 1183
atgatacaggtgctactaggcatattgtatgtagaaaagaatttctagttaattttagaaaaataaataaaaatattacttggggaaaagccgctt

SEQ ID NO: 28646 - DNA, 96 bp, Fusarium azukicola
  misc_feature: 1180
tgatacaggtgctactaggcatattgtatgtagaaaagaatttctagttaattttagaaaaataaataaaaatattacttggggaaaagccgcttc

SEQ ID NO: 28647 - DNA, 96 bp, Fusarium azukicola
  misc_feature: 1180
aactttaaaggaggctgttaatgttctatattatattaccaactatagtgatatatccctataaaccacatattatattatagaatttttactcta

SEQ ID NO: 28648 - DNA, 96 bp, Fusarium azukicola
  misc_feature: 1179
tttttgactggcataaaagactaagtcatcttaacttaagaagtctaattaaatatataaaaataaaagatcctctctttaaatatactagtgagg

SEQ ID NO: 28649 - DNA, 96 bp, Fusarium azukicola
  misc_feature: 1176
gatcctctctttaaatatactagtgaggacctatatcaagtcaaaaactgcgaaaactgcaaactaggaaaattaactaaaaataatataaataaa

SEQ ID NO: 28650 - DNA, 96 bp, Fusarium azukicola
  misc_feature: 1176
ttaaagttataatcttataagggttatagctttatacgttcttattattagaggaaaaaattaaacctctattattattatatatatcttagtaaa

SEQ ID NO: 28651 - DNA, 96 bp, Fusarium azukicola
  misc_feature: 1174
ggaatatatatataagctaagaccctattgtataaagaatggaataaaatataatacaagtccgcctcataataaacaagctaatggctttgtaga

SEQ ID NO: 28652 - DNA, 96 bp, Fusarium azukicola
  misc_feature: 1174
cctatactctcttctctcttttactttaccctatactctcttctctcttttactttaccctatactctcttctctcttttactttaccctatactc

SEQ ID NO: 28653 - DNA, 96 bp, Fusarium azukicola
  misc_feature: 1170
gggtattattctaattggttaaaaaggttcctacagacctttatgactgccgtcatctatgcatcaaagtataataactgccgattggctaaaaaa

SEQ ID NO: 28654 - DNA, 96 bp, Fusarium azukicola
  misc_feature: 1170
ctaagatatatataataataatagaggtttaattttttcctctaataataagaacgtataaagctataacccttataagattataactttaaagga

SEQ ID NO: 28655 - DNA, 96 bp, Fusarium azukicola
  misc_feature: 1169
cttcctcggctttaggagatgacgaagaagaagaattagctataaatagcttttcttgtttcttttctctttcttccttcttagaattaggtttag

SEQ ID NO: 28656 - DNA, 96 bp, Fusarium azukicola
  misc_feature: 1164
actaggttttttatttatattatttttagttaattttcctagtttgcagttttcgcagtttttgacttgatataggtcctcactagtatatttaaa

SEQ ID NO: 28657 - DNA, 96 bp, Fusarium azukicola
  misc_feature: 1163
tattattagaggaaaaaattaaacctctattattattatatatatcttagtaaaaacccctttattatagacctgatattataagggaaaatctaa

SEQ ID NO: 28658 - DNA, 96 bp, Fusarium azukicola
  misc_feature: 1162
agtatagggtaaagtaaaagagagaagagagtatagggtaaagtaaaagagagaagagagtatagggtaaagtaaaagagagaagagagtataggg

SEQ ID NO: 28659 - DNA, 96 bp, Fusarium azukicola
  misc_feature: 1158
tagttggtaatataatatagaacattaacagcctcctttaaagttataatcttataagggttatagctttatacgttcttattattagaggaaaaa

SEQ ID NO: 28660 - DNA, 96 bp, Fusarium azukicola
  misc_feature: 1158
tatttaggtaggttagaagtaaataataaagctctaaccttttctaatatagtcctatttatcctttctacaaagccattagcttgtttattatga

SEQ ID NO: 28661 - DNA, 96 bp, Fusarium azukicola
  misc_feature: 1158
gtttatacttaaaagaagattatacttcttttttaagtcttttctaagactttatacctccttaagtcttctttaagactttataactgctttttg

SEQ ID NO: 28662 - DNA, 96 bp, Fusarium azukicola
  misc_feature: 1157
ttaattttttcctctaataataagaacgtataaagctataacccttataagattataactttaaaggaggctgttaatgttctatattatattacc

SEQ ID NO: 28663 - DNA, 96 bp, Fusarium azukicola
  misc_feature: 1156
ttggtaatataatatagaacattaacagcctcctttaaagttataatcttataagggttatagctttatacgttcttattattagaggaaaaaatt

SEQ ID NO: 28664 - DNA, 96 bp, Fusarium azukicola
  misc_feature: 1154
taagaattaggaagataaccgattatagctcctttataagctctagtttctagtttatctaagggagaatggttcttataataaactatagaccca

SEQ ID NO: 28665 - DNA, 96 bp, Fusarium azukicola
  misc_feature: 1151
agatcctctctttaaatatactagtgaggacctatatcaagtcaaaaactgcgaaaactgcaaactaggaaaattaactaaaaataatataaataa

SEQ ID NO: 28666 - DNA, 96 bp, Fusarium azukicola
  misc_feature: 1151
tagccttatagatgaatctaagagactagaaaaaacagattctaatgagatatatttttctaagacttctaagccttggaaaaagaagaaaactgc

SEQ ID NO: 28667 - DNA, 96 bp, Fusarium azukicola
  misc_feature: 1148
tttaattttttcctctaataataagaacgtataaagctataacccttataagattataactttaaaggaggctgttaatgttctatattatattac

SEQ ID NO: 28668 - DNA, 96 bp, Fusarium azukicola
  misc_feature: 1148
ggctgttaatgttctatattatattaccaactatagtgatatatccctataaaccacatattatattatagaatttttactctatttttaggtata

SEQ ID NO: 28669 - DNA, 96 bp, Fusarium azukicola
  misc_feature: 1146
gtcctcactagtatatttaaagagaggatcttttatttttatatatttaattagacttcttaagttaagatgacttagtcttttatgccagtcaaa

SEQ ID NO: 28670 - DNA, 96 bp, Fusarium azukicola
  misc_feature: 1145
ctattattattatatatatcttagtaaaaacccctttattatagacctgatattataagggaaaatctaagattatatagggaaaagtattaaaat

SEQ ID NO: 28671 - DNA, 96 bp, Fusarium azukicola
  misc_feature: 1144
ctagaatcactttcttctagccttatagatgaatctaagagactagaaaaaacagattctaatgagatatatttttctaagacttctaagccttgg

SEQ ID NO: 28672 - DNA, 96 bp, Fusarium azukicola
  misc_feature: 1144
actaagatatatataataataatagaggtttaattttttcctctaataataagaacgtataaagctataacccttataagattataactttaaagg

SEQ ID NO: 28673 - DNA, 96 bp, Fusarium azukicola
  misc_feature: 1142
tattggaagcgagaattatattacttgggctttgagaatggaagctttcttggttaaagaaaagctttctagtactatagaagaagattccacttc

SEQ ID NO: 28674 - DNA, 96 bp, Fusarium azukicola
  misc_feature: 1142
aagaagaagaattagctataaatagcttttcttgtttcttttctctttcttccttcttagaattaggtttagattcctttttcttagaagtcttat

SEQ ID NO: 28675 - DNA, 96 bp, Fusarium azukicola
  misc_feature: 1139
gggtattattctaattggttaaaaaggttcctacagaccttcatgactgccgtcatcaatgcatcaaagtataataactgccgattggctaaaaaa

SEQ ID NO: 28676 - DNA, 96 bp, Fusarium azukicola
  misc_feature: 1138
cagtttgcaataactgcattttaaggcagttttcttctttttccaaggcttagaagtcttagaaaaatatatctcattagaatctgttttttctag

SEQ ID NO: 28677 - DNA, 96 bp, Fusarium azukicola
  misc_feature: 1136
gtaagtcttatgagagataatgcttctttactcttagaagaagtggaatcttcttctatagtactagaaagcttttctttaaccaagaaagcttcc

SEQ ID NO: 28678 - DNA, 96 bp, Fusarium azukicola
  misc_feature: 1134
aaaagctatttatagctaattcttcttcttcgtcatctcctaaagccgaggaagacctaatttccctttctgagaccccagatgaaatggattttg

SEQ ID NO: 28679 - DNA, 96 bp, Fusarium azukicola
  misc_feature: 1133
tttatacttaaaagaagattatacttcttttttaagtcttttctaagactttatacctccttaagtcttctttaagactttataactgctttttga

SEQ ID NO: 28680 - DNA, 96 bp, Fusarium azukicola
  misc_feature: 1133
tggctttgtagaaaggataaataggactatattagaaaaggttagagctttattatttacttctaacctacctaaatacctttggggagaggctgt

SEQ ID NO: 28681 - DNA, 96 bp, Fusarium azukicola
  misc_feature: 1132
ttcctcggctttaggagatgacgaagaagaagaattagctataaatagcttttcttgtttcttttctctttcttccttcttagaattaggtttaga

SEQ ID NO: 28682 - DNA, 96 bp, Fusarium azukicola
  misc_feature: 1131
ctaagacttctaagccttggaaaaagaagaaaactgccttaaaatgcagttattgcaaactgccaggtcataaagacccagattgctattttttgc

SEQ ID NO: 28683 - DNA, 96 bp, Fusarium azukicola
  misc_feature: 1130
ctcattaaaagaggggttatttccttcgagaaagctattttctattatagttatatccttagagataactagttttttattcttaaaatcccaaat

SEQ ID NO: 28684 - DNA, 96 bp, Fusarium azukicola
  misc_feature: 1129
tgacttattccttaatagatagacttttagatatctagtagccctatctaggaaggtaataaagtatatatatttattataggtagggattctaga

SEQ ID NO: 28685 - DNA, 96 bp, Fusarium azukicola
  misc_feature: 1129
cctaaaaatagagtaaaaattctataatataatatgtggtttatagggatatatcactatagttggtaatataatatagaacattaacagcctcct

SEQ ID NO: 28686 - DNA, 96 bp, Fusarium azukicola
  misc_feature: 1128
ctagccttatagatgaatctaagagactagaaaaaacagattctaatgagatatatttttctaagacttctaagccttggaaaaagaagaaaactg

SEQ ID NO: 28687 - DNA, 96 bp, Fusarium azukicola
  misc_feature: 1128
aagacttaaggaggtataaagtcttagaaaagacttaaaaaagaagtataatcttcttttaagtataaacccttaggtagagacctccgggctcat

SEQ ID NO: 28688 - DNA, 96 bp, Fusarium azukicola
  misc_feature: 1127
ggtgcataagacttctaagaaaaaggaatctaaacctaattctaagaaggaagaaagagaaaagaaacaagaaaagctatttatagctaattcttc

SEQ ID NO: 28689 - DNA, 96 bp, Fusarium azukicola
  misc_feature: 1126
tcttttttaagactatatctcaactatggccactaagtataatatttcccggcttattggaagcgagaattatattacttgggctttgagaatgga

SEQ ID NO: 28690 - DNA, 96 bp, Fusarium azukicola
  misc_feature: 1124
tttctcttttccttgtgatattatttttccttgcttatttaaaagaaggacttcttgtttatttataatagaagttatattataaagagaagattg

SEQ ID NO: 28691 - DNA, 96 bp, Fusarium azukicola
  misc_feature: 1123
ctctctttaaatatactagtgaggacctatatcaagtcaaaaactgcgaaaactgcaaactaggaaaattaactaaaaataatataaataaaaaac

SEQ ID NO: 28692 - DNA, 96 bp, Fusarium azukicola
  misc_feature: 1123
ctaggttttttatttatattatttttagttaattttcctagtttgcagttttcgcagtttttgacttgatataggtcctcactagtatatttaaag

SEQ ID NO: 28693 - DNA, 96 bp, Fusarium azukicola
  misc_feature: 1122
gaggctgttaatgttctatattatattaccaactatagtgatatatccctataaaccacatattatattatagaatttttactctatttttaggta

SEQ ID NO: 28694 - DNA, 96 bp, Fusarium azukicola
  misc_feature: 1120
tttctaagacttctaagccttggaaaaagaagaaaactgccttaaaatgcagttattgcaaactgccaggtcataaagacccagattgctattttt

SEQ ID NO: 28695 - DNA, 96 bp, Fusarium azukicola
  misc_feature: 1120
agctataggttaggtaaatatacctaaaaatagagtaaaaattctataatataatatatggtttatagggatatatcactatagttagtaatataa

SEQ ID NO: 28696 - DNA, 96 bp, Fusarium azukicola
  misc_feature: 1117
atattatattactaactatagtgatatatccctataaaccatatattatattatagaatttttactctatttttaggtatatttacctaacctata

SEQ ID NO: 28697 - DNA, 96 bp, Fusarium azukicola
  misc_feature: 1117
ataagataaaaacagataataataataatataattaaatataaatccagatatgttgtacaagggtttttacaaattcaaggtattaactatgaag

SEQ ID NO: 28698 - DNA, 96 bp, Fusarium azukicola
  misc_feature: 1115
atcctctctttaaatatactagtgaggacctatatcaagtcaaaaactgcgaaaactgcaaactaggaaaattaactaaaaataatataaataaaa

SEQ ID NO: 28699 - DNA, 96 bp, Fusarium azukicola
  misc_feature: 1115
gtcaatcttctctttataatataacttctattataaataaacaagaagtccttcttttaaataagcaaggaaaaataatatcacaaggaaaagaga

SEQ ID NO: 28700 - DNA, 96 bp, Fusarium azukicola
  misc_feature: 1114
ttaaagaagacttaaggaggtataaagtcttagaaaagacttaaaaaagaagtataatcttcttttaagtataaacccttaggtagagacctccgg

SEQ ID NO: 28701 - DNA, 96 bp, Fusarium azukicola
  misc_feature: 1114
cctctctctcttttcactccttatcctctcctctcccctctccctctctctcttttcactccttatcctctcctctcccctctccctctctctctt

SEQ ID NO: 28702 - DNA, 96 bp, Fusarium azukicola
  misc_feature: 1111
ttactaagatatatataataataatagaggtttaattttttcctctaataataagaacgtataaagctataacccttataagattataactttaaa

SEQ ID NO: 28703 - DNA, 96 bp, Fusarium azukicola
  misc_feature: 1111
ccaagtaatatttttatttatttttctaaaattaactagaaattcttttctacatacaatatgcctagtagcacctgtatcatatataaaattagt

SEQ ID NO: 28704 - DNA, 96 bp, Fusarium azukicola
  misc_feature: 1110
tatattactaactatagtgatatatccctataaaccatatattatattatagaatttttactctatttttaggtatatttacctaacctatagcta

SEQ ID NO: 28705 - DNA, 96 bp, Fusarium azukicola
  misc_feature: 1110
atatcaggtctataataaaggggtttttactaagatatatataataataatagaggtttaattttttcctctaataataagaacgtataaagctat

SEQ ID NO: 28706 - DNA, 96 bp, Fusarium azukicola
  misc_feature: 1106
ttttgactggcataaaagactaagtcatcttaacttaagaagtctaattaaatatataaaaataaaagatcctctctttaaatatactagtgagga

SEQ ID NO: 28707 - DNA, 96 bp, Fusarium azukicola
  misc_feature: 1105
ctctctcttttcactccttatcctctcctctcccctctccctctctctcttttcactccttatcctctcctctcccctctccctctctctcttttc

SEQ ID NO: 28708 - DNA, 96 bp, Fusarium azukicola
  misc_feature: 1104
cctctctttaaatatactagtgaggacctatatcaagtcaaaaactgcgaaaactgcaaactaggaaaattaactaaaaataatataaataaaaaa

SEQ ID NO: 28709 - DNA, 96 bp, Fusarium azukicola
  misc_feature: 1103
ttcccggcttattggaagcgagaattatattacttgggctttgagaatggaagctttcttggttaaagaaaagctttctagtactatagaagaaga

SEQ ID NO: 28710 - DNA, 96 bp, Fusarium azukicola
  misc_feature: 1103
atataatcttagattttcccttataatatcaggtctataataaaggggtttttactaagatatatataataataatagaggtttaattttttcctc

SEQ ID NO: 28711 - DNA, 96 bp, Fusarium azukicola
  misc_feature: 1100
ccatttcatctggggtctcagaaagggaaattaggtcttcctcggctttaggagatgacgaagaagaagaattagctataaatagcttttcttgtt

SEQ ID NO: 28712 - DNA, 96 bp, Fusarium azukicola
  misc_feature: 1097
gcagtttgcaataactgcattttaaggcagttttcttctttttccaaggcttagaagtcttagaaaaatatatctcattagaatctgttttttcta

SEQ ID NO: 28713 - DNA, 96 bp, Fusarium azukicola
  misc_feature: 1097
aggttttttatttatattatttttagttaattttcctagtttgcagttttcgcagtttttgacttgatataggtcctcactagtatatttaaagag

SEQ ID NO: 28714 - DNA, 96 bp, Fusarium azukicola
  misc_feature: 1095
ggctttgtagaaaggataaataggactatattagaaaaggttagagctttattatttacttctaacctacctaaatacctttggggagaggctgtg

SEQ ID NO: 28715 - DNA, 96 bp, Fusarium azukicola
  misc_feature: 1094
tatattatattactaactatagtgatatatccctataaaccatatattatattatagaatttttactctatttttaggtatatttacctaacctat

SEQ ID NO: 28716 - DNA, 96 bp, Fusarium azukicola
  misc_feature: 1092
ctctctctcttttcactccttatcctctcctctcccctctccctctctctcttttcactccttatcctctcctctcccctctccctctctctcttt

SEQ ID NO: 28717 - DNA, 96 bp, Fusarium azukicola
  misc_feature: 1091
ttattggaagcgagaattatattacttgggctttgagaatggaagctttcttggttaaagaaaagctttctagtactatagaagaagattccactt

SEQ ID NO: 28718 - DNA, 96 bp, Fusarium azukicola
  misc_feature: 1087
gacttattccttaatagatagacttttagatatctagtagccctatctaggaaggtaataaagtatatatatttattataggtagggattctagaa

SEQ ID NO: 28719 - DNA, 96 bp, Fusarium azukicola
  misc_feature: 1087
tcattaaaagaggggttatttccttcgagaaagctattttctattatagttatatccttagagataactagttttttattcttaaaatcccaaatc

SEQ ID NO: 28720 - DNA, 96 bp, Fusarium azukicola
  misc_feature: 1087
tattactaactatagtgatatatccctataaaccatatattatattatagaatttttactctatttttaggtatatttacctaacctatagctact

SEQ ID NO: 28721 - DNA, 96 bp, Fusarium azukicola
  misc_feature: 1086
taggttttttatttatattatttttagttaattttcctagtttgcagttttcgcagtttttgacttgatataggtcctcactagtatatttaaaga

SEQ ID NO: 28722 - DNA, 96 bp, Fusarium azukicola
  misc_feature: 1085
tctatattatattactaactatagtgatatatccctataaaccatatattatattatagaatttttactctatttttaggtatatttacctaacct

SEQ ID NO: 28723 - DNA, 96 bp, Fusarium azukicola
  misc_feature: 1085
gctataggttaggtaaatatacctaaaaatagagtaaaaattctataatataatatatggtttatagggatatatcactatagttagtaatataat

SEQ ID NO: 28724 - DNA, 96 bp, Fusarium azukicola
  misc_feature: 1083
atattactaactatagtgatatatccctataaaccatatattatattatagaatttttactctatttttaggtatatttacctaacctatagctac

SEQ ID NO: 28725 - DNA, 96 bp, Fusarium azukicola
  misc_feature: 1083
aaaaaacagattctaatgagatatatttttctaagacttctaagccttggaaaaagaagaaaactgccttaaaatgcagttattgcaaactgccag

SEQ ID NO: 28726 - DNA, 96 bp, Fusarium azukicola
  misc_feature: 1082
ttctcttttccttgtgatattatttttccttgcttatttaaaagaaggacttcttgtttatttataatagaagttatattataaagagaagattga

SEQ ID NO: 28727 - DNA, 96 bp, Fusarium azukicola
  misc_feature: 1080
tctctctcttttcactccttatcctctcctctcccctctccctctctctcttttcactccttatcctctcctctcccctctccctctctctctttt

SEQ ID NO: 28728 - DNA, 96 bp, Fusarium azukicola
  misc_feature: 1079
gatattagttatatagctggaatagctatcatctaggttatttaaaacccaggcaataatcactttttcaggaatagtgatttctctagcttctag

SEQ ID NO: 28729 - DNA, 96 bp, Fusarium azukicola
  misc_feature: 1079
aggtgcataagacttctaagaaaaaggaatctaaacctaattctaagaaggaagaaagagaaaagaaacaagaaaagctatttatagctaattctt

SEQ ID NO: 28730 - DNA, 96 bp, Fusarium azukicola
  misc_feature: 1078
tcctctctttaaatatactagtgaggacctatatcaagtcaaaaactgcgaaaactgcaaactaggaaaattaactaaaaataatataaataaaaa

SEQ ID NO: 28731 - DNA, 96 bp, Fusarium azukicola
  misc_feature: 1078
tatcaggtctataataaaggggtttttactaagatatatataataataatagaggtttaattttttcctctaataataagaacgtataaagctata

SEQ ID NO: 28732 - DNA, 96 bp, Fusarium azukicola
  misc_feature: 1075
tgcattatctgagaaaactgattttattcttattttattaggattattttctatttcttttctaaattccttgaattttataatagcttctgactt

SEQ ID NO: 28733 - DNA, 96 bp, Fusarium azukicola
  misc_feature: 1075
tattatattactaactatagtgatatatccctataaaccatatattatattatagaatttttactctatttttaggtatatttacctaacctatag

SEQ ID NO: 28734 - DNA, 96 bp, Fusarium azukicola
  misc_feature: 1075
ctttaaaggaggctgttaatgttctatattatattaccaactatagtgatatatccctataaaccacatattatattatagaatttttactctatt

SEQ ID NO: 28735 - DNA, 96 bp, Fusarium azukicola
  misc_feature: 1075
ccctctctctcttttcactccttatcctctcctctcccctctccctctctctcttttcactccttatcctctcctctcccctctccctctctctct

SEQ ID NO: 28736 - DNA, 96 bp, Fusarium azukicola
  misc_feature: 1074
atcactattcctgaaaaagtgattattgcctgggttttaaataacctagatgatagctattccagctatataactaatatctcacaagctttaagg

SEQ ID NO: 28737 - DNA, 96 bp, Fusarium azukicola
  misc_feature: 1072
taaagctataacccttataagattataactttaaaggaggctgttaatgttctatattatattaccaactatagtgatatatccctataaaccaca

SEQ ID NO: 28738 - DNA, 96 bp, Fusarium azukicola
  misc_feature: 1072
atccatttcatctggggtctcagaaagggaaattaggtcttcctcggctttaggagatgacgaagaagaagaattagctataaatagcttttcttg

SEQ ID NO: 28739 - DNA, 96 bp, Fusarium azukicola
  misc_feature: 1070
taaagaagacttaaggaggtataaagtcttagaaaagacttaaaaaagaagtataatcttcttttaagtataaacccttaggtagagacctccggg

SEQ ID NO: 28740 - DNA, 96 bp, Fusarium azukicola
  misc_feature: 1069
ttgtttattatgaggcggacttgtattatattttattccattctttatacaatagggtcttagcttatatatatattcctttgcattatctgagaa

SEQ ID NO: 28741 - DNA, 96 bp, Fusarium azukicola
  misc_feature: 1069
ttctaagacttctaagccttggaaaaagaagaaaactgccttaaaatgcagttattgcaaactgccaggtcataaagacccagattgctatttttt

SEQ ID NO: 28742 - DNA, 96 bp, Fusarium azukicola
  misc_feature: 1066
tggcagtttgcaataactgcattttaaggcagttttcttctttttccaaggcttagaagtcttagaaaaatatatctcattagaatctgttttttc

SEQ ID NO: 28743 - DNA, 96 bp, Fusarium azukicola
  misc_feature: 1065
ttctatattatattactaactatagtgatatatccctataaaccatatattatattatagaatttttactctatttttaggtatatttacctaacc

SEQ ID NO: 28744 - DNA, 96 bp, Fusarium azukicola
  misc_feature: 1061
taagtcttatgagagataatgcttctttactcttagaagaagtggaatcttcttctatagtactagaaagcttttctttaaccaagaaagcttcca

SEQ ID NO: 28745 - DNA, 96 bp, Fusarium azukicola
  misc_feature: 1060
tcccggcttattggaagcgagaattatattacttgggctttgagaatggaagctttcttggttaaagaaaagctttctagtactatagaagaagat

SEQ ID NO: 28746 - DNA, 96 bp, Fusarium azukicola
  misc_feature: 1058
tagaatcactttcttctagccttatagatgaatctaagagactagaaaaaacagattctaatgagatatatttttctaagacttctaagccttgga

SEQ ID NO: 28747 - DNA, 96 bp, Fusarium azukicola
  misc_feature: 1057
ctaaaaatagagtaaaaattctataatataatatgtggtttatagggatatatcactatagttggtaatataatatagaacattaacagcctcctt

SEQ ID NO: 28748 - DNA, 96 bp, Fusarium azukicola
  misc_feature: 1056
tactaggttttttatttatattatttttagttaattttcctagtttgcagttttcgcagtttttgacttgatataggtcctcactagtatatttaa

SEQ ID NO: 28749 - DNA, 96 bp, Fusarium azukicola
  misc_feature: 1055
taagataaaaacagataataataataatataattaaatataaatccagatatgttgtacaagggtttttacaaattcaaggtattaactatgaaga

SEQ ID NO: 28750 - DNA, 96 bp, Fusarium azukicola
  misc_feature: 1053
tttaaaggaggctgttaatgttctatattatattaccaactatagtgatatatccctataaaccacatattatattatagaatttttactctattt

SEQ ID NO: 28751 - DNA, 96 bp, Fusarium azukicola
  misc_feature: 1052
ggttttttatttatattatttttagttaattttcctagtttgcagttttcgcagtttttgacttgatataggtcctcactagtatatttaaagaga

SEQ ID NO: 28752 - DNA, 96 bp, Fusarium azukicola
  misc_feature: 1050
cttaaagaagacttaaggaggtataaagtcttagaaaagacttaaaaaagaagtataatcttcttttaagtataaacccttaggtagagacctccg

SEQ ID NO: 28753 - DNA, 96 bp, Fusarium azukicola
  misc_feature: 1048
attactaggttttttatttatattatttttagttaattttcctagtttgcagttttcgcagtttttgacttgatataggtcctcactagtatattt

SEQ ID NO: 28754 - DNA, 96 bp, Fusarium azukicola
  misc_feature: 1048
ataggtcctcactagtatatttaaagagaggatcttttatttttatatatttaattagacttcttaagttaagatgacttagtcttttatgccagt

SEQ ID NO: 28755 - DNA, 96 bp, Fusarium azukicola
  misc_feature: 1047
ttatatatatcttagtaaaaacccctttattatagacctgatattataagggaaaatctaagattatatagggaaaagtattaaaatacaataaaa

SEQ ID NO: 28756 - DNA, 96 bp, Fusarium azukicola
  misc_feature: 1047
agctttatacgttcttattattagaggaaaaaattaaacctctattattattatatatatcttagtaaaaacccctttattatagacctgatatta

SEQ ID NO: 28757 - DNA, 96 bp, Fusarium azukicola
  misc_feature: 1044
gactggcataaaagactaagtcatcttaacttaagaagtctaattaaatatataaaaataaaagatcctctctttaaatatactagtgaggaccta

SEQ ID NO: 28758 - DNA, 96 bp, Fusarium azukicola
  misc_feature: 1043
tttctcagataatgcaaaggaatatatatataagctaagaccctattgtataaagaatggaataaaatataatacaagtccgcctcataataaaca

SEQ ID NO: 28759 - DNA, 96 bp, Fusarium azukicola
  misc_feature: 1043
tggtaatataatatagaacattaacagcctcctttaaagttataatcttataagggttatagctttatacgttcttattattagaggaaaaaatta

SEQ ID NO: 28760 - DNA, 96 bp, Fusarium azukicola
  misc_feature: 1042
aggtcctcactagtatatttaaagagaggatcttttatttttatatatttaattagacttcttaagttaagatgacttagtcttttatgccagtca

SEQ ID NO: 28761 - DNA, 96 bp, Fusarium azukicola
  misc_feature: 1040
caaaaagactagttttttcctttatatttaaaataggaagatctaagttatctcttagtctatagttattcttattagaaataaccttagctgtta

SEQ ID NO: 28762 - DNA, 96 bp, Fusarium azukicola
  misc_feature: 1040
cttcctatattaggaatcggtgacttaataattaagttcctagataaagatacctatataataaggaattgctattgcattcctaagttagctgtt

SEQ ID NO: 28763 - DNA, 96 bp, Fusarium azukicola
  misc_feature: 1039
aacccttgtacaacatatctggatttatatttaattatattattattattatctgtttttatcttataaacccagcggcctttaagagcttgcaat

SEQ ID NO: 28764 - DNA, 96 bp, Fusarium azukicola
  misc_feature: 1038
aagaagaagaattagctataaatagcttttcttatttcttttctctttcttccttcttagaattaggtttagattcctttttcttagaagtcttat

SEQ ID NO: 28765 - DNA, 96 bp, Fusarium azukicola
  misc_feature: 1037
tcttcctatattaggaatcggtgacttaataattaagttcctagataaagatacctatataataaggaattgctattgcattcctaagttagctgt

SEQ ID NO: 28766 - DNA, 96 bp, Fusarium azukicola
  misc_feature: 1037
agaagacttaaggaggtataaagtcttagaaaagacttaaaaaagaagtataatcttcttttaagtataaacccttaggtagagacctccgggctc

SEQ ID NO: 28767 - DNA, 96 bp, Fusarium azukicola
  misc_feature: 1035
ctatattatattactaactatagtgatatatccctataaaccatatattatattatagaatttttactctatttttaggtatatttacctaaccta

SEQ ID NO: 28768 - DNA, 96 bp, Fusarium azukicola
  misc_feature: 1034
ataaagctataacccttataagattataactttaaaggaggctgttaatgttctatattatattaccaactatagtgatatatccctataaaccac

SEQ ID NO: 28769 - DNA, 96 bp, Fusarium azukicola
  misc_feature: 1029
tattactaggttttttatttatattatttttagttaattttcctagtttgcagttttcgcagtttttgacttgatataggtcctcactagtatatt

SEQ ID NO: 28770 - DNA, 96 bp, Fusarium azukicola
  misc_feature: 1028
acccttgtacaacatatctggatttatatttaattatattattattattatctgtttttatcttataaacccagcggcctttaagagcttgcaatc

SEQ ID NO: 28771 - DNA, 96 bp, Fusarium azukicola
  misc_feature: 1026
atatactagtgaggacctatatcaagtcaaaaactgcgaaaactgcaaactaggaaaattaactaaaaataatataaataaaaaacctagtaataa

SEQ ID NO: 28772 - DNA, 96 bp, Fusarium azukicola
  misc_feature: 1025
tagattttcccttataatatcaggtctataataaaggggtttttactaagatatatataataataatagaggtttaattttttcctctaataataa

SEQ ID NO: 28773 - DNA, 96 bp, Fusarium azukicola
  misc_feature: 1025
taagacttctaagccttggaaaaagaagaaaactgccttaaaatgcagttattgcaaactgccaggtcataaagacccagattgctattttttgca

SEQ ID NO: 28774 - DNA, 96 bp, Fusarium azukicola
  misc_feature: 1025
gtgcataagacttctaagaaaaaggaatctaaacctaattctaagaaggaagaaagagaaaagaaacaagaaaagctatttatagctaattcttct

SEQ ID NO: 28775 - DNA, 96 bp, Fusarium azukicola
  misc_feature: 1024
agtgttaatgttctatattatattaccaactatagtgatatatccctataaaccacatattatattatagaatttttactctatttttaggtatat

SEQ ID NO: 28776 - DNA, 96 bp, Fusarium azukicola
  misc_feature: 1023
aaaaactgcgaaaactgcaaactaggaaaattaactaaaaataatataaataaaaaacctagtaataaggaatataagttcctagataaaatagct

SEQ ID NO: 28777 - DNA, 96 bp, Fusarium azukicola
  misc_feature: 1020
gctttatacgttcttattattagaggaaaaaattaaacctctattattattatatatatcttagtaaaaacccctttattatagacctgatattat

SEQ ID NO: 28778 - DNA, 96 bp, Fusarium azukicola
  misc_feature: 1019
atcaggtctataataaaggggtttttactaagatatatataataataatagaggtttaattttttcctctaataataagaacgtataaagctataa

SEQ ID NO: 28779 - DNA, 96 bp, Fusarium azukicola
  misc_feature: 1017
tataagataaaaacagataataataataatataattaaatataaatccagatatgttgtacaagggtttttacaaattcaaggtattaactatgaa

SEQ ID NO: 28780 - DNA, 96 bp, Fusarium azukicola
  misc_feature: 1017
gaatcggtgacttaataattaagttcctagataaagatacctatataataaggaattgctattgcattcctaagttagctgttaacttaataagtc

SEQ ID NO: 28781 - DNA, 96 bp, Fusarium azukicola
  misc_feature: 1017
cttttcactccttatcctctcctctcccctctccctctctctcttttcactccttatcctctcctctcccctctccctctctctcttttcactcct

SEQ ID NO: 28782 - DNA, 96 bp, Fusarium azukicola
  misc_feature: 1016
aatatcaggtctataataaaggggtttttactaagatatatataataataatagaggtttaattttttcctctaataataagaacgtataaagcta

SEQ ID NO: 28783 - DNA, 96 bp, Fusarium azukicola
  misc_feature: 1015
gctttgtagaaaggataaataggactatattagaaaaggttagagctttattatttacttctaacctacctaaatacctttggggagaggctgtgg

SEQ ID NO: 28784 - DNA, 96 bp, Fusarium azukicola
  misc_feature: 1013
ggtcctcactagtatatttaaagagaggatcttttatttttatatatttaattagacttcttaagttaagatgacttagtcttttatgccagtcaa

SEQ ID NO: 28785 - DNA, 96 bp, Fusarium azukicola
  misc_feature: 1013
ctcaggattactccttaaagcttgtgagatattagttatatagctggaatagctatcatctaggttatttaaaacccaggcaataatcactttttc

SEQ ID NO: 28786 - DNA, 96 bp, Fusarium azukicola
  misc_feature: 1011
actagtgaggacctatatcaagtcaaaaactgcgaaaactgcaaactaggaaaattaactaaaaataatataaataaaaaacctagtaataaggaa

SEQ ID NO: 28787 - DNA, 96 bp, Fusarium azukicola
  misc_feature: 1010
cccggcttattggaagcgagaattatattacttgggctttgagaatggaagctttcttggttaaagaaaagctttctagtactatagaagaagatt

SEQ ID NO: 28788 - DNA, 96 bp, Fusarium azukicola
  misc_feature: 1010
aattagctataaatagcttttcttgtttcttttctctttcttccttcttagaattaggtttagattcctttttcttagaagtcttatgcaccttat

SEQ ID NO: 28789 - DNA, 96 bp, Fusarium azukicola
  misc_feature: 1009
attactaactatagtgatatatccctataaaccatatattatattatagaatttttactctatttttaggtatatttacctaacctatagctacta

SEQ ID NO: 28790 - DNA, 96 bp, Fusarium azukicola
  misc_feature: 1008
agaattagctataaatagcttttcttgtttcttttctctttcttccttcttagaattaggtttagattcctttttcttagaagtcttatgcacctt

SEQ ID NO: 28791 - DNA, 96 bp, Fusarium azukicola
  misc_feature: 1006
atttctagctataaaaactagacctgatatagcttatgctgtagttatttgttctagatttacctctaaaccaaataagacgcattttaatgcctt

SEQ ID NO: 28792 - DNA, 96 bp, Fusarium azukicola
  misc_feature: 1005
tccatttcatctggggtctcagaaagggaaattaggtcttcctcggctttaggagatgacgaagaagaagaattagctataaatagcttttcttgt

SEQ ID NO: 28793 - DNA, 96 bp, Fusarium azukicola
  misc_feature: 1005
ctagtgaggacctatatcaagtcaaaaactgcgaaaactgcaaactaggaaaattaactaaaaataatataaataaaaaacctagtaataaggaat

SEQ ID NO: 28794 - DNA, 96 bp, Fusarium azukicola
  misc_feature: 1004
ttactaactatagtgatatatccctataaaccatatattatattatagaatttttactctatttttaggtatatttacctaacctatagctactat

SEQ ID NO: 28795 - DNA, 96 bp, Fusarium azukicola
  misc_feature: 1001
cccaagtaatatttttatttatttttctaaaattaactagaaattcttttctacatacaatatgcctagtagcacctgtatcatatataaaattag

SEQ ID NO: 28796 - DNA, 96 bp, Fusarium azukicola
  misc_feature: 1001
atggaagctttcttggttaaagaaaagctttctagtactatagaagaagattccacttcttctaagagtaaagaagcattatctctcataagactt

SEQ ID NO: 28797 - DNA, 96 bp, Fusarium azukicola
  misc_feature: 1000
ttgttaatgttctatattatattaccaactatagtgatatatccctataaaccatatattatattatagaatttttactctatttttaggtatatt

SEQ ID NO: 28798 - DNA, 96 bp, Fusarium azukicola
  misc_feature: 999
ttactaggttttttatttatattatttttagttaattttcctagtttgcagttttcgcagtttttgacttgatataggtcctcactagtatattta

SEQ ID NO: 28799 - DNA, 96 bp, Fusarium azukicola
  misc_feature: 999
cattattataagggctttctttaaagtaaggaatctcattaaaagaggggttatttccttcgagaaagctattttctattatagttatatccttag

SEQ ID NO: 28800 - DNA, 96 bp, Fusarium azukicola
  misc_feature: 998
gagagagagggagaggggagaggagaggataaggagtgaaaagagagagagggagaggggagaggagaggataaggagtgaaaagagagagaggga

SEQ ID NO: 28801 - DNA, 96 bp, Fusarium azukicola
  misc_feature: 995
tctagaaggaccccatatatcagtagctattttatctaggaacttatattccttattactaggttttttatttatattatttttagttaattttcc

SEQ ID NO: 28802 - DNA, 96 bp, Fusarium azukicola
  misc_feature: 993
attatatatatcttagtaaaaacccctttattatagacctgatattataagggaaaatctaagattatatagggaaaagtattaaaatacaataaa

SEQ ID NO: 28803 - DNA, 96 bp, Fusarium azukicola
  misc_feature: 991
tctaagacttctaagccttggaaaaagaagaaaactgccttaaaatgcagttattgcaaactgccaggtcataaagacccagattgctattttttg

SEQ ID NO: 28804 - DNA, 96 bp, Fusarium azukicola
  misc_feature: 989
tcaggtctataataaaggggtttttactaagatatatataataataatagaggtttaattttttcctctaataataagaacgtataaagctataac

SEQ ID NO: 28805 - DNA, 96 bp, Fusarium azukicola
  misc_feature: 989
agattttcccttataatatcaggtctataataaaggggtttttactaagatatatataataataatagaggtttaattttttcctctaataataag

SEQ ID NO: 28806 - DNA, 96 bp, Fusarium azukicola
  misc_feature: 987
ggcagtttgcaataactgcattttaaggcagttttcttctttttccaaggcttagaagtcttagaaaaatatatctcattagaatctgttttttct

SEQ ID NO: 28807 - DNA, 96 bp, Fusarium azukicola
  misc_feature: 986
aaggcattaaaatgcgtcttatttggtttagaggcaaatctagaacaaataactacagcataagctatatcaggtctagtttttatagctagaaat

SEQ ID NO: 28808 - DNA, 96 bp, Fusarium azukicola
  misc_feature: 985
cccttgtacaacatatctggatttatatttaattatattattattattatctgtttttatcttataaacccagcggcctttaagagcttgcaatcc

SEQ ID NO: 28809 - DNA, 96 bp, Fusarium azukicola
  misc_feature: 983
tgacttattaagttaacagctaacttaggaatgcaatagcaattccttattatataggtatctttatctaggaacttaattattaagtcaccgatt

SEQ ID NO: 28810 - DNA, 96 bp, Fusarium azukicola
  misc_feature: 982
ttttcactccttatcctctcctctcccctctccctctctctcttttcactccttatcctctcctctcccctctccctctctctcttttcactcctt

SEQ ID NO: 28811 - DNA, 96 bp, Fusarium azukicola
  misc_feature: 982
tataggtcctcactagtatatttaaagagaggatcttttatttttatatatttaattagacttcttaagttaagatgacttagtcttttatgccag

SEQ ID NO: 28812 - DNA, 96 bp, Fusarium azukicola
  misc_feature: 982
cactattcctgaaaaagtgattattgcctgggttttaaataacctagatgatagctattccagctatataactaatatctcacaagctttaaggag

SEQ ID NO: 28813 - DNA, 96 bp, Fusarium azukicola
  misc_feature: 981
gagtcttttttaagactatatctcaactatggccactaagtataatatttcccggcttattggaagcgagaattatattacttgggctttgagaat

SEQ ID NO: 28814 - DNA, 96 bp, Fusarium azukicola
  misc_feature: 981
atactagtgaggacctatatcaagtcaaaaactgcgaaaactgcaaactaggaaaattaactaaaaataatataaataaaaaacctagtaataagg

SEQ ID NO: 28815 - DNA, 96 bp, Fusarium azukicola
  misc_feature: 980
tttctagctataaaaactagacctgatatagcttatgctgtagttatttgttctagatttacctctaaaccaaataagacgcattttaatgcctta

SEQ ID NO: 28816 - DNA, 96 bp, Fusarium azukicola
  misc_feature: 978
atataggtcctcactagtatatttaaagagaggatcttttatttttatatatttaattagacttcttaagttaagatgacttagtcttttatgcca

SEQ ID NO: 28817 - DNA, 96 bp, Fusarium azukicola
  misc_feature: 978
ctcttcctatattaggaatcggtgacttaataattaagttcctagataaagatacctatataataaggaattgctattgcattcctaagttagctg

SEQ ID NO: 28818 - DNA, 96 bp, Fusarium azukicola
  misc_feature: 977
tactagtgaggacctatatcaagtcaaaaactgcgaaaactgcaaactaggaaaattaactaaaaataatataaataaaaaacctagtaataagga

SEQ ID NO: 28819 - DNA, 96 bp, Fusarium azukicola
  misc_feature: 976
tatataatcttagattttcccttataatatcaggtctataataaaggggtttttactaagatatatataataataatagaggtttaattttttcct

SEQ ID NO: 28820 - DNA, 96 bp, Fusarium azukicola
  misc_feature: 975
cttattactaggttttttatttatattatttttagttaattttcctagtttgcagttttcgcagtttttgacttgatataggtcctcactagtata

SEQ ID NO: 28821 - DNA, 96 bp, Fusarium azukicola
  misc_feature: 975
aaactaggaaaattaactaaaaataatataaataaaaaacctagtaataaggaatataagttcctagataaaatagctactgatatatggggtcct

SEQ ID NO: 28822 - DNA, 96 bp, Fusarium azukicola
  misc_feature: 974
ttttcccttataatatcaggtctataataaaggggtttttactaagatatatataataataatagaggtttaattttttcctctaataataagaac

SEQ ID NO: 28823 - DNA, 96 bp, Fusarium azukicola
  misc_feature: 970
gaattagctataaatagcttttcttgtttcttttctctttcttccttcttagaattaggtttagattcctttttcttagaagtcttatgcacctta

SEQ ID NO: 28824 - DNA, 96 bp, Fusarium azukicola
  misc_feature: 967
aaaggaggctgttaatgttctatattatattaccaactatagtgatatatccctataaaccacatattatattatagaatttttactctattttta

SEQ ID NO: 28825 - DNA, 96 bp, Fusarium azukicola
  misc_feature: 966
tattatatatatcttagtaaaaacccctttattatagacctgatattataagggaaaatctaagattatatagggaaaagtattaaaatacaataa

SEQ ID NO: 28826 - DNA, 96 bp, Fusarium azukicola
  misc_feature: 966
caaggaaaagagaaaaataacctatatataataacagctaaggttatttctaataagaataactatagactaagagataacttagatcttcctatt

SEQ ID NO: 28827 - DNA, 96 bp, Fusarium azukicola
  misc_feature: 964
aaacccttgtacaacatatctggatttatatttaattatattattattattatctgtttttatcttataaacccagcggcctttaagagcttgcaa

SEQ ID NO: 28828 - DNA, 96 bp, Fusarium azukicola
  misc_feature: 964
aagcagaatatatagccctaagggaggctattaaagagtcaatttctcttaattacatatataaatatataaataaaaatctctctttaagtttta

SEQ ID NO: 28829 - DNA, 96 bp, Fusarium azukicola
  misc_feature: 963
ctaggaaaattaactaaaaataatataaataaaaaacctagtaataaggaatataagttcctagataaaatagctactgatatatggggtccttct

SEQ ID NO: 28830 - DNA, 96 bp, Fusarium azukicola
  misc_feature: 963
attagctataaatagcttttcttgtttcttttctctttcttccttcttagaattaggtttagattcctttttcttagaagtcttatgcaccttatt

SEQ ID NO: 28831 - DNA, 96 bp, Fusarium azukicola
  misc_feature: 962
ttataagataaaaacagataataataataatataattaaatataaatccagatatgttgtacaagggtttttacaaattcaaggtattaactatga

SEQ ID NO: 28832 - DNA, 96 bp, Fusarium azukicola
  misc_feature: 962
ctcttttcactccttatcctctcctctcccctctccctctctctcttttcactccttatcctctcctctcccctctccctctctctcttttcactc

SEQ ID NO: 28833 - DNA, 96 bp, Fusarium azukicola
  misc_feature: 962
caggattactccttaaagcttgtgagatattagttatatagctggaatagctatcatctaggttatttaaaacccaggcaataatcactttttcag

SEQ ID NO: 28834 - DNA, 96 bp, Fusarium azukicola
  misc_feature: 961
taaggcattaaaatgcgtcttatttggtttagaggcaaatctagaacaaataactacagcataagctatatcaggtctagtttttatagctagaaa

SEQ ID NO: 28835 - DNA, 96 bp, Fusarium azukicola
  misc_feature: 959
gattttcccttataatatcaggtctataataaaggggtttttactaagatatatataataataatagaggtttaattttttcctctaataataaga

SEQ ID NO: 28836 - DNA, 96 bp, Fusarium azukicola
  misc_feature: 959
aaactgcgaaaactgcaaactaggaaaattaactaaaaataatataaataaaaaacctagtaataaggaatataagttcctagataaaatagctac

SEQ ID NO: 28837 - DNA, 96 bp, Fusarium azukicola
  misc_feature: 959
actaggaaaattaactaaaaataatataaataaaaaacctagtaataaggaatataagttcctagataaaatagctactgatatatggggtccttc

SEQ ID NO: 28838 - DNA, 96 bp, Fusarium azukicola
  misc_feature: 957
ttaaaggaggctgttaatgttctatattatattaccaactatagtgatatatccctataaaccacatattatattatagaatttttactctatttt

SEQ ID NO: 28839 - DNA, 96 bp, Fusarium azukicola
  misc_feature: 957
caggtctataataaaggggtttttactaagatatatataataataatagaggtttaattttttcctctaataataagaacgtataaagctataacc

SEQ ID NO: 28840 - DNA, 96 bp, Fusarium azukicola
  misc_feature: 953
tcttttcactccttatcctctcctctcccctctccctctctctcttttcactccttatcctctcctctcccctctccctctctctcttttcactcc

SEQ ID NO: 28841 - DNA, 96 bp, Fusarium azukicola
  misc_feature: 953
agtagataaatttggatagctatttaaatacttccaaatcgtatctaaggcattaaaatgcgtcttatttggtttagaggcaaatctagaacaaat

SEQ ID NO: 28842 - DNA, 96 bp, Fusarium azukicola
  misc_feature: 949
tattgtgtatatctgaataatcacagttatatatagtagataaatttggatagctatttaaatacttccaaatcgtatctaaggcattaaaatgcg

SEQ ID NO: 28843 - DNA, 96 bp, Fusarium azukicola
  misc_feature: 949
taaaggaggctgttaatgttctatattatattaccaactatagtgatatatccctataaaccacatattatattatagaatttttactctattttt

SEQ ID NO: 28844 - DNA, 96 bp, Fusarium azukicola
  misc_feature: 946
attttcccttataatatcaggtctataataaaggggtttttactaagatatatataataataatagaggtttaattttttcctctaataataagaa

SEQ ID NO: 28845 - DNA, 96 bp, Fusarium azukicola
  misc_feature: 944
tcattattataagggctttctttaaagtaaggaatctcattaaaagaggggttatttccttcgagaaagctattttctattatagttatatcctta

SEQ ID NO: 28846 - DNA, 96 bp, Fusarium azukicola
  misc_feature: 944
ctatatctcaactatggccactaagtataatatttcccggcttattggaagcgagaattatattacttgggctttgagaatggaagctttcttggt

SEQ ID NO: 28847 - DNA, 96 bp, Fusarium azukicola
  misc_feature: 943
aactaggaaaattaactaaaaataatataaataaaaaacctagtaataaggaatataagttcctagataaaatagctactgatatatggggtcctt

SEQ ID NO: 28848 - DNA, 96 bp, Fusarium azukicola
  misc_feature: 940
ctttatacgttcttattattagaggaaaaaattaaacctctattattattatatatatcttagtaaaaacccctttattatagacctgatattata

SEQ ID NO: 28849 - DNA, 96 bp, Fusarium azukicola
  misc_feature: 939
gtacttgataagcaagcgccgcagtcatgtaagcgccgcactttttttaaccccctctatagttatcgcgataaaaacaccataaaccatttgatc

SEQ ID NO: 28850 - DNA, 96 bp, Fusarium azukicola
  misc_feature: 939
aggaggtataaagtcttagaaaagacttaaaaaagaagtataatcttcttttaagtataaacccttaggtagagacctccgggctcataacctgtc

SEQ ID NO: 28851 - DNA, 96 bp, Fusarium azukicola
  misc_feature: 937
acgaagaagaagaattagctataaatagcttttcttgtttcttttctctttcttccttcttagaattaggtttagattcctttttcttagaagtct

SEQ ID NO: 28852 - DNA, 96 bp, Fusarium azukicola
  misc_feature: 936
atttaaatacttccaaatcgtatctaaggcattaaaatgcgtcttatttggtttagaggcaaatctagaacaaataactacagcataagctatatc

SEQ ID NO: 28853 - DNA, 96 bp, Fusarium azukicola
  misc_feature: 936
atttgttctagatttacctctaaaccaaataagacgcattttaatgccttagatacgatttggaagtatttaaatagctatccaaatttatctact

SEQ ID NO: 28854 - DNA, 96 bp, Fusarium azukicola
  misc_feature: 934
gtcaaaaagactagttttttcctttatatttaaaataggaagatctaagttatctcttagtctatagttattcttattagaaataaccttagctgt

SEQ ID NO: 28855 - DNA, 96 bp, Fusarium azukicola
  misc_feature: 934
ctttaggagatgacgaagaagaagaattagctataaatagcttttcttgtttcttttctctttcttccttcttagaattaggtttagattcctttt

SEQ ID NO: 28856 - DNA, 96 bp, Fusarium azukicola
  misc_feature: 934
ctagaaggaccccatatatcagtagctattttatctaggaacttatattccttattactaggttttttatttatattatttttagttaattttcct

SEQ ID NO: 28857 - DNA, 96 bp, Fusarium azukicola
  misc_feature: 929
aaagtaataattaggggtaataattaaattaagggttagggttaagtagttatagtaaaggttaggggtagtaatgaagttaatttaaaaagaaaa

SEQ ID NO: 28858 - DNA, 96 bp, Fusarium azukicola
  misc_feature: 929
ttcattattataagggctttctttaaagtaaggaatctcattaaaagaggggttatttccttcgagaaagctattttctattatagttatatcctt

SEQ ID NO: 28859 - DNA, 96 bp, Fusarium azukicola
  misc_feature: 928
ttttatgccagtcaaaaagactagttttttcctttatatttaaaataggaagatctaagttatctcttagtctatagttattcttattagaaataa

SEQ ID NO: 28860 - DNA, 96 bp, Fusarium azukicola
  misc_feature: 928
ttcaaggtattaactatgaagaaacctatgcttgtactataagacctgagactctaagacttttctttataatttctataagaaataactactatt

SEQ ID NO: 28861 - DNA, 96 bp, Fusarium azukicola
  misc_feature: 926
gagagagggagaggggagaggagaggataaggagtgaaaagagagagagggagaggggagaggagaggataaggagtgaaaagagagagagggaga

SEQ ID NO: 28862 - DNA, 96 bp, Fusarium azukicola
  misc_feature: 926
tcactattcctgaaaaagtgattattgcctgggttttaaataacctagatgatagctattccagctatataactaatatctcacaagctttaagga

SEQ ID NO: 28863 - DNA, 96 bp, Fusarium azukicola
  misc_feature: 925
ttgttctagatttgcctctaaaccaaataagacgcattttaatgccttagatacgatttggaagtatttaaatagctatccaaatttatctactat

SEQ ID NO: 28864 - DNA, 96 bp, Fusarium azukicola
  misc_feature: 924
gtagataaatttggatagctatttaaatacttccaaatcgtatctaaggcattaaaatgcgtcttatttggtttagaggcaaatctagaacaaata

SEQ ID NO: 28865 - DNA, 96 bp, Fusarium azukicola
  misc_feature: 924
atctgaataatcacagttatatatagtagataaatttggatagctatttaaatacttccaaatcgtatctaaggcattaaaatgcgtcttatttgg

SEQ ID NO: 28866 - DNA, 96 bp, Fusarium azukicola
  misc_feature: 923
gaagaagaagaattagctataaatagcttttcttgtttcttttctctttcttccttcttagaattaggtttagattcctttttcttagaagtctta

SEQ ID NO: 28867 - DNA, 96 bp, Fusarium azukicola
  misc_feature: 923
gacctgatatagcttatgctgtagttatttgttctagatttgcctctaaaccaaataagacgcattttaatgccttagatacgatttggaagtatt

SEQ ID NO: 28868 - DNA, 96 bp, Fusarium azukicola
  misc_feature: 922
actatatctcaactatggccactaagtataatatttcccggcttattggaagcgagaattatattacttgggctttgagaatggaagctttcttgg

SEQ ID NO: 28869 - DNA, 96 bp, Fusarium azukicola
  misc_feature: 922
aaatacttccaaatcgtatctaaggcattaaaatgcgtcttatttggtttagaggcaaatctagaacaaataactacagcataagctatatcaggt

SEQ ID NO: 28870 - DNA, 96 bp, Fusarium azukicola
  misc_feature: 921
gatttacctctaaaccaaataagacgcattttaatgccttagatacgatttggaagtatttaaatagctatccaaatttatctactatatataact

SEQ ID NO: 28871 - DNA, 96 bp, Fusarium azukicola
  misc_feature: 920
aagaaaaaggaatctaaacctaattctaagaaggaagaaagagaaaagaaacaagaaaagctatttatagctaattcttcttcttcgtcatctcct

SEQ ID NO: 28872 - DNA, 96 bp, Fusarium azukicola
  misc_feature: 918
tttatacgttcttattattagaggaaaaaattaaacctctattattattatatatatcttagtaaaaacccctttattatagacctgatattataa

SEQ ID NO: 28873 - DNA, 96 bp, Fusarium azukicola
  misc_feature: 918
cgaagaagaagaattagctataaatagcttttcttgtttcttttctctttcttccttcttagaattaggtttagattcctttttcttagaagtctt

SEQ ID NO: 28874 - DNA, 96 bp, Fusarium azukicola
  misc_feature: 917
gactatatctcaactatggccactaagtataatatttcccggcttattggaagcgagaattatattacttgggctttgagaatggaagctttcttg

SEQ ID NO: 28875 - DNA, 96 bp, Fusarium azukicola
  misc_feature: 917
agaagaagaattagctataaatagcttttcttgtttcttttctctttcttccttcttagaattaggtttagattcctttttcttagaagtcttatg

SEQ ID NO: 28876 - DNA, 96 bp, Fusarium azukicola
  misc_feature: 916
gtttataagataaaaacagataataataataatataattaaatataaatccagatatgttgtacaagggtttttacaaattcaaggtattaactat

SEQ ID NO: 28877 - DNA, 96 bp, Fusarium azukicola
  misc_feature: 914
tcttttatgccagtcaaaaagactagttttttcctttatatttaaaataggaagatctaagttatctcttagtctatagttattcttattagaaat

SEQ ID NO: 28878 - DNA, 96 bp, Fusarium azukicola
  misc_feature: 914
tctgaataatcacagttatatatagtagataaatttggatagctatttaaatacttccaaatcgtatctaaggcattaaaatgcgtcttatttggt

SEQ ID NO: 28879 - DNA, 96 bp, Fusarium azukicola
  misc_feature: 914
agaaaaaggaatctaaacctaattctaagaaggaagaaagagaaaagaaacaagaaaagctatttatagctaattcttcttcttcgtcatctccta

SEQ ID NO: 28880 - DNA, 96 bp, Fusarium azukicola
  misc_feature: 913
actaactatagtgatatatccctataaaccatatattatattatagaatttttactctatttttaggtatatttacctaacctatagctactatag

SEQ ID NO: 28881 - DNA, 96 bp, Fusarium azukicola
  misc_feature: 912
tttaggagatgacgaagaagaagaattagctataaatagcttttcttgtttcttttctctttcttccttcttagaattaggtttagattccttttt

SEQ ID NO: 28882 - DNA, 96 bp, Fusarium azukicola
  misc_feature: 912
ttctagctataaaaactagacctgatatagcttatgctgtagttatttgttctagatttacctctaaaccaaataagacgcattttaatgccttag

SEQ ID NO: 28883 - DNA, 96 bp, Fusarium azukicola
  misc_feature: 912
agagagagggagaggggagaggagaggataaggagtgaaaagagagagagggagaggggagaggagaggataaggagtgaaaagagagagagggag

SEQ ID NO: 28884 - DNA, 96 bp, Fusarium azukicola
  misc_feature: 911
atttaaatacttccaaatcgtatctaaggcattaaaatgcgtcttatttggtttagaggtaaatctagaacaaataactacagcataagctatatc

SEQ ID NO: 28885 - DNA, 96 bp, Fusarium azukicola
  misc_feature: 910
tcaaaaagactagttttttcctttatatttaaaataggaagatctaagttatctcttagtctatagttattcttattagaaataaccttagctgtt

SEQ ID NO: 28886 - DNA, 96 bp, Fusarium azukicola
  misc_feature: 907
tacttgataagcaagcgccgcagtcatgtaagcgccgcactttttttaaccccctctatagttatcgcgataaaaacaccataaaccatttgatca

SEQ ID NO: 28887 - DNA, 96 bp, Fusarium azukicola
  misc_feature: 906
tgagtcttttttaagactatatctcaactatggccactaagtataatatttcccggcttattggaagcgagaattatattacttgggctttgagaa

SEQ ID NO: 28888 - DNA, 96 bp, Fusarium azukicola
  misc_feature: 905
tcaaggtattaactatgaagaaacctatgcttgtactataagacctgagactctaagacttttctttataatttctataagaaataactactattt

SEQ ID NO: 28889 - DNA, 96 bp, Fusarium azukicola
  misc_feature: 904
tttatgccagtcaaaaagactagttttttcctttatatttaaaataggaagatctaagttatctcttagtctatagttattcttattagaaataac

SEQ ID NO: 28890 - DNA, 96 bp, Fusarium azukicola
  misc_feature: 904
gacgaagaagaagaattagctataaatagcttttcttgtttcttttctctttcttccttcttagaattaggtttagattcctttttcttagaagtc

SEQ ID NO: 28891 - DNA, 96 bp, Fusarium azukicola
  misc_feature: 903
aaaactgcgaaaactgcaaactaggaaaattaactaaaaataatataaataaaaaacctagtaataaggaatataagttcctagataaaatagcta

SEQ ID NO: 28892 - DNA, 96 bp, Fusarium azukicola
  misc_feature: 903
ggctttaggagatgacgaagaagaagaattagctataaatagcttttcttgtttcttttctctttcttccttcttagaattaggtttagattcctt

SEQ ID NO: 28893 - DNA, 96 bp, Fusarium azukicola
  misc_feature: 901
agtgaggacctatatcaagtcaaaaactgcgaaaactgcaaactaggaaaattaactaaaaataatataaataaaaaacctagtaataaggaatat

SEQ ID NO: 28894 - DNA, 96 bp, Fusarium azukicola
  misc_feature: 900
ctatataatcttagattttcccttataatatcaggtctataataaaggggtttttactaagatatatataataataatagaggtttaattttttcc

SEQ ID NO: 28895 - DNA, 96 bp, Fusarium azukicola
  misc_feature: 900
aaatacttccaaatcgtatctaaggcattaaaatgcgtcttatttggtttagaggtaaatctagaacaaataactacagcataagctatatcaggt

SEQ ID NO: 28896 - DNA, 96 bp, Fusarium azukicola
  misc_feature: 899
tagataaatttggatagctatttaaatacttccaaatcgtatctaaggcattaaaatgcgtcttatttggtttagaggcaaatctagaacaaataa

SEQ ID NO: 28897 - DNA, 96 bp, Fusarium azukicola
  misc_feature: 899
atacgttcttattattagaggaaaaaattaaacctctattattattatatatatcttagtaaaaacccctttattatagacctgatattataaggg

SEQ ID NO: 28898 - DNA, 96 bp, Fusarium azukicola
  misc_feature: 898
tatttctagctataaaaactagacctgatatagcttatgctgtagttatttgttctagatttacctctaaaccaaataagacgcattttaatgcct

SEQ ID NO: 28899 - DNA, 96 bp, Fusarium azukicola
  misc_feature: 898
cttttatgccagtcaaaaagactagttttttcctttatatttaaaataggaagatctaagttatctcttagtctatagttattcttattagaaata

SEQ ID NO: 28900 - DNA, 96 bp, Fusarium azukicola
  misc_feature: 898
ccggcttattggaagcgagaattatattacttgggctttgagaatggaagctttcttggttaaagaaaagctttctagtactatagaagaagattc

SEQ ID NO: 28901 - DNA, 96 bp, Fusarium azukicola
  misc_feature: 898
agagagggagaggggagaggagaggataaggagtgaaaagagagagagggagaggggagaggagaggataaggagtgaaaagagagagagggagag

SEQ ID NO: 28902 - DNA, 96 bp, Fusarium azukicola
  misc_feature: 897
tttataagataaaaacagataataataataatataattaaatataaatccagatatgttgtacaagggtttttacaaattcaaggtattaactatg

SEQ ID NO: 28903 - DNA, 96 bp, Fusarium azukicola
  misc_feature: 897
ttgataagcaagcgccgcagtcatgtaagcgccgcactttttttaaccccctctatagttatcgcgataaaaacaccataaaccatttgatcaatt

SEQ ID NO: 28904 - DNA, 96 bp, Fusarium azukicola
  misc_feature: 897
tatttgttctagatttacctctaaaccaaataagacgcattttaatgccttagatacgatttggaagtatttaaatagctatccaaatttatctac

SEQ ID NO: 28905 - DNA, 96 bp, Fusarium azukicola
  misc_feature: 897
aactgcgaaaactgcaaactaggaaaattaactaaaaataatataaataaaaaacctagtaataaggaatataagttcctagataaaatagctact

SEQ ID NO: 28906 - DNA, 96 bp, Fusarium azukicola
  misc_feature: 895
agataaatttggatagctatttaaatacttccaaatcgtatctaaggcattaaaatgcgtcttatttggtttagaggcaaatctagaacaaataac

SEQ ID NO: 28907 - DNA, 96 bp, Fusarium azukicola
  misc_feature: 895
aagtaataattaggggtaataattaaattaagggttagggttaagtagttatagtaaaggttaggggtagtaatgaagttaatttaaaaagaaaag

SEQ ID NO: 28908 - DNA, 96 bp, Fusarium azukicola
  misc_feature: 894
acttctaagaaaaaggaatctaaacctaattctaagaaggaagaaagagaaaagaaacaagaaaagctatttatagctaattcttcttcttcgtca

SEQ ID NO: 28909 - DNA, 96 bp, Fusarium azukicola
  misc_feature: 894
tagaaggaccccatatatcagtagctattttatctaggaacttatattccttattactaggttttttatttatattatttttagttaattttccta

SEQ ID NO: 28910 - DNA, 96 bp, Fusarium azukicola
  misc_feature: 892
ttgttctagatttacctctaaaccaaataagacgcattttaatgccttagatacgatttggaagtatttaaatagctatccaaatttatctactat

SEQ ID NO: 28911 - DNA, 96 bp, Fusarium azukicola
  misc_feature: 892
cttctaagaaaaaggaatctaaacctaattctaagaaggaagaaagagaaaagaaacaagaaaagctatttatagctaattcttcttcttcgtcat

SEQ ID NO: 28912 - DNA, 96 bp, Fusarium azukicola
  misc_feature: 891
ctaaggcattaaaatgcgtcttatttggtttagaggcaaatctagaacaaataactacagcataagctatatcaggtctagtttttatagctagaa

SEQ ID NO: 28913 - DNA, 96 bp, Fusarium azukicola
  misc_feature: 891
tagtgaggacctatatcaagtcaaaaactgcgaaaactgcaaactaggaaaattaactaaaaataatataaataaaaaacctagtaataaggaata

SEQ ID NO: 28914 - DNA, 96 bp, Fusarium azukicola
  misc_feature: 891
atatagtagataaatttggatagctatttaaatacttccaaatcgtatctaaggcattaaaatgcgtcttatttggtttagaggtaaatctagaac

SEQ ID NO: 28915 - DNA, 96 bp, Fusarium azukicola
  misc_feature: 890
aatacttccaaatcgtatctaaggcattaaaatgcgtcttatttggtttagaggtaaatctagaacaaataactacagcataagctatatcaggtc

SEQ ID NO: 28916 - DNA, 96 bp, Fusarium azukicola
  misc_feature: 890
ctagctataaaaactagacctgatatagcttatgctgtagttatttgttctagatttacctctaaaccaaataagacgcattttaatgccttagat

SEQ ID NO: 28917 - DNA, 96 bp, Fusarium azukicola
  misc_feature: 889
gttctagatttgcctctaaaccaaataagacgcattttaatgccttagatacgatttggaagtatttaaatagctatccaaatttatctactatat

SEQ ID NO: 28918 - DNA, 96 bp, Fusarium azukicola
  misc_feature: 887
gctttaggagatgacgaagaagaagaattagctataaatagcttttcttgtttcttttctctttcttccttcttagaattaggtttagattccttt

SEQ ID NO: 28919 - DNA, 96 bp, Fusarium azukicola
  misc_feature: 883
ttatgccagtcaaaaagactagttttttcctttatatttaaaataggaagatctaagttatctcttagtctatagttattcttattagaaataacc

SEQ ID NO: 28920 - DNA, 96 bp, Fusarium azukicola
  misc_feature: 882
gaaaaaggaatctaaacctaattctaagaaggaagaaagagaaaagaaacaagaaaagctatttatagctaattcttcttcttcgtcatctcctaa

SEQ ID NO: 28921 - DNA, 96 bp, Fusarium azukicola
  misc_feature: 882
tctttttaaattaacttcattactacccctaacctttactataactacttaaccctaacccttaatttaattattacccctaattattactttaat

SEQ ID NO: 28922 - DNA, 96 bp, Fusarium azukicola
  misc_feature: 882
tactaactatagtgatatatccctataaaccatatattatattatagaatttttactctatttttaggtatatttacctaacctatagctactata

SEQ ID NO: 28923 - DNA, 96 bp, Fusarium azukicola
  misc_feature: 882
gagaatggaagctttcttggttaaagaaaagctttctagtactatagaagaagattccacttcttctaagagtaaagaagcattatctctcataag

SEQ ID NO: 28924 - DNA, 96 bp, Fusarium azukicola
  misc_feature: 879
tacgttcttattattagaggaaaaaattaaacctctattattattatatatatcttagtaaaaacccctttattatagacctgatattataaggga

SEQ ID NO: 28925 - DNA, 96 bp, Fusarium azukicola
  misc_feature: 874
cggcttattggaagcgagaattatattacttgggctttgagaatggaagctttcttggttaaagaaaagctttctagtactatagaagaagattcc

SEQ ID NO: 28926 - DNA, 96 bp, Fusarium azukicola
  misc_feature: 874
ctttttaaattaacttcattactacccctaacctttactataactacttaaccctaacccttaatttaattattacccctaattattactttaatt

SEQ ID NO: 28927 - DNA, 96 bp, Fusarium azukicola
  misc_feature: 873
gtataaagtcttagaaaagacttaaaaaagaagtataatcttcttttaagtataaacccttaggtagagacctccgggctcataacctgtcagtgt

SEQ ID NO: 28928 - DNA, 96 bp, Fusarium azukicola
  misc_feature: 872
aataattaggggtaataattaaattaagggttagggttaagtagttatagtaaaggttaggggtagtaatgaagttaatttaaaaagaaaagagaa

SEQ ID NO: 28929 - DNA, 96 bp, Fusarium azukicola
  misc_feature: 872
gtttgcagttttcgcagtttttgacttgatataggtcctcactagtatatttaaagagaggatcttttatttttatatatttaattagacttctta

SEQ ID NO: 28930 - DNA, 96 bp, Fusarium azukicola
  misc_feature: 871
tatctgaataatcacagttatatatagtagataaatttggatagctatttaaatacttccaaatcgtatctaaggcattaaaatgcgtcttatttg

SEQ ID NO: 28931 - DNA, 96 bp, Fusarium azukicola
  misc_feature: 871
atattgtgtatatctgaataatcacagttatatatagtagataaatttggatagctatttaaatacttccaaatcgtatctaaggcattaaaatgc

SEQ ID NO: 28932 - DNA, 96 bp, Fusarium azukicola
  misc_feature: 871
atgccagtcaaaaagactagttttttcctttatatttaaaataggaagatctaagttatctcttagtctatagttattcttattagaaataacctt

SEQ ID NO: 28933 - DNA, 96 bp, Fusarium azukicola
  misc_feature: 870
tatttaaatacttccaaatcgtatctaaggcattaaaatgcgtcttatttggtttagaggcaaatctagaacaaataactacagcataagctatat

SEQ ID NO: 28934 - DNA, 96 bp, Fusarium azukicola
  misc_feature: 870
ctctcttttcactccttatcctctcctctcccctctccctctctctcttttcactccttatcctctcctctcccctctccctctctctcttttcac

SEQ ID NO: 28935 - DNA, 96 bp, Fusarium azukicola
  misc_feature: 870
ctagctataaaaactagacctgatatagcttatgctgtagttatttgttctagatttgcctctaaaccaaataagacgcattttaatgccttagat

SEQ ID NO: 28936 - DNA, 96 bp, Fusarium azukicola
  misc_feature: 869
ttatttgttctagatttacctctaaaccaaataagacgcattttaatgccttagatacgatttggaagtatttaaatagctatccaaatttatcta

SEQ ID NO: 28937 - DNA, 96 bp, Fusarium azukicola
  misc_feature: 869
gatataggtcctcactagtatatttaaagagaggatcttttatttttatatatttaattagacttcttaagttaagatgacttagtcttttatgcc

SEQ ID NO: 28938 - DNA, 96 bp, Fusarium azukicola
  misc_feature: 868
acctctaaattatcacttatatcaaaatccatttcatctggggtctcagaaagggaaattaggtcttcctcggctttaggagatgacgaagaagaa

SEQ ID NO: 28939 - DNA, 96 bp, Fusarium azukicola
  misc_feature: 868
agtaataattaggggtaataattaaattaagggttagggttaagtagttatagtaaaggttaggggtagtaatgaagttaatttaaaaagaaaaga

SEQ ID NO: 28940 - DNA, 96 bp, Fusarium azukicola
  misc_feature: 867
ttatacgttcttattattagaggaaaaaattaaacctctattattattatatatatcttagtaaaaacccctttattatagacctgatattataag

SEQ ID NO: 28941 - DNA, 96 bp, Fusarium azukicola
  misc_feature: 867
tctagctataaaaactagacctgatatagcttatgctgtagttatttgttctagatttacctctaaaccaaataagacgcattttaatgccttaga

SEQ ID NO: 28942 - DNA, 96 bp, Fusarium azukicola
  misc_feature: 866
ttcccttataatatcaggtctataataaaggggtttttactaagatatatataataataatagaggtttaattttttcctctaataataagaacgt

SEQ ID NO: 28943 - DNA, 96 bp, Fusarium azukicola
  misc_feature: 866
atcgcagttatatatagtagataaatttggatagctatttaaatacttccaaatcgtatctaaggcattaaaatgcgtcttatttggtttagaggc

SEQ ID NO: 28944 - DNA, 96 bp, Fusarium azukicola
  misc_feature: 866
aaggaggtataaagtcttagaaaagacttaaaaaagaagtataatcttcttttaagtataaacccttaggtagagacctccgggctcataacctgt

SEQ ID NO: 28945 - DNA, 96 bp, Fusarium azukicola
  misc_feature: 864
ttaaatacttccaaatcgtatctaaggcattaaaatgcgtcttatttggtttagaggcaaatctagaacaaataactacagcataagctatatcag

SEQ ID NO: 28946 - DNA, 96 bp, Fusarium azukicola
  misc_feature: 864
tctcttttcactccttatcctctcctctcccctctccctctctctcttttcactccttatcctctcctctcccctctccctctctctcttttcact

SEQ ID NO: 28947 - DNA, 96 bp, Fusarium azukicola
  misc_feature: 864
gtgaggacctatatcaagtcaaaaactgcgaaaactgcaaactaggaaaattaactaaaaataatataaataaaaaacctagtaataaggaatata

SEQ ID NO: 28948 - DNA, 96 bp, Fusarium azukicola
  misc_feature: 863
tgcgaaaactgcaaactaggaaaattaactaaaaataatataaataaaaaacctagtaataaggaatataagttcctagataaaatagctactgat

SEQ ID NO: 28949 - DNA, 96 bp, Fusarium azukicola
  misc_feature: 863
atatagcttatgctgtagttatttgttctagatttacctctaaaccaaataagacgcattttaatgccttagatacgatttggaagtatttaaata

SEQ ID NO: 28950 - DNA, 96 bp, Fusarium azukicola
  misc_feature: 862
tttgttctagatttgcctctaaaccaaataagacgcattttaatgccttagatacgatttggaagtatttaaatagctatccaaatttatctacta

SEQ ID NO: 28951 - DNA, 96 bp, Fusarium azukicola
  misc_feature: 862
gttatatatagtagataaatttggatagctatttaaatacttccaaatcgtatctaaggcattaaaatgcgtcttatttggtttagaggtaaatct

SEQ ID NO: 28952 - DNA, 96 bp, Fusarium azukicola
  misc_feature: 861
tatatagtagataaatttggatagctatttaaatacttccaaatcgtatctaaggcattaaaatgcgtcttatttggtttagaggtaaatctagaa

SEQ ID NO: 28953 - DNA, 96 bp, Fusarium azukicola
  misc_feature: 860
tttcccttataatatcaggtctataataaaggggtttttactaagatatatataataataatagaggtttaattttttcctctaataataagaacg

SEQ ID NO: 28954 - DNA, 96 bp, Fusarium azukicola
  misc_feature: 860
atatatagtagataaatttggatagctatttaaatacttccaaatcgtatctaaggcattaaaatgcgtcttatttggtttagaggtaaatctaga

SEQ ID NO: 28955 - DNA, 96 bp, Fusarium azukicola
  misc_feature: 860
aggcattaaaatgcgtcttatttggtttagaggcaaatctagaacaaataactacagcataagctatatcaggtctagtttttatagctagaaata

SEQ ID NO: 28956 - DNA, 96 bp, Fusarium azukicola
  misc_feature: 860
acaaattcaaggtattaactatgaagaaacctatgcttgtactataagacctgagactctaagacttttctttataatttctataagaaataacta

SEQ ID NO: 28957 - DNA, 96 bp, Fusarium azukicola
  misc_feature: 860
caaactaggaaaattaactaaaaataatataaataaaaaacctagtaataaggaatataagttcctagataaaatagctactgatatatggggtcc

SEQ ID NO: 28958 - DNA, 96 bp, Fusarium azukicola
  misc_feature: 859
taaagtaataattaggggtaataattaaattaagggttagggttaagtagttatagtaaaggttaggggtagtaatgaagttaatttaaaaagaaa

SEQ ID NO: 28959 - DNA, 96 bp, Fusarium azukicola
  misc_feature: 859
gttatttgttctagatttacctctaaaccaaataagacgcattttaatgccttagatacgatttggaagtatttaaatagctatccaaatttatct

SEQ ID NO: 28960 - DNA, 96 bp, Fusarium azukicola
  misc_feature: 858
aggccgctgggtttataagataaaaacagataataataataatataattaaatataaatccagatatgttgtacaagggtttttacaaattcaagg

SEQ ID NO: 28961 - DNA, 96 bp, Fusarium azukicola
  misc_feature: 857
cacactgacaggttatgagcccggaggtctctacctaagggtttatacttaaaagaagattatacttcttttttaagtcttttctaagactttata

SEQ ID NO: 28962 - DNA, 96 bp, Fusarium azukicola
  misc_feature: 857
gcttattggaagcgagaattatattacttgggctttgagaatggaagctttcttggttaaagaaaagctttctagtactatagaagaagattccac

SEQ ID NO: 28963 - DNA, 96 bp, Fusarium azukicola
  misc_feature: 857
ggcattaaaatgcgtcttatttggtttagaggtaaatctagaacaaataactacagcataagctatatcaggtctagtttttatagctagaaatat

SEQ ID NO: 28964 - DNA, 96 bp, Fusarium azukicola
  misc_feature: 857
atctgaataatcgcagttatatatagtagataaatttggatagctatttaaatacttccaaatcgtatctaaggcattaaaatgcgtcttatttgg

SEQ ID NO: 28965 - DNA, 96 bp, Fusarium azukicola
  misc_feature: 857
agacctgatatagcttatgctgtagttatttgttctagatttgcctctaaaccaaataagacgcattttaatgccttagatacgatttggaagtat

SEQ ID NO: 28966 - DNA, 96 bp, Fusarium azukicola
  misc_feature: 856
gctatttaaatacttccaaatcgtatctaaggcattaaaatgcgtcttatttggtttagaggcaaatctagaacaaataactacagcataagctat

SEQ ID NO: 28967 - DNA, 96 bp, Fusarium azukicola
  misc_feature: 855
tgcataagacttctaagaaaaaggaatctaaacctaattctaagaaggaagaaagagaaaagaaacaagaaaagctatttatagctaattcttctt

SEQ ID NO: 28968 - DNA, 96 bp, Fusarium azukicola
  misc_feature: 855
tgataagcaagcgccgcagtcatgtaagcgccgcactttttttaaccccctctatagttatcgcgataaaaacaccataaaccatttgatcaatta

SEQ ID NO: 28969 - DNA, 96 bp, Fusarium azukicola
  misc_feature: 853
tttaaatacttccaaatcgtatctaaggcattaaaatgcgtcttatttggtttagaggcaaatctagaacaaataactacagcataagctatatca

SEQ ID NO: 28970 - DNA, 96 bp, Fusarium azukicola
  misc_feature: 853
ctctcctctcccctctccctctctctcttttcactccttatcctctcctctcccctctccctctctctcttttcactccttatcctctcctctccc

SEQ ID NO: 28971 - DNA, 96 bp, Fusarium azukicola
  misc_feature: 853
ctaactatagtgatatatccctataaaccatatattatattatagaatttttactctatttttaggtatatttacctaacctatagctactatagg

SEQ ID NO: 28972 - DNA, 96 bp, Fusarium azukicola
  misc_feature: 852
tttgcagttttcgcagtttttgacttgatataggtcctcactagtatatttaaagagaggatcttttatttttatatatttaattagacttcttaa

SEQ ID NO: 28973 - DNA, 96 bp, Fusarium azukicola
  misc_feature: 852
accaaataagacgcattttaatgccttagatacgatttggaagtatttaaatagctatccaaatttatctactatatataactgcgattattcaga

SEQ ID NO: 28974 - DNA, 96 bp, Fusarium azukicola
  misc_feature: 852
aactttccctttcatcttttgagaatatagaaatatatcttaataagataaaagaggttaaaaatgagctagaagctagagaaatcactattcctg

SEQ ID NO: 28975 - DNA, 96 bp, Fusarium azukicola
  misc_feature: 851
tacaaattcaaggtattaactatgaagaaacctatgcttgtactataagacctgagactctaagacttttctttataatttctataagaaataact

SEQ ID NO: 28976 - DNA, 96 bp, Fusarium azukicola
  misc_feature: 851
ggcttctttatagttattaggttctaaaggaaggttattattctcttgagctataagagtaggatattccttataatctttatagaaatcagctgg

SEQ ID NO: 28977 - DNA, 96 bp, Fusarium azukicola
  misc_feature: 850
acttgataagcaagcgccgcagtcatgtaagcgccgcactttttttaaccccctctatagttatcgcgataaaaacaccataaaccatttgatcaa

SEQ ID NO: 28978 - DNA, 96 bp, Fusarium azukicola
  misc_feature: 850
tatattgtgtatatctgaataatcacagttatatatagtagataaatttggatagctatttaaatacttccaaatcgtatctaaggcattaaaatg

SEQ ID NO: 28979 - DNA, 96 bp, Fusarium azukicola
  misc_feature: 850
gataaatttggatagctatttaaatacttccaaatcgtatctaaggcattaaaatgcgtcttatttggtttagaggcaaatctagaacaaataact

SEQ ID NO: 28980 - DNA, 96 bp, Fusarium azukicola
  misc_feature: 847
ggccgctgggtttataagataaaaacagataataataataatataattaaatataaatccagatatgttgtacaagggtttttacaaattcaaggt

SEQ ID NO: 28981 - DNA, 96 bp, Fusarium azukicola
  misc_feature: 847
agttatatatagtagataaatttggatagctatttaaatacttccaaatcgtatctaaggcattaaaatgcgtcttatttggtttagaggcaaatc

SEQ ID NO: 28982 - DNA, 96 bp, Fusarium azukicola
  misc_feature: 846
tttgttctagatttacctctaaaccaaataagacgcattttaatgccttagatacgatttggaagtatttaaatagctatccaaatttatctacta

SEQ ID NO: 28983 - DNA, 96 bp, Fusarium azukicola
  misc_feature: 846
taaatacttccaaatcgtatctaaggcattaaaatgcgtcttatttggtttagaggcaaatctagaacaaataactacagcataagctatatcagg

SEQ ID NO: 28984 - DNA, 96 bp, Fusarium azukicola
  misc_feature: 846
ctaagaaaaaggaatctaaacctaattctaagaaggaagaaagagaaaagaaacaagaaaagctatttatagctaattcttcttcttcgtcatctc

SEQ ID NO: 28985 - DNA, 96 bp, Fusarium azukicola
  misc_feature: 845
aagtaattaaagtaataattaggggtaataattaaattaagggttagggttaagtagttatagtaaaggttaggggtagtaatgaagttaatttaa

SEQ ID NO: 28986 - DNA, 96 bp, Fusarium azukicola
  misc_feature: 844
taaggaggtataaagtcttagaaaagacttaaaaaagaagtataatcttcttttaagtataaacccttaggtagagacctccgggctcataacctg

SEQ ID NO: 28987 - DNA, 96 bp, Fusarium azukicola
  misc_feature: 843
ctgcgaaaactgcaaactaggaaaattaactaaaaataatataaataaaaaacctagtaataaggaatataagttcctagataaaatagctactga

SEQ ID NO: 28988 - DNA, 96 bp, Fusarium azukicola
  misc_feature: 843
caaggtattaactatgaagaaacctatgcttgtactataagacctgagactctaagacttttctttataatttctataagaaataactactattta

SEQ ID NO: 28989 - DNA, 96 bp, Fusarium azukicola
  misc_feature: 843
ggtataaagtcttagaaaagacttaaaaaagaagtataatcttcttttaagtataaacccttaggtagagacctccgggctcataacctgtcagtg

SEQ ID NO: 28990 - DNA, 96 bp, Fusarium azukicola
  misc_feature: 842
taaatttggatagctatttaaatacttccaaatcgtatctaaggcattaaaatgcgtcttatttggtttagaggcaaatctagaacaaataactac

SEQ ID NO: 28991 - DNA, 96 bp, Fusarium azukicola
  misc_feature: 841
accccatatatcagtagctattttatctaggaacttatattccttattactaggttttttatttatattatttttagttaattttcctagtttgca

SEQ ID NO: 28992 - DNA, 96 bp, Fusarium azukicola
  misc_feature: 841
aggttatttctaataagaataactatagactaagagataacttagatcttcctattttaaatataaaggaaaaaactagtctttttgactggcata

SEQ ID NO: 28993 - DNA, 96 bp, Fusarium azukicola
  misc_feature: 841
tatctgaataatcgcagttatatatagtagataaatttggatagctatttaaatacttccaaatcgtatctaaggcattaaaatgcgtcttatttg

SEQ ID NO: 28994 - DNA, 96 bp, Fusarium azukicola
  misc_feature: 841
ggcattaaaatgcgtcttatttggtttagaggcaaatctagaacaaataactacagcataagctatatcaggtctagtttttatagctagaaatat

SEQ ID NO: 28995 - DNA, 96 bp, Fusarium azukicola
  misc_feature: 840
atagcttatgctgtagttatttgttctagatttacctctaaaccaaataagacgcattttaatgccttagatacgatttggaagtatttaaatagc

SEQ ID NO: 28996 - DNA, 96 bp, Fusarium azukicola
  misc_feature: 840
cggctttaggagatgacgaagaagaagaattagctataaatagcttttcttgtttcttttctctttcttccttcttagaattaggtttagattcct

SEQ ID NO: 28997 - DNA, 96 bp, Fusarium azukicola
  misc_feature: 840
agctgatttctataaagattataaggaatatcctactcttatagctcaagagaataataaccttcctttagaacctaataactataaagaagccat

SEQ ID NO: 28998 - DNA, 96 bp, Fusarium azukicola
  misc_feature: 839
tctctcttttcactccttatcctctcctctcccctctccctctctctcttttcactccttatcctctcctctcccctctccctctctctcttttca

SEQ ID NO: 28999 - DNA, 96 bp, Fusarium azukicola
  misc_feature: 839
atgcgtcttatttggtttagaggcaaatctagaacaaataactacagcataagctatatcaggtctagtttttatagctagaaatattaaagaacc

SEQ ID NO: 29000 - DNA, 96 bp, Fusarium azukicola
  misc_feature: 839
agtcaaaaagactagttttttcctttatatttaaaataggaagatctaagttatctcttagtctatagttattcttattagaaataaccttagctg

SEQ ID NO: 29001 - DNA, 96 bp, Fusarium azukicola
  misc_feature: 837
tcaggattactccttaaagcttgtgagatattagttatatagctggaatagctatcatctaggttatttaaaacccaggcaataatcactttttca

SEQ ID NO: 29002 - DNA, 96 bp, Fusarium azukicola
  misc_feature: 836
agaatatttgctattctttctatatcttctttataagggcccgaaaatataaggtcatctacgtgaatagctatagcaatctttaagttcttattc

SEQ ID NO: 29003 - DNA, 96 bp, Fusarium azukicola
  misc_feature: 835
ttgatataggtcctcactagtatatttaaagagaggatcttttatttttatatatttaattagacttcttaagttaagatgacttagtcttttatg

SEQ ID NO: 29004 - DNA, 96 bp, Fusarium azukicola
  misc_feature: 835
ttgagaatggaagctttcttggttaaagaaaagctttctagtactatagaagaagattccacttcttctaagagtaaagaagcattatctctcata

SEQ ID NO: 29005 - DNA, 96 bp, Fusarium azukicola
  misc_feature: 835
tctctcttagaagctagatattatctctttattacttttcttcctagttatctaggaaatcaaccatttataacctagtcacactgacaggttatg

SEQ ID NO: 29006 - DNA, 96 bp, Fusarium azukicola
  misc_feature: 835
atatatatacggctgcttccacagcctctccccaaaggtatttaggtaggttagaagtaaataataaagctctaaccttttctaatatagtcctat

SEQ ID NO: 29007 - DNA, 96 bp, Fusarium azukicola
  misc_feature: 835
ataaaaactagacctgatatagcttatgctgtagttatttgttctagatttgcctctaaaccaaataagacgcattttaatgccttagatacgatt

SEQ ID NO: 29008 - DNA, 96 bp, Fusarium azukicola
  misc_feature: 834
tgatataggtcctcactagtatatttaaagagaggatcttttatttttatatatttaattagacttcttaagttaagatgacttagtcttttatgc

SEQ ID NO: 29009 - DNA, 96 bp, Fusarium azukicola
  misc_feature: 834
gataaatttggatagctatttaaatacttccaaatcgtatctaaggcattaaaatgcgtcttatttggtttagaggtaaatctagaacaaataact

SEQ ID NO: 29010 - DNA, 96 bp, Fusarium azukicola
  misc_feature: 833
ttaaagtaataattaggggtaataattaaattaagggttagggttaagtagttatagtaaaggttaggggtagtaatgaagttaatttaaaaagaa

SEQ ID NO: 29011 - DNA, 96 bp, Fusarium azukicola
  misc_feature: 833
tacctctaaattatcacttatatcaaaatccatttcatctggggtctcagaaagggaaattaggtcttcctcggctttaggagatgacgaagaaga

SEQ ID NO: 29012 - DNA, 96 bp, Fusarium azukicola
  misc_feature: 833
ataaatttggatagctatttaaatacttccaaatcgtatctaaggcattaaaatgcgtcttatttggtttagaggcaaatctagaacaaataacta

SEQ ID NO: 29013 - DNA, 96 bp, Fusarium azukicola
  misc_feature: 833
aatatttgctattctttctatatcttctttataagggcccgaaaatataaggtcatctacgtgaatagctatagcaatctttaagttcttattcat

SEQ ID NO: 29014 - DNA, 96 bp, Fusarium azukicola
  misc_feature: 832
taaatacttccaaatcgtatctaaggcattaaaatgcgtcttatttggtttagaggtaaatctagaacaaataactacagcataagctatatcagg

SEQ ID NO: 29015 - DNA, 96 bp, Fusarium azukicola
  misc_feature: 831
tttaaatacttccaaatcgtatctaaggcattaaaatgcgtcttatttggtttagaggtaaatctagaacaaataactacagcataagctatatca

SEQ ID NO: 29016 - DNA, 96 bp, Fusarium azukicola
  misc_feature: 831
ttatattccttattactaggttttttatttatattatttttagttaattttcctagtttgcagttttcgcagtttttgacttgatataggtcctca

SEQ ID NO: 29017 - DNA, 96 bp, Fusarium azukicola
  misc_feature: 830
aaaacccttgtacaacatatctggatttatatttaattatattattattattatctgtttttatcttataaacccagcggcctttaagagcttgca

SEQ ID NO: 29018 - DNA, 96 bp, Fusarium azukicola
  misc_feature: 830
tatcacttatatcaaaatccatttcatctggggtctcagaaagggaaattaggtcttcctcggctttaggagatgacgaagaagaagaattagcta

SEQ ID NO: 29019 - DNA, 96 bp, Fusarium azukicola
  misc_feature: 830
tatatatagtagataaatttggatagctatttaaatacttccaaatcgtatctaaggcattaaaatgcgtcttatttggtttagaggtaaatctag

SEQ ID NO: 29020 - DNA, 96 bp, Fusarium azukicola
  misc_feature: 830
gaccccatatatcagtagctattttatctaggaacttatattccttattactaggttttttatttatattatttttagttaattttcctagtttgc

SEQ ID NO: 29021 - DNA, 96 bp, Fusarium azukicola
  misc_feature: 828
taagaaaaaggaatctaaacctaattctaagaaggaagaaagagaaaagaaacaagaaaagctatttatagctaattcttcttcttcgtcatctcc

SEQ ID NO: 29022 - DNA, 96 bp, Fusarium azukicola
  misc_feature: 828
cttatattccttattactaggttttttatttatattatttttagttaattttcctagtttgcagttttcgcagtttttgacttgatataggtcctc

SEQ ID NO: 29023 - DNA, 96 bp, Fusarium azukicola
  misc_feature: 827
cctctccctctctctcttttcactccttatcctctcctctcccctctccctctctctcttttcactccttatcctctcctctcccctctccctctc

SEQ ID NO: 29024 - DNA, 96 bp, Fusarium azukicola
  misc_feature: 826
tctaaggcattaaaatgcgtcttatttggtttagaggcaaatctagaacaaataactacagcataagctatatcaggtctagtttttatagctaga

SEQ ID NO: 29025 - DNA, 96 bp, Fusarium azukicola
  misc_feature: 826
aagctataaaaaaatattcataaagctttaggtttagcaagctaaaactaaagcttgagggtaaatactaggaatcgaacctagagcctattaaac

SEQ ID NO: 29026 - DNA, 96 bp, Fusarium azukicola
  misc_feature: 826
atacctctaaattatcacttatatcaaaatccatttcatctggggtctcagaaagggaaattaggtcttcctcggctttaggagatgacgaagaag

SEQ ID NO: 29027 - DNA, 96 bp, Fusarium azukicola
  misc_feature: 826
ccctctccctctctctcttttcactccttatcctctcctctcccctctccctctctctcttttcactccttatcctctcctctcccctctccctct

SEQ ID NO: 29028 - DNA, 96 bp, Fusarium azukicola
  misc_feature: 825
gataagcaagcgccgcagtcatgtaagcgccgcactttttttaaccccctctatagttatcgcgataaaaacaccataaaccatttgatcaattaa

SEQ ID NO: 29029 - DNA, 96 bp, Fusarium azukicola
  misc_feature: 825
acttatattccttattactaggttttttatttatattatttttagttaattttcctagtttgcagttttcgcagtttttgacttgatataggtcct

SEQ ID NO: 29030 - DNA, 96 bp, Fusarium azukicola
  misc_feature: 824
tatacgttcttattattagaggaaaaaattaaacctctattattattatatatatcttagtaaaaacccctttattatagacctgatattataagg

SEQ ID NO: 29031 - DNA, 96 bp, Fusarium azukicola
  misc_feature: 823
ttctagatttgcctctaaaccaaataagacgcattttaatgccttagatacgatttggaagtatttaaatagctatccaaatttatctactatata

SEQ ID NO: 29032 - DNA, 96 bp, Fusarium azukicola
  misc_feature: 823
taactatagtgatatatccctataaaccatatattatattatagaatttttactctatttttaggtatatttacctaacctatagctactataggt

SEQ ID NO: 29033 - DNA, 96 bp, Fusarium azukicola
  misc_feature: 823
gcaagctcttaaaggccgctgggtttataagataaaaacagataataataataatataattaaatataaatccagatatgttgtacaagggttttt

SEQ ID NO: 29034 - DNA, 96 bp, Fusarium azukicola
  misc_feature: 823
gaacttatattccttattactaggttttttatttatattatttttagttaattttcctagtttgcagttttcgcagtttttgacttgatataggtc

SEQ ID NO: 29035 - DNA, 96 bp, Fusarium azukicola
  misc_feature: 821
aactagacctgatatagcttatgctgtagttatttgttctagatttgcctctaaaccaaataagacgcattttaatgccttagatacgatttggaa

SEQ ID NO: 29036 - DNA, 96 bp, Fusarium azukicola
  misc_feature: 819
tgagaatggaagctttcttggttaaagaaaagctttctagtactatagaagaagattccacttcttctaagagtaaagaagcattatctctcataa

SEQ ID NO: 29037 - DNA, 96 bp, Fusarium azukicola
  misc_feature: 819
tagctataaaaactagacctgatatagcttatgctgtagttatttgttctagatttacctctaaaccaaataagacgcattttaatgccttagata

SEQ ID NO: 29038 - DNA, 96 bp, Fusarium azukicola
  misc_feature: 819
agctatttaaatacttccaaatcgtatctaaggcattaaaatgcgtcttatttggtttagaggcaaatctagaacaaataactacagcataagcta

SEQ ID NO: 29039 - DNA, 96 bp, Fusarium azukicola
  misc_feature: 818
gttctttaatatttctagctataaaaactagacctgatatagcttatgctgtagttatttgttctagatttacctctaaaccaaataagacgcatt

SEQ ID NO: 29040 - DNA, 96 bp, Fusarium azukicola
  misc_feature: 817
ttaaatacttccaaatcgtatctaaggcattaaaatgcgtcttatttggtttagaggtaaatctagaacaaataactacagcataagctatatcag

SEQ ID NO: 29041 - DNA, 96 bp, Fusarium azukicola
  misc_feature: 817
tgttctagatttgcctctaaaccaaataagacgcattttaatgccttagatacgatttggaagtatttaaatagctatccaaatttatctactata

SEQ ID NO: 29042 - DNA, 96 bp, Fusarium azukicola
  misc_feature: 817
tatagcttatgctgtagttatttgttctagatttacctctaaaccaaataagacgcattttaatgccttagatacgatttggaagtatttaaatag

SEQ ID NO: 29043 - DNA, 96 bp, Fusarium azukicola
  misc_feature: 817
actgcgaaaactgcaaactaggaaaattaactaaaaataatataaataaaaaacctagtaataaggaatataagttcctagataaaatagctactg

SEQ ID NO: 29044 - DNA, 96 bp, Fusarium azukicola
  misc_feature: 816
caaattcaaggtattaactatgaagaaacctatgcttgtactataagacctgagactctaagacttttctttataatttctataagaaataactac

SEQ ID NO: 29045 - DNA, 96 bp, Fusarium azukicola
  misc_feature: 814
tatagtagataaatttggatagctatttaaatacttccaaatcgtatctaaggcattaaaatgcgtcttatttggtttagaggtaaatctagaaca

SEQ ID NO: 29046 - DNA, 96 bp, Fusarium azukicola
  misc_feature: 814
ctatttaaatacttccaaatcgtatctaaggcattaaaatgcgtcttatttggtttagaggcaaatctagaacaaataactacagcataagctata

SEQ ID NO: 29047 - DNA, 96 bp, Fusarium azukicola
  misc_feature: 814
atacttccaaatcgtatctaaggcattaaaatgcgtcttatttggtttagaggtaaatctagaacaaataactacagcataagctatatcaggtct

SEQ ID NO: 29048 - DNA, 96 bp, Fusarium azukicola
  misc_feature: 813
ataaatttggatagctatttaaatacttccaaatcgtatctaaggcattaaaatgcgtcttatttggtttagaggtaaatctagaacaaataacta

SEQ ID NO: 29049 - DNA, 96 bp, Fusarium azukicola
  misc_feature: 813
ggttctttaatatttctagctataaaaactagacctgatatagcttatgctgtagttatttgttctagatttacctctaaaccaaataagacgcat

SEQ ID NO: 29050 - DNA, 96 bp, Fusarium azukicola
  misc_feature: 812
aatgcgtcttatttggtttagaggcaaatctagaacaaataactacagcataagctatatcaggtctagtttttatagctagaaatattaaagaac

SEQ ID NO: 29051 - DNA, 96 bp, Fusarium azukicola
  misc_feature: 811
tattgtgtatatctgaataatcgcagttatatatagtagataaatttggatagctatttaaatacttccaaatcgtatctaaggcattaaaatgcg

SEQ ID NO: 29052 - DNA, 96 bp, Fusarium azukicola
  misc_feature: 809
cagctgatttctataaagattataaggaatatcctactcttatagctcaagagaataataaccttcctttagaacctaataactataaagaagcca

SEQ ID NO: 29053 - DNA, 96 bp, Fusarium azukicola
  misc_feature: 809
tctaagaaaaaggaatctaaacctaattctaagaaggaagaaagagaaaagaaacaagaaaagctatttatagctaattcttcttcttcgtcatct

SEQ ID NO: 29054 - DNA, 96 bp, Fusarium azukicola
  misc_feature: 807
ttgagtcttttttaagactatatctcaactatggccactaagtataatatttcccggcttattggaagcgagaattatattacttgggctttgaga

SEQ ID NO: 29055 - DNA, 96 bp, Fusarium azukicola
  misc_feature: 807
tgccagtcaaaaagactagttttttcctttatatttaaaataggaagatctaagttatctcttagtctatagttattcttattagaaataacctta

SEQ ID NO: 29056 - DNA, 96 bp, Fusarium azukicola
  misc_feature: 807
agctataaaaactagacctgatatagcttatgctgtagttatttgttctagatttgcctctaaaccaaataagacgcattttaatgccttagatac

SEQ ID NO: 29057 - DNA, 96 bp, Fusarium azukicola
  misc_feature: 807
agttaataccttgaatttgtaaaaacccttgtacaacatatctggatttatatttaattatattattattattatctgtttttatcttataaaccc

SEQ ID NO: 29058 - DNA, 96 bp, Fusarium azukicola
  misc_feature: 806
gaagaagaattagctataaatagcttttcttgtttcttttctctttcttccttcttagaattaggtttagattcctttttcttagaagtcttatgc

SEQ ID NO: 29059 - DNA, 96 bp, Fusarium azukicola
  misc_feature: 804
tagcttatgctgtagttatttgttctagatttacctctaaaccaaataagacgcattttaatgccttagatacgatttggaagtatttaaatagct

SEQ ID NO: 29060 - DNA, 96 bp, Fusarium azukicola
  misc_feature: 803
taataattaggggtaataattaaattaagggttagggttaagtagttatagtaaaggttaggggtagtaatgaagttaatttaaaaagaaaagaga

SEQ ID NO: 29061 - DNA, 96 bp, Fusarium azukicola
  misc_feature: 803
gccgctgggtttataagataaaaacagataataataataatataattaaatataaatccagatatgttgtacaagggtttttacaaattcaaggta

SEQ ID NO: 29062 - DNA, 96 bp, Fusarium azukicola
  misc_feature: 802
actagacctgatatagcttatgctgtagttatttgttctagatttgcctctaaaccaaataagacgcattttaatgccttagatacgatttggaag

SEQ ID NO: 29063 - DNA, 96 bp, Fusarium azukicola
  misc_feature: 801
caaagcccaagtaatataattctcgcttccaataagccgggaaatattatacttagtggccatagttgagatatagtcttaaaaaagactcaaaaa

SEQ ID NO: 29064 - DNA, 96 bp, Fusarium azukicola
  misc_feature: 801
ctataaatagcttttcttgtttcttttctctttcttccttcttagaattaggtttagattcctttttcttagaagtcttatgcaccttattggctt

SEQ ID NO: 29065 - DNA, 96 bp, Fusarium azukicola
  misc_feature: 800
gaatatttgctattctttctatatcttctttataagggcccgaaaatataaggtcatctacgtgaatagctatagcaatctttaagttcttattca

SEQ ID NO: 29066 - DNA, 96 bp, Fusarium azukicola
  misc_feature: 800
tcccctctccctctctctcttttcactccttatcctctcctctcccctctccctctctctcttttcactccttatcctctcctctcccctctccct

SEQ ID NO: 29067 - DNA, 96 bp, Fusarium azukicola
  misc_feature: 799
cctatataatcttagattttcccttataatatcaggtctataataaaggggtttttactaagatatatataataataatagaggtttaattttttc

SEQ ID NO: 29068 - DNA, 96 bp, Fusarium azukicola
  misc_feature: 797
agctataaaaaaatattcataaagctttaggtttagcaagctaaaactaaagcttgagggtaaatactaggaatcgaacctagagcctattaaacc

SEQ ID NO: 29069 - DNA, 96 bp, Fusarium azukicola
  misc_feature: 797
ctgttaatgttctatattatattaccaactatagtgatatatccctataaaccatatattatattatagaatttttactctatttttaggtatatt

SEQ ID NO: 29070 - DNA, 96 bp, Fusarium azukicola
  misc_feature: 796
aagctcttaaaggccgctgggtttataagataaaaacagataataataataatataattaaatataaatccagatatgttgtacaagggtttttac

SEQ ID NO: 29071 - DNA, 96 bp, Fusarium azukicola
  misc_feature: 795
tctcctctcccctctccctctctctcttttcactccttatcctctcctctcccctctccctctctctcttttcactccttatcctctcctctcccc

SEQ ID NO: 29072 - DNA, 96 bp, Fusarium azukicola
  misc_feature: 794
aaatttggatagctatttaaatacttccaaatcgtatctaaggcattaaaatgcgtcttatttggtttagaggcaaatctagaacaaataactaca

SEQ ID NO: 29073 - DNA, 96 bp, Fusarium azukicola
  misc_feature: 793
ccatttataacctagtcacactgacaggttatgagcccggaggtctctacctaagggtttatacttaaaagaagattatacttcttttttaagtct

SEQ ID NO: 29074 - DNA, 96 bp, Fusarium azukicola
  misc_feature: 792
gtaataattaggggtaataattaaattaagggttagggttaagtagttatagtaaaggttaggggtagtaatgaagttaatttaaaaagaaaagag

SEQ ID NO: 29075 - DNA, 96 bp, Fusarium azukicola
  misc_feature: 791
taaatttggatagctatttaaatacttccaaatcgtatctaaggcattaaaatgcgtcttatttggtttagaggtaaatctagaacaaataactac

SEQ ID NO: 29076 - DNA, 96 bp, Fusarium azukicola
  misc_feature: 791
ctcccctctccctctctctcttttcactccttatcctctcctctcccctctccctctctctcttttcactccttatcctctcctctcccctctccc

SEQ ID NO: 29077 - DNA, 96 bp, Fusarium azukicola
  misc_feature: 791
ccagtcaaaaagactagttttttcctttatatttaaaataggaagatctaagttatctcttagtctatagttattcttattagaaataaccttagc

SEQ ID NO: 29078 - DNA, 96 bp, Fusarium azukicola
  misc_feature: 790
attaagggtattattctaattggttaaaaaggttcctatagacctttatgactgccgtcatctatgcatcaagtataataactgccgattggctaa

SEQ ID NO: 29079 - DNA, 96 bp, Fusarium azukicola
  misc_feature: 790
tctagatttgcctctaaaccaaataagacgcattttaatgccttagatacgatttggaagtatttaaatagctatccaaatttatctactatatat

SEQ ID NO: 29080 - DNA, 96 bp, Fusarium azukicola
  misc_feature: 789
tagctataaaaactagacctgatatagcttatgctgtagttatttgttctagatttgcctctaaaccaaataagacgcattttaatgccttagata

SEQ ID NO: 29081 - DNA, 96 bp, Fusarium azukicola
  misc_feature: 788
agtaattaaagtaataattaggggtaataattaaattaagggttagggttaagtagttatagtaaaggttaggggtagtaatgaagttaatttaaa

SEQ ID NO: 29082 - DNA, 96 bp, Fusarium azukicola
  misc_feature: 788
ctataaaaaaatattcataaagctttaggtttagcaagctaaaactaaagcttgagggtaaatactaggaatcgaacctagagcctattaaaccac

SEQ ID NO: 29083 - DNA, 96 bp, Fusarium azukicola
  misc_feature: 788
cagtcaaaaagactagttttttcctttatatttaaaataggaagatctaagttatctcttagtctatagttattcttattagaaataaccttagct

SEQ ID NO: 29084 - DNA, 96 bp, Fusarium azukicola
  misc_feature: 786
tatgttaatgttctatattatattaccaactatagtgatatatccctataaaccacatattatattatagaatttttactctatttttaggtatat

SEQ ID NO: 29085 - DNA, 96 bp, Fusarium azukicola
  misc_feature: 786
agctataaatagcttttcttgtttcttttctctttcttccttcttagaattaggtttagattcctttttcttagaagtcttatgcaccttattggc

SEQ ID NO: 29086 - DNA, 96 bp, Fusarium azukicola
  misc_feature: 786
cccctctccctctctctcttttcactccttatcctctcctctcccctctccctctctctcttttcactccttatcctctcctctcccctctccctc

SEQ ID NO: 29087 - DNA, 96 bp, Fusarium azukicola
  misc_feature: 786
agagattaaagtagggtatagggtaaagtaaaagagagaagagagtatagggtaaagtaaaagagagaagagagtatagggtaaagtaaaagagag

SEQ ID NO: 29088 - DNA, 96 bp, Fusarium azukicola
  misc_feature: 785
aaactagacctgatatagcttatgctgtagttatttgttctagatttgcctctaaaccaaataagacgcattttaatgccttagatacgatttgga

SEQ ID NO: 29089 - DNA, 96 bp, Fusarium azukicola
  misc_feature: 784
atagctatttaaatacttccaaatcgtatctaaggcattaaaatgcgtcttatttggtttagaggcaaatctagaacaaataactacagcataagc

SEQ ID NO: 29090 - DNA, 96 bp, Fusarium azukicola
  misc_feature: 783
tagttaataccttgaatttgtaaaaacccttgtacaacatatctggatttatatttaattatattattattattatctgtttttatcttataaacc

SEQ ID NO: 29091 - DNA, 96 bp, Fusarium azukicola
  misc_feature: 782
gccagtcaaaaagactagttttttcctttatatttaaaataggaagatctaagttatctcttagtctatagttattcttattagaaataaccttag

SEQ ID NO: 29092 - DNA, 96 bp, Fusarium azukicola
  misc_feature: 781
ctcctctcccctctccctctctctcttttcactccttatcctctcctctcccctctccctctctctcttttcactccttatcctctcctctcccct

SEQ ID NO: 29093 - DNA, 96 bp, Fusarium azukicola
  misc_feature: 780
tagctatttaaatacttccaaatcgtatctaaggcattaaaatgcgtcttatttggtttagaggcaaatctagaacaaataactacagcataagct

SEQ ID NO: 29094 - DNA, 96 bp, Fusarium azukicola
  misc_feature: 780
agatttgcctctaaaccaaataagacgcattttaatgccttagatacgatttggaagtatttaaatagctatccaaatttatctactatatataac

SEQ ID NO: 29095 - DNA, 96 bp, Fusarium azukicola
  misc_feature: 779
gtatctaaggcattaaaatgcgtcttatttggtttagaggtaaatctagaacaaataactacagcataagctatatcaggtctagtttttatagct

SEQ ID NO: 29096 - DNA, 96 bp, Fusarium azukicola
  misc_feature: 778
aaaaaattaaacctctattattattatatatatcttagtaaaaacccctttattatagacctgatattataagggaaaatctaagattatataggg

SEQ ID NO: 29097 - DNA, 96 bp, Fusarium azukicola
  misc_feature: 778
catttataacctagtcacactgacaggttatgagcccggaggtctctacctaagggtttatacttaaaagaagattatacttcttttttaagtctt

SEQ ID NO: 29098 - DNA, 96 bp, Fusarium azukicola
  misc_feature: 778
agcaattccaaaaggaaataggttctttaatatttctagctataaaaactagacctgatatagcttatgctgtagttatttgttctagatttacct

SEQ ID NO: 29099 - DNA, 96 bp, Fusarium azukicola
  misc_feature: 777
ttagctataaatagcttttcttgtttcttttctctttcttccttcttagaattaggtttagattcctttttcttagaagtcttatgcaccttattg

SEQ ID NO: 29100 - DNA, 96 bp, Fusarium azukicola
  misc_feature: 777
cattaaaatgcgtcttatttggtttagaggtaaatctagaacaaataactacagcataagctatatcaggtctagtttttatagctagaaatatta

SEQ ID NO: 29101 - DNA, 96 bp, Fusarium azukicola
  misc_feature: 776
tttttaaattaacttcattactacccctaacctttactataactacttaaccctaacccttaatttaattattacccctaattattactttaatta

SEQ ID NO: 29102 - DNA, 96 bp, Fusarium azukicola
  misc_feature: 776
ggaagtaattaaagtaataattaggggtaataattaaattaagggttagggttaagtagttatagtaaaggttaggggtagtaatgaagttaattt

SEQ ID NO: 29103 - DNA, 96 bp, Fusarium azukicola
  misc_feature: 775
tcgcagttatatatagtagataaatttggatagctatttaaatacttccaaatcgtatctaaggcattaaaatgcgtcttatttggtttagaggca

SEQ ID NO: 29104 - DNA, 96 bp, Fusarium azukicola
  misc_feature: 775
gaagtaattaaagtaataattaggggtaataattaaattaagggttagggttaagtagttatagtaaaggttaggggtagtaatgaagttaattta

SEQ ID NO: 29105 - DNA, 96 bp, Fusarium azukicola
  misc_feature: 774
ctcaaagcccaagtaatataattctcgcttccaataagccgggaaatattatacttagtggccatagttgagatatagtcttaaaaaagactcaaa

SEQ ID NO: 29106 - DNA, 96 bp, Fusarium azukicola
  misc_feature: 774
ttgcagttttcgcagtttttgacttgatataggtcctcactagtatatttaaagagaggatcttttatttttatatatttaattagacttcttaag

SEQ ID NO: 29107 - DNA, 96 bp, Fusarium azukicola
  misc_feature: 773
ttatatatagtagataaatttggatagctatttaaatacttccaaatcgtatctaaggcattaaaatgcgtcttatttggtttagaggtaaatcta

SEQ ID NO: 29108 - DNA, 96 bp, Fusarium azukicola
  misc_feature: 773
agcttatgctgtagttatttgttctagatttacctctaaaccaaataagacgcattttaatgccttagatacgatttggaagtatttaaatagcta

SEQ ID NO: 29109 - DNA, 96 bp, Fusarium azukicola
  misc_feature: 773
aataccttgaatttgtaaaaacccttgtacaacatatctggatttatatttaattatattattattattatctgtttttatcttataaacccagcg

SEQ ID NO: 29110 - DNA, 96 bp, Fusarium azukicola
  misc_feature: 772
aacttatattccttattactaggttttttatttatattatttttagttaattttcctagtttgcagttttcgcagtttttgacttgatataggtcc

SEQ ID NO: 29111 - DNA, 96 bp, Fusarium azukicola
  misc_feature: 771
ttatcacttatatcaaaatccatttcatctggggtctcagaaagggaaattaggtcttcctcggctttaggagatgacgaagaagaagaattagct

SEQ ID NO: 29112 - DNA, 96 bp, Fusarium azukicola
  misc_feature: 771
ggcttattggaagcgagaattatattacttgggctttgagaatggaagctttcttggttaaagaaaagctttctagtactatagaagaagattcca

SEQ ID NO: 29113 - DNA, 96 bp, Fusarium azukicola
  misc_feature: 770
ctttccctttcatcttttgagaatatagaaatatatcttaataagataaaagaggttaaaaatgagctagaagctagagaaatcactattcctgaa

SEQ ID NO: 29114 - DNA, 96 bp, Fusarium azukicola
  misc_feature: 770
aagccttggaaaaagaagaaaactgccttaaaatgcagttattgcaaactgccaggtcataaagacccagattgctattttttgcaccctaataag

SEQ ID NO: 29115 - DNA, 96 bp, Fusarium azukicola
  misc_feature: 768
tatattgtgtatatctgaataatcgcagttatatatagtagataaatttggatagctatttaaatacttccaaatcgtatctaaggcattaaaatg

SEQ ID NO: 29116 - DNA, 96 bp, Fusarium azukicola
  misc_feature: 768
gcttatgctgtagttatttgttctagatttacctctaaaccaaataagacgcattttaatgccttagatacgatttggaagtatttaaatagctat

SEQ ID NO: 29117 - DNA, 96 bp, Fusarium azukicola
  misc_feature: 768
atattgtgtatatctgaataatcgcagttatatatagtagataaatttggatagctatttaaatacttccaaatcgtatctaaggcattaaaatgc

SEQ ID NO: 29118 - DNA, 96 bp, Fusarium azukicola
  misc_feature: 766
aataggttctttaatatttctagctataaaaactagacctgatatagcttatgctgtagttatttgttctagatttacctctaaaccaaataagac

SEQ ID NO: 29119 - DNA, 96 bp, Fusarium azukicola
  misc_feature: 765
ttctaagaaaaaggaatctaaacctaattctaagaaggaagaaagagaaaagaaacaagaaaagctatttatagctaattcttcttcttcgtcatc

SEQ ID NO: 29120 - DNA, 96 bp, Fusarium azukicola
  misc_feature: 765
taaaaactagacctgatatagcttatgctgtagttatttgttctagatttgcctctaaaccaaataagacgcattttaatgccttagatacgattt

SEQ ID NO: 29121 - DNA, 96 bp, Fusarium azukicola
  misc_feature: 764
tgcgtcttatttggtttagaggcaaatctagaacaaataactacagcataagctatatcaggtctagtttttatagctagaaatattaaagaacct

SEQ ID NO: 29122 - DNA, 96 bp, Fusarium azukicola
  misc_feature: 764
tataaaaactagacctgatatagcttatgctgtagttatttgttctagatttgcctctaaaccaaataagacgcattttaatgccttagatacgat

SEQ ID NO: 29123 - DNA, 96 bp, Fusarium azukicola
  misc_feature: 764
aatttggatagctatttaaatacttccaaatcgtatctaaggcattaaaatgcgtcttatttggtttagaggcaaatctagaacaaataactacag

SEQ ID NO: 29124 - DNA, 96 bp, Fusarium azukicola
  misc_feature: 763
gcattaaaatgcgtcttatttggtttagaggtaaatctagaacaaataactacagcataagctatatcaggtctagtttttatagctagaaatatt

SEQ ID NO: 29125 - DNA, 96 bp, Fusarium azukicola
  misc_feature: 762
ctctcccctctccctctctctcttttcactccttatcctctcctctcccctctccctctctctcttttcactccttatcctctcctctcccctctc

SEQ ID NO: 29126 - DNA, 96 bp, Fusarium azukicola
  misc_feature: 758
taataccttgaatttgtaaaaacccttgtacaacatatctggatttatatttaattatattattattattatctgtttttatcttataaacccagc

SEQ ID NO: 29127 - DNA, 96 bp, Fusarium azukicola
  misc_feature: 757
gagagattaaagtagggtatagggtaaagtaaaagagagaagagagtatagggtaaagtaaaagagagaagagagtatagggtaaagtaaaagaga

SEQ ID NO: 29128 - DNA, 96 bp, Fusarium azukicola
  misc_feature: 757
ctctcttagaagctagatattatctctttattacttttcttcctagttatctaggaaatcaaccatttataacctagtcacactgacaggttatga

SEQ ID NO: 29129 - DNA, 96 bp, Fusarium azukicola
  misc_feature: 755
cctctcccctctccctctctctcttttcactccttatcctctcctctcccctctccctctctctcttttcactccttatcctctcctctcccctct

SEQ ID NO: 29130 - DNA, 96 bp, Fusarium azukicola
  misc_feature: 755
aaaaactagacctgatatagcttatgctgtagttatttgttctagatttgcctctaaaccaaataagacgcattttaatgccttagatacgatttg

SEQ ID NO: 29131 - DNA, 96 bp, Fusarium azukicola
  misc_feature: 754
tagacctgatatagcttatgctgtagttatttgttctagatttgcctctaaaccaaataagacgcattttaatgccttagatacgatttggaagta

SEQ ID NO: 29132 - DNA, 96 bp, Fusarium azukicola
  misc_feature: 754
aaaggtcaagggaagtaattaaagtaataattaggggtaataattaaattaagggttagggttaagtagttatagtaaaggttaggggtagtaatg

SEQ ID NO: 29133 - DNA, 96 bp, Fusarium azukicola
  misc_feature: 753
caagtcaaaaactgcgaaaactgcaaactaggaaaattaactaaaaataatataaataaaaaacctagtaataaggaatataagttcctagataaa

SEQ ID NO: 29134 - DNA, 96 bp, Fusarium azukicola
  misc_feature: 750
agattaaagtagggtatagggtaaagtaaaagagagaagagagtatagggtaaagtaaaagagagaagagagtatagggtaaagtaaaagagagaa

SEQ ID NO: 29135 - DNA, 96 bp, Fusarium azukicola
  misc_feature: 750
attttatctaggaacttatattccttattactaggttttttatttatattatttttagttaattttcctagtttgcagttttcgcagtttttgact

SEQ ID NO: 29136 - DNA, 96 bp, Fusarium azukicola
  misc_feature: 749
gcgtcttatttggtttagaggcaaatctagaacaaataactacagcataagctatatcaggtctagtttttatagctagaaatattaaagaaccta

SEQ ID NO: 29137 - DNA, 96 bp, Fusarium azukicola
  misc_feature: 748
ctagatttgcctctaaaccaaataagacgcattttaatgccttagatacgatttggaagtatttaaatagctatccaaatttatctactatatata

SEQ ID NO: 29138 - DNA, 96 bp, Fusarium azukicola
  misc_feature: 747
tatcacttatatcaaaatccatttcttctggggtctcagaaagggaaattaggtcttcctcggctttaggagatgacgaagaagaagaattagcta

SEQ ID NO: 29139 - DNA, 96 bp, Fusarium azukicola
  misc_feature: 746
gcagttatatatagtagataaatttggatagctatttaaatacttccaaatcgtatctaaggcattaaaatgcgtcttatttggtttagaggcaaa

SEQ ID NO: 29140 - DNA, 96 bp, Fusarium azukicola
  misc_feature: 746
ataaaggtcaagggaagtaattaaagtaataattaggggtaataattaaattaagggttagggttaagtagttatagtaaaggttaggggtagtaa

SEQ ID NO: 29141 - DNA, 96 bp, Fusarium azukicola
  misc_feature: 746
atttggatagctatttaaatacttccaaatcgtatctaaggcattaaaatgcgtcttatttggtttagaggcaaatctagaacaaataactacagc

SEQ ID NO: 29142 - DNA, 96 bp, Fusarium azukicola
  misc_feature: 745
aataggttctttaatatttctagctataaaaactagacctgatatagcttatgctgtagttatttgttctagatttgcctctaaaccaaataagac

SEQ ID NO: 29143 - DNA, 96 bp, Fusarium azukicola
  misc_feature: 744
gctataaatagcttttcttgtttcttttctctttcttccttcttagaattaggtttagattcctttttcttagaagtcttatgcaccttattggct

SEQ ID NO: 29144 - DNA, 96 bp, Fusarium azukicola
  misc_feature: 744
ccgctgggtttataagataaaaacagataataataataatataattaaatataaatccagatatgttgtacaagggtttttacaaattcaaggtat

SEQ ID NO: 29145 - DNA, 96 bp, Fusarium azukicola
  misc_feature: 744
aaaactagacctgatatagcttatgctgtagttatttgttctagatttgcctctaaaccaaataagacgcattttaatgccttagatacgatttgg

SEQ ID NO: 29146 - DNA, 96 bp, Fusarium azukicola
  misc_feature: 743
aaaaggaaataggttctttaatatttctagctataaaaactagacctgatatagcttatgctgtagttatttgttctagatttacctctaaaccaa

SEQ ID NO: 29147 - DNA, 96 bp, Fusarium azukicola
  misc_feature: 743
gagattaaagtagggtatagggtaaagtaaaagagagaagagagtatagggtaaagtaaaagagagaagagagtatagggtaaagtaaaagagaga

SEQ ID NO: 29148 - DNA, 96 bp, Fusarium azukicola
  misc_feature: 742
gtaattaaagtaataattaggggtaataattaaattaagggttagggttaagtagttatagtaaaggttaggggtagtaatgaagttaatttaaaa

SEQ ID NO: 29149 - DNA, 96 bp, Fusarium azukicola
  misc_feature: 742
tccacagcctctccccaaaggtatttaggtaggttagaagtaaataataaagctctaaccttttctaatatagtcctatttatcctttctacaaag

SEQ ID NO: 29150 - DNA, 96 bp, Fusarium azukicola
  misc_feature: 742
ctctttctccctttctttcctttatctttcttcactcttcttcttaaccctaaccctctctttccctccttcttttcctttctcttcttcttcttt

SEQ ID NO: 29151 - DNA, 96 bp, Fusarium azukicola
  misc_feature: 741
tctcccctctccctctctctcttttcactccttatcctctcctctcccctctccctctctctcttttcactccttatcctctcctctcccctctcc

SEQ ID NO: 29152 - DNA, 96 bp, Fusarium azukicola
  misc_feature: 738
taaaggtcaagggaagtaattaaagtaataattaggggtaataattaaattaagggttagggttaagtagttatagtaaaggttaggggtagtaat

SEQ ID NO: 29153 - DNA, 96 bp, Fusarium azukicola
  misc_feature: 737
caagctcttaaaggccgctgggtttataagataaaaacagataataataataatataattaaatataaatccagatatgttgtacaagggttttta

SEQ ID NO: 29154 - DNA, 96 bp, Fusarium azukicola
  misc_feature: 737
gatagctatttaaatacttccaaatcgtatctaaggcattaaaatgcgtcttatttggtttagaggcaaatctagaacaaataactacagcataag

SEQ ID NO: 29155 - DNA, 96 bp, Fusarium azukicola
  misc_feature: 737
aacctttactataacctcttcccctaacctttactataacctcttcccctaacctttactataacctcttcccctaacctttactataacctcttc

SEQ ID NO: 29156 - DNA, 96 bp, Fusarium azukicola
  misc_feature: 737
ccccatatatcagtagctattttatctaggaacttatattccttattactaggttttttatttatattatttttagttaattttcctagtttgcag

SEQ ID NO: 29157 - DNA, 96 bp, Fusarium azukicola
  misc_feature: 737
ctagacctgatatagcttatgctgtagttatttgttctagatttgcctctaaaccaaataagacgcattttaatgccttagatacgatttggaagt

SEQ ID NO: 29158 - DNA, 96 bp, Fusarium azukicola
  misc_feature: 737
ataggttctttaatatttctagctataaaaactagacctgatatagcttatgctgtagttatttgttctagatttacctctaaaccaaataagacg

SEQ ID NO: 29159 - DNA, 96 bp, Fusarium azukicola
  misc_feature: 735
cttctctttctccctttctttcctttatctttcttcactcttcttcttaaccctaaccctctctttccctccttcttttcctttctcttcttcttc

SEQ ID NO: 29160 - DNA, 96 bp, Fusarium azukicola
  misc_feature: 735
aaagatcctctctttaaatatactagtgaggacctatatcaagttaaaaactgtgaaaactgcaaactaggaaaattaactaaaaataatataaat

SEQ ID NO: 29161 - DNA, 96 bp, Fusarium azukicola
  misc_feature: 734
aggttctttaatatttctagctataaaaactagacctgatatagcttatgctgtagttatttgttctagatttacctctaaaccaaataagacgca

SEQ ID NO: 29162 - DNA, 96 bp, Fusarium azukicola
  misc_feature: 734
actttccctttcatcttttgagaatatagaaatatatcttaataagataaaagaggttaaaaatgagctagaagctagagaaatcactattcctga

SEQ ID NO: 29163 - DNA, 96 bp, Fusarium azukicola
  misc_feature: 734
ataggttctttaatatttctagctataaaaactagacctgatatagcttatgctgtagttatttgttctagatttgcctctaaaccaaataagacg

SEQ ID NO: 29164 - DNA, 96 bp, Fusarium azukicola
  misc_feature: 733
agagagattaaagtagggtatagggtaaagtaaaagagagaagagagtatagggtaaagtaaaagagagaagagagtatagggtaaagtaaaagag

SEQ ID NO: 29165 - DNA, 96 bp, Fusarium azukicola
  misc_feature: 732
ggaacttatattccttattactaggttttttatttatattatttttagttaattttcctagtttgcagttttcgcagtttttgacttgatataggt

SEQ ID NO: 29166 - DNA, 96 bp, Fusarium azukicola
  misc_feature: 731
ataaaagtgggtcacaataaagagtctgattggatcagataaaagtgggatttagttgttgatgattgaattgactgaagagttgattcttattgt

SEQ ID NO: 29167 - DNA, 96 bp, Fusarium azukicola
  misc_feature: 730
tcaaagcccaagtaatataattctcgcttccaataagccgggaaatattatacttagtggccatagttgagatatagtcttaaaaaagactcaaaa

SEQ ID NO: 29168 - DNA, 96 bp, Fusarium azukicola
  misc_feature: 729
aattattcttccttctttaaccttccttacttctctcctttcttaaccttccttacttctctcctttcttaaccttccttacttctctcctttctt

SEQ ID NO: 29169 - DNA, 96 bp, Fusarium azukicola
  misc_feature: 728
taggttctttaatatttctagctataaaaactagacctgatatagcttatgctgtagttatttgttctagatttacctctaaaccaaataagacgc

SEQ ID NO: 29170 - DNA, 96 bp, Fusarium azukicola
  misc_feature: 726
agggaagtaattaaagtaataattaggggtaataattaaattaagggttagggttaagtagttatagtaaaggttaggggtagtaatgaagttaat

SEQ ID NO: 29171 - DNA, 96 bp, Fusarium azukicola
  misc_feature: 725
cgcagttatatatagtagataaatttggatagctatttaaatacttccaaatcgtatctaaggcattaaaatgcgtcttatttggtttagaggcaa

SEQ ID NO: 29172 - DNA, 96 bp, Fusarium azukicola
  misc_feature: 724
aaatttggatagctatttaaatacttccaaatcgtatctaaggcattaaaatgcgtcttatttggtttagaggtaaatctagaacaaataactaca

SEQ ID NO: 29173 - DNA, 96 bp, Fusarium azukicola
  misc_feature: 724
tctctttctccctttctttcctttatctttcttcactcttcttcttaaccctaaccctctctttccctccttcttttcctttctcttcttcttctt

SEQ ID NO: 29174 - DNA, 96 bp, Fusarium azukicola
  misc_feature: 723
aagatcctctctttaaatatactagtgaggacctatatcaagttaaaaactgtgaaaactgcaaactaggaaaattaactaaaaataatataaata

SEQ ID NO: 29175 - DNA, 96 bp, Fusarium azukicola
  misc_feature: 723
ctcttctctttctccctttctttcctttatctttcttcactcttcttcttaaccctaaccctctctttccctccttcttttcctttctcttcttct

SEQ ID NO: 29176 - DNA, 96 bp, Fusarium azukicola
  misc_feature: 721
tttttatttatttttctaaaattaactagaaattcttttctacatacaatatgcctagtagcacctgtatcatatataaaattagttatattattt

SEQ ID NO: 29177 - DNA, 96 bp, Fusarium azukicola
  misc_feature: 721
caagctataaaaaaatattcataaagctttaggtttagcaagctaaaactaaagcttgagggtaaatactaggaatcgaacctagagcctattaaa

SEQ ID NO: 29178 - DNA, 96 bp, Fusarium azukicola
  misc_feature: 721
attcttccttctttaaccttccttacttctctcctttcttaaccttccttacttctctcctttcttaaccttccttacttctctcctttcttaacc

SEQ ID NO: 29179 - DNA, 96 bp, Fusarium azukicola
  misc_feature: 721
atatatcagtagctattttatctaggaacttatattccttattactaggttttttatttatattatttttagttaattttcctagtttgcagtttt

SEQ ID NO: 29180 - DNA, 96 bp, Fusarium azukicola
  misc_feature: 720
aaaaattaaacctctattattattatatatatcttagtaaaaacccctttattatagacctgatattataagggaaaatctaagattatataggga

SEQ ID NO: 29181 - DNA, 96 bp, Fusarium azukicola
  misc_feature: 720
cattaaaatgcgtcttatttggtttagaggcaaatctagaacaaataactacagcataagctatatcaggtctagtttttatagctagaaatatta

SEQ ID NO: 29182 - DNA, 96 bp, Fusarium azukicola
  misc_feature: 719
tttatattatttttagttaattttcctagtttgcagttttcacagtttttaacttgatataggtcctcactagtatatttaaagagaggatctttt

SEQ ID NO: 29183 - DNA, 96 bp, Fusarium azukicola
  misc_feature: 719
atacctaaaaatagagtaaaaattctataatataatatgtggtttatagggatatatcactatagttggtaatataatatagaacattaacaataa

SEQ ID NO: 29184 - DNA, 96 bp, Fusarium azukicola
  misc_feature: 719
atatcagtagctattttatctaggaacttatattccttattactaggttttttatttatattatttttagttaattttcctagtttgcagttttcg

SEQ ID NO: 29185 - DNA, 96 bp, Fusarium azukicola
  misc_feature: 718
ttttatctaggaacttatattccttattactaggttttttatttatattatttttagttaattttcctagtttgcagttttcgcagtttttgactt

SEQ ID NO: 29186 - DNA, 96 bp, Fusarium azukicola
  misc_feature: 717
gaaggaaataacccctcttttaatgagattccttactttaaagaaagcccttataataatgaaaaggcaatattatataataataataataataaa

SEQ ID NO: 29187 - DNA, 96 bp, Fusarium azukicola
  misc_feature: 717
gttaataccttgaatttgtaaaaacccttgtacaacatatctggatttatatttaattatattattattattatctgtttttatcttataaaccca

SEQ ID NO: 29188 - DNA, 96 bp, Fusarium azukicola
  misc_feature: 717
gggaagtaattaaagtaataattaggggtaataattaaattaagggttagggttaagtagttatagtaaaggttaggggtagtaatgaagttaatt

SEQ ID NO: 29189 - DNA, 96 bp, Fusarium azukicola
  misc_feature: 717
gcattaaaatgcgtcttatttggtttagaggcaaatctagaacaaataactacagcataagctatatcaggtctagtttttatagctagaaatatt

SEQ ID NO: 29190 - DNA, 96 bp, Fusarium azukicola
  misc_feature: 717
aggaattatatacctctaaattatcacttatatcaaaatccatttcatctggggtctcagaaagggaaattaggtcttcctcggctttaggagatg

SEQ ID NO: 29191 - DNA, 96 bp, Fusarium azukicola
  misc_feature: 716
tgcagttttcgcagtttttgacttgatataggtcctcactagtatatttaaagagaggatcttttatttttatatatttaattagacttcttaagt

SEQ ID NO: 29192 - DNA, 96 bp, Fusarium azukicola
  misc_feature: 715
tagctataaatagcttttcttgtttcttttctctttcttccttcttagaattaggtttagattcctttttcttagaagtcttatgcaccttattgg

SEQ ID NO: 29193 - DNA, 96 bp, Fusarium azukicola
  misc_feature: 715
aagctatttatagctaattcttcttcttcgtcatctcctaaagccgaggaagacctaatttccctttctgagaccccagaagaaatggattttgat

SEQ ID NO: 29194 - DNA, 96 bp, Fusarium azukicola
  misc_feature: 714
gcgaaaactgcaaactaggaaaattaactaaaaataatataaataaaaaacctagtaataaggaatataagttcctagataaaatagctactgata

SEQ ID NO: 29195 - DNA, 96 bp, Fusarium azukicola
  misc_feature: 712
ttctctttctccctttctttcctttatctttcttcactcttcttcttaaccctaaccctctctttccctccttcttttcctttctcttcttcttct

SEQ ID NO: 29196 - DNA, 96 bp, Fusarium azukicola
  misc_feature: 712
aaggtcaagggaagtaattaaagtaataattaggggtaataattaaattaagggttagggttaagtagttatagtaaaggttaggggtagtaatga

SEQ ID NO: 29197 - DNA, 96 bp, Fusarium azukicola
  misc_feature: 712
ataattattcttccttctttaaccttccttacttctctcctttcttaaccttccttacttctctcctttcttaaccttccttacttctctcctttc

SEQ ID NO: 29198 - DNA, 96 bp, Fusarium azukicola
  misc_feature: 712
cttccaaatcgtatctaaggcattaaaatgcgtcttatttggtttagaggtaaatctagaacaaataactacagcataagctatatcaggtctagt

SEQ ID NO: 29199 - DNA, 96 bp, Fusarium azukicola
  misc_feature: 711
ttccacagcctctccccaaaggtatttaggtaggttagaagtaaataataaagctctaaccttttctaatatagtcctatttatcctttctacaaa

SEQ ID NO: 29200 - DNA, 96 bp, Fusarium azukicola
  misc_feature: 711
tataaataaaataataaggaaatataataaataagaaataggaacttctaaagtacctattaaatttatagaaagactcttaaaatctaaagaacc

SEQ ID NO: 29201 - DNA, 96 bp, Fusarium azukicola
  misc_feature: 710
gctataaaaaaatattcataaagctttaggtttagcaagctaaaactaaagcttgagggtaaatactaggaatcgaacctagagcctattaaacca

SEQ ID NO: 29202 - DNA, 96 bp, Fusarium azukicola
  misc_feature: 710
tcttctctttctccctttctttcctttatctttcttcactcttcttcttaaccctaaccctctctttccctccttcttttcctttctcttcttctt

SEQ ID NO: 29203 - DNA, 96 bp, Fusarium azukicola
  misc_feature: 710
taattattcttccttctttaaccttccttacttctctcctttcttaaccttccttacttctctcctttcttaaccttccttacttctctcctttct

SEQ ID NO: 29204 - DNA, 96 bp, Fusarium azukicola
  misc_feature: 710
gatagctatttaaatacttccaaatcgtatctaaggcattaaaatgcgtcttatttggtttagaggtaaatctagaacaaataactacagcataag

SEQ ID NO: 29205 - DNA, 96 bp, Fusarium azukicola
  misc_feature: 710
agccttggaaaaagaagaaaactgccttaaaatgcagttattgcaaactgccaggtcataaagacccagattgctattttttgcaccctaataagg

SEQ ID NO: 29206 - DNA, 96 bp, Fusarium azukicola
  misc_feature: 709
aaaaagtattttaataaacttaactcttaaataaactatagataattttttagaatttctaaaaaagtctcttaatagaaaaaaagctacttatac

SEQ ID NO: 29207 - DNA, 96 bp, Fusarium azukicola
  misc_feature: 709
gcaattccaaaaggaaataggttctttaatatttctagctataaaaactagacctgatatagcttatgctgtagttatttgttctagatttacctc

SEQ ID NO: 29208 - DNA, 96 bp, Fusarium azukicola
  misc_feature: 709
ataaataaaataataaggaaatataataaataagaaataggaacttctaaagtacctattaaatttatagaaagactcttaaaatctaaagaacct

SEQ ID NO: 29209 - DNA, 96 bp, Fusarium azukicola
  misc_feature: 708
ggatagctatttaaatacttccaaatcgtatctaaggcattaaaatgcgtcttatttggtttagaggcaaatctagaacaaataactacagcataa

SEQ ID NO: 29210 - DNA, 96 bp, Fusarium azukicola
  misc_feature: 707
gatcctctctttaaatatactagtgaggacctatatcaagttaaaaactgtgaaaactgcaaactaggaaaattaactaaaaataatataaataaa

SEQ ID NO: 29211 - DNA, 96 bp, Fusarium azukicola
  misc_feature: 707
tagatttgcctctaaaccaaataagacgcattttaatgccttagatacgatttggaagtatttaaatagctatccaaatttatctactatatataa

SEQ ID NO: 29212 - DNA, 96 bp, Fusarium azukicola
  misc_feature: 707
tcctctcccctctccctctctctcttttcactccttatcctctcctctcccctctccctctctctcttttcactccttatcctctcctctcccctc

SEQ ID NO: 29213 - DNA, 96 bp, Fusarium azukicola
  misc_feature: 707
tattcttccttctttaaccttccttacttctctcctttcttaaccttccttacttctctcctttcttaaccttccttacttctctcctttcttaac

SEQ ID NO: 29214 - DNA, 96 bp, Fusarium azukicola
  misc_feature: 707
aaccctctctttccctccttcttttcctttctcttcttcttcttttctataacctctctttttactaaactctaaactaccttatttttatctttc

SEQ ID NO: 29215 - DNA, 96 bp, Fusarium azukicola
  misc_feature: 706
aaaagtgggtcacaataaagagtctgattggatcagataaaagtgggatttagttgttgatgattgaattgactgaagagttgattcttattgtag

SEQ ID NO: 29216 - DNA, 96 bp, Fusarium azukicola
  misc_feature: 705
aaaattaaacctctattattattatatatatcttagtaaaaacccctttattatagacctgatattataagggaaaatctaagattatatagggaa

SEQ ID NO: 29217 - DNA, 96 bp, Fusarium azukicola
  misc_feature: 705
aaaagtattttaataaacttaactcttaaataaactatagataattttttagaatttctaaaaaagtctcttaatagaaaaaaagctacttataca

SEQ ID NO: 29218 - DNA, 96 bp, Fusarium azukicola
  misc_feature: 705
atttttatttatttttctaaaattaactagaaattcttttctacatacaatatgcctagtagcacctgtatcatatataaaattagttatattatt

SEQ ID NO: 29219 - DNA, 96 bp, Fusarium azukicola
  misc_feature: 704
gataaaagtgggtcacaataaagagtctgattggatcagataaaagtgggatttagttgttgatgattgaattgactgaagagttgattcttattg

SEQ ID NO: 29220 - DNA, 96 bp, Fusarium azukicola
  misc_feature: 703
tacttccaaatcgtatctaaggcattaaaatgcgtcttatttggtttagaggtaaatctagaacaaataactacagcataagctatatcaggtcta

SEQ ID NO: 29221 - DNA, 96 bp, Fusarium azukicola
  misc_feature: 701
aggtgcataagacttctaagaaaagggaatctaaacctaattctaagaaggaagaaagagaaaagaaacaagaaaagctatttatagctaattctt

SEQ ID NO: 29222 - DNA, 96 bp, Fusarium azukicola
  misc_feature: 700
ttaatgttctatattatattactaactatagtgatatatccctataaaccatatattatattatagaatttttactctatttttaggtatatttac

SEQ ID NO: 29223 - DNA, 96 bp, Fusarium azukicola
  misc_feature: 700
atgttctatattatattactaactatagtgatatatccctataaaccatatattatattatagaatttttactctatttttaggtatatttaccta

SEQ ID NO: 29224 - DNA, 96 bp, Fusarium azukicola
  misc_feature: 700
aagaaaactgccttaaaatgcagttattgcaaactgccaggtcataaagacccagattgctattttttgcaccctaataaggctccaaaaaactgg

SEQ ID NO: 29225 - DNA, 96 bp, Fusarium azukicola
  misc_feature: 699
gatacgatttggaagtatttaaatagctatccaaatttatctactatatataactgtgattattcagatatacacaatataattagaggctataca

SEQ ID NO: 29226 - DNA, 96 bp, Fusarium azukicola
  misc_feature: 698
ttaataccttgaatttgtaaaaacccttgtacaacatatctggatttatatttaattatattattattattatctgtttttatcttataaacccag

SEQ ID NO: 29227 - DNA, 96 bp, Fusarium azukicola
  misc_feature: 698
atttggatagctatttaaatacttccaaatcgtatctaaggcattaaaatgcgtcttatttggtttagaggtaaatctagaacaaataactacagc

SEQ ID NO: 29228 - DNA, 96 bp, Fusarium azukicola
  misc_feature: 698
ctttattttactttaccctatactctcttctctcttttactttaccctatactctcttctctcttttactttaccctatactctcttctctctttt

SEQ ID NO: 29229 - DNA, 96 bp, Fusarium azukicola
  misc_feature: 697
agatcctctctttaaatatactagtgaggacctatatcaagttaaaaactgtgaaaactgcaaactaggaaaattaactaaaaataatataaataa

SEQ ID NO: 29230 - DNA, 96 bp, Fusarium azukicola
  misc_feature: 696
ttcataaagagagctttatcaaaagggatagcgtagaagcctaaattatttaataatttagagagaaggttataccacaatctagggctttgtttt

SEQ ID NO: 29231 - DNA, 96 bp, Fusarium azukicola
  misc_feature: 696
aaaagaagaagaagagaaaggaaaagaaggagggaaagagagggttagggttaagaagaagagtgaagaaagataaaggaaagaaagggagaaaga

SEQ ID NO: 29232 - DNA, 96 bp, Fusarium azukicola
  misc_feature: 695
aagggaagtaattaaagtaataattaggggtaataattaaattaagggttagggttaagtagttatagtaaaggttaggggtagtaatgaagttaa

SEQ ID NO: 29233 - DNA, 96 bp, Fusarium azukicola
  misc_feature: 695
aatttggatagctatttaaatacttccaaatcgtatctaaggcattaaaatgcgtcttatttggtttagaggtaaatctagaacaaataactacag

SEQ ID NO: 29234 - DNA, 96 bp, Fusarium azukicola
  misc_feature: 694
taatgttctatattatattactaactatagtgatatatccctataaaccatatattatattatagaatttttactctatttttaggtatatttacc

SEQ ID NO: 29235 - DNA, 96 bp, Fusarium azukicola
  misc_feature: 694
aatcgtatctaaggcattaaaatgcgtcttatttggtttagaggtaaatctagaacaaataactacagcataagctatatcaggtctagtttttat

SEQ ID NO: 29236 - DNA, 96 bp, Fusarium azukicola
  misc_feature: 693
tacctctaaattatcacttatatcaaaatccatttcttctggggtctcagaaagggaaattaggtcttcctcggctttaggagatgacgaagaaga

SEQ ID NO: 29237 - DNA, 96 bp, Fusarium azukicola
  misc_feature: 692
attaaagtagggtatagggtaaagtaaaagagagaagagagtatagggtaaagtaaaagagagaagagagtatagggtaaagtaaaagagagaaga

SEQ ID NO: 29238 - DNA, 96 bp, Fusarium azukicola
  misc_feature: 692
aaaagttatattagtttaatagagagattaaagtagggtatagggtaaagtaaaagagagaagagagtatagggtaaagtaaaagagagaagagag

SEQ ID NO: 29239 - DNA, 96 bp, Fusarium azukicola
  misc_feature: 692
agcaattccaaaaggaaataggttctttaatatttctagctataaaaactagacctgatatagcttatgctgtagttatttgttctagatttgcct

SEQ ID NO: 29240 - DNA, 96 bp, Fusarium azukicola
  misc_feature: 691
tagagagattaaagtagggtatagggtaaagtaaaagagagaagagagtatagggtaaagtaaaagagagaagagagtatagggtaaagtaaaaga

SEQ ID NO: 29241 - DNA, 96 bp, Fusarium azukicola
  misc_feature: 691
attattcttccttctttaaccttccttacttctctcctttcttaaccttccttacttctctcctttcttaaccttccttacttctctcctttctta

SEQ ID NO: 29242 - DNA, 96 bp, Fusarium azukicola
  misc_feature: 690
aaagaagaaagagagagagaggaggtagagtaattgagaagttatagtaagtaaagataaaagagtaaaaacggaataaaagttatattagtttaa

SEQ ID NO: 29243 - DNA, 96 bp, Fusarium azukicola
  misc_feature: 689
ttccaaatcgtatctaaggcattaaaatgcgtcttatttggtttagaggtaaatctagaacaaataactacagcataagctatatcaggtctagtt

SEQ ID NO: 29244 - DNA, 96 bp, Fusarium azukicola
  misc_feature: 689
ttatcacttatatcaaaatccatttcttctggggtctcagaaagggaaattaggtcttcctcggctttaggagatgacgaagaagaagaattagct

SEQ ID NO: 29245 - DNA, 96 bp, Fusarium azukicola
  misc_feature: 689
tcttccttctttaaccttccttacttctctcctttcttaaccttccttacttctctcctttcttaaccttccttacttctctcctttcttaacctt

SEQ ID NO: 29246 - DNA, 96 bp, Fusarium azukicola
  misc_feature: 689
gattaaagtagggtatagggtaaagtaaaagagagaagagagtatagggtaaagtaaaagagagaagagagtatagggtaaagtaaaagagagaag

SEQ ID NO: 29247 - DNA, 96 bp, Fusarium azukicola
  misc_feature: 689
cttcttcgtcatctcctaaagccgaggaagacctaatttccctttctgagaccccagaagaaatggattttgatataagtgataatttagaggtat

SEQ ID NO: 29248 - DNA, 96 bp, Fusarium azukicola
  misc_feature: 688
ttttactcttctctttctccctttctttcctttatctttcttcactcttcttcttaaccctaaccctctctttccctccttcttttcctttctctt

SEQ ID NO: 29249 - DNA, 96 bp, Fusarium azukicola
  misc_feature: 688
ggaattatatacctctaaattatcacttatatcaaaatccatttcatctggggtctcagaaagggaaattaggtcttcctcggctttaggagatga

SEQ ID NO: 29250 - DNA, 96 bp, Fusarium azukicola
  misc_feature: 688
tattttatctaggaacttatattccttattactaggttttttatttatattatttttagttaattttcctagtttgcagttttcgcagtttttgac

SEQ ID NO: 29251 - DNA, 96 bp, Fusarium azukicola
  misc_feature: 688
acttccaaatcgtatctaaggcattaaaatgcgtcttatttggtttagaggtaaatctagaacaaataactacagcataagctatatcaggtctag

SEQ ID NO: 29252 - DNA, 96 bp, Fusarium azukicola
  misc_feature: 688
agaagaaaactgccttaaaatgcagttattgcaaactgccaggtcataaagacccagattgctattttttgcaccctaataaggctccaaaaaact

SEQ ID NO: 29253 - DNA, 96 bp, Fusarium azukicola
  misc_feature: 688
aatgttctatattatattactaactatagtgatatatccctataaaccatatattatattatagaatttttactctatttttaggtatatttacct

SEQ ID NO: 29254 - DNA, 96 bp, Fusarium azukicola
  misc_feature: 687
tataattattcttccttctttaaccttccttacttctctcctttcttaaccttccttacttctctcctttcttaaccttccttacttctctccttt

SEQ ID NO: 29255 - DNA, 96 bp, Fusarium azukicola
  misc_feature: 687
attatcacttatatcaaaatccatttcatctggggtctcagaaagggaaattaggtcttcctcggctttaggagatgacgaagaagaagaattagc

SEQ ID NO: 29256 - DNA, 96 bp, Fusarium azukicola
  misc_feature: 687
atacgatttggaagtatttaaatagctatccaaatttatctactatatataactgtgattattcagatatacacaatataattagaggctatacag

SEQ ID NO: 29257 - DNA, 96 bp, Fusarium azukicola
  misc_feature: 687
aagaagaaagagagagagaggaggtagagtaattgagaagttatagtaagtaaagataaaagagtaaaaacggaataaaagttatattagtttaat

SEQ ID NO: 29258 - DNA, 96 bp, Fusarium azukicola
  misc_feature: 686
cccatatatcagtagctattttatctaggaacttatattccttattactaggttttttatttatattatttttagttaattttcctagtttgcagt

SEQ ID NO: 29259 - DNA, 96 bp, Fusarium azukicola
  misc_feature: 685
ttattcttccttctttaaccttccttacttctctcctttcttaaccttccttacttctctcctttcttaaccttccttacttctctcctttcttaa

SEQ ID NO: 29260 - DNA, 96 bp, Fusarium azukicola
  misc_feature: 685
ggatagctatttaaatacttccaaatcgtatctaaggcattaaaatgcgtcttatttggtttagaggtaaatctagaacaaataactacagcataa

SEQ ID NO: 29261 - DNA, 96 bp, Fusarium azukicola
  misc_feature: 685
ctataaaaactagacctgatatagcttatgctgtagttatttgttctagatttgcctctaaaccaaataagacgcattttaatgccttagatacga

SEQ ID NO: 29262 - DNA, 96 bp, Fusarium azukicola
  misc_feature: 685
tatatcagtagctattttatctaggaacttatattccttattactaggttttttatttatattatttttagttaattttcctagtttgcagttttc

SEQ ID NO: 29263 - DNA, 96 bp, Fusarium azukicola
  misc_feature: 685
aagcaattccaaaaggaaataggttctttaatatttctagctataaaaactagacctgatatagcttatgctgtagttatttgttctagatttgcc

SEQ ID NO: 29264 - DNA, 96 bp, Fusarium azukicola
  misc_feature: 685
aaagttatattagtttaatagagagattaaagtagggtatagggtaaagtaaaagagagaagagagtatagggtaaagtaaaagagagaagagagt

SEQ ID NO: 29265 - DNA, 96 bp, Fusarium azukicola
  misc_feature: 684
tttctccctttctttcctttatctttcttcactcttcttcttaaccctaaccctctctttccctccttcttttcctttctcttcttcttcttttct

SEQ ID NO: 29266 - DNA, 96 bp, Fusarium azukicola
  misc_feature: 683
ataacttttattccgtttttactcttttatctttacttactataacttctcaattactctacctcctctctctctctttcttctttttttttctcc

SEQ ID NO: 29267 - DNA, 96 bp, Fusarium azukicola
  misc_feature: 682
gtcaagggaagtaattaaagtaataattaggggtaataattaaattaagggttagggttaagtagttatagtaaaggttaggggtagtaatgaagt

SEQ ID NO: 29268 - DNA, 96 bp, Fusarium azukicola
  misc_feature: 682
gaagaaaactgccttaaaatgcagttattgcaaactgccaggtcataaagacccagattgctattttttgcaccctaataaggctccaaaaaactg

SEQ ID NO: 29269 - DNA, 96 bp, Fusarium azukicola
  misc_feature: 681
ttattattattattattatataatattgccttttcattattataagggctttctttaaagtaaggaatctcattaaaagaggggttatttccttcg

SEQ ID NO: 29270 - DNA, 96 bp, Fusarium azukicola
  misc_feature: 681
aacagaattttttaaaaatctaaaaaaatcatttttagactttattaagagttagatttatagaaatactctttttatcttcctagctattttata

SEQ ID NO: 29271 - DNA, 96 bp, Fusarium azukicola
  misc_feature: 680
gaattatatacctctaaattatcacttatatcaaaatccatttcatctggggtctcagaaagggaaattaggtcttcctcggctttaggagatgac

SEQ ID NO: 29272 - DNA, 96 bp, Fusarium azukicola
  misc_feature: 679
atcaagtcaaaaactgcgaaaactgcaaactaggaaaattaactaaaaataatataaataaaaaacctagtaataaggaatataagttcctagata

SEQ ID NO: 29273 - DNA, 96 bp, Fusarium azukicola
  misc_feature: 679
acagaattttttaaaaatctaaaaaaatcatttttagactttattaagagttagatttatagaaatactctttttatcttcctagctattttatag

SEQ ID NO: 29274 - DNA, 96 bp, Fusarium azukicola
  misc_feature: 679
aattagctataaatagcttttcttgtttcttttctctttcttccttcttagaattaggtttagattcccttttcttagaagtcttatgcaccttat

SEQ ID NO: 29275 - DNA, 96 bp, Fusarium azukicola
  misc_feature: 678
aataaaggtcaagggaagtaattaaagtaataattaggggtaataattaaattaagggttagggttaagtagttatagtaaaggttaggggtagta

SEQ ID NO: 29276 - DNA, 96 bp, Fusarium azukicola
  misc_feature: 677
gctataaaaactagacctgatatagcttatgctgtagttatttgttctagatttgcctctaaaccaaataagacgcattttaatgccttagatacg

SEQ ID NO: 29277 - DNA, 96 bp, Fusarium azukicola
  misc_feature: 677
atagagagattaaagtagggtatagggtaaagtaaaagagagaagagagtatagggtaaagtaaaagagagaagagagtatagggtaaagtaaaag

SEQ ID NO: 29278 - DNA, 96 bp, Fusarium azukicola
  misc_feature: 676
tttactcttctctttctccctttctttcctttatctttcttcactcttcttcttaaccctaaccctctctttccctccttcttttcctttctcttc

SEQ ID NO: 29279 - DNA, 96 bp, Fusarium azukicola
  misc_feature: 676
accctctctttccctccttcttttcctttctcttcttcttcttttctataacctctctttttactaaactctaaactaccttatttttatctttct

SEQ ID NO: 29280 - DNA, 96 bp, Fusarium azukicola
  misc_feature: 675
aggtcaagggaagtaattaaagtaataattaggggtaataattaaattaagggttagggttaagtagttatagtaaaggttaggggtagtaatgaa

SEQ ID NO: 29281 - DNA, 96 bp, Fusarium azukicola
  misc_feature: 675
tgtaagcgccgcactttttttaaccccctctatagttatcgcgataaaaacaccataaaccatttgatcaattaaaactactcgctatactcttcc

SEQ ID NO: 29282 - DNA, 96 bp, Fusarium azukicola
  misc_feature: 673
acctctaaattatcacttatatcaaaatccatttcttctggggtctcagaaagggaaattaggtcttcctcggctttaggagatgacgaagaagaa

SEQ ID NO: 29283 - DNA, 96 bp, Fusarium azukicola
  misc_feature: 673
ttatctttctttttaccttaacttactctatactcctttctctcctaatacttactatactcctccttaacttaacttctctccttaaactttttt

SEQ ID NO: 29284 - DNA, 96 bp, Fusarium azukicola
  misc_feature: 673
taacctttactataacctcttcccctaacctttactataacctcttcccctaacctttactataacctcttcccctaacctttactataacctctt

SEQ ID NO: 29285 - DNA, 96 bp, Fusarium azukicola
  misc_feature: 673
cattattataggggctttctttaaagtaaggaatctcattaaaagaggggttatttccttcgagaaagctattttctattatagttatatccttag

SEQ ID NO: 29286 - DNA, 96 bp, Fusarium azukicola
  misc_feature: 672
ctctctttccctccttcttttcctttctcttcttcttcttttctataacctctctttttactaaactctaaactaccttatttttatctttctttt

SEQ ID NO: 29287 - DNA, 96 bp, Fusarium azukicola
  misc_feature: 672
aggaacttatattccttattactaggttttttatttatattatttttagttaattttcctagtttgcagttttcgcagtttttgacttgatatagg

SEQ ID NO: 29288 - DNA, 96 bp, Fusarium azukicola
  misc_feature: 671
ttcattattataggggctttctttaaagtaaggaatctcattaaaagaggggttatttccttcgagaaagctattttctattatagttatatcctt

SEQ ID NO: 29289 - DNA, 96 bp, Fusarium azukicola
  misc_feature: 671
aaaagaagaaagagagagagaggaggtagagtaattgagaagttatagtaagtaaagataaaagagtaaaaacggaataaaagttatattagttta

SEQ ID NO: 29290 - DNA, 96 bp, Fusarium azukicola
  misc_feature: 671
aagaagaaaactgccttaaaatgcagttattgcaaactgccaggtcataaagacccagattgctattttttgcaccctaataaggctccaaaaaac

SEQ ID NO: 29291 - DNA, 96 bp, Fusarium azukicola
  misc_feature: 670
aaaaagaagaaagagagagagaggaggtagagtaattgagaagttatagtaagtaaagataaaagagtaaaaacggaataaaagttatattagttt

SEQ ID NO: 29292 - DNA, 96 bp, Fusarium azukicola
  misc_feature: 669
tgtatagcctctaattatattgtgtatatctgaataatcgcagttatatatagtagataaatttggatagctatttaaatacttccaaatcgtatc

SEQ ID NO: 29293 - DNA, 96 bp, Fusarium azukicola
  misc_feature: 669
agaaaactgccttaaaatgcagttattgcaaactgccaggtcataaagacccagattgctattttttgcaccctaataaggctccaaaaaactgga

SEQ ID NO: 29294 - DNA, 96 bp, Fusarium azukicola
  misc_feature: 669
tcaaaatccatttcttctggggtctcagaaagggaaattaggtcttcctcggctttaggagatgacgaagaagaagaattagctataaatagcttt

SEQ ID NO: 29295 - DNA, 96 bp, Fusarium azukicola
  misc_feature: 669
taacttttattccgtttttactcttttatctttacttactataacttctcaattactctacctcctctctctctctttcttctttttttttctccc

SEQ ID NO: 29296 - DNA, 96 bp, Fusarium azukicola
  misc_feature: 669
ggtgcataagacttctaagaaaagggaatctaaacctaattctaagaaggaagaaagagaaaagaaacaagaaaagctatttatagctaattcttc

SEQ ID NO: 29297 - DNA, 96 bp, Fusarium azukicola
  misc_feature: 669
ccctctctttccctccttcttttcctttctcttcttcttcttttctataacctctctttttactaaactctaaactaccttatttttatctttctt

SEQ ID NO: 29298 - DNA, 96 bp, Fusarium azukicola
  misc_feature: 667
tttggatagctatttaaatacttccaaatcgtatctaaggcattaaaatgcgtcttatttggtttagaggcaaatctagaacaaataactacagca

SEQ ID NO: 29299 - DNA, 96 bp, Fusarium azukicola
  misc_feature: 667
ctgcttccacagcctctccccaaaggtatttaggtaggttagaagtaaataataaagctctaaccttttctaatatagtcctatttatcctttcta

SEQ ID NO: 29300 - DNA, 96 bp, Fusarium azukicola
  misc_feature: 667
cttcattactacccctaacctttactataactacttaaccctaacccttaatttaattattacccctaattattactttaattacttcccttgacc

SEQ ID NO: 29301 - DNA, 96 bp, Fusarium azukicola
  misc_feature: 667
aaggtgcataagacttctaagaaaagggaatctaaacctaattctaagaaggaagaaagagaaaagaaacaagaaaagctatttatagctaattct

SEQ ID NO: 29302 - DNA, 96 bp, Fusarium azukicola
  misc_feature: 666
tttcactccttatcctctcctctcccctctccctctctctcttttcactccttatcctctcctctcccctctccctctctctcttttcactccttc

SEQ ID NO: 29303 - DNA, 96 bp, Fusarium azukicola
  misc_feature: 666
ttcttccttctttaaccttccttacttctctcctttcttaaccttccttacttctctcctttcttaaccttccttacttctctcctttcttaacct

SEQ ID NO: 29304 - DNA, 96 bp, Fusarium azukicola
  misc_feature: 666
gaaaagaagaagaagagaaaggaaaagaaggagggaaagagagggttagggttaagaagaagagtgaagaaagataaaggaaagaaagggagaaag

SEQ ID NO: 29305 - DNA, 96 bp, Fusarium azukicola
  misc_feature: 665
atcctctctttaaatatactagtgaggacctatatcaagttaaaaactgtgaaaactgcaaactaggaaaattaactaaaaataatataaataaaa

SEQ ID NO: 29306 - DNA, 96 bp, Fusarium azukicola
  misc_feature: 664
aaagcaattccaaaaggaaataggttctttaatatttctagctataaaaactagacctgatatagcttatgctgtagttatttgttctagatttgc

SEQ ID NO: 29307 - DNA, 96 bp, Fusarium azukicola
  misc_feature: 663
cttccttctttaaccttccttacttctctcctttcttaaccttccttacttctctcctttcttaaccttccttacttctctcctttcttaaccttc

SEQ ID NO: 29308 - DNA, 96 bp, Fusarium azukicola
  misc_feature: 663
catgtaagcgccgcactttttttaaccccctctatagttatcgcgataaaaacaccataaaccatttgatcaattaaaactactcgctatactctt

SEQ ID NO: 29309 - DNA, 96 bp, Fusarium azukicola
  misc_feature: 663
aaaaaagaagaaagagagagagaggaggtagagtaattgagaagttatagtaagtaaagataaaagagtaaaaacggaataaaagttatattagtt

SEQ ID NO: 29310 - DNA, 96 bp, Fusarium azukicola
  misc_feature: 662
caaaaggaaataggttctttaatatttctagctataaaaactagacctgatatagcttatgctgtagttatttgttctagatttacctctaaacca

SEQ ID NO: 29311 - DNA, 96 bp, Fusarium azukicola
  misc_feature: 662
ataaaagttatattagtttaatagagagattaaagtagggtatagggtaaagtaaaagagagaagagagtatagggtaaagtaaaagagagaagag

SEQ ID NO: 29312 - DNA, 96 bp, Fusarium azukicola
  misc_feature: 662
agataaaaaaagaaaagaaggtaaaatagaggagtatagggtatataagaataagtaagatagaataaagaagaagggagagtaagatatttagag

SEQ ID NO: 29313 - DNA, 96 bp, Fusarium azukicola
  misc_feature: 662
cgattcagccattacctgcgcatctatatccatttgatcaattacttgtcttccttcctctactatcataacccctcttttctgtagtctagtctt

SEQ ID NO: 29314 - DNA, 96 bp, Fusarium azukicola
  misc_feature: 662
caattccaaaaggaaataggttctttaatatttctagctataaaaactagacctgatatagcttatgctgtagttatttgttctagatttacctct

SEQ ID NO: 29315 - DNA, 96 bp, Fusarium azukicola
  misc_feature: 661
atcgtatctaaggcattaaaatgcgtcttatttggtttagaggtaaatctagaacaaataactacagcataagctatatcaggtctagtttttata

SEQ ID NO: 29316 - DNA, 96 bp, Fusarium azukicola
  misc_feature: 661
ggggctttctttaaagtaaggaatctcattaaaagaggggttatttccttcgagaaagctattttctattatagttatatccttagagataactag

SEQ ID NO: 29317 - DNA, 96 bp, Fusarium azukicola
  misc_feature: 660
ttactcttctctttctccctttctttcctttatctttcttcactcttcttcttaaccctaaccctctctttccctccttcttttcctttctcttct

SEQ ID NO: 29318 - DNA, 96 bp, Fusarium azukicola
  misc_feature: 660
caagggaagtaattaaagtaataattaggggtaataattaaattaagggttagggttaagtagttatagtaaaggttaggggtagtaatgaagtta

SEQ ID NO: 29319 - DNA, 96 bp, Fusarium azukicola
  misc_feature: 660
gtcttccttcctctactatcataacccctcttttctgtagtctagtcttttttgccctccgccgccggcttaatatctcatttgcctctcgaaggt

SEQ ID NO: 29320 - DNA, 96 bp, Fusarium azukicola
  misc_feature: 660
atgtaagcgccgcactttttttaaccccctctatagttatcgcgataaaaacaccataaaccatttgatcaattaaaactactcgctatactcttc

SEQ ID NO: 29321 - DNA, 96 bp, Fusarium azukicola
  misc_feature: 660
actgttaatgttctatattatattaccaactatagtgatatatccctataaaccacatattatattatagaatttttactctatttttaggtatat

SEQ ID NO: 29322 - DNA, 96 bp, Fusarium azukicola
  misc_feature: 659
tgaatttctgtttattattattattattatataatattgccttttcattattataagggctttctttaaagtaaggaatctcattaaaagaggggt

SEQ ID NO: 29323 - DNA, 96 bp, Fusarium azukicola
  misc_feature: 659
aataaaagttatattagtttaatagagagattaaagtagggtatagggtaaagtaaaagagagaagagagtatagggtaaagtaaaagagagaaga

SEQ ID NO: 29324 - DNA, 96 bp, Fusarium azukicola
  misc_feature: 658
cttctttctccttcccctttctcttcttttactactactttcttactctcttactacctttacttctatacctattttctctttaactactctata

SEQ ID NO: 29325 - DNA, 96 bp, Fusarium azukicola
  misc_feature: 658
gaattatatacctctaaattatcacttatatcaaaatccatttcttctggggtctcagaaagggaaattaggtcttcctcggctttaggagatgac

SEQ ID NO: 29326 - DNA, 96 bp, Fusarium azukicola
  misc_feature: 658
cctctctttccctccttcttttcctttctcttcttcttcttttctataacctctctttttactaaactctaaactaccttatttttatctttcttt

SEQ ID NO: 29327 - DNA, 96 bp, Fusarium azukicola
  misc_feature: 658
atctcctaaagccgaggaagacctaatttccctttctgagaccccagaagaaatggattttgatataagtgataatttagaggtatataattccat

SEQ ID NO: 29328 - DNA, 96 bp, Fusarium azukicola
  misc_feature: 657
aagttatattagtttaatagagagattaaagtagggtatagggtaaagtaaaagagagaagagagtatagggtaaagtaaaagagagaagagagta

SEQ ID NO: 29329 - DNA, 96 bp, Fusarium azukicola
  misc_feature: 656
taaataaaataataaggaaatataataaataagaaataggaacttctaaagtacctattaaatttatagaaagactcttaaaatctaaagaacctt

SEQ ID NO: 29330 - DNA, 96 bp, Fusarium azukicola
  misc_feature: 656
cttttactcttctctttctccctttctttcctttatctttcttcactcttcttcttaaccctaaccctctctttccctccttcttttcctttctct

SEQ ID NO: 29331 - DNA, 96 bp, Fusarium azukicola
  misc_feature: 656
agttatattagtttaatagagagattaaagtagggtatagggtaaagtaaaagagagaagagagtatagggtaaagtaaaagagagaagagagtat

SEQ ID NO: 29332 - DNA, 96 bp, Fusarium azukicola
  misc_feature: 655
cataaagagagctttatcaaaagggatagcgtagaagcctaaattatttaataatttagagagaaggttataccacaatctagggctttgttttag

SEQ ID NO: 29333 - DNA, 96 bp, Fusarium azukicola
  misc_feature: 654
ctattttatctaggaacttatattccttattactaggttttttatttatattatttttagttaattttcctagtttgcagttttcgcagtttttga

SEQ ID NO: 29334 - DNA, 96 bp, Fusarium azukicola
  misc_feature: 654
ctatatcaagtcaaaaactgcgaaaactgcaaactaggaaaattaactaaaaataatataaataaaaaacctagtaataaggaatataagttccta

SEQ ID NO: 29335 - DNA, 96 bp, Fusarium azukicola
  misc_feature: 654
aacttttattccgtttttactcttttatctttacttactataacttctcaattactctacctcctctctctctctttcttctttttttttctcccc

SEQ ID NO: 29336 - DNA, 96 bp, Fusarium azukicola
  misc_feature: 654
gcagttttcgcagtttttgacttgatataggtcctcactagtatatttaaagagaggatcttttatttttatatatttaattagacttcttaagtt

SEQ ID NO: 29337 - DNA, 96 bp, Fusarium azukicola
  misc_feature: 654
actcttctctttctccctttctttcctttatctttcttcactcttcttcttaaccctaaccctctctttccctccttcttttcctttctcttcttc

SEQ ID NO: 29338 - DNA, 96 bp, Fusarium azukicola
  misc_feature: 654
atataacttttattccgtttttactcttttatctttacttactataacttctcaattactctacctcctctctctctctttcttctttttttttct

SEQ ID NO: 29339 - DNA, 96 bp, Fusarium azukicola
  misc_feature: 653
ggaataaaagttatattagtttaatagagagattaaagtagggtatagggtaaagtaaaagagagaagagagtatagggtaaagtaaaagagagaa

SEQ ID NO: 29340 - DNA, 96 bp, Fusarium azukicola
  misc_feature: 653
aaagataaaaataaggtagtttagagtttagtaaaaagagaggttatagaaaagaagaagaagagaaaggaaaagaaggagggaaagagagggtta

SEQ ID NO: 29341 - DNA, 96 bp, Fusarium azukicola
  misc_feature: 653
gccttggaaaaagaagaaaactgccttaaaatgcagttattgcaaactgccaggtcataaagacccagattgctattttttgcaccctaataaggc

SEQ ID NO: 29342 - DNA, 96 bp, Fusarium azukicola
  misc_feature: 653
ctgtatagcctctaattatattgtgtatatctgaataatcgcagttatatatagtagataaatttggatagctatttaaatacttccaaatcgtat

SEQ ID NO: 29343 - DNA, 96 bp, Fusarium azukicola
  misc_feature: 652
tcataaagagagctttatcaaaagggatagcgtagaagcctaaattatttaataatttagagagaaggttataccacaatctagggctttgtttta

SEQ ID NO: 29344 - DNA, 96 bp, Fusarium azukicola
  misc_feature: 652
aaatcgtatctaaggcattaaaatgcgtcttatttggtttagaggtaaatctagaacaaataactacagcataagctatatcaggtctagttttta

SEQ ID NO: 29345 - DNA, 96 bp, Fusarium azukicola
  misc_feature: 652
attagaggaaaaaattaaacctctattattattatatatatcttagtaaaaacccctttattatagacctaatattataagggaaaatctaagatt

SEQ ID NO: 29346 - DNA, 96 bp, Fusarium azukicola
  misc_feature: 651
ataaagacccagattgctattttttgcaccctaataaggctccaaaaaactggaaaactcaggaagccaataaggtgcataagacttctaagaaaa

SEQ ID NO: 29347 - DNA, 96 bp, Fusarium azukicola
  misc_feature: 650
tgttctatattatattactaactatagtgatatatccctataaaccatatattatattatagaatttttactctatttttaggtatatttacctaa

SEQ ID NO: 29348 - DNA, 96 bp, Fusarium azukicola
  misc_feature: 650
atataaataaaataataaggaaatataataaataagaaataggaacttctaaagtacctattaaatttatagaaagactcttaaaatctaaagaac

SEQ ID NO: 29349 - DNA, 96 bp, Fusarium azukicola
  misc_feature: 650
gttctatattatattactaactatagtgatatatccctataaaccatatattatattatagaatttttactctatttttaggtatatttacctaac

SEQ ID NO: 29350 - DNA, 96 bp, Fusarium azukicola
  misc_feature: 650
gcaattccaaaaggaaataggttctttaatatttctagctataaaaactagacctgatatagcttatgctgtagttatttgttctagatttgcctc

SEQ ID NO: 29351 - DNA, 96 bp, Fusarium azukicola
  misc_feature: 650
agagaagtaaggaaggttaagaaaggagagaagtaaggaaggttaagaaaggagagaagtaaggaaggttaagaaaggagagaagtaaggaagggt

SEQ ID NO: 29352 - DNA, 96 bp, Fusarium azukicola
  misc_feature: 649
tactcttctctttctccctttctttcctttatctttcttcactcttcttcttaaccctaaccctctctttccctccttcttttcctttctcttctt

SEQ ID NO: 29353 - DNA, 96 bp, Fusarium azukicola
  misc_feature: 649
cagttttcgcagtttttgacttgatataggtcctcactagtatatttaaagagaggatcttttatttttatatatttaattagacttcttaagtta

SEQ ID NO: 29354 - DNA, 96 bp, Fusarium azukicola
  misc_feature: 649
ggtattattctaattggttaaaaaggttcctacagaccttcatgactgccgtcatcaatgcatcaaagtataataactgccgattggctaaaaaag

SEQ ID NO: 29355 - DNA, 96 bp, Fusarium azukicola
  misc_feature: 648
aatagagagattaaagtagggtatagggtaaagtaaaagagagaagagagtatagggtaaagtaaaagagagaagagagtatagggtaaagtaaaa

SEQ ID NO: 29356 - DNA, 96 bp, Fusarium azukicola
  misc_feature: 648
acgattcagccattacctgcgcatctatatccatttgatcaattacttgtcttccttcctctactatcataacccctcttttctgtagtctagtct

SEQ ID NO: 29357 - DNA, 96 bp, Fusarium azukicola
  misc_feature: 647
ttggatagctatttaaatacttccaaatcgtatctaaggcattaaaatgcgtcttatttggtttagaggcaaatctagaacaaataactacagcat

SEQ ID NO: 29358 - DNA, 96 bp, Fusarium azukicola
  misc_feature: 647
aggggctttctttaaagtaaggaatctcattaaaagaggggttatttccttcgagaaagctattttctattatagttatatccttagagataacta

SEQ ID NO: 29359 - DNA, 96 bp, Fusarium azukicola
  misc_feature: 647
gagagaagtaaggaaggttaagaaaggagagaagtaaggaaggttaagaaaggagagaagtaaggaaggttaagaaaggagagaagtaaggaaggg

SEQ ID NO: 29360 - DNA, 96 bp, Fusarium azukicola
  misc_feature: 646
tttggatagctatttaaatacttccaaatcgtatctaaggcattaaaatgcgtcttatttggtttagaggtaaatctagaacaaataactacagca

SEQ ID NO: 29361 - DNA, 96 bp, Fusarium azukicola
  misc_feature: 646
gaaaactgccttaaaatgcagttattgcaaactgccaggtcataaagacccagattgctattttttgcaccctaataaggctccaaaaaactggaa

SEQ ID NO: 29362 - DNA, 96 bp, Fusarium azukicola
  misc_feature: 646
tccaaatcgtatctaaggcattaaaatgcgtcttatttggtttagaggtaaatctagaacaaataactacagcataagctatatcaggtctagttt

SEQ ID NO: 29363 - DNA, 96 bp, Fusarium azukicola
  misc_feature: 646
acggaataaaagttatattagtttaatagagagattaaagtagggtatagggtaaagtaaaagagagaagagagtatagggtaaagtaaaagagag

SEQ ID NO: 29364 - DNA, 96 bp, Fusarium azukicola
  misc_feature: 646
aaaaaaaagaagaaagagagagagaggaggtagagtaattgagaagttatagtaagtaaagataaaagagtaaaaacggaataaaagttatattag

SEQ ID NO: 29365 - DNA, 96 bp, Fusarium azukicola
  misc_feature: 645
gaatttctgtttattattattattattatataatattgccttttcattattataagggctttctttaaagtaaggaatctcattaaaagaggggtt

SEQ ID NO: 29366 - DNA, 96 bp, Fusarium azukicola
  misc_feature: 645
aattatcacttatatcaaaatccatttcatctggggtctcagaaagggaaattaggtcttcctcggctttaggagatgacgaagaagaagaattag

SEQ ID NO: 29367 - DNA, 96 bp, Fusarium azukicola
  misc_feature: 644
aaaaaaaaagaagaaagagagagagaggaggtagagtaattgagaagttatagtaagtaaagataaaagagtaaaaacggaataaaagttatatta

SEQ ID NO: 29368 - DNA, 96 bp, Fusarium azukicola
  misc_feature: 644
ggagaggagaggataaggagtgaaaagagagagagggagaggggagaggagaggataaggagtgaaaagagagagagggagaggggagaggagagg

SEQ ID NO: 29369 - DNA, 96 bp, Fusarium azukicola
  misc_feature: 644
aatataacttttattccgtttttactcttttatctttacttactataacttctcaattactctacctcctctctctctctttcttctttttttttc

SEQ ID NO: 29370 - DNA, 96 bp, Fusarium azukicola
  misc_feature: 644
catatatcagtagctattttatctaggaacttatattccttattactaggttttttatttatattatttttagttaattttcctagtttgcagttt

SEQ ID NO: 29371 - DNA, 96 bp, Fusarium azukicola
  misc_feature: 643
catctcctaaagccgaggaagacctaatttccctttctgagaccccagaagaaatggattttgatataagtgataatttagaggtatataattcca

SEQ ID NO: 29372 - DNA, 96 bp, Fusarium azukicola
  misc_feature: 642
atcttactctcccttcttctttattctatcttacttattcttatataccctatactcctctattttaccttcttttctttttttatcttttactct

SEQ ID NO: 29373 - DNA, 96 bp, Fusarium azukicola
  misc_feature: 641
tttattattattattattatataatattgccttttcattattataggggctttctttaaagtaaggaatctcattaaaagaggggttatttccttc

SEQ ID NO: 29374 - DNA, 96 bp, Fusarium azukicola
  misc_feature: 641
aaaaggaaataggttctttaatatttctagctataaaaactagacctgatatagcttatgctgtagttatttgttctagatttgcctctaaaccaa

SEQ ID NO: 29375 - DNA, 96 bp, Fusarium azukicola
  misc_feature: 640
tcctctctttaaatatactagtgaggacctatatcaagttaaaaactgtgaaaactgcaaactaggaaaattaactaaaaataatataaataaaaa

SEQ ID NO: 29376 - DNA, 96 bp, Fusarium azukicola
  misc_feature: 640
tttatctttctttttaccttaacttactctatactcctttctctcctaatacttactatactcctccttaacttaacttctctccttaaacttttt

SEQ ID NO: 29377 - DNA, 96 bp, Fusarium azukicola
  misc_feature: 640
ctcttctctcttttactttaccctatactctcttctctcttttactttaccctatactctcttctctcttttactttaccctataccctactttaa

SEQ ID NO: 29378 - DNA, 96 bp, Fusarium azukicola
  misc_feature: 640
cggaataaaagttatattagtttaatagagagattaaagtagggtatagggtaaagtaaaagagagaagagagtatagggtaaagtaaaagagaga

SEQ ID NO: 29379 - DNA, 96 bp, Fusarium azukicola
  misc_feature: 640
tatctttctttttaccttaacttactctatactcctttctctcctaatacttactatactcctccttaacttaacttctctccttaaactttttta

SEQ ID NO: 29380 - DNA, 96 bp, Fusarium azukicola
  misc_feature: 640
agagaggttatagaaaagaagaagaagagaaaggaaaagaaggagggaaagagagggttagggttaagaagaagagtgaagaaagataaaggaaag

SEQ ID NO: 29381 - DNA, 96 bp, Fusarium azukicola
  misc_feature: 640
attagctataaatagcttttcttgtttcttttctctttcttccttcttagaattaggtttagattcccttttcttagaagtcttatgcaccttatt

SEQ ID NO: 29382 - DNA, 96 bp, Fusarium azukicola
  misc_feature: 640
atcttttactcttctctttctccctttctttcctttatctttcttcactcttcttcttaaccctaaccctctctttccctccttcttttcctttct

SEQ ID NO: 29383 - DNA, 96 bp, Fusarium azukicola
  misc_feature: 640
aaagtgggtcacaataaagagtctgattggatcagataaaagtgggatttagttgttgatgattgaattgactgaagagttgattcttattgtagt

SEQ ID NO: 29384 - DNA, 96 bp, Fusarium azukicola
  misc_feature: 639
cctctctttaaatatactagtgaggacctatatcaagttaaaaactgtgaaaactgcaaactaggaaaattaactaaaaataatataaataaaaaa

SEQ ID NO: 29385 - DNA, 96 bp, Fusarium azukicola
  misc_feature: 639
tggatagctatttaaatacttccaaatcgtatctaaggcattaaaatgcgtcttatttggtttagaggcaaatctagaacaaataactacagcata

SEQ ID NO: 29386 - DNA, 96 bp, Fusarium azukicola
  misc_feature: 639
gggaggagagtttagtaagtaagtatagaggagaggaagagaggagaggaaggggagaagagaagaagaggagtaaagagggagagaagaggaaga

SEQ ID NO: 29387 - DNA, 96 bp, Fusarium azukicola
  misc_feature: 639
taataaaggtcaagggaagtaattaaagtaataattaggggtaataattaaattaagggttagggttaagtagttatagtaaaggttaggggtagt

SEQ ID NO: 29388 - DNA, 96 bp, Fusarium azukicola
  misc_feature: 638
agaagaaagagagagagaggaggtagagtaattgagaagttatagtaagtaaagataaaagagtaaaaacggaataaaagttatattagtttaata

SEQ ID NO: 29389 - DNA, 96 bp, Fusarium azukicola
  misc_feature: 637
ctataaaccacatattatattatagaatttttactctatttttaggtatatttacctaacctatagctactataggtagctagatattaaggggat

SEQ ID NO: 29390 - DNA, 96 bp, Fusarium azukicola
  misc_feature: 636
tattagaggaaaaaattaaacctctattattattatatatatcttagtaaaaacccctttattatagacctaatattataagggaaaatctaagat

SEQ ID NO: 29391 - DNA, 96 bp, Fusarium azukicola
  misc_feature: 636
taaggtgcataagacttctaagaaaagggaatctaaacctaattctaagaaggaagaaagagaaaagaaacaagaaaagctatttatagctaattc

SEQ ID NO: 29392 - DNA, 96 bp, Fusarium azukicola
  misc_feature: 635
ggtattattctaattggttaaaaaggttcctacagacctttatgactgccgtcatctatgcatcaaagtataataactgccgattggctaaaaaag

SEQ ID NO: 29393 - DNA, 96 bp, Fusarium azukicola
  misc_feature: 635
ataaggtatataagacttctaagaaaaaggaatctaaacctaattctaagaaggaagaaagagaaaagaaataagaaaagctatttatagctaatt

SEQ ID NO: 29394 - DNA, 96 bp, Fusarium azukicola
  misc_feature: 635
agagaaaataggtatagaagtaaaggtagtaagagagtaagaaagtagtagtaaaagaagagaaaggggaaggagaaagaagagaaaaaagtaagt

SEQ ID NO: 29395 - DNA, 96 bp, Fusarium azukicola
  misc_feature: 634
ttctttctccttcccctttctcttcttttactactactttcttactctcttactacctttacttctatacctattttctctttaactactctatat

SEQ ID NO: 29396 - DNA, 96 bp, Fusarium azukicola
  misc_feature: 634
tcaagtcaaaaactgcgaaaactgcaaactaggaaaattaactaaaaataatataaataaaaaacctagtaataaggaatataagttcctagataa

SEQ ID NO: 29397 - DNA, 96 bp, Fusarium azukicola
  misc_feature: 634
tcattattataggggctttctttaaagtaaggaatctcattaaaagaggggttatttccttcgagaaagctattttctattatagttatatcctta

SEQ ID NO: 29398 - DNA, 96 bp, Fusarium azukicola
  misc_feature: 634
aataaaaggaaggttattgaagagggaggagagtttagtaagtaagtatagaggagaggaagagaggagaggaaggggagaagagaagaagaggag

SEQ ID NO: 29399 - DNA, 96 bp, Fusarium azukicola
  misc_feature: 633
tctcttctctcttttactttaccctatactctcttctctcttttactttaccctatactctcttctctcttttactttaccctataccctacttta

SEQ ID NO: 29400 - DNA, 96 bp, Fusarium azukicola
  misc_feature: 633
tatatcaagtcaaaaactgcgaaaactgcaaactaggaaaattaactaaaaataatataaataaaaaacctagtaataaggaatataagttcctag

SEQ ID NO: 29401 - DNA, 96 bp, Fusarium azukicola
  misc_feature: 633
ccatatatcagtagctattttatctaggaacttatattccttattactaggttttttatttatattatttttagttaattttcctagtttgcagtt

SEQ ID NO: 29402 - DNA, 96 bp, Fusarium azukicola
  misc_feature: 633
aaaagctatttatagctaattcttcttcttcgtcatctcctaaagccgaggaagacctaatttccctttctgagaccccagaagaaatggattttg

SEQ ID NO: 29403 - DNA, 96 bp, Fusarium azukicola
  misc_feature: 631
aaagaagaaaactgccttaaaatgcagttattgcaaactgccaggtcataaagacccagattgctattttttgcaccctaataaggctccaaaaaa

SEQ ID NO: 29404 - DNA, 96 bp, Fusarium azukicola
  misc_feature: 629
ttggatagctatttaaatacttccaaatcgtatctaaggcattaaaatgcgtcttatttggtttagaggtaaatctagaacaaataactacagcat

SEQ ID NO: 29405 - DNA, 96 bp, Fusarium azukicola
  misc_feature: 629
tctcttctctcttttactttaccctatactctcttctctcttttactttaccctataccctactttaatctctctattaaactaatataactttta

SEQ ID NO: 29406 - DNA, 96 bp, Fusarium azukicola
  misc_feature: 629
cttactctcccttcttctttattctatcttacttattcttatataccctatactcctctattttaccttcttttctttttttatcttttactcttc

SEQ ID NO: 29407 - DNA, 96 bp, Fusarium azukicola
  misc_feature: 629
aaagataaaaaaagaaaagaaggtaaaatagaggagtatagggtatataagaataagtaagatagaataaagaagaagggagagtaagatatttag

SEQ ID NO: 29408 - DNA, 96 bp, Fusarium azukicola
  misc_feature: 627
ttttattccgtttttactcttttatctttacttactataacttctcaattactctacctcctctctctctctttcttctttttttttctccccctt

SEQ ID NO: 29409 - DNA, 96 bp, Fusarium azukicola
  misc_feature: 627
aaggtaaaatagaggagtatagggtatataagaataagtaagatagaataaagaagaagggagagtaagatatttagagttagagagaaagaataa

SEQ ID NO: 29410 - DNA, 96 bp, Fusarium azukicola
  misc_feature: 627
gctattttatctaggaacttatattccttattactaggttttttatttatattatttttagttaattttcctagtttgcagttttcgcagtttttg

SEQ ID NO: 29411 - DNA, 96 bp, Fusarium azukicola
  misc_feature: 626
tagaagctagatattatctctttattacttttcttcctagttatctaggaaatcaaccatttataacctagtcacactgacaggttatgagcccgg

SEQ ID NO: 29412 - DNA, 96 bp, Fusarium azukicola
  misc_feature: 625
aggtaaaatagaggagtatagggtatataagaataagtaagatagaataaagaagaagggagagtaagatatttagagttagagagaaagaataaa

SEQ ID NO: 29413 - DNA, 96 bp, Fusarium azukicola
  misc_feature: 625
tttattccgtttttactcttttatctttacttactataacttctcaattactctacctcctctctctctctttcttctttttttttctcccccttt

SEQ ID NO: 29414 - DNA, 96 bp, Fusarium azukicola
  misc_feature: 625
gtgaatttctgtttattattattattattatataatattgccttttcattattataagggctttctttaaagtaaggaatctcattaaaagagggg

SEQ ID NO: 29415 - DNA, 96 bp, Fusarium azukicola
  misc_feature: 625
ctataattattcttccttctttaaccttccttacttctctcctttcttaaccttccttacttctctcctttcttaaccttccttacttctctcctt

SEQ ID NO: 29416 - DNA, 96 bp, Fusarium azukicola
  misc_feature: 624
tttaaatatactagtgaggacctatatcaagttaaaaactgtgaaaactgcaaactaggaaaattaactaaaaataatataaataaaaaacctagt

SEQ ID NO: 29417 - DNA, 96 bp, Fusarium azukicola
  misc_feature: 624
ggaaggttaagaaaggagagaagtaaggaaggttaagaaaggagagaagtaaggaaggttaagaaaggagagaagtaaggaaggttaaagaaggaa

SEQ ID NO: 29418 - DNA, 96 bp, Fusarium azukicola
  misc_feature: 624
ttattattatataatattgccttttcattattataggggctttctttaaagtaaggaatctcattaaaagaggggttatttccttcgagaaagcta

SEQ ID NO: 29419 - DNA, 96 bp, Fusarium azukicola
  misc_feature: 624
tcttttactcttctctttctccctttctttcctttatctttcttcactcttcttcttaaccctaaccctctctttccctccttcttttcctttctc

SEQ ID NO: 29420 - DNA, 96 bp, Fusarium azukicola
  misc_feature: 624
tattattatataatattgccttttcattattataggggctttctttaaagtaaggaatctcattaaaagaggggttatttccttcgagaaagctat

SEQ ID NO: 29421 - DNA, 96 bp, Fusarium azukicola
  misc_feature: 624
aaaaaaagaagaaagagagagagaggaggtagagtaattgagaagttatagtaagtaaagataaaagagtaaaaacggaataaaagttatattagt

SEQ ID NO: 29422 - DNA, 96 bp, Fusarium azukicola
  misc_feature: 623
tataacttttattccgtttttactcttttatctttacttactataacttctcaattactctacctcctctctctctctttcttctttttttttctc

SEQ ID NO: 29423 - DNA, 96 bp, Fusarium azukicola
  misc_feature: 622
ttttaccttcttttctttttttatcttttactcttctctttctccctttctttcctttatctttcttcactcttcttcttaaccctaaccctctct

SEQ ID NO: 29424 - DNA, 96 bp, Fusarium azukicola
  misc_feature: 622
aaggaagagaagggttttaaggtttattaagtagagaagaaggagggagaataaggtaagtaagtaagttaggttaaagaagagaagaaagggtta

SEQ ID NO: 29425 - DNA, 96 bp, Fusarium azukicola
  misc_feature: 621
tgaatttctgtttattattattattattatataatattgccttttcattattataggggctttctttaaagtaaggaatctcattaaaagaggggt

SEQ ID NO: 29426 - DNA, 96 bp, Fusarium azukicola
  misc_feature: 620
tttattttactttaccctatactctcttctctcttttactttaccctatactctcttctctcttttactttaccctatactctcttctctctttta

SEQ ID NO: 29427 - DNA, 96 bp, Fusarium azukicola
  misc_feature: 619
tttttatctttctttttaccttaacttactctatactcctttctctcctaatacttactatactcctccttaacttaacttctctccttaaacttt

SEQ ID NO: 29428 - DNA, 96 bp, Fusarium azukicola
  misc_feature: 619
ttatagcaaaaaccggttttgatggatagaatgcaacgctgaaggttttaggaaccttcctagccaatcggcagttattatactttgatgcattga

SEQ ID NO: 29429 - DNA, 96 bp, Fusarium azukicola
  misc_feature: 619
tggatagctatttaaatacttccaaatcgtatctaaggcattaaaatgcgtcttatttggtttagaggtaaatctagaacaaataactacagcata

SEQ ID NO: 29430 - DNA, 96 bp, Fusarium azukicola
  misc_feature: 619
gtttattattattattattatataatattgccttttcattattataggggctttctttaaagtaaggaatctcattaaaagaggggttatttcctt

SEQ ID NO: 29431 - DNA, 96 bp, Fusarium azukicola
  misc_feature: 618
cttttattccgtttttactcttttatctttacttactataacttctcaattactctacctcctctctctctctttcttctttttttttctccccct

SEQ ID NO: 29432 - DNA, 96 bp, Fusarium azukicola
  misc_feature: 618
agaattagctataaatagcttttcttatttcttttctctttcttccttcttagaattaggtttagattcctttttcttagaagtcttatatacctt

SEQ ID NO: 29433 - DNA, 96 bp, Fusarium azukicola
  misc_feature: 617
ccttcgagaggcaaatgagatattaagccggcggcggagggcaaaaaagactagactacagaaaagaggggttatgatagtagaggaaggaagaca

SEQ ID NO: 29434 - DNA, 96 bp, Fusarium azukicola
  misc_feature: 617
tcttactctcccttcttctttattctatcttacttattcttatataccctatactcctctattttaccttcttttctttttttatcttttactctt

SEQ ID NO: 29435 - DNA, 96 bp, Fusarium azukicola
  misc_feature: 617
agaagaagaattagctataaatagcttttcttatttcttttctctttcttccttcttagaattaggtttagattcctttttcttagaagtcttata

SEQ ID NO: 29436 - DNA, 96 bp, Fusarium azukicola
  misc_feature: 617
ctctcttctctcttttactttaccctatactctcttctctcttttactttaccctatactctcttctctcttttactttaccctataccctacttt

SEQ ID NO: 29437 - DNA, 96 bp, Fusarium azukicola
  misc_feature: 617
agaataaaaggaaggttattgaagagggaggagagtttagtaagtaagtatagaggagaggaagagaggagaggaaggggagaagagaagaagagg

SEQ ID NO: 29438 - DNA, 96 bp, Fusarium azukicola
  misc_feature: 615
taggggctttctttaaagtaaggaatctcattaaaagaggggttatttccttcgagaaagctattttctattatagttatatccttagagataact

SEQ ID NO: 29439 - DNA, 96 bp, Fusarium azukicola
  misc_feature: 615
gagaagtaaggaaggttaagaaaggagagaagtaaggaaggttaagaaaggagagaagtaaggaaggttaagaaaggagagaagtaaggaagggta

SEQ ID NO: 29440 - DNA, 96 bp, Fusarium azukicola
  misc_feature: 615
ggtaaaatagaggagtatagggtatataagaataagtaagatagaataaagaagaagggagagtaagatatttagagttagagagaaagaataaag

SEQ ID NO: 29441 - DNA, 96 bp, Fusarium azukicola
  misc_feature: 615
acttttattccgtttttactcttttatctttacttactataacttctcaattactctacctcctctctctctctttcttctttttttttctccccc

SEQ ID NO: 29442 - DNA, 96 bp, Fusarium azukicola
  misc_feature: 615
aataaggtatataagacttctaagaaaaaggaatctaaacctaattctaagaaggaagaaagagaaaagaaataagaaaagctatttatagctaat

SEQ ID NO: 29443 - DNA, 96 bp, Fusarium azukicola
  misc_feature: 614
aaactgccttaaaatgcagttattgcaaactgccaggtcataaagacccagattgctattttttgcaccctaataaggctccaaaaaactggaaaa

SEQ ID NO: 29444 - DNA, 96 bp, Fusarium azukicola
  misc_feature: 614
gaatttctgtttattattattattattatataatattgccttttcattattataggggctttctttaaagtaaggaatctcattaaaagaggggtt

SEQ ID NO: 29445 - DNA, 96 bp, Fusarium azukicola
  misc_feature: 614
ataataaaggtcaagggaagtaattaaagtaataattaggggtaataattaaattaagggttagggttaagtagttatagtaaaggttaggggtag

SEQ ID NO: 29446 - DNA, 96 bp, Fusarium azukicola
  misc_feature: 614
attgttaatgttctatattatattaccaactatagtgatatatccctataaaccatatattatattatagaatttttactctatttttaggtatat

SEQ ID NO: 29447 - DNA, 96 bp, Fusarium azukicola
  misc_feature: 613
tttctccttcccctttctcttcttttactactactttcttactctcttactacctttacttctatacctattttctctttaactactctatatatc

SEQ ID NO: 29448 - DNA, 96 bp, Fusarium azukicola
  misc_feature: 613
ttcactccttatcctctcctctcccctctccctctctctcttttcactccttatcctctcctctcccctctccctctctctcttttcactccttct

SEQ ID NO: 29449 - DNA, 96 bp, Fusarium azukicola
  misc_feature: 613
ttattattattattattatataatattgccttttcattattataggggctttctttaaagtaaggaatctcattaaaagaggggttatttccttcg

SEQ ID NO: 29450 - DNA, 96 bp, Fusarium azukicola
  misc_feature: 613
gaaggtaaaatagaggagtatagggtatataagaataagtaagatagaataaagaagaagggagagtaagatatttagagttagagagaaagaata

SEQ ID NO: 29451 - DNA, 96 bp, Fusarium azukicola
  misc_feature: 613
ccctataaaccacatattatattatagaatttttactctatttttaggtatatttacctaacctatagctactataggtagctagatattaagggg

SEQ ID NO: 29452 - DNA, 96 bp, Fusarium azukicola
  misc_feature: 612
agggaggagagtttagtaagtaagtatagaggagaggaagagaggagaggaaggggagaagagaagaagaggagtaaagagggagagaagaggaag

SEQ ID NO: 29453 - DNA, 96 bp, Fusarium azukicola
  misc_feature: 612
ctcttcttctcttctccccttcctctcctctcttcctctcctctatacttacttactaaactctcctccctcttcaataaccttccttttattctt

SEQ ID NO: 29454 - DNA, 96 bp, Fusarium azukicola
  misc_feature: 610
cttccacagcctctccccaaaggtatttaggtaggttagaagtaaataataaagctctaaccttttctaatatagtcctatttatcctttctacaa

SEQ ID NO: 29455 - DNA, 96 bp, Fusarium azukicola
  misc_feature: 610
ttattagaggaaaaaattaaacctctattattattatatatatcttagtaaaaacccctttattatagacctaatattataagggaaaatctaaga

SEQ ID NO: 29456 - DNA, 96 bp, Fusarium azukicola
  misc_feature: 610
aagataaaaaaagaaaagaaggtaaaatagaggagtatagggtatataagaataagtaagatagaataaagaagaagggagagtaagatatttaga

SEQ ID NO: 29457 - DNA, 96 bp, Fusarium azukicola
  misc_feature: 610
ctttctccttcccctttctcttcttttactactactttcttactctcttactacctttacttctatacctattttctctttaactactctatatat

SEQ ID NO: 29458 - DNA, 96 bp, Fusarium azukicola
  misc_feature: 610
catcttatctttattctttctctctaactctaaatatcttactctcccttcttctttattctatcttacttattcttatataccctatactcctct

SEQ ID NO: 29459 - DNA, 96 bp, Fusarium azukicola
  misc_feature: 609
ttatataccctatactcctctattttaccttcttttctttttttatcttttactcttctctttctccctttctttcctttatctttcttcactctt

SEQ ID NO: 29460 - DNA, 96 bp, Fusarium azukicola
  misc_feature: 609
caattccaaaaggaaataggttctttaatatttctagctataaaaactagacctgatatagcttatgctgtagttatttgttctagatttgcctct

SEQ ID NO: 29461 - DNA, 96 bp, Fusarium azukicola
  misc_feature: 608
ttttatctttctttttaccttaacttactctatactcctttctctcctaatacttactatactcctccttaacttaacttctctccttaaactttt

SEQ ID NO: 29462 - DNA, 96 bp, Fusarium azukicola
  misc_feature: 608
aaaaggaaggttattgaagagggaggagagtttagtaagtaagtatagaggagaggaagagaggagaggaaggggagaagagaagaagaggagtaa

SEQ ID NO: 29463 - DNA, 96 bp, Fusarium azukicola
  misc_feature: 608
ctctctttaaatatactagtgaggacctatatcaagttaaaaactgtgaaaactgcaaactaggaaaattaactaaaaataatataaataaaaaac

SEQ ID NO: 29464 - DNA, 96 bp, Fusarium azukicola
  misc_feature: 607
atgacccacttttatctatctatcttctataagtctctcttagaagctagatattatctctttattacttttcttcctagttatctaggaaatcaa

SEQ ID NO: 29465 - DNA, 96 bp, Fusarium azukicola
  misc_feature: 607
tctcttagaagctagatattatctctttattacttttcttcctagttatctaggaaatcaaccatttataacctagtcacactgacaggttatgag

SEQ ID NO: 29466 - DNA, 96 bp, Fusarium azukicola
  misc_feature: 607
tctcctaaagccgaggaagacctaatttccctttctgagaccccagaagaaatggattttgatataagtgataatttagaggtatataattccata

SEQ ID NO: 29467 - DNA, 96 bp, Fusarium azukicola
  misc_feature: 607
aggagagaagtaaggaaggttaagaaaggagagaagtaaggaaggttaagaaaggagagaagtaaggaaggttaaagaaggaagaataattataga

SEQ ID NO: 29468 - DNA, 96 bp, Fusarium azukicola
  misc_feature: 607
taaagcaattccaaaaggaaataggttctttaatatttctagctataaaaactagacctgatatagcttatgctgtagttatttgttctagatttg

SEQ ID NO: 29469 - DNA, 96 bp, Fusarium azukicola
  misc_feature: 606
tttaccttcttttctttttttatcttttactcttctctttctccctttctttcctttatctttcttcactcttcttcttaaccctaaccctctctt

SEQ ID NO: 29470 - DNA, 96 bp, Fusarium azukicola
  misc_feature: 606
tattattattattattatataatattgccttttcattattataagggctttctttaaagtaaggaatctcattaaaagaggggttatttccttcga

SEQ ID NO: 29471 - DNA, 96 bp, Fusarium azukicola
  misc_feature: 606
ggaattatatacctctaaattatcacttatatcaaaatccatttcttctggggtctcagaaagggaaattaggtcttcctcggctttaggagatga

SEQ ID NO: 29472 - DNA, 96 bp, Fusarium azukicola
  misc_feature: 606
aatttctgtttattattattattattatataatattgccttttcattattataagggctttctttaaagtaaggaatctcattaaaagaggggtta

SEQ ID NO: 29473 - DNA, 96 bp, Fusarium azukicola
  misc_feature: 606
ccttggaaaaagaagaaaactgccttaaaatgcagttattgcaaactgccaggtcataaagacccagattgctattttttgcaccctaataaggct

SEQ ID NO: 29474 - DNA, 96 bp, Fusarium azukicola
  misc_feature: 606
agaaggtaaaatagaggagtatagggtatataagaataagtaagatagaataaagaagaagggagagtaagatatttagagttagagagaaagaat

SEQ ID NO: 29475 - DNA, 96 bp, Fusarium azukicola
  misc_feature: 606
acaatatgcctagtagcacctgtatcatatataaaattagttatattatctttattagtagaaaaaacaggtttatttaccttatttaaatatcct

SEQ ID NO: 29476 - DNA, 96 bp, Fusarium azukicola
  misc_feature: 605
tttcctttatctttcttcactcttcttcttaaccctaaccctctctttccctccttcttttcctttctcttcttcttcttttctataacctctctt

SEQ ID NO: 29477 - DNA, 96 bp, Fusarium azukicola
  misc_feature: 605
agaagtaaggaaggttaagaaaggagagaagtaaggaaggttaagaaaggagagaagtaaggaaggttaagaaaggagagaagtaaggaagggtaa

SEQ ID NO: 29478 - DNA, 96 bp, Fusarium azukicola
  misc_feature: 605
taccttcttttctttttttatcttttactcttctctttctccctttctttcctttatctttcttcactcttcttcttaaccctaaccctctctttc

SEQ ID NO: 29479 - DNA, 96 bp, Fusarium azukicola
  misc_feature: 605
attattagaggaaaaaattaaacctctattattattatatatatcttagtaaaaacccctttattatagacctaatattataagggaaaatctaag

SEQ ID NO: 29480 - DNA, 96 bp, Fusarium azukicola
  misc_feature: 604
ttctccctttctttcctttatctttcttcactcttcttcttaaccctaaccctctctttccctccttcttttcctttctcttcttcttcttttcta

SEQ ID NO: 29481 - DNA, 96 bp, Fusarium azukicola
  misc_feature: 604
tgacttgatataggtcctcactagtatatttaaagagaggatcttttatttttatatatttaattagacttcttaagttaagatgacttagtcttt

SEQ ID NO: 29482 - DNA, 96 bp, Fusarium azukicola
  misc_feature: 604
gaataaaaggaaggttattgaagagggaggagagtttagtaagtaagtatagaggagaggaagagaggagaggaaggggagaagagaagaagagga

SEQ ID NO: 29483 - DNA, 96 bp, Fusarium azukicola
  misc_feature: 603
ttttcactccttcttccttcttcctcatcttatctttattctttctctctaactctaaatatcttactctcccttcttctttattctatcttactt

SEQ ID NO: 29484 - DNA, 96 bp, Fusarium azukicola
  misc_feature: 603
tacaatatgcctagtagcacctgtatcatatataaaattagttatattatctttattagtagaaaaaacaggtttatttaccttatttaaatatcc

SEQ ID NO: 29485 - DNA, 96 bp, Fusarium azukicola
  misc_feature: 603
attattattattattatataatattgccttttcattattataagggctttctttaaagtaaggaatctcattaaaagaggggttatttccttcgag

SEQ ID NO: 29486 - DNA, 96 bp, Fusarium azukicola
  misc_feature: 602
aaaggaaggttattgaagagggaggagagtttagtaagtaagtatagaggagaggaagagaggagaggaaggggagaagagaagaagaggagtaaa

SEQ ID NO: 29487 - DNA, 96 bp, Fusarium azukicola
  misc_feature: 602
tctctttccctccttcttttcctttctcttcttcttcttttctataacctctctttttactaaactctaaactaccttatttttatctttcttttt

SEQ ID NO: 29488 - DNA, 96 bp, Fusarium azukicola
  misc_feature: 602
gtgcataagacttctaagaaaagggaatctaaacctaattctaagaaggaagaaagagaaaagaaacaagaaaagctatttatagctaattcttct

SEQ ID NO: 29489 - DNA, 96 bp, Fusarium azukicola
  misc_feature: 602
cgtatctaaggcattaaaatgcgtcttatttggtttagaggtaaatctagaacaaataactacagcataagctatatcaggtctagtttttatagc

SEQ ID NO: 29490 - DNA, 96 bp, Fusarium azukicola
  misc_feature: 601
tagaggaaaaaattaaacctctattattattatatatatcttagtaaaaacccctttattatagacctaatattataagggaaaatctaagattat

SEQ ID NO: 29491 - DNA, 96 bp, Fusarium azukicola
  misc_feature: 601
gaataaaagttatattagtttaatagagagattaaagtagggtatagggtaaagtaaaagagagaagagagtatagggtaaagtaaaagagagaag

SEQ ID NO: 29492 - DNA, 96 bp, Fusarium azukicola
  misc_feature: 600
ttttctttttttatcttttactcttctctttctccctttctttcctttatctttcttcactcttcttcttaaccctaaccctctctttccctcctt

SEQ ID NO: 29493 - DNA, 96 bp, Fusarium azukicola
  misc_feature: 600
agaggttatagaaaagaagaagaagagaaaggaaaagaaggagggaaagagagggttagggttaagaagaagagtgaagaaagataaaggaaagaa

SEQ ID NO: 29494 - DNA, 96 bp, Fusarium azukicola
  misc_feature: 599
gagaggagaggataaggagtgaaaagagagagagggagaggggagaggagaggataaggagtgaaaagagagagagggagaggggagaggagagga

SEQ ID NO: 29495 - DNA, 96 bp, Fusarium azukicola
  misc_feature: 599
taaaatagaggagtatagggtatataagaataagtaagatagaataaagaagaagggagagtaagatatttagagttagagagaaagaataaagat

SEQ ID NO: 29496 - DNA, 96 bp, Fusarium azukicola
  misc_feature: 599
attatcacttatatcaaaatccatttcttctggggtctcagaaagggaaattaggtcttcctcggctttaggagatgacgaagaagaagaattagc

SEQ ID NO: 29497 - DNA, 96 bp, Fusarium azukicola
  misc_feature: 599
aagataaaaataaggtagtttagagtttagtaaaaagagaggttatagaaaagaagaagaagagaaaggaaaagaaggagggaaagagagggttag

SEQ ID NO: 29498 - DNA, 96 bp, Fusarium azukicola
  misc_feature: 599
caaatcgtatctaaggcattaaaatgcgtcttatttggtttagaggtaaatctagaacaaataactacagcataagctatatcaggtctagttttt

SEQ ID NO: 29499 - DNA, 96 bp, Fusarium azukicola
  misc_feature: 599
aatctatccctaatataacttatttcctttataaagggtttttattatattttaatacttttccctatataatcttagattttcccttataatatt

SEQ ID NO: 29500 - DNA, 96 bp, Fusarium azukicola
  misc_feature: 598
tttctgtttattattattattattatataatattgccttttcattattataggggctttctttaaagtaaggaatctcattaaaagaggggttatt

SEQ ID NO: 29501 - DNA, 96 bp, Fusarium azukicola
  misc_feature: 598
gagggaggagagtttagtaagtaagtatagaggagaggaagagaggagaggaaggggagaagagaagaagaggagtaaagagggagagaagaggaa

SEQ ID NO: 29502 - DNA, 96 bp, Fusarium azukicola
  misc_feature: 598
ttagaggaaaaaattaaacctctattattattatatatatcttagtaaaaacccctttattatagacctaatattataagggaaaatctaagatta

SEQ ID NO: 29503 - DNA, 96 bp, Fusarium azukicola
  misc_feature: 598
tatcttttactcttctctttctccctttctttcctttatctttcttcactcttcttcttaaccctaaccctctctttccctccttcttttcctttc

SEQ ID NO: 29504 - DNA, 96 bp, Fusarium azukicola
  misc_feature: 598
tatcttactctcccttcttctttattctatcttacttattcttatataccctatactcctctattttaccttcttttctttttttatcttttactc

SEQ ID NO: 29505 - DNA, 96 bp, Fusarium azukicola
  misc_feature: 598
gaattagctataaatagcttttcttatttcttttctctttcttccttcttagaattaggtttagattcctttttcttagaagtcttatatacctta

SEQ ID NO: 29506 - DNA, 96 bp, Fusarium azukicola
  misc_feature: 598
gtgaatttctgtttattattattattattatataatattgccttttcattattataggggctttctttaaagtaaggaatctcattaaaagagggg

SEQ ID NO: 29507 - DNA, 96 bp, Fusarium azukicola
  misc_feature: 598
ggaggagagtttagtaagtaagtatagaggagaggaagagaggagaggaaggggagaagagaagaagaggagtaaagagggagagaagaggaagag

SEQ ID NO: 29508 - DNA, 96 bp, Fusarium azukicola
  misc_feature: 598
ccaaatcgtatctaaggcattaaaatgcgtcttatttggtttagaggtaaatctagaacaaataactacagcataagctatatcaggtctagtttt

SEQ ID NO: 29509 - DNA, 96 bp, Fusarium azukicola
  misc_feature: 597
ttactctcccttcttctttattctatcttacttattcttatataccctatactcctctattttaccttcttttctttttttatcttttactcttct

SEQ ID NO: 29510 - DNA, 96 bp, Fusarium azukicola
  misc_feature: 597
cttttctttttttatcttttactcttctctttctccctttctttcctttatctttcttcactcttcttcttaaccctaaccctctctttccctcct

SEQ ID NO: 29511 - DNA, 96 bp, Fusarium azukicola
  misc_feature: 597
aagaattagctataaatagcttttcttatttcttttctctttcttccttcttagaattaggtttagattcctttttcttagaagtcttatatacct

SEQ ID NO: 29512 - DNA, 96 bp, Fusarium azukicola
  misc_feature: 596
ttaccttcttttctttttttatcttttactcttctctttctccctttctttcctttatctttcttcactcttcttcttaaccctaaccctctcttt

SEQ ID NO: 29513 - DNA, 96 bp, Fusarium azukicola
  misc_feature: 596
gtaaaatagaggagtatagggtatataagaataagtaagatagaataaagaagaagggagagtaagatatttagagttagagagaaagaataaaga

SEQ ID NO: 29514 - DNA, 96 bp, Fusarium azukicola
  misc_feature: 596
atagagtagttaaagagaaaataggtatagaagtaaaggtagtaagagagtaagaaagtagtagtaaaagaagagaaaggggaaggagaaagaaga

SEQ ID NO: 29515 - DNA, 96 bp, Fusarium azukicola
  misc_feature: 595
aaaagaagaaaactgccttaaaatgcagttattgcaaactgccaggtcataaagacccagattgctattttttgcaccctaataaggctccaaaaa

SEQ ID NO: 29516 - DNA, 96 bp, Fusarium azukicola
  misc_feature: 595
atagtaagtattaggagagaaaggagtatagagtaagttaaggtaaaaagaaagataaaaataaggtagtttagagtttagtaaaaagagaggtta

SEQ ID NO: 29517 - DNA, 96 bp, Fusarium azukicola
  misc_feature: 595
agtttaatagagagattaaagtagggtatagggtaaagtaaaagagagaagagagtatagggtaaagtaaaagagagaagagagtatagggtaaag

SEQ ID NO: 29518 - DNA, 96 bp, Fusarium azukicola
  misc_feature: 594
aaaactgccttaaaatgcagttattgcaaactgccaggtcataaagacccagattgctattttttgcaccctaataaggctccaaaaaactggaaa

SEQ ID NO: 29519 - DNA, 96 bp, Fusarium azukicola
  misc_feature: 594
attttaatacttttccctatataatcttagattttcccttataatattaggtctataataaaggggtttttactaagatatatataataataatag

SEQ ID NO: 29520 - DNA, 96 bp, Fusarium azukicola
  misc_feature: 593
ttctccttcccctttctcttcttttactactactttcttactctcttactacctttacttctatacctattttctctttaactactctatatatct

SEQ ID NO: 29521 - DNA, 96 bp, Fusarium azukicola
  misc_feature: 593
gagaggttatagaaaagaagaagaagagaaaggaaaagaaggagggaaagagagggttagggttaagaagaagagtgaagaaagataaaggaaaga

SEQ ID NO: 29522 - DNA, 96 bp, Fusarium azukicola
  misc_feature: 593
ccaaaaggaaataggttctttaatatttctagctataaaaactagacctgatatagcttatgctgtagttatttgttctagatttacctctaaacc

SEQ ID NO: 29523 - DNA, 96 bp, Fusarium azukicola
  misc_feature: 593
atttctgtttattattattattattatataatattgccttttcattattataagggctttctttaaagtaaggaatctcattaaaagaggggttat

SEQ ID NO: 29524 - DNA, 96 bp, Fusarium azukicola
  misc_feature: 592
tcgtatctaaggcattaaaatgcgtcttatttggtttagaggtaaatctagaacaaataactacagcataagctatatcaggtctagtttttatag

SEQ ID NO: 29525 - DNA, 96 bp, Fusarium azukicola
  misc_feature: 592
ctccccttcctctcctctcttcctctcctctatacttacttactaaactctcctccctcttcaataaccttccttttattcttactataaccccct

SEQ ID NO: 29526 - DNA, 96 bp, Fusarium azukicola
  misc_feature: 592
accttccctatataaagaaacaactaggatatttaaataaggtaaataaacctgttttttctactaataaagataatataactaattttatatatg

SEQ ID NO: 29527 - DNA, 96 bp, Fusarium azukicola
  misc_feature: 591
cttcttctcttctccccttcctctcctctcttcctctcctctatacttacttactaaactctcctccctcttcaataaccttccttttattcttac

SEQ ID NO: 29528 - DNA, 96 bp, Fusarium azukicola
  misc_feature: 591
ataaaaggaaggttattgaagagggaggagagtttagtaagtaagtatagaggagaggaagagaggagaggaaggggagaagagaagaagaggagt

SEQ ID NO: 29529 - DNA, 96 bp, Fusarium azukicola
  misc_feature: 590
aagagagagaggggaggaagggaggaagggagaagagaaagaagataggtagttagaagagaaagaaagaaggggaatagaaaaagaaaagaagaa

SEQ ID NO: 29530 - DNA, 96 bp, Fusarium azukicola
  misc_feature: 590
tcatgtaagcgccgcactttttttaaccccctctatagttatcgcgataaaaacaccataaaccatttgatcaattaaaactactcgctatactct

SEQ ID NO: 29531 - DNA, 96 bp, Fusarium azukicola
  misc_feature: 590
gagaaaataggtatagaagtaaaggtagtaagagagtaagaaagtagtagtaaaagaagagaaaggggaaggagaaagaagagaaaaaagtaagtt

SEQ ID NO: 29532 - DNA, 96 bp, Fusarium azukicola
  misc_feature: 590
ctttactcctcttcttctcttctccccttcctctcctctcttcctctcctctatacttacttactaaactctcctccctcttcaataaccttcctt

SEQ ID NO: 29533 - DNA, 96 bp, Fusarium azukicola
  misc_feature: 590
ctctttaaatatactagtgaggacctatatcaagttaaaaactgtgaaaactgcaaactaggaaaattaactaaaaataatataaataaaaaacct

SEQ ID NO: 29534 - DNA, 96 bp, Fusarium azukicola
  misc_feature: 589
ttcctttatctttcttcactcttcttcttaaccctaaccctctctttccctccttcttttcctttctcttcttcttcttttctataacctctcttt

SEQ ID NO: 29535 - DNA, 96 bp, Fusarium azukicola
  misc_feature: 589
agagggaggagagtttagtaagtaagtatagaggagaggaagagaggagaggaaggggagaagagaagaagaggagtaaagagggagagaagagga

SEQ ID NO: 29536 - DNA, 96 bp, Fusarium azukicola
  misc_feature: 589
ctcttctccccttcctctcctctcttcctctcctctatacttacttactaaactctcctccctcttcaataaccttccttttattcttactataac

SEQ ID NO: 29537 - DNA, 96 bp, Fusarium azukicola
  misc_feature: 589
ctttaaatatactagtgaggacctatatcaagttaaaaactgtgaaaactgcaaactaggaaaattaactaaaaataatataaataaaaaacctag

SEQ ID NO: 29538 - DNA, 96 bp, Fusarium azukicola
  misc_feature: 589
cttatataccctatactcctctattttaccttcttttctttttttatcttttactcttctctttctccctttctttcctttatctttcttcactct

SEQ ID NO: 29539 - DNA, 96 bp, Fusarium azukicola
  misc_feature: 589
atataccctatactcctctattttaccttcttttctttttttatcttttactcttctctttctccctttctttcctttatctttcttcactcttct

SEQ ID NO: 29540 - DNA, 96 bp, Fusarium azukicola
  misc_feature: 588
tctccttcccctttctcttcttttactactactttcttactctcttactacctttacttctatacctattttctctttaactactctatatatctt

SEQ ID NO: 29541 - DNA, 96 bp, Fusarium azukicola
  misc_feature: 588
cttggaaaaagaagaaaactgccttaaaatgcagttattgcaaactgccaggtcataaagacccagattgctattttttgcaccctaataaggctc

SEQ ID NO: 29542 - DNA, 96 bp, Fusarium azukicola
  misc_feature: 588
aagagaaaataggtatagaagtaaaggtagtaagagagtaagaaagtagtagtaaaagaagagaaaggggaaggagaaagaagagaaaaaagtaag

SEQ ID NO: 29543 - DNA, 96 bp, Fusarium azukicola
  misc_feature: 588
aggagtatagggtatataagaataagtaagatagaataaagaagaagggagagtaagatatttagagttagagagaaagaataaagataagatgag

SEQ ID NO: 29544 - DNA, 96 bp, Fusarium azukicola
  misc_feature: 587
agacctaatttccctttctgagaccccagaagaaatggattttgatataagtgataatttagaggtatataattccataatttctcaacaaaataa

SEQ ID NO: 29545 - DNA, 96 bp, Fusarium azukicola
  misc_feature: 586
ttaagggtattattctaattggttaaaaaggttcctatagacctttatgactgccgtcatctatgcatcaagtataataactgccgattggctaaa

SEQ ID NO: 29546 - DNA, 96 bp, Fusarium azukicola
  misc_feature: 586
tctccctttctttcctttatctttcttcactcttcttcttaaccctaaccctctctttccctccttcttttcctttctcttcttcttcttttctat

SEQ ID NO: 29547 - DNA, 96 bp, Fusarium azukicola
  misc_feature: 586
atactactcttttaccttaacttacttttttctcttctttctccttcccctttctcttcttttactactactttcttactctcttactacctttac

SEQ ID NO: 29548 - DNA, 96 bp, Fusarium azukicola
  misc_feature: 586
aggaagagaagggttttaaggtttattaagtagagaagaaggagggagaataaggtaagtaagtaagttaggttaaagaagagaagaaagggttag

SEQ ID NO: 29549 - DNA, 96 bp, Fusarium azukicola
  misc_feature: 585
tttctttttttatcttttactcttctctttctccctttctttcctttatctttcttcactcttcttcttaaccctaaccctctctttccctccttc

SEQ ID NO: 29550 - DNA, 96 bp, Fusarium azukicola
  misc_feature: 585
aaaagataaaaaaagaaaagaaggtaaaatagaggagtatagggtatataagaataagtaagatagaataaagaagaagggagagtaagatattta

SEQ ID NO: 29551 - DNA, 96 bp, Fusarium azukicola
  misc_feature: 584
ttgacttgatataggtcctcactagtatatttaaagagaggatcttttatttttatatatttaattagacttcttaagttaagatgacttagtctt

SEQ ID NO: 29552 - DNA, 96 bp, Fusarium azukicola
  misc_feature: 584
ttctttttttatcttttactcttctctttctccctttctttcctttatctttcttcactcttcttcttaaccctaaccctctctttccctccttct

SEQ ID NO: 29553 - DNA, 96 bp, Fusarium azukicola
  misc_feature: 584
tatataccctatactcctctattttaccttcttttctttttttatcttttactcttctctttctccctttctttcctttatctttcttcactcttc

SEQ ID NO: 29554 - DNA, 96 bp, Fusarium azukicola
  misc_feature: 584
cttctccccttcctctcctctcttcctctcctctatacttacttactaaactctcctccctcttcaataaccttccttttattcttactataaccc

SEQ ID NO: 29555 - DNA, 96 bp, Fusarium azukicola
  misc_feature: 584
cccttcctctcctctcttcctctcctctatacttacttactaaactctcctccctcttcaataaccttccttttattcttactataacccccttct

SEQ ID NO: 29556 - DNA, 96 bp, Fusarium azukicola
  misc_feature: 583
aggaagccaataaggtgcataagacttctaagaaaaaggaatctaaacctaattctaagaaggaagaaagagaaaagaaacaagaaaagctattta

SEQ ID NO: 29557 - DNA, 96 bp, Fusarium azukicola
  misc_feature: 583
aaggaaataacccctcttttaatgagattccttactttaaagaaagcccttataataatgaaaaggcaatattatataataataataataataaac

SEQ ID NO: 29558 - DNA, 96 bp, Fusarium azukicola
  misc_feature: 583
gaagaattagctataaatagcttttcttatttcttttctctttcttccttcttagaattaggtttagattcctttttcttagaagtcttatatacc

SEQ ID NO: 29559 - DNA, 96 bp, Fusarium azukicola
  misc_feature: 583
cttttcactccttcttccttcttcctcatcttatctttattctttctctctaactctaaatatcttactctcccttcttctttattctatcttact

SEQ ID NO: 29560 - DNA, 96 bp, Fusarium azukicola
  misc_feature: 583
aagagaaaaaagtaagttaaggtaaaagagtagtatttaataggggaaaggaaagaagaagtaagtaaaaaaaagagaaggggtagaagagagggg

SEQ ID NO: 29561 - DNA, 96 bp, Fusarium azukicola
  misc_feature: 583
actctcttctctcttttactttaccctatactctcttctctcttttactttaccctatactctcttctctcttttactttaccctataccctactt

SEQ ID NO: 29562 - DNA, 96 bp, Fusarium azukicola
  misc_feature: 582
taatagagagattaaagtagggtatagggtaaagtaaaagagagaagagagtatagggtaaagtaaaagagagaagagagtatagggtaaagtaaa

SEQ ID NO: 29563 - DNA, 96 bp, Fusarium azukicola
  misc_feature: 582
aggaaggttaagaaaggagagaagtaaggaaggttaagaaaggagagaagtaaggaaggttaagaaaggagagaagtaaggaaggttaaagaagga

SEQ ID NO: 29564 - DNA, 96 bp, Fusarium azukicola
  misc_feature: 581
tacgatttggaagtatttaaatagctatccaaatttatctactatatataactgtgattattcagatatacacaatataattagaggctatacaga

SEQ ID NO: 29565 - DNA, 96 bp, Fusarium azukicola
  misc_feature: 581
aaaaagggggagaaaaaaaaagaagaaagagagagagaggaggtagagtaattgagaagttatagtaagtaaagataaaagagtaaaaacggaata

SEQ ID NO: 29566 - DNA, 96 bp, Fusarium azukicola
  misc_feature: 581
gacctaatttccctttctgagaccccagaagaaatggattttgatataagtgataatttagaggtatataattccataatttctcaacaaaataat

SEQ ID NO: 29567 - DNA, 96 bp, Fusarium azukicola
  misc_feature: 581
cttctcttctccccttcctctcctctcttcctctcctctatacttacttactaaactctcctccctcttcaataaccttccttttattcttactat

SEQ ID NO: 29568 - DNA, 96 bp, Fusarium azukicola
  misc_feature: 580
tctttctccttcccctttctcttcttttactactactttcttactctcttactacctttacttctatacctattttctctttaactactctatata

SEQ ID NO: 29569 - DNA, 96 bp, Fusarium azukicola
  misc_feature: 580
tcaagggaagtaattaaagtaataattaggggtaataattaaattaagggttagggttaagtagttatagtaaaggttaggggtagtaatgaagtt

SEQ ID NO: 29570 - DNA, 96 bp, Fusarium azukicola
  misc_feature: 578
ttctgtttattattattattattatataatattgccttttcattattataggggctttctttaaagtaaggaatctcattaaaagaggggttattt

SEQ ID NO: 29571 - DNA, 96 bp, Fusarium azukicola
  misc_feature: 578
aagacctaatttccctttctgagaccccagaagaaatggattttgatataagtgataatttagaggtatataattccataatttctcaacaaaata

SEQ ID NO: 29572 - DNA, 96 bp, Fusarium azukicola
  misc_feature: 578
gtcatgtaagcgccgcactttttttaaccccctctatagttatcgcgataaaaacaccataaaccatttgatcaattaaaactactcgctatactc

SEQ ID NO: 29573 - DNA, 96 bp, Fusarium azukicola
  misc_feature: 577
tcttcttctcttctccccttcctctcctctcttcctctcctctatacttacttactaaactctcctccctcttcaataaccttccttttattctta

SEQ ID NO: 29574 - DNA, 96 bp, Fusarium azukicola
  misc_feature: 576
aaaagggggagaaaaaaaaagaagaaagagagagagaggaggtagagtaattgagaagttatagtaagtaaagataaaagagtaaaaacggaataa

SEQ ID NO: 29575 - DNA, 96 bp, Fusarium azukicola
  misc_feature: 576
aaagggaatctaaacctaattctaagaaggaagaaagagaaaagaaacaagaaaagctatttatagctaattcttcttcttcgtcatctcctaaag

SEQ ID NO: 29576 - DNA, 96 bp, Fusarium azukicola
  misc_feature: 576
agtgaatttctgtttattattattattattatataatattgccttttcattattataagggctttctttaaagtaaggaatctcattaaaagaggg

SEQ ID NO: 29577 - DNA, 96 bp, Fusarium azukicola
  misc_feature: 575
aataacccctcttttaatgagattccttactttaaagaaagcccttataataatgaaaaggcaatattatataataataataataataaacagaaa

SEQ ID NO: 29578 - DNA, 96 bp, Fusarium azukicola
  misc_feature: 575
tctttaaatatactagtgaggacctatatcaagttaaaaactgtgaaaactgcaaactaggaaaattaactaaaaataatataaataaaaaaccta

SEQ ID NO: 29579 - DNA, 96 bp, Fusarium azukicola
  misc_feature: 574
caaaaggaaataggttctttaatatttctagctataaaaactagacctgatatagcttatgctgtagttatttgttctagatttgcctctaaacca

SEQ ID NO: 29580 - DNA, 96 bp, Fusarium azukicola
  misc_feature: 574
ctataataatgaaaaggcaatattatataataataataataataaacagaaattcactatcgaaattcctaaaaagccagctgatttctataaaga

SEQ ID NO: 29581 - DNA, 96 bp, Fusarium azukicola
  misc_feature: 574
atcttatctttattctttctctctaactctaaatatcttactctcccttcttctttattctatcttacttattcttatataccctatactcctcta

SEQ ID NO: 29582 - DNA, 96 bp, Fusarium azukicola
  misc_feature: 574
agagagagaggggaggaagggaggaagggagaagagaaagaagataggtagttagaagagaaagaaagaaggggaatagaaaaagaaaagaagaag

SEQ ID NO: 29583 - DNA, 96 bp, Fusarium azukicola
  misc_feature: 573
ttagaagtcttatgcaccttattggcttcctgagttttccagttttttggagccttattagggtgcaaaaaatagcaatctgggtctttatgacct

SEQ ID NO: 29584 - DNA, 96 bp, Fusarium azukicola
  misc_feature: 573
gaggagagtttagtaagtaagtatagaggagaggaagagaggagaggaaggggagaagagaagaagaggagtaaagagggagagaagaggaagaga

SEQ ID NO: 29585 - DNA, 96 bp, Fusarium azukicola
  misc_feature: 573
ctgtttattattattattattatataatattgccttttcattattataggggctttctttaaagtaaggaatctcattaaaagaggggttatttcc

SEQ ID NO: 29586 - DNA, 96 bp, Fusarium azukicola
  misc_feature: 573
gaagagggaggagagtttagtaagtaagtatagaggagaggaagagaggagaggaaggggagaagagaagaagaggagtaaagagggagagaagag

SEQ ID NO: 29587 - DNA, 96 bp, Fusarium azukicola
  misc_feature: 573
aagagggaggagagtttagtaagtaagtatagaggagaggaagagaggagaggaaggggagaagagaagaagaggagtaaagagggagagaagagg

SEQ ID NO: 29588 - DNA, 96 bp, Fusarium azukicola
  misc_feature: 573
agagaaaaaagtaagttaaggtaaaagagtagtatttaataggggaaaggaaagaagaagtaagtaaaaaaaagagaaggggtagaagagaggggg

SEQ ID NO: 29589 - DNA, 96 bp, Fusarium azukicola
  misc_feature: 573
aaaaaagggggagaaaaaaaaagaagaaagagagagagaggaggtagagtaattgagaagttatagtaagtaaagataaaagagtaaaaacggaat

SEQ ID NO: 29590 - DNA, 96 bp, Fusarium azukicola
  misc_feature: 572
tttcactccttcttccttcttcctcatcttatctttattctttctctctaactctaaatatcttactctcccttcttctttattctatcttactta

SEQ ID NO: 29591 - DNA, 96 bp, Fusarium azukicola
  misc_feature: 572
ttccttattactaggttttttatttatattatttttagttaattttcctagtttgcagttttcacagtttttaacttgatataggtcctcactagt

SEQ ID NO: 29592 - DNA, 96 bp, Fusarium azukicola
  misc_feature: 572
ttatcttttactcttctctttctccctttctttcctttatctttcttcactcttcttcttaaccctaaccctctctttccctccttcttttccttt

SEQ ID NO: 29593 - DNA, 96 bp, Fusarium azukicola
  misc_feature: 572
ttacctgcgcatctatatccatttgatcaattacttgtcttccttcctctactatcataacccctcttttctgtagtctagtcttttttgccctcc

SEQ ID NO: 29594 - DNA, 96 bp, Fusarium azukicola
  misc_feature: 572
aaagaagaagtaagtaaaaaaaagagaaggggtagaagagagggggagttaaggtaagagagtaggagaagagtaggaaagggttataaggagaga

SEQ ID NO: 29595 - DNA, 96 bp, Fusarium azukicola
  misc_feature: 572
gagtctgtatagcctctaattatattgtgtatatctgaataatcacagttatatatagtagataaatttggatagctatttaaatacttccaaatc

SEQ ID NO: 29596 - DNA, 96 bp, Fusarium azukicola
  misc_feature: 572
gaagaagagtgaagaaagataaaggaaagaaagggagaaagagaagagtaaaagataaaaaaagaaaagaaggtaaaatagaggagtatagggtat

SEQ ID NO: 29597 - DNA, 96 bp, Fusarium azukicola
  misc_feature: 571
aagggtattattctaattggttaaaaaggttcctatagacctttatgactgccgtcatctatgcatcaagtataataactgccgattggctaaaaa

SEQ ID NO: 29598 - DNA, 96 bp, Fusarium azukicola
  misc_feature: 571
tctctttaaatatactagtgaggacctatatcaagttaaaaactgtgaaaactgcaaactaggaaaattaactaaaaataatataaataaaaaacc

SEQ ID NO: 29599 - DNA, 96 bp, Fusarium azukicola
  misc_feature: 571
gaggagtatagggtatataagaataagtaagatagaataaagaagaagggagagtaagatatttagagttagagagaaagaataaagataagatga

SEQ ID NO: 29600 - DNA, 96 bp, Fusarium azukicola
  misc_feature: 571
agaggaaaaaattaaacctctattattattatatatatcttagtaaaaacccctttattatagacctaatattataagggaaaatctaagattata

SEQ ID NO: 29601 - DNA, 96 bp, Fusarium azukicola
  misc_feature: 571
taaaagataaaaaaagaaaagaaggtaaaatagaggagtatagggtatataagaataagtaagatagaataaagaagaagggagagtaagatattt

SEQ ID NO: 29602 - DNA, 96 bp, Fusarium azukicola
  misc_feature: 571
aagaagaagtaagtaaaaaaaagagaaggggtagaagagagggggagttaaggtaagagagtaggagaagagtaggaaagggttataaggagagag

SEQ ID NO: 29603 - DNA, 96 bp, Fusarium azukicola
  misc_feature: 571
aattatcacttatatcaaaatccatttcttctggggtctcagaaagggaaattaggtcttcctcggctttaggagatgacgaagaagaagaattag

SEQ ID NO: 29604 - DNA, 96 bp, Fusarium azukicola
  misc_feature: 570
aaggtagtttagagtttagtaaaaagagaggttatagaaaagaagaagaagagaaaggaaaagaaggagggaaagagagggttagggttaagaaga

SEQ ID NO: 29605 - DNA, 96 bp, Fusarium azukicola
  misc_feature: 570
tccccttcctctcctctcttcctctcctctatacttacttactaaactctcctccctcttcaataaccttccttttattcttactataaccccctt

SEQ ID NO: 29606 - DNA, 96 bp, Fusarium azukicola
  misc_feature: 569
ttctccccttcctctcctctcttcctctcctctatacttacttactaaactctcctccctcttcaataaccttccttttattcttactataacccc

SEQ ID NO: 29607 - DNA, 96 bp, Fusarium azukicola
  misc_feature: 569
ttcactccttcttccttcttcctcatcttatctttattctttctctctaactctaaatatcttactctcccttcttctttattctatcttacttat

SEQ ID NO: 29608 - DNA, 96 bp, Fusarium azukicola
  misc_feature: 569
tccccctctcttctaccccttctcttttttttacttacttcttctttcctttcccctattaaatactactcttttaccttaacttacttttttctc

SEQ ID NO: 29609 - DNA, 96 bp, Fusarium azukicola
  misc_feature: 569
aatttctgtttattattattattattatataatattgccttttcattattataggggctttctttaaagtaaggaatctcattaaaagaggggtta

SEQ ID NO: 29610 - DNA, 96 bp, Fusarium azukicola
  misc_feature: 569
atagataaaagtgggtcacaataaagagtctgattggatcagataaaagtgggatttagttgttgatgattgaattgactgaagagttgattcttg

SEQ ID NO: 29611 - DNA, 96 bp, Fusarium azukicola
  misc_feature: 568
tactactcttttaccttaacttacttttttctcttctttctccttcccctttctcttcttttactactactttcttactctcttactacctttact

SEQ ID NO: 29612 - DNA, 96 bp, Fusarium azukicola
  misc_feature: 568
gagagggttagggttaagaagaagagtgaagaaagataaaggaaagaaagggagaaagagaagagtaaaagataaaaaaagaaaagaaggtaaaat

SEQ ID NO: 29613 - DNA, 96 bp, Fusarium azukicola
  misc_feature: 567
tatataaataaaataataaggaaatataataaataagaaataggaacttctaaagtacctattaaatttatagaaagactcttaaaatctaaagaa

SEQ ID NO: 29614 - DNA, 96 bp, Fusarium azukicola
  misc_feature: 567
ggaagagaagggttttaaggtttattaagtagagaagaaggagggagaataaggtaagtaagtaagttaggttaaagaagagaagaaagggttaga

SEQ ID NO: 29615 - DNA, 96 bp, Fusarium azukicola
  misc_feature: 567
gacttgatataggtcctcactagtatatttaaagagaggatcttttatttttatatatttaattagacttcttaagttaagatgacttagtctttt

SEQ ID NO: 29616 - DNA, 96 bp, Fusarium azukicola
  misc_feature: 567
agaataaagaagaagggagagtaagatatttagagttagagagaaagaataaagataagatgaggaagaaggaagaaggagtgaaaagagagagag

SEQ ID NO: 29617 - DNA, 96 bp, Fusarium azukicola
  misc_feature: 566
tctttactcctcttcttctcttctccccttcctctcctctcttcctctcctctatacttacttactaaactctcctccctcttcaataaccttcct

SEQ ID NO: 29618 - DNA, 96 bp, Fusarium azukicola
  misc_feature: 566
tctgtatagcctctaattatattgtgtatatctgaataatcgcagttatatatagtagataaatttggatagctatttaaatacttccaaatcgta

SEQ ID NO: 29619 - DNA, 96 bp, Fusarium azukicola
  misc_feature: 566
agggaatctaaacctaattctaagaaggaagaaagagaaaagaaacaagaaaagctatttatagctaattcttcttcttcgtcatctcctaaagcc

SEQ ID NO: 29620 - DNA, 96 bp, Fusarium azukicola
  misc_feature: 566
atttttatctttctttttaccttaacttactctatactcctttctctcctaatacttactatactcctccttaacttaacttctctccttaaactt

SEQ ID NO: 29621 - DNA, 96 bp, Fusarium azukicola
  misc_feature: 566
aggaagagaagggaatataagagagagaggggaggaagggaggaagggagaagagaaagaagataggtagttagaagagaaagaaagaaggggaat

SEQ ID NO: 29622 - DNA, 96 bp, Fusarium azukicola
  misc_feature: 566
agaggagaggataaggagtgaaaagagagagagggagaggggagaggagaggataaggagtgaaaagagagagagggagaggggagaggagaggat

SEQ ID NO: 29623 - DNA, 96 bp, Fusarium azukicola
  misc_feature: 565
ttttggagccttattagggtgcaaaaaatagcaatctgggtctttatgacctggcagtttgcaataactgcattttaaggcagttttcttcttttt

SEQ ID NO: 29624 - DNA, 96 bp, Fusarium azukicola
  misc_feature: 565
tttaaccttccttacttctctcctttcttaaccttccttacttctctcctttcttaaccttccttacttctctcctttcttaaccttccttacttc

SEQ ID NO: 29625 - DNA, 96 bp, Fusarium azukicola
  misc_feature: 565
tactctcttctctcttttactttaccctatactctcttctctcttttactttaccctatactctcttctctcttttactttaccctataccctact

SEQ ID NO: 29626 - DNA, 96 bp, Fusarium azukicola
  misc_feature: 565
tactctcccttcttctttattctatcttacttattcttatataccctatactcctctattttaccttcttttctttttttatcttttactcttctc

SEQ ID NO: 29627 - DNA, 96 bp, Fusarium azukicola
  misc_feature: 565
ctcttttcactccttcttccttcttcctcatcttatctttattctttctctctaactctaaatatcttactctcccttcttctttattctatctta

SEQ ID NO: 29628 - DNA, 96 bp, Fusarium azukicola
  misc_feature: 565
ctataacctctctttttactaaactctaaactaccttatttttatctttctttttaccttaacttactctatactcctttctctcctaatacttac

SEQ ID NO: 29629 - DNA, 96 bp, Fusarium azukicola
  misc_feature: 565
gaataaagaagaagggagagtaagatatttagagttagagagaaagaataaagataagatgaggaagaaggaagaaggagtgaaaagagagagagg

SEQ ID NO: 29630 - DNA, 96 bp, Fusarium azukicola
  misc_feature: 565
atcatatataaaattagttatattatctttattagtagaaaaaacaggtttatttaccttatttaaatatcctagttgtttctttatatagggaag

SEQ ID NO: 29631 - DNA, 96 bp, Fusarium azukicola
  misc_feature: 564
ttctctccctctttactcctcttcttctcttctccccttcctctcctctcttcctctcctctatacttacttactaaactctcctccctcttcaat

SEQ ID NO: 29632 - DNA, 96 bp, Fusarium azukicola
  misc_feature: 564
tcttatctttattctttctctctaactctaaatatcttactctcccttcttctttattctatcttacttattcttatataccctatactcctctat

SEQ ID NO: 29633 - DNA, 96 bp, Fusarium azukicola
  misc_feature: 564
atactctcttctctcttttactttaccctatactctcttctctcttttactttaccctatactctcttctctcttttactttaccctataccctac

SEQ ID NO: 29634 - DNA, 96 bp, Fusarium azukicola
  misc_feature: 563
ttcttttcttttattcttccttctctctcctccttctttttacttttcctcctctctttctctcccctccttctctctcctcttttaaccccctct

SEQ ID NO: 29635 - DNA, 96 bp, Fusarium azukicola
  misc_feature: 562
ttatttttatctttctttttaccttaacttactctatactcctttctctcctaatacttactatactcctccttaacttaacttctctccttaaac

SEQ ID NO: 29636 - DNA, 96 bp, Fusarium azukicola
  misc_feature: 562
tcttctcccctttttccctcccctcttcctctactttctttctcttctcccctcctcttcttaactacactttctctctacctcacttttccctct

SEQ ID NO: 29637 - DNA, 96 bp, Fusarium azukicola
  misc_feature: 562
gttatattagtttaatagagagattaaagtagggtatagggtaaagtaaaagagagaagagagtatagggtaaagtaaaagagagaagagagtata

SEQ ID NO: 29638 - DNA, 96 bp, Fusarium azukicola
  misc_feature: 562
tatacctaaaaatagagtaaaaattctataatataatatgtggtttatagggatatatcactatagttggtaatataatatagaacattaacactt

SEQ ID NO: 29639 - DNA, 96 bp, Fusarium azukicola
  misc_feature: 562
cctataataatgaaaaggcaatattatataataataataataataaacagaaattcactatcgaaattcctaaaaagccagctgatttctataaag

SEQ ID NO: 29640 - DNA, 96 bp, Fusarium azukicola
  misc_feature: 562
ccctcctaccttctctaaactacgttctattactttctattactttcttacttttctttcttttactcttccccttctccttttatcttcttctct

SEQ ID NO: 29641 - DNA, 96 bp, Fusarium azukicola
  misc_feature: 561
ttcttctcttctccccttcctctcctctcttcctctcctctatacttacttactaaactctcctccctcttcaataaccttccttttattcttact

SEQ ID NO: 29642 - DNA, 96 bp, Fusarium azukicola
  misc_feature: 561
tgtttattattattattattatataatattgccttttcattattataggggctttctttaaagtaaggaatctcattaaaagaggggttatttcct

SEQ ID NO: 29643 - DNA, 96 bp, Fusarium azukicola
  misc_feature: 561
accttcttttctttttttatcttttactcttctctttctccctttctttcctttatctttcttcactcttcttcttaaccctaaccctctctttcc

SEQ ID NO: 29644 - DNA, 96 bp, Fusarium azukicola
  misc_feature: 561
aaggaaggttaagaaaggagagaagtaaggaaggttaagaaaggagagaagtaaggaaggttaagaaaggagagaagtaaggaaggttaaagaagg

SEQ ID NO: 29645 - DNA, 96 bp, Fusarium azukicola
  misc_feature: 561
agtgaatttctgtttattattattattattatataatattgccttttcattattataggggctttctttaaagtaaggaatctcattaaaagaggg

SEQ ID NO: 29646 - DNA, 96 bp, Fusarium azukicola
  misc_feature: 560
tcttctccccttcctctcctctcttcctctcctctatacttacttactaaactctcctccctcttcaataaccttccttttattcttactataacc

SEQ ID NO: 29647 - DNA, 96 bp, Fusarium azukicola
  misc_feature: 560
aatatcttactctcccttcttctttattctatcttacttattcttatataccctatactcctctattttaccttcttttctttttttatcttttac

SEQ ID NO: 29648 - DNA, 96 bp, Fusarium azukicola
  misc_feature: 560
ctctttactcctcttcttctcttctccccttcctctcctctcttcctctcctctatacttacttactaaactctcctccctcttcaataaccttcc

SEQ ID NO: 29649 - DNA, 96 bp, Fusarium azukicola
  misc_feature: 560
agcgtataatcaattaaattcaattactatcttcttccctagatagctcagtaacaatctgacatgttcttctattatgaccggccttaccgcatc

SEQ ID NO: 29650 - DNA, 96 bp, Fusarium azukicola
  misc_feature: 560
cttatctttattctttctctctaactctaaatatcttactctcccttcttctttattctatcttacttattcttatataccctatactcctctatt

SEQ ID NO: 29651 - DNA, 96 bp, Fusarium azukicola
  misc_feature: 560
ctctttttcttcttcttttctttttctattccccttctttctttctcttctaactacctatcttctttctcttctcccttcctcccttcctcccct

SEQ ID NO: 29652 - DNA, 96 bp, Fusarium azukicola
  misc_feature: 560
atatcttactctcccttcttctttattctatcttacttattcttatataccctatactcctctattttaccttcttttctttttttatcttttact

SEQ ID NO: 29653 - DNA, 96 bp, Fusarium azukicola
  misc_feature: 559
aaataacccctcttttaatgagattccttactttaaagaaagcccttataataatgaaaaggcaatattatataataataataataataaacagaa

SEQ ID NO: 29654 - DNA, 96 bp, Fusarium azukicola
  misc_feature: 559
tataataaaggtcaagggaagtaattaaagtaataattaggggtaataattaaattaagggttagggttaagtagttatagtaaaggttaggggta

SEQ ID NO: 29655 - DNA, 96 bp, Fusarium azukicola
  misc_feature: 558
ttccctcctaccttctctaaactacgttctattactttctattactttcttacttttctttcttttactcttccccttctccttttatcttcttct

SEQ ID NO: 29656 - DNA, 96 bp, Fusarium azukicola
  misc_feature: 558
aatatactagtgaggacctatatcaagttaaaaactgtgaaaactgcaaactaggaaaattaactaaaaataatataaataaaaaacctagtaata

SEQ ID NO: 29657 - DNA, 96 bp, Fusarium azukicola
  misc_feature: 558
tatctttattctttctctctaactctaaatatcttactctcccttcttctttattctatcttacttattcttatataccctatactcctctatttt

SEQ ID NO: 29658 - DNA, 96 bp, Fusarium azukicola
  misc_feature: 558
ctttttcttcttcttttctttttctattccccttctttctttctcttctaactacctatcttctttctcttctcccttcctcccttcctcccctct

SEQ ID NO: 29659 - DNA, 96 bp, Fusarium azukicola
  misc_feature: 558
actactcttttaccttaacttacttttttctcttctttctccttcccctttctcttcttttactactactttcttactctcttactacctttactt

SEQ ID NO: 29660 - DNA, 96 bp, Fusarium azukicola
  misc_feature: 557
cataaagacccagattgctattttttgcaccctaataaggctccaaaaaactggaaaactcaggaagccaataaggtgcataagacttctaagaaa

SEQ ID NO: 29661 - DNA, 96 bp, Fusarium azukicola
  misc_feature: 557
tttaggagatgacgaagaagaagaattagctataaatagcttttcttgtttcttttctctttcttccttcttagaattaggtttagattccctttt

SEQ ID NO: 29662 - DNA, 96 bp, Fusarium azukicola
  misc_feature: 557
ttaagatatatagagtagttaaagagaaaataggtatagaagtaaaggtagtaagagagtaagaaagtagtagtaaaagaagagaaaggggaagga

SEQ ID NO: 29663 - DNA, 96 bp, Fusarium azukicola
  misc_feature: 557
tatactttaagatacctatataaggaatttttttaaaaatttagaaaaaatatttttaagtcttatatatagctaaatagttaaaatcgttttttt

SEQ ID NO: 29664 - DNA, 96 bp, Fusarium azukicola
  misc_feature: 557
ataagagagagaggggaggaagggaggaagggagaagagaaagaagataggtagttagaagagaaagaaagaaggggaatagaaaaagaaaagaag

SEQ ID NO: 29665 - DNA, 96 bp, Fusarium azukicola
  misc_feature: 557
atagaagtaaaggtagtaagagagtaagaaagtagtagtaaaagaagagaaaggggaaggagaaagaagagaaaaaagtaagttaaggtaaaagag

SEQ ID NO: 29666 - DNA, 96 bp, Fusarium azukicola
  misc_feature: 556
ttccccttctttctttctcttctaactacctatcttctttctcttctcccttcctcccttcctcccctctctctcttatattcccttctcttcctt

SEQ ID NO: 29667 - DNA, 96 bp, Fusarium azukicola
  misc_feature: 556
cctataaaccacatattatattatagaatttttactctatttttaggtatatttacctaacctatagctactataggtagctagatattaagggga

SEQ ID NO: 29668 - DNA, 96 bp, Fusarium azukicola
  misc_feature: 556
tataccctatactcctctattttaccttcttttctttttttatcttttactcttctctttctccctttctttcctttatctttcttcactcttctt

SEQ ID NO: 29669 - DNA, 96 bp, Fusarium azukicola
  misc_feature: 556
tactcttttaccttaacttacttttttctcttctttctccttcccctttctcttcttttactactactttcttactctcttactacctttacttct

SEQ ID NO: 29670 - DNA, 96 bp, Fusarium azukicola
  misc_feature: 556
agaaaataggtatagaagtaaaggtagtaagagagtaagaaagtagtagtaaaagaagagaaaggggaaggagaaagaagagaaaaaagtaagtta

SEQ ID NO: 29671 - DNA, 96 bp, Fusarium azukicola
  misc_feature: 556
gtttaatagagagattaaagtagggtatagggtaaagtaaaagagagaagagagtatagggtaaagtaaaagagagaagagagtatagggtaaagt

SEQ ID NO: 29672 - DNA, 96 bp, Fusarium azukicola
  misc_feature: 556
ctactcttttaccttaacttacttttttctcttctttctccttcccctttctcttcttttactactactttcttactctcttactacctttacttc

SEQ ID NO: 29673 - DNA, 96 bp, Fusarium azukicola
  misc_feature: 556
cttctcccctttttccctcccctcttcctctactttctttctcttctcccctcctcttcttaactacactttctctctacctcacttttccctctt

SEQ ID NO: 29674 - DNA, 96 bp, Fusarium azukicola
  misc_feature: 555
ttcttaaccctaaccctctctttccctccttcttttcctttctcttcttcttcttttctataacctctctttttactaaactctaaactaccttat

SEQ ID NO: 29675 - DNA, 96 bp, Fusarium azukicola
  misc_feature: 555
aggagagtttagtaagtaagtatagaggagaggaagagaggagaggaaggggagaagagaagaagaggagtaaagagggagagaagaggaagagaa

SEQ ID NO: 29676 - DNA, 96 bp, Fusarium azukicola
  misc_feature: 555
ttattttactttaccctatactctcttctctcttttactttaccctatactctcttctctcttttactttaccctatactctcttctctcttttac

SEQ ID NO: 29677 - DNA, 96 bp, Fusarium azukicola
  misc_feature: 555
ggaagccaataaggtgcataagacttctaagaaaaaggaatctaaacctaattctaagaaggaagaaagagaaaagaaacaagaaaagctatttat

SEQ ID NO: 29678 - DNA, 96 bp, Fusarium azukicola
  misc_feature: 555
agataaaaataaggtagtttagagtttagtaaaaagagaggttatagaaaagaagaagaagagaaaggaaaagaaggagggaaagagagggttagg

SEQ ID NO: 29679 - DNA, 96 bp, Fusarium azukicola
  misc_feature: 555
atttctgtttattattattattattatataatattgccttttcattattataggggctttctttaaagtaaggaatctcattaaaagaggggttat

SEQ ID NO: 29680 - DNA, 96 bp, Fusarium azukicola
  misc_feature: 555
actctcccttcttctttattctatcttacttattcttatataccctatactcctctattttaccttcttttctttttttatcttttactcttctct

SEQ ID NO: 29681 - DNA, 96 bp, Fusarium azukicola
  misc_feature: 554
aggtagtttagagtttagtaaaaagagaggttatagaaaagaagaagaagagaaaggaaaagaaggagggaaagagagggttagggttaagaagaa

SEQ ID NO: 29682 - DNA, 96 bp, Fusarium azukicola
  misc_feature: 554
ttaaatatactagtgaggacctatatcaagttaaaaactgtgaaaactgcaaactaggaaaattaactaaaaataatataaataaaaaacctagta

SEQ ID NO: 29683 - DNA, 96 bp, Fusarium azukicola
  misc_feature: 554
gcttccacagcctctccccaaaggtatttaggtaggttagaagtaaataataaagctctaaccttttctaatatagtcctatttatcctttctaca

SEQ ID NO: 29684 - DNA, 96 bp, Fusarium azukicola
  misc_feature: 554
cttattactaggttttttatttatattatttttagttaattttcctagtttgcagttttcacagtttttaacttgatataggtcctcactagtata

SEQ ID NO: 29685 - DNA, 96 bp, Fusarium azukicola
  misc_feature: 554
aaccctttcctactcttctcctactctcttaccttaactccccctctcttctaccccttctcttttttttacttacttcttctttcctttccccta

SEQ ID NO: 29686 - DNA, 96 bp, Fusarium azukicola
  misc_feature: 554
atctttcttaacctcactacttttttttcttttccttactctctccttataaccctttcctactcttctcctactctcttaccttaactccccctc

SEQ ID NO: 29687 - DNA, 96 bp, Fusarium azukicola
  misc_feature: 554
agtctgtatagcctctaattatattgtgtatatctgaataatcacagttatatatagtagataaatttggatagctatttaaatacttccaaatcg

SEQ ID NO: 29688 - DNA, 96 bp, Fusarium azukicola
  misc_feature: 554
ccctctttactcctcttcttctcttctccccttcctctcctctcttcctctcctctatacttacttactaaactctcctccctcttcaataacctt

SEQ ID NO: 29689 - DNA, 96 bp, Fusarium azukicola
  misc_feature: 553
atatactagtgaggacctatatcaagttaaaaactgtgaaaactgcaaactaggaaaattaactaaaaataatataaataaaaaacctagtaataa

SEQ ID NO: 29690 - DNA, 96 bp, Fusarium azukicola
  misc_feature: 553
tctttttttatcttttactcttctctttctccctttctttcctttatctttcttcactcttcttcttaaccctaaccctctctttccctccttctt

SEQ ID NO: 29691 - DNA, 96 bp, Fusarium azukicola
  misc_feature: 553
tcttttcactccttcttccttcttcctcatcttatctttattctttctctctaactctaaatatcttactctcccttcttctttattctatcttac

SEQ ID NO: 29692 - DNA, 96 bp, Fusarium azukicola
  misc_feature: 553
agtaagtattaggagagaaaggagtatagagtaagttaaggtaaaaagaaagataaaaataaggtagtttagagtttagtaaaaagagaggttata

SEQ ID NO: 29693 - DNA, 96 bp, Fusarium azukicola
  misc_feature: 553
gtctgtatagcctctaattatattgtgtatatctgaataatcacagttatatatagtagataaatttggatagctatttaaatacttccaaatcgt

SEQ ID NO: 29694 - DNA, 96 bp, Fusarium azukicola
  misc_feature: 553
ctttttttatcttttactcttctctttctccctttctttcctttatctttcttcactcttcttcttaaccctaaccctctctttccctccttcttt

SEQ ID NO: 29695 - DNA, 96 bp, Fusarium azukicola
  misc_feature: 553
attaagatatatagagtagttaaagagaaaataggtatagaagtaaaggtagtaagagagtaagaaagtagtagtaaaagaagagaaaggggaagg

SEQ ID NO: 29696 - DNA, 96 bp, Fusarium azukicola
  misc_feature: 553
aaatatactagtgaggacctatatcaagttaaaaactgtgaaaactgcaaactaggaaaattaactaaaaataatataaataaaaaacctagtaat

SEQ ID NO: 29697 - DNA, 96 bp, Fusarium azukicola
  misc_feature: 552
tctccccttcctctcctctcttcctctcctctatacttacttactaaactctcctccctcttcaataaccttccttttattcttactataaccccc

SEQ ID NO: 29698 - DNA, 96 bp, Fusarium azukicola
  misc_feature: 552
tatagtaagtattaggagagaaaggagtatagagtaagttaaggtaaaaagaaagataaaaataaggtagtttagagtttagtaaaaagagaggtt

SEQ ID NO: 29699 - DNA, 96 bp, Fusarium azukicola
  misc_feature: 552
ggaaataacccctcttttaatgagattccttactttaaagaaagcccttataataatgaaaaggcaatattatataataataataataataaacag

SEQ ID NO: 29700 - DNA, 96 bp, Fusarium azukicola
  misc_feature: 552
attccttattactaggttttttatttatattatttttagttaattttcctagtttgcagttttcacagtttttaacttgatataggtcctcactag

SEQ ID NO: 29701 - DNA, 96 bp, Fusarium azukicola
  misc_feature: 551
ttctataattattcttccttctttaaccttccttacttctctcctttcttaaccttccttacttctctcctttcttaaccttccttacttctctcc

SEQ ID NO: 29702 - DNA, 96 bp, Fusarium azukicola
  misc_feature: 551
aaagagaaaataggtatagaagtaaaggtagtaagagagtaagaaagtagtagtaaaagaagagaaaggggaaggagaaagaagagaaaaaagtaa

SEQ ID NO: 29703 - DNA, 96 bp, Fusarium azukicola
  misc_feature: 551
cttagaagtcttatgcaccttattggcttcctgagttttccagttttttggagccttattagggtgcaaaaaatagcaatctgggtctttatgacc

SEQ ID NO: 29704 - DNA, 96 bp, Fusarium azukicola
  misc_feature: 551
gaaagaagaagtaagtaaaaaaaagagaaggggtagaagagagggggagttaaggtaagagagtaggagaagagtaggaaagggttataaggagag

SEQ ID NO: 29705 - DNA, 96 bp, Fusarium azukicola
  misc_feature: 551
attttactttaccctatactctcttctctcttttactttaccctatactctcttctctcttttactttaccctatactctcttctctcttttactt

SEQ ID NO: 29706 - DNA, 96 bp, Fusarium azukicola
  misc_feature: 550
ggagagtttagtaagtaagtatagaggagaggaagagaggagaggaaggggagaagagaagaagaggagtaaagagggagagaagaggaagagaaa

SEQ ID NO: 29707 - DNA, 96 bp, Fusarium azukicola
  misc_feature: 550
ctctcttttcactccttcttccttcttcctcatcttatctttattctttctctctaactctaaatatcttactctcccttcttctttattctatct

SEQ ID NO: 29708 - DNA, 96 bp, Fusarium azukicola
  misc_feature: 549
tcttttctttttttatcttttactcttctctttctccctttctttcctttatctttcttcactcttcttcttaaccctaaccctctctttccctcc

SEQ ID NO: 29709 - DNA, 96 bp, Fusarium azukicola
  misc_feature: 549
aagggaatctaaacctaattctaagaaggaagaaagagaaaagaaacaagaaaagctatttatagctaattcttcttcttcgtcatctcctaaagc

SEQ ID NO: 29710 - DNA, 96 bp, Fusarium azukicola
  misc_feature: 549
aacaagaaaagctatttatagctaattcttcttcttcgtcatctcctaaagccgaggaagacctaatttccctttctgagaccccagaagaaatgg

SEQ ID NO: 29711 - DNA, 96 bp, Fusarium azukicola
  misc_feature: 549
actctctccttataaccctttcctactcttctcctactctcttaccttaactccccctctcttctaccccttctcttttttttacttacttcttct

SEQ ID NO: 29712 - DNA, 96 bp, Fusarium azukicola
  misc_feature: 548
taagagagagaggggaggaagggaggaagggagaagagaaagaagataggtagttagaagagaaagaaagaaggggaatagaaaaagaaaagaaga

SEQ ID NO: 29713 - DNA, 96 bp, Fusarium azukicola
  misc_feature: 547
ttatctttattctttctctctaactctaaatatcttactctcccttcttctttattctatcttacttattcttatataccctatactcctctattt

SEQ ID NO: 29714 - DNA, 96 bp, Fusarium azukicola
  misc_feature: 547
tattattattattattatataatattgccttttcattattataggggctttctttaaagtaaggaatctcattaaaagaggggttatttccttcga

SEQ ID NO: 29715 - DNA, 96 bp, Fusarium azukicola
  misc_feature: 547
tccttattactaggttttttatttatattatttttagttaattttcctagtttgcagttttcacagtttttaacttgatataggtcctcactagta

SEQ ID NO: 29716 - DNA, 96 bp, Fusarium azukicola
  misc_feature: 547
tattattttgttgaggaattaaggaattatatacctctaaattatcacttatatcaaaatccatttcatctggggtctcagaaagggaaattaggt

SEQ ID NO: 29717 - DNA, 96 bp, Fusarium azukicola
  misc_feature: 547
agaagggttttaaggtttattaagtagagaagaaggagggagaataaggtaagtaagtaagttaggttaaagaagagaagaaagggttagaaagta

SEQ ID NO: 29718 - DNA, 96 bp, Fusarium azukicola
  misc_feature: 547
atctatccctaatataacttatttcctttataaagggtttttattatattttaatacttttccctatataatcttagattttcccttataatatta

SEQ ID NO: 29719 - DNA, 96 bp, Fusarium azukicola
  misc_feature: 547
ataaaaataaggtagtttagagtttagtaaaaagagaggttatagaaaagaagaagaagagaaaggaaaagaaggagggaaagagagggttagggt

SEQ ID NO: 29720 - DNA, 96 bp, Fusarium azukicola
  misc_feature: 546
taagggtattattctaattggttaaaaaggttcctatagacctttatgactgccgtcatctatgcatcaagtataataactgccgattggctaaaa

SEQ ID NO: 29721 - DNA, 96 bp, Fusarium azukicola
  misc_feature: 546
tagtttaatagagagattaaagtagggtatagggtaaagtaaaagagagaagagagtatagggtaaagtaaaagagagaagagagtatagggtaaa

SEQ ID NO: 29722 - DNA, 96 bp, Fusarium azukicola
  misc_feature: 546
ttagctataaatagcttttcttgtttcttttctctttcttccttcttagaattaggtttagattcccttttcttagaagtcttatgcaccttattg

SEQ ID NO: 29723 - DNA, 96 bp, Fusarium azukicola
  misc_feature: 546
tattattagaggaaaaaattaaacctctattattattatatatatcttagtaaaaacccctttattatagacctaatattataagggaaaatctaa

SEQ ID NO: 29724 - DNA, 96 bp, Fusarium azukicola
  misc_feature: 546
tcttatataccctatactcctctattttaccttcttttctttttttatcttttactcttctctttctccctttctttcctttatctttcttcactc

SEQ ID NO: 29725 - DNA, 96 bp, Fusarium azukicola
  misc_feature: 546
tcttagaagtcttatgcaccttattggcttcctgagttttccagttttttggagccttattagggtgcaaaaaatagcaatctgggtctttatgac

SEQ ID NO: 29726 - DNA, 96 bp, Fusarium azukicola
  misc_feature: 546
tcctttatctttcttcactcttcttcttaaccctaaccctctctttccctccttcttttcctttctcttcttcttcttttctataacctctctttt

SEQ ID NO: 29727 - DNA, 96 bp, Fusarium azukicola
  misc_feature: 546
tattttactttaccctatactctcttctctcttttactttaccctatactctcttctctcttttactttaccctatactctcttctctcttttact

SEQ ID NO: 29728 - DNA, 96 bp, Fusarium azukicola
  misc_feature: 546
gaattaaggaattatatacctctaaattatcacttatatcaaaatccatttcatctggggtctcagaaagggaaattaggtcttcctcggctttag

SEQ ID NO: 29729 - DNA, 96 bp, Fusarium azukicola
  misc_feature: 546
attccctcctaccttctctaaactacgttctattactttctattactttcttacttttctttcttttactcttccccttctccttttatcttcttc

SEQ ID NO: 29730 - DNA, 96 bp, Fusarium azukicola
  misc_feature: 545
tttaatagagagattaaagtagggtatagggtaaagtaaaagagagaagagagtatagggtaaagtaaaagagagaagagagtatagggtaaagta

SEQ ID NO: 29731 - DNA, 96 bp, Fusarium azukicola
  misc_feature: 545
tctcttttcactccttcttccttcttcctcatcttatctttattctttctctctaactctaaatatcttactctcccttcttctttattctatctt

SEQ ID NO: 29732 - DNA, 96 bp, Fusarium azukicola
  misc_feature: 544
aataactaggaagaaaagtaataaagagataatatctagcttctaagagagacttatagaagatagatagataaaagtgggtcacaataaagagtc

SEQ ID NO: 29733 - DNA, 96 bp, Fusarium azukicola
  misc_feature: 544
ctttctaaccctttcttctcttctttaacctaacttacttacttaccttattctccctccttcttctctacttaataaaccttaaaacccttctct

SEQ ID NO: 29734 - DNA, 96 bp, Fusarium azukicola
  misc_feature: 544
aaagagaagaagataaaaggagaaggggaagagtaaaagaaagaaaagtaagaaagtaatagaaagtaatagaacgtagtttagagaaggtaggag

SEQ ID NO: 29735 - DNA, 96 bp, Fusarium azukicola
  misc_feature: 544
ccttattactaggttttttatttatattatttttagttaattttcctagtttgcagttttcacagtttttaacttgatataggtcctcactagtat

SEQ ID NO: 29736 - DNA, 96 bp, Fusarium azukicola
  misc_feature: 544
aaatactactcttttaccttaacttacttttttctcttctttctccttcccctttctcttcttttactactactttcttactctcttactaccttt

SEQ ID NO: 29737 - DNA, 96 bp, Fusarium azukicola
  misc_feature: 543
tctgtttattattattattattatataatattgccttttcattattataggggctttctttaaagtaaggaatctcattaaaagaggggttatttc

SEQ ID NO: 29738 - DNA, 96 bp, Fusarium azukicola
  misc_feature: 543
ctctttccctccttcttttcctttctcttcttcttcttttctataacctctctttttactaaactctaaactaccttatttttatctttcttttta

SEQ ID NO: 29739 - DNA, 96 bp, Fusarium azukicola
  misc_feature: 543
ccttcttttctttttttatcttttactcttctctttctccctttctttcctttatctttcttcactcttcttcttaaccctaaccctctctttccc

SEQ ID NO: 29740 - DNA, 96 bp, Fusarium azukicola
  misc_feature: 543
ggagtatagggtatataagaataagtaagatagaataaagaagaagggagagtaagatatttagagttagagagaaagaataaagataagatgagg

SEQ ID NO: 29741 - DNA, 96 bp, Fusarium azukicola
  misc_feature: 543
cctctttactcctcttcttctcttctccccttcctctcctctcttcctctcctctatacttacttactaaactctcctccctcttcaataaccttc

SEQ ID NO: 29742 - DNA, 96 bp, Fusarium azukicola
  misc_feature: 543
attattattatataatattgccttttcattattataggggctttctttaaagtaaggaatctcattaaaagaggggttatttccttcgagaaagct

SEQ ID NO: 29743 - DNA, 96 bp, Fusarium azukicola
  misc_feature: 542
ttctcttctccccttcctctcctctcttcctctcctctatacttacttactaaactctcctccctcttcaataaccttccttttattcttactata

SEQ ID NO: 29744 - DNA, 96 bp, Fusarium azukicola
  misc_feature: 542
tctctttttcttcttcttttctttttctattccccttctttctttctcttctaactacctatcttctttctcttctcccttcctcccttcctcccc

SEQ ID NO: 29745 - DNA, 96 bp, Fusarium azukicola
  misc_feature: 542
tatattagtttaatagagagattaaagtagggtatagggtaaagtaaaagagagaagagagtatagggtaaagtaaaagagagaagagagtatagg

SEQ ID NO: 29746 - DNA, 96 bp, Fusarium azukicola
  misc_feature: 542
ccccttcctctcctctcttcctctcctctatacttacttactaaactctcctccctcttcaataaccttccttttattcttactataacccccttc

SEQ ID NO: 29747 - DNA, 96 bp, Fusarium azukicola
  misc_feature: 541
ttcttcttcttttctttttctattccccttctttctttctcttctaactacctatcttctttctcttctcccttcctcccttcctcccctctctct

SEQ ID NO: 29748 - DNA, 96 bp, Fusarium azukicola
  misc_feature: 541
tctttttcttcttcttttctttttctattccccttctttctttctcttctaactacctatcttctttctcttctcccttcctcccttcctcccctc

SEQ ID NO: 29749 - DNA, 96 bp, Fusarium azukicola
  misc_feature: 541
ataaagaagaagggagagtaagatatttagagttagagagaaagaataaagataagatgaggaagaaggaagaaggagtgaaaagagagagaggga

SEQ ID NO: 29750 - DNA, 96 bp, Fusarium azukicola
  misc_feature: 541
ccttccctatataaagaaacaactaggatatttaaataaggtaaataaacctgttttttctactaataaagataatataactaattttatatatga

SEQ ID NO: 29751 - DNA, 96 bp, Fusarium azukicola
  misc_feature: 541
gaagaagaattagctataaatagcttttcttatttcttttctctttcttccttcttagaattaggtttagattcctttttcttagaagtcttatat

SEQ ID NO: 29752 - DNA, 96 bp, Fusarium azukicola
  misc_feature: 541
aataaagaagaagggagagtaagatatttagagttagagagaaagaataaagataagatgaggaagaaggaagaaggagtgaaaagagagagaggg

SEQ ID NO: 29753 - DNA, 96 bp, Fusarium azukicola
  misc_feature: 540
tttctttcctttatctttcttcactcttcttcttaaccctaaccctctctttccctccttcttttcctttctcttcttcttcttttctataacctc

SEQ ID NO: 29754 - DNA, 96 bp, Fusarium azukicola
  misc_feature: 540
tcataaagacccagattgctattttttgcaccctaataaggctccaaaaaactggaaaactcaggaagccaataaggtgcataagacttctaagaa

SEQ ID NO: 29755 - DNA, 96 bp, Fusarium azukicola
  misc_feature: 540
gtctgagtctgtatagcctctaattatattgtgtatatctgaataatcacagttatatatagtagataaatttggatagctatttaaatacttcca

SEQ ID NO: 29756 - DNA, 96 bp, Fusarium azukicola
  misc_feature: 540
tctccctctctctcttttcactccttcttccttcttcctcatcttatctttattctttctctctaactctaaatatcttactctcccttcttcttt

SEQ ID NO: 29757 - DNA, 96 bp, Fusarium azukicola
  misc_feature: 540
taagatatatagagtagttaaagagaaaataggtatagaagtaaaggtagtaagagagtaagaaagtagtagtaaaagaagagaaaggggaaggag

SEQ ID NO: 29758 - DNA, 96 bp, Fusarium azukicola
  misc_feature: 540
cttttcttttattcttccttctctctcctccttctttttacttttcctcctctctttctctcccctccttctctctcctcttttaaccccctctat

SEQ ID NO: 29759 - DNA, 96 bp, Fusarium azukicola
  misc_feature: 540
ctcgaaggaaataacccctcttttaatgagattccttactttaaagaaagcccctataataatgaaaaggcaatattatataataataataataat

SEQ ID NO: 29760 - DNA, 96 bp, Fusarium azukicola
  misc_feature: 539
aagagaagggttttaaggtttattaagtagagaagaaggagggagaataaggtaagtaagtaagttaggttaaagaagagaagaaagggttagaaa

SEQ ID NO: 29761 - DNA, 96 bp, Fusarium azukicola
  misc_feature: 539
agaggtgattggttattaagatatatagagtagttaaagagaaaataggtatagaagtaaaggtagtaagagagtaagaaagtagtagtaaaagaa

SEQ ID NO: 29762 - DNA, 96 bp, Fusarium azukicola
  misc_feature: 539
gaagagaagggttttaaggtttattaagtagagaagaaggagggagaataaggtaagtaagtaagttaggttaaagaagagaagaaagggttagaa

SEQ ID NO: 29763 - DNA, 96 bp, Fusarium azukicola
  misc_feature: 539
tcttctcttctccccttcctctcctctcttcctctcctctatacttacttactaaactctcctccctcttcaataaccttccttttattcttacta

SEQ ID NO: 29764 - DNA, 96 bp, Fusarium azukicola
  misc_feature: 539
ctccctttctttcctttatctttcttcactcttcttcttaaccctaaccctctctttccctccttcttttcctttctcttcttcttcttttctata

SEQ ID NO: 29765 - DNA, 96 bp, Fusarium azukicola
  misc_feature: 539
tagtaagtattaggagagaaaggagtatagagtaagttaaggtaaaaagaaagataaaaataaggtagtttagagtttagtaaaaagagaggttat

SEQ ID NO: 29766 - DNA, 96 bp, Fusarium azukicola
  misc_feature: 539
actcttttaccttaacttacttttttctcttctttctccttcccctttctcttcttttactactactttcttactctcttactacctttacttcta

SEQ ID NO: 29767 - DNA, 96 bp, Fusarium azukicola
  misc_feature: 539
agaagaattagctataaatagcttttcttatttcttttctctttcttccttcttagaattaggtttagattcctttttcttagaagtcttatatac

SEQ ID NO: 29768 - DNA, 96 bp, Fusarium azukicola
  misc_feature: 539
gataaaaataaggtagtttagagtttagtaaaaagagaggttatagaaaagaagaagaagagaaaggaaaagaaggagggaaagagagggttaggg

SEQ ID NO: 29769 - DNA, 96 bp, Fusarium azukicola
  misc_feature: 539
ctctccctctctctcttttcactccttcttccttcttcctcatcttatctttattctttctctctaactctaaatatcttactctcccttcttctt

SEQ ID NO: 29770 - DNA, 96 bp, Fusarium azukicola
  misc_feature: 539
ctctcccctctccctctctctcttttcactccttcttccttcttcctcatcttatctttattctttctctctaactctaaatatcttactctccct

SEQ ID NO: 29771 - DNA, 96 bp, Fusarium azukicola
  misc_feature: 539
actccttcttccttcttcctcatcttatctttattctttctctctaactctaaatatcttactctcccttcttctttattctatcttacttattct

SEQ ID NO: 29772 - DNA, 96 bp, Fusarium azukicola
  misc_feature: 538
ttttctttttctattccccttctttctttctcttctaactacctatcttctttctcttctcccttcctcccttcctcccctctctctcttatattc

SEQ ID NO: 29773 - DNA, 96 bp, Fusarium azukicola
  misc_feature: 538
ttcttatataccctatactcctctattttaccttcttttctttttttatcttttactcttctctttctccctttctttcctttatctttcttcact

SEQ ID NO: 29774 - DNA, 96 bp, Fusarium azukicola
  misc_feature: 538
atatataaataaaataataaggaaatataataaataagaaataggaacttctaaagtacctattaaatttatagaaagactcttaaaatctaaaga

SEQ ID NO: 29775 - DNA, 96 bp, Fusarium azukicola
  misc_feature: 538
gatagaataaagaagaagggagagtaagatatttagagttagagagaaagaataaagataagatgaggaagaaggaagaaggagtgaaaagagaga

SEQ ID NO: 29776 - DNA, 96 bp, Fusarium azukicola
  misc_feature: 538
tattaagatatatagagtagttaaagagaaaataggtatagaagtaaaggtagtaagagagtaagaaagtagtagtaaaagaagagaaaggggaag

SEQ ID NO: 29777 - DNA, 96 bp, Fusarium azukicola
  misc_feature: 538
gaagaagaagaattagctataaatagcttttcttatttcttttctctttcttccttcttagaattaggtttagattcctttttcttagaagtctta

SEQ ID NO: 29778 - DNA, 96 bp, Fusarium azukicola
  misc_feature: 538
ccaaaaggaaataggttctttaatatttctagctataaaaactagacctgatatagcttatgctgtagttatttgttctagatttgcctctaaacc

SEQ ID NO: 29779 - DNA, 96 bp, Fusarium azukicola
  misc_feature: 538
cttactctctccttataaccctttcctactcttctcctactctcttaccttaactccccctctcttctaccccttctcttttttttacttacttct

SEQ ID NO: 29780 - DNA, 96 bp, Fusarium azukicola
  misc_feature: 537
aggaaataacccctcttttaatgagattccttactttaaagaaagcccttataataatgaaaaggcaatattatataataataataataataaaca

SEQ ID NO: 29781 - DNA, 96 bp, Fusarium azukicola
  misc_feature: 537
tccctcctaccttctctaaactacgttctattactttctattactttcttacttttctttcttttactcttccccttctccttttatcttcttctc

SEQ ID NO: 29782 - DNA, 96 bp, Fusarium azukicola
  misc_feature: 537
tatttttatctttctttttaccttaacttactctatactcctttctctcctaatacttactatactcctccttaacttaacttctctccttaaact

SEQ ID NO: 29783 - DNA, 96 bp, Fusarium azukicola
  misc_feature: 537
atatgttaatgttctatattatattaccaactatagtgatatatccctataaaccacatattatattatagaatttttactctatttttaggtata

SEQ ID NO: 29784 - DNA, 96 bp, Fusarium azukicola
  misc_feature: 537
tagagtagttaaagagaaaataggtatagaagtaaaggtagtaagagagtaagaaagtagtagtaaaagaagagaaaggggaaggagaaagaagag

SEQ ID NO: 29785 - DNA, 96 bp, Fusarium azukicola
  misc_feature: 537
ggtagtttagagtttagtaaaaagagaggttatagaaaagaagaagaagagaaaggaaaagaaggagggaaagagagggttagggttaagaagaag

SEQ ID NO: 29786 - DNA, 96 bp, Fusarium azukicola
  misc_feature: 537
ggagaggataaggagtgaaaagagagagagggagaggggagaggagaggataaggagtgaaaagagagagagggagaggggagaggagaggataag

SEQ ID NO: 29787 - DNA, 96 bp, Fusarium azukicola
  misc_feature: 537
aaattagttatattatctttattagtagaaaaaacaggtttatttaccttatttaaatatcctagttgtttctttatatagggaaggtttcttatc

SEQ ID NO: 29788 - DNA, 96 bp, Fusarium azukicola
  misc_feature: 537
gaggtgattggttattaagatatatagagtagttaaagagaaaataggtatagaagtaaaggtagtaagagagtaagaaagtagtagtaaaagaag

SEQ ID NO: 29789 - DNA, 96 bp, Fusarium azukicola
  misc_feature: 537
ctcttctcccctttttccctcccctcttcctctactttctttctcttctcccctcctcttcttaactacactttctctctacctcacttttccctc

SEQ ID NO: 29790 - DNA, 96 bp, Fusarium azukicola
  misc_feature: 537
cttctttcctttcccctattaaatactactcttttaccttaacttacttttttctcttctttctccttcccctttctcttcttttactactacttt

SEQ ID NO: 29791 - DNA, 96 bp, Fusarium azukicola
  misc_feature: 536
taaaaggaaggttattgaagagggaggagagtttagtaagtaagtatagaggagaggaagagaggagaggaaggggagaagagaagaagaggagta

SEQ ID NO: 29792 - DNA, 96 bp, Fusarium azukicola
  misc_feature: 536
gtatagtaagtattaggagagaaaggagtatagagtaagttaaggtaaaaagaaagataaaaataaggtagtttagagtttagtaaaaagagaggt

SEQ ID NO: 29793 - DNA, 96 bp, Fusarium azukicola
  misc_feature: 536
aaaagaaacaagaaaagctatttatagctaattcttcttcttcgtcatctcctaaagccgaggaagacctaatttccctttctgagaccccagaag

SEQ ID NO: 29794 - DNA, 96 bp, Fusarium azukicola
  misc_feature: 536
caagaaaagctatttatagctaattcttcttcttcgtcatctcctaaagccgaggaagacctaatttccctttctgagaccccagaagaaatggat

SEQ ID NO: 29795 - DNA, 96 bp, Fusarium azukicola
  misc_feature: 535
ctctccctctttactcctcttcttctcttctccccttcctctcctctcttcctctcctctatacttacttactaaactctcctccctcttcaataa

SEQ ID NO: 29796 - DNA, 96 bp, Fusarium azukicola
  misc_feature: 535
ttaatagagagattaaagtagggtatagggtaaagtaaaagagagaagagagtatagggtaaagtaaaagagagaagagagtatagggtaaagtaa

SEQ ID NO: 29797 - DNA, 96 bp, Fusarium azukicola
  misc_feature: 535
tcttcttcttttctttttctattccccttctttctttctcttctaactacctatcttctttctcttctcccttcctcccttcctcccctctctctc

SEQ ID NO: 29798 - DNA, 96 bp, Fusarium azukicola
  misc_feature: 535
tcccctctccctctctctcttttcactccttcttccttcttcctcatcttatctttattctttctctctaactctaaatatcttactctcccttct

SEQ ID NO: 29799 - DNA, 96 bp, Fusarium azukicola
  misc_feature: 535
agtctgagtctgtatagcctctaattatattgtgtatatctgaataatcacagttatatatagtagataaatttggatagctatttaaatacttcc

SEQ ID NO: 29800 - DNA, 96 bp, Fusarium azukicola
  misc_feature: 535
attcttttcttttattcttccttctctctcctccttctttttacttttcctcctctctttctctcccctccttctctctcctcttttaaccccctc

SEQ ID NO: 29801 - DNA, 96 bp, Fusarium azukicola
  misc_feature: 535
ctccccctctcttctaccccttctcttttttttacttacttcttctttcctttcccctattaaatactactcttttaccttaacttacttttttct

SEQ ID NO: 29802 - DNA, 96 bp, Fusarium azukicola
  misc_feature: 534
ttcctctcctctcttcctctcctctatacttacttactaaactctcctccctcttcaataaccttccttttattcttactataacccccttctttt

SEQ ID NO: 29803 - DNA, 96 bp, Fusarium azukicola
  misc_feature: 534
aggagaggataaggagtgaaaagagagagagggagaggggagaggagaggataaggagtgaaaagagagagagggagaggggagaggagaggataa

SEQ ID NO: 29804 - DNA, 96 bp, Fusarium azukicola
  misc_feature: 534
tctctccctctttactcctcttcttctcttctccccttcctctcctctcttcctctcctctatacttacttactaaactctcctccctcttcaata

SEQ ID NO: 29805 - DNA, 96 bp, Fusarium azukicola
  misc_feature: 534
agaggataaggagtgaaaagagagagagggagaggggagaggagaggataaggagtgaaaagagagagagggagaggggagaggagaggataagga

SEQ ID NO: 29806 - DNA, 96 bp, Fusarium azukicola
  misc_feature: 534
gggaatctaaacctaattctaagaaggaagaaagagaaaagaaacaagaaaagctatttatagctaattcttcttcttcgtcatctcctaaagccg

SEQ ID NO: 29807 - DNA, 96 bp, Fusarium azukicola
  misc_feature: 534
cttttctttttctattccccttctttctttctcttctaactacctatcttctttctcttctcccttcctcccttcctcccctctctctcttatatt

SEQ ID NO: 29808 - DNA, 96 bp, Fusarium azukicola
  misc_feature: 534
aaaggagaaggggaagagtaaaagaaagaaaagtaagaaagtaatagaaagtaatagaacgtagtttagagaaggtaggagggaattagaggtaag

SEQ ID NO: 29809 - DNA, 96 bp, Fusarium azukicola
  misc_feature: 534
aattccctcctaccttctctaaactacgttctattactttctattactttcttacttttctttcttttactcttccccttctccttttatcttctt

SEQ ID NO: 29810 - DNA, 96 bp, Fusarium azukicola
  misc_feature: 533
tttcttcttcttttctttttctattccccttctttctttctcttctaactacctatcttctttctcttctcccttcctcccttcctcccctctctc

SEQ ID NO: 29811 - DNA, 96 bp, Fusarium azukicola
  misc_feature: 533
ttataataaaggtcaagggaagtaattaaagtaataattaggggtaataattaaattaagggttagggttaagtagttatagtaaaggttaggggt

SEQ ID NO: 29812 - DNA, 96 bp, Fusarium azukicola
  misc_feature: 533
gaaaataggtatagaagtaaaggtagtaagagagtaagaaagtagtagtaaaagaagagaaaggggaaggagaaagaagagaaaaaagtaagttaa

SEQ ID NO: 29813 - DNA, 96 bp, Fusarium azukicola
  misc_feature: 533
tgcttccacagcctctccccaaaggtatttaggtaggttagaagtaaataataaagctctaaccttttctaatatagtcctatttatcctttctac

SEQ ID NO: 29814 - DNA, 96 bp, Fusarium azukicola
  misc_feature: 533
tattaggagagaaaggagtatagagtaagttaaggtaaaaagaaagataaaaataaggtagtttagagtttagtaaaaagagaggttatagaaaag

SEQ ID NO: 29815 - DNA, 96 bp, Fusarium azukicola
  misc_feature: 533
gaagccaataaggtgcataagacttctaagaaaaaggaatctaaacctaattctaagaaggaagaaagagaaaagaaacaagaaaagctatttata

SEQ ID NO: 29816 - DNA, 96 bp, Fusarium azukicola
  misc_feature: 533
ctcccctctccctctctctcttttcactccttcttccttcttcctcatcttatctttattctttctctctaactctaaatatcttactctcccttc

SEQ ID NO: 29817 - DNA, 96 bp, Fusarium azukicola
  misc_feature: 533
agtatagtaagtattaggagagaaaggagtatagagtaagttaaggtaaaaagaaagataaaaataaggtagtttagagtttagtaaaaagagagg

SEQ ID NO: 29818 - DNA, 96 bp, Fusarium azukicola
  misc_feature: 533
accctttcctactcttctcctactctcttaccttaactccccctctcttctaccccttctcttttttttacttacttcttctttcctttcccctat

SEQ ID NO: 29819 - DNA, 96 bp, Fusarium azukicola
  misc_feature: 532
tttttcttcttcttttctttttctattccccttctttctttctcttctaactacctatcttctttctcttctcccttcctcccttcctcccctctc

SEQ ID NO: 29820 - DNA, 96 bp, Fusarium azukicola
  misc_feature: 532
aagccttggaaaaagaagaaaactgccttaaaatgcagttattgcaaactgccaggtcataaagacccagattgctattttttgcaccctaataaa

SEQ ID NO: 29821 - DNA, 96 bp, Fusarium azukicola
  misc_feature: 532
ttctctttttcttcttcttttctttttctattccccttctttctttctcttctaactacctatcttctttctcttctcccttcctcccttcctccc

SEQ ID NO: 29822 - DNA, 96 bp, Fusarium azukicola
  misc_feature: 532
tatattattttgttgaggaattaaggaattatatacctctaaattatcacttatatcaaaatccatttcatctggggtctcagaaagggaaattag

SEQ ID NO: 29823 - DNA, 96 bp, Fusarium azukicola
  misc_feature: 532
ataaccctttcctactcttctcctactctcttaccttaactccccctctcttctaccccttctcttttttttacttacttcttctttcctttcccc

SEQ ID NO: 29824 - DNA, 96 bp, Fusarium azukicola
  misc_feature: 532
aaagaaaagaataagagggaaaggaagagaagaagattgagagaaagaggagggaagagaaggaaggagaaagaggaaggggagttaaaagtgtgt

SEQ ID NO: 29825 - DNA, 96 bp, Fusarium azukicola
  misc_feature: 531
ttatattagtttaatagagagattaaagtagggtatagggtaaagtaaaagagagaagagagtatagggtaaagtaaaagagagaagagagtatag

SEQ ID NO: 29826 - DNA, 96 bp, Fusarium azukicola
  misc_feature: 531
taaatatactagtgaggacctatatcaagttaaaaactgtgaaaactgcaaactaggaaaattaactaaaaataatataaataaaaaacctagtaa

SEQ ID NO: 29827 - DNA, 96 bp, Fusarium azukicola
  misc_feature: 531
tccctctttactcctcttcttctcttctccccttcctctcctctcttcctctcctctatacttacttactaaactctcctccctcttcaataacct

SEQ ID NO: 29828 - DNA, 96 bp, Fusarium azukicola
  misc_feature: 531
caatatgcctagtagcacctgtatcatatataaaattagttatattatctttattagtagaaaaaacaggtttatttaccttatttaaatatccta

SEQ ID NO: 29829 - DNA, 96 bp, Fusarium azukicola
  misc_feature: 531
atagaataaagaagaagggagagtaagatatttagagttagagagaaagaataaagataagatgaggaagaaggaagaaggagtgaaaagagagag

SEQ ID NO: 29830 - DNA, 96 bp, Fusarium azukicola
  misc_feature: 530
tctcttctccccttcctctcctctcttcctctcctctatacttacttactaaactctcctccctcttcaataaccttccttttattcttactataa

SEQ ID NO: 29831 - DNA, 96 bp, Fusarium azukicola
  misc_feature: 530
gaggaaaaaattaaacctctattattattatatatatcttagtaaaaacccctttattatagacctaatattataagggaaaatctaagattatat

SEQ ID NO: 29832 - DNA, 96 bp, Fusarium azukicola
  misc_feature: 530
ctttcctttcccctattaaatactactcttttaccttaacttacttttttctcttctttctccttcccctttctcttcttttactactactttctt

SEQ ID NO: 29833 - DNA, 96 bp, Fusarium azukicola
  misc_feature: 530
ctcactttttatcttaccttctctttactttttacctactctctttactattacttcttcttattcttaaccctctcttgccccccttttaactct

SEQ ID NO: 29834 - DNA, 96 bp, Fusarium azukicola
  misc_feature: 530
ctacccctcactttttatcttaccttctctttactttttacctactctctttactattacttcttcttattcttaaccctctcttgcccccctttt

SEQ ID NO: 29835 - DNA, 96 bp, Fusarium azukicola
  misc_feature: 530
cccctctccctctctctcttttcactccttcttccttcttcctcatcttatctttattctttctctctaactctaaatatcttactctcccttctt

SEQ ID NO: 29836 - DNA, 96 bp, Fusarium azukicola
  misc_feature: 530
agggcaaaaaagactagactacagaaaagaggggttatgatagtagaggaaggaagacaagtaattgatcaaatggatatagatgcgcaggtaatg

SEQ ID NO: 29837 - DNA, 96 bp, Fusarium azukicola
  misc_feature: 529
ttttcttcttcttttctttttctattccccttctttctttctcttctaactacctatcttctttctcttctcccttcctcccttcctcccctctct

SEQ ID NO: 29838 - DNA, 96 bp, Fusarium azukicola
  misc_feature: 529
agtattaggagagaaaggagtatagagtaagttaaggtaaaaagaaagataaaaataaggtagtttagagtttagtaaaaagagaggttatagaaa

SEQ ID NO: 29839 - DNA, 96 bp, Fusarium azukicola
  misc_feature: 529
gtagtttagagtttagtaaaaagagaggttatagaaaagaagaagaagagaaaggaaaagaaggagggaaagagagggttagggttaagaagaaga

SEQ ID NO: 29840 - DNA, 96 bp, Fusarium azukicola
  misc_feature: 529
tagaataaagaagaagggagagtaagatatttagagttagagagaaagaataaagataagatgaggaagaaggaagaaggagtgaaaagagagaga

SEQ ID NO: 29841 - DNA, 96 bp, Fusarium azukicola
  misc_feature: 529
cttcttttctttttttatcttttactcttctctttctccctttctttcctttatctttcttcactcttcttcttaaccctaaccctctctttccct

SEQ ID NO: 29842 - DNA, 96 bp, Fusarium azukicola
  misc_feature: 528
agggtattattctaattggttaaaaaggttcctatagacctttatgactgccgtcatctatgcatcaagtataataactgccgattggctaaaaaa

SEQ ID NO: 29843 - DNA, 96 bp, Fusarium azukicola
  misc_feature: 528
cttctctccctctttactcctcttcttctcttctccccttcctctcctctcttcctctcctctatacttacttactaaactctcctccctcttcaa

SEQ ID NO: 29844 - DNA, 96 bp, Fusarium azukicola
  misc_feature: 528
ttagtttaatagagagattaaagtagggtatagggtaaagtaaaagagagaagagagtatagggtaaagtaaaagagagaagagagtatagggtaa

SEQ ID NO: 29845 - DNA, 96 bp, Fusarium azukicola
  misc_feature: 528
tcttttctataacctctctttttactaaactctaaactaccttatttttatctttctttttaccttaacttactctatactcctttctctcctaat

SEQ ID NO: 29846 - DNA, 96 bp, Fusarium azukicola
  misc_feature: 528
actttctaaccctttcttctcttctttaacctaacttacttacttaccttattctccctccttcttctctacttaataaaccttaaaacccttctc

SEQ ID NO: 29847 - DNA, 96 bp, Fusarium azukicola
  misc_feature: 528
aaggggggcaagagagggttaagaataagaagaagtaatagtaaagagagtaggtaaaaagtaaagagaaggtaagataaaaagtgaggggtaggg

SEQ ID NO: 29848 - DNA, 96 bp, Fusarium azukicola
  misc_feature: 527
tttgttaatgttctatattatattaccaactatagtgatatatccctataaaccacatattatattatagaatttttactctatttttaggtatat

SEQ ID NO: 29849 - DNA, 96 bp, Fusarium azukicola
  misc_feature: 527
gaaataacccctcttttaatgagattccttactttaaagaaagcccttataataatgaaaaggcaatattatataataataataataataaacaga

SEQ ID NO: 29850 - DNA, 96 bp, Fusarium azukicola
  misc_feature: 527
tatacctaaaaatagagtaaaaattctataatataatatgtggtttatagggatatatcactatagttggtaatataatatagaacattaacaatt

SEQ ID NO: 29851 - DNA, 96 bp, Fusarium azukicola
  misc_feature: 527
agaagaagagtgaagaaagataaaggaaagaaagggagaaagagaagagtaaaagataaaaaaagaaaagaaggtaaaatagaggagtatagggta

SEQ ID NO: 29852 - DNA, 96 bp, Fusarium azukicola
  misc_feature: 527
gaggataaggagtgaaaagagagagagggagaggggagaggagaggataaggagtgaaaagagagagagggagaggggagaggagaggataaggag

SEQ ID NO: 29853 - DNA, 96 bp, Fusarium azukicola
  misc_feature: 527
aagaagaaaaagagaaatgaaggaggggaagagtaaagaaaaagagaagaagataaaaggagaaggggaagagtaaaagaaagaaaagtaagaaag

SEQ ID NO: 29854 - DNA, 96 bp, Fusarium azukicola
  misc_feature: 527
aagtaaggaaggttaagaaaggagagaagtaaggaaggttaagaaaggagagaagtaaggaaggttaagaaaggagagaagtaaggaaggttaaag

SEQ ID NO: 29855 - DNA, 96 bp, Fusarium azukicola
  misc_feature: 527
aggaaggaagagaagggaatataagagagagaggggaggaagggaggaagggagaagagaaagaagataggtagttagaagagaaagaaagaaggg

SEQ ID NO: 29856 - DNA, 96 bp, Fusarium azukicola
  misc_feature: 526
aaaaaaagggggagaaaaaaaaagaagaaagagagagagaggaggtagagtaattgagaagttatagtaagtaaagataaaagagtaaaaacggaa

SEQ ID NO: 29857 - DNA, 96 bp, Fusarium azukicola
  misc_feature: 526
tccccttctttctttctcttctaactacctatcttctttctcttctcccttcctcccttcctcccctctctctcttatattcccttctcttccttc

SEQ ID NO: 29858 - DNA, 96 bp, Fusarium azukicola
  misc_feature: 526
attagtttaatagagagattaaagtagggtatagggtaaagtaaaagagagaagagagtatagggtaaagtaaaagagagaagagagtatagggta

SEQ ID NO: 29859 - DNA, 96 bp, Fusarium azukicola
  misc_feature: 526
cttcttaaccctaaccctctctttccctccttcttttcctttctcttcttcttcttttctataacctctctttttactaaactctaaactacctta

SEQ ID NO: 29860 - DNA, 96 bp, Fusarium azukicola
  misc_feature: 526
ccctctccctctctctcttttcactccttcttccttcttcctcatcttatctttattctttctctctaactctaaatatcttactctcccttcttc

SEQ ID NO: 29861 - DNA, 96 bp, Fusarium azukicola
  misc_feature: 526
aaataaggtagtttagagtttagtaaaaagagaggttatagaaaagaagaagaagagaaaggaaaagaaggagggaaagagagggttagggttaag

SEQ ID NO: 29862 - DNA, 96 bp, Fusarium azukicola
  misc_feature: 526
ctcttacctctaattccctcctaccttctctaaactacgttctattactttctattactttcttacttttctttcttttactcttccccttctcct

SEQ ID NO: 29863 - DNA, 96 bp, Fusarium azukicola
  misc_feature: 526
caggaagccaataaggtgcataagacttctaagaaaaaggaatctaaacctaattctaagaaggaagaaagagaaaagaaacaagaaaagctattt

SEQ ID NO: 29864 - DNA, 96 bp, Fusarium azukicola
  misc_feature: 526
agaaggggtagaagagagggggagttaaggtaagagagtaggagaagagtaggaaagggttataaggagagagtaaggaaaagaaaaaaaagtagt

SEQ ID NO: 29865 - DNA, 96 bp, Fusarium azukicola
  misc_feature: 525
tttccctccttcttttcctttctcttcttcttcttttctataacctctctttttactaaactctaaactaccttatttttatctttctttttacct

SEQ ID NO: 29866 - DNA, 96 bp, Fusarium azukicola
  misc_feature: 525
gagagggggagttaaggtaagagagtaggagaagagtaggaaagggttataaggagagagtaaggaaaagaaaaaaaagtagtgaggttaagaaag

SEQ ID NO: 29867 - DNA, 96 bp, Fusarium azukicola
  misc_feature: 525
cctttatctttcttcactcttcttcttaaccctaaccctctctttccctccttcttttcctttctcttcttcttcttttctataacctctcttttt

SEQ ID NO: 29868 - DNA, 96 bp, Fusarium azukicola
  misc_feature: 524
tttctctttttcttcttcttttctttttctattccccttctttctttctcttctaactacctatcttctttctcttctcccttcctcccttcctcc

SEQ ID NO: 29869 - DNA, 96 bp, Fusarium azukicola
  misc_feature: 524
gagggaaagagagggttagggttaagaagaagagtgaagaaagataaaggaaagaaagggagaaagagaagagtaaaagataaaaaaagaaaagaa

SEQ ID NO: 29870 - DNA, 96 bp, Fusarium azukicola
  misc_feature: 524
gaaaagaataagagggaaaggaagagaagaagattgagagaaagaggagggaagagaaggaaggagaaagaggaaggggagttaaaagtgtgtgaa

SEQ ID NO: 29871 - DNA, 96 bp, Fusarium azukicola
  misc_feature: 524
ttatctttcttaacctcactacttttttttcttttccttactctctccttataaccctttcctactcttctcctactctcttaccttaactccccc

SEQ ID NO: 29872 - DNA, 96 bp, Fusarium azukicola
  misc_feature: 524
tgaagagggaggagagtttagtaagtaagtatagaggagaggaagagaggagaggaaggggagaagagaagaagaggagtaaagagggagagaaga

SEQ ID NO: 29873 - DNA, 96 bp, Fusarium azukicola
  misc_feature: 524
tctttcctttcccctattaaatactactcttttaccttaacttacttttttctcttctttctccttcccctttctcttcttttactactactttct

SEQ ID NO: 29874 - DNA, 96 bp, Fusarium azukicola
  misc_feature: 524
tcactccttcttccttcttcctcatcttatctttattctttctctctaactctaaatatcttactctcccttcttctttattctatcttacttatt

SEQ ID NO: 29875 - DNA, 96 bp, Fusarium azukicola
  misc_feature: 524
atattctatattatattactaactatagtgatatatccctataaaccatatattatattatagaatttttactctatttttaggtatatttaccta

SEQ ID NO: 29876 - DNA, 96 bp, Fusarium azukicola
  misc_feature: 524
gagaggataaggagtgaaaagagagagagggagaggggagaggagaggataaggagtgaaaagagagagagggagaggggagaggagaggataagg

SEQ ID NO: 29877 - DNA, 96 bp, Fusarium azukicola
  misc_feature: 524
gaagagaaaaaagtaagttaaggtaaaagagtagtatttaataggggaaaggaaagaagaagtaagtaaaaaaaagagaaggggtagaagagaggg

SEQ ID NO: 29878 - DNA, 96 bp, Fusarium azukicola
  misc_feature: 524
aaaaaagtaagttaaggtaaaagagtagtatttaataggggaaaggaaagaagaagtaagtaaaaaaaagagaaggggtagaagagagggggagtt

SEQ ID NO: 29879 - DNA, 96 bp, Fusarium azukicola
  misc_feature: 523
ttctctcttttactttaccctatactctcttctctcttttactttaccctctacttttattctttattttactttaccctatactctcttctctct

SEQ ID NO: 29880 - DNA, 96 bp, Fusarium azukicola
  misc_feature: 523
agagaggtgattggttattaagatatatagagtagttaaagagaaaataggtatagaagtaaaggtagtaagagagtaagaaagtagtagtaaaag

SEQ ID NO: 29881 - DNA, 96 bp, Fusarium azukicola
  misc_feature: 522
ttctataacctctctttttactaaactctaaactaccttatttttatctttctttttaccttaacttactctatactcctttctctcctaatactt

SEQ ID NO: 29882 - DNA, 96 bp, Fusarium azukicola
  misc_feature: 522
agagggttagggttaagaagaagagtgaagaaagataaaggaaagaaagggagaaagagaagagtaaaagataaaaaaagaaaagaaggtaaaata

SEQ ID NO: 29883 - DNA, 96 bp, Fusarium azukicola
  misc_feature: 522
tagataaaagtgggtcacaataaagagtctgattggatcagataaaagtgggatttagttgttgatgattgaattgactgaagagttgattcttgt

SEQ ID NO: 29884 - DNA, 96 bp, Fusarium azukicola
  misc_feature: 522
tactctctccttataaccctttcctactcttctcctactctcttaccttaactccccctctcttctaccccttctcttttttttacttacttcttc

SEQ ID NO: 29885 - DNA, 96 bp, Fusarium azukicola
  misc_feature: 522
actccccctctcttctaccccttctcttttttttacttacttcttctttcctttcccctattaaatactactcttttaccttaacttacttttttc

SEQ ID NO: 29886 - DNA, 96 bp, Fusarium azukicola
  misc_feature: 521
tcttaaccctaaccctctctttccctccttcttttcctttctcttcttcttcttttctataacctctctttttactaaactctaaactaccttatt

SEQ ID NO: 29887 - DNA, 96 bp, Fusarium azukicola
  misc_feature: 521
agggggttaaaagaggagagagaaggaggggagagaaagagaggaggaaaagtaaaaagaaggaggagagagaaggaagaataaaagaaaagaata

SEQ ID NO: 29888 - DNA, 96 bp, Fusarium azukicola
  misc_feature: 521
tatctttcttaacctcactacttttttttcttttccttactctctccttataaccctttcctactcttctcctactctcttaccttaactccccct

SEQ ID NO: 29889 - DNA, 96 bp, Fusarium azukicola
  misc_feature: 521
attcttatataccctatactcctctattttaccttcttttctttttttatcttttactcttctctttctccctttctttcctttatctttcttcac

SEQ ID NO: 29890 - DNA, 96 bp, Fusarium azukicola
  misc_feature: 521
gcgtataatcaattaaattcaattactatcttcttccctagatagctcagtaacaatctgacatgttcttctattatgaccggccttaccgcatct

SEQ ID NO: 29891 - DNA, 96 bp, Fusarium azukicola
  misc_feature: 520
tattctatattatattactaactatagtgatatatccctataaaccatatattatattatagaatttttactctatttttaggtatatttacctaa

SEQ ID NO: 29892 - DNA, 96 bp, Fusarium azukicola
  misc_feature: 520
tattcttatataccctatactcctctattttaccttcttttctttttttatcttttactcttctctttctccctttctttcctttatctttcttca

SEQ ID NO: 29893 - DNA, 96 bp, Fusarium azukicola
  misc_feature: 520
tcttcttttactactactttcttactctcttactacctttacttctatacctattttctctttaactactctatatatcttaataaccaatcacct

SEQ ID NO: 29894 - DNA, 96 bp, Fusarium azukicola
  misc_feature: 520
tctccctctttactcctcttcttctcttctccccttcctctcctctcttcctctcctctatacttacttactaaactctcctccctcttcaataac

SEQ ID NO: 29895 - DNA, 96 bp, Fusarium azukicola
  misc_feature: 520
ggaagagaagggaatataagagagagaggggaggaagggaggaagggagaagagaaagaagataggtagttagaagagaaagaaagaaggggaata

SEQ ID NO: 29896 - DNA, 96 bp, Fusarium azukicola
  misc_feature: 520
gagggttagggttaagaagaagagtgaagaaagataaaggaaagaaagggagaaagagaagagtaaaagataaaaaaagaaaagaaggtaaaatag

SEQ ID NO: 29897 - DNA, 96 bp, Fusarium azukicola
  misc_feature: 520
aaagagaagttaagaggagtaaagggagtgaagaggagggaggagaaagagaaagggaagtaaagagaaagaggaaggaagagaagggaatataag

SEQ ID NO: 29898 - DNA, 96 bp, Fusarium azukicola
  misc_feature: 520
aggagatgacgaagaagaagaattagctataaatagcttttcttgtttcttttctctttcttccttcttagaattaggtttagattcccttttctt

SEQ ID NO: 29899 - DNA, 96 bp, Fusarium azukicola
  misc_feature: 519
aaaagaaggagggaaagagagggttagggttaagaagaagagtgaagaaagataaaggaaagaaagggagaaagagaagagtaaaagataaaaaaa

SEQ ID NO: 29900 - DNA, 96 bp, Fusarium azukicola
  misc_feature: 519
tctttcttaacctcactacttttttttcttttccttactctctccttataaccctttcctactcttctcctactctcttaccttaactccccctct

SEQ ID NO: 29901 - DNA, 96 bp, Fusarium azukicola
  misc_feature: 519
aatactactcttttaccttaacttacttttttctcttctttctccttcccctttctcttcttttactactactttcttactctcttactaccttta

SEQ ID NO: 29902 - DNA, 96 bp, Fusarium azukicola
  misc_feature: 519
gtctgtatagcctctaattatattgtgtatatctgaataatcgcagttatatatagtagataaatttggatagctatttaaatacttccaaatcgt

SEQ ID NO: 29903 - DNA, 96 bp, Fusarium azukicola
  misc_feature: 519
gtatagaagtaaaggtagtaagagagtaagaaagtagtagtaaaagaagagaaaggggaaggagaaagaagagaaaaaagtaagttaaggtaaaag

SEQ ID NO: 29904 - DNA, 96 bp, Fusarium azukicola
  misc_feature: 519
cctcactttttatcttaccttctctttactttttacctactctctttactattacttcttcttattcttaaccctctcttgccccccttttaactc

SEQ ID NO: 29905 - DNA, 96 bp, Fusarium azukicola
  misc_feature: 519
aaggggaaggagaaagaagagaaaaaagtaagttaaggtaaaagagtagtatttaataggggaaaggaaagaagaagtaagtaaaaaaaagagaag

SEQ ID NO: 29906 - DNA, 96 bp, Fusarium azukicola
  misc_feature: 519
atattagtttaatagagagattaaagtagggtatagggtaaagtaaaagagagaagagagtatagggtaaagtaaaagagagaagagagtataggg

SEQ ID NO: 29907 - DNA, 96 bp, Fusarium azukicola
  misc_feature: 518
ttcgcagtttttgacttgatataggtcctcactagtatatttaaagagaggatcttttatttttatatatttaattagacttcttaagttaagatg

SEQ ID NO: 29908 - DNA, 96 bp, Fusarium azukicola
  misc_feature: 518
tattaaccctctcccttctttctcttcctcttctctccctctttactcctcttcttctcttctccccttcctctcctctcttcctctcctctatac

SEQ ID NO: 29909 - DNA, 96 bp, Fusarium azukicola
  misc_feature: 518
aagaagaattagctataaatagcttttcttatttcttttctctttcttccttcttagaattaggtttagattcctttttcttagaagtcttatata

SEQ ID NO: 29910 - DNA, 96 bp, Fusarium azukicola
  misc_feature: 518
tactcctctattttaccttcttttctttttttatcttttactcttctctttctccctttctttcctttatctttcttcactcttcttcttaaccct

SEQ ID NO: 29911 - DNA, 96 bp, Fusarium azukicola
  misc_feature: 517
aagccaataaggtgcataagacttctaagaaaagggaatctaaacctaattctaagaaggaagaaagagaaaagaaacaagaaaagctatttatag

SEQ ID NO: 29912 - DNA, 96 bp, Fusarium azukicola
  misc_feature: 516
aaagaaagggagaaagagaagagtaaaagataaaaaaagaaaagaaggtaaaatagaggagtatagggtatataagaataagtaagatagaataaa

SEQ ID NO: 29913 - DNA, 96 bp, Fusarium azukicola
  misc_feature: 516
aaggaaaagaaggagggaaagagagggttagggttaagaagaagagtgaagaaagataaaggaaagaaagggagaaagagaagagtaaaagataaa

SEQ ID NO: 29914 - DNA, 96 bp, Fusarium azukicola
  misc_feature: 516
ttaggagatgacgaagaagaagaattagctataaatagcttttcttgtttcttttctctttcttccttcttagaattaggtttagattcccttttc

SEQ ID NO: 29915 - DNA, 96 bp, Fusarium azukicola
  misc_feature: 516
aaattaactagaaattcttttctacatacaatatgcctagtagcacctgtatcatatataaaattagttatattatctttattagtagaaaaaaca

SEQ ID NO: 29916 - DNA, 96 bp, Fusarium azukicola
  misc_feature: 516
atataagagagagaggggaggaagggaggaagggagaagagaaagaagataggtagttagaagagaaagaaagaaggggaatagaaaaagaaaaga

SEQ ID NO: 29917 - DNA, 96 bp, Fusarium azukicola
  misc_feature: 516
tctcttctcccctttttccctcccctcttcctctactttctttctcttctcccctcctcttcttaactacactttctctctacctcacttttccct

SEQ ID NO: 29918 - DNA, 96 bp, Fusarium azukicola
  misc_feature: 516
gaggagaggataaggagtgaaaagagagagagggagaggggagaggagaggataaggagtgaaaagagagagagggagaggggagaggagaggata

SEQ ID NO: 29919 - DNA, 96 bp, Fusarium azukicola
  misc_feature: 516
aagaaagggagaaagagaagagtaaaagataaaaaaagaaaagaaggtaaaatagaggagtatagggtatataagaataagtaagatagaataaag

SEQ ID NO: 29920 - DNA, 96 bp, Fusarium azukicola
  misc_feature: 516
cttcctctcctctcttcctctcctctatacttacttactaaactctcctccctcttcaataaccttccttttattcttactataacccccttcttt

SEQ ID NO: 29921 - DNA, 96 bp, Fusarium azukicola
  misc_feature: 516
cctctccctctctctcttttcactccttcttccttcttcctcatcttatctttattctttctctctaactctaaatatcttactctcccttcttct

SEQ ID NO: 29922 - DNA, 96 bp, Fusarium azukicola
  misc_feature: 516
ccagttttttggagctttattagggtgcaaaaaatagcaatctgggtctttatgacctggcagtttgcaataactgcattttaaggcagttttctt

SEQ ID NO: 29923 - DNA, 96 bp, Fusarium azukicola
  misc_feature: 515
ttattaagatatatagagtagttaaagagaaaataggtatagaagtaaaggtagtaagagagtaagaaagtagtagtaaaagaagagaaaggggaa

SEQ ID NO: 29924 - DNA, 96 bp, Fusarium azukicola
  misc_feature: 515
atcttagattttcccttataatatcaggtctataataaaggggtttttactaagatatatatataataataatagaggtttaattttttcctctaa

SEQ ID NO: 29925 - DNA, 96 bp, Fusarium azukicola
  misc_feature: 515
tcttagattttcccttataatatcaggtctataataaaggggtttttactaagatatatatataataataatagaggtttaattttttcctctaat

SEQ ID NO: 29926 - DNA, 96 bp, Fusarium azukicola
  misc_feature: 515
tctataacctctctttttactaaactctaaactaccttatttttatctttctttttaccttaacttactctatactcctttctctcctaatactta

SEQ ID NO: 29927 - DNA, 96 bp, Fusarium azukicola
  misc_feature: 515
ccccttctttctttctcttctaactacctatcttctttctcttctcccttcctcccttcctcccctctctctcttatattcccttctcttccttcc

SEQ ID NO: 29928 - DNA, 96 bp, Fusarium azukicola
  misc_feature: 515
atttctctttttcttcttcttttctttttctattccccttctttctttctcttctaactacctatcttctttctcttctcccttcctcccttcctc

SEQ ID NO: 29929 - DNA, 96 bp, Fusarium azukicola
  misc_feature: 515
aaaagaataagagggaaaggaagagaagaagattgagagaaagaggagggaagagaaggaaggagaaagaggaaggggagttaaaagtgtgtgaag

SEQ ID NO: 29930 - DNA, 96 bp, Fusarium azukicola
  misc_feature: 515
ataagaataagtaagatagaataaagaagaagggagagtaagatatttagagttagagagaaagaataaagataagatgaggaagaaggaagaagg

SEQ ID NO: 29931 - DNA, 96 bp, Fusarium azukicola
  misc_feature: 515
attaaccctctcccttctttctcttcctcttctctccctctttactcctcttcttctcttctccccttcctctcctctcttcctctcctctatact

SEQ ID NO: 29932 - DNA, 96 bp, Fusarium azukicola
  misc_feature: 514
agaggagaggaagagaggagaggaaggggagaagagaagaagaggagtaaagagggagagaagaggaagagaaagaagggagagggttaatataaa

SEQ ID NO: 29933 - DNA, 96 bp, Fusarium azukicola
  misc_feature: 514
taaccctttcctactcttctcctactctcttaccttaactccccctctcttctaccccttctcttttttttacttacttcttctttcctttcccct

SEQ ID NO: 29934 - DNA, 96 bp, Fusarium azukicola
  misc_feature: 514
gagagtttagtaagtaagtatagaggagaggaagagaggagaggaaggggagaagagaagaagaggagtaaagagggagagaagaggaagagaaag

SEQ ID NO: 29935 - DNA, 96 bp, Fusarium azukicola
  misc_feature: 514
cttttcctttctcttcttcttcttttctataacctctctttttactaaactctaaactaccttatttttatctttctttttaccttaacttactct

SEQ ID NO: 29936 - DNA, 96 bp, Fusarium azukicola
  misc_feature: 513
gaagaagaaaaagagaaatgaaggaggggaagagtaaagaaaaagagaagaagataaaaggagaaggggaagagtaaaagaaagaaaagtaagaaa

SEQ ID NO: 29937 - DNA, 96 bp, Fusarium azukicola
  misc_feature: 513
agagagggggagttaaggtaagagagtaggagaagagtaggaaagggttataaggagagagtaaggaaaagaaaaaaaagtagtgaggttaagaaa

SEQ ID NO: 29938 - DNA, 96 bp, Fusarium azukicola
  misc_feature: 513
tttatctttcttaacctcactacttttttttcttttccttactctctccttataaccctttcctactcttctcctactctcttaccttaactcccc

SEQ ID NO: 29939 - DNA, 96 bp, Fusarium azukicola
  misc_feature: 513
tattagtttaatagagagattaaagtagggtatagggtaaagtaaaagagagaagagagtatagggtaaagtaaaagagagaagagagtatagggt

SEQ ID NO: 29940 - DNA, 96 bp, Fusarium azukicola
  misc_feature: 513
cgtataatcaattaaattcaattactatcttcttccctagatagctcagtaacaatctgacatgttcttctattatgaccggccttaccgcatctt

SEQ ID NO: 29941 - DNA, 96 bp, Fusarium azukicola
  misc_feature: 513
agctataacccttataagattataactttaaaggaggctgttaatgttctatattatattaccaactatagtgatatatccctataaaccatatat

SEQ ID NO: 29942 - DNA, 96 bp, Fusarium azukicola
  misc_feature: 512
ttttcttttattcttccttctctctcctccttctttttacttttcctcctctctttctctcccctccttctctctcctcttttaaccccctctatc

SEQ ID NO: 29943 - DNA, 96 bp, Fusarium azukicola
  misc_feature: 512
ttcttctttcctttcccctattaaatactactcttttaccttaacttacttttttctcttctttctccttcccctttctcttcttttactactact

SEQ ID NO: 29944 - DNA, 96 bp, Fusarium azukicola
  misc_feature: 512
ttcctttcccctattaaatactactcttttaccttaacttacttttttctcttctttctccttcccctttctcttcttttactactactttcttac

SEQ ID NO: 29945 - DNA, 96 bp, Fusarium azukicola
  misc_feature: 512
ttactctctccttataaccctttcctactcttctcctactctcttaccttaactccccctctcttctaccccttctcttttttttacttacttctt

SEQ ID NO: 29946 - DNA, 96 bp, Fusarium azukicola
  misc_feature: 512
aagagaagttaagaggagtaaagggagtgaagaggagggaggagaaagagaaagggaagtaaagagaaagaggaaggaagagaagggaatataaga

SEQ ID NO: 29947 - DNA, 96 bp, Fusarium azukicola
  misc_feature: 512
tataaccctttcctactcttctcctactctcttaccttaactccccctctcttctaccccttctcttttttttacttacttcttctttcctttccc

SEQ ID NO: 29948 - DNA, 96 bp, Fusarium azukicola
  misc_feature: 512
gccaataaggtgcataagacttctaagaaaagggaatctaaacctaattctaagaaggaagaaagagaaaagaaacaagaaaagctatttatagct

SEQ ID NO: 29949 - DNA, 96 bp, Fusarium azukicola
  misc_feature: 512
gaagagaagggaatataagagagagaggggaggaagggaggaagggagaagagaaagaagataggtagttagaagagaaagaaagaaggggaatag

SEQ ID NO: 29950 - DNA, 96 bp, Fusarium azukicola
  misc_feature: 512
aaaataggtatagaagtaaaggtagtaagagagtaagaaagtagtagtaaaagaagagaaaggggaaggagaaagaagagaaaaaagtaagttaag

SEQ ID NO: 29951 - DNA, 96 bp, Fusarium azukicola
  misc_feature: 512
agaagaaaaagagaaatgaaggaggggaagagtaaagaaaaagagaagaagataaaaggagaaggggaagagtaaaagaaagaaaagtaagaaagt

SEQ ID NO: 29952 - DNA, 96 bp, Fusarium azukicola
  misc_feature: 511
ctcctctattttaccttcttttctttttttatcttttactcttctctttctccctttctttcctttatctttcttcactcttcttcttaaccctaa

SEQ ID NO: 29953 - DNA, 96 bp, Fusarium azukicola
  misc_feature: 511
tccagttttttggagctttattagggtgcaaaaaatagcaatctgggtctttatgacctggcagtttgcaataactgcattttaaggcagttttct

SEQ ID NO: 29954 - DNA, 96 bp, Fusarium azukicola
  misc_feature: 511
attctatattatattactaactatagtgatatatccctataaaccatatattatattatagaatttttactctatttttaggtatatttacctaac

SEQ ID NO: 29955 - DNA, 96 bp, Fusarium azukicola
  misc_feature: 511
ctcctctcttcctctcctctatacttacttactaaactctcctccctcttcaataaccttccttttattcttactataacccccttctttttctac

SEQ ID NO: 29956 - DNA, 96 bp, Fusarium azukicola
  misc_feature: 511
gcaaaaaagactagactacagaaaagaggggttatgatagtagaggaaggaagacaagtaattgatcaaatggatatagatgcgcaggtaatggct

SEQ ID NO: 29957 - DNA, 96 bp, Fusarium azukicola
  misc_feature: 511
ataagacttctaagaaaagggaatctaaacctaattctaagaaggaagaaagagaaaagaaacaagaaaagctatttatagctaattcttcttctt

SEQ ID NO: 29958 - DNA, 96 bp, Fusarium azukicola
  misc_feature: 510
tcttctttcctttcccctattaaatactactcttttaccttaacttacttttttctcttctttctccttcccctttctcttcttttactactactt

SEQ ID NO: 29959 - DNA, 96 bp, Fusarium azukicola
  misc_feature: 510
aaggagaaggggaagagtaaaagaaagaaaagtaagaaagtaatagaaagtaatagaacgtagtttagagaaggtaggagggaattagaggtaaga

SEQ ID NO: 29960 - DNA, 96 bp, Fusarium azukicola
  misc_feature: 510
tctcccctctccctctctctcttttcactccttcttccttcttcctcatcttatctttattctttctctctaactctaaatatcttactctccctt

SEQ ID NO: 29961 - DNA, 96 bp, Fusarium azukicola
  misc_feature: 510
tcctctcccctctccctctctctcttttcactccttcttccttcttcctcatcttatctttattctttctctctaactctaaatatcttactctcc

SEQ ID NO: 29962 - DNA, 96 bp, Fusarium azukicola
  misc_feature: 510
ctccctctttactcctcttcttctcttctccccttcctctcctctcttcctctcctctatacttacttactaaactctcctccctcttcaataacc

SEQ ID NO: 29963 - DNA, 96 bp, Fusarium azukicola
  misc_feature: 510
gaataagtaagatagaataaagaagaagggagagtaagatatttagagttagagagaaagaataaagataagatgaggaagaaggaagaaggagtg

SEQ ID NO: 29964 - DNA, 96 bp, Fusarium azukicola
  misc_feature: 509
ggtattattctaattggttaaaaaggttcctacagacctttatgactgccgtcatctatgcatcaaagtataataactgccgattggctaaaaaaa

SEQ ID NO: 29965 - DNA, 96 bp, Fusarium azukicola
  misc_feature: 509
tataagagagagaggggaggaagggaggaagggagaagagaaagaagataggtagttagaagagaaagaaagaaggggaatagaaaaagaaaagaa

SEQ ID NO: 29966 - DNA, 96 bp, Fusarium azukicola
  misc_feature: 509
aaagagggaaaagtgaggtagagagaaagtgtagttaagaagaggaggggagaagagaaagaaagtagaggaagaggggagggaaaaaggggagaa

SEQ ID NO: 29967 - DNA, 96 bp, Fusarium azukicola
  misc_feature: 509
tatataagaataagtaagatagaataaagaagaagggagagtaagatatttagagttagagagaaagaataaagataagatgaggaagaaggaaga

SEQ ID NO: 29968 - DNA, 96 bp, Fusarium azukicola
  misc_feature: 509
tccttcttcctcatcttatctttattctttctctctaactctaaatatcttactctcccttcttctttattctatcttacttattcttatataccc

SEQ ID NO: 29969 - DNA, 96 bp, Fusarium azukicola
  misc_feature: 509
aatatataaataaaataataaggaaatataataaataagaaataggaacttctaaagtacctattaaatttatagaaagactcttaaaatctaaag

SEQ ID NO: 29970 - DNA, 96 bp, Fusarium azukicola
  misc_feature: 508
ttctttcctttcccctattaaatactactcttttaccttaacttacttttttctcttctttctccttcccctttctcttcttttactactactttc

SEQ ID NO: 29971 - DNA, 96 bp, Fusarium azukicola
  misc_feature: 508
tcccctttctcttcttttactactactttcttactctcttactacctttacttctatacctattttctctttaactactctatatatcttaataac

SEQ ID NO: 29972 - DNA, 96 bp, Fusarium azukicola
  misc_feature: 508
agaaaagaataagagggaaaggaagagaagaagattgagagaaagaggagggaagagaaggaaggagaaagaggaaggggagttaaaagtgtgtga

SEQ ID NO: 29973 - DNA, 96 bp, Fusarium azukicola
  misc_feature: 508
taggagatgacgaagaagaagaattagctataaatagcttttcttgtttcttttctctttcttccttcttagaattaggtttagattcccttttct

SEQ ID NO: 29974 - DNA, 96 bp, Fusarium azukicola
  misc_feature: 508
gttataataaaggtcaagggaagtaattaaagtaataattaggggtaataattaaattaagggttagggttaagtagttatagtaaaggttagggg

SEQ ID NO: 29975 - DNA, 96 bp, Fusarium azukicola
  misc_feature: 508
ctcttcttttactactactttcttactctcttactacctttacttctatacctattttctctttaactactctatatatcttaataaccaatcacc

SEQ ID NO: 29976 - DNA, 96 bp, Fusarium azukicola
  misc_feature: 508
cataacgggatctaagataaaaatataataaagcgtataatcaattaaattcaattactatcttcttccctagatagctcagtaacaatctgacat

SEQ ID NO: 29977 - DNA, 96 bp, Fusarium azukicola
  misc_feature: 507
ggtatataagaataagtaagatagaataaagaagaagggagagtaagatatttagagttagagagaaagaataaagataagatgaggaagaaggaa

SEQ ID NO: 29978 - DNA, 96 bp, Fusarium azukicola
  misc_feature: 507
tcctctcttcctctcctctatacttacttactaaactctcctccctcttcaataaccttccttttattcttactataacccccttctttttctact

SEQ ID NO: 29979 - DNA, 96 bp, Fusarium azukicola
  misc_feature: 507
tataagaataagtaagatagaataaagaagaagggagagtaagatatttagagttagagagaaagaataaagataagatgaggaagaaggaagaag

SEQ ID NO: 29980 - DNA, 96 bp, Fusarium azukicola
  misc_feature: 507
taaagaagaagggagagtaagatatttagagttagagagaaagaataaagataagatgaggaagaaggaagaaggagtgaaaagagagagagggag

SEQ ID NO: 29981 - DNA, 96 bp, Fusarium azukicola
  misc_feature: 507
ccctttctttcctttatctttcttcactcttcttcttaaccctaaccctctctttccctccttcttttcctttctcttcttcttcttttctataac

SEQ ID NO: 29982 - DNA, 96 bp, Fusarium azukicola
  misc_feature: 507
agtctgagtctgtatagcctctaattatattgtgtatatctgaataatcgcagttatatatagtagataaatttggatagctatttaaatacttcc

SEQ ID NO: 29983 - DNA, 96 bp, Fusarium azukicola
  misc_feature: 507
ctttctttcctttatctttcttcactcttcttcttaaccctaaccctctctttccctccttcttttcctttctcttcttcttcttttctataacct

SEQ ID NO: 29984 - DNA, 96 bp, Fusarium azukicola
  misc_feature: 507
ctccttcttccttcttcctcatcttatctttattctttctctctaactctaaatatcttactctcccttcttctttattctatcttacttattctt

SEQ ID NO: 29985 - DNA, 96 bp, Fusarium azukicola
  misc_feature: 507
agtctgtatagcctctaattatattgtgtatatctgaataatcgcagttatatatagtagataaatttggatagctatttaaatacttccaaatcg

SEQ ID NO: 29986 - DNA, 96 bp, Fusarium azukicola
  misc_feature: 506
tttatctttcttcactcttcttcttaaccctaaccctctctttccctccttcttttcctttctcttcttcttcttttctataacctctctttttac

SEQ ID NO: 29987 - DNA, 96 bp, Fusarium azukicola
  misc_feature: 506
ggttataataaaggtcaagggaagtaattaaagtaataattaggggtaataattaaattaagggttagggttaagtagttatagtaaaggttaggg

SEQ ID NO: 29988 - DNA, 96 bp, Fusarium azukicola
  misc_feature: 506
agccttggaaaaagaagaaaactgccttaaaatgcagttattgcaaactgccaggtcataaagacccagattgctattttttgcaccctaataaag

SEQ ID NO: 29989 - DNA, 96 bp, Fusarium azukicola
  misc_feature: 506
aagagaaggggtagaagagagggggagttaaggtaagagagtaggagaagagtaggaaagggttataaggagagagtaaggaaaagaaaaaaaagt

SEQ ID NO: 29990 - DNA, 96 bp, Fusarium azukicola
  misc_feature: 505
aattagttatattatctttattagtagaaaaaacaggtttatttaccttatttaaatatcctagttgtttctttatatagggaaggtttcttatca

SEQ ID NO: 29991 - DNA, 96 bp, Fusarium azukicola
  misc_feature: 505
aaagaaacaagaaaagctatttatagctaattcttcttcttcgtcatctcctaaagccgaggaagacctaatttccctttctgagaccccagaaga

SEQ ID NO: 29992 - DNA, 96 bp, Fusarium azukicola
  misc_feature: 505
aaaagagaagaagataaaaggagaaggggaagagtaaaagaaagaaaagtaagaaagtaatagaaagtaatagaacgtagtttagagaaggtagga

SEQ ID NO: 29993 - DNA, 96 bp, Fusarium azukicola
  misc_feature: 505
cttcttttctataacctctctttttactaaactctaaactaccttatttttatctttctttttaccttaacttactctatactcctttctctccta

SEQ ID NO: 29994 - DNA, 96 bp, Fusarium azukicola
  misc_feature: 505
aagacttctaagaaaagggaatctaaacctaattctaagaaggaagaaagagaaaagaaacaagaaaagctatttatagctaattcttcttcttcg

SEQ ID NO: 29995 - DNA, 96 bp, Fusarium azukicola
  misc_feature: 504
tcttttcttttattcttccttctctctcctccttctttttacttttcctcctctctttctctcccctccttctctctcctcttttaaccccctcta

SEQ ID NO: 29996 - DNA, 96 bp, Fusarium azukicola
  misc_feature: 504
taaaaataaggtagtttagagtttagtaaaaagagaggttatagaaaagaagaagaagagaaaggaaaagaaggagggaaagagagggttagggtt

SEQ ID NO: 29997 - DNA, 96 bp, Fusarium azukicola
  misc_feature: 504
cctttctttcctttatctttcttcactcttcttcttaaccctaaccctctctttccctccttcttttcctttctcttcttcttcttttctataacc

SEQ ID NO: 29998 - DNA, 96 bp, Fusarium azukicola
  misc_feature: 504
aaagaagaagaaaaagagaaatgaaggaggggaagagtaaagaaaaagagaagaagataaaaggagaaggggaagagtaaaagaaagaaaagtaag

SEQ ID NO: 29999 - DNA, 96 bp, Fusarium azukicola
  misc_feature: 504
ccttcctctcctctcttcctctcctctatacttacttactaaactctcctccctcttcaataaccttccttttattcttactataacccccttctt

SEQ ID NO: 30000 - DNA, 96 bp, Fusarium azukicola
  misc_feature: 503
tttctttttctattccccttctttctttctcttctaactacctatcttctttctcttctcccttcctcccttcctcccctctctctcttatattcc

SEQ ID NO: 30001 - DNA, 96 bp, Fusarium azukicola
  misc_feature: 503
gagaggtgattggttattaagatatatagagtagttaaagagaaaataggtatagaagtaaaggtagtaagagagtaagaaagtagtagtaaaaga

SEQ ID NO: 30002 - DNA, 96 bp, Fusarium azukicola
  misc_feature: 503
aatcttagattttcccttataatatcaggtctataataaaggggtttttactaagatatatatataataataatagaggtttaattttttcctcta

SEQ ID NO: 30003 - DNA, 96 bp, Fusarium azukicola
  misc_feature: 503
gtataatcaattaaattcaattactatcttcttccctagatagctcagtaacaatctgacatgttcttctattatgaccggccttaccgcatcttc

SEQ ID NO: 30004 - DNA, 96 bp, Fusarium azukicola
  misc_feature: 503
cttccttctctctcctccttctttttacttttcctcctctctttctctcccctccttctctctcctcttttaaccccctctatctcttctcccctt

SEQ ID NO: 30005 - DNA, 96 bp, Fusarium azukicola
  misc_feature: 503
atattattttgttgaggaattaaggaattatatacctctaaattatcacttatatcaaaatccatttcatctggggtctcagaaagggaaattagg

SEQ ID NO: 30006 - DNA, 96 bp, Fusarium azukicola
  misc_feature: 503
accctatactcctctattttaccttcttttctttttttatcttttactcttctctttctccctttctttcctttatctttcttcactcttcttctt

SEQ ID NO: 30007 - DNA, 96 bp, Fusarium azukicola
  misc_feature: 502
tcttttcctttctcttcttcttcttttctataacctctctttttactaaactctaaactaccttatttttatctttctttttaccttaacttactc

SEQ ID NO: 30008 - DNA, 96 bp, Fusarium azukicola
  misc_feature: 502
gttagggttaagaagaagagtgaagaaagataaaggaaagaaagggagaaagagaagagtaaaagataaaaaaagaaaagaaggtaaaatagagga

SEQ ID NO: 30009 - DNA, 96 bp, Fusarium azukicola
  misc_feature: 502
actcctctattttaccttcttttctttttttatcttttactcttctctttctccctttctttcctttatctttcttcactcttcttcttaacccta

SEQ ID NO: 30010 - DNA, 96 bp, Fusarium azukicola
  misc_feature: 502
cctcctaccttctctaaactacgttctattactttctattactttcttacttttctttcttttactcttccccttctccttttatcttcttctctt

SEQ ID NO: 30011 - DNA, 96 bp, Fusarium azukicola
  misc_feature: 502
ataaaaggagaaggggaagagtaaaagaaagaaaagtaagaaagtaatagaaagtaatagaacgtagtttagagaaggtaggagggaattagaggt

SEQ ID NO: 30012 - DNA, 96 bp, Fusarium azukicola
  misc_feature: 501
aaaaggagaaggggaagagtaaaagaaagaaaagtaagaaagtaatagaaagtaatagaacgtagtttagagaaggtaggagggaattagaggtaa

SEQ ID NO: 30013 - DNA, 96 bp, Fusarium azukicola
  misc_feature: 501
acaagaaaagctatttatagctaattcttcttcttcgtcatctcctaaagccgaggaagacctaatttccctttctgagaccccagaagaaatgga

SEQ ID NO: 30014 - DNA, 96 bp, Fusarium azukicola
  misc_feature: 501
taattccctcctaccttctctaaactacgttctattactttctattactttcttacttttctttcttttactcttccccttctccttttatcttct

SEQ ID NO: 30015 - DNA, 96 bp, Fusarium azukicola
  misc_feature: 501
aagacttctaagaaaaaggaatctaaacctaattctaagaaggaagaaagagaaaagaaataagaaaagctatttatagctaattcttcttcttta

SEQ ID NO: 30016 - DNA, 96 bp, Fusarium azukicola
  misc_feature: 501
gtatataagaataagtaagatagaataaagaagaagggagagtaagatatttagagttagagagaaagaataaagataagatgaggaagaaggaag

SEQ ID NO: 30017 - DNA, 96 bp, Fusarium azukicola
  misc_feature: 501
catatataaaattagttatattatctttattagtagaaaaatcaggtttatttaccttatttaaatatcctagttgtttctttatatagggaaggt

SEQ ID NO: 30018 - DNA, 96 bp, Fusarium azukicola
  misc_feature: 500
cttatttttatctttctttttaccttaacttactctatactcctttctctcctaatacttactatactcctccttaacttaacttctctccttaaa

SEQ ID NO: 30019 - DNA, 96 bp, Fusarium azukicola
  misc_feature: 500
agaagaagaaaaagagaaatgaaggaggggaagagtaaagaaaaagagaagaagataaaaggagaaggggaagagtaaaagaaagaaaagtaagaa

SEQ ID NO: 30020 - DNA, 96 bp, Fusarium azukicola
  misc_feature: 500
ttaaatactactcttttaccttaacttacttttttctcttctttctccttcccctttctcttcttttactactactttcttactctcttactacct

SEQ ID NO: 30021 - DNA, 96 bp, Fusarium azukicola
  misc_feature: 500
tcttccttctctctcctccttctttttacttttcctcctctctttctctcccctccttctctctcctcttttaaccccctctatctcttctcccct

SEQ ID NO: 30022 - DNA, 96 bp, Fusarium azukicola
  misc_feature: 500
gtttgcagttttcacagtttttaacttgatataggtcctcactagtatatttaaagagaggatcttttatttttatatatttaattagacttctta

SEQ ID NO: 30023 - DNA, 96 bp, Fusarium azukicola
  misc_feature: 500
taacctttactataactacttaaccctaacccttaatttaattattacccctaattattactttaattacttcccttgacctttattataacctct

SEQ ID NO: 30024 - DNA, 96 bp, Fusarium azukicola
  misc_feature: 500
cccctttctcttcttttactactactttcttactctcttactacctttacttctatacctattttctctttaactactctatatatcttaataacc

SEQ ID NO: 30025 - DNA, 96 bp, Fusarium azukicola
  misc_feature: 500
agagaaaggggaaggagaaagaagagaaaaaagtaagttaaggtaaaagagtagtatttaataggggaaaggaaagaagaagtaagtaaaaaaaag

SEQ ID NO: 30026 - DNA, 96 bp, Fusarium azukicola
  misc_feature: 500
aagaagagaaaaaagtaagttaaggtaaaagagtagtatttaataggggaaaggaaagaagaagtaagtaaaaaaaagagaaggggtagaagagag

SEQ ID NO: 30027 - DNA, 96 bp, Fusarium azukicola
  misc_feature: 500
aagagaagagtaaaagataaaaaaagaaaagaaggtaaaatagaggagtatagggtatataagaataagtaagatagaataaagaagaagggagag

SEQ ID NO: 30028 - DNA, 96 bp, Fusarium azukicola
  misc_feature: 500
agttttttggagctttattagggtgcaaaaaatagcaatctgggtctttatgacctggcagtttgcaataactgcattttaaggcagttttcttct

SEQ ID NO: 30029 - DNA, 96 bp, Fusarium azukicola
  misc_feature: 499
ggtatagaagtaaaggtagtaagagagtaagaaagtagtagtaaaagaagagaaaggggaaggagaaagaagagaaaaaagtaagttaaggtaaaa

SEQ ID NO: 30030 - DNA, 96 bp, Fusarium azukicola
  misc_feature: 499
gtaaggaaggttaagaaaggagagaagtaaggaaggttaagaaaggagagaagtaaggaaggttaagaaaggagagaagtaaggaaggttaaagaa

SEQ ID NO: 30031 - DNA, 96 bp, Fusarium azukicola
  misc_feature: 499
ttccctccttcttttcctttctcttcttcttcttttctataacctctctttttactaaactctaaactaccttatttttatctttctttttacctt

SEQ ID NO: 30032 - DNA, 96 bp, Fusarium azukicola
  misc_feature: 499
agaggaaaaaattaaacctctattattattatatatatatcttagtaaaaacccctttattatagacctgatattataagggaaaatctaagatta

SEQ ID NO: 30033 - DNA, 96 bp, Fusarium azukicola
  misc_feature: 499
gaaggggtagaagagagggggagttaaggtaagagagtaggagaagagtaggaaagggttataaggagagagtaaggaaaagaaaaaaaagtagtg

SEQ ID NO: 30034 - DNA, 96 bp, Fusarium azukicola
  misc_feature: 499
aaaagaaaagaataagagggaaaggaagagaagaagattgagagaaagaggagggaagagaaggaaggagaaagaggaaggggagttaaaagtgtg

SEQ ID NO: 30035 - DNA, 96 bp, Fusarium azukicola
  misc_feature: 499
aaagctataacccttataagattataactttaaaggaggctgttaatgttctatattatattaccaactatagtgatatatccctataaaccatat

SEQ ID NO: 30036 - DNA, 96 bp, Fusarium azukicola
  misc_feature: 499
agacttctaagaaaagggaatctaaacctaattctaagaaggaagaaagagaaaagaaacaagaaaagctatttatagctaattcttcttcttcgt

SEQ ID NO: 30037 - DNA, 96 bp, Fusarium azukicola
  misc_feature: 498
tttggagccttattagggtgcaaaaaatagcaatctgggtctttatgacctggcagtttgcaataactgcattttaaggcagttttcttctttttc

SEQ ID NO: 30038 - DNA, 96 bp, Fusarium azukicola
  misc_feature: 498
aaagaagagaaaaaagtaagttaaggtaaaagagtagtatttaataggggaaaggaaagaagaagtaagtaaaaaaaagagaaggggtagaagaga

SEQ ID NO: 30039 - DNA, 96 bp, Fusarium azukicola
  misc_feature: 498
aagctataacccttataagattataactttaaaggaggctgttaatgttctatattatattaccaactatagtgatatatccctataaaccatata

SEQ ID NO: 30040 - DNA, 96 bp, Fusarium azukicola
  misc_feature: 498
taaatactactcttttaccttaacttacttttttctcttctttctccttcccctttctcttcttttactactactttcttactctcttactacctt

SEQ ID NO: 30041 - DNA, 96 bp, Fusarium azukicola
  misc_feature: 498
aggaaagaagaagtaagtaaaaaaaagagaaggggtagaagagagggggagttaaggtaagagagtaggagaagagtaggaaagggttataaggag

SEQ ID NO: 30042 - DNA, 96 bp, Fusarium azukicola
  misc_feature: 497
ttggaaaaagaagaaaactgccttaaaatgcagttattgcaaactgccaggtcataaagacccagattgctattttttgcaccctaataaggctcc

SEQ ID NO: 30043 - DNA, 96 bp, Fusarium azukicola
  misc_feature: 497
ttcttcttttctataacctctctttttactaaactctaaactaccttatttttatctttctttttaccttaacttactctatactcctttctctcc

SEQ ID NO: 30044 - DNA, 96 bp, Fusarium azukicola
  misc_feature: 497
gaaaagaaacaagaaaagctatttatagctaattcttcttcttcgtcatctcctaaagccgaggaagacctaatttccctttctgagaccccagaa

SEQ ID NO: 30045 - DNA, 96 bp, Fusarium azukicola
  misc_feature: 497
aaaataaggtagtttagagtttagtaaaaagagaggttatagaaaagaagaagaagagaaaggaaaagaaggagggaaagagagggttagggttaa

SEQ ID NO: 30046 - DNA, 96 bp, Fusarium azukicola
  misc_feature: 497
ggaaagaagaagtaagtaaaaaaaagagaaggggtagaagagagggggagttaaggtaagagagtaggagaagagtaggaaagggttataaggaga

SEQ ID NO: 30047 - DNA, 96 bp, Fusarium azukicola
  misc_feature: 497
aagaaaagaataagagggaaaggaagagaagaagattgagagaaagaggagggaagagaaggaaggagaaagaggaaggggagttaaaagtgtgtg

SEQ ID NO: 30048 - DNA, 96 bp, Fusarium azukicola
  misc_feature: 496
ttataaccctttcctactcttctcctactctcttaccttaactccccctctcttctaccccttctcttttttttacttacttcttctttcctttcc

SEQ ID NO: 30049 - DNA, 96 bp, Fusarium azukicola
  misc_feature: 496
acttctaagaaaagggaatctaaacctaattctaagaaggaagaaagagaaaagaaacaagaaaagctatttatagctaattcttcttcttcgtca

SEQ ID NO: 30050 - DNA, 96 bp, Fusarium azukicola
  misc_feature: 496
acctaatttccctttctgagaccccagaagaaatggattttgatataagtgataatttagaggtatataattccataatttctcaacaaaataata

SEQ ID NO: 30051 - DNA, 96 bp, Fusarium azukicola
  misc_feature: 496
tagctataaatagcttttcttgtttcttttctctttcttccttcttagaattaggtttagattcccttttcttagaagtcttatgcaccttattgg

SEQ ID NO: 30052 - DNA, 96 bp, Fusarium azukicola
  misc_feature: 496
ggaattaaggaattatatacctctaaattatcacttatatcaaaatccatttcatctggggtctcagaaagggaaattaggtcttcctcggcttta

SEQ ID NO: 30053 - DNA, 96 bp, Fusarium azukicola
  misc_feature: 496
aaataactaggaagaaaagtaataaagagataatatctagcttctaagagagacttatagaagatagatagataaaagtgggtcacaataaagagt

SEQ ID NO: 30054 - DNA, 96 bp, Fusarium azukicola
  misc_feature: 495
ttttcctttctcttcttcttcttttctataacctctctttttactaaactctaaactaccttatttttatctttctttttaccttaacttactcta

SEQ ID NO: 30055 - DNA, 96 bp, Fusarium azukicola
  misc_feature: 495
aagaagaattagctataaatagcttttcttgtttcttttctctttcttccttcttagaattaggtttagattcccttttcttagaagtcttatgca

SEQ ID NO: 30056 - DNA, 96 bp, Fusarium azukicola
  misc_feature: 495
tctctcttttactttaccctatactctcttctctcttttactttaccctctacttttattctttattttactttaccctatactctcttctctctt

SEQ ID NO: 30057 - DNA, 96 bp, Fusarium azukicola
  misc_feature: 495
taagaataagtaagatagaataaagaagaagggagagtaagatatttagagttagagagaaagaataaagataagatgaggaagaaggaagaagga

SEQ ID NO: 30058 - DNA, 96 bp, Fusarium azukicola
  misc_feature: 495
taactttaaaggaggctgttaatgttctatattatattaccaactatagtgatatatccctataaaccatatattatattatagaatttttactct

SEQ ID NO: 30059 - DNA, 96 bp, Fusarium azukicola
  misc_feature: 494
tttcctttctcttcttcttcttttctataacctctctttttactaaactctaaactaccttatttttatctttctttttaccttaacttactctat

SEQ ID NO: 30060 - DNA, 96 bp, Fusarium azukicola
  misc_feature: 494
atgcagttattgcaaactgccaggtcataaagacccagattgctattttttgcaccctaataaggctccaaaaaactggaaaactcaggaagccaa

SEQ ID NO: 30061 - DNA, 96 bp, Fusarium azukicola
  misc_feature: 494
tctgagtctgtatagcctctaattatattgtgtatatctgaataatcacagttatatatagtagataaatttggatagctatttaaatacttccaa

SEQ ID NO: 30062 - DNA, 96 bp, Fusarium azukicola
  misc_feature: 494
ttcttttctataacctctctttttactaaactctaaactaccttatttttatctttctttttaccttaacttactctatactcctttctctcctaa

SEQ ID NO: 30063 - DNA, 96 bp, Fusarium azukicola
  misc_feature: 494
agtaaggaaggttaagaaaggagagaagtaaggaaggttaagaaaggagagaagtaaggaaggttaagaaaggagagaagtaaggaaggttaaaga

SEQ ID NO: 30064 - DNA, 96 bp, Fusarium azukicola
  misc_feature: 494
tcttcttttctataacctctctttttactaaactctaaactaccttatttttatctttctttttaccttaacttactctatactcctttctctcct

SEQ ID NO: 30065 - DNA, 96 bp, Fusarium azukicola
  misc_feature: 494
gagaaggggtagaagagagggggagttaaggtaagagagtaggagaagagtaggaaagggttataaggagagagtaaggaaaagaaaaaaaagtag

SEQ ID NO: 30066 - DNA, 96 bp, Fusarium azukicola
  misc_feature: 493
tacccctcactttttatcttaccttctctttactttttacctactctctttactattacttcttcttattcttaaccctctcttgcccccctttta

SEQ ID NO: 30067 - DNA, 96 bp, Fusarium azukicola
  misc_feature: 493
ctttccctccttcttttcctttctcttcttcttcttttctataacctctctttttactaaactctaaactaccttatttttatctttctttttacc

SEQ ID NO: 30068 - DNA, 96 bp, Fusarium azukicola
  misc_feature: 493
gctataacccttataagattataactttaaaggaggctgttaatgttctatattatattaccaactatagtgatatatccctataaaccatatatt

SEQ ID NO: 30069 - DNA, 96 bp, Fusarium azukicola
  misc_feature: 493
cttctctcttttactttaccctatactctcttctctcttttactttaccctctacttttattctttattttactttaccctatactctcttctctc

SEQ ID NO: 30070 - DNA, 96 bp, Fusarium azukicola
  misc_feature: 493
gacttctaagaaaagggaatctaaacctaattctaagaaggaagaaagagaaaagaaacaagaaaagctatttatagctaattcttcttcttcgtc

SEQ ID NO: 30071 - DNA, 96 bp, Fusarium azukicola
  misc_feature: 493
cttattggcttcctgagttttccagttttttggagccttattagggtgcaaaaaatagcaatctgggtctttatgacctggcagtttgcaataact

SEQ ID NO: 30072 - DNA, 96 bp, Fusarium azukicola
  misc_feature: 493
aggggaaggagaaagaagagaaaaaagtaagttaaggtaaaagagtagtatttaataggggaaaggaaagaagaagtaagtaaaaaaaagagaagg

SEQ ID NO: 30073 - DNA, 96 bp, Fusarium azukicola
  misc_feature: 493
aatattctatattatattactaactatagtgatatatccctataaaccatatattatattatagaatttttactctatttttaggtatatttacct

SEQ ID NO: 30074 - DNA, 96 bp, Fusarium azukicola
  misc_feature: 492
tttgcagttttcacagtttttaacttgatataggtcctcactagtatatttaaagagaggatcttttatttttatatatttaattagacttcttaa

SEQ ID NO: 30075 - DNA, 96 bp, Fusarium azukicola
  misc_feature: 492
ttcttcactcttcttcttaaccctaaccctctctttccctccttcttttcctttctcttcttcttcttttctataacctctctttttactaaactc

SEQ ID NO: 30076 - DNA, 96 bp, Fusarium azukicola
  misc_feature: 492
tctttttctattccccttctttctttctcttctaactacctatcttctttctcttctcccttcctcccttcctcccctctctctcttatattccct

SEQ ID NO: 30077 - DNA, 96 bp, Fusarium azukicola
  misc_feature: 492
tctcttctttctccttcccctttctcttcttttactactactttcttactctcttactacctttacttctatacctattttctctttaactactct

SEQ ID NO: 30078 - DNA, 96 bp, Fusarium azukicola
  misc_feature: 492
cttcttctttcctttcccctattaaatactactcttttaccttaacttacttttttctcttctttctccttcccctttctcttcttttactactac

SEQ ID NO: 30079 - DNA, 96 bp, Fusarium azukicola
  misc_feature: 492
agccaataaggtgcataagacttctaagaaaagggaatctaaacctaattctaagaaggaagaaagagaaaagaaacaagaaaagctatttatagc

SEQ ID NO: 30080 - DNA, 96 bp, Fusarium azukicola
  misc_feature: 492
gagtctgtatagcctctaattatattgtgtatatctgaataatcgcagttatatatagtagataaatttggatagctatttaaatacttccaaatc

SEQ ID NO: 30081 - DNA, 96 bp, Fusarium azukicola
  misc_feature: 492
ctaattccctcctaccttctctaaactacgttctattactttctattactttcttacttttctttcttttactcttccccttctccttttatcttc

SEQ ID NO: 30082 - DNA, 96 bp, Fusarium azukicola
  misc_feature: 491
aggtatagaagtaaaggtagtaagagagtaagaaagtagtagtaaaagaagagaaaggggaaggagaaagaagagaaaaaagtaagttaaggtaaa

SEQ ID NO: 30083 - DNA, 96 bp, Fusarium azukicola
  misc_feature: 491
ttctcttccttcctctttctctttacttccctttctctttctcctccctcctcttcactccctttactcctcttaacttctctttctcttccctct

SEQ ID NO: 30084 - DNA, 96 bp, Fusarium azukicola
  misc_feature: 491
gaaagagaagttaagaggagtaaagggagtgaagaggagggaggagaaagagaaagggaagtaaagagaaagaggaaggaagagaagggaatataa

SEQ ID NO: 30085 - DNA, 96 bp, Fusarium azukicola
  misc_feature: 491
aaaagaagaagaaaaagagaaatgaaggaggggaagagtaaagaaaaagagaagaagataaaaggagaaggggaagagtaaaagaaagaaaagtaa

SEQ ID NO: 30086 - DNA, 96 bp, Fusarium azukicola
  misc_feature: 491
tatagaagtaaaggtagtaagagagtaagaaagtagtagtaaaagaagagaaaggggaaggagaaagaagagaaaaaagtaagttaaggtaaaaga

SEQ ID NO: 30087 - DNA, 96 bp, Fusarium azukicola
  misc_feature: 491
cttagattttcccttataatatcaggtctataataaaggggtttttactaagatatatatataataataatagaggtttaattttttcctctaata

SEQ ID NO: 30088 - DNA, 96 bp, Fusarium azukicola
  misc_feature: 491
aaaattaactagaaattcttttctacatacaatatgcctagtagcacctgtatcatatataaaattagttatattatctttattagtagaaaaaac

SEQ ID NO: 30089 - DNA, 96 bp, Fusarium azukicola
  misc_feature: 491
ctctcttttactttaccctatactctcttctctcttttactttaccctctacttttattctttattttactttaccctatactctcttctctcttt

SEQ ID NO: 30090 - DNA, 96 bp, Fusarium azukicola
  misc_feature: 491
aaaggggggcaagagagggttaagaataagaagaagtaatagtaaagagagtaggtaaaaagtaaagagaaggtaagataaaaagtgaggggtagg

SEQ ID NO: 30091 - DNA, 96 bp, Fusarium azukicola
  misc_feature: 491
cctaacctttactataactacttaaccctaacccttaatttaattattacccctaattattactttaattacttcccttgacctttattataacct

SEQ ID NO: 30092 - DNA, 96 bp, Fusarium azukicola
  misc_feature: 490
atataagaataagtaagatagaataaagaagaagggagagtaagatatttagagttagagagaaagaataaagataagatgaggaagaaggaagaa

SEQ ID NO: 30093 - DNA, 96 bp, Fusarium azukicola
  misc_feature: 490
aaaggggaaggagaaagaagagaaaaaagtaagttaaggtaaaagagtagtatttaataggggaaaggaaagaagaagtaagtaaaaaaaagagaa

SEQ ID NO: 30094 - DNA, 96 bp, Fusarium azukicola
  misc_feature: 490
ttaatattctatattatattactaactatagtgatatatccctataaaccatatattatattatagaatttttactctatttttaggtatatttac

SEQ ID NO: 30095 - DNA, 96 bp, Fusarium azukicola
  misc_feature: 490
cctctcctctcttcctctcctctatacttacttactaaactctcctccctcttcaataaccttccttttattcttactataacccccttctttttc

SEQ ID NO: 30096 - DNA, 96 bp, Fusarium azukicola
  misc_feature: 490
ctcttatattcccttctcttccttcctctttctctttacttccctttctctttctcctccctcctcttcactccctttactcctcttaacttctct

SEQ ID NO: 30097 - DNA, 96 bp, Fusarium azukicola
  misc_feature: 490
agacttctaagaaaaaggaatctaaacctaattctaagaaggaagaaagagaaaagaaataagaaaagctatttatagctaattcttcttctttat

SEQ ID NO: 30098 - DNA, 96 bp, Fusarium azukicola
  misc_feature: 490
aggaattaaggaattatatacctctaaattatcacttatatcaaaatccatttcatctggggtctcagaaagggaaattaggtcttcctcggcttt

SEQ ID NO: 30099 - DNA, 96 bp, Fusarium azukicola
  misc_feature: 490
aaagaataagagggaaaggaagagaagaagattgagagaaagaggagggaagagaaggaaggagaaagaggaaggggagttaaaagtgtgtgaagt

SEQ ID NO: 30100 - DNA, 96 bp, Fusarium azukicola
  misc_feature: 489
ttctttttctattccccttctttctttctcttctaactacctatcttctttctcttctcccttcctcccttcctcccctctctctcttatattccc

SEQ ID NO: 30101 - DNA, 96 bp, Fusarium azukicola
  misc_feature: 489
ttccagttttttggagctttattagggtgcaaaaaatagcaatctgggtctttatgacctggcagtttgcaataactgcattttaaggcagttttc

SEQ ID NO: 30102 - DNA, 96 bp, Fusarium azukicola
  misc_feature: 489
gaaaggggaaggagaaagaagagaaaaaagtaagttaaggtaaaagagtagtatttaataggggaaaggaaagaagaagtaagtaaaaaaaagaga

SEQ ID NO: 30103 - DNA, 96 bp, Fusarium azukicola
  misc_feature: 489
tatttatctttcttaacctcactacttttttttcttttccttactctctccttataaccctttcctactcttctcctactctcttaccttaactcc

SEQ ID NO: 30104 - DNA, 96 bp, Fusarium azukicola
  misc_feature: 489
cttaaccctaaccctaatttcaaccaattaaccctaacccttaactctactactacccctaaccctaatttcaaccaattaaccctaacccttaac

SEQ ID NO: 30105 - DNA, 96 bp, Fusarium azukicola
  misc_feature: 489
gggttagggttaagaagaagagtgaagaaagataaaggaaagaaagggagaaagagaagagtaaaagataaaaaaagaaaagaaggtaaaatagag

SEQ ID NO: 30106 - DNA, 96 bp, Fusarium azukicola
  misc_feature: 489
ccctcactttttatcttaccttctctttactttttacctactctctttactattacttcttcttattcttaaccctctcttgccccccttttaact

SEQ ID NO: 30107 - DNA, 96 bp, Fusarium azukicola
  misc_feature: 489
aaccctaaccctaatttcaaccaattaaccctaacccttaactctactactacccctaaccctaatttcaaccaattaaccctaacccttaactct

SEQ ID NO: 30108 - DNA, 96 bp, Fusarium azukicola
  misc_feature: 488
ttttttttacttacttcttctttcctttcccctattaaatactactcttttaccttaacttacttttttctcttctttctccttcccctttctctt

SEQ ID NO: 30109 - DNA, 96 bp, Fusarium azukicola
  misc_feature: 488
ttcttttcctttctcttcttcttcttttctataacctctctttttactaaactctaaactaccttatttttatctttctttttaccttaacttact

SEQ ID NO: 30110 - DNA, 96 bp, Fusarium azukicola
  misc_feature: 488
agagaaggggtagaagagagggggagttaaggtaagagagtaggagaagagtaggaaagggttataaggagagagtaaggaaaagaaaaaaaagta

SEQ ID NO: 30111 - DNA, 96 bp, Fusarium azukicola
  misc_feature: 488
taaaaggagaaggggaagagtaaaagaaagaaaagtaagaaagtaatagaaagtaatagaacgtagtttagagaaggtaggagggaattagaggta

SEQ ID NO: 30112 - DNA, 96 bp, Fusarium azukicola
  misc_feature: 488
gaaaaagagaagaagataaaaggagaaggggaagagtaaaagaaagaaaagtaagaaagtaatagaaagtaatagaacgtagtttagagaaggtag

SEQ ID NO: 30113 - DNA, 96 bp, Fusarium azukicola
  misc_feature: 488
agaagagaaaaaagtaagttaaggtaaaagagtagtatttaataggggaaaggaaagaagaagtaagtaaaaaaaagagaaggggtagaagagagg

SEQ ID NO: 30114 - DNA, 96 bp, Fusarium azukicola
  misc_feature: 487
tctttcttcactcttcttcttaaccctaaccctctctttccctccttcttttcctttctcttcttcttcttttctataacctctctttttactaaa

SEQ ID NO: 30115 - DNA, 96 bp, Fusarium azukicola
  misc_feature: 487
ttcttaactacactttctctctacctcacttttccctctttatattaaccctctcccttctttctcttcctcttctctccctctttactcctcttc

SEQ ID NO: 30116 - DNA, 96 bp, Fusarium azukicola
  misc_feature: 487
tcttctctcttttactttaccctatactctcttctctcttttactttaccctctacttttattctttattttactttaccctatactctcttctct

SEQ ID NO: 30117 - DNA, 96 bp, Fusarium azukicola
  misc_feature: 487
tcttaactacactttctctctacctcacttttccctctttatattaaccctctcccttctttctcttcctcttctctccctctttactcctcttct

SEQ ID NO: 30118 - DNA, 96 bp, Fusarium azukicola
  misc_feature: 487
ctaatattataagggaaaatctaagattatatagggaaaagtattaaaatataataaaaaccctttataaaggaaataagttatattagggataga

SEQ ID NO: 30119 - DNA, 96 bp, Fusarium azukicola
  misc_feature: 487
tattggcttcctgagttttccagttttttggagccttattagggtgcaaaaaatagcaatctgggtctttatgacctggcagtttgcaataactgc

SEQ ID NO: 30120 - DNA, 96 bp, Fusarium azukicola
  misc_feature: 487
ctttcttcactcttcttcttaaccctaaccctctctttccctccttcttttcctttctcttcttcttcttttctataacctctctttttactaaac

SEQ ID NO: 30121 - DNA, 96 bp, Fusarium azukicola
  misc_feature: 487
ggttagggttaagaagaagagtgaagaaagataaaggaaagaaagggagaaagagaagagtaaaagataaaaaaagaaaagaaggtaaaatagagg

SEQ ID NO: 30122 - DNA, 96 bp, Fusarium azukicola
  misc_feature: 487
aaaggggtttttactaagatatatatataataataatagaggtttaattttttcctctaataataagaacgtataaagctataacccttataagat

SEQ ID NO: 30123 - DNA, 96 bp, Fusarium azukicola
  misc_feature: 487
acttttctttcttttactcttccccttctccttttatcttcttctctttttctttactcttcccctccttcatttctctttttcttcttcttttct

SEQ ID NO: 30124 - DNA, 96 bp, Fusarium azukicola
  misc_feature: 486
gtctgagtctgtatagcctctaattatattgtgtatatctgaataatcgcagttatatatagtagataaatttggatagctatttaaatacttcca

SEQ ID NO: 30125 - DNA, 96 bp, Fusarium azukicola
  misc_feature: 486
tctcttacctctaattccctcctaccttctctaaactacgttctattactttctattactttcttacttttctttcttttactcttccccttctcc

SEQ ID NO: 30126 - DNA, 96 bp, Fusarium azukicola
  misc_feature: 486
ctaacctttactataactacttaaccctaacccttaatttaattattacccctaattattactttaattacttcccttgacctttattataacctc

SEQ ID NO: 30127 - DNA, 96 bp, Fusarium azukicola
  misc_feature: 485
aaggaaagaagaagtaagtaaaaaaaagagaaggggtagaagagagggggagttaaggtaagagagtaggagaagagtaggaaagggttataagga

SEQ ID NO: 30128 - DNA, 96 bp, Fusarium azukicola
  misc_feature: 485
gaagaaaaagagaaatgaaggaggggaagagtaaagaaaaagagaagaagataaaaggagaaggggaagagtaaaagaaagaaaagtaagaaagta

SEQ ID NO: 30129 - DNA, 96 bp, Fusarium azukicola
  misc_feature: 485
taagacttctaagaaaaaggaatctaaacctaattctaagaaggaagaaagagaaaagaaataagaaaagctatttatagctaattcttcttcttt

SEQ ID NO: 30130 - DNA, 96 bp, Fusarium azukicola
  misc_feature: 485
aaaaataaggtagtttagagtttagtaaaaagagaggttatagaaaagaagaagaagagaaaggaaaagaaggagggaaagagagggttagggtta

SEQ ID NO: 30131 - DNA, 96 bp, Fusarium azukicola
  misc_feature: 485
cttaactacactttctctctacctcacttttccctctttatattaaccctctcccttctttctcttcctcttctctccctctttactcctcttctt

SEQ ID NO: 30132 - DNA, 96 bp, Fusarium azukicola
  misc_feature: 484
aaaagagaaggggtagaagagagggggagttaaggtaagagagtaggagaagagtaggaaagggttataaggagagagtaaggaaaagaaaaaaaa

SEQ ID NO: 30133 - DNA, 96 bp, Fusarium azukicola
  misc_feature: 484
atctttcttcactcttcttcttaaccctaaccctctctttccctccttcttttcctttctcttcttcttcttttctataacctctctttttactaa

SEQ ID NO: 30134 - DNA, 96 bp, Fusarium azukicola
  misc_feature: 484
tctaattccctcctaccttctctaaactacgttctattactttctattactttcttacttttctttcttttactcttccccttctccttttatctt

SEQ ID NO: 30135 - DNA, 96 bp, Fusarium azukicola
  misc_feature: 484
taaggaaggttaagaaaggagagaagtaaggaaggttaagaaaggagagaagtaaggaaggttaagaaaggagagaagtaaggaaggttaaagaag

SEQ ID NO: 30136 - DNA, 96 bp, Fusarium azukicola
  misc_feature: 484
cttaactcacctacttaaccctaaccctaatttcaaccaattaaccctaacccttaactctactactacccctaaccctaatttcaaccaattaac

SEQ ID NO: 30137 - DNA, 96 bp, Fusarium azukicola
  misc_feature: 484
gaagaaaactgccttaaaatgcagttattgcaaactgccaggtcataaagacccagattgctattttttgcaccctaataaagctccaaaaaactg

SEQ ID NO: 30138 - DNA, 96 bp, Fusarium azukicola
  misc_feature: 484
ctttcccctattaaatactactcttttaccttaacttacttttttctcttctttctccttcccctttctcttcttttactactactttcttactct

SEQ ID NO: 30139 - DNA, 96 bp, Fusarium azukicola
  misc_feature: 484
aagacccagattgctattttttgcaccctaataaggctccaaaaaactggaaaactcaggaagccaataaggtgcataagacttctaagaaaaggg

SEQ ID NO: 30140 - DNA, 96 bp, Fusarium azukicola
  misc_feature: 484
agaagaagaattagctataaatagcttttcttgtttcttttctctttcttccttcttagaattaggtttagattcccttttcttagaagtcttatg

SEQ ID NO: 30141 - DNA, 96 bp, Fusarium azukicola
  misc_feature: 484
aacctttactataactacttaaccctaacccttaatttaattattacccctaattattactttaattacttcccttgacctttattataacctctt

SEQ ID NO: 30142 - DNA, 96 bp, Fusarium azukicola
  misc_feature: 483
gtattaggagagaaaggagtatagagtaagttaaggtaaaaagaaagataaaaataaggtagtttagagtttagtaaaaagagaggttatagaaaa

SEQ ID NO: 30143 - DNA, 96 bp, Fusarium azukicola
  misc_feature: 483
ttccttctctctcctccttctttttacttttcctcctctctttctctcccctccttctctctcctcttttaaccccctctatctcttctccccttt

SEQ ID NO: 30144 - DNA, 96 bp, Fusarium azukicola
  misc_feature: 483
tctttttctaaactaccttataagggatttttttaaaaagttttaaaaaaccataataggttttttatggcttaattagtctaactctaagttatt

SEQ ID NO: 30145 - DNA, 96 bp, Fusarium azukicola
  misc_feature: 483
aggaaaaaattaaacctctattattattatatatatcttagtaaaaacccctttattatagacctaatattataagggaaaatctaagattatata

SEQ ID NO: 30146 - DNA, 96 bp, Fusarium azukicola
  misc_feature: 482
tcctctcctctcttcctctcctctatacttacttactaaactctcctccctcttcaataaccttccttttattcttactataacccccttcttttt

SEQ ID NO: 30147 - DNA, 96 bp, Fusarium azukicola
  misc_feature: 482
tatctttcttcactcttcttcttaaccctaaccctctctttccctccttcttttcctttctcttcttcttcttttctataacctctctttttacta

SEQ ID NO: 30148 - DNA, 96 bp, Fusarium azukicola
  misc_feature: 482
ctttatctttcttcactcttcttcttaaccctaaccctctctttccctccttcttttcctttctcttcttcttcttttctataacctctcttttta

SEQ ID NO: 30149 - DNA, 96 bp, Fusarium azukicola
  misc_feature: 482
cctctcccctctccctctctctcttttcactccttcttccttcttcctcatcttatctttattctttctctctaactctaaatatcttactctccc

SEQ ID NO: 30150 - DNA, 96 bp, Fusarium azukicola
  misc_feature: 482
ctcctctcccctctccctctctctcttttcactccttcttccttcttcctcatcttatctttattctttctctctaactctaaatatcttactctc

SEQ ID NO: 30151 - DNA, 96 bp, Fusarium azukicola
  misc_feature: 482
cttataaccctttcctactcttctcctactctcttaccttaactccccctctcttctaccccttctcttttttttacttacttcttctttcctttc

SEQ ID NO: 30152 - DNA, 96 bp, Fusarium azukicola
  misc_feature: 481
tttctcttctattcacttcctacctttctaatcacccttcctctactctttttcttttctctcctctcccctctccctctctctcttttcactcct

SEQ ID NO: 30153 - DNA, 96 bp, Fusarium azukicola
  misc_feature: 481
tttcctttcccctattaaatactactcttttaccttaacttacttttttctcttctttctccttcccctttctcttcttttactactactttctta

SEQ ID NO: 30154 - DNA, 96 bp, Fusarium azukicola
  misc_feature: 481
gttattgcaaactgccaggtcataaagacccagattgctattttttgcaccctaataaggctccaaaaaactggaaaactcaggaagccaataagg

SEQ ID NO: 30155 - DNA, 96 bp, Fusarium azukicola
  misc_feature: 481
cagaattttttaaaaatctaaaaaaatcatttttagactttattaagagttagatttatagaaatactctttttatcttcctagctattttatagc

SEQ ID NO: 30156 - DNA, 96 bp, Fusarium azukicola
  misc_feature: 480
tccctttctttcctttatctttcttcactcttcttcttaaccctaaccctctctttccctccttcttttcctttctcttcttcttcttttctataa

SEQ ID NO: 30157 - DNA, 96 bp, Fusarium azukicola
  misc_feature: 480
tcctttcccctattaaatactactcttttaccttaacttacttttttctcttctttctccttcccctttctcttcttttactactactttcttact

SEQ ID NO: 30158 - DNA, 96 bp, Fusarium azukicola
  misc_feature: 480
taatattctatattatattactaactatagtgatatatccctataaaccatatattatattatagaatttttactctatttttaggtatatttacc

SEQ ID NO: 30159 - DNA, 96 bp, Fusarium azukicola
  misc_feature: 480
cccctcactttttatcttaccttctctttactttttacctactctctttactattacttcttcttattcttaaccctctcttgccccccttttaac

SEQ ID NO: 30160 - DNA, 96 bp, Fusarium azukicola
  misc_feature: 480
attataaggaaaagagaaaaataacctatatataataatagctaaggttatttctaataagaataactatagactaagagataacttagatcttcc

SEQ ID NO: 30161 - DNA, 96 bp, Fusarium azukicola
  misc_feature: 480
atatttatctttcttaacctcactacttttttttcttttccttactctctccttataaccctttcctactcttctcctactctcttaccttaactc

SEQ ID NO: 30162 - DNA, 96 bp, Fusarium azukicola
  misc_feature: 480
cttcttcttttctataacctctctttttactaaactctaaactaccttatttttatctttctttttaccttaacttactctatactcctttctctc

SEQ ID NO: 30163 - DNA, 96 bp, Fusarium azukicola
  misc_feature: 480
gaaagaagagaaaaaagtaagttaaggtaaaagagtagtatttaataggggaaaggaaagaagaagtaagtaaaaaaaagagaaggggtagaagag

SEQ ID NO: 30164 - DNA, 96 bp, Fusarium azukicola
  misc_feature: 480
agttatattattttgttgagaaattatggaattatatacctctaaattatcacttatatcaaaatccatttcttctggggtctcagaaagggaaat

SEQ ID NO: 30165 - DNA, 96 bp, Fusarium azukicola
  misc_feature: 479
tttcttttattcttccttctctctcctccttctttttacttttcctcctctctttctctcccctccttctctctcctcttttaaccccctctatct

SEQ ID NO: 30166 - DNA, 96 bp, Fusarium azukicola
  misc_feature: 479
ttctcttctattcacttcctacctttctaatcacccttcctctactctttttcttttctctcctctcccctctccctctctctcttttcactcctt

SEQ ID NO: 30167 - DNA, 96 bp, Fusarium azukicola
  misc_feature: 479
tattccttattactaggttttttatttatattatttttagttaattttcctagtttgcagttttcacagtttttaacttgatataggtcctcacta

SEQ ID NO: 30168 - DNA, 96 bp, Fusarium azukicola
  misc_feature: 479
tattattattatataatattgccttttcattattataggggctttctttaaagtaaggaatctcattaaaagaggggttatttccttcgagaaagc

SEQ ID NO: 30169 - DNA, 96 bp, Fusarium azukicola
  misc_feature: 479
atattaaccctctcccttctttctcttcctcttctctccctctttactcctcttcttctcttctccccttcctctcctctcttcctctcctctata

SEQ ID NO: 30170 - DNA, 96 bp, Fusarium azukicola
  misc_feature: 479
ccccttctcttttttttacttacttcttctttcctttcccctattaaatactactcttttaccttaacttacttttttctcttctttctccttccc

SEQ ID NO: 30171 - DNA, 96 bp, Fusarium azukicola
  misc_feature: 479
ctctcctaacttcacacacttttaactccccttcctctttctccttccttctcttccctcctctttctctcaatcttcttctcttcctttccctct

SEQ ID NO: 30172 - DNA, 96 bp, Fusarium azukicola
  misc_feature: 479
aaaaagagaagaagataaaaggagaaggggaagagtaaaagaaagaaaagtaagaaagtaatagaaagtaatagaacgtagtttagagaaggtagg

SEQ ID NO: 30173 - DNA, 96 bp, Fusarium azukicola
  misc_feature: 478
attagttatattatctttattagtagaaaaaacaggtttatttaccttatttaaatatcctagttgtttctttatatagggaaggtttcttatcaa

SEQ ID NO: 30174 - DNA, 96 bp, Fusarium azukicola
  misc_feature: 478
ttcttccttctctctcctccttctttttacttttcctcctctctttctctcccctccttctctctcctcttttaaccccctctatctcttctcccc

SEQ ID NO: 30175 - DNA, 96 bp, Fusarium azukicola
  misc_feature: 478
tattaatgttctatattatattactaactatagtgatatatccctataaaccatatattatattatagaatttttactctatttttaggtatattt

SEQ ID NO: 30176 - DNA, 96 bp, Fusarium azukicola
  misc_feature: 478
gtaagttaaggtaaaaagaaagataaaaataaggtagtttagagtttagtaaaaagagaggttatagaaaagaagaagaagagaaaggaaaagaag

SEQ ID NO: 30177 - DNA, 96 bp, Fusarium azukicola
  misc_feature: 478
gaggaaaaaattaaacctctattattattatatatatatcttagtaaaaacccctttattatagacctgatattataagggaaaatctaagattat

SEQ ID NO: 30178 - DNA, 96 bp, Fusarium azukicola
  misc_feature: 477
tctttccctccttcttttcctttctcttcttcttcttttctataacctctctttttactaaactctaaactaccttatttttatctttctttttac

SEQ ID NO: 30179 - DNA, 96 bp, Fusarium azukicola
  misc_feature: 477
atagaggagaggaagagaggagaggaaggggagaagagaagaagaggagtaaagagggagagaagaggaagagaaagaagggagagggttaatata

SEQ ID NO: 30180 - DNA, 96 bp, Fusarium azukicola
  misc_feature: 477
atctcttctcccctttttccctcccctcttcctctactttctttctcttctcccctcctcttcttaactacactttctctctacctcacttttccc

SEQ ID NO: 30181 - DNA, 96 bp, Fusarium azukicola
  misc_feature: 477
ctctaattccctcctaccttctctaaactacgttctattactttctattactttcttacttttctttcttttactcttccccttctccttttatct

SEQ ID NO: 30182 - DNA, 96 bp, Fusarium azukicola
  misc_feature: 476
ggtattattctaattggttaaaaaggttcctacagaccttcatgactgccgtcatcaatgcatcaaagtataataactgccgattggctaaaaaaa

SEQ ID NO: 30183 - DNA, 96 bp, Fusarium azukicola
  misc_feature: 476
gaaaagaaggagggaaagagagggttagggttaagaagaagagtgaagaaagataaaggaaagaaagggagaaagagaagagtaaaagataaaaaa

SEQ ID NO: 30184 - DNA, 96 bp, Fusarium azukicola
  misc_feature: 476
tatccgacggtataatcttggtccgaatcggatcctattaggccggtcaaatgactataataagggactatccttctttgttagttactacaacaa

SEQ ID NO: 30185 - DNA, 96 bp, Fusarium azukicola
  misc_feature: 476
ttattggcttcctgagttttccagttttttggagccttattagggtgcaaaaaatagcaatctgggtctttatgacctggcagtttgcaataactg

SEQ ID NO: 30186 - DNA, 96 bp, Fusarium azukicola
  misc_feature: 476
taggtatagaagtaaaggtagtaagagagtaagaaagtagtagtaaaagaagagaaaggggaaggagaaagaagagaaaaaagtaagttaaggtaa

SEQ ID NO: 30187 - DNA, 96 bp, Fusarium azukicola
  misc_feature: 476
tcttcttcttttctataacctctctttttactaaactctaaactaccttatttttatctttctttttaccttaacttactctatactcctttctct

SEQ ID NO: 30188 - DNA, 96 bp, Fusarium azukicola
  misc_feature: 476
attaaatactactcttttaccttaacttacttttttctcttctttctccttcccctttctcttcttttactactactttcttactctcttactacc

SEQ ID NO: 30189 - DNA, 96 bp, Fusarium azukicola
  misc_feature: 476
atttatctttcttaacctcactacttttttttcttttccttactctctccttataaccctttcctactcttctcctactctcttaccttaactccc

SEQ ID NO: 30190 - DNA, 96 bp, Fusarium azukicola
  misc_feature: 476
gaggagaggaagagaggagaggaaggggagaagagaagaagaggagtaaagagggagagaagaggaagagaaagaagggagagggttaatataaag

SEQ ID NO: 30191 - DNA, 96 bp, Fusarium azukicola
  misc_feature: 476
aggaatttcgatagtgaatttctgtttattattattattattatataatattgccttttcattattataagggctttctttaaagtaaggaatctc

SEQ ID NO: 30192 - DNA, 96 bp, Fusarium azukicola
  misc_feature: 476
ccttactctctccttataaccctttcctactcttctcctactctcttaccttaactccccctctcttctaccccttctcttttttttacttacttc

SEQ ID NO: 30193 - DNA, 96 bp, Fusarium azukicola
  misc_feature: 475
tttttatcttaccttctctttactttttacctactctctttactattacttcttcttattcttaaccctctcttgccccccttttaactctaaaac

SEQ ID NO: 30194 - DNA, 96 bp, Fusarium azukicola
  misc_feature: 475
taaaggggtttttactaagatatatatataataataatagaggtttaattttttcctctaataataagaacgtataaagctataacccttataaga

SEQ ID NO: 30195 - DNA, 96 bp, Fusarium azukicola
  misc_feature: 475
gagtatagggtatataagaataagtaagatagaataaagaagaagggagagtaagatatttagagttagagagaaagaataaagataagatgagga

SEQ ID NO: 30196 - DNA, 96 bp, Fusarium azukicola
  misc_feature: 475
tatactcctctattttaccttcttttctttttttatcttttactcttctctttctccctttctttcctttatctttcttcactcttcttcttaacc

SEQ ID NO: 30197 - DNA, 96 bp, Fusarium azukicola
  misc_feature: 475
ggcttaattagtctaactctaagttattagctaattaaatcttaagctgaatttcttagaatttttaaggctattttaaaatttggtataaatccc

SEQ ID NO: 30198 - DNA, 96 bp, Fusarium azukicola
  misc_feature: 475
ctttttctattccccttctttctttctcttctaactacctatcttctttctcttctcccttcctcccttcctcccctctctctcttatattccctt

SEQ ID NO: 30199 - DNA, 96 bp, Fusarium azukicola
  misc_feature: 474
tttcttcactcttcttcttaaccctaaccctctctttccctccttcttttcctttctcttcttcttcttttctataacctctctttttactaaact

SEQ ID NO: 30200 - DNA, 96 bp, Fusarium azukicola
  misc_feature: 474
tttaggaatttcgatagtgaatttctgtttattattattattattatataatattgccttttcattattataagggctttctttaaagtaaggaat

SEQ ID NO: 30201 - DNA, 96 bp, Fusarium azukicola
  misc_feature: 474
ttatctttcttcactcttcttcttaaccctaaccctctctttccctccttcttttcctttctcttcttcttcttttctataacctctctttttact

SEQ ID NO: 30202 - DNA, 96 bp, Fusarium azukicola
  misc_feature: 474
atactcctctattttaccttcttttctttttttatcttttactcttctctttctccctttctttcctttatctttcttcactcttcttcttaaccc

SEQ ID NO: 30203 - DNA, 96 bp, Fusarium azukicola
  misc_feature: 474
agaaaggggaaggagaaagaagagaaaaaagtaagttaaggtaaaagagtagtatttaataggggaaaggaaagaagaagtaagtaaaaaaaagag

SEQ ID NO: 30204 - DNA, 96 bp, Fusarium azukicola
  misc_feature: 474
aaaggagtatagagtaagttaaggtaaaaagaaagataaaaataaggtagtttagagtttagtaaaaagagaggttatagaaaagaagaagaagag

SEQ ID NO: 30205 - DNA, 96 bp, Fusarium azukicola
  misc_feature: 473
ttcctcaacaaaataatataactaataatatactaggacctttaataagaaaccttccctatataaagaaacaactaggatatttaaataaggtaa

SEQ ID NO: 30206 - DNA, 96 bp, Fusarium azukicola
  misc_feature: 473
ttattattagaggaaaaaattaaacctctattattattatatatatcttagtaaaaacccctttattatagacctaatattataagggaaaatcta

SEQ ID NO: 30207 - DNA, 96 bp, Fusarium azukicola
  misc_feature: 473
ttaggaatttcgatagtgaatttctgtttattattattattattatataatattgccttttcattattataggggctttctttaaagtaaggaatc

SEQ ID NO: 30208 - DNA, 96 bp, Fusarium azukicola
  misc_feature: 473
ttaggaatttcgatagtgaatttctgtttattattattattattatataatattgccttttcattattataagggctttctttaaagtaaggaatc

SEQ ID NO: 30209 - DNA, 96 bp, Fusarium azukicola
  misc_feature: 473
tctaccccttctcttttttttacttacttcttctttcctttcccctattaaatactactcttttaccttaacttacttttttctcttctttctcct

SEQ ID NO: 30210 - DNA, 96 bp, Fusarium azukicola
  misc_feature: 473
taagacttctaagaaaagggaatctaaacctaattctaagaaggaagaaagagaaaagaaacaagaaaagctatttatagctaattcttcttcttc

SEQ ID NO: 30211 - DNA, 96 bp, Fusarium azukicola
  misc_feature: 473
cctctaattccctcctaccttctctaaactacgttctattactttctattactttcttacttttctttcttttactcttccccttctccttttatc

SEQ ID NO: 30212 - DNA, 96 bp, Fusarium azukicola
  misc_feature: 473
cttctttctcttcctcttctctccctctttactcctcttcttctcttctccccttcctctcctctcttcctctcctctatacttacttactaaact

SEQ ID NO: 30213 - DNA, 96 bp, Fusarium azukicola
  misc_feature: 473
aaagacccagattgctattttttgcaccctaataaggctccaaaaaactggaaaactcaggaagccaataaggtgcataagacttctaagaaaagg

SEQ ID NO: 30214 - DNA, 96 bp, Fusarium azukicola
  misc_feature: 473
attactttcttacttttctttcttttactcttccccttctccttttatcttcttctctttttctttactcttcccctccttcatttctctttttct

SEQ ID NO: 30215 - DNA, 96 bp, Fusarium azukicola
  misc_feature: 472
ttttcttttccttactctctccttataaccctttcctactcttctcctactctcttaccttaactccccctctcttctaccccttctctttttttt

SEQ ID NO: 30216 - DNA, 96 bp, Fusarium azukicola
  misc_feature: 472
tttctcttcttttactactactttcttactctcttactacctttacttctatacctattttctctttaactactctatatatcttaataaccaatc

SEQ ID NO: 30217 - DNA, 96 bp, Fusarium azukicola
  misc_feature: 472
tagttatattattttgttgagaaattatggaattatatacctctaaattatcacttatatcaaaatccatttcttctggggtctcagaaagggaaa

SEQ ID NO: 30218 - DNA, 96 bp, Fusarium azukicola
  misc_feature: 472
tgcctagtagcacctgtatcatatataaaattagttatattatctttattagtagaaaaaacaggtttatttaccttatttaaatatcctagttgt

SEQ ID NO: 30219 - DNA, 96 bp, Fusarium azukicola
  misc_feature: 472
tacttttctttcttttactcttccccttctccttttatcttcttctctttttctttactcttcccctccttcatttctctttttcttcttcttttc

SEQ ID NO: 30220 - DNA, 96 bp, Fusarium azukicola
  misc_feature: 472
attaatgttctatattatattactaactatagtgatatatccctataaaccatatattatattatagaatttttactctatttttaggtatattta

SEQ ID NO: 30221 - DNA, 96 bp, Fusarium azukicola
  misc_feature: 472
gagaagaagaggagtaaagagggagagaagaggaagagaaagaagggagagggttaatataaagagggaaaagtgaggtagagagaaagtgtagtt

SEQ ID NO: 30222 - DNA, 96 bp, Fusarium azukicola
  misc_feature: 472
cttcttaactacactttctctctacctcacttttccctctttatattaaccctctcccttctttctcttcctcttctctccctctttactcctctt

SEQ ID NO: 30223 - DNA, 96 bp, Fusarium azukicola
  misc_feature: 472
ataaaggggtttttactaagatatatatataataataatagaggtttaattttttcctctaataataagaacgtataaagctataacccttataag

SEQ ID NO: 30224 - DNA, 96 bp, Fusarium azukicola
  misc_feature: 472
aaaggaaagaagaagtaagtaaaaaaaagagaaggggtagaagagagggggagttaaggtaagagagtaggagaagagtaggaaagggttataagg

SEQ ID NO: 30225 - DNA, 96 bp, Fusarium azukicola
  misc_feature: 472
actgccttaaaatgcagttattgcaaactgccaggtcataaagacccagattgctattttttgcaccctaataaggctccaaaaaactggaaaact

SEQ ID NO: 30226 - DNA, 96 bp, Fusarium azukicola
  misc_feature: 471
ttcttcctcatcttatctttattctttctctctaactctaaatatcttactctcccttcttctttattctatcttacttattcttatataccctat

SEQ ID NO: 30227 - DNA, 96 bp, Fusarium azukicola
  misc_feature: 471
ttataaggaaaagagaaaaataacctatatataataatagctaaggttatttctaataagaataactatagactaagagataacttagatcttcct

SEQ ID NO: 30228 - DNA, 96 bp, Fusarium azukicola
  misc_feature: 471
ggaatttcgatagtgaatttctgtttattattattattattatataatattgccttttcattattataggggctttctttaaagtaaggaatctca

SEQ ID NO: 30229 - DNA, 96 bp, Fusarium azukicola
  misc_feature: 471
aagaagaagaaaaagagaaatgaaggaggggaagagtaaagaaaaagagaagaagataaaaggagaaggggaagagtaaaagaaagaaaagtaaga

SEQ ID NO: 30230 - DNA, 96 bp, Fusarium azukicola
  misc_feature: 471
tctcttttactttaccctatactctcttctctcttttactttaccctctacttttattctttattttactttaccctatactctcttctctctttt

SEQ ID NO: 30231 - DNA, 96 bp, Fusarium azukicola
  misc_feature: 471
tctcttcttttactactactttcttactctcttactacctttacttctatacctattttctctttaactactctatatatcttaataaccaatcac

SEQ ID NO: 30232 - DNA, 96 bp, Fusarium azukicola
  misc_feature: 471
gttatattattttgttgagaaattatggaattatatacctctaaattatcacttatatcaaaatccatttcttctggggtctcagaaagggaaatt

SEQ ID NO: 30233 - DNA, 96 bp, Fusarium azukicola
  misc_feature: 471
ctatactcctctattttaccttcttttctttttttatcttttactcttctctttctccctttctttcctttatctttcttcactcttcttcttaac

SEQ ID NO: 30234 - DNA, 96 bp, Fusarium azukicola
  misc_feature: 471
gcctagtagcacctgtatcatatataaaattagttatattatctttattagtagaaaaaacaggtttatttaccttatttaaatatcctagttgtt

SEQ ID NO: 30235 - DNA, 96 bp, Fusarium azukicola
  misc_feature: 471
gaaagagaagagtaaaagataaaaaaagaaaagaaggtaaaatagaggagtatagggtatataagaataagtaagatagaataaagaagaagggag

SEQ ID NO: 30236 - DNA, 96 bp, Fusarium azukicola
  misc_feature: 470
aagagagggggagttaaggtaagagagtaggagaagagtaggaaagggttataaggagagagtaaggaaaagaaaaaaaagtagtgaggttaagaa

SEQ ID NO: 30237 - DNA, 96 bp, Fusarium azukicola
  misc_feature: 470
tggcttaattagtctaactctaagttattagctaattaaatcttaagctgaatttcttagaatttttaaggctattttaaaatttggtataaatcc

SEQ ID NO: 30238 - DNA, 96 bp, Fusarium azukicola
  misc_feature: 470
agggttagggttaagaagaagagtgaagaaagataaaggaaagaaagggagaaagagaagagtaaaagataaaaaaagaaaagaaggtaaaataga

SEQ ID NO: 30239 - DNA, 96 bp, Fusarium azukicola
  misc_feature: 470
agacccagattgctattttttgcaccctaataaggctccaaaaaactggaaaactcaggaagccaataaggtgcataagacttctaagaaaaggga

SEQ ID NO: 30240 - DNA, 96 bp, Fusarium azukicola
  misc_feature: 470
gttttttggagctttattagggtgcaaaaaatagcaatctgggtctttatgacctggcagtttgcaataactgcattttaaggcagttttcttctt

SEQ ID NO: 30241 - DNA, 96 bp, Fusarium azukicola
  misc_feature: 470
aaataggtatagaagtaaaggtagtaagagagtaagaaagtagtagtaaaagaagagaaaggggaaggagaaagaagagaaaaaagtaagttaagg

SEQ ID NO: 30242 - DNA, 96 bp, Fusarium azukicola
  misc_feature: 469
tttctttcttttactcttccccttctccttttatcttcttctctttttctttactcttcccctccttcatttctctttttcttcttcttttctttt

SEQ ID NO: 30243 - DNA, 96 bp, Fusarium azukicola
  misc_feature: 469
tttctcttacctctaattccctcctaccttctctaaactacgttctattactttctattactttcttacttttctttcttttactcttccccttct

SEQ ID NO: 30244 - DNA, 96 bp, Fusarium azukicola
  misc_feature: 469
ttactttcttacttttctttcttttactcttccccttctccttttatcttcttctctttttctttactcttcccctccttcatttctctttttctt

SEQ ID NO: 30245 - DNA, 96 bp, Fusarium azukicola
  misc_feature: 469
tcctttctcttcttcttcttttctataacctctctttttactaaactctaaactaccttatttttatctttctttttaccttaacttactctatac

SEQ ID NO: 30246 - DNA, 96 bp, Fusarium azukicola
  misc_feature: 469
attgcaaactgccaggtcataaagacccagattgctattttttgcaccctaataaggctccaaaaaactggaaaactcaggaagccaataaggtgc

SEQ ID NO: 30247 - DNA, 96 bp, Fusarium azukicola
  misc_feature: 469
ccttcttcctcatcttatctttattctttctctctaactctaaatatcttactctcccttcttctttattctatcttacttattcttatataccct

SEQ ID NO: 30248 - DNA, 96 bp, Fusarium azukicola
  misc_feature: 469
atagagtaaaaattctataatataatatatggtttatagggatatatcactatagttggtaatataatatagaacattaacagcctcctttaaagt

SEQ ID NO: 30249 - DNA, 96 bp, Fusarium azukicola
  misc_feature: 468
ttctcttacctctaattccctcctaccttctctaaactacgttctattactttctattactttcttacttttctttcttttactcttccccttctc

SEQ ID NO: 30250 - DNA, 96 bp, Fusarium azukicola
  misc_feature: 468
tccttctctctcctccttctttttacttttcctcctctctttctctcccctccttctctctcctcttttaaccccctctatctcttctcccctttt

SEQ ID NO: 30251 - DNA, 96 bp, Fusarium azukicola
  misc_feature: 468
gtattccttattactaggttttttatttatattatttttagttaattttcctagtttgcagttttcacagtttttaacttgatataggtcctcact

SEQ ID NO: 30252 - DNA, 96 bp, Fusarium azukicola
  misc_feature: 468
aaccctctcccttctttctcttcctcttctctccctctttactcctcttcttctcttctccccttcctctcctctcttcctctcctctatacttac

SEQ ID NO: 30253 - DNA, 96 bp, Fusarium azukicola
  misc_feature: 468
atacctaaaaatagagtaaaaattctataatataatatatggtttatagggatatatcactatagttggtaatataatatagaacattaacagcct

SEQ ID NO: 30254 - DNA, 96 bp, Fusarium azukicola
  misc_feature: 467
aggaaaagaaggagggaaagagagggttagggttaagaagaagagtgaagaaagataaaggaaagaaagggagaaagagaagagtaaaagataaaa

SEQ ID NO: 30255 - DNA, 96 bp, Fusarium azukicola
  misc_feature: 467
agagaagggaatataagagagagaggggaggaagggaggaagggagaagagaaagaagataggtagttagaagagaaagaaagaaggggaatagaa

SEQ ID NO: 30256 - DNA, 96 bp, Fusarium azukicola
  misc_feature: 467
gaagaagaggagtaaagagggagagaagaggaagagaaagaagggagagggttaatataaagagggaaaagtgaggtagagagaaagtgtagttaa

SEQ ID NO: 30257 - DNA, 96 bp, Fusarium azukicola
  misc_feature: 467
gatagtgaatttctgtttattattattattattatataatattgccttttcattattataagggctttctttaaagtaaggaatctcattaaaaga

SEQ ID NO: 30258 - DNA, 96 bp, Fusarium azukicola
  misc_feature: 467
tctttctcttcctcttctctccctctttactcctcttcttctcttctccccttcctctcctctcttcctctcctctatacttacttactaaactct

SEQ ID NO: 30259 - DNA, 96 bp, Fusarium azukicola
  misc_feature: 467
gaaaggagtatagagtaagttaaggtaaaaagaaagataaaaataaggtagtttagagtttagtaaaaagagaggttatagaaaagaagaagaaga

SEQ ID NO: 30260 - DNA, 96 bp, Fusarium azukicola
  misc_feature: 467
agaaagagaagttaagaggagtaaagggagtgaagaggagggaggagaaagagaaagggaagtaaagagaaagaggaaggaagagaagggaatata

SEQ ID NO: 30261 - DNA, 96 bp, Fusarium azukicola
  misc_feature: 467
aactttaaaggaggctgttaatgttctatattatattaccaactatagtgatatatccctataaaccatatattatattatagaatttttactcta

SEQ ID NO: 30262 - DNA, 96 bp, Fusarium azukicola
  misc_feature: 467
gtttagagtttagtaaaaagagaggttatagaaaagaagaagaagagaaaggaaaagaaggagggaaagagagggttagggttaagaagaagagtg

SEQ ID NO: 30263 - DNA, 96 bp, Fusarium azukicola
  misc_feature: 467
gtagggattctagaaggaccctatatattagtagctattttatctaggaacttatattccttattactaggttttttatttatattatttttagtt

SEQ ID NO: 30264 - DNA, 96 bp, Fusarium azukicola
  misc_feature: 467
aactacgttctattactttctattactttcttacttttctttcttttactcttccccttctccttttatcttcttctctttttctttactcttccc

SEQ ID NO: 30265 - DNA, 96 bp, Fusarium azukicola
  misc_feature: 467
cttctaccccttctcttttttttacttacttcttctttcctttcccctattaaatactactcttttaccttaacttacttttttctcttctttctc

SEQ ID NO: 30266 - DNA, 96 bp, Fusarium azukicola
  misc_feature: 467
ctttctcttcttttactactactttcttactctcttactacctttacttctatacctattttctctttaactactctatatatcttaataaccaat

SEQ ID NO: 30267 - DNA, 96 bp, Fusarium azukicola
  misc_feature: 467
cttctaagaaaagggaatctaaacctaattctaagaaggaagaaagagaaaagaaacaagaaaagctatttatagctaattcttcttcttcgtcat

SEQ ID NO: 30268 - DNA, 96 bp, Fusarium azukicola
  misc_feature: 467
aaaaaaaacgattttaactatttagctatatataagacttaaaaatattttttctaaatttttaaaaaaattccttatataggtatcttaaagtat

SEQ ID NO: 30269 - DNA, 96 bp, Fusarium azukicola
  misc_feature: 467
agtttagagtttagtaaaaagagaggttatagaaaagaagaagaagagaaaggaaaagaaggagggaaagagagggttagggttaagaagaagagt

SEQ ID NO: 30270 - DNA, 96 bp, Fusarium azukicola
  misc_feature: 466
ttggagccttattagggtgcaaaaaatagcaatctgggtctttatgacctggcagtttgcaataactgcattttaaggcagttttcttctttttcc

SEQ ID NO: 30271 - DNA, 96 bp, Fusarium azukicola
  misc_feature: 466
aggagtatagagtaagttaaggtaaaaagaaagataaaaataaggtagtttagagtttagtaaaaagagaggttatagaaaagaagaagaagagaa

SEQ ID NO: 30272 - DNA, 96 bp, Fusarium azukicola
  misc_feature: 466
aaggagtatagagtaagttaaggtaaaaagaaagataaaaataaggtagtttagagtttagtaaaaagagaggttatagaaaagaagaagaagaga

SEQ ID NO: 30273 - DNA, 96 bp, Fusarium azukicola
  misc_feature: 466
tagtttagagtttagtaaaaagagaggttatagaaaagaagaagaagagaaaggaaaagaaggagggaaagagagggttagggttaagaagaagag

SEQ ID NO: 30274 - DNA, 96 bp, Fusarium azukicola
  misc_feature: 466
aactgccttaaaatgcagttattgcaaactgccaggtcataaagacccagattgctattttttgcaccctaataaggctccaaaaaactggaaaac

SEQ ID NO: 30275 - DNA, 96 bp, Fusarium azukicola
  misc_feature: 466
gtgtaaataggttttttatatactagctatataattactttttaaaaatctaagaaaattattatagcttttatattatataataagcctaacttt

SEQ ID NO: 30276 - DNA, 96 bp, Fusarium azukicola
  misc_feature: 466
agaaaggagtatagagtaagttaaggtaaaaagaaagataaaaataaggtagtttagagtttagtaaaaagagaggttatagaaaagaagaagaag

SEQ ID NO: 30277 - DNA, 96 bp, Fusarium azukicola
  misc_feature: 466
agggtatagggtaaagtaaaagagagaagagagtatagggtaaagtaaaagagagaagagagtatagggtaaagtaaaagagagaagagagtatag

SEQ ID NO: 30278 - DNA, 96 bp, Fusarium azukicola
  misc_feature: 465
ttttttacttacttcttctttcctttcccctattaaatactactcttttaccttaacttacttttttctcttctttctccttcccctttctcttct

SEQ ID NO: 30279 - DNA, 96 bp, Fusarium azukicola
  misc_feature: 465
ttttctttcttttactcttccccttctccttttatcttcttctctttttctttactcttcccctccttcatttctctttttcttcttcttttcttt

SEQ ID NO: 30280 - DNA, 96 bp, Fusarium azukicola
  misc_feature: 465
aaatatataaataaaataataaggaaatataataaataagaaataggaacttctaaagtacctattaaatttatagaaagactcttaaaatctaaa

SEQ ID NO: 30281 - DNA, 96 bp, Fusarium azukicola
  misc_feature: 465
tttacttacttcttctttcctttcccctattaaatactactcttttaccttaacttacttttttctcttctttctccttcccctttctcttctttt

SEQ ID NO: 30282 - DNA, 96 bp, Fusarium azukicola
  misc_feature: 465
gacccagattgctattttttgcaccctaataaggctccaaaaaactggaaaactcaggaagccaataaggtgcataagacttctaagaaaagggaa

SEQ ID NO: 30283 - DNA, 96 bp, Fusarium azukicola
  misc_feature: 465
aaagagaagagtaaaagataaaaaaagaaaagaaggtaaaatagaggagtatagggtatataagaataagtaagatagaataaagaagaagggaga

SEQ ID NO: 30284 - DNA, 96 bp, Fusarium azukicola
  misc_feature: 465
agggaagagaaagagaagttaagaggagtaaagggagtgaagaggagggaggagaaagagaaagggaagtaaagagaaagaggaaggaagagaagg

SEQ ID NO: 30285 - DNA, 96 bp, Fusarium azukicola
  misc_feature: 465
aaagaaaaagagaagaagataaaaggagaaggggaagagtaaaagaaagaaaagtaagaaagtaatagaaagtaatagaacgtagtttagagaagg

SEQ ID NO: 30286 - DNA, 96 bp, Fusarium azukicola
  misc_feature: 465
aatatttatctttcttaacctcactacttttttttcttttccttactctctccttataaccctttcctactcttctcctactctcttaccttaact

SEQ ID NO: 30287 - DNA, 96 bp, Fusarium azukicola
  misc_feature: 464
tttctttactaaaagcttataacctatactatttgagagaataaaagagaatctatccctaatataacttatttcctttataaagggtttttatta

SEQ ID NO: 30288 - DNA, 96 bp, Fusarium azukicola
  misc_feature: 464
aagagaagggaatataagagagagaggggaggaagggaggaagggagaagagaaagaagataggtagttagaagagaaagaaagaaggggaataga

SEQ ID NO: 30289 - DNA, 96 bp, Fusarium azukicola
  misc_feature: 464
tatttaaatatcctagttgtttctttatatagggaaggtttcttatcaaaggtcctagtatattattagttatattattttgttgagaaattatgg

SEQ ID NO: 30290 - DNA, 96 bp, Fusarium azukicola
  misc_feature: 464
cctctcttcctctcctctatacttacttactaaactctcctccctcttcaataaccttccttttattcttactataacccccttctttttctactt

SEQ ID NO: 30291 - DNA, 96 bp, Fusarium azukicola
  misc_feature: 463
agaaagaagagaaaaaagtaagttaaggtaaaagagtagtatttaataggggaaaggaaagaagaagtaagtaaaaaaaagagaaggggtagaaga

SEQ ID NO: 30292 - DNA, 96 bp, Fusarium azukicola
  misc_feature: 463
agaattttttaaaaatctaaaaaaatcatttttagactttattaagagttagatttatagaaatactctttttatcttcctagctattttatagta

SEQ ID NO: 30293 - DNA, 96 bp, Fusarium azukicola
  misc_feature: 463
acctaaaaatagagtaaaaattctataatataatatatggtttatagggatatatcactatagttggtaatataatatagaacattaacagcctcc

SEQ ID NO: 30294 - DNA, 96 bp, Fusarium azukicola
  misc_feature: 463
cctcaacaaaataatataactaataatatactaggacctttaataagaaaccttccctatataaagaaacaactaggatatttaaataaggtaaat

SEQ ID NO: 30295 - DNA, 96 bp, Fusarium azukicola
  misc_feature: 463
aaggggtttttactaagatatatatataataataatagaggtttaattttttcctctaataataagaacgtataaagctataacccttataagatt

SEQ ID NO: 30296 - DNA, 96 bp, Fusarium azukicola
  misc_feature: 462
gagaaaggggaaggagaaagaagagaaaaaagtaagttaaggtaaaagagtagtatttaataggggaaaggaaagaagaagtaagtaaaaaaaaga

SEQ ID NO: 30297 - DNA, 96 bp, Fusarium azukicola
  misc_feature: 462
cttttctttcttttactcttccccttctccttttatcttcttctctttttctttactcttcccctccttcatttctctttttcttcttcttttctt

SEQ ID NO: 30298 - DNA, 96 bp, Fusarium azukicola
  misc_feature: 462
cgttctattactttctattactttcttacttttctttcttttactcttccccttctccttttatcttcttctctttttctttactcttcccctcct

SEQ ID NO: 30299 - DNA, 96 bp, Fusarium azukicola
  misc_feature: 462
ataaagctataacccttataagattataactttaaaggaggctgttaatgttctatattatattaccaactatagtgatatatccctataaaccat

SEQ ID NO: 30300 - DNA, 96 bp, Fusarium azukicola
  misc_feature: 461
tttaggaatttcgatagtgaatttctgtttattattattattattatataatattgccttttcattattataggggctttctttaaagtaaggaat

SEQ ID NO: 30301 - DNA, 96 bp, Fusarium azukicola
  misc_feature: 461
ttcctttctcttcttcttcttttctataacctctctttttactaaactctaaactaccttatttttatctttctttttaccttaacttactctata

SEQ ID NO: 30302 - DNA, 96 bp, Fusarium azukicola
  misc_feature: 461
tagaggagaggaagagaggagaggaaggggagaagagaagaagaggagtaaagagggagagaagaggaagagaaagaagggagagggttaatataa

SEQ ID NO: 30303 - DNA, 96 bp, Fusarium azukicola
  misc_feature: 461
ttaaggtaaaaagaaagataaaaataaggtagtttagagtttagtaaaaagagaggttatagaaaagaagaagaagagaaaggaaaagaaggaggg

SEQ ID NO: 30304 - DNA, 96 bp, Fusarium azukicola
  misc_feature: 461
taaggtaaaaagaaagataaaaataaggtagtttagagtttagtaaaaagagaggttatagaaaagaagaagaagagaaaggaaaagaaggaggga

SEQ ID NO: 30305 - DNA, 96 bp, Fusarium azukicola
  misc_feature: 461
taggaatttcgatagtgaatttctgtttattattattattattatataatattgccttttcattattataagggctttctttaaagtaaggaatct

SEQ ID NO: 30306 - DNA, 96 bp, Fusarium azukicola
  misc_feature: 461
ataaggagtgaaaagagagagagggagaggggagaggagagaaaagaaaaagagtagaggaagggtgattagaaaggtaggaagtgaatagaagag

SEQ ID NO: 30307 - DNA, 96 bp, Fusarium azukicola
  misc_feature: 461
agttaaggtaaaaagaaagataaaaataaggtagtttagagtttagtaaaaagagaggttatagaaaagaagaagaagagaaaggaaaagaaggag

SEQ ID NO: 30308 - DNA, 96 bp, Fusarium azukicola
  misc_feature: 461
cctttctcttcttcttcttttctataacctctctttttactaaactctaaactaccttatttttatctttctttttaccttaacttactctatact

SEQ ID NO: 30309 - DNA, 96 bp, Fusarium azukicola
  misc_feature: 460
ttatattattttgttgagaaattatggaattatatacctctaaattatcacttatatcaaaatccatttcttctggggtctcagaaagggaaatta

SEQ ID NO: 30310 - DNA, 96 bp, Fusarium azukicola
  misc_feature: 460
taaagagggaaaagtgaggtagagagaaagtgtagttaagaagaggaggggagaagagaaagaaagtagaggaagaggggagggaaaaaggggaga

SEQ ID NO: 30311 - DNA, 96 bp, Fusarium azukicola
  misc_feature: 460
taaagagaaaataggtatagaagtaaaggtagtaagagagtaagaaagtagtagtaaaagaagagaaaggggaaggagaaagaagagaaaaaagta

SEQ ID NO: 30312 - DNA, 96 bp, Fusarium azukicola
  misc_feature: 460
gagggaagagaaagagaagttaagaggagtaaagggagtgaagaggagggaggagaaagagaaagggaagtaaagagaaagaggaaggaagagaag

SEQ ID NO: 30313 - DNA, 96 bp, Fusarium azukicola
  misc_feature: 460
aggaatttcgatagtgaatttctgtttattattattattattatataatattgccttttcattattataggggctttctttaaagtaaggaatctc

SEQ ID NO: 30314 - DNA, 96 bp, Fusarium azukicola
  misc_feature: 460
cccctctccctctctctcttttcactccttatcctctcctctcccctctccctctctctcttttcactccttcttccttcttcctcatcttatctt

SEQ ID NO: 30315 - DNA, 96 bp, Fusarium azukicola
  misc_feature: 459
attggcttcctgagttttccagttttttggagccttattagggtgcaaaaaatagcaatctgggtctttatgacctggcagtttgcaataactgca

SEQ ID NO: 30316 - DNA, 96 bp, Fusarium azukicola
  misc_feature: 459
agaaagggagaaagagaagagtaaaagataaaaaaagaaaagaaggtaaaatagaggagtatagggtatataagaataagtaagatagaataaaga

SEQ ID NO: 30317 - DNA, 96 bp, Fusarium azukicola
  misc_feature: 459
taagaaaagggaatctaaacctaattctaagaaggaagaaagagaaaagaaacaagaaaagctatttatagctaattcttcttcttcgtcatctcc

SEQ ID NO: 30318 - DNA, 96 bp, Fusarium azukicola
  misc_feature: 459
agaagaagaggagtaaagagggagagaagaggaagagaaagaagggagagggttaatataaagagggaaaagtgaggtagagagaaagtgtagtta

SEQ ID NO: 30319 - DNA, 96 bp, Fusarium azukicola
  misc_feature: 459
cctttcccctattaaatactactcttttaccttaacttacttttttctcttctttctccttcccctttctcttcttttactactactttcttactc

SEQ ID NO: 30320 - DNA, 96 bp, Fusarium azukicola
  misc_feature: 459
ctaagaaaagggaatctaaacctaattctaagaaggaagaaagagaaaagaaacaagaaaagctatttatagctaattcttcttcttcgtcatctc

SEQ ID NO: 30321 - DNA, 96 bp, Fusarium azukicola
  misc_feature: 459
agggttaattggttgaaattagggttaggggtagtagtagagttaagggttagggttaattggttgaaattagggttagggttaagtaggtgagtt

SEQ ID NO: 30322 - DNA, 96 bp, Fusarium azukicola
  misc_feature: 458
ggagtatagagtaagttaaggtaaaaagaaagataaaaataaggtagtttagagtttagtaaaaagagaggttatagaaaagaagaagaagagaaa

SEQ ID NO: 30323 - DNA, 96 bp, Fusarium azukicola
  misc_feature: 458
tggagccttattagggtgcaaaaaatagcaatctgggtctttatgacctggcagtttgcaataactgcattttaaggcagttttcttctttttcca

SEQ ID NO: 30324 - DNA, 96 bp, Fusarium azukicola
  misc_feature: 458
tatactctcttctctcttttactttaccctatactctcttctctcttttactttaccctatactctcttctctcttttactttaccctatacccta

SEQ ID NO: 30325 - DNA, 96 bp, Fusarium azukicola
  misc_feature: 458
ctcttctctcttttactttaccctatactctcttctctcttttactttaccctctacttttattctttattttactttaccctatactctcttctc

SEQ ID NO: 30326 - DNA, 96 bp, Fusarium azukicola
  misc_feature: 458
ccctctccctctctctcttttcactccttatcctctcctctcccctctccctctctctcttttcactccttcttccttcttcctcatcttatcttt

SEQ ID NO: 30327 - DNA, 96 bp, Fusarium azukicola
  misc_feature: 457
tcctcaacaaaataatataactaataatatactaggacctttaataagaaaccttccctatataaagaaacaactaggatatttaaataaggtaaa

SEQ ID NO: 30328 - DNA, 96 bp, Fusarium azukicola
  misc_feature: 457
ttcttttccttactctctccttataaccctttcctactcttctcctactctcttaccttaactccccctctcttctaccccttctcttttttttac

SEQ ID NO: 30329 - DNA, 96 bp, Fusarium azukicola
  misc_feature: 457
ttctcttcttttactactactttcttactctcttactacctttacttctatacctattttctctttaactactctatatatcttaataaccaatca

SEQ ID NO: 30330 - DNA, 96 bp, Fusarium azukicola
  misc_feature: 457
ttagattttcccttataatatcaggtctataataaaggggtttttactaagatatatatataataataatagaggtttaattttttcctctaataa

SEQ ID NO: 30331 - DNA, 96 bp, Fusarium azukicola
  misc_feature: 457
ttaaccctctcccttctttctcttcctcttctctccctctttactcctcttcttctcttctccccttcctctcctctcttcctctcctctatactt

SEQ ID NO: 30332 - DNA, 96 bp, Fusarium azukicola
  misc_feature: 457
actacgttctattactttctattactttcttacttttctttcttttactcttccccttctccttttatcttcttctctttttctttactcttcccc

SEQ ID NO: 30333 - DNA, 96 bp, Fusarium azukicola
  misc_feature: 457
gccttggaaaaagaagaaaactgccttaaaatgcagttattgcaaactgccaggtcataaagacccagattgctattttttgcaccctaataaagc

SEQ ID NO: 30334 - DNA, 96 bp, Fusarium azukicola
  misc_feature: 457
atccttcctcttttttcccccaccctccctttcttaataactctttataacttctctttttactcttctctacactacctttcctttaccctcttc

SEQ ID NO: 30335 - DNA, 96 bp, Fusarium azukicola
  misc_feature: 457
aaagggagaaagagaagagtaaaagataaaaaaagaaaagaaggtaaaatagaggagtatagggtatataagaataagtaagatagaataaagaag

SEQ ID NO: 30336 - DNA, 96 bp, Fusarium azukicola
  misc_feature: 456
tttttttacttacttcttctttcctttcccctattaaatactactcttttaccttaacttacttttttctcttctttctccttcccctttctcttc

SEQ ID NO: 30337 - DNA, 96 bp, Fusarium azukicola
  misc_feature: 456
ttctttctcttcctcttctctccctctttactcctcttcttctcttctccccttcctctcctctcttcctctcctctatacttacttactaaactc

SEQ ID NO: 30338 - DNA, 96 bp, Fusarium azukicola
  misc_feature: 456
ttctaccccttctcttttttttacttacttcttctttcctttcccctattaaatactactcttttaccttaacttacttttttctcttctttctcc

SEQ ID NO: 30339 - DNA, 96 bp, Fusarium azukicola
  misc_feature: 456
gaagaagaattagctataaatagcttttcttgtttcttttctctttcttccttcttagaattaggtttagattcccttttcttagaagtcttatgc

SEQ ID NO: 30340 - DNA, 96 bp, Fusarium azukicola
  misc_feature: 455
tcactcttcttcttaaccctaaccctctctttccctccttcttttcctttctcttcttcttcttttctataacctctctttttactaaactctaaa

SEQ ID NO: 30341 - DNA, 96 bp, Fusarium azukicola
  misc_feature: 455
gggggttaaaagaggagagagaaggaggggagagaaagagaggaggaaaagtaaaaagaaggaggagagagaaggaagaataaaagaaaagaataa

SEQ ID NO: 30342 - DNA, 96 bp, Fusarium azukicola
  misc_feature: 455
tcttccttcctctttctctttacttccctttctctttctcctccctcctcttcactccctttactcctcttaacttctctttctcttccctcttct

SEQ ID NO: 30343 - DNA, 96 bp, Fusarium azukicola
  misc_feature: 455
tcttcactcttcttcttaaccctaaccctctctttccctccttcttttcctttctcttcttcttcttttctataacctctctttttactaaactct

SEQ ID NO: 30344 - DNA, 96 bp, Fusarium azukicola
  misc_feature: 455
aaaaaaaagggggagaaaaaaaaagaagaaagagagagagaggaggtagagtaattgagaagttatagtaagtaaagataaaagagtaaaaacgga

SEQ ID NO: 30345 - DNA, 96 bp, Fusarium azukicola
  misc_feature: 455
cttcactcttcttcttaaccctaaccctctctttccctccttcttttcctttctcttcttcttcttttctataacctctctttttactaaactcta

SEQ ID NO: 30346 - DNA, 96 bp, Fusarium azukicola
  misc_feature: 455
cccttaactcacctacttaaccctaaccctaatttcaaccaattaaccctaacccttaactctactactacccctaaccctaatttcaaccaatta

SEQ ID NO: 30347 - DNA, 96 bp, Fusarium azukicola
  misc_feature: 454
tcgcagtttttgacttgatataggtcctcactagtatatttaaagagaggatcttttatttttatatatttaattagacttcttaagttaagatga

SEQ ID NO: 30348 - DNA, 96 bp, Fusarium azukicola
  misc_feature: 454
ccttctttctcttcctcttctctccctctttactcctcttcttctcttctccccttcctctcctctcttcctctcctctatacttacttactaaac

SEQ ID NO: 30349 - DNA, 96 bp, Fusarium azukicola
  misc_feature: 454
gttctattactttctattactttcttacttttctttcttttactcttccccttctccttttatcttcttctctttttctttactcttcccctcctt

SEQ ID NO: 30350 - DNA, 96 bp, Fusarium azukicola
  misc_feature: 454
ctcccctctccctctctctcttttcactccttatcctctcctctcccctctccctctctctcttttcactccttcttccttcttcctcatcttatc

SEQ ID NO: 30351 - DNA, 96 bp, Fusarium azukicola
  misc_feature: 454
gagtatagagtaagttaaggtaaaaagaaagataaaaataaggtagtttagagtttagtaaaaagagaggttatagaaaagaagaagaagagaaag

SEQ ID NO: 30352 - DNA, 96 bp, Fusarium azukicola
  misc_feature: 454
gaggagaggaaggggagaagagaagaagaggagtaaagagggagagaagaggaagagaaagaagggagagggttaatataaagagggaaaagtgag

SEQ ID NO: 30353 - DNA, 96 bp, Fusarium azukicola
  misc_feature: 454
aggagaggaaggggagaagagaagaagaggagtaaagagggagagaagaggaagagaaagaagggagagggttaatataaagagggaaaagtgagg

SEQ ID NO: 30354 - DNA, 96 bp, Fusarium azukicola
  misc_feature: 453
ttcttctttattctatcttacttattcttatataccctatactcctctattttaccttcttttctttttttatcttttactcttctctttctccct

SEQ ID NO: 30355 - DNA, 96 bp, Fusarium azukicola
  misc_feature: 453
agagtaaagaaaaagagaagaagataaaaggagaaggggaagagtaaaagaaagaaaagtaagaaagtaatagaaagtaatagaacgtagtttaga

SEQ ID NO: 30356 - DNA, 96 bp, Fusarium azukicola
  misc_feature: 453
gaaggagaaagaagagaaaaaagtaagttaaggtaaaagagtagtatttaataggggaaaggaaagaagaagtaagtaaaaaaaagagaaggggta

SEQ ID NO: 30357 - DNA, 96 bp, Fusarium azukicola
  misc_feature: 453
acctcacttttccctctttatattaaccctctcccttctttctcttcctcttctctccctctttactcctcttcttctcttctccccttcctctcc

SEQ ID NO: 30358 - DNA, 96 bp, Fusarium azukicola
  misc_feature: 453
gaggaaggaagagaagggaatataagagagagaggggaggaagggaggaagggagaagagaaagaagataggtagttagaagagaaagaaagaagg

SEQ ID NO: 30359 - DNA, 96 bp, Fusarium azukicola
  misc_feature: 453
gaggaagaaggaagaaggagtgaaaagagagagagggagaggggagaggagaggataaggagtgaaaagagagagagggagaggggagaggagagg

SEQ ID NO: 30360 - DNA, 96 bp, Fusarium azukicola
  misc_feature: 453
aaagagaaggggtagaagagagggggagttaaggtaagagagtaggagaagagtaggaaagggttataaggagagagtaaggaaaagaaaaaaaag

SEQ ID NO: 30361 - DNA, 96 bp, Fusarium azukicola
  misc_feature: 452
ggaaaagaaggagggaaagagagggttagggttaagaagaagagtgaagaaagataaaggaaagaaagggagaaagagaagagtaaaagataaaaa

SEQ ID NO: 30362 - DNA, 96 bp, Fusarium azukicola
  misc_feature: 452
acccctcactttttatcttaccttctctttactttttacctactctctttactattacttcttcttattcttaaccctctcttgccccccttttaa

SEQ ID NO: 30363 - DNA, 96 bp, Fusarium azukicola
  misc_feature: 452
taagatgaggaagaaggaagaaggagtgaaaagagagagagggagaggggagaggagaggataaggagtgaaaagagagagagggagaggggagag

SEQ ID NO: 30364 - DNA, 96 bp, Fusarium azukicola
  misc_feature: 452
ctttctcttctattcacttcctacctttctaatcacccttcctctactctttttcttttctctcctctcccctctccctctctctcttttcactcc

SEQ ID NO: 30365 - DNA, 96 bp, Fusarium azukicola
  misc_feature: 452
ctaccccttctcttttttttacttacttcttctttcctttcccctattaaatactactcttttaccttaacttacttttttctcttctttctcctt

SEQ ID NO: 30366 - DNA, 96 bp, Fusarium azukicola
  misc_feature: 451
cctttctcttcttttactactactttcttactctcttactacctttacttctatacctattttctctttaactactctatatatcttaataaccaa

SEQ ID NO: 30367 - DNA, 96 bp, Fusarium azukicola
  misc_feature: 451
ttagaggaaaaattaaacctctattattattatatatatatcttagtaaaaacccctttattatagacctaatattataagggaaaatctaagatt

SEQ ID NO: 30368 - DNA, 96 bp, Fusarium azukicola
  misc_feature: 451
gtaatagactatataataagtctaaactttaaattttagctattttagagttagtttgaattttctaggattttttaaaaaacctagttttagtat

SEQ ID NO: 30369 - DNA, 96 bp, Fusarium azukicola
  misc_feature: 451
ccttcctcttttttcccccaccctccctttcttaataactctttataacttctctttttactcttctctacactacctttcctttaccctcttccc

SEQ ID NO: 30370 - DNA, 96 bp, Fusarium azukicola
  misc_feature: 451
ctttattttactttaccctatactctcttctctcttttactttaccctatactctcttctctcttttactttaccctctacttttattctttattt

SEQ ID NO: 30371 - DNA, 96 bp, Fusarium azukicola
  misc_feature: 451
cttctttctttctcttctaactacctatcttctttctcttctcccttcctcccttcctcccctctctctcttatattcccttctcttccttcctct

SEQ ID NO: 30372 - DNA, 96 bp, Fusarium azukicola
  misc_feature: 451
aagtcatcttaacttaagaagtctaattaaatatataaaaataaaagatcctctctttaaatatactagtgaggacctatatcaagttaaaaactg

SEQ ID NO: 30373 - DNA, 96 bp, Fusarium azukicola
  misc_feature: 450
ctttttatcttaccttctctttactttttacctactctctttactattacttcttcttattcttaaccctctcttgccccccttttaactctaaaa

SEQ ID NO: 30374 - DNA, 96 bp, Fusarium azukicola
  misc_feature: 450
tttactttaccctatactctcttctctcttttactttaccctatactctcttctctcttttactttaccctctacttttattctttattttacttt

SEQ ID NO: 30375 - DNA, 96 bp, Fusarium azukicola
  misc_feature: 450
ttgcagttttcacagtttttaacttgatataggtcctcactagtatatttaaagagaggatcttttatttttatatatttaattagacttcttaag

SEQ ID NO: 30376 - DNA, 96 bp, Fusarium azukicola
  misc_feature: 450
ttattgcaaactgccaggtcataaagacccagattgctattttttgcaccctaataaggctccaaaaaactggaaaactcaggaagccaataaggt

SEQ ID NO: 30377 - DNA, 96 bp, Fusarium azukicola
  misc_feature: 450
aatgcagttattgcaaactgccaggtcataaagacccagattgctattttttgcaccctaataaggctccaaaaaactggaaaactcaggaagcca

SEQ ID NO: 30378 - DNA, 96 bp, Fusarium azukicola
  misc_feature: 450
gtatcatatataaaattagttatattatctttattagtagaaaaaacaggtttatttaccttatttaaatatcctagttgtttctttatataggga

SEQ ID NO: 30379 - DNA, 96 bp, Fusarium azukicola
  misc_feature: 450
accccttctcttttttttacttacttcttctttcctttcccctattaaatactactcttttaccttaacttacttttttctcttctttctccttcc

SEQ ID NO: 30380 - DNA, 96 bp, Fusarium azukicola
  misc_feature: 450
acctgcgcatctatatccatttgatcaattacttgtcttccttcctctactatcataacccctcttttctgtagtctagtcttttttgccctccgc

SEQ ID NO: 30381 - DNA, 96 bp, Fusarium azukicola
  misc_feature: 450
ctcttccttcctctttctctttacttccctttctctttctcctccctcctcttcactccctttactcctcttaacttctctttctcttccctcttc

SEQ ID NO: 30382 - DNA, 96 bp, Fusarium azukicola
  misc_feature: 450
aataggtatagaagtaaaggtagtaagagagtaagaaagtagtagtaaaagaagagaaaggggaaggagaaagaagagaaaaaagtaagttaaggt

SEQ ID NO: 30383 - DNA, 96 bp, Fusarium azukicola
  misc_feature: 449
tttctttctcttctaactacctatcttctttctcttctcccttcctcccttcctcccctctctctcttatattcccttctcttccttcctctttct

SEQ ID NO: 30384 - DNA, 96 bp, Fusarium azukicola
  misc_feature: 449
taaagctataacccttataagattataactttaaaggaggctgttaatgttctatattatattaccaactatagtgatatatccctataaaccata

SEQ ID NO: 30385 - DNA, 96 bp, Fusarium azukicola
  misc_feature: 449
cccttctcttttttttacttacttcttctttcctttcccctattaaatactactcttttaccttaacttacttttttctcttctttctccttcccc

SEQ ID NO: 30386 - DNA, 96 bp, Fusarium azukicola
  misc_feature: 449
ctctcctctcccctctccctctctctcttttcactccttcttccttcttcctcatcttatctttattctttctctctaactctaaatatcttactc

SEQ ID NO: 30387 - DNA, 96 bp, Fusarium azukicola
  misc_feature: 449
cttattattagaggaaaaaattaaacctctattattattatatatatcttagtaaaaacccctttattatagacctaatattataagggaaaatct

SEQ ID NO: 30388 - DNA, 96 bp, Fusarium azukicola
  misc_feature: 448
agttagagagaaagaataaagataagatgaggaagaaggaagaaggagtgaaaagagagagagggagaggggagaggagaggataaggagtgaaaa

SEQ ID NO: 30389 - DNA, 96 bp, Fusarium azukicola
  misc_feature: 448
agggattctagaaggaccctatatattagtagctattttatctaggaacttatattccttattactaggttttttatttatattatttttagttaa

SEQ ID NO: 30390 - DNA, 96 bp, Fusarium azukicola
  misc_feature: 448
ccctttctcttcttttactactactttcttactctcttactacctttacttctatacctattttctctttaactactctatatatcttaataacca

SEQ ID NO: 30391 - DNA, 96 bp, Fusarium azukicola
  misc_feature: 448
agagagaaagaataaagataagatgaggaagaaggaagaaggagtgaaaagagagagagggagaggggagaggagaggataaggagtgaaaagaga

SEQ ID NO: 30392 - DNA, 96 bp, Fusarium azukicola
  misc_feature: 448
tctcctaacttcacacacttttaactccccttcctctttctccttccttctcttccctcctctttctctcaatcttcttctcttcctttccctctt

SEQ ID NO: 30393 - DNA, 96 bp, Fusarium azukicola
  misc_feature: 448
aggggagggaaaaaggggagaagagatagagggggttaaaagaggagagagaaggaggggagagaaagagaggaggaaaagtaaaaagaaggagga

SEQ ID NO: 30394 - DNA, 96 bp, Fusarium azukicola
  misc_feature: 448
tatacctaaaaatagagtaaaaattctataatataatatatggtttatagggatatatcactatagttggtaatataatatagaacattaacagcc

SEQ ID NO: 30395 - DNA, 96 bp, Fusarium azukicola
  misc_feature: 448
gggttaattggttgaaattagggttaggggtagtagtagagttaagggttagggttaattggttgaaattagggttagggttaagtaggtgagtta

SEQ ID NO: 30396 - DNA, 96 bp, Fusarium azukicola
  misc_feature: 448
taaatctatttaaaattaagaaaagccttatatagcctaaaataaagccctagattatagtataaccttctctctaaattattaaataatttaggc

SEQ ID NO: 30397 - DNA, 96 bp, Fusarium azukicola
  misc_feature: 448
atgcctagtagcacctgtatcatatataaaattagttatattatctttattagtagaaaaaacaggtttatttaccttatttaaatatcctagttg

SEQ ID NO: 30398 - DNA, 96 bp, Fusarium azukicola
  misc_feature: 447
tttttctattccccttctttctttctcttctaactacctatcttctttctcttctcccttcctcccttcctcccctctctctcttatattcccttc

SEQ ID NO: 30399 - DNA, 96 bp, Fusarium azukicola
  misc_feature: 447
ttttacttacttcttctttcctttcccctattaaatactactcttttaccttaacttacttttttctcttctttctccttcccctttctcttcttt

SEQ ID NO: 30400 - DNA, 96 bp, Fusarium azukicola
  misc_feature: 447
tttatttctcttacctctaattccctcctaccttctctaaactacgttctattactttctattactttcttacttttctttcttttactcttcccc

SEQ ID NO: 30401 - DNA, 96 bp, Fusarium azukicola
  misc_feature: 447
aggagaggaagagaggagaggaaggggagaagagaagaagaggagtaaagagggagagaagaggaagagaaagaagggagagggttaatataaaga

SEQ ID NO: 30402 - DNA, 96 bp, Fusarium azukicola
  misc_feature: 447
tctcttatattcccttctcttccttcctctttctctttacttccctttctctttctcctccctcctcttcactccctttactcctcttaacttctc

SEQ ID NO: 30403 - DNA, 96 bp, Fusarium azukicola
  misc_feature: 447
taagttaaggtaaaaagaaagataaaaataaggtagtttagagtttagtaaaaagagaggttatagaaaagaagaagaagagaaaggaaaagaagg

SEQ ID NO: 30404 - DNA, 96 bp, Fusarium azukicola
  misc_feature: 447
gtcatcttaacttaagaagtctaattaaatatataaaaataaaagatcctctctttaaatatactagtgaggacctatatcaagtcaaaaactgcg

SEQ ID NO: 30405 - DNA, 96 bp, Fusarium azukicola
  misc_feature: 447
ctctcttatattcccttctcttccttcctctttctctttacttccctttctctttctcctccctcctcttcactccctttactcctcttaacttct

SEQ ID NO: 30406 - DNA, 96 bp, Fusarium azukicola
  misc_feature: 447
agggaaaggaagagaagaagattgagagaaagaggagggaagagaaggaaggagaaagaggaaggggagttaaaagtgtgtgaagttaggagagtt

SEQ ID NO: 30407 - DNA, 96 bp, Fusarium azukicola
  misc_feature: 446
gaaagggagaaagagaagagtaaaagataaaaaaagaaaagaaggtaaaatagaggagtatagggtatataagaataagtaagatagaataaagaa

SEQ ID NO: 30408 - DNA, 96 bp, Fusarium azukicola
  misc_feature: 446
ccctatactcctctattttaccttcttttctttttttatcttttactcttctctttctccctttctttcctttatctttcttcactcttcttctta

SEQ ID NO: 30409 - DNA, 96 bp, Fusarium azukicola
  misc_feature: 446
taaaagaaaagaataagagggaaaggaagagaagaagattgagagaaagaggagggaagagaaggaaggagaaagaggaaggggagttaaaagtgt

SEQ ID NO: 30410 - DNA, 96 bp, Fusarium azukicola
  misc_feature: 446
ctcactacttttttttcttttccttactctctccttataaccctttcctactcttctcctactctcttaccttaactccccctctcttctacccct

SEQ ID NO: 30411 - DNA, 96 bp, Fusarium azukicola
  misc_feature: 446
aagcaatagccgctattagattttctatcatctaggctactgccccagtctgagtctgtatagcctctaattatattgtgtatatctgaataatcg

SEQ ID NO: 30412 - DNA, 96 bp, Fusarium azukicola
  misc_feature: 446
ccttgcattatggccgggcttgctgcatacaccacagcgccgaacacccggtccaaccgaccttcctcgaccaccactcctcgacgattcagccat

SEQ ID NO: 30413 - DNA, 96 bp, Fusarium azukicola
  misc_feature: 446
ataagggttatagctttatacgttcttattattagaggaaaaaattaaacctctattattattatatatatatcttagtaaaaacccctttattat

SEQ ID NO: 30414 - DNA, 96 bp, Fusarium azukicola
  misc_feature: 445
gagaaaggagtatagagtaagttaaggtaaaaagaaagataaaaataaggtagtttagagtttagtaaaaagagaggttatagaaaagaagaagaa

SEQ ID NO: 30415 - DNA, 96 bp, Fusarium azukicola
  misc_feature: 445
agtatagggtatataagaataagtaagatagaataaagaagaagggagagtaagatatttagagttagagagaaagaataaagataagatgaggaa

SEQ ID NO: 30416 - DNA, 96 bp, Fusarium azukicola
  misc_feature: 445
ataggtatagaagtaaaggtagtaagagagtaagaaagtagtagtaaaagaagagaaaggggaaggagaaagaagagaaaaaagtaagttaaggta

SEQ ID NO: 30417 - DNA, 96 bp, Fusarium azukicola
  misc_feature: 444
tttctcttctaactacctatcttctttctcttctcccttcctcccttcctcccctctctctcttatattcccttctcttccttcctctttctcttt

SEQ ID NO: 30418 - DNA, 96 bp, Fusarium azukicola
  misc_feature: 444
actttttatcttaccttctctttactttttacctactctctttactattacttcttcttattcttaaccctctcttgccccccttttaactctaaa

SEQ ID NO: 30419 - DNA, 96 bp, Fusarium azukicola
  misc_feature: 444
ttcactcttcttcttaaccctaaccctctctttccctccttcttttcctttctcttcttcttcttttctataacctctctttttactaaactctaa

SEQ ID NO: 30420 - DNA, 96 bp, Fusarium azukicola
  misc_feature: 444
ttataagggttatagctttatacgttcttattattagaggaaaaaattaaacctctattattattatatatatatcttagtaaaaacccctttatt

SEQ ID NO: 30421 - DNA, 96 bp, Fusarium azukicola
  misc_feature: 444
tctatcatctaggctactgccccagtctgagtctgtatagcctctaattatattgtgtatatctgaataatcgcagttatatatagtagataaatt

SEQ ID NO: 30422 - DNA, 96 bp, Fusarium azukicola
  misc_feature: 444
tatattattttgttgagaaattatggaattatatacctctaaattatcacttatatcaaaatccatttcttctggggtctcagaaagggaaattag

SEQ ID NO: 30423 - DNA, 96 bp, Fusarium azukicola
  misc_feature: 444
taggaatttcgatagtgaatttctgtttattattattattattatataatattgccttttcattattataggggctttctttaaagtaaggaatct

SEQ ID NO: 30424 - DNA, 96 bp, Fusarium azukicola
  misc_feature: 444
gtatagggtatataagaataagtaagatagaataaagaagaagggagagtaagatatttagagttagagagaaagaataaagataagatgaggaag

SEQ ID NO: 30425 - DNA, 96 bp, Fusarium azukicola
  misc_feature: 444
ggtagggattctagaaggaccctatatattagtagctattttatctaggaacttatattccttattactaggttttttatttatattatttttagt

SEQ ID NO: 30426 - DNA, 96 bp, Fusarium azukicola
  misc_feature: 444
gagctttattagggtgcaaaaaatagcaatctgggtctttatgacctggcagtttgcaataactgcattttaaggcagttttcttctttttccaag

SEQ ID NO: 30427 - DNA, 96 bp, Fusarium azukicola
  misc_feature: 444
gaagtaaggaaggttaagaaaggagagaagtaaggaaggttaagaaaggagagaagtaaggaaggttaagaaaggagagaagtaaggaagggtaag

SEQ ID NO: 30428 - DNA, 96 bp, Fusarium azukicola
  misc_feature: 444
aagagaaagagaagttaagaggagtaaagggagtgaagaggagggaggagaaagagaaagggaagtaaagagaaagaggaaggaagagaagggaat

SEQ ID NO: 30429 - DNA, 96 bp, Fusarium azukicola
  misc_feature: 444
attagaggaaaaattaaacctctattattattatatatatatcttagtaaaaacccctttattatagacctaatattataagggaaaatctaagat

SEQ ID NO: 30430 - DNA, 96 bp, Fusarium azukicola
  misc_feature: 443
tttattttactttaccctatactctcttctctcttttactttaccctatactctcttctctcttttactttaccctctacttttattctttatttt

SEQ ID NO: 30431 - DNA, 96 bp, Fusarium azukicola
  misc_feature: 443
ctttctattactttcttacttttctttcttttactcttccccttctccttttatcttcttctctttttctttactcttcccctccttcatttctct

SEQ ID NO: 30432 - DNA, 96 bp, Fusarium azukicola
  misc_feature: 443
ctcctctttctctcaatcttcttctcttcctttccctcttattcttttcttttattcttccttctctctcctccttctttttacttttcctcctct

SEQ ID NO: 30433 - DNA, 96 bp, Fusarium azukicola
  misc_feature: 443
ctacgttctattactttctattactttcttacttttctttcttttactcttccccttctccttttatcttcttctctttttctttactcttcccct

SEQ ID NO: 30434 - DNA, 96 bp, Fusarium azukicola
  misc_feature: 443
aagagtaaagaaaaagagaagaagataaaaggagaaggggaagagtaaaagaaagaaaagtaagaaagtaatagaaagtaatagaacgtagtttag

SEQ ID NO: 30435 - DNA, 96 bp, Fusarium azukicola
  misc_feature: 443
aagaataagagggaaaggaagagaagaagattgagagaaagaggagggaagagaaggaaggagaaagaggaaggggagttaaaagtgtgtgaagtt

SEQ ID NO: 30436 - DNA, 96 bp, Fusarium azukicola
  misc_feature: 442
caagttaaaaactgtgaaaactgcaaactaggaaaattaactaaaaataatataaataaaaaacctagtaataaggaatacaagttcctagataaa

SEQ ID NO: 30437 - DNA, 96 bp, Fusarium azukicola
  misc_feature: 442
ttgatttcctagataactaggaagaaaagtagtaaagagataatatctagcttctaagagagacttatagaagatagatagataaaagtgggtcat

SEQ ID NO: 30438 - DNA, 96 bp, Fusarium azukicola
  misc_feature: 442
tcttcttaactacactttctctctacctcacttttccctctttatattaaccctctcccttctttctcttcctcttctctccctctttactcctct

SEQ ID NO: 30439 - DNA, 96 bp, Fusarium azukicola
  misc_feature: 442
tcatatataaaattagttatattatctttattagtagaaaaatcaggtttatttaccttatttaaatatcctagttgtttctttatatagggaagg

SEQ ID NO: 30440 - DNA, 96 bp, Fusarium azukicola
  misc_feature: 442
tagagagaaagaataaagataagatgaggaagaaggaagaaggagtgaaaagagagagagggagaggggagaggagaggataaggagtgaaaagag

SEQ ID NO: 30441 - DNA, 96 bp, Fusarium azukicola
  misc_feature: 442
attggttgaaattagggttagggttaagtaggtgagttaagggttagggttaattggttgaaattagggttagggttaagtaggtgagttaggtta

SEQ ID NO: 30442 - DNA, 96 bp, Fusarium azukicola
  misc_feature: 442
gttaaggtaaaaagaaagataaaaataaggtagtttagagtttagtaaaaagagaggttatagaaaagaagaagaagagaaaggaaaagaaggagg

SEQ ID NO: 30443 - DNA, 96 bp, Fusarium azukicola
  misc_feature: 441
tcataacgggatctaagataaaaatataataaagcgtataatcaattaaattcaattactatcttcttccctagatagctcagtaacaatctgaca

SEQ ID NO: 30444 - DNA, 96 bp, Fusarium azukicola
  misc_feature: 441
tctttctcttctaactacctatcttctttctcttctcccttcctcccttcctcccctctctctcttatattcccttctcttccttcctctttctct

SEQ ID NO: 30445 - DNA, 96 bp, Fusarium azukicola
  misc_feature: 441
tcttctttattctatcttacttattcttatataccctatactcctctattttaccttcttttctttttttatcttttactcttctctttctccctt

SEQ ID NO: 30446 - DNA, 96 bp, Fusarium azukicola
  misc_feature: 441
attcttccttctctctcctccttctttttacttttcctcctctctttctctcccctccttctctctcctcttttaaccccctctatctcttctccc

SEQ ID NO: 30447 - DNA, 96 bp, Fusarium azukicola
  misc_feature: 441
aaactacgttctattactttctattactttcttacttttctttcttttactcttccccttctccttttatcttcttctctttttctttactcttcc

SEQ ID NO: 30448 - DNA, 96 bp, Fusarium azukicola
  misc_feature: 441
ctcttcttaactacactttctctctacctcacttttccctctttatattaaccctctcccttctttctcttcctcttctctccctctttactcctc

SEQ ID NO: 30449 - DNA, 96 bp, Fusarium azukicola
  misc_feature: 441
ccttctctctcctccttctttttacttttcctcctctctttctctcccctccttctctctcctcttttaaccccctctatctcttctccccttttt

SEQ ID NO: 30450 - DNA, 96 bp, Fusarium azukicola
  misc_feature: 441
acactttctctctacctcacttttccctctttatattaaccctctcccttctttctcttcctcttctctccctctttactcctcttcttctcttct

SEQ ID NO: 30451 - DNA, 96 bp, Fusarium azukicola
  misc_feature: 440
tctcccctctccctctctctcttttcactccttatcctctcctctcccctctccctctctctcttttcactccttcttccttcttcctcatcttat

SEQ ID NO: 30452 - DNA, 96 bp, Fusarium azukicola
  misc_feature: 440
tccttcctcttttttcccccaccctccctttcttaataactctttataacttctctttttactcttctctacactacctttcctttaccctcttcc

SEQ ID NO: 30453 - DNA, 96 bp, Fusarium azukicola
  misc_feature: 440
agaaagagaagagtaaaagataaaaaaagaaaagaaggtaaaatagaggagtatagggtatataagaataagtaagatagaataaagaagaaggga

SEQ ID NO: 30454 - DNA, 96 bp, Fusarium azukicola
  misc_feature: 440
agagaaagagaagttaagaggagtaaagggagtgaagaggagggaggagaaagagaaagggaagtaaagagaaagaggaaggaagagaagggaata

SEQ ID NO: 30455 - DNA, 96 bp, Fusarium azukicola
  misc_feature: 440
taaagacccagattgctattttttgcaccctaataaggctccaaaaaactggaaaactcaggaagccaataaggtgcataagacttctaagaaaag

SEQ ID NO: 30456 - DNA, 96 bp, Fusarium azukicola
  misc_feature: 440
gagagaaagaataaagataagatgaggaagaaggaagaaggagtgaaaagagagagagggagaggggagaggagaggataaggagtgaaaagagag

SEQ ID NO: 30457 - DNA, 96 bp, Fusarium azukicola
  misc_feature: 440
atcatatataaaattagttatattatctttattagtagaaaaatcaggtttatttaccttatttaaatatcctagttgtttctttatatagggaag

SEQ ID NO: 30458 - DNA, 96 bp, Fusarium azukicola
  misc_feature: 440
ataatttctcaacaaaataatataactaataatatactaggacctttgataagaaaccttccctatataaagaaacaactaggatatttaaataag

SEQ ID NO: 30459 - DNA, 96 bp, Fusarium azukicola
  misc_feature: 440
aaaaataatataaataaaaaacctagtaataaggaatataagttcctagataaaatagctactaatatatagggtccttctagaatccctacctat

SEQ ID NO: 30460 - DNA, 96 bp, Fusarium azukicola
  misc_feature: 439
tttcactccttatcctctcctctcccctctccctctctctcttttcactccttcttccttcttcctcatcttatctttattctttctctctaactc

SEQ ID NO: 30461 - DNA, 96 bp, Fusarium azukicola
  misc_feature: 439
ttcttattattagaggaaaaaattaaacctctattattattatatatatcttagtaaaaacccctttattatagacctaatattataagggaaaat

SEQ ID NO: 30462 - DNA, 96 bp, Fusarium azukicola
  misc_feature: 439
tctaagaaaagggaatctaaacctaattctaagaaggaagaaagagaaaagaaacaagaaaagctatttatagctaattcttcttcttcgtcatct

SEQ ID NO: 30463 - DNA, 96 bp, Fusarium azukicola
  misc_feature: 439
tagggattctagaaggaccctatatattagtagctattttatctaggaacttatattccttattactaggttttttatttatattatttttagtta

SEQ ID NO: 30464 - DNA, 96 bp, Fusarium azukicola
  misc_feature: 439
agaaaaagagaagaagataaaaggagaaggggaagagtaaaagaaagaaaagtaagaaagtaatagaaagtaatagaacgtagtttagagaaggta

SEQ ID NO: 30465 - DNA, 96 bp, Fusarium azukicola
  misc_feature: 439
aaatgcagttattgcaaactgccaggtcataaagacccagattgctattttttgcaccctaataaggctccaaaaaactggaaaactcaggaagcc

SEQ ID NO: 30466 - DNA, 96 bp, Fusarium azukicola
  misc_feature: 439
agaggggagggaaaaaggggagaagagatagagggggttaaaagaggagagagaaggaggggagagaaagagaggaggaaaagtaaaaagaaggag

SEQ ID NO: 30467 - DNA, 96 bp, Fusarium azukicola
  misc_feature: 439
ctcccctttttccctcccctcttcctctactttctttctcttctcccctcctcttcttaactacactttctctctacctcacttttccctctttat

SEQ ID NO: 30468 - DNA, 96 bp, Fusarium azukicola
  misc_feature: 439
ctaaaaataatataaataaaaaacctagtaataaggaatataagttcctagataaaatagctactaatatatagggtccttctagaatccctacct

SEQ ID NO: 30469 - DNA, 96 bp, Fusarium azukicola
  misc_feature: 439
agttaaaaactgtgaaaactgcaaactaggaaaattaactaaaaataatataaataaaaaacctagtaataaggaatacaagttcctagataaaat

SEQ ID NO: 30470 - DNA, 96 bp, Fusarium azukicola
  misc_feature: 439
agagaagaagaggagtaaagagggagagaagaggaagagaaagaagggagagggttaatataaagagggaaaagtgaggtagagagaaagtgtagt

SEQ ID NO: 30471 - DNA, 96 bp, Fusarium azukicola
  misc_feature: 438
ttttccttactctctccttataaccctttcctactcttctcctactctcttaccttaactccccctctcttctaccccttctcttttttttactta

SEQ ID NO: 30472 - DNA, 96 bp, Fusarium azukicola
  misc_feature: 438
acttaaccctaaccctaatttcaaccaattaaccctaacccttaactctactactacccctaaccctaatttcaaccaattaaccctaacccttaa

SEQ ID NO: 30473 - DNA, 96 bp, Fusarium azukicola
  misc_feature: 438
ggttaattggttgaaattagggttaggggtagtagtagagttaagggttagggttaattggttgaaattagggttagggttaagtaggtgagttaa

SEQ ID NO: 30474 - DNA, 96 bp, Fusarium azukicola
  misc_feature: 438
ttaaccctaaccctaatttcaaccaattaaccctaacccttaactctactactacccctaaccctaatttcaaccaattaaccctaacccttaact

SEQ ID NO: 30475 - DNA, 96 bp, Fusarium azukicola
  misc_feature: 438
ttaaccctaaccctaatttcaaccaattaaccctaacccttaactcacctacttaaccctaaccctaatttcaaccaattaaccctaacccttaac

SEQ ID NO: 30476 - DNA, 96 bp, Fusarium azukicola
  misc_feature: 438
tcttattattagaggaaaaaattaaacctctattattattatatatatcttagtaaaaacccctttattatagacctaatattataagggaaaatc

SEQ ID NO: 30477 - DNA, 96 bp, Fusarium azukicola
  misc_feature: 438
agatgacggcagtcataaaggtctgtaggaacctttttaaccaattagaataatacccttaatatctagctacctatagtagctataggttaggga

SEQ ID NO: 30478 - DNA, 96 bp, Fusarium azukicola
  misc_feature: 438
gttagagagaaagaataaagataagatgaggaagaaggaagaaggagtgaaaagagagagagggagaggggagaggagaggataaggagtgaaaag

SEQ ID NO: 30479 - DNA, 96 bp, Fusarium azukicola
  misc_feature: 438
acctttactataacctcttcccctaacctttactataacctcttcccctaacctttactataacctcttcccctaacctttactataacctcttcc

SEQ ID NO: 30480 - DNA, 96 bp, Fusarium azukicola
  misc_feature: 438
agcaatagccgctattagattttctatcatctaggctactgccccagtctgagtctgtatagcctctaattatattgtgtatatctgaataatcgc

SEQ ID NO: 30481 - DNA, 96 bp, Fusarium azukicola
  misc_feature: 438
ccttggaaaaagaagaaaactgccttaaaatgcagttattgcaaactgccaggtcataaagacccagattgctattttttgcaccctaataaagct

SEQ ID NO: 30482 - DNA, 96 bp, Fusarium azukicola
  misc_feature: 438
aagcttttctttaactaagaaagcttccattctcaaagcccaagtaatataattctcgcttccaataagccgggaaatattatacttagtggccat

SEQ ID NO: 30483 - DNA, 96 bp, Fusarium azukicola
  misc_feature: 438
aatagactatataataagtctaaactttaaattttagctattttagagttagtttgaattttctaggattttttaaaaaacctagttttagtatat

SEQ ID NO: 30484 - DNA, 96 bp, Fusarium azukicola
  misc_feature: 438
accctctcccttctttctcttcctcttctctccctctttactcctcttcttctcttctccccttcctctcctctcttcctctcctctatacttact

SEQ ID NO: 30485 - DNA, 96 bp, Fusarium azukicola
  misc_feature: 437
gagaagggaatataagagagagaggggaggaagggaggaagggagaagagaaagaagataggtagttagaagagaaagaaagaaggggaatagaaa

SEQ ID NO: 30486 - DNA, 96 bp, Fusarium azukicola
  misc_feature: 437
tctttctcttctattcacttcctacctttctaatcacccttcctctactctttttcttttctctcctctcccctctccctctctctcttttcactc

SEQ ID NO: 30487 - DNA, 96 bp, Fusarium azukicola
  misc_feature: 437
tagggttaattggttgaaattagggttaggggtagtagtagagttaagggttagggttaattggttgaaattagggttagggttaagtaggtgagt

SEQ ID NO: 30488 - DNA, 96 bp, Fusarium azukicola
  misc_feature: 437
gagaaagagaagttaagaggagtaaagggagtgaagaggagggaggagaaagagaaagggaagtaaagagaaagaggaaggaagagaagggaatat

SEQ ID NO: 30489 - DNA, 96 bp, Fusarium azukicola
  misc_feature: 437
cttttccttactctctccttataaccctttcctactcttctcctactctcttaccttaactccccctctcttctaccccttctcttttttttactt

SEQ ID NO: 30490 - DNA, 96 bp, Fusarium azukicola
  misc_feature: 437
agaagagagggggagttaaggtaagagagtaggagaagagtaggaaagggttataaggagagagtaaggaaaagaaaaaaaagtagtgaggttaag

SEQ ID NO: 30491 - DNA, 96 bp, Fusarium azukicola
  misc_feature: 437
ccttccttacttctctcctttcttaaccttccttacttctctcctttcttaaccttccttacttctctcctttcttaacccttctaaccctcccct

SEQ ID NO: 30492 - DNA, 96 bp, Fusarium azukicola
  misc_feature: 436
tttctattactttcttacttttctttcttttactcttccccttctccttttatcttcttctctttttctttactcttcccctccttcatttctctt

SEQ ID NO: 30493 - DNA, 96 bp, Fusarium azukicola
  misc_feature: 436
tttcccctattaaatactactcttttaccttaacttacttttttctcttctttctccttcccctttctcttcttttactactactttcttactctc

SEQ ID NO: 30494 - DNA, 96 bp, Fusarium azukicola
  misc_feature: 436
cctaatttccctttctgagaccccagaagaaatggattttgatataagtgataatttagaggtatataattccataatttctcaacaaaataatat

SEQ ID NO: 30495 - DNA, 96 bp, Fusarium azukicola
  misc_feature: 436
cctaacttcacacacttttaactccccttcctctttctccttccttctcttccctcctctttctctcaatcttcttctcttcctttccctcttatt

SEQ ID NO: 30496 - DNA, 96 bp, Fusarium azukicola
  misc_feature: 435
ttttactttaccctatactctcttctctcttttactttaccctatactctcttctctcttttactttaccctctacttttattctttattttactt

SEQ ID NO: 30497 - DNA, 96 bp, Fusarium azukicola
  misc_feature: 435
tttcttttccttactctctccttataaccctttcctactcttctcctactctcttaccttaactccccctctcttctaccccttctctttttttta

SEQ ID NO: 30498 - DNA, 96 bp, Fusarium azukicola
  misc_feature: 435
gaagagaaagagaagttaagaggagtaaagggagtgaagaggagggaggagaaagagaaagggaagtaaagagaaagaggaaggaagagaagggaa

SEQ ID NO: 30499 - DNA, 96 bp, Fusarium azukicola
  misc_feature: 435
ttcataacgggatctaagataaaaatataataaagcgtataatcaattaaattcaattactatcttcttccctagatagctcagtaacaatctgac

SEQ ID NO: 30500 - DNA, 96 bp, Fusarium azukicola
  misc_feature: 435
agatatttagagttagagagaaagaataaagataagatgaggaagaaggaagaaggagtgaaaagagagagagggagaggggagaggagaggataa

SEQ ID NO: 30501 - DNA, 96 bp, Fusarium azukicola
  misc_feature: 435
agagaaagaataaagataagatgaggaagaaggaagaaggagtgaaaagagagagagggagaggggagaggagaggataaggagtgaaaagagaga

SEQ ID NO: 30502 - DNA, 96 bp, Fusarium azukicola
  misc_feature: 435
tcccctctccctctctctcttttcactccttatcctctcctctcccctctccctctctctcttttcactccttcttccttcttcctcatcttatct

SEQ ID NO: 30503 - DNA, 96 bp, Fusarium azukicola
  misc_feature: 435
gggaagagaaagagaagttaagaggagtaaagggagtgaagaggagggaggagaaagagaaagggaagtaaagagaaagaggaaggaagagaaggg

SEQ ID NO: 30504 - DNA, 96 bp, Fusarium azukicola
  misc_feature: 435
gagaggaagagaggagaggaaggggagaagagaagaagaggagtaaagagggagagaagaggaagagaaagaagggagagggttaatataaagagg

SEQ ID NO: 30505 - DNA, 96 bp, Fusarium azukicola
  misc_feature: 435
cttgcattatggccgggcttgctgcatacaccacagcgccgaacacccggtccaaccgaccttcctcgaccaccactcctcgacgattcagccatt

SEQ ID NO: 30506 - DNA, 96 bp, Fusarium azukicola
  misc_feature: 435
agaggaaaaattaaacctctattattattatatatatatcttagtaaaaacccctttattatagacctaatattataagggaaaatctaagattat

SEQ ID NO: 30507 - DNA, 96 bp, Fusarium azukicola
  misc_feature: 434
tttttacttacttcttctttcctttcccctattaaatactactcttttaccttaacttacttttttctcttctttctccttcccctttctcttctt

SEQ ID NO: 30508 - DNA, 96 bp, Fusarium azukicola
  misc_feature: 434
tttccagttttttggagctttattagggtgcaaaaaatagcaatctgggtctttatgacctggcagtttgcaataactgcattttaaggcagtttt

SEQ ID NO: 30509 - DNA, 96 bp, Fusarium azukicola
  misc_feature: 434
ttctcttctttctccttcccctttctcttcttttactactactttcttactctcttactacctttacttctatacctattttctctttaactactc

SEQ ID NO: 30510 - DNA, 96 bp, Fusarium azukicola
  misc_feature: 434
aaagcttttctttaactaagaaagcttccattctcaaagcccaagtaatataattctcgcttccaataagccgggaaatattatacttagtggcca

SEQ ID NO: 30511 - DNA, 96 bp, Fusarium azukicola
  misc_feature: 434
tctcctctcccctctccctctctctcttttcactccttcttccttcttcctcatcttatctttattctttctctctaactctaaatatcttactct

SEQ ID NO: 30512 - DNA, 96 bp, Fusarium azukicola
  misc_feature: 434
tcctaacttcacacacttttaactccccttcctctttctccttccttctcttccctcctctttctctcaatcttcttctcttcctttccctcttat

SEQ ID NO: 30513 - DNA, 96 bp, Fusarium azukicola
  misc_feature: 434
tacctaaaaatagagtaaaaattctataatataatatatggtttatagggatatatcactatagttggtaatataatatagaacattaacagcctc

SEQ ID NO: 30514 - DNA, 96 bp, Fusarium azukicola
  misc_feature: 434
aacctaactcacctacttaaccctaaccctaatttcaaccaattaaccctaacccttaactcacctacttaaccctaaccctaatttcaaccaatt

SEQ ID NO: 30515 - DNA, 96 bp, Fusarium azukicola
  misc_feature: 434
aataatataactaataatatactaggacctttgataagaaaccttccctatataaagaaacaactaggatatttaaataaggtaaataaacctgtt

SEQ ID NO: 30516 - DNA, 96 bp, Fusarium azukicola
  misc_feature: 433
ttgcaaactgccaggtcataaagacccagattgctattttttgcaccctaataaggctccaaaaaactggaaaactcaggaagccaataaggtgca

SEQ ID NO: 30517 - DNA, 96 bp, Fusarium azukicola
  misc_feature: 433
ttcacaactagataaagcaacgcttttttgcttagttgttttccagcttattaggttattatatatataaaagcaatagccgctattagattttct

SEQ ID NO: 30518 - DNA, 96 bp, Fusarium azukicola
  misc_feature: 433
tgcaaactgccaggtcataaagacccagattgctattttttgcaccctaataaggctccaaaaaactggaaaactcaggaagccaataaggtgcat

SEQ ID NO: 30519 - DNA, 96 bp, Fusarium azukicola
  misc_feature: 433
tcactttttatcttaccttctctttactttttacctactctctttactattacttcttcttattcttaaccctctcttgccccccttttaactcta

SEQ ID NO: 30520 - DNA, 96 bp, Fusarium azukicola
  misc_feature: 433
tataaggaaaagagaaaaataacctatatataataatagctaaggttatttctaataagaataactatagactaagagataacttagatcttccta

SEQ ID NO: 30521 - DNA, 96 bp, Fusarium azukicola
  misc_feature: 433
gaggggagggaaaaaggggagaagagatagagggggttaaaagaggagagagaaggaggggagagaaagagaggaggaaaagtaaaaagaaggagg

SEQ ID NO: 30522 - DNA, 96 bp, Fusarium azukicola
  misc_feature: 433
acttttccctctttatattaaccctctcccttctttctcttcctcttctctccctctttactcctcttcttctcttctccccttcctctcctctct

SEQ ID NO: 30523 - DNA, 96 bp, Fusarium azukicola
  misc_feature: 433
aagaaaaagagaagaagataaaaggagaaggggaagagtaaaagaaagaaaagtaagaaagtaatagaaagtaatagaacgtagtttagagaaggt

SEQ ID NO: 30524 - DNA, 96 bp, Fusarium azukicola
  misc_feature: 433
acccttaactcacctacttaaccctaaccctaatttcaaccaattaaccctaacccttaactctactactacccctaaccctaatttcaaccaatt

SEQ ID NO: 30525 - DNA, 96 bp, Fusarium azukicola
  misc_feature: 432
aaataatataaataaaaaacctagtaataaggaatataagttcctagataaaatagctactaatatatagggtccttctagaatccctacctataa

SEQ ID NO: 30526 - DNA, 96 bp, Fusarium azukicola
  misc_feature: 432
ttactttctattactttcttacttttctttcttttactcttccccttctccttttatcttcttctctttttctttactcttcccctccttcatttc

SEQ ID NO: 30527 - DNA, 96 bp, Fusarium azukicola
  misc_feature: 432
cttaaccctaaccctaatttcaaccaattaaccctaacccttaactcacctacttaaccctaaccctaatttcaaccaattaaccctaacccttaa

SEQ ID NO: 30528 - DNA, 96 bp, Fusarium azukicola
  misc_feature: 432
tattactttcttacttttctttcttttactcttccccttctccttttatcttcttctctttttctttactcttcccctccttcatttctctttttc

SEQ ID NO: 30529 - DNA, 96 bp, Fusarium azukicola
  misc_feature: 432
tatctcttctcccctttttccctcccctcttcctctactttctttctcttctcccctcctcttcttaactacactttctctctacctcacttttcc

SEQ ID NO: 30530 - DNA, 96 bp, Fusarium azukicola
  misc_feature: 432
gtgttaatgttctatattatattaccaactatagtgatatatccctataaaccatatattatattatagaatttttactctatttttaggtatatt

SEQ ID NO: 30531 - DNA, 96 bp, Fusarium azukicola
  misc_feature: 432
ctttaacctaactcacctacttaaccctaaccctaatttcaaccaattaaccctaacccttaactcacctacttaaccctaaccctaatttcaacc

SEQ ID NO: 30532 - DNA, 96 bp, Fusarium azukicola
  misc_feature: 432
gagaaagagaagagtaaaagataaaaaaagaaaagaaggtaaaatagaggagtatagggtatataagaataagtaagatagaataaagaagaaggg

SEQ ID NO: 30533 - DNA, 96 bp, Fusarium azukicola
  misc_feature: 432
cttctcccctcctcttcttaactacactttctctctacctcacttttccctctttatattaaccctctcccttctttctcttcctcttctctccct

SEQ ID NO: 30534 - DNA, 96 bp, Fusarium azukicola
  misc_feature: 432
aaagctacttatacagtgcgaataattctttttctaaactaccttataagggatttttttaaaaagttttaaaaaaccataataggttttttatgg

SEQ ID NO: 30535 - DNA, 96 bp, Fusarium azukicola
  misc_feature: 431
ttttccagttttttggagctttattagggtgcaaaaaatagcaatctgggtctttatgacctggcagtttgcaataactgcattttaaggcagttt

SEQ ID NO: 30536 - DNA, 96 bp, Fusarium azukicola
  misc_feature: 431
ttatttaaatatcctagttgtttctttatatagggaaggtttcttatcaaaggtcctagtatattattagttatattattttgttgagaaattatg

SEQ ID NO: 30537 - DNA, 96 bp, Fusarium azukicola
  misc_feature: 431
aggaaaaaattaaacctctattattattatatatatatcttagtaaaaacccctttattatagacctgatattataagggaaaatctaagattata

SEQ ID NO: 30538 - DNA, 96 bp, Fusarium azukicola
  misc_feature: 431
tacactttctctctacctcacttttccctctttatattaaccctctcccttctttctcttcctcttctctccctctttactcctcttcttctcttc

SEQ ID NO: 30539 - DNA, 96 bp, Fusarium azukicola
  misc_feature: 431
acgttctattactttctattactttcttacttttctttcttttactcttccccttctccttttatcttcttctctttttctttactcttcccctcc

SEQ ID NO: 30540 - DNA, 96 bp, Fusarium azukicola
  misc_feature: 431
attcacttcctacctttctaatcacccttcctctactctttttcttttctctcctctcccctctccctctctctcttttcactccttatcctctcc

SEQ ID NO: 30541 - DNA, 96 bp, Fusarium azukicola
  misc_feature: 431
agtcatcttaacttaagaagtctaattaaatatataaaaataaaagatcctctctttaaatatactagtgaggacctatatcaagtcaaaaactgc

SEQ ID NO: 30542 - DNA, 96 bp, Fusarium azukicola
  misc_feature: 431
ctgccttaaaatgcagttattgcaaactgccaggtcataaagacccagattgctattttttgcaccctaataaggctccaaaaaactggaaaactc

SEQ ID NO: 30543 - DNA, 96 bp, Fusarium azukicola
  misc_feature: 431
ctttctttctcttctaactacctatcttctttctcttctcccttcctcccttcctcccctctctctcttatattcccttctcttccttcctctttc

SEQ ID NO: 30544 - DNA, 96 bp, Fusarium azukicola
  misc_feature: 430
ttttttggagctttattagggtgcaaaaaatagcaatctgggtctttatgacctggcagtttgcaataactgcattttaaggcagttttcttcttt

SEQ ID NO: 30545 - DNA, 96 bp, Fusarium azukicola
  misc_feature: 430
tttttcttttccttactctctccttataaccctttcctactcttctcctactctcttaccttaactccccctctcttctaccccttctcttttttt

SEQ ID NO: 30546 - DNA, 96 bp, Fusarium azukicola
  misc_feature: 430
tttctttctcttctcccctcctcttcttaactacactttctctctacctcacttttccctctttatattaaccctctcccttctttctcttcctct

SEQ ID NO: 30547 - DNA, 96 bp, Fusarium azukicola
  misc_feature: 430
cactttttatcttaccttctctttactttttacctactctctttactattacttcttcttattcttaaccctctcttgccccccttttaactctaa

SEQ ID NO: 30548 - DNA, 96 bp, Fusarium azukicola
  misc_feature: 430
tctcttccttcctctttctctttacttccctttctctttctcctccctcctcttcactccctttactcctcttaacttctctttctcttccctctt

SEQ ID NO: 30549 - DNA, 96 bp, Fusarium azukicola
  misc_feature: 430
aaaataatataaataaaaaacctagtaataaggaatataagttcctagataaaatagctactaatatatagggtccttctagaatccctacctata

SEQ ID NO: 30550 - DNA, 96 bp, Fusarium azukicola
  misc_feature: 430
tataagggttatagctttatacgttcttattattagaggaaaaaattaaacctctattattattatatatatatcttagtaaaaacccctttatta

SEQ ID NO: 30551 - DNA, 96 bp, Fusarium azukicola
  misc_feature: 430
ctcccttctttctcttcctcttctctccctctttactcctcttcttctcttctccccttcctctcctctcttcctctcctctatacttacttacta

SEQ ID NO: 30552 - DNA, 96 bp, Fusarium azukicola
  misc_feature: 430
ctctcctctcccctctccctctctctcttttcactccttatcctctcctctcccctctccctctctctcttttcactccttctcctctcctctccc

SEQ ID NO: 30553 - DNA, 96 bp, Fusarium azukicola
  misc_feature: 430
cttccttcctctttctctttacttccctttctctttctcctccctcctcttcactccctttactcctcttaacttctctttctcttccctcttctt

SEQ ID NO: 30554 - DNA, 96 bp, Fusarium azukicola
  misc_feature: 430
attactttctattactttcttacttttctttcttttactcttccccttctccttttatcttcttctctttttctttactcttcccctccttcattt

SEQ ID NO: 30555 - DNA, 96 bp, Fusarium azukicola
  misc_feature: 429
ttttcttctttaacctaactcacctacttaaccctaaccctaatttcaaccaattaaccctaacccttaactcacctacttaaccctaaccctaat

SEQ ID NO: 30556 - DNA, 96 bp, Fusarium azukicola
  misc_feature: 429
aagttaaaaactgtgaaaactgcaaactaggaaaattaactaaaaataatataaataaaaaacctagtaataaggaatacaagttcctagataaaa

SEQ ID NO: 30557 - DNA, 96 bp, Fusarium azukicola
  misc_feature: 429
ttacttcttctttcctttcccctattaaatactactcttttaccttaacttacttttttctcttctttctccttcccctttctcttcttttactac

SEQ ID NO: 30558 - DNA, 96 bp, Fusarium azukicola
  misc_feature: 429
gcaatagccgctattagattttctatcatctaggctactgccccagtctgagtctgtatagcctctaattatattgtgtatatctgaataatcgca

SEQ ID NO: 30559 - DNA, 96 bp, Fusarium azukicola
  misc_feature: 429
gaagagagggggagttaaggtaagagagtaggagaagagtaggaaagggttataaggagagagtaaggaaaagaaaaaaaagtagtgaggttaaga

SEQ ID NO: 30560 - DNA, 96 bp, Fusarium azukicola
  misc_feature: 429
atcaagttaaaaactgtgaaaactgcaaactaggaaaattaactaaaaataatataaataaaaaacctagtaataaggaatacaagttcctagata

SEQ ID NO: 30561 - DNA, 96 bp, Fusarium azukicola
  misc_feature: 429
taaaaataatataaataaaaaacctagtaataaggaatataagttcctagataaaatagctactaatatatagggtccttctagaatccctaccta

SEQ ID NO: 30562 - DNA, 96 bp, Fusarium azukicola
  misc_feature: 429
cttcttcctcatcttatctttattctttctctctaactctaaatatcttactctcccttcttctttattctatcttacttattcttatatacccta

SEQ ID NO: 30563 - DNA, 96 bp, Fusarium azukicola
  misc_feature: 429
taaccctctcccttctttctcttcctcttctctccctctttactcctcttcttctcttctccccttcctctcctctcttcctctcctctatactta

SEQ ID NO: 30564 - DNA, 96 bp, Fusarium azukicola
  misc_feature: 429
ctttaaaggaggctgttaatgttctatattatattaccaactatagtgatatatccctataaaccatatattatattatagaatttttactctatt

SEQ ID NO: 30565 - DNA, 96 bp, Fusarium azukicola
  misc_feature: 429
agagttaagggttagggttaattggttgaaattagggttagggttaagtaggtgagttaagggttagggttaattggttgaaattagggttagggt

SEQ ID NO: 30566 - DNA, 96 bp, Fusarium azukicola
  misc_feature: 428
acctgatttttctactaataaaaataatataactaattttatatatgatacaggtgctactaggcatattgtatgtagaaaagaatttctagttaa

SEQ ID NO: 30567 - DNA, 96 bp, Fusarium azukicola
  misc_feature: 428
aagatgaggaagaaggaagaaggagtgaaaagagagagagggagaggggagaggagaggataaggagtgaaaagagagagagggagaggggagagg

SEQ ID NO: 30568 - DNA, 96 bp, Fusarium azukicola
  misc_feature: 427
agaagggaatataagagagagaggggaggaagggaggaagggagaagagaaagaagataggtagttagaagagaaagaaagaaggggaatagaaaa

SEQ ID NO: 30569 - DNA, 96 bp, Fusarium azukicola
  misc_feature: 427
tatatattatattatagaatttttactctatttttaggtatatttacctaacctatagctactataggtagctagatattaagggtattattctaa

SEQ ID NO: 30570 - DNA, 96 bp, Fusarium azukicola
  misc_feature: 427
tattaaatactactcttttaccttaacttacttttttctcttctttctccttcccctttctcttcttttactactactttcttactctcttactac

SEQ ID NO: 30571 - DNA, 96 bp, Fusarium azukicola
  misc_feature: 427
tagattttcccttataatatcaggtctataataaaggggtttttactaagatatatatataataataatagaggtttaattttttcctctaataat

SEQ ID NO: 30572 - DNA, 96 bp, Fusarium azukicola
  misc_feature: 427
tacgttctattactttctattactttcttacttttctttcttttactcttccccttctccttttatcttcttctctttttctttactcttcccctc

SEQ ID NO: 30573 - DNA, 96 bp, Fusarium azukicola
  misc_feature: 427
ggggtttttactaagatatatatataataataatagaggtttaattttttcctctaataataagaacgtataaagctataacccttataagattat

SEQ ID NO: 30574 - DNA, 96 bp, Fusarium azukicola
  misc_feature: 427
aaaaagaaggaggagagagaaggaagaataaaagaaaagaataagagggaaaggaagagaagaagattgagagaaagaggagggaagagaaggaag

SEQ ID NO: 30575 - DNA, 96 bp, Fusarium azukicola
  misc_feature: 427
ccctcctctttctctcaatcttcttctcttcctttccctcttattcttttcttttattcttccttctctctcctccttctttttacttttcctcct

SEQ ID NO: 30576 - DNA, 96 bp, Fusarium azukicola
  misc_feature: 426
tttttttcttttccttactctctccttataaccctttcctactcttctcctactctcttaccttaactccccctctcttctaccccttctcttttt

SEQ ID NO: 30577 - DNA, 96 bp, Fusarium azukicola
  misc_feature: 426
ttctttcttttactcttccccttctccttttatcttcttctctttttctttactcttcccctccttcatttctctttttcttcttcttttcttttt

SEQ ID NO: 30578 - DNA, 96 bp, Fusarium azukicola
  misc_feature: 426
gaaagaagggagagggttaatataaagagggaaaagtgaggtagagagaaagtgtagttaagaagaggaggggagaagagaaagaaagtagaggaa

SEQ ID NO: 30579 - DNA, 96 bp, Fusarium azukicola
  misc_feature: 426
tgaggaagaaggaagaaggagtgaaaagagagagagggagaggggagaggagaggataaggagtgaaaagagagagagggagaggggagaggagag

SEQ ID NO: 30580 - DNA, 96 bp, Fusarium azukicola
  misc_feature: 426
aagttaaggtaaaaagaaagataaaaataaggtagtttagagtttagtaaaaagagaggttatagaaaagaagaagaagagaaaggaaaagaagga

SEQ ID NO: 30581 - DNA, 96 bp, Fusarium azukicola
  misc_feature: 426
tattaggtctataataaaggggtttttactaagatatatataataataatagaggtttaattttttcctctaataataagaacgtataaagctata

SEQ ID NO: 30582 - DNA, 96 bp, Fusarium azukicola
  misc_feature: 426
taagatatttagagttagagagaaagaataaagataagatgaggaagaaggaagaaggagtgaaaagagagagagggagaggggagaggagaggat

SEQ ID NO: 30583 - DNA, 96 bp, Fusarium azukicola
  misc_feature: 426
ggagaaagagaagagtaaaagataaaaaaagaaaagaaggtaaaatagaggagtatagggtatataagaataagtaagatagaataaagaagaagg

SEQ ID NO: 30584 - DNA, 96 bp, Fusarium azukicola
  misc_feature: 426
aaagaataaagataagatgaggaagaaggaagaaggagtgaaaagagagagagggagaggggagaggagaggataaggagtgaaaagagagagagg

SEQ ID NO: 30585 - DNA, 96 bp, Fusarium azukicola
  misc_feature: 426
attggttgaaattagggttaggggtagtagtagagttaagggttagggttaattggttgaaattagggttagggttaagtaggtgagttaagggtt

SEQ ID NO: 30586 - DNA, 96 bp, Fusarium azukicola
  misc_feature: 425
tctgagtctgtatagcctctaattatattgtgtatatctgaataatcgcagttatatatagtagataaatttggatagctatttaaatacttccaa

SEQ ID NO: 30587 - DNA, 96 bp, Fusarium azukicola
  misc_feature: 425
ttcttttattcttccttctctctcctccttctttttacttttcctcctctctttctctcccctccttctctctcctcttttaaccccctctatctc

SEQ ID NO: 30588 - DNA, 96 bp, Fusarium azukicola
  misc_feature: 425
taaggagtgaaaagagagagagggagaggggagaggagagaaaagaaaaagagtagaggaagggtgattagaaaggtaggaagtgaatagaagaga

SEQ ID NO: 30589 - DNA, 96 bp, Fusarium azukicola
  misc_feature: 425
tattgcaaactgccaggtcataaagacccagattgctattttttgcaccctaataaggctccaaaaaactggaaaactcaggaagccaataaggtg

SEQ ID NO: 30590 - DNA, 96 bp, Fusarium azukicola
  misc_feature: 425
tacttaaccctaaccctaatttcaaccaattaaccctaacccttaactcacctacttaaccctaaccctaatttcaaccaattaaccctaaccctt

SEQ ID NO: 30591 - DNA, 96 bp, Fusarium azukicola
  misc_feature: 425
aagctacttatacagtgcgaataattctttttctaaactaccttataagggatttttttaaaaagttttaaaaaaccataataggttttttatggc

SEQ ID NO: 30592 - DNA, 96 bp, Fusarium azukicola
  misc_feature: 425
gaaagaataaagataagatgaggaagaaggaagaaggagtgaaaagagagagagggagaggggagaggagaggataaggagtgaaaagagagagag

SEQ ID NO: 30593 - DNA, 96 bp, Fusarium azukicola
  misc_feature: 425
ctttctcttctaactacctatcttctttctcttctcccttcctcccttcctcccctctctctcttatattcccttctcttccttcctctttctctt

SEQ ID NO: 30594 - DNA, 96 bp, Fusarium azukicola
  misc_feature: 425
aagtaagtatagaggagaggaagagaggagaggaaggggagaagagaagaagaggagtaaagagggagagaagaggaagagaaagaagggagaggg

SEQ ID NO: 30595 - DNA, 96 bp, Fusarium azukicola
  misc_feature: 424
tttcttctttaacctaactcacctacttaaccctaaccctaatttcaaccaattaaccctaacccttaactcacctacttaaccctaaccctaatt

SEQ ID NO: 30596 - DNA, 96 bp, Fusarium azukicola
  misc_feature: 424
cccttctttctcttcctcttctctccctctttactcctcttcttctcttctccccttcctctcctctcttcctctcctctatacttacttactaaa

SEQ ID NO: 30597 - DNA, 96 bp, Fusarium azukicola
  misc_feature: 424
ttctattactttcttacttttctttcttttactcttccccttctccttttatcttcttctctttttctttactcttcccctccttcatttctcttt

SEQ ID NO: 30598 - DNA, 96 bp, Fusarium azukicola
  misc_feature: 424
ccttaactcacctacttaaccctaaccctaatttcaaccaattaaccctaacccttaactctactactacccctaaccctaatttcaaccaattaa

SEQ ID NO: 30599 - DNA, 96 bp, Fusarium azukicola
  misc_feature: 424
cctatactcctctattttaccttcttttctttttttatcttttactcttctctttctccctttctttcctttatctttcttcactcttcttcttaa

SEQ ID NO: 30600 - DNA, 96 bp, Fusarium azukicola
  misc_feature: 424
aagaagggagagggttaatataaagagggaaaagtgaggtagagagaaagtgtagttaagaagaggaggggagaagagaaagaaagtagaggaaga

SEQ ID NO: 30601 - DNA, 96 bp, Fusarium azukicola
  misc_feature: 424
ggtatagggtaaagtaaaagagagaagagagtatagggtaaagtaaaagagagaagagagtatagggtaaagtaaaagagagaagagagtataggg

SEQ ID NO: 30602 - DNA, 96 bp, Fusarium azukicola
  misc_feature: 424
atttctcttacctctaattccctcctaccttctctaaactacgttctattactttctattactttcttacttttctttcttttactcttccccttc

SEQ ID NO: 30603 - DNA, 96 bp, Fusarium azukicola
  misc_feature: 424
ctacactttctctctacctcacttttccctctttatattaaccctctcccttctttctcttcctcttctctccctctttactcctcttcttctctt

SEQ ID NO: 30604 - DNA, 96 bp, Fusarium azukicola
  misc_feature: 424
actatatattatattatagaatttttactctatttttaggtatatttacctaacctatagctactataggtagctagatattaagggtattattct

SEQ ID NO: 30605 - DNA, 96 bp, Fusarium azukicola
  misc_feature: 423
ttactttaccctatactctcttctctcttttactttaccctatactctcttctctcttttactttaccctctacttttattctttattttacttta

SEQ ID NO: 30606 - DNA, 96 bp, Fusarium azukicola
  misc_feature: 423
tctttaacctaactcacctacttaaccctaaccctaatttcaaccaattaaccctaacccttaactcacctacttaaccctaaccctaatttcaac

SEQ ID NO: 30607 - DNA, 96 bp, Fusarium azukicola
  misc_feature: 423
agaaggaggagagagaaggaagaataaaagaaaagaataagagggaaaggaagagaagaagattgagagaaagaggagggaagagaaggaaggaga

SEQ ID NO: 30608 - DNA, 96 bp, Fusarium azukicola
  misc_feature: 423
tctacctcacttttccctctttatattaaccctctcccttctttctcttcctcttctctccctctttactcctcttcttctcttctccccttcctc

SEQ ID NO: 30609 - DNA, 96 bp, Fusarium azukicola
  misc_feature: 423
gggtatagggtaaagtaaaagagagaagagagtatagggtaaagtaaaagagagaagagagtatagggtaaagtaaaagagagaagagagtatagg

SEQ ID NO: 30610 - DNA, 96 bp, Fusarium azukicola
  misc_feature: 423
ctctcctccttctttttacttttcctcctctctttctctcccctccttctctctcctcttttaaccccctctatctcttctcccctttttccctcc

SEQ ID NO: 30611 - DNA, 96 bp, Fusarium azukicola
  misc_feature: 423
ggaaaaaattaaacctctattattattatatatatcttagtaaaaacccctttattatagacctaatattataagggaaaatctaagattatatag

SEQ ID NO: 30612 - DNA, 96 bp, Fusarium azukicola
  misc_feature: 423
gaagtcttatgcaccttattggcttcctgagttttccagttttttggagccttattagggtgcaaaaaatagcaatctgggtctttatgacctggc

SEQ ID NO: 30613 - DNA, 96 bp, Fusarium azukicola
  misc_feature: 423
ctaacttcacacacttttaactccccttcctctttctccttccttctcttccctcctctttctctcaatcttcttctcttcctttccctcttattc

SEQ ID NO: 30614 - DNA, 96 bp, Fusarium azukicola
  misc_feature: 423
ctacttaaccctaaccctaatttcaaccaattaaccctaacccttaactctactactacccctaaccctaatttcaaccaattaaccctaaccctt

SEQ ID NO: 30615 - DNA, 96 bp, Fusarium azukicola
  misc_feature: 423
atctttctcttctattcacttcctacctttctaatcacccttcctctactctttttcttttctctcctctcccctctccctctctctcttttcact

SEQ ID NO: 30616 - DNA, 96 bp, Fusarium azukicola
  misc_feature: 422
agagagggagaggagggaagaagagggaagagaaagagaagttaagaggagtaaagggagtgaagaggagggaggagaaagagaaagggaagtaaa

SEQ ID NO: 30617 - DNA, 96 bp, Fusarium azukicola
  misc_feature: 422
ttcactccttatcctctcctctcccctctccctctctctcttttcactccttcttccttcttcctcatcttatctttattctttctctctaactct

SEQ ID NO: 30618 - DNA, 96 bp, Fusarium azukicola
  misc_feature: 422
tccttactctctccttataaccctttcctactcttctcctactctcttaccttaactccccctctcttctaccccttctcttttttttacttactt

SEQ ID NO: 30619 - DNA, 96 bp, Fusarium azukicola
  misc_feature: 422
tactttctattactttcttacttttctttcttttactcttccccttctccttttatcttcttctctttttctttactcttcccctccttcatttct

SEQ ID NO: 30620 - DNA, 96 bp, Fusarium azukicola
  misc_feature: 422
agaataagagggaaaggaagagaagaagattgagagaaagaggagggaagagaaggaaggagaaagaggaaggggagttaaaagtgtgtgaagtta

SEQ ID NO: 30621 - DNA, 96 bp, Fusarium azukicola
  misc_feature: 422
gggattctagaaggaccctatatattagtagctattttatctaggaacttatattccttattactaggttttttatttatattatttttagttaat

SEQ ID NO: 30622 - DNA, 96 bp, Fusarium azukicola
  misc_feature: 422
cttctattcacttcctacctttctaatcacccttcctctactctttttcttttctctcctctcccctctccctctctctcttttcactccttatcc

SEQ ID NO: 30623 - DNA, 96 bp, Fusarium azukicola
  misc_feature: 422
actctcctaacttcacacacttttaactccccttcctctttctccttccttctcttccctcctctttctctcaatcttcttctcttcctttccctc

SEQ ID NO: 30624 - DNA, 96 bp, Fusarium azukicola
  misc_feature: 422
cctgatttttctactaataaaaataatataactaattttatatatgatacaggtgctactaggcatattgtatgtagaaaagaatttctagttaat

SEQ ID NO: 30625 - DNA, 96 bp, Fusarium azukicola
  misc_feature: 422
aggaggctgttaatgttctatattatattaccaactatagtgatatatccctataaaccatatattatattatagaatttttactctatttttagg

SEQ ID NO: 30626 - DNA, 96 bp, Fusarium azukicola
  misc_feature: 422
acccagattgctattttttgcaccctaataaggctccaaaaaactggaaaactcaggaagccaataaggtgcataagacttctaagaaaagggaat

SEQ ID NO: 30627 - DNA, 96 bp, Fusarium azukicola
  misc_feature: 422
aatatacctaaaaatagagtaaaaattctataatataatatatggtttatagggatatatcactatagttggtaatataatatagaacattaacat

SEQ ID NO: 30628 - DNA, 96 bp, Fusarium azukicola
  misc_feature: 422
atattgttaatgttctatattatattaccaactatagtgatatatccctataaaccacatattatattatagaatttttactctatttttaggtat

SEQ ID NO: 30629 - DNA, 96 bp, Fusarium azukicola
  misc_feature: 422
aaccctctcttttcttctttaacctaactcacctacttaaccctaaccctaatttcaaccaattaaccctaacccttaactcacctacttaaccct

SEQ ID NO: 30630 - DNA, 96 bp, Fusarium azukicola
  misc_feature: 421
aaggaggagagagaaggaagaataaaagaaaagaataagagggaaaggaagagaagaagattgagagaaagaggagggaagagaaggaaggagaaa

SEQ ID NO: 30631 - DNA, 96 bp, Fusarium azukicola
  misc_feature: 421
tttaaaggaggctgttaatgttctatattatattaccaactatagtgatatatccctataaaccatatattatattatagaatttttactctattt

SEQ ID NO: 30632 - DNA, 96 bp, Fusarium azukicola
  misc_feature: 421
ttcacttcctacctttctaatcacccttcctctactctttttcttttctctcctctcccctctccctctctctcttttcactccttatcctctcct

SEQ ID NO: 30633 - DNA, 96 bp, Fusarium azukicola
  misc_feature: 421
aaactgtgaaaactgcaaactaggaaaattaactaaaaataatataaataaaaaacctagtaataaggaatacaagttcctagataaaatagctac

SEQ ID NO: 30634 - DNA, 96 bp, Fusarium azukicola
  misc_feature: 421
ggagaggaagagaggagaggaaggggagaagagaagaagaggagtaaagagggagagaagaggaagagaaagaagggagagggttaatataaagag

SEQ ID NO: 30635 - DNA, 96 bp, Fusarium azukicola
  misc_feature: 421
cttctctctcctccttctttttacttttcctcctctctttctctcccctccttctctctcctcttttaaccccctctatctcttctcccctttttc

SEQ ID NO: 30636 - DNA, 96 bp, Fusarium azukicola
  misc_feature: 421
aagaaggaggagagagaaggaagaataaaagaaaagaataagagggaaaggaagagaagaagattgagagaaagaggagggaagagaaggaaggag

SEQ ID NO: 30637 - DNA, 96 bp, Fusarium azukicola
  misc_feature: 421
aaagggatttttttaaaaatctaaaaaaattatttttaagttttatatttagttagatctataagattactttttttaagtttctagctattttat

SEQ ID NO: 30638 - DNA, 96 bp, Fusarium azukicola
  misc_feature: 420
tttctcttctttctccttcccctttctcttcttttactactactttcttactctcttactacctttacttctatacctattttctctttaactact

SEQ ID NO: 30639 - DNA, 96 bp, Fusarium azukicola
  misc_feature: 420
atgacccacttttatctatctatcttctataagtctctcttagaagctagatattatctctttattacttttcttcctagttatctaggaaattaa

SEQ ID NO: 30640 - DNA, 96 bp, Fusarium azukicola
  misc_feature: 420
gttagggttaattggttgaaattagggttaggggtagtagtagagttaagggttagggttaattggttgaaattagggttagggttaagtaggtga

SEQ ID NO: 30641 - DNA, 96 bp, Fusarium azukicola
  misc_feature: 420
acttcttctttcctttcccctattaaatactactcttttaccttaacttacttttttctcttctttctccttcccctttctcttcttttactacta

SEQ ID NO: 30642 - DNA, 96 bp, Fusarium azukicola
  misc_feature: 420
tacttcttctttcctttcccctattaaatactactcttttaccttaacttacttttttctcttctttctccttcccctttctcttcttttactact

SEQ ID NO: 30643 - DNA, 96 bp, Fusarium azukicola
  misc_feature: 420
gttttccagttttttggagctttattagggtgcaaaaaatagcaatctgggtctttatgacctggcagtttgcaataactgcattttaaggcagtt

SEQ ID NO: 30644 - DNA, 96 bp, Fusarium azukicola
  misc_feature: 420
cttttccctctttatattaaccctctcccttctttctcttcctcttctctccctctttactcctcttcttctcttctccccttcctctcctctctt

SEQ ID NO: 30645 - DNA, 96 bp, Fusarium azukicola
  misc_feature: 420
cctctcctctcccctctccctctctctcttttcactccttcttccttcttcctcatcttatctttattctttctctctaactctaaatatcttact

SEQ ID NO: 30646 - DNA, 96 bp, Fusarium azukicola
  misc_feature: 420
aatgttaatgttctatattatattaccaactatagtgatatatccctataaaccacatattatattatagaatttttactctatttttaggtatat

SEQ ID NO: 30647 - DNA, 96 bp, Fusarium azukicola
  misc_feature: 419
tttttggagctttattagggtgcaaaaaatagcaatctgggtctttatgacctggcagtttgcaataactgcattttaaggcagttttcttctttt

SEQ ID NO: 30648 - DNA, 96 bp, Fusarium azukicola
  misc_feature: 419
ttctcccctcctcttcttaactacactttctctctacctcacttttccctctttatattaaccctctcccttctttctcttcctcttctctccctc

SEQ ID NO: 30649 - DNA, 96 bp, Fusarium azukicola
  misc_feature: 419
ttctattcacttcctacctttctaatcacccttcctctactctttttcttttctctcctctcccctctccctctctctcttttcactccttatcct

SEQ ID NO: 30650 - DNA, 96 bp, Fusarium azukicola
  misc_feature: 419
ctatccgacggtataatcttggtccgaatcggatcctattaggccggtcaaatgactataataagggactatccttctttgttagttactacaaca

SEQ ID NO: 30651 - DNA, 96 bp, Fusarium azukicola
  misc_feature: 419
tctttctttctcttctaactacctatcttctttctcttctcccttcctcccttcctcccctctctctcttatattcccttctcttccttcctcttt

SEQ ID NO: 30652 - DNA, 96 bp, Fusarium azukicola
  misc_feature: 419
tcactacttttttttcttttccttactctctccttataaccctttcctactcttctcctactctcttaccttaactccccctctcttctacccctt

SEQ ID NO: 30653 - DNA, 96 bp, Fusarium azukicola
  misc_feature: 419
tagaggaaaaattaaacctctattattattatatatatatcttagtaaaaacccctttattatagacctaatattataagggaaaatctaagatta

SEQ ID NO: 30654 - DNA, 96 bp, Fusarium azukicola
  misc_feature: 419
atggcttaattagtctaactctaagttattagctaattaaatcttaagctgaatttcttagaatttttaaggctattttaaaatttggtataaatc

SEQ ID NO: 30655 - DNA, 96 bp, Fusarium azukicola
  misc_feature: 419
actttctattactttcttacttttctttcttttactcttccccttctccttttatcttcttctctttttctttactcttcccctccttcatttctc

SEQ ID NO: 30656 - DNA, 96 bp, Fusarium azukicola
  misc_feature: 419
aagggttatagctttatacgttcttattattagaggaaaaaattaaacctctattattattatatatatatcttagtaaaaacccctttattatag

SEQ ID NO: 30657 - DNA, 96 bp, Fusarium azukicola
  misc_feature: 418
ttcctttccctcttattcttttcttttattcttccttctctctcctccttctttttacttttcctcctctctttctctcccctccttctctctcct

SEQ ID NO: 30658 - DNA, 96 bp, Fusarium azukicola
  misc_feature: 418
ttatatataggttatttttttcttttccttgtgatattatttttccttgcttatttaaaagaaggacttcttgtttatttataatagaagttatat

SEQ ID NO: 30659 - DNA, 96 bp, Fusarium azukicola
  misc_feature: 418
ttatatatagctaaatagttaaaatcgttttttttaagtttctagctattttatagcgatttttagaaacttagggtttagctgtttttagttata

SEQ ID NO: 30660 - DNA, 96 bp, Fusarium azukicola
  misc_feature: 418
gggagaaagagaagagtaaaagataaaaaaagaaaagaaggtaaaatagaggagtatagggtatataagaataagtaagatagaataaagaagaag

SEQ ID NO: 30661 - DNA, 96 bp, Fusarium azukicola
  misc_feature: 418
ctttctttctcttctcccctcctcttcttaactacactttctctctacctcacttttccctctttatattaaccctctcccttctttctcttcctc

SEQ ID NO: 30662 - DNA, 96 bp, Fusarium azukicola
  misc_feature: 418
cttcacaactagataaagcaacgcttttttgcttagttgttttccagcttattaggttattatatatataaaagcaatagccgctattagattttc

SEQ ID NO: 30663 - DNA, 96 bp, Fusarium azukicola
  misc_feature: 418
ctccttatcctctcctctcccctctccctctctctcttttcactccttcttccttcttcctcatcttatctttattctttctctctaactctaaat

SEQ ID NO: 30664 - DNA, 96 bp, Fusarium azukicola
  misc_feature: 418
cctcttcttaactacactttctctctacctcacttttccctctttatattaaccctctcccttctttctcttcctcttctctccctctttactcct

SEQ ID NO: 30665 - DNA, 96 bp, Fusarium azukicola
  misc_feature: 418
acttacttcttctttcctttcccctattaaatactactcttttaccttaacttacttttttctcttctttctccttcccctttctcttcttttact

SEQ ID NO: 30666 - DNA, 96 bp, Fusarium azukicola
  misc_feature: 417
tttccttactctctccttataaccctttcctactcttctcctactctcttaccttaactccccctctcttctaccccttctcttttttttacttac

SEQ ID NO: 30667 - DNA, 96 bp, Fusarium azukicola
  misc_feature: 417
tttaacctaactcacctacttaaccctaaccctaatttcaaccaattaaccctaacccttaactcacctacttaaccctaaccctaatttcaacca

SEQ ID NO: 30668 - DNA, 96 bp, Fusarium azukicola
  misc_feature: 417
ttctttactaaaagcttataacctatactatttgagagaataaaagagaatctatccctaatataacttatttcctttataaagggtttttattat

SEQ ID NO: 30669 - DNA, 96 bp, Fusarium azukicola
  misc_feature: 417
aaaatatataaataaaataataaggaaatataataaataagaaataggaacttctaaagtacctattaaatttatagaaagactcttaaaatctaa

SEQ ID NO: 30670 - DNA, 96 bp, Fusarium azukicola
  misc_feature: 417
atatccctataaactatatattatattatagaatttttactctatttttaggtatatttacctaacctatagctactataggtagctagatattaa

SEQ ID NO: 30671 - DNA, 96 bp, Fusarium azukicola
  misc_feature: 417
tccctctttatattaaccctctcccttctttctcttcctcttctctccctctttactcctcttcttctcttctccccttcctctcctctcttcctc

SEQ ID NO: 30672 - DNA, 96 bp, Fusarium azukicola
  misc_feature: 417
taatagactatataataagtctaaactttaaattttagctattttagagttagtttgaattttctaggattttttaaaaaacctagttttagtata

SEQ ID NO: 30673 - DNA, 96 bp, Fusarium azukicola
  misc_feature: 417
atacctaaaaatagagtaaaaattctataatataatatgtggtttatagggatatatcactatagttggtaatataatatagaacattaacactta

SEQ ID NO: 30674 - DNA, 96 bp, Fusarium azukicola
  misc_feature: 417
cttgttaatgttctatattatattaccaactatagtgatatatccctataaaccacatattatattatagaatttttactctatttttaggtatat

SEQ ID NO: 30675 - DNA, 96 bp, Fusarium azukicola
  misc_feature: 417
aaagaagggagagggttaatataaagagggaaaagtgaggtagagagaaagtgtagttaagaagaggaggggagaagagaaagaaagtagaggaag

SEQ ID NO: 30676 - DNA, 96 bp, Fusarium azukicola
  misc_feature: 417
agagaaagaagggagagggttaatataaagagggaaaagtgaggtagagagaaagtgtagttaagaagaggaggggagaagagaaagaaagtagag

SEQ ID NO: 30677 - DNA, 96 bp, Fusarium azukicola
  misc_feature: 417
agctattttatctaggaacttgtattccttattactaggttttttatttatattatttttagttaattttcctagtttgcagttttcacagttttt

SEQ ID NO: 30678 - DNA, 96 bp, Fusarium azukicola
  misc_feature: 416
ttaacctaactcacctacttaaccctaaccctaatttcaaccaattaaccctaacccttaactcacctacttaaccctaaccctaatttcaaccaa

SEQ ID NO: 30679 - DNA, 96 bp, Fusarium azukicola
  misc_feature: 416
ttctttctcttctaactacctatcttctttctcttctcccttcctcccttcctcccctctctctcttatattcccttctcttccttcctctttctc

SEQ ID NO: 30680 - DNA, 96 bp, Fusarium azukicola
  misc_feature: 416
ttactttaaagaaagcccctataataatgaaaaggcaatattatataataataataataataaacagaaattcactatcgaaattcctaaaaagcc

SEQ ID NO: 30681 - DNA, 96 bp, Fusarium azukicola
  misc_feature: 416
tctcctccttctttttacttttcctcctctctttctctcccctccttctctctcctcttttaaccccctctatctcttctcccctttttccctccc

SEQ ID NO: 30682 - DNA, 96 bp, Fusarium azukicola
  misc_feature: 416
aggggtttttactaagatatatatataataataatagaggtttaattttttcctctaataataagaacgtataaagctataacccttataagatta

SEQ ID NO: 30683 - DNA, 96 bp, Fusarium azukicola
  misc_feature: 416
gagaaagaataaagataagatgaggaagaaggaagaaggagtgaaaagagagagagggagaggggagaggagaggataaggagtgaaaagagagag

SEQ ID NO: 30684 - DNA, 96 bp, Fusarium azukicola
  misc_feature: 416
agttattgcaaactgccaggtcataaagacccagattgctattttttgcaccctaataaagctccaaaaaactggaaaactcaggaagccaataag

SEQ ID NO: 30685 - DNA, 96 bp, Fusarium azukicola
  misc_feature: 416
ctattcacttcctacctttctaatcacccttcctctactctttttcttttctctcctctcccctctccctctctctcttttcactccttatcctct

SEQ ID NO: 30686 - DNA, 96 bp, Fusarium azukicola
  misc_feature: 416
ccttccttctcttccctcctctttctctcaatcttcttctcttcctttccctcttattcttttcttttattcttccttctctctcctccttctttt

SEQ ID NO: 30687 - DNA, 96 bp, Fusarium azukicola
  misc_feature: 416
aaaagctacttatacagtgcgaataattctttttctaaactaccttataagggatttttttaaaaagttttaaaaaaccataataggttttttatg

SEQ ID NO: 30688 - DNA, 96 bp, Fusarium azukicola
  misc_feature: 415
ttttttcttttccttactctctccttataaccctttcctactcttctcctactctcttaccttaactccccctctcttctaccccttctctttttt

SEQ ID NO: 30689 - DNA, 96 bp, Fusarium azukicola
  misc_feature: 415
tcttttccttactctctccttataaccctttcctactcttctcctactctcttaccttaactccccctctcttctaccccttctcttttttttact

SEQ ID NO: 30690 - DNA, 96 bp, Fusarium azukicola
  misc_feature: 415
agaaagaataaagataagatgaggaagaaggaagaaggagtgaaaagagagagagggagaggggagaggagaggataaggagtgaaaagagagaga

SEQ ID NO: 30691 - DNA, 96 bp, Fusarium azukicola
  misc_feature: 415
gaccttcctcgaccaccactcctcgacgattcagccattacctgcgcatctatatccatttgatcaattacttgtcttccttcctctactatcata

SEQ ID NO: 30692 - DNA, 96 bp, Fusarium azukicola
  misc_feature: 415
gctatccgacggtataatcttggtccgaatcggatcctattaggccggtcaaatgactataataagggactatccttctttgttagttactacaac

SEQ ID NO: 30693 - DNA, 96 bp, Fusarium azukicola
  misc_feature: 415
ctttactataacctcttcccctaacctttactataacctcttcccctaacctttactataacctcttcccctaacctttactataacctcttcccc

SEQ ID NO: 30694 - DNA, 96 bp, Fusarium azukicola
  misc_feature: 415
gctgttaatgttctatattatattaccaactatagtgatatatccctataaaccatatattatattatagaatttttactctatttttaggtatat

SEQ ID NO: 30695 - DNA, 96 bp, Fusarium azukicola
  misc_feature: 415
ccctctttatattaaccctctcccttctttctcttcctcttctctccctctttactcctcttcttctcttctccccttcctctcctctcttcctct

SEQ ID NO: 30696 - DNA, 96 bp, Fusarium azukicola
  misc_feature: 414
ttagggttaattggttgaaattagggttaggggtagtagtagagttaagggttagggttaattggttgaaattagggttagggttaagtaggtgag

SEQ ID NO: 30697 - DNA, 96 bp, Fusarium azukicola
  misc_feature: 414
tctcccttctttctcttcctcttctctccctctttactcctcttcttctcttctccccttcctctcctctcttcctctcctctatacttacttact

SEQ ID NO: 30698 - DNA, 96 bp, Fusarium azukicola
  misc_feature: 414
tagatgacggcagtcataaaggtctgtaggaacctttttaaccaattagaataatacccttaatatctagctacctatagtagctataggttaggg

SEQ ID NO: 30699 - DNA, 96 bp, Fusarium azukicola
  misc_feature: 414
taatgagattccttactttaaagaaagcccctataataatgaaaaggcaatattatataataataataataataaacagaaattcactatcgaaat

SEQ ID NO: 30700 - DNA, 96 bp, Fusarium azukicola
  misc_feature: 414
taaagaaaaagagaagaagataaaaggagaaggggaagagtaaaagaaagaaaagtaagaaagtaatagaaagtaatagaacgtagtttagagaag

SEQ ID NO: 30701 - DNA, 96 bp, Fusarium azukicola
  misc_feature: 414
gagagggagaggagggaagaagagggaagagaaagagaagttaagaggagtaaagggagtgaagaggagggaggagaaagagaaagggaagtaaag

SEQ ID NO: 30702 - DNA, 96 bp, Fusarium azukicola
  misc_feature: 414
cacttttccctctttatattaaccctctcccttctttctcttcctcttctctccctctttactcctcttcttctcttctccccttcctctcctctc

SEQ ID NO: 30703 - DNA, 96 bp, Fusarium azukicola
  misc_feature: 414
ccctcttcctctactttctttctcttctcccctcctcttcttaactacactttctctctacctcacttttccctctttatattaaccctctccctt

SEQ ID NO: 30704 - DNA, 96 bp, Fusarium azukicola
  misc_feature: 414
atatataataataatagaggtttaattttttcctctaataataagaacgtataaagctataacccttataagattataactttaaaggaggctatt

SEQ ID NO: 30705 - DNA, 96 bp, Fusarium azukicola
  misc_feature: 413
ggtatagtaagtattaagttagttaggagagagtagtgagtattaggtaaaagaggagtaaaaagtagattggggtagggaagagggtaaaggaaa

SEQ ID NO: 30706 - DNA, 96 bp, Fusarium azukicola
  misc_feature: 413
tcttttaatgagattccttactttaaagaaagcccctataataatgaaaaggcaatattatataataataataataataaacagaaattcactatc

SEQ ID NO: 30707 - DNA, 96 bp, Fusarium azukicola
  misc_feature: 413
taaactacgttctattactttctattactttcttacttttctttcttttactcttccccttctccttttatcttcttctctttttctttactcttc

SEQ ID NO: 30708 - DNA, 96 bp, Fusarium azukicola
  misc_feature: 413
acctacttaaccctaaccctaatttcaaccaattaaccctaacccttaactctactactacccctaaccctaatttcaaccaattaaccctaaccc

SEQ ID NO: 30709 - DNA, 96 bp, Fusarium azukicola
  misc_feature: 413
agaagggagagggttaatataaagagggaaaagtgaggtagagagaaagtgtagttaagaagaggaggggagaagagaaagaaagtagaggaagag

SEQ ID NO: 30710 - DNA, 96 bp, Fusarium azukicola
  misc_feature: 413
agggttaagaaaggagagaagtaaggaaggttaagaaaggagagaagtaaggaaggttaagaaaggagagaagtaaggaaggttaagaaaggagag

SEQ ID NO: 30711 - DNA, 96 bp, Fusarium azukicola
  misc_feature: 413
aaggaggctgttaatgttctatattatattaccaactatagtgatatatccctataaaccatatattatattatagaatttttactctatttttag

SEQ ID NO: 30712 - DNA, 96 bp, Fusarium azukicola
  misc_feature: 413
cctatcttctttctcttctcccttcctcccttcctcccctctctctcttatattcccttctcttccttcctctttctctttacttccctttctctt

SEQ ID NO: 30713 - DNA, 96 bp, Fusarium azukicola
  misc_feature: 413
aggctgaggtccagaaccttcgacagtcaaataaggcccttagcaagcggcgtagaggaaaaagaacccgcctacaagatagagggaagatgactg

SEQ ID NO: 30714 - DNA, 96 bp, Fusarium azukicola
  misc_feature: 413
attctagaaggaccctatatattagtagctattttatctaggaacttatattccttattactaggttttttatttatattatttttagttaatttt

SEQ ID NO: 30715 - DNA, 96 bp, Fusarium azukicola
  misc_feature: 412
atgcagttattgcaaactgccaggtcataaagacccagattgctattttttgcaccctaataaagctccaaaaaactggaaaactcaggaagccaa

SEQ ID NO: 30716 - DNA, 96 bp, Fusarium azukicola
  misc_feature: 412
ttccttactctctccttataaccctttcctactcttctcctactctcttaccttaactccccctctcttctaccccttctcttttttttacttact

SEQ ID NO: 30717 - DNA, 96 bp, Fusarium azukicola
  misc_feature: 412
ttcccctattaaatactactcttttaccttaacttacttttttctcttctttctccttcccctttctcttcttttactactactttcttactctct

SEQ ID NO: 30718 - DNA, 96 bp, Fusarium azukicola
  misc_feature: 412
tctttcttttactcttccccttctccttttatcttcttctctttttctttactcttcccctccttcatttctctttttcttcttcttttctttttc

SEQ ID NO: 30719 - DNA, 96 bp, Fusarium azukicola
  misc_feature: 412
aagatatttagagttagagagaaagaataaagataagatgaggaagaaggaagaaggagtgaaaagagagagagggagaggggagaggagaggata

SEQ ID NO: 30720 - DNA, 96 bp, Fusarium azukicola
  misc_feature: 412
taagggttatagctttatacgttcttattattagaggaaaaaattaaacctctattattattatatatatatcttagtaaaaacccctttattata

SEQ ID NO: 30721 - DNA, 96 bp, Fusarium azukicola
  misc_feature: 412
cttacttcttctttcctttcccctattaaatactactcttttaccttaacttacttttttctcttctttctccttcccctttctcttcttttacta

SEQ ID NO: 30722 - DNA, 96 bp, Fusarium azukicola
  misc_feature: 412
tacctcacttttccctctttatattaaccctctcccttctttctcttcctcttctctccctctttactcctcttcttctcttctccccttcctctc

SEQ ID NO: 30723 - DNA, 96 bp, Fusarium azukicola
  misc_feature: 412
atttcgatagtgaatttctgtttattattattattattatataatattgccttttcattattataagggctttctttaaagtaaggaatctcatta

SEQ ID NO: 30724 - DNA, 96 bp, Fusarium azukicola
  misc_feature: 412
ggggagggaaaaaggggagaagagatagagggggttaaaagaggagagagaaggaggggagagaaagagaggaggaaaagtaaaaagaaggaggag

SEQ ID NO: 30725 - DNA, 96 bp, Fusarium azukicola
  misc_feature: 412
gaaagcttttctttaactaagaaagcttccattctcaaagcccaagtaatataattctcgcttccaataagccgggaaatattatacttagtggcc

SEQ ID NO: 30726 - DNA, 96 bp, Fusarium azukicola
  misc_feature: 412
cctcctctttctctcaatcttcttctcttcctttccctcttattcttttcttttattcttccttctctctcctccttctttttacttttcctcctc

SEQ ID NO: 30727 - DNA, 96 bp, Fusarium azukicola
  misc_feature: 412
ctattactttcttacttttctttcttttactcttccccttctccttttatcttcttctctttttctttactcttcccctccttcatttctcttttt

SEQ ID NO: 30728 - DNA, 96 bp, Fusarium azukicola
  misc_feature: 412
atccctataaactatatattatattatagaatttttactctatttttaggtatatttacctaacctatagctactataggtagctagatattaagg

SEQ ID NO: 30729 - DNA, 96 bp, Fusarium azukicola
  misc_feature: 412
agagaagaagattgagagaaagaggagggaagagaaggaaggagaaagaggaaggggagttaaaagtgtgtgaagttaggagagttaaggggaggg

SEQ ID NO: 30730 - DNA, 96 bp, Fusarium azukicola
  misc_feature: 411
tcatcacttatatcaaaatccatttcatctggggtctcagaaagggaaattaggtcttcctcggctttaggagatgacgaagaagaagaattagct

SEQ ID NO: 30731 - DNA, 96 bp, Fusarium azukicola
  misc_feature: 411
agaggagaggaaggggagaagagaagaagaggagtaaagagggagagaagaggaagagaaagaagggagagggttaatataaagagggaaaagtga

SEQ ID NO: 30732 - DNA, 96 bp, Fusarium azukicola
  misc_feature: 411
tatatataggttatttttttcttttccttgtgatattatttttccttgcttatttaaaagaaggacttcttgtttatttataatagaagttatatt

SEQ ID NO: 30733 - DNA, 96 bp, Fusarium azukicola
  misc_feature: 411
ggcttcctgagttttccagttttttggagctttattagggtgcaaaaaatagcaatctgggtctttatgacctggcagtttgcaataactgcattt

SEQ ID NO: 30734 - DNA, 96 bp, Fusarium azukicola
  misc_feature: 411
agggatttttttaaaaatctaaaaaaattatttttaagttttatatttagttagatctataagattactttttttaagtttctagctattttatag

SEQ ID NO: 30735 - DNA, 96 bp, Fusarium azukicola
  misc_feature: 411
cgctttataatgatatataatctattactaaagccttataaatggcttagttatagcaaaaaccggttttaatggatagaatgcaacgctgaaggg

SEQ ID NO: 30736 - DNA, 96 bp, Fusarium azukicola
  misc_feature: 411
aaccgaccttcctcgaccaccactcctcgacgattcagccattacctgcgcatctatatccatttgatcaattacttgtcttccttcctctactat

SEQ ID NO: 30737 - DNA, 96 bp, Fusarium azukicola
  misc_feature: 410
ttaaagagaaaataggtatagaagtaaaggtagtaagagagtaagaaagtagtagtaaaagaagagaaaggggaaggagaaagaagagaaaaaagt

SEQ ID NO: 30738 - DNA, 96 bp, Fusarium azukicola
  misc_feature: 410
tactttaaagaaagcccctataataatgaaaaggcaatattatataataataataataataaacagaaattcactatcgaaattcctaaaaagcca

SEQ ID NO: 30739 - DNA, 96 bp, Fusarium azukicola
  misc_feature: 410
tgcagttttcacagtttttaacttgatataggtcctcactagtatatttaaagagaggatcttttatttttatatatttaattagacttcttaagt

SEQ ID NO: 30740 - DNA, 96 bp, Fusarium azukicola
  misc_feature: 410
tccctctctctcttttcactccttatcctctcctctcccctctccctctctctcttttcactccttcttccttcttcctcatcttatctttattct

SEQ ID NO: 30741 - DNA, 96 bp, Fusarium azukicola
  misc_feature: 410
tattcacttcctacctttctaatcacccttcctctactctttttcttttctctcctctcccctctccctctctctcttttcactccttatcctctc

SEQ ID NO: 30742 - DNA, 96 bp, Fusarium azukicola
  misc_feature: 410
taaccctaaccctaatttcaaccaattaaccctaacccttaactctactactacccctaaccctaatttcaaccaattaaccctaacccttaactc

SEQ ID NO: 30743 - DNA, 96 bp, Fusarium azukicola
  misc_feature: 410
gccttaaaatgcagttattgcaaactgccaggtcataaagacccagattgctattttttgcaccctaataaggctccaaaaaactggaaaactcag

SEQ ID NO: 30744 - DNA, 96 bp, Fusarium azukicola
  misc_feature: 410
gagttaagggttagggttaattggttgaaattagggttagggttaagtaggtgagttaagggttagggttaattggttgaaattagggttagggtt

SEQ ID NO: 30745 - DNA, 96 bp, Fusarium azukicola
  misc_feature: 410
actttaaagaaagcccctataataatgaaaaggcaatattatataataataataataataaacagaaattcactatcgaaattcctaaaaagccag

SEQ ID NO: 30746 - DNA, 96 bp, Fusarium azukicola
  misc_feature: 410
ccttaaaatgcagttattgcaaactgccaggtcataaagacccagattgctattttttgcaccctaataaggctccaaaaaactggaaaactcagg

SEQ ID NO: 30747 - DNA, 96 bp, Fusarium azukicola
  misc_feature: 410
agaagtcttatgcaccttattggcttcctgagttttccagttttttggagccttattagggtgcaaaaaatagcaatctgggtctttatgacctgg

SEQ ID NO: 30748 - DNA, 96 bp, Fusarium azukicola
  misc_feature: 410
aagtcatcttaacttaagaagtctaattaaatatataaaaataaaagatcctctctttaaatatactagtgaggacctatatcaagtcaaaaactg

SEQ ID NO: 30749 - DNA, 96 bp, Fusarium azukicola
  misc_feature: 409
ttttaggaatttcgatagtgaatttctgtttattattattattattatataatattgccttttcattattataagggctttctttaaagtaaggaa

SEQ ID NO: 30750 - DNA, 96 bp, Fusarium azukicola
  misc_feature: 409
ttctatcatctaggctactgccccagtctgagtctgtatagcctctaattatattgtgtatatctgaataatcgcagttatatatagtagataaat

SEQ ID NO: 30751 - DNA, 96 bp, Fusarium azukicola
  misc_feature: 409
gtgaggacctatatcaagttaaaaactgtgaaaactgcaaactaggaaaattaactaaaaataatataaataaaaaacctagtaataaggaataca

SEQ ID NO: 30752 - DNA, 96 bp, Fusarium azukicola
  misc_feature: 409
atgaggaagaaggaagaaggagtgaaaagagagagagggagaggggagaggagaggataaggagtgaaaagagagagagggagaggggagaggaga

SEQ ID NO: 30753 - DNA, 96 bp, Fusarium azukicola
  misc_feature: 409
aagaggggagggaaaaaggggagaagagatagagggggttaaaagaggagagagaaggaggggagagaaagagaggaggaaaagtaaaaagaagga

SEQ ID NO: 30754 - DNA, 96 bp, Fusarium azukicola
  misc_feature: 409
tatttagagttagagagaaagaataaagataagatgaggaagaaggaagaaggagtgaaaagagagagagggagaggggagaggagaggataagga

SEQ ID NO: 30755 - DNA, 96 bp, Fusarium azukicola
  misc_feature: 409
aaaaagtaatcttatagatctaactaaatataaaacttaaaaataatttttttagatttttaaaaaaatccctttatagcgaaataactaattata

SEQ ID NO: 30756 - DNA, 96 bp, Fusarium azukicola
  misc_feature: 409
aaggaatttttttaaaaatttagaaaaaatatttttaagtcttatatatagctaaatagttaaaatcgttttttttaagtttctagctattttata

SEQ ID NO: 30757 - DNA, 96 bp, Fusarium azukicola
  misc_feature: 409
tacttaaccctaaccctaatttcaaccaattaaccctaacccttaactctactactacccctaaccctaatttcaaccaattaaccctaaccctta

SEQ ID NO: 30758 - DNA, 96 bp, Fusarium azukicola
  misc_feature: 409
gttgaaattagggttaggggtagtagtagagttaagggttagggttaattggttgaaattagggttagggttaagtaggtgagttaagggttaggg

SEQ ID NO: 30759 - DNA, 96 bp, Fusarium azukicola
  misc_feature: 409
cctttactataacctcttcccctaacctttactataacctcttcccctaacctttactataacctcttcccctaacctttactataacctcttccc

SEQ ID NO: 30760 - DNA, 96 bp, Fusarium azukicola
  misc_feature: 409
gatgaggaagaaggaagaaggagtgaaaagagagagagggagaggggagaggagaggataaggagtgaaaagagagagagggagaggggagaggag

SEQ ID NO: 30761 - DNA, 96 bp, Fusarium azukicola
  misc_feature: 409
atatttagagttagagagaaagaataaagataagatgaggaagaaggaagaaggagtgaaaagagagagagggagaggggagaggagaggataagg

SEQ ID NO: 30762 - DNA, 96 bp, Fusarium azukicola
  misc_feature: 409
aaaaaaaaagggggagaaaaaaaaagaagaaagagagagagaggaggtagagtaattgagaagttatagtaagtaaagataaaagagtaaaaacgg

SEQ ID NO: 30763 - DNA, 96 bp, Fusarium azukicola
  misc_feature: 409
ccctctctctcttttcactccttatcctctcctctcccctctccctctctctcttttcactccttcttccttcttcctcatcttatctttattctt

SEQ ID NO: 30764 - DNA, 96 bp, Fusarium azukicola
  misc_feature: 409
atagctttatacgttcttattattagaggaaaaaattaaacctctattattattatatatatcttagtaaaaacccctttattatagacctaatat

SEQ ID NO: 30765 - DNA, 96 bp, Fusarium azukicola
  misc_feature: 408
ttctaagaaaagggaatctaaacctaattctaagaaggaagaaagagaaaagaaacaagaaaagctatttatagctaattcttcttcttcgtcatc

SEQ ID NO: 30766 - DNA, 96 bp, Fusarium azukicola
  misc_feature: 408
atataataataatagaggtttaattttttcctctaataataagaacgtataaagctataacccttataagattataactttaaaggaggctattaa

SEQ ID NO: 30767 - DNA, 96 bp, Fusarium azukicola
  misc_feature: 408
tctccctctctctcttttcactccttatcctctcctctcccctctccctctctctcttttcactccttcttccttcttcctcatcttatctttatt

SEQ ID NO: 30768 - DNA, 96 bp, Fusarium azukicola
  misc_feature: 408
tcaggaagccaataaggtgcataagacttctaagaaaaaggaatctaaacctaattctaagaaggaagaaagagaaaagaaacaagaaaagctatt

SEQ ID NO: 30769 - DNA, 96 bp, Fusarium azukicola
  misc_feature: 408
tactttaccctatactctcttctctcttttactttaccctatactctcttctctcttttactttaccctctacttttattctttattttactttac

SEQ ID NO: 30770 - DNA, 96 bp, Fusarium azukicola
  misc_feature: 408
attgcaaactgccaggtcataaagacccagattgctattttttgcaccctaataaagctccaaaaaactggaaaactcaggaagccaataaggtgc

SEQ ID NO: 30771 - DNA, 96 bp, Fusarium azukicola
  misc_feature: 408
acctttactataactacttaaccctaacccttaatttaattattacccctaattattactttaattacttcccttgacctttattataacctcttc

SEQ ID NO: 30772 - DNA, 96 bp, Fusarium azukicola
  misc_feature: 407
aaaaactggaaaactcaggaagccaataaggtgcataagacttctaagaaaaaggaatctaaacctaattctaagaaggaagaaagagaaaagaaa

SEQ ID NO: 30773 - DNA, 96 bp, Fusarium azukicola
  misc_feature: 407
tgtatcatatataaaattagttatattatctttattagtagaaaaaacaggtttatttaccttatttaaatatcctagttgtttctttatataggg

SEQ ID NO: 30774 - DNA, 96 bp, Fusarium azukicola
  misc_feature: 407
tccctcctctttctctcaatcttcttctcttcctttccctcttattcttttcttttattcttccttctctctcctccttctttttacttttcctcc

SEQ ID NO: 30775 - DNA, 96 bp, Fusarium azukicola
  misc_feature: 407
tattttactttaccctatactctcttctctcttttactttaccctatactctcttctctcttttactttaccctctacttttattctttattttac

SEQ ID NO: 30776 - DNA, 96 bp, Fusarium azukicola
  misc_feature: 407
ggttagggttaattggttgaaattagggttaggggtagtagtagagttaagggttagggttaattggttgaaattagggttagggttaagtaggtg

SEQ ID NO: 30777 - DNA, 96 bp, Fusarium azukicola
  misc_feature: 407
cactttctctctacctcacttttccctctttatattaaccctctcccttctttctcttcctcttctctccctctttactcctcttcttctcttctc

SEQ ID NO: 30778 - DNA, 96 bp, Fusarium azukicola
  misc_feature: 407
ataaatctatttaaaattaagaaaagccttatatagcctaaaataaagccctagattatagtataaccttctctctaaattattaaataatttagg

SEQ ID NO: 30779 - DNA, 96 bp, Fusarium azukicola
  misc_feature: 407
aatatctagctacctatagtagctataggttaggtaaatatacctaaaaatagagtaaaaattctataatataatatatagtttatagggatatat

SEQ ID NO: 30780 - DNA, 96 bp, Fusarium azukicola
  misc_feature: 406
tctcttctctcttttactttaccctatactctcttctctcttttactttaccctctacttttattctttattttactttaccctatactctcttct

SEQ ID NO: 30781 - DNA, 96 bp, Fusarium azukicola
  misc_feature: 406
tatccttcctcttttttcccccaccctccctttcttaataactctttataacttctctttttactcttctctacactacctttcctttaccctctt

SEQ ID NO: 30782 - DNA, 96 bp, Fusarium azukicola
  misc_feature: 406
taaccctctcttttcttctttaacctaactcacctacttaaccctaaccctaatttcaaccaattaaccctaacccttaactcacctacttaaccc

SEQ ID NO: 30783 - DNA, 96 bp, Fusarium azukicola
  misc_feature: 406
attaatattctatattatattactaactatagtgatatatccctataaaccatatattatattatagaatttttactctatttttaggtatattta

SEQ ID NO: 30784 - DNA, 96 bp, Fusarium azukicola
  misc_feature: 406
ctcttttatctttacttactataacttctcaattactctacctcctctctctctctttcttctttttttttctccccctttttttttttccctctt

SEQ ID NO: 30785 - DNA, 96 bp, Fusarium azukicola
  misc_feature: 406
ctctcccctccttctctctcctcttttaaccccctctatctcttctcccctttttccctcccctcttcctctactttctttctcttctcccctcct

SEQ ID NO: 30786 - DNA, 96 bp, Fusarium azukicola
  misc_feature: 406
aagagaagaagattgagagaaagaggagggaagagaaggaaggagaaagaggaaggggagttaaaagtgtgtgaagttaggagagttaaggggagg

SEQ ID NO: 30787 - DNA, 96 bp, Fusarium azukicola
  misc_feature: 405
ttctttctcttctcccctcctcttcttaactacactttctctctacctcacttttccctctttatattaaccctctcccttctttctcttcctctt

SEQ ID NO: 30788 - DNA, 96 bp, Fusarium azukicola
  misc_feature: 405
ttagagagaaagaataaagataagatgaggaagaaggaagaaggagtgaaaagagagagagggagaggggagaggagaggataaggagtgaaaaga

SEQ ID NO: 30789 - DNA, 96 bp, Fusarium azukicola
  misc_feature: 405
tcctttccctcttattcttttcttttattcttccttctctctcctccttctttttacttttcctcctctctttctctcccctccttctctctcctc

SEQ ID NO: 30790 - DNA, 96 bp, Fusarium azukicola
  misc_feature: 405
tatccctataaactatatattatattatagaatttttactctatttttaggtatatttacctaacctatagctactataggtagctagatattaag

SEQ ID NO: 30791 - DNA, 96 bp, Fusarium azukicola
  misc_feature: 405
tataataataatagaggtttaattttttcctctaataataagaacgtataaagctataacccttataagattataactttaaaggaggctattaat

SEQ ID NO: 30792 - DNA, 96 bp, Fusarium azukicola
  misc_feature: 405
tacttacttcttctttcctttcccctattaaatactactcttttaccttaacttacttttttctcttctttctccttcccctttctcttcttttac

SEQ ID NO: 30793 - DNA, 96 bp, Fusarium azukicola
  misc_feature: 405
ggagagaagaggaagagaaagaagggagagggttaatataaagagggaaaagtgaggtagagagaaagtgtagttaagaagaggaggggagaagag

SEQ ID NO: 30794 - DNA, 96 bp, Fusarium azukicola
  misc_feature: 405
gatatttagagttagagagaaagaataaagataagatgaggaagaaggaagaaggagtgaaaagagagagagggagaggggagaggagaggataag

SEQ ID NO: 30795 - DNA, 96 bp, Fusarium azukicola
  misc_feature: 405
gaattttttaaaaatctaaaaaaatcatttttagactttattaagagttagatttatagaaatactctttttatcttcctagctattttatagtag

SEQ ID NO: 30796 - DNA, 96 bp, Fusarium azukicola
  misc_feature: 405
aattagggttaggggtagtagtagagttaagggttagggttaattggttgaaattagggttagggttaagtaggtgagttaagggttagggttaat

SEQ ID NO: 30797 - DNA, 96 bp, Fusarium azukicola
  misc_feature: 404
ttattttactttaccctatactctcttctctcttttactttaccctatactctcttctctcttttactttaccctctacttttattctttatttta

SEQ ID NO: 30798 - DNA, 96 bp, Fusarium azukicola
  misc_feature: 404
attaggtctataataaaggggtttttactaagatatatataataataatagaggtttaattttttcctctaataataagaacgtataaagctataa

SEQ ID NO: 30799 - DNA, 96 bp, Fusarium azukicola
  misc_feature: 404
taaataactaggaagaaaagtaataaagagataatatctagcttctaagagagacttatagaagatagatagataaaagtgggtcacaataaagag

SEQ ID NO: 30800 - DNA, 96 bp, Fusarium azukicola
  misc_feature: 404
cctcactacttttttttcttttccttactctctccttataaccctttcctactcttctcctactctcttaccttaactccccctctcttctacccc

SEQ ID NO: 30801 - DNA, 96 bp, Fusarium azukicola
  misc_feature: 404
ctggctttttaggaatttcgatagtgaatttctgtttattattattattattatataatattgccttttcattattataagggctttctttaaagt

SEQ ID NO: 30802 - DNA, 96 bp, Fusarium azukicola
  misc_feature: 404
aagataggtagttagaagagaaagaaagaaggggaatagaaaaagaaaagaagaagaaaaagagaaatgaaggaggggaagagtaaagaaaaagag

SEQ ID NO: 30803 - DNA, 96 bp, Fusarium azukicola
  misc_feature: 404
cctacttaaccctaaccctaatttcaaccaattaaccctaacccttaactctactactacccctaaccctaatttcaaccaattaaccctaaccct

SEQ ID NO: 30804 - DNA, 96 bp, Fusarium azukicola
  misc_feature: 404
ataaaagaaaagaataagagggaaaggaagagaagaagattgagagaaagaggagggaagagaaggaaggagaaagaggaaggggagttaaaagtg

SEQ ID NO: 30805 - DNA, 96 bp, Fusarium azukicola
  misc_feature: 403
ttacttacttcttctttcctttcccctattaaatactactcttttaccttaacttacttttttctcttctttctccttcccctttctcttctttta

SEQ ID NO: 30806 - DNA, 96 bp, Fusarium azukicola
  misc_feature: 403
gtaagatatttagagttagagagaaagaataaagataagatgaggaagaaggaagaaggagtgaaaagagagagagggagaggggagaggagagga

SEQ ID NO: 30807 - DNA, 96 bp, Fusarium azukicola
  misc_feature: 403
tcctctcctctcccctctccctctctctcttttcactccttatcctctcctctcccctctccctctctctcttttcactccttcttccttcttcct

SEQ ID NO: 30808 - DNA, 96 bp, Fusarium azukicola
  misc_feature: 403
tattaatattctatattatattactaactatagtgatatatccctataaaccatatattatattatagaatttttactctatttttaggtatattt

SEQ ID NO: 30809 - DNA, 96 bp, Fusarium azukicola
  misc_feature: 403
cttcctttccctcttattcttttcttttattcttccttctctctcctccttctttttacttttcctcctctctttctctcccctccttctctctcc

SEQ ID NO: 30810 - DNA, 96 bp, Fusarium azukicola
  misc_feature: 403
gcttaaaaaaagtattttaataaacttaactcttaaataaactatagataattttttagaatttctaaaaaagtctcttaatagaaaaaaagctat

SEQ ID NO: 30811 - DNA, 96 bp, Fusarium azukicola
  misc_feature: 403
ctatcttctttctcttctcccttcctcccttcctcccctctctctcttatattcccttctcttccttcctctttctctttacttccctttctcttt

SEQ ID NO: 30812 - DNA, 96 bp, Fusarium azukicola
  misc_feature: 402
tttccctctttatattaaccctctcccttctttctcttcctcttctctccctctttactcctcttcttctcttctccccttcctctcctctcttcc

SEQ ID NO: 30813 - DNA, 96 bp, Fusarium azukicola
  misc_feature: 402
aggtatagtaagtattaagttagttaggagagagtagtgagtattaggtaaaagaggagtaaaaagtagattggggtagggaagagggtaaaggaa

SEQ ID NO: 30814 - DNA, 96 bp, Fusarium azukicola
  misc_feature: 402
ttccttcctctttctctttacttccctttctctttctcctccctcctcttcactccctttactcctcttaacttctctttctcttccctcttcttc

SEQ ID NO: 30815 - DNA, 96 bp, Fusarium azukicola
  misc_feature: 402
tattagaggaaaaattaaacctctattattattatatatatatcttagtaaaaacccctttattatagacctaatattataagggaaaatctaaga

SEQ ID NO: 30816 - DNA, 96 bp, Fusarium azukicola
  misc_feature: 402
cctctccctctctctcttttcactccttatcctctcctctcccctctccctctctctcttttcactccttcttccttcttcctcatcttatcttta

SEQ ID NO: 30817 - DNA, 96 bp, Fusarium azukicola
  misc_feature: 402
ggattctagaaggaccctatatattagtagctattttatctaggaacttatattccttattactaggttttttatttatattatttttagttaatt

SEQ ID NO: 30818 - DNA, 96 bp, Fusarium azukicola
  misc_feature: 402
cttccttacttctctcctttcttaaccttccttacttctctcctttcttaaccttccttacttctctcctttcttaacccttctaaccctcccctt

SEQ ID NO: 30819 - DNA, 96 bp, Fusarium azukicola
  misc_feature: 402
ctctacctcacttttccctctttatattaaccctctcccttctttctcttcctcttctctccctctttactcctcttcttctcttctccccttcct

SEQ ID NO: 30820 - DNA, 96 bp, Fusarium azukicola
  misc_feature: 402
aaggtcctagtatattattagttatattattttgttgaggaattaaggaattatatacctctaaattatcacttatatcaaaatccatttcatctg

SEQ ID NO: 30821 - DNA, 96 bp, Fusarium azukicola
  misc_feature: 402
aaaaaagtaatcttatagatctaactaaatataaaacttaaaaataatttttttagatttttaaaaaaatccctttatagcgaaataactaattat

SEQ ID NO: 30822 - DNA, 96 bp, Fusarium azukicola
  misc_feature: 402
actcttttatctttacttactataacttctcaattactctacctcctctctctctctttcttctttttttttctccccctttttttttttccctct

SEQ ID NO: 30823 - DNA, 96 bp, Fusarium azukicola
  misc_feature: 401
ttccctcctctttctctcaatcttcttctcttcctttccctcttattcttttcttttattcttccttctctctcctccttctttttacttttcctc

SEQ ID NO: 30824 - DNA, 96 bp, Fusarium azukicola
  misc_feature: 401
aatgcagttattgcaaactgccaggtcataaagacccagattgctattttttgcaccctaataaagctccaaaaaactggaaaactcaggaagcca

SEQ ID NO: 30825 - DNA, 96 bp, Fusarium azukicola
  misc_feature: 401
tatgacccacttttatctatctatcttctataagtctctcttagaagctagatattatctctttattacttttcttcctagttatctaggaaatta

SEQ ID NO: 30826 - DNA, 96 bp, Fusarium azukicola
  misc_feature: 401
tatataataataatagaggtttaattttttcctctaataataagaacgtataaagctataacccttataagattataactttaaaggaggctatta

SEQ ID NO: 30827 - DNA, 96 bp, Fusarium azukicola
  misc_feature: 401
attatatataggttatttttttcttttccttgtgatattatttttccttgcttatttaaaagaaggacttcttgtttatttataatagaagttata

SEQ ID NO: 30828 - DNA, 96 bp, Fusarium azukicola
  misc_feature: 401
accctaaccctaatttcaaccaattaaccctaacccttaactctactactacccctaaccctaatttcaaccaattaaccctaacccttaactcta

SEQ ID NO: 30829 - DNA, 96 bp, Fusarium azukicola
  misc_feature: 401
ctatatattatattatagaatttttactctatttttaggtatatttacctaacctatagctactataggtagctagatattaagggtattattcta

SEQ ID NO: 30830 - DNA, 96 bp, Fusarium azukicola
  misc_feature: 401
ctcctaacttcacacacttttaactccccttcctctttctccttccttctcttccctcctctttctctcaatcttcttctcttcctttccctctta

SEQ ID NO: 30831 - DNA, 96 bp, Fusarium azukicola
  misc_feature: 401
taaccctaaccctaatttcaaccaattaaccctaacccttaactcacctacttaaccctaaccctaatttcaaccaattaaccctaacccttaact

SEQ ID NO: 30832 - DNA, 96 bp, Fusarium azukicola
  misc_feature: 401
ggaatttttttaaaaatttagaaaaaatatttttaagtcttatatatagctaaatagttaaaatcgttttttttaagtttctagctattttatagc

SEQ ID NO: 30833 - DNA, 96 bp, Fusarium azukicola
  misc_feature: 401
ctttccctcttattcttttcttttattcttccttctctctcctccttctttttacttttcctcctctctttctctcccctccttctctctcctctt

SEQ ID NO: 30834 - DNA, 96 bp, Fusarium azukicola
  misc_feature: 401
ctcccctcctcttcttaactacactttctctctacctcacttttccctctttatattaaccctctcccttctttctcttcctcttctctccctctt

SEQ ID NO: 30835 - DNA, 96 bp, Fusarium azukicola
  misc_feature: 401
cctctttctctcaatcttcttctcttcctttccctcttattcttttcttttattcttccttctctctcctccttctttttacttttcctcctctct

SEQ ID NO: 30836 - DNA, 96 bp, Fusarium azukicola
  misc_feature: 401
agttttccagttttttggagctttattagggtgcaaaaaatagcaatctgggtctttatgacctggcagtttgcaataactgcattttaaggcagt

SEQ ID NO: 30837 - DNA, 96 bp, Fusarium azukicola
  misc_feature: 400
ttttaggaatttcgatagtgaatttctgtttattattattattattatataatattgccttttcattattataggggctttctttaaagtaaggaa

SEQ ID NO: 30838 - DNA, 96 bp, Fusarium azukicola
  misc_feature: 400
acttaaaaaaaacgattttaactatttagctatatataagacttaaaaatattttttctaaatttttaaaaaaattccttatataggtatcttaaa

SEQ ID NO: 30839 - DNA, 96 bp, Fusarium azukicola
  misc_feature: 400
gaagttaagaggagtaaagggagtgaagaggagggaggagaaagagaaagggaagtaaagagaaagaggaaggaagagaagggaatataagagaga

SEQ ID NO: 30840 - DNA, 96 bp, Fusarium azukicola
  misc_feature: 400
agggttatagctttatacgttcttattattagaggaaaaaattaaacctctattattattatatatatatcttagtaaaaacccctttattataga

SEQ ID NO: 30841 - DNA, 96 bp, Fusarium azukicola
  misc_feature: 400
aagagaaagaagggagagggttaatataaagagggaaaagtgaggtagagagaaagtgtagttaagaagaggaggggagaagagaaagaaagtaga

SEQ ID NO: 30842 - DNA, 96 bp, Fusarium azukicola
  misc_feature: 400
tcctctttctctcaatcttcttctcttcctttccctcttattcttttcttttattcttccttctctctcctccttctttttacttttcctcctctc

SEQ ID NO: 30843 - DNA, 96 bp, Fusarium azukicola
  misc_feature: 400
ctctcccttctttctcttcctcttctctccctctttactcctcttcttctcttctccccttcctctcctctcttcctctcctctatacttacttac

SEQ ID NO: 30844 - DNA, 96 bp, Fusarium azukicola
  misc_feature: 400
ggggttaaaagaggagagagaaggaggggagagaaagagaggaggaaaagtaaaaagaaggaggagagagaaggaagaataaaagaaaagaataag

SEQ ID NO: 30845 - DNA, 96 bp, Fusarium azukicola
  misc_feature: 399
tcaagttaaaaactgtgaaaactgcaaactaggaaaattaactaaaaataatataaataaaaaacctagtaataaggaatacaagttcctagataa

SEQ ID NO: 30846 - DNA, 96 bp, Fusarium azukicola
  misc_feature: 399
tctttacttccctttctctttctcctccctcctcttcactccctttactcctcttaacttctctttctcttccctcttcttccctcctctccctct

SEQ ID NO: 30847 - DNA, 96 bp, Fusarium azukicola
  misc_feature: 399
aagagaaagaaagaaggggaatagaaaaagaaaagaagaagaaaaagagaaatgaaggaggggaagagtaaagaaaaagagaagaagataaaagga

SEQ ID NO: 30848 - DNA, 96 bp, Fusarium azukicola
  misc_feature: 399
tatataggttatttttttcttttccttgtgatattatttttccttgcttatttaaaagaaggacttcttgtttatttataatagaagttatattat

SEQ ID NO: 30849 - DNA, 96 bp, Fusarium azukicola
  misc_feature: 399
aagggatttttttaaaaatctaaaaaaattatttttaagttttatatttagttagatctataagattactttttttaagtttctagctattttata

SEQ ID NO: 30850 - DNA, 96 bp, Fusarium azukicola
  misc_feature: 399
taactccctatccttcctcttttttcccccaccctccctttcttaataactctttataacttctctttttactcttctctacactacctttccttt

SEQ ID NO: 30851 - DNA, 96 bp, Fusarium azukicola
  misc_feature: 399
actttaccctatactctcttctctcttttactttaccctatactctcttctctcttttactttaccctctacttttattctttattttactttacc

SEQ ID NO: 30852 - DNA, 96 bp, Fusarium azukicola
  misc_feature: 399
actctttattgtgacccacttttatctatctatcttctataagtctctcttagaagctagatattatctctttattacttttcttcctagttatcc

SEQ ID NO: 30853 - DNA, 96 bp, Fusarium azukicola
  misc_feature: 399
gagagaaagaggagggaagagaaggaaggagaaagaggaaggggagttaaaagtgtgtgaagttaggagagttaaggggaggggaagtagttcaag

SEQ ID NO: 30854 - DNA, 96 bp, Fusarium azukicola
  misc_feature: 399
cttaaaaaaaacgattttaactatttagctatatataagacttaaaaatattttttctaaatttttaaaaaaattccttatataggtatcttaaag

SEQ ID NO: 30855 - DNA, 96 bp, Fusarium azukicola
  misc_feature: 399
aaactgccaggtcataaagacccagattgctattttttgcaccctaataaggctccaaaaaactggaaaactcaggaagccaataaggtgcataag

SEQ ID NO: 30856 - DNA, 96 bp, Fusarium azukicola
  misc_feature: 399
ctcttttcttctttaacctaactcacctacttaaccctaaccctaatttcaaccaattaaccctaacccttaactcacctacttaaccctaaccct

SEQ ID NO: 30857 - DNA, 96 bp, Fusarium azukicola
  misc_feature: 399
cctttccctcttattcttttcttttattcttccttctctctcctccttctttttacttttcctcctctctttctctcccctccttctctctcctct

SEQ ID NO: 30858 - DNA, 96 bp, Fusarium azukicola
  misc_feature: 399
acctatcttctttctcttctcccttcctcccttcctcccctctctctcttatattcccttctcttccttcctctttctctttacttccctttctct

SEQ ID NO: 30859 - DNA, 96 bp, Fusarium azukicola
  misc_feature: 398
gtaaagaaaaagagaagaagataaaaggagaaggggaagagtaaaagaaagaaaagtaagaaagtaatagaaagtaatagaacgtagtttagagaa

SEQ ID NO: 30860 - DNA, 96 bp, Fusarium azukicola
  misc_feature: 398
ttaggtctataataaaggggtttttactaagatatatataataataatagaggtttaattttttcctctaataataagaacgtataaagctataac

SEQ ID NO: 30861 - DNA, 96 bp, Fusarium azukicola
  misc_feature: 398
ttaaaaaaaacgattttaactatttagctatatataagacttaaaaatattttttctaaatttttaaaaaaattccttatataggtatcttaaagt

SEQ ID NO: 30862 - DNA, 96 bp, Fusarium azukicola
  misc_feature: 398
tatttctcttacctctaattccctcctaccttctctaaactacgttctattactttctattactttcttacttttctttcttttactcttcccctt

SEQ ID NO: 30863 - DNA, 96 bp, Fusarium azukicola
  misc_feature: 398
ctctcttttcttctttaacctaactcacctacttaaccctaaccctaatttcaaccaattaaccctaacccttaactcacctacttaaccctaacc

SEQ ID NO: 30864 - DNA, 96 bp, Fusarium azukicola
  misc_feature: 398
ctataacctcttcccctaacctttactataacctcttcccctaacctttactataacctcttcccctaacctttactataacctcttcccctaacc

SEQ ID NO: 30865 - DNA, 96 bp, Fusarium azukicola
  misc_feature: 398
gaaagaaagaaggggaatagaaaaagaaaagaagaagaaaaagagaaatgaaggaggggaagagtaaagaaaaagagaagaagataaaaggagaag

SEQ ID NO: 30866 - DNA, 96 bp, Fusarium azukicola
  misc_feature: 398
ctcccctccttctctctcctcttttaaccccctctatctcttctcccctttttccctcccctcttcctctactttctttctcttctcccctcctct

SEQ ID NO: 30867 - DNA, 96 bp, Fusarium azukicola
  misc_feature: 398
cccctcttcctctactttctttctcttctcccctcctcttcttaactacactttctctctacctcacttttccctctttatattaaccctctccct

SEQ ID NO: 30868 - DNA, 96 bp, Fusarium azukicola
  misc_feature: 397
tttagagttagagagaaagaataaagataagatgaggaagaaggaagaaggagtgaaaagagagagagggagaggggagaggagaggataaggagt

SEQ ID NO: 30869 - DNA, 96 bp, Fusarium azukicola
  misc_feature: 397
gaaggaggagagagaaggaagaataaaagaaaagaataagagggaaaggaagagaagaagattgagagaaagaggagggaagagaaggaaggagaa

SEQ ID NO: 30870 - DNA, 96 bp, Fusarium azukicola
  misc_feature: 397
ttatttctcttacctctaattccctcctaccttctctaaactacgttctattactttctattactttcttacttttctttcttttactcttcccct

SEQ ID NO: 30871 - DNA, 96 bp, Fusarium azukicola
  misc_feature: 397
tgtgaaaactgcaaactaggaaaattaactaaaaataatataaataaaaaacctagtaataaggaatacaagttcctagataaaatagctactgat

SEQ ID NO: 30872 - DNA, 96 bp, Fusarium azukicola
  misc_feature: 397
ggaagagaaagagaagttaagaggagtaaagggagtgaagaggagggaggagaaagagaaagggaagtaaagagaaagaggaaggaagagaaggga

SEQ ID NO: 30873 - DNA, 96 bp, Fusarium azukicola
  misc_feature: 397
tatcaagttaaaaactgtgaaaactgcaaactaggaaaattaactaaaaataatataaataaaaaacctagtaataaggaatacaagttcctagat

SEQ ID NO: 30874 - DNA, 96 bp, Fusarium azukicola
  misc_feature: 397
atatataggttatttttttcttttccttgtgatattatttttccttgcttatttaaaagaaggacttcttgtttatttataatagaagttatatta

SEQ ID NO: 30875 - DNA, 96 bp, Fusarium azukicola
  misc_feature: 397
atcatcacttatatcaaaatccatttcatctggggtctcagaaagggaaattaggtcttcctcggctttaggagatgacgaagaagaagaattagc

SEQ ID NO: 30876 - DNA, 96 bp, Fusarium azukicola
  misc_feature: 397
gaatttttttaaaaatttagaaaaaatatttttaagtcttatatatagctaaatagttaaaatcgttttttttaagtttctagctattttatagcg

SEQ ID NO: 30877 - DNA, 96 bp, Fusarium azukicola
  misc_feature: 397
cttccctcctctttctctcaatcttcttctcttcctttccctcttattcttttcttttattcttccttctctctcctccttctttttacttttcct

SEQ ID NO: 30878 - DNA, 96 bp, Fusarium azukicola
  misc_feature: 397
aggaatttttttaaaaatttagaaaaaatatttttaagtcttatatatagctaaatagttaaaatcgttttttttaagtttctagctattttatag

SEQ ID NO: 30879 - DNA, 96 bp, Fusarium azukicola
  misc_feature: 397
atttttattagtagaaaaatcaggtttatttaccttatttaaatatcctagttgtttctttatatagggaaggtttcttattaaaggtcctagtat

SEQ ID NO: 30880 - DNA, 96 bp, Fusarium azukicola
  misc_feature: 396
taaaattaactagaaattcttttctacatacaatatgcctagtagcacctgtatcatatataaaattagttatattatctttattagtagaaaaaa

SEQ ID NO: 30881 - DNA, 96 bp, Fusarium azukicola
  misc_feature: 396
ttctttaacctaactcacctacttaaccctaaccctaatttcaaccaattaaccctaacccttaactcacctacttaaccctaaccctaatttcaa

SEQ ID NO: 30882 - DNA, 96 bp, Fusarium azukicola
  misc_feature: 396
tattcttccttctctctcctccttctttttacttttcctcctctctttctctcccctccttctctctcctcttttaaccccctctatctcttctcc

SEQ ID NO: 30883 - DNA, 96 bp, Fusarium azukicola
  misc_feature: 396
tatatataataataatagaggtttaattttttcctctaataataagaacgtataaagctataacccttataagattataactttaaaggaggctat

SEQ ID NO: 30884 - DNA, 96 bp, Fusarium azukicola
  misc_feature: 396
aatagctttttttctattaagagacttttttagaaattctaaaaaattatctatagtttatttaagagttaagtttattaaaatactttttttaag

SEQ ID NO: 30885 - DNA, 96 bp, Fusarium azukicola
  misc_feature: 395
aagaaagtagaggaagaggggagggaaaaaggggagaagagatagagggggttaaaagaggagagagaaggaggggagagaaagagaggaggaaaa

SEQ ID NO: 30886 - DNA, 96 bp, Fusarium azukicola
  misc_feature: 395
tcttttattcttccttctctctcctccttctttttacttttcctcctctctttctctcccctccttctctctcctcttttaaccccctctatctct

SEQ ID NO: 30887 - DNA, 96 bp, Fusarium azukicola
  misc_feature: 395
agatgaggaagaaggaagaaggagtgaaaagagagagagggagaggggagaggagaggataaggagtgaaaagagagagagggagaggggagagga

SEQ ID NO: 30888 - DNA, 96 bp, Fusarium azukicola
  misc_feature: 395
tatcttctttctcttctcccttcctcccttcctcccctctctctcttatattcccttctcttccttcctctttctctttacttccctttctctttc

SEQ ID NO: 30889 - DNA, 96 bp, Fusarium azukicola
  misc_feature: 395
cttactttatctttctcttctattcacttcctacctttctaatcacccttcctctactctttttcttttctctcctctcccctctccctctctctc

SEQ ID NO: 30890 - DNA, 96 bp, Fusarium azukicola
  misc_feature: 395
ctctttctctcaatcttcttctcttcctttccctcttattcttttcttttattcttccttctctctcctccttctttttacttttcctcctctctt

SEQ ID NO: 30891 - DNA, 96 bp, Fusarium azukicola
  misc_feature: 395
ctcttcttatacccttatacacttttcttctttattttctttaccctatactttcttcattattttactttaccctccacttttattctttatttt

SEQ ID NO: 30892 - DNA, 96 bp, Fusarium azukicola
  misc_feature: 395
cctccttctctctcctcttttaaccccctctatctcttctcccctttttccctcccctcttcctctactttctttctcttctcccctcctcttctt

SEQ ID NO: 30893 - DNA, 96 bp, Fusarium azukicola
  misc_feature: 394
tttttctttactcttcccctccttcatttctctttttcttcttcttttctttttctattccccttctttctttctcttctaactacctatcttctt

SEQ ID NO: 30894 - DNA, 96 bp, Fusarium azukicola
  misc_feature: 394
ttctttctttctcttctaactacctatcttctttctcttctcccttcctcccttcctcccctctctctcttatattcccttctcttccttcctctt

SEQ ID NO: 30895 - DNA, 96 bp, Fusarium azukicola
  misc_feature: 394
ctattttatctaggaacttgtattccttattactaggttttttatttatattatttttagttaattttcctagtttgcagttttcacagtttttaa

SEQ ID NO: 30896 - DNA, 96 bp, Fusarium azukicola
  misc_feature: 394
tggctttttaggaatttcgatagtgaatttctgtttattattattattattatataatattgccttttcattattataagggctttctttaaagta

SEQ ID NO: 30897 - DNA, 96 bp, Fusarium azukicola
  misc_feature: 394
gcagttattgcaaactgccaggtcataaagacccagattgctattttttgcaccctaataaagctccaaaaaactggaaaactcaggaagccaata

SEQ ID NO: 30898 - DNA, 96 bp, Fusarium azukicola
  misc_feature: 394
atagctttatagaaaggataaataggactatattagaaaaggttagagctttattatttacttctaacctacctaaatacctttagggagaggcta

SEQ ID NO: 30899 - DNA, 96 bp, Fusarium azukicola
  misc_feature: 394
cctctcccttctttctcttcctcttctctccctctttactcctcttcttctcttctccccttcctctcctctcttcctctcctctatacttactta

SEQ ID NO: 30900 - DNA, 96 bp, Fusarium azukicola
  misc_feature: 394
ctcttttactttaccctatactctcttctctcttttactttaccctctacttttattctttattttactttaccctatactctcttctctctttta

SEQ ID NO: 30901 - DNA, 96 bp, Fusarium azukicola
  misc_feature: 394
attgctattttttgcaccctaataaggctccaaaaaactggaaaactcaggaagccaataaggtgcataagacttctaagaaaagggaatctaaac

SEQ ID NO: 30902 - DNA, 96 bp, Fusarium azukicola
  misc_feature: 394
cctctcttttcttctttaacctaactcacctacttaaccctaaccctaatttcaaccaattaaccctaacccttaactcacctacttaaccctaac

SEQ ID NO: 30903 - DNA, 96 bp, Fusarium azukicola
  misc_feature: 394
cttttttctcttctttctccttcccctttctcttcttttactactactttcttactctcttactacctttacttctatacctattttctctttaac

SEQ ID NO: 30904 - DNA, 96 bp, Fusarium azukicola
  misc_feature: 394
ctttaccctatactctcttctctcttttactttaccctatactctcttctctcttttactttaccctctacttttattctttattttactttaccc

SEQ ID NO: 30905 - DNA, 96 bp, Fusarium azukicola
  misc_feature: 394
cccagattgctattttttgcaccctaataaggctccaaaaaactggaaaactcaggaagccaataaggtgcataagacttctaagaaaagggaatc

SEQ ID NO: 30906 - DNA, 96 bp, Fusarium azukicola
  misc_feature: 394
agttaagaagaggaggggagaagagaaagaaagtagaggaagaggggagggaaaaaggggagaagagatagagggggttaaaagaggagagagaag

SEQ ID NO: 30907 - DNA, 96 bp, Fusarium azukicola
  misc_feature: 394
ctatataaggaatttttttaaaaatttagaaaaaatatttttaagtcttatatatagctaaatagttaaaatcgttttttttaagtttctagctat

SEQ ID NO: 30908 - DNA, 96 bp, Fusarium azukicola
  misc_feature: 394
ccttactttatctttctcttctattcacttcctacctttctaatcacccttcctctactctttttcttttctctcctctcccctctccctctctct

SEQ ID NO: 30909 - DNA, 96 bp, Fusarium azukicola
  misc_feature: 393
tttctctcccctccttctctctcctcttttaaccccctctatctcttctcccctttttccctcccctcttcctctactttctttctcttctcccct

SEQ ID NO: 30910 - DNA, 96 bp, Fusarium azukicola
  misc_feature: 393
aaagtaaaaagaaggaggagagagaaggaagaataaaagaaaagaataagagggaaaggaagagaagaagattgagagaaagaggagggaagagaa

SEQ ID NO: 30911 - DNA, 96 bp, Fusarium azukicola
  misc_feature: 393
agaaagaagggagagggttaatataaagagggaaaagtgaggtagagagaaagtgtagttaagaagaggaggggagaagagaaagaaagtagagga

SEQ ID NO: 30912 - DNA, 96 bp, Fusarium azukicola
  misc_feature: 393
tattttatctaggaacttgtattccttattactaggttttttatttatattatttttagttaattttcctagtttgcagttttcacagtttttaac

SEQ ID NO: 30913 - DNA, 96 bp, Fusarium azukicola
  misc_feature: 393
actttctttctcttctcccctcctcttcttaactacactttctctctacctcacttttccctctttatattaaccctctcccttctttctcttcct

SEQ ID NO: 30914 - DNA, 96 bp, Fusarium azukicola
  misc_feature: 392
aaagaagataggtagttagaagagaaagaaagaaggggaatagaaaaagaaaagaagaagaaaaagagaaatgaaggaggggaagagtaaagaaaa

SEQ ID NO: 30915 - DNA, 96 bp, Fusarium azukicola
  misc_feature: 392
tgccttaaaatgcagttattgcaaactgccaggtcataaagacccagattgctattttttgcaccctaataaggctccaaaaaactggaaaactca

SEQ ID NO: 30916 - DNA, 96 bp, Fusarium azukicola
  misc_feature: 392
tgcaaactgccaggtcataaagacccagattgctattttttgcaccctaataaagctccaaaaaactggaaaactcaggaagccaataaggtgcat

SEQ ID NO: 30917 - DNA, 96 bp, Fusarium azukicola
  misc_feature: 392
gataaggagtgaaaagagagagagggagaggggagaggagagaaaagaaaaagagtagaggaagggtgattagaaaggtaggaagtgaatagaaga

SEQ ID NO: 30918 - DNA, 96 bp, Fusarium azukicola
  misc_feature: 392
agtaaagaaaaagagaagaagataaaaggagaaggggaagagtaaaagaaagaaaagtaagaaagtaatagaaagtaatagaacgtagtttagaga

SEQ ID NO: 30919 - DNA, 96 bp, Fusarium azukicola
  misc_feature: 392
aaagaaggaggagagagaaggaagaataaaagaaaagaataagagggaaaggaagagaagaagattgagagaaagaggagggaagagaaggaagga

SEQ ID NO: 30920 - DNA, 96 bp, Fusarium azukicola
  misc_feature: 392
ggagtaaagagggagagaagaggaagagaaagaagggagagggttaatataaagagggaaaagtgaggtagagagaaagtgtagttaagaagagga

SEQ ID NO: 30921 - DNA, 96 bp, Fusarium azukicola
  misc_feature: 392
atagactatataataagtctaaactttaaattttagctattttagagttagtttgaattttctaggattttttaaaaaacctagttttagtatata

SEQ ID NO: 30922 - DNA, 96 bp, Fusarium azukicola
  misc_feature: 392
atacctaaaaatagagtaaaaattctataatataatatgtggtttatagggatatatcactatagttggtaatataatatagaacattaacaatta

SEQ ID NO: 30923 - DNA, 96 bp, Fusarium azukicola
  misc_feature: 392
gggaaaggaagagaagaagattgagagaaagaggagggaagagaaggaaggagaaagaggaaggggagttaaaagtgtgtgaagttaggagagtta

SEQ ID NO: 30924 - DNA, 96 bp, Fusarium azukicola
  misc_feature: 392
ctaaccctctcttttcttctttaacctaactcacctacttaaccctaaccctaatttcaaccaattaaccctaacccttaactcacctacttaacc

SEQ ID NO: 30925 - DNA, 96 bp, Fusarium azukicola
  misc_feature: 392
cttcttctctttttctttactcttcccctccttcatttctctttttcttcttcttttctttttctattccccttctttctttctcttctaactacc

SEQ ID NO: 30926 - DNA, 96 bp, Fusarium azukicola
  misc_feature: 392
gaagagaaagaagggagagggttaatataaagagggaaaagtgaggtagagagaaagtgtagttaagaagaggaggggagaagagaaagaaagtag

SEQ ID NO: 30927 - DNA, 96 bp, Fusarium azukicola
  misc_feature: 392
cttatgcaccttattggcttcctgagttttccagttttttggagctttattagggtgcaaaaaatagcaatctgggtctttatgacctggcagttt

SEQ ID NO: 30928 - DNA, 96 bp, Fusarium azukicola
  misc_feature: 392
ctacctcacttttccctctttatattaaccctctcccttctttctcttcctcttctctccctctttactcctcttcttctcttctccccttcctct

SEQ ID NO: 30929 - DNA, 96 bp, Fusarium azukicola
  misc_feature: 392
aactgtgaaaactgcaaactaggaaaattaactaaaaataatataaataaaaaacctagtaataaggaatacaagttcctagataaaatagctact

SEQ ID NO: 30930 - DNA, 96 bp, Fusarium azukicola
  misc_feature: 392
agactatataataagtctaaactttaaattttagctattttagagttagtttgaattttctaggattttttaaaaaacctagttttagtatatagt

SEQ ID NO: 30931 - DNA, 96 bp, Fusarium azukicola
  misc_feature: 391
gggagagaagaggaagagaaagaagggagagggttaatataaagagggaaaagtgaggtagagagaaagtgtagttaagaagaggaggggagaaga

SEQ ID NO: 30932 - DNA, 96 bp, Fusarium azukicola
  misc_feature: 391
tctctcctttcttaaccttccttacttctctcctttcttaaccttccttacttctctcctttcttaaccttccttacttctctcctttcttaaccc

SEQ ID NO: 30933 - DNA, 96 bp, Fusarium azukicola
  misc_feature: 391
tctcctctcccctctccctctctctcttttcactccttatcctctcctctcccctctccctctctctcttttcactccttctcctctcctctcccc

SEQ ID NO: 30934 - DNA, 96 bp, Fusarium azukicola
  misc_feature: 391
tctattcacttcctacctttctaatcacccttcctctactctttttcttttctctcctctcccctctccctctctctcttttcactccttatcctc

SEQ ID NO: 30935 - DNA, 96 bp, Fusarium azukicola
  misc_feature: 391
tcccctttttccctcccctcttcctctactttctttctcttctcccctcctcttcttaactacactttctctctacctcacttttccctctttata

SEQ ID NO: 30936 - DNA, 96 bp, Fusarium azukicola
  misc_feature: 391
ataaaatagctagaaacttaaaaaaaacgattttaactatttagctatatataagacttaaaaatattttttctaaatttttaaaaaaattcctta

SEQ ID NO: 30937 - DNA, 96 bp, Fusarium azukicola
  misc_feature: 391
gggttatagctttatacgttcttattattagaggaaaaaattaaacctctattattattatatatatatcttagtaaaaacccctttattatagac

SEQ ID NO: 30938 - DNA, 96 bp, Fusarium azukicola
  misc_feature: 391
gaagagagtatagggtaaagtaaaataaagaataaaagtagagggtaaagtaaaagagagaagagagtatagggtaaagtaaaagagagaagagag

SEQ ID NO: 30939 - DNA, 96 bp, Fusarium azukicola
  misc_feature: 391
ctaactccctatccttcctcttttttcccccaccctccctttcttaataactctttataacttctctttttactcttctctacactacctttcctt

SEQ ID NO: 30940 - DNA, 96 bp, Fusarium azukicola
  misc_feature: 391
atcacccttcctctactctttttcttttctctcctctcccctctccctctctctcttttcactccttatcctctcctctcccctctccctctctct

SEQ ID NO: 30941 - DNA, 96 bp, Fusarium azukicola
  misc_feature: 390
aggtagttagaagagaaagaaagaaggggaatagaaaaagaaaagaagaagaaaaagagaaatgaaggaggggaagagtaaagaaaaagagaagaa

SEQ ID NO: 30942 - DNA, 96 bp, Fusarium azukicola
  misc_feature: 390
tctctctcctccttctttttacttttcctcctctctttctctcccctccttctctctcctcttttaaccccctctatctcttctcccctttttccc

SEQ ID NO: 30943 - DNA, 96 bp, Fusarium azukicola
  misc_feature: 390
gtaaaaagaaggaggagagagaaggaagaataaaagaaaagaataagagggaaaggaagagaagaagattgagagaaagaggagggaagagaagga

SEQ ID NO: 30944 - DNA, 96 bp, Fusarium azukicola
  misc_feature: 390
aagagagtaagaaagtagtagtaaaagaagagaaaggggaaggagaaagaagagaaaaaagtaagttaaggtaaaagagtagtatttaatagggga

SEQ ID NO: 30945 - DNA, 96 bp, Fusarium azukicola
  misc_feature: 390
acttaaccctaaccctaatttcaaccaattaaccctaacccttaactcacctacttaaccctaaccctaatttcaaccaattaaccctaaccctta

SEQ ID NO: 30946 - DNA, 96 bp, Fusarium azukicola
  misc_feature: 390
aacctcactacttttttttcttttccttactctctccttataaccctttcctactcttctcctactctcttaccttaactccccctctcttctacc

SEQ ID NO: 30947 - DNA, 96 bp, Fusarium azukicola
  misc_feature: 389
tttctctctacctcacttttccctctttatattaaccctctcccttctttctcttcctcttctctccctctttactcctcttcttctcttctcccc

SEQ ID NO: 30948 - DNA, 96 bp, Fusarium azukicola
  misc_feature: 389
gataggtagttagaagagaaagaaagaaggggaatagaaaaagaaaagaagaagaaaaagagaaatgaaggaggggaagagtaaagaaaaagagaa

SEQ ID NO: 30949 - DNA, 96 bp, Fusarium azukicola
  misc_feature: 389
gaggaaaaattaaacctctattattattatatatatatcttagtaaaaacccctttattatagacctaatattataagggaaaatctaagattata

SEQ ID NO: 30950 - DNA, 96 bp, Fusarium azukicola
  misc_feature: 389
actttctctctacctcacttttccctctttatattaaccctctcccttctttctcttcctcttctctccctctttactcctcttcttctcttctcc

SEQ ID NO: 30951 - DNA, 96 bp, Fusarium azukicola
  misc_feature: 389
ggaaaaaattaaacctctattattattatatatatatcttagtaaaaacccctttattatagacctgatattataagggaaaatctaagattatat

SEQ ID NO: 30952 - DNA, 96 bp, Fusarium azukicola
  misc_feature: 389
cgatagtgaatttctgtttattattattattattatataatattgccttttcattattataagggctttctttaaagtaaggaatctcattaaaag

SEQ ID NO: 30953 - DNA, 96 bp, Fusarium azukicola
  misc_feature: 389
ctacctatcttctttctcttctcccttcctcccttcctcccctctctctcttatattcccttctcttccttcctctttctctttacttccctttct

SEQ ID NO: 30954 - DNA, 96 bp, Fusarium azukicola
  misc_feature: 388
cttttcttctttaacctaactcacctacttaaccctaaccctaatttcaaccaattaaccctaacccttaactcacctacttaaccctaaccctaa

SEQ ID NO: 30955 - DNA, 96 bp, Fusarium azukicola
  misc_feature: 388
attattagaggaaaaattaaacctctattattattatatatatatcttagtaaaaacccctttattatagacctaatattataagggaaaatctaa

SEQ ID NO: 30956 - DNA, 96 bp, Fusarium azukicola
  misc_feature: 388
tctttactaaaagcttataacctatactatttgagagaataaaagagaatctatccctaatataacttatttcctttataaagggtttttattata

SEQ ID NO: 30957 - DNA, 96 bp, Fusarium azukicola
  misc_feature: 388
tatagggtatataagaataagtaagatagaataaagaagaagggagagtaagatatttagagttagagagaaagaataaagataagatgaggaaga

SEQ ID NO: 30958 - DNA, 96 bp, Fusarium azukicola
  misc_feature: 388
tctctttacttccctttctctttctcctccctcctcttcactccctttactcctcttaacttctctttctcttccctcttcttccctcctctccct

SEQ ID NO: 30959 - DNA, 96 bp, Fusarium azukicola
  misc_feature: 388
tctcccctcctcttcttaactacactttctctctacctcacttttccctctttatattaaccctctcccttctttctcttcctcttctctccctct

SEQ ID NO: 30960 - DNA, 96 bp, Fusarium azukicola
  misc_feature: 388
tattattagaggaaaaaattaaacctctattattattatatatatatcttagtaaaaacccctttattatagacctgatattataagggaaaatct

SEQ ID NO: 30961 - DNA, 96 bp, Fusarium azukicola
  misc_feature: 388
acctaactcacctacttaaccctaaccctaatttcaaccaattaaccctaacccttaactcacctacttaaccctaaccctaatttcaaccaatta

SEQ ID NO: 30962 - DNA, 96 bp, Fusarium azukicola
  misc_feature: 388
cctttaaagttataatcttataagggttatagctttatacgttcttattattagaggaaaaaattaaacctctattattattatatatatatctta

SEQ ID NO: 30963 - DNA, 96 bp, Fusarium azukicola
  misc_feature: 388
aagaaagaaggggaatagaaaaagaaaagaagaagaaaaagagaaatgaaggaggggaagagtaaagaaaaagagaagaagataaaaggagaaggg

SEQ ID NO: 30964 - DNA, 96 bp, Fusarium azukicola
  misc_feature: 388
agagaaggaagaataaaagaaaagaataagagggaaaggaagagaagaagattgagagaaagaggagggaagagaaggaaggagaaagaggaaggg

SEQ ID NO: 30965 - DNA, 96 bp, Fusarium azukicola
  misc_feature: 388
ccccttaactctcctaacttcacacacttttaactccccttcctctttctccttccttctcttccctcctctttctctcaatcttcttctcttcct

SEQ ID NO: 30966 - DNA, 96 bp, Fusarium azukicola
  misc_feature: 388
atccttttatactctcttcttatacccttatacacttttcttctttattttctttaccctatactttcttcattattttactttaccctccacttt

SEQ ID NO: 30967 - DNA, 96 bp, Fusarium azukicola
  misc_feature: 387
ggctttttaggaatttcgatagtgaatttctgtttattattattattattatataatattgccttttcattattataagggctttctttaaagtaa

SEQ ID NO: 30968 - DNA, 96 bp, Fusarium azukicola
  misc_feature: 387
tcttccctcctctttctctcaatcttcttctcttcctttccctcttattcttttcttttattcttccttctctctcctccttctttttacttttcc

SEQ ID NO: 30969 - DNA, 96 bp, Fusarium azukicola
  misc_feature: 387
gaggacctatatcaagttaaaaactgtgaaaactgcaaactaggaaaattaactaaaaataatataaataaaaaacctagtaataaggaatacaag

SEQ ID NO: 30970 - DNA, 96 bp, Fusarium azukicola
  misc_feature: 387
aggaggagagagaaggaagaataaaagaaaagaataagagggaaaggaagagaagaagattgagagaaagaggagggaagagaaggaaggagaaag

SEQ ID NO: 30971 - DNA, 96 bp, Fusarium azukicola
  misc_feature: 387
agagaaagaaagaaggggaatagaaaaagaaaagaagaagaaaaagagaaatgaaggaggggaagagtaaagaaaaagagaagaagataaaaggag

SEQ ID NO: 30972 - DNA, 96 bp, Fusarium azukicola
  misc_feature: 387
agggtaaaggaaaggtagtgtagagaagagtaaaaagagaagttataaagagttattaagaaagggagggtgggggaaaaaagaggaaggataggg

SEQ ID NO: 30973 - DNA, 96 bp, Fusarium azukicola
  misc_feature: 386
agaaagaaagaaggggaatagaaaaagaaaagaagaagaaaaagagaaatgaaggaggggaagagtaaagaaaaagagaagaagataaaaggagaa

SEQ ID NO: 30974 - DNA, 96 bp, Fusarium azukicola
  misc_feature: 386
tctcctttcttaaccttccttacttctctcctttcttaaccttccttacttctctcctttcttaaccttccttacttctctcctttcttaaccctt

SEQ ID NO: 30975 - DNA, 96 bp, Fusarium azukicola
  misc_feature: 386
atataggttatttttttcttttccttgtgatattatttttccttgcttatttaaaagaaggacttcttgtttatttataatagaagttatattata

SEQ ID NO: 30976 - DNA, 96 bp, Fusarium azukicola
  misc_feature: 386
ctctccctctctctcttttcactccttatcctctcctctcccctctccctctctctcttttcactccttcttccttcttcctcatcttatctttat

SEQ ID NO: 30977 - DNA, 96 bp, Fusarium azukicola
  misc_feature: 386
agagggtaaaggaaaggtagtgtagagaagagtaaaaagagaagttataaagagttattaagaaagggagggtgggggaaaaaagaggaaggatag

SEQ ID NO: 30978 - DNA, 96 bp, Fusarium azukicola
  misc_feature: 385
ttttggagctttattagggtgcaaaaaatagcaatctgggtctttatgacctggcagtttgcaataactgcattttaaggcagttttcttcttttt

SEQ ID NO: 30979 - DNA, 96 bp, Fusarium azukicola
  misc_feature: 385
tttcgatagtgaatttctgtttattattattattattatataatattgccttttcattattataagggctttctttaaagtaaggaatctcattaa

SEQ ID NO: 30980 - DNA, 96 bp, Fusarium azukicola
  misc_feature: 385
tgaggacctatatcaagttaaaaactgtgaaaactgcaaactaggaaaattaactaaaaataatataaataaaaaacctagtaataaggaatacaa

SEQ ID NO: 30981 - DNA, 96 bp, Fusarium azukicola
  misc_feature: 385
agaaagaggagggaagagaaggaaggagaaagaggaaggggagttaaaagtgtgtgaagttaggagagttaaggggaggggaagtagttcaagtaa

SEQ ID NO: 30982 - DNA, 96 bp, Fusarium azukicola
  misc_feature: 385
tccttactttatctttctcttctattcacttcctacctttctaatcacccttcctctactctttttcttttctctcctctcccctctccctctctc

SEQ ID NO: 30983 - DNA, 96 bp, Fusarium azukicola
  misc_feature: 385
tataaatctatttaaaattaagaaaagccttatatagcctaaaataaagccctagattatagtataaccttctctctaaattattaaataatttag

SEQ ID NO: 30984 - DNA, 96 bp, Fusarium azukicola
  misc_feature: 385
tagctattttatctaggaacttgtattccttattactaggttttttatttatattatttttagttaattttcctagtttgcagttttcacagtttt

SEQ ID NO: 30985 - DNA, 96 bp, Fusarium azukicola
  misc_feature: 385
ggaagagaaagaagggagagggttaatataaagagggaaaagtgaggtagagagaaagtgtagttaagaagaggaggggagaagagaaagaaagta

SEQ ID NO: 30986 - DNA, 96 bp, Fusarium azukicola
  misc_feature: 385
gaaggaagaataaaagaaaagaataagagggaaaggaagagaagaagattgagagaaagaggagggaagagaaggaaggagaaagaggaaggggag

SEQ ID NO: 30987 - DNA, 96 bp, Fusarium azukicola
  misc_feature: 385
ctccccttaactctcctaacttcacacacttttaactccccttcctctttctccttccttctcttccctcctctttctctcaatcttcttctcttc

SEQ ID NO: 30988 - DNA, 96 bp, Fusarium azukicola
  misc_feature: 385
ctttcttttactcttccccttctccttttatcttcttctctttttctttactcttcccctccttcatttctctttttcttcttcttttctttttct

SEQ ID NO: 30989 - DNA, 96 bp, Fusarium azukicola
  misc_feature: 385
aaaaaattaaacctctattattattatatatatcttagtaaaaacccctttattatagacctaatattataagggaaaatctaagattatataggg

SEQ ID NO: 30990 - DNA, 96 bp, Fusarium azukicola
  misc_feature: 385
acttgtattccttattactaggttttttatttatattatttttagttaattttcctagtttgcagttttcacagtttttaacttgatataggtcct

SEQ ID NO: 30991 - DNA, 96 bp, Fusarium azukicola
  misc_feature: 385
aatattataagggaaaatctaagattatatagggaaaagtattaaaatacaataaaaaccctttataaaggaaataagttatattagggatagatt

SEQ ID NO: 30992 - DNA, 96 bp, Fusarium azukicola
  misc_feature: 384
ttgctattttttgcaccctaataaggctccaaaaaactggaaaactcaggaagccaataaggtgcataagacttctaagaaaagggaatctaaacc

SEQ ID NO: 30993 - DNA, 96 bp, Fusarium azukicola
  misc_feature: 384
cttagattttcccttataatattaggtctataataaaggggtttttactaagatatatatataataataatagaggtttaatttttcctctaataa

SEQ ID NO: 30994 - DNA, 96 bp, Fusarium azukicola
  misc_feature: 384
aaattagggttaggggtagtagtagagttaagggttagggttaattggttgaaattagggttagggttaagtaggtgagttaagggttagggttaa

SEQ ID NO: 30995 - DNA, 96 bp, Fusarium azukicola
  misc_feature: 384
aaatagctttttttctattaagagacttttttagaaattctaaaaaattatctatagtttatttaagagttaagtttattaaaatactttttttaa

SEQ ID NO: 30996 - DNA, 96 bp, Fusarium azukicola
  misc_feature: 384
agataggtagttagaagagaaagaaagaaggggaatagaaaaagaaaagaagaagaaaaagagaaatgaaggaggggaagagtaaagaaaaagaga

SEQ ID NO: 30997 - DNA, 96 bp, Fusarium azukicola
  misc_feature: 384
tctcttcttatacccttatacacttttcttctttattttctttaccctatactttcttcattattttactttaccctccacttttattctttattt

SEQ ID NO: 30998 - DNA, 96 bp, Fusarium azukicola
  misc_feature: 384
tacttttcctcctctctttctctcccctccttctctctcctcttttaaccccctctatctcttctcccctttttccctcccctcttcctctacttt

SEQ ID NO: 30999 - DNA, 96 bp, Fusarium azukicola
  misc_feature: 384
ccctcttccctaccccaatctactttttactcctcttttacctaatactcactactctctcctaactaacttaatacttactatacctccctctta

SEQ ID NO: 31000 - DNA, 96 bp, Fusarium azukicola
  misc_feature: 384
ggaggggagagaaagagaggaggaaaagtaaaaagaaggaggagagagaaggaagaataaaagaaaagaataagagggaaaggaagagaagaagat

SEQ ID NO: 31001 - DNA, 96 bp, Fusarium azukicola
  misc_feature: 384
ggaagaggttataataaaggtcaagggaagtaattaaagtaataattaggggtaataattaaattaagggttagggttaagtagttatagtaaagg

SEQ ID NO: 31002 - DNA, 96 bp, Fusarium azukicola
  misc_feature: 384
gagtaaagaaaaagagaagaagataaaaggagaaggggaagagtaaaagaaagaaaagtaagaaagtaatagaaagtaatagaacgtagtttagag

SEQ ID NO: 31003 - DNA, 96 bp, Fusarium azukicola
  misc_feature: 384
gagaaggaagaataaaagaaaagaataagagggaaaggaagagaagaagattgagagaaagaggagggaagagaaggaaggagaaagaggaagggg

SEQ ID NO: 31004 - DNA, 96 bp, Fusarium azukicola
  misc_feature: 384
gagaaagaagggagagggttaatataaagagggaaaagtgaggtagagagaaagtgtagttaagaagaggaggggagaagagaaagaaagtagagg

SEQ ID NO: 31005 - DNA, 96 bp, Fusarium azukicola
  misc_feature: 384
agaagaggaagagaaagaagggagagggttaatataaagagggaaaagtgaggtagagagaaagtgtagttaagaagaggaggggagaagagaaag

SEQ ID NO: 31006 - DNA, 96 bp, Fusarium azukicola
  misc_feature: 384
aaggaggggagagaaagagaggaggaaaagtaaaaagaaggaggagagagaaggaagaataaaagaaaagaataagagggaaaggaagagaagaag

SEQ ID NO: 31007 - DNA, 96 bp, Fusarium azukicola
  misc_feature: 383
ttgcattatggccgggcttgctgcatacaccacagcgccgaacacccggtccaaccgaccttcctcgaccaccactcctcgacgattcagccatta

SEQ ID NO: 31008 - DNA, 96 bp, Fusarium azukicola
  misc_feature: 383
ttgcaaactgccaggtcataaagacccagattgctattttttgcaccctaataaagctccaaaaaactggaaaactcaggaagccaataaggtgca

SEQ ID NO: 31009 - DNA, 96 bp, Fusarium azukicola
  misc_feature: 383
ttcttctttaacctaactcacctacttaaccctaaccctaatttcaaccaattaaccctaacccttaactcacctacttaaccctaaccctaattt

SEQ ID NO: 31010 - DNA, 96 bp, Fusarium azukicola
  misc_feature: 383
gagagagggagaggagggaagaagagggaagagaaagagaagttaagaggagtaaagggagtgaagaggagggaggagaaagagaaagggaagtaa

SEQ ID NO: 31011 - DNA, 96 bp, Fusarium azukicola
  misc_feature: 383
tcttcttctctttttctttactcttcccctccttcatttctctttttcttcttcttttctttttctattccccttctttctttctcttctaactac

SEQ ID NO: 31012 - DNA, 96 bp, Fusarium azukicola
  misc_feature: 383
tctcccctccttctctctcctcttttaaccccctctatctcttctcccctttttccctcccctcttcctctactttctttctcttctcccctcctc

SEQ ID NO: 31013 - DNA, 96 bp, Fusarium azukicola
  misc_feature: 383
tctattactttcttacttttctttcttttactcttccccttctccttttatcttcttctctttttctttactcttcccctccttcatttctctttt

SEQ ID NO: 31014 - DNA, 96 bp, Fusarium azukicola
  misc_feature: 383
tcctttaccctcttccctaccccaatctactttttactcctcttttacctaatactcactactctctcctaactaacttaatacttactatacctc

SEQ ID NO: 31015 - DNA, 96 bp, Fusarium azukicola
  misc_feature: 383
aatgaaggaggggaagagtaaagaaaaagagaagaagataaaaggagaaggggaagagtaaaagaaagaaaagtaagaaagtaatagaaagtaata

SEQ ID NO: 31016 - DNA, 96 bp, Fusarium azukicola
  misc_feature: 383
gattctagaaggaccctatatattagtagctattttatctaggaacttatattccttattactaggttttttatttatattatttttagttaattt

SEQ ID NO: 31017 - DNA, 96 bp, Fusarium azukicola
  misc_feature: 383
agaaagtagaggaagaggggagggaaaaaggggagaagagatagagggggttaaaagaggagagagaaggaggggagagaaagagaggaggaaaag

SEQ ID NO: 31018 - DNA, 96 bp, Fusarium azukicola
  misc_feature: 383
cctattaaatactactcttttaccttaacttacttttttctcttctttctccttcccctttctcttcttttactactactttcttactctcttact

SEQ ID NO: 31019 - DNA, 96 bp, Fusarium azukicola
  misc_feature: 383
agaaagagaaagggaagtaaagagaaagaggaaggaagagaagggaatataagagagagaggggaggaagggaggaagggagaagagaaagaagat

SEQ ID NO: 31020 - DNA, 96 bp, Fusarium azukicola
  misc_feature: 382
ttctcttctaactacctatcttctttctcttctcccttcctcccttcctcccctctctctcttatattcccttctcttccttcctctttctcttta

SEQ ID NO: 31021 - DNA, 96 bp, Fusarium azukicola
  misc_feature: 382
tcacttcctacctttctaatcacccttcctctactctttttcttttctctcctctcccctctccctctctctcttttcactccttatcctctcctc

SEQ ID NO: 31022 - DNA, 96 bp, Fusarium azukicola
  misc_feature: 382
gtgaaaactgcaaactaggaaaattaactaaaaataatataaataaaaaacctagtaataaggaatacaagttcctagataaaatagctactgata

SEQ ID NO: 31023 - DNA, 96 bp, Fusarium azukicola
  misc_feature: 382
ccttcctctttctctttacttccctttctctttctcctccctcctcttcactccctttactcctcttaacttctctttctcttccctcttcttccc

SEQ ID NO: 31024 - DNA, 96 bp, Fusarium azukicola
  misc_feature: 382
gcagttttcacagtttttaacttgatataggtcctcactagtatatttaaagagaggatcttttatttttatatatttaattagacttcttaagtt

SEQ ID NO: 31025 - DNA, 96 bp, Fusarium azukicola
  misc_feature: 382
actacctatcttctttctcttctcccttcctcccttcctcccctctctctcttatattcccttctcttccttcctctttctctttacttccctttc

SEQ ID NO: 31026 - DNA, 96 bp, Fusarium azukicola
  misc_feature: 382
actgtgaaaactgcaaactaggaaaattaactaaaaataatataaataaaaaacctagtaataaggaatacaagttcctagataaaatagctactg

SEQ ID NO: 31027 - DNA, 96 bp, Fusarium azukicola
  misc_feature: 382
attttactttaccctatactctcttctctcttttactttaccctatactctcttctctcttttactttaccctctacttttattctttattttact

SEQ ID NO: 31028 - DNA, 96 bp, Fusarium azukicola
  misc_feature: 381
tttctcttctcccctcctcttcttaactacactttctctctacctcacttttccctctttatattaaccctctcccttctttctcttcctcttctc

SEQ ID NO: 31029 - DNA, 96 bp, Fusarium azukicola
  misc_feature: 381
ttctctctacctcacttttccctctttatattaaccctctcccttctttctcttcctcttctctccctctttactcctcttcttctcttctcccct

SEQ ID NO: 31030 - DNA, 96 bp, Fusarium azukicola
  misc_feature: 381
ttctaactacctatcttctttctcttctcccttcctcccttcctcccctctctctcttatattcccttctcttccttcctctttctctttacttcc

SEQ ID NO: 31031 - DNA, 96 bp, Fusarium azukicola
  misc_feature: 381
ttatgacccacttttatctatctatcttctataagtctctcttagaagctagatattatctctttattacttttcttcctagttatctaggaaatt

SEQ ID NO: 31032 - DNA, 96 bp, Fusarium azukicola
  misc_feature: 381
tgctattttttgcaccctaataaggctccaaaaaactggaaaactcaggaagccaataaggtgcataagacttctaagaaaagggaatctaaacct

SEQ ID NO: 31033 - DNA, 96 bp, Fusarium azukicola
  misc_feature: 381
atatcaagttaaaaactgtgaaaactgcaaactaggaaaattaactaaaaataatataaataaaaaacctagtaataaggaatacaagttcctaga

SEQ ID NO: 31034 - DNA, 96 bp, Fusarium azukicola
  misc_feature: 381
tcccctcctcttcttaactacactttctctctacctcacttttccctctttatattaaccctctcccttctttctcttcctcttctctccctcttt

SEQ ID NO: 31035 - DNA, 96 bp, Fusarium azukicola
  misc_feature: 381
tcactccttatcctctcctctcccctctccctctctctcttttcactccttcttccttcttcctcatcttatctttattctttctctctaactcta

SEQ ID NO: 31036 - DNA, 96 bp, Fusarium azukicola
  misc_feature: 381
tattatatataggttatttttttcttttccttgtgatattatttttccttgcttatttaaaagaaggacttcttgtttatttataatagaagttat

SEQ ID NO: 31037 - DNA, 96 bp, Fusarium azukicola
  misc_feature: 381
tagctttatagaaaggataaataggactatattagaaaaggttagagctttattatttacttctaacctacctaaatacctttagggagaggctat

SEQ ID NO: 31038 - DNA, 96 bp, Fusarium azukicola
  misc_feature: 381
cttttatcttcttctctttttctttactcttcccctccttcatttctctttttcttcttcttttctttttctattccccttctttctttctcttct

SEQ ID NO: 31039 - DNA, 96 bp, Fusarium azukicola
  misc_feature: 381
aagtaaaaagaaggaggagagagaaggaagaataaaagaaaagaataagagggaaaggaagagaagaagattgagagaaagaggagggaagagaag

SEQ ID NO: 31040 - DNA, 96 bp, Fusarium azukicola
  misc_feature: 381
aagaaggggaatagaaaaagaaaagaagaagaaaaagagaaatgaaggaggggaagagtaaagaaaaagagaagaagataaaaggagaaggggaag

SEQ ID NO: 31041 - DNA, 96 bp, Fusarium azukicola
  misc_feature: 381
aatcatcacttatatcaaaatccatttcatctggggtctcagaaagggaaattaggtcttcctcggctttaggagatgacgaagaagaagaattag

SEQ ID NO: 31042 - DNA, 96 bp, Fusarium azukicola
  misc_feature: 380
tcttttatctttacttactataacttctcaattactctacctcctctctctctctttcttctttttttttctccccctttttttttttccctcttc

SEQ ID NO: 31043 - DNA, 96 bp, Fusarium azukicola
  misc_feature: 380
ctgtgaaaactgcaaactaggaaaattaactaaaaataatataaataaaaaacctagtaataaggaatacaagttcctagataaaatagctactga

SEQ ID NO: 31044 - DNA, 96 bp, Fusarium azukicola
  misc_feature: 380
tatcttcttctctttttctttactcttcccctccttcatttctctttttcttcttcttttctttttctattccccttctttctttctcttctaact

SEQ ID NO: 31045 - DNA, 96 bp, Fusarium azukicola
  misc_feature: 380
taaaaaaaacgattttaactatttagctatatataagacttaaaaatattttttctaaatttttaaaaaaattccttatataggtatcttaaagta

SEQ ID NO: 31046 - DNA, 96 bp, Fusarium azukicola
  misc_feature: 380
tactctcttctctcttttactttaccctatactctcttctctcttttactttaccctctacttttattctttattttactttaccctatactctct

SEQ ID NO: 31047 - DNA, 96 bp, Fusarium azukicola
  misc_feature: 380
taaaatagctagaaacttaaaaaaaacgattttaactatttagctatatataagacttaaaaatattttttctaaatttttaaaaaaattccttat

SEQ ID NO: 31048 - DNA, 96 bp, Fusarium azukicola
  misc_feature: 380
ggaccccatatatcagtagctattttatctaggaacttgtattccttattactaggttttttatttatattatttttagttaattttcctagtttg

SEQ ID NO: 31049 - DNA, 96 bp, Fusarium azukicola
  misc_feature: 380
gcttcacaactagataaagcaacgcttttttgcttagttgttttccagcttattaggttattatatatataaaagcaatagccgctattagatttt

SEQ ID NO: 31050 - DNA, 96 bp, Fusarium azukicola
  misc_feature: 380
ctctttacttccctttctctttctcctccctcctcttcactccctttactcctcttaacttctctttctcttccctcttcttccctcctctccctc

SEQ ID NO: 31051 - DNA, 96 bp, Fusarium azukicola
  misc_feature: 380
acacttttcttctttattttctttaccctatactttcttcattattttactttaccctccacttttattctttattttactttaccctatactctc

SEQ ID NO: 31052 - DNA, 96 bp, Fusarium azukicola
  misc_feature: 380
aaagtgtagttaagaagaggaggggagaagagaaagaaagtagaggaagaggggagggaaaaaggggagaagagatagagggggttaaaagaggag

SEQ ID NO: 31053 - DNA, 96 bp, Fusarium azukicola
  misc_feature: 380
aggggagagaaagagaggaggaaaagtaaaaagaaggaggagagagaaggaagaataaaagaaaagaataagagggaaaggaagagaagaagattg

SEQ ID NO: 31054 - DNA, 96 bp, Fusarium azukicola
  misc_feature: 380
ataatagaggtttaattttttcctctaataataagaacgtataaagctataacccttataagattataactttaaaggaggctattaatgttctat

SEQ ID NO: 31055 - DNA, 96 bp, Fusarium azukicola
  misc_feature: 379
ctattaaatactactcttttaccttaacttacttttttctcttctttctccttcccctttctcttcttttactactactttcttactctcttacta

SEQ ID NO: 31056 - DNA, 96 bp, Fusarium azukicola
  misc_feature: 379
gggaaggtttcttattaaaggtcctagtatattattagttatattattttgttgaggaattaaggaattatatacctctaaattatcacttatatc

SEQ ID NO: 31057 - DNA, 96 bp, Fusarium azukicola
  misc_feature: 379
cctttaccctcttccctaccccaatctactttttactcctcttttacctaatactcactactctctcctaactaacttaatacttactatacctcc

SEQ ID NO: 31058 - DNA, 96 bp, Fusarium azukicola
  misc_feature: 379
atactctcttctctcttttactttaccctatactctcttctctcttttactttaccctctacttttattctttattttactttaccctatactctc

SEQ ID NO: 31059 - DNA, 96 bp, Fusarium azukicola
  misc_feature: 379
ctcttccccttctccttttatcttcttctctttttctttactcttcccctccttcatttctctttttcttcttcttttctttttctattccccttc

SEQ ID NO: 31060 - DNA, 96 bp, Fusarium azukicola
  misc_feature: 379
ataggtagttagaagagaaagaaagaaggggaatagaaaaagaaaagaagaagaaaaagagaaatgaaggaggggaagagtaaagaaaaagagaag

SEQ ID NO: 31061 - DNA, 96 bp, Fusarium azukicola
  misc_feature: 378
ttttccctctttatattaaccctctcccttctttctcttcctcttctctccctctttactcctcttcttctcttctccccttcctctcctctcttc

SEQ ID NO: 31062 - DNA, 96 bp, Fusarium azukicola
  misc_feature: 378
ttttattagtagaaaaatcaggtttatttaccttatttaaatatcctagttgtttctttatatagggaaggtttcttattaaaggtcctagtatat

SEQ ID NO: 31063 - DNA, 96 bp, Fusarium azukicola
  misc_feature: 378
taaaaagaaggaggagagagaaggaagaataaaagaaaagaataagagggaaaggaagagaagaagattgagagaaagaggagggaagagaaggaa

SEQ ID NO: 31064 - DNA, 96 bp, Fusarium azukicola
  misc_feature: 378
ttacttttcctcctctctttctctcccctccttctctctcctcttttaaccccctctatctcttctcccctttttccctcccctcttcctctactt

SEQ ID NO: 31065 - DNA, 96 bp, Fusarium azukicola
  misc_feature: 378
ggaaggtttcttattaaaggtcctagtatattattagttatattattttgttgaggaattaaggaattatatacctctaaattatcacttatatca

SEQ ID NO: 31066 - DNA, 96 bp, Fusarium azukicola
  misc_feature: 378
tctcttttcttctttaacctaactcacctacttaaccctaaccctaatttcaaccaattaaccctaacccttaactcacctacttaaccctaaccc

SEQ ID NO: 31067 - DNA, 96 bp, Fusarium azukicola
  misc_feature: 378
gggtttttactaagatatatatataataataatagaggtttaattttttcctctaataataagaacgtataaagctataacccttataagattata

SEQ ID NO: 31068 - DNA, 96 bp, Fusarium azukicola
  misc_feature: 378
gctattttttgcaccctaataaggctccaaaaaactggaaaactcaggaagccaataaggtgcataagacttctaagaaaagggaatctaaaccta

SEQ ID NO: 31069 - DNA, 96 bp, Fusarium azukicola
  misc_feature: 378
aataatagaggtttaattttttcctctaataataagaacgtataaagctataacccttataagattataactttaaaggaggctattaatgttcta

SEQ ID NO: 31070 - DNA, 96 bp, Fusarium azukicola
  misc_feature: 378
taactacctatcttctttctcttctcccttcctcccttcctcccctctctctcttatattcccttctcttccttcctctttctctttacttccctt

SEQ ID NO: 31071 - DNA, 96 bp, Fusarium azukicola
  misc_feature: 378
gttattgcaaactgccaggtcataaagacccagattgctattttttgcaccctaataaagctccaaaaaactggaaaactcaggaagccaataagg

SEQ ID NO: 31072 - DNA, 96 bp, Fusarium azukicola
  misc_feature: 378
cctacttaaccctaaccctaatttcaaccaattaaccctaacccttaactcacctacttaaccctaaccctaatttcaaccaattaaccctaaccc

SEQ ID NO: 31073 - DNA, 96 bp, Fusarium azukicola
  misc_feature: 378
gagaagaagattgagagaaagaggagggaagagaaggaaggagaaagaggaaggggagttaaaagtgtgtgaagttaggagagttaaggggagggg

SEQ ID NO: 31074 - DNA, 96 bp, Fusarium azukicola
  misc_feature: 378
gacctatatcaagttaaaaactgtgaaaactgcaaactaggaaaattaactaaaaataatataaataaaaaacctagtaataaggaatacaagttc

SEQ ID NO: 31075 - DNA, 96 bp, Fusarium azukicola
  misc_feature: 378
ctcctttcttaaccttccttacttctctcctttcttaaccttccttacttctctcctttcttaaccttccttacttctctcctttcttaacccttc

SEQ ID NO: 31076 - DNA, 96 bp, Fusarium azukicola
  misc_feature: 378
acttttcctcctctctttctctcccctccttctctctcctcttttaaccccctctatctcttctcccctttttccctcccctcttcctctactttc

SEQ ID NO: 31077 - DNA, 96 bp, Fusarium azukicola
  misc_feature: 378
ctatctcttctcccctttttccctcccctcttcctctactttctttctcttctcccctcctcttcttaactacactttctctctacctcacttttc

SEQ ID NO: 31078 - DNA, 96 bp, Fusarium azukicola
  misc_feature: 378
ctcaggaagccaataaggtgcataagacttctaagaaaaaggaatctaaacctaattctaagaaggaagaaagagaaaagaaacaagaaaagctat

SEQ ID NO: 31079 - DNA, 96 bp, Fusarium azukicola
  misc_feature: 377
tttctctttacttccctttctctttctcctccctcctcttcactccctttactcctcttaacttctctttctcttccctcttcttccctcctctcc

SEQ ID NO: 31080 - DNA, 96 bp, Fusarium azukicola
  misc_feature: 377
catcttaacttaagaagtctaattaaatatataaaaataaaagatcctctctttaaatatactagtgaggacctatatcaagttaaaaactgtgaa

SEQ ID NO: 31081 - DNA, 96 bp, Fusarium azukicola
  misc_feature: 377
ttaaaaaaagtaatcttatagatctaactaaatataaaacttaaaaataatttttttagatttttaaaaaaatccctttatagcgaaataactaat

SEQ ID NO: 31082 - DNA, 96 bp, Fusarium azukicola
  misc_feature: 377
aaagctccaaaaaactggaaaactcaggaagccaataaggtgcataagacttctaagaaaaaggaatctaaacctaattctaagaaggaagaaaga

SEQ ID NO: 31083 - DNA, 96 bp, Fusarium azukicola
  misc_feature: 377
aggaggggagagaaagagaggaggaaaagtaaaaagaaggaggagagagaaggaagaataaaagaaaagaataagagggaaaggaagagaagaaga

SEQ ID NO: 31084 - DNA, 96 bp, Fusarium azukicola
  misc_feature: 377
aaaagtaaaaagaaggaggagagagaaggaagaataaaagaaaagaataagagggaaaggaagagaagaagattgagagaaagaggagggaagaga

SEQ ID NO: 31085 - DNA, 96 bp, Fusarium azukicola
  misc_feature: 377
tctctcctccttctttttacttttcctcctctctttctctcccctccttctctctcctcttttaaccccctctatctcttctcccctttttccctc

SEQ ID NO: 31086 - DNA, 96 bp, Fusarium azukicola
  misc_feature: 377
cccttatacacttttcttctttattttctttaccctatactttcttcattattttactttaccctccacttttattctttattttactttacccta

SEQ ID NO: 31087 - DNA, 96 bp, Fusarium azukicola
  misc_feature: 377
tagaagtcttatgcaccttattggcttcctgagttttccagttttttggagccttattagggtgcaaaaaatagcaatctgggtctttatgacctg

SEQ ID NO: 31088 - DNA, 96 bp, Fusarium azukicola
  misc_feature: 377
taatattaggtctataataaaggggtttttactaagatatatataataataatagaggtttaattttttcctctaataataagaacgtataaagct

SEQ ID NO: 31089 - DNA, 96 bp, Fusarium azukicola
  misc_feature: 377
acctcactacttttttttcttttccttactctctccttataaccctttcctactcttctcctactctcttaccttaactccccctctcttctaccc

SEQ ID NO: 31090 - DNA, 96 bp, Fusarium azukicola
  misc_feature: 377
gctttataatgatatataatctattactaaagccttataaatggcttagttatagcaaaaaccggttttaatggatagaatgcaacgctgaagggt

SEQ ID NO: 31091 - DNA, 96 bp, Fusarium azukicola
  misc_feature: 377
cttccttactttatctttctcttctattcacttcctacctttctaatcacccttcctctactctttttcttttctctcctctcccctctccctctc

SEQ ID NO: 31092 - DNA, 96 bp, Fusarium azukicola
  misc_feature: 377
cctcttcctctactttctttctcttctcccctcctcttcttaactacactttctctctacctcacttttccctctttatattaaccctctcccttc

SEQ ID NO: 31093 - DNA, 96 bp, Fusarium azukicola
  misc_feature: 377
agaaagaaggggaatagaaaaagaaaagaagaagaaaaagagaaatgaaggaggggaagagtaaagaaaaagagaagaagataaaaggagaagggg

SEQ ID NO: 31094 - DNA, 96 bp, Fusarium azukicola
  misc_feature: 377
aactcaggaagccaataaggtgcataagacttctaagaaaaaggaatctaaacctaattctaagaaggaagaaagagaaaagaaacaagaaaagct

SEQ ID NO: 31095 - DNA, 96 bp, Fusarium azukicola
  misc_feature: 377
aaataatataactaataatatactaggacctttgataagaaaccttccctatataaagaaacaactaggatatttaaataaggtaaataaacctgt

SEQ ID NO: 31096 - DNA, 96 bp, Fusarium azukicola
  misc_feature: 376
tttccctcttattcttttcttttattcttccttctctctcctccttctttttacttttcctcctctctttctctcccctccttctctctcctcttt

SEQ ID NO: 31097 - DNA, 96 bp, Fusarium azukicola
  misc_feature: 376
ttccctctttatattaaccctctcccttctttctcttcctcttctctccctctttactcctcttcttctcttctccccttcctctcctctcttcct

SEQ ID NO: 31098 - DNA, 96 bp, Fusarium azukicola
  misc_feature: 376
aaagaaggggaatagaaaaagaaaagaagaagaaaaagagaaatgaaggaggggaagagtaaagaaaaagagaagaagataaaaggagaaggggaa

SEQ ID NO: 31099 - DNA, 96 bp, Fusarium azukicola
  misc_feature: 376
gaagaggaagagaaagaagggagagggttaatataaagagggaaaagtgaggtagagagaaagtgtagttaagaagaggaggggagaagagaaaga

SEQ ID NO: 31100 - DNA, 96 bp, Fusarium azukicola
  misc_feature: 376
tctttctctcaatcttcttctcttcctttccctcttattcttttcttttattcttccttctctctcctccttctttttacttttcctcctctcttt

SEQ ID NO: 31101 - DNA, 96 bp, Fusarium azukicola
  misc_feature: 376
atacctaaaaatagagtaaaaattctataatataatatgtggtttatagggatatatcactatagttggtaatataatatagaacattaacatata

SEQ ID NO: 31102 - DNA, 96 bp, Fusarium azukicola
  misc_feature: 376
cccctccttctctctcctcttttaaccccctctatctcttctcccctttttccctcccctcttcctctactttctttctcttctcccctcctcttc

SEQ ID NO: 31103 - DNA, 96 bp, Fusarium azukicola
  misc_feature: 376
aagacccagattgctattttttgcaccctaataaagctccaaaaaactggaaaactcaggaagccaataaggtgcataagacttctaagaaaaagg

SEQ ID NO: 31104 - DNA, 96 bp, Fusarium azukicola
  misc_feature: 376
agtaaaaagaaggaggagagagaaggaagaataaaagaaaagaataagagggaaaggaagagaagaagattgagagaaagaggagggaagagaagg

SEQ ID NO: 31105 - DNA, 96 bp, Fusarium azukicola
  misc_feature: 376
aagagagtatagggtaaagtaaaataaagaataaaagtagagggtaaagtaaaagagagaagagagtatagggtaaagtaaaagagagaagagagt

SEQ ID NO: 31106 - DNA, 96 bp, Fusarium azukicola
  misc_feature: 376
aactacctatcttctttctcttctcccttcctcccttcctcccctctctctcttatattcccttctcttccttcctctttctctttacttcccttt

SEQ ID NO: 31107 - DNA, 96 bp, Fusarium azukicola
  misc_feature: 375
gatgacggcagtcataaaggtctgtaggaacctttttaaccaattagaataatacccttaatatctagctacctatagtagctataggttagggaa

SEQ ID NO: 31108 - DNA, 96 bp, Fusarium azukicola
  misc_feature: 375
gtatagggtaaagtaaaataaagaataaaagtggagggtaaagtaaaataatgaagaaagtatagggtaaagaaaataaagaagaaaagtgtataa

SEQ ID NO: 31109 - DNA, 96 bp, Fusarium azukicola
  misc_feature: 375
taggtagttagaagagaaagaaagaaggggaatagaaaaagaaaagaagaagaaaaagagaaatgaaggaggggaagagtaaagaaaaagagaaga

SEQ ID NO: 31110 - DNA, 96 bp, Fusarium azukicola
  misc_feature: 375
tcctttcttaaccttccttacttctctcctttcttaaccttccttacttctctcctttcttaaccttccttacttctctcctttcttaacccttct

SEQ ID NO: 31111 - DNA, 96 bp, Fusarium azukicola
  misc_feature: 375
tccccttaactctcctaacttcacacacttttaactccccttcctctttctccttccttctcttccctcctctttctctcaatcttcttctcttcc

SEQ ID NO: 31112 - DNA, 96 bp, Fusarium azukicola
  misc_feature: 375
cttctttttacttttcctcctctctttctctcccctccttctctctcctcttttaaccccctctatctcttctcccctttttccctcccctcttcc

SEQ ID NO: 31113 - DNA, 96 bp, Fusarium azukicola
  misc_feature: 375
ctccctctctctcttttcactccttatcctctcctctcccctctccctctctctcttttcactccttcttccttcttcctcatcttatctttattc

SEQ ID NO: 31114 - DNA, 96 bp, Fusarium azukicola
  misc_feature: 375
gaataaaagaaaagaataagagggaaaggaagagaagaagattgagagaaagaggagggaagagaaggaaggagaaagaggaaggggagttaaaag

SEQ ID NO: 31115 - DNA, 96 bp, Fusarium azukicola
  misc_feature: 375
cgaagaagaagaattagctataaatagcttttcttatttcttttctctttcttccttcttagaattaggtttagattcctttttcttagaagtctt

SEQ ID NO: 31116 - DNA, 96 bp, Fusarium azukicola
  misc_feature: 375
aaaaattaaacctctattattattatatatatatcttagtaaaaacccctttattatagacctgatattataagggaaaatctaagattatatagg

SEQ ID NO: 31117 - DNA, 96 bp, Fusarium azukicola
  misc_feature: 374
tttacttttcctcctctctttctctcccctccttctctctcctcttttaaccccctctatctcttctcccctttttccctcccctcttcctctact

SEQ ID NO: 31118 - DNA, 96 bp, Fusarium azukicola
  misc_feature: 374
aagagaaagaagataggtagttagaagagaaagaaagaaggggaatagaaaaagaaaagaagaagaaaaagagaaatgaaggaggggaagagtaaa

SEQ ID NO: 31119 - DNA, 96 bp, Fusarium azukicola
  misc_feature: 374
ttcgatagtgaatttctgtttattattattattattatataatattgccttttcattattataagggctttctttaaagtaaggaatctcattaaa

SEQ ID NO: 31120 - DNA, 96 bp, Fusarium azukicola
  misc_feature: 374
ttctctctcctccttctttttacttttcctcctctctttctctcccctccttctctctcctcttttaaccccctctatctcttctcccctttttcc

SEQ ID NO: 31121 - DNA, 96 bp, Fusarium azukicola
  misc_feature: 374
gacccagattgctattttttgcaccctaataaagctccaaaaaactggaaaactcaggaagccaataaggtgcataagacttctaagaaaaaggaa

SEQ ID NO: 31122 - DNA, 96 bp, Fusarium azukicola
  misc_feature: 374
ttccttactttatctttctcttctattcacttcctacctttctaatcacccttcctctactctttttcttttctctcctctcccctctccctctct

SEQ ID NO: 31123 - DNA, 96 bp, Fusarium azukicola
  misc_feature: 374
aagatatatatataataataatagaggtttaattttttcctctaataataagaacgtataaagctataacccttataagattataactttaaagga

SEQ ID NO: 31124 - DNA, 96 bp, Fusarium azukicola
  misc_feature: 374
taatagaggtttaattttttcctctaataataagaacgtataaagctataacccttataagattataactttaaaggaggctattaatgttctata

SEQ ID NO: 31125 - DNA, 96 bp, Fusarium azukicola
  misc_feature: 374
ctttaccctcttccctaccccaatctactttttactcctcttttacctaatactcactactctctcctaactaacttaatacttactatacctccc

SEQ ID NO: 31126 - DNA, 96 bp, Fusarium azukicola
  misc_feature: 374
ggagaagagaaagaaagtagaggaagaggggagggaaaaaggggagaagagatagagggggttaaaagaggagagagaaggaggggagagaaagag

SEQ ID NO: 31127 - DNA, 96 bp, Fusarium azukicola
  misc_feature: 374
aaaatgcagttattgcaaactgccaggtcataaagacccagattgctattttttgcaccctaataaggctccaaaaaactggaaaactcaggaagc

SEQ ID NO: 31128 - DNA, 96 bp, Fusarium azukicola
  misc_feature: 374
gaagaggggagggaaaaaggggagaagagatagagggggttaaaagaggagagagaaggaggggagagaaagagaggaggaaaagtaaaaagaagg

SEQ ID NO: 31129 - DNA, 96 bp, Fusarium azukicola
  misc_feature: 374
aaagacccagattgctattttttgcaccctaataaagctccaaaaaactggaaaactcaggaagccaataaggtgcataagacttctaagaaaaag

SEQ ID NO: 31130 - DNA, 96 bp, Fusarium azukicola
  misc_feature: 374
atgaaggaggggaagagtaaagaaaaagagaagaagataaaaggagaaggggaagagtaaaagaaagaaaagtaagaaagtaatagaaagtaatag

SEQ ID NO: 31131 - DNA, 96 bp, Fusarium azukicola
  misc_feature: 374
ccttatacacttttcttctttattttctttaccctatactttcttcattattttactttaccctccacttttattctttattttactttaccctat

SEQ ID NO: 31132 - DNA, 96 bp, Fusarium azukicola
  misc_feature: 374
aataagctaatagctttatagaaaggataaataggactatattagaaaaggttagagctttattatttacttctaacctacctaaatacctttagg

SEQ ID NO: 31133 - DNA, 96 bp, Fusarium azukicola
  misc_feature: 374
attagaaataaccttagctgttattatatataggttatttttttcttttccttgtgatattatttttccttgcttatttaaaagaaggacttcttg

SEQ ID NO: 31134 - DNA, 96 bp, Fusarium azukicola
  misc_feature: 374
aatagaggtttaattttttcctctaataataagaacgtataaagctataacccttataagattataactttaaaggaggctattaatgttctatat

SEQ ID NO: 31135 - DNA, 96 bp, Fusarium azukicola
  misc_feature: 373
ttttattcttccttctctctcctccttctttttacttttcctcctctctttctctcccctccttctctctcctcttttaaccccctctatctcttc

SEQ ID NO: 31136 - DNA, 96 bp, Fusarium azukicola
  misc_feature: 373
ttctctttacttccctttctctttctcctccctcctcttcactccctttactcctcttaacttctctttctcttccctcttcttccctcctctccc

SEQ ID NO: 31137 - DNA, 96 bp, Fusarium azukicola
  misc_feature: 373
cagttattgcaaactgccaggtcataaagacccagattgctattttttgcaccctaataaagctccaaaaaactggaaaactcaggaagccaataa

SEQ ID NO: 31138 - DNA, 96 bp, Fusarium azukicola
  misc_feature: 373
tactataacctcttcccctaacctttactataacctcttcccctaacctttactataacctcttcccctaacctttactataacctcttcccctaa

SEQ ID NO: 31139 - DNA, 96 bp, Fusarium azukicola
  misc_feature: 373
tatacctaaaaatagagtaaaaattctataatataatatatggtttatagggatatatcactatagttggtaatataatatagaacattaacaata

SEQ ID NO: 31140 - DNA, 96 bp, Fusarium azukicola
  misc_feature: 373
aaacttaaaaaaaacgattttaactatttagctatatataagacttaaaaatattttttctaaatttttaaaaaaattccttatataggtatctta

SEQ ID NO: 31141 - DNA, 96 bp, Fusarium azukicola
  misc_feature: 373
gtagagttaagggttagggttaattggttgaaattagggttagggttaagtaggtgagttaagggttagggttaattggttgaaattagggttagg

SEQ ID NO: 31142 - DNA, 96 bp, Fusarium azukicola
  misc_feature: 373
cttaactctcctaacttcacacacttttaactccccttcctctttctccttccttctcttccctcctctttctctcaatcttcttctcttcctttc

SEQ ID NO: 31143 - DNA, 96 bp, Fusarium azukicola
  misc_feature: 373
atactctcttcttatacccttatacacttttcttctttattttctttaccctatactttcttcattattttactttaccctccacttttattcttt

SEQ ID NO: 31144 - DNA, 96 bp, Fusarium azukicola
  misc_feature: 373
aggatatttaaataaggtaaataaacctgatttttctactaataaaaataatataactaattttatatatgatacaggtgctactaggcatattgt

SEQ ID NO: 31145 - DNA, 96 bp, Fusarium azukicola
  misc_feature: 373
acgaagaagaagaattagctataaatagcttttcttatttcttttctctttcttccttcttagaattaggtttagattcctttttcttagaagtct

SEQ ID NO: 31146 - DNA, 96 bp, Fusarium azukicola
  misc_feature: 372
gaaagaagataggtagttagaagagaaagaaagaaggggaatagaaaaagaaaagaagaagaaaaagagaaatgaaggaggggaagagtaaagaaa

SEQ ID NO: 31147 - DNA, 96 bp, Fusarium azukicola
  misc_feature: 372
tttaccctcttccctaccccaatctactttttactcctcttttacctaatactcactactctctcctaactaacttaatacttactatacctccct

SEQ ID NO: 31148 - DNA, 96 bp, Fusarium azukicola
  misc_feature: 372
aattaaacctctattattattatatatatatcttagtaaaaacccctttattatagacctgatattataagggaaaatctaagattatatagggaa

SEQ ID NO: 31149 - DNA, 96 bp, Fusarium azukicola
  misc_feature: 372
gaagataggtagttagaagagaaagaaagaaggggaatagaaaaagaaaagaagaagaaaaagagaaatgaaggaggggaagagtaaagaaaaaga

SEQ ID NO: 31150 - DNA, 96 bp, Fusarium azukicola
  misc_feature: 372
tcttctcttcctttccctcttattcttttcttttattcttccttctctctcctccttctttttacttttcctcctctctttctctcccctccttct

SEQ ID NO: 31151 - DNA, 96 bp, Fusarium azukicola
  misc_feature: 372
cttaaaatgcagttattgcaaactgccaggtcataaagacccagattgctattttttgcaccctaataaggctccaaaaaactggaaaactcagga

SEQ ID NO: 31152 - DNA, 96 bp, Fusarium azukicola
  misc_feature: 372
cttttatactctcttcttatacccttatacacttttcttctttattttctttaccctatactttcttcattattttactttaccctccacttttat

SEQ ID NO: 31153 - DNA, 96 bp, Fusarium azukicola
  misc_feature: 372
ataaaaaagtttaaggagagaagttaagttaaggaggagtatagtaagtattaggagagaaaggagtatagagtaagttaaggtaaaaagaaagat

SEQ ID NO: 31154 - DNA, 96 bp, Fusarium azukicola
  misc_feature: 371
ttggttgaaattagggttaggggtagtagtagagttaagggttagggttaattggttgaaattagggttagggttaagtaggtgagttaagggtta

SEQ ID NO: 31155 - DNA, 96 bp, Fusarium azukicola
  misc_feature: 371
ttcttcccctctaccttccttactttatctttctcttctattcacttcctacctttctaatcacccttcctctactctttttcttttctctcctct

SEQ ID NO: 31156 - DNA, 96 bp, Fusarium azukicola
  misc_feature: 371
ttaactctcctaacttcacacacttttaactccccttcctctttctccttccttctcttccctcctctttctctcaatcttcttctcttcctttcc

SEQ ID NO: 31157 - DNA, 96 bp, Fusarium azukicola
  misc_feature: 371
agaaggggaatagaaaaagaaaagaagaagaaaaagagaaatgaaggaggggaagagtaaagaaaaagagaagaagataaaaggagaaggggaaga

SEQ ID NO: 31158 - DNA, 96 bp, Fusarium azukicola
  misc_feature: 371
aatttttttaaaaatttagaaaaaatatttttaagtcttatatatagctaaatagttaaaatcgttttttttaagtttctagctattttatagcga

SEQ ID NO: 31159 - DNA, 96 bp, Fusarium azukicola
  misc_feature: 371
aaaaattaaacctctattattattatatatatcttagtaaaaacccctttattatagacctaatattataagggaaaatctaagattatataggga

SEQ ID NO: 31160 - DNA, 96 bp, Fusarium azukicola
  misc_feature: 371
atcttcttctctttttctttactcttcccctccttcatttctctttttcttcttcttttctttttctattccccttctttctttctcttctaacta

SEQ ID NO: 31161 - DNA, 96 bp, Fusarium azukicola
  misc_feature: 371
gagaaagaggagggaagagaaggaaggagaaagaggaaggggagttaaaagtgtgtgaagttaggagagttaaggggaggggaagtagttcaagta

SEQ ID NO: 31162 - DNA, 96 bp, Fusarium azukicola
  misc_feature: 371
aaaaaaagtaatcttatagatctaactaaatataaaacttaaaaataatttttttagatttttaaaaaaatccctttatagcgaaataactaatta

SEQ ID NO: 31163 - DNA, 96 bp, Fusarium azukicola
  misc_feature: 371
atcctctcctctcccctctccctctctctcttttcactccttatcctctcctctcccctctccctctctctcttttcactccttcttccttcttcc

SEQ ID NO: 31164 - DNA, 96 bp, Fusarium azukicola
  misc_feature: 371
ataataatagaggtttaattttttcctctaataataagaacgtataaagctataacccttataagattataactttaaaggaggctattaatgttc

SEQ ID NO: 31165 - DNA, 96 bp, Fusarium azukicola
  misc_feature: 371
gaaaaaattaaacctctattattattatatatatcttagtaaaaacccctttattatagacctaatattataagggaaaatctaagattatatagg

SEQ ID NO: 31166 - DNA, 96 bp, Fusarium azukicola
  misc_feature: 371
ctaagatatatatataataataatagaggtttaattttttcctctaataataagaacgtataaagctataacccttataagattataactttaaag

SEQ ID NO: 31167 - DNA, 96 bp, Fusarium azukicola
  misc_feature: 371
aaaattaaacctctattattattatatatatatcttagtaaaaacccctttattatagacctgatattataagggaaaatctaagattatataggg

SEQ ID NO: 31168 - DNA, 96 bp, Fusarium azukicola
  misc_feature: 371
aggtcctagtatattattagttatattattttgttgaggaattaaggaattatatacctctaaattatcacttatatcaaaatccatttcatctgg

SEQ ID NO: 31169 - DNA, 96 bp, Fusarium azukicola
  misc_feature: 371
aataaaagaaaagaataagagggaaaggaagagaagaagattgagagaaagaggagggaagagaaggaaggagaaagaggaaggggagttaaaagt

SEQ ID NO: 31170 - DNA, 96 bp, Fusarium azukicola
  misc_feature: 370
aaaattaaacctctattattattatatatatcttagtaaaaacccctttattatagacctaatattataagggaaaatctaagattatatagggaa

SEQ ID NO: 31171 - DNA, 96 bp, Fusarium azukicola
  misc_feature: 370
ccttttatactctcttcttatacccttatacacttttcttctttattttctttaccctatactttcttcattattttactttaccctccactttta

SEQ ID NO: 31172 - DNA, 96 bp, Fusarium azukicola
  misc_feature: 370
atacacttttcttctttattttctttaccctatactttcttcattattttactttaccctccacttttattctttattttactttaccctatactc

SEQ ID NO: 31173 - DNA, 96 bp, Fusarium azukicola
  misc_feature: 370
ctgtatcatatataaaattagttatattatctttattagtagaaaaaacaggtttatttaccttatttaaatatcctagttgtttctttatatagg

SEQ ID NO: 31174 - DNA, 96 bp, Fusarium azukicola
  misc_feature: 370
ctgccaggtcataaagacccagattgctattttttgcaccctaataaggctccaaaaaactggaaaactcaggaagccaataaggtgcataagact

SEQ ID NO: 31175 - DNA, 96 bp, Fusarium azukicola
  misc_feature: 370
ctaactacctatcttctttctcttctcccttcctcccttcctcccctctctctcttatattcccttctcttccttcctctttctctttacttccct

SEQ ID NO: 31176 - DNA, 96 bp, Fusarium azukicola
  misc_feature: 370
attagggttaggggtagtagtagagttaagggttagggttaattggttgaaattagggttagggttaagtaggtgagttaagggttagggttaatt

SEQ ID NO: 31177 - DNA, 96 bp, Fusarium azukicola
  misc_feature: 370
aggaaaagagaaaaataacctatatataataacagctaaggttatttctaataagaataactatagactaagagataacttagatcttcctatctt

SEQ ID NO: 31178 - DNA, 96 bp, Fusarium azukicola
  misc_feature: 369
ttatctttctcttctattcacttcctacctttctaatcacccttcctctactctttttcttttctctcctctcccctctccctctctctcttttca

SEQ ID NO: 31179 - DNA, 96 bp, Fusarium azukicola
  misc_feature: 369
ttactttatctttctcttctattcacttcctacctttctaatcacccttcctctactctttttcttttctctcctctcccctctccctctctctct

SEQ ID NO: 31180 - DNA, 96 bp, Fusarium azukicola
  misc_feature: 369
tatataaggaatttttttaaaaatttagaaaaaatatttttaagtcttatatatagctaaatagttaaaatcgttttttttaagtttctagctatt

SEQ ID NO: 31181 - DNA, 96 bp, Fusarium azukicola
  misc_feature: 369
accctctcttttcttctttaacctaactcacctacttaaccctaaccctaatttcaaccaattaaccctaacccttaactcacctacttaacccta

SEQ ID NO: 31182 - DNA, 96 bp, Fusarium azukicola
  misc_feature: 369
tactactttctaaccctctcttttcttctttaacctaactcacctacttaaccctaaccctaatttcaaccaattaaccctaacccttaactcacc

SEQ ID NO: 31183 - DNA, 96 bp, Fusarium azukicola
  misc_feature: 369
tacctatcttctttctcttctcccttcctcccttcctcccctctctctcttatattcccttctcttccttcctctttctctttacttccctttctc

SEQ ID NO: 31184 - DNA, 96 bp, Fusarium azukicola
  misc_feature: 369
ggatatttaaataaggtaaataaacctgatttttctactaataaaaataatataactaattttatatatgatacaggtgctactaggcatattgta

SEQ ID NO: 31185 - DNA, 96 bp, Fusarium azukicola
  misc_feature: 369
aacttgtattccttattactaggttttttatttatattatttttagttaattttcctagtttgcagttttcacagtttttaacttgatataggtcc

SEQ ID NO: 31186 - DNA, 96 bp, Fusarium azukicola
  misc_feature: 369
ataatattaggtctataataaaggggtttttactaagatatatataataataatagaggtttaattttttcctctaataataagaacgtataaagc

SEQ ID NO: 31187 - DNA, 96 bp, Fusarium azukicola
  misc_feature: 369
gagggtaaaggaaaggtagtgtagagaagagtaaaaagagaagttataaagagttattaagaaagggagggtgggggaaaaaagaggaaggatagg

SEQ ID NO: 31188 - DNA, 96 bp, Fusarium azukicola
  misc_feature: 369
acttcctacctttctaatcacccttcctctactctttttcttttctctcctctcccctctccctctctctcttttcactccttatcctctcctctc

SEQ ID NO: 31189 - DNA, 96 bp, Fusarium azukicola
  misc_feature: 369
cttttattcttccttctctctcctccttctttttacttttcctcctctctttctctcccctccttctctctcctcttttaaccccctctatctctt

SEQ ID NO: 31190 - DNA, 96 bp, Fusarium azukicola
  misc_feature: 369
cttcctctttctctttacttccctttctctttctcctccctcctcttcactccctttactcctcttaacttctctttctcttccctcttcttccct

SEQ ID NO: 31191 - DNA, 96 bp, Fusarium azukicola
  misc_feature: 369
cccttcctctactctttttcttttctctcctctcccctctccctctctctcttttcactccttatcctctcctctcccctctccctctctctcttt

SEQ ID NO: 31192 - DNA, 96 bp, Fusarium azukicola
  misc_feature: 369
ccagattgctattttttgcaccctaataaggctccaaaaaactggaaaactcaggaagccaataaggtgcataagacttctaagaaaagggaatct

SEQ ID NO: 31193 - DNA, 96 bp, Fusarium azukicola
  misc_feature: 369
cacttttcttctttattttctttaccctatactttcttcattattttactttaccctccacttttattctttattttactttaccctatactctct

SEQ ID NO: 31194 - DNA, 96 bp, Fusarium azukicola
  misc_feature: 369
atataaggaatttttttaaaaatttagaaaaaatatttttaagtcttatatatagctaaatagttaaaatcgttttttttaagtttctagctattt

SEQ ID NO: 31195 - DNA, 96 bp, Fusarium azukicola
  misc_feature: 369
actactttctaaccctctcttttcttctttaacctaactcacctacttaaccctaaccctaatttcaaccaattaaccctaacccttaactcacct

SEQ ID NO: 31196 - DNA, 96 bp, Fusarium azukicola
  misc_feature: 368
tttttattagtagaaaaatcaggtttatttaccttatttaaatatcctagttgtttctttatatagggaaggtttcttattaaaggtcctagtata

SEQ ID NO: 31197 - DNA, 96 bp, Fusarium azukicola
  misc_feature: 368
ttctcttctcccctcctcttcttaactacactttctctctacctcacttttccctctttatattaaccctctcccttctttctcttcctcttctct

SEQ ID NO: 31198 - DNA, 96 bp, Fusarium azukicola
  misc_feature: 368
ggaggagagagaaggaagaataaaagaaaagaataagagggaaaggaagagaagaagattgagagaaagaggagggaagagaaggaaggagaaaga

SEQ ID NO: 31199 - DNA, 96 bp, Fusarium azukicola
  misc_feature: 368
agaaggaagaataaaagaaaagaataagagggaaaggaagagaagaagattgagagaaagaggagggaagagaaggaaggagaaagaggaagggga

SEQ ID NO: 31200 - DNA, 96 bp, Fusarium azukicola
  misc_feature: 368
tagctttatacgttcttattattagaggaaaaaattaaacctctattattattatatatatcttagtaaaaacccctttattatagacctaatatt

SEQ ID NO: 31201 - DNA, 96 bp, Fusarium azukicola
  misc_feature: 368
aaaggaggctgttaatgttctatattatattaccaactatagtgatatatccctataaaccatatattatattatagaatttttactctattttta

SEQ ID NO: 31202 - DNA, 96 bp, Fusarium azukicola
  misc_feature: 368
ggctgaggtccagaaccttcgacagtcaaataaggcccttagcaagcggcgtagaggaaaaagaacccgcctacaagatagagggaagatgactgt

SEQ ID NO: 31203 - DNA, 96 bp, Fusarium azukicola
  misc_feature: 368
gaggtactatatactaaaactaggttttttaaaaaatcctagaaaattcaaactaactctaaaatagctaaaatttaaagtttagacttattatat

SEQ ID NO: 31204 - DNA, 96 bp, Fusarium azukicola
  misc_feature: 368
aaactaactccctatccttcctcttttttcccccaccctccctttcttaataactctttataacttctctttttactcttctctacactacctttc

SEQ ID NO: 31205 - DNA, 96 bp, Fusarium azukicola
  misc_feature: 368
ctctttctcctccctcctcttcactccctttactcctcttaacttctctttctcttccctcttcttccctcctctccctctctcctttcccctcct

SEQ ID NO: 31206 - DNA, 96 bp, Fusarium azukicola
  misc_feature: 368
ctctctcctccttctttttacttttcctcctctctttctctcccctccttctctctcctcttttaaccccctctatctcttctcccctttttccct

SEQ ID NO: 31207 - DNA, 96 bp, Fusarium azukicola
  misc_feature: 368
aagacttaaggaggtataaagtcttagaaaagacttaaaaaagaagtataatcttcttttaagtataaacccttaggaagagacctccgggctcat

SEQ ID NO: 31208 - DNA, 96 bp, Fusarium azukicola
  misc_feature: 367
ttaatgagattccttactttaaagaaagcccctataataatgaaaaggcaatattatataataataataataataaacagaaattcactatcgaaa

SEQ ID NO: 31209 - DNA, 96 bp, Fusarium azukicola
  misc_feature: 367
ttcgatagtgaatttctgtttattattattattattatataatattgccttttcattattataggggctttctttaaagtaaggaatctcattaaa

SEQ ID NO: 31210 - DNA, 96 bp, Fusarium azukicola
  misc_feature: 367
ttcttctttattttctttaccctatactttcttcattattttactttaccctccacttttattctttattttactttaccctatactctcttctct

SEQ ID NO: 31211 - DNA, 96 bp, Fusarium azukicola
  misc_feature: 367
gaaggggagggttagaagggttaagaaaggagagaagtaaggaaggttaagaaaggagagaagtaaggaaggttaagaaaggagagaagtaaggaa

SEQ ID NO: 31212 - DNA, 96 bp, Fusarium azukicola
  misc_feature: 367
tctctcccctccttctctctcctcttttaaccccctctatctcttctcccctttttccctcccctcttcctctactttctttctcttctcccctcc

SEQ ID NO: 31213 - DNA, 96 bp, Fusarium azukicola
  misc_feature: 367
agtgatatatccctataaactatatattatattatagaatttttactctatttttaggtatatttacctaacctatagctactataggtagctaga

SEQ ID NO: 31214 - DNA, 96 bp, Fusarium azukicola
  misc_feature: 367
tccttttatactctcttcttatacccttatacacttttcttctttattttctttaccctatactttcttcattattttactttaccctccactttt

SEQ ID NO: 31215 - DNA, 96 bp, Fusarium azukicola
  misc_feature: 367
tagtgttaatgttctatattatattaccaactatagtgatatatccctataaaccacatattatattatagaatttttactctatttttaggtata

SEQ ID NO: 31216 - DNA, 96 bp, Fusarium azukicola
  misc_feature: 367
tagactatataataagtctaaactttaaattttagctattttagagttagtttgaattttctaggattttttaaaaaacctagttttagtatatag

SEQ ID NO: 31217 - DNA, 96 bp, Fusarium azukicola
  misc_feature: 367
acctacttaaccctaaccctaatttcaaccaattaaccctaacccttaactcacctacttaaccctaaccctaatttcaaccaattaaccctaacc

SEQ ID NO: 31218 - DNA, 96 bp, Fusarium azukicola
  misc_feature: 367
aactaactccctatccttcctcttttttcccccaccctccctttcttaataactctttataacttctctttttactcttctctacactacctttcc

SEQ ID NO: 31219 - DNA, 96 bp, Fusarium azukicola
  misc_feature: 367
aaactcaggaagccaataaggtgcataagacttctaagaaaaaggaatctaaacctaattctaagaaggaagaaagagaaaagaaacaagaaaagc

SEQ ID NO: 31220 - DNA, 96 bp, Fusarium azukicola
  misc_feature: 367
ataaggagtgaaaagagagagagggagaggggagaggagaggataaggagtgaaaagagagagagggagaggggagaggagagaaaagaaaaagag

SEQ ID NO: 31221 - DNA, 96 bp, Fusarium azukicola
  misc_feature: 367
ccttccttactttatctttctcttctattcacttcctacctttctaatcacccttcctctactctttttcttttctctcctctcccctctccctct

SEQ ID NO: 31222 - DNA, 96 bp, Fusarium azukicola
  misc_feature: 366
gttcttattattagaggaaaaaattaaacctctattattattatatatatcttagtaaaaacccctttattatagacctaatattataagggaaaa

SEQ ID NO: 31223 - DNA, 96 bp, Fusarium azukicola
  misc_feature: 366
tcttcccctccttcatttctctttttcttcttcttttctttttctattccccttctttctttctcttctaactacctatcttctttctcttctccc

SEQ ID NO: 31224 - DNA, 96 bp, Fusarium azukicola
  misc_feature: 366
agacccagattgctattttttgcaccctaataaagctccaaaaaactggaaaactcaggaagccaataaggtgcataagacttctaagaaaaagga

SEQ ID NO: 31225 - DNA, 96 bp, Fusarium azukicola
  misc_feature: 366
tcactccttatcctctcctctcccctctccctctctctcttttcactccttatcctctcctctcccctctccctctctctcttttcactccttctc

SEQ ID NO: 31226 - DNA, 96 bp, Fusarium azukicola
  misc_feature: 366
tactctcttcttatacccttatacacttttcttctttattttctttaccctatactttcttcattattttactttaccctccacttttattcttta

SEQ ID NO: 31227 - DNA, 96 bp, Fusarium azukicola
  misc_feature: 366
gtgatatatccctataaactatatattatattatagaatttttactctatttttaggtatatttacctaacctatagctactataggtagctagat

SEQ ID NO: 31228 - DNA, 96 bp, Fusarium azukicola
  misc_feature: 366
ctttttctttactcttcccctccttcatttctctttttcttcttcttttctttttctattccccttctttctttctcttctaactacctatcttct

SEQ ID NO: 31229 - DNA, 96 bp, Fusarium azukicola
  misc_feature: 366
cttctttattttctttaccctatactttcttcattattttactttaccctccacttttattctttattttactttaccctatactctcttctctct

SEQ ID NO: 31230 - DNA, 96 bp, Fusarium azukicola
  misc_feature: 366
ctacttaaccctaaccctaatttcaaccaattaaccctaacccttaactcacctacttaaccctaaccctaatttcaaccaattaaccctaaccct

SEQ ID NO: 31231 - DNA, 96 bp, Fusarium azukicola
  misc_feature: 366
actctcttcttatacccttatacacttttcttctttattttctttaccctatactttcttcattattttactttaccctccacttttattctttat

SEQ ID NO: 31232 - DNA, 96 bp, Fusarium azukicola
  misc_feature: 366
agaaacttaaaaaaaacgattttaactatttagctatatataagacttaaaaatattttttctaaatttttaaaaaaattccttatataggtatct

SEQ ID NO: 31233 - DNA, 96 bp, Fusarium azukicola
  misc_feature: 366
accctcttccctaccccaatctactttttactcctcttttacctaatactcactactctctcctaactaacttaatacttactatacctccctctt

SEQ ID NO: 31234 - DNA, 96 bp, Fusarium azukicola
  misc_feature: 365
gagaaagaaagaaggggaatagaaaaagaaaagaagaagaaaaagagaaatgaaggaggggaagagtaaagaaaaagagaagaagataaaaggaga

SEQ ID NO: 31235 - DNA, 96 bp, Fusarium azukicola
  misc_feature: 365
agaggtactatatactaaaactaggttttttaaaaaatcctagaaaattcaaactaactctaaaatagctaaaatttaaagtttagacttattata

SEQ ID NO: 31236 - DNA, 96 bp, Fusarium azukicola
  misc_feature: 365
tactctttttcttttctctcctctcccctctccctctctctcttttcactccttatcctctcctctcccctctccctctctctcttttcactcctt

SEQ ID NO: 31237 - DNA, 96 bp, Fusarium azukicola
  misc_feature: 365
agagagaaggaagaataaaagaaaagaataagagggaaaggaagagaagaagattgagagaaagaggagggaagagaaggaaggagaaagaggaag

SEQ ID NO: 31238 - DNA, 96 bp, Fusarium azukicola
  misc_feature: 365
cttccctttctctttctcctccctcctcttcactccctttactcctcttaacttctctttctcttccctcttcttccctcctctccctctctcctt

SEQ ID NO: 31239 - DNA, 96 bp, Fusarium azukicola
  misc_feature: 365
ctgatttttctactaataaaaataatataactaattttatatatgatacaggtgctactaggcatattgtatgtagaaaagaatttctagttaatt

SEQ ID NO: 31240 - DNA, 96 bp, Fusarium azukicola
  misc_feature: 365
ctcttcctttccctcttattcttttcttttattcttccttctctctcctccttctttttacttttcctcctctctttctctcccctccttctctct

SEQ ID NO: 31241 - DNA, 96 bp, Fusarium azukicola
  misc_feature: 365
agtgtagttaagaagaggaggggagaagagaaagaaagtagaggaagaggggagggaaaaaggggagaagagatagagggggttaaaagaggagag

SEQ ID NO: 31242 - DNA, 96 bp, Fusarium azukicola
  misc_feature: 365
agagaaagaggagggaagagaaggaaggagaaagaggaaggggagttaaaagtgtgtgaagttaggagagttaaggggaggggaagtagttcaagt

SEQ ID NO: 31243 - DNA, 96 bp, Fusarium azukicola
  misc_feature: 364
ttgaaattagggttaggggtagtagtagagttaagggttagggttaattggttgaaattagggttagggttaagtaggtgagttaagggttagggt

SEQ ID NO: 31244 - DNA, 96 bp, Fusarium azukicola
  misc_feature: 364
ttatcttcttctctttttctttactcttcccctccttcatttctctttttcttcttcttttctttttctattccccttctttctttctcttctaac

SEQ ID NO: 31245 - DNA, 96 bp, Fusarium azukicola
  misc_feature: 364
ttaaaggaggctgttaatgttctatattatattaccaactatagtgatatatccctataaaccatatattatattatagaatttttactctatttt

SEQ ID NO: 31246 - DNA, 96 bp, Fusarium azukicola
  misc_feature: 364
aagtcttatgcaccttattggcttcctgagttttccagttttttggagccttattagggtgcaaaaaatagcaatctgggtctttatgacctggca

SEQ ID NO: 31247 - DNA, 96 bp, Fusarium azukicola
  misc_feature: 364
tccttcctctttctctttacttccctttctctttctcctccctcctcttcactccctttactcctcttaacttctctttctcttccctcttcttcc

SEQ ID NO: 31248 - DNA, 96 bp, Fusarium azukicola
  misc_feature: 364
agaaggggagggttagaagggttaagaaaggagagaagtaaggaaggttaagaaaggagagaagtaaggaaggttaagaaaggagagaagtaagga

SEQ ID NO: 31249 - DNA, 96 bp, Fusarium azukicola
  misc_feature: 364
tatctttctcttctattcacttcctacctttctaatcacccttcctctactctttttcttttctctcctctcccctctccctctctctcttttcac

SEQ ID NO: 31250 - DNA, 96 bp, Fusarium azukicola
  misc_feature: 364
ccttctctctcctcttttaaccccctctatctcttctcccctttttccctcccctcttcctctactttctttctcttctcccctcctcttcttaac

SEQ ID NO: 31251 - DNA, 96 bp, Fusarium azukicola
  misc_feature: 364
ggtaaagtaaaataaagaataaaagtggagggtaaagtaaaataatgaagaaagtatagggtaaagaaaataaagaagaaaagtgtataagggtat

SEQ ID NO: 31252 - DNA, 96 bp, Fusarium azukicola
  misc_feature: 364
ggggagaagagaaagaaagtagaggaagaggggagggaaaaaggggagaagagatagagggggttaaaagaggagagagaaggaggggagagaaag

SEQ ID NO: 31253 - DNA, 96 bp, Fusarium azukicola
  misc_feature: 364
ctttctctctacctcacttttccctctttatattaaccctctcccttctttctcttcctcttctctccctctttactcctcttcttctcttctccc

SEQ ID NO: 31254 - DNA, 96 bp, Fusarium azukicola
  misc_feature: 364
ctcttcccctccttcatttctctttttcttcttcttttctttttctattccccttctttctttctcttctaactacctatcttctttctcttctcc

SEQ ID NO: 31255 - DNA, 96 bp, Fusarium azukicola
  misc_feature: 364
gaagtcttatgcaccttattggcttcctgagttttccagttttttggagctttattagggtgcaaaaaatagcaatctgggtctttatgacctggc

SEQ ID NO: 31256 - DNA, 96 bp, Fusarium azukicola
  misc_feature: 364
gagagaaggaagaataaaagaaaagaataagagggaaaggaagagaagaagattgagagaaagaggagggaagagaaggaaggagaaagaggaagg

SEQ ID NO: 31257 - DNA, 96 bp, Fusarium azukicola
  misc_feature: 364
cccctttttccctcccctcttcctctactttctttctcttctcccctcctcttcttaactacactttctctctacctcacttttccctctttatat

SEQ ID NO: 31258 - DNA, 96 bp, Fusarium azukicola
  misc_feature: 364
aggaagggaggaagggagaagagaaagaagataggtagttagaagagaaagaaagaaggggaatagaaaaagaaaagaagaagaaaaagagaaatg

SEQ ID NO: 31259 - DNA, 96 bp, Fusarium azukicola
  misc_feature: 364
catatataaaattagttatattatttttattagtagaaaaatcaggtttatttaccttatttaaatatcctagttgtttctttatatagggaaggt

SEQ ID NO: 31260 - DNA, 96 bp, Fusarium azukicola
  misc_feature: 364
cacttcctacctttctaatcacccttcctctactctttttcttttctctcctctcccctctccctctctctcttttcactccttatcctctcctct

SEQ ID NO: 31261 - DNA, 96 bp, Fusarium azukicola
  misc_feature: 364
atagaggtttaattttttcctctaataataagaacgtataaagctataacccttataagattataactttaaaggaggctattaatgttctatatt

SEQ ID NO: 31262 - DNA, 96 bp, Fusarium azukicola
  misc_feature: 363
tgcagttattgcaaactgccaggtcataaagacccagattgctattttttgcaccctaataaagctccaaaaaactggaaaactcaggaagccaat

SEQ ID NO: 31263 - DNA, 96 bp, Fusarium azukicola
  misc_feature: 363
tactatatactaaaactaggttttttaaaaaatcctagaaaattcaaactaactctaaaatagctaaaatttaaagtttagacttattatatagtc

SEQ ID NO: 31264 - DNA, 96 bp, Fusarium azukicola
  misc_feature: 363
ctcccctcttcctctactttctttctcttctcccctcctcttcttaactacactttctctctacctcacttttccctctttatattaaccctctcc

SEQ ID NO: 31265 - DNA, 96 bp, Fusarium azukicola
  misc_feature: 363
cttctaactacctatcttctttctcttctcccttcctcccttcctcccctctctctcttatattcccttctcttccttcctctttctctttacttc

SEQ ID NO: 31266 - DNA, 96 bp, Fusarium azukicola
  misc_feature: 363
gaagagaaagaaagaaggggaatagaaaaagaaaagaagaagaaaaagagaaatgaaggaggggaagagtaaagaaaaagagaagaagataaaagg

SEQ ID NO: 31267 - DNA, 96 bp, Fusarium azukicola
  misc_feature: 363
cgatagtgaatttctgtttattattattattattatataatattgccttttcattattataggggctttctttaaagtaaggaatctcattaaaag

SEQ ID NO: 31268 - DNA, 96 bp, Fusarium azukicola
  misc_feature: 363
agggtaaagtaaaataaagaataaaagtggagggtaaagtaaaataatgaagaaagtatagggtaaagaaaataaagaagaaaagtgtataagggt

SEQ ID NO: 31269 - DNA, 96 bp, Fusarium azukicola
  misc_feature: 362
ttctctcccctccttctctctcctcttttaaccccctctatctcttctcccctttttccctcccctcttcctctactttctttctcttctcccctc

SEQ ID NO: 31270 - DNA, 96 bp, Fusarium azukicola
  misc_feature: 362
acaagaagtccttcttttaaataagcaaggaaaaataatatcacaaggaaaagaaaaaaataacctatatataataacagctaaggttatttctaa

SEQ ID NO: 31271 - DNA, 96 bp, Fusarium azukicola
  misc_feature: 362
tgaaattagggttaggggtagtagtagagttaagggttagggttaattggttgaaattagggttagggttaagtaggtgagttaagggttagggtt

SEQ ID NO: 31272 - DNA, 96 bp, Fusarium azukicola
  misc_feature: 362
tcttctaactacctatcttctttctcttctcccttcctcccttcctcccctctctctcttatattcccttctcttccttcctctttctctttactt

SEQ ID NO: 31273 - DNA, 96 bp, Fusarium azukicola
  misc_feature: 362
ggagtgaaaagagagagagggagaggggagaggagaggataaggagtgaaaagagagagagggagaggggagaggagagaaaagaaaaagagtaga

SEQ ID NO: 31274 - DNA, 96 bp, Fusarium azukicola
  misc_feature: 362
ggaagggaggaagggagaagagaaagaagataggtagttagaagagaaagaaagaaggggaatagaaaaagaaaagaagaagaaaaagagaaatga

SEQ ID NO: 31275 - DNA, 96 bp, Fusarium azukicola
  misc_feature: 362
tattgcaaactgccaggtcataaagacccagattgctattttttgcaccctaataaagctccaaaaaactggaaaactcaggaagccaataaggtg

SEQ ID NO: 31276 - DNA, 96 bp, Fusarium azukicola
  misc_feature: 362
tatactctcttctctcttttactttaccctatactctcttctctcttttactttaccctctacttttattctttattttactttaccctatactct

SEQ ID NO: 31277 - DNA, 96 bp, Fusarium azukicola
  misc_feature: 362
tagagttaagggttagggttaattggttgaaattagggttagggttaagtaggtgagttaagggttagggttaattggttgaaattagggttaggg

SEQ ID NO: 31278 - DNA, 96 bp, Fusarium azukicola
  misc_feature: 362
cacctacttaaccctaaccctaatttcaaccaattaaccctaacccttaactcacctacttaaccctaaccctaatttcaaccaattaaccctaac

SEQ ID NO: 31279 - DNA, 96 bp, Fusarium azukicola
  misc_feature: 362
actataacctcttcccctaacctttactataacctcttcccctaacctttactataacctcttcccctaacctttactataacctcttcccctaac

SEQ ID NO: 31280 - DNA, 96 bp, Fusarium azukicola
  misc_feature: 362
gtatttctataaatctaactcttaataaagtctaaaaatgatttttttagatttttaaaaaattctgtttatagtgaaatagttaattacacagtg

SEQ ID NO: 31281 - DNA, 96 bp, Fusarium azukicola
  misc_feature: 362
gtaagagagtaagaaagtagtagtaaaagaagagaaaggggaaggagaaagaagagaaaaaagtaagttaaggtaaaagagtagtatttaataggg

SEQ ID NO: 31282 - DNA, 96 bp, Fusarium azukicola
  misc_feature: 362
agggaggaagggagaagagaaagaagataggtagttagaagagaaagaaagaaggggaatagaaaaagaaaagaagaagaaaaagagaaatgaagg

SEQ ID NO: 31283 - DNA, 96 bp, Fusarium azukicola
  misc_feature: 362
cccttaactctcctaacttcacacacttttaactccccttcctctttctccttccttctcttccctcctctttctctcaatcttcttctcttcctt

SEQ ID NO: 31284 - DNA, 96 bp, Fusarium azukicola
  misc_feature: 361
tcccttctttctcttcctcttctctccctctttactcctcttcttctcttctccccttcctctcctctcttcctctcctctatacttacttactaa

SEQ ID NO: 31285 - DNA, 96 bp, Fusarium azukicola
  misc_feature: 361
aacttaaaaaaaacgattttaactatttagctatatataagacttaaaaatattttttctaaatttttaaaaaaattccttatataggtatcttaa

SEQ ID NO: 31286 - DNA, 96 bp, Fusarium azukicola
  misc_feature: 361
tggttgaaattagggttaggggtagtagtagagttaagggttagggttaattggttgaaattagggttagggttaagtaggtgagttaagggttag

SEQ ID NO: 31287 - DNA, 96 bp, Fusarium azukicola
  misc_feature: 361
cttctttaacctaactcacctacttaaccctaaccctaatttcaaccaattaaccctaacccttaactcacctacttaaccctaaccctaatttca

SEQ ID NO: 31288 - DNA, 96 bp, Fusarium azukicola
  misc_feature: 361
gggagaagagaaagaaagtagaggaagaggggagggaaaaaggggagaagagatagagggggttaaaagaggagagagaaggaggggagagaaaga

SEQ ID NO: 31289 - DNA, 96 bp, Fusarium azukicola
  misc_feature: 361
tctttctcctccctcctcttcactccctttactcctcttaacttctctttctcttccctcttcttccctcctctccctctctcctttcccctcctc

SEQ ID NO: 31290 - DNA, 96 bp, Fusarium azukicola
  misc_feature: 361
tcttcctttccctcttattcttttcttttattcttccttctctctcctccttctttttacttttcctcctctctttctctcccctccttctctctc

SEQ ID NO: 31291 - DNA, 96 bp, Fusarium azukicola
  misc_feature: 361
tctcttctaactacctatcttctttctcttctcccttcctcccttcctcccctctctctcttatattcccttctcttccttcctctttctctttac

SEQ ID NO: 31292 - DNA, 96 bp, Fusarium azukicola
  misc_feature: 361
acactgtgtaattaactatttcactataaacagaattttttaaaaatctaaaaaaatcatttttagactttattaagagttagatttatagaaata

SEQ ID NO: 31293 - DNA, 96 bp, Fusarium azukicola
  misc_feature: 361
tactttatctttctcttctattcacttcctacctttctaatcacccttcctctactctttttcttttctctcctctcccctctccctctctctctt

SEQ ID NO: 31294 - DNA, 96 bp, Fusarium azukicola
  misc_feature: 361
ggagagagggagaggagggaagaagagggaagagaaagagaagttaagaggagtaaagggagtgaagaggagggaggagaaagagaaagggaagta

SEQ ID NO: 31295 - DNA, 96 bp, Fusarium azukicola
  misc_feature: 361
gggtaaagtaaaataaagaataaaagtggagggtaaagtaaaataatgaagaaagtatagggtaaagaaaataaagaagaaaagtgtataagggta

SEQ ID NO: 31296 - DNA, 96 bp, Fusarium azukicola
  misc_feature: 361
taacctcactacttttttttcttttccttactctctccttataaccctttcctactcttctcctactctcttaccttaactccccctctcttctac

SEQ ID NO: 31297 - DNA, 96 bp, Fusarium azukicola
  misc_feature: 361
ataatatagaacattaatagcctcctttaaagttataatcttataagggttatagctttatacgttcttattattagaggaaaaaattaaacctct

SEQ ID NO: 31298 - DNA, 96 bp, Fusarium azukicola
  misc_feature: 361
actcttccccttctccttttatcttcttctctttttctttactcttcccctccttcatttctctttttcttcttcttttctttttctattcccctt

SEQ ID NO: 31299 - DNA, 96 bp, Fusarium azukicola
  misc_feature: 360
agaataaaagaaaagaataagagggaaaggaagagaagaagattgagagaaagaggagggaagagaaggaaggagaaagaggaaggggagttaaaa

SEQ ID NO: 31300 - DNA, 96 bp, Fusarium azukicola
  misc_feature: 360
aaagaaagtagaggaagaggggagggaaaaaggggagaagagatagagggggttaaaagaggagagagaaggaggggagagaaagagaggaggaaa

SEQ ID NO: 31301 - DNA, 96 bp, Fusarium azukicola
  misc_feature: 360
tcttcttatacccttatacacttttcttctttattttctttaccctatactttcttcattattttactttaccctccacttttattctttatttta

SEQ ID NO: 31302 - DNA, 96 bp, Fusarium azukicola
  misc_feature: 360
tactcttttatctttacttactataacttctcaattactctacctcctctctctctctttcttctttttttttctccccctttttttttttccctc

SEQ ID NO: 31303 - DNA, 96 bp, Fusarium azukicola
  misc_feature: 360
tacacttttcttctttattttctttaccctatactttcttcattattttactttaccctccacttttattctttattttactttaccctatactct

SEQ ID NO: 31304 - DNA, 96 bp, Fusarium azukicola
  misc_feature: 360
aactccctatccttcctcttttttcccccaccctccctttcttaataactctttataacttctctttttactcttctctacactacctttccttta

SEQ ID NO: 31305 - DNA, 96 bp, Fusarium azukicola
  misc_feature: 360
ggtactatatactaaaactaggttttttaaaaaatcctagaaaattcaaactaactctaaaatagctaaaatttaaagtttagacttattatatag

SEQ ID NO: 31306 - DNA, 96 bp, Fusarium azukicola
  misc_feature: 360
aatattatctctaacttctagaggggatttattatttaaagccgaatgcgggcttctattatatatatatacggctgcttccacagcctctccccc

SEQ ID NO: 31307 - DNA, 96 bp, Fusarium azukicola
  misc_feature: 360
ctttctcctccctcctcttcactccctttactcctcttaacttctctttctcttccctcttcttccctcctctccctctctcctttcccctcctct

SEQ ID NO: 31308 - DNA, 96 bp, Fusarium azukicola
  misc_feature: 360
agaagagaaagaaagtagaggaagaggggagggaaaaaggggagaagagatagagggggttaaaagaggagagagaaggaggggagagaaagagag

SEQ ID NO: 31309 - DNA, 96 bp, Fusarium azukicola
  misc_feature: 360
ctctcttcttatacccttatacacttttcttctttattttctttaccctatactttcttcattattttactttaccctccacttttattctttatt

SEQ ID NO: 31310 - DNA, 96 bp, Fusarium azukicola
  misc_feature: 360
cctatatcaagttaaaaactgtgaaaactgcaaactaggaaaattaactaaaaataatataaataaaaaacctagtaataaggaatacaagttcct

SEQ ID NO: 31311 - DNA, 96 bp, Fusarium azukicola
  misc_feature: 359
tttactactttctaaccctctcttttcttctttaacctaactcacctacttaaccctaaccctaatttcaaccaattaaccctaacccttaactca

SEQ ID NO: 31312 - DNA, 96 bp, Fusarium azukicola
  misc_feature: 359
ccctctcttttcttctttaacctaactcacctacttaaccctaaccctaatttcaaccaattaaccctaacccttaactcacctacttaaccctaa

SEQ ID NO: 31313 - DNA, 96 bp, Fusarium azukicola
  misc_feature: 359
accccatatatcagtagctattttatctaggaacttgtattccttattactaggttttttatttatattatttttagttaattttcctagtttgca

SEQ ID NO: 31314 - DNA, 96 bp, Fusarium azukicola
  misc_feature: 359
tcccctccttctctctcctcttttaaccccctctatctcttctcccctttttccctcccctcttcctctactttctttctcttctcccctcctctt

SEQ ID NO: 31315 - DNA, 96 bp, Fusarium azukicola
  misc_feature: 359
taataatagaggtttaattttttcctctaataataagaacgtataaagctataacccttataagattataactttaaaggaggctattaatgttct

SEQ ID NO: 31316 - DNA, 96 bp, Fusarium azukicola
  misc_feature: 359
taacttaagaagtctaattaaatatataaaaataaaagatcctctctttaaatatactagtgaggacctatatcaagttaaaaactgtgaaaactg

SEQ ID NO: 31317 - DNA, 96 bp, Fusarium azukicola
  misc_feature: 359
ctgccttaaaatgcagttattgcaaactgccaggtcataaagacccagattgctattttttgcaccctaataaagctccaaaaaactggaaaactc

SEQ ID NO: 31318 - DNA, 96 bp, Fusarium azukicola
  misc_feature: 359
cttataagacttactattgaagatggtcctcttcttcaaataaagcatattgagactgcttataaggcttgggaagccttaaaaaacctatataat

SEQ ID NO: 31319 - DNA, 96 bp, Fusarium azukicola
  misc_feature: 358
tttaccctatactctcttctctcttttactttaccctatactctcttctctcttttactttaccctctacttttattctttattttactttaccct

SEQ ID NO: 31320 - DNA, 96 bp, Fusarium azukicola
  misc_feature: 358
actaagatatatatataataataatagaggtttaattttttcctctaataataagaacgtataaagctataacccttataagattataactttaaa

SEQ ID NO: 31321 - DNA, 96 bp, Fusarium azukicola
  misc_feature: 358
ttattgcaaactgccaggtcataaagacccagattgctattttttgcaccctaataaagctccaaaaaactggaaaactcaggaagccaataaggt

SEQ ID NO: 31322 - DNA, 96 bp, Fusarium azukicola
  misc_feature: 358
tcttttcttctttaacctaactcacctacttaaccctaaccctaatttcaaccaattaaccctaacccttaactcacctacttaaccctaacccta

SEQ ID NO: 31323 - DNA, 96 bp, Fusarium azukicola
  misc_feature: 358
tctaaaagtctatctattaaggaataagttagaagctattataaaatttaaggaatttagaaaagaaatagaaaataatcctaataaaataagaat

SEQ ID NO: 31324 - DNA, 96 bp, Fusarium azukicola
  misc_feature: 358
tcccctcttcctctactttctttctcttctcccctcctcttcttaactacactttctctctacctcacttttccctctttatattaaccctctccc

SEQ ID NO: 31325 - DNA, 96 bp, Fusarium azukicola
  misc_feature: 358
aggtactatatactaaaactaggttttttaaaaaatcctagaaaattcaaactaactctaaaatagctaaaatttaaagtttagacttattatata

SEQ ID NO: 31326 - DNA, 96 bp, Fusarium azukicola
  misc_feature: 358
aaaactggaaaactcaggaagccaataaggtgcataagacttctaagaaaaaggaatctaaacctaattctaagaaggaagaaagagaaaagaaac

SEQ ID NO: 31327 - DNA, 96 bp, Fusarium azukicola
  misc_feature: 358
gtcatcttaacttaagaagtctaattaaatatataaaaataaaagatcctctctttaaatatactagtgaggacctatatcaagttaaaaactgtg

SEQ ID NO: 31328 - DNA, 96 bp, Fusarium azukicola
  misc_feature: 358
gggagagaaagagaggaggaaaagtaaaaagaaggaggagagagaaggaagaataaaagaaaagaataagagggaaaggaagagaagaagattgag

SEQ ID NO: 31329 - DNA, 96 bp, Fusarium azukicola
  misc_feature: 358
atacctatataaggaatttttttaaaaatttagaaaaaatatttttaagtcttatatatagctaaatagttaaaatcgttttttttaagtttctag

SEQ ID NO: 31330 - DNA, 96 bp, Fusarium azukicola
  misc_feature: 358
cctcttccctaccccaatctactttttactcctcttttacctaatactcactactctctcctaactaacttaatacttactatacctccctcttat

SEQ ID NO: 31331 - DNA, 96 bp, Fusarium azukicola
  misc_feature: 358
aaggaagaataaaagaaaagaataagagggaaaggaagagaagaagattgagagaaagaggagggaagagaaggaaggagaaagaggaaggggagt

SEQ ID NO: 31332 - DNA, 96 bp, Fusarium azukicola
  misc_feature: 357
ttggaaaaagaagaaaactgccttaaaatgcagttattgcaaactgccaggtcataaagacccagattgctattttttgcaccctaataaagctcc

SEQ ID NO: 31333 - DNA, 96 bp, Fusarium azukicola
  misc_feature: 357
tgagagaaagaggagggaagagaaggaaggagaaagaggaaggggagttaaaagtgtgtgaagttaggagagttaaggggaggggaagtagttcaa

SEQ ID NO: 31334 - DNA, 96 bp, Fusarium azukicola
  misc_feature: 357
agaaagaagataggtagttagaagagaaagaaagaaggggaatagaaaaagaaaagaagaagaaaaagagaaatgaaggaggggaagagtaaagaa

SEQ ID NO: 31335 - DNA, 96 bp, Fusarium azukicola
  misc_feature: 357
tgaaaactgcaaactaggaaaattaactaaaaataatataaataaaaaacctagtaataaggaatacaagttcctagataaaatagctactgatat

SEQ ID NO: 31336 - DNA, 96 bp, Fusarium azukicola
  misc_feature: 357
aataaaaaagtttaaggagagaagttaagttaaggaggagtatagtaagtattaggagagaaaggagtatagagtaagttaaggtaaaaagaaaga

SEQ ID NO: 31337 - DNA, 96 bp, Fusarium azukicola
  misc_feature: 357
tctaaccctctcttttcttctttaacctaactcacctacttaaccctaaccctaatttcaaccaattaaccctaacccttaactcacctacttaac

SEQ ID NO: 31338 - DNA, 96 bp, Fusarium azukicola
  misc_feature: 357
atagtgatatatccctataaactatatattatattatagaatttttactctatttttaggtatatttacctaacctatagctactataggtagcta

SEQ ID NO: 31339 - DNA, 96 bp, Fusarium azukicola
  misc_feature: 357
agagaaagaagataggtagttagaagagaaagaaagaaggggaatagaaaaagaaaagaagaagaaaaagagaaatgaaggaggggaagagtaaag

SEQ ID NO: 31340 - DNA, 96 bp, Fusarium azukicola
  misc_feature: 357
aggagtgaaaagagagagagggagaggggagaggagaggataaggagtgaaaagagagagagggagaggggagaggagagaaaagaaaaagagtag

SEQ ID NO: 31341 - DNA, 96 bp, Fusarium azukicola
  misc_feature: 357
ccttaaaatgcagttattgcaaactgccaggtcataaagacccagattgctattttttgcaccctaataaagctccaaaaaactggaaaactcagg

SEQ ID NO: 31342 - DNA, 96 bp, Fusarium azukicola
  misc_feature: 356
tttattcttccttctctctcctccttctttttacttttcctcctctctttctctcccctccttctctctcctcttttaaccccctctatctcttct

SEQ ID NO: 31343 - DNA, 96 bp, Fusarium azukicola
  misc_feature: 356
gaaggaggggagagaaagagaggaggaaaagtaaaaagaaggaggagagagaaggaagaataaaagaaaagaataagagggaaaggaagagaagaa

SEQ ID NO: 31344 - DNA, 96 bp, Fusarium azukicola
  misc_feature: 356
tagttaagaagaggaggggagaagagaaagaaagtagaggaagaggggagggaaaaaggggagaagagatagagggggttaaaagaggagagagaa

SEQ ID NO: 31345 - DNA, 96 bp, Fusarium azukicola
  misc_feature: 356
cttaaaaaaagtaatcttatagatctaactaaatataaaacttaaaaataatttttttagatttttaaaaaaatccctttatagcgaaataactaa

SEQ ID NO: 31346 - DNA, 96 bp, Fusarium azukicola
  misc_feature: 356
ttagagttagagagaaagaataaagataagatgaggaagaaggaagaaggagtgaaaagagagagagggagaggggagaggagaggataaggagtg

SEQ ID NO: 31347 - DNA, 96 bp, Fusarium azukicola
  misc_feature: 356
tctttattttctttaccctatactttcttcattattttactttaccctccacttttattctttattttactttaccctatactctcttctctcttt

SEQ ID NO: 31348 - DNA, 96 bp, Fusarium azukicola
  misc_feature: 356
tctctttctcctccctcctcttcactccctttactcctcttaacttctctttctcttccctcttcttccctcctctccctctctcctttcccctcc

SEQ ID NO: 31349 - DNA, 96 bp, Fusarium azukicola
  misc_feature: 356
gaaagtgtagttaagaagaggaggggagaagagaaagaaagtagaggaagaggggagggaaaaaggggagaagagatagagggggttaaaagagga

SEQ ID NO: 31350 - DNA, 96 bp, Fusarium azukicola
  misc_feature: 356
tcacccttcctctactctttttcttttctctcctctcccctctccctctctctcttttcactccttatcctctcctctcccctctccctctctctc

SEQ ID NO: 31351 - DNA, 96 bp, Fusarium azukicola
  misc_feature: 356
taatatctagctacctatagtagctataggttaggtaaatatacctaaaaatagagtaaaaattctataatataatatatagtttatagggatata

SEQ ID NO: 31352 - DNA, 96 bp, Fusarium azukicola
  misc_feature: 356
tatactctcttcttatacccttatacacttttcttctttattttctttaccctatactttcttcattattttactttaccctccacttttattctt

SEQ ID NO: 31353 - DNA, 96 bp, Fusarium azukicola
  misc_feature: 356
tataaggaatttttttaaaaatttagaaaaaatatttttaagtcttatatatagctaaatagttaaaatcgttttttttaagtttctagctatttt

SEQ ID NO: 31354 - DNA, 96 bp, Fusarium azukicola
  misc_feature: 356
cctctcctctcccctctccctctctctcttttcactccttatcctctcctctcccctctccctctctctcttttcactccttctcctctcctctcc

SEQ ID NO: 31355 - DNA, 96 bp, Fusarium azukicola
  misc_feature: 356
gaccccatatatcagtagctattttatctaggaacttgtattccttattactaggttttttatttatattatttttagttaattttcctagtttgc

SEQ ID NO: 31356 - DNA, 96 bp, Fusarium azukicola
  misc_feature: 356
aagctccaaaaaactggaaaactcaggaagccaataaggtgcataagacttctaagaaaaaggaatctaaacctaattctaagaaggaagaaagag

SEQ ID NO: 31357 - DNA, 96 bp, Fusarium azukicola
  misc_feature: 356
ctcttctaactacctatcttctttctcttctcccttcctcccttcctcccctctctctcttatattcccttctcttccttcctctttctctttact

SEQ ID NO: 31358 - DNA, 96 bp, Fusarium azukicola
  misc_feature: 356
agaagaagaattagctataaatagcttttcttatttcttttctctttcttccttcttagaattaggtttagattcctttttcttagaagtcttatg

SEQ ID NO: 31359 - DNA, 96 bp, Fusarium azukicola
  misc_feature: 355
gagagagaaggaagaataaaagaaaagaataagagggaaaggaagagaagaagattgagagaaagaggagggaagagaaggaaggagaaagaggaa

SEQ ID NO: 31360 - DNA, 96 bp, Fusarium azukicola
  misc_feature: 355
ttaacctcactacttttttttcttttccttactctctccttataaccctttcctactcttctcctactctcttaccttaactccccctctcttcta

SEQ ID NO: 31361 - DNA, 96 bp, Fusarium azukicola
  misc_feature: 355
tctctctacctcacttttccctctttatattaaccctctcccttctttctcttcctcttctctccctctttactcctcttcttctcttctcccctt

SEQ ID NO: 31362 - DNA, 96 bp, Fusarium azukicola
  misc_feature: 355
aacaagaagtccttcttttaaataagcaaggaaaaataatatcacaaggaaaagaaaaaaataacctatatataataacagctaaggttatttcta

SEQ ID NO: 31363 - DNA, 96 bp, Fusarium azukicola
  misc_feature: 355
taaagggatttttttaaaaatctaaaaaaattatttttaagttttatatttagttagatctataagattactttttttaagtttctagctatttta

SEQ ID NO: 31364 - DNA, 96 bp, Fusarium azukicola
  misc_feature: 355
acctatatcaagttaaaaactgtgaaaactgcaaactaggaaaattaactaaaaataatataaataaaaaacctagtaataaggaatacaagttcc

SEQ ID NO: 31365 - DNA, 96 bp, Fusarium azukicola
  misc_feature: 355
gaggggagagaaagagaggaggaaaagtaaaaagaaggaggagagagaaggaagaataaaagaaaagaataagagggaaaggaagagaagaagatt

SEQ ID NO: 31366 - DNA, 96 bp, Fusarium azukicola
  misc_feature: 355
aatcacccttcctctactctttttcttttctctcctctcccctctccctctctctcttttcactccttatcctctcctctcccctctccctctctc

SEQ ID NO: 31367 - DNA, 96 bp, Fusarium azukicola
  misc_feature: 355
aagttaagaggagtaaagggagtgaagaggagggaggagaaagagaaagggaagtaaagagaaagaggaaggaagagaagggaatataagagagag

SEQ ID NO: 31368 - DNA, 96 bp, Fusarium azukicola
  misc_feature: 354
tttactaagatatatatataataataatagaggtttaattttttcctctaataataagaacgtataaagctataacccttataagattataacttt

SEQ ID NO: 31369 - DNA, 96 bp, Fusarium azukicola
  misc_feature: 354
gaagagaaagaagataggtagttagaagagaaagaaagaaggggaatagaaaaagaaaagaagaagaaaaagagaaatgaaggaggggaagagtaa

SEQ ID NO: 31370 - DNA, 96 bp, Fusarium azukicola
  misc_feature: 354
ttactactttctaaccctctcttttcttctttaacctaactcacctacttaaccctaaccctaatttcaaccaattaaccctaacccttaactcac

SEQ ID NO: 31371 - DNA, 96 bp, Fusarium azukicola
  misc_feature: 354
ttaacttctctttctcttccctcttcttccctcctctccctctctcctttcccctcctctctaccgaccctaaactaactccctatccttcctctt

SEQ ID NO: 31372 - DNA, 96 bp, Fusarium azukicola
  misc_feature: 354
tcatcttaacttaagaagtctaattaaatatataaaaataaaagatcctctctttaaatatactagtgaggacctatatcaagttaaaaactgtga

SEQ ID NO: 31373 - DNA, 96 bp, Fusarium azukicola
  misc_feature: 354
taggatatttaaataaggtaaataaacctgatttttctactaataaaaataatataactaattttatatatgatacaggtgctactaggcatattg

SEQ ID NO: 31374 - DNA, 96 bp, Fusarium azukicola
  misc_feature: 354
actccctatccttcctcttttttcccccaccctccctttcttaataactctttataacttctctttttactcttctctacactacctttcctttac

SEQ ID NO: 31375 - DNA, 96 bp, Fusarium azukicola
  misc_feature: 354
ggttaagggagtaataagagggaggtatagtaagtattaagttagttaggagagagtagtgagtattaggtaaaagaggagtaaaaagtagattgg

SEQ ID NO: 31376 - DNA, 96 bp, Fusarium azukicola
  misc_feature: 354
cccctccttcatttctctttttcttcttcttttctttttctattccccttctttctttctcttctaactacctatcttctttctcttctcccttcc

SEQ ID NO: 31377 - DNA, 96 bp, Fusarium azukicola
  misc_feature: 354
acccagattgctattttttgcaccctaataaagctccaaaaaactggaaaactcaggaagccaataaggtgcataagacttctaagaaaaaggaat

SEQ ID NO: 31378 - DNA, 96 bp, Fusarium azukicola
  misc_feature: 353
gaaagaaggggaatagaaaaagaaaagaagaagaaaaagagaaatgaaggaggggaagagtaaagaaaaagagaagaagataaaaggagaagggga

SEQ ID NO: 31379 - DNA, 96 bp, Fusarium azukicola
  misc_feature: 353
cctatataaggaatttttttaaaaatttagaaaaaatatttttaagtcttatatatagctaaatagttaaaatcgttttttttaagtttctagcta

SEQ ID NO: 31380 - DNA, 96 bp, Fusarium azukicola
  misc_feature: 353
gtactatatactaaaactaggttttttaaaaaatcctagaaaattcaaactaactctaaaatagctaaaatttaaagtttagacttattatatagt

SEQ ID NO: 31381 - DNA, 96 bp, Fusarium azukicola
  misc_feature: 353
gggtaaagtaaaagagagaagagagtatagggtaaagtaaaataaagaataaaagtagagggtaaagtaaaagagagaagagagtatagggtaaag

SEQ ID NO: 31382 - DNA, 96 bp, Fusarium azukicola
  misc_feature: 353
ctcttccctcctctttctctcaatcttcttctcttcctttccctcttattcttttcttttattcttccttctctctcctccttctttttacttttc

SEQ ID NO: 31383 - DNA, 96 bp, Fusarium azukicola
  misc_feature: 353
cttcccctccttcatttctctttttcttcttcttttctttttctattccccttctttctttctcttctaactacctatcttctttctcttctccct

SEQ ID NO: 31384 - DNA, 96 bp, Fusarium azukicola
  misc_feature: 353
cttaacttctctttctcttccctcttcttccctcctctccctctctcctttcccctcctctctaccgaccctaaactaactccctatccttcctct

SEQ ID NO: 31385 - DNA, 96 bp, Fusarium azukicola
  misc_feature: 353
agtcttatgcaccttattggcttcctgagttttccagttttttggagctttattagggtgcaaaaaatagcaatctgggtctttatgacctggcag

SEQ ID NO: 31386 - DNA, 96 bp, Fusarium azukicola
  misc_feature: 353
agtagagttaagggttagggttaattggttgaaattagggttagggttaagtaggtgagttaagggttagggttaattggttgaaattagggttag

SEQ ID NO: 31387 - DNA, 96 bp, Fusarium azukicola
  misc_feature: 353
ataagctaatagctttatagaaaggataaataggactatattagaaaaggttagagctttattatttacttctaacctacctaaatacctttaggg

SEQ ID NO: 31388 - DNA, 96 bp, Fusarium azukicola
  misc_feature: 352
gaaaaagaagaaaactgccttaaaatgcagttattgcaaactgccaggtcataaagacccagattgctattttttgcaccctaataaagctccaaa

SEQ ID NO: 31389 - DNA, 96 bp, Fusarium azukicola
  misc_feature: 352
tttagattcctttttcttagaagtcttatgcaccttattggcttcctgagttttccagttttttggagctttattagggtgcaaaaaatagcaatc

SEQ ID NO: 31390 - DNA, 96 bp, Fusarium azukicola
  misc_feature: 352
ttctcttcctttccctcttattcttttcttttattcttccttctctctcctccttctttttacttttcctcctctctttctctcccctccttctct

SEQ ID NO: 31391 - DNA, 96 bp, Fusarium azukicola
  misc_feature: 352
gaaggaggggaagagtaaagaaaaagagaagaagataaaaggagaaggggaagagtaaaagaaagaaaagtaagaaagtaatagaaagtaatagaa

SEQ ID NO: 31392 - DNA, 96 bp, Fusarium azukicola
  misc_feature: 352
cttaaaatgcagttattgcaaactgccaggtcataaagacccagattgctattttttgcaccctaataaagctccaaaaaactggaaaactcagga

SEQ ID NO: 31393 - DNA, 96 bp, Fusarium azukicola
  misc_feature: 352
aaattaaacctctattattattatatatatatcttagtaaaaacccctttattatagacctgatattataagggaaaatctaagattatataggga

SEQ ID NO: 31394 - DNA, 96 bp, Fusarium azukicola
  misc_feature: 352
tatccttttatactctcttcttatacccttatacacttttcttctttattttctttaccctatactttcttcattattttactttaccctccactt

SEQ ID NO: 31395 - DNA, 96 bp, Fusarium azukicola
  misc_feature: 352
cttatacacttttcttctttattttctttaccctatactttcttcattattttactttaccctccacttttattctttattttactttaccctata

SEQ ID NO: 31396 - DNA, 96 bp, Fusarium azukicola
  misc_feature: 352
tataaataaacaagaagtccttcttttaaataagcaaggaaaaataatatcacaaggaaaagaaaaaaataacctatatataataacagctaaggt

SEQ ID NO: 31397 - DNA, 96 bp, Fusarium azukicola
  misc_feature: 352
taaaaaaagtaatcttatagatctaactaaatataaaacttaaaaataatttttttagatttttaaaaaaatccctttatagcgaaataactaatt

SEQ ID NO: 31398 - DNA, 96 bp, Fusarium azukicola
  misc_feature: 352
attgctattttttgcaccctaataaagctccaaaaaactggaaaactcaggaagccaataaggtgcataagacttctaagaaaaaggaatctaaac

SEQ ID NO: 31399 - DNA, 96 bp, Fusarium azukicola
  misc_feature: 352
ggttgaaattagggttaggggtagtagtagagttaagggttagggttaattggttgaaattagggttagggttaagtaggtgagttaagggttagg

SEQ ID NO: 31400 - DNA, 96 bp, Fusarium azukicola
  misc_feature: 352
cctctctttctctcccctccttctctctcctcttttaaccccctctatctcttctcccctttttccctcccctcttcctctactttctttctcttc

SEQ ID NO: 31401 - DNA, 96 bp, Fusarium azukicola
  misc_feature: 352
aagggaggaagggagaagagaaagaagataggtagttagaagagaaagaaagaaggggaatagaaaaagaaaagaagaagaaaaagagaaatgaag

SEQ ID NO: 31402 - DNA, 96 bp, Fusarium azukicola
  misc_feature: 352
aaagaaagaaggggaatagaaaaagaaaagaagaagaaaaagagaaatgaaggaggggaagagtaaagaaaaagagaagaagataaaaggagaagg

SEQ ID NO: 31403 - DNA, 96 bp, Fusarium azukicola
  misc_feature: 352
aggaaaaattaaacctctattattattatatatatatcttagtaaaaacccctttattatagacctaatattataagggaaaatctaagattatat

SEQ ID NO: 31404 - DNA, 96 bp, Fusarium azukicola
  misc_feature: 352
actccttatcctctcctctcccctctccctctctctcttttcactccttatcctctcctctcccctctccctctctctcttttcactccttctcct

SEQ ID NO: 31405 - DNA, 96 bp, Fusarium azukicola
  misc_feature: 351
ttttatactctcttcttatacccttatacacttttcttctttattttctttaccctatactttcttcattattttactttaccctccacttttatt

SEQ ID NO: 31406 - DNA, 96 bp, Fusarium azukicola
  misc_feature: 351
tttatattatttttagttaattttcctagtttgcagttttcgcagtttttaacttgatataggtcctcactagtatatttaaagagaggatctttt

SEQ ID NO: 31407 - DNA, 96 bp, Fusarium azukicola
  misc_feature: 351
tctttctctttacttccctttctctttctcctccctcctcttcactccctttactcctcttaacttctctttctcttccctcttcttccctcctct

SEQ ID NO: 31408 - DNA, 96 bp, Fusarium azukicola
  misc_feature: 351
tctcttctcccctcctcttcttaactacactttctctctacctcacttttccctctttatattaaccctctcccttctttctcttcctcttctctc

SEQ ID NO: 31409 - DNA, 96 bp, Fusarium azukicola
  misc_feature: 351
tagaaggggagggttagaagggttaagaaaggagagaagtaaggaaggttaagaaaggagagaagtaaggaaggttaagaaaggagagaagtaagg

SEQ ID NO: 31410 - DNA, 96 bp, Fusarium azukicola
  misc_feature: 351
taataaaaaagtttaaggagagaagttaagttaaggaggagtatagtaagtattaggagagaaaggagtatagagtaagttaaggtaaaaagaaag

SEQ ID NO: 31411 - DNA, 96 bp, Fusarium azukicola
  misc_feature: 351
aaaactcaggaagccaataaggtgcataagacttctaagaaaaaggaatctaaacctaattctaagaaggaagaaagagaaaagaaacaagaaaag

SEQ ID NO: 31412 - DNA, 96 bp, Fusarium azukicola
  misc_feature: 351
ctttatctttctcttctattcacttcctacctttctaatcacccttcctctactctttttcttttctctcctctcccctctccctctctctctttt

SEQ ID NO: 31413 - DNA, 96 bp, Fusarium azukicola
  misc_feature: 351
acttttcttctttattttctttaccctatactttcttcattattttactttaccctccacttttattctttattttactttaccctatactctctt

SEQ ID NO: 31414 - DNA, 96 bp, Fusarium azukicola
  misc_feature: 350
taaagtaaaataaagaataaaagtggagggtaaagtaaaataatgaagaaagtatagggtaaagaaaataaagaagaaaagtgtataagggtataa

SEQ ID NO: 31415 - DNA, 96 bp, Fusarium azukicola
  misc_feature: 350
aagtcttatgcaccttattggcttcctgagttttccagttttttggagctttattagggtgcaaaaaatagcaatctgggtctttatgacctggca

SEQ ID NO: 31416 - DNA, 96 bp, Fusarium azukicola
  misc_feature: 350
tatctagctacctatagtagctataggttaggtaaatatacctaaaaatagagtaaaaattctataatataatatatagtttatagggatatatca

SEQ ID NO: 31417 - DNA, 96 bp, Fusarium azukicola
  misc_feature: 350
tctctacctcacttttccctctttatattaaccctctcccttctttctcttcctcttctctccctctttactcctcttcttctcttctccccttcc

SEQ ID NO: 31418 - DNA, 96 bp, Fusarium azukicola
  misc_feature: 350
gcaaactgccaggtcataaagacccagattgctattttttgcaccctaataaggctccaaaaaactggaaaactcaggaagccaataaggtgcata

SEQ ID NO: 31419 - DNA, 96 bp, Fusarium azukicola
  misc_feature: 350
aactcacctacttaaccctaaccctaatttcaaccaattaaccctaacccttaactcacctacttaaccctaaccctaatttcaaccaattaaccc

SEQ ID NO: 31420 - DNA, 96 bp, Fusarium azukicola
  misc_feature: 350
aataaaggggtttttactaagatatatatataataataatagaggtttaatttttcctctaataataagaacgtataaagctataacccttataag

SEQ ID NO: 31421 - DNA, 96 bp, Fusarium azukicola
  misc_feature: 350
atggcattttttaaaaacctaaaaaaattatatatagttttattactaattaaatagctaaaaaatactttttatttatatatagctaatttctag

SEQ ID NO: 31422 - DNA, 96 bp, Fusarium azukicola
  misc_feature: 350
ccttaactctcctaacttcacacacttttaactccccttcctctttctccttccttctcttccctcctctttctctcaatcttcttctcttccttt

SEQ ID NO: 31423 - DNA, 96 bp, Fusarium azukicola
  misc_feature: 350
cattttttaaaaacctaaaaaaattatatatagttttattactaattaaatagctaaaaaatactttttatttatatatagctaatttctagctat

SEQ ID NO: 31424 - DNA, 96 bp, Fusarium azukicola
  misc_feature: 350
actaactccctatccttcctcttttttcccccaccctccctttcttaataactctttataacttctctttttactcttctctacactacctttcct

SEQ ID NO: 31425 - DNA, 96 bp, Fusarium azukicola
  misc_feature: 350
acttcccctccccttaactctcctaacttcacacacttttaactccccttcctctttctccttccttctcttccctcctctttctctcaatcttct

SEQ ID NO: 31426 - DNA, 96 bp, Fusarium azukicola
  misc_feature: 350
actttatctttctcttctattcacttcctacctttctaatcacccttcctctactctttttcttttctctcctctcccctctccctctctctcttt

SEQ ID NO: 31427 - DNA, 96 bp, Fusarium azukicola
  misc_feature: 349
taataaggtatataagacttctaagaaaaaggaatctaaacctaattctaagaaggaagaaagagaaaagaaataagaaaagctatttatagctaa

SEQ ID NO: 31428 - DNA, 96 bp, Fusarium azukicola
  misc_feature: 349
tcttttactttaccctatactctcttctctcttttactttaccctctacttttattctttattttactttaccctatactctcttctctcttttac

SEQ ID NO: 31429 - DNA, 96 bp, Fusarium azukicola
  misc_feature: 349
gtgtagttaagaagaggaggggagaagagaaagaaagtagaggaagaggggagggaaaaaggggagaagagatagagggggttaaaagaggagaga

SEQ ID NO: 31430 - DNA, 96 bp, Fusarium azukicola
  misc_feature: 349
gggtaaaggaaaggtagtgtagagaagagtaaaaagagaagttataaagagttattaagaaagggagggtgggggaaaaaagaggaaggataggga

SEQ ID NO: 31431 - DNA, 96 bp, Fusarium azukicola
  misc_feature: 349
tacctatataaggaatttttttaaaaatttagaaaaaatatttttaagtcttatatatagctaaatagttaaaatcgttttttttaagtttctagc

SEQ ID NO: 31432 - DNA, 96 bp, Fusarium azukicola
  misc_feature: 349
cttcttatacccttatacacttttcttctttattttctttaccctatactttcttcattattttactttaccctccacttttattctttattttac

SEQ ID NO: 31433 - DNA, 96 bp, Fusarium azukicola
  misc_feature: 349
aagaagattgagagaaagaggagggaagagaaggaaggagaaagaggaaggggagttaaaagtgtgtgaagttaggagagttaaggggaggggaag

SEQ ID NO: 31434 - DNA, 96 bp, Fusarium azukicola
  misc_feature: 349
cttaaccttccttacttctctcctttcttaaccttccttacttctctcctttcttaaccttccttacttctctcctttcttaacccttctaaccct

SEQ ID NO: 31435 - DNA, 96 bp, Fusarium azukicola
  misc_feature: 349
aaaaaaaaaagggggagaaaaaaaaagaagaaagagagagagaggaggtagagtaattgagaagttatagtaagtaaagataaaagagtaaaaacg

SEQ ID NO: 31436 - DNA, 96 bp, Fusarium azukicola
  misc_feature: 349
aggagagagaaggaagaataaaagaaaagaataagagggaaaggaagagaagaagattgagagaaagaggagggaagagaaggaaggagaaagagg

SEQ ID NO: 31437 - DNA, 96 bp, Fusarium azukicola
  misc_feature: 349
acttccctttctctttctcctccctcctcttcactccctttactcctcttaacttctctttctcttccctcttcttccctcctctccctctctcct

SEQ ID NO: 31438 - DNA, 96 bp, Fusarium azukicola
  misc_feature: 348
tttctaaccctctcttttcttctttaacctaactcacctacttaaccctaaccctaatttcaaccaattaaccctaacccttaactcacctactta

SEQ ID NO: 31439 - DNA, 96 bp, Fusarium azukicola
  misc_feature: 348
ttattattagaggaaaaattaaacctctattattattatatatatatcttagtaaaaacccctttattatagacctaatattataagggaaaatct

SEQ ID NO: 31440 - DNA, 96 bp, Fusarium azukicola
  misc_feature: 348
ttactaagatatatatataataataatagaggtttaattttttcctctaataataagaacgtataaagctataacccttataagattataacttta

SEQ ID NO: 31441 - DNA, 96 bp, Fusarium azukicola
  misc_feature: 348
tccttctctctcctcttttaaccccctctatctcttctcccctttttccctcccctcttcctctactttctttctcttctcccctcctcttcttaa

SEQ ID NO: 31442 - DNA, 96 bp, Fusarium azukicola
  misc_feature: 348
tgaaggaggggaagagtaaagaaaaagagaagaagataaaaggagaaggggaagagtaaaagaaagaaaagtaagaaagtaatagaaagtaataga

SEQ ID NO: 31443 - DNA, 96 bp, Fusarium azukicola
  misc_feature: 348
tcttctttattttctttaccctatactttcttcattattttactttaccctccacttttattctttattttactttaccctatactctcttctctc

SEQ ID NO: 31444 - DNA, 96 bp, Fusarium azukicola
  misc_feature: 348
aactgccaggtcataaagacccagattgctattttttgcaccctaataaggctccaaaaaactggaaaactcaggaagccaataaggtgcataaga

SEQ ID NO: 31445 - DNA, 96 bp, Fusarium azukicola
  misc_feature: 348
aagtaaaataaagaataaaagtggagggtaaagtaaaataatgaagaaagtatagggtaaagaaaataaagaagaaaagtgtataagggtataaga

SEQ ID NO: 31446 - DNA, 96 bp, Fusarium azukicola
  misc_feature: 348
ctaaaagtctatctattaaggaataagttagaagctattataaaatttaaggaatttagaaaagaaatagaaaataatcctaataaaataagaata

SEQ ID NO: 31447 - DNA, 96 bp, Fusarium azukicola
  misc_feature: 348
ggattatataggttttttaaggcttcccaagccttataagcagtctcaatatgctttatttgaagaagaggaccatcttcaatagtaagtcttata

SEQ ID NO: 31448 - DNA, 96 bp, Fusarium azukicola
  misc_feature: 348
tagtgatatatccctataaactatatattatattatagaatttttactctatttttaggtatatttacctaacctatagctactataggtagctag

SEQ ID NO: 31449 - DNA, 96 bp, Fusarium azukicola
  misc_feature: 348
taccctcttccctaccccaatctactttttactcctcttttacctaatactcactactctctcctaactaacttaatacttactatacctccctct

SEQ ID NO: 31450 - DNA, 96 bp, Fusarium azukicola
  misc_feature: 348
gctattttatctaggaacttgtattccttattactaggttttttatttatattatttttagttaattttcctagtttgcagttttcacagttttta

SEQ ID NO: 31451 - DNA, 96 bp, Fusarium azukicola
  misc_feature: 348
gcttcctgagttttccagttttttggagctttattagggtgcaaaaaatagcaatctgggtctttatgacctggcagtttgcaataactgcatttt

SEQ ID NO: 31452 - DNA, 96 bp, Fusarium azukicola
  misc_feature: 348
gaattcctcttaataagggaatttttttaactttcccttttatcttttaagaatatagaaatatatcttaataagataaaagaggttaaaaataag

SEQ ID NO: 31453 - DNA, 96 bp, Fusarium azukicola
  misc_feature: 348
atcctctcctctcccctctccctctctctcttttcactccttatcctctcctctcccctctccctctctctcttttcactccttctcctctcctct

SEQ ID NO: 31454 - DNA, 96 bp, Fusarium azukicola
  misc_feature: 347
tcgatagtgaatttctgtttattattattattattatataatattgccttttcattattataagggctttctttaaagtaaggaatctcattaaaa

SEQ ID NO: 31455 - DNA, 96 bp, Fusarium azukicola
  misc_feature: 347
tttatctttctcttctattcacttcctacctttctaatcacccttcctctactctttttcttttctctcctctcccctctccctctctctcttttc

SEQ ID NO: 31456 - DNA, 96 bp, Fusarium azukicola
  misc_feature: 347
gattgctattttttgcaccctaataaggctccaaaaaactggaaaactcaggaagccaataaggtgcataagacttctaagaaaagggaatctaaa

SEQ ID NO: 31457 - DNA, 96 bp, Fusarium azukicola
  misc_feature: 347
tctttttacttttcctcctctctttctctcccctccttctctctcctcttttaaccccctctatctcttctcccctttttccctcccctcttcctc

SEQ ID NO: 31458 - DNA, 96 bp, Fusarium azukicola
  misc_feature: 347
tatctaaaagtctatctattaaggaataagttagaagctattataaaatttaaggaatttagaaaagaaatagaaaataatcctaataaaataaga

SEQ ID NO: 31459 - DNA, 96 bp, Fusarium azukicola
  misc_feature: 347
ataaaggggtttttactaagatatatatataataataatagaggtttaatttttcctctaataataagaacgtataaagctataacccttataaga

SEQ ID NO: 31460 - DNA, 96 bp, Fusarium azukicola
  misc_feature: 347
gttaagggagtaataagagggaggtatagtaagtattaagttagttaggagagagtagtgagtattaggtaaaagaggagtaaaaagtagattggg

SEQ ID NO: 31461 - DNA, 96 bp, Fusarium azukicola
  misc_feature: 347
cttccctaccccaatctactttttactcctcttttacctaatactcactactctctcctaactaacttaatacttactatacctccctcttattac

SEQ ID NO: 31462 - DNA, 96 bp, Fusarium azukicola
  misc_feature: 347
cttctcttcctttccctcttattcttttcttttattcttccttctctctcctccttctttttacttttcctcctctctttctctcccctccttctc

SEQ ID NO: 31463 - DNA, 96 bp, Fusarium azukicola
  misc_feature: 347
cctctttctctttacttccctttctctttctcctccctcctcttcactccctttactcctcttaacttctctttctcttccctcttcttccctcct

SEQ ID NO: 31464 - DNA, 96 bp, Fusarium azukicola
  misc_feature: 347
ataaatggcattttttaaaaacctaaaaaaattatatatagttttattactaattaaatagctaaaaaatactttttatttatatatagctaattt

SEQ ID NO: 31465 - DNA, 96 bp, Fusarium azukicola
  misc_feature: 346
tactaagatatatatataataataatagaggtttaattttttcctctaataataagaacgtataaagctataacccttataagattataactttaa

SEQ ID NO: 31466 - DNA, 96 bp, Fusarium azukicola
  misc_feature: 346
gagaaagagaaagggaagtaaagagaaagaggaaggaagagaagggaatataagagagagaggggaggaagggaggaagggagaagagaaagaaga

SEQ ID NO: 31467 - DNA, 96 bp, Fusarium azukicola
  misc_feature: 346
tcttatgcaccttattggcttcctgagttttccagttttttggagctttattagggtgcaaaaaatagcaatctgggtctttatgacctggcagtt

SEQ ID NO: 31468 - DNA, 96 bp, Fusarium azukicola
  misc_feature: 346
ggggagagaaagagaggaggaaaagtaaaaagaaggaggagagagaaggaagaataaaagaaaagaataagagggaaaggaagagaagaagattga

SEQ ID NO: 31469 - DNA, 96 bp, Fusarium azukicola
  misc_feature: 346
tatatcaagttaaaaactgtgaaaactgcaaactaggaaaattaactaaaaataatataaataaaaaacctagtaataaggaatacaagttcctag

SEQ ID NO: 31470 - DNA, 96 bp, Fusarium azukicola
  misc_feature: 346
agctttatagaaaggataaataggactatattagaaaaggttagagctttattatttacttctaacctacctaaatacctttagggagaggctata

SEQ ID NO: 31471 - DNA, 96 bp, Fusarium azukicola
  misc_feature: 346
tacactgtgtaattaactatttcactataaacagaattttttaaaaatctaaaaaaatcatttttagactttattaagagttagatttatagaaat

SEQ ID NO: 31472 - DNA, 96 bp, Fusarium azukicola
  misc_feature: 346
ggcattttttaaaaacctaaaaaaattatatatagttttattactaattaaatagctaaaaaatactttttatttatatatagctaatttctagct

SEQ ID NO: 31473 - DNA, 96 bp, Fusarium azukicola
  misc_feature: 346
ccttcctctactctttttcttttctctcctctcccctctccctctctctcttttcactccttatcctctcctctcccctctccctctctctctttt

SEQ ID NO: 31474 - DNA, 96 bp, Fusarium azukicola
  misc_feature: 345
ataaagacccagattgctattttttgcaccctaataaagctccaaaaaactggaaaactcaggaagccaataaggtgcataagacttctaagaaaa

SEQ ID NO: 31475 - DNA, 96 bp, Fusarium azukicola
  misc_feature: 345
ttttacttttcctcctctctttctctcccctccttctctctcctcttttaaccccctctatctcttctcccctttttccctcccctcttcctctac

SEQ ID NO: 31476 - DNA, 96 bp, Fusarium azukicola
  misc_feature: 345
ttctttttacttttcctcctctctttctctcccctccttctctctcctcttttaaccccctctatctcttctcccctttttccctcccctcttcct

SEQ ID NO: 31477 - DNA, 96 bp, Fusarium azukicola
  misc_feature: 345
ttaaaatgcagttattgcaaactgccaggtcataaagacccagattgctattttttgcaccctaataaggctccaaaaaactggaaaactcaggaa

SEQ ID NO: 31478 - DNA, 96 bp, Fusarium azukicola
  misc_feature: 345
ttattcttccttctctctcctccttctttttacttttcctcctctctttctctcccctccttctctctcctcttttaaccccctctatctcttctc

SEQ ID NO: 31479 - DNA, 96 bp, Fusarium azukicola
  misc_feature: 345
ttatactctcttcttatacccttatacacttttcttctttattttctttaccctatactttcttcattattttactttaccctccacttttattct

SEQ ID NO: 31480 - DNA, 96 bp, Fusarium azukicola
  misc_feature: 345
ctattttttgcaccctaataaggctccaaaaaactggaaaactcaggaagccaataaggtgcataagacttctaagaaaagggaatctaaacctaa

SEQ ID NO: 31481 - DNA, 96 bp, Fusarium azukicola
  misc_feature: 345
gtagttaagaagaggaggggagaagagaaagaaagtagaggaagaggggagggaaaaaggggagaagagatagagggggttaaaagaggagagaga

SEQ ID NO: 31482 - DNA, 96 bp, Fusarium azukicola
  misc_feature: 345
tatacacttttcttctttattttctttaccctatactttcttcattattttactttaccctccacttttattctttattttactttaccctatact

SEQ ID NO: 31483 - DNA, 96 bp, Fusarium azukicola
  misc_feature: 345
actcaggaagccaataaggtgcataagacttctaagaaaaaggaatctaaacctaattctaagaaggaagaaagagaaaagaaacaagaaaagcta

SEQ ID NO: 31484 - DNA, 96 bp, Fusarium azukicola
  misc_feature: 345
agaagagaaagaagataggtagttagaagagaaagaaagaaggggaatagaaaaagaaaagaagaagaaaaagagaaatgaaggaggggaagagta

SEQ ID NO: 31485 - DNA, 96 bp, Fusarium azukicola
  misc_feature: 345
gtttttactaagatatatatataataataatagaggtttaattttttcctctaataataagaacgtataaagctataacccttataagattataac

SEQ ID NO: 31486 - DNA, 96 bp, Fusarium azukicola
  misc_feature: 345
cactccttatcctctcctctcccctctccctctctctcttttcactccttatcctctcctctcccctctccctctctctcttttcactccttctcc

SEQ ID NO: 31487 - DNA, 96 bp, Fusarium azukicola
  misc_feature: 345
agaagtcttatgcaccttattggcttcctgagttttccagttttttggagctttattagggtgcaaaaaatagcaatctgggtctttatgacctgg

SEQ ID NO: 31488 - DNA, 96 bp, Fusarium azukicola
  misc_feature: 345
aaggaaaagagaaaaataacctatatataataacagctaaggttatttctaataagaataactatagactaagagataacttagatcttcctatct

SEQ ID NO: 31489 - DNA, 96 bp, Fusarium azukicola
  misc_feature: 344
ttttactaagatatatatataataataatagaggtttaattttttcctctaataataagaacgtataaagctataacccttataagattataactt

SEQ ID NO: 31490 - DNA, 96 bp, Fusarium azukicola
  misc_feature: 344
ttctttattttctttaccctatactttcttcattattttactttaccctccacttttattctttattttactttaccctatactctcttctctctt

SEQ ID NO: 31491 - DNA, 96 bp, Fusarium azukicola
  misc_feature: 344
ttcctctttctctttacttccctttctctttctcctccctcctcttcactccctttactcctcttaacttctctttctcttccctcttcttccctc

SEQ ID NO: 31492 - DNA, 96 bp, Fusarium azukicola
  misc_feature: 344
ttatccttttatactctcttcttatacccttatacacttttcttctttattttctttaccctatactttcttcattattttactttaccctccact

SEQ ID NO: 31493 - DNA, 96 bp, Fusarium azukicola
  misc_feature: 344
tcttctttaacctaactcacctacttaaccctaaccctaatttcaaccaattaaccctaacccttaactcacctacttaaccctaaccctaatttc

SEQ ID NO: 31494 - DNA, 96 bp, Fusarium azukicola
  misc_feature: 344
ctatatcaagttaaaaactgtgaaaactgcaaactaggaaaattaactaaaaataatataaataaaaaacctagtaataaggaatacaagttccta

SEQ ID NO: 31495 - DNA, 96 bp, Fusarium azukicola
  misc_feature: 344
cttcccctctaccttccttactttatctttctcttctattcacttcctacctttctaatcacccttcctctactctttttcttttctctcctctcc

SEQ ID NO: 31496 - DNA, 96 bp, Fusarium azukicola
  misc_feature: 344
attatataataagtctcactttctaattttagctattttaagcttaatttcgacttttatagcttttttaaaaaataccttttaaggtgaaaatat

SEQ ID NO: 31497 - DNA, 96 bp, Fusarium azukicola
  misc_feature: 343
ttttctcttctttctccttcccctttctcttcttttactactactttcttactctcttactacctttacttctatacctattttctctttaactac

SEQ ID NO: 31498 - DNA, 96 bp, Fusarium azukicola
  misc_feature: 343
ttataagacttactattgaagatggtcctcttcttcaaataaagcatattgagactgcttataaggcttgggaagccttaaaaaacctatataatc

SEQ ID NO: 31499 - DNA, 96 bp, Fusarium azukicola
  misc_feature: 343
ttaccctcttccctaccccaatctactttttactcctcttttacctaatactcactactctctcctaactaacttaatacttactatacctccctc

SEQ ID NO: 31500 - DNA, 96 bp, Fusarium azukicola
  misc_feature: 343
aagtgtagttaagaagaggaggggagaagagaaagaaagtagaggaagaggggagggaaaaaggggagaagagatagagggggttaaaagaggaga

SEQ ID NO: 31501 - DNA, 96 bp, Fusarium azukicola
  misc_feature: 343
tctaactacctatcttctttctcttctcccttcctcccttcctcccctctctctcttatattcccttctcttccttcctctttctctttacttccc

SEQ ID NO: 31502 - DNA, 96 bp, Fusarium azukicola
  misc_feature: 343
taacttctctttctcttccctcttcttccctcctctccctctctcctttcccctcctctctaccgaccctaaactaactccctatccttcctcttt

SEQ ID NO: 31503 - DNA, 96 bp, Fusarium azukicola
  misc_feature: 343
actcttcccctccttcatttctctttttcttcttcttttctttttctattccccttctttctttctcttctaactacctatcttctttctcttctc

SEQ ID NO: 31504 - DNA, 96 bp, Fusarium azukicola
  misc_feature: 343
aaagtaaaataaagaataaaagtggagggtaaagtaaaataatgaagaaagtatagggtaaagaaaataaagaagaaaagtgtataagggtataag

SEQ ID NO: 31505 - DNA, 96 bp, Fusarium azukicola
  misc_feature: 343
cctcttttaaccccctctatctcttctcccctttttccctcccctcttcctctactttctttctcttctcccctcctcttcttaactacactttct

SEQ ID NO: 31506 - DNA, 96 bp, Fusarium azukicola
  misc_feature: 343
ccctccttctctctcctcttttaaccccctctatctcttctcccctttttccctcccctcttcctctactttctttctcttctcccctcctcttct

SEQ ID NO: 31507 - DNA, 96 bp, Fusarium azukicola
  misc_feature: 343
atatttaaataaggtaaataaacctgatttttctactaataaaaataatataactaattttatatatgatacaggtgctactaggcatattgtatg

SEQ ID NO: 31508 - DNA, 96 bp, Fusarium azukicola
  misc_feature: 343
cacccttcctctactctttttcttttctctcctctcccctctccctctctctcttttcactccttatcctctcctctcccctctccctctctctct

SEQ ID NO: 31509 - DNA, 96 bp, Fusarium azukicola
  misc_feature: 342
tttcttctttattttctttaccctatactttcttcattattttactttaccctccacttttattctttattttactttaccctatactctcttctc

SEQ ID NO: 31510 - DNA, 96 bp, Fusarium azukicola
  misc_feature: 342
aagaataaaagaaaagaataagagggaaaggaagagaagaagattgagagaaagaggagggaagagaaggaaggagaaagaggaaggggagttaaa

SEQ ID NO: 31511 - DNA, 96 bp, Fusarium azukicola
  misc_feature: 342
ttattatatataggttatttttttcttttccttgtgatattatttttccttgcttatttaaaagaaggacttcttgtttatttataatagaagtta

SEQ ID NO: 31512 - DNA, 96 bp, Fusarium azukicola
  misc_feature: 342
gagaagagaaagaaagtagaggaagaggggagggaaaaaggggagaagagatagagggggttaaaagaggagagagaaggaggggagagaaagaga

SEQ ID NO: 31513 - DNA, 96 bp, Fusarium azukicola
  misc_feature: 342
tattattagaggaaaaattaaacctctattattattatatatatatcttagtaaaaacccctttattatagacctaatattataagggaaaatcta

SEQ ID NO: 31514 - DNA, 96 bp, Fusarium azukicola
  misc_feature: 342
taggtctataataaaggggtttttactaagatatatataataataatagaggtttaattttttcctctaataataagaacgtataaagctataacc

SEQ ID NO: 31515 - DNA, 96 bp, Fusarium azukicola
  misc_feature: 342
taaaggggtttttactaagatatatatataataataatagaggtttaatttttcctctaataataagaacgtataaagctataacccttataagat

SEQ ID NO: 31516 - DNA, 96 bp, Fusarium azukicola
  misc_feature: 342
ccctcctcttcttaactacactttctctctacctcacttttccctctttatattaaccctctcccttctttctcttcctcttctctccctctttac

SEQ ID NO: 31517 - DNA, 96 bp, Fusarium azukicola
  misc_feature: 342
atatctagctacctatagtagctataggttaggtaaatatacctaaaaatagagtaaaaattctataatataatatatagtttatagggatatatc

SEQ ID NO: 31518 - DNA, 96 bp, Fusarium azukicola
  misc_feature: 342
gaggagagagaaggaagaataaaagaaaagaataagagggaaaggaagagaagaagattgagagaaagaggagggaagagaaggaaggagaaagag

SEQ ID NO: 31519 - DNA, 96 bp, Fusarium azukicola
  misc_feature: 342
ccctcccctcttcctctactttctttctcttctcccctcctcttcttaactacactttctctctacctcacttttccctctttatattaaccctct

SEQ ID NO: 31520 - DNA, 96 bp, Fusarium azukicola
  misc_feature: 342
attttttaaaaacctaaaaaaattatatatagttttattactaattaaatagctaaaaaatactttttatttatatatagctaatttctagctatt

SEQ ID NO: 31521 - DNA, 96 bp, Fusarium azukicola
  misc_feature: 341
tttctctcaatcttcttctcttcctttccctcttattcttttcttttattcttccttctctctcctccttctttttacttttcctcctctctttct

SEQ ID NO: 31522 - DNA, 96 bp, Fusarium azukicola
  misc_feature: 341
acctctaaatcatcacttatatcaaaatccatttcatctggggtctcagaaagggaaattaggtcttcctcggctttaggagatgacgaagaagaa

SEQ ID NO: 31523 - DNA, 96 bp, Fusarium azukicola
  misc_feature: 341
ttaaaaacctaaaaaaattatatatagttttattactaattaaatagctaaaaaatactttttatttatatatagctaatttctagctatttttat

SEQ ID NO: 31524 - DNA, 96 bp, Fusarium azukicola
  misc_feature: 341
tctatccctaatataacttatttcctttataaagggtttttattgtattttaatacttttccctatataatcttagattttcccttataatattag

SEQ ID NO: 31525 - DNA, 96 bp, Fusarium azukicola
  misc_feature: 341
gatacctatataaggaatttttttaaaaatttagaaaaaatatttttaagtcttatatatagctaaatagttaaaatcgttttttttaagtttcta

SEQ ID NO: 31526 - DNA, 96 bp, Fusarium azukicola
  misc_feature: 341
gtaagtcttataagagataatgcttctttactcttagaagaagtggaatcttcttctatagtactagaaagcttttctttaactaagaaagcttcc

SEQ ID NO: 31527 - DNA, 96 bp, Fusarium azukicola
  misc_feature: 341
ctttctctcaatcttcttctcttcctttccctcttattcttttcttttattcttccttctctctcctccttctttttacttttcctcctctctttc

SEQ ID NO: 31528 - DNA, 96 bp, Fusarium azukicola
  misc_feature: 341
ctttctaaccctctcttttcttctttaacctaactcacctacttaaccctaaccctaatttcaaccaattaaccctaacccttaactcacctactt

SEQ ID NO: 31529 - DNA, 96 bp, Fusarium azukicola
  misc_feature: 340
ttatcctctcctctcccctctccctctctctcttttcactccttatcctctcctctcccctctccctctctctcttttcactccttctcctctcct

SEQ ID NO: 31530 - DNA, 96 bp, Fusarium azukicola
  misc_feature: 340
agattgctattttttgcaccctaataaggctccaaaaaactggaaaactcaggaagccaataaggtgcataagacttctaagaaaagggaatctaa

SEQ ID NO: 31531 - DNA, 96 bp, Fusarium azukicola
  misc_feature: 340
gaaattagggttaggggtagtagtagagttaagggttagggttaattggttgaaattagggttagggttaagtaggtgagttaagggttagggtta

SEQ ID NO: 31532 - DNA, 96 bp, Fusarium azukicola
  misc_feature: 340
cccagattgctattttttgcaccctaataaagctccaaaaaactggaaaactcaggaagccaataaggtgcataagacttctaagaaaaaggaatc

SEQ ID NO: 31533 - DNA, 96 bp, Fusarium azukicola
  misc_feature: 340
ctcctctctttctctcccctccttctctctcctcttttaaccccctctatctcttctcccctttttccctcccctcttcctctactttctttctct

SEQ ID NO: 31534 - DNA, 96 bp, Fusarium azukicola
  misc_feature: 340
cccatatatcagtagctattttatctaggaacttgtattccttattactaggttttttatttatattatttttagttaattttcctagtttgcagt

SEQ ID NO: 31535 - DNA, 96 bp, Fusarium azukicola
  misc_feature: 339
taaagacccagattgctattttttgcaccctaataaagctccaaaaaactggaaaactcaggaagccaataaggtgcataagacttctaagaaaaa

SEQ ID NO: 31536 - DNA, 96 bp, Fusarium azukicola
  misc_feature: 339
aaagtaaaagagagaagagagtatagggtaaagtaaaataaagaataaaagtagagggtaaagtaaaagagagaagagagtatagggtaaagtaaa

SEQ ID NO: 31537 - DNA, 96 bp, Fusarium azukicola
  misc_feature: 339
gaagaagattgagagaaagaggagggaagagaaggaaggagaaagaggaaggggagttaaaagtgtgtgaagttaggagagttaaggggaggggaa

SEQ ID NO: 31538 - DNA, 96 bp, Fusarium azukicola
  misc_feature: 339
gaagggaggaagggagaagagaaagaagataggtagttagaagagaaagaaagaaggggaatagaaaaagaaaagaagaagaaaaagagaaatgaa

SEQ ID NO: 31539 - DNA, 96 bp, Fusarium azukicola
  misc_feature: 339
ttataaataaacaagaagtccttcttttaaataagcaaggaaaaataatatcacaaggaaaagaaaaaaataacctatatataataacagctaagg

SEQ ID NO: 31540 - DNA, 96 bp, Fusarium azukicola
  misc_feature: 339
aggaagaataaaagaaaagaataagagggaaaggaagagaagaagattgagagaaagaggagggaagagaaggaaggagaaagaggaaggggagtt

SEQ ID NO: 31541 - DNA, 96 bp, Fusarium azukicola
  misc_feature: 338
tttctcctccctcctcttcactccctttactcctcttaacttctctttctcttccctcttcttccctcctctccctctctcctttcccctcctctc

SEQ ID NO: 31542 - DNA, 96 bp, Fusarium azukicola
  misc_feature: 338
tttatcttcttctctttttctttactcttcccctccttcatttctctttttcttcttcttttctttttctattccccttctttctttctcttctaa

SEQ ID NO: 31543 - DNA, 96 bp, Fusarium azukicola
  misc_feature: 338
ggaaaaagaagaaaactgccttaaaatgcagttattgcaaactgccaggtcataaagacccagattgctattttttgcaccctaataaagctccaa

SEQ ID NO: 31544 - DNA, 96 bp, Fusarium azukicola
  misc_feature: 338
ttccctaccccaatctactttttactcctcttttacctaatactcactactctctcctaactaacttaatacttactatacctccctcttattact

SEQ ID NO: 31545 - DNA, 96 bp, Fusarium azukicola
  misc_feature: 338
tcttcccctctaccttccttactttatctttctcttctattcacttcctacctttctaatcacccttcctctactctttttcttttctctcctctc

SEQ ID NO: 31546 - DNA, 96 bp, Fusarium azukicola
  misc_feature: 338
aagtaaggaaggttaagaaaggagagaagtaaggaaggttaagaaaggagagaagtaaggaaggttaagaaaggagagaagtaaggaagggtaaga

SEQ ID NO: 31547 - DNA, 96 bp, Fusarium azukicola
  misc_feature: 338
gggaggaagggagaagagaaagaagataggtagttagaagagaaagaaagaaggggaatagaaaaagaaaagaagaagaaaaagagaaatgaagga

SEQ ID NO: 31548 - DNA, 96 bp, Fusarium azukicola
  misc_feature: 338
tcctctttctctttacttccctttctctttctcctccctcctcttcactccctttactcctcttaacttctctttctcttccctcttcttccctcc

SEQ ID NO: 31549 - DNA, 96 bp, Fusarium azukicola
  misc_feature: 338
tatagtgatatatccctataaactatatattatattatagaatttttactctatttttaggtatatttacctaacctatagctactataggtagct

SEQ ID NO: 31550 - DNA, 96 bp, Fusarium azukicola
  misc_feature: 338
ctactttctaaccctctcttttcttctttaacctaactcacctacttaaccctaaccctaatttcaaccaattaaccctaacccttaactcaccta

SEQ ID NO: 31551 - DNA, 96 bp, Fusarium azukicola
  misc_feature: 338
ggatatttaaataaggtaaataaacctgatttttctactaataaagataatataactaattttatatatgatacaggtgctactaggcatattgta

SEQ ID NO: 31552 - DNA, 96 bp, Fusarium azukicola
  misc_feature: 338
tacaagttcctagataaaatagctactgatatatggggtccttctagaatccctacctataataaatatatatactttattaccttcctagatagg

SEQ ID NO: 31553 - DNA, 96 bp, Fusarium azukicola
  misc_feature: 338
taagagagtaagaaagtagtagtaaaagaagagaaaggggaaggagaaagaagagaaaaaagtaagttaaggtaaaagagtagtatttaatagggg

SEQ ID NO: 31554 - DNA, 96 bp, Fusarium azukicola
  misc_feature: 338
accttccttacttctctcctttcttaaccttccttacttctctcctttcttaaccttccttacttctctcctttcttaacccttctaaccctcccc

SEQ ID NO: 31555 - DNA, 96 bp, Fusarium azukicola
  misc_feature: 338
ggagaaagagaaagggaagtaaagagaaagaggaaggaagagaagggaatataagagagagaggggaggaagggaggaagggagaagagaaagaag

SEQ ID NO: 31556 - DNA, 96 bp, Fusarium azukicola
  misc_feature: 338
gaaacttaaaaaaaacgattttaactatttagctatatataagacttaaaaatattttttctaaatttttaaaaaaattccttatataggtatctt

SEQ ID NO: 31557 - DNA, 96 bp, Fusarium azukicola
  misc_feature: 338
ctttttacttttcctcctctctttctctcccctccttctctctcctcttttaaccccctctatctcttctcccctttttccctcccctcttcctct

SEQ ID NO: 31558 - DNA, 96 bp, Fusarium azukicola
  misc_feature: 338
agtagtagagttaagggttagggttaattggttgaaattagggttagggttaagtaggtgagttaagggttagggttaattggttgaaattagggt

SEQ ID NO: 31559 - DNA, 96 bp, Fusarium azukicola
  misc_feature: 338
acctatataaggaatttttttaaaaatttagaaaaaatatttttaagtcttatatatagctaaatagttaaaatcgttttttttaagtttctagct

SEQ ID NO: 31560 - DNA, 96 bp, Fusarium azukicola
  misc_feature: 338
aaatggcattttttaaaaacctaaaaaaattatatatagttttattactaattaaatagctaaaaaatactttttatttatatatagctaatttct

SEQ ID NO: 31561 - DNA, 96 bp, Fusarium azukicola
  misc_feature: 337
ttttttctcttctttctccttcccctttctcttcttttactactactttcttactctcttactacctttacttctatacctattttctctttaact

SEQ ID NO: 31562 - DNA, 96 bp, Fusarium azukicola
  misc_feature: 337
ttcttatacccttatacacttttcttctttattttctttaccctatactttcttcattattttactttaccctccacttttattctttattttact

SEQ ID NO: 31563 - DNA, 96 bp, Fusarium azukicola
  misc_feature: 337
tactcttccccttctccttttatcttcttctctttttctttactcttcccctccttcatttctctttttcttcttcttttctttttctattcccct

SEQ ID NO: 31564 - DNA, 96 bp, Fusarium azukicola
  misc_feature: 337
gtagtagagttaagggttagggttaattggttgaaattagggttagggttaagtaggtgagttaagggttagggttaattggttgaaattagggtt

SEQ ID NO: 31565 - DNA, 96 bp, Fusarium azukicola
  misc_feature: 336
tttatactctcttcttatacccttatacacttttcttctttattttctttaccctatactttcttcattattttactttaccctccacttttattc

SEQ ID NO: 31566 - DNA, 96 bp, Fusarium azukicola
  misc_feature: 336
ttctctttctcctccctcctcttcactccctttactcctcttaacttctctttctcttccctcttcttccctcctctccctctctcctttcccctc

SEQ ID NO: 31567 - DNA, 96 bp, Fusarium azukicola
  misc_feature: 336
ttatgcaccttattggcttcctgagttttccagttttttggagccttattagggtgcaaaaaatagcaatctgggtctttatgacctggcagtttg

SEQ ID NO: 31568 - DNA, 96 bp, Fusarium azukicola
  misc_feature: 336
ggtttttactaagatatatatataataataatagaggtttaattttttcctctaataataagaacgtataaagctataacccttataagattataa

SEQ ID NO: 31569 - DNA, 96 bp, Fusarium azukicola
  misc_feature: 336
tgtagttaagaagaggaggggagaagagaaagaaagtagaggaagaggggagggaaaaaggggagaagagatagagggggttaaaagaggagagag

SEQ ID NO: 31570 - DNA, 96 bp, Fusarium azukicola
  misc_feature: 336
tcttaacttctctttctcttccctcttcttccctcctctccctctctcctttcccctcctctctaccgaccctaaactaactccctatccttcctc

SEQ ID NO: 31571 - DNA, 96 bp, Fusarium azukicola
  misc_feature: 336
taagctaatagctttatagaaaggataaataggactatattagaaaaggttagagctttattatttacttctaacctacctaaatacctttaggga

SEQ ID NO: 31572 - DNA, 96 bp, Fusarium azukicola
  misc_feature: 336
ctcacctacttaaccctaaccctaatttcaaccaattaaccctaacccttaactcacctacttaaccctaaccctaatttcaaccaattaacccta

SEQ ID NO: 31573 - DNA, 96 bp, Fusarium azukicola
  misc_feature: 336
ctatactctcttctctcttttactttaccctatactctcttctctcttttactttaccctctacttttattctttattttactttaccctatactc

SEQ ID NO: 31574 - DNA, 96 bp, Fusarium azukicola
  misc_feature: 336
cctcccctcttcctctactttctttctcttctcccctcctcttcttaactacactttctctctacctcacttttccctctttatattaaccctctc

SEQ ID NO: 31575 - DNA, 96 bp, Fusarium azukicola
  misc_feature: 336
attttttgcaccctaataaggctccaaaaaactggaaaactcaggaagccaataaggtgcataagacttctaagaaaagggaatctaaacctaatt

SEQ ID NO: 31576 - DNA, 96 bp, Fusarium azukicola
  misc_feature: 336
atcaaaggtcctagtatattattagttatattattttgttgagaaattatggaattatatacctctaaattatcacttatatcaaaatccatttct

SEQ ID NO: 31577 - DNA, 96 bp, Fusarium azukicola
  misc_feature: 336
acccttcctctactctttttcttttctctcctctcccctctccctctctctcttttcactccttatcctctcctctcccctctccctctctctctt

SEQ ID NO: 31578 - DNA, 96 bp, Fusarium azukicola
  misc_feature: 335
aagtaaaagagagaagagagtatagggtaaagtaaaataaagaataaaagtagagggtaaagtaaaagagagaagagagtatagggtaaagtaaaa

SEQ ID NO: 31579 - DNA, 96 bp, Fusarium azukicola
  misc_feature: 335
aaaagtctatctattaaggaataagttagaagctattataaaatttaaggaatttagaaaagaaatagaaaataatcctaataaaataagaataaa

SEQ ID NO: 31580 - DNA, 96 bp, Fusarium azukicola
  misc_feature: 335
tcacctacttaaccctaaccctaatttcaaccaattaaccctaacccttaactcacctacttaaccctaaccctaatttcaaccaattaaccctaa

SEQ ID NO: 31581 - DNA, 96 bp, Fusarium azukicola
  misc_feature: 335
cctaactcacctacttaaccctaaccctaatttcaaccaattaaccctaacccttaactcacctacttaaccctaaccctaatttcaaccaattaa

SEQ ID NO: 31582 - DNA, 96 bp, Fusarium azukicola
  misc_feature: 335
ggaagaataaaagaaaagaataagagggaaaggaagagaagaagattgagagaaagaggagggaagagaaggaaggagaaagaggaaggggagtta

SEQ ID NO: 31583 - DNA, 96 bp, Fusarium azukicola
  misc_feature: 335
taaaggaggctgttaatgttctatattatattaccaactatagtgatatatccctataaaccatatattatattatagaatttttactctattttt

SEQ ID NO: 31584 - DNA, 96 bp, Fusarium azukicola
  misc_feature: 335
gtattattctaattggttaaaaaggttcctacagacctttatgactgccgtcatctatgcatcaaagtataataactgccgattggctaaaaaagg

SEQ ID NO: 31585 - DNA, 96 bp, Fusarium azukicola
  misc_feature: 335
ggtaaaggaaaggtagtgtagagaagagtaaaaagagaagttataaagagttattaagaaagggagggtgggggaaaaaagaggaaggatagggag

SEQ ID NO: 31586 - DNA, 96 bp, Fusarium azukicola
  misc_feature: 335
aaccttccttacttctctcctttcttaaccttccttacttctctcctttcttaaccttccttacttctctcctttcttaacccttctaaccctccc

SEQ ID NO: 31587 - DNA, 96 bp, Fusarium azukicola
  misc_feature: 335
ctctactctttttcttttctctcctctcccctctccctctctctcttttcactccttatcctctcctctcccctctccctctctctcttttcactc

SEQ ID NO: 31588 - DNA, 96 bp, Fusarium azukicola
  misc_feature: 335
gagtaaagagggagagaagaggaagagaaagaagggagagggttaatataaagagggaaaagtgaggtagagagaaagtgtagttaagaagaggag

SEQ ID NO: 31589 - DNA, 96 bp, Fusarium azukicola
  misc_feature: 334
ttccctcttattcttttcttttattcttccttctctctcctccttctttttacttttcctcctctctttctctcccctccttctctctcctctttt

SEQ ID NO: 31590 - DNA, 96 bp, Fusarium azukicola
  misc_feature: 334
ttactcttccccttctccttttatcttcttctctttttctttactcttcccctccttcatttctctttttcttcttcttttctttttctattcccc

SEQ ID NO: 31591 - DNA, 96 bp, Fusarium azukicola
  misc_feature: 334
tcttctcccttcctcccttcctcccctctctctcttatattcccttctcttccttcctctttctctttacttccctttctctttctcctccctcct

SEQ ID NO: 31592 - DNA, 96 bp, Fusarium azukicola
  misc_feature: 334
atatacctaaaaatagagtaaaaattctataatataatatgtggtttatagggatatatcactatagttggtaatataatatagaacattaacaga

SEQ ID NO: 31593 - DNA, 96 bp, Fusarium azukicola
  misc_feature: 334
tcctctctttctctcccctccttctctctcctcttttaaccccctctatctcttctcccctttttccctcccctcttcctctactttctttctctt

SEQ ID NO: 31594 - DNA, 96 bp, Fusarium azukicola
  misc_feature: 334
tcatatataaaattagttatattatttttattagtagaaaaatcaggtttatttaccttatttaaatatcctagttgtttctttatatagggaagg

SEQ ID NO: 31595 - DNA, 96 bp, Fusarium azukicola
  misc_feature: 334
gaaaaaattaaacctctattattattatatatatatcttagtaaaaacccctttattatagacctgatattataagggaaaatctaagattatata

SEQ ID NO: 31596 - DNA, 96 bp, Fusarium azukicola
  misc_feature: 334
attaatgttctatattatattaccaactatagtgatatatccctataaaccatatattatattatagaatttttactctatttttaggtatattta

SEQ ID NO: 31597 - DNA, 96 bp, Fusarium azukicola
  misc_feature: 334
ctttattttctttaccctatactttcttcattattttactttaccctccacttttattctttattttactttaccctatactctcttctctctttt

SEQ ID NO: 31598 - DNA, 96 bp, Fusarium azukicola
  misc_feature: 334
atttatattatttttagttaattttcctagtttgcagttttcgcagtttttaacttgatataggtcctcactagtatatttaaagagaggatcttt

SEQ ID NO: 31599 - DNA, 96 bp, Fusarium azukicola
  misc_feature: 334
actacttcccctccccttaactctcctaacttcacacacttttaactccccttcctctttctccttccttctcttccctcctctttctctcaatct

SEQ ID NO: 31600 - DNA, 96 bp, Fusarium azukicola
  misc_feature: 333
tagaaaaagaaaagaagaagaaaaagagaaatgaaggaggggaagagtaaagaaaaagagaagaagataaaaggagaaggggaagagtaaaagaaa

SEQ ID NO: 31601 - DNA, 96 bp, Fusarium azukicola
  misc_feature: 333
aaactggaaaactcaggaagccaataaggtgcataagacttctaagaaaaaggaatctaaacctaattctaagaaggaagaaagagaaaagaaaca

SEQ ID NO: 31602 - DNA, 96 bp, Fusarium azukicola
  misc_feature: 333
gggttaaaagaggagagagaaggaggggagagaaagagaggaggaaaagtaaaaagaaggaggagagagaaggaagaataaaagaaaagaataaga

SEQ ID NO: 31603 - DNA, 96 bp, Fusarium azukicola
  misc_feature: 333
agagaaagagaggaggaaaagtaaaaagaaggaggagagagaaggaagaataaaagaaaagaataagagggaaaggaagagaagaagattgagaga

SEQ ID NO: 31604 - DNA, 96 bp, Fusarium azukicola
  misc_feature: 333
ggagagagaaggaagaataaaagaaaagaataagagggaaaggaagagaagaagattgagagaaagaggagggaagagaaggaaggagaaagagga

SEQ ID NO: 31605 - DNA, 96 bp, Fusarium azukicola
  misc_feature: 333
aagggagtaataagagggaggtatagtaagtattaagttagttaggagagagtagtgagtattaggtaaaagaggagtaaaaagtagattggggta

SEQ ID NO: 31606 - DNA, 96 bp, Fusarium azukicola
  misc_feature: 333
aaggggtttttactaagatatatatataataataatagaggtttaatttttcctctaataataagaacgtataaagctataacccttataagatta

SEQ ID NO: 31607 - DNA, 96 bp, Fusarium azukicola
  misc_feature: 333
ctccttctctctcctcttttaaccccctctatctcttctcccctttttccctcccctcttcctctactttctttctcttctcccctcctcttctta

SEQ ID NO: 31608 - DNA, 96 bp, Fusarium azukicola
  misc_feature: 333
caaaaagactagttttttcctttatatttaagataggaagatctaagttatctcttagtctatagttattcttattagaaataaccttagctgtta

SEQ ID NO: 31609 - DNA, 96 bp, Fusarium azukicola
  misc_feature: 333
cttttactttaccctatactctcttctctcttttactttaccctctacttttattctttattttactttaccctatactctcttctctcttttact

SEQ ID NO: 31610 - DNA, 96 bp, Fusarium azukicola
  misc_feature: 333
cttccctatataaagaaacaactaggatatttaaataaggtaaataaacctgatttttctactaataaaaataatataactaattttatatatgat

SEQ ID NO: 31611 - DNA, 96 bp, Fusarium azukicola
  misc_feature: 333
aagggttttaaggtttattaagtagagaagaaggagggagaataaggtaagtaagtaagttaggttaaagaagagaagaaagggttagaaagtaat

SEQ ID NO: 31612 - DNA, 96 bp, Fusarium azukicola
  misc_feature: 333
acagtttttaacttgatataggtcctcactagtatatttaaagagaggatcttttatttttatatatttaattagacttcttaagttaagatgact

SEQ ID NO: 31613 - DNA, 96 bp, Fusarium azukicola
  misc_feature: 333
aaaggggtttttactaagatatatatataataataatagaggtttaatttttcctctaataataagaacgtataaagctataacccttataagatt

SEQ ID NO: 31614 - DNA, 96 bp, Fusarium azukicola
  misc_feature: 332
ttctaaccctctcttttcttctttaacctaactcacctacttaaccctaaccctaatttcaaccaattaaccctaacccttaactcacctacttaa

SEQ ID NO: 31615 - DNA, 96 bp, Fusarium azukicola
  misc_feature: 332
ctctttattgtgacccacttttatctatctatcttctataagtctctcttagaagctagatattatctctttattacttttcttcctagttatcca

SEQ ID NO: 31616 - DNA, 96 bp, Fusarium azukicola
  misc_feature: 332
gtaaagtaaaagagagaagagagtatagggtaaagtaaaataaagaataaaagtagagggtaaagtaaaagagagaagagagtatagggtaaagta

SEQ ID NO: 31617 - DNA, 96 bp, Fusarium azukicola
  misc_feature: 332
taacctatactatttgagagaataaaagagaatctatccctaatataacttatttcctttataaagggtttttattatattttaatacttttccct

SEQ ID NO: 31618 - DNA, 96 bp, Fusarium azukicola
  misc_feature: 332
aatttcaaccaattaaccctaacccttaactcacctacttaaccctaaccctaatttcaaccaattaaccctaacccttaactctactactacccc

SEQ ID NO: 31619 - DNA, 96 bp, Fusarium azukicola
  misc_feature: 332
gccttaaaatgcagttattgcaaactgccaggtcataaagacccagattgctattttttgcaccctaataaagctccaaaaaactggaaaactcag

SEQ ID NO: 31620 - DNA, 96 bp, Fusarium azukicola
  misc_feature: 332
agggagtaataagagggaggtatagtaagtattaagttagttaggagagagtagtgagtattaggtaaaagaggagtaaaaagtagattggggtag

SEQ ID NO: 31621 - DNA, 96 bp, Fusarium azukicola
  misc_feature: 332
aggggtttttactaagatatatatataataataatagaggtttaatttttcctctaataataagaacgtataaagctataacccttataagattat

SEQ ID NO: 31622 - DNA, 96 bp, Fusarium azukicola
  misc_feature: 331
aatttcctagataactaggaagaaaagtaataaagagataatatctagcttctaagagagacttatagaagatagatagataaaagtgggtcacaa

SEQ ID NO: 31623 - DNA, 96 bp, Fusarium azukicola
  misc_feature: 331
atagaaaaagaaaagaagaagaaaaagagaaatgaaggaggggaagagtaaagaaaaagagaagaagataaaaggagaaggggaagagtaaaagaa

SEQ ID NO: 31624 - DNA, 96 bp, Fusarium azukicola
  misc_feature: 331
agtaaggaaggttaagaaaggagagaagtaaggaaggttaagaaaggagagaagtaaggaaggttaagaaaggagagaagtaaggaagggtaagaa

SEQ ID NO: 31625 - DNA, 96 bp, Fusarium azukicola
  misc_feature: 331
tacctctaaatcatcacttatatcaaaatccatttcatctggggtctcagaaagggaaattaggtcttcctcggctttaggagatgacgaagaaga

SEQ ID NO: 31626 - DNA, 96 bp, Fusarium azukicola
  misc_feature: 331
tcctctcctctcccctctccctctctctcttttcactccttatcctctcctctcccctctccctctctctcttttcactccttctcctctcctctc

SEQ ID NO: 31627 - DNA, 96 bp, Fusarium azukicola
  misc_feature: 331
gtaaagtaaaataaagaataaaagtggagggtaaagtaaaataatgaagaaagtatagggtaaagaaaataaagaagaaaagtgtataagggtata

SEQ ID NO: 31628 - DNA, 96 bp, Fusarium azukicola
  misc_feature: 331
atctatccctaatataacttatttcctttataaagggtttttattgtattttaatacttttccctatataatcttagattttcccttataatatta

SEQ ID NO: 31629 - DNA, 96 bp, Fusarium azukicola
  misc_feature: 331
gggagtaataagagggaggtatagtaagtattaagttagttaggagagagtagtgagtattaggtaaaagaggagtaaaaagtagattggggtagg

SEQ ID NO: 31630 - DNA, 96 bp, Fusarium azukicola
  misc_feature: 331
ggaggaagggagaagagaaagaagataggtagttagaagagaaagaaagaaggggaatagaaaaagaaaagaagaagaaaaagagaaatgaaggag

SEQ ID NO: 31631 - DNA, 96 bp, Fusarium azukicola
  misc_feature: 331
ctacttcccctccccttaactctcctaacttcacacacttttaactccccttcctctttctccttccttctcttccctcctctttctctcaatctt

SEQ ID NO: 31632 - DNA, 96 bp, Fusarium azukicola
  misc_feature: 331
actcacctacttaaccctaaccctaatttcaaccaattaaccctaacccttaactcacctacttaaccctaaccctaatttcaaccaattaaccct

SEQ ID NO: 31633 - DNA, 96 bp, Fusarium azukicola
  misc_feature: 331
aacttctctttctcttccctcttcttccctcctctccctctctcctttcccctcctctctaccgaccctaaactaactccctatccttcctctttt

SEQ ID NO: 31634 - DNA, 96 bp, Fusarium azukicola
  misc_feature: 330
ttgctattttttgcaccctaataaagctccaaaaaactggaaaactcaggaagccaataaggtgcataagacttctaagaaaaaggaatctaaacc

SEQ ID NO: 31635 - DNA, 96 bp, Fusarium azukicola
  misc_feature: 330
ttcccctctaccttccttactttatctttctcttctattcacttcctacctttctaatcacccttcctctactctttttcttttctctcctctccc

SEQ ID NO: 31636 - DNA, 96 bp, Fusarium azukicola
  misc_feature: 330
taataaaggggtttttactaagatatatatataataataatagaggtttaatttttcctctaataataagaacgtataaagctataacccttataa

SEQ ID NO: 31637 - DNA, 96 bp, Fusarium azukicola
  misc_feature: 330
taaagtaaaagagagaagagagtatagggtaaagtaaaataaagaataaaagtagagggtaaagtaaaagagagaagagagtatagggtaaagtaa

SEQ ID NO: 31638 - DNA, 96 bp, Fusarium azukicola
  misc_feature: 330
tctcttcctttccctcttattcttttcttttattcttccttctctctcctccttctttttacttttcctcctctctttctctcccctccttctctc

SEQ ID NO: 31639 - DNA, 96 bp, Fusarium azukicola
  misc_feature: 330
tctctctcttatattcccttctcttccttcctctttctctttacttccctttctctttctcctccctcctcttcactccctttactcctcttaact

SEQ ID NO: 31640 - DNA, 96 bp, Fusarium azukicola
  misc_feature: 330
tatttatattatttttagttaattttcctagtttgcagttttcgcagtttttaacttgatataggtcctcactagtatatttaaagagaggatctt

SEQ ID NO: 31641 - DNA, 96 bp, Fusarium azukicola
  misc_feature: 330
aatggcattttttaaaaacctaaaaaaattatatatagttttattactaattaaatagctaaaaaatactttttatttatatatagctaatttcta

SEQ ID NO: 31642 - DNA, 96 bp, Fusarium azukicola
  misc_feature: 330
gataacgtttttttactataaaagagccttgagagctcttaacccttctagaaagtggtggttgtgtcacacccatggctttagcagctcggggta

SEQ ID NO: 31643 - DNA, 96 bp, Fusarium azukicola
  misc_feature: 330
taactcacctacttaaccctaaccctaatttcaaccaattaaccctaacccttaactcacctacttaaccctaaccctaatttcaaccaattaacc

SEQ ID NO: 31644 - DNA, 96 bp, Fusarium azukicola
  misc_feature: 330
cttcctacctttctaatcacccttcctctactctttttcttttctctcctctcccctctccctctctctcttttcactccttatcctctcctctcc

SEQ ID NO: 31645 - DNA, 96 bp, Fusarium azukicola
  misc_feature: 330
cttttcttctttattttctttaccctatactttcttcattattttactttaccctccacttttattctttattttactttaccctatactctcttc

SEQ ID NO: 31646 - DNA, 96 bp, Fusarium azukicola
  misc_feature: 330
caaaggtcctagtatattattagttatattattttgttgagaaattatggaattatatacctctaaattatcacttatatcaaaatccatttcttc

SEQ ID NO: 31647 - DNA, 96 bp, Fusarium azukicola
  misc_feature: 330
ctcttaacttctctttctcttccctcttcttccctcctctccctctctcctttcccctcctctctaccgaccctaaactaactccctatccttcct

SEQ ID NO: 31648 - DNA, 96 bp, Fusarium azukicola
  misc_feature: 330
ccctccttcatttctctttttcttcttcttttctttttctattccccttctttctttctcttctaactacctatcttctttctcttctcccttcct

SEQ ID NO: 31649 - DNA, 96 bp, Fusarium azukicola
  misc_feature: 330
aactgcaaactaggaaaattaactaaaaataatataaataaaaaacctagtaataaggaatacaagttcctagataaaatagctactgatatatgg

SEQ ID NO: 31650 - DNA, 96 bp, Fusarium azukicola
  misc_feature: 330
atttttttaaaaatttagaaaaaatatttttaagtcttatatatagctaaatagttaaaatcgttttttttaagtttctagctattttatagcgat

SEQ ID NO: 31651 - DNA, 96 bp, Fusarium azukicola
  misc_feature: 330
aagtcttataagagataatgcttctttactcttagaagaagtggaatcttcttctatagtactagaaagcttttctttaactaagaaagcttccat

SEQ ID NO: 31652 - DNA, 96 bp, Fusarium azukicola
  misc_feature: 329
tttttttaaaaatttagaaaaaatatttttaagtcttatatatagctaaatagttaaaatcgttttttttaagtttctagctattttatagcgatt

SEQ ID NO: 31653 - DNA, 96 bp, Fusarium azukicola
  misc_feature: 329
ttttttaaaaacctaaaaaaattatatatagttttattactaattaaatagctaaaaaatactttttatttatatatagctaatttctagctattt

SEQ ID NO: 31654 - DNA, 96 bp, Fusarium azukicola
  misc_feature: 329
tttctttttaccttaacttactctatactcctttctctcctaatacttactatactcctccttaacttaacttctctccttaaacttttttattac

SEQ ID NO: 31655 - DNA, 96 bp, Fusarium azukicola
  misc_feature: 329
ttctttttaccttaacttactctatactcctttctctcctaatacttactatactcctccttaacttaacttctctccttaaacttttttattact

SEQ ID NO: 31656 - DNA, 96 bp, Fusarium azukicola
  misc_feature: 329
ttcccctccttcatttctctttttcttcttcttttctttttctattccccttctttctttctcttctaactacctatcttctttctcttctccctt

SEQ ID NO: 31657 - DNA, 96 bp, Fusarium azukicola
  misc_feature: 329
taaaagtctatctattaaggaataagttagaagctattataaaatttaaggaatttagaaaagaaatagaaaataatcctaataaaataagaataa

SEQ ID NO: 31658 - DNA, 96 bp, Fusarium azukicola
  misc_feature: 329
tcttaaccttccttacttctctcctttcttaaccttccttacttctctcctttcttaaccttccttacttctctcctttcttaacccttctaaccc

SEQ ID NO: 31659 - DNA, 96 bp, Fusarium azukicola
  misc_feature: 329
caaccgaccttcctcgaccaccactcctcgacgattcagccattacctgcgcatctatatccatttgatcaattacttgtcttccttcctctacta

SEQ ID NO: 31660 - DNA, 96 bp, Fusarium azukicola
  misc_feature: 329
tactttctaaccctctcttttcttctttaacctaactcacctacttaaccctaaccctaatttcaaccaattaaccctaacccttaactcacctac

SEQ ID NO: 31661 - DNA, 96 bp, Fusarium azukicola
  misc_feature: 329
cccctcctcttcttaactacactttctctctacctcacttttccctctttatattaaccctctcccttctttctcttcctcttctctccctcttta

SEQ ID NO: 31662 - DNA, 96 bp, Fusarium azukicola
  misc_feature: 329
gtggagggtaaagtaaaataatgaagaaagtatagggtaaagaaaataaagaagaaaagtgtataagggtataagaagagagtataaaaggataag

SEQ ID NO: 31663 - DNA, 96 bp, Fusarium azukicola
  misc_feature: 329
attataaataaacaagaagtccttcttttaaataagcaaggaaaaataatatcacaaggaaaagaaaaaaataacctatatataataacagctaag

SEQ ID NO: 31664 - DNA, 96 bp, Fusarium azukicola
  misc_feature: 329
aaaaaaattatatatagttttattactaattaaatagctaaaaaatactttttatttatatatagctaatttctagctatttttatagacctaagg

SEQ ID NO: 31665 - DNA, 96 bp, Fusarium azukicola
  misc_feature: 328
ttcctcctctctttctctcccctccttctctctcctcttttaaccccctctatctcttctcccctttttccctcccctcttcctctactttctttc

SEQ ID NO: 31666 - DNA, 96 bp, Fusarium azukicola
  misc_feature: 328
taagtcttataagagataatgcttctttactcttagaagaagtggaatcttcttctatagtactagaaagcttttctttaactaagaaagcttcca

SEQ ID NO: 31667 - DNA, 96 bp, Fusarium azukicola
  misc_feature: 328
tcttttactcttccccttctccttttatcttcttctctttttctttactcttcccctccttcatttctctttttcttcttcttttctttttctatt

SEQ ID NO: 31668 - DNA, 96 bp, Fusarium azukicola
  misc_feature: 328
gagaaagaagataggtagttagaagagaaagaaagaaggggaatagaaaaagaaaagaagaagaaaaagagaaatgaaggaggggaagagtaaaga

SEQ ID NO: 31669 - DNA, 96 bp, Fusarium azukicola
  misc_feature: 328
taatatagaacattaatagcctcctttaaagttataatcttataagggttatagctttatacgttcttattattagaggaaaaaattaaacctcta

SEQ ID NO: 31670 - DNA, 96 bp, Fusarium azukicola
  misc_feature: 328
gtttttactcttttatctttacttactataacttctcaattactctacctcctctctctctctttcttctttttttttctcccccttttttttttt

SEQ ID NO: 31671 - DNA, 96 bp, Fusarium azukicola
  misc_feature: 328
ctaactcacctacttaaccctaaccctaatttcaaccaattaaccctaacccttaactcacctacttaaccctaaccctaatttcaaccaattaac

SEQ ID NO: 31672 - DNA, 96 bp, Fusarium azukicola
  misc_feature: 328
atattatataataagtctcactttctaattttagctattttaagcttaatttcgacttttatagcttttttaaaaaataccttttaaggtgaaaat

SEQ ID NO: 31673 - DNA, 96 bp, Fusarium azukicola
  misc_feature: 328
aagagaataaaagagaatctatccctaatataacttatttcctttataaagggtttttattatattttaatacttttccctatataatcttagatt

SEQ ID NO: 31674 - DNA, 96 bp, Fusarium azukicola
  misc_feature: 327
ttttatcttcttctctttttctttactcttcccctccttcatttctctttttcttcttcttttctttttctattccccttctttctttctcttcta

SEQ ID NO: 31675 - DNA, 96 bp, Fusarium azukicola
  misc_feature: 327
ttttaaaaacctaaaaaaattatatatagttttattactaattaaatagctaaaaaatactttttatttatatatagctaatttctagctattttt

SEQ ID NO: 31676 - DNA, 96 bp, Fusarium azukicola
  misc_feature: 327
gaaaattaactaaaaataatataaataaaaaacctagtaataaggaatataagttcctagataaaatagctactaatatatagggtccttctagaa

SEQ ID NO: 31677 - DNA, 96 bp, Fusarium azukicola
  misc_feature: 327
atattatctctaacttctagaggggatttattatttaaagccgaatgcgggcttctattatatatatatacggctgcttccacagcctctccccca

SEQ ID NO: 31678 - DNA, 96 bp, Fusarium azukicola
  misc_feature: 327
ggagagaaagagaggaggaaaagtaaaaagaaggaggagagagaaggaagaataaaagaaaagaataagagggaaaggaagagaagaagattgaga

SEQ ID NO: 31679 - DNA, 96 bp, Fusarium azukicola
  misc_feature: 327
tcccctccttcatttctctttttcttcttcttttctttttctattccccttctttctttctcttctaactacctatcttctttctcttctcccttc

SEQ ID NO: 31680 - DNA, 96 bp, Fusarium azukicola
  misc_feature: 327
agggttttaaggtttattaagtagagaagaaggagggagaataaggtaagtaagtaagttaggttaaagaagagaagaaagggttagaaagtaata

SEQ ID NO: 31681 - DNA, 96 bp, Fusarium azukicola
  misc_feature: 327
cctttcttaaccttccttacttctctcctttcttaaccttccttacttctctcctttcttaaccttccttacttctctcctttcttaacccttcta

SEQ ID NO: 31682 - DNA, 96 bp, Fusarium azukicola
  misc_feature: 327
taaccttccttacttctctcctttcttaaccttccttacttctctcctttcttaaccttccttacttctctcctttcttaacccttctaaccctcc

SEQ ID NO: 31683 - DNA, 96 bp, Fusarium azukicola
  misc_feature: 327
aggaagccaataaggtgcataagacttctaagaaaagggaatctaaacctaattctaagaaggaagaaagagaaaagaaacaagaaaagctattta

SEQ ID NO: 31684 - DNA, 96 bp, Fusarium azukicola
  misc_feature: 327
gggaaggtttcttatcaaaggtcctagtatattattagttatattattttgttgagaaattatggaattatatacctctaaattatcacttatatc

SEQ ID NO: 31685 - DNA, 96 bp, Fusarium azukicola
  misc_feature: 327
cttctcccttcctcccttcctcccctctctctcttatattcccttctcttccttcctctttctctttacttccctttctctttctcctccctcctc

SEQ ID NO: 31686 - DNA, 96 bp, Fusarium azukicola
  misc_feature: 327
gaactacttcccctccccttaactctcctaacttcacacacttttaactccccttcctctttctccttccttctcttccctcctctttctctcaat

SEQ ID NO: 31687 - DNA, 96 bp, Fusarium azukicola
  misc_feature: 327
cttataatatcaggtctataataaaggggtttttactaagatatatatataataataatagaggtttaattttttcctctaataataagaacgtat

SEQ ID NO: 31688 - DNA, 96 bp, Fusarium azukicola
  misc_feature: 327
aggttttttatttatattatttttagttaattttcctagtttgcagttttcgcagtttttaacttgatataggtcctcactagtatatttaaagag

SEQ ID NO: 31689 - DNA, 96 bp, Fusarium azukicola
  misc_feature: 327
cctgttaatgttctatattatattaccaactatagtgatatatccctataaaccacatattatattatagaatttttactctatttttaggtatat

SEQ ID NO: 31690 - DNA, 96 bp, Fusarium azukicola
  misc_feature: 327
ccaaccgaccttcctcgaccaccactcctcgacgattcagccattacctgcgcatctatatccatttgatcaattacttgtcttccttcctctact

SEQ ID NO: 31691 - DNA, 96 bp, Fusarium azukicola
  misc_feature: 327
caaggaaaagaaaaaaataacctatatataataacagctaaggttatttctaataagaataactatagactaagagataacttagatcttcctatt

SEQ ID NO: 31692 - DNA, 96 bp, Fusarium azukicola
  misc_feature: 326
ttaagagaataaaagagaatctatccctaatataacttatttcctttataaagggtttttattatattttaatacttttccctatataatcttaga

SEQ ID NO: 31693 - DNA, 96 bp, Fusarium azukicola
  misc_feature: 326
tattaatgttctatattatattaccaactatagtgatatatccctataaaccatatattatattatagaatttttactctatttttaggtatattt

SEQ ID NO: 31694 - DNA, 96 bp, Fusarium azukicola
  misc_feature: 326
tatcctctcctctcccctctccctctctctcttttcactccttatcctctcctctcccctctccctctctctcttttcactccttctcctctcctc

SEQ ID NO: 31695 - DNA, 96 bp, Fusarium azukicola
  misc_feature: 326
taaactaactccctatccttcctcttttttcccccaccctccctttcttaataactctttataacttctctttttactcttctctacactaccttt

SEQ ID NO: 31696 - DNA, 96 bp, Fusarium azukicola
  misc_feature: 326
aactacttcccctccccttaactctcctaacttcacacacttttaactccccttcctctttctccttccttctcttccctcctctttctctcaatc

SEQ ID NO: 31697 - DNA, 96 bp, Fusarium azukicola
  misc_feature: 326
gagaaagaaagtagaggaagaggggagggaaaaaggggagaagagatagagggggttaaaagaggagagagaaggaggggagagaaagagaggagg

SEQ ID NO: 31698 - DNA, 96 bp, Fusarium azukicola
  misc_feature: 326
atagaaggggagggttagaagggttaagaaaggagagaagtaaggaaggttaagaaaggagagaagtaaggaaggttaagaaaggagagaagtaag

SEQ ID NO: 31699 - DNA, 96 bp, Fusarium azukicola
  misc_feature: 326
agcaaggaaaaataatatcacaaggaaaagaaaaaaataacctatatataataacagctaaggttatttctaataagaataactatagactaagag

SEQ ID NO: 31700 - DNA, 96 bp, Fusarium azukicola
  misc_feature: 326
ccctttttccctcccctcttcctctactttctttctcttctcccctcctcttcttaactacactttctctctacctcacttttccctctttatatt

SEQ ID NO: 31701 - DNA, 96 bp, Fusarium azukicola
  misc_feature: 325
tttctctttctcctccctcctcttcactccctttactcctcttaacttctctttctcttccctcttcttccctcctctccctctctcctttcccct

SEQ ID NO: 31702 - DNA, 96 bp, Fusarium azukicola
  misc_feature: 325
ttccctttctctttctcctccctcctcttcactccctttactcctcttaacttctctttctcttccctcttcttccctcctctccctctctccttt

SEQ ID NO: 31703 - DNA, 96 bp, Fusarium azukicola
  misc_feature: 325
tggaaaaagaagaaaactgccttaaaatgcagttattgcaaactgccaggtcataaagacccagattgctattttttgcaccctaataaagctcca

SEQ ID NO: 31704 - DNA, 96 bp, Fusarium azukicola
  misc_feature: 325
tgcctagtagcacctgtatcatatataaaattagttatattatttttattagtagaaaaatcaggtttatttaccttatttaaatatcctagttgt

SEQ ID NO: 31705 - DNA, 96 bp, Fusarium azukicola
  misc_feature: 325
agaagaagattgagagaaagaggagggaagagaaggaaggagaaagaggaaggggagttaaaagtgtgtgaagttaggagagttaaggggagggga

SEQ ID NO: 31706 - DNA, 96 bp, Fusarium azukicola
  misc_feature: 325
cagattgctattttttgcaccctaataaggctccaaaaaactggaaaactcaggaagccaataaggtgcataagacttctaagaaaagggaatcta

SEQ ID NO: 31707 - DNA, 96 bp, Fusarium azukicola
  misc_feature: 325
taagagaataaaagagaatctatccctaatataacttatttcctttataaagggtttttattatattttaatacttttccctatataatcttagat

SEQ ID NO: 31708 - DNA, 96 bp, Fusarium azukicola
  misc_feature: 325
taacagctaaggttatttctaataagaataactatagactaagagataacttagatcttcctattctaaatataaaggaaaaaactagtctttttg

SEQ ID NO: 31709 - DNA, 96 bp, Fusarium azukicola
  misc_feature: 325
ctctttctctttacttccctttctctttctcctccctcctcttcactccctttactcctcttaacttctctttctcttccctcttcttccctcctc

SEQ ID NO: 31710 - DNA, 96 bp, Fusarium azukicola
  misc_feature: 325
ccagattgctattttttgcaccctaataaagctccaaaaaactggaaaactcaggaagccaataaggtgcataagacttctaagaaaaaggaatct

SEQ ID NO: 31711 - DNA, 96 bp, Fusarium azukicola
  misc_feature: 324
ttttcttctttattttctttaccctatactttcttcattattttactttaccctccacttttattctttattttactttaccctatactctcttct

SEQ ID NO: 31712 - DNA, 96 bp, Fusarium azukicola
  misc_feature: 324
aactggaaaactcaggaagccaataaggtgcataagacttctaagaaaaaggaatctaaacctaattctaagaaggaagaaagagaaaagaaacaa

SEQ ID NO: 31713 - DNA, 96 bp, Fusarium azukicola
  misc_feature: 324
ttaaccttccttacttctctcctttcttaaccttccttacttctctcctttcttaaccttccttacttctctcctttcttaacccttctaaccctc

SEQ ID NO: 31714 - DNA, 96 bp, Fusarium azukicola
  misc_feature: 324
tggcattttttaaaaacctaaaaaaattatatatagttttattactaattaaatagctaaaaaatactttttatttatatatagctaatttctagc

SEQ ID NO: 31715 - DNA, 96 bp, Fusarium azukicola
  misc_feature: 324
tcttttatttttatatatttaattagacttcttaagttaagatgacttagtcttttatgccagtcaaaaagactagttttttcctttatatttaag

SEQ ID NO: 31716 - DNA, 96 bp, Fusarium azukicola
  misc_feature: 324
tctttattgtgacccacttttatctatctatcttctataagtctctcttagaagctagatattatctctttattacttttcttcctagttatccag

SEQ ID NO: 31717 - DNA, 96 bp, Fusarium azukicola
  misc_feature: 324
tattatataataagtctcactttctaattttagctattttaagcttaatttcgacttttatagcttttttaaaaaataccttttaaggtgaaaata

SEQ ID NO: 31718 - DNA, 96 bp, Fusarium azukicola
  misc_feature: 324
gcaaactgccaggtcataaagacccagattgctattttttgcaccctaataaagctccaaaaaactggaaaactcaggaagccaataaggtgcata

SEQ ID NO: 31719 - DNA, 96 bp, Fusarium azukicola
  misc_feature: 324
actgccaggtcataaagacccagattgctattttttgcaccctaataaggctccaaaaaactggaaaactcaggaagccaataaggtgcataagac

SEQ ID NO: 31720 - DNA, 96 bp, Fusarium azukicola
  misc_feature: 324
ataacctatactatttgagagaataaaagagaatctatccctaatataacttatttcctttataaagggtttttattatattttaatacttttccc

SEQ ID NO: 31721 - DNA, 96 bp, Fusarium azukicola
  misc_feature: 324
gcttttatattatataataagtctcactttctaattttagctattttaagcttaatttcgacttttatagcttttttaaaaaataccttttaaggt

SEQ ID NO: 31722 - DNA, 96 bp, Fusarium azukicola
  misc_feature: 324
ctcccctctctctcttatattcccttctcttccttcctctttctctttacttccctttctctttctcctccctcctcttcactccctttactcctc

SEQ ID NO: 31723 - DNA, 96 bp, Fusarium azukicola
  misc_feature: 324
atacctctaaatcatcacttatatcaaaatccatttcatctggggtctcagaaagggaaattaggtcttcctcggctttaggagatgacgaagaag

SEQ ID NO: 31724 - DNA, 96 bp, Fusarium azukicola
  misc_feature: 324
atatctaaaagtctatctattaaggaataagttagaagctattataaaatttaaggaatttagaaaagaaatagaaaataatcctaataaaataag

SEQ ID NO: 31725 - DNA, 96 bp, Fusarium azukicola
  misc_feature: 324
cctttactcctcttaacttctctttctcttccctcttcttccctcctctccctctctcctttcccctcctctctaccgaccctaaactaactccct

SEQ ID NO: 31726 - DNA, 96 bp, Fusarium azukicola
  misc_feature: 324
ataaaaaccctttataaaggaaataagttatattagggatagattctcttttattctctcaaatagtataggttataagcttttagtaaagaaatt

SEQ ID NO: 31727 - DNA, 96 bp, Fusarium azukicola
  misc_feature: 324
aaccctaatttcaaccaattaaccctaacccttaactctactactacccctaaccctaatttcaaccaattaaccctaacccttaacgtaactact

SEQ ID NO: 31728 - DNA, 96 bp, Fusarium azukicola
  misc_feature: 323
actaggttttttatttatattatttttagttaattttcctagtttgcagttttcgcagtttttaacttgatataggtcctcactagtatatttaaa

SEQ ID NO: 31729 - DNA, 96 bp, Fusarium azukicola
  misc_feature: 323
tgctattttttgcaccctaataaagctccaaaaaactggaaaactcaggaagccaataaggtgcataagacttctaagaaaaaggaatctaaacct

SEQ ID NO: 31730 - DNA, 96 bp, Fusarium azukicola
  misc_feature: 323
gcaaggaaaaataatatcacaaggaaaagaaaaaaataacctatatataataacagctaaggttatttctaataagaataactatagactaagaga

SEQ ID NO: 31731 - DNA, 96 bp, Fusarium azukicola
  misc_feature: 323
agctataataattttcttagatttttaaaaagtaattatatagctagtatataaaaaacctatttacactgtgtaattaactatttcactataaac

SEQ ID NO: 31732 - DNA, 96 bp, Fusarium azukicola
  misc_feature: 323
gtcttatgcaccttattggcttcctgagttttccagttttttggagctttattagggtgcaaaaaatagcaatctgggtctttatgacctggcagt

SEQ ID NO: 31733 - DNA, 96 bp, Fusarium azukicola
  misc_feature: 323
atctttctttttaccttaacttactctatactcctttctctcctaatacttactatactcctccttaacttaacttctctccttaaacttttttac

SEQ ID NO: 31734 - DNA, 96 bp, Fusarium azukicola
  misc_feature: 323
ggtaaagtaaaagagagaagagagtatagggtaaagtaaaataaagaataaaagtagagggtaaagtaaaagagagaagagagtatagggtaaagt

SEQ ID NO: 31735 - DNA, 96 bp, Fusarium azukicola
  misc_feature: 323
cctccttcatttctctttttcttcttcttttctttttctattccccttctttctttctcttctaactacctatcttctttctcttctcccttcctc

SEQ ID NO: 31736 - DNA, 96 bp, Fusarium azukicola
  misc_feature: 323
ccccatatatcagtagctattttatctaggaacttgtattccttattactaggttttttatttatattatttttagttaattttcctagtttgcag

SEQ ID NO: 31737 - DNA, 96 bp, Fusarium azukicola
  misc_feature: 323
ctaaactaactccctatccttcctcttttttcccccaccctccctttcttaataactctttataacttctctttttactcttctctacactacctt

SEQ ID NO: 31738 - DNA, 96 bp, Fusarium azukicola
  misc_feature: 323
aaacttttttattactttctaaccctttcttctcttctttaacctaacttacttacttaccttattctccctccttcttctctacttaataaacct

SEQ ID NO: 31739 - DNA, 96 bp, Fusarium azukicola
  misc_feature: 322
ataactaagaaagagaggtataactaggaaaaagagatatagctaagagagagaggtaaagctaagaaagagagatatagctagaaaagagagaaa

SEQ ID NO: 31740 - DNA, 96 bp, Fusarium azukicola
  misc_feature: 322
gctattttttgcaccctaataaagctccaaaaaactggaaaactcaggaagccaataaggtgcataagacttctaagaaaaaggaatctaaaccta

SEQ ID NO: 31741 - DNA, 96 bp, Fusarium azukicola
  misc_feature: 322
gtattattctaattggttaaaaaggttcctacagaccttcatgactgccgtcatcaatgcatcaaagtataataactgccgattggctaaaaaagg

SEQ ID NO: 31742 - DNA, 96 bp, Fusarium azukicola
  misc_feature: 322
ggttaaaagaggagagagaaggaggggagagaaagagaggaggaaaagtaaaaagaaggaggagagagaaggaagaataaaagaaaagaataagag

SEQ ID NO: 31743 - DNA, 96 bp, Fusarium azukicola
  misc_feature: 322
gagcccggaggtctcttcctaagggtttatacttaaaagaagattatacttcttttttaagtcttttctaagactttatacctccttaagtcttct

SEQ ID NO: 31744 - DNA, 96 bp, Fusarium azukicola
  misc_feature: 322
ctctctacctcacttttccctctttatattaaccctctcccttctttctcttcctcttctctccctctttactcctcttcttctcttctccccttc

SEQ ID NO: 31745 - DNA, 96 bp, Fusarium azukicola
  misc_feature: 322
cagatgaatcaactcttcagtcaattcaatcatcaacaactaaatcccacttttatctgatccaatcagactctttattgtgacccacttttatct

SEQ ID NO: 31746 - DNA, 96 bp, Fusarium azukicola
  misc_feature: 322
atttcaaccaattaaccctaacccttaactcacctacttaaccctaaccctaatttcaaccaattaaccctaacccttaactctactactacccct

SEQ ID NO: 31747 - DNA, 96 bp, Fusarium azukicola
  misc_feature: 322
aacattaatagcctcctttaaagttataatcttataagggttatagctttatacgttcttattattagaggaaaaaattaaacctctattattatt

SEQ ID NO: 31748 - DNA, 96 bp, Fusarium azukicola
  misc_feature: 321
tcgatagtgaatttctgtttattattattattattatataatattgccttttcattattataggggctttctttaaagtaaggaatctcattaaaa

SEQ ID NO: 31749 - DNA, 96 bp, Fusarium azukicola
  misc_feature: 321
gaaggtttcttattaaaggtcctagtatattattagttatattattttgttgaggaattaaggaattatatacctctaaattatcacttatatcaa

SEQ ID NO: 31750 - DNA, 96 bp, Fusarium azukicola
  misc_feature: 321
ttactcttttatctttacttactataacttctcaattactctacctcctctctctctctttcttctttttttttctccccctttttttttttccct

SEQ ID NO: 31751 - DNA, 96 bp, Fusarium azukicola
  misc_feature: 321
aaattaactagaaattcttttctacatacaatatgcctagtagcacctgtatcatatataaaattagttatattatttttattagtagaaaaatca

SEQ ID NO: 31752 - DNA, 96 bp, Fusarium azukicola
  misc_feature: 321
gtaagttaggttaaagaagagaagaaagggttagaaagtagtaaaaaagtttaaggagagaagttaagttaaggaggagtatagtaagtattagga

SEQ ID NO: 31753 - DNA, 96 bp, Fusarium azukicola
  misc_feature: 321
tcccctctctctcttatattcccttctcttccttcctctttctctttacttccctttctctttctcctccctcctcttcactccctttactcctct

SEQ ID NO: 31754 - DNA, 96 bp, Fusarium azukicola
  misc_feature: 321
taaatagcttttcttgtttcttttctctttcttccttcttagaattaggtttagattcctttttcttagaagtcttatgcaccttattggctttct

SEQ ID NO: 31755 - DNA, 96 bp, Fusarium azukicola
  misc_feature: 321
gtctataaaaatagctagaaattagctatatataaataaaaagtattttttagctatttaattagtaataaaactatatataatttttttaggttt

SEQ ID NO: 31756 - DNA, 96 bp, Fusarium azukicola
  misc_feature: 321
ctaatttcaaccaattaaccctaacccttaactcacctacttaaccctaaccctaatttcaaccaattaaccctaacccttaactctactactacc

SEQ ID NO: 31757 - DNA, 96 bp, Fusarium azukicola
  misc_feature: 321
cttatcctctcctctcccctctccctctctctcttttcactccttatcctctcctctcccctctccctctctctcttttcactccttctcctctcc

SEQ ID NO: 31758 - DNA, 96 bp, Fusarium azukicola
  misc_feature: 321
ataaagggatttttttaaaaatctaaaaaaattatttttaagttttatatttagttagatctataagattactttttttaagtttctagctatttt

SEQ ID NO: 31759 - DNA, 96 bp, Fusarium azukicola
  misc_feature: 321
aacttaaaaaaagtaatcttatagatctaactaaatataaaacttaaaaataatttttttagatttttaaaaaaatccctttatagcgaaataact

SEQ ID NO: 31760 - DNA, 96 bp, Fusarium azukicola
  misc_feature: 321
aaaaattatatatagttttattactaattaaatagctaaaaaatactttttatttatatatagctaatttctagctatttttatagacctaaggtt

SEQ ID NO: 31761 - DNA, 96 bp, Fusarium azukicola
  misc_feature: 320
gtaaggaaggttaagaaaggagagaagtaaggaaggttaagaaaggagagaagtaaggaaggttaagaaaggagagaagtaaggaagggtaagaaa

SEQ ID NO: 31762 - DNA, 96 bp, Fusarium azukicola
  misc_feature: 320
tgaactacttcccctccccttaactctcctaacttcacacacttttaactccccttcctctttctccttccttctcttccctcctctttctctcaa

SEQ ID NO: 31763 - DNA, 96 bp, Fusarium azukicola
  misc_feature: 320
aagggtattattctaattggttaaaaaggttcctacagaccttcatgactgccgtcatcaatgcatcaaagtataataactgccgattggctaaga

SEQ ID NO: 31764 - DNA, 96 bp, Fusarium azukicola
  misc_feature: 320
cctaaaaaaattatatatagttttattactaattaaatagctaaaaaatactttttatttatatatagctaatttctagctatttttatagaccta

SEQ ID NO: 31765 - DNA, 96 bp, Fusarium azukicola
  misc_feature: 320
ccctaccccaatctactttttactcctcttttacctaatactcactactctctcctaactaacttaatacttactatacctccctcttattactcc

SEQ ID NO: 31766 - DNA, 96 bp, Fusarium azukicola
  misc_feature: 320
ctcttttaaccccctctatctcttctcccctttttccctcccctcttcctctactttctttctcttctcccctcctcttcttaactacactttctc

SEQ ID NO: 31767 - DNA, 96 bp, Fusarium azukicola
  misc_feature: 320
aggaattatatacctctaaatcatcacttatatcaaaatccatttcatctggggtctcagaaagggaaattaggtcttcctcggctttaggagatg

SEQ ID NO: 31768 - DNA, 96 bp, Fusarium azukicola
  misc_feature: 320
acaatatgcctagtagcacctgtatcatatataaaattagttatattatctttattagtagaaaaatcaggtttatttaccttatttaaatatcct

SEQ ID NO: 31769 - DNA, 96 bp, Fusarium azukicola
  misc_feature: 319
ttttatttttatatatttaattagacttcttaagttaagatgacttagtcttttatgccagtcaaaaagactagttttttcctttatatttaagat

SEQ ID NO: 31770 - DNA, 96 bp, Fusarium azukicola
  misc_feature: 319
agggtaaagtaaaagagagaagagagtatagggtaaagtaaaataaagaataaaagtagagggtaaagtaaaagagagaagagagtatagggtaaa

SEQ ID NO: 31771 - DNA, 96 bp, Fusarium azukicola
  misc_feature: 319
gaagaataaaagaaaagaataagagggaaaggaagagaagaagattgagagaaagaggagggaagagaaggaaggagaaagaggaaggggagttaa

SEQ ID NO: 31772 - DNA, 96 bp, Fusarium azukicola
  misc_feature: 319
tatacctaaaaatagagtaaaaattctataatataatatgtggtttatagggatatatcactatagttggtaatataatatagaacattaacagta

SEQ ID NO: 31773 - DNA, 96 bp, Fusarium azukicola
  misc_feature: 319
taaaaacctaaaaaaattatatatagttttattactaattaaatagctaaaaaatactttttatttatatatagctaatttctagctatttttata

SEQ ID NO: 31774 - DNA, 96 bp, Fusarium azukicola
  misc_feature: 319
ctcttctcccttcctcccttcctcccctctctctcttatattcccttctcttccttcctctttctctttacttccctttctctttctcctccctcc

SEQ ID NO: 31775 - DNA, 96 bp, Fusarium azukicola
  misc_feature: 319
agttacgttaagggttagggttaattggttgaaattagggttaggggtagtagtagagttaagggttagggttaattggttgaaattagggttagg

SEQ ID NO: 31776 - DNA, 96 bp, Fusarium azukicola
  misc_feature: 318
ttttactcttccccttctccttttatcttcttctctttttctttactcttcccctccttcatttctctttttcttcttcttttctttttctattcc

SEQ ID NO: 31777 - DNA, 96 bp, Fusarium azukicola
  misc_feature: 318
ttctctcaatcttcttctcttcctttccctcttattcttttcttttattcttccttctctctcctccttctttttacttttcctcctctctttctc

SEQ ID NO: 31778 - DNA, 96 bp, Fusarium azukicola
  misc_feature: 318
ttaaaatgcagttattgcaaactgccaggtcataaagacccagattgctattttttgcaccctaataaagctccaaaaaactggaaaactcaggaa

SEQ ID NO: 31779 - DNA, 96 bp, Fusarium azukicola
  misc_feature: 318
ctaaaaaaattatatatagttttattactaattaaatagctaaaaaatactttttatttatatatagctaatttctagctatttttatagacctaa

SEQ ID NO: 31780 - DNA, 96 bp, Fusarium azukicola
  misc_feature: 318
tgccttaaaatgcagttattgcaaactgccaggtcataaagacccagattgctattttttgcaccctaataaagctccaaaaaactggaaaactca

SEQ ID NO: 31781 - DNA, 96 bp, Fusarium azukicola
  misc_feature: 318
ggaaggtttcttatcaaaggtcctagtatattattagttatattattttgttgagaaattatggaattatatacctctaaattatcacttatatca

SEQ ID NO: 31782 - DNA, 96 bp, Fusarium azukicola
  misc_feature: 318
cttttatttttatatatttaattagacttcttaagttaagatgacttagtcttttatgccagtcaaaaagactagttttttcctttatatttaaga

SEQ ID NO: 31783 - DNA, 96 bp, Fusarium azukicola
  misc_feature: 318
agctccaaaaaactggaaaactcaggaagccaataaggtgcataagacttctaagaaaaaggaatctaaacctaattctaagaaggaagaaagaga

SEQ ID NO: 31784 - DNA, 96 bp, Fusarium azukicola
  misc_feature: 318
aaaagtgaggtagagagaaagtgtagttaagaagaggaggggagaagagaaagaaagtagaggaagaggggagggaaaaaggggagaagagataga

SEQ ID NO: 31785 - DNA, 96 bp, Fusarium azukicola
  misc_feature: 318
ggaaaaattaaacctctattattattatatatatatcttagtaaaaacccctttattatagacctaatattataagggaaaatctaagattatata

SEQ ID NO: 31786 - DNA, 96 bp, Fusarium azukicola
  misc_feature: 318
ctttctctttacttccctttctctttctcctccctcctcttcactccctttactcctcttaacttctctttctcttccctcttcttccctcctctc

SEQ ID NO: 31787 - DNA, 96 bp, Fusarium azukicola
  misc_feature: 318
aagctaataaggtatataagacttctaagaaaaaggaatctaaacctaattctaagaaggaagaaagagaaaagaaataagaaaagctatttatag

SEQ ID NO: 31788 - DNA, 96 bp, Fusarium azukicola
  misc_feature: 318
atcagatgaatcaactcttcagtcaattcaatcatcaacaactaaatcccacttttatctgatccaatcagactctttattgtgacccacttttat

SEQ ID NO: 31789 - DNA, 96 bp, Fusarium azukicola
  misc_feature: 318
actttctaaccctctcttttcttctttaacctaactcacctacttaaccctaaccctaatttcaaccaattaaccctaacccttaactcacctact

SEQ ID NO: 31790 - DNA, 96 bp, Fusarium azukicola
  misc_feature: 317
tatcctctcctctcccctctccctctctctcttttcactccttatcctctcctctcccctctccctctctctcttttcactccttcttccttcttc

SEQ ID NO: 31791 - DNA, 96 bp, Fusarium azukicola
  misc_feature: 317
acttaaaaaaagtaatcttatagatctaactaaatataaaacttaaaaataatttttttagatttttaaaaaaatccctttatagcgaaataacta

SEQ ID NO: 31792 - DNA, 96 bp, Fusarium azukicola
  misc_feature: 317
tagtagtagagttaagggttagggttaattggttgaaattagggttagggttaagtaggtgagttaagggttagggttaattggttgaaattaggg

SEQ ID NO: 31793 - DNA, 96 bp, Fusarium azukicola
  misc_feature: 317
ctttctttttaccttaacttactctatactcctttctctcctaatacttactatactcctccttaacttaacttctctccttaaacttttttacta

SEQ ID NO: 31794 - DNA, 96 bp, Fusarium azukicola
  misc_feature: 317
taccttccttactttatctttctcttctattcacttcctacctttctaatcacccttcctctactctttttcttttctctcctctcccctctccct

SEQ ID NO: 31795 - DNA, 96 bp, Fusarium azukicola
  misc_feature: 317
gctgaggtccagaaccttcgacagtcaaataaggcccttagcaagcggcgtagaggaaaaagaacccgcctacaagatagagggaagatgactgta

SEQ ID NO: 31796 - DNA, 96 bp, Fusarium azukicola
  misc_feature: 317
taatcacccttcctctactctttttcttttctctcctctcccctctccctctctctcttttcactccttatcctctcctctcccctctccctctct

SEQ ID NO: 31797 - DNA, 96 bp, Fusarium azukicola
  misc_feature: 317
taaatggcattttttaaaaacctaaaaaaattatatatagttttattactaattaaatagctaaaaaatactttttatttatatatagctaatttc

SEQ ID NO: 31798 - DNA, 96 bp, Fusarium azukicola
  misc_feature: 317
taaaatgcagttattgcaaactgccaggtcataaagacccagattgctattttttgcaccctaataaggctccaaaaaactggaaaactcaggaag

SEQ ID NO: 31799 - DNA, 96 bp, Fusarium azukicola
  misc_feature: 316
ttctcctccctcctcttcactccctttactcctcttaacttctctttctcttccctcttcttccctcctctccctctctcctttcccctcctctct

SEQ ID NO: 31800 - DNA, 96 bp, Fusarium azukicola
  misc_feature: 316
ttctcccttcctcccttcctcccctctctctcttatattcccttctcttccttcctctttctctttacttccctttctctttctcctccctcctct

SEQ ID NO: 31801 - DNA, 96 bp, Fusarium azukicola
  misc_feature: 316
ccctatactctcttctctcttttactttaccctatactctcttctctcttttactttaccctctacttttattctttattttactttaccctatac

SEQ ID NO: 31802 - DNA, 96 bp, Fusarium azukicola
  misc_feature: 316
gctaataaggtatataagacttctaagaaaaaggaatctaaacctaattctaagaaggaagaaagagaaaagaaataagaaaagctatttatagct

SEQ ID NO: 31803 - DNA, 96 bp, Fusarium azukicola
  misc_feature: 316
cctcctcttcttaactacactttctctctacctcacttttccctctttatattaaccctctcccttctttctcttcctcttctctccctctttact

SEQ ID NO: 31804 - DNA, 96 bp, Fusarium azukicola
  misc_feature: 316
cctatactctcttctctcttttactttaccctatactctcttctctcttttactttaccctctacttttattctttattttactttaccctatact

SEQ ID NO: 31805 - DNA, 96 bp, Fusarium azukicola
  misc_feature: 316
cccttataatattaggtctataataaaggggtttttactaagatatatataataataatagaggtttaattttttcctctaataataagaacgtat

SEQ ID NO: 31806 - DNA, 96 bp, Fusarium azukicola
  misc_feature: 316
cccctctctctcttatattcccttctcttccttcctctttctctttacttccctttctctttctcctccctcctcttcactccctttactcctctt

SEQ ID NO: 31807 - DNA, 96 bp, Fusarium azukicola
  misc_feature: 316
attttattcttattttattaggattattttctatttcttttctaaattccttgaattttataatagcttctgacttattccttaatagataggctt

SEQ ID NO: 31808 - DNA, 96 bp, Fusarium azukicola
  misc_feature: 316
aaatatactagtgaggacctatattaagttaaaaactgcgaaaactataaactaggaaaattaactaaaaataatataaataaaaaacctagtaat

SEQ ID NO: 31809 - DNA, 96 bp, Fusarium azukicola
  misc_feature: 315
tttttaaaaacctaaaaaaattatatatagttttattactaattaaatagctaaaaaatactttttatttatatatagctaatttctagctatttt

SEQ ID NO: 31810 - DNA, 96 bp, Fusarium azukicola
  misc_feature: 315
caaactgccaggtcataaagacccagattgctattttttgcaccctaataaagctccaaaaaactggaaaactcaggaagccaataaggtgcataa

SEQ ID NO: 31811 - DNA, 96 bp, Fusarium azukicola
  misc_feature: 315
aagaaatagaaaataatcctaataaaataagaataaaatcagttttcttagataatataaaggaatatatatataagctaagaccctattatataa

SEQ ID NO: 31812 - DNA, 96 bp, Fusarium azukicola
  misc_feature: 315
ccccaatctactttttactcctcttttacctaatactcactactctctcctaactaacttaatacttactatacctccctcttattactcccttaa

SEQ ID NO: 31813 - DNA, 96 bp, Fusarium azukicola
  misc_feature: 315
tcaaaggtcctagtatattattagttatattattttgttgagaaattatggaattatatacctctaaattatcacttatatcaaaatccatttctt

SEQ ID NO: 31814 - DNA, 96 bp, Fusarium azukicola
  misc_feature: 315
gaaatagaaaataatcctaataaaataagaataaaatcagttttcttagataatataaaggaatatatatataagctaagaccctattatataaag

SEQ ID NO: 31815 - DNA, 96 bp, Fusarium azukicola
  misc_feature: 315
ctaggttttttatttatattatttttagttaattttcctagtttgcagttttcgcagtttttaacttgatataggtcctcactagtatatttaaag

SEQ ID NO: 31816 - DNA, 96 bp, Fusarium azukicola
  misc_feature: 315
caaggaaaaataatatcacaaggaaaagaaaaaaataacctatatataataacagctaaggttatttctaataagaataactatagactaagagat

SEQ ID NO: 31817 - DNA, 96 bp, Fusarium azukicola
  misc_feature: 314
tttatttatattatttttagttaattttcctagtttgcagttttcgcagtttttaacttgatataggtcctcactagtatatttaaagagaggatc

SEQ ID NO: 31818 - DNA, 96 bp, Fusarium azukicola
  misc_feature: 314
tttactcttccccttctccttttatcttcttctctttttctttactcttcccctccttcatttctctttttcttcttcttttctttttctattccc

SEQ ID NO: 31819 - DNA, 96 bp, Fusarium azukicola
  misc_feature: 314
actaggttttttatttatattatttttagttaattttcctagtttatagttttcgcagtttttaacttaatataggtcctcactagtatatttaaa

SEQ ID NO: 31820 - DNA, 96 bp, Fusarium azukicola
  misc_feature: 314
ttatttatattatttttagttaattttcctagtttgcagttttcgcagtttttaacttgatataggtcctcactagtatatttaaagagaggatct

SEQ ID NO: 31821 - DNA, 96 bp, Fusarium azukicola
  misc_feature: 314
tagggtaaagtaaaataaagaataaaagtagagggtaaagtaaaagagagaagagagtatagggtaaagtaaaagagagaagagagtatagggtaa

SEQ ID NO: 31822 - DNA, 96 bp, Fusarium azukicola
  misc_feature: 314
tatttaaataaggtaaataaacctgatttttctactaataaaaataatataactaattttatatatgatacaggtgctactaggcatattgtatgt

SEQ ID NO: 31823 - DNA, 96 bp, Fusarium azukicola
  misc_feature: 314
tataatattaggtctataataaaggggtttttactaagatatatataataataatagaggtttaattttttcctctaataataagaacgtataaag

SEQ ID NO: 31824 - DNA, 96 bp, Fusarium azukicola
  misc_feature: 314
taagggtattattctaattggttaaaaaggttcctacagaccttcatgactgccgtcatcaatgcatcaaagtataataactgccgattggctaag

SEQ ID NO: 31825 - DNA, 96 bp, Fusarium azukicola
  misc_feature: 314
taaaatgcagttattgcaaactgccaggtcataaagacccagattgctattttttgcaccctaataaagctccaaaaaactggaaaactcaggaag

SEQ ID NO: 31826 - DNA, 96 bp, Fusarium azukicola
  misc_feature: 314
taaaaaaattatatatagttttattactaattaaatagctaaaaaatactttttatttatatatagctaatttctagctatttttatagacctaag

SEQ ID NO: 31827 - DNA, 96 bp, Fusarium azukicola
  misc_feature: 314
gtagtagtagagttaagggttagggttaattggttgaaattagggttagggttaagtaggtgagttaagggttagggttaattggttgaaattagg

SEQ ID NO: 31828 - DNA, 96 bp, Fusarium azukicola
  misc_feature: 314
gggatttttttaaaaatctaaaaaaattatttttaagttttatatttagttagatctataagattactttttttaagtttctagctattttatagc

SEQ ID NO: 31829 - DNA, 96 bp, Fusarium azukicola
  misc_feature: 314
ctctatctcttctcccctttttccctcccctcttcctctactttctttctcttctcccctcctcttcttaactacactttctctctacctcacttt

SEQ ID NO: 31830 - DNA, 96 bp, Fusarium azukicola
  misc_feature: 313
tttttctcttctttctccttcccctttctcttcttttactactactttcttactctcttactacctttacttctatacctattttctctttaacta

SEQ ID NO: 31831 - DNA, 96 bp, Fusarium azukicola
  misc_feature: 313
agaaatagaaaataatcctaataaaataagaataaaatcagttttcttagataatataaaggaatatatatataagctaagaccctattatataaa

SEQ ID NO: 31832 - DNA, 96 bp, Fusarium azukicola
  misc_feature: 313
tataaatagcttttcttatttcttttctctttcttccttcttagaattaggtttagattcctttttcttagaagtcttatataccttattagcttc

SEQ ID NO: 31833 - DNA, 96 bp, Fusarium azukicola
  misc_feature: 313
gttttttatttatattatttttagttaattttcctagtttgcagttttcgcagtttttaacttgatataggtcctcactagtatatttaaagagag

SEQ ID NO: 31834 - DNA, 96 bp, Fusarium azukicola
  misc_feature: 312
ttttttatttatattatttttagttaattttcctagtttgcagttttcgcagtttttaacttgatataggtcctcactagtatatttaaagagagg

SEQ ID NO: 31835 - DNA, 96 bp, Fusarium azukicola
  misc_feature: 312
tattttttgcaccctaataaggctccaaaaaactggaaaactcaggaagccaataaggtgcataagacttctaagaaaagggaatctaaacctaat

SEQ ID NO: 31836 - DNA, 96 bp, Fusarium azukicola
  misc_feature: 312
tacctaaaaatagagtaaaaattctataatataatatgtggtttatagggatatatcactatagttggtaatataatatagaacattaacacttat

SEQ ID NO: 31837 - DNA, 96 bp, Fusarium azukicola
  misc_feature: 312
aaccaattaaccctaacccttaactcacctacttaaccctaaccctaatttcaaccaattaaccctaacccttaactctactactacccctaaccc

SEQ ID NO: 31838 - DNA, 96 bp, Fusarium azukicola
  misc_feature: 312
aataagaaataggaacttctaaagtacctattaaatttatagaaagactcttaaaatctaaagaaccttcttctctagaagatataaagtaattcc

SEQ ID NO: 31839 - DNA, 96 bp, Fusarium azukicola
  misc_feature: 312
ggaagccaataaggtgcataagacttctaagaaaagggaatctaaacctaattctaagaaggaagaaagagaaaagaaacaagaaaagctatttat

SEQ ID NO: 31840 - DNA, 96 bp, Fusarium azukicola
  misc_feature: 312
gcctagtagcacctgtatcatatataaaattagttatattatttttattagtagaaaaatcaggtttatttaccttatttaaatatcctagttgtt

SEQ ID NO: 31841 - DNA, 96 bp, Fusarium azukicola
  misc_feature: 312
caaggaaaagagaaaaataacctatatataataacagctaaggttatttctaataagaataactatagactaagagataacttagatcttcctatc

SEQ ID NO: 31842 - DNA, 96 bp, Fusarium azukicola
  misc_feature: 312
ctcttccctaccccaatctactttttactcctcttttacctaatactcactactctctcctaactaacttaatacttactatacctccctcttatt

SEQ ID NO: 31843 - DNA, 96 bp, Fusarium azukicola
  misc_feature: 312
aaaaaattatatatagttttattactaattaaatagctaaaaaatactttttatttatatatagctaatttctagctatttttatagacctaaggt

SEQ ID NO: 31844 - DNA, 96 bp, Fusarium azukicola
  misc_feature: 312
aaaattatatatagttttattactaattaaatagctaaaaaatactttttatttatatatagctaatttctagctatttttatagacctaaggttt

SEQ ID NO: 31845 - DNA, 96 bp, Fusarium azukicola
  misc_feature: 311
ttatataataagtctcactttctaattttagctattttaagcttaatttcgacttttatagcttttttaaaaaataccttttaaggtgaaaatata

SEQ ID NO: 31846 - DNA, 96 bp, Fusarium azukicola
  misc_feature: 311
atataactaagaaagagaggtataactaggaaaaagagatatagctaagagagagaggtaaagctaagaaagagagatatagctagaaaagagaga

SEQ ID NO: 31847 - DNA, 96 bp, Fusarium azukicola
  misc_feature: 311
gagagaaagagaggaggaaaagtaaaaagaaggaggagagagaaggaagaataaaagaaaagaataagagggaaaggaagagaagaagattgagag

SEQ ID NO: 31848 - DNA, 96 bp, Fusarium azukicola
  misc_feature: 311
ctaaatataaaggaaaaaactagtctttttgactggcataaaagactaagtcatcttaacttaagaagtctaattaaatatataaaaataaaagat

SEQ ID NO: 31849 - DNA, 96 bp, Fusarium azukicola
  misc_feature: 310
tcttccctaccccaatctactttttactcctcttttacctaatactcactactctctcctaactaacttaatacttactatacctccctcttatta

SEQ ID NO: 31850 - DNA, 96 bp, Fusarium azukicola
  misc_feature: 310
tactttcttcattattttactttaccctccacttttattctttattttactttaccctatactctcttctctcttttactttaccctatactctct

SEQ ID NO: 31851 - DNA, 96 bp, Fusarium azukicola
  misc_feature: 310
gttacgttaagggttagggttaattggttgaaattagggttaggggtagtagtagagttaagggttagggttaattggttgaaattagggttaggg

SEQ ID NO: 31852 - DNA, 96 bp, Fusarium azukicola
  misc_feature: 310
ctttctctttctcctccctcctcttcactccctttactcctcttaacttctctttctcttccctcttcttccctcctctccctctctcctttcccc

SEQ ID NO: 31853 - DNA, 96 bp, Fusarium azukicola
  misc_feature: 310
ataggaagatctaagttatctcttagtctatagttattcttattagaaataaccttagctgttattatatataggttatttttttcttttccttgt

SEQ ID NO: 31854 - DNA, 96 bp, Fusarium azukicola
  misc_feature: 310
agaattagctataaatagcttttcttatttcttttctctttcttccttcttagaattaggtttagattcctttttcttagaagtcttatgcacctt

SEQ ID NO: 31855 - DNA, 96 bp, Fusarium azukicola
  misc_feature: 310
aacttttttattactttctaaccctttcttctcttctttaacctaacttacttacttaccttattctccctccttcttctctacttaataaacctt

SEQ ID NO: 31856 - DNA, 96 bp, Fusarium azukicola
  misc_feature: 309
tttttacttttcctcctctctttctctcccctccttctctctcctcttttaaccccctctatctcttctcccctttttccctcccctcttcctcta

SEQ ID NO: 31857 - DNA, 96 bp, Fusarium azukicola
  misc_feature: 309
tttcttaaccttccttacttctctcctttcttaaccttccttacttctctcctttcttaaccttccttacttctctcctttcttaacccttctaac

SEQ ID NO: 31858 - DNA, 96 bp, Fusarium azukicola
  misc_feature: 309
ttcccttataatattaggtctataataaaggggtttttactaagatatatataataataatagaggtttaattttttcctctaataataagaacgt

SEQ ID NO: 31859 - DNA, 96 bp, Fusarium azukicola
  misc_feature: 309
tctaaatataaaggaaaaaactagtctttttgactggcataaaagactaagtcatcttaacttaagaagtctaattaaatatataaaaataaaaga

SEQ ID NO: 31860 - DNA, 96 bp, Fusarium azukicola
  misc_feature: 309
ggttttttatttatattatttttagttaattttcctagtttgcagttttcgcagtttttaacttgatataggtcctcactagtatatttaaagaga

SEQ ID NO: 31861 - DNA, 96 bp, Fusarium azukicola
  misc_feature: 309
aaaacctaaaaaaattatatatagttttattactaattaaatagctaaaaaatactttttatttatatatagctaatttctagctatttttataga

SEQ ID NO: 31862 - DNA, 96 bp, Fusarium azukicola
  misc_feature: 309
ggaaaattaactaaaaataatataaataaaaaacctagtaataaggaatataagttcctagataaaatagctactaatatatagggtccttctaga

SEQ ID NO: 31863 - DNA, 96 bp, Fusarium azukicola
  misc_feature: 309
aactaagaaagagaggtataactaggaaaaagagatatagctaagagagagaggtaaagctaagaaagagagatatagctagaaaagagagaaata

SEQ ID NO: 31864 - DNA, 96 bp, Fusarium azukicola
  misc_feature: 309
ggaaaagtattaaaatataataaaaaccctttataaaggaaataagttatattagggatagattctcttttattctctcaaatagtataggttata

SEQ ID NO: 31865 - DNA, 96 bp, Fusarium azukicola
  misc_feature: 309
ctaataaggtatataagacttctaagaaaaaggaatctaaacctaattctaagaaggaagaaagagaaaagaaataagaaaagctatttatagcta

SEQ ID NO: 31866 - DNA, 96 bp, Fusarium azukicola
  misc_feature: 309
cttttactcttccccttctccttttatcttcttctctttttctttactcttcccctccttcatttctctttttcttcttcttttctttttctattc

SEQ ID NO: 31867 - DNA, 96 bp, Fusarium azukicola
  misc_feature: 308
tttaaaaacctaaaaaaattatatatagttttattactaattaaatagctaaaaaatactttttatttatatatagctaatttctagctattttta

SEQ ID NO: 31868 - DNA, 96 bp, Fusarium azukicola
  misc_feature: 308
ttataatatcaggtctataataaaggggtttttactaagatatatatataataataatagaggtttaattttttcctctaataataagaacgtata

SEQ ID NO: 31869 - DNA, 96 bp, Fusarium azukicola
  misc_feature: 308
tggagggtaaagtaaaataatgaagaaagtatagggtaaagaaaataaagaagaaaagtgtataagggtataagaagagagtataaaaggataaga

SEQ ID NO: 31870 - DNA, 96 bp, Fusarium azukicola
  misc_feature: 308
tcccttataatattaggtctataataaaggggtttttactaagatatatataataataatagaggtttaattttttcctctaataataagaacgta

SEQ ID NO: 31871 - DNA, 96 bp, Fusarium azukicola
  misc_feature: 308
tataatatagaacattaatagcctcctttaaagttataatcttataagggttatagctttatacgttcttattattagaggaaaaaattaaacctc

SEQ ID NO: 31872 - DNA, 96 bp, Fusarium azukicola
  misc_feature: 308
tagtagagttaagggttagggttaattggttgaaattagggttagggttaagtaggtgagttaagggttagggttaattggttgaaattagggtta

SEQ ID NO: 31873 - DNA, 96 bp, Fusarium azukicola
  misc_feature: 308
tacttcccctccccttaactctcctaacttcacacacttttaactccccttcctctttctccttccttctcttccctcctctttctctcaatcttc

SEQ ID NO: 31874 - DNA, 96 bp, Fusarium azukicola
  misc_feature: 308
gaagaattagctataaatagcttttcttatttcttttctctttcttccttcttagaattaggtttagattcctttttcttagaagtcttatgcacc

SEQ ID NO: 31875 - DNA, 96 bp, Fusarium azukicola
  misc_feature: 308
ccctttactcctcttaacttctctttctcttccctcttcttccctcctctccctctctcctttcccctcctctctaccgaccctaaactaactccc

SEQ ID NO: 31876 - DNA, 96 bp, Fusarium azukicola
  misc_feature: 308
ctataaaaatagctagaaattagctatatataaataaaaagtattttttagctatttaattagtaataaaactatatataatttttttaggttttt

SEQ ID NO: 31877 - DNA, 96 bp, Fusarium azukicola
  misc_feature: 308
ctaacgtacttgataagcaagcgccgcagtcatgtaagcgccgcactttttttaaccccctctatagttatcgcgataaaaacaccataaaccatt

SEQ ID NO: 31878 - DNA, 96 bp, Fusarium azukicola
  misc_feature: 308
aagaattagctataaatagcttttcttatttcttttctctttcttccttcttagaattaggtttagattcctttttcttagaagtcttatgcacct

SEQ ID NO: 31879 - DNA, 96 bp, Fusarium azukicola
  misc_feature: 307
tatattatataataagtctcactttctaattttagctattttaagcttaatttcgacttttatagcttttttaaaaaataccttttaaggtgaaaa

SEQ ID NO: 31880 - DNA, 96 bp, Fusarium azukicola
  misc_feature: 307
caattaaccctaacccttaactcacctacttaaccctaaccctaatttcaaccaattaaccctaacccttaactctactactacccctaaccctaa

SEQ ID NO: 31881 - DNA, 96 bp, Fusarium azukicola
  misc_feature: 307
gaagggttttaaggtttattaagtagagaagaaggagggagaataaggtaagtaagtaagttaggttaaagaagagaagaaagggttagaaagtaa

SEQ ID NO: 31882 - DNA, 96 bp, Fusarium azukicola
  misc_feature: 307
tctttttaccttaacttactctatactcctttctctcctaatacttactatactcctccttaacttaacttctctccttaaacttttttattactt

SEQ ID NO: 31883 - DNA, 96 bp, Fusarium azukicola
  misc_feature: 307
ataataaaggggtttttactaagatatatatataataataatagaggtttaatttttcctctaataataagaacgtataaagctataacccttata

SEQ ID NO: 31884 - DNA, 96 bp, Fusarium azukicola
  misc_feature: 307
taaaaaccctttataaaggaaataagttatattagggatagattctcttttattctctcaaatagtataggttataagcttttagtaaagaaatta

SEQ ID NO: 31885 - DNA, 96 bp, Fusarium azukicola
  misc_feature: 307
taaacttttttattactttctaaccctttcttctcttctttaacctaacttacttacttaccttattctccctccttcttctctacttaataaacc

SEQ ID NO: 31886 - DNA, 96 bp, Fusarium azukicola
  misc_feature: 307
gttattatatataggttatttttttcttttccttgtgatattatttttccttgcttatttaaaagaaggacttcttgtttatttataatagaagtt

SEQ ID NO: 31887 - DNA, 96 bp, Fusarium azukicola
  misc_feature: 307
aaaaaattaaacctctattattattatatatatatcttagtaaaaacccctttattatagacctgatattataagggaaaatctaagattatatag

SEQ ID NO: 31888 - DNA, 96 bp, Fusarium azukicola
  misc_feature: 307
cgaccctaaactaactccctatccttcctcttttttcccccaccctccctttcttaataactctttataacttctctttttactcttctctacact

SEQ ID NO: 31889 - DNA, 96 bp, Fusarium azukicola
  misc_feature: 307
agcttttatattatataataagtctcactttctaattttagctattttaagcttaatttcgacttttatagcttttttaaaaaataccttttaagg

SEQ ID NO: 31890 - DNA, 96 bp, Fusarium azukicola
  misc_feature: 306
gttcttattattagaggaaaaaattaaacctctattattattatatatatatcttagtaaaaacccctttattatagacctgatattataagggaa

SEQ ID NO: 31891 - DNA, 96 bp, Fusarium azukicola
  misc_feature: 306
tctcttctcccttcctcccttcctcccctctctctcttatattcccttctcttccttcctctttctctttacttccctttctctttctcctccctc

SEQ ID NO: 31892 - DNA, 96 bp, Fusarium azukicola
  misc_feature: 306
gattttattcttattttattaggattattttctatttcttttctaaattccttgaattttataatagcttctgacttattccttaatagataggct

SEQ ID NO: 31893 - DNA, 96 bp, Fusarium azukicola
  misc_feature: 306
accttccttactttatctttctcttctattcacttcctacctttctaatcacccttcctctactctttttcttttctctcctctcccctctccctc

SEQ ID NO: 31894 - DNA, 96 bp, Fusarium azukicola
  misc_feature: 306
cctcccttcctcccctctctctcttatattcccttctcttccttcctctttctctttacttccctttctctttctcctccctcctcttcactccct

SEQ ID NO: 31895 - DNA, 96 bp, Fusarium azukicola
  misc_feature: 305
ttttatttatattatttttagttaattttcctagtttgcagttttcgcagtttttaacttgatataggtcctcactagtatatttaaagagaggat

SEQ ID NO: 31896 - DNA, 96 bp, Fusarium azukicola
  misc_feature: 305
ttatcctctcctctcccctctccctctctctcttttcactccttatcctctcctctcccctctccctctctctcttttcactccttcttccttctt

SEQ ID NO: 31897 - DNA, 96 bp, Fusarium azukicola
  misc_feature: 305
ctttcttaaccttccttacttctctcctttcttaaccttccttacttctctcctttcttaaccttccttacttctctcctttcttaacccttctaa

SEQ ID NO: 31898 - DNA, 96 bp, Fusarium azukicola
  misc_feature: 305
tataataaaggggtttttactaagatatatatataataataatagaggtttaatttttcctctaataataagaacgtataaagctataacccttat

SEQ ID NO: 31899 - DNA, 96 bp, Fusarium azukicola
  misc_feature: 305
ataaatagcttttcttgtttcttttctctttcttccttcttagaattaggtttagattcctttttcttagaagtcttatgcaccttattggctttc

SEQ ID NO: 31900 - DNA, 96 bp, Fusarium azukicola
  misc_feature: 305
cttcctctactctttttcttttctctcctctcccctctccctctctctcttttcactccttatcctctcctctcccctctccctctctctcttttc

SEQ ID NO: 31901 - DNA, 96 bp, Fusarium azukicola
  misc_feature: 304
ttttcttttctctcctctcccctctccctctctctcttttcactccttatcctctcctctcccctctccctctctctcttttcactccttatcctc

SEQ ID NO: 31902 - DNA, 96 bp, Fusarium azukicola
  misc_feature: 304
tttctttttaccttaacttactctatactcctttctctcctaatacttactatactcctccttaacttaacttctctccttaaacttttttactac

SEQ ID NO: 31903 - DNA, 96 bp, Fusarium azukicola
  misc_feature: 304
tttcactccttatcctctcctctcccctctccctctctctcttttcactccttatcctctcctctcccctctccctctctctcttttcactcctta

SEQ ID NO: 31904 - DNA, 96 bp, Fusarium azukicola
  misc_feature: 304
tataactaagaaagagaggtataactaggaaaaagagatatagctaagagagagaggtaaagctaagaaagagagatatagctagaaaagagagaa

SEQ ID NO: 31905 - DNA, 96 bp, Fusarium azukicola
  misc_feature: 304
gggttttaaggtttattaagtagagaagaaggagggagaataaggtaagtaagtaagttaggttaaagaagagaagaaagggttagaaagtaataa

SEQ ID NO: 31906 - DNA, 96 bp, Fusarium azukicola
  misc_feature: 304
tcctcctctctttctctcccctccttctctctcctcttttaaccccctctatctcttctcccctttttccctcccctcttcctctactttctttct

SEQ ID NO: 31907 - DNA, 96 bp, Fusarium azukicola
  misc_feature: 304
ggaattatatacctctaaatcatcacttatatcaaaatccatttcatctggggtctcagaaagggaaattaggtcttcctcggctttaggagatga

SEQ ID NO: 31908 - DNA, 96 bp, Fusarium azukicola
  misc_feature: 304
tatataatagggtcttagcttatatatatattcctttatattatctaagaaaactgattttattcttattttattaggattattttctatttcttt

SEQ ID NO: 31909 - DNA, 96 bp, Fusarium azukicola
  misc_feature: 304
tacctctctttcttagttatattctcttactcttatatctcttttacctctctttcttaagaaaatctcctctctttacttataagctatatcttt

SEQ ID NO: 31910 - DNA, 96 bp, Fusarium azukicola
  misc_feature: 304
acgttcttattattagaggaaaaaattaaacctctattattattatatatatatcttagtaaaaacccctttattatagacctgatattataaggg

SEQ ID NO: 31911 - DNA, 96 bp, Fusarium azukicola
  misc_feature: 304
accaattaaccctaacccttaactcacctacttaaccctaaccctaatttcaaccaattaaccctaacccttaactctactactacccctaaccct

SEQ ID NO: 31912 - DNA, 96 bp, Fusarium azukicola
  misc_feature: 303
tttcccttataatattaggtctataataaaggggtttttactaagatatatataataataatagaggtttaattttttcctctaataataagaacg

SEQ ID NO: 31913 - DNA, 96 bp, Fusarium azukicola
  misc_feature: 303
ttctaaatataaaggaaaaaactagtctttttgactggcataaaagactaagtcatcttaacttaagaagtctaattaaatatataaaaataaaag

SEQ ID NO: 31914 - DNA, 96 bp, Fusarium azukicola
  misc_feature: 303
ttcactccttatcctctcctctcccctctccctctctctcttttcactccttatcctctcctctcccctctccctctctctcttttcactccttat

SEQ ID NO: 31915 - DNA, 96 bp, Fusarium azukicola
  misc_feature: 303
taactaagaaagagaggtataactaggaaaaagagatatagctaagagagagaggtaaagctaagaaagagagatatagctagaaaagagagaaat

SEQ ID NO: 31916 - DNA, 96 bp, Fusarium azukicola
  misc_feature: 303
ctatagtgatatatccctataaactatatattatattatagaatttttactctatttttaggtatatttacctaacctatagctactataggtagc

SEQ ID NO: 31917 - DNA, 96 bp, Fusarium azukicola
  misc_feature: 303
atactttcttcattattttactttaccctccacttttattctttattttactttaccctatactctcttctctcttttactttaccctatactctc

SEQ ID NO: 31918 - DNA, 96 bp, Fusarium azukicola
  misc_feature: 303
aggagggagaataaggtaagtaagtaagttaggttaaagaagagaagaaagggttagaaagtagtaaaaaagtttaaggagagaagttaagttaag

SEQ ID NO: 31919 - DNA, 96 bp, Fusarium azukicola
  misc_feature: 303
atgtaattaactatttcactataaacagaattttttaaaaatctaaaaaaatcatttttagactttattaagagttagatttatagaaatactctt

SEQ ID NO: 31920 - DNA, 96 bp, Fusarium azukicola
  misc_feature: 302
tttttatttatattatttttagttaattttcctagtttgcagttttcgcagtttttaacttgatataggtcctcactagtatatttaaagagagga

SEQ ID NO: 31921 - DNA, 96 bp, Fusarium azukicola
  misc_feature: 302
ttgatgacggcagtcatgaaggtctgtaggaacctttttaaccaattagaataatacccttaatatctagctacctatagtagctataggttaggg

SEQ ID NO: 31922 - DNA, 96 bp, Fusarium azukicola
  misc_feature: 302
ttctttctcttctcccttcctcccttcctcccctctctctcttatattcccttctcttccttcctctttctctttacttccctttctctttctcct

SEQ ID NO: 31923 - DNA, 96 bp, Fusarium azukicola
  misc_feature: 302
gatatctaaaagtctatctattaaggaataagttagaagctattataaaatttaaggaatttagaaaagaaatagaaaataatcctaataaaataa

SEQ ID NO: 31924 - DNA, 96 bp, Fusarium azukicola
  misc_feature: 302
gataaggagtgaaaagagagagagggagaggggagaggagaggataaggagtgaaaagagagagagggagaggggagaggagagaaaagaaaaaga

SEQ ID NO: 31925 - DNA, 96 bp, Fusarium azukicola
  misc_feature: 302
tctttctcttctcccttcctcccttcctcccctctctctcttatattcccttctcttccttcctctttctctttacttccctttctctttctcctc

SEQ ID NO: 31926 - DNA, 96 bp, Fusarium azukicola
  misc_feature: 302
tccctaccccaatctactttttactcctcttttacctaatactcactactctctcctaactaacttaatacttactatacctccctcttattactc

SEQ ID NO: 31927 - DNA, 96 bp, Fusarium azukicola
  misc_feature: 302
ccaattaaccctaacccttaactcacctacttaaccctaaccctaatttcaaccaattaaccctaacccttaactctactactacccctaacccta

SEQ ID NO: 31928 - DNA, 96 bp, Fusarium azukicola
  misc_feature: 302
aaacttaaaaaaagtaatcttatagatctaactaaatataaaacttaaaaataatttttttagatttttaaaaaaatccctttatagcgaaataac

SEQ ID NO: 31929 - DNA, 96 bp, Fusarium azukicola
  misc_feature: 302
gaattatatacctctaaatcatcacttatatcaaaatccatttcatctggggtctcagaaagggaaattaggtcttcctcggctttaggagatgac

SEQ ID NO: 31930 - DNA, 96 bp, Fusarium azukicola
  misc_feature: 302
gtcaaaaagactagttttttcctttatatttaagataggaagatctaagttatctcttagtctatagttattcttattagaaataaccttagctgt

SEQ ID NO: 31931 - DNA, 96 bp, Fusarium azukicola
  misc_feature: 302
ccaaaaaactggaaaactcaggaagccaataaggtgcataagacttctaagaaaaaggaatctaaacctaattctaagaaggaagaaagagaaaag

SEQ ID NO: 31932 - DNA, 96 bp, Fusarium azukicola
  misc_feature: 302
aggagtaaagggagtgaagaggagggaggagaaagagaaagggaagtaaagagaaagaggaaggaagagaagggaatataagagagagaggggagg

SEQ ID NO: 31933 - DNA, 96 bp, Fusarium azukicola
  misc_feature: 302
cccctctaccttccttactttatctttctcttctattcacttcctacctttctaatcacccttcctctactctttttcttttctctcctctcccct

SEQ ID NO: 31934 - DNA, 96 bp, Fusarium azukicola
  misc_feature: 302
atagaaaataatcctaataaaataagaataaaatcagttttcttagataatataaaggaatatatatataagctaagaccctattatataaagaat

SEQ ID NO: 31935 - DNA, 96 bp, Fusarium azukicola
  misc_feature: 302
agatataagagtaagagaatataactaagaaagagaggtataactaggaaaaagagatatagctaagagagagaggtaaagctaagaaagagagat

SEQ ID NO: 31936 - DNA, 96 bp, Fusarium azukicola
  misc_feature: 302
atagcctcctttaaagttataatcttataagggttatagctttatacgttcttattattagaggaaaaattaaacctctattattattatatatat

SEQ ID NO: 31937 - DNA, 96 bp, Fusarium azukicola
  misc_feature: 302
atataatatagaacattaatagcctcctttaaagttataatcttataagggttatagctttatacgttcttattattagaggaaaaaattaaacct

SEQ ID NO: 31938 - DNA, 96 bp, Fusarium azukicola
  misc_feature: 301
tttttcttttctctcctctcccctctccctctctctcttttcactccttatcctctcctctcccctctccctctctctcttttcactccttatcct

SEQ ID NO: 31939 - DNA, 96 bp, Fusarium azukicola
  misc_feature: 301
tttttactaagatatatatataataataatagaggtttaattttttcctctaataataagaacgtataaagctataacccttataagattataact

SEQ ID NO: 31940 - DNA, 96 bp, Fusarium azukicola
  misc_feature: 301
tgataacgtttttttactataaaagagccttgagagctcttaacccttctagaaagtggtggttgtgtcacacccatggctttagcagctcggggt

SEQ ID NO: 31941 - DNA, 96 bp, Fusarium azukicola
  misc_feature: 301
ccctttctctttctcctccctcctcttcactccctttactcctcttaacttctctttctcttccctcttcttccctcctctccctctctcctttcc

SEQ ID NO: 31942 - DNA, 96 bp, Fusarium azukicola
  misc_feature: 301
gagttagtttagggtcggtagagaggaggggaaaggagagagggagaggagggaagaagagggaagagaaagagaagttaagaggagtaaagggag

SEQ ID NO: 31943 - DNA, 96 bp, Fusarium azukicola
  misc_feature: 301
aattagctataaatagcttttcttatttcttttctctttcttccttcttagaattaggtttagattcctttttcttagaagtcttatgcaccttat

SEQ ID NO: 31944 - DNA, 96 bp, Fusarium azukicola
  misc_feature: 301
agttagtttagggtcggtagagaggaggggaaaggagagagggagaggagggaagaagagggaagagaaagagaagttaagaggagtaaagggagt

SEQ ID NO: 31945 - DNA, 96 bp, Fusarium azukicola
  misc_feature: 300
ttttttaaaaatttagaaaaaatatttttaagtcttatatatagctaaatagttaaaatcgttttttttaagtttctagctattttatagcgattt

SEQ ID NO: 31946 - DNA, 96 bp, Fusarium azukicola
  misc_feature: 300
ttttatgccagtcaaaaagactagttttttcctttatatttaagataggaagatctaagttatctcttagtctatagttattcttattagaaataa

SEQ ID NO: 31947 - DNA, 96 bp, Fusarium azukicola
  misc_feature: 300
ttcctacctttctaatcacccttcctctactctttttcttttctctcctctcccctctccctctctctcttttcactccttatcctctcctctccc

SEQ ID NO: 31948 - DNA, 96 bp, Fusarium azukicola
  misc_feature: 300
ttactaggttttttatttatattatttttagttaattttcctagtttatagttttcgcagtttttaacttaatataggtcctcactagtatattta

SEQ ID NO: 31949 - DNA, 96 bp, Fusarium azukicola
  misc_feature: 300
gctataataattttcttagatttttaaaaagtaattatatagctagtatataaaaaacctatttacactgtgtaattaactatttcactataaaca

SEQ ID NO: 31950 - DNA, 96 bp, Fusarium azukicola
  misc_feature: 300
tattaagtagagaagaaggagggagaataaggtaagtaagtaagttaggttaaagaagagaagaaagggttagaaagtaataaaaaagtttaagga

SEQ ID NO: 31951 - DNA, 96 bp, Fusarium azukicola
  misc_feature: 300
tccctcccctcttcctctactttctttctcttctcccctcctcttcttaactacactttctctctacctcacttttccctctttatattaaccctc

SEQ ID NO: 31952 - DNA, 96 bp, Fusarium azukicola
  misc_feature: 300
atttagaaaagaaatagaaaataatcctaataaaataagaataaaatcagttttcttagataatataaaggaatatatatataagctaagacccta

SEQ ID NO: 31953 - DNA, 96 bp, Fusarium azukicola
  misc_feature: 300
ctttactcctcttaacttctctttctcttccctcttcttccctcctctccctctctcctttcccctcctctctaccgaccctaaactaactcccta

SEQ ID NO: 31954 - DNA, 96 bp, Fusarium azukicola
  misc_feature: 300
gcattttttaaaaacctaaaaaaattatatatagttttattactaattaaatagctaaaaaatactttttatttatatatagctaatttctagcta

SEQ ID NO: 31955 - DNA, 96 bp, Fusarium azukicola
  misc_feature: 300
tagattcctttttcttagaagtcttatgcaccttattggcttcctgagttttccagttttttggagctttattagggtgcaaaaaatagcaatctg

SEQ ID NO: 31956 - DNA, 96 bp, Fusarium azukicola
  misc_feature: 300
taatttcaaccaattaaccctaacccttaactcacctacttaaccctaaccctaatttcaaccaattaaccctaacccttaactctactactaccc

SEQ ID NO: 31957 - DNA, 96 bp, Fusarium azukicola
  misc_feature: 300
ctctctctcttatattcccttctcttccttcctctttctctttacttccctttctctttctcctccctcctcttcactccctttactcctcttaac

SEQ ID NO: 31958 - DNA, 96 bp, Fusarium azukicola
  misc_feature: 300
caagttcctagataaaatagctactgatatatggggtccttctagaatccctacctataataaatatatatactttattaccttcctagatagggc

SEQ ID NO: 31959 - DNA, 96 bp, Fusarium azukicola
  misc_feature: 300
cttaacttctctccttaaacttttttactactttctaaccctttcttctcttctttaacctaacttacttacttaccttattctccctccttcttc

SEQ ID NO: 31960 - DNA, 96 bp, Fusarium azukicola
  misc_feature: 300
cctctactctttttcttttctctcctctcccctctccctctctctcttttcactccttatcctctcctctcccctctccctctctctcttttcact

SEQ ID NO: 31961 - DNA, 96 bp, Fusarium azukicola
  misc_feature: 299
ttttattcttattttattaggattattttctatttcttttctaaattccttgaattttataatagcttctgacttattccttaatagataggcttt

SEQ ID NO: 31962 - DNA, 96 bp, Fusarium azukicola
  misc_feature: 299
ttatatatatcttagtaaaaacccctttattatagacctaatattataagggaaaatctaagattatatagggaaaagtattaaaatataataaaa

SEQ ID NO: 31963 - DNA, 96 bp, Fusarium azukicola
  misc_feature: 299
tgttattatatataggttatttttttcttttccttgtgatattatttttccttgcttatttaaaagaaggacttcttgtttatttataatagaagt

SEQ ID NO: 31964 - DNA, 96 bp, Fusarium azukicola
  misc_feature: 299
taggttttttatttatattatttttagttaattttcctagtttgcagttttcgcagtttttaacttgatataggtcctcactagtatatttaaaga

SEQ ID NO: 31965 - DNA, 96 bp, Fusarium azukicola
  misc_feature: 299
acattaatagcctcctttaaagttataatcttataagggttatagctttatacgttcttattattagaggaaaaaattaaacctctattattatta

SEQ ID NO: 31966 - DNA, 96 bp, Fusarium azukicola
  misc_feature: 299
acagctaaggttatttctaataagaataactatagactaagagataacttagatcttcctattctaaatataaaggaaaaaactagtctttttgac

SEQ ID NO: 31967 - DNA, 96 bp, Fusarium azukicola
  misc_feature: 299
aacctaaaaaaattatatatagttttattactaattaaatagctaaaaaatactttttatttatatatagctaatttctagctatttttatagacc

SEQ ID NO: 31968 - DNA, 96 bp, Fusarium azukicola
  misc_feature: 298
attatatatatcttagtaaaaacccctttattatagacctaatattataagggaaaatctaagattatatagggaaaagtattaaaatataataaa

SEQ ID NO: 31969 - DNA, 96 bp, Fusarium azukicola
  misc_feature: 298
ttcaccttaaaaggtattttttaaaaaagctataaaagtcgaaattaagcttaaaatagctaaaattagaaagtgagacttattatataatataaa

SEQ ID NO: 31970 - DNA, 96 bp, Fusarium azukicola
  misc_feature: 298
tattatatatatcttagtaaaaacccctttattatagacctaatattataagggaaaatctaagattatatagggaaaagtattaaaatataataa

SEQ ID NO: 31971 - DNA, 96 bp, Fusarium azukicola
  misc_feature: 298
ccttaaacttttttattactttctaaccctttcttctcttctttaacctaacttacttacttaccttattctccctccttcttctctacttaataa

SEQ ID NO: 31972 - DNA, 96 bp, Fusarium azukicola
  misc_feature: 298
tactaggttttttatttatattatttttagttaattttcctagtttatagttttcgcagtttttaacttaatataggtcctcactagtatatttaa

SEQ ID NO: 31973 - DNA, 96 bp, Fusarium azukicola
  misc_feature: 298
accccaatctactttttactcctcttttacctaatactcactactctctcctaactaacttaatacttactatacctccctcttattactccctta

SEQ ID NO: 31974 - DNA, 96 bp, Fusarium azukicola
  misc_feature: 298
ctaatcacccttcctctactctttttcttttctctcctctcccctctccctctctctcttttcactccttatcctctcctctcccctctccctctc

SEQ ID NO: 31975 - DNA, 96 bp, Fusarium azukicola
  misc_feature: 298
ccttatcctctcctctcccctctccctctctctcttttcactccttatcctctcctctcccctctccctctctctcttttcactccttctcctctc

SEQ ID NO: 31976 - DNA, 96 bp, Fusarium azukicola
  misc_feature: 298
aggtttattaagtagagaagaaggagggagaataaggtaagtaagtaagttaggttaaagaagagaagaaagggttagaaagtagtaaaaaagttt

SEQ ID NO: 31977 - DNA, 96 bp, Fusarium azukicola
  misc_feature: 297
tttcttttctctcctctcccctctccctctctctcttttcactccttatcctctcctctcccctctccctctctctcttttcactccttatcctct

SEQ ID NO: 31978 - DNA, 96 bp, Fusarium azukicola
  misc_feature: 297
actaagaaagagaggtataactaggaaaaagagatatagctaagagagagaggtaaagctaagaaagagagatatagctagaaaagagagaaataa

SEQ ID NO: 31979 - DNA, 96 bp, Fusarium azukicola
  misc_feature: 297
tattattatatatatcttagtaaaaacccctttattatagacctaatattataagggaaaatctaagattatatagggaaaagtattaaaatataa

SEQ ID NO: 31980 - DNA, 96 bp, Fusarium azukicola
  misc_feature: 297
tggaatcttcttctatagtactagaaagcttttctttaactaagaaagcttccattctcaaagcccaagtaatataattctcgcttccaataagcc

SEQ ID NO: 31981 - DNA, 96 bp, Fusarium azukicola
  misc_feature: 297
gtattattctaattggttaaaaaggttcctacagacctttatgactgccgtcatctatgcatcaaagtataataactgccgattggctaaaaaaga

SEQ ID NO: 31982 - DNA, 96 bp, Fusarium azukicola
  misc_feature: 297
tcttttaaccccctctatctcttctcccctttttccctcccctcttcctctactttctttctcttctcccctcctcttcttaactacactttctct

SEQ ID NO: 31983 - DNA, 96 bp, Fusarium azukicola
  misc_feature: 297
aactatagtgatatatccctataaactatatattatattatagaatttttactctatttttaggtatatttacctaacctatagctactataggta

SEQ ID NO: 31984 - DNA, 96 bp, Fusarium azukicola
  misc_feature: 297
ctccttatcctctcctctcccctctccctctctctcttttcactccttatcctctcctctcccctctccctctctctcttttcactccttctcctc

SEQ ID NO: 31985 - DNA, 96 bp, Fusarium azukicola
  misc_feature: 297
ctttttaccttaacttactctatactcctttctctcctaatacttactatactcctccttaacttaacttctctccttaaacttttttattacttt

SEQ ID NO: 31986 - DNA, 96 bp, Fusarium azukicola
  misc_feature: 297
ctataataattttcttagatttttaaaaagtaattatatagctagtatataaaaaacctatttacactgtgtaattaactatttcactataaacag

SEQ ID NO: 31987 - DNA, 96 bp, Fusarium azukicola
  misc_feature: 297
ctctctttcttagctttacctctctctcttagctatatctctttttcctagttatacctctctttcttagttatattctcttactcttatatctct

SEQ ID NO: 31988 - DNA, 96 bp, Fusarium azukicola
  misc_feature: 297
ctataaaccatatattatattatagaatttttactctatttttaggtatatttacctaacctatagctactataggtagctagatattaaggggat

SEQ ID NO: 31989 - DNA, 96 bp, Fusarium azukicola
  misc_feature: 297
acaagttcctagataaaatagctactgatatatggggtccttctagaatccctacctataataaatatatatactttattaccttcctagataggg

SEQ ID NO: 31990 - DNA, 96 bp, Fusarium azukicola
  misc_feature: 297
attctttatataatagggtcttagcttatatatatattcctttatattatctaagaaaactaattttattcttattttattaggattattttctat

SEQ ID NO: 31991 - DNA, 96 bp, Fusarium azukicola
  misc_feature: 297
atacctctctttcttagttatattctcttactcttatatctcttttacctctctttcttaagaaaatctcctctctttacttataagctatatctt

SEQ ID NO: 31992 - DNA, 96 bp, Fusarium azukicola
  misc_feature: 297
acttctctttctcttccctcttcttccctcctctccctctctcctttcccctcctctctaccgaccctaaactaactccctatccttcctcttttt

SEQ ID NO: 31993 - DNA, 96 bp, Fusarium azukicola
  misc_feature: 296
gaaaactcaggaagccaataaggtgcataagacttctaagaaaaaggaatctaaacctaattctaagaaggaagaaagagaaaagaaacaagaaaa

SEQ ID NO: 31994 - DNA, 96 bp, Fusarium azukicola
  misc_feature: 296
ttaacttctctccttaaacttttttactactttctaaccctttcttctcttctttaacctaacttacttacttaccttattctccctccttcttct

SEQ ID NO: 31995 - DNA, 96 bp, Fusarium azukicola
  misc_feature: 296
ttaaacttttttattactttctaaccctttcttctcttctttaacctaacttacttacttaccttattctccctccttcttctctacttaataaac

SEQ ID NO: 31996 - DNA, 96 bp, Fusarium azukicola
  misc_feature: 296
ataagaaataggaacttctaaagtacctattaaatttatagaaagactcttaaaatctaaagaaccttcttctctagaagatataaagtaattcca

SEQ ID NO: 31997 - DNA, 96 bp, Fusarium azukicola
  misc_feature: 296
gtattattctaattggttaaaaaggttcctacagaccttcatgactgccgtcatcaatgcatcaaagtataataactgccgattggctaaaaaaga

SEQ ID NO: 31998 - DNA, 96 bp, Fusarium azukicola
  misc_feature: 296
tctttctttttaccttaacttactctatactcctttctctcctaatacttactatactcctccttaacttaacttctctccttaaacttttttact

SEQ ID NO: 31999 - DNA, 96 bp, Fusarium azukicola
  misc_feature: 296
tcagatgaatcaactcttcagtcaattcaatcatcaacaactaaatcccacttttatctgatccaatcagactctttattgtgacccacttttatc

SEQ ID NO: 32000 - DNA, 96 bp, Fusarium azukicola
  misc_feature: 296
tatacctctctttcttagttatattctcttactcttatatctcttttacctctctttcttaagaaaatctcctctctttacttataagctatatct

SEQ ID NO: 32001 - DNA, 96 bp, Fusarium azukicola
  misc_feature: 296
acccctaaccctaatttcaaccaattaaccctaacccttaactctactactacccctaaccctaatttcaaccaattaaccctaacccttaacgta

SEQ ID NO: 32002 - DNA, 96 bp, Fusarium azukicola
  misc_feature: 296
cattaatagcctcctttaaagttataatcttataagggttatagctttatacgttcttattattagaggaaaaaattaaacctctattattattat

SEQ ID NO: 32003 - DNA, 96 bp, Fusarium azukicola
  misc_feature: 295
ttcttccctcctctccctctctcctttcccctcctctctaccgaccctaaactaactccctatccttcctcttttttcccccaccctccctttctt

SEQ ID NO: 32004 - DNA, 96 bp, Fusarium azukicola
  misc_feature: 295
tatataataagtctcactttctaattttagctattttaagcttaatttcgacttttatagcttttttaaaaaataccttttaaggtgaaaatataa

SEQ ID NO: 32005 - DNA, 96 bp, Fusarium azukicola
  misc_feature: 295
tctcctaatacttactatactcctccttaacttaacttctctccttaaacttttttactactttctaaccctttcttctcttctttaacctaactt

SEQ ID NO: 32006 - DNA, 96 bp, Fusarium azukicola
  misc_feature: 295
tcctccttaacttaacttctctccttaaacttttttactactttctaaccctttcttctcttctttaacctaacttacttacttaccttattctcc

SEQ ID NO: 32007 - DNA, 96 bp, Fusarium azukicola
  misc_feature: 295
tccctttctctttctcctccctcctcttcactccctttactcctcttaacttctctttctcttccctcttcttccctcctctccctctctcctttc

SEQ ID NO: 32008 - DNA, 96 bp, Fusarium azukicola
  misc_feature: 295
taaatagcttttcttatttcttttctctttcttccttcttagaattaggtttagattcctttttcttagaagtcttatataccttattagcttcct

SEQ ID NO: 32009 - DNA, 96 bp, Fusarium azukicola
  misc_feature: 295
ccctataaaccatatattatattatagaatttttactctatttttaggtatatttacctaacctatagctactataggtagctagatattaagggg

SEQ ID NO: 32010 - DNA, 96 bp, Fusarium azukicola
  misc_feature: 294
aatagaaaataatcctaataaaataagaataaaatcagttttcttagataatataaaggaatatatatataagctaagaccctattatataaagaa

SEQ ID NO: 32011 - DNA, 96 bp, Fusarium azukicola
  misc_feature: 294
atttctaataagaataactatagactaagagataacttagatcttcctatcttaaatataaaggaaaaaactagtctttttgactggcataaaaga

SEQ ID NO: 32012 - DNA, 96 bp, Fusarium azukicola
  misc_feature: 294
tatgtaattaactatttcactataaacagaattttttaaaaatctaaaaaaatcatttttagactttattaagagttagatttatagaaatactct

SEQ ID NO: 32013 - DNA, 96 bp, Fusarium azukicola
  misc_feature: 294
gatataagagtaagagaatataactaagaaagagaggtataactaggaaaaagagatatagctaagagagagaggtaaagctaagaaagagagata

SEQ ID NO: 32014 - DNA, 96 bp, Fusarium azukicola
  misc_feature: 294
cacaaggaaaagaaaaaaataacctatatataataacagctaaggttatttctaataagaataactatagactaagagataacttagatcttccta

SEQ ID NO: 32015 - DNA, 96 bp, Fusarium azukicola
  misc_feature: 294
atttaaataaggtaaataaacctgatttttctactaataaaaataatataactaattttatatatgatacaggtgctactaggcatattgtatgta

SEQ ID NO: 32016 - DNA, 96 bp, Fusarium azukicola
  misc_feature: 294
taagttaggttaaagaagagaagaaagggttagaaagtagtaaaaaagtttaaggagagaagttaagttaaggaggagtatagtaagtattaggag

SEQ ID NO: 32017 - DNA, 96 bp, Fusarium azukicola
  misc_feature: 294
ctaatacttactatactcctccttaacttaacttctctccttaaacttttttactactttctaaccctttcttctcttctttaacctaacttactt

SEQ ID NO: 32018 - DNA, 96 bp, Fusarium azukicola
  misc_feature: 293
tttagaaaagaaatagaaaataatcctaataaaataagaataaaatcagttttcttagataatataaaggaatatatatataagctaagaccctat

SEQ ID NO: 32019 - DNA, 96 bp, Fusarium azukicola
  misc_feature: 293
ggagggtaaagtaaaataatgaagaaagtatagggtaaagaaaataaagaagaaaagtgtataagggtataagaagagagtataaaaggataagaa

SEQ ID NO: 32020 - DNA, 96 bp, Fusarium azukicola
  misc_feature: 293
tatataataataatagaggtttaatttttcctctaataataagaacgtataaagctataacccttataagattataactttaaaggaggctattaa

SEQ ID NO: 32021 - DNA, 96 bp, Fusarium azukicola
  misc_feature: 293
aaatagaaaataatcctaataaaataagaataaaatcagttttcttagataatataaaggaatatatatataagctaagaccctattatataaaga

SEQ ID NO: 32022 - DNA, 96 bp, Fusarium azukicola
  misc_feature: 293
gaagccaataaggtgcataagacttctaagaaaagggaatctaaacctaattctaagaaggaagaaagagaaaagaaacaagaaaagctatttata

SEQ ID NO: 32023 - DNA, 96 bp, Fusarium azukicola
  misc_feature: 293
cggcttattggaagcgagaattatattacttgggctttgagaatggaagctttcttagttaaagaaaagctttctagtactatagaagaagattcc

SEQ ID NO: 32024 - DNA, 96 bp, Fusarium azukicola
  misc_feature: 293
cctctatctcttctcccctttttccctcccctcttcctctactttctttctcttctcccctcctcttcttaactacactttctctctacctcactt

SEQ ID NO: 32025 - DNA, 96 bp, Fusarium azukicola
  misc_feature: 292
taggttttttatttatattatttttagttaattttcctagtttatagttttcgcagtttttaacttaatataggtcctcactagtatatttaaaga

SEQ ID NO: 32026 - DNA, 96 bp, Fusarium azukicola
  misc_feature: 292
tatctctttttcctagttatacctctctttcttagttatattctcttactcttatatctcttttacctctctttcttaagaaaatctcctctcttt

SEQ ID NO: 32027 - DNA, 96 bp, Fusarium azukicola
  misc_feature: 292
gtggaatcttcttctatagtactagaaagcttttctttaactaagaaagcttccattctcaaagcccaagtaatataattctcgcttccaataagc

SEQ ID NO: 32028 - DNA, 96 bp, Fusarium azukicola
  misc_feature: 292
cctttctctttctcctccctcctcttcactccctttactcctcttaacttctctttctcttccctcttcttccctcctctccctctctcctttccc

SEQ ID NO: 32029 - DNA, 96 bp, Fusarium azukicola
  misc_feature: 292
attaagtagagaagaaggagggagaataaggtaagtaagtaagttaggttaaagaagagaagaaagggttagaaagtagtaaaaaagtttaaggag

SEQ ID NO: 32030 - DNA, 96 bp, Fusarium azukicola
  misc_feature: 292
atgcctagtagcacctgtatcatatataaaattagttatattatttttattagtagaaaaatcaggtttatttaccttatttaaatatcctagttg

SEQ ID NO: 32031 - DNA, 96 bp, Fusarium azukicola
  misc_feature: 292
atattttaatacttttccctatataatcttagattttcccttataatattaggtctataataaaggggtttttactaagatatatataataataat

SEQ ID NO: 32032 - DNA, 96 bp, Fusarium azukicola
  misc_feature: 292
atactcctccttaacttaacttctctccttaaacttttttattactttctaaccctttcttctcttctttaacctaacttacttacttaccttatt

SEQ ID NO: 32033 - DNA, 96 bp, Fusarium azukicola
  misc_feature: 292
aatttagaaaagaaatagaaaataatcctaataaaataagaataaaatcagttttcttagataatataaaggaatatatatataagctaagaccct

SEQ ID NO: 32034 - DNA, 96 bp, Fusarium azukicola
  misc_feature: 292
actgtatactttaagatacctatataaggaatttttttaaaaatttagaaaaaatatttttaagtcttatatatagctaaatagttaaaatcgttt

SEQ ID NO: 32035 - DNA, 96 bp, Fusarium azukicola
  misc_feature: 291
tttcaccttaaaaggtattttttaaaaaagctataaaagtcgaaattaagcttaaaatagctaaaattagaaagtgagacttattatataatataa

SEQ ID NO: 32036 - DNA, 96 bp, Fusarium azukicola
  misc_feature: 291
ttataatattaggtctataataaaggggtttttactaagatatatataataataatagaggtttaattttttcctctaataataagaacgtataaa

SEQ ID NO: 32037 - DNA, 96 bp, Fusarium azukicola
  misc_feature: 291
tagggtaaagtaaaagagagaagagagtatagggtaaagtaaaataaagaataaaagtagagggtaaagtaaaagagagaagagagtatagggtaa

SEQ ID NO: 32038 - DNA, 96 bp, Fusarium azukicola
  misc_feature: 291
taatttcctagataactaggaagaaaagtaataaagagataatatctagcttctaagagagacttatagaagatagatagataaaagtgggtcaca

SEQ ID NO: 32039 - DNA, 96 bp, Fusarium azukicola
  misc_feature: 291
cgttcttattattagaggaaaaaattaaacctctattattattatatatatatcttagtaaaaacccctttattatagacctgatattataaggga

SEQ ID NO: 32040 - DNA, 96 bp, Fusarium azukicola
  misc_feature: 291
aacagctaaggttatttctaataagaataactatagactaagagataacttagatcttcctatcttaaatataaaggaaaaaactagtctttttga

SEQ ID NO: 32041 - DNA, 96 bp, Fusarium azukicola
  misc_feature: 291
agggttatagctttatacgttcttattattagaggaaaaattaaacctctattattattatatatatatcttagtaaaaacccctttattatagac

SEQ ID NO: 32042 - DNA, 96 bp, Fusarium azukicola
  misc_feature: 291
accctaaactaactccctatccttcctcttttttcccccaccctccctttcttaataactctttataacttctctttttactcttctctacactac

SEQ ID NO: 32043 - DNA, 96 bp, Fusarium azukicola
  misc_feature: 291
ctaccttccttactttatctttctcttctattcacttcctacctttctaatcacccttcctctactctttttcttttctctcctctcccctctccc

SEQ ID NO: 32044 - DNA, 96 bp, Fusarium azukicola
  misc_feature: 291
ctttttcttttctctcctctcccctctccctctctctcttttcactccttatcctctcctctcccctctccctctctctcttttcactccttatcc

SEQ ID NO: 32045 - DNA, 96 bp, Fusarium azukicola
  misc_feature: 291
gcctagtagcacctgtatcatatataaaattagttatattatctttattagtagaaaaatcaggtttatttaccttatttaaatatcctagttgtt

SEQ ID NO: 32046 - DNA, 96 bp, Fusarium azukicola
  misc_feature: 291
aaggtcctagtatattattagttatattattttgttgagaaattatggaattatatacctctaaattatcacttatatcaaaatccatttcttctg

SEQ ID NO: 32047 - DNA, 96 bp, Fusarium azukicola
  misc_feature: 291
atataataataatagaggtttaatttttcctctaataataagaacgtataaagctataacccttataagattataactttaaaggaggctattaat

SEQ ID NO: 32048 - DNA, 96 bp, Fusarium azukicola
  misc_feature: 290
ttttattgtattttaatacttttccctatataatcttagattttcccttataatattaggtctataataaaggggtttttactaagatatatataa

SEQ ID NO: 32049 - DNA, 96 bp, Fusarium azukicola
  misc_feature: 290
ttcttaaccttccttacttctctcctttcttaaccttccttacttctctcctttcttaaccttccttacttctctcctttcttaacccttctaacc

SEQ ID NO: 32050 - DNA, 96 bp, Fusarium azukicola
  misc_feature: 290
ttaatataaagagggaaaagtgaggtagagagaaagtgtagttaagaagaggaggggagaagagaaagaaagtagaggaagaggggagggaaaaag

SEQ ID NO: 32051 - DNA, 96 bp, Fusarium azukicola
  misc_feature: 290
tccctttactcctcttaacttctctttctcttccctcttcttccctcctctccctctctcctttcccctcctctctaccgaccctaaactaactcc

SEQ ID NO: 32052 - DNA, 96 bp, Fusarium azukicola
  misc_feature: 290
aattgatttcctagataactaggaagaaaagtaataaagagataatatctagcttctaagagagacttatagaagatagatagataaaagtgggtc

SEQ ID NO: 32053 - DNA, 96 bp, Fusarium azukicola
  misc_feature: 290
ctcccttcctcccctctctctcttatattcccttctcttccttcctctttctctttacttccctttctctttctcctccctcctcttcactccctt

SEQ ID NO: 32054 - DNA, 96 bp, Fusarium azukicola
  misc_feature: 290
ctattaatgttctatattatattactaactatagtgatatatccctataaaccatatattatattatagaatttttactctatttttaggtatatt

SEQ ID NO: 32055 - DNA, 96 bp, Fusarium azukicola
  misc_feature: 290
atataatagggtcttagcttatatatatattcctttatattatctaagaaaactgattttattcttattttattaggattattttctatttctttt

SEQ ID NO: 32056 - DNA, 96 bp, Fusarium azukicola
  misc_feature: 290
ataaataaataagaagtccttcttttaaataagtaaggaaaaataatattataaggaaaagagaaaaataacctatatataataatagctaaggtt

SEQ ID NO: 32057 - DNA, 96 bp, Fusarium azukicola
  misc_feature: 289
gttttaaggtttattaagtagagaagaaggagggagaataaggtaagtaagtaagttaggttaaagaagagaagaaagggttagaaagtaataaaa

SEQ ID NO: 32058 - DNA, 96 bp, Fusarium azukicola
  misc_feature: 289
ttctcttctcccttcctcccttcctcccctctctctcttatattcccttctcttccttcctctttctctttacttccctttctctttctcctccct

SEQ ID NO: 32059 - DNA, 96 bp, Fusarium azukicola
  misc_feature: 289
ttattattatatatatcttagtaaaaacccctttattatagacctaatattataagggaaaatctaagattatatagggaaaagtattaaaatata

SEQ ID NO: 32060 - DNA, 96 bp, Fusarium azukicola
  misc_feature: 289
tctataataaaggggtttttactaagatatatatataataataatagaggtttaatttttcctctaataataagaacgtataaagctataaccctt

SEQ ID NO: 32061 - DNA, 96 bp, Fusarium azukicola
  misc_feature: 289
tcaaccaattaaccctaacccttaactcacctacttaaccctaaccctaatttcaaccaattaaccctaacccttaactctactactacccctaac

SEQ ID NO: 32062 - DNA, 96 bp, Fusarium azukicola
  misc_feature: 289
tataatagggtcttagcttatatatatattcctttatattatctaagaaaactgattttattcttattttattaggattattttctatttcttttc

SEQ ID NO: 32063 - DNA, 96 bp, Fusarium azukicola
  misc_feature: 289
tacgttcttattattagaggaaaaaattaaacctctattattattatatatatatcttagtaaaaacccctttattatagacctgatattataagg

SEQ ID NO: 32064 - DNA, 96 bp, Fusarium azukicola
  misc_feature: 289
aaaacgattttaactatttagctatatataagacttaaaaatattttttctaaatttttaaaaaaattccttatataggtatcttaaagtatacag

SEQ ID NO: 32065 - DNA, 96 bp, Fusarium azukicola
  misc_feature: 289
acctaaaaaaattatatatagttttattactaattaaatagctaaaaaatactttttatttatatatagctaatttctagctatttttatagacct

SEQ ID NO: 32066 - DNA, 96 bp, Fusarium azukicola
  misc_feature: 288
tttcttagaagtcttatgcaccttattggcttcctgagttttccagttttttggagctttattagggtgcaaaaaatagcaatctgggtctttatg

SEQ ID NO: 32067 - DNA, 96 bp, Fusarium azukicola
  misc_feature: 288
tttatataatagggtcttagcttatatatatattcctttatattatctaagaaaactaattttattcttattttattaggattattttctatttct

SEQ ID NO: 32068 - DNA, 96 bp, Fusarium azukicola
  misc_feature: 288
ttatgccagtcaaaaagactagttttttcctttatatttaagataggaagatctaagttatctcttagtctatagttattcttattagaaataacc

SEQ ID NO: 32069 - DNA, 96 bp, Fusarium azukicola
  misc_feature: 288
ttacgttaagggttagggttaattggttgaaattagggttaggggtagtagtagagttaagggttagggttaattggttgaaattagggttagggg

SEQ ID NO: 32070 - DNA, 96 bp, Fusarium azukicola
  misc_feature: 288
gagatataagagtaagagaatataactaagaaagagaggtataactaggaaaaagagatatagctaagagagagaggtaaagctaagaaagagaga

SEQ ID NO: 32071 - DNA, 96 bp, Fusarium azukicola
  misc_feature: 288
taccctatactctcttctctcttttactttaccctatactctcttctctcttttactttaccctctacttttattctttattttactttaccctat

SEQ ID NO: 32072 - DNA, 96 bp, Fusarium azukicola
  misc_feature: 288
gaattagctataaatagcttttcttatttcttttctctttcttccttcttagaattaggtttagattcctttttcttagaagtcttatgcacctta

SEQ ID NO: 32073 - DNA, 96 bp, Fusarium azukicola
  misc_feature: 288
ccctctctctcttatattcccttctcttccttcctctttctctttacttccctttctctttctcctccctcctcttcactccctttactcctctta

SEQ ID NO: 32074 - DNA, 96 bp, Fusarium azukicola
  misc_feature: 288
agctaataaggtatataagacttctaagaaaaaggaatctaaacctaattctaagaaggaagaaagagaaaagaaataagaaaagctatttatagc

SEQ ID NO: 32075 - DNA, 96 bp, Fusarium azukicola
  misc_feature: 288
cttcttccctcctctccctctctcctttcccctcctctctaccgaccctaaactaactccctatccttcctcttttttcccccaccctccctttct

SEQ ID NO: 32076 - DNA, 96 bp, Fusarium azukicola
  misc_feature: 288
cttctctttctcttccctcttcttccctcctctccctctctcctttcccctcctctctaccgaccctaaactaactccctatccttcctctttttt

SEQ ID NO: 32077 - DNA, 96 bp, Fusarium azukicola
  misc_feature: 288
aagtatagaaggggagggttagaagggttaagaaaggagagaagtaaggaaggttaagaaaggagagaagtaaggaaggttaagaaaggagagaag

SEQ ID NO: 32078 - DNA, 96 bp, Fusarium azukicola
  misc_feature: 288
cttaacttactctatactcctttctctcctaatacttactatactcctccttaacttaacttctctccttaaacttttttattactttctaaccct

SEQ ID NO: 32079 - DNA, 96 bp, Fusarium azukicola
  misc_feature: 288
actccttatcctctcctctcccctctccctctctctcttttcactccttatcctctcctctcccctctccctctctctcttttcactccttatcct

SEQ ID NO: 32080 - DNA, 96 bp, Fusarium azukicola
  misc_feature: 287
gttaatataaagagggaaaagtgaggtagagagaaagtgtagttaagaagaggaggggagaagagaaagaaagtagaggaagaggggagggaaaaa

SEQ ID NO: 32081 - DNA, 96 bp, Fusarium azukicola
  misc_feature: 287
tccaaaaaactggaaaactcaggaagccaataaggtgcataagacttctaagaaaaaggaatctaaacctaattctaagaaggaagaaagagaaaa

SEQ ID NO: 32082 - DNA, 96 bp, Fusarium azukicola
  misc_feature: 287
aaagtctatctattaaggaataagttagaagctattataaaatttaaggaatttagaaaagaaatagaaaataatcctaataaaataagaataaaa

SEQ ID NO: 32083 - DNA, 96 bp, Fusarium azukicola
  misc_feature: 287
tttctaatcacccttcctctactctttttcttttctctcctctcccctctccctctctctcttttcactccttatcctctcctctcccctctccct

SEQ ID NO: 32084 - DNA, 96 bp, Fusarium azukicola
  misc_feature: 287
tttactcttttatctttacttactataacttctcaattactctacctcctctctctctctttcttctttttttttctccccctttttttttttccc

SEQ ID NO: 32085 - DNA, 96 bp, Fusarium azukicola
  misc_feature: 287
taagaaataggaacttctaaagtacctattaaatttatagaaagactcttaaaatctaaagaaccttcttctctagaagatataaagtaattccaa

SEQ ID NO: 32086 - DNA, 96 bp, Fusarium azukicola
  misc_feature: 287
ttagctgttattatatataggttatttttttcttttccttgtgatattatttttccttgcttatttaaaagaaggacttcttgtttatttataata

SEQ ID NO: 32087 - DNA, 96 bp, Fusarium azukicola
  misc_feature: 287
aaaaacgattttaactatttagctatatataagacttaaaaatattttttctaaatttttaaaaaaattccttatataggtatcttaaagtataca

SEQ ID NO: 32088 - DNA, 96 bp, Fusarium azukicola
  misc_feature: 287
tataaagctataacccttataagattataactttaaaggaggctattaatgttctatattatattactaactatagtgatatatccctataaacca

SEQ ID NO: 32089 - DNA, 96 bp, Fusarium azukicola
  misc_feature: 287
aatatactagtgaggacctatattaagttaaaaactgcgaaaactataaactaggaaaattaactaaaaataatataaataaaaaacctagtaata

SEQ ID NO: 32090 - DNA, 96 bp, Fusarium azukicola
  misc_feature: 287
tatatctctttttcctagttatacctctctttcttagttatattctcttactcttatatctcttttacctctctttcttaagaaaatctcctctct

SEQ ID NO: 32091 - DNA, 96 bp, Fusarium azukicola
  misc_feature: 287
ggggtttttactaagatatatatataataataatagaggtttaatttttcctctaataataagaacgtataaagctataacccttataagattata

SEQ ID NO: 32092 - DNA, 96 bp, Fusarium azukicola
  misc_feature: 287
caaccaattaaccctaacccttaactcacctacttaaccctaaccctaatttcaaccaattaaccctaacccttaactctactactacccctaacc

SEQ ID NO: 32093 - DNA, 96 bp, Fusarium azukicola
  misc_feature: 287
cctccttaacttaacttctctccttaaacttttttactactttctaaccctttcttctcttctttaacctaacttacttacttaccttattctccc

SEQ ID NO: 32094 - DNA, 96 bp, Fusarium azukicola
  misc_feature: 287
attaagtagagaagaaggagggagaataaggtaagtaagtaagttaggttaaagaagagaagaaagggttagaaagtaataaaaaagtttaaggag

SEQ ID NO: 32095 - DNA, 96 bp, Fusarium azukicola
  misc_feature: 287
agtaagtaagttaggttaaagaagagaagaaagggttagaaagtaataaaaaagtttaaggagagaagttaagttaaggaggagtatagtaagtat

SEQ ID NO: 32096 - DNA, 96 bp, Fusarium azukicola
  misc_feature: 286
ttttttattactttctaaccctttcttctcttctttaacctaacttacttacttaccttattctccctccttcttctctacttaataaaccttaaa

SEQ ID NO: 32097 - DNA, 96 bp, Fusarium azukicola
  misc_feature: 286
tttactcctcttaacttctctttctcttccctcttcttccctcctctccctctctcctttcccctcctctctaccgaccctaaactaactccctat

SEQ ID NO: 32098 - DNA, 96 bp, Fusarium azukicola
  misc_feature: 286
gggagtgaagaggagggaggagaaagagaaagggaagtaaagagaaagaggaaggaagagaagggaatataagagagagaggggaggaagggagga

SEQ ID NO: 32099 - DNA, 96 bp, Fusarium azukicola
  misc_feature: 286
tatttctaataagaataactatagactaagagataacttagatcttcctatcttaaatataaaggaaaaaactagtctttttgactggcataaaag

SEQ ID NO: 32100 - DNA, 96 bp, Fusarium azukicola
  misc_feature: 286
taatataaagagggaaaagtgaggtagagagaaagtgtagttaagaagaggaggggagaagagaaagaaagtagaggaagaggggagggaaaaagg

SEQ ID NO: 32101 - DNA, 96 bp, Fusarium azukicola
  misc_feature: 286
agaagaattagctataaatagcttttcttatttcttttctctttcttccttcttagaattaggtttagattcctttttcttagaagtcttatgcac

SEQ ID NO: 32102 - DNA, 96 bp, Fusarium azukicola
  misc_feature: 286
cttatcctctcctctcccctctccctctctctcttttcactccttatcctctcctctcccctctccctctctctcttttcactccttcttccttct

SEQ ID NO: 32103 - DNA, 96 bp, Fusarium azukicola
  misc_feature: 286
ctccttaacttaacttctctccttaaacttttttactactttctaaccctttcttctcttctttaacctaacttacttacttaccttattctccct

SEQ ID NO: 32104 - DNA, 96 bp, Fusarium azukicola
  misc_feature: 286
ctcctctcccctctccctctctctcttttcactccttatcctctcctctcccctctccctctctctcttttcactccttctcctctcctctcccct

SEQ ID NO: 32105 - DNA, 96 bp, Fusarium azukicola
  misc_feature: 286
atggcttagttatagcaaaaaccggttttgatggatagaatgcaacgctgaaggttttaggaaccttcctagccaatcggcaggtattatactttt

SEQ ID NO: 32106 - DNA, 96 bp, Fusarium azukicola
  misc_feature: 286
ataatagggtcttagcttatatatatattcctttatattatctaagaaaactgattttattcttattttattaggattattttctatttcttttct

SEQ ID NO: 32107 - DNA, 96 bp, Fusarium azukicola
  misc_feature: 286
aagggttttaaggtttattaagtagagaagaaggagggagaataaggtaagtaagtaagttaggttaaagaagagaagaaagggttagaaagtagt

SEQ ID NO: 32108 - DNA, 96 bp, Fusarium azukicola
  misc_feature: 285
tttatgccagtcaaaaagactagttttttcctttatatttaagataggaagatctaagttatctcttagtctatagttattcttattagaaataac

SEQ ID NO: 32109 - DNA, 96 bp, Fusarium azukicola
  misc_feature: 285
ttgataacgtttttttactataaaagagccttgagagctcttaacccttctagaaagtggtggttgtgtcacacccatggctttagcagctcgggg

SEQ ID NO: 32110 - DNA, 96 bp, Fusarium azukicola
  misc_feature: 285
gatgacggcagtcatgaaggtctgtaggaacctttttaaccaattagaataatacccttaatatctagctacctatagtagctataggttagggaa

SEQ ID NO: 32111 - DNA, 96 bp, Fusarium azukicola
  misc_feature: 285
ggatttttttaaaaatctaaaaaaattatttttaagttttatatttagttagatctataagattactttttttaagtttctagctattttatagca

SEQ ID NO: 32112 - DNA, 96 bp, Fusarium azukicola
  misc_feature: 285
tgatgacggcagtcatgaaggtctgtaggaacctttttaaccaattagaataatacccttaatatctagctacctatagtagctataggttaggga

SEQ ID NO: 32113 - DNA, 96 bp, Fusarium azukicola
  misc_feature: 285
tattaagtagagaagaaggagggagaataaggtaagtaagtaagttaggttaaagaagagaagaaagggttagaaagtagtaaaaaagtttaagga

SEQ ID NO: 32114 - DNA, 96 bp, Fusarium azukicola
  misc_feature: 285
tcccctctaccttccttactttatctttctcttctattcacttcctacctttctaatcacccttcctctactctttttcttttctctcctctcccc

SEQ ID NO: 32115 - DNA, 96 bp, Fusarium azukicola
  misc_feature: 285
agaaacttaaaaaaagtaatcttatagatctaactaaatataaaacttaaaaataatttttttagatttttaaaaaaatccctttatagcgaaata

SEQ ID NO: 32116 - DNA, 96 bp, Fusarium azukicola
  misc_feature: 285
caatatgcctagtagcacctgtatcatatataaaattagttatattatctttattagtagaaaaatcaggtttatttaccttatttaaatatccta

SEQ ID NO: 32117 - DNA, 96 bp, Fusarium azukicola
  misc_feature: 285
acttttttattactttctaaccctttcttctcttctttaacctaacttacttacttaccttattctccctccttcttctctacttaataaacctta

SEQ ID NO: 32118 - DNA, 96 bp, Fusarium azukicola
  misc_feature: 284
ttctttatataatagggtcttagcttatatatatattcctttatattatctaagaaaactaattttattcttattttattaggattattttctatt

SEQ ID NO: 32119 - DNA, 96 bp, Fusarium azukicola
  misc_feature: 284
ttattatatatatatcttagtaaaaacccctttattatagacctaatattataagggaaaatctaagattatatagggaaaagtattaaaatataa

SEQ ID NO: 32120 - DNA, 96 bp, Fusarium azukicola
  misc_feature: 284
tccttatcctctcctctcccctctccctctctctcttttcactccttatcctctcctctcccctctccctctctctcttttcactccttctcctct

SEQ ID NO: 32121 - DNA, 96 bp, Fusarium azukicola
  misc_feature: 284
tcactccttatcctctcctctcccctctccctctctctcttttcactccttatcctctcctctcccctctccctctctctcttttcactccttatc

SEQ ID NO: 32122 - DNA, 96 bp, Fusarium azukicola
  misc_feature: 284
aacagctaaggttatttctaataagaataactatagactaagagataacttagatcttcctattctaaatataaaggaaaaaactagtctttttga

SEQ ID NO: 32123 - DNA, 96 bp, Fusarium azukicola
  misc_feature: 284
accctatactctcttctctcttttactttaccctatactctcttctctcttttactttaccctctacttttattctttattttactttaccctata

SEQ ID NO: 32124 - DNA, 96 bp, Fusarium azukicola
  misc_feature: 284
atttgttaatgttctatattatattaccaactatagtgatatatccctataaaccacatattatattatagaatttttactctatttttaggtata

SEQ ID NO: 32125 - DNA, 96 bp, Fusarium azukicola
  misc_feature: 284
ctaaccctaatttcaaccaattaaccctaacccttaactctactactacccctaaccctaatttcaaccaattaaccctaacccttaacgtaacta

SEQ ID NO: 32126 - DNA, 96 bp, Fusarium azukicola
  misc_feature: 284
acctctctttcttagttatattctcttactcttatatctcttttacctctctttcttaagaaaatctcctctctttacttataagctatatcttta

SEQ ID NO: 32127 - DNA, 96 bp, Fusarium azukicola
  misc_feature: 284
aatataactaagaaagagaggtataactaggaaaaagagatatagctaagagagagaggtaaagctaagaaagagagatatagctagaaaagagag

SEQ ID NO: 32128 - DNA, 96 bp, Fusarium azukicola
  misc_feature: 284
actatagtgatatatccctataaactatatattatattatagaatttttactctatttttaggtatatttacctaacctatagctactataggtag

SEQ ID NO: 32129 - DNA, 96 bp, Fusarium azukicola
  misc_feature: 284
aagaaggagggagaataaggtaagtaagtaagttaggttaaagaagagaagaaagggttagaaagtagtaaaaaagtttaaggagagaagttaagt

SEQ ID NO: 32130 - DNA, 96 bp, Fusarium azukicola
  misc_feature: 283
tttattgtattttaatacttttccctatataatcttagattttcccttataatattaggtctataataaaggggtttttactaagatatatataat

SEQ ID NO: 32131 - DNA, 96 bp, Fusarium azukicola
  misc_feature: 283
tattatctctaacttctagaggggatttattatttaaagccgaatgcgggcttctattatatatatatacggctgcttccacagcctctcccccaa

SEQ ID NO: 32132 - DNA, 96 bp, Fusarium azukicola
  misc_feature: 283
aattaaacctctattattattatatatatatcttagtaaaaacccctttattatagacctaatattataagggaaaatctaagattatatagggaa

SEQ ID NO: 32133 - DNA, 96 bp, Fusarium azukicola
  misc_feature: 283
cctctctctcttatattcccttctcttccttcctctttctctttacttccctttctctttctcctccctcctcttcactccctttactcctcttaa

SEQ ID NO: 32134 - DNA, 96 bp, Fusarium azukicola
  misc_feature: 283
ctggaaaactcaggaagccaataaggtgcataagacttctaagaaaaaggaatctaaacctaattctaagaaggaagaaagagaaaagaaacaaga

SEQ ID NO: 32135 - DNA, 96 bp, Fusarium azukicola
  misc_feature: 283
ggaaaagtattaaaatacaataaaaaccctttataaaggaaataagttatattagggatagattctcttttattctctcaaatagtataggttata

SEQ ID NO: 32136 - DNA, 96 bp, Fusarium azukicola
  misc_feature: 283
ctataataaaggggtttttactaagatatatatataataataatagaggtttaatttttcctctaataataagaacgtataaagctataaccctta

SEQ ID NO: 32137 - DNA, 96 bp, Fusarium azukicola
  misc_feature: 283
aataaggtaagtaagtaagttaggttaaagaagagaagaaagggttagaaagtagtaaaaaagtttaaggagagaagttaagttaaggaggagtat

SEQ ID NO: 32138 - DNA, 96 bp, Fusarium azukicola
  misc_feature: 282
aagttaaaaactgcgaaaactgcaaactaggaaaattaactaaaaataatataaataaaaaacctagtaataaggaatataagttcctagataaaa

SEQ ID NO: 32139 - DNA, 96 bp, Fusarium azukicola
  misc_feature: 282
ttttatattatataataagtctcactttctaattttagctattttaagcttaatttcgacttttatagcttttttaaaaaataccttttaaggtga

SEQ ID NO: 32140 - DNA, 96 bp, Fusarium azukicola
  misc_feature: 282
cttaaacttttttattactttctaaccctttcttctcttctttaacctaacttacttacttaccttattctccctccttcttctctacttaataaa

SEQ ID NO: 32141 - DNA, 96 bp, Fusarium azukicola
  misc_feature: 282
gtaagtaagttaggttaaagaagagaagaaagggttagaaagtaataaaaaagtttaaggagagaagttaagttaaggaggagtatagtaagtatt

SEQ ID NO: 32142 - DNA, 96 bp, Fusarium azukicola
  misc_feature: 282
cttactatactcctccttaacttaacttctctccttaaacttttttactactttctaaccctttcttctcttctttaacctaacttacttacttac

SEQ ID NO: 32143 - DNA, 96 bp, Fusarium azukicola
  misc_feature: 282
aaggaaggttaagaaaggagagaagtaaggaaggttaagaaaggagagaagtaaggaaggttaagaaaggagagaagtaaggaagggtaagaaagg

SEQ ID NO: 32144 - DNA, 96 bp, Fusarium azukicola
  misc_feature: 282
atatctctctttcttagctttacctctctctcttagctatatctctttttcctagttatacctctctttcttagttatattctcttactcttatat

SEQ ID NO: 32145 - DNA, 96 bp, Fusarium azukicola
  misc_feature: 282
aaggtttattaagtagagaagaaggagggagaataaggtaagtaagtaagttaggttaaagaagagaagaaagggttagaaagtagtaaaaaagtt

SEQ ID NO: 32146 - DNA, 96 bp, Fusarium azukicola
  misc_feature: 281
tttattttctttaccctatactttcttcattattttactttaccctccacttttattctttattttactttaccctatactctcttctctctttta

SEQ ID NO: 32147 - DNA, 96 bp, Fusarium azukicola
  misc_feature: 281
ttaacttactctatactcctttctctcctaatacttactatactcctccttaacttaacttctctccttaaacttttttattactttctaaccctt

SEQ ID NO: 32148 - DNA, 96 bp, Fusarium azukicola
  misc_feature: 281
tactaggttttttatttatattatttttagttaattttcctagtttgcagttttcgcagtttttaacttgatataggtcctcactagtatatttaa

SEQ ID NO: 32149 - DNA, 96 bp, Fusarium azukicola
  misc_feature: 281
tcctttaaagttataatcttataagggttatagctttatacgttcttattattagaggaaaaattaaacctctattattattatatatatatctta

SEQ ID NO: 32150 - DNA, 96 bp, Fusarium azukicola
  misc_feature: 281
tagaattttttaaaaatctaaaaaaatcatttttagactttattaagagttagatttatagaaatactctttttatcttcctagctattttatagt

SEQ ID NO: 32151 - DNA, 96 bp, Fusarium azukicola
  misc_feature: 281
taatagcctcctttaaagttataatcttataagggttatagctttatacgttcttattattagaggaaaaattaaacctctattattattatatat

SEQ ID NO: 32152 - DNA, 96 bp, Fusarium azukicola
  misc_feature: 281
gttagtttagggtcggtagagaggaggggaaaggagagagggagaggagggaagaagagggaagagaaagagaagttaagaggagtaaagggagtg

SEQ ID NO: 32153 - DNA, 96 bp, Fusarium azukicola
  misc_feature: 281
gaatttagaaaagaaatagaaaataatcctaataaaataagaataaaatcagttttcttagataatataaaggaatatatatataagctaagaccc

SEQ ID NO: 32154 - DNA, 96 bp, Fusarium azukicola
  misc_feature: 281
gatggatagaatgcaacgctgaaggttttaggaaccttcctagccaatcggcagttattatactttgatgcattgatgacggcagtcatgaagggc

SEQ ID NO: 32155 - DNA, 96 bp, Fusarium azukicola
  misc_feature: 281
aagtaagttaggttaaagaagagaagaaagggttagaaagtaataaaaaagtttaaggagagaagttaagttaaggaggagtatagtaagtattag

SEQ ID NO: 32156 - DNA, 96 bp, Fusarium azukicola
  misc_feature: 281
agtgaagaggagggaggagaaagagaaagggaagtaaagagaaagaggaaggaagagaagggaatataagagagagaggggaggaagggaggaagg

SEQ ID NO: 32157 - DNA, 96 bp, Fusarium azukicola
  misc_feature: 281
cctaaactaactccctatccttcctcttttttcccccaccctccctttcttaataactctttataacttctctttttactcttctctacactacct

SEQ ID NO: 32158 - DNA, 96 bp, Fusarium azukicola
  misc_feature: 280
tttttactcttttatctttacttactataacttctcaattactctacctcctctctctctctttcttctttttttttctccccctttttttttttc

SEQ ID NO: 32159 - DNA, 96 bp, Fusarium azukicola
  misc_feature: 280
tttctcttctcccttcctcccttcctcccctctctctcttatattcccttctcttccttcctctttctctttacttccctttctctttctcctccc

SEQ ID NO: 32160 - DNA, 96 bp, Fusarium azukicola
  misc_feature: 280
ggttttaaggtttattaagtagagaagaaggagggagaataaggtaagtaagtaagttaggttaaagaagagaagaaagggttagaaagtaataaa

SEQ ID NO: 32161 - DNA, 96 bp, Fusarium azukicola
  misc_feature: 280
ttctaatcacccttcctctactctttttcttttctctcctctcccctctccctctctctcttttcactccttatcctctcctctcccctctccctc

SEQ ID NO: 32162 - DNA, 96 bp, Fusarium azukicola
  misc_feature: 280
tctaatcacccttcctctactctttttcttttctctcctctcccctctccctctctctcttttcactccttatcctctcctctcccctctccctct

SEQ ID NO: 32163 - DNA, 96 bp, Fusarium azukicola
  misc_feature: 280
aatagcctcctttaaagttataatcttataagggttatagctttatacgttcttattattagaggaaaaattaaacctctattattattatatata

SEQ ID NO: 32164 - DNA, 96 bp, Fusarium azukicola
  misc_feature: 280
atatagcttataagtaaagagaggagattttcttaagaaagagaggtaaaagagatataagagtaagagaatataactaagaaagagaggtataac

SEQ ID NO: 32165 - DNA, 96 bp, Fusarium azukicola
  misc_feature: 280
atattactaactatagtgatatatccctataaactatatattatattatagaatttttactctatttttaggtatatttacctaacctatagctac

SEQ ID NO: 32166 - DNA, 96 bp, Fusarium azukicola
  misc_feature: 280
aataaataagaagtccttcttttaaataagtaaggaaaaataatattataaggaaaagagaaaaataacctatatataataatagctaaggttatt

SEQ ID NO: 32167 - DNA, 96 bp, Fusarium azukicola
  misc_feature: 279
tttttattactttctaaccctttcttctcttctttaacctaacttacttacttaccttattctccctccttcttctctacttaataaaccttaaaa

SEQ ID NO: 32168 - DNA, 96 bp, Fusarium azukicola
  misc_feature: 279
ggagtgaagaggagggaggagaaagagaaagggaagtaaagagaaagaggaaggaagagaagggaatataagagagagaggggaggaagggaggaa

SEQ ID NO: 32169 - DNA, 96 bp, Fusarium azukicola
  misc_feature: 279
gaaacttaaaaaaagtaatcttatagatctaactaaatataaaacttaaaaataatttttttagatttttaaaaaaatccctttatagcgaaataa

SEQ ID NO: 32170 - DNA, 96 bp, Fusarium azukicola
  misc_feature: 279
attaagggtattattctaattggttaaaaaggttcctatagacctttatgactgccgtcatctatgcattaagtataataactgccgattggctaa

SEQ ID NO: 32171 - DNA, 96 bp, Fusarium azukicola
  misc_feature: 279
accctaatttcaaccaattaaccctaacccttaactctactactacccctaaccctaatttcaaccaattaaccctaacccttaacgtaactacta

SEQ ID NO: 32172 - DNA, 96 bp, Fusarium azukicola
  misc_feature: 279
aatacttactatactcctccttaacttaacttctctccttaaacttttttactactttctaaccctttcttctcttctttaacctaacttacttac

SEQ ID NO: 32173 - DNA, 96 bp, Fusarium azukicola
  misc_feature: 279
cactccttatcctctcctctcccctctccctctctctcttttcactccttatcctctcctctcccctctccctctctctcttttcactccttatcc

SEQ ID NO: 32174 - DNA, 96 bp, Fusarium azukicola
  misc_feature: 279
gctataaagggatttttttaaaaatctaaaaaaattatttttaagttttatatttagttagatctataagattactttttttaagtttctagctat

SEQ ID NO: 32175 - DNA, 96 bp, Fusarium azukicola
  misc_feature: 279
ctctaccttccttactttatctttctcttctattcacttcctacctttctaatcacccttcctctactctttttcttttctctcctctcccctctc

SEQ ID NO: 32176 - DNA, 96 bp, Fusarium azukicola
  misc_feature: 279
agtaagttaggttaaagaagagaagaaagggttagaaagtagtaaaaaagtttaaggagagaagttaagttaaggaggagtatagtaagtattagg

SEQ ID NO: 32177 - DNA, 96 bp, Fusarium azukicola
  misc_feature: 278
tttcaaccaattaaccctaacccttaactcacctacttaaccctaaccctaatttcaaccaattaaccctaacccttaactctactactaccccta

SEQ ID NO: 32178 - DNA, 96 bp, Fusarium azukicola
  misc_feature: 278
ttagaagtcttatgcaccttattggcttcctgagttttccagttttttggagctttattagggtgcaaaaaatagcaatctgggtctttatgacct

SEQ ID NO: 32179 - DNA, 96 bp, Fusarium azukicola
  misc_feature: 278
tgcctagtagcacctgtatcatatataaaattagttatattatctttattagtagaaaaatcaggtttatttaccttatttaaatatcctagttgt

SEQ ID NO: 32180 - DNA, 96 bp, Fusarium azukicola
  misc_feature: 278
tccctatataaagaaacaactaggatatttaaataaggtaaataaacctgatttttctactaataaaaataatataactaattttatatatgatac

SEQ ID NO: 32181 - DNA, 96 bp, Fusarium azukicola
  misc_feature: 278
atatttagttagatctataagattactttttttaagtttctagctattttatagcagtttttagaaacttaggttttagcgatttttagttatata

SEQ ID NO: 32182 - DNA, 96 bp, Fusarium azukicola
  misc_feature: 278
gtagttacgttaagggttagggttaattggttgaaattagggttaggggtagtagtagagttaagggttagggttaattggttgaaattagggtta

SEQ ID NO: 32183 - DNA, 96 bp, Fusarium azukicola
  misc_feature: 278
taaagagaggagattttcttaagaaagagaggtaaaagagatataagagtaagagaatataactaagaaagagaggtataactaggaaaaagagat

SEQ ID NO: 32184 - DNA, 96 bp, Fusarium azukicola
  misc_feature: 278
aaaaaacgattttaactatttagctatatataagacttaaaaatattttttctaaatttttaaaaaaattccttatataggtatcttaaagtatac

SEQ ID NO: 32185 - DNA, 96 bp, Fusarium azukicola
  misc_feature: 278
ccctaaactaactccctatccttcctcttttttcccccaccctccctttcttaataactctttataacttctctttttactcttctctacactacc

SEQ ID NO: 32186 - DNA, 96 bp, Fusarium azukicola
  misc_feature: 278
gggaaaagtattaaaatacaataaaaaccctttataaaggaaataagttatattagggatagattctcttttattctctcaaatagtataggttat

SEQ ID NO: 32187 - DNA, 96 bp, Fusarium azukicola
  misc_feature: 278
ctttctcttctcccttcctcccttcctcccctctctctcttatattcccttctcttccttcctctttctctttacttccctttctctttctcctcc

SEQ ID NO: 32188 - DNA, 96 bp, Fusarium azukicola
  misc_feature: 278
aggagtgaaaagagagagagggagaggggagaggagaggataaggagtgaaaagagagagagggagaggggagaggagaggataaggagagaaaag

SEQ ID NO: 32189 - DNA, 96 bp, Fusarium azukicola
  misc_feature: 278
actggaaaactcaggaagccaataaggtgcataagacttctaagaaaaaggaatctaaacctaattctaagaaggaagaaagagaaaagaaacaag

SEQ ID NO: 32190 - DNA, 96 bp, Fusarium azukicola
  misc_feature: 278
agaaggaccctatatattagtagctattttatctaggaacttatattccttattactaggttttttatttatattatttttagttaattttcctag

SEQ ID NO: 32191 - DNA, 96 bp, Fusarium azukicola
  misc_feature: 278
cagctaaggttatttctaataagaataactatagactaagagataacttagatcttcctattctaaatataaaggaaaaaactagtctttttgact

SEQ ID NO: 32192 - DNA, 96 bp, Fusarium azukicola
  misc_feature: 278
aagtctatctattaaggaataagttagaagctattataaaatttaaggaatttagaaaagaaatagaaaataatcctaataaaataagaataaaat

SEQ ID NO: 32193 - DNA, 96 bp, Fusarium azukicola
  misc_feature: 278
agttaaaaactgcgaaaactgcaaactaggaaaattaactaaaaataatataaataaaaaacctagtaataaggaatataagttcctagataaaat

SEQ ID NO: 32194 - DNA, 96 bp, Fusarium azukicola
  misc_feature: 278
atacttactatactcctccttaacttaacttctctccttaaacttttttactactttctaaccctttcttctcttctttaacctaacttacttact

SEQ ID NO: 32195 - DNA, 96 bp, Fusarium azukicola
  misc_feature: 277
ttctctccttaaacttttttactactttctaaccctttcttctcttctttaacctaacttacttacttaccttattctccctccttcttctctact

SEQ ID NO: 32196 - DNA, 96 bp, Fusarium azukicola
  misc_feature: 277
tatttagttagatctataagattactttttttaagtttctagctattttatagcagtttttagaaacttaggttttagcgatttttagttatatag

SEQ ID NO: 32197 - DNA, 96 bp, Fusarium azukicola
  misc_feature: 277
tattaaggaataagttagaagctattataaaatttaaggaatttagaaaagaaatagaaaataatcctaataaaataagaataaaatcagttttct

SEQ ID NO: 32198 - DNA, 96 bp, Fusarium azukicola
  misc_feature: 277
ccttataatattaggtctataataaaggggtttttactaagatatatataataataatagaggtttaattttttcctctaataataagaacgtata

SEQ ID NO: 32199 - DNA, 96 bp, Fusarium azukicola
  misc_feature: 277
tataaagggatttttttaaaaatctaaaaaaattatttttaagttttatatttagttagatctataagattactttttttaagtttctagctattt

SEQ ID NO: 32200 - DNA, 96 bp, Fusarium azukicola
  misc_feature: 277
tagaatttttactctatttttaggtatatttacctaacctatagctactataggtagctagatattaagggtattattctaattggttaaaaaggg

SEQ ID NO: 32201 - DNA, 96 bp, Fusarium azukicola
  misc_feature: 277
taatacttactatactcctccttaacttaacttctctccttaaacttttttactactttctaaccctttcttctcttctttaacctaacttactta

SEQ ID NO: 32202 - DNA, 96 bp, Fusarium azukicola
  misc_feature: 277
aaaattaactagaaattcttttctacatacaatatgcctagtagcacctgtatcatatataaaattagttatattatttttattagtagaaaaatc

SEQ ID NO: 32203 - DNA, 96 bp, Fusarium azukicola
  misc_feature: 277
gaaggaccctatatattagtagctattttatctaggaacttatattccttattactaggttttttatttatattatttttagttaattttcctagt

SEQ ID NO: 32204 - DNA, 96 bp, Fusarium azukicola
  misc_feature: 277
aggaaaattaactaaaaataatataaataaaaaacctagtaataaggaatataagttcctagataaaatagctactaatatatagggtccttctag

SEQ ID NO: 32205 - DNA, 96 bp, Fusarium azukicola
  misc_feature: 277
atttagttagatctataagattactttttttaagtttctagctattttatagcagtttttagaaacttaggttttagcgatttttagttatatagt

SEQ ID NO: 32206 - DNA, 96 bp, Fusarium azukicola
  misc_feature: 277
aaataaataagaagtccttcttttaaataagtaaggaaaaataatattataaggaaaagagaaaaataacctatatataataatagctaaggttat

SEQ ID NO: 32207 - DNA, 96 bp, Fusarium azukicola
  misc_feature: 276
ttttttgcaccctaataaggctccaaaaaactggaaaactcaggaagccaataaggtgcataagacttctaagaaaagggaatctaaacctaattc

SEQ ID NO: 32208 - DNA, 96 bp, Fusarium azukicola
  misc_feature: 276
ggaaaactcaggaagccaataaggtgcataagacttctaagaaaaaggaatctaaacctaattctaagaaggaagaaagagaaaagaaacaagaaa

SEQ ID NO: 32209 - DNA, 96 bp, Fusarium azukicola
  misc_feature: 276
gaaggtttcttatcaaaggtcctagtatattattagttatattattttgttgagaaattatggaattatatacctctaaattatcacttatatcaa

SEQ ID NO: 32210 - DNA, 96 bp, Fusarium azukicola
  misc_feature: 276
tatagaaggggagggttagaagggttaagaaaggagagaagtaaggaaggttaagaaaggagagaagtaaggaaggttaagaaaggagagaagtaa

SEQ ID NO: 32211 - DNA, 96 bp, Fusarium azukicola
  misc_feature: 276
tactatactcctccttaacttaacttctctccttaaacttttttactactttctaaccctttcttctcttctttaacctaacttacttacttacct

SEQ ID NO: 32212 - DNA, 96 bp, Fusarium azukicola
  misc_feature: 276
agggttttaaggtttattaagtagagaagaaggagggagaataaggtaagtaagtaagttaggttaaagaagagaagaaagggttagaaagtagta

SEQ ID NO: 32213 - DNA, 96 bp, Fusarium azukicola
  misc_feature: 276
attctatattatattaccaactatagtgatatatccctataaaccatatattatattatagaatttttactctatttttaggtatatttacctaac

SEQ ID NO: 32214 - DNA, 96 bp, Fusarium azukicola
  misc_feature: 276
aggaatttagaaaagaaatagaaaataatcctaataaaataagaataaaatcagttttcttagataatataaaggaatatatatataagctaagac

SEQ ID NO: 32215 - DNA, 96 bp, Fusarium azukicola
  misc_feature: 276
ccctaatttcaaccaattaaccctaacccttaactctactactacccctaaccctaatttcaaccaattaaccctaacccttaacgtaactactac

SEQ ID NO: 32216 - DNA, 96 bp, Fusarium azukicola
  misc_feature: 276
ataaatagcttttcttatttcttttctctttcttccttcttagaattaggtttagattcctttttcttagaagtcttatataccttattagcttcc

SEQ ID NO: 32217 - DNA, 96 bp, Fusarium azukicola
  misc_feature: 276
atataataagtctcactttctaattttagctattttaagcttaatttcgacttttatagcttttttaaaaaataccttttaaggtgaaaatataag

SEQ ID NO: 32218 - DNA, 96 bp, Fusarium azukicola
  misc_feature: 276
aggaccctatatattagtagctattttatctaggaacttatattccttattactaggttttttatttatattatttttagttaattttcctagttt

SEQ ID NO: 32219 - DNA, 96 bp, Fusarium azukicola
  misc_feature: 276
aaaaactgcgaaaactataaactaggaaaattaactaaaaataatataaataaaaaacctagtaataaggaatataagttcctagataaaatagct

SEQ ID NO: 32220 - DNA, 96 bp, Fusarium azukicola
  misc_feature: 275
ttctttttaccttaacttactctatactcctttctctcctaatacttactatactcctccttaacttaacttctctccttaaacttttttactact

SEQ ID NO: 32221 - DNA, 96 bp, Fusarium azukicola
  misc_feature: 275
gagtaaagggagtgaagaggagggaggagaaagagaaagggaagtaaagagaaagaggaaggaagagaagggaatataagagagagaggggaggaa

SEQ ID NO: 32222 - DNA, 96 bp, Fusarium azukicola
  misc_feature: 275
tcttcttccctcctctccctctctcctttcccctcctctctaccgaccctaaactaactccctatccttcctcttttttcccccaccctccctttc

SEQ ID NO: 32223 - DNA, 96 bp, Fusarium azukicola
  misc_feature: 275
atattatattactaactatagtgatatatccctataaactatatattatattatagaatttttactctatttttaggtatatttacctaacctata

SEQ ID NO: 32224 - DNA, 96 bp, Fusarium azukicola
  misc_feature: 275
tatactttcttcattattttactttaccctccacttttattctttattttactttaccctatactctcttctctcttttactttaccctatactct

SEQ ID NO: 32225 - DNA, 96 bp, Fusarium azukicola
  misc_feature: 275
tataaatagcttttcttgtttcttttctctttcttccttcttagaattaggtttagattcctttttcttagaagtcttatgcaccttattggcttt

SEQ ID NO: 32226 - DNA, 96 bp, Fusarium azukicola
  misc_feature: 275
tagaaggaccctatatattagtagctattttatctaggaacttatattccttattactaggttttttatttatattatttttagttaattttccta

SEQ ID NO: 32227 - DNA, 96 bp, Fusarium azukicola
  misc_feature: 275
aaaactgcgaaaactataaactaggaaaattaactaaaaataatataaataaaaaacctagtaataaggaatataagttcctagataaaatagcta

SEQ ID NO: 32228 - DNA, 96 bp, Fusarium azukicola
  misc_feature: 275
aacttactctatactcctttctctcctaatacttactatactcctccttaacttaacttctctccttaaacttttttattactttctaaccctttc

SEQ ID NO: 32229 - DNA, 96 bp, Fusarium azukicola
  misc_feature: 274
gatatagcttataagtaaagagaggagattttcttaagaaagagaggtaaaagagatataagagtaagagaatataactaagaaagagaggtataa

SEQ ID NO: 32230 - DNA, 96 bp, Fusarium azukicola
  misc_feature: 274
ctattttttgcaccctaataaagctccaaaaaactggaaaactcaggaagccaataaggtgcataagacttctaagaaaaaggaatctaaacctaa

SEQ ID NO: 32231 - DNA, 96 bp, Fusarium azukicola
  misc_feature: 274
cctataaaccatatattatattatagaatttttactctatttttaggtatatttacctaacctatagctactataggtagctagatattaagggga

SEQ ID NO: 32232 - DNA, 96 bp, Fusarium azukicola
  misc_feature: 274
attattatatatatatcttagtaaaaacccctttattatagacctaatattataagggaaaatctaagattatatagggaaaagtattaaaatata

SEQ ID NO: 32233 - DNA, 96 bp, Fusarium azukicola
  misc_feature: 274
tatatttagttagatctataagattactttttttaagtttctagctattttatagcagtttttagaaacttaggttttagcgatttttagttatat

SEQ ID NO: 32234 - DNA, 96 bp, Fusarium azukicola
  misc_feature: 274
gtatagaaggggagggttagaagggttaagaaaggagagaagtaaggaaggttaagaaaggagagaagtaaggaaggttaagaaaggagagaagta

SEQ ID NO: 32235 - DNA, 96 bp, Fusarium azukicola
  misc_feature: 274
gtataaagctataacccttataagattataactttaaaggaggctattaatgttctatattatattactaactatagtgatatatccctataaacc

SEQ ID NO: 32236 - DNA, 96 bp, Fusarium azukicola
  misc_feature: 274
cttctctccttaaacttttttactactttctaaccctttcttctcttctttaacctaacttacttacttaccttattctccctccttcttctctac

SEQ ID NO: 32237 - DNA, 96 bp, Fusarium azukicola
  misc_feature: 274
ctaataaggctccaaaaaactggaaaactcaggaagccaataaggtgcataagacttctaagaaaagggaatctaaacctaattctaagaaggaag

SEQ ID NO: 32238 - DNA, 96 bp, Fusarium azukicola
  misc_feature: 274
agtttagggtcggtagagaggaggggaaaggagagagggagaggagggaagaagagggaagagaaagagaagttaagaggagtaaagggagtgaag

SEQ ID NO: 32239 - DNA, 96 bp, Fusarium azukicola
  misc_feature: 274
atcatataaagagttagatttatagaaatactttttttaagtttctagctattttatagcagtttttattaaggttagaaatataaggttttagtg

SEQ ID NO: 32240 - DNA, 96 bp, Fusarium azukicola
  misc_feature: 274
actatactcctccttaacttaacttctctccttaaacttttttactactttctaaccctttcttctcttctttaacctaacttacttacttacctt

SEQ ID NO: 32241 - DNA, 96 bp, Fusarium azukicola
  misc_feature: 273
ttagaaaagaaatagaaaataatcctaataaaataagaataaaatcagttttcttagataatataaaggaatatatatataagctaagaccctatt

SEQ ID NO: 32242 - DNA, 96 bp, Fusarium azukicola
  misc_feature: 273
ttaagtagagaagaaggagggagaataaggtaagtaagtaagttaggttaaagaagagaagaaagggttagaaagtagtaaaaaagtttaaggaga

SEQ ID NO: 32243 - DNA, 96 bp, Fusarium azukicola
  misc_feature: 273
gtttattaagtagagaagaaggagggagaataaggtaagtaagtaagttaggttaaagaagagaagaaagggttagaaagtagtaaaaaagtttaa

SEQ ID NO: 32244 - DNA, 96 bp, Fusarium azukicola
  misc_feature: 273
tctctttcttagctttacctctctctcttagctatatctctttttcctagttatacctctctttcttagttatattctcttactcttatatctctt

SEQ ID NO: 32245 - DNA, 96 bp, Fusarium azukicola
  misc_feature: 273
tataaataaataagaagtccttcttttaaataagtaaggaaaaataatattataaggaaaagagaaaaataacctatatataataatagctaaggt

SEQ ID NO: 32246 - DNA, 96 bp, Fusarium azukicola
  misc_feature: 273
tagaaacttaaaaaaagtaatcttatagatctaactaaatataaaacttaaaaataatttttttagatttttaaaaaaatccctttatagcgaaat

SEQ ID NO: 32247 - DNA, 96 bp, Fusarium azukicola
  misc_feature: 273
taaataaataagaagtccttcttttaaataagtaaggaaaaataatattataaggaaaagagaaaaataacctatatataataatagctaaggtta

SEQ ID NO: 32248 - DNA, 96 bp, Fusarium azukicola
  misc_feature: 273
ctcctccttaacttaacttctctccttaaacttttttactactttctaaccctttcttctcttctttaacctaacttacttacttaccttattctc

SEQ ID NO: 32249 - DNA, 96 bp, Fusarium azukicola
  misc_feature: 273
aggttttttatttatattatttttagttaattttcctagtttatagttttcgcagtttttaacttaatataggtcctcactagtatatttaaagag

SEQ ID NO: 32250 - DNA, 96 bp, Fusarium azukicola
  misc_feature: 272
ttttactaagatatatatataataataatagaggtttaatttttcctctaataataagaacgtataaagctataacccttataagattataacttt

SEQ ID NO: 32251 - DNA, 96 bp, Fusarium azukicola
  misc_feature: 272
ctagaaacttaaaaaaagtaatcttatagatctaactaaatataaaacttaaaaataatttttttagatttttaaaaaaatccctttatagcgaaa

SEQ ID NO: 32252 - DNA, 96 bp, Fusarium azukicola
  misc_feature: 272
ttcttttccttgtgatattatttttccttgcttatttaaaagaaggacttcttgtttatttataatagaagttatattataaagagaagattgact

SEQ ID NO: 32253 - DNA, 96 bp, Fusarium azukicola
  misc_feature: 272
tctcccttcctcccttcctcccctctctctcttatattcccttctcttccttcctctttctctttacttccctttctctttctcctccctcctctt

SEQ ID NO: 32254 - DNA, 96 bp, Fusarium azukicola
  misc_feature: 272
gtaagttaggttaaagaagagaagaaagggttagaaagtaataaaaaagtttaaggagagaagttaagttaaggaggagtatagtaagtattagga

SEQ ID NO: 32255 - DNA, 96 bp, Fusarium azukicola
  misc_feature: 272
gtatcatatataaaattagttatattatctttattagtagaaaaatcaggtttatttaccttatttaaatatcctagttgtttctttatataggga

SEQ ID NO: 32256 - DNA, 96 bp, Fusarium azukicola
  misc_feature: 272
ataaggtaagtaagtaagttaggttaaagaagagaagaaagggttagaaagtaataaaaaagtttaaggagagaagttaagttaaggaggagtata

SEQ ID NO: 32257 - DNA, 96 bp, Fusarium azukicola
  misc_feature: 272
ctttaccctatactttcttcattattttactttaccctccacttttattctttattttactttaccctatactctcttctctcttttactttaccc

SEQ ID NO: 32258 - DNA, 96 bp, Fusarium azukicola
  misc_feature: 272
ctttatataatagggtcttagcttatatatatattcctttatattatctaagaaaactaattttattcttattttattaggattattttctatttc

SEQ ID NO: 32259 - DNA, 96 bp, Fusarium azukicola
  misc_feature: 272
ctataaagggatttttttaaaaatctaaaaaaattatttttaagttttatatttagttagatctataagattactttttttaagtttctagctatt

SEQ ID NO: 32260 - DNA, 96 bp, Fusarium azukicola
  misc_feature: 272
atatctctttttcctagttatacctctctttcttagttatattctcttactcttatatctcttttacctctctttcttaagaaaatctcctctctt

SEQ ID NO: 32261 - DNA, 96 bp, Fusarium azukicola
  misc_feature: 271
tttccctcccctcttcctctactttctttctcttctcccctcctcttcttaactacactttctctctacctcacttttccctctttatattaaccc

SEQ ID NO: 32262 - DNA, 96 bp, Fusarium azukicola
  misc_feature: 271
tataagagataatgcttctttactcttagaagaagtggaatcttcttctatagtactagaaagcttttctttaactaagaaagcttccattctcaa

SEQ ID NO: 32263 - DNA, 96 bp, Fusarium azukicola
  misc_feature: 271
ttctctttctcttccctcttcttccctcctctccctctctcctttcccctcctctctaccgaccctaaactaactccctatccttcctcttttttc

SEQ ID NO: 32264 - DNA, 96 bp, Fusarium azukicola
  misc_feature: 271
atatactagtgaggacctatattaagttaaaaactgcgaaaactataaactaggaaaattaactaaaaataatataaataaaaaacctagtaataa

SEQ ID NO: 32265 - DNA, 96 bp, Fusarium azukicola
  misc_feature: 271
ttatataatagggtcttagcttatatatatattcctttatattatctaagaaaactaattttattcttattttattaggattattttctatttctt

SEQ ID NO: 32266 - DNA, 96 bp, Fusarium azukicola
  misc_feature: 271
attgatttcctagataactaggaagaaaagtaataaagagataatatctagcttctaagagagacttatagaagatagatagataaaagtgggtca

SEQ ID NO: 32267 - DNA, 96 bp, Fusarium azukicola
  misc_feature: 271
aagtagtaaaaaagtttaaggagagaagttaagttaaggaggagtatagtaagtattaggagagaaaggagtatagagtaagttaaggtaaaaaga

SEQ ID NO: 32268 - DNA, 96 bp, Fusarium azukicola
  misc_feature: 271
aggtaagtaagtaagttaggttaaagaagagaagaaagggttagaaagtaataaaaaagtttaaggagagaagttaagttaaggaggagtatagta

SEQ ID NO: 32269 - DNA, 96 bp, Fusarium azukicola
  misc_feature: 271
ggtttattaagtagagaagaaggagggagaataaggtaagtaagtaagttaggttaaagaagagaagaaagggttagaaagtagtaaaaaagttta

SEQ ID NO: 32270 - DNA, 96 bp, Fusarium azukicola
  misc_feature: 271
ctcaggaagccaataaggtgcataagacttctaagaaaagggaatctaaacctaattctaagaaggaagaaagagaaaagaaacaagaaaagctat

SEQ ID NO: 32271 - DNA, 96 bp, Fusarium azukicola
  misc_feature: 271
atgcctagtagcacctgtatcatatataaaattagttatattatctttattagtagaaaaatcaggtttatttaccttatttaaatatcctagttg

SEQ ID NO: 32272 - DNA, 96 bp, Fusarium azukicola
  misc_feature: 271
actgttaatgttctatattatattaccaactatagtgatatatccctataaaccatatattatattatagaatttttactctatttttaggtatat

SEQ ID NO: 32273 - DNA, 96 bp, Fusarium azukicola
  misc_feature: 271
acttctctcctttcttaaccttccttacttctctcctttcttaaccttccttacttctctcctttcttaacccttctaaccctccccttctatact

SEQ ID NO: 32274 - DNA, 96 bp, Fusarium azukicola
  misc_feature: 271
aactcaggaagccaataaggtgcataagacttctaagaaaagggaatctaaacctaattctaagaaggaagaaagagaaaagaaacaagaaaagct

SEQ ID NO: 32275 - DNA, 96 bp, Fusarium azukicola
  misc_feature: 270
aaggaatttagaaaagaaatagaaaataatcctaataaaataagaataaaatcagttttcttagataatataaaggaatatatatataagctaaga

SEQ ID NO: 32276 - DNA, 96 bp, Fusarium azukicola
  misc_feature: 270
ggagtaaagggagtgaagaggagggaggagaaagagaaagggaagtaaagagaaagaggaaggaagagaagggaatataagagagagaggggagga

SEQ ID NO: 32277 - DNA, 96 bp, Fusarium azukicola
  misc_feature: 270
gtttttactaagatatatatataataataatagaggtttaatttttcctctaataataagaacgtataaagctataacccttataagattataact

SEQ ID NO: 32278 - DNA, 96 bp, Fusarium azukicola
  misc_feature: 270
gatttttttaaaaatctaaaaaaattatttttaagttttatatttagttagatctataagattactttttttaagtttctagctattttatagcag

SEQ ID NO: 32279 - DNA, 96 bp, Fusarium azukicola
  misc_feature: 270
ccctcttcttccctcctctccctctctcctttcccctcctctctaccgaccctaaactaactccctatccttcctcttttttcccccaccctccct

SEQ ID NO: 32280 - DNA, 96 bp, Fusarium azukicola
  misc_feature: 269
ttaaaagaggagagagaaggaggggagagaaagagaggaggaaaagtaaaaagaaggaggagagagaaggaagaataaaagaaaagaataagaggg

SEQ ID NO: 32281 - DNA, 96 bp, Fusarium azukicola
  misc_feature: 269
tgattttattcttattttattaggattattttctatttcttttctaaattccttgaattttataatagcttctgacttattccttaatagataggc

SEQ ID NO: 32282 - DNA, 96 bp, Fusarium azukicola
  misc_feature: 269
tatataatagggtcttagcttatatatatattcctttatattatctaagaaaactaattttattcttattttattaggattattttctatttcttt

SEQ ID NO: 32283 - DNA, 96 bp, Fusarium azukicola
  misc_feature: 269
ggtcgatctggaatacttctagggcttcttaaggctatttttgcctccctttatctcttatctcttatttcttatttctttatctcttatctctta

SEQ ID NO: 32284 - DNA, 96 bp, Fusarium azukicola
  misc_feature: 269
gttaaaagaggagagagaaggaggggagagaaagagaggaggaaaagtaaaaagaaggaggagagagaaggaagaataaaagaaaagaataagagg

SEQ ID NO: 32285 - DNA, 96 bp, Fusarium azukicola
  misc_feature: 269
gtaagtaagtaagttaggttaaagaagagaagaaagggttagaaagtaataaaaaagtttaaggagagaagttaagttaaggaggagtatagtaag

SEQ ID NO: 32286 - DNA, 96 bp, Fusarium azukicola
  misc_feature: 269
ataaatcccctctagaagttagagataatatttccttagatattaaggaattagataaaataaaaacctttaggtctatagtttattataagaacc

SEQ ID NO: 32287 - DNA, 96 bp, Fusarium azukicola
  misc_feature: 269
ggaatttagaaaagaaatagaaaataatcctaataaaataagaataaaatcagttttcttagataatataaaggaatatatatataagctaagacc

SEQ ID NO: 32288 - DNA, 96 bp, Fusarium azukicola
  misc_feature: 269
ccctctaccttccttactttatctttctcttctattcacttcctacctttctaatcacccttcctctactctttttcttttctctcctctcccctc

SEQ ID NO: 32289 - DNA, 96 bp, Fusarium azukicola
  misc_feature: 269
gaatacttctagggcttcttaaggctatttttgcctccctttatctcttatctcttatttcttatttctttatctcttatctcttatctcttatct

SEQ ID NO: 32290 - DNA, 96 bp, Fusarium azukicola
  misc_feature: 269
ctctttttcctagttatacctctctttcttagttatattctcttactcttatatctcttttacctctctttcttaagaaaatctcctctctttact

SEQ ID NO: 32291 - DNA, 96 bp, Fusarium azukicola
  misc_feature: 269
attagctataaatagcttttcttatttcttttctctttcttccttcttagaattaggtttagattcctttttcttagaagtcttatgcaccttatt

SEQ ID NO: 32292 - DNA, 96 bp, Fusarium azukicola
  misc_feature: 269
agaaggagggagaataaggtaagtaagtaagttaggttaaagaagagaagaaagggttagaaagtagtaaaaaagtttaaggagagaagttaagtt

SEQ ID NO: 32293 - DNA, 96 bp, Fusarium azukicola
  misc_feature: 268
tttttgcaccctaataaggctccaaaaaactggaaaactcaggaagccaataaggtgcataagacttctaagaaaagggaatctaaacctaattct

SEQ ID NO: 32294 - DNA, 96 bp, Fusarium azukicola
  misc_feature: 268
tttaccctatactttcttcattattttactttaccctccacttttattctttattttactttaccctatactctcttctctcttttactttaccct

SEQ ID NO: 32295 - DNA, 96 bp, Fusarium azukicola
  misc_feature: 268
tctaccttccttactttatctttctcttctattcacttcctacctttctaatcacccttcctctactctttttcttttctctcctctcccctctcc

SEQ ID NO: 32296 - DNA, 96 bp, Fusarium azukicola
  misc_feature: 268
tcctctcccctctccctctctctcttttcactccttatcctctcctctcccctctccctctctctcttttcactccttctcctctcctctcccctc

SEQ ID NO: 32297 - DNA, 96 bp, Fusarium azukicola
  misc_feature: 268
tattactaactatagtgatatatccctataaactatatattatattatagaatttttactctatttttaggtatatttacctaacctatagctact

SEQ ID NO: 32298 - DNA, 96 bp, Fusarium azukicola
  misc_feature: 268
ataaggtaagtaagtaagttaggttaaagaagagaagaaagggttagaaagtagtaaaaaagtttaaggagagaagttaagttaaggaggagtata

SEQ ID NO: 32299 - DNA, 96 bp, Fusarium azukicola
  misc_feature: 268
cgctataaagggatttttttaaaaatctaaaaaaattatttttaagttttatatttagttagatctataagattactttttttaagtttctagcta

SEQ ID NO: 32300 - DNA, 96 bp, Fusarium azukicola
  misc_feature: 268
gtcgatctggaatacttctagggcttcttaaggctatttttgcctccctttatctcttatctcttatttcttatttctttatctcttatctcttat

SEQ ID NO: 32301 - DNA, 96 bp, Fusarium azukicola
  misc_feature: 268
gaaaaattaaacctctattattattatatatatatcttagtaaaaacccctttattatagacctaatattataagggaaaatctaagattatatag

SEQ ID NO: 32302 - DNA, 96 bp, Fusarium azukicola
  misc_feature: 268
aggtcctagtatattattagttatattattttgttgagaaattatggaattatatacctctaaattatcacttatatcaaaatccatttcttctgg

SEQ ID NO: 32303 - DNA, 96 bp, Fusarium azukicola
  misc_feature: 268
aaggttatttctaataagaataactatagactaagagataacttagatcttcctattctaaatataaaggaaaaaactagtctttttgactggcat

SEQ ID NO: 32304 - DNA, 96 bp, Fusarium azukicola
  misc_feature: 268
atatatatacggctgcttctatagcctctccctaaaggtatttaggtaggttagaagtaaataataaagctctaaccttttctaatatagtcctat

SEQ ID NO: 32305 - DNA, 96 bp, Fusarium azukicola
  misc_feature: 268
aagagataagagataaagaaataagaaataagagataagagataaagggaggcaaaaatagccttaagaagccctagaagtattccagatcgacct

SEQ ID NO: 32306 - DNA, 96 bp, Fusarium azukicola
  misc_feature: 268
aaggaccctatatattagtagctattttatctaggaacttatattccttattactaggttttttatttatattatttttagttaattttcctagtt

SEQ ID NO: 32307 - DNA, 96 bp, Fusarium azukicola
  misc_feature: 267
ttatttctaataagaataactatagactaagagataacttagatcttcctattctaaatataaaggaaaaaactagtctttttgactggcataaaa

SEQ ID NO: 32308 - DNA, 96 bp, Fusarium azukicola
  misc_feature: 267
tttactaagatatatatataataataatagaggtttaatttttcctctaataataagaacgtataaagctataacccttataagattataacttta

SEQ ID NO: 32309 - DNA, 96 bp, Fusarium azukicola
  misc_feature: 267
caagtatagaaggggagggttagaagggttaagaaaggagagaagtaaggaaggttaagaaaggagagaagtaaggaaggttaagaaaggagagaa

SEQ ID NO: 32310 - DNA, 96 bp, Fusarium azukicola
  misc_feature: 267
tattctatattatattaccaactatagtgatatatccctataaaccatatattatattatagaatttttactctatttttaggtatatttacctaa

SEQ ID NO: 32311 - DNA, 96 bp, Fusarium azukicola
  misc_feature: 267
ttactatactcctccttaacttaacttctctccttaaacttttttactactttctaaccctttcttctcttctttaacctaacttacttacttacc

SEQ ID NO: 32312 - DNA, 96 bp, Fusarium azukicola
  misc_feature: 267
tctttatataatagggtcttagcttatatatatattcctttatattatctaagaaaactaattttattcttattttattaggattattttctattt

SEQ ID NO: 32313 - DNA, 96 bp, Fusarium azukicola
  misc_feature: 267
taagtaagttaggttaaagaagagaagaaagggttagaaagtaataaaaaagtttaaggagagaagttaagttaaggaggagtatagtaagtatta

SEQ ID NO: 32314 - DNA, 96 bp, Fusarium azukicola
  misc_feature: 267
ccttaacttactctatactcctttctctcctaatacttactatactcctccttaacttaacttctctccttaaacttttttattactttctaaccc

SEQ ID NO: 32315 - DNA, 96 bp, Fusarium azukicola
  misc_feature: 267
ctttctaatcacccttcctctactctttttcttttctctcctctcccctctccctctctctcttttcactccttatcctctcctctcccctctccc

SEQ ID NO: 32316 - DNA, 96 bp, Fusarium azukicola
  misc_feature: 267
cctttctaatcacccttcctctactctttttcttttctctcctctcccctctccctctctctcttttcactccttatcctctcctctcccctctcc

SEQ ID NO: 32317 - DNA, 96 bp, Fusarium azukicola
  misc_feature: 267
ctcccttcctcccttcctcccctctctctcttatattcccttctcttccttcctctttctctttacttccctttctctttctcctccctcctcttc

SEQ ID NO: 32318 - DNA, 96 bp, Fusarium azukicola
  misc_feature: 266
actagtgaggacctatatcaagttaaaaactgcgaaaactgcaaactaggaaaattaactaaaaataatataaataaaaaacctagtaataaggaa

SEQ ID NO: 32319 - DNA, 96 bp, Fusarium azukicola
  misc_feature: 266
ttactaggttttttatttatattatttttagttaattttcctagtttgcagttttcgcagtttttaacttgatataggtcctcactagtatattta

SEQ ID NO: 32320 - DNA, 96 bp, Fusarium azukicola
  misc_feature: 266
cttttttattactttctaaccctttcttctcttctttaacctaacttacttacttaccttattctccctccttcttctctacttaataaaccttaa

SEQ ID NO: 32321 - DNA, 96 bp, Fusarium azukicola
  misc_feature: 266
catataaagagttagatttatagaaatactttttttaagtttctagctattttatagcagtttttattaaggttagaaatataaggttttagtgca

SEQ ID NO: 32322 - DNA, 96 bp, Fusarium azukicola
  misc_feature: 266
atattctatattatattaccaactatagtgatatatccctataaaccatatattatattatagaatttttactctatttttaggtatatttaccta

SEQ ID NO: 32323 - DNA, 96 bp, Fusarium azukicola
  misc_feature: 266
gttagaaagtaataaaaaagtttaaggagagaagttaagttaaggaggagtatagtaagtattaggagagaaaggagtatagagtaagttaaggta

SEQ ID NO: 32324 - DNA, 96 bp, Fusarium azukicola
  misc_feature: 266
agggaaaagtattaaaatacaataaaaaccctttataaaggaaataagttatattagggatagattctcttttattctctcaaatagtataggtta

SEQ ID NO: 32325 - DNA, 96 bp, Fusarium azukicola
  misc_feature: 266
accttaacttactctatactcctttctctcctaatacttactatactcctccttaacttaacttctctccttaaacttttttattactttctaacc

SEQ ID NO: 32326 - DNA, 96 bp, Fusarium azukicola
  misc_feature: 266
gggtattattctaattggttaaaaaggttcctatagacctttatgactgccgtcatctatgcatcaagtataataactgccgattggctaaaaaag

SEQ ID NO: 32327 - DNA, 96 bp, Fusarium azukicola
  misc_feature: 266
aaaactcaggaagccaataaggtgcataagacttctaagaaaagggaatctaaacctaattctaagaaggaagaaagagaaaagaaacaagaaaag

SEQ ID NO: 32328 - DNA, 96 bp, Fusarium azukicola
  misc_feature: 266
ccctctatctcttctcccctttttccctcccctcttcctctactttctttctcttctcccctcctcttcttaactacactttctctctacctcact

SEQ ID NO: 32329 - DNA, 96 bp, Fusarium azukicola
  misc_feature: 266
aaaattaaacctctattattattatatatatatcttagtaaaaacccctttattatagacctaatattataagggaaaatctaagattatataggg

SEQ ID NO: 32330 - DNA, 96 bp, Fusarium azukicola
  misc_feature: 266
aggaaggcaagcaattgatcaaatggatatagatgcgcaggtattagctgaatcgtcgaggagtggtggtcaaggaaggtcggcgcgaccgggggg

SEQ ID NO: 32331 - DNA, 96 bp, Fusarium azukicola
  misc_feature: 266
aatttcaaccaattaaccctaacccttaactctactactacccctaaccctaatttcaaccaattaaccctaacccttaacgtaactactacccct

SEQ ID NO: 32332 - DNA, 96 bp, Fusarium azukicola
  misc_feature: 265
tttcttatccttttatactctcttcttatacccttatacacttttcttctttattttctttaccctatactttcttcattattttactttaccctc

SEQ ID NO: 32333 - DNA, 96 bp, Fusarium azukicola
  misc_feature: 265
ttattgtattttaatacttttccctatataatcttagattttcccttataatattaggtctataataaaggggtttttactaagatatatataata

SEQ ID NO: 32334 - DNA, 96 bp, Fusarium azukicola
  misc_feature: 265
ggttatttctaataagaataactatagactaagagataacttagatcttcctattctaaatataaaggaaaaaactagtctttttgactggcataa

SEQ ID NO: 32335 - DNA, 96 bp, Fusarium azukicola
  misc_feature: 265
cttccctcctctccctctctcctttcccctcctctctaccgaccctaaactaactccctatccttcctcttttttcccccaccctccctttcttaa

SEQ ID NO: 32336 - DNA, 96 bp, Fusarium azukicola
  misc_feature: 265
tcttagaagtcttatgcaccttattggcttcctgagttttccagttttttggagctttattagggtgcaaaaaatagcaatctgggtctttatgac

SEQ ID NO: 32337 - DNA, 96 bp, Fusarium azukicola
  misc_feature: 265
tattatattactaactatagtgatatatccctataaactatatattatattatagaatttttactctatttttaggtatatttacctaacctatag

SEQ ID NO: 32338 - DNA, 96 bp, Fusarium azukicola
  misc_feature: 265
tagaagtcttatgcaccttattggcttcctgagttttccagttttttggagctttattagggtgcaaaaaatagcaatctgggtctttatgacctg

SEQ ID NO: 32339 - DNA, 96 bp, Fusarium azukicola
  misc_feature: 265
actcctttctctcctaatacttactatactcctccttaacttaacttctctccttaaacttttttattactttctaaccctttcttctcttcttta

SEQ ID NO: 32340 - DNA, 96 bp, Fusarium azukicola
  misc_feature: 265
gaagggttttaaggtttattaagtagagaagaaggagggagaataaggtaagtaagtaagttaggttaaagaagagaagaaagggttagaaagtag

SEQ ID NO: 32341 - DNA, 96 bp, Fusarium azukicola
  misc_feature: 265
ctgattttattcttattttattaggattattttctatttcttttctaaattccttgaattttataatagcttctgacttattccttaatagatagg

SEQ ID NO: 32342 - DNA, 96 bp, Fusarium azukicola
  misc_feature: 265
ctctcctaatacttactatactcctccttaacttaacttctctccttaaacttttttactactttctaaccctttcttctcttctttaacctaact

SEQ ID NO: 32343 - DNA, 96 bp, Fusarium azukicola
  misc_feature: 265
aaaaaccctttataaaggaaataagttatattagggatagattctcttttattctctcaaatagtataggttataagcttttagtaaagaaattag

SEQ ID NO: 32344 - DNA, 96 bp, Fusarium azukicola
  misc_feature: 265
cctctaccttccttactttatctttctcttctattcacttcctacctttctaatcacccttcctctactctttttcttttctctcctctcccctct

SEQ ID NO: 32345 - DNA, 96 bp, Fusarium azukicola
  misc_feature: 265
caggaagccaataaggtgcataagacttctaagaaaagggaatctaaacctaattctaagaaggaagaaagagaaaagaaacaagaaaagctattt

SEQ ID NO: 32346 - DNA, 96 bp, Fusarium azukicola
  misc_feature: 265
aaggtaagtaagtaagttaggttaaagaagagaagaaagggttagaaagtaataaaaaagtttaaggagagaagttaagttaaggaggagtatagt

SEQ ID NO: 32347 - DNA, 96 bp, Fusarium azukicola
  misc_feature: 264
agaaagtaataaaaaagtttaaggagagaagttaagttaaggaggagtatagtaagtattaggagagaaaggagtatagagtaagttaaggtaaaa

SEQ ID NO: 32348 - DNA, 96 bp, Fusarium azukicola
  misc_feature: 264
ttttaaccccctctatctcttctcccctttttccctcccctcttcctctactttctttctcttctcccctcctcttcttaactacactttctctct

SEQ ID NO: 32349 - DNA, 96 bp, Fusarium azukicola
  misc_feature: 264
ttcttttctctcctctcccctctccctctctctcttttcactccttatcctctcctctcccctctccctctctctcttttcactccttatcctctc

SEQ ID NO: 32350 - DNA, 96 bp, Fusarium azukicola
  misc_feature: 264
ccttaaacttttttactactttctaaccctttcttctcttctttaacctaacttacttacttaccttattctccctccttcttctctacttaataa

SEQ ID NO: 32351 - DNA, 96 bp, Fusarium azukicola
  misc_feature: 264
tctccttaaacttttttattactttctaaccctttcttctcttctttaacctaacttacttacttaccttattctccctccttcttctctacttaa

SEQ ID NO: 32352 - DNA, 96 bp, Fusarium azukicola
  misc_feature: 264
gtaaagagaggagattttcttaagaaagagaggtaaaagagatataagagtaagagaatataactaagaaagagaggtataactaggaaaaagaga

SEQ ID NO: 32353 - DNA, 96 bp, Fusarium azukicola
  misc_feature: 264
gaataaggtaagtaagtaagttaggttaaagaagagaagaaagggttagaaagtagtaaaaaagtttaaggagagaagttaagttaaggaggagta

SEQ ID NO: 32354 - DNA, 96 bp, Fusarium azukicola
  misc_feature: 264
ctctccttaaacttttttactactttctaaccctttcttctcttctttaacctaacttacttacttaccttattctccctccttcttctctactta

SEQ ID NO: 32355 - DNA, 96 bp, Fusarium azukicola
  misc_feature: 264
gggatatatcactatagttagtaatataatatagaacattaatagcctcctttaaagttataatcttataagggttatagctttatacgttcttat

SEQ ID NO: 32356 - DNA, 96 bp, Fusarium azukicola
  misc_feature: 264
aaactcaggaagccaataaggtgcataagacttctaagaaaagggaatctaaacctaattctaagaaggaagaaagagaaaagaaacaagaaaagc

SEQ ID NO: 32357 - DNA, 96 bp, Fusarium azukicola
  misc_feature: 264
aaagtagtaaaaaagtttaaggagagaagttaagttaaggaggagtatagtaagtattaggagagaaaggagtatagagtaagttaaggtaaaaag

SEQ ID NO: 32358 - DNA, 96 bp, Fusarium azukicola
  misc_feature: 264
cttttctctcctctcccctctccctctctctcttttcactccttatcctctcctctcccctctccctctctctcttttcactccttatcctctcct

SEQ ID NO: 32359 - DNA, 96 bp, Fusarium azukicola
  misc_feature: 264
actaagatatatatataataataatagaggtttaatttttcctctaataataagaacgtataaagctataacccttataagattataactttaaag

SEQ ID NO: 32360 - DNA, 96 bp, Fusarium azukicola
  misc_feature: 263
ggtaaagtaaaataatgaagaaagtatagggtaaagaaaataaagaagaaaagtgtataagggtataagaagagagtataaaaggataagaaaaaa

SEQ ID NO: 32361 - DNA, 96 bp, Fusarium azukicola
  misc_feature: 263
ggttaatataaagagggaaaagtgaggtagagagaaagtgtagttaagaagaggaggggagaagagaaagaaagtagaggaagaggggagggaaaa

SEQ ID NO: 32362 - DNA, 96 bp, Fusarium azukicola
  misc_feature: 263
ttcaaccaattaaccctaacccttaactcacctacttaaccctaaccctaatttcaaccaattaaccctaacccttaactctactactacccctaa

SEQ ID NO: 32363 - DNA, 96 bp, Fusarium azukicola
  misc_feature: 263
ttataaataaataagaagtccttcttttaaataagtaaggaaaaataatattataaggaaaagagaaaaataacctatatataataatagctaagg

SEQ ID NO: 32364 - DNA, 96 bp, Fusarium azukicola
  misc_feature: 263
ttagaaagtaataaaaaagtttaaggagagaagttaagttaaggaggagtatagtaagtattaggagagaaaggagtatagagtaagttaaggtaa

SEQ ID NO: 32365 - DNA, 96 bp, Fusarium azukicola
  misc_feature: 263
tcttccctcctctccctctctcctttcccctcctctctaccgaccctaaactaactccctatccttcctcttttttcccccaccctccctttctta

SEQ ID NO: 32366 - DNA, 96 bp, Fusarium azukicola
  misc_feature: 263
gcaagtatagaaggggagggttagaagggttaagaaaggagagaagtaaggaaggttaagaaaggagagaagtaaggaaggttaagaaaggagaga

SEQ ID NO: 32367 - DNA, 96 bp, Fusarium azukicola
  misc_feature: 263
gaaggagggagaataaggtaagtaagtaagttaggttaaagaagagaagaaagggttagaaagtagtaaaaaagtttaaggagagaagttaagtta

SEQ ID NO: 32368 - DNA, 96 bp, Fusarium azukicola
  misc_feature: 263
cttttaaccccctctatctcttctcccctttttccctcccctcttcctctactttctttctcttctcccctcctcttcttaactacactttctctc

SEQ ID NO: 32369 - DNA, 96 bp, Fusarium azukicola
  misc_feature: 263
ctaggttttttatttatattatttttagttaattttcctagtttatagttttcgcagtttttaacttaatataggtcctcactagtatatttaaag

SEQ ID NO: 32370 - DNA, 96 bp, Fusarium azukicola
  misc_feature: 263
ctaagatatatatataataataatagaggtttaatttttcctctaataataagaacgtataaagctataacccttataagattataactttaaagg

SEQ ID NO: 32371 - DNA, 96 bp, Fusarium azukicola
  misc_feature: 263
attactaggttttttatttatattatttttagttaattttcctagtttgcagttttcgcagtttttaacttgatataggtcctcactagtatattt

SEQ ID NO: 32372 - DNA, 96 bp, Fusarium azukicola
  misc_feature: 262
tactaagatatatatataataataatagaggtttaatttttcctctaataataagaacgtataaagctataacccttataagattataactttaaa

SEQ ID NO: 32373 - DNA, 96 bp, Fusarium azukicola
  misc_feature: 262
cttataatattaggtctataataaaggggtttttactaagatatatataataataatagaggtttaattttttcctctaataataagaacgtataa

SEQ ID NO: 32374 - DNA, 96 bp, Fusarium azukicola
  misc_feature: 262
aaggagggagaataaggtaagtaagtaagttaggttaaagaagagaagaaagggttagaaagtagtaaaaaagtttaaggagagaagttaagttaa

SEQ ID NO: 32375 - DNA, 96 bp, Fusarium azukicola
  misc_feature: 262
caaaaaactggaaaactcaggaagccaataaggtgcataagacttctaagaaaaaggaatctaaacctaattctaagaaggaagaaagagaaaaga

SEQ ID NO: 32376 - DNA, 96 bp, Fusarium azukicola
  misc_feature: 262
gataaggagtgaaaagagagagagggagaggggagaggagaggataaggagtgaaaagagagagagggagaggggagaggagaggataaggagaga

SEQ ID NO: 32377 - DNA, 96 bp, Fusarium azukicola
  misc_feature: 262
tccctcttattcttttcttttattcttccttctctctcctccttctttttacttttcctcctctctttctctcccctccttctctctcctctttta

SEQ ID NO: 32378 - DNA, 96 bp, Fusarium azukicola
  misc_feature: 262
tataagagtaagagaatataactaagaaagagaggtataactaggaaaaagagatatagctaagagagagaggtaaagctaagaaagagagatata

SEQ ID NO: 32379 - DNA, 96 bp, Fusarium azukicola
  misc_feature: 262
tacctttctaatcacccttcctctactctttttcttttctctcctctcccctctccctctctctcttttcactccttatcctctcctctcccctct

SEQ ID NO: 32380 - DNA, 96 bp, Fusarium azukicola
  misc_feature: 262
gagataagagataagagataagagataaagaaataagaaataagagataagagataaagggaggcaaaaatagccttaagaagccctagaagtatt

SEQ ID NO: 32381 - DNA, 96 bp, Fusarium azukicola
  misc_feature: 262
aggaagaaggagtgaaaagagagagagggagaggggagaggagaggataaggagtgaaaagagagagagggagaggggagaggagaggataaggag

SEQ ID NO: 32382 - DNA, 96 bp, Fusarium azukicola
  misc_feature: 262
atttttttaaaaatctaaaaaaattatttttaagttttatatttagttagatctataagattactttttttaagtttctagctattttatagcagt

SEQ ID NO: 32383 - DNA, 96 bp, Fusarium azukicola
  misc_feature: 262
aacttctctccttaaacttttttactactttctaaccctttcttctcttctttaacctaacttacttacttaccttattctccctccttcttctct

SEQ ID NO: 32384 - DNA, 96 bp, Fusarium azukicola
  misc_feature: 261
gaaagtaataaaaaagtttaaggagagaagttaagttaaggaggagtatagtaagtattaggagagaaaggagtatagagtaagttaaggtaaaaa

SEQ ID NO: 32385 - DNA, 96 bp, Fusarium azukicola
  misc_feature: 261
ttttactcttttatctttacttactataacttctcaattactctacctcctctctctctctttcttctttttttttctccccctttttttttttcc

SEQ ID NO: 32386 - DNA, 96 bp, Fusarium azukicola
  misc_feature: 261
gttttaaggtttattaagtagagaagaaggagggagaataaggtaagtaagtaagttaggttaaagaagagaagaaagggttagaaagtagtaaaa

SEQ ID NO: 32387 - DNA, 96 bp, Fusarium azukicola
  misc_feature: 261
tttcttttccttgtgatattatttttccttgcttatttaaaagaaggacttcttgtttatttataatagaagttatattataaagagaagattgac

SEQ ID NO: 32388 - DNA, 96 bp, Fusarium azukicola
  misc_feature: 261
tttagggtcggtagagaggaggggaaaggagagagggagaggagggaagaagagggaagagaaagagaagttaagaggagtaaagggagtgaagag

SEQ ID NO: 32389 - DNA, 96 bp, Fusarium azukicola
  misc_feature: 261
ttccctcccctcttcctctactttctttctcttctcccctcctcttcttaactacactttctctctacctcacttttccctctttatattaaccct

SEQ ID NO: 32390 - DNA, 96 bp, Fusarium azukicola
  misc_feature: 261
ttactaagatatatatataataataatagaggtttaatttttcctctaataataagaacgtataaagctataacccttataagattataactttaa

SEQ ID NO: 32391 - DNA, 96 bp, Fusarium azukicola
  misc_feature: 261
ttactaactatagtgatatatccctataaactatatattatattatagaatttttactctatttttaggtatatttacctaacctatagctactat

SEQ ID NO: 32392 - DNA, 96 bp, Fusarium azukicola
  misc_feature: 261
tctctcttttcactccttatcctctcctctcccctctccctctctctcttttcactccttatcctctcctctcccctctccctctctctcttttct

SEQ ID NO: 32393 - DNA, 96 bp, Fusarium azukicola
  misc_feature: 261
tctattataaataaacaagaagtccttcttttaaataagcaaggaaaaataatatcacaaggaaaagaaaaaaataacctatatataataacagct

SEQ ID NO: 32394 - DNA, 96 bp, Fusarium azukicola
  misc_feature: 261
tcccttcctcccctctctctcttatattcccttctcttccttcctctttctctttacttccctttctctttctcctccctcctcttcactcccttt

SEQ ID NO: 32395 - DNA, 96 bp, Fusarium azukicola
  misc_feature: 261
tatattactaactatagtgatatatccctataaactatatattatattatagaatttttactctatttttaggtatatttacctaacctatagcta

SEQ ID NO: 32396 - DNA, 96 bp, Fusarium azukicola
  misc_feature: 261
ggaaaagtattaaaatataataaaaaccctttataaaggaaataagttatattagggatagattctcttttattctcttaaatagtataggttata

SEQ ID NO: 32397 - DNA, 96 bp, Fusarium azukicola
  misc_feature: 261
tagaaaggataaataggactatattagaaaaggttagagctttattatttacttctaacctacctaaatacctttagggagaggctatagaagcag

SEQ ID NO: 32398 - DNA, 96 bp, Fusarium azukicola
  misc_feature: 261
cctaatttcaaccaattaaccctaacccttaactctactactacccctaaccctaatttcaaccaattaaccctaacccttaacgtaactactacc

SEQ ID NO: 32399 - DNA, 96 bp, Fusarium azukicola
  misc_feature: 261
ggagggagaataaggtaagtaagtaagttaggttaaagaagagaagaaagggttagaaagtagtaaaaaagtttaaggagagaagttaagttaagg

SEQ ID NO: 32400 - DNA, 96 bp, Fusarium azukicola
  misc_feature: 261
agctatatctctttttcctagttatacctctctttcttagttatattctcttactcttatatctcttttacctctctttcttaagaaaatctcctc

SEQ ID NO: 32401 - DNA, 96 bp, Fusarium azukicola
  misc_feature: 261
cttttatattatataataagtctcactttctaattttagctattttaagcttaatttcgacttttatagcttttttaaaaaataccttttaaggtg

SEQ ID NO: 32402 - DNA, 96 bp, Fusarium azukicola
  misc_feature: 261
ataggatttcacttaattaacctaatctaaaattttaagttatttttaccttaatttgaatttttaaagaattcttttctatttagtgtaaactag

SEQ ID NO: 32403 - DNA, 96 bp, Fusarium azukicola
  misc_feature: 261
ctagtgaggacctatatcaagttaaaaactgcgaaaactgcaaactaggaaaattaactaaaaataatataaataaaaaacctagtaataaggaat

SEQ ID NO: 32404 - DNA, 96 bp, Fusarium azukicola
  misc_feature: 261
actcctcttaacttctctttctcttccctcttcttccctcctctccctctctcctttcccctcctctctaccgaccctaaactaactccctatcct

SEQ ID NO: 32405 - DNA, 96 bp, Fusarium azukicola
  misc_feature: 261
acttactctatactcctttctctcctaatacttactatactcctccttaacttaacttctctccttaaacttttttattactttctaaccctttct

SEQ ID NO: 32406 - DNA, 96 bp, Fusarium azukicola
  misc_feature: 260
ttattactaggttttttatttatattatttttagttaattttcctagtttgcagttttcgcagtttttaacttgatataggtcctcactagtatat

SEQ ID NO: 32407 - DNA, 96 bp, Fusarium azukicola
  misc_feature: 260
ttatattactaactatagtgatatatccctataaactatatattatattatagaatttttactctatttttaggtatatttacctaacctatagct

SEQ ID NO: 32408 - DNA, 96 bp, Fusarium azukicola
  misc_feature: 260
gtttagggtcggtagagaggaggggaaaggagagagggagaggagggaagaagagggaagagaaagagaagttaagaggagtaaagggagtgaaga

SEQ ID NO: 32409 - DNA, 96 bp, Fusarium azukicola
  misc_feature: 260
tctctcctaatacttactatactcctccttaacttaacttctctccttaaacttttttactactttctaaccctttcttctcttctttaacctaac

SEQ ID NO: 32410 - DNA, 96 bp, Fusarium azukicola
  misc_feature: 260
tatttgttaatgttctatattatattaccaactatagtgatatatccctataaaccacatattatattatagaatttttactctatttttaggtat

SEQ ID NO: 32411 - DNA, 96 bp, Fusarium azukicola
  misc_feature: 260
taggatttcacttaattaacctaatctaaaattttaagttatttttaccttaatttgaatttttaaagaattcttttctatttagtgtaaactagt

SEQ ID NO: 32412 - DNA, 96 bp, Fusarium azukicola
  misc_feature: 260
acttactatactcctccttaacttaacttctctccttaaacttttttactactttctaaccctttcttctcttctttaacctaacttacttactta

SEQ ID NO: 32413 - DNA, 96 bp, Fusarium azukicola
  misc_feature: 260
taaggagtgaaaagagagagagggagaggggagaggagaggataaggagtgaaaagagagagagggagaggggagaggagagaaaagaaaaagagt

SEQ ID NO: 32414 - DNA, 96 bp, Fusarium azukicola
  misc_feature: 260
ggtttttactaagatatatatataataataatagaggtttaatttttcctctaataataagaacgtataaagctataacccttataagattataac

SEQ ID NO: 32415 - DNA, 96 bp, Fusarium azukicola
  misc_feature: 260
ctatactttcttcattattttactttaccctccacttttattctttattttactttaccctatactctcttctctcttttactttaccctatactc

SEQ ID NO: 32416 - DNA, 96 bp, Fusarium azukicola
  misc_feature: 260
ctgttattatatataggttatttttttcttttccttgtgatattatttttccttgcttatttaaaagaaggacttcttgtttatttataatagaag

SEQ ID NO: 32417 - DNA, 96 bp, Fusarium azukicola
  misc_feature: 260
ctctttcttagctttacctctctctcttagctatatctctttttcctagttatacctctctttcttagttatattctcttactcttatatctcttt

SEQ ID NO: 32418 - DNA, 96 bp, Fusarium azukicola
  misc_feature: 260
cctcttcttccctcctctccctctctcctttcccctcctctctaccgaccctaaactaactccctatccttcctcttttttcccccaccctccctt

SEQ ID NO: 32419 - DNA, 96 bp, Fusarium azukicola
  misc_feature: 259
tttttcttatccttttatactctcttcttatacccttatacacttttcttctttattttctttaccctatactttcttcattattttactttaccc

SEQ ID NO: 32420 - DNA, 96 bp, Fusarium azukicola
  misc_feature: 259
tttttactaagatatatatataataataatagaggtttaatttttcctctaataataagaacgtataaagctataacccttataagattataactt

SEQ ID NO: 32421 - DNA, 96 bp, Fusarium azukicola
  misc_feature: 259
ttcttagaagtcttatgcaccttattggcttcctgagttttccagttttttggagctttattagggtgcaaaaaatagcaatctgggtctttatga

SEQ ID NO: 32422 - DNA, 96 bp, Fusarium azukicola
  misc_feature: 259
tcctctactctttttcttttctctcctctcccctctccctctctctcttttcactccttatcctctcctctcccctctccctctctctcttttcac

SEQ ID NO: 32423 - DNA, 96 bp, Fusarium azukicola
  misc_feature: 259
tataataagtctcactttctaattttagctattttaagcttaatttcgacttttatagcttttttaaaaaataccttttaaggtgaaaatataagt

SEQ ID NO: 32424 - DNA, 96 bp, Fusarium azukicola
  misc_feature: 259
aggatttcacttaattaacctaatctaaaattttaagttatttttaccttaatttgaatttttaaagaattcttttctatttagtgtaaactagta

SEQ ID NO: 32425 - DNA, 96 bp, Fusarium azukicola
  misc_feature: 259
gtgaggtagagagaaagtgtagttaagaagaggaggggagaagagaaagaaagtagaggaagaggggagggaaaaaggggagaagagatagagggg

SEQ ID NO: 32426 - DNA, 96 bp, Fusarium azukicola
  misc_feature: 259
gggaaggtttcttattaaaggtcctagtatattattagttatattattttgttgagaaattaaggaattatatacctctaaatcatcacttatatc

SEQ ID NO: 32427 - DNA, 96 bp, Fusarium azukicola
  misc_feature: 259
ataaataagaagtccttcttttaaataagtaaggaaaaataatattataaggaaaagagaaaaataacctatatataataatagctaaggttattt

SEQ ID NO: 32428 - DNA, 96 bp, Fusarium azukicola
  misc_feature: 258
tactagtgaggacctatatcaagttaaaaactgcgaaaactgcaaactaggaaaattaactaaaaataatataaataaaaaacctagtaataagga

SEQ ID NO: 32429 - DNA, 96 bp, Fusarium azukicola
  misc_feature: 258
tactcctccttaacttaacttctctccttaaacttttttattactttctaaccctttcttctcttctttaacctaacttacttacttaccttattc

SEQ ID NO: 32430 - DNA, 96 bp, Fusarium azukicola
  misc_feature: 258
ggatatatcactatagttagtaatataatatagaacattaatagcctcctttaaagttataatcttataagggttatagctttatacgttcttatt

SEQ ID NO: 32431 - DNA, 96 bp, Fusarium azukicola
  misc_feature: 258
ggataaggagtgaaaagagagagagggagaggggagaggagaggataaggagtgaaaagagagagagggagaggggagaggagaggataaggagag

SEQ ID NO: 32432 - DNA, 96 bp, Fusarium azukicola
  misc_feature: 258
cgttaagggttagggttaattggttgaaattagggttaggggtagtagtagagttaagggttagggttaattggttgaaattagggttaggggtag

SEQ ID NO: 32433 - DNA, 96 bp, Fusarium azukicola
  misc_feature: 258
cctacctttctaatcacccttcctctactctttttcttttctctcctctcccctctccctctctctcttttcactccttatcctctcctctcccct

SEQ ID NO: 32434 - DNA, 96 bp, Fusarium azukicola
  misc_feature: 257
ttcctctactctttttcttttctctcctctcccctctccctctctctcttttcactccttatcctctcctctcccctctccctctctctcttttca

SEQ ID NO: 32435 - DNA, 96 bp, Fusarium azukicola
  misc_feature: 257
ttccctcctctccctctctcctttcccctcctctctaccgaccctaaactaactccctatccttcctcttttttcccccaccctccctttcttaat

SEQ ID NO: 32436 - DNA, 96 bp, Fusarium azukicola
  misc_feature: 257
ttataagagataatgcttctttactcttagaagaagtggaatcttcttctatagtactagaaagcttttctttaactaagaaagcttccattctca

SEQ ID NO: 32437 - DNA, 96 bp, Fusarium azukicola
  misc_feature: 257
tctatattatattactaactatagtgatatatccctataaactatatattatattatagaatttttactctatttttaggtatatttacctaacct

SEQ ID NO: 32438 - DNA, 96 bp, Fusarium azukicola
  misc_feature: 257
tattcttattttattaggattattttctatttcttttctaaattccttgaattttataatagcttctgacttattccttaatagataggctttcag

SEQ ID NO: 32439 - DNA, 96 bp, Fusarium azukicola
  misc_feature: 257
tattactaggttttttatttatattatttttagttaattttcctagtttgcagttttcgcagtttttaacttgatataggtcctcactagtatatt

SEQ ID NO: 32440 - DNA, 96 bp, Fusarium azukicola
  misc_feature: 257
taagtaagtaagttaggttaaagaagagaagaaagggttagaaagtaataaaaaagtttaaggagagaagttaagttaaggaggagtatagtaagt

SEQ ID NO: 32441 - DNA, 96 bp, Fusarium azukicola
  misc_feature: 257
ctaatttcaaccaattaaccctaacccttaactctactactacccctaaccctaatttcaaccaattaaccctaacccttaacgtaactactaccc

SEQ ID NO: 32442 - DNA, 96 bp, Fusarium azukicola
  misc_feature: 257
ctcttcttccctcctctccctctctcctttcccctcctctctaccgaccctaaactaactccctatccttcctcttttttcccccaccctcccttt

SEQ ID NO: 32443 - DNA, 96 bp, Fusarium azukicola
  misc_feature: 257
cctctctttcttagttatattctcttactcttatatctcttttacctctctttcttaagaaaatctcctctctttacttataagctatatctttag

SEQ ID NO: 32444 - DNA, 96 bp, Fusarium azukicola
  misc_feature: 257
aggaaaagaaaaaaataacctatatataataacagctaaggttatttctaataagaataactatagactaagagataacttagatcttcctattct

SEQ ID NO: 32445 - DNA, 96 bp, Fusarium azukicola
  misc_feature: 256
aaggagtgaaaagagagagagggagaggggagaggagaggataaggagtgaaaagagagagagggagaggggagaggagaggataaggagagaaaa

SEQ ID NO: 32446 - DNA, 96 bp, Fusarium azukicola
  misc_feature: 256
aactggaaaactcaggaagccaataaggtgcataagacttctaagaaaagggaatctaaacctaattctaagaaggaagaaagagaaaagaaacaa

SEQ ID NO: 32447 - DNA, 96 bp, Fusarium azukicola
  misc_feature: 256
ttctctccttaaacttttttattactttctaaccctttcttctcttctttaacctaacttacttacttaccttattctccctccttcttctctact

SEQ ID NO: 32448 - DNA, 96 bp, Fusarium azukicola
  misc_feature: 256
gggtttttactaagatatatatataataataatagaggtttaatttttcctctaataataagaacgtataaagctataacccttataagattataa

SEQ ID NO: 32449 - DNA, 96 bp, Fusarium azukicola
  misc_feature: 256
tactataacctcttcccctaacctttactataacctcttcccctaacctttactataacctcttcccctaacctttactataacctcttctcctaa

SEQ ID NO: 32450 - DNA, 96 bp, Fusarium azukicola
  misc_feature: 256
aagtagagaagaaggagggagaataaggtaagtaagtaagttaggttaaagaagagaagaaagggttagaaagtagtaaaaaagtttaaggagaga

SEQ ID NO: 32451 - DNA, 96 bp, Fusarium azukicola
  misc_feature: 256
aggttatttctaataagaataactatagactaagagataacttagatcttcctattctaaatataaaggaaaaaactagtctttttgactggcata

SEQ ID NO: 32452 - DNA, 96 bp, Fusarium azukicola
  misc_feature: 256
taaagaagagaagaaagggttagaaagtagtaaaaaagtttaaggagagaagttaagttaaggaggagtatagtaagtattaggagagaaaggagt

SEQ ID NO: 32453 - DNA, 96 bp, Fusarium azukicola
  misc_feature: 256
cttagaagtcttatgcaccttattggcttcctgagttttccagttttttggagctttattagggtgcaaaaaatagcaatctgggtctttatgacc

SEQ ID NO: 32454 - DNA, 96 bp, Fusarium azukicola
  misc_feature: 256
gctatatctctttttcctagttatacctctctttcttagttatattctcttactcttatatctcttttacctctctttcttaagaaaatctcctct

SEQ ID NO: 32455 - DNA, 96 bp, Fusarium azukicola
  misc_feature: 256
ctctcccctctccctctctctcttttcactccttatcctctcctctcccctctccctctctctcttttcactccttctcctctcctctcccctctc

SEQ ID NO: 32456 - DNA, 96 bp, Fusarium azukicola
  misc_feature: 256
aaccttttctaatatagtcctatttatcctttctataaagctattagcttatttattatgaggcggacttatattatattttattccattctttat

SEQ ID NO: 32457 - DNA, 96 bp, Fusarium azukicola
  misc_feature: 255
tttttcttttccttgtgatattatttttccttgcttatttaaaagaaggacttcttgtttatttataatagaagttatattataaagagaagattg

SEQ ID NO: 32458 - DNA, 96 bp, Fusarium azukicola
  misc_feature: 255
ttttctttaccctatactttcttcattattttactttaccctccacttttattctttattttactttaccctatactctcttctctcttttacttt

SEQ ID NO: 32459 - DNA, 96 bp, Fusarium azukicola
  misc_feature: 255
gttatttctaataagaataactatagactaagagataacttagatcttcctattctaaatataaaggaaaaaactagtctttttgactggcataaa

SEQ ID NO: 32460 - DNA, 96 bp, Fusarium azukicola
  misc_feature: 255
tttaaggaaagggaagaaagaagagggaaaaaaaaaaagggggagaaaaaaaaagaagaaagagagagagaggaggtagagtaattgagaagttat

SEQ ID NO: 32461 - DNA, 96 bp, Fusarium azukicola
  misc_feature: 255
ttcgctataaagggatttttttaaaaatctaaaaaaattatttttaagttttatatttagttagatctataagattactttttttaagtttctagc

SEQ ID NO: 32462 - DNA, 96 bp, Fusarium azukicola
  misc_feature: 255
ccctatataaagaaacaactaggatatttaaataaggtaaataaacctgatttttctactaataaaaataatataactaattttatatatgataca

SEQ ID NO: 32463 - DNA, 96 bp, Fusarium azukicola
  misc_feature: 255
gagggagaataaggtaagtaagtaagttaggttaaagaagagaagaaagggttagaaagtagtaaaaaagtttaaggagagaagttaagttaagga

SEQ ID NO: 32464 - DNA, 96 bp, Fusarium azukicola
  misc_feature: 255
tagctatatctctttttcctagttatacctctctttcttagttatattctcttactcttatatctcttttacctctctttcttaagaaaatctcct

SEQ ID NO: 32465 - DNA, 96 bp, Fusarium azukicola
  misc_feature: 255
acttctctccttaaacttttttactactttctaaccctttcttctcttctttaacctaacttacttacttaccttattctccctccttcttctcta

SEQ ID NO: 32466 - DNA, 96 bp, Fusarium azukicola
  misc_feature: 255
taacttactctatactcctttctctcctaatacttactatactcctccttaacttaacttctctccttaaacttttttattactttctaacccttt

SEQ ID NO: 32467 - DNA, 96 bp, Fusarium azukicola
  misc_feature: 255
ctataacctcttcccctaacctttactataacctcttcccctaacctttactataacctcttcccctaacctttactataacctcttctcctaacc

SEQ ID NO: 32468 - DNA, 96 bp, Fusarium azukicola
  misc_feature: 255
attatattactaactatagtgatatatccctataaactatatattatattatagaatttttactctatttttaggtatatttacctaacctatagc

SEQ ID NO: 32469 - DNA, 96 bp, Fusarium azukicola
  misc_feature: 255
gagtgaagaggagggaggagaaagagaaagggaagtaaagagaaagaggaaggaagagaagggaatataagagagagaggggaggaagggaggaag

SEQ ID NO: 32470 - DNA, 96 bp, Fusarium azukicola
  misc_feature: 255
ctacctttctaatcacccttcctctactctttttcttttctctcctctcccctctccctctctctcttttcactccttatcctctcctctcccctc

SEQ ID NO: 32471 - DNA, 96 bp, Fusarium azukicola
  misc_feature: 255
ctatatctctttttcctagttatacctctctttcttagttatattctcttactcttatatctcttttacctctctttcttaagaaaatctcctctc

SEQ ID NO: 32472 - DNA, 96 bp, Fusarium azukicola
  misc_feature: 255
cttataagagataatgcttctttactcttagaagaagtggaatcttcttctatagtactagaaagcttttctttaactaagaaagcttccattctc

SEQ ID NO: 32473 - DNA, 96 bp, Fusarium azukicola
  misc_feature: 255
agtcaaaaagactagttttttcctttatatttaagataggaagatctaagttatctcttagtctatagttattcttattagaaataaccttagctg

SEQ ID NO: 32474 - DNA, 96 bp, Fusarium azukicola
  misc_feature: 255
actataacttctcaattactctacctcctctctctctctttcttctttttttttctccccctttttttttttccctcttctttcttccctttcctt

SEQ ID NO: 32475 - DNA, 96 bp, Fusarium azukicola
  misc_feature: 254
ggtaagtaagtaagttaggttaaagaagagaagaaagggttagaaagtaataaaaaagtttaaggagagaagttaagttaaggaggagtatagtaa

SEQ ID NO: 32476 - DNA, 96 bp, Fusarium azukicola
  misc_feature: 254
ggagtgaaaagagagagagggagaggggagaggagaggataaggagtgaaaagagagagagggagaggggagaggagaggataaggagagaaaaga

SEQ ID NO: 32477 - DNA, 96 bp, Fusarium azukicola
  misc_feature: 254
tccctcttcttccctcctctccctctctcctttcccctcctctctaccgaccctaaactaactccctatccttcctcttttttcccccaccctccc

SEQ ID NO: 32478 - DNA, 96 bp, Fusarium azukicola
  misc_feature: 254
accttttctaatatagtcctatttatcctttctataaagctattagcttatttattatgaggcggacttatattatattttattccattctttata

SEQ ID NO: 32479 - DNA, 96 bp, Fusarium azukicola
  misc_feature: 254
attactaactatagtgatatatccctataaactatatattatattatagaatttttactctatttttaggtatatttacctaacctatagctacta

SEQ ID NO: 32480 - DNA, 96 bp, Fusarium azukicola
  misc_feature: 254
cctttctctcctaatacttactatactcctccttaacttaacttctctccttaaacttttttattactttctaaccctttcttctcttctttaacc

SEQ ID NO: 32481 - DNA, 96 bp, Fusarium azukicola
  misc_feature: 254
ggaaggttaagaaaggagagaagtaaggaaggttaagaaaggagagaagtaaggaaggttaagaaaggagagaagtaaggaagggtaagaaaggag

SEQ ID NO: 32482 - DNA, 96 bp, Fusarium azukicola
  misc_feature: 254
gaaaactgattttattcttattttattaggattattttctatttcttttctaaattccttaaattttataatagcttctaacttattccttaatag

SEQ ID NO: 32483 - DNA, 96 bp, Fusarium azukicola
  misc_feature: 254
agaatataactaagaaagagaggtataactaggaaaaagagatatagctaagagagagaggtaaagctaagaaagagagatatagctagaaaagag

SEQ ID NO: 32484 - DNA, 96 bp, Fusarium azukicola
  misc_feature: 254
agtaagttaggttaaagaagagaagaaagggttagaaagtaataaaaaagtttaaggagagaagttaagttaaggaggagtatagtaagtattagg

SEQ ID NO: 32485 - DNA, 96 bp, Fusarium azukicola
  misc_feature: 254
atgccagtcaaaaagactagttttttcctttatatttaagataggaagatctaagttatctcttagtctatagttattcttattagaaataacctt

SEQ ID NO: 32486 - DNA, 96 bp, Fusarium azukicola
  misc_feature: 254
agagataagagataagagataagagataaagaaataagaaataagagataagagataaagggaggcaaaaatagccttaagaagccctagaagtat

SEQ ID NO: 32487 - DNA, 96 bp, Fusarium azukicola
  misc_feature: 254
aatctaagagactagaaaaaatagattctaatgagatatatttttctaagacttctaagccttagaaaaagaagaaaactgccttaaaatgcagtt

SEQ ID NO: 32488 - DNA, 96 bp, Fusarium azukicola
  misc_feature: 253
ggaaggtttcttattaaaggtcctagtatattattagttatattattttgttgagaaattaaggaattatatacctctaaatcatcacttatatca

SEQ ID NO: 32489 - DNA, 96 bp, Fusarium azukicola
  misc_feature: 253
gaatataactaagaaagagaggtataactaggaaaaagagatatagctaagagagagaggtaaagctaagaaagagagatatagctagaaaagaga

SEQ ID NO: 32490 - DNA, 96 bp, Fusarium azukicola
  misc_feature: 253
tatattatattactaactatagtgatatatccctataaactatatattatattatagaatttttactctatttttaggtatatttacctaacctat

SEQ ID NO: 32491 - DNA, 96 bp, Fusarium azukicola
  misc_feature: 253
actcaggaagccaataaggtgcataagacttctaagaaaagggaatctaaacctaattctaagaaggaagaaagagaaaagaaacaagaaaagcta

SEQ ID NO: 32492 - DNA, 96 bp, Fusarium azukicola
  misc_feature: 253
tacctaaaaatagagtaaaaattctataatataatatgtggtttatagggatatatcactatagttggtaatataatatagaacattaacaataat

SEQ ID NO: 32493 - DNA, 96 bp, Fusarium azukicola
  misc_feature: 253
taaggtaagtaagtaagttaggttaaagaagagaagaaagggttagaaagtaataaaaaagtttaaggagagaagttaagttaaggaggagtatag

SEQ ID NO: 32494 - DNA, 96 bp, Fusarium azukicola
  misc_feature: 253
taacttctctccttaaacttttttactactttctaaccctttcttctcttctttaacctaacttacttacttaccttattctccctccttcttctc

SEQ ID NO: 32495 - DNA, 96 bp, Fusarium azukicola
  misc_feature: 253
taacttaacttctctccttaaacttttttattactttctaaccctttcttctcttctttaacctaacttacttacttaccttattctccctccttc

SEQ ID NO: 32496 - DNA, 96 bp, Fusarium azukicola
  misc_feature: 253
cccggaggtctcttcctaagggtttatacttaaaagaagattatacttcttttttaagtcttttctaagactttatacctccttaagtcttcttta

SEQ ID NO: 32497 - DNA, 96 bp, Fusarium azukicola
  misc_feature: 253
gtattattctaattggttaaaaaggttcctacagacctttatgactgccgtcatctatgcatcaaagtataataactgccgattggctaaaaaaag

SEQ ID NO: 32498 - DNA, 96 bp, Fusarium azukicola
  misc_feature: 253
ataagagtaagagaatataactaagaaagagaggtataactaggaaaaagagatatagctaagagagagaggtaaagctaagaaagagagatatag

SEQ ID NO: 32499 - DNA, 96 bp, Fusarium azukicola
  misc_feature: 253
aaggtcctagtatattattagttatattattttgttgagaaattaaggaattatatacctctaaatcatcacttatatcaaaatccatttcatctg

SEQ ID NO: 32500 - DNA, 96 bp, Fusarium azukicola
  misc_feature: 253
attttctttaccctatactttcttcattattttactttaccctccacttttattctttattttactttaccctatactctcttctctcttttactt

SEQ ID NO: 32501 - DNA, 96 bp, Fusarium azukicola
  misc_feature: 253
aatagaggtttaatttttcctctaataataagaacgtataaagctataacccttataagattataactttaaaggaggctattaatattctatatt

SEQ ID NO: 32502 - DNA, 96 bp, Fusarium azukicola
  misc_feature: 252
ttttcttatccttttatactctcttcttatacccttatacacttttcttctttattttctttaccctatactttcttcattattttactttaccct

SEQ ID NO: 32503 - DNA, 96 bp, Fusarium azukicola
  misc_feature: 252
cttaaacttttttactactttctaaccctttcttctcttctttaacctaacttacttacttaccttattctccctccttcttctctacttaataaa

SEQ ID NO: 32504 - DNA, 96 bp, Fusarium azukicola
  misc_feature: 252
tagaaagtaataaaaaagtttaaggagagaagttaagttaaggaggagtatagtaagtattaggagagaaaggagtatagagtaagttaaggtaaa

SEQ ID NO: 32505 - DNA, 96 bp, Fusarium azukicola
  misc_feature: 252
ttattttctttaccctatactttcttcattattttactttaccctccacttttattctttattttactttaccctatactctcttctctcttttac

SEQ ID NO: 32506 - DNA, 96 bp, Fusarium azukicola
  misc_feature: 252
tcctttctctcctaatacttactatactcctccttaacttaacttctctccttaaacttttttattactttctaaccctttcttctcttctttaac

SEQ ID NO: 32507 - DNA, 96 bp, Fusarium azukicola
  misc_feature: 252
aaggaagaaggagtgaaaagagagagagggagaggggagaggagaggataaggagtgaaaagagagagagggagaggggagaggagaggataagga

SEQ ID NO: 32508 - DNA, 96 bp, Fusarium azukicola
  misc_feature: 252
gaccctaaactaactccctatccttcctcttttttcccccaccctccctttcttaataactctttataacttctctttttactcttctctacacta

SEQ ID NO: 32509 - DNA, 96 bp, Fusarium azukicola
  misc_feature: 252
ccttcctcccctctctctcttatattcccttctcttccttcctctttctctttacttccctttctctttctcctccctcctcttcactccctttac

SEQ ID NO: 32510 - DNA, 96 bp, Fusarium azukicola
  misc_feature: 252
ctttattataacctcttcccctaacctttactataacctcttcccctaacctttactataacctcttcccctaacctttactataacctcttcccc

SEQ ID NO: 32511 - DNA, 96 bp, Fusarium azukicola
  misc_feature: 252
cttcctcccctctctctcttatattcccttctcttccttcctctttctctttacttccctttctctttctcctccctcctcttcactccctttact

SEQ ID NO: 32512 - DNA, 96 bp, Fusarium azukicola
  misc_feature: 251
ctcctttctctcctaatacttactatactcctccttaacttaacttctctccttaaacttttttattactttctaaccctttcttctcttctttaa

SEQ ID NO: 32513 - DNA, 96 bp, Fusarium azukicola
  misc_feature: 251
ccggaggtctcttcctaagggtttatacttaaaagaagattatacttcttttttaagtcttttctaagactttatacctccttaagtcttctttaa

SEQ ID NO: 32514 - DNA, 96 bp, Fusarium azukicola
  misc_feature: 251
taaggttatttctaataagaataactatagactaagagataacttagatcttcctattctaaatataaaggaaaaaactagtctttttgactggca

SEQ ID NO: 32515 - DNA, 96 bp, Fusarium azukicola
  misc_feature: 251
gttaaaaactgcgaaaactgcaaactaggaaaattaactaaaaataatataaataaaaaacctagtaataaggaatataagttcctagataaaata

SEQ ID NO: 32516 - DNA, 96 bp, Fusarium azukicola
  misc_feature: 251
tacttactatactcctccttaacttaacttctctccttaaacttttttactactttctaaccctttcttctcttctttaacctaacttacttactt

SEQ ID NO: 32517 - DNA, 96 bp, Fusarium azukicola
  misc_feature: 251
taaatagcttttcttgtttcttttctctttcttccttcttagaattaggtttagattcccttttcttagaagtcttatgcaccttattggctttct

SEQ ID NO: 32518 - DNA, 96 bp, Fusarium azukicola
  misc_feature: 251
ccttaacttactctatactcctttctctcctaatacttactatactcctccttaacttaacttctctccttaaacttttttactactttctaaccc

SEQ ID NO: 32519 - DNA, 96 bp, Fusarium azukicola
  misc_feature: 251
ctctcttttcactccttatcctctcctctcccctctccctctctctcttttcactccttatcctctcctctcccctctccctctctctcttttctc

SEQ ID NO: 32520 - DNA, 96 bp, Fusarium azukicola
  misc_feature: 251
agctaaggttatttctaataagaataactatagactaagagataacttagatcttcctattctaaatataaaggaaaaaactagtctttttgactg

SEQ ID NO: 32521 - DNA, 96 bp, Fusarium azukicola
  misc_feature: 250
tttaaggtttattaagtagagaagaaggagggagaataaggtaagtaagtaagttaggttaaagaagagaagaaagggttagaaagtagtaaaaaa

SEQ ID NO: 32522 - DNA, 96 bp, Fusarium azukicola
  misc_feature: 250
ttactcctcttaacttctctttctcttccctcttcttccctcctctccctctctcctttcccctcctctctaccgaccctaaactaactccctatc

SEQ ID NO: 32523 - DNA, 96 bp, Fusarium azukicola
  misc_feature: 250
gggttttaaggtttattaagtagagaagaaggagggagaataaggtaagtaagtaagttaggttaaagaagagaagaaagggttagaaagtagtaa

SEQ ID NO: 32524 - DNA, 96 bp, Fusarium azukicola
  misc_feature: 250
ttaatattctatattatattaccaactatagtgatatatccctataaaccatatattatattatagaatttttactctatttttaggtatatttac

SEQ ID NO: 32525 - DNA, 96 bp, Fusarium azukicola
  misc_feature: 250
tattattatatatatatcttagtaaaaacccctttattatagacctaatattataagggaaaatctaagattatatagggaaaagtattaaaatat

SEQ ID NO: 32526 - DNA, 96 bp, Fusarium azukicola
  misc_feature: 250
tactcctcttaacttctctttctcttccctcttcttccctcctctccctctctcctttcccctcctctctaccgaccctaaactaactccctatcc

SEQ ID NO: 32527 - DNA, 96 bp, Fusarium azukicola
  misc_feature: 250
taaggtttattaagtagagaagaaggagggagaataaggtaagtaagtaagttaggttaaagaagagaagaaagggttagaaagtagtaaaaaagt

SEQ ID NO: 32528 - DNA, 96 bp, Fusarium azukicola
  misc_feature: 250
gtgaagaggagggaggagaaagagaaagggaagtaaagagaaagaggaaggaagagaagggaatataagagagagaggggaggaagggaggaaggg

SEQ ID NO: 32529 - DNA, 96 bp, Fusarium azukicola
  misc_feature: 250
accttaacttactctatactcctttctctcctaatacttactatactcctccttaacttaacttctctccttaaacttttttactactttctaacc

SEQ ID NO: 32530 - DNA, 96 bp, Fusarium azukicola
  misc_feature: 250
ccttatcctctcctctcccctctccctctctctcttttcactccttatcctctcctctcccctctccctctctctcttttcactccttcttccttc

SEQ ID NO: 32531 - DNA, 96 bp, Fusarium azukicola
  misc_feature: 250
cttaacttaacttctctccttaaacttttttattactttctaaccctttcttctcttctttaacctaacttacttacttaccttattctccctcct

SEQ ID NO: 32532 - DNA, 96 bp, Fusarium azukicola
  misc_feature: 250
atataatagggtcttagcttatatatatattcctttatattatctaagaaaactaattttattcttattttattaggattattttctatttctttt

SEQ ID NO: 32533 - DNA, 96 bp, Fusarium azukicola
  misc_feature: 250
aggctattaatgttctatattatattactaactatagtgatatatccctataaaccatatattatattatagaatttttactctatttttaggtat

SEQ ID NO: 32534 - DNA, 96 bp, Fusarium azukicola
  misc_feature: 249
ttttaaggtttattaagtagagaagaaggagggagaataaggtaagtaagtaagttaggttaaagaagagaagaaagggttagaaagtagtaaaaa

SEQ ID NO: 32535 - DNA, 96 bp, Fusarium azukicola
  misc_feature: 249
ttagtttagggtcggtagagaggaggggaaaggagagagggagaggagggaagaagagggaagagaaagagaagttaagaggagtaaagggagtga

SEQ ID NO: 32536 - DNA, 96 bp, Fusarium azukicola
  misc_feature: 249
ttaaggaataagtcagaagctattataaaattcaaggaatttagaaaagaaatagaaaataatcctaataaaataagaataaaatcagttttctta

SEQ ID NO: 32537 - DNA, 96 bp, Fusarium azukicola
  misc_feature: 249
aagtaagtaagttaggttaaagaagagaagaaagggttagaaagtaataaaaaagtttaaggagagaagttaagttaaggaggagtatagtaagta

SEQ ID NO: 32538 - DNA, 96 bp, Fusarium azukicola
  misc_feature: 249
taagttaggttaaagaagagaagaaagggttagaaagtaataaaaaagtttaaggagagaagttaagttaaggaggagtatagtaagtattaggag

SEQ ID NO: 32539 - DNA, 96 bp, Fusarium azukicola
  misc_feature: 249
aaaactggaaaactcaggaagccaataaggtgcataagacttctaagaaaagggaatctaaacctaattctaagaaggaagaaagagaaaagaaac

SEQ ID NO: 32540 - DNA, 96 bp, Fusarium azukicola
  misc_feature: 249
ggaagctttcttagttaaagaaaagctttctagtactatagaagaagattccacttcttctaagagtaaagaagcattatctctcataagacttac

SEQ ID NO: 32541 - DNA, 96 bp, Fusarium azukicola
  misc_feature: 249
acctttattataacctcttcccctaacctttactataacctcttcccctaacctttactataacctcttcccctaacctttactataacctcttcc

SEQ ID NO: 32542 - DNA, 96 bp, Fusarium azukicola
  misc_feature: 248
ttttgcaccctaataaggctccaaaaaactggaaaactcaggaagccaataaggtgcataagacttctaagaaaagggaatctaaacctaattcta

SEQ ID NO: 32543 - DNA, 96 bp, Fusarium azukicola
  misc_feature: 248
tttagttagatctataagattactttttttaagtttctagctattttatagcagtttttagaaacttaggttttagcgatttttagttatatagta

SEQ ID NO: 32544 - DNA, 96 bp, Fusarium azukicola
  misc_feature: 248
tctctttctcttccctcttcttccctcctctccctctctcctttcccctcctctctaccgaccctaaactaactccctatccttcctcttttttcc

SEQ ID NO: 32545 - DNA, 96 bp, Fusarium azukicola
  misc_feature: 248
acctttctaatcacccttcctctactctttttcttttctctcctctcccctctccctctctctcttttcactccttatcctctcctctcccctctc

SEQ ID NO: 32546 - DNA, 96 bp, Fusarium azukicola
  misc_feature: 248
actcctccttaacttaacttctctccttaaacttttttactactttctaaccctttcttctcttctttaacctaacttacttacttaccttattct

SEQ ID NO: 32547 - DNA, 96 bp, Fusarium azukicola
  misc_feature: 248
aacttaacttctctccttaaacttttttattactttctaaccctttcttctcttctttaacctaacttacttacttaccttattctccctccttct

SEQ ID NO: 32548 - DNA, 96 bp, Fusarium azukicola
  misc_feature: 247
atatacctaaaaatagagtaaaaattctataatataatatatggtttatagggatatatcactatagttggtaatataatatagaacattaacaaa

SEQ ID NO: 32549 - DNA, 96 bp, Fusarium azukicola
  misc_feature: 247
gctgttattatatataggttatttttttcttttccttgtgatattatttttccttgcttatttaaaagaaggacttcttgtttatttataatagaa

SEQ ID NO: 32550 - DNA, 96 bp, Fusarium azukicola
  misc_feature: 247
tagtttagggtcggtagagaggaggggaaaggagagagggagaggagggaagaagagggaagagaaagagaagttaagaggagtaaagggagtgaa

SEQ ID NO: 32551 - DNA, 96 bp, Fusarium azukicola
  misc_feature: 247
agaagtccttcttttaaataagtaaggaaaaataatatcataaggaaaagagaaaaataacctatatataataatagctaaggttatttctaataa

SEQ ID NO: 32552 - DNA, 96 bp, Fusarium azukicola
  misc_feature: 247
aggttatttctaataagaataactatagactaagagataacttagatcttcctatcttaaatataaaggaaaaaactagtctttttgactggcata

SEQ ID NO: 32553 - DNA, 96 bp, Fusarium azukicola
  misc_feature: 247
taccttaacttactctatactcctttctctcctaatacttactatactcctccttaacttaacttctctccttaaacttttttactactttctaac

SEQ ID NO: 32554 - DNA, 96 bp, Fusarium azukicola
  misc_feature: 247
ctctccttaaacttttttattactttctaaccctttcttctcttctttaacctaacttacttacttaccttattctccctccttcttctctactta

SEQ ID NO: 32555 - DNA, 96 bp, Fusarium azukicola
  misc_feature: 247
taaggtaagtaagtaagttaggttaaagaagagaagaaagggttagaaagtagtaaaaaagtttaaggagagaagttaagttaaggaggagtatag

SEQ ID NO: 32556 - DNA, 96 bp, Fusarium azukicola
  misc_feature: 247
agggatatatcactatagttagtaatataatatagaacattaatagcctcctttaaagttataatcttataagggttatagctttatacgttctta

SEQ ID NO: 32557 - DNA, 96 bp, Fusarium azukicola
  misc_feature: 247
aaatagcttttcttgtttcttttctctttcttccttcttagaattaggtttagattcctttttcttagaagtcttatgcaccttattggctttctg

SEQ ID NO: 32558 - DNA, 96 bp, Fusarium azukicola
  misc_feature: 247
aaactgattttattcttattttattaggattattttctatttcttttctaaattccttaaattttataatagcttctaacttattccttaatagat

SEQ ID NO: 32559 - DNA, 96 bp, Fusarium azukicola
  misc_feature: 246
ttctatattatattactaactatagtgatatatccctataaactatatattatattatagaatttttactctatttttaggtatatttacctaacc

SEQ ID NO: 32560 - DNA, 96 bp, Fusarium azukicola
  misc_feature: 246
ttatatttagaataggaagatctaagttatctcttagtctatagttattcttattagaaataaccttagctgttattatatataggttattttttt

SEQ ID NO: 32561 - DNA, 96 bp, Fusarium azukicola
  misc_feature: 246
aaactggaaaactcaggaagccaataaggtgcataagacttctaagaaaagggaatctaaacctaattctaagaaggaagaaagagaaaagaaaca

SEQ ID NO: 32562 - DNA, 96 bp, Fusarium azukicola
  misc_feature: 246
tcttttctctcctctcccctctccctctctctcttttcactccttatcctctcctctcccctctccctctctctcttttcactccttatcctctcc

SEQ ID NO: 32563 - DNA, 96 bp, Fusarium azukicola
  misc_feature: 246
tcctacctttctaatcacccttcctctactctttttcttttctctcctctcccctctccctctctctcttttcactccttatcctctcctctcccc

SEQ ID NO: 32564 - DNA, 96 bp, Fusarium azukicola
  misc_feature: 246
aaattaaacctctattattattatatatatatcttagtaaaaacccctttattatagacctaatattataagggaaaatctaagattatataggga

SEQ ID NO: 32565 - DNA, 96 bp, Fusarium azukicola
  misc_feature: 246
ctattataaataaacaagaagtccttcttttaaataagcaaggaaaaataatatcacaaggaaaagaaaaaaataacctatatataataacagcta

SEQ ID NO: 32566 - DNA, 96 bp, Fusarium azukicola
  misc_feature: 246
aatataatatagaacattaatagcctcctttaaagttataatcttataagggttatagctttatacgttcttattattagaggaaaaaattaaacc

SEQ ID NO: 32567 - DNA, 96 bp, Fusarium azukicola
  misc_feature: 246
ccttattactaggttttttatttatattatttttagttaattttcctagtttgcagttttcgcagtttttaacttgatataggtcctcactagtat

SEQ ID NO: 32568 - DNA, 96 bp, Fusarium azukicola
  misc_feature: 246
aaaaattaaacctctattattattatatatatatcttagtaaaaacccctttattatagacctaatattataagggaaaatctaagattatatagg

SEQ ID NO: 32569 - DNA, 96 bp, Fusarium azukicola
  misc_feature: 246
attatctaagaaaactgattttattcttattttattaggattattttctatttcttttctaaattccttgaattttataatagcttctgacttatt

SEQ ID NO: 32570 - DNA, 96 bp, Fusarium azukicola
  misc_feature: 245
ccttcttttaaataagtaaggaaaaataatattataaggaaaagagaaaaataacctatatataataatagctaaggttatttctaataagaataa

SEQ ID NO: 32571 - DNA, 96 bp, Fusarium azukicola
  misc_feature: 245
ttagctatatctctttttcctagttatacctctctttcttagttatattctcttactcttatatctcttttacctctctttcttaagaaaatctcc

SEQ ID NO: 32572 - DNA, 96 bp, Fusarium azukicola
  misc_feature: 245
aagaagaattagctataaatagcttttcttatttcttttctctttcttccttcttagaattaggtttagattcctttttcttagaagtcttatgca

SEQ ID NO: 32573 - DNA, 96 bp, Fusarium azukicola
  misc_feature: 245
tatacctaaaaatagagtaaaaattctataatataatatgtggtttatagggatatatcactatagttggtaatataatatagaacattaacaggt

SEQ ID NO: 32574 - DNA, 96 bp, Fusarium azukicola
  misc_feature: 245
ctatattatattactaactatagtgatatatccctataaactatatattatattatagaatttttactctatttttaggtatatttacctaaccta

SEQ ID NO: 32575 - DNA, 96 bp, Fusarium azukicola
  misc_feature: 245
taatagggtcttagcttatatatatattcctttatattatctaagaaaactgattttattcttattttattaggattattttctatttcttttcta

SEQ ID NO: 32576 - DNA, 96 bp, Fusarium azukicola
  misc_feature: 245
agggaaaagtattaaaatataataaaaaccctttataaaggaaataagttatattagggatagattctcttttattctcttaaatagtataggtta

SEQ ID NO: 32577 - DNA, 96 bp, Fusarium azukicola
  misc_feature: 245
cctatactttcttcattattttactttaccctccacttttattctttattttactttaccctatactctcttctctcttttactttaccctatact

SEQ ID NO: 32578 - DNA, 96 bp, Fusarium azukicola
  misc_feature: 245
agaagaaaactgccttaaaatgcagttattgcaaactgctaggtcataaagacccagattgctattttttgcaccctaataaggctccaaaaaact

SEQ ID NO: 32579 - DNA, 96 bp, Fusarium azukicola
  misc_feature: 244
ttaacttctctccttaaacttttttattactttctaaccctttcttctcttctttaacctaacttacttacttaccttattctccctccttcttct

SEQ ID NO: 32580 - DNA, 96 bp, Fusarium azukicola
  misc_feature: 244
tctttttcctagttatacctctctttcttagttatattctcttactcttatatctcttttacctctctttcttaagaaaatctcctctctttactt

SEQ ID NO: 32581 - DNA, 96 bp, Fusarium azukicola
  misc_feature: 244
tctcctaatacttactatactcctccttaacttaacttctctccttaaacttttttattactttctaaccctttcttctcttctttaacctaactt

SEQ ID NO: 32582 - DNA, 96 bp, Fusarium azukicola
  misc_feature: 244
aggaaggttaagaaaggagagaagtaaggaaggttaagaaaggagagaagtaaggaaggttaagaaaggagagaagtaaggaagggtaagaaagga

SEQ ID NO: 32583 - DNA, 96 bp, Fusarium azukicola
  misc_feature: 244
tatttctaataagaataactatagactaagagataacttagatcttcctattctaaatataaaggaaaaaactagtctttttgactggcataaaag

SEQ ID NO: 32584 - DNA, 96 bp, Fusarium azukicola
  misc_feature: 244
tatatttagaataggaagatctaagttatctcttagtctatagttattcttattagaaataaccttagctgttattatatataggttatttttttc

SEQ ID NO: 32585 - DNA, 96 bp, Fusarium azukicola
  misc_feature: 244
tagaatctattttttctagtctcttagatttatctataaggctagaagaaagtaattctaggttataagccttaggattactccttaaagcttatg

SEQ ID NO: 32586 - DNA, 96 bp, Fusarium azukicola
  misc_feature: 244
aagagataagagataagagataagagataaagaaataagaaataagagataagagataaagggaggcaaaaatagccttaagaagccctagaagta

SEQ ID NO: 32587 - DNA, 96 bp, Fusarium azukicola
  misc_feature: 244
cttcttttaaataagtaaggaaaaataatattataaggaaaagagaaaaataacctatatataataatagctaaggttatttctaataagaataac

SEQ ID NO: 32588 - DNA, 96 bp, Fusarium azukicola
  misc_feature: 244
aataagtctcactttctaattttagctattttaagcttaatttcgacttttatagcttttttaaaaaataccttttaaggtgaaaatataagtgtc

SEQ ID NO: 32589 - DNA, 96 bp, Fusarium azukicola
  misc_feature: 244
attaaggaataagtcagaagctattataaaattcaaggaatttagaaaagaaatagaaaataatcctaataaaataagaataaaatcagttttctt

SEQ ID NO: 32590 - DNA, 96 bp, Fusarium azukicola
  misc_feature: 243
gttaggggtagtagttacgttaagggttagggttaattggttgaaattagggttaggggtagtagtagagttaagggttagggttaattggttgaa

SEQ ID NO: 32591 - DNA, 96 bp, Fusarium azukicola
  misc_feature: 243
aggataaggagtgaaaagagagagagggagaggggagaggagaggataaggagtgaaaagagagagagggagaggggagaggagaggataaggaga

SEQ ID NO: 32592 - DNA, 96 bp, Fusarium azukicola
  misc_feature: 243
gctattaatgttctatattatattactaactatagtgatatatccctataaaccatatattatattatagaatttttactctatttttaggtatat

SEQ ID NO: 32593 - DNA, 96 bp, Fusarium azukicola
  misc_feature: 243
gagtgaaaagagagagagggagaggggagaggagaggataaggagtgaaaagagagagagggagaggggagaggagaggataaggagagaaaagag

SEQ ID NO: 32594 - DNA, 96 bp, Fusarium azukicola
  misc_feature: 243
cttagctatatctctttttcctagttatacctctctttcttagttatattctcttactcttatatctcttttacctctctttcttaagaaaatctc

SEQ ID NO: 32595 - DNA, 96 bp, Fusarium azukicola
  misc_feature: 243
aaggaaaagaaaaaaataacctatatataataacagctaaggttatttctaataagaataactatagactaagagataacttagatcttcctattc

SEQ ID NO: 32596 - DNA, 96 bp, Fusarium azukicola
  misc_feature: 243
gaagtccttcttttaaataagtaaggaaaaataatatcataaggaaaagagaaaaataacctatatataataatagctaaggttatttctaataag

SEQ ID NO: 32597 - DNA, 96 bp, Fusarium azukicola
  misc_feature: 243
cttttctagctatatctctctttcttagctttacctctctctcttagctatatctctttttcctagttatacctctctttcttagttatattctct

SEQ ID NO: 32598 - DNA, 96 bp, Fusarium azukicola
  misc_feature: 243
actggaaaactcaggaagccaataaggtgcataagacttctaagaaaagggaatctaaacctaattctaagaaggaagaaagagaaaagaaacaag

SEQ ID NO: 32599 - DNA, 96 bp, Fusarium azukicola
  misc_feature: 243
agtgttaatgttctatattatattaccaactatagtgatatatccctataaaccatatattatattatagaatttttactctatttttaggtatat

SEQ ID NO: 32600 - DNA, 96 bp, Fusarium azukicola
  misc_feature: 242
ttttctctcctctcccctctccctctctctcttttcactccttatcctctcctctcccctctccctctctctcttttcactccttatcctctcctc

SEQ ID NO: 32601 - DNA, 96 bp, Fusarium azukicola
  misc_feature: 242
ggaaaactcaggaagccaataaggtgcataagacttctaagaaaagggaatctaaacctaattctaagaaggaagaaagagaaaagaaacaagaaa

SEQ ID NO: 32602 - DNA, 96 bp, Fusarium azukicola
  misc_feature: 242
ggttttaaggtttattaagtagagaagaaggagggagaataaggtaagtaagtaagttaggttaaagaagagaagaaagggttagaaagtagtaaa

SEQ ID NO: 32603 - DNA, 96 bp, Fusarium azukicola
  misc_feature: 242
tctttaccctatactttcttcattattttactttaccctccacttttattctttattttactttaccctatactctcttctctcttttactttacc

SEQ ID NO: 32604 - DNA, 96 bp, Fusarium azukicola
  misc_feature: 242
tctctccttaaacttttttattactttctaaccctttcttctcttctttaacctaacttacttacttaccttattctccctccttcttctctactt

SEQ ID NO: 32605 - DNA, 96 bp, Fusarium azukicola
  misc_feature: 242
tctctcctaatacttactatactcctccttaacttaacttctctccttaaacttttttattactttctaaccctttcttctcttctttaacctaac

SEQ ID NO: 32606 - DNA, 96 bp, Fusarium azukicola
  misc_feature: 242
aaaactgattttattcttattttattaggattattttctatttcttttctaaattccttaaattttataatagcttctaacttattccttaataga

SEQ ID NO: 32607 - DNA, 96 bp, Fusarium azukicola
  misc_feature: 242
aactgttaatgttctatattatattaccaactatagtgatatatccctataaaccacatattatattatagaatttttactctatttttaggtata

SEQ ID NO: 32608 - DNA, 96 bp, Fusarium azukicola
  misc_feature: 242
gttttttatttatattatttttagttaattttcctagtttatagttttcgcagtttttaacttaatataggtcctcactagtatatttaaagagag

SEQ ID NO: 32609 - DNA, 96 bp, Fusarium azukicola
  misc_feature: 242
cttccctcttcttccctcctctccctctctcctttcccctcctctctaccgaccctaaactaactccctatccttcctcttttttcccccaccctc

SEQ ID NO: 32610 - DNA, 96 bp, Fusarium azukicola
  misc_feature: 242
cttaacttctctccttaaacttttttattactttctaaccctttcttctcttctttaacctaacttacttacttaccttattctccctccttcttc

SEQ ID NO: 32611 - DNA, 96 bp, Fusarium azukicola
  misc_feature: 242
ctttctctcctaatacttactatactcctccttaacttaacttctctccttaaacttttttattactttctaaccctttcttctcttctttaacct

SEQ ID NO: 32612 - DNA, 96 bp, Fusarium azukicola
  misc_feature: 242
cttattttattaggattattttctatttcttttctaaattccttgaattttataatagcttctgacttattccttaatagataggctttcagatat

SEQ ID NO: 32613 - DNA, 96 bp, Fusarium azukicola
  misc_feature: 242
ctattaatattctatattatattactaactatagtgatatatccctataaaccatatattatattatagaatttttactctatttttaggtatatt

SEQ ID NO: 32614 - DNA, 96 bp, Fusarium azukicola
  misc_feature: 242
atcgaggtattcagactgagattgggcctcaaggacggtctttggggtctttgagacccaaggggtggtagggctagctacctcctcggcaggcgg

SEQ ID NO: 32615 - DNA, 96 bp, Fusarium azukicola
  misc_feature: 242
atatacctaaaaatagagtaaaaattctataatataatatgtggtttatagggatatatcactatagttagtaatataatatagaacattaataat

SEQ ID NO: 32616 - DNA, 96 bp, Fusarium azukicola
  misc_feature: 242
attatattttattccattctttatataatagggtcttagcttatatatatattcctttatattatctaagaaaactgattttattcttattttatt

SEQ ID NO: 32617 - DNA, 96 bp, Fusarium azukicola
  misc_feature: 242
agaacgtataaagctataacccttataagattataactttaaaggaggctattaatgttctatattatattactaactatagtgatatatccctat

SEQ ID NO: 32618 - DNA, 96 bp, Fusarium azukicola
  misc_feature: 241
ttccctcttcttccctcctctccctctctcctttcccctcctctctaccgaccctaaactaactccctatccttcctcttttttcccccaccctcc

SEQ ID NO: 32619 - DNA, 96 bp, Fusarium azukicola
  misc_feature: 241
tagggatatatcactatagttagtaatataatatagaacattaatagcctcctttaaagttataatcttataagggttatagctttatacgttctt

SEQ ID NO: 32620 - DNA, 96 bp, Fusarium azukicola
  misc_feature: 241
taatataatatagaacattaatagcctcctttaaagttataatcttataagggttatagctttatacgttcttattattagaggaaaaaattaaac

SEQ ID NO: 32621 - DNA, 96 bp, Fusarium azukicola
  misc_feature: 241
aagaagaaaactgccttaaaatgcagttattgcaaactgctaggtcataaagacccagattgctattttttgcaccctaataaggctccaaaaaac

SEQ ID NO: 32622 - DNA, 96 bp, Fusarium azukicola
  misc_feature: 241
gagatatatttttctaagacttctaagccttggaaaaagaagaaaactgccttaaaatgcagttattgcaaactgctaggtcataaagacccagat

SEQ ID NO: 32623 - DNA, 96 bp, Fusarium azukicola
  misc_feature: 241
cctctcccctctccctctctctcttttcactccttatcctctcctctcccctctccctctctctcttttcactccttctcctctcctctcccctct

SEQ ID NO: 32624 - DNA, 96 bp, Fusarium azukicola
  misc_feature: 241
aggaataagtcagaagctattataaaattcaaggaatttagaaaagaaatagaaaataatcctaataaaataagaataaaatcagttttcttagat

SEQ ID NO: 32625 - DNA, 96 bp, Fusarium azukicola
  misc_feature: 241
acttaacttctctccttaaacttttttattactttctaaccctttcttctcttctttaacctaacttacttacttaccttattctccctccttctt

SEQ ID NO: 32626 - DNA, 96 bp, Fusarium azukicola
  misc_feature: 240
tttttttaaaaatctaaaaaaattatttttaagttttatatttagttagatctataagattactttttttaagtttctagctattttatagcagtt

SEQ ID NO: 32627 - DNA, 96 bp, Fusarium azukicola
  misc_feature: 240
ctcctttctctcctaatacttactatactcctccttaacttaacttctctccttaaacttttttactactttctaaccctttcttctcttctttaa

SEQ ID NO: 32628 - DNA, 96 bp, Fusarium azukicola
  misc_feature: 240
taaatcccctctagaagttagagataatatttccttagatattaaggaattagataaaataaaaacctttaggtctatagtttattataagaacca

SEQ ID NO: 32629 - DNA, 96 bp, Fusarium azukicola
  misc_feature: 240
aagagagtatagggtaaagtaaaagagagaagagagtatagggtaaagtaaaagagagaagagagtatagggtaaagtaaaagagagaagagagga

SEQ ID NO: 32630 - DNA, 96 bp, Fusarium azukicola
  misc_feature: 240
tatagcttataagtaaagagaggagattttcttaagaaagagaggtaaaagagatataagagtaagagaatataactaagaaagagaggtataact

SEQ ID NO: 32631 - DNA, 96 bp, Fusarium azukicola
  misc_feature: 239
tgtatcatatataaaattagttatattatctttattagtagaaaaatcaggtttatttaccttatttaaatatcctagttgtttctttatataggg

SEQ ID NO: 32632 - DNA, 96 bp, Fusarium azukicola
  misc_feature: 239
ctggaaaactcaggaagccaataaggtgcataagacttctaagaaaagggaatctaaacctaattctaagaaggaagaaagagaaaagaaacaaga

SEQ ID NO: 32633 - DNA, 96 bp, Fusarium azukicola
  misc_feature: 239
ggctattaatgttctatattatattactaactatagtgatatatccctataaaccatatattatattatagaatttttactctatttttaggtata

SEQ ID NO: 32634 - DNA, 96 bp, Fusarium azukicola
  misc_feature: 239
atattatattttattccattctttatataatagggtcttagcttatatatatattcctttatattatctaagaaaactgattttattcttatttta

SEQ ID NO: 32635 - DNA, 96 bp, Fusarium azukicola
  misc_feature: 239
gaaggcaagcaattgatcaaatggatatagatgcgcaggtattagctgaatcgtcgaggagtggtggtcaaggaaggtcggcgcgaccggggggtc

SEQ ID NO: 32636 - DNA, 96 bp, Fusarium azukicola
  misc_feature: 239
ataagagataagagataagagataagagataaagaaataagaaataagagataagagataaagggaggcaaaaatagccttaagaagccctagaag

SEQ ID NO: 32637 - DNA, 96 bp, Fusarium azukicola
  misc_feature: 239
agggtcggtagagaggaggggaaaggagagagggagaggagggaagaagagggaagagaaagagaagttaagaggagtaaagggagtgaagaggag

SEQ ID NO: 32638 - DNA, 96 bp, Fusarium azukicola
  misc_feature: 239
aatattctatattatattaccaactatagtgatatatccctataaaccatatattatattatagaatttttactctatttttaggtatatttacct

SEQ ID NO: 32639 - DNA, 96 bp, Fusarium azukicola
  misc_feature: 239
actcctccttaacttaacttctctccttaaacttttttattactttctaaccctttcttctcttctttaacctaacttacttacttaccttattct

SEQ ID NO: 32640 - DNA, 96 bp, Fusarium azukicola
  misc_feature: 238
gaaaactcaggaagccaataaggtgcataagacttctaagaaaagggaatctaaacctaattctaagaaggaagaaagagaaaagaaacaagaaaa

SEQ ID NO: 32641 - DNA, 96 bp, Fusarium azukicola
  misc_feature: 238
ataagctttaaggagtaatcctgaggcttataacctagaatcactttcttctagccttatagatgaatctaagagactagaaaaaatagattctaa

SEQ ID NO: 32642 - DNA, 96 bp, Fusarium azukicola
  misc_feature: 238
tagtgaggacctatatcaagttaaaaactgcgaaaactgcaaactaggaaaattaactaaaaataatataaataaaaaacctagtaataaggaata

SEQ ID NO: 32643 - DNA, 96 bp, Fusarium azukicola
  misc_feature: 238
tattatattttattccattctttatataatagggtcttagcttatatatatattcctttatattatctaagaaaactgattttattcttattttat

SEQ ID NO: 32644 - DNA, 96 bp, Fusarium azukicola
  misc_feature: 238
ggaaaagaaaaaaataacctatatataataacagctaaggttatttctaataagaataactatagactaagagataacttagatcttcctattcta

SEQ ID NO: 32645 - DNA, 96 bp, Fusarium azukicola
  misc_feature: 238
acgttaagggttagggttaattggttgaaattagggttaggggtagtagtagagttaagggttagggttaattggttgaaattagggttaggggta

SEQ ID NO: 32646 - DNA, 96 bp, Fusarium azukicola
  misc_feature: 238
atagaggtttaatttttcctctaataataagaacgtataaagctataacccttataagattataactttaaaggaggctattaatattctatatta

SEQ ID NO: 32647 - DNA, 96 bp, Fusarium azukicola
  misc_feature: 238
actataacctcttcccctaacctttactataacctcttcccctaacctttactataacctcttcccctaacctttactataacctcttctcctaac

SEQ ID NO: 32648 - DNA, 96 bp, Fusarium azukicola
  misc_feature: 238
cctttctctcctaatacttactatactcctccttaacttaacttctctccttaaacttttttactactttctaaccctttcttctcttctttaacc

SEQ ID NO: 32649 - DNA, 96 bp, Fusarium azukicola
  misc_feature: 238
gaagagagtatagggtaaagtaaaagagagaagagagtatagggtaaagtaaaagagagaagagagtatagggtaaagtaaaagagagaagagagg

SEQ ID NO: 32650 - DNA, 96 bp, Fusarium azukicola
  misc_feature: 238
ctctcctaatacttactatactcctccttaacttaacttctctccttaaacttttttattactttctaaccctttcttctcttctttaacctaact

SEQ ID NO: 32651 - DNA, 96 bp, Fusarium azukicola
  misc_feature: 237
ttttcttttccttgtgatattatttttccttgcttatttaaaagaaggacttcttgtttatttataatagaagttatattataaagagaagattga

SEQ ID NO: 32652 - DNA, 96 bp, Fusarium azukicola
  misc_feature: 237
ttctttaccctatactttcttcattattttactttaccctccacttttattctttattttactttaccctatactctcttctctcttttactttac

SEQ ID NO: 32653 - DNA, 96 bp, Fusarium azukicola
  misc_feature: 237
tgcccggcgggtttcttctagctaaagatatagcttataagtaaagagaggagattttcttaagaaagagaggtaaaagagatataagagtaagag

SEQ ID NO: 32654 - DNA, 96 bp, Fusarium azukicola
  misc_feature: 237
tgatggatagaatgcaacgctgaaggttttaggaaccttcctagccaatcggcagttattatactttgatgcattgatgacggcagtcatgaaggg

SEQ ID NO: 32655 - DNA, 96 bp, Fusarium azukicola
  misc_feature: 237
tcctttctctcctaatacttactatactcctccttaacttaacttctctccttaaacttttttactactttctaaccctttcttctcttctttaac

SEQ ID NO: 32656 - DNA, 96 bp, Fusarium azukicola
  misc_feature: 237
tcactccttatcctctcctctcccctctccctctctctcttttcactccttatcctctcctctcccctctccctctctctcttttcactccttctt

SEQ ID NO: 32657 - DNA, 96 bp, Fusarium azukicola
  misc_feature: 237
aagaagtccttcttttaaataagtaaggaaaaataatatcataaggaaaagagaaaaataacctatatataataatagctaaggttatttctaata

SEQ ID NO: 32658 - DNA, 96 bp, Fusarium azukicola
  misc_feature: 237
ccctatactttcttcattattttactttaccctccacttttattctttattttactttaccctatactctcttctctcttttactttaccctatac

SEQ ID NO: 32659 - DNA, 96 bp, Fusarium azukicola
  misc_feature: 237
cttctctccttaaacttttttattactttctaaccctttcttctcttctttaacctaacttacttacttaccttattctccctccttcttctctac

SEQ ID NO: 32660 - DNA, 96 bp, Fusarium azukicola
  misc_feature: 237
ctcctccttaacttaacttctctccttaaacttttttattactttctaaccctttcttctcttctttaacctaacttacttacttaccttattctc

SEQ ID NO: 32661 - DNA, 96 bp, Fusarium azukicola
  misc_feature: 237
atacgccaacgccggttgaggaggcagctgaaccatcgaccccttgggcttcaaggaccccaaagactgtgcttgaggcccaatctcagtctgaat

SEQ ID NO: 32662 - DNA, 96 bp, Fusarium azukicola
  misc_feature: 237
agtgaggacctatatcaagttaaaaactgcgaaaactgcaaactaggaaaattaactaaaaataatataaataaaaaacctagtaataaggaatat

SEQ ID NO: 32663 - DNA, 96 bp, Fusarium azukicola
  misc_feature: 237
atagcctaaaataaagccctagattatagtataaccttctctctaaattattaaataatttaggcttctatactatcccttttaataaagctctct

SEQ ID NO: 32664 - DNA, 96 bp, Fusarium azukicola
  misc_feature: 236
gtattattctaattggttaaaaaggttcctacagacctttatgactgccgtcatctatgcatcaaagtataataactgccgattggctaaaaaaaa

SEQ ID NO: 32665 - DNA, 96 bp, Fusarium azukicola
  misc_feature: 236
tttctttaccctatactttcttcattattttactttaccctccacttttattctttattttactttaccctatactctcttctctcttttacttta

SEQ ID NO: 32666 - DNA, 96 bp, Fusarium azukicola
  misc_feature: 236
tgaggtagagagaaagtgtagttaagaagaggaggggagaagagaaagaaagtagaggaagaggggagggaaaaaggggagaagagatagaggggg

SEQ ID NO: 32667 - DNA, 96 bp, Fusarium azukicola
  misc_feature: 236
tctctttcttagttatattctcttactcttatatctcttttacctctctttcttaagaaaatctcctctctttacttataagctatatctttagct

SEQ ID NO: 32668 - DNA, 96 bp, Fusarium azukicola
  misc_feature: 236
atatacctaaaaatagagtaaaaattctataatataatatatggtttatagggatatatcactatagttggtaatataatatagaacattaacata

SEQ ID NO: 32669 - DNA, 96 bp, Fusarium azukicola
  misc_feature: 236
agaggtttaatttttcctctaataataagaacgtataaagctataacccttataagattataactttaaaggaggctattaatattctatattata

SEQ ID NO: 32670 - DNA, 96 bp, Fusarium azukicola
  misc_feature: 236
taataagtctcactttctaattttagctattttaagcttaatttcgacttttatagcttttttaaaaaataccttttaaggtgaaaatataagtgt

SEQ ID NO: 32671 - DNA, 96 bp, Fusarium azukicola
  misc_feature: 236
taagggtattattctaattggttaaaaaggttcctacagacctttatgactgccgtcatctatgcatcaaagtataataactgccgattggctaag

SEQ ID NO: 32672 - DNA, 96 bp, Fusarium azukicola
  misc_feature: 236
gttaatgttctatattatattactaactatagtgatatatccctataaaccatatattatattatagaatttttactctatttttaggtatattta

SEQ ID NO: 32673 - DNA, 96 bp, Fusarium azukicola
  misc_feature: 236
cctttattataacctcttcccctaacctttactataacctcttcccctaacctttactataacctcttcccctaacctttactataacctcttccc

SEQ ID NO: 32674 - DNA, 96 bp, Fusarium azukicola
  misc_feature: 236
ctccttaacttaacttctctccttaaacttttttattactttctaaccctttcttctcttctttaacctaacttacttacttaccttattctccct

SEQ ID NO: 32675 - DNA, 96 bp, Fusarium azukicola
  misc_feature: 236
aaaaaacctatttacactatgtaattaactatttcactataaacagaattttttaaaaatctaaaaaaatcatttttagactttattaagagttag

SEQ ID NO: 32676 - DNA, 96 bp, Fusarium azukicola
  misc_feature: 236
cctatatcaagttaaaaactgcgaaaactgcaaactaggaaaattaactaaaaataatataaataaaaaacctagtaataaggaatataagttcct

SEQ ID NO: 32677 - DNA, 96 bp, Fusarium azukicola
  misc_feature: 236
cagtcaaaaagactagttttttcctttatatttaagataggaagatctaagttatctcttagtctatagttattcttattagaaataaccttagct

SEQ ID NO: 32678 - DNA, 96 bp, Fusarium azukicola
  misc_feature: 235
cctctctttaaatatactagtgaggacctatattaagttaaaaactgcgaaaactataaactaggaaaattaactaaaaataatataaataaaaaa

SEQ ID NO: 32679 - DNA, 96 bp, Fusarium azukicola
  misc_feature: 235
tggaaaactcaggaagccaataaggtgcataagacttctaagaaaaaggaatctaaacctaattctaagaaggaagaaagagaaaagaaacaagaa

SEQ ID NO: 32680 - DNA, 96 bp, Fusarium azukicola
  misc_feature: 235
ttctctcctaatacttactatactcctccttaacttaacttctctccttaaacttttttattactttctaaccctttcttctcttctttaacctaa

SEQ ID NO: 32681 - DNA, 96 bp, Fusarium azukicola
  misc_feature: 235
ttctctcctaatacttactatactcctccttaacttaacttctctccttaaacttttttactactttctaaccctttcttctcttctttaacctaa

SEQ ID NO: 32682 - DNA, 96 bp, Fusarium azukicola
  misc_feature: 235
tctttcttagctttacctctctctcttagctatatctctttttcctagttatacctctctttcttagttatattctcttactcttatatctctttt

SEQ ID NO: 32683 - DNA, 96 bp, Fusarium azukicola
  misc_feature: 235
tcttattttattaggattattttctatttcttttctaaattccttgaattttataatagcttctgacttattccttaatagataggctttcagata

SEQ ID NO: 32684 - DNA, 96 bp, Fusarium azukicola
  misc_feature: 235
aagggtattattctaattggttaaaaaggttcctacagacctttatgactgccgtcatctatgcatcaaagtataataactgccgattggctaaga

SEQ ID NO: 32685 - DNA, 96 bp, Fusarium azukicola
  misc_feature: 235
tcatataaagagttagatttatagaaatactttttttaagtttctagctattttatagcagtttttattaaggttagaaatataaggttttagtgc

SEQ ID NO: 32686 - DNA, 96 bp, Fusarium azukicola
  misc_feature: 235
aagctataacccttataagattataactttaaaggaggctattaatgttctatattatattactaactatagtgatatatccctataaaccatata

SEQ ID NO: 32687 - DNA, 96 bp, Fusarium azukicola
  misc_feature: 235
cttattactaggttttttatttatattatttttagttaattttcctagtttgcagttttcgcagtttttaacttgatataggtcctcactagtata

SEQ ID NO: 32688 - DNA, 96 bp, Fusarium azukicola
  misc_feature: 235
agctaaggttatttctaataagaataactatagactaagagataacttagatcttcctattttaaatataaaggaaaaaactagtctttttaacta

SEQ ID NO: 32689 - DNA, 96 bp, Fusarium azukicola
  misc_feature: 235
tagaggtttaatttttcctctaataataagaacgtataaagctataacccttataagattataactttaaaggaggctattaatattctatattat

SEQ ID NO: 32690 - DNA, 96 bp, Fusarium azukicola
  misc_feature: 235
ctcctccctcctcttcactccctttactcctcttaacttctctttctcttccctcttcttccctcctctccctctctcctttcccctcctctctac

SEQ ID NO: 32691 - DNA, 96 bp, Fusarium azukicola
  misc_feature: 235
ggatttcacttaattaacctaatctaaaattttaagttatttttaccttaatttgaatttttaaagaattcttttctatttagtgtaaactagtac

SEQ ID NO: 32692 - DNA, 96 bp, Fusarium azukicola
  misc_feature: 235
ctctctttcttagttatattctcttactcttatatctcttttacctctctttcttaagaaaatctcctctctttacttataagctatatctttagc

SEQ ID NO: 32693 - DNA, 96 bp, Fusarium azukicola
  misc_feature: 235
aaatcccctctagaagttagagataatatttccttagatattaaggaattagataaaataaaaacctttaggtctatagtttattataagaaccat

SEQ ID NO: 32694 - DNA, 96 bp, Fusarium azukicola
  misc_feature: 234
aaagaagaaaactgccttaaaatgcagttattgcaaactgctaggtcataaagacccagattgctattttttgcaccctaataaggctccaaaaaa

SEQ ID NO: 32695 - DNA, 96 bp, Fusarium azukicola
  misc_feature: 234
agaaagtagtaaaaaagtttaaggagagaagttaagttaaggaggagtatagtaagtattaggagagaaaggagtatagagtaagttaaggtaaaa

SEQ ID NO: 32696 - DNA, 96 bp, Fusarium azukicola
  misc_feature: 234
ttattttattaggattattttctatttcttttctaaattccttgaattttataatagcttctgacttattccttaatagataggctttcagatatc

SEQ ID NO: 32697 - DNA, 96 bp, Fusarium azukicola
  misc_feature: 234
ttatctaagaaaactgattttattcttattttattaggattattttctatttcttttctaaattccttgaattttataatagcttctgacttattc

SEQ ID NO: 32698 - DNA, 96 bp, Fusarium azukicola
  misc_feature: 234
ttaaaaactgcgaaaactgcaaactaggaaaattaactaaaaataatataaataaaaaacctagtaataaggaatataagttcctagataaaatag

SEQ ID NO: 32699 - DNA, 96 bp, Fusarium azukicola
  misc_feature: 234
tctcctccctcctcttcactccctttactcctcttaacttctctttctcttccctcttcttccctcctctccctctctcctttcccctcctctcta

SEQ ID NO: 32700 - DNA, 96 bp, Fusarium azukicola
  misc_feature: 234
tcctccttaacttaacttctctccttaaacttttttattactttctaaccctttcttctcttctttaacctaacttacttacttaccttattctcc

SEQ ID NO: 32701 - DNA, 96 bp, Fusarium azukicola
  misc_feature: 234
ataaatatataaataaaaatctctctttaagttttaatagggctatacctcctattttaactaataatctagcagctaagcaattagctgaaaata

SEQ ID NO: 32702 - DNA, 96 bp, Fusarium azukicola
  misc_feature: 234
aaaataagaataaaatcagttttcttagataatataaaggaatatatatataagctaagaccctattatataaagaatggaataaaatataatata

SEQ ID NO: 32703 - DNA, 96 bp, Fusarium azukicola
  misc_feature: 234
taatagaggtttaatttttcctctaataataagaacgtataaagctataacccttataagattataactttaaaggaggctattaatattctatat

SEQ ID NO: 32704 - DNA, 96 bp, Fusarium azukicola
  misc_feature: 234
taaccttttctaatatagtcctatttatcctttctataaagctattagcttatttattatgaggcggacttatattatattttattccattcttta

SEQ ID NO: 32705 - DNA, 96 bp, Fusarium azukicola
  misc_feature: 233
ctaaaattaactagaaattcttttctacatacaatatgcctagtagcacctgtatcatatataaaattagttatattatttttattagtagaaaaa

SEQ ID NO: 32706 - DNA, 96 bp, Fusarium azukicola
  misc_feature: 233
gaaagtagtaaaaaagtttaaggagagaagttaagttaaggaggagtatagtaagtattaggagagaaaggagtatagagtaagttaaggtaaaaa

SEQ ID NO: 32707 - DNA, 96 bp, Fusarium azukicola
  misc_feature: 233
tgccagtcaaaaagactagttttttcctttatatttaagataggaagatctaagttatctcttagtctatagttattcttattagaaataacctta

SEQ ID NO: 32708 - DNA, 96 bp, Fusarium azukicola
  misc_feature: 233
tccttcttttaaataagtaaggaaaaataatattataaggaaaagagaaaaataacctatatataataatagctaaggttatttctaataagaata

SEQ ID NO: 32709 - DNA, 96 bp, Fusarium azukicola
  misc_feature: 233
taatttcaaccaattaaccctaacccttaactctactactacccctaaccctaatttcaaccaattaaccctaacccttaacgtaactactacccc

SEQ ID NO: 32710 - DNA, 96 bp, Fusarium azukicola
  misc_feature: 233
cttttatctatctatcttctataagtctctcttagaagctagatattatctctttattacttttcttcctagttatctaggaaatcaactatttac

SEQ ID NO: 32711 - DNA, 96 bp, Fusarium azukicola
  misc_feature: 233
gggaaaagtattaaaatataataaaaaccctttataaaggaaataagttatattagggatagattctcttttattctcttaaatagtataggttat

SEQ ID NO: 32712 - DNA, 96 bp, Fusarium azukicola
  misc_feature: 233
ccttaacttaacttctctccttaaacttttttattactttctaaccctttcttctcttctttaacctaacttacttacttaccttattctccctcc

SEQ ID NO: 32713 - DNA, 96 bp, Fusarium azukicola
  misc_feature: 233
ctatgtaattaactatttcactataaacagaattttttaaaaatctaaaaaaatcatttttagactttattaagagttagatttatagaaatactc

SEQ ID NO: 32714 - DNA, 96 bp, Fusarium azukicola
  misc_feature: 233
ctcttttcactccttatcctctcctctcccctctccctctctctcttttcactccttatcctctcctctcccctctccctctctctcttttctctc

SEQ ID NO: 32715 - DNA, 96 bp, Fusarium azukicola
  misc_feature: 233
agctataacccttataagattataactttaaaggaggctattaatgttctatattatattactaactatagtgatatatccctataaaccatatat

SEQ ID NO: 32716 - DNA, 96 bp, Fusarium azukicola
  misc_feature: 232
caatcttctctttataatataacttctattataaataaataagaagtccttcttttaaataagtaaggaaaaataatatcataaggaaaagagaaa

SEQ ID NO: 32717 - DNA, 96 bp, Fusarium azukicola
  misc_feature: 232
tttctctcctaatacttactatactcctccttaacttaacttctctccttaaacttttttattactttctaaccctttcttctcttctttaaccta

SEQ ID NO: 32718 - DNA, 96 bp, Fusarium azukicola
  misc_feature: 232
tttatatttagaataggaagatctaagttatctcttagtctatagttattcttattagaaataaccttagctgttattatatataggttatttttt

SEQ ID NO: 32719 - DNA, 96 bp, Fusarium azukicola
  misc_feature: 232
gaaggtttcttattaaaggtcctagtatattattagttatattattttgttgagaaattaaggaattatatacctctaaatcatcacttatatcaa

SEQ ID NO: 32720 - DNA, 96 bp, Fusarium azukicola
  misc_feature: 232
tcgaggtattcagactgagattgggcctcaaggacggtctttggggtctttgagacccaaggggtggtagggctagctacctcctcggcaggcggt

SEQ ID NO: 32721 - DNA, 96 bp, Fusarium azukicola
  misc_feature: 232
taaggaataagtcagaagctattataaaattcaaggaatttagaaaagaaatagaaaataatcctaataaaataagaataaaatcagttttcttag

SEQ ID NO: 32722 - DNA, 96 bp, Fusarium azukicola
  misc_feature: 232
taagctttaaggagtaatcctgaggcttataacctagaatcactttcttctagccttatagatgaatctaagagactagaaaaaatagattctaat

SEQ ID NO: 32723 - DNA, 96 bp, Fusarium azukicola
  misc_feature: 232
ggaaggcaagcaattgatcaaatggatatagatgcgcaggtattagctgaatcgtcgaggagtggtggtcaaggaaggtcggcgcgaccggggggt

SEQ ID NO: 32724 - DNA, 96 bp, Fusarium azukicola
  misc_feature: 232
acctatatcaagttaaaaactgcgaaaactgcaaactaggaaaattaactaaaaataatataaataaaaaacctagtaataaggaatataagttcc

SEQ ID NO: 32725 - DNA, 96 bp, Fusarium azukicola
  misc_feature: 232
ataaatagcttttcttgtttcttttctctttcttccttcttagaattaggtttagattcccttttcttagaagtcttatgcaccttattggctttc

SEQ ID NO: 32726 - DNA, 96 bp, Fusarium azukicola
  misc_feature: 232
ataataagtctcactttctaattttagctattttaagcttaatttcgacttttatagcttttttaaaaaataccttttaaggtgaaaatataagtg

SEQ ID NO: 32727 - DNA, 96 bp, Fusarium azukicola
  misc_feature: 232
acatcacaagcgagtgggccatacaagcgagtgggccaaaaatccctcaatctctcttcttttcaattgatcaattaattctcaaccaccaaagat

SEQ ID NO: 32728 - DNA, 96 bp, Fusarium azukicola
  misc_feature: 232
atcacaagcgagtgggccatacaagcgagtgggccaaaaatccctcaatctctcttcttttcaattgatcaattaattctcaaccaccaaagatgt

SEQ ID NO: 32729 - DNA, 96 bp, Fusarium azukicola
  misc_feature: 232
actctcttcttatacccttatacacttttcttctttattttctttaccctatactttctttattattttactttaccctctacttttattctttat

SEQ ID NO: 32730 - DNA, 96 bp, Fusarium azukicola
  misc_feature: 232
acttctaagccttggaaaaagaagaaaactgccttaaaatgcagttattgcaaactgctaggtcataaagacccagattgctattttttgcaccct

SEQ ID NO: 32731 - DNA, 96 bp, Fusarium azukicola
  misc_feature: 232
agctactataggtagctagatattaagggtattattctaattggttaaaaaggttcctacagaccttcatgactgccgtcattaatgcatcaaagt

SEQ ID NO: 32732 - DNA, 96 bp, Fusarium azukicola
  misc_feature: 231
ttaaggtttattaagtagagaagaaggagggagaataaggtaagtaagtaagttaggttaaagaagagaagaaagggttagaaagtagtaaaaaag

SEQ ID NO: 32733 - DNA, 96 bp, Fusarium azukicola
  misc_feature: 231
tcccttcctcccttcctcccctctctctcttatattcccttctcttccttcctctttctctttacttccctttctctttctcctccctcctcttca

SEQ ID NO: 32734 - DNA, 96 bp, Fusarium azukicola
  misc_feature: 231
ggttttttatttatattatttttagttaattttcctagtttatagttttcgcagtttttaacttaatataggtcctcactagtatatttaaagaga

SEQ ID NO: 32735 - DNA, 96 bp, Fusarium azukicola
  misc_feature: 231
ggaataagtcagaagctattataaaattcaaggaatttagaaaagaaatagaaaataatcctaataaaataagaataaaatcagttttcttagata

SEQ ID NO: 32736 - DNA, 96 bp, Fusarium azukicola
  misc_feature: 231
taataagaacgtataaagctataacccttataagattataactttaaaggaggctattaatgttctatattatattactaactatagtgatatatc

SEQ ID NO: 32737 - DNA, 96 bp, Fusarium azukicola
  misc_feature: 231
cctccttaacttaacttctctccttaaacttttttattactttctaaccctttcttctcttctttaacctaacttacttacttaccttattctccc

SEQ ID NO: 32738 - DNA, 96 bp, Fusarium azukicola
  misc_feature: 231
cttataaatggcttagttatagcaaaaaccggttttgatggatagaatgcaacgctgaaggttttaggaaccttcctagccaatcggcaggtattt

SEQ ID NO: 32739 - DNA, 96 bp, Fusarium azukicola
  misc_feature: 231
ctgtatcatatataaaattagttatattatttttattagtagaaaaatcaggtttatttaccttatttaaatatcctagttgtttctttatatagg

SEQ ID NO: 32740 - DNA, 96 bp, Fusarium azukicola
  misc_feature: 231
agaatttttactctatttttaggtatatttacctaacctatagctactataggtagctagatattaagggtattattctaattggttaaaaagggt

SEQ ID NO: 32741 - DNA, 96 bp, Fusarium azukicola
  misc_feature: 230
ttctagaatccctacctataataaatatatatactttattaccttcctagatagggctactagatatctaaaagtctatctattaaggaataagtt

SEQ ID NO: 32742 - DNA, 96 bp, Fusarium azukicola
  misc_feature: 230
ttagaaagtagtaaaaaagtttaaggagagaagttaagttaaggaggagtatagtaagtattaggagagaaaggagtatagagtaagttaaggtaa

SEQ ID NO: 32743 - DNA, 96 bp, Fusarium azukicola
  misc_feature: 230
tctcttcttatacccttatacacttttcttctttattttctttaccctatactttctttattattttactttaccctctacttttattctttattt

SEQ ID NO: 32744 - DNA, 96 bp, Fusarium azukicola
  misc_feature: 230
aaggaataagtcagaagctattataaaattcaaggaatttagaaaagaaatagaaaataatcctaataaaataagaataaaatcagttttcttaga

SEQ ID NO: 32745 - DNA, 96 bp, Fusarium azukicola
  misc_feature: 230
tcgatctggaatacttctagggcttcttaaggctatttttgcctccctttatctcttatctcttatttcttatttctttatctcttatctcttatc

SEQ ID NO: 32746 - DNA, 96 bp, Fusarium azukicola
  misc_feature: 230
tactaactatagtgatatatccctataaactatatattatattatagaatttttactctatttttaggtatatttacctaacctatagctactata

SEQ ID NO: 32747 - DNA, 96 bp, Fusarium azukicola
  misc_feature: 230
tataggatttcacttaattaacctaatctaaaattttaagttatttttaccttaatttgaatttttaaagaattcttttctatttagtgtaaacta

SEQ ID NO: 32748 - DNA, 96 bp, Fusarium azukicola
  misc_feature: 230
atattctatattatattactaactatagtgatatatccctataaactatatattatattatagaatttttactctatttttaggtatatttaccta

SEQ ID NO: 32749 - DNA, 96 bp, Fusarium azukicola
  misc_feature: 230
ctttttcctagttatacctctctttcttagttatattctcttactcttatatctcttttacctctctttcttaagaaaatctcctctctttactta

SEQ ID NO: 32750 - DNA, 96 bp, Fusarium azukicola
  misc_feature: 230
cataataaataagctaatggctttatagaaaggataaataggactatattagaaaaggttagagctttattatttacttctaacctacctaaatac

SEQ ID NO: 32751 - DNA, 96 bp, Fusarium azukicola
  misc_feature: 230
gggtcggtagagaggaggggaaaggagagagggagaggagggaagaagagggaagagaaagagaagttaagaggagtaaagggagtgaagaggagg

SEQ ID NO: 32752 - DNA, 96 bp, Fusarium azukicola
  misc_feature: 230
cggaggtctcttcctaagggtttatacttaaaagaagattatacttcttttttaagtcttttctaagactttatacctccttaagtcttctttaag

SEQ ID NO: 32753 - DNA, 96 bp, Fusarium azukicola
  misc_feature: 230
ataagattataactttaaaggaggctattaatgttctatattatattactaactatagtgatatatccctataaaccatatattatattatagaat

SEQ ID NO: 32754 - DNA, 96 bp, Fusarium azukicola
  misc_feature: 230
aataatagaggtttaatttttcctctaataataagaacgtataaagctataacccttataagattataactttaaaggaggctattaatattctat

SEQ ID NO: 32755 - DNA, 96 bp, Fusarium azukicola
  misc_feature: 230
aacttctctccttaaacttttttattactttctaaccctttcttctcttctttaacctaacttacttacttaccttattctccctccttcttctct

SEQ ID NO: 32756 - DNA, 96 bp, Fusarium azukicola
  misc_feature: 229
tattttctttaccctatactttcttcattattttactttaccctccacttttattctttattttactttaccctatactctcttctctcttttact

SEQ ID NO: 32757 - DNA, 96 bp, Fusarium azukicola
  misc_feature: 229
atggtttatggtgtttttatcgcgataactatagagggggttaaaaaaagtgcggcgcttacatgactgcggcgcttgcttatcaagtacgttata

SEQ ID NO: 32758 - DNA, 96 bp, Fusarium azukicola
  misc_feature: 229
aattcctctatttcagctgtcatagatagatgccaattataagataaagcacaacttatggcttctttatagttattaggttctaaaggaagggta

SEQ ID NO: 32759 - DNA, 96 bp, Fusarium azukicola
  misc_feature: 229
gacttctaagccttggaaaaagaagaaaactgccttaaaatgcagttattgcaaactgctaggtcataaagacccagattgctattttttgcaccc

SEQ ID NO: 32760 - DNA, 96 bp, Fusarium azukicola
  misc_feature: 229
ctctttctcttccctcttcttccctcctctccctctctcctttcccctcctctctaccgaccctaaactaactccctatccttcctcttttttccc

SEQ ID NO: 32761 - DNA, 96 bp, Fusarium azukicola
  misc_feature: 229
ataaaagtgggtcacaataaagagtctgattggatcagataaaagtgggatttagttattgatgattgaattgactgaagagttgattcttattgt

SEQ ID NO: 32762 - DNA, 96 bp, Fusarium azukicola
  misc_feature: 229
aatataagtccgcctcataataaataagctaatagctttatagaaaggataaataggactatattagaaaaggttagagctttattatttacttct

SEQ ID NO: 32763 - DNA, 96 bp, Fusarium azukicola
  misc_feature: 228
tttctctcctaatacttactatactcctccttaacttaacttctctccttaaacttttttactactttctaaccctttcttctcttctttaaccta

SEQ ID NO: 32764 - DNA, 96 bp, Fusarium azukicola
  misc_feature: 228
aaataagaataaaatcagttttcttagataatataaaggaatatatatataagctaagaccctattatataaagaatggaataaaatataatataa

SEQ ID NO: 32765 - DNA, 96 bp, Fusarium azukicola
  misc_feature: 228
ttaacttaacttctctccttaaacttttttattactttctaaccctttcttctcttctttaacctaacttacttacttaccttattctccctcctt

SEQ ID NO: 32766 - DNA, 96 bp, Fusarium azukicola
  misc_feature: 228
tcttttctagctatatctctctttcttagctttacctctctctcttagctatatctctttttcctagttatacctctctttcttagttatattctc

SEQ ID NO: 32767 - DNA, 96 bp, Fusarium azukicola
  misc_feature: 228
atatatagctaaatagttaaaatcgttttttttaagtttctagctattttatagcgatttttagaaacttagggtttagctgtttttagttatata

SEQ ID NO: 32768 - DNA, 96 bp, Fusarium azukicola
  misc_feature: 228
taattcctctatttcagctgtcatagatagatgccaattataagataaagcacaacttatggcttctttatagttattaggttctaaaggaagggt

SEQ ID NO: 32769 - DNA, 96 bp, Fusarium azukicola
  misc_feature: 228
taaggaaggttaagaaaggagagaagtaaggaaggttaagaaaggagagaagtaaggaaggttaagaaaggagagaagtaaggaagggtaagaaag

SEQ ID NO: 32770 - DNA, 96 bp, Fusarium azukicola
  misc_feature: 228
gacctatatcaagttaaaaactgcgaaaactgcaaactaggaaaattaactaaaaataatataaataaaaaacctagtaataaggaatataagttc

SEQ ID NO: 32771 - DNA, 96 bp, Fusarium azukicola
  misc_feature: 228
gaaggaaataagttatattagggatagattctcttttattctctcaaatagtataggttgtaagcttttagtaaagaaatcagctatattatcttt

SEQ ID NO: 32772 - DNA, 96 bp, Fusarium azukicola
  misc_feature: 228
atgagatatatttttctaagacttctaagccttggaaaaagaagaaaactgccttaaaatgcagttattgcaaactgctaggtcataaagacccag

SEQ ID NO: 32773 - DNA, 96 bp, Fusarium azukicola
  misc_feature: 228
ctctcttcttatacccttatacacttttcttctttattttctttaccctatactttctttattattttactttaccctctacttttattctttatt

SEQ ID NO: 32774 - DNA, 96 bp, Fusarium azukicola
  misc_feature: 228
aaaagtgggtcacaataaagagtctgattggatcagataaaagtgggatttagttattgatgattgaattgactgaagagttgattcttattgtag

SEQ ID NO: 32775 - DNA, 96 bp, Fusarium azukicola
  misc_feature: 228
ataataagaacgtataaagctataacccttataagattataactttaaaggaggctattaatgttctatattatattactaactatagtgatatat

SEQ ID NO: 32776 - DNA, 96 bp, Fusarium azukicola
  misc_feature: 228
atagctaaatagttaaaatcgttttttttaagtttctagctattttatagcgatttttagaaacttagggtttagctgtttttagttatatagtat

SEQ ID NO: 32777 - DNA, 96 bp, Fusarium azukicola
  misc_feature: 227
tcgctataaagggatttttttaaaaatctaaaaaaattatttttaagttttatatttagttagatctataagattactttttttaagtttctagct

SEQ ID NO: 32778 - DNA, 96 bp, Fusarium azukicola
  misc_feature: 227
aggataaataggactatattagaaaaggttagagctttattatttacttctaacctacctaaatacctttggggagaggctgtggaagcagccgga

SEQ ID NO: 32779 - DNA, 96 bp, Fusarium azukicola
  misc_feature: 227
gtgaggacctatatcaagttaaaaactgcgaaaactgcaaactaggaaaattaactaaaaataatataaataaaaaacctagtaataaggaatata

SEQ ID NO: 32780 - DNA, 96 bp, Fusarium azukicola
  misc_feature: 227
tatactagtgaggacctatattaagttaaaaactgcgaaaactataaactaggaaaattaactaaaaataatataaataaaaaacctagtaataag

SEQ ID NO: 32781 - DNA, 96 bp, Fusarium azukicola
  misc_feature: 227
tactctcttcttatacccttatacacttttcttctttattttctttaccctatactttctttattattttactttaccctctacttttattcttta

SEQ ID NO: 32782 - DNA, 96 bp, Fusarium azukicola
  misc_feature: 227
taaaattaactagaaattcttttctacatacaatatgcctagtagcacctgtatcatatataaaattagttatattatttttattagtagaaaaat

SEQ ID NO: 32783 - DNA, 96 bp, Fusarium azukicola
  misc_feature: 227
cttataagattataactttaaaggaggctattaatgttctatattatattactaactatagtgatatatccctataaaccatatattatattatag

SEQ ID NO: 32784 - DNA, 96 bp, Fusarium azukicola
  misc_feature: 227
ctcttcttatacccttatacacttttcttctttattttctttaccctatactttctttattattttactttaccctctacttttattctttatttt

SEQ ID NO: 32785 - DNA, 96 bp, Fusarium azukicola
  misc_feature: 227
ctatataaatagctatatctctataaaggggattttttaaaaatctagaaaaaatattttctaattatataaagagttagatttatagaaatactt

SEQ ID NO: 32786 - DNA, 96 bp, Fusarium azukicola
  misc_feature: 227
cgaggtattcagactgagattgggcctcaaggacggtctttggggtctttgagacccaaggggtggtagggctagctacctcctcggcaggcggtg

SEQ ID NO: 32787 - DNA, 96 bp, Fusarium azukicola
  misc_feature: 227
atactctcttcttatacccttatacacttttcttctttattttctttaccctatactttctttattattttactttaccctctacttttattcttt

SEQ ID NO: 32788 - DNA, 96 bp, Fusarium azukicola
  misc_feature: 227
aattagttttaattaattagatagtttatagtatttttatagtgatttatatattaaaggttaagaaaagtatttaattcgcttatctatttaact

SEQ ID NO: 32789 - DNA, 96 bp, Fusarium azukicola
  misc_feature: 226
tttgcagttttcgcagtttttaacttgatataggtcctcactagtatatttaaagagaggatcttttatttttatatatttaattagacttcttaa

SEQ ID NO: 32790 - DNA, 96 bp, Fusarium azukicola
  misc_feature: 226
taataaaataagaataaaatcagttttcttagataatataaaggaatatatatataagctaagaccctattatataaagaatggaataaaatataa

SEQ ID NO: 32791 - DNA, 96 bp, Fusarium azukicola
  misc_feature: 226
ctataacttctcaattactctacctcctctctctctctttcttctttttttttctccccctttttttttttccctcttctttcttccctttcctta

SEQ ID NO: 32792 - DNA, 96 bp, Fusarium azukicola
  misc_feature: 226
taagagataagagataagagataagagataaagaaataagaaataagagataagagataaagggaggcaaaaatagccttaagaagccctagaagt

SEQ ID NO: 32793 - DNA, 96 bp, Fusarium azukicola
  misc_feature: 226
gagaagaaggagggagaataaggtaagtaagtaagttaggttaaagaagagaagaaagggttagaaagtaataaaaaagtttaaggagagaagtta

SEQ ID NO: 32794 - DNA, 96 bp, Fusarium azukicola
  misc_feature: 226
taaaggaatatatatataagctaagaccctattatataaagaatggaataaaatataatataagtccgccttataataaataagctaatagcttta

SEQ ID NO: 32795 - DNA, 96 bp, Fusarium azukicola
  misc_feature: 226
ctaaggttatttctaataagaataactatagactaagagataacttagatcttcctattctaaatataaaggaaaaaactagtctttttgactggc

SEQ ID NO: 32796 - DNA, 96 bp, Fusarium azukicola
  misc_feature: 226
ctaaccttttctaatatagtcctatttatcctttctataaagctattagcttatttattatgaggcggacttatattatattttattccattcttt

SEQ ID NO: 32797 - DNA, 96 bp, Fusarium azukicola
  misc_feature: 225
tcaatcttctctttataatataacttctattataaataaataagaagtccttcttttaaataagtaaggaaaaataatatcataaggaaaagagaa

SEQ ID NO: 32798 - DNA, 96 bp, Fusarium azukicola
  misc_feature: 225
tgttaatgttctatattatattactaactatagtgatatatccctataaaccatatattatattatagaatttttactctatttttaggtatattt

SEQ ID NO: 32799 - DNA, 96 bp, Fusarium azukicola
  misc_feature: 225
taatattctatattatattaccaactatagtgatatatccctataaaccatatattatattatagaatttttactctatttttaggtatatttacc

SEQ ID NO: 32800 - DNA, 96 bp, Fusarium azukicola
  misc_feature: 225
taagagtaagagaatataactaagaaagagaggtataactaggaaaaagagatatagctaagagagagaggtaaagctaagaaagagagatatagc

SEQ ID NO: 32801 - DNA, 96 bp, Fusarium azukicola
  misc_feature: 225
agacttctaagccttggaaaaagaagaaaactgccttaaaatgcagttattgcaaactgctaggtcataaagacccagattgctattttttgcacc

SEQ ID NO: 32802 - DNA, 96 bp, Fusarium azukicola
  misc_feature: 225
gctttcagatatctagtagccctatctaggaaggtaataaagtatatatatttattataggtagggattctagaaggaccccatatatcagtagct

SEQ ID NO: 32803 - DNA, 96 bp, Fusarium azukicola
  misc_feature: 225
atactagtgaggacctatattaagttaaaaactgcgaaaactataaactaggaaaattaactaaaaataatataaataaaaaacctagtaataagg

SEQ ID NO: 32804 - DNA, 96 bp, Fusarium azukicola
  misc_feature: 225
ataagtctcactttctaattttagctattttaagcttaatttcgacttttatagcttttttaaaaaataccttttaaggtgaaaatataagtgtct

SEQ ID NO: 32805 - DNA, 96 bp, Fusarium azukicola
  misc_feature: 224
ttatagcaaaaaccggttttgatggatagaatgcaacgctgaaggttttaggaaccttcctagccaatcggcaggtattatactttgatgcattga

SEQ ID NO: 32806 - DNA, 96 bp, Fusarium azukicola
  misc_feature: 224
ttagttagatctataagattactttttttaagtttctagctattttatagcagtttttagaaacttaggttttagcgatttttagttatatagtat

SEQ ID NO: 32807 - DNA, 96 bp, Fusarium azukicola
  misc_feature: 224
tattctatattatattactaactatagtgatatatccctataaactatatattatattatagaatttttactctatttttaggtatatttacctaa

SEQ ID NO: 32808 - DNA, 96 bp, Fusarium azukicola
  misc_feature: 224
ttaaggaaagggaagaaagaagagggaaaaaaaaaaagggggagaaaaaaaaagaagaaagagagagagaggaggtagagtaattgagaagttata

SEQ ID NO: 32809 - DNA, 96 bp, Fusarium azukicola
  misc_feature: 224
tggaagctttcttagttaaagaaaagctttctagtactatagaagaagattccacttcttctaagagtaaagaagcattatctctcataagactta

SEQ ID NO: 32810 - DNA, 96 bp, Fusarium azukicola
  misc_feature: 224
tcttccctcttcttccctcctctccctctctcctttcccctcctctctaccgaccctaaactaactccctatccttcctcttttttcccccaccct

SEQ ID NO: 32811 - DNA, 96 bp, Fusarium azukicola
  misc_feature: 224
tactagtgaggacctatattaagttaaaaactgcgaaaactataaactaggaaaattaactaaaaataatataaataaaaaacctagtaataagga

SEQ ID NO: 32812 - DNA, 96 bp, Fusarium azukicola
  misc_feature: 224
taaagctataacccttataagattataactttaaaggaggctattaatgttctatattatattactaactatagtgatatatccctataaaccata

SEQ ID NO: 32813 - DNA, 96 bp, Fusarium azukicola
  misc_feature: 224
tatatatagctaaatagttaaaatcgttttttttaagtttctagctattttatagcgatttttagaaacttagggtttagctgtttttagttatat

SEQ ID NO: 32814 - DNA, 96 bp, Fusarium azukicola
  misc_feature: 224
tatatatagctaaatagttaaaatcgttttttttaagtttctagctattttatagcgatttttagaaacttagggtttagctgtttttagttatac

SEQ ID NO: 32815 - DNA, 96 bp, Fusarium azukicola
  misc_feature: 224
gaacgtataaagctataacccttataagattataactttaaaggaggctattaatgttctatattatattactaactatagtgatatatccctata

SEQ ID NO: 32816 - DNA, 96 bp, Fusarium azukicola
  misc_feature: 224
cttctaagccttggaaaaagaagaaaactgccttaaaatgcagttattgcaaactgctaggtcataaagacccagattgctattttttgcacccta

SEQ ID NO: 32817 - DNA, 96 bp, Fusarium azukicola
  misc_feature: 224
taactgttaatgttctatattatattaccaactatagtgatatatccctataaaccacatattatattatagaatttttactctatttttaggtat

SEQ ID NO: 32818 - DNA, 96 bp, Fusarium azukicola
  misc_feature: 224
aaggataaataggactatattagaaaaggttagagctttattatttacttctaacctacctaaatacctttggggagaggctgtggaagcagccgg

SEQ ID NO: 32819 - DNA, 96 bp, Fusarium azukicola
  misc_feature: 224
aaagctataacccttataagattataactttaaaggaggctattaatgttctatattatattactaactatagtgatatatccctataaaccatat

SEQ ID NO: 32820 - DNA, 96 bp, Fusarium azukicola
  misc_feature: 224
atatagctaaatagttaaaatcgttttttttaagtttctagctattttatagcgatttttagaaacttagggtttagctgtttttagttatatagt

SEQ ID NO: 32821 - DNA, 96 bp, Fusarium azukicola
  misc_feature: 224
atatagctaaatagttaaaatcgttttttttaagtttctagctattttatagcgatttttagaaacttagggtttagctgtttttagttatacagt

SEQ ID NO: 32822 - DNA, 96 bp, Fusarium azukicola
  misc_feature: 224
aggtagagagaaagtgtagttaagaagaggaggggagaagagaaagaaagtagaggaagaggggagggaaaaaggggagaagagatagagggggtt

SEQ ID NO: 32823 - DNA, 96 bp, Fusarium azukicola
  misc_feature: 224
acttatattccttattactaggttttttatttatattatttttagttaattttcctagtttgcagttttcgcagtttttaacttgatataggtcct

SEQ ID NO: 32824 - DNA, 96 bp, Fusarium azukicola
  misc_feature: 223
tttatctatctatcttctataagtctctcttagaagctagatattatctctttattacttttcttcctagttatctaggaaatcaactatttacaa

SEQ ID NO: 32825 - DNA, 96 bp, Fusarium azukicola
  misc_feature: 223
agtccttcttttaaataagtaaggaaaaataatatcataaggaaaagagaaaaataacctatatataataatagctaaggttatttctaataagaa

SEQ ID NO: 32826 - DNA, 96 bp, Fusarium azukicola
  misc_feature: 223
ttataagattataactttaaaggaggctattaatgttctatattatattactaactatagtgatatatccctataaaccatatattatattataga

SEQ ID NO: 32827 - DNA, 96 bp, Fusarium azukicola
  misc_feature: 223
tatttatcctttctataaagctattagcttatttattatgaggcggacttatattatattttattccattctttatataatagggtcttagcttat

SEQ ID NO: 32828 - DNA, 96 bp, Fusarium azukicola
  misc_feature: 223
tatatagctaaatagttaaaatcgttttttttaagtttctagctattttatagcgatttttagaaacttagggtttagctgtttttagttatatag

SEQ ID NO: 32829 - DNA, 96 bp, Fusarium azukicola
  misc_feature: 223
tatagctaaatagttaaaatcgttttttttaagtttctagctattttatagcgatttttagaaacttagggtttagctgtttttagttatacagta

SEQ ID NO: 32830 - DNA, 96 bp, Fusarium azukicola
  misc_feature: 223
ataatagaggtttaatttttcctctaataataagaacgtataaagctataacccttataagattataactttaaaggaggctattaatattctata

SEQ ID NO: 32831 - DNA, 96 bp, Fusarium azukicola
  misc_feature: 223
tagcctaaaataaagccctagattatagtataaccttctctctaaattattaaataatttaggcttctatactatcccttttaataaagctctctt

SEQ ID NO: 32832 - DNA, 96 bp, Fusarium azukicola
  misc_feature: 223
taagctaagaccctattatataaagaatggaataaaatataatataagtccgcctcataataaataagctaatagctttatagaaaggataaatag

SEQ ID NO: 32833 - DNA, 96 bp, Fusarium azukicola
  misc_feature: 223
ggctttcagatatctagtagccctatctaggaaggtaataaagtatatatatttattataggtagggattctagaaggaccccatatatcagtagc

SEQ ID NO: 32834 - DNA, 96 bp, Fusarium azukicola
  misc_feature: 223
aataataatagaggtttaatttttcctctaataataagaacgtataaagctataacccttataagattataactttaaaggaggctattaatattc

SEQ ID NO: 32835 - DNA, 96 bp, Fusarium azukicola
  misc_feature: 223
atggaagctttcttagttaaagaaaagctttctagtactatagaagaagattccacttcttctaagagtaaagaagcattatctctcataagactt

SEQ ID NO: 32836 - DNA, 96 bp, Fusarium azukicola
  misc_feature: 223
atagctaaatagttaaaatcgttttttttaagtttctagctattttatagcgatttttagaaacttagggtttagctgtttttagttatacagtat

SEQ ID NO: 32837 - DNA, 96 bp, Fusarium azukicola
  misc_feature: 222
gtattattctaattggttaaaaaggttcctacagaccttcatgactgccgtcatcaatgcatcaaagtataataactgccgattggctaaaaaaaa

SEQ ID NO: 32838 - DNA, 96 bp, Fusarium azukicola
  misc_feature: 222
ttaccctatactttcttcattattttactttaccctccacttttattctttattttactttaccctatactctcttctctcttttactttacccta

SEQ ID NO: 32839 - DNA, 96 bp, Fusarium azukicola
  misc_feature: 222
tccttcttttaaataagtaaggaaaaataatatcataaggaaaagagaaaaataacctatatataataatagctaaggttatttctaataagaata

SEQ ID NO: 32840 - DNA, 96 bp, Fusarium azukicola
  misc_feature: 222
aactgattttattcttattttattaggattattttctatttcttttctaaattccttaaattttataatagcttctaacttattccttaatagata

SEQ ID NO: 32841 - DNA, 96 bp, Fusarium azukicola
  misc_feature: 222
tatatcaagttaaaaactgcgaaaactgcaaactaggaaaattaactaaaaataatataaataaaaaacctagtaataaggaatataagttcctag

SEQ ID NO: 32842 - DNA, 96 bp, Fusarium azukicola
  misc_feature: 222
tatatagctaaatagttaaaatcgttttttttaagtttctagctattttatagcgatttttagaaacttagggtttagctgtttttagttatacag

SEQ ID NO: 32843 - DNA, 96 bp, Fusarium azukicola
  misc_feature: 222
tatagctttatacgttcttattattagaggaaaaattaaacctctattattattatatatatatcttagtaaaaacccctttattatagacctaat

SEQ ID NO: 32844 - DNA, 96 bp, Fusarium azukicola
  misc_feature: 222
ctctttcttagttatattctcttactcttatatctcttttacctctctttcttaagaaaatctcctctctttacttataagctatatctttagcta

SEQ ID NO: 32845 - DNA, 96 bp, Fusarium azukicola
  misc_feature: 222
atatttttctaagacttctaagccttggaaaaagaagaaaactgccttaaaatgcagttattgcaaactgctaggtcataaagacccagattgcta

SEQ ID NO: 32846 - DNA, 96 bp, Fusarium azukicola
  misc_feature: 222
gggatatatcactatagttggtaatataatatagaacattaatagcctcctttaaagttataatcttataagggttatagctttatacgttcttat

SEQ ID NO: 32847 - DNA, 96 bp, Fusarium azukicola
  misc_feature: 222
ggataaataggactatattagaaaaggttagagctttattatttacttctaacctacctaaatacctttggggagaggctgtggaagcagccggat

SEQ ID NO: 32848 - DNA, 96 bp, Fusarium azukicola
  misc_feature: 222
gaagaagaattagctataaatagcttttcttatttcttttctctttcttccttcttagaattaggtttagattcctttttcttagaagtcttatgc

SEQ ID NO: 32849 - DNA, 96 bp, Fusarium azukicola
  misc_feature: 222
aggtcctagtatattattagttatattattttgttgagaaattaaggaattatatacctctaaatcatcacttatatcaaaatccatttcatctgg

SEQ ID NO: 32850 - DNA, 96 bp, Fusarium azukicola
  misc_feature: 222
ataaagctataacccttataagattataactttaaaggaggctattaatgttctatattatattactaactatagtgatatatccctataaaccat

SEQ ID NO: 32851 - DNA, 96 bp, Fusarium azukicola
  misc_feature: 222
ataagaataaaatcagttttcttagataatataaaggaatatatatataagctaagaccctattatataaagaatggaataaaatataatataagt

SEQ ID NO: 32852 - DNA, 96 bp, Fusarium azukicola
  misc_feature: 222
aagagtaagagaatataactaagaaagagaggtataactaggaaaaagagatatagctaagagagagaggtaaagctaagaaagagagatatagct

SEQ ID NO: 32853 - DNA, 96 bp, Fusarium azukicola
  misc_feature: 222
aagcaaaatgtgcaggcatatgaaactctatatctgtgaaagtaaacagtgatataatacgtggtcaaaacaaacaaagatgctagcaagactctt

SEQ ID NO: 32854 - DNA, 96 bp, Fusarium azukicola
  misc_feature: 221
ttttatctatctatcttctataagtctctcttagaagctagatattatctctttattacttttcttcctagttatctaggaaatcaactatttaca

SEQ ID NO: 32855 - DNA, 96 bp, Fusarium azukicola
  misc_feature: 221
ataagaagtccttcttttaaataagtaaggaaaaataatattataaggaaaagagaaaaataacctatatataataatagctaaggttatttctaa

SEQ ID NO: 32856 - DNA, 96 bp, Fusarium azukicola
  misc_feature: 221
atatatagctaaatagttaaaatcgttttttttaagtttctagctattttatagcgatttttagaaacttagggtttagctgtttttagttataca

SEQ ID NO: 32857 - DNA, 96 bp, Fusarium azukicola
  misc_feature: 221
tcttagctttacctctctctcttagctatatctctttttcctagttatacctctctttcttagttatattctcttactcttatatctcttttacct

SEQ ID NO: 32858 - DNA, 96 bp, Fusarium azukicola
  misc_feature: 221
tcttagctatatctctttttcctagttatacctctctttcttagttatattctcttactcttatatctcttttacctctctttcttaagaaaatct

SEQ ID NO: 32859 - DNA, 96 bp, Fusarium azukicola
  misc_feature: 221
ctatatcaagttaaaaactgcgaaaactgcaaactaggaaaattaactaaaaataatataaataaaaaacctagtaataaggaatataagttccta

SEQ ID NO: 32860 - DNA, 96 bp, Fusarium azukicola
  misc_feature: 221
taccctatactttcttcattattttactttaccctccacttttattctttattttactttaccctatactctcttctctcttttactttaccctat

SEQ ID NO: 32861 - DNA, 96 bp, Fusarium azukicola
  misc_feature: 221
actaactatagtgatatatccctataaactatatattatattatagaatttttactctatttttaggtatatttacctaacctatagctactatag

SEQ ID NO: 32862 - DNA, 96 bp, Fusarium azukicola
  misc_feature: 221
agagataagagataaagaaataagaaataagagataagagataaagggaggcaaaaatagccttaagaagccctagaagtattccagatcgacctg

SEQ ID NO: 32863 - DNA, 96 bp, Fusarium azukicola
  misc_feature: 220
ttttctagctatatctctctttcttagctttacctctctctcttagctatatctctttttcctagttatacctctctttcttagttatattctctt

SEQ ID NO: 32864 - DNA, 96 bp, Fusarium azukicola
  misc_feature: 220
tgaggacctatattaagttaaaaactgcgaaaactataaactaggaaaattaactaaaaataatataaataaaaaacctagtaataaggaatataa

SEQ ID NO: 32865 - DNA, 96 bp, Fusarium azukicola
  misc_feature: 220
tgagatatatttttctaagacttctaagccttggaaaaagaagaaaactgccttaaaatgcagttattgcaaactgctaggtcataaagacccaga

SEQ ID NO: 32866 - DNA, 96 bp, Fusarium azukicola
  misc_feature: 220
aagtccttcttttaaataagtaaggaaaaataatatcataaggaaaagagaaaaataacctatatataataatagctaaggttatttctaataaga

SEQ ID NO: 32867 - DNA, 96 bp, Fusarium azukicola
  misc_feature: 220
tctcttttcactccttatcctctcctctcccctctccctctctctcttttcactccttatcctctcctctcccctctccctctctctcttttctct

SEQ ID NO: 32868 - DNA, 96 bp, Fusarium azukicola
  misc_feature: 220
agtaagagaatataactaagaaagagaggtataactaggaaaaagagatatagctaagagagagaggtaaagctaagaaagagagatatagctaga

SEQ ID NO: 32869 - DNA, 96 bp, Fusarium azukicola
  misc_feature: 220
ggttaggggtagtagttacgttaagggttagggttaattggttgaaattagggttaggggtagtagtagagttaagggttagggttaattggttga

SEQ ID NO: 32870 - DNA, 96 bp, Fusarium azukicola
  misc_feature: 220
taatgttaatgttctatattatattaccaactatagtgatatatccctataaaccacatattatattatagaatttttactctatttttaggtata

SEQ ID NO: 32871 - DNA, 96 bp, Fusarium azukicola
  misc_feature: 220
gctaaggttatttctaataagaataactatagactaagagataacttagatcttcctattctaaatataaaggaaaaaactagtctttttgactgg

SEQ ID NO: 32872 - DNA, 96 bp, Fusarium azukicola
  misc_feature: 220
gataaaagtgggtcacaataaagagtctgattggatcagataaaagtgggatttagttattgatgattgaattgactgaagagttgattcttattg

SEQ ID NO: 32873 - DNA, 96 bp, Fusarium azukicola
  misc_feature: 220
gaggtagagagaaagtgtagttaagaagaggaggggagaagagaaagaaagtagaggaagaggggagggaaaaaggggagaagagatagagggggt

SEQ ID NO: 32874 - DNA, 96 bp, Fusarium azukicola
  misc_feature: 220
aggctttcagatatctagtagccctatctaggaaggtaataaagtatatatatttattataggtagggattctagaaggaccccatatatcagtag

SEQ ID NO: 32875 - DNA, 96 bp, Fusarium azukicola
  misc_feature: 220
agagagtatagggtaaagtaaaagagagaagagagtatagggtaaagtaaaagagagaagagagtatagggtaaagtaaaagagagaagagaggat

SEQ ID NO: 32876 - DNA, 96 bp, Fusarium azukicola
  misc_feature: 220
ataaaggaatatatatataagctaagaccctattatataaagaatggaataaaatataatataagtccgccttataataaataagctaatagcttt

SEQ ID NO: 32877 - DNA, 96 bp, Fusarium azukicola
  misc_feature: 220
aaattcaatcatcaacaactaaatcccacttttatctgatccaatcagactctttattgtgacccacttttatctatctatcttctataagtctct

SEQ ID NO: 32878 - DNA, 96 bp, Fusarium azukicola
  misc_feature: 220
aagattataactttaaaggaggctattaatgttctatattatattactaactatagtgatatatccctataaaccatatattatattatagaattt

SEQ ID NO: 32879 - DNA, 96 bp, Fusarium azukicola
  misc_feature: 219
tttctctcctctcccctctccctctctctcttttcactccttatcctctcctctcccctctccctctctctcttttcactccttatcctctcctct

SEQ ID NO: 32880 - DNA, 96 bp, Fusarium azukicola
  misc_feature: 219
ttcagatatctagtagccctatctaggaaggtaataaagtatatatatttattataggtagggattctagaaggaccccatatatcagtagctatt

SEQ ID NO: 32881 - DNA, 96 bp, Fusarium azukicola
  misc_feature: 219
ttagggtcggtagagaggaggggaaaggagagagggagaggagggaagaagagggaagagaaagagaagttaagaggagtaaagggagtgaagagg

SEQ ID NO: 32882 - DNA, 96 bp, Fusarium azukicola
  misc_feature: 219
gatttcacttaattaacctaatctaaaattttaagttatttttaccttaatttgaatttttaaagaattcttttctatttagtgtaaactagtaca

SEQ ID NO: 32883 - DNA, 96 bp, Fusarium azukicola
  misc_feature: 219
tctcccctctccctctctctcttttcactccttatcctctcctctcccctctccctctctctcttttcactccttctcctctcctctcccctctcc

SEQ ID NO: 32884 - DNA, 96 bp, Fusarium azukicola
  misc_feature: 219
acttctctccttaaacttttttattactttctaaccctttcttctcttctttaacctaacttacttacttaccttattctccctccttcttctcta

SEQ ID NO: 32885 - DNA, 96 bp, Fusarium azukicola
  misc_feature: 219
taagattataactttaaaggaggctattaatgttctatattatattactaactatagtgatatatccctataaaccatatattatattatagaatt

SEQ ID NO: 32886 - DNA, 96 bp, Fusarium azukicola
  misc_feature: 219
ctttcttagctttacctctctctcttagctatatctctttttcctagttatacctctctttcttagttatattctcttactcttatatctctttta

SEQ ID NO: 32887 - DNA, 96 bp, Fusarium azukicola
  misc_feature: 219
gtccttcttttaaataagtaaggaaaaataatatcataaggaaaagagaaaaataacctatatataataatagctaaggttatttctaataagaat

SEQ ID NO: 32888 - DNA, 96 bp, Fusarium azukicola
  misc_feature: 219
aaggaatctaaacctaattctaagaaggaagaaagagaaaagaaataagaaaagctatttatagctaattcttcttctttattatctcctaaagcc

SEQ ID NO: 32889 - DNA, 96 bp, Fusarium azukicola
  misc_feature: 219
ctcttagctatatctctttttcctagttatacctctctttcttagttatattctcttactcttatatctcttttacctctctttcttaagaaaatc

SEQ ID NO: 32890 - DNA, 96 bp, Fusarium azukicola
  misc_feature: 219
aacgaagaagaagaattagctataaatagcttttcttatttcttttctctttcttccttcttagaattaggtttagattcctttttcttagaagtc

SEQ ID NO: 32891 - DNA, 96 bp, Fusarium azukicola
  misc_feature: 219
aaaggaatatatatataagctaagaccctattatataaagaatggaataaaatataatataagtccgccttataataaataagctaatagctttat

SEQ ID NO: 32892 - DNA, 96 bp, Fusarium azukicola
  misc_feature: 219
ataaaaaacctatttacactatgtaattaactatttcactataaacagaattttttaaaaatctaaaaaaatcatttttagactttattaagagtt

SEQ ID NO: 32893 - DNA, 96 bp, Fusarium azukicola
  misc_feature: 219
aaagagtcttgctagcatctttgtttgttttgaccacgtattatatcactgtttactttcacagatatagagtttcatatgcctgcacattttgct

SEQ ID NO: 32894 - DNA, 96 bp, Fusarium azukicola
  misc_feature: 218
aaaagaagaaaactgccttaaaatgcagttattgcaaactgctaggtcataaagacccagattgctattttttgcaccctaataaggctccaaaaa

SEQ ID NO: 32895 - DNA, 96 bp, Fusarium azukicola
  misc_feature: 218
tctttctcttccctcttcttccctcctctccctctctcctttcccctcctctctaccgaccctaaactaactccctatccttcctcttttttcccc

SEQ ID NO: 32896 - DNA, 96 bp, Fusarium azukicola
  misc_feature: 218
taggggtagtagttacgttaagggttagggttaattggttgaaattagggttaggggtagtagtagagttaagggttagggttaattggttgaaat

SEQ ID NO: 32897 - DNA, 96 bp, Fusarium azukicola
  misc_feature: 218
agagtaagagaatataactaagaaagagaggtataactaggaaaaagagatatagctaagagagagaggtaaagctaagaaagagagatatagcta

SEQ ID NO: 32898 - DNA, 96 bp, Fusarium azukicola
  misc_feature: 218
tagaatctattttttctagtctcttagattcatctataaggctagaagaaagtgattctaggttataagcctcaggattactccttaaagcttatg

SEQ ID NO: 32899 - DNA, 96 bp, Fusarium azukicola
  misc_feature: 218
taagaagtccttcttttaaataagtaaggaaaaataatattataaggaaaagagaaaaataacctatatataataatagctaaggttatttctaat

SEQ ID NO: 32900 - DNA, 96 bp, Fusarium azukicola
  misc_feature: 218
taaatctatttaaaattaagaaaagccttatatagcctaaaataaagccctagattatggtataaccttctctctaaattattaaataatttaggc

SEQ ID NO: 32901 - DNA, 96 bp, Fusarium azukicola
  misc_feature: 218
ctttctctcctaatacttactatactcctccttaacttaacttctctccttaaacttttttactactttctaaccctttcttctcttctttaacct

SEQ ID NO: 32902 - DNA, 96 bp, Fusarium azukicola
  misc_feature: 218
ctgtatcatatataaaattagttatattatctttattagtagaaaaatcaggtttatttaccttatttaaatatcctagttgtttctttatatagg

SEQ ID NO: 32903 - DNA, 96 bp, Fusarium azukicola
  misc_feature: 218
atatatcactatagttggtaatataatatagaacattaatagcctcctttaaagttataatcttataagggttatagctttatacgttcttattat

SEQ ID NO: 32904 - DNA, 96 bp, Fusarium azukicola
  misc_feature: 217
tttctttactaaaagcttataacctatactatttaagagaataaaagagaatctatccctaatataacttatttcctttataaagggtttttatta

SEQ ID NO: 32905 - DNA, 96 bp, Fusarium azukicola
  misc_feature: 217
ttattcttattttattaggattattttctatttcttttctaaattccttgaattttataatagcttctgacttattccttaatagataggctttca

SEQ ID NO: 32906 - DNA, 96 bp, Fusarium azukicola
  misc_feature: 217
atataatatagaatattaatagcctcctttaaagttataatcttataagggttatagctttatacgttcttattattagaggaaaaattaaacctc

SEQ ID NO: 32907 - DNA, 96 bp, Fusarium azukicola
  misc_feature: 217
ctatctattaaggaataagttagaagctattataaaatttaaggaatttagaaaagaaatagaaaataatcctaataaaataagaataaaatcagt

SEQ ID NO: 32908 - DNA, 96 bp, Fusarium azukicola
  misc_feature: 217
ataataatagaggtttaatttttcctctaataataagaacgtataaagctataacccttataagattataactttaaaggaggctattaatattct

SEQ ID NO: 32909 - DNA, 96 bp, Fusarium azukicola
  misc_feature: 217
acttatattccttattactaggttttttatttatattatttttagttaattttcctagtttatagttttcgcagtttttaacttaatataggtcct

SEQ ID NO: 32910 - DNA, 96 bp, Fusarium azukicola
  misc_feature: 216
tttcttagctttacctctctctcttagctatatctctttttcctagttatacctctctttcttagttatattctcttactcttatatctcttttac

SEQ ID NO: 32911 - DNA, 96 bp, Fusarium azukicola
  misc_feature: 216
tttaaaattaagaaaagccttatatagcctaaaataaagccctagattatagtataaccttctctctaaattattaaataatttaggcttctatac

SEQ ID NO: 32912 - DNA, 96 bp, Fusarium azukicola
  misc_feature: 216
tataagattataactttaaaggaggctattaatgttctatattatattactaactatagtgatatatccctataaaccatatattatattatagaa

SEQ ID NO: 32913 - DNA, 96 bp, Fusarium azukicola
  misc_feature: 216
ccttcttttaaataagtaaggaaaaataatatcataaggaaaagagaaaaataacctatatataataatagctaaggttatttctaataagaataa

SEQ ID NO: 32914 - DNA, 96 bp, Fusarium azukicola
  misc_feature: 216
tcaggaagccaataaggtgcataagacttctaagaaaagggaatctaaacctaattctaagaaggaagaaagagaaaagaaacaagaaaagctatt

SEQ ID NO: 32915 - DNA, 96 bp, Fusarium azukicola
  misc_feature: 216
tatagctaaatagttaaaatcgttttttttaagtttctagctattttatagcgatttttagaaacttagggtttagctgtttttagttatatagta

SEQ ID NO: 32916 - DNA, 96 bp, Fusarium azukicola
  misc_feature: 216
tagctactataggtagctagatattaagggtattattctaattggttaaaaaggttcctacagaccttcatgactgccgtcattaatgcatcaaag

SEQ ID NO: 32917 - DNA, 96 bp, Fusarium azukicola
  misc_feature: 216
taaataagaagtccttcttttaaataagtaaggaaaaataatattataaggaaaagagaaaaataacctatatataataatagctaaggttatttc

SEQ ID NO: 32918 - DNA, 96 bp, Fusarium azukicola
  misc_feature: 216
ggatatatcactatagttggtaatataatatagaacattaatagcctcctttaaagttataatcttataagggttatagctttatacgttcttatt

SEQ ID NO: 32919 - DNA, 96 bp, Fusarium azukicola
  misc_feature: 216
aacttatattccttattactaggttttttatttatattatttttagttaattttcctagtttgcagttttcgcagtttttaacttgatataggtcc

SEQ ID NO: 32920 - DNA, 96 bp, Fusarium azukicola
  misc_feature: 216
cttagctttacctctctctcttagctatatctctttttcctagttatacctctctttcttagttatattctcttactcttatatctcttttacctc

SEQ ID NO: 32921 - DNA, 96 bp, Fusarium azukicola
  misc_feature: 216
cttatattccttattactaggttttttatttatattatttttagttaattttcctagtttgcagttttcgcagtttttaacttgatataggtcctc

SEQ ID NO: 32922 - DNA, 96 bp, Fusarium azukicola
  misc_feature: 215
tttgcaccctaataaggctccaaaaaactggaaaactcaggaagccaataaggtgcataagacttctaagaaaagggaatctaaacctaattctaa

SEQ ID NO: 32923 - DNA, 96 bp, Fusarium azukicola
  misc_feature: 215
ttatattccttattactaggttttttatttatattatttttagttaattttcctagtttgcagttttcgcagtttttaacttgatataggtcctca

SEQ ID NO: 32924 - DNA, 96 bp, Fusarium azukicola
  misc_feature: 215
aacgtataaagctataacccttataagattataactttaaaggaggctattaatgttctatattatattactaactatagtgatatatccctataa

SEQ ID NO: 32925 - DNA, 96 bp, Fusarium azukicola
  misc_feature: 215
aatgagatatatttttctaagacttctaagccttggaaaaagaagaaaactgccttaaaatgcagttattgcaaactgctaggtcataaagaccca

SEQ ID NO: 32926 - DNA, 96 bp, Fusarium azukicola
  misc_feature: 215
tagggtcggtagagaggaggggaaaggagagagggagaggagggaagaagagggaagagaaagagaagttaagaggagtaaagggagtgaagagga

SEQ ID NO: 32927 - DNA, 96 bp, Fusarium azukicola
  misc_feature: 215
aagaagtccttcttttaaataagtaaggaaaaataatattataaggaaaagagaaaaataacctatatataataatagctaaggttatttctaata

SEQ ID NO: 32928 - DNA, 96 bp, Fusarium azukicola
  misc_feature: 215
gtttgcagttttcgcagtttttaacttgatataggtcctcactagtatatttaaagagaggatcttttatttttatatatttaattagacttctta

SEQ ID NO: 32929 - DNA, 96 bp, Fusarium azukicola
  misc_feature: 215
aagattggacccttgacgattggaagaatgttatttggtctgatgagacctctattgtcttgcttcatcgtcgaggaggctatcgtatttggcgac

SEQ ID NO: 32930 - DNA, 96 bp, Fusarium azukicola
  misc_feature: 215
aataagaataaaatcagttttcttagataatataaaggaatatatatataagctaagaccctattatataaagaatggaataaaatataatataag

SEQ ID NO: 32931 - DNA, 96 bp, Fusarium azukicola
  misc_feature: 215
agattataactttaaaggaggctattaatgttctatattatattactaactatagtgatatatccctataaaccatatattatattatagaatttt

SEQ ID NO: 32932 - DNA, 96 bp, Fusarium azukicola
  misc_feature: 214
tcctccctcctcttcactccctttactcctcttaacttctctttctcttccctcttcttccctcctctccctctctcctttcccctcctctctacc

SEQ ID NO: 32933 - DNA, 96 bp, Fusarium azukicola
  misc_feature: 214
ctaataaaataagaataaaatcagttttcttagataatataaaggaatatatatataagctaagaccctattatataaagaatggaataaaatata

SEQ ID NO: 32934 - DNA, 96 bp, Fusarium azukicola
  misc_feature: 214
taataatagaggtttaatttttcctctaataataagaacgtataaagctataacccttataagattataactttaaaggaggctattaatattcta

SEQ ID NO: 32935 - DNA, 96 bp, Fusarium azukicola
  misc_feature: 214
taatgagatatatttttctaagacttctaagccttggaaaaagaagaaaactgccttaaaatgcagttattgcaaactgctaggtcataaagaccc

SEQ ID NO: 32936 - DNA, 96 bp, Fusarium azukicola
  misc_feature: 214
taagaataaaatcagttttcttagataatataaaggaatatatatataagctaagaccctattatataaagaatggaataaaatataatataagtc

SEQ ID NO: 32937 - DNA, 96 bp, Fusarium azukicola
  misc_feature: 214
ctcttccctcttcttccctcctctccctctctcctttcccctcctctctaccgaccctaaactaactccctatccttcctcttttttcccccaccc

SEQ ID NO: 32938 - DNA, 96 bp, Fusarium azukicola
  misc_feature: 214
ccttttctaatatagtcctatttatcctttctataaagctattagcttatttattatgaggcggacttatattatattttattccattctttatat

SEQ ID NO: 32939 - DNA, 96 bp, Fusarium azukicola
  misc_feature: 214
agatattaagggtattattctaattggttaaaaaggttcctacagaccttcatgactgccgtcattaatgcatcaaagtataataactgccgattg

SEQ ID NO: 32940 - DNA, 96 bp, Fusarium azukicola
  misc_feature: 214
atttttctaagacttctaagccttggaaaaagaagaaaactgccttaaaatgcagttattgcaaactgctaggtcataaagacccagattgctatt

SEQ ID NO: 32941 - DNA, 96 bp, Fusarium azukicola
  misc_feature: 214
atattaatagcctcctttaaagttataatcttataagggttatagctttatacgttcttattattagaggaaaaattaaacctctattattattat

SEQ ID NO: 32942 - DNA, 96 bp, Fusarium azukicola
  misc_feature: 214
aggcggacttatattatattttattccattctttatataatagggtcttagcttatatatatattcctttatattatctaagaaaactgattttat

SEQ ID NO: 32943 - DNA, 96 bp, Fusarium azukicola
  misc_feature: 214
aaataagaagtccttcttttaaataagtaaggaaaaataatattataaggaaaagagaaaaataacctatatataataatagctaaggttatttct

SEQ ID NO: 32944 - DNA, 96 bp, Fusarium azukicola
  misc_feature: 214
actacaataagaatcaactcttcagtcaattcaatcatcaataactaaatcccacttttatctgatccaatcagactctttattgtgacccacttt

SEQ ID NO: 32945 - DNA, 96 bp, Fusarium azukicola
  misc_feature: 213
attagggtgcaaaaaatagcaatctgggtctttatgacctagcagtttgcaataactgcattttaaggcagttttcttctttttccaaggcttaga

SEQ ID NO: 32946 - DNA, 96 bp, Fusarium azukicola
  misc_feature: 213
tccttaacttaacttctctccttaaacttttttattactttctaaccctttcttctcttctttaacctaacttacttacttaccttattctccctc

SEQ ID NO: 32947 - DNA, 96 bp, Fusarium azukicola
  misc_feature: 213
atagcttataagtaaagagaggagattttcttaagaaagagaggtaaaagagatataagagtaagagaatataactaagaaagagaggtataacta

SEQ ID NO: 32948 - DNA, 96 bp, Fusarium azukicola
  misc_feature: 213
taaaagtgggtcacaataaagagtctgattggatcagataaaagtgggatttagttattgatgattgaattgactgaagagttgattcttattgta

SEQ ID NO: 32949 - DNA, 96 bp, Fusarium azukicola
  misc_feature: 213
gatatatcactatagttggtaatataatatagaacattaatagcctcctttaaagttataatcttataagggttatagctttatacgttcttatta

SEQ ID NO: 32950 - DNA, 96 bp, Fusarium azukicola
  misc_feature: 213
taaaaaacctatttacactatgtaattaactatttcactataaacagaattttttaaaaatctaaaaaaatcatttttagactttattaagagtta

SEQ ID NO: 32951 - DNA, 96 bp, Fusarium azukicola
  misc_feature: 213
atttattattattattattatataatattgcctttttattattataagggctttctttaaagtaaggaatctcattaaaagaggggttatttcctt

SEQ ID NO: 32952 - DNA, 96 bp, Fusarium azukicola
  misc_feature: 213
ataatagggtcttagcttatatatatattcctttatattatctaagaaaactaattttattcttattttattaggattattttctatttcttttct

SEQ ID NO: 32953 - DNA, 96 bp, Fusarium azukicola
  misc_feature: 212
taataaaaaccctttataaaggaaataagttatattagggatagattctcttttattctctcaaatagtataggttgtaagcttttagtaaagaaa

SEQ ID NO: 32954 - DNA, 96 bp, Fusarium azukicola
  misc_feature: 212
gaaagcctatctattaaggaataagtcagaagctattataaaattcaaggaatttagaaaagaaatagaaaataatcctaataaaataagaataaa

SEQ ID NO: 32955 - DNA, 96 bp, Fusarium azukicola
  misc_feature: 212
ttctaagccttggaaaaagaagaaaactgccttaaaatgcagttattgcaaactgctaggtcataaagacccagattgctattttttgcaccctaa

SEQ ID NO: 32956 - DNA, 96 bp, Fusarium azukicola
  misc_feature: 212
actagtgaggacctatattaagttaaaaactgcgaaaactataaactaggaaaattaactaaaaataatataaataaaaaacctagtaataaggaa

SEQ ID NO: 32957 - DNA, 96 bp, Fusarium azukicola
  misc_feature: 212
agatgacggcagtcataaaggtctataggaacctttttaaccaattagaataatacccttaatatctagctacctatagtagctataggttaggga

SEQ ID NO: 32958 - DNA, 96 bp, Fusarium azukicola
  misc_feature: 212
tatttttctaagacttctaagccttggaaaaagaagaaaactgccttaaaatgcagttattgcaaactgctaggtcataaagacccagattgctat

SEQ ID NO: 32959 - DNA, 96 bp, Fusarium azukicola
  misc_feature: 212
accctatactttcttcattattttactttaccctccacttttattctttattttactttaccctatactctcttctctcttttactttaccctata

SEQ ID NO: 32960 - DNA, 96 bp, Fusarium azukicola
  misc_feature: 212
cccttcctcccctctctctcttatattcccttctcttccttcctctttctctttacttccctttctctttctcctccctcctcttcactcccttta

SEQ ID NO: 32961 - DNA, 96 bp, Fusarium azukicola
  misc_feature: 212
gtccttcttttaaataagtaaggaaaaataatattataaggaaaagagaaaaataacctatatataataatagctaaggttatttctaataagaat

SEQ ID NO: 32962 - DNA, 96 bp, Fusarium azukicola
  misc_feature: 212
gctataacccttataagattataactttaaaggaggctattaatgttctatattatattactaactatagtgatatatccctataaaccatatatt

SEQ ID NO: 32963 - DNA, 96 bp, Fusarium azukicola
  misc_feature: 212
ccagtcaaaaagactagttttttcctttatatttaagataggaagatctaagttatctcttagtctatagttattcttattagaaataaccttagc

SEQ ID NO: 32964 - DNA, 96 bp, Fusarium azukicola
  misc_feature: 212
atataaaaaacctatttacactatgtaattaactatttcactataaacagaattttttaaaaatctaaaaaaatcatttttagactttattaagag

SEQ ID NO: 32965 - DNA, 96 bp, Fusarium azukicola
  misc_feature: 211
tggaaaactcaggaagccaataaggtgcataagacttctaagaaaagggaatctaaacctaattctaagaaggaagaaagagaaaagaaacaagaa

SEQ ID NO: 32966 - DNA, 96 bp, Fusarium azukicola
  misc_feature: 211
tgaaggaaataagttatattagggatagattctcttttattctctcaaatagtataggttgtaagcttttagtaaagaaatcagctatattatctt

SEQ ID NO: 32967 - DNA, 96 bp, Fusarium azukicola
  misc_feature: 211
atttctaataagaataactatagactaagagataacttagatcttcctattctaaatataaaggaaaaaactagtctttttgactggcataaaaga

SEQ ID NO: 32968 - DNA, 96 bp, Fusarium azukicola
  misc_feature: 211
tatactctcttcttatacccttatacacttttcttctttattttctttaccctatactttctttattattttactttaccctctacttttattctt

SEQ ID NO: 32969 - DNA, 96 bp, Fusarium azukicola
  misc_feature: 211
tataaatagcttttcttgtttcttttctctttcttccttcttagaattaggtttagattcccttttcttagaagtcttatgcaccttattggcttt

SEQ ID NO: 32970 - DNA, 96 bp, Fusarium azukicola
  misc_feature: 211
gccagtcaaaaagactagttttttcctttatatttaagataggaagatctaagttatctcttagtctatagttattcttattagaaataaccttag

SEQ ID NO: 32971 - DNA, 96 bp, Fusarium azukicola
  misc_feature: 211
agcaaaatatataaataaaataataaggaaatataataaataagaaataggaacttctaaagtacctattaaatttatagaaagactcttaaaatc

SEQ ID NO: 32972 - DNA, 96 bp, Fusarium azukicola
  misc_feature: 211
gaagtccttcttttaaataagtaaggaaaaataatattataaggaaaagagaaaaataacctatatataataatagctaaggttatttctaataag

SEQ ID NO: 32973 - DNA, 96 bp, Fusarium azukicola
  misc_feature: 211
ctagaatccctacctataataaatatatatactttattaccttcctagatagggctactagatatctaaaagtctatctattaaggaataagttag

SEQ ID NO: 32974 - DNA, 96 bp, Fusarium azukicola
  misc_feature: 211
cctccctcctcttcactccctttactcctcttaacttctctttctcttccctcttcttccctcctctccctctctcctttcccctcctctctaccg

SEQ ID NO: 32975 - DNA, 96 bp, Fusarium azukicola
  misc_feature: 211
atgaaggaaataagttatattagggatagattctcttttattctctcaaatagtataggttgtaagcttttagtaaagaaatcagctatattatct

SEQ ID NO: 32976 - DNA, 96 bp, Fusarium azukicola
  misc_feature: 210
atagttagtaatataatatagaacattaatagcctcctttaaagttataatcttataagggttatagctttatacgttcttattattagaggaaaa

SEQ ID NO: 32977 - DNA, 96 bp, Fusarium azukicola
  misc_feature: 210
tattattgttaatgttctatattatattaccaactatagtgatatatccctataaaccacatattatattatagaatttttactctatttttaggt

SEQ ID NO: 32978 - DNA, 96 bp, Fusarium azukicola
  misc_feature: 210
gggctatccgacggtataatcttggtccgaatcggatcctattaggccggtcaaatgactataataagggactatccttctttgttagttactata

SEQ ID NO: 32979 - DNA, 96 bp, Fusarium azukicola
  misc_feature: 210
tataaataagctttttatatactagcttattaagattttttaaaaactctatagaaatttatattagtaatagactatataataagtctaaacttt

SEQ ID NO: 32980 - DNA, 96 bp, Fusarium azukicola
  misc_feature: 210
taataataagaacgtataaagctataacccttataagattataactttaaaggaggctattaatgttctatattatattactaactatagtgatat

SEQ ID NO: 32981 - DNA, 96 bp, Fusarium azukicola
  misc_feature: 210
aagacttctaagccttggaaaaagaagaaaactgccttaaaatgcagttattgcaaactgctaggtcataaagacccagattgctattttttgcac

SEQ ID NO: 32982 - DNA, 96 bp, Fusarium azukicola
  misc_feature: 210
gatatatttttctaagacttctaagccttggaaaaagaagaaaactgccttaaaatgcagttattgcaaactgctaggtcataaagacccagattg

SEQ ID NO: 32983 - DNA, 96 bp, Fusarium azukicola
  misc_feature: 210
aagcaaaatatataaataaaataataaggaaatataataaataagaaataggaacttctaaagtacctattaaatttatagaaagactcttaaaat

SEQ ID NO: 32984 - DNA, 96 bp, Fusarium azukicola
  misc_feature: 210
attcctttatattatctaagaaaactaattttattcttattttattaggattattttctatttcttttctaaattccttaaattttataatagctt

SEQ ID NO: 32985 - DNA, 96 bp, Fusarium azukicola
  misc_feature: 210
agagtcttgctagcatctttgtttgttttgaccacgtattatatcactgtttactttcacagatatagagtttcatatgcctgcacattttgcttt

SEQ ID NO: 32986 - DNA, 96 bp, Fusarium azukicola
  misc_feature: 209
gggtattattctaattggttaaaaaggttcctatagacctttatgactgccgtcatctatgcatcaagtataataactgccgattggctaaaaaaa

SEQ ID NO: 32987 - DNA, 96 bp, Fusarium azukicola
  misc_feature: 209
gggtattattctaattggttaaaaaggttcctacagaccttcatgactgccgtcatcaatgcatcaaagtataataactgccgattggctaagaaa

SEQ ID NO: 32988 - DNA, 96 bp, Fusarium azukicola
  misc_feature: 209
ttcttagttatattctcttactcttatatctcttttacctctctttcttaagaaaatctcctctctttacttataagctatatctttagctagaag

SEQ ID NO: 32989 - DNA, 96 bp, Fusarium azukicola
  misc_feature: 209
catacgccaacgccggttgaggaggcagctgaaccatcgaccccttgggcttcaaggaccccaaagactgtgcttgaggcccaatctcagtctgaa

SEQ ID NO: 32990 - DNA, 96 bp, Fusarium azukicola
  misc_feature: 209
ttataaatggcttagttatagcaaaaaccggttttgatggatagaatgcaacgctgaaggttttaggaaccttcctagccaatcggcaggtatttt

SEQ ID NO: 32991 - DNA, 96 bp, Fusarium azukicola
  misc_feature: 209
tatatttttctaagacttctaagccttggaaaaagaagaaaactgccttaaaatgcagttattgcaaactgctaggtcataaagacccagattgct

SEQ ID NO: 32992 - DNA, 96 bp, Fusarium azukicola
  misc_feature: 209
tagttaaagaaaagctttctagtactatagaagaagattccacttcttctaagagtaaagaagcattatctcttataagacttactattgaagatg

SEQ ID NO: 32993 - DNA, 96 bp, Fusarium azukicola
  misc_feature: 209
agggatatatcactatagttggtaatataatatagaacattaatagcctcctttaaagttataatcttataagggttatagctttatacgttctta

SEQ ID NO: 32994 - DNA, 96 bp, Fusarium azukicola
  misc_feature: 209
gtagggattctagaaggaccctatatattagtagctattttatctaggaacttatattccttattattaggttttttatttatattatttttagtt

SEQ ID NO: 32995 - DNA, 96 bp, Fusarium azukicola
  misc_feature: 209
ggaatacttctagggcttcttaaggctatttttgcctccctttatctcttatctcttatttcttatttctttatctcttatctcttatctcttatc

SEQ ID NO: 32996 - DNA, 96 bp, Fusarium azukicola
  misc_feature: 209
atatatttttctaagacttctaagccttggaaaaagaagaaaactgccttaaaatgcagttattgcaaactgctaggtcataaagacccagattgc

SEQ ID NO: 32997 - DNA, 96 bp, Fusarium azukicola
  misc_feature: 209
aaaagagtcttgctagcatctttgtttgttttgaccacgtattatatcactgtttactttcacagatatagagtttcatatgcctgcacattttgc

SEQ ID NO: 32998 - DNA, 96 bp, Fusarium azukicola
  misc_feature: 209
cactccttatcctctcctctcccctctccctctctctcttttcactccttatcctctcctctcccctctccctctctctcttttcactccttcttc

SEQ ID NO: 32999 - DNA, 96 bp, Fusarium azukicola
  misc_feature: 209
ctttaggagataacgaagaagaagaattagctataaatagcttttcttatttcttttctctttcttccttcttagaattaggtttagattcctttt

SEQ ID NO: 33000 - DNA, 96 bp, Fusarium azukicola
  misc_feature: 209
ctagtgaggacctatattaagttaaaaactgcgaaaactataaactaggaaaattaactaaaaataatataaataaaaaacctagtaataaggaat

SEQ ID NO: 33001 - DNA, 96 bp, Fusarium azukicola
  misc_feature: 209
cacttttcttctttattttctttaccctatactttctttattattttactttaccctctacttttattctttattttactttaccctatactctct

SEQ ID NO: 33002 - DNA, 96 bp, Fusarium azukicola
  misc_feature: 208
tttacctctctctcttagctatatctctttttcctagttatacctctctttcttagttatattctcttactcttatatctcttttacctctctttc

SEQ ID NO: 33003 - DNA, 96 bp, Fusarium azukicola
  misc_feature: 208
ttattccattctttatataatagggtcttagcttatatatatattcctttatattatctaagaaaactgattttattcttattttattaggattat

SEQ ID NO: 33004 - DNA, 96 bp, Fusarium azukicola
  misc_feature: 208
ttagctttacctctctctcttagctatatctctttttcctagttatacctctctttcttagttatattctcttactcttatatctcttttacctct

SEQ ID NO: 33005 - DNA, 96 bp, Fusarium azukicola
  misc_feature: 208
tctttcttagttatattctcttactcttatatctcttttacctctctttcttaagaaaatctcctctctttacttataagctatatctttagctag

SEQ ID NO: 33006 - DNA, 96 bp, Fusarium azukicola
  misc_feature: 208
tcttattagaaataaccttagctattattatatataggttatttttctcttttccttataatattatttttccttacttatttaaaagaaggactt

SEQ ID NO: 33007 - DNA, 96 bp, Fusarium azukicola
  misc_feature: 208
tataaaaaacctatttacactatgtaattaactatttcactataaacagaattttttaaaaatctaaaaaaatcatttttagactttattaagagt

SEQ ID NO: 33008 - DNA, 96 bp, Fusarium azukicola
  misc_feature: 208
aagaacgtataaagctataacccttataagattataactttaaaggaggctattaatattctatattatattaccaactatagtgatatatcccta

SEQ ID NO: 33009 - DNA, 96 bp, Fusarium azukicola
  misc_feature: 208
taaataataaagctctaaccttttctaatatagtcctatttatcctttctataaagctattagcttatttattatgaggcggacttatattatatt

SEQ ID NO: 33010 - DNA, 96 bp, Fusarium azukicola
  misc_feature: 208
atttacctaacctatagctactataggtagctagatattaagggtattattctaattggttaaaaaggttcctacagacctttatgactgccgtcc

SEQ ID NO: 33011 - DNA, 96 bp, Fusarium azukicola
  misc_feature: 208
ctatttattattattattattatataatattgcctttttattattataagggctttctttaaagtaaggaatctcattaaaagaggggttatttcc

SEQ ID NO: 33012 - DNA, 96 bp, Fusarium azukicola
  misc_feature: 208
gagtaagagaatataactaagaaagagaggtataactaggaaaaagagatatagctaagagagagaggtaaagctaagaaagagagatatagctag

SEQ ID NO: 33013 - DNA, 96 bp, Fusarium azukicola
  misc_feature: 208
aatattctatattatattactaactatagtgatatatccctataaactatatattatattatagaatttttactctatttttaggtatatttacct

SEQ ID NO: 33014 - DNA, 96 bp, Fusarium azukicola
  misc_feature: 208
agcctaaaataaagccctagattatagtataaccttctctctaaattattaaataatttaggcttctatactatcccttttaataaagctctcttt

SEQ ID NO: 33015 - DNA, 96 bp, Fusarium azukicola
  misc_feature: 207
tagaaagtagtaaaaaagtttaaggagagaagttaagttaaggaggagtatagtaagtattaggagagaaaggagtatagagtaagttaaggtaaa

SEQ ID NO: 33016 - DNA, 96 bp, Fusarium azukicola
  misc_feature: 207
ttcttagctttacctctctctcttagctatatctctttttcctagttatacctctctttcttagttatattctcttactcttatatctcttttacc

SEQ ID NO: 33017 - DNA, 96 bp, Fusarium azukicola
  misc_feature: 207
ttaattcctctatttcagctgtcatagatagatgccaattataagataaagcacaacttatggcttctttatagttattaggttctaaaggaaggg

SEQ ID NO: 33018 - DNA, 96 bp, Fusarium azukicola
  misc_feature: 207
agattggacccttgacgattggaagaatgttatttggtctgatgagacctctattgtcttgcttcatcgtcgaggaggctatcgtatttggcgaca

SEQ ID NO: 33019 - DNA, 96 bp, Fusarium azukicola
  misc_feature: 207
tcttcttatacccttatacacttttcttctttattttctttaccctatactttctttattattttactttaccctctacttttattctttatttta

SEQ ID NO: 33020 - DNA, 96 bp, Fusarium azukicola
  misc_feature: 207
tataaatctatttaaaattaagaaaagccttatatagcctaaaataaagccctagattatggtataaccttctctctaaattattaaataatttag

SEQ ID NO: 33021 - DNA, 96 bp, Fusarium azukicola
  misc_feature: 207
aataagaagtccttcttttaaataagtaaggaaaaataatattataaggaaaagagaaaaataacctatatataataatagctaaggttatttcta

SEQ ID NO: 33022 - DNA, 96 bp, Fusarium azukicola
  misc_feature: 207
taacgaagaagaagaattagctataaatagcttttcttatttcttttctctttcttccttcttagaattaggtttagattcctttttcttagaagt

SEQ ID NO: 33023 - DNA, 96 bp, Fusarium azukicola
  misc_feature: 207
gattggacccttgacgattggaagaatgttatttggtctgatgagacctctattgtcttgcttcatcgtcgaggaggctatcgtatttggcgacag

SEQ ID NO: 33024 - DNA, 96 bp, Fusarium azukicola
  misc_feature: 207
acacttttcttctttattttctttaccctatactttctttattattttactttaccctctacttttattctttattttactttaccctatactctc

SEQ ID NO: 33025 - DNA, 96 bp, Fusarium azukicola
  misc_feature: 207
agttaaagaaaagctttctagtactatagaagaagattccacttcttctaagagtaaagaagcattatctcttataagacttactattgaagatgg

SEQ ID NO: 33026 - DNA, 96 bp, Fusarium azukicola
  misc_feature: 206
taaggagtgaaaagagagagagggagaggggagaggagaggataaggagtgaaaagagagagagggagaggggagaggagaggataaggagagaaa

SEQ ID NO: 33027 - DNA, 96 bp, Fusarium azukicola
  misc_feature: 206
gtaatataatatagaacattaatagcctcctttaaagttataatcttataagggttatagctttatacgttcttattattagaggaaaaaattaaa

SEQ ID NO: 33028 - DNA, 96 bp, Fusarium azukicola
  misc_feature: 206
tcagatatctagtagccctatctaggaaggtaataaagtatatatatttattataggtagggattctagaaggaccccatatatcagtagctattt

SEQ ID NO: 33029 - DNA, 96 bp, Fusarium azukicola
  misc_feature: 206
tattagggtgcaaaaaatagcaatctgggtctttatgacctagcagtttgcaataactgcattttaaggcagttttcttctttttccaaggcttag

SEQ ID NO: 33030 - DNA, 96 bp, Fusarium azukicola
  misc_feature: 206
taaaaactgcgaaaactgcaaactaggaaaattaactaaaaataatataaataaaaaacctagtaataaggaatataagttcctagataaaatagc

SEQ ID NO: 33031 - DNA, 96 bp, Fusarium azukicola
  misc_feature: 206
ctttctcttccctcttcttccctcctctccctctctcctttcccctcctctctaccgaccctaaactaactccctatccttcctcttttttccccc

SEQ ID NO: 33032 - DNA, 96 bp, Fusarium azukicola
  misc_feature: 206
aataaaatcagttttcttagataatataaaggaatatatatataagctaagaccctattatataaagaatggaataaaatataatataagtccgcc

SEQ ID NO: 33033 - DNA, 96 bp, Fusarium azukicola
  misc_feature: 206
actccttatcctctcctctcccctctccctctctctcttttcactccttatcctctcctctcccctctccctctctctcttttcactccttcttcc

SEQ ID NO: 33034 - DNA, 96 bp, Fusarium azukicola
  misc_feature: 206
gaatttctatttattattattattattatataatattgccttttcattattataagggctttctttaaagtaaggaatctcattaaaagaggggtt

SEQ ID NO: 33035 - DNA, 96 bp, Fusarium azukicola
  misc_feature: 206
atatatcactatagttagtaatataatatagaatattaatagcctcctttaaagttataatcttataagggttatagctttatacgttcttattat

SEQ ID NO: 33036 - DNA, 96 bp, Fusarium azukicola
  misc_feature: 206
aatatagtcctatttatcctttctataaagctattagcttatttattatgaggcggacttatattatattttattccattctttatataatagggt

SEQ ID NO: 33037 - DNA, 96 bp, Fusarium azukicola
  misc_feature: 205
tttttcctagttatacctctctttcttagttatattctcttactcttatatctcttttacctctctttcttaagaaaatctcctctctttacttat

SEQ ID NO: 33038 - DNA, 96 bp, Fusarium azukicola
  misc_feature: 205
ttttcctctaataataagaacgtataaagctataacccttataagattataactttaaaggaggctattaatgttctatattatattaccaactat

SEQ ID NO: 33039 - DNA, 96 bp, Fusarium azukicola
  misc_feature: 205
tttaggagataacgaagaagaagaattagctataaatagcttttcttatttcttttctctttcttccttcttagaattaggtttagattccttttt

SEQ ID NO: 33040 - DNA, 96 bp, Fusarium azukicola
  misc_feature: 205
ttcttctagctaaagatatagcttataagtaaagagaggagattttcttaagaaagagaggtaaaagagatataagagtaagagaatataactaag

SEQ ID NO: 33041 - DNA, 96 bp, Fusarium azukicola
  misc_feature: 205
ataaggagtgaaaagagagagagggagaggggagaggagaggataaggagtgaaaagagagagagggagaggggagaggagaggataaggagagaa

SEQ ID NO: 33042 - DNA, 96 bp, Fusarium azukicola
  misc_feature: 205
ttcctctaataataagaacgtataaagctataacccttataagattataactttaaaggaggctattaatgttctatattatattaccaactatag

SEQ ID NO: 33043 - DNA, 96 bp, Fusarium azukicola
  misc_feature: 205
gatgacggcagtcataaaggtctataggaacctttttaaccaattagaataatacccttaatatctagctacctatagtagctataggttagggaa

SEQ ID NO: 33044 - DNA, 96 bp, Fusarium azukicola
  misc_feature: 205
agaagtccttcttttaaataagtaaggaaaaataatattataaggaaaagagaaaaataacctatatataataatagctaaggttatttctaataa

SEQ ID NO: 33045 - DNA, 96 bp, Fusarium azukicola
  misc_feature: 205
attaagggtattattctaattggttaaaaaggttcctacagacctttatgactgccgtcatctatgcatcaagtataataactgccgattggctaa

SEQ ID NO: 33046 - DNA, 96 bp, Fusarium azukicola
  misc_feature: 205
gaaggttaagaaaggagagaagtaaggaaggttaagaaaggagagaagtaaggaaggttaagaaaggagagaagtaaggaagggtaagaaaggaga

SEQ ID NO: 33047 - DNA, 96 bp, Fusarium azukicola
  misc_feature: 205
tagatgacggcagtcataaaggtctataggaacctttttaaccaattagaataatacccttaatatctagctacctatagtagctataggttaggg

SEQ ID NO: 33048 - DNA, 96 bp, Fusarium azukicola
  misc_feature: 205
gcaaaatatataaataaaataataaggaaatataataaataagaaataggaacttctaaagtacctattaaatttatagaaagactcttaaaatct

SEQ ID NO: 33049 - DNA, 96 bp, Fusarium azukicola
  misc_feature: 205
ctttattttactttaccctatactctcttctctcttttactttaccctatactctcttctctcttttactttaccctccacttttattctttattt

SEQ ID NO: 33050 - DNA, 96 bp, Fusarium azukicola
  misc_feature: 205
aataagctaatggctttatagaaaggataaataggactatattagaaaaggttagagctttattatttacttctaacctacctaaatacctttagg

SEQ ID NO: 33051 - DNA, 96 bp, Fusarium azukicola
  misc_feature: 204
tttttaagtcttttttaagactatatctcaactatggccactaagtataatatttcccggcttattggaagcgagaattatattacttgggctttg

SEQ ID NO: 33052 - DNA, 96 bp, Fusarium azukicola
  misc_feature: 204
ttatagctttatacgttcttattattagaggaaaaattaaacctctattattattatatatatatcttagtaaaaacccctttattatagacctaa

SEQ ID NO: 33053 - DNA, 96 bp, Fusarium azukicola
  misc_feature: 204
ttacctctctctcttagctatatctctttttcctagttatacctctctttcttagttatattctcttactcttatatctcttttacctctctttct

SEQ ID NO: 33054 - DNA, 96 bp, Fusarium azukicola
  misc_feature: 204
aatagctaaggttatttctaataagaataactatagactaagagataacttagatcttcctattttaaatataaaggaaaaaactagtctttttaa

SEQ ID NO: 33055 - DNA, 96 bp, Fusarium azukicola
  misc_feature: 204
taaagtttagacttattatatagtctattactaatataaatttctatagagtttttaaaaaatcttaataagctagtatataaaaagcttatttat

SEQ ID NO: 33056 - DNA, 96 bp, Fusarium azukicola
  misc_feature: 204
gtaaattcaatcatcaacaactaaatcccacttttatctgatccaatcagactctttattgtgacccacttttatctatctatcttctataagtct

SEQ ID NO: 33057 - DNA, 96 bp, Fusarium azukicola
  misc_feature: 204
ctcccctctccctctctctcttttcactccttatcctctcctctcccctctccctctctctcttttcactccttctcctctcctctcccctctccc

SEQ ID NO: 33058 - DNA, 96 bp, Fusarium azukicola
  misc_feature: 204
atattaagggtattattctaattggttaaaaaggttcctacagaccttcatgactgccgtcattaatgcatcaaagtataataactgccgattggc

SEQ ID NO: 33059 - DNA, 96 bp, Fusarium azukicola
  misc_feature: 204
ataactttaaaggaggctattaatattctatattatattactaactatagtgatatatccctataaaccatatattatattatagaatttttactc

SEQ ID NO: 33060 - DNA, 96 bp, Fusarium azukicola
  misc_feature: 204
ctcttctctcttttactttaccctatactctcttctctcttttactttaccctccacttttattctttattttactttaccctatactctcttctc

SEQ ID NO: 33061 - DNA, 96 bp, Fusarium azukicola
  misc_feature: 203
ttaggggtagtagttacgttaagggttagggttaattggttgaaattagggttaggggtagtagtagagttaagggttagggttaattggttgaaa

SEQ ID NO: 33062 - DNA, 96 bp, Fusarium azukicola
  misc_feature: 203
ttgcagttttcgcagtttttaacttgatataggtcctcactagtatatttaaagagaggatcttttatttttatatatttaattagacttcttaag

SEQ ID NO: 33063 - DNA, 96 bp, Fusarium azukicola
  misc_feature: 203
ttctagctatatctctctttcttagctttacctctctctcttagctatatctctttttcctagttatacctctctttcttagttatattctcttac

SEQ ID NO: 33064 - DNA, 96 bp, Fusarium azukicola
  misc_feature: 203
tgaatttctatttattattattattattatataatattgccttttcattattataagggctttctttaaagtaaggaatctcattaaaagaggggt

SEQ ID NO: 33065 - DNA, 96 bp, Fusarium azukicola
  misc_feature: 203
atcaagttaaaaactgcgaaaactgcaaactaggaaaattaactaaaaataatataaataaaaaacctagtaataaggaatataagttcctagata

SEQ ID NO: 33066 - DNA, 96 bp, Fusarium azukicola
  misc_feature: 203
taattagttttaattaattagatagtttatagtatttttatagtgatttatatattaaaggttaagaaaagtatttaattcgcttatctatttaac

SEQ ID NO: 33067 - DNA, 96 bp, Fusarium azukicola
  misc_feature: 203
taagtctcactttctaattttagctattttaagcttaatttcgacttttatagcttttttaaaaaataccttttaaggtgaaaatataagtgtctc

SEQ ID NO: 33068 - DNA, 96 bp, Fusarium azukicola
  misc_feature: 203
aacttatattccttattactaggttttttatttatattatttttagttaattttcctagtttatagttttcgcagtttttaacttaatataggtcc

SEQ ID NO: 33069 - DNA, 96 bp, Fusarium azukicola
  misc_feature: 203
gataatataaaggaatatatatataagctaagaccctattatataaagaatggaataaaatataatataagtccgccttataataaataagctaat

SEQ ID NO: 33070 - DNA, 96 bp, Fusarium azukicola
  misc_feature: 203
aatataatatagaatattaatagcctcctttaaagttataatcttataagggttatagctttatacgttcttattattagaggaaaaattaaacct

SEQ ID NO: 33071 - DNA, 96 bp, Fusarium azukicola
  misc_feature: 202
cctaataaggctccaaaaaactggaaaactcaggaagccaataaggtgcataagacttctaagaaaagggaatctaaacctaattctaagaaggaa

SEQ ID NO: 33072 - DNA, 96 bp, Fusarium azukicola
  misc_feature: 202
tacctctctctcttagctatatctctttttcctagttatacctctctttcttagttatattctcttactcttatatctcttttacctctctttctt

SEQ ID NO: 33073 - DNA, 96 bp, Fusarium azukicola
  misc_feature: 202
taataataatagaggtttaatttttcctctaataataagaacgtataaagctataacccttataagattataactttaaaggaggctattaatatt

SEQ ID NO: 33074 - DNA, 96 bp, Fusarium azukicola
  misc_feature: 202
atatcactatagttagtaatataatatagaatattaatagcctcctttaaagttataatcttataagggttatagctttatacgttcttattatta

SEQ ID NO: 33075 - DNA, 96 bp, Fusarium azukicola
  misc_feature: 202
ggtcggtagagaggaggggaaaggagagagggagaggagggaagaagagggaagagaaagagaagttaagaggagtaaagggagtgaagaggaggg

SEQ ID NO: 33076 - DNA, 96 bp, Fusarium azukicola
  misc_feature: 202
ggtaaagtaaaataaagaataaaagtagagggtaaagtaaaataataaagaaagtatagggtaaagaaaataaagaagaaaagtgtataagggtat

SEQ ID NO: 33077 - DNA, 96 bp, Fusarium azukicola
  misc_feature: 202
gattataactttaaaggaggctattaatgttctatattatattactaactatagtgatatatccctataaaccatatattatattatagaattttt

SEQ ID NO: 33078 - DNA, 96 bp, Fusarium azukicola
  misc_feature: 202
aggaatctaaacctaattctaagaaggaagaaagagaaaagaaataagaaaagctatttatagctaattcttcttctttattatctcctaaagccg

SEQ ID NO: 33079 - DNA, 96 bp, Fusarium azukicola
  misc_feature: 202
cctaataaaataagaataaaatcagttttcttagataatataaaggaatatatatataagctaagaccctattatataaagaatggaataaaatat

SEQ ID NO: 33080 - DNA, 96 bp, Fusarium azukicola
  misc_feature: 202
acttttcttctttattttctttaccctatactttctttattattttactttaccctctacttttattctttattttactttaccctatactctctt

SEQ ID NO: 33081 - DNA, 96 bp, Fusarium azukicola
  misc_feature: 201
atagctactataggtagctagatattaagggtattattctaattggttaaaaaggttcctacagaccttcatgactgccgtcattaatgcatcaaa

SEQ ID NO: 33082 - DNA, 96 bp, Fusarium azukicola
  misc_feature: 201
gacccagattgctattttttgcaccctaataaggctccaaaaaactggaaaactcaggaagccaataaggtgcataagacttctaagaaaaaggaa

SEQ ID NO: 33083 - DNA, 96 bp, Fusarium azukicola
  misc_feature: 201
gtagagagaaagtgtagttaagaagaggaggggagaagagaaagaaagtagaggaagaggggagggaaaaaggggagaagagatagagggggttaa

SEQ ID NO: 33084 - DNA, 96 bp, Fusarium azukicola
  misc_feature: 201
tcttttcactccttatcctctcctctcccctctccctctctctcttttcactccttatcctctcctctcccctctccctctctctcttttctctcc

SEQ ID NO: 33085 - DNA, 96 bp, Fusarium azukicola
  misc_feature: 201
tagtgaggacctatattaagttaaaaactgcgaaaactataaactaggaaaattaactaaaaataatataaataaaaaacctagtaataaggaata

SEQ ID NO: 33086 - DNA, 96 bp, Fusarium azukicola
  misc_feature: 201
gagagtatagggtaaagtaaaagagagaagagagtatagggtaaagtaaaagagagaagagagtatagggtaaagtaaaagagagaagagaggata

SEQ ID NO: 33087 - DNA, 96 bp, Fusarium azukicola
  misc_feature: 201
aagctattagcttatttattataaggcggacttatattatattttattccattctttatataatagggtcttagcttatatatatattcctttata

SEQ ID NO: 33088 - DNA, 96 bp, Fusarium azukicola
  misc_feature: 201
atataagtccgcctcataataaataagctaatagctttatagaaaggataaataggactatattagaaaaggttagagctttattatttacttcta

SEQ ID NO: 33089 - DNA, 96 bp, Fusarium azukicola
  misc_feature: 201
taagctgagagggaaaagcaaaatgtgcaggcatatgaaactctatatctgtgaaagtaaacagtgatataatacgtggtcaaaacaaacaaagat

SEQ ID NO: 33090 - DNA, 96 bp, Fusarium azukicola
  misc_feature: 201
aaactgcgaaaactataaactaggaaaattaactaaaaataatataaataaaaaacctagtaataaggaatataagttcctagataaaatagctac

SEQ ID NO: 33091 - DNA, 96 bp, Fusarium azukicola
  misc_feature: 201
aaaggaatctaaacctaattctaagaaggaagaaagagaaaagaaataagaaaagctatttatagctaattcttcttcttcgttatctcctaaagc

SEQ ID NO: 33092 - DNA, 96 bp, Fusarium azukicola
  misc_feature: 201
aaaatagctactgatatatggggtccttctagaatccctacctataataaatatatatactttattaccttcctagatagggctactagatatctg

SEQ ID NO: 33093 - DNA, 96 bp, Fusarium azukicola
  misc_feature: 200
ctatagttagtaatataatatagaacattaatagcctcctttaaagttataatcttataagggttatagctttatacgttcttattattagaggaa

SEQ ID NO: 33094 - DNA, 96 bp, Fusarium azukicola
  misc_feature: 200
aaatatataaataaaaatctctctttaagttttaatagggctatacctcctattttaactaataatctagcagctaagcaattagctgaaaataca

SEQ ID NO: 33095 - DNA, 96 bp, Fusarium azukicola
  misc_feature: 200
tatctaaaagtctatctattaaggaataagtcagaagctattataaaatttaaggaatttagaaaagaaatagaaaataatcctaataaaataaga

SEQ ID NO: 33096 - DNA, 96 bp, Fusarium azukicola
  misc_feature: 200
gtcaatcttctctttataatataacttctattataaataaataagaagtccttcttttaaataagtaaggaaaaataatatcataaggaaaagaga

SEQ ID NO: 33097 - DNA, 96 bp, Fusarium azukicola
  misc_feature: 200
gggctatccgacggtataatcttggtccgaatcggatcctattaggccggtcaaatgactataataagggactatccttctttattagttactata

SEQ ID NO: 33098 - DNA, 96 bp, Fusarium azukicola
  misc_feature: 200
gttatagctttatacgttcttattattagaggaaaaattaaacctctattattattatatatatatcttagtaaaaacccctttattatagaccta

SEQ ID NO: 33099 - DNA, 96 bp, Fusarium azukicola
  misc_feature: 200
tagctttacctctctctcttagctatatctctttttcctagttatacctctctttcttagttatattctcttactcttatatctcttttacctctc

SEQ ID NO: 33100 - DNA, 96 bp, Fusarium azukicola
  misc_feature: 200
taagaacgtataaagctataacccttataagattataactttaaaggaggctattaatattctatattatattaccaactatagtgatatatccct

SEQ ID NO: 33101 - DNA, 96 bp, Fusarium azukicola
  misc_feature: 200
taactttaaaggaggctattaatattctatattatattactaactatagtgatatatccctataaaccatatattatattatagaatttttactct

SEQ ID NO: 33102 - DNA, 96 bp, Fusarium azukicola
  misc_feature: 200
gttattcttattagaaataaccttagctattattatatataggttatttttctcttttccttatgatattatttttccttacttatttaaaagaag

SEQ ID NO: 33103 - DNA, 96 bp, Fusarium azukicola
  misc_feature: 200
ataagaacgtataaagctataacccttataagattataactttaaaggaggctattaatattctatattatattaccaactatagtgatatatccc

SEQ ID NO: 33104 - DNA, 96 bp, Fusarium azukicola
  misc_feature: 200
gatattaagggtattattctaattggttaaaaaggttcctacagaccttcatgactgccgtcattaatgcatcaaagtataataactgccgattgg

SEQ ID NO: 33105 - DNA, 96 bp, Fusarium azukicola
  misc_feature: 200
gaatctaaacctaattctaagaaggaagaaagagaaaagaaataagaaaagctatttatagctaattcttcttctttattatctcctaaagccgag

SEQ ID NO: 33106 - DNA, 96 bp, Fusarium azukicola
  misc_feature: 200
cttatctcttatctcttatctcttatttctctcttttctagctatatctctctttcttagctttacctctctctcttagctatatctctttttcct

SEQ ID NO: 33107 - DNA, 96 bp, Fusarium azukicola
  misc_feature: 200
atttaggtaggttagaagtaaataataaagctctaaccttttctaatatagtcctatttatcctttctataaagccattagcttatttattatgag

SEQ ID NO: 33108 - DNA, 96 bp, Fusarium azukicola
  misc_feature: 200
agtgaggacctatattaagttaaaaactgcgaaaactataaactaggaaaattaactaaaaataatataaataaaaaacctagtaataaggaatat

SEQ ID NO: 33109 - DNA, 96 bp, Fusarium azukicola
  misc_feature: 199
ataataaaaaccctttataaaggaaataagttatattagggatagattctcttttattctcttaaatagtataggttataagcttttagtaaagaa

SEQ ID NO: 33110 - DNA, 96 bp, Fusarium azukicola
  misc_feature: 199
tcttagttatattctcttactcttatatctcttttacctctctttcttaagaaaatctcctctctttacttataagctatatctttagctagaaga

SEQ ID NO: 33111 - DNA, 96 bp, Fusarium azukicola
  misc_feature: 199
acactatgtaattaactatttcactataaacagaattttttaaaaatctaaaaaaatcatttttagactttattaagagttagatttatagaaata

SEQ ID NO: 33112 - DNA, 96 bp, Fusarium azukicola
  misc_feature: 199
tatttattattattattattatataatattgcctttttattattataagggctttctttaaagtaaggaatctcattaaaagaggggttatttcct

SEQ ID NO: 33113 - DNA, 96 bp, Fusarium azukicola
  misc_feature: 199
aagaacgtataaagctataacccttataagattataactttaaaggaggctattaatgttctatattatattaccaactatagtgatatatcccta

SEQ ID NO: 33114 - DNA, 96 bp, Fusarium azukicola
  misc_feature: 199
taatattctatattatattactaactatagtgatatatccctataaactatatattatattatagaatttttactctatttttaggtatatttacc

SEQ ID NO: 33115 - DNA, 96 bp, Fusarium azukicola
  misc_feature: 199
taatatagtcctatttatcctttctataaagctattagcttatttattatgaggcggacttatattatattttattccattctttatataataggg

SEQ ID NO: 33116 - DNA, 96 bp, Fusarium azukicola
  misc_feature: 199
taagagactagaaaaaatagattctaatgagatatatttttctaagacttctaagccttagaaaaagaagaaaactgccttaaaatgcagttattg

SEQ ID NO: 33117 - DNA, 96 bp, Fusarium azukicola
  misc_feature: 199
ggaggctattaatgttctatattatattactaactatagtgatatatccctataaaccatatattatattatagaatttttactctatttttaggt

SEQ ID NO: 33118 - DNA, 96 bp, Fusarium azukicola
  misc_feature: 199
ctaatttcaaccaattaaccctaacccttaactctactactacccctaaccctaatttcaaccaattaaccctaacccttaacttaactactactc

SEQ ID NO: 33119 - DNA, 96 bp, Fusarium azukicola
  misc_feature: 199
gaacttatattccttattactaggttttttatttatattatttttagttaattttcctagtttatagttttcgcagtttttaacttaatataggtc

SEQ ID NO: 33120 - DNA, 96 bp, Fusarium azukicola
  misc_feature: 199
gacctagcagtttgcaataactgcattttaaggcagttttcttctttttccaaggcttagaagtcttagaaaaatatatctcattagaatctgttt

SEQ ID NO: 33121 - DNA, 96 bp, Fusarium azukicola
  misc_feature: 199
cttttcttctttattttctttaccctatactttctttattattttactttaccctctacttttattctttattttactttaccctatactctcttc

SEQ ID NO: 33122 - DNA, 96 bp, Fusarium azukicola
  misc_feature: 199
ccaaaaaactggaaaactcaggaagccaataaggtgcataagacttctaagaaaagggaatctaaacctaattctaagaaggaagaaagagaaaag

SEQ ID NO: 33123 - DNA, 96 bp, Fusarium azukicola
  misc_feature: 199
ataacgaagaagaagaattagctataaatagcttttcttatttcttttctctttcttccttcttagaattaggtttagattcctttttcttagaag

SEQ ID NO: 33124 - DNA, 96 bp, Fusarium azukicola
  misc_feature: 199
aagtctaaaaatgatttttttagatttttaaaaaattctgtttatagtgaaatagttaattacatagtgtaaataggttttttatatactagctat

SEQ ID NO: 33125 - DNA, 96 bp, Fusarium azukicola
  misc_feature: 199
agctttacctctctctcttagctatatctctttttcctagttatacctctctttcttagttatattctcttactcttatatctcttttacctctct

SEQ ID NO: 33126 - DNA, 96 bp, Fusarium azukicola
  misc_feature: 199
agaattagctataaatagcttttcttatttcttttctctttcttccttcttagaattaggtttagattcctttttcttagaagtcttatgtacctt

SEQ ID NO: 33127 - DNA, 96 bp, Fusarium azukicola
  misc_feature: 199
acaggttatgagcccggaggtctcttcctaagggtttatacttaaaagaagattatacttcttttttaagtcttttctaagactttatacctcctt

SEQ ID NO: 33128 - DNA, 96 bp, Fusarium azukicola
  misc_feature: 198
ttttggagccttattagggtgcaaaaaatagcaatctgggtctttatgacctagcagtttgcaataactgcattttaaggcagttttcttcttttt

SEQ ID NO: 33129 - DNA, 96 bp, Fusarium azukicola
  misc_feature: 198
tttcttctagctaaagatatagcttataagtaaagagaggagattttcttaagaaagagaggtaaaagagatataagagtaagagaatataactaa

SEQ ID NO: 33130 - DNA, 96 bp, Fusarium azukicola
  misc_feature: 198
ttcttctttattttctttaccctatactttctttattattttactttaccctctacttttattctttattttactttaccctatactctcttctct

SEQ ID NO: 33131 - DNA, 96 bp, Fusarium azukicola
  misc_feature: 198
ttatatatagaaaagaatttctagttaattttagaaaaataaataaaaatattacttagggaaaagccgcttctcttcctatattaggaatcggtg

SEQ ID NO: 33132 - DNA, 96 bp, Fusarium azukicola
  misc_feature: 198
ttatactctcttcttatacccttatacacttttcttctttattttctttaccctatactttctttattattttactttaccctctacttttattct

SEQ ID NO: 33133 - DNA, 96 bp, Fusarium azukicola
  misc_feature: 198
agggattctagaaggaccctatatattagtagctattttatctaggaacttatattccttattattaggttttttatttatattatttttagttaa

SEQ ID NO: 33134 - DNA, 96 bp, Fusarium azukicola
  misc_feature: 198
ttaaaattaagaaaagccttatatagcctaaaataaagccctagattatagtataaccttctctctaaattattaaataatttaggcttctatact

SEQ ID NO: 33135 - DNA, 96 bp, Fusarium azukicola
  misc_feature: 198
agaagagagtatagggtaaagtaaaataaagaataaaagtggagggtaaagtaaaagagagaagagagtatagggtaaagtaaaagagagaagaga

SEQ ID NO: 33136 - DNA, 96 bp, Fusarium azukicola
  misc_feature: 198
ggagaggagaggataaggagtgaaaagagagagagggagaggggagaggagaggataaggagtgaaaagagagagagggagaggggagaggagaga

SEQ ID NO: 33137 - DNA, 96 bp, Fusarium azukicola
  misc_feature: 198
tattcctttatattatctaagaaaactaattttattcttattttattaggattattttctatttcttttctaaattccttaaattttataatagct

SEQ ID NO: 33138 - DNA, 96 bp, Fusarium azukicola
  misc_feature: 198
aagactttttaggaataaatataactataaatagagagaataagagtatatctttttcataagcaaaatatataaataaaataataaggaaatata

SEQ ID NO: 33139 - DNA, 96 bp, Fusarium azukicola
  misc_feature: 198
tataatagggtcttagcttatatatatattcctttatattatctaagaaaactaattttattcttattttattaggattattttctatttcttttc

SEQ ID NO: 33140 - DNA, 96 bp, Fusarium azukicola
  misc_feature: 198
gtgaatttctatttattattattattattatataatattgccttttcattattataagggctttctttaaagtaaggaatctcattaaaagagggg

SEQ ID NO: 33141 - DNA, 96 bp, Fusarium azukicola
  misc_feature: 198
agctattagcttatttattataaggcggacttatattatattttattccattctttatataatagggtcttagcttatatatatattcctttatat

SEQ ID NO: 33142 - DNA, 96 bp, Fusarium azukicola
  misc_feature: 198
aatataagtccgccttataataaataagctaatagctttatagaaaggataaataggactatattagaaaaggttagagctttattatttacttct

SEQ ID NO: 33143 - DNA, 96 bp, Fusarium azukicola
  misc_feature: 197
ttctttactaaaagcttacaacctatactatttgagagaataaaagagaatctatccctaatataacttatttcctttataaagggtttttattat

SEQ ID NO: 33144 - DNA, 96 bp, Fusarium azukicola
  misc_feature: 197
ttctctctaaattattaaataatttaggcttctatactatcccttttaataaagctctctttataaataagaacttaaagattactatagctattt

SEQ ID NO: 33145 - DNA, 96 bp, Fusarium azukicola
  misc_feature: 197
tccttaatatctaaggaaatattatctctaacttctagaggggatttattatttaaagccgaatgcgggcttctattatatatatatacggctact

SEQ ID NO: 33146 - DNA, 96 bp, Fusarium azukicola
  misc_feature: 197
aaagtctaaaaatgatttttttagatttttaaaaaattctgtttatagtgaaatagttaattacatagtgtaaataggttttttatatactagcta

SEQ ID NO: 33147 - DNA, 96 bp, Fusarium azukicola
  misc_feature: 197
taataataagaacgtataaagctataacccttataagattataactttaaaggaggctattaatgttctatattatattaccaactatagtgatat

SEQ ID NO: 33148 - DNA, 96 bp, Fusarium azukicola
  misc_feature: 197
caggttatgagcccggaggtctcttcctaagggtttatacttaaaagaagattatacttcttttttaagtcttttctaagactttatacctcctta

SEQ ID NO: 33149 - DNA, 96 bp, Fusarium azukicola
  misc_feature: 197
attaatattctatattatattactaactatagtgatatatccctataaactatatattatattatagaatttttactctatttttaggtatattta

SEQ ID NO: 33150 - DNA, 96 bp, Fusarium azukicola
  misc_feature: 197
gtataaagctataacccttataagattataactttaaaggaggctattaatgttctatattatattaccaactatagtgatatatccctataaacc

SEQ ID NO: 33151 - DNA, 96 bp, Fusarium azukicola
  misc_feature: 197
gggtattattctaattggttaaaaaggttcctacagaccttcatgactgccgtcatcaatgcatcaaagtataataactgccgattggctaaaaag

SEQ ID NO: 33152 - DNA, 96 bp, Fusarium azukicola
  misc_feature: 197
ggaacttatattccttattactaggttttttatttatattatttttagttaattttcctagtttatagttttcgcagtttttaacttaatataggt

SEQ ID NO: 33153 - DNA, 96 bp, Fusarium azukicola
  misc_feature: 197
agttagatctataagattactttttttaagtttctagctattttatagcagtttttagaaacttaggttttagcgatttttagttatatagtatgc

SEQ ID NO: 33154 - DNA, 96 bp, Fusarium azukicola
  misc_feature: 197
attagttttaattaattagatagtttatagtatttttatagtgatttatatattaaaggttaagaaaagtatttaattcgcttatctatttaactc

SEQ ID NO: 33155 - DNA, 96 bp, Fusarium azukicola
  misc_feature: 197
gagataagagataaagaaataagaaataagagataagagataaagggaggcaaaaatagccttaagaagccctagaagtattccagatcgacctgg

SEQ ID NO: 33156 - DNA, 96 bp, Fusarium azukicola
  misc_feature: 197
ctttacctctctctcttagctatatctctttttcctagttatacctctctttcttagttatattctcttactcttatatctcttttacctctcttt

SEQ ID NO: 33157 - DNA, 96 bp, Fusarium azukicola
  misc_feature: 197
cttagtaaaaacccctttattatagacctgatattataagggaaaatctaagattatatagggaaaagtattaaaatacaataaaaaccctttatg

SEQ ID NO: 33158 - DNA, 96 bp, Fusarium azukicola
  misc_feature: 197
atagcttttcttatttcttttctctttcttccttcttagaattaggtttagattcctttttcttagaagtcttatataccttattagcttcctgag

SEQ ID NO: 33159 - DNA, 96 bp, Fusarium azukicola
  misc_feature: 197
agaacgtataaagctataacccttataagattataactttaaaggaggctattaatattctatattatattaccaactatagtgatatatccctat

SEQ ID NO: 33160 - DNA, 96 bp, Fusarium azukicola
  misc_feature: 197
aattagctataaatagcttttcttatttcttttctctttcttccttcttagaattaggtttagattcctttttcttagaagtcttatgtaccttat

SEQ ID NO: 33161 - DNA, 96 bp, Fusarium azukicola
  misc_feature: 196
ttttctaatatagtcctatttatcctttctataaagctattagcttatttattatgaggcggacttatattatattttattccattctttatataa

SEQ ID NO: 33162 - DNA, 96 bp, Fusarium azukicola
  misc_feature: 196
tatagttagtaatataatatagaacattaatagcctcctttaaagttataatcttataagggttatagctttatacgttcttattattagaggaaa

SEQ ID NO: 33163 - DNA, 96 bp, Fusarium azukicola
  misc_feature: 196
ttcttattagaaataaccttagctattattatatataggttatttttctcttttccttataatattatttttccttacttatttaaaagaaggact

SEQ ID NO: 33164 - DNA, 96 bp, Fusarium azukicola
  misc_feature: 196
ttctctcctctcccctctccctctctctcttttcactccttatcctctcctctcccctctccctctctctcttttcactccttatcctctcctctc

SEQ ID NO: 33165 - DNA, 96 bp, Fusarium azukicola
  misc_feature: 196
gataagagataagagataagagataagagataaagaaataagaaataagagataagagataaagggaggcaaaaatagccttaagaagccctagaa

SEQ ID NO: 33166 - DNA, 96 bp, Fusarium azukicola
  misc_feature: 196
ttatgttaatgttctatattatattaccaactatagtgatatatccctataaaccacatattatattatagaatttttactctatttttaggtata

SEQ ID NO: 33167 - DNA, 96 bp, Fusarium azukicola
  misc_feature: 196
taaagactttttaggaataaatataactataaatagagagaataagagtatatctttttcataagcaaaatatataaataaaataataaggaaata

SEQ ID NO: 33168 - DNA, 96 bp, Fusarium azukicola
  misc_feature: 196
tattaatagcctcctttaaagttataatcttataagggttatagctttatacgttcttattattagaggaaaaattaaacctctattattattata

SEQ ID NO: 33169 - DNA, 96 bp, Fusarium azukicola
  misc_feature: 196
aaggaatatatatataagctaagaccctattatataaagaatggaataaaatataatataagtccgccttataataaataagctaatagctttata

SEQ ID NO: 33170 - DNA, 96 bp, Fusarium azukicola
  misc_feature: 196
tacactatgtaattaactatttcactataaacagaattttttaaaaatctaaaaaaatcatttttagactttattaagagttagatttatagaaat

SEQ ID NO: 33171 - DNA, 96 bp, Fusarium azukicola
  misc_feature: 196
atagctaaggttatttctaataagaataactatagactaagagataacttagatcttcctattttaaatataaaggaaaaaactagtctttttaac

SEQ ID NO: 33172 - DNA, 96 bp, Fusarium azukicola
  misc_feature: 196
gtatagggtaaagtaaaagagagaagagagtatagggtaaagtaaaagagagaagagagtatagggtaaagtaaaagagagaagagagtatagggg

SEQ ID NO: 33173 - DNA, 96 bp, Fusarium azukicola
  misc_feature: 196
ggattctagaaggaccctatatattagtagctattttatctaggaacttatattccttattattaggttttttatttatattatttttagttaatt

SEQ ID NO: 33174 - DNA, 96 bp, Fusarium azukicola
  misc_feature: 196
atatagaatattaatagcctcctttaaagttataatcttataagggttatagctttatacgttcttattattagaggaaaaaattaaacctctatt

SEQ ID NO: 33175 - DNA, 96 bp, Fusarium azukicola
  misc_feature: 196
agaggtttaattttttcctctaataataagaacgtataaagctataacccttataagattataactttaaaggaggctattaatattctatattat

SEQ ID NO: 33176 - DNA, 96 bp, Fusarium azukicola
  misc_feature: 195
ttttaagtcttttttaagactatatctcaactatggccactaagtataatatttcccggcttattggaagcgagaattatattacttgggctttga

SEQ ID NO: 33177 - DNA, 96 bp, Fusarium azukicola
  misc_feature: 195
tagagagaaagtgtagttaagaagaggaggggagaagagaaagaaagtagaggaagaggggagggaaaaaggggagaagagatagagggggttaaa

SEQ ID NO: 33178 - DNA, 96 bp, Fusarium azukicola
  misc_feature: 195
ttattagggtgcaaaaaatagcaatctgggtctttatgacctagcagtttgcaataactgcattttaaggcagttttcttctttttccaaggctta

SEQ ID NO: 33179 - DNA, 96 bp, Fusarium azukicola
  misc_feature: 195
agactttttaggaataaatataactataaatagagagaataagagtatatctttttcataagcaaaatatataaataaaataataaggaaatataa

SEQ ID NO: 33180 - DNA, 96 bp, Fusarium azukicola
  misc_feature: 195
tggcttagttatagcaaaaaccggttttgatggatagaatgcaacgctgaaggttttaggaaccttcctagccaatcggcaggtattatactttta

SEQ ID NO: 33181 - DNA, 96 bp, Fusarium azukicola
  misc_feature: 195
tctcttagctatatctctttttcctagttatacctctctttcttagttatattctcttactcttatatctcttttacctctctttcttaagaaaat

SEQ ID NO: 33182 - DNA, 96 bp, Fusarium azukicola
  misc_feature: 195
ctttcttagttatattctcttactcttatatctcttttacctctctttcttaagaaaatctcctctctttacttataagctatatctttagctaga

SEQ ID NO: 33183 - DNA, 96 bp, Fusarium azukicola
  misc_feature: 195
tcataataaataagctaatggctttatagaaaggataaataggactatattagaaaaggttagagctttattatttacttctaacctacctaaata

SEQ ID NO: 33184 - DNA, 96 bp, Fusarium azukicola
  misc_feature: 195
gaggctattaatgttctatattatattactaactatagtgatatatccctataaaccatatattatattatagaatttttactctatttttaggta

SEQ ID NO: 33185 - DNA, 96 bp, Fusarium azukicola
  misc_feature: 195
aatataatataagtccgccttataataaataagctaatagctttatagaaaggataaataggactatattagaaaaggttagagctttattattta

SEQ ID NO: 33186 - DNA, 96 bp, Fusarium azukicola
  misc_feature: 195
cttcttatacccttatacacttttcttctttattttctttaccctatactttctttattattttactttaccctctacttttattctttattttac

SEQ ID NO: 33187 - DNA, 96 bp, Fusarium azukicola
  misc_feature: 195
aataagaacgtataaagctataacccttataagattataactttaaaggaggctattaatattctatattatattaccaactatagtgatatatcc

SEQ ID NO: 33188 - DNA, 96 bp, Fusarium azukicola
  misc_feature: 195
gagtcttgctagcatctttgtttgttttgaccacgtattatatcactgtttactttcacagatatagagtttcatatgcctgcacattttgctttt

SEQ ID NO: 33189 - DNA, 96 bp, Fusarium azukicola
  misc_feature: 195
gaatttttactctatttttaggtatatttacctaacctatagctactataggtagctagatattaagggtattattctaattggttaaaaagggtc

SEQ ID NO: 33190 - DNA, 96 bp, Fusarium azukicola
  misc_feature: 195
ctaataaagctccaaaaaactggaaaactcaggaagccaataaggtgcataagacttctaagaaaaaggaatctaaacctaattctaagaaggaag

SEQ ID NO: 33191 - DNA, 96 bp, Fusarium azukicola
  misc_feature: 195
cttattagggtgcaaaaaatagcaatctgggtctttatgacctagcagtttgcaataactgcattttaaggcagttttcttctttttccaaggctt

SEQ ID NO: 33192 - DNA, 96 bp, Fusarium azukicola
  misc_feature: 195
aagacccagattgctattttttgcaccctaataaggctccaaaaaactggaaaactcaggaagccaataaggtgcataagacttctaagaaaaagg

SEQ ID NO: 33193 - DNA, 96 bp, Fusarium azukicola
  misc_feature: 195
ataggactatattagaaaaggttagagctttattatttacttctaacctacctaaatacctttggggagaggctgtggaagcagccggatatatat

SEQ ID NO: 33194 - DNA, 96 bp, Fusarium azukicola
  misc_feature: 195
aatatagaatattaatagcctcctttaaagttataatcttataagggttatagctttatacgttcttattattagaggaaaaaattaaacctctat

SEQ ID NO: 33195 - DNA, 96 bp, Fusarium azukicola
  misc_feature: 194
tccaaaaaactggaaaactcaggaagccaataaggtgcataagacttctaagaaaagggaatctaaacctaattctaagaaggaagaaagagaaaa

SEQ ID NO: 33196 - DNA, 96 bp, Fusarium azukicola
  misc_feature: 194
atagggtaaagtaaaagagagaagagagtatagggtaaagtaaaagagagaagagagtatagggtaaagtaaaagagagaagagagtataggggaa

SEQ ID NO: 33197 - DNA, 96 bp, Fusarium azukicola
  misc_feature: 194
tcttctctcttttactttaccctatactctcttctctcttttactttaccctccacttttattctttattttactttaccctatactctcttctct

SEQ ID NO: 33198 - DNA, 96 bp, Fusarium azukicola
  misc_feature: 194
cttttctaatatagtcctatttatcctttctataaagctattagcttatttattatgaggcggacttatattatattttattccattctttatata

SEQ ID NO: 33199 - DNA, 96 bp, Fusarium azukicola
  misc_feature: 194
aactttaaaggaggctattaatattctatattatattactaactatagtgatatatccctataaaccatatattatattatagaatttttactcta

SEQ ID NO: 33200 - DNA, 96 bp, Fusarium azukicola
  misc_feature: 194
cataagctttaaggagtaatcctaaggcttataacctagaatcactttcttctagccttatagataaatctaagagactagaaaaaatagattcta

SEQ ID NO: 33201 - DNA, 96 bp, Fusarium azukicola
  misc_feature: 194
acctctctctcttagctatatctctttttcctagttatacctctctttcttagttatattctcttactcttatatctcttttacctctctttctta

SEQ ID NO: 33202 - DNA, 96 bp, Fusarium azukicola
  misc_feature: 194
ggaccctatatattagtagctattttatctaggaacttatattccttattactaggttttttatttatattatttttagttaattttcctagttta

SEQ ID NO: 33203 - DNA, 96 bp, Fusarium azukicola
  misc_feature: 194
gctttacctctctctcttagctatatctctttttcctagttatacctctctttcttagttatattctcttactcttatatctcttttacctctctt

SEQ ID NO: 33204 - DNA, 96 bp, Fusarium azukicola
  misc_feature: 194
gaggacctatattaagttaaaaactgcgaaaactataaactaggaaaattaactaaaaataatataaataaaaaacctagtaataaggaatataag

SEQ ID NO: 33205 - DNA, 96 bp, Fusarium azukicola
  misc_feature: 194
atatctaaaagtctatctattaaggaataagtcagaagctattataaaatttaaggaatttagaaaagaaatagaaaataatcctaataaaataag

SEQ ID NO: 33206 - DNA, 96 bp, Fusarium azukicola
  misc_feature: 194
cttatttctctcttttctagctatatctctctttcttagctttacctctctctcttagctatatctctttttcctagttatacctctctttcttag

SEQ ID NO: 33207 - DNA, 96 bp, Fusarium azukicola
  misc_feature: 194
agaataaaatcagttttcttagataatataaaggaatatatatataagctaagaccctattatataaagaatggaataaaatataatataagtccg

SEQ ID NO: 33208 - DNA, 96 bp, Fusarium azukicola
  misc_feature: 194
ataaatctatttaaaattaagaaaagccttatatagcctaaaataaagccctagattatggtataaccttctctctaaattattaaataatttagg

SEQ ID NO: 33209 - DNA, 96 bp, Fusarium azukicola
  misc_feature: 194
caagcgagtgcaacagaggtactatatactaaaactaggttttttaaaaaatcctagaaaattcaaactaactctaaaatagctaaaatttaaagt

SEQ ID NO: 33210 - DNA, 96 bp, Fusarium azukicola
  misc_feature: 194
agggtaaagtaaaataaagaataaaagtagagggtaaagtaaaataataaagaaagtatagggtaaagaaaataaagaagaaaagtgtataagggt

SEQ ID NO: 33211 - DNA, 96 bp, Fusarium azukicola
  misc_feature: 194
aagcgagtgcaacagaggtactatatactaaaactaggttttttaaaaaatcctagaaaattcaaactaactctaaaatagctaaaatttaaagtt

SEQ ID NO: 33212 - DNA, 96 bp, Fusarium azukicola
  misc_feature: 193
tttctagctatatctctctttcttagctttacctctctctcttagctatatctctttttcctagttatacctctctttcttagttatattctctta

SEQ ID NO: 33213 - DNA, 96 bp, Fusarium azukicola
  misc_feature: 193
ctatataaccaaaaaacagctaaaccttaatttctaaaaactgctataaaatagctaggaagataaaaagagtatttctataaatctaactcttaa

SEQ ID NO: 33214 - DNA, 96 bp, Fusarium azukicola
  misc_feature: 193
ttaacctaatctaaaattttaagttatttttaccttaatttgaatttttaaagaattcttttctatttagtgtaaactagtacaaattttaagtgt

SEQ ID NO: 33215 - DNA, 96 bp, Fusarium azukicola
  misc_feature: 193
ataagctgagagggaaaagcaaaatgtgcaggcatatgaaactctatatctgtgaaagtaaacagtgatataatacgtggtcaaaacaaacaaaga

SEQ ID NO: 33216 - DNA, 96 bp, Fusarium azukicola
  misc_feature: 193
attatttattattataatcgtaataacgaaagaggaagaagaagaagaagaagaagaagaagaaggaaaaaaagacctatttgtagtgccgaaaga

SEQ ID NO: 33217 - DNA, 96 bp, Fusarium azukicola
  misc_feature: 193
tcttatttctctcttttctagctatatctctctttcttagctttacctctctctcttagctatatctctttttcctagttatacctctctttctta

SEQ ID NO: 33218 - DNA, 96 bp, Fusarium azukicola
  misc_feature: 193
tctaaagtacctattaaatttatagaaagactcttaaaatctaaagaaccttcttctctagaagatataaagtaattccaaaaggaaataggttct

SEQ ID NO: 33219 - DNA, 96 bp, Fusarium azukicola
  misc_feature: 193
tagttagatctataagattactttttttaagtttctagctattttatagcagtttttagaaacttaggttttagcgatttttagttatatagtatg

SEQ ID NO: 33220 - DNA, 96 bp, Fusarium azukicola
  misc_feature: 193
tagctaaatagttaaaatcgttttttttaagtttctagctattttatagcgatttttagaaacttagggtttagctgtttttagttatacagtatg

SEQ ID NO: 33221 - DNA, 96 bp, Fusarium azukicola
  misc_feature: 193
taataagaacgtataaagctataacccttataagattataactttaaaggaggctattaatattctatattatattaccaactatagtgatatatc

SEQ ID NO: 33222 - DNA, 96 bp, Fusarium azukicola
  misc_feature: 193
attataactttaaaggaggctattaatgttctatattatattactaactatagtgatatatccctataaaccatatattatattatagaattttta

SEQ ID NO: 33223 - DNA, 96 bp, Fusarium azukicola
  misc_feature: 193
cactatgtaattaactatttcactataaacagaattttttaaaaatctaaaaaaatcatttttagactttattaagagttagatttatagaaatac

SEQ ID NO: 33224 - DNA, 96 bp, Fusarium azukicola
  misc_feature: 193
gtattattctaattggttaaaaaggttcctacagaccttcatgactgccgtcatcaatgcatcaaagtataataactgccgattggctaaaaaaag

SEQ ID NO: 33225 - DNA, 96 bp, Fusarium azukicola
  misc_feature: 193
ggcttagttatagcaaaaaccggttttgatggatagaatgcaacgctgaaggttttaggaaccttcctagccaatcggcaggtattatacttttat

SEQ ID NO: 33226 - DNA, 96 bp, Fusarium azukicola
  misc_feature: 193
gctaaggttatttctaataagaataactatagactaagagataacttagatcttcctattttaaatataaaggaaaaaactagtctttttaactag

SEQ ID NO: 33227 - DNA, 96 bp, Fusarium azukicola
  misc_feature: 193
aagagactagaaaaaatagattctaatgagatatatttttctaagacttctaagccttagaaaaagaagaaaactgccttaaaatgcagttattgc

SEQ ID NO: 33228 - DNA, 96 bp, Fusarium azukicola
  misc_feature: 193
gaatttctatttattattattattattatataatattgcctttttattattataagggctttctttaaagtaaggaatctcattaaaagaggggtt

SEQ ID NO: 33229 - DNA, 96 bp, Fusarium azukicola
  misc_feature: 193
aaaagagatatagctaagagagagaggtaaagctaagaaagagagatatagctagaaaagagagaaataagagataagagataagagataagagat

SEQ ID NO: 33230 - DNA, 96 bp, Fusarium azukicola
  misc_feature: 193
aaagactttttaggaataaatataactataaatagagagaataagagtatatctttttcataagcaaaatatataaataaaataataaggaaatat

SEQ ID NO: 33231 - DNA, 96 bp, Fusarium azukicola
  misc_feature: 193
aatttcaaccaattaaccctaacccttaactctactactacccctaaccctaatttcaaccaattaaccctaacccttaacttaactactactctt

SEQ ID NO: 33232 - DNA, 96 bp, Fusarium azukicola
  misc_feature: 192
ttttcctagttatacctctctttcttagttatattctcttactcttatatctcttttacctctctttcttaagaaaatctcctctctttacttata

SEQ ID NO: 33233 - DNA, 96 bp, Fusarium azukicola
  misc_feature: 192
tataataaaaaccctttataaaggaaataagttatattagggatagattctcttttattctcttaaatagtataggttataagcttttagtaaaga

SEQ ID NO: 33234 - DNA, 96 bp, Fusarium azukicola
  misc_feature: 192
tctctcttttactttaccctatactctcttctctcttttactttaccctccacttttattctttattttactttaccctatactctcttctctctt

SEQ ID NO: 33235 - DNA, 96 bp, Fusarium azukicola
  misc_feature: 192
agataagagataagagataagagataagagataaagaaataagaaataagagataagagataaagggaggcaaaaatagccttaagaagccctaga

SEQ ID NO: 33236 - DNA, 96 bp, Fusarium azukicola
  misc_feature: 192
tctaaaagtctatctattaaggaataagtcagaagctattataaaatttaaggaatttagaaaagaaatagaaaataatcctaataaaataagaat

SEQ ID NO: 33237 - DNA, 96 bp, Fusarium azukicola
  misc_feature: 192
ggaatctaaacctaattctaagaaggaagaaagagaaaagaaataagaaaagctatttatagctaattcttcttctttattatctcctaaagccga

SEQ ID NO: 33238 - DNA, 96 bp, Fusarium azukicola
  misc_feature: 192
atttcaaccaattaaccctaacccttaactctactactacccctaaccctaatttcaaccaattaaccctaacccttaacttaactactactctta

SEQ ID NO: 33239 - DNA, 96 bp, Fusarium azukicola
  misc_feature: 192
agtctatctattaaggaataagttagaagctattataaaatttaaggaatttagaaaagaaatagaaaataatcctaataaaataagaataaaatc

SEQ ID NO: 33240 - DNA, 96 bp, Fusarium azukicola
  misc_feature: 192
aagccaataaggtatataagacttctaagaaaaaggaatctaaacctaattctaagaaggaagaaagagaaaagaaataagaaaagctatttatag

SEQ ID NO: 33241 - DNA, 96 bp, Fusarium azukicola
  misc_feature: 192
attaacctaatctaaaattttaagttatttttaccttaatttgaatttttaaagaattcttttctatttagtgtaaactagtacaaattttaagtg

SEQ ID NO: 33242 - DNA, 96 bp, Fusarium azukicola
  misc_feature: 192
atcctaataaaataagaataaaatcagttttcttagataatataaaggaatatatatataagctaagaccctattatataaagaatggaataaaat

SEQ ID NO: 33243 - DNA, 96 bp, Fusarium azukicola
  misc_feature: 192
aggtttaattttttcctctaataataagaacgtataaagctataacccttataagattataactttaaaggaggctattaatattctatattatat

SEQ ID NO: 33244 - DNA, 96 bp, Fusarium azukicola
  misc_feature: 191
tttaagtcttttttaagactatatctcaactatggccactaagtataatatttcccggcttattggaagcgagaattatattacttgggctttgag

SEQ ID NO: 33245 - DNA, 96 bp, Fusarium azukicola
  misc_feature: 191
ataagcaaaatatataaataaaataataaggaaatataataaataagaaataggaacttctaaagtacctattaaatttatagaaagactcttaaa

SEQ ID NO: 33246 - DNA, 96 bp, Fusarium azukicola
  misc_feature: 191
ttctctcttttactttaccctatactctcttctctcttttactttaccctccacttttattctttattttactttaccctatactctcttctctct

SEQ ID NO: 33247 - DNA, 96 bp, Fusarium azukicola
  misc_feature: 191
ttccttaatatctaaggaaatattatctctaacttctagaggggatttattatttaaagccgaatgcgggcttctattatatatatatacggctgg

SEQ ID NO: 33248 - DNA, 96 bp, Fusarium azukicola
  misc_feature: 191
ataaggaaaaataatattataaggaaaagagaaaaataacctatatataataatagctaaggttatttctaataagaataactatagactaagaga

SEQ ID NO: 33249 - DNA, 96 bp, Fusarium azukicola
  misc_feature: 191
tctatctattaaggaataagttagaagctattataaaatttaaggaatttagaaaagaaatagaaaataatcctaataaaataagaataaaatcag

SEQ ID NO: 33250 - DNA, 96 bp, Fusarium azukicola
  misc_feature: 191
tctaataataagaacgtataaagctataacccttataagattataactttaaaggaggctattaatgttctatattatattaccaactatagtgat

SEQ ID NO: 33251 - DNA, 96 bp, Fusarium azukicola
  misc_feature: 191
agacccagattgctattttttgcaccctaataaggctccaaaaaactggaaaactcaggaagccaataaggtgcataagacttctaagaaaaagga

SEQ ID NO: 33252 - DNA, 96 bp, Fusarium azukicola
  misc_feature: 191
ctaggaaaaagagatatagctaagagagagaggtaaagctaagaaagagagatatagctagaaaagagagaaataaaagataagagataagagata

SEQ ID NO: 33253 - DNA, 96 bp, Fusarium azukicola
  misc_feature: 191
aataataagaacgtataaagctataacccttataagattataactttaaaggaggctattaatgttctatattatattactaactatagtgatata

SEQ ID NO: 33254 - DNA, 96 bp, Fusarium azukicola
  misc_feature: 191
caaaatatataaataaaataataaggaaatataataaataagaaataggaacttctaaagtacctattaaatttatagaaagactcttaaaatcta

SEQ ID NO: 33255 - DNA, 96 bp, Fusarium azukicola
  misc_feature: 191
gggtaaagtaaaataaagaataaaagtagagggtaaagtaaaataataaagaaagtatagggtaaagaaaataaagaagaaaagtgtataagggta

SEQ ID NO: 33256 - DNA, 96 bp, Fusarium azukicola
  misc_feature: 191
gggattctagaaggaccctatatattagtagctattttatctaggaacttatattccttattattaggttttttatttatattatttttagttaat

SEQ ID NO: 33257 - DNA, 96 bp, Fusarium azukicola
  misc_feature: 191
atacacttttcttctttattttctttaccctatactttctttattattttactttaccctctacttttattctttattttactttaccctatactc

SEQ ID NO: 33258 - DNA, 96 bp, Fusarium azukicola
  misc_feature: 191
agagagaagagagtatagggtaaagtaaaataaagaataaaagtagagggtaaagtaaaataataaagaaagtatagggtaaagaaaataaagaag

SEQ ID NO: 33259 - DNA, 96 bp, Fusarium azukicola
  misc_feature: 191
aagctctaaccttttctaatatagtcctatttatcctttctataaagctattagcttatttattatgaggcggacttatattatattttattccat

SEQ ID NO: 33260 - DNA, 96 bp, Fusarium azukicola
  misc_feature: 191
agcttttcttatttcttttctctttcttccttcttagaattaggtttagattcctttttcttagaagtcttatataccttattagcttcctgagtt

SEQ ID NO: 33261 - DNA, 96 bp, Fusarium azukicola
  misc_feature: 191
agcgagtgcaacagaggtactatatactaaaactaggttttttaaaaaatcctagaaaattcaaactaactctaaaatagctaaaatttaaagttt

SEQ ID NO: 33262 - DNA, 96 bp, Fusarium azukicola
  misc_feature: 190
tttttctaagacttctaagccttggaaaaagaagaaaactgccttaaaatgcagttattgcaaactgctaggtcataaagacccagattgctattt

SEQ ID NO: 33263 - DNA, 96 bp, Fusarium azukicola
  misc_feature: 190
aatcctaataaaataagaataaaatcagttttcttagataatataaaggaatatatatataagctaagaccctattatataaagaatggaataaaa

SEQ ID NO: 33264 - DNA, 96 bp, Fusarium azukicola
  misc_feature: 190
tttctataaagctattagcttatttattatgaggcggacttatattatattttattccattctttatataatagggtcttagcttatatatatatt

SEQ ID NO: 33265 - DNA, 96 bp, Fusarium azukicola
  misc_feature: 190
tttcctctaataataagaacgtataaagctataacccttataagattataactttaaaggaggctattaatgttctatattatattaccaactata

SEQ ID NO: 33266 - DNA, 96 bp, Fusarium azukicola
  misc_feature: 190
ttccttaatatctaaggaaatattatctctaacttctagaggggatttattatttaaagccgaatgcgggcttctattatatatatatacggctac

SEQ ID NO: 33267 - DNA, 96 bp, Fusarium azukicola
  misc_feature: 190
ttattttattaggattattttctatttcttttctaaattccttaaattttataatagcttctgacttattccttaatagatagacttttagatatc

SEQ ID NO: 33268 - DNA, 96 bp, Fusarium azukicola
  misc_feature: 190
aaaatttaaggaatttagaaaagaaatagaaaataatcctaataaaataagaataaaattagttttcttagataatataaaggaatatatatataa

SEQ ID NO: 33269 - DNA, 96 bp, Fusarium azukicola
  misc_feature: 190
gtaaaaattctataatataatatatggtttatagggatatatcactatagttagtaatataatatagaacattaatagcctcctttaaagttataa

SEQ ID NO: 33270 - DNA, 96 bp, Fusarium azukicola
  misc_feature: 190
tataaagctataacccttataagattataactttaaaggaggctattaatgttctatattatattaccaactatagtgatatatccctataaacca

SEQ ID NO: 33271 - DNA, 96 bp, Fusarium azukicola
  misc_feature: 190
tgcagttttcgcagtttttaacttgatataggtcctcactagtatatttaaagagaggatcttttatttttatatatttaattagacttcttaagt

SEQ ID NO: 33272 - DNA, 96 bp, Fusarium azukicola
  misc_feature: 190
tcctaataaaataagaataaaatcagttttcttagataatataaaggaatatatatataagctaagaccctattatataaagaatggaataaaata

SEQ ID NO: 33273 - DNA, 96 bp, Fusarium azukicola
  misc_feature: 190
gtcggtagagaggaggggaaaggagagagggagaggagggaagaagagggaagagaaagagaagttaagaggagtaaagggagtgaagaggaggga

SEQ ID NO: 33274 - DNA, 96 bp, Fusarium azukicola
  misc_feature: 190
tatatatagaaaagaatttctagttaattttagaaaaataaataaaaatattacttagggaaaagccgcttctcttcctatattaggaatcggtga

SEQ ID NO: 33275 - DNA, 96 bp, Fusarium azukicola
  misc_feature: 190
tagtcctatttatcctttctataaagctattagcttatttattatgaggcggacttatattatattttattccattctttatataatagggtctta

SEQ ID NO: 33276 - DNA, 96 bp, Fusarium azukicola
  misc_feature: 190
gaataaaatcagttttcttagataatataaaggaatatatatataagctaagaccctattatataaagaatggaataaaatataatataagtccgc

SEQ ID NO: 33277 - DNA, 96 bp, Fusarium azukicola
  misc_feature: 190
ataaaagtagagggtaaagtaaaataataaagaaagtatagggtaaagaaaataaagaagaaaagtgtataagggtataagaagagagtataaaag

SEQ ID NO: 33278 - DNA, 96 bp, Fusarium azukicola
  misc_feature: 190
aaggttaagaaaggagagaagtaaggaaggttaagaaaggagagaagtaaggaaggttaagaaaggagagaagtaaggaagggtaagaaaggagag

SEQ ID NO: 33279 - DNA, 96 bp, Fusarium azukicola
  misc_feature: 190
aagctgagagggaaaagcaaaatgtgcaggcatatgaaactctatatctgtgaaagtaaacagtgatataatacgtggtcaaaacaaacaaagatg

SEQ ID NO: 33280 - DNA, 96 bp, Fusarium azukicola
  misc_feature: 190
ataataagaacgtataaagctataacccttataagattataactttaaaggaggctattaatattctatattatattaccaactatagtgatatat

SEQ ID NO: 33281 - DNA, 96 bp, Fusarium azukicola
  misc_feature: 190
aaccctaatttcaaccaattaaccctaacccttaactctactactacccctaaccctaatttcaaccaattaaccctaacccttaacttaactact

SEQ ID NO: 33282 - DNA, 96 bp, Fusarium azukicola
  misc_feature: 189
tttctatttattattattattattatataatattgcctttttattattataagggctttctttaaagtaaggaatctcattaaaagaggggttatt

SEQ ID NO: 33283 - DNA, 96 bp, Fusarium azukicola
  misc_feature: 189
gtctatctattaaggaataagttagaagctattataaaatttaaggaatttagaaaagaaatagaaaataatcctaataaaataagaataaaatca

SEQ ID NO: 33284 - DNA, 96 bp, Fusarium azukicola
  misc_feature: 189
tatatcactatagttagtaatataatatagaatattaatagcctcctttaaagttataatcttataagggttatagctttatacgttcttattatt

SEQ ID NO: 33285 - DNA, 96 bp, Fusarium azukicola
  misc_feature: 189
gtttgcaataactgcattttaaggcagttttcttctttttctaaggcttagaagtcttagaaaaatatatctcattagaatctattttttctagtc

SEQ ID NO: 33286 - DNA, 96 bp, Fusarium azukicola
  misc_feature: 189
gtatttaggtaggttagaagtaaataataaagctctaaccttttctaatatagtcctatttatcctttctataaagctattagcttatttattatg

SEQ ID NO: 33287 - DNA, 96 bp, Fusarium azukicola
  misc_feature: 189
gctgagagggaaaagcaaaatgtgcaggcatatgaaactctatatctgtgaaagtaaacagtgatataatacgtggtcaaaacaaacaaagatgct

SEQ ID NO: 33288 - DNA, 96 bp, Fusarium azukicola
  misc_feature: 189
cttctctcttttactttaccctatactctcttctctcttttactttaccctccacttttattctttattttactttaccctatactctcttctctc

SEQ ID NO: 33289 - DNA, 96 bp, Fusarium azukicola
  misc_feature: 189
aagctaagaccctattatataaagaatggaataaaatataatataagtccgcctcataataaataagctaatagctttatagaaaggataaatagg

SEQ ID NO: 33290 - DNA, 96 bp, Fusarium azukicola
  misc_feature: 189
actttaaaggaggctattaatattctatattatattactaactatagtgatatatccctataaaccatatattatattatagaatttttactctat

SEQ ID NO: 33291 - DNA, 96 bp, Fusarium azukicola
  misc_feature: 188
tagttagtaatataatatagaacattaatagcctcctttaaagttataatcttataagggttatagctttatacgttcttattattagaggaaaaa

SEQ ID NO: 33292 - DNA, 96 bp, Fusarium azukicola
  misc_feature: 188
taagcaaaatatataaataaaataataaggaaatataataaataagaaataggaacttctaaagtacctattaaatttatagaaagactcttaaaa

SEQ ID NO: 33293 - DNA, 96 bp, Fusarium azukicola
  misc_feature: 188
tttattttactttaccctatactctcttctctcttttactttaccctatactctcttctctcttttactttaccctccacttttattctttatttt

SEQ ID NO: 33294 - DNA, 96 bp, Fusarium azukicola
  misc_feature: 188
acgtataaagctataacccttataagattataactttaaaggaggctattaatgttctatattatattactaactatagtgatatatccctataaa

SEQ ID NO: 33295 - DNA, 96 bp, Fusarium azukicola
  misc_feature: 188
ttgcaccctaataaggctccaaaaaactggaaaactcaggaagccaataaggtgcataagacttctaagaaaagggaatctaaacctaattctaag

SEQ ID NO: 33296 - DNA, 96 bp, Fusarium azukicola
  misc_feature: 188
ttctcttccctcttcttccctcctctccctctctcctttcccctcctctctaccgaccctaaactaactccctatccttcctcttttttcccccac

SEQ ID NO: 33297 - DNA, 96 bp, Fusarium azukicola
  misc_feature: 188
ttctatttattattattattattatataatattgcctttttattattataagggctttctttaaagtaaggaatctcattaaaagaggggttattt

SEQ ID NO: 33298 - DNA, 96 bp, Fusarium azukicola
  misc_feature: 188
tcccctctccctctctctcttttcactccttatcctctcctctcccctctccctctctctcttttcactccttctcctctcctctcccctctccct

SEQ ID NO: 33299 - DNA, 96 bp, Fusarium azukicola
  misc_feature: 188
tatctcttatctcttatctcttatttctctcttttctagctatatctctctttcttagctttacctctctctcttagctatatctctttttcctag

SEQ ID NO: 33300 - DNA, 96 bp, Fusarium azukicola
  misc_feature: 188
tatcctttctataaagctattagcttatttattatgaggcggacttatattatattttattccattctttatataatagggtcttagcttatatat

SEQ ID NO: 33301 - DNA, 96 bp, Fusarium azukicola
  misc_feature: 188
tatatcactatagttggtaatataatatagaacattaatagcctcctttaaagttataatcttataagggttatagctttatacgttcttattatt

SEQ ID NO: 33302 - DNA, 96 bp, Fusarium azukicola
  misc_feature: 188
tatataaccaaaaaacagctaaaccttaatttctaaaaactgctataaaatagctaggaagataaaaagagtatttctataaatctaactcttaat

SEQ ID NO: 33303 - DNA, 96 bp, Fusarium azukicola
  misc_feature: 188
atttatcctttctataaagctattagcttatttattatgaggcggacttatattatattttattccattctttatataatagggtcttagcttata

SEQ ID NO: 33304 - DNA, 96 bp, Fusarium azukicola
  misc_feature: 188
tagctaaggttatttctaataagaataactatagactaagagataacttagatcttcctattttaaatataaaggaaaaaactagtctttttaact

SEQ ID NO: 33305 - DNA, 96 bp, Fusarium azukicola
  misc_feature: 188
tacctaaaaatagagtaaaaattctataatataatatgtggtttatagggatatatcactatagttggtaatataatatagaacattaacaattat

SEQ ID NO: 33306 - DNA, 96 bp, Fusarium azukicola
  misc_feature: 188
taaaagagtcttgctagcatctttgtttgttttgaccacgtattatatcactgtttactttcacagatatagagtttcatatgcctgcacattttg

SEQ ID NO: 33307 - DNA, 96 bp, Fusarium azukicola
  misc_feature: 188
gaagagagtatagggtaaagtaaaataaagaataaaagtggagggtaaagtaaaagagagaagagagtatagggtaaagtaaaagagagaagagag

SEQ ID NO: 33308 - DNA, 96 bp, Fusarium azukicola
  misc_feature: 188
ctctcttttactttaccctatactctcttctctcttttactttaccctccacttttattctttattttactttaccctatactctcttctctcttt

SEQ ID NO: 33309 - DNA, 96 bp, Fusarium azukicola
  misc_feature: 188
ctctaaccttttctaatatagtcctatttatcctttctataaagctattagcttatttattatgaggcggacttatattatattttattccattct

SEQ ID NO: 33310 - DNA, 96 bp, Fusarium azukicola
  misc_feature: 188
ctaactatagtgatatatccctataaactatatattatattatagaatttttactctatttttaggtatatttacctaacctatagctactatagg

SEQ ID NO: 33311 - DNA, 96 bp, Fusarium azukicola
  misc_feature: 188
acagattctaatgagatatatttttctaagacttctaagccttggaaaaagaagaaaactgccttaaaatgcagttattgcaaactgctaggtcat

SEQ ID NO: 33312 - DNA, 96 bp, Fusarium azukicola
  misc_feature: 188
agaacgtataaagctataacccttataagattataactttaaaggaggctattaatgttctatattatattaccaactatagtgatatatccctat

SEQ ID NO: 33313 - DNA, 96 bp, Fusarium azukicola
  misc_feature: 187
ttttcttctttattttctttaccctatactttctttattattttactttaccctctacttttattctttattttactttaccctatactctcttct

SEQ ID NO: 33314 - DNA, 96 bp, Fusarium azukicola
  misc_feature: 187
tttcttagttatattctcttactcttatatctcttttacctctctttcttaagaaaatctcctctctttacttataagctatatctttagctagaa

SEQ ID NO: 33315 - DNA, 96 bp, Fusarium azukicola
  misc_feature: 187
caagttaaaaactgcgaaaactgcaaactaggaaaattaactaaaaataatataaataaaaaacctagtaataaggaatataagttcctagataaa

SEQ ID NO: 33316 - DNA, 96 bp, Fusarium azukicola
  misc_feature: 187
tttatactctcttcttatacccttatacacttttcttctttattttctttaccctatactttctttattattttactttaccctctacttttattc

SEQ ID NO: 33317 - DNA, 96 bp, Fusarium azukicola
  misc_feature: 187
ttattataaggcggacttatattatattttattccattctttatataatagggtcttagcttatatatatattcctttatattatctaagaaaact

SEQ ID NO: 33318 - DNA, 96 bp, Fusarium azukicola
  misc_feature: 187
ttatacacttttcttctttattttctttaccctatactttctttattattttactttaccctctacttttattctttattttactttaccctatac

SEQ ID NO: 33319 - DNA, 96 bp, Fusarium azukicola
  misc_feature: 187
tgacctagcagtttgcaataactgcattttaaggcagttttcttctttttccaaggcttagaagtcttagaaaaatatatctcattagaatctgtt

SEQ ID NO: 33320 - DNA, 96 bp, Fusarium azukicola
  misc_feature: 187
tgaatttctatttattattattattattatataatattgcctttttattattataagggctttctttaaagtaaggaatctcattaaaagaggggt

SEQ ID NO: 33321 - DNA, 96 bp, Fusarium azukicola
  misc_feature: 187
cctttctataaagctattagcttatttattatgaggcggacttatattatattttattccattctttatataatagggtcttagcttatatatata

SEQ ID NO: 33322 - DNA, 96 bp, Fusarium azukicola
  misc_feature: 187
gtttcttctagctaaagatatagcttataagtaaagagaggagattttcttaagaaagagaggtaaaagagatataagagtaagagaatataacta

SEQ ID NO: 33323 - DNA, 96 bp, Fusarium azukicola
  misc_feature: 187
tagggattctagaaggaccctatatattagtagctattttatctaggaacttatattccttattattaggttttttatttatattatttttagtta

SEQ ID NO: 33324 - DNA, 96 bp, Fusarium azukicola
  misc_feature: 187
attccttaatatctaaggaaatattatctctaacttctagaggggatttattatttaaagccgaatgcgggcttctattatatatatatacggcta

SEQ ID NO: 33325 - DNA, 96 bp, Fusarium azukicola
  misc_feature: 187
gatatatcactatagttagtaatataatatagaatattaatagcctcctttaaagttataatcttataagggttatagctttatacgttcttatta

SEQ ID NO: 33326 - DNA, 96 bp, Fusarium azukicola
  misc_feature: 187
ggatatatcactatagttagtaatataatatagaatattaatagcctcctttaaagttataatcttataagggttatagctttatacgttcttatt

SEQ ID NO: 33327 - DNA, 96 bp, Fusarium azukicola
  misc_feature: 187
agagtatagggtaaagtaaaagagagaagagagtatagggtaaagtaaaagagagaagagagtatagggtaaagtaaaagagagaagagaggatag

SEQ ID NO: 33328 - DNA, 96 bp, Fusarium azukicola
  misc_feature: 187
aagtctcactttctaattttagctattttaagcttaatttcgacttttatagcttttttaaaaaataccttttaaggtgaaaatataagtgtctcg

SEQ ID NO: 33329 - DNA, 96 bp, Fusarium azukicola
  misc_feature: 187
agcttataagtaaagagaggagattttcttaagaaagagaggtaaaagagatataagagtaagagaatataactaagaaagagaggtataactagg

SEQ ID NO: 33330 - DNA, 96 bp, Fusarium azukicola
  misc_feature: 187
atctaattccttaatatctaaggaaatattatctctaacttctagaggggatttattatttaaagccgaatgcgggcttctattatatatatatat

SEQ ID NO: 33331 - DNA, 96 bp, Fusarium azukicola
  misc_feature: 187
ataatagaggtttaattttttcctctaataataagaacgtataaagctataacccttataagattataactttaaaggaggctattaatattctat

SEQ ID NO: 33332 - DNA, 96 bp, Fusarium azukicola
  misc_feature: 186
tttctcttccctcttcttccctcctctccctctctcctttcccctcctctctaccgaccctaaactaactccctatccttcctcttttttccccca

SEQ ID NO: 33333 - DNA, 96 bp, Fusarium azukicola
  misc_feature: 186
taggaaaaagagatatagctaagagagagaggtaaagctaagaaagagagatatagctagaaaagagagaaataaaagataagagataagagataa

SEQ ID NO: 33334 - DNA, 96 bp, Fusarium azukicola
  misc_feature: 186
ttatattaccaactatagtgatatatccctataaactatatattatattatagaatttttactctatttttaggtatatttacctaacctatagct

SEQ ID NO: 33335 - DNA, 96 bp, Fusarium azukicola
  misc_feature: 186
ttataattaaggatttccttaaggattataaaaagaaatatcctaatagtaatataaataagctataaatctatttaaaattaagaaaagccttat

SEQ ID NO: 33336 - DNA, 96 bp, Fusarium azukicola
  misc_feature: 186
cctctctctcttagctatatctctttttcctagttatacctctctttcttagttatattctcttactcttatatctcttttacctctctttcttaa

SEQ ID NO: 33337 - DNA, 96 bp, Fusarium azukicola
  misc_feature: 186
tctatttattattattattattatataatattgcctttttattattataagggctttctttaaagtaaggaatctcattaaaagaggggttatttc

SEQ ID NO: 33338 - DNA, 96 bp, Fusarium azukicola
  misc_feature: 186
actatagttggtaatataatatagaacattaatagcctcctttaaagttataatcttataagggttatagctttatacgttcttattattagagga

SEQ ID NO: 33339 - DNA, 96 bp, Fusarium azukicola
  misc_feature: 186
taagctaatggctttatagaaaggataaataggactatattagaaaaggttagagctttattatttacttctaacctacctaaatacctttaggga

SEQ ID NO: 33340 - DNA, 96 bp, Fusarium azukicola
  misc_feature: 186
ctctaataataagaacgtataaagctataacccttataagattataactttaaaggaggctattaatgttctatattatattaccaactatagtga

SEQ ID NO: 33341 - DNA, 96 bp, Fusarium azukicola
  misc_feature: 186
ataagtcagaagctattataaaattcaaggaatttagaaaagaaatagaaaataatcctaataaaataagaataaaatcagttttcttagataata

SEQ ID NO: 33342 - DNA, 96 bp, Fusarium azukicola
  misc_feature: 186
aaatgttaatgttctatattatattaccaactatagtgatatatccctataaaccacatattatattatagaatttttactctatttttaggtata

SEQ ID NO: 33343 - DNA, 96 bp, Fusarium azukicola
  misc_feature: 186
tataactttaaaggaggctattaatattctatattatattactaactatagtgatatatccctataaaccatatattatattatagaatttttact

SEQ ID NO: 33344 - DNA, 96 bp, Fusarium azukicola
  misc_feature: 186
aataaataagctaatggctttatagaaaggataaataggactatattagaaaaggttagagctttattatttacttctaacctacctaaataccta

SEQ ID NO: 33345 - DNA, 96 bp, Fusarium azukicola
  misc_feature: 186
gaattagctataaatagcttttcttatttcttttctctttcttccttcttagaattaggtttagattcctttttcttagaagtcttatgtacctta

SEQ ID NO: 33346 - DNA, 96 bp, Fusarium azukicola
  misc_feature: 186
cgtataaagctataacccttataagattataactttaaaggaggctattaatgttctatattatattactaactatagtgatatatccctataaac

SEQ ID NO: 33347 - DNA, 96 bp, Fusarium azukicola
  misc_feature: 186
ggtttaattttttcctctaataataagaacgtataaagctataacccttataagattataactttaaaggaggctattaatattctatattatatt

SEQ ID NO: 33348 - DNA, 96 bp, Fusarium azukicola
  misc_feature: 186
ggtacataagacttctaagaaaaaggaatctaaacctaattctaagaaggaagaaagagaaaagaaataagaaaagctatttatagctaattcttc

SEQ ID NO: 33349 - DNA, 96 bp, Fusarium azukicola
  misc_feature: 186
gggatatatcactatagttagtaatataatatagaatattaatagcctcctttaaagttataatcttataagggttatagctttatacgttcttat

SEQ ID NO: 33350 - DNA, 96 bp, Fusarium azukicola
  misc_feature: 186
attaaggatttccttaaggattataaaaagaaatatcctaatagtaatataaataagctataaatctatttaaaattaagaaaagccttatatagc

SEQ ID NO: 33351 - DNA, 96 bp, Fusarium azukicola
  misc_feature: 186
agctaaatagttaaaatcgttttttttaagtttctagctattttatagcgatttttagaaacttagggtttagctgtttttagttatacagtatgc

SEQ ID NO: 33352 - DNA, 96 bp, Fusarium azukicola
  misc_feature: 186
aaagacccagattgctattttttgcaccctaataaggctccaaaaaactggaaaactcaggaagccaataaggtgcataagacttctaagaaaaag

SEQ ID NO: 33353 - DNA, 96 bp, Fusarium azukicola
  misc_feature: 186
ctttaaaggaggctattaatattctatattatattactaactatagtgatatatccctataaaccatatattatattatagaatttttactctatt

SEQ ID NO: 33354 - DNA, 96 bp, Fusarium azukicola
  misc_feature: 186
ccttattagggtgcaaaaaatagcaatctgggtctttatgacctagcagtttgcaataactgcattttaaggcagttttcttctttttccaaggct

SEQ ID NO: 33355 - DNA, 96 bp, Fusarium azukicola
  misc_feature: 186
aatctaaacctaattctaagaaggaagaaagagaaaagaaataagaaaagctatttatagctaattcttcttctttattatctcctaaagccgagg

SEQ ID NO: 33356 - DNA, 96 bp, Fusarium azukicola
  misc_feature: 186
aggaacttatattccttattactaggttttttatttatattatttttagttaattttcctagtttatagttttcgcagtttttaacttaatatagg

SEQ ID NO: 33357 - DNA, 96 bp, Fusarium azukicola
  misc_feature: 186
cctaatttcaaccaattaaccctaacccttaactctactactacccctaaccctaatttcaaccaattaaccctaacccttaacttaactactact

SEQ ID NO: 33358 - DNA, 96 bp, Fusarium azukicola
  misc_feature: 186
ataagctaatggctttatagaaaggataaataggactatattagaaaaggttagagctttattatttacttctaacctacctaaatacctttaggg

SEQ ID NO: 33359 - DNA, 96 bp, Fusarium azukicola
  misc_feature: 186
aaaagaggggtaatgacggtagaggaaggaaggcaagcaattgatcaaatggatatagatgcgcaggtattagctgaatcgtcgaggagtggtggg

SEQ ID NO: 33360 - DNA, 96 bp, Fusarium azukicola
  misc_feature: 186
ataaaagagtcttgctagcatctttgtttgttttgaccacgtattatatcactgtttactttcacagatatagagtttcatatgcctgcacatttt

SEQ ID NO: 33361 - DNA, 96 bp, Fusarium azukicola
  misc_feature: 185
ttttgcaccctaataaagctccaaaaaactggaaaactcaggaagccaataaggtgcataagacttctaagaaaaaggaatctaaacctaattcta

SEQ ID NO: 33362 - DNA, 96 bp, Fusarium azukicola
  misc_feature: 185
aataaaagtagagggtaaagtaaaataataaagaaagtatagggtaaagaaaataaagaagaaaagtgtataagggtataagaagagagtataaaa

SEQ ID NO: 33363 - DNA, 96 bp, Fusarium azukicola
  misc_feature: 185
tttattccattctttatataatagggtcttagcttatatatatattcctttatattatctaagaaaactgattttattcttattttattaggatta

SEQ ID NO: 33364 - DNA, 96 bp, Fusarium azukicola
  misc_feature: 185
tttacctaacctatagctactataggtagctagatattaagggtattattctaattggttaaaaaggttcctacagacctttatgactgccgtcct

SEQ ID NO: 33365 - DNA, 96 bp, Fusarium azukicola
  misc_feature: 185
ttggcttcctgagttttccagttttttggagccttattagggtgcaaaaaatagcaatctgggtctttatgacctagcagtttgcaataactgcat

SEQ ID NO: 33366 - DNA, 96 bp, Fusarium azukicola
  misc_feature: 185
ttatttattattataatcgtaataacgaaagaggaagaagaagaagaagaagaagaagaagaaggaaaaaaagacctatttgtagtgccgaaagat

SEQ ID NO: 33367 - DNA, 96 bp, Fusarium azukicola
  misc_feature: 185
ataaagccctagattatagtataaccttctctctaaattattaaataatttaggcttctatactatcccttttaataaagctctctttataaataa

SEQ ID NO: 33368 - DNA, 96 bp, Fusarium azukicola
  misc_feature: 185
taaatagcgttttcttacatggatcgggttagactatatgggtagggtatagataagagggttattagctagggtaaggcgattagggattaataa

SEQ ID NO: 33369 - DNA, 96 bp, Fusarium azukicola
  misc_feature: 185
ttaatattctatattatattactaactatagtgatatatccctataaactatatattatattatagaatttttactctatttttaggtatatttac

SEQ ID NO: 33370 - DNA, 96 bp, Fusarium azukicola
  misc_feature: 185
agtatataaaaaacctatttacactatgtaattaactatttcactataaacagaattttttaaaaatctaaaaaaatcatttttagactttattaa

SEQ ID NO: 33371 - DNA, 96 bp, Fusarium azukicola
  misc_feature: 185
tatataaaaaacctatttacactatgtaattaactatttcactataaacagaattttttaaaaatctaaaaaaatcatttttagactttattaaga

SEQ ID NO: 33372 - DNA, 96 bp, Fusarium azukicola
  misc_feature: 185
tatttattattataatcgtaataacgaaagaggaagaagaagaagaagaagaagaagaagaaggaaaaaaagacctatttgtagtgccgaaagata

SEQ ID NO: 33373 - DNA, 96 bp, Fusarium azukicola
  misc_feature: 185
taaaattaagaaaagccttatatagcctaaaataaagccctagattatagtataaccttctctctaaattattaaataatttaggcttctatacta

SEQ ID NO: 33374 - DNA, 96 bp, Fusarium azukicola
  misc_feature: 185
taggaacttatattccttattactaggttttttatttatattatttttagttaattttcctagtttatagttttcgcagtttttaacttaatatag

SEQ ID NO: 33375 - DNA, 96 bp, Fusarium azukicola
  misc_feature: 185
taatagggtcttagcttatatatatattcctttatattatctaagaaaactaattttattcttattttattaggattattttctatttcttttcta

SEQ ID NO: 33376 - DNA, 96 bp, Fusarium azukicola
  misc_feature: 185
taatttcaaccaattaaccctaacccttaactctactactacccctaaccctaatttcaaccaattaaccctaacccttaacttaactactactct

SEQ ID NO: 33377 - DNA, 96 bp, Fusarium azukicola
  misc_feature: 185
taaaagtagagggtaaagtaaaataataaagaaagtatagggtaaagaaaataaagaagaaaagtgtataagggtataagaagagagtataaaagg

SEQ ID NO: 33378 - DNA, 96 bp, Fusarium azukicola
  misc_feature: 185
atatacctaaaaatagagtaaaaattctataatataatatgtggtttatagggatatatcactatagttggtaatataatatagaacattaacaac

SEQ ID NO: 33379 - DNA, 96 bp, Fusarium azukicola
  misc_feature: 185
gggaggctattaaagagttaatttctcttaattatatatataaatatataaataaaaatctctctttaagttttaatagggctatacctcctattt

SEQ ID NO: 33380 - DNA, 96 bp, Fusarium azukicola
  misc_feature: 185
gagtaaaaattctataatataatatatggtttatagggatatatcactatagttagtaatataatatagaacattaatagcctcctttaaagttat

SEQ ID NO: 33381 - DNA, 96 bp, Fusarium azukicola
  misc_feature: 185
aggaaaaagagatatagctaagagagagaggtaaagctaagaaagagagatatagctagaaaagagagaaataaaagataagagataagagataag

SEQ ID NO: 33382 - DNA, 96 bp, Fusarium azukicola
  misc_feature: 185
ctcttatttctctcttttctagctatatctctctttcttagctttacctctctctcttagctatatctctttttcctagttatacctctctttctt

SEQ ID NO: 33383 - DNA, 96 bp, Fusarium azukicola
  misc_feature: 185
cactatagttggtaatataatatagaacattaatagcctcctttaaagttataatcttataagggttatagctttatacgttcttattattagagg

SEQ ID NO: 33384 - DNA, 96 bp, Fusarium azukicola
  misc_feature: 185
ataagtctaaactttaaattttagctattttagagttagtttgaattttctaggattttttaaaaaacctagttttagtatatagtacctctgttg

SEQ ID NO: 33385 - DNA, 96 bp, Fusarium azukicola
  misc_feature: 185
agttaaaaactgcgaaaactataaactaggaaaattaactaaaaataatataaataaaaaacctagtaataaggaatataagttcctagataaaat

SEQ ID NO: 33386 - DNA, 96 bp, Fusarium azukicola
  misc_feature: 185
ataaagaagaagaattagctataaatagcttttcttgtttcttttctctttcttccttcttagaattaggtttagattcctttttcttagaagtct

SEQ ID NO: 33387 - DNA, 96 bp, Fusarium azukicola
  misc_feature: 185
aagaaaaaggaatctaaacctaattctaagaaggaagaaagagaaaagaaataagaaaagctatttatagctaattcttcttcttcgttatctcct

SEQ ID NO: 33388 - DNA, 96 bp, Fusarium azukicola
  misc_feature: 185
aataagtctaaactttaaattttagctattttagagttagtttgaattttctaggattttttaaaaaacctagttttagtatatagtacctctgtt

SEQ ID NO: 33389 - DNA, 96 bp, Fusarium azukicola
  misc_feature: 184
ttgtactagtttacactaaatagaaaagaattctttaaaaattcaaattaaggtaaaaataacttaaaattttagattaggttaattaagtgaaat

SEQ ID NO: 33390 - DNA, 96 bp, Fusarium azukicola
  misc_feature: 184
ttcctagttatacctctctttcttagttatattctcttactcttatatctcttttacctctctttcttaagaaaatctcctctctttacttataag

SEQ ID NO: 33391 - DNA, 96 bp, Fusarium azukicola
  misc_feature: 184
ttattgttaatgttctatattatattaccaactatagtgatatatccctataaaccatatattatattatagaatttttactctatttttaggtat

SEQ ID NO: 33392 - DNA, 96 bp, Fusarium azukicola
  misc_feature: 184
ttatctcttatctcttatctcttatttctctcttttctagctatatctctctttcttagctttacctctctctcttagctatatctctttttccta

SEQ ID NO: 33393 - DNA, 96 bp, Fusarium azukicola
  misc_feature: 184
taaagtaaaataaagaataaaagtagagggtaaagtaaaataataaagaaagtatagggtaaagaaaataaagaagaaaagtgtataagggtataa

SEQ ID NO: 33394 - DNA, 96 bp, Fusarium azukicola
  misc_feature: 184
agtgaaaagagagagagggagaggggagaggagaggataaggagtgaaaagagagagagggagaggggagaggagaggataaggagagaaaagaga

SEQ ID NO: 33395 - DNA, 96 bp, Fusarium azukicola
  misc_feature: 184
tctaaccttttctaatatagtcctatttatcctttctataaagctattagcttatttattatgaggcggacttatattatattttattccattctt

SEQ ID NO: 33396 - DNA, 96 bp, Fusarium azukicola
  misc_feature: 184
tatctcttatttctctcttttctagctatatctctctttcttagctttacctctctctcttagctatatctctttttcctagttatacctctcttt

SEQ ID NO: 33397 - DNA, 96 bp, Fusarium azukicola
  misc_feature: 184
ctaataataagaacgtataaagctataacccttataagattataactttaaaggaggctattaatgttctatattatattactaactatagtgata

SEQ ID NO: 33398 - DNA, 96 bp, Fusarium azukicola
  misc_feature: 184
aattgttaatgttctatattatattaccaactatagtgatatatccctataaaccatatattatattatagaatttttactctatttttaggtata

SEQ ID NO: 33399 - DNA, 96 bp, Fusarium azukicola
  misc_feature: 184
taatatagaatattaatagcctcctttaaagttataatcttataagggttatagctttatacgttcttattattagaggaaaaaattaaacctcta

SEQ ID NO: 33400 - DNA, 96 bp, Fusarium azukicola
  misc_feature: 184
gtttattataagaactattctcccttagataaactagaaactagagcttataaaggagctataatcggttatcttcctaattcttataagatttag

SEQ ID NO: 33401 - DNA, 96 bp, Fusarium azukicola
  misc_feature: 184
ccctaatttcaaccaattaaccctaacccttaactctactactacccctaaccctaatttcaaccaattaaccctaacccttaacttaactactac

SEQ ID NO: 33402 - DNA, 96 bp, Fusarium azukicola
  misc_feature: 184
atagcttttcttatttcttttctctttcttccttcttagaattaggtttagattcctttttcttagaagtcttatataccttattagcttcctaag

SEQ ID NO: 33403 - DNA, 96 bp, Fusarium azukicola
  misc_feature: 184
agttaagttaagggttagggttaattggttgaaattagggttaggggtagtagtagagttaagggttagggttaattggttgaaattagggttagg

SEQ ID NO: 33404 - DNA, 96 bp, Fusarium azukicola
  misc_feature: 184
acccagattgctattttttgcaccctaataaggctccaaaaaactggaaaactcaggaagccaataaggtgcataagacttctaagaaaaaggaat

SEQ ID NO: 33405 - DNA, 96 bp, Fusarium azukicola
  misc_feature: 183
tttcttctttattttctttaccctatactttctttattattttactttaccctctacttttattctttattttactttaccctatactctcttctc

SEQ ID NO: 33406 - DNA, 96 bp, Fusarium azukicola
  misc_feature: 183
tagggtaaagtaaaagagagaagagagtatagggtaaagtaaaagagagaagagagtatagggtaaagtaaaagagagaagagagtataggggaaa

SEQ ID NO: 33407 - DNA, 96 bp, Fusarium azukicola
  misc_feature: 183
atagggtcttagcttatatatatattcctttatattatctaagaaaactaattttattcttattttattaggattattttctatttcttttctaaa

SEQ ID NO: 33408 - DNA, 96 bp, Fusarium azukicola
  misc_feature: 183
gaaaaaggaatctaaacctaattctaagaaggaagaaagagaaaagaaataagaaaagctatttatagctaattcttcttcttcgttatctcctaa

SEQ ID NO: 33409 - DNA, 96 bp, Fusarium azukicola
  misc_feature: 183
tctcttccctcttcttccctcctctccctctctcctttcccctcctctctaccgaccctaaactaactccctatccttcctcttttttcccccacc

SEQ ID NO: 33410 - DNA, 96 bp, Fusarium azukicola
  misc_feature: 183
tctctctaaattattaaataatttaggcttctatactatcccttttaataaagctctctttataaataagaacttaaagattactatagctattta

SEQ ID NO: 33411 - DNA, 96 bp, Fusarium azukicola
  misc_feature: 183
ataaatagcgttttcttacatggatcgggttagactatatgggtagggtatagataagagggttattagctagggtaaggcgattagggattaata

SEQ ID NO: 33412 - DNA, 96 bp, Fusarium azukicola
  misc_feature: 183
ctaataataagaacgtataaagctataacccttataagattataactttaaaggaggctattaatattctatattatattactaactatagtgata

SEQ ID NO: 33413 - DNA, 96 bp, Fusarium azukicola
  misc_feature: 183
taatagaggtttaattttttcctctaataataagaacgtataaagctataacccttataagattataactttaaaggaggctattaatattctata

SEQ ID NO: 33414 - DNA, 96 bp, Fusarium azukicola
  misc_feature: 183
agaaaaaggaatctaaacctaattctaagaaggaagaaagagaaaagaaataagaaaagctatttatagctaattcttcttcttcgttatctccta

SEQ ID NO: 33415 - DNA, 96 bp, Fusarium azukicola
  misc_feature: 183
gtttatagtgaaatagttaattacatagtgtaaataggttttttatatactagctatataattactttttaaaaatctaagaaaattattatagct

SEQ ID NO: 33416 - DNA, 96 bp, Fusarium azukicola
  misc_feature: 183
gtatataaaaaacctatttacactatgtaattaactatttcactataaacagaattttttaaaaatctaaaaaaatcatttttagactttattaag

SEQ ID NO: 33417 - DNA, 96 bp, Fusarium azukicola
  misc_feature: 183
gattataactttaaaggaggctattaatattctatattatattactaactatagtgatatatccctataaaccatatattatattatagaattttt

SEQ ID NO: 33418 - DNA, 96 bp, Fusarium azukicola
  misc_feature: 183
ctcttatctcttatctcttatctcttatttctctcttttctagctatatctctctttcttagctttacctctctctcttagctatatctctttttc

SEQ ID NO: 33419 - DNA, 96 bp, Fusarium azukicola
  misc_feature: 183
agggtaaagtaaaagagagaagagagtatagggtaaagtaaaagagagaagagagtatagggtaaagtaaaagagagaagagagtataggggaaag

SEQ ID NO: 33420 - DNA, 96 bp, Fusarium azukicola
  misc_feature: 183
aataaggaaaaataatattataaggaaaagagaaaaataacctatatataataatagctaaggttatttctaataagaataactatagactaagag

SEQ ID NO: 33421 - DNA, 96 bp, Fusarium azukicola
  misc_feature: 183
atcaaaaccggtttttgctataactaagccatttataaggctttagtaatagattataaagcgcatcttccgggctatccgacggtataatcttag

SEQ ID NO: 33422 - DNA, 96 bp, Fusarium azukicola
  misc_feature: 183
ataaaatttaaggaatttagaaaagaaatagaaaataatcctaataaaataagaataaaattagttttcttagataatataaaggaatatatatat

SEQ ID NO: 33423 - DNA, 96 bp, Fusarium azukicola
  misc_feature: 182
ttttattccattctttatataatagggtcttagcttatatatatattcctttatattatctaagaaaactaattttattcttattttattaggatt

SEQ ID NO: 33424 - DNA, 96 bp, Fusarium azukicola
  misc_feature: 182
agtagagggtaaagtaaaataataaagaaagtatagggtaaagaaaataaagaagaaaagtgtataagggtataagaagagagtataaaaggataa

SEQ ID NO: 33425 - DNA, 96 bp, Fusarium azukicola
  misc_feature: 182
caataaggtatataagacttctaagaaaaaggaatctaaacctaattctaagaaggaagaaagagaaaagaaataagaaaagctatttatagctaa

SEQ ID NO: 33426 - DNA, 96 bp, Fusarium azukicola
  misc_feature: 182
tataaagctataacccttataagattataactttaaaggaggctattaatattctatattatattaccaactatagtgatatatccctataaacca

SEQ ID NO: 33427 - DNA, 96 bp, Fusarium azukicola
  misc_feature: 182
aagtaaaataaagaataaaagtagagggtaaagtaaaataataaagaaagtatagggtaaagaaaataaagaagaaaagtgtataagggtataaga

SEQ ID NO: 33428 - DNA, 96 bp, Fusarium azukicola
  misc_feature: 182
aaaagtagagggtaaagtaaaataataaagaaagtatagggtaaagaaaataaagaagaaaagtgtataagggtataagaagagagtataaaagga

SEQ ID NO: 33429 - DNA, 96 bp, Fusarium azukicola
  misc_feature: 182
ctctcttagaagctagatattatctctttattacttttcttcctagttatctaggaaatcaactatttataacctagtcacactgacaggttatga

SEQ ID NO: 33430 - DNA, 96 bp, Fusarium azukicola
  misc_feature: 182
accctatatattagtagctattttatctaggaacttatattccttattactaggttttttatttatattatttttagttaattttcctagtttata

SEQ ID NO: 33431 - DNA, 96 bp, Fusarium azukicola
  misc_feature: 182
accctaatttcaaccaattaaccctaacccttaactctactactacccctaaccctaatttcaaccaattaaccctaacccttaacttaactacta

SEQ ID NO: 33432 - DNA, 96 bp, Fusarium azukicola
  misc_feature: 182
tagcttttcttatttcttttctctttcttccttcttagaattaggtttagattcctttttcttagaagtcttatataccttattagcttcctgagt

SEQ ID NO: 33433 - DNA, 96 bp, Fusarium azukicola
  misc_feature: 182
tagcttataagtaaagagaggagattttcttaagaaagagaggtaaaagagatataagagtaagagaatataactaagaaagagaggtataactag

SEQ ID NO: 33434 - DNA, 96 bp, Fusarium azukicola
  misc_feature: 182
gttaggtaaatatacctaaaaatagagtaaaaattctataatataatatatagtttatagggatatatcactatagttagtaatataatatagaat

SEQ ID NO: 33435 - DNA, 96 bp, Fusarium azukicola
  misc_feature: 182
gttaagttaagggttagggttaattggttgaaattagggttaggggtagtagtagagttaagggttagggttaattggttgaaattagggttaggg

SEQ ID NO: 33436 - DNA, 96 bp, Fusarium azukicola
  misc_feature: 182
gtctcactttctaattttagctattttaagcttaatttcgacttttatagcttttttaaaaaataccttttaaggtgaaaatataagtgtctcgtt

SEQ ID NO: 33437 - DNA, 96 bp, Fusarium azukicola
  misc_feature: 182
atattaccaactatagtgatatatccctataaactatatattatattatagaatttttactctatttttaggtatatttacctaacctatagctac

SEQ ID NO: 33438 - DNA, 96 bp, Fusarium azukicola
  misc_feature: 182
ggaggctattaaagagttaatttctcttaattatatatataaatatataaataaaaatctctctttaagttttaatagggctatacctcctatttt

SEQ ID NO: 33439 - DNA, 96 bp, Fusarium azukicola
  misc_feature: 182
aacttaagaagtctaattaaatatataaaaataaaagatcctctctttaaatatactagtgaggacctatatcaagttaaaaactgcgaaaactgc

SEQ ID NO: 33440 - DNA, 96 bp, Fusarium azukicola
  misc_feature: 182
gcaattccttattatataggtatctttatctaggaacttaattattaagtcaccgattcctaatataggaagagaagcggcttttccctaagtaat

SEQ ID NO: 33441 - DNA, 96 bp, Fusarium azukicola
  misc_feature: 182
ctaagacttctaagccttggaaaaagaagaaaactgccttaaaatgcagttattgcaaactgctaggtcataaagacccagattgctattttttgc

SEQ ID NO: 33442 - DNA, 96 bp, Fusarium azukicola
  misc_feature: 182
ctttctataaagctattagcttatttattatgaggcggacttatattatattttattccattctttatataatagggtcttagcttatatatatat

SEQ ID NO: 33443 - DNA, 96 bp, Fusarium azukicola
  misc_feature: 182
aaagtagagggtaaagtaaaataataaagaaagtatagggtaaagaaaataaagaagaaaagtgtataagggtataagaagagagtataaaaggat

SEQ ID NO: 33444 - DNA, 96 bp, Fusarium azukicola
  misc_feature: 181
ttttctaagacttctaagccttggaaaaagaagaaaactgccttaaaatgcagttattgcaaactgctaggtcataaagacccagattgctatttt

SEQ ID NO: 33445 - DNA, 96 bp, Fusarium azukicola
  misc_feature: 181
aagttaaaaactgcgaaaactataaactaggaaaattaactaaaaataatataaataaaaaacctagtaataaggaatataagttcctagataaaa

SEQ ID NO: 33446 - DNA, 96 bp, Fusarium azukicola
  misc_feature: 181
tttcaaccaattaaccctaacccttaactctactactacccctaaccctaatttcaaccaattaaccctaacccttaacttaactactactcttaa

SEQ ID NO: 33447 - DNA, 96 bp, Fusarium azukicola
  misc_feature: 181
ttatcctttctataaagctattagcttatttattatgaggcggacttatattatattttattccattctttatataatagggtcttagcttatata

SEQ ID NO: 33448 - DNA, 96 bp, Fusarium azukicola
  misc_feature: 181
ttatagtaaaggttaggggtagtaatgaagttaatttaaaaagaaaagagaagaaaggatttaaaaataagagaaagagttaaataaaaaagttag

SEQ ID NO: 33449 - DNA, 96 bp, Fusarium azukicola
  misc_feature: 181
ttaagggtattattctaattggttaaaaaggttcctatagacctttatgactgccgtcatctatgcatcaaagtataataactgccgattggctaa

SEQ ID NO: 33450 - DNA, 96 bp, Fusarium azukicola
  misc_feature: 181
agcaattccttattatataggtatctttatctaggaacttaattattaagtcaccgattcctaatataggaagagaagcggcttttccctaagtaa

SEQ ID NO: 33451 - DNA, 96 bp, Fusarium azukicola
  misc_feature: 181
tctaataataagaacgtataaagctataacccttataagattataactttaaaggaggctattaatgttctatattatattactaactatagtgat

SEQ ID NO: 33452 - DNA, 96 bp, Fusarium azukicola
  misc_feature: 181
atctaaacctaattctaagaaggaagaaagagaaaagaaataagaaaagctatttatagctaattcttcttctttattatctcctaaagccgagga

SEQ ID NO: 33453 - DNA, 96 bp, Fusarium azukicola
  misc_feature: 181
ctaaaagtctatctattaaggaataagtcagaagctattataaaatttaaggaatttagaaaagaaatagaaaataatcctaataaaataagaata

SEQ ID NO: 33454 - DNA, 96 bp, Fusarium azukicola
  misc_feature: 181
cagattctaatgagatatatttttctaagacttctaagccttggaaaaagaagaaaactgccttaaaatgcagttattgcaaactgctaggtcata

SEQ ID NO: 33455 - DNA, 96 bp, Fusarium azukicola
  misc_feature: 181
gtgaggacctatattaagttaaaaactgcgaaaactataaactaggaaaattaactaaaaataatataaataaaaaacctagtaataaggaatata

SEQ ID NO: 33456 - DNA, 96 bp, Fusarium azukicola
  misc_feature: 181
tatagtcctatttatcctttctataaagctattagcttatttattatgaggcggacttatattatattttattccattctttatataatagggtct

SEQ ID NO: 33457 - DNA, 96 bp, Fusarium azukicola
  misc_feature: 181
gaggtttaattttttcctctaataataagaacgtataaagctataacccttataagattataactttaaaggaggctattaatattctatattata

SEQ ID NO: 33458 - DNA, 96 bp, Fusarium azukicola
  misc_feature: 181
tagctatataactaatatctcacaagctttaaggagtaatcctgaggcttataacctagaatcactttcttctagccttatagatgaatctaagag

SEQ ID NO: 33459 - DNA, 96 bp, Fusarium azukicola
  misc_feature: 181
tacacttttcttctttattttctttaccctatactttctttattattttactttaccctctacttttattctttattttactttaccctatactct

SEQ ID NO: 33460 - DNA, 96 bp, Fusarium azukicola
  misc_feature: 181
agggatatatcactatagttagtaatataatatagaatattaatagcctcctttaaagttataatcttataagggttatagctttatacgttctta

SEQ ID NO: 33461 - DNA, 96 bp, Fusarium azukicola
  misc_feature: 181
taactatagtgatatatccctataaactatatattatattatagaatttttactctatttttaggtatatttacctaacctatagctactataggt

SEQ ID NO: 33462 - DNA, 96 bp, Fusarium azukicola
  misc_feature: 181
ggtagagagaaagtgtagttaagaagaggaggggagaagagaaagaaagtagaggaagaggggagggaaaaaggggagaagagatagagggggtta

SEQ ID NO: 33463 - DNA, 96 bp, Fusarium azukicola
  misc_feature: 181
taaatatataaataaaaatctctctttaagttttaatagggctatacctcctattttaactaataatctagcagctaagcaattagctgaaaatac

SEQ ID NO: 33464 - DNA, 96 bp, Fusarium azukicola
  misc_feature: 181
gttagatctataagattactttttttaagtttctagctattttatagcagtttttagaaacttaggttttagcgatttttagttatatagtatgct

SEQ ID NO: 33465 - DNA, 96 bp, Fusarium azukicola
  misc_feature: 181
aaggaatctaaacctaattctaagaaggaagaaagagaaaagaaataagaaaagctatttatagctaattcttcttcttcgtcatctcctaaagcc

SEQ ID NO: 33466 - DNA, 96 bp, Fusarium azukicola
  misc_feature: 181
ctttgtagaaaggataaataggactatattagaaaaggttagagctttattatttacttctaacctacctaaatacctttggggagaggctgtggg

SEQ ID NO: 33467 - DNA, 96 bp, Fusarium azukicola
  misc_feature: 181
atttaaggaatttagaaaagaaatagaaaataatcctaataaaataagaataaaattagttttcttagataatataaaggaatatatatataagct

SEQ ID NO: 33468 - DNA, 96 bp, Fusarium azukicola
  misc_feature: 181
atagattctaatgagatatatttttctaagacttctaagccttagaaaaagaagaaaactgccttaaaatgcagttattgcaaactgctaggtcat

SEQ ID NO: 33469 - DNA, 96 bp, Fusarium azukicola
  misc_feature: 181
aattaacctaatctaaaattttaagttatttttaccttaatttgaatttttaaagaattcttttctatttagtgtaaactagtacaaattttaagt

SEQ ID NO: 33470 - DNA, 96 bp, Fusarium azukicola
  misc_feature: 180
taaagacccagattgctattttttgcaccctaataaggctccaaaaaactggaaaactcaggaagccaataaggtgcataagacttctaagaaaaa

SEQ ID NO: 33471 - DNA, 96 bp, Fusarium azukicola
  misc_feature: 180
ttcaaccaattaaccctaacccttaactctactactacccctaaccctaatttcaaccaattaaccctaacccttaacttaactactactcttaaa

SEQ ID NO: 33472 - DNA, 96 bp, Fusarium azukicola
  misc_feature: 180
tattatataaagaatggaataaaatataatataagtccgcctcataataaataagctaatagctttatagaaaggataaataggactatattagaa

SEQ ID NO: 33473 - DNA, 96 bp, Fusarium azukicola
  misc_feature: 180
tcaagttaaaaactgcgaaaactgcaaactaggaaaattaactaaaaataatataaataaaaaacctagtaataaggaatataagttcctagataa

SEQ ID NO: 33474 - DNA, 96 bp, Fusarium azukicola
  misc_feature: 180
tctcttatctcttatctcttatttctctcttttctagctatatctctctttcttagctttacctctctctcttagctatatctctttttcctagtt

SEQ ID NO: 33475 - DNA, 96 bp, Fusarium azukicola
  misc_feature: 180
aaaaagagatatagctaagagagagaggtaaagctaagaaagagagatatagctagaaaagagagaaataagagataagagataagagataagaga

SEQ ID NO: 33476 - DNA, 96 bp, Fusarium azukicola
  misc_feature: 180
tctctcttagaagctagatattatctctttattacttttcttcctagttatctaggaaatcaactatttataacctagtcacactgacaggttatg

SEQ ID NO: 33477 - DNA, 96 bp, Fusarium azukicola
  misc_feature: 180
tatagggtaaagtaaaagagagaagagagtatagggtaaagtaaaagagagaagagagtatagggtaaagtaaaagagagaagagagtatagggga

SEQ ID NO: 33478 - DNA, 96 bp, Fusarium azukicola
  misc_feature: 180
ctaataataagaacgtataaagctataacccttataagattataactttaaaggaggctattaatgttctatattatattaccaactatagtgata

SEQ ID NO: 33479 - DNA, 96 bp, Fusarium azukicola
  misc_feature: 180
taaaatttaaggaatttagaaaagaaatagaaaataatcctaataaaataagaataaaattagttttcttagataatataaaggaatatatatata

SEQ ID NO: 33480 - DNA, 96 bp, Fusarium azukicola
  misc_feature: 180
tataaatagcgttttcttacatggatcgggttagactatatgggtagggtatagataagagggttattagctagggtaaggcgattagggattaat

SEQ ID NO: 33481 - DNA, 96 bp, Fusarium azukicola
  misc_feature: 180
aagaacgtataaagctataacccttataagattataactttaaaggaggctattaatattctatattatattactaactatagtgatatatcccta

SEQ ID NO: 33482 - DNA, 96 bp, Fusarium azukicola
  misc_feature: 180
atataagtccgccttataataaataagctaatagctttatagaaaggataaataggactatattagaaaaggttagagctttattatttacttcta

SEQ ID NO: 33483 - DNA, 96 bp, Fusarium azukicola
  misc_feature: 180
gtcttagcttatatatatattcctttatattatctaagaaaactaattttattcttattttattaggattattttctatttcttttctaaattcct

SEQ ID NO: 33484 - DNA, 96 bp, Fusarium azukicola
  misc_feature: 180
ctaatatagtcctatttatcctttctataaagctattagcttatttattatgaggcggacttatattatattttattccattctttatataatagg

SEQ ID NO: 33485 - DNA, 96 bp, Fusarium azukicola
  misc_feature: 180
agacttctaagaaaaaggaatctaaacctaattctaagaaggaagaaagagaaaagaaataagaaaagctatttatagctaattcttcttcttcat

SEQ ID NO: 33486 - DNA, 96 bp, Fusarium azukicola
  misc_feature: 180
agaagtaaataataaagctctaaccttttctaatatagtcctatttatcctttctataaagccattagcttatttattataaggcggacttatatt

SEQ ID NO: 33487 - DNA, 96 bp, Fusarium azukicola
  misc_feature: 179
ctctcttagctatatctctttttcctagttatacctctctttcttagttatattctcttactcttatatctcttttacctctctttcttaagaaaa

SEQ ID NO: 33488 - DNA, 96 bp, Fusarium azukicola
  misc_feature: 179
tttcctagttatacctctctttcttagttatattctcttactcttatatctcttttacctctctttcttaagaaaatctcctctctttacttataa

SEQ ID NO: 33489 - DNA, 96 bp, Fusarium azukicola
  misc_feature: 179
tttattataaggcggacttatattatattttattccattctttatataatagggtcttagcttatatatatattcctttatattatctaagaaaac

SEQ ID NO: 33490 - DNA, 96 bp, Fusarium azukicola
  misc_feature: 179
aagagagaagagagtatagggtaaagtaaaataaagaataaaagtagagggtaaagtaaaataataaagaaagtatagggtaaagaaaataaagaa

SEQ ID NO: 33491 - DNA, 96 bp, Fusarium azukicola
  misc_feature: 179
aagacttctaagaaaaaggaatctaaacctaattctaagaaggaagaaagagaaaagaaataagaaaagctatttatagctaattcttcttcttca

SEQ ID NO: 33492 - DNA, 96 bp, Fusarium azukicola
  misc_feature: 179
tctttactaaaagcttacaacctatactatttgagagaataaaagagaatctatccctaatataacttatttcctttataaagggtttttattata

SEQ ID NO: 33493 - DNA, 96 bp, Fusarium azukicola
  misc_feature: 179
tcttatctcttatctcttatctcttatttctctcttttctagctatatctctctttcttagctttacctctctctcttagctatatctctttttcc

SEQ ID NO: 33494 - DNA, 96 bp, Fusarium azukicola
  misc_feature: 179
tctaataataagaacgtataaagctataacccttataagattataactttaaaggaggctattaatattctatattatattactaactatagtgat

SEQ ID NO: 33495 - DNA, 96 bp, Fusarium azukicola
  misc_feature: 179
actatagttagtaatataatatagaacattaatagcctcctttaaagttataatcttataagggttatagctttatacgttcttattattagagga

SEQ ID NO: 33496 - DNA, 96 bp, Fusarium azukicola
  misc_feature: 179
tcagactgagattgggcctcaagcacagtctttggggtccttgaagcccaaggggtcgatggttcagctgcctcctcaaccggcgttggcgtatgt

SEQ ID NO: 33497 - DNA, 96 bp, Fusarium azukicola
  misc_feature: 179
tattaatattctatattatattactaactatagtgatatatccctataaactatatattatattatagaatttttactctatttttaggtatattt

SEQ ID NO: 33498 - DNA, 96 bp, Fusarium azukicola
  misc_feature: 179
tataagtgttaatgttctatattatattaccaactatagtgatatatccctataaaccacatattatattatagaatttttactctatttttaggt

SEQ ID NO: 33499 - DNA, 96 bp, Fusarium azukicola
  misc_feature: 179
taagagataagagataagagataagagataagagataaagaaataagaaataagagataagagataaagggaggcaaaaatagccttaagaagccc

SEQ ID NO: 33500 - DNA, 96 bp, Fusarium azukicola
  misc_feature: 179
agtttattataagaactattctcccttagataaactagaaactagagcttataaaggagctataatcggttatcttcctaattcttataagattta

SEQ ID NO: 33501 - DNA, 96 bp, Fusarium azukicola
  misc_feature: 179
gtgaatttctatttattattattattattatataatattgcctttttattattataagggctttctttaaagtaaggaatctcattaaaagagggg

SEQ ID NO: 33502 - DNA, 96 bp, Fusarium azukicola
  misc_feature: 179
aaaaaagtatttttataaatctaactatataaagaacctaaaaatatcttttttagatttttaaaaaaattgctttatagagaaataactaagtac

SEQ ID NO: 33503 - DNA, 96 bp, Fusarium azukicola
  misc_feature: 179
aagaataaaatcagttttcttagataatataaaggaatatatatataagctaagaccctattatataaagaatggaataaaatataatataagtcc

SEQ ID NO: 33504 - DNA, 96 bp, Fusarium azukicola
  misc_feature: 179
gacttctaagaaaaaggaatctaaacctaattctaagaaggaagaaagagaaaagaaataagaaaagctatttatagctaattcttcttcttcatt

SEQ ID NO: 33505 - DNA, 96 bp, Fusarium azukicola
  misc_feature: 179
aggaatatatatataagctaagaccctattatataaagaatggaataaaatataatataagtccgccttataataaataagctaatagctttatag

SEQ ID NO: 33506 - DNA, 96 bp, Fusarium azukicola
  misc_feature: 178
atagttagtaatataatatagaatattaatagcctcctttaaagttataatcttataagggttatagctttatacgttcttattattagaggaaaa

SEQ ID NO: 33507 - DNA, 96 bp, Fusarium azukicola
  misc_feature: 178
tttatcctttctataaagctattagcttatttattatgaggcggacttatattatattttattccattctttatataatagggtcttagcttatat

SEQ ID NO: 33508 - DNA, 96 bp, Fusarium azukicola
  misc_feature: 178
tttaaaggaggctattaatattctatattatattactaactatagtgatatatccctataaaccatatattatattatagaatttttactctattt

SEQ ID NO: 33509 - DNA, 96 bp, Fusarium azukicola
  misc_feature: 178
ttcttatacccttatacacttttcttctttattttctttaccctatactttctttattattttactttaccctctacttttattctttattttact

SEQ ID NO: 33510 - DNA, 96 bp, Fusarium azukicola
  misc_feature: 178
ggttaagaaaggagagaagtaaggaaggttaagaaaggagagaagtaaggaaggttaagaaaggagagaagtaaggaagggtaagaaaggagagaa

SEQ ID NO: 33511 - DNA, 96 bp, Fusarium azukicola
  misc_feature: 178
ttctaattttagctattttaagcttaatttcgacttttatagcttttttaaaaaataccttttaaggtgaaaatataagtgtctcgttcgcttgtc

SEQ ID NO: 33512 - DNA, 96 bp, Fusarium azukicola
  misc_feature: 178
ttatctcttatttctctcttttctagctatatctctctttcttagctttacctctctctcttagctatatctctttttcctagttatacctctctt

SEQ ID NO: 33513 - DNA, 96 bp, Fusarium azukicola
  misc_feature: 178
tctctttataatataacttctattataaataaataagaagtccttcttttaaataaataaggaaaaataatattataaggaaaagagaaaaataac

SEQ ID NO: 33514 - DNA, 96 bp, Fusarium azukicola
  misc_feature: 178
cttagattcatctataaggctagaagaaagtgattctaggttataagcctcaggattactccttaaagcttgtgagatattagttatatagctaga

SEQ ID NO: 33515 - DNA, 96 bp, Fusarium azukicola
  misc_feature: 178
tatattaccaactatagtgatatatccctataaactatatattatattatagaatttttactctatttttaggtatatttacctaacctatagcta

SEQ ID NO: 33516 - DNA, 96 bp, Fusarium azukicola
  misc_feature: 178
aataatagaggtttaattttttcctctaataataagaacgtataaagctataacccttataagattataactttaaaggaggctattaatattcta

SEQ ID NO: 33517 - DNA, 96 bp, Fusarium azukicola
  misc_feature: 178
taatataatatagaatattaatagcctcctttaaagttataatcttataagggttatagctttatacgttcttattattagaggaaaaattaaacc

SEQ ID NO: 33518 - DNA, 96 bp, Fusarium azukicola
  misc_feature: 178
gttatagtaaaggttaggggtagtaatgaagttaatttaaaaagaaaagagaagaaaggatttaaaaataagagaaagagttaaataaaaaagtta

SEQ ID NO: 33519 - DNA, 96 bp, Fusarium azukicola
  misc_feature: 178
gctaagaccctattatataaagaatggaataaaatataatataagtccgcctcataataaataagctaatagctttatagaaaggataaataggac

SEQ ID NO: 33520 - DNA, 96 bp, Fusarium azukicola
  misc_feature: 178
aagtttagacttattatatagtctattactaatataaatttctatagagtttttaaaaaatcttaataagctagtatataaaaagcttatttatac

SEQ ID NO: 33521 - DNA, 96 bp, Fusarium azukicola
  misc_feature: 178
attatattaccaactatagtgatatatccctataaactatatattatattatagaatttttactctatttttaggtatatttacctaacctatagc

SEQ ID NO: 33522 - DNA, 96 bp, Fusarium azukicola
  misc_feature: 178
gataagctgagagggaaaagcaaaatgtgcaggcatatgaaactctatatctgtgaaagtaaacagtgatataatacgtggtcaaaacaaacaaag

SEQ ID NO: 33523 - DNA, 96 bp, Fusarium azukicola
  misc_feature: 178
cttatctcttatttctctcttttctagctatatctctctttcttagctttacctctctctcttagctatatctctttttcctagttatacctctct

SEQ ID NO: 33524 - DNA, 96 bp, Fusarium azukicola
  misc_feature: 178
aaagtaaaataaagaataaaagtagagggtaaagtaaaataataaagaaagtatagggtaaagaaaataaagaagaaaagtgtataagggtataag

SEQ ID NO: 33525 - DNA, 96 bp, Fusarium azukicola
  misc_feature: 178
cactatagttagtaatataatatagaacattaatagcctcctttaaagttataatcttataagggttatagctttatacgttcttattattagagg

SEQ ID NO: 33526 - DNA, 96 bp, Fusarium azukicola
  misc_feature: 178
aggaggctattaatgttctatattatattactaactatagtgatatatccctataaaccatatattatattatagaatttttactctatttttagg

SEQ ID NO: 33527 - DNA, 96 bp, Fusarium azukicola
  misc_feature: 178
aagaaaactgccttaaaatgcagttattgcaaactgctaggtcataaagacccagattgctattttttgcaccctaataaggctccaaaaaactgg

SEQ ID NO: 33528 - DNA, 96 bp, Fusarium azukicola
  misc_feature: 178
atatatggtttatagggatatatcactatagttagtaatataatatagaatattaatagcctcctttaaagttataatcttataagggttatagct

SEQ ID NO: 33529 - DNA, 96 bp, Fusarium azukicola
  misc_feature: 178
atataaataagctataaatctatttaaaattaagaaaagccttatatagcctaaaataaagccctagattatagtataaccttctctctaaattat

SEQ ID NO: 33530 - DNA, 96 bp, Fusarium azukicola
  misc_feature: 178
ataaataagctaatggctttatagaaaggataaataggactatattagaaaaggttagagctttattatttacttctaacctacctaaatacctat

SEQ ID NO: 33531 - DNA, 96 bp, Fusarium azukicola
  misc_feature: 178
aagggaggctattaaagagttaatttctcttaattatatatataaatatataaataaaaatctctctttaagttttaatagggctatacctcctat

SEQ ID NO: 33532 - DNA, 96 bp, Fusarium azukicola
  misc_feature: 178
agctctaaccttttctaatatagtcctatttatcctttctataaagctattagcttatttattatgaggcggacttatattatattttattccatt

SEQ ID NO: 33533 - DNA, 96 bp, Fusarium azukicola
  misc_feature: 177
attatataaagaatggaataaaatataatataagtccgcctcataataaataagctaatagctttatagaaaggataaataggactatattagaaa

SEQ ID NO: 33534 - DNA, 96 bp, Fusarium azukicola
  misc_feature: 177
gttgttgctatgacattaaccctcaacttgatctatacgtacatatgcaactataatggatgactaatattcctcctcaacctggccattttccaa

SEQ ID NO: 33535 - DNA, 96 bp, Fusarium azukicola
  misc_feature: 177
ttagatttatagaaatactttttttaagtttctagctattttatagcagtttttattaaggttagaaatataaggttttagtgcacagtatagcta

SEQ ID NO: 33536 - DNA, 96 bp, Fusarium azukicola
  misc_feature: 177
ctccctcctcttcactccctttactcctcttaacttctctttctcttccctcttcttccctcctctccctctctcctttcccctcctctctaccga

SEQ ID NO: 33537 - DNA, 96 bp, Fusarium azukicola
  misc_feature: 177
agtaaaaattctataatataatatatggtttatagggatatatcactatagttagtaatataatatagaacattaatagcctcctttaaagttata

SEQ ID NO: 33538 - DNA, 96 bp, Fusarium azukicola
  misc_feature: 177
tagggtaaagtaaaataaagaataaaagtagagggtaaagtaaaataataaagaaagtatagggtaaagaaaataaagaagaaaagtgtataaggg

SEQ ID NO: 33539 - DNA, 96 bp, Fusarium azukicola
  misc_feature: 177
taataatagaggtttaattttttcctctaataataagaacgtataaagctataacccttataagattataactttaaaggaggctattaatattct

SEQ ID NO: 33540 - DNA, 96 bp, Fusarium azukicola
  misc_feature: 177
attataactttaaaggaggctattaatattctatattatattactaactatagtgatatatccctataaaccatatattatattatagaattttta

SEQ ID NO: 33541 - DNA, 96 bp, Fusarium azukicola
  misc_feature: 177
aacctaattctaagaaggaagaaagagaaaagaaataagaaaagctatttatagctaattcttcttcttcgtcatctcctaaagccgaggaagacc

SEQ ID NO: 33542 - DNA, 96 bp, Fusarium azukicola
  misc_feature: 177
aaggaatctaaacctaattctaagaaggaagaaagagaaaagaaataagaaaagctatttatagctaattcttcttcttcgttatctcctaaagcc

SEQ ID NO: 33543 - DNA, 96 bp, Fusarium azukicola
  misc_feature: 177
gctattagcttatttattataaggcggacttatattatattttattccattctttatataatagggtcttagcttatatatatattcctttatatt

SEQ ID NO: 33544 - DNA, 96 bp, Fusarium azukicola
  misc_feature: 177
gattctagaaggaccctatatattagtagctattttatctaggaacttatattccttattattaggttttttatttatattatttttagttaattt

SEQ ID NO: 33545 - DNA, 96 bp, Fusarium azukicola
  misc_feature: 177
atctcttatttctctcttttctagctatatctctctttcttagctttacctctctctcttagctatatctctttttcctagttatacctctctttc

SEQ ID NO: 33546 - DNA, 96 bp, Fusarium azukicola
  misc_feature: 177
aaatttaaggaatttagaaaagaaatagaaaataatcctaataaaataagaataaaattagttttcttagataatataaaggaatatatatataag

SEQ ID NO: 33547 - DNA, 96 bp, Fusarium azukicola
  misc_feature: 177
agatatagctaagagagagaggtaaagctaagaaagagagatatagctagaaaagagagaaataagagataagagataagagataagagataagag

SEQ ID NO: 33548 - DNA, 96 bp, Fusarium azukicola
  misc_feature: 177
aagccaataaggtgcataagacttctaagaaaaaggaatctaaacctaattctaagaaggaagaaagagaaaagaaataagaaaagctatttatag

SEQ ID NO: 33549 - DNA, 96 bp, Fusarium azukicola
  misc_feature: 177
atatggtttatagggatatatcactatagttagtaatataatatagaatattaatagcctcctttaaagttataatcttataagggttatagcttt

SEQ ID NO: 33550 - DNA, 96 bp, Fusarium azukicola
  misc_feature: 177
atagtcctatttatcctttctataaagctattagcttatttattatgaggcggacttatattatattttattccattctttatataatagggtctt

SEQ ID NO: 33551 - DNA, 96 bp, Fusarium azukicola
  misc_feature: 177
atagagtaaaaattctataatataatatatggtttatagggatatatcactatagttagtaatataatatagaacattaatagcctcctttaaagt

SEQ ID NO: 33552 - DNA, 96 bp, Fusarium azukicola
  misc_feature: 177
aagaattagctataaatagcttttcttatttcttttctctttcttccttcttagaattaggtttagattcctttttcttagaagtcttatgtacct

SEQ ID NO: 33553 - DNA, 96 bp, Fusarium azukicola
  misc_feature: 177
aagataggaagatctaagttatctcttagtctatagttattcttattagaaataaccttagctattattatatataggttatttttctcttttcct

SEQ ID NO: 33554 - DNA, 96 bp, Fusarium azukicola
  misc_feature: 176
agactagaaaaaatagattctaatgagatatatttttctaagacttctaagccttagaaaaagaagaaaactgccttaaaatgcagttattgcaaa

SEQ ID NO: 33555 - DNA, 96 bp, Fusarium azukicola
  misc_feature: 176
tttattataagaactattctcccttagataaactagaaactagagcttataaaggagctataatcggttatcttcctaattcttataagatttagg

SEQ ID NO: 33556 - DNA, 96 bp, Fusarium azukicola
  misc_feature: 176
ataactattcctattggatttaaagaccttataattaaggatttccttaaggattataaaaagaaatatcctaatagtagtataaatgagctataa

SEQ ID NO: 33557 - DNA, 96 bp, Fusarium azukicola
  misc_feature: 176
ttacctaacctatagctactataggtagctagatattaagggtattattctaattggttaaaaaggttcctacagacctttatgactgccgtcctc

SEQ ID NO: 33558 - DNA, 96 bp, Fusarium azukicola
  misc_feature: 176
tggaatacttctagggcttcttaaggctatttttgcctccctttatctcttatctcttatttcttatttctttatctcttatctcttatctcttat

SEQ ID NO: 33559 - DNA, 96 bp, Fusarium azukicola
  misc_feature: 176
taagacttctaagccttggaaaaagaagaaaactgccttaaaatgcagttattgcaaactgctaggtcataaagacccagattgctattttttgca

SEQ ID NO: 33560 - DNA, 96 bp, Fusarium azukicola
  misc_feature: 176
tcttctttattttctttaccctatactttctttattattttactttaccctctacttttattctttattttactttaccctatactctcttctctc

SEQ ID NO: 33561 - DNA, 96 bp, Fusarium azukicola
  misc_feature: 176
aaataaggaaaaataatattataaggaaaagagaaaaataacctatatataataatagctaaggttatttctaataagaataactatagactaaga

SEQ ID NO: 33562 - DNA, 96 bp, Fusarium azukicola
  misc_feature: 176
tctcttttactttaccctatactctcttctctcttttactttaccctccacttttattctttattttactttaccctatactctcttctctctttt

SEQ ID NO: 33563 - DNA, 96 bp, Fusarium azukicola
  misc_feature: 176
gtaaagtaaaataaagaataaaagtagagggtaaagtaaaataataaagaaagtatagggtaaagaaaataaagaagaaaagtgtataagggtata

SEQ ID NO: 33564 - DNA, 96 bp, Fusarium azukicola
  misc_feature: 176
tatacacttttcttctttattttctttaccctatactttctttattattttactttaccctctacttttattctttattttactttaccctatact

SEQ ID NO: 33565 - DNA, 96 bp, Fusarium azukicola
  misc_feature: 176
cttataattaaggatttccttaaggattataaaaagaaatatcctaatagtaatataaataagctataaatctatttaaaattaagaaaagcctta

SEQ ID NO: 33566 - DNA, 96 bp, Fusarium azukicola
  misc_feature: 176
agtgcaacagaggtactatatactaaaactaggttttttaaaaaatcctagaaaattcaaactaactctaaaatagctaaaatttaaagtttagac

SEQ ID NO: 33567 - DNA, 96 bp, Fusarium azukicola
  misc_feature: 176
gtataaagctataacccttataagattataactttaaaggaggctattaatattctatattatattaccaactatagtgatatatccctataaacc

SEQ ID NO: 33568 - DNA, 96 bp, Fusarium azukicola
  misc_feature: 176
atattcctttatattatctaagaaaactaattttattcttattttattaggattattttctatttcttttctaaattccttaaattttataatagc

SEQ ID NO: 33569 - DNA, 96 bp, Fusarium azukicola
  misc_feature: 176
aatatatggtttatagggatatatcactatagttagtaatataatatagaatattaatagcctcctttaaagttataatcttataagggttatagc

SEQ ID NO: 33570 - DNA, 96 bp, Fusarium azukicola
  misc_feature: 176
gagtatagggtaaagtaaaagagagaagagagtatagggtaaagtaaaagagagaagagagtatagggtaaagtaaaagagagaagagaggatagg

SEQ ID NO: 33571 - DNA, 96 bp, Fusarium azukicola
  misc_feature: 176
ctctctctcttagctatatctctttttcctagttatacctctctttcttagttatattctcttactcttatatctcttttacctctctttcttaag

SEQ ID NO: 33572 - DNA, 96 bp, Fusarium azukicola
  misc_feature: 176
agaagtcttatgcaccttattggcttcctgagttttccagttttttggagccttattagggtgcaaaaaatagcaatctgggtctttatgacctag

SEQ ID NO: 33573 - DNA, 96 bp, Fusarium azukicola
  misc_feature: 176
aattattcctattggatttaaagaccttataattaaggatttccttaaggattataaaaagaaatatcctaatagtagtataaatgagctataaat

SEQ ID NO: 33574 - DNA, 96 bp, Fusarium azukicola
  misc_feature: 176
attagctataaatagcttttcttatttcttttctctttcttccttcttagaattaggtttagattcctttttcttagaagtcttatgtaccttatt

SEQ ID NO: 33575 - DNA, 96 bp, Fusarium azukicola
  misc_feature: 176
ataattaaggatttccttaaggattataaaaagaaatatcctaatagtaatataaataagctataaatctatttaaaattaagaaaagccttatat

SEQ ID NO: 33576 - DNA, 96 bp, Fusarium azukicola
  misc_feature: 176
agggaggctattaaagagttaatttctcttaattatatatataaatatataaataaaaatctctctttaagttttaatagggctatacctcctatt

SEQ ID NO: 33577 - DNA, 96 bp, Fusarium azukicola
  misc_feature: 176
aattggttgaaattagggttaggggtagtagtagagttaagggttagggttaattggttgaaattagggttaggggtagtagtagagttaaggggt

SEQ ID NO: 33578 - DNA, 96 bp, Fusarium azukicola
  misc_feature: 175
agataatataaaggaatatatatataagctaagaccctattatataaagaatggaataaaatataatataagtccgccttataataaataagctaa

SEQ ID NO: 33579 - DNA, 96 bp, Fusarium azukicola
  misc_feature: 175
ttagaaaagaaatagaaaataatcctaataaaataagaataaaattagttttcttagataatataaaggaatatatatataagctaagaccctatt

SEQ ID NO: 33580 - DNA, 96 bp, Fusarium azukicola
  misc_feature: 175
ttaaagactttttaggaataaatataactataaatagagagaataagagtatatctttttcataagcaaaatatataaataaaataataaggaaat

SEQ ID NO: 33581 - DNA, 96 bp, Fusarium azukicola
  misc_feature: 175
tatacctaaaaatagagtaaaaattctataatataatatgtggtttatagggatatatcactatagttagtaatataatatagaacattaataata

SEQ ID NO: 33582 - DNA, 96 bp, Fusarium azukicola
  misc_feature: 175
tattaccaactatagtgatatatccctataaactatatattatattatagaatttttactctatttttaggtatatttacctaacctatagctact

SEQ ID NO: 33583 - DNA, 96 bp, Fusarium azukicola
  misc_feature: 175
agagtaaaaattctataatataatatatggtttatagggatatatcactatagttagtaatataatatagaacattaatagcctcctttaaagtta

SEQ ID NO: 33584 - DNA, 96 bp, Fusarium azukicola
  misc_feature: 175
agtctaaactttaaattttagctattttagagttagtttgaattttctaggattttttaaaaaacctagttttagtatatagtacctctgttgcac

SEQ ID NO: 33585 - DNA, 96 bp, Fusarium azukicola
  misc_feature: 175
aaacctaattctaagaaggaagaaagagaaaagaaataagaaaagctatttatagctaattcttcttctttattatctcctaaagccgaggaagac

SEQ ID NO: 33586 - DNA, 96 bp, Fusarium azukicola
  misc_feature: 175
aatttaaggaatttagaaaagaaatagaaaataatcctaataaaataagaataaaattagttttcttagataatataaaggaatatatatataagc

SEQ ID NO: 33587 - DNA, 96 bp, Fusarium azukicola
  misc_feature: 175
atatagtcctatttatcctttctataaagctattagcttatttattatgaggcggacttatattatattttattccattctttatataatagggtc

SEQ ID NO: 33588 - DNA, 96 bp, Fusarium azukicola
  misc_feature: 175
ataataatagaggtttaattttttcctctaataataagaacgtataaagctataacccttataagattataactttaaaggaggctattaatattc

SEQ ID NO: 33589 - DNA, 96 bp, Fusarium azukicola
  misc_feature: 175
ccttatacacttttcttctttattttctttaccctatactttctttattattttactttaccctctacttttattctttattttactttaccctat

SEQ ID NO: 33590 - DNA, 96 bp, Fusarium azukicola
  misc_feature: 175
aaaaacagattctaatgagatatatttttctaagacttctaagccttggaaaaagaagaaaactgccttaaaatgcagttattgcaaactgctagg

SEQ ID NO: 33591 - DNA, 96 bp, Fusarium azukicola
  misc_feature: 174
ttcctctaataataagaacgtataaagctataacccttataagattataactttaaaggaggctattaatattctatattatattactaactatag

SEQ ID NO: 33592 - DNA, 96 bp, Fusarium azukicola
  misc_feature: 174
aaaataatcctaataaaataagaataaaatcagttttcttagataatataaaggaatatatatataagctaagaccctattatataaagaatggaa

SEQ ID NO: 33593 - DNA, 96 bp, Fusarium azukicola
  misc_feature: 174
ttataactttaaaggaggctattaatattctatattatattactaactatagtgatatatccctataaaccatatattatattatagaatttttac

SEQ ID NO: 33594 - DNA, 96 bp, Fusarium azukicola
  misc_feature: 174
ggaatatatatataagctaagaccctattatataaagaatggaataaaatataatataagtccgccttataataaataagctaatagctttataga

SEQ ID NO: 33595 - DNA, 96 bp, Fusarium azukicola
  misc_feature: 174
agctaagaccctattatataaagaatggaataaaatataatataagtccgcctcataataaataagctaatagctttatagaaaggataaatagga

SEQ ID NO: 33596 - DNA, 96 bp, Fusarium azukicola
  misc_feature: 174
tcaccatccatgtatgtaccgcgtcgataagctgagagggaaaagcaaaatgtgcaggcatatgaaactctatatctgtgaaagtaaacagtgata

SEQ ID NO: 33597 - DNA, 96 bp, Fusarium azukicola
  misc_feature: 174
tagtagctataggttaggtaaatatacctaaaaatagagtaaaaattctataatataatatatagtttatagggatatatcactatagttggtaat

SEQ ID NO: 33598 - DNA, 96 bp, Fusarium azukicola
  misc_feature: 174
aaggatttccttaaggattataaaaagaaatatcctaatagtaatataaataagctataaatctatttaaaattaagaaaagccttatatagccta

SEQ ID NO: 33599 - DNA, 96 bp, Fusarium azukicola
  misc_feature: 174
aaaaaaagtatttttataaatctaactatataaagaacctaaaaatatcttttttagatttttaaaaaaattgctttatagagaaataactaagta

SEQ ID NO: 33600 - DNA, 96 bp, Fusarium azukicola
  misc_feature: 174
attgctattttttgcaccctaataaggctccaaaaaactggaaaactcaggaagccaataaggtgcataagacttctaagaaaaaggaatctaaac

SEQ ID NO: 33601 - DNA, 96 bp, Fusarium azukicola
  misc_feature: 174
aactaaaaataatataaataaaaaacctagtaataaggaatataagttcctagataaaatagctattaatatatagggtccttctagaatccctac

SEQ ID NO: 33602 - DNA, 96 bp, Fusarium azukicola
  misc_feature: 174
gtacataagacttctaagaaaaaggaatctaaacctaattctaagaaggaagaaagagaaaagaaataagaaaagctatttatagctaattcttct

SEQ ID NO: 33603 - DNA, 96 bp, Fusarium azukicola
  misc_feature: 174
agccaataaggtatataagacttctaagaaaaaggaatctaaacctaattctaagaaggaagaaagagaaaagaaataagaaaagctatttatagc

SEQ ID NO: 33604 - DNA, 96 bp, Fusarium azukicola
  misc_feature: 174
agctgagagggaaaagcaaaatgtgcaggcatatgaaactctatatctgtgaaagtaaacagtgatataatacgtggtcaaaacaaacaaagatgc

SEQ ID NO: 33605 - DNA, 96 bp, Fusarium azukicola
  misc_feature: 174
gatctggaatacttctagggcttcttaaggctatttttgcctccctttatctcttatctcttatttcttatttctttatctcttatctcttatctc

SEQ ID NO: 33606 - DNA, 96 bp, Fusarium azukicola
  misc_feature: 174
cactttctaattttagctattttaagcttaatttcgacttttatagcttttttaaaaaataccttttaaggtgaaaatataagtgtctcgttcgct

SEQ ID NO: 33607 - DNA, 96 bp, Fusarium azukicola
  misc_feature: 174
atttcttttctctttcttccttcttagaattaggtttagattcctttttcttagaagtcttatataccttattagcttcctgagttttctagtttt

SEQ ID NO: 33608 - DNA, 96 bp, Fusarium azukicola
  misc_feature: 174
atctggaatacttctagggcttcttaaggctatttttgcctccctttatctcttatctcttatttcttatttctttatctcttatctcttatctct

SEQ ID NO: 33609 - DNA, 96 bp, Fusarium azukicola
  misc_feature: 174
aaaactataaactaggaaaattaactaaaaataatataaataaaaaacctagtaataaggaatataagttcctagataaaatagctactaatatat

SEQ ID NO: 33610 - DNA, 96 bp, Fusarium azukicola
  misc_feature: 174
ataaaaagaaatatcctaatagtaatataaataagctataaatctatttaaaattaagaaaagccttatatagcctaaaataaagccctagattat

SEQ ID NO: 33611 - DNA, 96 bp, Fusarium azukicola
  misc_feature: 174
acctaattctaagaaggaagaaagagaaaagaaataagaaaagctatttatagctaattcttcttcttcgtcatctcctaaagccgaggaagacct

SEQ ID NO: 33612 - DNA, 96 bp, Fusarium azukicola
  misc_feature: 173
ttcctttatattatctaagaaaactaattttattcttattttattaggattattttctatttcttttctaaattccttaaattttataatagcttc

SEQ ID NO: 33613 - DNA, 96 bp, Fusarium azukicola
  misc_feature: 173
ataactaggaaaaagagatatagctaagagagagaggtaaagctaagaaagagagatatagctagaaaagagagaaataagagataagagataaga

SEQ ID NO: 33614 - DNA, 96 bp, Fusarium azukicola
  misc_feature: 173
ctagctatataactaatatctcacaagctttaaggagtaatcctgaggcttataacctagaatcactttcttctagccttatagatgaatctaaga

SEQ ID NO: 33615 - DNA, 96 bp, Fusarium azukicola
  misc_feature: 173
tctctctcttagctatatctctttttcctagttatacctctctttcttagttatattctcttactcttatatctcttttacctctctttcttaaga

SEQ ID NO: 33616 - DNA, 96 bp, Fusarium azukicola
  misc_feature: 173
atcctttctataaagctattagcttatttattatgaggcggacttatattatattttattccattctttatataatagggtcttagcttatatata

SEQ ID NO: 33617 - DNA, 96 bp, Fusarium azukicola
  misc_feature: 173
taactaaaaataatataaataaaaaacctagtaataaggaatataagttcctagataaaatagctattaatatatagggtccttctagaatcccta

SEQ ID NO: 33618 - DNA, 96 bp, Fusarium azukicola
  misc_feature: 173
tactctcttctctcttttactttaccctatactctcttctctcttttactttaccctccacttttattctttattttactttaccctatactctct

SEQ ID NO: 33619 - DNA, 96 bp, Fusarium azukicola
  misc_feature: 173
taatataaaggaatatatatataagctaagaccctattatataaagaatggaataaaatataatataagtccgccttataataaataagctaatag

SEQ ID NO: 33620 - DNA, 96 bp, Fusarium azukicola
  misc_feature: 173
taaggatttccttaaggattataaaaagaaatatcctaatagtaatataaataagctataaatctatttaaaattaagaaaagccttatatagcct

SEQ ID NO: 33621 - DNA, 96 bp, Fusarium azukicola
  misc_feature: 173
ggtagggattctagaaggaccctatatattagtagctattttatctaggaacttatattccttattattaggttttttatttatattatttttagt

SEQ ID NO: 33622 - DNA, 96 bp, Fusarium azukicola
  misc_feature: 173
atattctcttactcttatatctcttttacctctctttcttaagaaaatctcctctctttacttataagctatatctttagctagaagaaacccgcc

SEQ ID NO: 33623 - DNA, 96 bp, Fusarium azukicola
  misc_feature: 173
gacctagcagtttgcaataactgcattttaaggcagttttcttctttttctaaggcttagaagtcttagaaaaatatatctcattagaatctattt

SEQ ID NO: 33624 - DNA, 96 bp, Fusarium azukicola
  misc_feature: 173
atagtgttaatgttctatattatattaccaactatagtgatatatccctataaaccacatattatattatagaatttttactctatttttaggtat

SEQ ID NO: 33625 - DNA, 96 bp, Fusarium azukicola
  misc_feature: 173
aagagataagagataagagataagagataagagataaagaaataagaaataagagataagagataaagggaggcaaaaatagccttaagaagccct

SEQ ID NO: 33626 - DNA, 96 bp, Fusarium azukicola
  misc_feature: 173
aacccttaactctactactacccctaaccctaatttcaaccaattaaccctaacccttaacgtaactactacccctaaccataatttcaaccaatt

SEQ ID NO: 33627 - DNA, 96 bp, Fusarium azukicola
  misc_feature: 173
aataataatagaggtttaattttttcctctaataataagaacgtataaagctataacccttataagattataactttaaaggaggctattaatatt

SEQ ID NO: 33628 - DNA, 96 bp, Fusarium azukicola
  misc_feature: 172
tttttcctctaataataagaacgtataaagctataacccttataagattataactttaaaggaggctattaatgttctatattatattaccaacta

SEQ ID NO: 33629 - DNA, 96 bp, Fusarium azukicola
  misc_feature: 172
tttctaagacttctaagccttggaaaaagaagaaaactgccttaaaatgcagttattgcaaactgctaggtcataaagacccagattgctattttt

SEQ ID NO: 33630 - DNA, 96 bp, Fusarium azukicola
  misc_feature: 172
gattgctattttttgcaccctaataaggctccaaaaaactggaaaactcaggaagccaataaggtgcataagacttctaagaaaaaggaatctaaa

SEQ ID NO: 33631 - DNA, 96 bp, Fusarium azukicola
  misc_feature: 172
ttagttttaattaattagatagtttatagtatttttatagtgatttatatattaaaggttaagaaaagtatttaattcgcttatctatttaactcg

SEQ ID NO: 33632 - DNA, 96 bp, Fusarium azukicola
  misc_feature: 172
ttagctataaatagcttttcttatttcttttctctttcttccttcttagaattaggtttagattcctttttcttagaagtcttatgcaccttattg

SEQ ID NO: 33633 - DNA, 96 bp, Fusarium azukicola
  misc_feature: 172
tgttgttgctatgacattaaccctcaacttgatctatacgtacatatgcaactataatggatgactaatattcctcctcaacctggccattttcca

SEQ ID NO: 33634 - DNA, 96 bp, Fusarium azukicola
  misc_feature: 172
aattactcgccgaccgcgacgcgctacccgttggcaagaactgggcttctaacttcgtcaagcggcatcaagatctcaagacgcgtttctttcgca

SEQ ID NO: 33635 - DNA, 96 bp, Fusarium azukicola
  misc_feature: 172
aatagattctaatgagatatatttttctaagacttctaagccttagaaaaagaagaaaactgccttaaaatgcagttattgcaaactgctaggtca

SEQ ID NO: 33636 - DNA, 96 bp, Fusarium azukicola
  misc_feature: 172
tcttagcttatatatatattcctttatattatctaagaaaactaattttattcttattttattaggattattttctatttcttttctaaattcctt

SEQ ID NO: 33637 - DNA, 96 bp, Fusarium azukicola
  misc_feature: 172
tctatattatattaccaactatagtgatatatccctataaactatatattatattatagaatttttactctatttttaggtatatttacctaacct

SEQ ID NO: 33638 - DNA, 96 bp, Fusarium azukicola
  misc_feature: 172
tcctttctataaagctattagcttatttattatgaggcggacttatattatattttattccattctttatataatagggtcttagcttatatatat

SEQ ID NO: 33639 - DNA, 96 bp, Fusarium azukicola
  misc_feature: 172
gcttataagtaaagagaggagattttcttaagaaagagaggtaaaagagatataagagtaagagaatataactaagaaagagaggtataactagga

SEQ ID NO: 33640 - DNA, 96 bp, Fusarium azukicola
  misc_feature: 172
ctctaataataagaacgtataaagctataacccttataagattataactttaaaggaggctattaatgttctatattatattactaactatagtga

SEQ ID NO: 33641 - DNA, 96 bp, Fusarium azukicola
  misc_feature: 172
ccaataaggtatataagacttctaagaaaaaggaatctaaacctaattctaagaaggaagaaagagaaaagaaataagaaaagctatttatagcta

SEQ ID NO: 33642 - DNA, 96 bp, Fusarium azukicola
  misc_feature: 172
taatatctaaggaaatattatctctaacttctagaggggatttattatttaaagccgaatgcgggcttctattatatatatatacggctgcttccc

SEQ ID NO: 33643 - DNA, 96 bp, Fusarium azukicola
  misc_feature: 172
taataagtctaaactttaaattttagctattttagagttagtttgaattttctaggattttttaaaaaacctagttttagtatatagtacctctgt

SEQ ID NO: 33644 - DNA, 96 bp, Fusarium azukicola
  misc_feature: 172
cagttttcgcagtttttaacttgatataggtcctcactagtatatttaaagagaggatcttttatttttatatatttaattagacttcttaagtta

SEQ ID NO: 33645 - DNA, 96 bp, Fusarium azukicola
  misc_feature: 172
gtagttaagttaagggttagggttaattggttgaaattagggttaggggtagtagtagagttaagggttagggttaattggttgaaattagggtta

SEQ ID NO: 33646 - DNA, 96 bp, Fusarium azukicola
  misc_feature: 172
gcttttcttatttcttttctctttcttccttcttagaattaggtttagattcctttttcttagaagtcttatataccttattagcttcctgagttt

SEQ ID NO: 33647 - DNA, 96 bp, Fusarium azukicola
  misc_feature: 172
gaagaaaactgccttaaaatgcagttattgcaaactgctaggtcataaagacccagattgctattttttgcaccctaataaggctccaaaaaactg

SEQ ID NO: 33648 - DNA, 96 bp, Fusarium azukicola
  misc_feature: 172
ctcttatctcttatttctctcttttctagctatatctctctttcttagctttacctctctctcttagctatatctctttttcctagttatacctct

SEQ ID NO: 33649 - DNA, 96 bp, Fusarium azukicola
  misc_feature: 172
ctacttaaccctaacccttaacttaaccacttaaccctaacctttactataactacttaaccctaacccttaacttaaccacttaaccctaacctt

SEQ ID NO: 33650 - DNA, 96 bp, Fusarium azukicola
  misc_feature: 172
atgttgacgagactggctttatgatgggcatgattgcaagcggaatggtcgtcacgggcacagaaaggcgtgaaaagccaaaagcagtgcagcctg

SEQ ID NO: 33651 - DNA, 96 bp, Fusarium azukicola
  misc_feature: 172
caccatccatgtatgtaccgcgtcgataagctgagagggaaaagcaaaatgtgcaggcatatgaaactctatatctgtgaaagtaaacagtgatat

SEQ ID NO: 33652 - DNA, 96 bp, Fusarium azukicola
  misc_feature: 172
atttagttagatctataagattactttttttaagtttctagctattttatagcagtttttagaaacttaggttttagcgatttttagttatacagt

SEQ ID NO: 33653 - DNA, 96 bp, Fusarium azukicola
  misc_feature: 172
agtagctattttatctaggaacttatattccttattactaggttttttatttatattatttttagttaattttcctagtttatagttttcgcagtt

SEQ ID NO: 33654 - DNA, 96 bp, Fusarium azukicola
  misc_feature: 171
tagcccggaagatgcgctttataatgatatataatctattactaaagccttataaatggcttagttatagcaaaaaccggttttaatggataaaaa

SEQ ID NO: 33655 - DNA, 96 bp, Fusarium azukicola
  misc_feature: 171
tttgcaccctaataaagctccaaaaaactggaaaactcaggaagccaataaggtgcataagacttctaagaaaaaggaatctaaacctaattctaa

SEQ ID NO: 33656 - DNA, 96 bp, Fusarium azukicola
  misc_feature: 171
gggtattattctaattggttaaaaaggttcctacagacctttatgactgccgtcatctatgcatcaaagtataataactgccgattggctaagaaa

SEQ ID NO: 33657 - DNA, 96 bp, Fusarium azukicola
  misc_feature: 171
ttccattctttatataatagggtcttagcttatatatatattcctttatattatctaagaaaactaattttattcttattttattaggattatttt

SEQ ID NO: 33658 - DNA, 96 bp, Fusarium azukicola
  misc_feature: 171
ttcatctataaggctagaagaaagtgattctaggttataagcctcaggattactccttaaagcttgtgagatattagttatatagctagaatagct

SEQ ID NO: 33659 - DNA, 96 bp, Fusarium azukicola
  misc_feature: 171
ttataggtagggattctagaaggaccctatatattagtagctattttatctaggaacttatattccttattattaggttttttatttatattattt

SEQ ID NO: 33660 - DNA, 96 bp, Fusarium azukicola
  misc_feature: 171
tctttataatataacttctattataaataaataagaagtccttcttttaaataaataaggaaaaataatattataaggaaaagagaaaaataacct

SEQ ID NO: 33661 - DNA, 96 bp, Fusarium azukicola
  misc_feature: 171
tcttatctcttatttctctcttttctagctatatctctctttcttagctttacctctctctcttagctatatctctttttcctagttatacctctc

SEQ ID NO: 33662 - DNA, 96 bp, Fusarium azukicola
  misc_feature: 171
tataattaaggatttccttaaggattataaaaagaaatatcctaatagtaatataaataagctataaatctatttaaaattaagaaaagccttata

SEQ ID NO: 33663 - DNA, 96 bp, Fusarium azukicola
  misc_feature: 171
tataaaaagaaatatcctaatagtaatataaataagctataaatctatttaaaattaagaaaagccttatatagcctaaaataaagccctagatta

SEQ ID NO: 33664 - DNA, 96 bp, Fusarium azukicola
  misc_feature: 171
tagggtcttagcttatatatatattcctttatattatctaagaaaactaattttattcttattttattaggattattttctatttcttttctaaat

SEQ ID NO: 33665 - DNA, 96 bp, Fusarium azukicola
  misc_feature: 171
tagatttatagaaatactttttttaagtttctagctattttatagcagtttttattaaggttagaaatataaggttttagtgcacagtatagctat

SEQ ID NO: 33666 - DNA, 96 bp, Fusarium azukicola
  misc_feature: 171
cttaaaatttgtactagtttacactaaatagaaaagaattctttaaaaattcaaattaaggtaaaaataacttaaaattttagattaggttaatta

SEQ ID NO: 33667 - DNA, 96 bp, Fusarium azukicola
  misc_feature: 171
agctttaaataataaatcccctctagaagttagagataatatttccttagatattaaggaattagataaaataaaaacctttaggtctatagttta

SEQ ID NO: 33668 - DNA, 96 bp, Fusarium azukicola
  misc_feature: 171
ctaagaccctattatataaagaatggaataaaatataatataagtccgcctcataataaataagctaatagctttatagaaaggataaataggact

SEQ ID NO: 33669 - DNA, 96 bp, Fusarium azukicola
  misc_feature: 171
catctataaggctagaagaaagtgattctaggttataagcctcaggattactccttaaagcttgtgagatattagttatatagctagaatagctat

SEQ ID NO: 33670 - DNA, 96 bp, Fusarium azukicola
  misc_feature: 171
cagtttttaacttaatataggtcctcactagtatatttaaagagaggatcttttatttttatatatttaattagacttcttaagttaagataactt

SEQ ID NO: 33671 - DNA, 96 bp, Fusarium azukicola
  misc_feature: 171
atctcttatctcttatctcttatttctctcttttctagctatatctctctttcttagctttacctctctctcttagctatatctctttttcctagt

SEQ ID NO: 33672 - DNA, 96 bp, Fusarium azukicola
  misc_feature: 171
agaacgtataaagctataacccttataagattataactttaaaggaggctattaatattctatattatattactaactatagtgatatatccctat

SEQ ID NO: 33673 - DNA, 96 bp, Fusarium azukicola
  misc_feature: 171
agtctcactttctaattttagctattttaagcttaatttcgacttttatagcttttttaaaaaataccttttaaggtgaaaatataagtgtctcgt

SEQ ID NO: 33674 - DNA, 96 bp, Fusarium azukicola
  misc_feature: 170
tttaaggaatttagaaaagaaatagaaaataatcctaataaaataagaataaaattagttttcttagataatataaaggaatatatatataagcta

SEQ ID NO: 33675 - DNA, 96 bp, Fusarium azukicola
  misc_feature: 170
tgtttatagtgaaatagttaattacatagtgtaaataggttttttatatactagctatataattactttttaaaaatctaagaaaattattatagc

SEQ ID NO: 33676 - DNA, 96 bp, Fusarium azukicola
  misc_feature: 170
tcaaccaattaaccctaacccttaactctactactacccctaaccctaatttcaaccaattaaccctaacccttaacttaactactactcttaaac

SEQ ID NO: 33677 - DNA, 96 bp, Fusarium azukicola
  misc_feature: 170
aagtagagggtaaagtaaaataataaagaaagtatagggtaaagaaaataaagaagaaaagtgtataagggtataagaagagagtataaaaggata

SEQ ID NO: 33678 - DNA, 96 bp, Fusarium azukicola
  misc_feature: 170
taaagaagaagaattagctataaatagcttttcttgtttcttttctctttcttccttcttagaattaggtttagattcctttttcttagaagtctt

SEQ ID NO: 33679 - DNA, 96 bp, Fusarium azukicola
  misc_feature: 170
gtttgttgtgtttttattgtgatatctatcttatagggttgagattcttgatccactcgcttggttgatccactcgcttatcatgtacgttatatt

SEQ ID NO: 33680 - DNA, 96 bp, Fusarium azukicola
  misc_feature: 170
ccttaactctactactacccctaaccctaatttcaaccaattaaccctaacccttaacgtaactactacccctaaccataatttcaaccaattaac

SEQ ID NO: 33681 - DNA, 96 bp, Fusarium azukicola
  misc_feature: 170
gtagagggtaaagtaaaataataaagaaagtatagggtaaagaaaataaagaagaaaagtgtataagggtataagaagagagtataaaaggataag

SEQ ID NO: 33682 - DNA, 96 bp, Fusarium azukicola
  misc_feature: 170
cttaactctactactacccctaaccctaatttcaaccaattaaccctaacccttaacgtaactactacccctaaccataatttcaaccaattaacc

SEQ ID NO: 33683 - DNA, 96 bp, Fusarium azukicola
  misc_feature: 170
gggtaaagtaaaagagagaagagagtatagggtaaagtaaaataaagaataaaagtagagggtaaagtaaaataataaagaaagtatagggtaaag

SEQ ID NO: 33684 - DNA, 96 bp, Fusarium azukicola
  misc_feature: 170
gataagaaaccttccctatataaagaaacaactaggatatttaaataaggtaaataaacctgatttttctactaataaagataatataactaattt

SEQ ID NO: 33685 - DNA, 96 bp, Fusarium azukicola
  misc_feature: 170
atactctcttctctcttttactttaccctatactctcttctctcttttactttaccctccacttttattctttattttactttaccctatactctc

SEQ ID NO: 33686 - DNA, 96 bp, Fusarium azukicola
  misc_feature: 170
gaccctatatattagtagctattttatctaggaacttatattccttattactaggttttttatttatattatttttagttaattttcctagtttat

SEQ ID NO: 33687 - DNA, 96 bp, Fusarium azukicola
  misc_feature: 170
cttttcactccttatcctctcctctcccctctccctctctctcttttcactccttatcctctcctctcccctctccctctctctcttttctctcct

SEQ ID NO: 33688 - DNA, 96 bp, Fusarium azukicola
  misc_feature: 170
cttattaatccctaatcgccttaccctagctaataaccctcttatctataccctacccatatagtctaacccgatccatgtaagaaaacgctattt

SEQ ID NO: 33689 - DNA, 96 bp, Fusarium azukicola
  misc_feature: 170
attaatgacggcagtcatgaaggtctgtaggaacctttttaaccaattagaataatacccttaatatctagctacctatagtagctataggttagg

SEQ ID NO: 33690 - DNA, 96 bp, Fusarium azukicola
  misc_feature: 170
aaatagcttttcttgtttcttttctctttcttccttcttagaattaggtttagattcccttttcttagaagtcttatgcaccttattggctttctg

SEQ ID NO: 33691 - DNA, 96 bp, Fusarium azukicola
  misc_feature: 170
attccattctttatataatagggtcttagcttatatatatattcctttatattatctaagaaaactgattttattcttattttattaggattattt

SEQ ID NO: 33692 - DNA, 96 bp, Fusarium azukicola
  misc_feature: 170
ataggtagggattctagaaggaccctatatattagtagctattttatctaggaacttatattccttattattaggttttttatttatattattttt

SEQ ID NO: 33693 - DNA, 96 bp, Fusarium azukicola
  misc_feature: 170
agataggaagatctaagttatctcttagtctatagttattcttattagaaataaccttagctattattatatataggttatttttctcttttcctt

SEQ ID NO: 33694 - DNA, 96 bp, Fusarium azukicola
  misc_feature: 170
acttattaatccctaatcgccttaccctagctaataaccctcttatctataccctacccatatagtctaacccgatccatgtaagaaaacgctatt

SEQ ID NO: 33695 - DNA, 96 bp, Fusarium azukicola
  misc_feature: 170
actctcttctctcttttactttaccctatactctcttctctcttttactttaccctccacttttattctttattttactttaccctatactctctt

SEQ ID NO: 33696 - DNA, 96 bp, Fusarium azukicola
  misc_feature: 169
ggaaaatggccaggttgaggaggaatattagtcatccattatagttgcatatgtacgtatagatcaagttgagggttaatgtcatagcaacaacaa

SEQ ID NO: 33697 - DNA, 96 bp, Fusarium azukicola
  misc_feature: 169
attactcgccgaccgcgacgcgctacccgttggcaagaactgggcttctaacttcgtcaagcggcatcaagatctcaagacgcgtttctttcgcaa

SEQ ID NO: 33698 - DNA, 96 bp, Fusarium azukicola
  misc_feature: 169
ttaagttaagggttagggttaattggttgaaattagggttaggggtagtagtagagttaagggttagggttaattggttgaaattagggttagggg

SEQ ID NO: 33699 - DNA, 96 bp, Fusarium azukicola
  misc_feature: 169
ttaaggatttccttaaggattataaaaagaaatatcctaatagtaatataaataagctataaatctatttaaaattaagaaaagccttatatagcc

SEQ ID NO: 33700 - DNA, 96 bp, Fusarium azukicola
  misc_feature: 169
tgcaccctaataaggctccaaaaaactggaaaactcaggaagccaataaggtgcataagacttctaagaaaagggaatctaaacctaattctaaga

SEQ ID NO: 33701 - DNA, 96 bp, Fusarium azukicola
  misc_feature: 169
gatatagctaagagagagaggtaaagctaagaaagagagatatagctagaaaagagagaaataagagataagagataagagataagagataagaga

SEQ ID NO: 33702 - DNA, 96 bp, Fusarium azukicola
  misc_feature: 169
tctcactttctaattttagctattttaagcttaatttcgacttttatagcttttttaaaaaataccttttaaggtgaaaatataagtgtctcgttc

SEQ ID NO: 33703 - DNA, 96 bp, Fusarium azukicola
  misc_feature: 169
tattataaaatttaaggaatttagaaaagaaatagaaaataatcctaataaaataagaataaaattagttttcttagataatataaaggaatatat

SEQ ID NO: 33704 - DNA, 96 bp, Fusarium azukicola
  misc_feature: 169
tatatggtttatagggatatatcactatagttagtaatataatatagaatattaatagcctcctttaaagttataatcttataagggttatagctt

SEQ ID NO: 33705 - DNA, 96 bp, Fusarium azukicola
  misc_feature: 169
tataaaatttaaggaatttagaaaagaaatagaaaataatcctaataaaataagaataaaattagttttcttagataatataaaggaatatatata

SEQ ID NO: 33706 - DNA, 96 bp, Fusarium azukicola
  misc_feature: 169
taatctttaagttcttatttataaagagagctttattaaaagggatagtatagaagcctaaattatttaataatttagagagaaggttatactata

SEQ ID NO: 33707 - DNA, 96 bp, Fusarium azukicola
  misc_feature: 169
tatacctaaaaatagagtaaaaattctataatataatatatggtttatagggatatatcactatagttggtaatataatatagaacattaacatat

SEQ ID NO: 33708 - DNA, 96 bp, Fusarium azukicola
  misc_feature: 169
tagtaaaggttaggggtagtaatgaagttaatttaaaaagaaaagagaagaaaggatttaaaaataagagaaagagttaaataaaaaagttaggat

SEQ ID NO: 33709 - DNA, 96 bp, Fusarium azukicola
  misc_feature: 169
taaaatatataaataaaataataaggaaatataataaataagaaataggaacttctaaagtacctattaaatttatagaaagactcttaaaatcta

SEQ ID NO: 33710 - DNA, 96 bp, Fusarium azukicola
  misc_feature: 169
tagagtaaaaattctataatataatatatggtttatagggatatatcactatagttagtaatataatatagaacattaatagcctcctttaaagtt

SEQ ID NO: 33711 - DNA, 96 bp, Fusarium azukicola
  misc_feature: 169
aatataaataagctataaatctatttaaaattaagaaaagccttatatagcctaaaataaagccctagattatagtataaccttctctctaaatta

SEQ ID NO: 33712 - DNA, 96 bp, Fusarium azukicola
  misc_feature: 169
gcgagtgcaacagaggtactatatactaaaactaggttttttaaaaaatcctagaaaattcaaactaactctaaaatagctaaaatttaaagttta

SEQ ID NO: 33713 - DNA, 96 bp, Fusarium azukicola
  misc_feature: 169
gctctaaccttttctaatatagtcctatttatcctttctataaagctattagcttatttattatgaggcggacttatattatattttattccattc

SEQ ID NO: 33714 - DNA, 96 bp, Fusarium azukicola
  misc_feature: 169
gccaataaggtatataagacttctaagaaaaaggaatctaaacctaattctaagaaggaagaaagagaaaagaaataagaaaagctatttatagct

SEQ ID NO: 33715 - DNA, 96 bp, Fusarium azukicola
  misc_feature: 169
ctttaggagatgacgaagaagaagaattagctataaatagcttttcttatttcttttctctttcttccttcttagaattaggtttagattcctttt

SEQ ID NO: 33716 - DNA, 96 bp, Fusarium azukicola
  misc_feature: 169
ataatggattatactccctacctgttccatcatcatcatcatgggtcgtcgtgcgcttacagcagaggaaaaggcaaacaaggccaaccgtgagag

SEQ ID NO: 33717 - DNA, 96 bp, Fusarium azukicola
  misc_feature: 169
ccctatatattagtagctattttatctaggaacttatattccttattactaggttttttatttatattatttttagttaattttcctagtttatag

SEQ ID NO: 33718 - DNA, 96 bp, Fusarium azukicola
  misc_feature: 169
agaaaataatcctaataaaataagaataaaatcagttttcttagataatataaaggaatatatatataagctaagaccctattatataaagaatgg

SEQ ID NO: 33719 - DNA, 96 bp, Fusarium azukicola
  misc_feature: 169
ataagagggttattagctagggtaaggcgattagggattaataagtactaagagaggtaaaggaaaccgctactatccggaggggagataacctct

SEQ ID NO: 33720 - DNA, 96 bp, Fusarium azukicola
  misc_feature: 168
tttggagccttattagggtgcaaaaaatagcaatctgggtctttatgacctagcagtttgcaataactgcattttaaggcagttttcttctttttc

SEQ ID NO: 33721 - DNA, 96 bp, Fusarium azukicola
  misc_feature: 168
tatagttagtaatataatatagaatattaatagcctcctttaaagttataatcttataagggttatagctttatacgttcttattattagaggaaa

SEQ ID NO: 33722 - DNA, 96 bp, Fusarium azukicola
  misc_feature: 168
gagactagaaaaaatagattctaatgagatatatttttctaagacttctaagccttagaaaaagaagaaaactgccttaaaatgcagttattgcaa

SEQ ID NO: 33723 - DNA, 96 bp, Fusarium azukicola
  misc_feature: 168
taaaagtctatctattaaggaataagtcagaagctattataaaatttaaggaatttagaaaagaaatagaaaataatcctaataaaataagaataa

SEQ ID NO: 33724 - DNA, 96 bp, Fusarium azukicola
  misc_feature: 168
aagagatatagctaagagagagaggtaaagctaagaaagagagatatagctagaaaagagagaaataagagataagagataagagataagagataa

SEQ ID NO: 33725 - DNA, 96 bp, Fusarium azukicola
  misc_feature: 168
agggattctagaaggaccctatatattaatagctattttatctaggaacttatattccttattactaggttttttatttatattatttttagttaa

SEQ ID NO: 33726 - DNA, 96 bp, Fusarium azukicola
  misc_feature: 168
agagactagaaaaaatagattctaatgagatatatttttctaagacttctaagccttagaaaaagaagaaaactgccttaaaatgcagttattgca

SEQ ID NO: 33727 - DNA, 96 bp, Fusarium azukicola
  misc_feature: 168
tgataagaaaccttccctatataaagaaacaactaggatatttaaataaggtaaataaacctgatttttctactaataaagataatataactaatt

SEQ ID NO: 33728 - DNA, 96 bp, Fusarium azukicola
  misc_feature: 168
aaagagagaagagagtatagggtaaagtaaaataaagaataaaagtagagggtaaagtaaaataataaagaaagtatagggtaaagaaaataaaga

SEQ ID NO: 33729 - DNA, 96 bp, Fusarium azukicola
  misc_feature: 168
tctcttatttctctcttttctagctatatctctctttcttagctttacctctctctcttagctatatctctttttcctagttatacctctctttct

SEQ ID NO: 33730 - DNA, 96 bp, Fusarium azukicola
  misc_feature: 168
tattccattctttatataatagggtcttagcttatatatatattcctttatattatctaagaaaactgattttattcttattttattaggattatt

SEQ ID NO: 33731 - DNA, 96 bp, Fusarium azukicola
  misc_feature: 168
tataggtagggattctagaaggaccctatatattagtagctattttatctaggaacttatattccttattattaggttttttatttatattatttt

SEQ ID NO: 33732 - DNA, 96 bp, Fusarium azukicola
  misc_feature: 168
gaacgtataaagctataacccttataagattataactttaaaggaggctattaatattctatattatattaccaactatagtgatatatccctata

SEQ ID NO: 33733 - DNA, 96 bp, Fusarium azukicola
  misc_feature: 168
tagaagtaaataataaagctctaaccttttctaatatagtcctatttatcctttctataaagccattagcttatttattataaggcggacttatat

SEQ ID NO: 33734 - DNA, 96 bp, Fusarium azukicola
  misc_feature: 168
taaggaatttagaaaagaaatagaaaataatcctaataaaataagaataaaattagttttcttagataatataaaggaatatatatataagctaag

SEQ ID NO: 33735 - DNA, 96 bp, Fusarium azukicola
  misc_feature: 168
ctggaatacttctagggcttcttaaggctatttttgcctccctttatctcttatctcttatttcttatttctttatctcttatctcttatctctta

SEQ ID NO: 33736 - DNA, 96 bp, Fusarium azukicola
  misc_feature: 168
atatctgtgaaagtaaacagtgatataatacgtggtcaaaacaaacaaagatgctagcaagactcttttatcagtggcaatggtagagaagacaac

SEQ ID NO: 33737 - DNA, 96 bp, Fusarium azukicola
  misc_feature: 168
ccttattggcttcctgagttttccagttttttggagccttattagggtgcaaaaaatagcaatctgggtctttatgacctagcagtttgcaataac

SEQ ID NO: 33738 - DNA, 96 bp, Fusarium azukicola
  misc_feature: 168
attattcctattggatttaaagaccttataattaaggatttccttaaggattataaaaagaaatatcctaatagtagtataaatgagctataaatc

SEQ ID NO: 33739 - DNA, 96 bp, Fusarium azukicola
  misc_feature: 168
aagcgaacgagacagcatactatataactaaaaatcgctaaaacctaagtttctaaaaactgctataaaatagctagaaacttaaaaaaagtaatc

SEQ ID NO: 33740 - DNA, 96 bp, Fusarium azukicola
  misc_feature: 168
actgcattttaaggcagttttcttctttttctaaggcttagaagtcttagaaaaatatatctcattagaatctattttttctagtctcttagattc

SEQ ID NO: 33741 - DNA, 96 bp, Fusarium azukicola
  misc_feature: 168
cttttcttatttcttttctctttcttccttcttagaattaggtttagattcctttttcttagaagtcttatataccttattagcttcctgagtttt

SEQ ID NO: 33742 - DNA, 96 bp, Fusarium azukicola
  misc_feature: 168
atgacgaagaagaagaattagctataaatagcttttcttatttcttttctctttcttccttcttagaattaggtttagattcctttttcttagaag

SEQ ID NO: 33743 - DNA, 96 bp, Fusarium azukicola
  misc_feature: 168
agtttaagagtagtagttaagttaagggttagggttaattggttgaaattagggttaggggtagtagtagagttaagggttagggttaattggttg

SEQ ID NO: 33744 - DNA, 96 bp, Fusarium azukicola
  misc_feature: 168
atttattattattattattatataatattgccttttcattattataagggctttctttaaagtaaggaatctcattaaaagaggggttatttcctt

SEQ ID NO: 33745 - DNA, 96 bp, Fusarium azukicola
  misc_feature: 168
atataatacgtggtcaaaacaaacaaagatgctagcaagactcttttatcagtggcaatggtagagaagacaactagacaactatcataatggatt

SEQ ID NO: 33746 - DNA, 96 bp, Fusarium azukicola
  misc_feature: 168
ataaataaataagaagtccttcttttaaataagtaaggaaaaataatatcataaggaaaagagaaaaataacctatatataataacagctaaggtt

SEQ ID NO: 33747 - DNA, 96 bp, Fusarium azukicola
  misc_feature: 168
agcttttcttatttcttttctctttcttccttcttagaattaggtttagattcctttttcttagaagtcttatataccttattagcttcctaagtt

SEQ ID NO: 33748 - DNA, 96 bp, Fusarium azukicola
  misc_feature: 168
agcgaacgagacagcatactatataactaaaaatcgctaaaacctaagtttctaaaaactgctataaaatagctagaaacttaaaaaaagtaatct

SEQ ID NO: 33749 - DNA, 96 bp, Fusarium azukicola
  misc_feature: 168
aaagtttaagagtagtagttaagttaagggttagggttaattggttgaaattagggttaggggtagtagtagagttaagggttagggttaattggt

SEQ ID NO: 33750 - DNA, 96 bp, Fusarium azukicola
  misc_feature: 167
atagttggtaatataatatagaatattaatagcctcctttaaagttataatcttataagggttatagctttatacgttcttattattagaggaaaa

SEQ ID NO: 33751 - DNA, 96 bp, Fusarium azukicola
  misc_feature: 167
tttagttagatctataagattactttttttaagtttctagctattttatagcagtttttagaaacttaggttttagcgatttttagttatacagta

SEQ ID NO: 33752 - DNA, 96 bp, Fusarium azukicola
  misc_feature: 167
ttctaagacttctaagccttggaaaaagaagaaaactgccttaaaatgcagttattgcaaactgctaggtcataaagacccagattgctatttttt

SEQ ID NO: 33753 - DNA, 96 bp, Fusarium azukicola
  misc_feature: 167
gacccagattgctattttttgcaccctaataaggctccaaaaaactggaaaattcaggaagccaataaggtgcataagacttctaagaaaaaggaa

SEQ ID NO: 33754 - DNA, 96 bp, Fusarium azukicola
  misc_feature: 167
ctatagttggtaatataatatagaatattaatagcctcctttaaagttataatcttataagggttatagctttatacgttcttattattagaggaa

SEQ ID NO: 33755 - DNA, 96 bp, Fusarium azukicola
  misc_feature: 167
tagtaaaaacccctttattatagacctgatattataagggaaaatctaagattatatagggaaaagtattaaaatacaataaaaaccctttatgaa

SEQ ID NO: 33756 - DNA, 96 bp, Fusarium azukicola
  misc_feature: 167
aaaattcaaggaatttagaaaagaaatagaaaataatcctaataaaataagaataaaatcagttttcttagataatataaaggaatatatatataa

SEQ ID NO: 33757 - DNA, 96 bp, Fusarium azukicola
  misc_feature: 167
atagtagctataggttaggtaaatatacctaaaaatagagtaaaaattctataatataatatatagtttatagggatatatcactatagttggtaa

SEQ ID NO: 33758 - DNA, 96 bp, Fusarium azukicola
  misc_feature: 167
caaaaaactggaaaactcaggaagccaataaggtgcataagacttctaagaaaagggaatctaaacctaattctaagaaggaagaaagagaaaaga

SEQ ID NO: 33759 - DNA, 96 bp, Fusarium azukicola
  misc_feature: 167
tccttaatatctaaggaaatattatctctaacttctagaggggatttattatttaaagccgaatgcgggcttctattatatatatatacggctggt

SEQ ID NO: 33760 - DNA, 96 bp, Fusarium azukicola
  misc_feature: 167
tatttcttttctctttcttccttcttagaattaggtttagattcctttttcttagaagtcttatataccttattagcttcctgagttttctagttt

SEQ ID NO: 33761 - DNA, 96 bp, Fusarium azukicola
  misc_feature: 167
attaagttaaaaactgcgaaaactataaactaggaaaattaactaaaaataatataaataaaaaacctagtaataaggaatataagttcctagata

SEQ ID NO: 33762 - DNA, 96 bp, Fusarium azukicola
  misc_feature: 167
cttatacacttttcttctttattttctttaccctatactttctttattattttactttaccctctacttttattctttattttactttaccctata

SEQ ID NO: 33763 - DNA, 96 bp, Fusarium azukicola
  misc_feature: 167
attagaaataaccttagctattattatatataggttatttttctcttttccttatgatattatttttccttacttatttaaaagaaggacttctta

SEQ ID NO: 33764 - DNA, 96 bp, Fusarium azukicola
  misc_feature: 167
gtaacgtacatgataagcgagtggatcaaccaagcgagtggatcaagaatctcaaccctataagatagatatcacaataaaaacacaacaaactat

SEQ ID NO: 33765 - DNA, 96 bp, Fusarium azukicola
  misc_feature: 167
ggtattattctaattggttaaaaaggttcctacagaccttcatgactgccgtcatcaatgcatcaaagtataataactgccgattggctaagaaag

SEQ ID NO: 33766 - DNA, 96 bp, Fusarium azukicola
  misc_feature: 167
cttatgcaccttattggcttcctgagttttccagttttttggagccttattagggtgcaaaaaatagcaatctgggtctttatgacctagcagttt

SEQ ID NO: 33767 - DNA, 96 bp, Fusarium azukicola
  misc_feature: 167
aggtagggattctagaaggaccctatatattagtagctattttatctaggaacttatattccttattattaggttttttatttatattatttttag

SEQ ID NO: 33768 - DNA, 96 bp, Fusarium azukicola
  misc_feature: 167
aggaatctaaacctaattctaagaaggaagaaagagaaaagaaataagaaaagctatttatagctaattcttcttcttcgttatctcctaaagccg

SEQ ID NO: 33769 - DNA, 96 bp, Fusarium azukicola
  misc_feature: 167
cactgtatactttaagatacctatataaggaatttttttaaaaatttagaaaaaatatttttaagtcttatatatagctaaatagttaaaatcgtt

SEQ ID NO: 33770 - DNA, 96 bp, Fusarium azukicola
  misc_feature: 167
aggtataactaggaaaaagagatatagctaagagagagaggtaaagctaagaaagagagatatagctagaaaagagagaaataagagataagagat

SEQ ID NO: 33771 - DNA, 96 bp, Fusarium azukicola
  misc_feature: 167
agataagagggttattagctagggtaaggcgattagggattaataagtactaagagaggtaaaggaaaccgctactatccggaggggagataacct

SEQ ID NO: 33772 - DNA, 96 bp, Fusarium azukicola
  misc_feature: 166
tcttatttcttttctctttcttccttcttagaattaggtttagattcctttttcttagaagtcttatataccttattagcttcctgagttttctag

SEQ ID NO: 33773 - DNA, 96 bp, Fusarium azukicola
  misc_feature: 166
tcttattagaaataaccttagctattattatatataggttatttttctcttttccttataatattatttttccttatttatttaaaagaaggactt

SEQ ID NO: 33774 - DNA, 96 bp, Fusarium azukicola
  misc_feature: 166
gagatatagctaagagagagaggtaaagctaagaaagagagatatagctagaaaagagagaaataagagataagagataagagataagagataaga

SEQ ID NO: 33775 - DNA, 96 bp, Fusarium azukicola
  misc_feature: 166
gaggtataactaggaaaaagagatatagctaagagagagaggtaaagctaagaaagagagatatagctagaaaagagagaaataagagataagaga

SEQ ID NO: 33776 - DNA, 96 bp, Fusarium azukicola
  misc_feature: 166
aatagcttttcttatttcttttctctttcttccttcttagaattaggtttagattcctttttcttagaagtcttatataccttattagcttcctga

SEQ ID NO: 33777 - DNA, 96 bp, Fusarium azukicola
  misc_feature: 166
tattaagttaaaaactgcgaaaactataaactaggaaaattaactaaaaataatataaataaaaaacctagtaataaggaatataagttcctagat

SEQ ID NO: 33778 - DNA, 96 bp, Fusarium azukicola
  misc_feature: 166
tatattcctttatattatctaagaaaactaattttattcttattttattaggattattttctatttcttttctaaattccttaaattttataatag

SEQ ID NO: 33779 - DNA, 96 bp, Fusarium azukicola
  misc_feature: 166
agaggtttaatttttcctctaataataagaacgtataaagctataacccttataagattataactttaaaggaggctattaatgttctatattata

SEQ ID NO: 33780 - DNA, 96 bp, Fusarium azukicola
  misc_feature: 166
cagactgagattgggcctcaagcacagtctttggggtccttgaagcccaaggggtcgatggttcagctgcctcctcaaccggcgttggcgtatgta

SEQ ID NO: 33781 - DNA, 96 bp, Fusarium azukicola
  misc_feature: 166
taagaaaaaggaatctaaacctaattctaagaaggaagaaagagaaaagaaataagaaaagctatttatagctaattcttcttcttcgttatctcc

SEQ ID NO: 33782 - DNA, 96 bp, Fusarium azukicola
  misc_feature: 166
gcgaacgagacagcatactatataactaaaaatcgctaaaacctaagtttctaaaaactgctataaaatagctagaaacttaaaaaaagtaatctt

SEQ ID NO: 33783 - DNA, 96 bp, Fusarium azukicola
  misc_feature: 166
gaaaagagagagagggagaggggagaggagaggataaggagtgaaaagagagagagggagaggggagaggagaggataaggagagaaaagagagag

SEQ ID NO: 33784 - DNA, 96 bp, Fusarium azukicola
  misc_feature: 166
cttattggcttcctgagttttccagttttttggagccttattagggtgcaaaaaatagcaatctgggtctttatgacctagcagtttgcaataact

SEQ ID NO: 33785 - DNA, 96 bp, Fusarium azukicola
  misc_feature: 166
aattaaggatttccttaaggattataaaaagaaatatcctaatagtaatataaataagctataaatctatttaaaattaagaaaagccttatatag

SEQ ID NO: 33786 - DNA, 96 bp, Fusarium azukicola
  misc_feature: 166
cattaatgacggcagtcatgaaggtctgtaggaacctttttaaccaattagaataatacccttaatatctagctacctatagtagctataggttag

SEQ ID NO: 33787 - DNA, 96 bp, Fusarium azukicola
  misc_feature: 166
aaatagcttttcttatttcttttctctttcttccttcttagaattaggtttagattcctttttcttagaagtcttatataccttattagcttcctg

SEQ ID NO: 33788 - DNA, 96 bp, Fusarium azukicola
  misc_feature: 166
ataaataaataagaagtccttcttttaaataagtaaggaaaaataatatcataaggaaaagagaaaaataacctatatataataatagctaaggtt

SEQ ID NO: 33789 - DNA, 96 bp, Fusarium azukicola
  misc_feature: 166
agttttccagttttttggagccttattagggtgcaaaaaatagcaatctgggtctttatgacctagcagtttgcaataactgcattttaaggcagt

SEQ ID NO: 33790 - DNA, 96 bp, Fusarium azukicola
  misc_feature: 166
acactgtatactttaagatacctatataaggaatttttttaaaaatttagaaaaaatatttttaagtcttatatatagctaaatagttaaaatcgt

SEQ ID NO: 33791 - DNA, 96 bp, Fusarium azukicola
  misc_feature: 165
taagttaaaaactgcgaaaactataaactaggaaaattaactaaaaataatataaataaaaaacctagtaataaggaatataagttcctagataaa

SEQ ID NO: 33792 - DNA, 96 bp, Fusarium azukicola
  misc_feature: 165
ttgatttcctagataactaggaagaaaagtaataaagagataatatctagcttctaagagagacttatagaagatagatagataaaagtaggtcat

SEQ ID NO: 33793 - DNA, 96 bp, Fusarium azukicola
  misc_feature: 165
aactctatatctgtgaaagtaaacagtgatataatacgtggtcaaaacaaacaaagatgctagcaagactcttttatcagtggcaatggtagagaa

SEQ ID NO: 33794 - DNA, 96 bp, Fusarium azukicola
  misc_feature: 165
gaatatatatataagctaagaccctattatataaagaatggaataaaatataatataagtccgccttataataaataagctaatagctttatagaa

SEQ ID NO: 33795 - DNA, 96 bp, Fusarium azukicola
  misc_feature: 165
tctaagaaaaaggaatctaaacctaattctaagaaggaagaaagagaaaagaaataagaaaagctatttatagctaattcttcttcttcgttatct

SEQ ID NO: 33796 - DNA, 96 bp, Fusarium azukicola
  misc_feature: 165
tcctttatattatctaagaaaactaattttattcttattttattaggattattttctatttcttttctaaattccttaaattttataatagcttct

SEQ ID NO: 33797 - DNA, 96 bp, Fusarium azukicola
  misc_feature: 165
tatttagttagatctataagattactttttttaagtttctagctattttatagcagtttttagaaacttaggttttagcgatttttagttatacag

SEQ ID NO: 33798 - DNA, 96 bp, Fusarium azukicola
  misc_feature: 165
tattggcttcctgagttttccagttttttggagccttattagggtgcaaaaaatagcaatctgggtctttatgacctagcagtttgcaataactgc

SEQ ID NO: 33799 - DNA, 96 bp, Fusarium azukicola
  misc_feature: 165
ctaggaacttatattccttattactaggttttttatttatattatttttagttaattttcctagtttatagttttcgcagtttttaacttaatata

SEQ ID NO: 33800 - DNA, 96 bp, Fusarium azukicola
  misc_feature: 165
taaaattcaaggaatttagaaaagaaatagaaaataatcctaataaaataagaataaaatcagttttcttagataatataaaggaatatatatata

SEQ ID NO: 33801 - DNA, 96 bp, Fusarium azukicola
  misc_feature: 165
gaacgtataaagctataacccttataagattataactttaaaggaggctattaatgttctatattatattaccaactatagtgatatatccctata

SEQ ID NO: 33802 - DNA, 96 bp, Fusarium azukicola
  misc_feature: 165
aagtgttaatgttctatattatattaccaactatagtgatatatccctataaaccatatattatattatagaatttttactctatttttaggtata

SEQ ID NO: 33803 - DNA, 96 bp, Fusarium azukicola
  misc_feature: 165
tagttaagttaagggttagggttaattggttgaaattagggttaggggtagtagtagagttaagggttagggttaattggttgaaattagggttag

SEQ ID NO: 33804 - DNA, 96 bp, Fusarium azukicola
  misc_feature: 165
aactacttaaccctaacccttaacttaaccacttaaccctaacctttactataactacttaaccctaacccttaacttaaccacttaaccctaacc

SEQ ID NO: 33805 - DNA, 96 bp, Fusarium azukicola
  misc_feature: 165
actaaaaataatataaataaaaaacctagtaataaggaatataagttcctagataaaatagctattaatatatagggtccttctagaatccctacc

SEQ ID NO: 33806 - DNA, 96 bp, Fusarium azukicola
  misc_feature: 165
gctttaggagatgacgaagaagaagaattagctataaatagcttttcttatttcttttctctttcttccttcttagaattaggtttagattccttt

SEQ ID NO: 33807 - DNA, 96 bp, Fusarium azukicola
  misc_feature: 165
gacaggttatgagcccggaggtctcttcctaagggtttatacttaaaagaagattatacttcttttttaagtcttttctaagactttatacctcct

SEQ ID NO: 33808 - DNA, 96 bp, Fusarium azukicola
  misc_feature: 165
ccttaatatctaaggaaatattatctctaacttctagaggggatttattatttaaagccgaatgcgggcttctattatatatatatacggctggtt

SEQ ID NO: 33809 - DNA, 96 bp, Fusarium azukicola
  misc_feature: 165
agaaaataatcctaataaaataagaataaaattagttttcttagataatataaaggaatatatatataagctaagaccctattatataaagaatgg

SEQ ID NO: 33810 - DNA, 96 bp, Fusarium azukicola
  misc_feature: 165
atatagctaagagagagaggtaaagctaagaaagagagatatagctagaaaagagagaaataagagataagagataagagataagagataagagat

SEQ ID NO: 33811 - DNA, 96 bp, Fusarium azukicola
  misc_feature: 164
tttgtactagtttacactaaatagaaaagaattctttaaaaattcaaattaaggtaaaaataacttaaaattttagattaggttaattaagtgaaa

SEQ ID NO: 33812 - DNA, 96 bp, Fusarium azukicola
  misc_feature: 164
tttctgttaatgttctatattatattaccaactatagtgatatatccctataaaccacatattatattatagaatttttactctatttttaggtat

SEQ ID NO: 33813 - DNA, 96 bp, Fusarium azukicola
  misc_feature: 164
tttattccattctttatataatagggtcttagcttatatatatattcctttatattatctaagaaaactaattttattcttattttattaggatta

SEQ ID NO: 33814 - DNA, 96 bp, Fusarium azukicola
  misc_feature: 164
acgtataaagctataacccttataagattataactttaaaggaggctattaatgttctatattatattaccaactatagtgatatatccctataaa

SEQ ID NO: 33815 - DNA, 96 bp, Fusarium azukicola
  misc_feature: 164
ggatttccttaaggattataaaaagaaatatcctaatagtaatataaataagctataaatctatttaaaattaagaaaagccttatatagcctaaa

SEQ ID NO: 33816 - DNA, 96 bp, Fusarium azukicola
  misc_feature: 164
tttaggagatgacgaagaagaagaattagctataaatagcttttcttatttcttttctctttcttccttcttagaattaggtttagattccttttt

SEQ ID NO: 33817 - DNA, 96 bp, Fusarium azukicola
  misc_feature: 164
ttcttatccttttatactctcttcttatacccttatacacttttcttctttattttctttaccctatactttctttattattttactttaccctct

SEQ ID NO: 33818 - DNA, 96 bp, Fusarium azukicola
  misc_feature: 164
ttcaccatccatgtatgtaccgcgtcgataagctgagagggaaaagcaaaatgtgcaggcatatgaaactctatatctgtgaaagtaaacagtgat

SEQ ID NO: 33819 - DNA, 96 bp, Fusarium azukicola
  misc_feature: 164
gtataactaggaaaaagagatatagctaagagagagaggtaaagctaagaaagagagatatagctagaaaagagagaaataagagataagagataa

SEQ ID NO: 33820 - DNA, 96 bp, Fusarium azukicola
  misc_feature: 164
ttagtaaaaacccctttattatagacctgatattataagggaaaatctaagattatatagggaaaagtattaaaatacaataaaaaccctttatga

SEQ ID NO: 33821 - DNA, 96 bp, Fusarium azukicola
  misc_feature: 164
ataagaagtccttcttttaaataagtaaggaaaaataatatcataaggaaaagagaaaaataacctatatataataatagctaaggttatttctaa

SEQ ID NO: 33822 - DNA, 96 bp, Fusarium azukicola
  misc_feature: 164
tattattctaattggttaaaaaggttcctacagacctttatgactgccgtcatctatgcatcaaagtataataactgccgattggctaaaaaaaga

SEQ ID NO: 33823 - DNA, 96 bp, Fusarium azukicola
  misc_feature: 164
gaaaataatcctaataaaataagaataaaatcagttttcttagataatataaaggaatatatatataagctaagaccctattatataaagaatgga

SEQ ID NO: 33824 - DNA, 96 bp, Fusarium azukicola
  misc_feature: 164
aatagcttttcttgtttcttttctctttcttccttcttagaattaggtttagattcctttttcttagaagtcttatgcaccttattggctttctga

SEQ ID NO: 33825 - DNA, 96 bp, Fusarium azukicola
  misc_feature: 164
gaaaactataaactaggaaaattaactaaaaataatataaataaaaaacctagtaataaggaatataagttcctagataaaatagctactaatata

SEQ ID NO: 33826 - DNA, 96 bp, Fusarium azukicola
  misc_feature: 164
agatttatagaaatactttttttaagtttctagctattttatagcagtttttattaaggttagaaatataaggttttagtgcacagtatagctata

SEQ ID NO: 33827 - DNA, 96 bp, Fusarium azukicola
  misc_feature: 164
atttgttaatgttctatattatattaccaactatagtgatatatccctataaaccatatattatattatagaatttttactctatttttaggtata

SEQ ID NO: 33828 - DNA, 96 bp, Fusarium azukicola
  misc_feature: 164
tagaaaataatcctaataaaataagaataaaatcagttttcttagataatataaaggaatatatatataagctaagaccctattatataaagaatg

SEQ ID NO: 33829 - DNA, 96 bp, Fusarium azukicola
  misc_feature: 164
gcagtttgcaataactgcattttaaggcagttttcttctttttctaaggcttagaagtcttagaaaaatatatctcattagaatctattttttcta

SEQ ID NO: 33830 - DNA, 96 bp, Fusarium azukicola
  misc_feature: 164
gatattgttaatgttctatattatattaccaactatagtgatatatccctataaaccacatattatattatagaatttttactctatttttaggta

SEQ ID NO: 33831 - DNA, 96 bp, Fusarium azukicola
  misc_feature: 164
aatataatataagtccgccttataataaataagctaatggctttatagaaaggataaataggactatattagaaaaggttagagctttattattta

SEQ ID NO: 33832 - DNA, 96 bp, Fusarium azukicola
  misc_feature: 164
gttctatattatattaccaactatagtgatatatccctataaactatatattatattatagaatttttactctatttttaggtatatttacctaac

SEQ ID NO: 33833 - DNA, 96 bp, Fusarium azukicola
  misc_feature: 164
aataataaggaaatataataaataagaaataggaacttctaaagtacctattaaatttatagaaagactcttaaaatctaaagaaccttcttctcc

SEQ ID NO: 33834 - DNA, 96 bp, Fusarium azukicola
  misc_feature: 164
agctaaatagttaaaatcgttttttttaagtttctagctattttatagcgatttttagaaacttagggtttagctgtttttagttatatagtatgc

SEQ ID NO: 33835 - DNA, 96 bp, Fusarium azukicola
  misc_feature: 164
gacgaagaagaagaattagctataaatagcttttcttatttcttttctctttcttccttcttagaattaggtttagattcctttttcttagaagtc

SEQ ID NO: 33836 - DNA, 96 bp, Fusarium azukicola
  misc_feature: 164
caaaaccggtttttgctataactaagccatttataaggctttagtaatagattataaagcgcatcttccgggctatccgacggtataatcttagtc

SEQ ID NO: 33837 - DNA, 96 bp, Fusarium azukicola
  misc_feature: 164
attttatttatatattttgcttatgaaaaagatatactcttattctctctatttatagttatatttattcctaaaaagtctttaacttctcctaag

SEQ ID NO: 33838 - DNA, 96 bp, Fusarium azukicola
  misc_feature: 164
cagtttgcaataactgcattttaaggcagttttcttctttttctaaggcttagaagtcttagaaaaatatatctcattagaatctattttttctag

SEQ ID NO: 33839 - DNA, 96 bp, Fusarium azukicola
  misc_feature: 164
agggtcttagcttatatatatattcctttatattatctaagaaaactaattttattcttattttattaggattattttctatttcttttctaaatt

SEQ ID NO: 33840 - DNA, 96 bp, Fusarium azukicola
  misc_feature: 163
ttgcaccctaataaagctccaaaaaactggaaaactcaggaagccaataaggtgcataagacttctaagaaaaaggaatctaaacctaattctaag

SEQ ID NO: 33841 - DNA, 96 bp, Fusarium azukicola
  misc_feature: 163
tctaatatagtcctatttatcctttctataaagctattagcttatttattatgaggcggacttatattatattttattccattctttatataatag

SEQ ID NO: 33842 - DNA, 96 bp, Fusarium azukicola
  misc_feature: 163
tatataaatagctatagtaatctttaagttcttatttataaagagagctttattaaaagggatagtatagaagcctaaattatttaataatttaga

SEQ ID NO: 33843 - DNA, 96 bp, Fusarium azukicola
  misc_feature: 163
ataacttctattataaataaataagaagtccttcttttaaataaataaggaaaaataatattataaggaaaagagaaaaataacctatatataata

SEQ ID NO: 33844 - DNA, 96 bp, Fusarium azukicola
  misc_feature: 163
tatatattagtagctattttatctaggaacttatattccttattactaggttttttatttatattatttttagttaattttcctagtttatagttt

SEQ ID NO: 33845 - DNA, 96 bp, Fusarium azukicola
  misc_feature: 163
taattaaggatttccttaaggattataaaaagaaatatcctaatagtaatataaataagctataaatctatttaaaattaagaaaagccttatata

SEQ ID NO: 33846 - DNA, 96 bp, Fusarium azukicola
  misc_feature: 163
atattatattaccaactatagtgatatatccctataaactatatattatattatagaatttttactctatttttaggtatatttacctaacctata

SEQ ID NO: 33847 - DNA, 96 bp, Fusarium azukicola
  misc_feature: 163
tagaggtttaatttttcctctaataataagaacgtataaagctataacccttataagattataactttaaaggaggctattaatgttctatattat

SEQ ID NO: 33848 - DNA, 96 bp, Fusarium azukicola
  misc_feature: 163
atagaggtactatatactaaaactaggttttttaaaaaatcctagaaaattcaaactaactctaaaatagctaaaatttaaagtttagacttatta

SEQ ID NO: 33849 - DNA, 96 bp, Fusarium azukicola
  misc_feature: 163
taagtctaaactttaaattttagctattttagagttagtttgaattttctaggattttttaaaaaacctagttttagtatatagtacctctgttgc

SEQ ID NO: 33850 - DNA, 96 bp, Fusarium azukicola
  misc_feature: 163
aaacctaattctaagaaggaagaaagagaaaagaaataagaaaagctatttatagctaattcttcttcttcgtcatctcctaaagccgaggaagac

SEQ ID NO: 33851 - DNA, 96 bp, Fusarium azukicola
  misc_feature: 163
ggtcttagcttatatatatattcctttatattatctaagaaaactaattttattcttattttattaggattattttctatttcttttctaaattcc

SEQ ID NO: 33852 - DNA, 96 bp, Fusarium azukicola
  misc_feature: 163
gctatcccgcctcgaccaccacttctcgatgattcaccctgtatctgtatatcaatatccatttgatcaattgcttcccttgcctcatctacagtc

SEQ ID NO: 33853 - DNA, 96 bp, Fusarium azukicola
  misc_feature: 163
agctataaatagcttttcttatttcttttctctttcttccttcttagaattaggtttagattcctttttcttagaagtcttatgcaccttattggc

SEQ ID NO: 33854 - DNA, 96 bp, Fusarium azukicola
  misc_feature: 163
aatagagtaaaaattctataatataatatatggtttatagggatatatcactatagttagtaatataatatagaacattaatagcctcctttaaag

SEQ ID NO: 33855 - DNA, 96 bp, Fusarium azukicola
  misc_feature: 163
atataaatagctatagtaatctttaagttcttatttataaagagagctttattaaaagggatagtatagaagcctaaattatttaataatttagag

SEQ ID NO: 33856 - DNA, 96 bp, Fusarium azukicola
  misc_feature: 163
aaggaggctattaatgttctatattatattactaactatagtgatatatccctataaaccatatattatattatagaatttttactctatttttag

SEQ ID NO: 33857 - DNA, 96 bp, Fusarium azukicola
  misc_feature: 163
aaaggaatatatatataagctaagaccctattatataaagaatggaataaaatataatataagtccgcctcataataaataagctaatagctttat

SEQ ID NO: 33858 - DNA, 96 bp, Fusarium azukicola
  misc_feature: 163
aggaaaagagaaaaataacctatatataataacagctaaggttatttctaataagaataactatagactaagagataacttagatcttcctattct

SEQ ID NO: 33859 - DNA, 96 bp, Fusarium azukicola
  misc_feature: 163
agcagtttgcaataactgcattttaaggcagttttcttctttttccaaggcttagaagtcttagaaaaatatatctcattagaatctgttttttct

SEQ ID NO: 33860 - DNA, 96 bp, Fusarium azukicola
  misc_feature: 163
actttctaattttagctattttaagcttaatttcgacttttatagcttttttaaaaaataccttttaaggtgaaaatataagtgtctcgttcgctt

SEQ ID NO: 33861 - DNA, 96 bp, Fusarium azukicola
  misc_feature: 162
aaactgccttaaaatgcagttattgcaaactgctaggtcataaagacccagattgctattttttgcaccctaataaggctccaaaaaactggaaaa

SEQ ID NO: 33862 - DNA, 96 bp, Fusarium azukicola
  misc_feature: 162
tctctcttagctatatctctttttcctagttatacctctctttcttagttatattctcttactcttatatctcttttacctctctttcttaagaaa

SEQ ID NO: 33863 - DNA, 96 bp, Fusarium azukicola
  misc_feature: 162
ttctctttataatataacttctattataaataaataagaagtccttcttttaaataaataaggaaaaataatattataaggaaaagagaaaaataa

SEQ ID NO: 33864 - DNA, 96 bp, Fusarium azukicola
  misc_feature: 162
ttattggcttcctgagttttccagttttttggagccttattagggtgcaaaaaatagcaatctgggtctttatgacctagcagtttgcaataactg

SEQ ID NO: 33865 - DNA, 96 bp, Fusarium azukicola
  misc_feature: 162
tattattatatatatcttagtaaaaacccctttattatagacctgatattataagggaaaatctaagattatatagggaaaagtattaaaatataa

SEQ ID NO: 33866 - DNA, 96 bp, Fusarium azukicola
  misc_feature: 162
ttagttagatctataagattactttttttaagtttctagctattttatagcagtttttagaaacttaggttttagcgatttttagttatacagtat

SEQ ID NO: 33867 - DNA, 96 bp, Fusarium azukicola
  misc_feature: 162
aatagcttttcttatttcttttctctttcttccttcttagaattaggtttagattcctttttcttagaagtcttatataccttattagcttcctaa

SEQ ID NO: 33868 - DNA, 96 bp, Fusarium azukicola
  misc_feature: 162
ttaaggaatttagaaaagaaatagaaaataatcctaataaaataagaataaaattagttttcttagataatataaaggaatatatatataagctaa

SEQ ID NO: 33869 - DNA, 96 bp, Fusarium azukicola
  misc_feature: 162
cccttaactctactactacccctaaccctaatttcaaccaattaaccctaacccttaacgtaactactacccctaaccataatttcaaccaattaa

SEQ ID NO: 33870 - DNA, 96 bp, Fusarium azukicola
  misc_feature: 162
ttaaggaataagttagaagctattataaaatttaaggaatttagaaaagaaatagaaaataatcctaataaaataagaataaaatcagttttctca

SEQ ID NO: 33871 - DNA, 96 bp, Fusarium azukicola
  misc_feature: 162
ttaactctactactacccctaaccctaatttcaaccaattaaccctaacccttaacgtaactactacccctaaccataatttcaaccaattaaccc

SEQ ID NO: 33872 - DNA, 96 bp, Fusarium azukicola
  misc_feature: 162
tctaattttagctattttaagcttaatttcgacttttatagcttttttaaaaaataccttttaaggtgaaaatataagtgtctcgttcgcttgtct

SEQ ID NO: 33873 - DNA, 96 bp, Fusarium azukicola
  misc_feature: 162
ccctaataaggctccaaaaaactggaaaactcaggaagccaataaggtgcataagacttctaagaaaagggaatctaaacctaattctaagaagga

SEQ ID NO: 33874 - DNA, 96 bp, Fusarium azukicola
  misc_feature: 162
tcctctaataataagaacgtataaagctataacccttataagattataactttaaaggaggctattaatattctatattatattactaactatagt

SEQ ID NO: 33875 - DNA, 96 bp, Fusarium azukicola
  misc_feature: 162
gttaaaaactgcgaaaactataaactaggaaaattaactaaaaataatataaataaaaaacctagtaataaggaatataagttcctagataaaata

SEQ ID NO: 33876 - DNA, 96 bp, Fusarium azukicola
  misc_feature: 162
tattatattaccaactatagtgatatatccctataaactatatattatattatagaatttttactctatttttaggtatatttacctaacctatag

SEQ ID NO: 33877 - DNA, 96 bp, Fusarium azukicola
  misc_feature: 162
tattacttagggaaaagccgcttctcttcctatattaggaatcggtgacttaataattaagttcctagataaagatacctatataataaggaattg

SEQ ID NO: 33878 - DNA, 96 bp, Fusarium azukicola
  misc_feature: 162
tatattatattaccaactatagtgatatatccctataaactatatattatattatagaatttttactctatttttaggtatatttacctaacctat

SEQ ID NO: 33879 - DNA, 96 bp, Fusarium azukicola
  misc_feature: 162
tataaagctattagcttatttattatgaggcggacttatattatattttattccattctttatataatagggtcttagcttatatatatattcctt

SEQ ID NO: 33880 - DNA, 96 bp, Fusarium azukicola
  misc_feature: 162
tagaaaataatcctaataaaataagaataaaattagttttcttagataatataaaggaatatatatataagctaagaccctattatataaagaatg

SEQ ID NO: 33881 - DNA, 96 bp, Fusarium azukicola
  misc_feature: 162
attaatattctatattatattaccaactatagtgatatatccctataaaccatatattatattatagaatttttactctatttttaggtatattta

SEQ ID NO: 33882 - DNA, 96 bp, Fusarium azukicola
  misc_feature: 162
cgtataaagctataacccttataagattataactttaaaggaggctattaatgttctatattatattaccaactatagtgatatatccctataaac

SEQ ID NO: 33883 - DNA, 96 bp, Fusarium azukicola
  misc_feature: 162
gtgaaaagagagagagggagaggggagaggagaggataaggagtgaaaagagagagagggagaggggagaggagaggataaggagagaaaagagag

SEQ ID NO: 33884 - DNA, 96 bp, Fusarium azukicola
  misc_feature: 162
gctaaatagttaaaatcgttttttttaagtttctagctattttatagcgatttttagaaacttagggtttagctgtttttagttatacagtatgct

SEQ ID NO: 33885 - DNA, 96 bp, Fusarium azukicola
  misc_feature: 162
ctaagaaaaaggaatctaaacctaattctaagaaggaagaaagagaaaagaaataagaaaagctatttatagctaattcttcttcttcgttatctc

SEQ ID NO: 33886 - DNA, 96 bp, Fusarium azukicola
  misc_feature: 162
ctcggctttaggagataacgaagaagaagaattagctataaatagcttttcttatttcttttctctttcttccttcttagaattaggtttagattc

SEQ ID NO: 33887 - DNA, 96 bp, Fusarium azukicola
  misc_feature: 162
aaggaaaagagaaaaataacctatatataataacagctaaggttatttctaataagaataactatagactaagagataacttagatcttcctattc

SEQ ID NO: 33888 - DNA, 96 bp, Fusarium azukicola
  misc_feature: 162
ataagattactttttttaagtttctagctattttatagcagtttttagaaacttaggttttagcgatttttagttatatagtatgctgtctcgttc

SEQ ID NO: 33889 - DNA, 96 bp, Fusarium azukicola
  misc_feature: 162
agtcttgctagcatctttgtttgttttgaccacgtattatatcactgtttactttcacagatatagagtttcatatgcctgcacattttgcttttc

SEQ ID NO: 33890 - DNA, 96 bp, Fusarium azukicola
  misc_feature: 162
agagatatagctaagagagagaggtaaagctaagaaagagagatatagctagaaaagagagaaataagagataagagataagagataagagataag

SEQ ID NO: 33891 - DNA, 96 bp, Fusarium azukicola
  misc_feature: 162
aatggattatactccctacctgttccatcatcatcatcatgggtcgtcgtgcgcttacagcagaggaaaaggcaaacaaggccaaccgtgagagag

SEQ ID NO: 33892 - DNA, 96 bp, Fusarium azukicola
  misc_feature: 162
cgagtgcaacagaggtactatatactaaaactaggttttttaaaaaatcctagaaaattcaaactaactctaaaatagctaaaatttaaagtttag

SEQ ID NO: 33893 - DNA, 96 bp, Fusarium azukicola
  misc_feature: 162
cctatatattagtagctattttatctaggaacttatattccttattactaggttttttatttatattatttttagttaattttcctagtttatagt

SEQ ID NO: 33894 - DNA, 96 bp, Fusarium azukicola
  misc_feature: 162
aagtaaaagagagaagagagtatagggtaaagtaaaataaagaataaaagtagagggtaaagtaaaataataaagaaagtatagggtaaagaaaat

SEQ ID NO: 33895 - DNA, 96 bp, Fusarium azukicola
  misc_feature: 162
attccattctttatataatagggtcttagcttatatatatattcctttatattatctaagaaaactaattttattcttattttattaggattattt

SEQ ID NO: 33896 - DNA, 96 bp, Fusarium azukicola
  misc_feature: 162
aaggttatttctaataagaataactatagactaagagataacttagatcttcctattttaaatataaaggaaaaaactagtctttttaactagcat

SEQ ID NO: 33897 - DNA, 96 bp, Fusarium azukicola
  misc_feature: 162
ataacttcccaggttttttgctttattaattcctctatttcagctgtcatagatagatgccaattataagataaagcacaacttatggcttctttt

SEQ ID NO: 33898 - DNA, 96 bp, Fusarium azukicola
  misc_feature: 162
agtaaaggttaggggtagtaatgaagttaatttaaaaagaaaagagaagaaaggatttaaaaataagagaaagagttaaataaaaaagttaggatt

SEQ ID NO: 33899 - DNA, 96 bp, Fusarium azukicola
  misc_feature: 161
ttttcttatttcttttctctttcttccttcttagaattaggtttagattcctttttcttagaagtcttatataccttattagcttcctgagttttc

SEQ ID NO: 33900 - DNA, 96 bp, Fusarium azukicola
  misc_feature: 161
aaatagagtaaaaattctataatataatatatggtttatagggatatatcactatagttagtaatataatatagaacattaatagcctcctttaaa

SEQ ID NO: 33901 - DNA, 96 bp, Fusarium azukicola
  misc_feature: 161
gtaaagtaaaagagagaagagagtatagggtaaagtaaaataaagaataaaagtagagggtaaagtaaaataataaagaaagtatagggtaaagaa

SEQ ID NO: 33902 - DNA, 96 bp, Fusarium azukicola
  misc_feature: 161
aacgtataaagctataacccttataagattataactttaaaggaggctattaatgttctatattatattaccaactatagtgatatatccctataa

SEQ ID NO: 33903 - DNA, 96 bp, Fusarium azukicola
  misc_feature: 161
ctatatctgtgaaagtaaacagtgatataatacgtggtcaaaacaaacaaagatgctagcaagactcttttatcagtggcaatggtagagaagaca

SEQ ID NO: 33904 - DNA, 96 bp, Fusarium azukicola
  misc_feature: 161
tgcaaactgccaggtcataaagacccagattgctattttttgcaccctaataaggctccaaaaaactggaaaattcaggaagccaataaggtgcat

SEQ ID NO: 33905 - DNA, 96 bp, Fusarium azukicola
  misc_feature: 161
ctatcccgcctcgaccaccacttctcgatgattcaccctgtatctgtatatcaatatccatttgatcaattgcttcccttgcctcatctacagtca

SEQ ID NO: 33906 - DNA, 96 bp, Fusarium azukicola
  misc_feature: 161
tcttatccttttatactctcttcttatacccttatacacttttcttctttattttctttaccctatactttctttattattttactttaccctcta

SEQ ID NO: 33907 - DNA, 96 bp, Fusarium azukicola
  misc_feature: 161
tcggctttaggagataacgaagaagaagaattagctataaatagcttttcttatttcttttctctttcttccttcttagaattaggtttagattcc

SEQ ID NO: 33908 - DNA, 96 bp, Fusarium azukicola
  misc_feature: 161
tcatctataaggctagaagaaagtgattctaggttataagcctcaggattactccttaaagcttgtgagatattagttatatagctagaatagcta

SEQ ID NO: 33909 - DNA, 96 bp, Fusarium azukicola
  misc_feature: 161
tatttataaagagagctttattaaaagggatagtatagaagcctaaattatttaataatttagagagaaggttatactataatctagggctttatt

SEQ ID NO: 33910 - DNA, 96 bp, Fusarium azukicola
  misc_feature: 161
ctatattatattaccaactatagtgatatatccctataaactatatattatattatagaatttttactctatttttaggtatatttacctaaccta

SEQ ID NO: 33911 - DNA, 96 bp, Fusarium azukicola
  misc_feature: 161
aaatagcttttcttatttcttttctctttcttccttcttagaattaggtttagattcctttttcttagaagtcttatataccttattagcttccta

SEQ ID NO: 33912 - DNA, 96 bp, Fusarium azukicola
  misc_feature: 161
tacttaaccctaacccttaacttaaccacttaaccctaacctttactataactacttaaccctaacccttaacttaaccacttaaccctaaccttt

SEQ ID NO: 33913 - DNA, 96 bp, Fusarium azukicola
  misc_feature: 161
taactctactactacccctaaccctaatttcaaccaattaaccctaacccttaacgtaactactacccctaaccataatttcaaccaattaaccct

SEQ ID NO: 33914 - DNA, 96 bp, Fusarium azukicola
  misc_feature: 161
ctctactactacccctaaccctaatttcaaccaattaaccctaacccttaacgtaactactacccctaaccataatttcaaccaattaaccctaac

SEQ ID NO: 33915 - DNA, 96 bp, Fusarium azukicola
  misc_feature: 161
gccttattagggtgcaaaaaatagcaatctgggtctttatgacctagcagtttgcaataactgcattttaaggcagttttcttctttttccaaggc

SEQ ID NO: 33916 - DNA, 96 bp, Fusarium azukicola
  misc_feature: 161
aaagaggggtaatgacggtagaggaaggaaggcaagcaattgatcaaatggatatagatgcgcaggtattagctgaatcgtcgaggagtggtgggc

SEQ ID NO: 33917 - DNA, 96 bp, Fusarium azukicola
  misc_feature: 161
gaggtttaatttttcctctaataataagaacgtataaagctataacccttataagattataactttaaaggaggctattaatgttctatattatat

SEQ ID NO: 33918 - DNA, 96 bp, Fusarium azukicola
  misc_feature: 161
aggagtgaaaagagagagagggagaggggagaggagaggataaggagtgaaaagagagagagggagaggggagaggagaggataaggagagagaag

SEQ ID NO: 33919 - DNA, 96 bp, Fusarium azukicola
  misc_feature: 161
aagtatttctataaatctaactctttatatgattagaaaatattttttctagatttttaaaaaatcccctttatagagatatagctatttatatag

SEQ ID NO: 33920 - DNA, 96 bp, Fusarium azukicola
  misc_feature: 161
aaaaaacagattctaatgagatatatttttctaagacttctaagccttggaaaaagaagaaaactgccttaaaatgcagttattgcaaactgctag

SEQ ID NO: 33921 - DNA, 96 bp, Fusarium azukicola
  misc_feature: 161
aatatagaatattaatagcctcctttaaagttataatcttataagggttatagctttatatattcttattattagaggaaaaaattaaacctctat

SEQ ID NO: 33922 - DNA, 96 bp, Fusarium azukicola
  misc_feature: 161
ataatacgtggtcaaaacaaacaaagatgctagcaagactcttttatcagtggcaatggtagagaagacaactagacaactatcataatggattat

SEQ ID NO: 33923 - DNA, 96 bp, Fusarium azukicola
  misc_feature: 161
accacatattatattatagaatttttactctatttttaggtatatttacctaacctatagctactataggtagctagatattaagggtattatttt

SEQ ID NO: 33924 - DNA, 96 bp, Fusarium azukicola
  misc_feature: 161
aagtttaagagtagtagttaagttaagggttagggttaattggttgaaattagggttaggggtagtagtagagttaagggttagggttaattggtt

SEQ ID NO: 33925 - DNA, 96 bp, Fusarium azukicola
  misc_feature: 160
tttttcctctaataataagaacgtataaagctataacccttataagattataactttaaaggaggctattaatattctatattatattaccaacta

SEQ ID NO: 33926 - DNA, 96 bp, Fusarium azukicola
  misc_feature: 160
ttatatatatcttagtaaaaacccctttattatagacctgatattataagggaaaatctaagattatatagggaaaagtattaaaatataataaaa

SEQ ID NO: 33927 - DNA, 96 bp, Fusarium azukicola
  misc_feature: 160
ttgcaaactgctaggtcataaagacccagattgctattttttgcaccctaataaggctccaaaaaactggaaaactcaggaagccaataaggtgca

SEQ ID NO: 33928 - DNA, 96 bp, Fusarium azukicola
  misc_feature: 160
aagaggggtaatgacggtagaggaaggaaggcaagcaattgatcaaatggatatagatgcgcaggtattagctgaatcgtcgaggagtggtgggca

SEQ ID NO: 33929 - DNA, 96 bp, Fusarium azukicola
  misc_feature: 160
attggcttcctgagttttccagttttttggagccttattagggtgcaaaaaatagcaatctgggtctttatgacctagcagtttgcaataactgca

SEQ ID NO: 33930 - DNA, 96 bp, Fusarium azukicola
  misc_feature: 160
tcaaaaccggtttttgctataactaagccatttataaggctttagtaatagattataaagcgcatcttccgggctatccgacggtataatcttagt

SEQ ID NO: 33931 - DNA, 96 bp, Fusarium azukicola
  misc_feature: 160
tattccattctttatataatagggtcttagcttatatatatattcctttatattatctaagaaaactaattttattcttattttattaggattatt

SEQ ID NO: 33932 - DNA, 96 bp, Fusarium azukicola
  misc_feature: 160
attataaaatttaaggaatttagaaaagaaatagaaaataatcctaataaaataagaataaaattagttttcttagataatataaaggaatatata

SEQ ID NO: 33933 - DNA, 96 bp, Fusarium azukicola
  misc_feature: 160
tagcagtttgcaataactgcattttaaggcagttttcttctttttccaaggcttagaagtcttagaaaaatatatctcattagaatctgttttttc

SEQ ID NO: 33934 - DNA, 96 bp, Fusarium azukicola
  misc_feature: 160
atattatctaagaaaactgattttattcttattttattaggattattttctatttcttttctaaattccttgaattttataatagcttctgactta

SEQ ID NO: 33935 - DNA, 96 bp, Fusarium azukicola
  misc_feature: 160
taactaggaaaaagagatatagctaagagagagaggtaaagctaagaaagagagatatagctagaaaagagagaaataagagataagagataagag

SEQ ID NO: 33936 - DNA, 96 bp, Fusarium azukicola
  misc_feature: 160
ataagagataagagataagagataagagataagagataaagaaataagaaataagagataagagataaagggaggcaaaaatagccttaagaagcc

SEQ ID NO: 33937 - DNA, 96 bp, Fusarium azukicola
  misc_feature: 160
ggattctagaaggaccctatatattaatagctattttatctaggaacttatattccttattactaggttttttatttatattatttttagttaatt

SEQ ID NO: 33938 - DNA, 96 bp, Fusarium azukicola
  misc_feature: 160
ggattataaaaagaaatatcctaatagtaatataaataagctataaatctatttaaaattaagaaaagccttatatagcctaaaataaagccctag

SEQ ID NO: 33939 - DNA, 96 bp, Fusarium azukicola
  misc_feature: 160
attgcaaactgctaggtcataaagacccagattgctattttttgcaccctaataaggctccaaaaaactggaaaactcaggaagccaataaggtgc

SEQ ID NO: 33940 - DNA, 96 bp, Fusarium azukicola
  misc_feature: 160
gataagagggttattagctagggtaaggcgattagggattaataagtactaagagaggtaaaggaaaccgctactatccggaggggagataacctc

SEQ ID NO: 33941 - DNA, 96 bp, Fusarium azukicola
  misc_feature: 160
cccctctccctctctctcttttcactccttatcctctcctctcccctctccctctctctcttttcactccttctcctctcctctcccctctccctc

SEQ ID NO: 33942 - DNA, 96 bp, Fusarium azukicola
  misc_feature: 160
gaagtccttcttttaaataagtaaggaaaaataatatcataaggaaaagagaaaaataacctatatataataacagctaaggttatttctaataag

SEQ ID NO: 33943 - DNA, 96 bp, Fusarium azukicola
  misc_feature: 160
gaaactctatatctgtgaaagtaaacagtgatataatacgtggtcaaaacaaacaaagatgctagcaagactcttttatcagtggcaatggtagag

SEQ ID NO: 33944 - DNA, 96 bp, Fusarium azukicola
  misc_feature: 160
ctgacttattccttaatagataggctttcagatatctagtagccctatctaggaaggtaataaagtatatatatttattataggtagggattctag

SEQ ID NO: 33945 - DNA, 96 bp, Fusarium azukicola
  misc_feature: 160
attataaaaagaaatatcctaatagtaatataaataagctataaatctatttaaaattaagaaaagccttatatagcctaaaataaagccctagat

SEQ ID NO: 33946 - DNA, 96 bp, Fusarium azukicola
  misc_feature: 160
attagttaaaataggaggtatagccctattaaaacttaaagagagatttttatttatatatttatatatataattaagagaaattaactctttaat

SEQ ID NO: 33947 - DNA, 96 bp, Fusarium azukicola
  misc_feature: 160
aataagtctaaactttaaattttagctattttagagttagtttgaattttctaggattttttaaaaaacctagttttagtatatagtacctctatt

SEQ ID NO: 33948 - DNA, 96 bp, Fusarium azukicola
  misc_feature: 159
tttcttttctctttcttccttcttagaattaggtttagattcctttttcttagaagtcttatataccttattagcttcctgagttttctagttttt

SEQ ID NO: 33949 - DNA, 96 bp, Fusarium azukicola
  misc_feature: 159
tttcttatttcttttctctttcttccttcttagaattaggtttagattcctttttcttagaagtcttatataccttattagcttcctgagttttct

SEQ ID NO: 33950 - DNA, 96 bp, Fusarium azukicola
  misc_feature: 159
tttagaggtatataattccttaatttctcaataaaataatataactaataatatactaggacctttaataagaaaccttccctatataaagaaata

SEQ ID NO: 33951 - DNA, 96 bp, Fusarium azukicola
  misc_feature: 159
agggtaaagtaaaagagagaagagagtatagggtaaagtaaaataaagaataaaagtagagggtaaagtaaaataataaagaaagtatagggtaaa

SEQ ID NO: 33952 - DNA, 96 bp, Fusarium azukicola
  misc_feature: 159
ttgcaaactgccaggtcataaagacccagattgctattttttgcaccctaataaggctccaaaaaactggaaaattcaggaagccaataaggtgca

SEQ ID NO: 33953 - DNA, 96 bp, Fusarium azukicola
  misc_feature: 159
ttataaaaagaaatatcctaatagtaatataaataagctataaatctatttaaaattaagaaaagccttatatagcctaaaataaagccctagatt

SEQ ID NO: 33954 - DNA, 96 bp, Fusarium azukicola
  misc_feature: 159
acctaacctatagctactataggtagctagatattaagggtattattctaattggttaaaaaggttcctacagaccttcatgactgccgtcattaa

SEQ ID NO: 33955 - DNA, 96 bp, Fusarium azukicola
  misc_feature: 159
taaacctaattctaagaaggaagaaagagaaaagaaataagaaaagctatttatagctaattcttcttctttattatctcctaaagccgaggaaga

SEQ ID NO: 33956 - DNA, 96 bp, Fusarium azukicola
  misc_feature: 159
tctctaaattattaaataatttaggcttctatactatcccttttaataaagctctctttataaataagaacttaaagattactatagctatttata

SEQ ID NO: 33957 - DNA, 96 bp, Fusarium azukicola
  misc_feature: 159
tctactactacccctaaccctaatttcaaccaattaaccctaacccttaacgtaactactacccctaaccataatttcaaccaattaaccctaacc

SEQ ID NO: 33958 - DNA, 96 bp, Fusarium azukicola
  misc_feature: 159
agaaaactgccttaaaatgcagttattgcaaactgctaggtcataaagacccagattgctattttttgcaccctaataaggctccaaaaaactgga

SEQ ID NO: 33959 - DNA, 96 bp, Fusarium azukicola
  misc_feature: 159
ctctaataataagaacgtataaagctataacccttataagattataactttaaaggaggctattaatattctatattatattactaactatagtga

SEQ ID NO: 33960 - DNA, 96 bp, Fusarium azukicola
  misc_feature: 159
agtttgttgtgtttttattgtgatatctatcttatagggttgagattcttgatccactcgcttggttgatccactcgcttatcatgtacgttaata

SEQ ID NO: 33961 - DNA, 96 bp, Fusarium azukicola
  misc_feature: 159
aaagagatatagctaagagagagaggtaaagctaagaaagagagatatagctagaaaagagagaaataagagataagagataagagataagagata

SEQ ID NO: 33962 - DNA, 96 bp, Fusarium azukicola
  misc_feature: 159
ctgagagggaaaagcaaaatgtgcaggcatatgaaactctatatctgtgaaagtaaacagtgatataatacgtggtcaaaacaaacaaagatgcta

SEQ ID NO: 33963 - DNA, 96 bp, Fusarium azukicola
  misc_feature: 159
tagataagagggttattagctagggtaaggcgattagggattaataagtactaagagaggtaaaggaaaccgctactatccggaggggagataacc

SEQ ID NO: 33964 - DNA, 96 bp, Fusarium azukicola
  misc_feature: 159
taattggttgaaattagggttaggggtagtagtagagttaagggttagggttaattggttgaaattagggttaggggtagtagtagagttaagggg

SEQ ID NO: 33965 - DNA, 96 bp, Fusarium azukicola
  misc_feature: 159
acttctaagaaaaaggaatctaaacctaattctaagaaggaagaaagagaaaagaaataagaaaagctatttatagctaattcttcttcttcatta

SEQ ID NO: 33966 - DNA, 96 bp, Fusarium azukicola
  misc_feature: 159
atagaggtttaatttttcctctaataataagaacgtataaagctataacccttataagattataactttaaaggaggctattaatgttctatatta

SEQ ID NO: 33967 - DNA, 96 bp, Fusarium azukicola
  misc_feature: 159
taataataatagaggtttaattttttcctctaataataagaacgtataaagctataacccttataagattataactttaaaggaggctattaatat

SEQ ID NO: 33968 - DNA, 96 bp, Fusarium azukicola
  misc_feature: 159
taaagccctagattatagtataaccttctctctaaattattaaataatttaggcttctatactatcccttttaataaagctctctttataaataag

SEQ ID NO: 33969 - DNA, 96 bp, Fusarium azukicola
  misc_feature: 159
gggtcttagcttatatatatattcctttatattatctaagaaaactaattttattcttattttattaggattattttctatttcttttctaaattc

SEQ ID NO: 33970 - DNA, 96 bp, Fusarium azukicola
  misc_feature: 159
attgcaaactgccaggtcataaagacccagattgctattttttgcaccctaataaggctccaaaaaactggaaaattcaggaagccaataaggtgc

SEQ ID NO: 33971 - DNA, 96 bp, Fusarium azukicola
  misc_feature: 159
gattcctttttcttagaagtcttatgcaccttattggcttcctgagttttccagttttttggagccttattagggtgcaaaaaatagcaatctggg

SEQ ID NO: 33972 - DNA, 96 bp, Fusarium azukicola
  misc_feature: 159
gactttttaggaataaatataactataaatagagagaataagagtatatctttttcataagcaaaatatataaataaaataataaggaaatataat

SEQ ID NO: 33973 - DNA, 96 bp, Fusarium azukicola
  misc_feature: 159
ctctctaaattattaaataatttaggcttctatactatcccttttaataaagctctctttataaataagaacttaaagattactatagctatttat

SEQ ID NO: 33974 - DNA, 96 bp, Fusarium azukicola
  misc_feature: 159
aaataagaagtccttcttttaaataagtaaggaaaaataatatcataaggaaaagagaaaaataacctatatataataatagctaaggttatttct

SEQ ID NO: 33975 - DNA, 96 bp, Fusarium azukicola
  misc_feature: 159
aatattaatagcctcctttaaagttataatcttataagggttatagctttatatattcttattattagaggaaaaaattaaacctctattattatt

SEQ ID NO: 33976 - DNA, 96 bp, Fusarium azukicola
  misc_feature: 158
gatttccttaaggattataaaaagaaatatcctaatagtaatataaataagctataaatctatttaaaattaagaaaagccttatatagcctaaaa

SEQ ID NO: 33977 - DNA, 96 bp, Fusarium azukicola
  misc_feature: 158
aaggagtgaaaagagagagagggagaggggagaggagaggataaggagtgaaaagagagagagggagaggggagaggagaggataaggagagagaa

SEQ ID NO: 33978 - DNA, 96 bp, Fusarium azukicola
  misc_feature: 158
ttctaagaaaaaggaatctaaacctaattctaagaaggaagaaagagaaaagaaataagaaaagctatttatagctaattcttcttcttcgttatc

SEQ ID NO: 33979 - DNA, 96 bp, Fusarium azukicola
  misc_feature: 158
ttattttactttaccctatactctcttctctcttttactttaccctatactctcttctctcttttactttaccctccacttttattctttatttta

SEQ ID NO: 33980 - DNA, 96 bp, Fusarium azukicola
  misc_feature: 158
aatgacggcagtcatgaaggtctgtaggaacctttttaaccaattagaataatacccttaatatctagctacctatagtagctataggttaggtaa

SEQ ID NO: 33981 - DNA, 96 bp, Fusarium azukicola
  misc_feature: 158
tggcttcctgagttttccagttttttggagccttattagggtgcaaaaaatagcaatctgggtctttatgacctagcagtttgcaataactgcatt

SEQ ID NO: 33982 - DNA, 96 bp, Fusarium azukicola
  misc_feature: 158
aagtctaaactttaaattttagctattttagagttagtttgaattttctaggattttttaaaaaacctagttttagtatatagtacctctgttgca

SEQ ID NO: 33983 - DNA, 96 bp, Fusarium azukicola
  misc_feature: 158
tgcaaactgctaggtcataaagacccagattgctattttttgcaccctaataaggctccaaaaaactggaaaactcaggaagccaataaggtgcat

SEQ ID NO: 33984 - DNA, 96 bp, Fusarium azukicola
  misc_feature: 158
ggaatctaaacctaattctaagaaggaagaaagagaaaagaaataagaaaagctatttatagctaattcttcttcttcgtcatctcctaaagccga

SEQ ID NO: 33985 - DNA, 96 bp, Fusarium azukicola
  misc_feature: 158
ggtataactaggaaaaagagatatagctaagagagagaggtaaagctaagaaagagagatatagctagaaaagagagaaataagagataagagata

SEQ ID NO: 33986 - DNA, 96 bp, Fusarium azukicola
  misc_feature: 158
tataactaggaaaaagagatatagctaagagagagaggtaaagctaagaaagagagatatagctagaaaagagagaaataagagataagagataag

SEQ ID NO: 33987 - DNA, 96 bp, Fusarium azukicola
  misc_feature: 158
actaacgtacatgataagcgagtggatcaaccaagcgagtggatcaagaatctcaaccctataagatagatatcacaataaaaacacaacaaacta

SEQ ID NO: 33988 - DNA, 96 bp, Fusarium azukicola
  misc_feature: 158
acccttaactctactactacccctaaccctaatttcaaccaattaaccctaacccttaacgtaactactacccctaaccataatttcaaccaatta

SEQ ID NO: 33989 - DNA, 96 bp, Fusarium azukicola
  misc_feature: 158
taatataatatagaacattaatagcctcctttaaagttataatcttataagggttatagctttatacgttcttattattagaggaaaaattaaacc

SEQ ID NO: 33990 - DNA, 96 bp, Fusarium azukicola
  misc_feature: 158
taatataaataagctataaatctatttaaaattaagaaaagccttatatagcctaaaataaagccctagattatagtataaccttctctctaaatt

SEQ ID NO: 33991 - DNA, 96 bp, Fusarium azukicola
  misc_feature: 158
taataataagaacgtataaagctataacccttataagattataactttaaaggaggctattaatattctatattatattaccaactatagtgatat

SEQ ID NO: 33992 - DNA, 96 bp, Fusarium azukicola
  misc_feature: 158
taagttaagggttagggttaattggttgaaattagggttaggggtagtagtagagttaagggttagggttaattggttgaaattagggttaggggt

SEQ ID NO: 33993 - DNA, 96 bp, Fusarium azukicola
  misc_feature: 158
aaaggaggctattaatgttctatattatattactaactatagtgatatatccctataaaccatatattatattatagaatttttactctattttta

SEQ ID NO: 33994 - DNA, 96 bp, Fusarium azukicola
  misc_feature: 158
gtcttgctagcatctttgtttgttttgaccacgtattatatcactgtttactttcacagatatagagtttcatatgcctgcacattttgcttttcc

SEQ ID NO: 33995 - DNA, 96 bp, Fusarium azukicola
  misc_feature: 158
gaatctaaacctaattctaagaaggaagaaagagaaaagaaataagaaaagctatttatagctaattcttcttcttcgtcatctcctaaagccgag

SEQ ID NO: 33996 - DNA, 96 bp, Fusarium azukicola
  misc_feature: 158
aataataatagaggtttaatttttcctctaataataagaacgtataaagctataacccttataagattataactttaaaggaggctattaatgttc

SEQ ID NO: 33997 - DNA, 96 bp, Fusarium azukicola
  misc_feature: 158
agcccggaagatgcgctttataatgatatataatctattactaaagccttataaatggcttagttatagcaaaaaccggttttaatggatagaaag

SEQ ID NO: 33998 - DNA, 96 bp, Fusarium azukicola
  misc_feature: 158
aggaatctaaacctaattctaagaaggaagaaagagaaaagaaataagaaaagctatttatagctaattcttcttcttcgtcatctcctaaagccg

SEQ ID NO: 33999 - DNA, 96 bp, Fusarium azukicola
  misc_feature: 158
ataataagtctaaactttaaattttagctattttagagttagtttgaattttctaggattttttaaaaaacctagttttagtatatagtacctctg

SEQ ID NO: 34000 - DNA, 96 bp, Fusarium azukicola
  misc_feature: 158
aaataaataagaagtccttcttttaaataagtaaggaaaaataatatcataaggaaaagagaaaaataacctatatataataatagctaaggttat

SEQ ID NO: 34001 - DNA, 96 bp, Fusarium azukicola
  misc_feature: 158
aggagatgacgaagaagaagaattagctataaatagcttttcttatttcttttctctttcttccttcttagaattaggtttagattcctttttctt

SEQ ID NO: 34002 - DNA, 96 bp, Fusarium azukicola
  misc_feature: 157
atcttctctttataatataacttctattataaataaataagaagtccttcttttaaataaataaggaaaaataatattataaggaaaagagaaaaa

SEQ ID NO: 34003 - DNA, 96 bp, Fusarium azukicola
  misc_feature: 157
tttttcctctaataataagaacgtataaagctataacccttataagattataactttaaaggaggctattaatattctatattatattactaacta

SEQ ID NO: 34004 - DNA, 96 bp, Fusarium azukicola
  misc_feature: 157
ttttgttaatgttctatattatattaccaactatagtgatatatccctataaaccacatattatattatagaatttttactctatttttaggtata

SEQ ID NO: 34005 - DNA, 96 bp, Fusarium azukicola
  misc_feature: 157
ttattcctattggatttaaagaccttataattaaggatttccttaaggattataaaaagaaatatcctaatagtagtataaatgagctataaatct

SEQ ID NO: 34006 - DNA, 96 bp, Fusarium azukicola
  misc_feature: 157
ttattccattctttatataatagggtcttagcttatatatatattcctttatattatctaagaaaactaattttattcttattttattaggattat

SEQ ID NO: 34007 - DNA, 96 bp, Fusarium azukicola
  misc_feature: 157
ttagataaaataaaaacctttaggtctatagtttattataagaactattctcccttagataaactagaaactagagcttataaaggagctataatt

SEQ ID NO: 34008 - DNA, 96 bp, Fusarium azukicola
  misc_feature: 157
tgctagttaaaaagactagttttttcctttatatttaaaataggaagatctaagttatctcttagtctatagttattcttattagaaataacctta

SEQ ID NO: 34009 - DNA, 96 bp, Fusarium azukicola
  misc_feature: 157
tgacgaagaagaagaattagctataaatagcttttcttatttcttttctctttcttccttcttagaattaggtttagattcctttttcttagaagt

SEQ ID NO: 34010 - DNA, 96 bp, Fusarium azukicola
  misc_feature: 157
taatggattatactccctacctgttccatcatcatcatcatgggtcgtcgtgcgcttacagcagaggaaaaggcaaacaaggccaaccgtgagaga

SEQ ID NO: 34011 - DNA, 96 bp, Fusarium azukicola
  misc_feature: 157
gagtgcaacagaggtactatatactaaaactaggttttttaaaaaatcctagaaaattcaaactaactctaaaatagctaaaatttaaagtttaga

SEQ ID NO: 34012 - DNA, 96 bp, Fusarium azukicola
  misc_feature: 157
agacccagattgctattttttgcaccctaataaggctccaaaaaactggaaaattcaggaagccaataaggtgcataagacttctaagaaaaagga

SEQ ID NO: 34013 - DNA, 96 bp, Fusarium azukicola
  misc_feature: 157
atagtaaaggttaggggtagtaatgaagttaatttaaaaagaaaagagaagaaaggatttaaaaataagagaaagagttaaataaaaaagttagga

SEQ ID NO: 34014 - DNA, 96 bp, Fusarium azukicola
  misc_feature: 157
attcaccatccatgtatgtaccgcgtcgataagctgagagggaaaagcaaaatgtgcaggcatatgaaactctatatctgtgaaagtaaacagtga

SEQ ID NO: 34015 - DNA, 96 bp, Fusarium azukicola
  misc_feature: 157
tataatacgtggtcaaaacaaacaaagatgctagcaagactcttttatcagtggcaatggtagagaagacaactagacaactatcataatggatta

SEQ ID NO: 34016 - DNA, 96 bp, Fusarium azukicola
  misc_feature: 157
atgttctatattatattaccaactatagtgatatatccctataaactatatattatattatagaatttttactctatttttaggtatatttaccta

SEQ ID NO: 34017 - DNA, 96 bp, Fusarium azukicola
  misc_feature: 157
tagctaaatagttaaaatcgttttttttaagtttctagctattttatagcgatttttagaaacttagggtttagctgtttttagttatatagtatg

SEQ ID NO: 34018 - DNA, 96 bp, Fusarium azukicola
  misc_feature: 157
aagagggttattagctagggtaaggcgattagggattaataagtactaagagaggtaaaggaaaccgctactatccggaggggagataacctctac

SEQ ID NO: 34019 - DNA, 96 bp, Fusarium azukicola
  misc_feature: 157
gggattctagaaggaccctatatattaatagctattttatctaggaacttatattccttattactaggttttttatttatattatttttagttaat

SEQ ID NO: 34020 - DNA, 96 bp, Fusarium azukicola
  misc_feature: 157
ggcagttttcttctttttctaaggcttagaagtcttagaaaaatatatctcattagaatctattttttctagtctcttagattcatctataaggct

SEQ ID NO: 34021 - DNA, 96 bp, Fusarium azukicola
  misc_feature: 157
cttgttaatgttctatattatattaccaactatagtgatatatccctataaaccatatattatattatagaatttttactctatttttaggtatat

SEQ ID NO: 34022 - DNA, 96 bp, Fusarium azukicola
  misc_feature: 157
actctatatctgtgaaagtaaacagtgatataatacgtggtcaaaacaaacaaagatgctagcaagactcttttatcagtggcaatggtagagaag

SEQ ID NO: 34023 - DNA, 96 bp, Fusarium azukicola
  misc_feature: 157
aaattcaaggaatttagaaaagaaatagaaaataatcctaataaaataagaataaaatcagttttcttagataatataaaggaatatatatataag

SEQ ID NO: 34024 - DNA, 96 bp, Fusarium azukicola
  misc_feature: 157
ctatctaagctattttgccctaggggtttcttctagctaaggtatagcttataaatagaggggagattttctaagaaatataaaaagaaaagaaat

SEQ ID NO: 34025 - DNA, 96 bp, Fusarium azukicola
  misc_feature: 157
cctctaataataagaacgtataaagctataacccttataagattataactttaaaggaggctattaatattctatattatattactaactatagtg

SEQ ID NO: 34026 - DNA, 96 bp, Fusarium azukicola
  misc_feature: 157
aggctattaatattctatattatattactaactatagtgatatatccctataaaccatatattatattatagaatttttactctatttttaggtat

SEQ ID NO: 34027 - DNA, 96 bp, Fusarium azukicola
  misc_feature: 157
aaccacatattatattatagaatttttactctatttttaggtatatttacctaacctatagctactataggtagctagatattaagggtattattt

SEQ ID NO: 34028 - DNA, 96 bp, Fusarium azukicola
  misc_feature: 156
tttattattattattattatataatattgcctttttattattataagggctttctttaaagtaaggaatctcattaaaagaggggttatttccttc

SEQ ID NO: 34029 - DNA, 96 bp, Fusarium azukicola
  misc_feature: 156
tatatctgtgaaagtaaacagtgatataatacgtggtcaaaacaaacaaagatgctagcaagactcttttatcagtggcaatggtagagaagacaa

SEQ ID NO: 34030 - DNA, 96 bp, Fusarium azukicola
  misc_feature: 156
ataattattcctattggatttaaagaccttataattaaggatttccttaaggattataaaaagaaatatcctaatagtagtataaatgagctataa

SEQ ID NO: 34031 - DNA, 96 bp, Fusarium azukicola
  misc_feature: 156
ttataaaatttaaggaatttagaaaagaaatagaaaataatcctaataaaataagaataaaattagttttcttagataatataaaggaatatatat

SEQ ID NO: 34032 - DNA, 96 bp, Fusarium azukicola
  misc_feature: 156
ggtaaagtaaaagagagaagagagtatagggtaaagtaaaataaagaataaaagtagagggtaaagtaaaataataaagaaagtatagggtaaaga

SEQ ID NO: 34033 - DNA, 96 bp, Fusarium azukicola
  misc_feature: 156
ctctatatctgtgaaagtaaacagtgatataatacgtggtcaaaacaaacaaagatgctagcaagactcttttatcagtggcaatggtagagaaga

SEQ ID NO: 34034 - DNA, 96 bp, Fusarium azukicola
  misc_feature: 156
tcttatgcaccttattggcttcctgagttttccagttttttggagccttattagggtgcaaaaaatagcaatctgggtctttatgacctagcagtt

SEQ ID NO: 34035 - DNA, 96 bp, Fusarium azukicola
  misc_feature: 156
tctggaatacttctagggcttcttaaggctatttttgcctccctttatctcttatctcttatttcttatttctttatctcttatctcttatctctt

SEQ ID NO: 34036 - DNA, 96 bp, Fusarium azukicola
  misc_feature: 156
tctaagacttctaagccttggaaaaagaagaaaactgccttaaaatgcagttattgcaaactgctaggtcataaagacccagattgctattttttg

SEQ ID NO: 34037 - DNA, 96 bp, Fusarium azukicola
  misc_feature: 156
cttctctttataatataacttctattataaataaataagaagtccttcttttaaataaataaggaaaaataatattataaggaaaagagaaaaata

SEQ ID NO: 34038 - DNA, 96 bp, Fusarium azukicola
  misc_feature: 156
tatagctaagagagagaggtaaagctaagaaagagagatatagctagaaaagagagaaataagagataagagataagagataagagataagagata

SEQ ID NO: 34039 - DNA, 96 bp, Fusarium azukicola
  misc_feature: 156
tatctctaacttctagaggggatttattatttaaagccgaatgcgggcttctattatatatatatacggctgcttccacagcctctcccccaaggg

SEQ ID NO: 34040 - DNA, 96 bp, Fusarium azukicola
  misc_feature: 156
accatccatgtatgtaccgcgtcgataagctgagagggaaaagcaaaatgtgcaggcatatgaaactctatatctgtgaaagtaaacagtgatata

SEQ ID NO: 34041 - DNA, 96 bp, Fusarium azukicola
  misc_feature: 156
taggtcataaagacccagattgctattttttgcaccctaataaggctccaaaaaactggaaaactcaggaagccaataaggtgcataagacttcta

SEQ ID NO: 34042 - DNA, 96 bp, Fusarium azukicola
  misc_feature: 156
agagataagagataagagataagagataagagataaagaaataagaaataagagataagagataaagggaggcaaaaatagccttaagaagcccta

SEQ ID NO: 34043 - DNA, 96 bp, Fusarium azukicola
  misc_feature: 156
tagcttttcttatttcttttctctttcttccttcttagaattaggtttagattcctttttcttagaagtcttatataccttattagcttcctaagt

SEQ ID NO: 34044 - DNA, 96 bp, Fusarium azukicola
  misc_feature: 156
taagcgaacgagacagcatactatataactaaaaatcgctaaaacctaagtttctaaaaactgctataaaatagctagaaacttaaaaaaagtaat

SEQ ID NO: 34045 - DNA, 96 bp, Fusarium azukicola
  misc_feature: 156
taactacttaaccctaacccttaacttaaccacttaaccctaacctttactataactacttaaccctaacccttaacttaaccacttaaccctaac

SEQ ID NO: 34046 - DNA, 96 bp, Fusarium azukicola
  misc_feature: 156
taaccctcttatctataccctacccatatagtctaacccgatccatgtaagaaaacgctatttatactatctcatactgtacttaactagccgtcc

SEQ ID NO: 34047 - DNA, 96 bp, Fusarium azukicola
  misc_feature: 156
aactgccttaaaatgcagttattgcaaactgctaggtcataaagacccagattgctattttttgcaccctaataaggctccaaaaaactggaaaac

SEQ ID NO: 34048 - DNA, 96 bp, Fusarium azukicola
  misc_feature: 156
ctctttataatataacttctattataaataaataagaagtccttcttttaaataaataaggaaaaataatattataaggaaaagagaaaaataacc

SEQ ID NO: 34049 - DNA, 96 bp, Fusarium azukicola
  misc_feature: 156
ggtataaagtcttagaaaagacttaaaaaagaagtataatcttcttttaagtataaacccttaggtagagacctccgggcttataacctattagtg

SEQ ID NO: 34050 - DNA, 96 bp, Fusarium azukicola
  misc_feature: 156
ggaggctattaatattctatattatattactaactatagtgatatatccctataaaccatatattatattatagaatttttactctatttttaggt

SEQ ID NO: 34051 - DNA, 96 bp, Fusarium azukicola
  misc_feature: 156
cagactgtcgccaaatacgatagcctcctcgacgatgaagcaagacaatagaggtctcatcagaccaaataacattcttccaatcgtcaagggtcc

SEQ ID NO: 34052 - DNA, 96 bp, Fusarium azukicola
  misc_feature: 156
gataagagataagagataagagataagagataagagataaagaaataagaaataagagataagagataaagggaggcaaaaatagccttaagaagc

SEQ ID NO: 34053 - DNA, 96 bp, Fusarium azukicola
  misc_feature: 156
atccattatgatagttgtctagttgtcttctctaccattgccactgataaaagagtcttgctagcatctttgtttgttttgaccacgtattatatc

SEQ ID NO: 34054 - DNA, 96 bp, Fusarium azukicola
  misc_feature: 156
gagataagagataagagataagagataagagataaagaaataagaaataagagataagagataaagggaggcaaaaatagccttaagaagccctag

SEQ ID NO: 34055 - DNA, 96 bp, Fusarium azukicola
  misc_feature: 156
attaaggaataagttagaagctattataaaatttaaggaatttagaaaagaaatagaaaataatcctaataaaataagaataaaatcagttttctc

SEQ ID NO: 34056 - DNA, 96 bp, Fusarium azukicola
  misc_feature: 156
ctgtttatagtgaaatagttaattacatagtgtaaataggttttttatatactagctatataattactttttaaaaatctaagaaaattattatag

SEQ ID NO: 34057 - DNA, 96 bp, Fusarium azukicola
  misc_feature: 156
atttaggtaggttagaagtaaataataaagctctaaccttttctaatatagtcctatttatcctttctataaagctattagcttatttattatgag

SEQ ID NO: 34058 - DNA, 96 bp, Fusarium azukicola
  misc_feature: 156
ctatatattagtagctattttatctaggaacttatattccttattactaggttttttatttatattatttttagttaattttcctagtttatagtt

SEQ ID NO: 34059 - DNA, 96 bp, Fusarium azukicola
  misc_feature: 156
cgatctggaatacttctagggcttcttaaggctatttttgcctccctttatctcttatctcttatttcttatttctttatctcttatctcttatct

SEQ ID NO: 34060 - DNA, 96 bp, Fusarium azukicola
  misc_feature: 156
atttctttatatagggaaggtttcttattaaaggtcctagtatattattagttatattattttattgagaaattaaggaattatatacctctaaat

SEQ ID NO: 34061 - DNA, 96 bp, Fusarium azukicola
  misc_feature: 156
aatatctaaggaaatattatctctaacttctagaggggatttattatttaaagccgaatgcgggcttctattatatatatatacggctgcttccat

SEQ ID NO: 34062 - DNA, 96 bp, Fusarium azukicola
  misc_feature: 156
ataaaattcaaggaatttagaaaagaaatagaaaataatcctaataaaataagaataaaatcagttttcttagataatataaaggaatatatatat

SEQ ID NO: 34063 - DNA, 96 bp, Fusarium azukicola
  misc_feature: 156
atatacctaaaaatagagtaaaaattctataatataatatatggtttatagggatatatcactatagttggtaatataatatagaacattaacatt

SEQ ID NO: 34064 - DNA, 96 bp, Fusarium azukicola
  misc_feature: 156
aaaaataatataaataaaaaacctagtaataaggaatataagttcctagataaaatagctattaatatatagggtccttctagaatccctacctat

SEQ ID NO: 34065 - DNA, 96 bp, Fusarium azukicola
  misc_feature: 156
agattataactttaaaggaggctattaatattctatattatattactaactatagtgatatatccctataaaccatatattatattatagaatttt

SEQ ID NO: 34066 - DNA, 96 bp, Fusarium azukicola
  misc_feature: 155
atttattataaggcggacttatattatattttattccattctttatataatagggtcttagcttatatatatattcctttatattatctaagaaaa

SEQ ID NO: 34067 - DNA, 96 bp, Fusarium azukicola
  misc_feature: 155
tttaattttttcctctaataataagaacgtataaagctataacccttataagattataactttaaaggaggctattaatattctatattatattac

SEQ ID NO: 34068 - DNA, 96 bp, Fusarium azukicola
  misc_feature: 155
ttatttcttttctctttcttccttcttagaattaggtttagattcctttttcttagaagtcttatataccttattagcttcctgagttttctagtt

SEQ ID NO: 34069 - DNA, 96 bp, Fusarium azukicola
  misc_feature: 155
aggatttccttaaggattataaaaagaaatatcctaatagtaatataaataagctataaatctatttaaaattaagaaaagccttatatagcctaa

SEQ ID NO: 34070 - DNA, 96 bp, Fusarium azukicola
  misc_feature: 155
tgttgacgagactggctttatgatgggcatgattgcaagcggaatggtcgtcacgggcacagaaaggcgtgaaaagccaaaagcagtgcagcctgg

SEQ ID NO: 34071 - DNA, 96 bp, Fusarium azukicola
  misc_feature: 155
tctatatctgtgaaagtaaacagtgatataatacgtggtcaaaacaaacaaagatgctagcaagactcttttatcagtggcaatggtagagaagac

SEQ ID NO: 34072 - DNA, 96 bp, Fusarium azukicola
  misc_feature: 155
atattaagttaaaaactgcgaaaactataaactaggaaaattaactaaaaataatataaataaaaaacctagtaataaggaatataagttcctaga

SEQ ID NO: 34073 - DNA, 96 bp, Fusarium azukicola
  misc_feature: 155
tcctctaataataagaacgtataaagctataacccttataagattataactttaaaggaggctattaatattctatattatattaccaactatagt

SEQ ID NO: 34074 - DNA, 96 bp, Fusarium azukicola
  misc_feature: 155
tattattctaattggttaaaaaggttcctacagacctttatgactgccgtcatctatgcatcaaagtataataactgccgattggctaaaaaaggg

SEQ ID NO: 34075 - DNA, 96 bp, Fusarium azukicola
  misc_feature: 155
actttttaggaataaatataactataaatagagagaataagagtatatctttttcataagcaaaatatataaataaaataataaggaaatataata

SEQ ID NO: 34076 - DNA, 96 bp, Fusarium azukicola
  misc_feature: 155
tattagaaataaccttagctgttattatatataggttatttttctcttttccttatgatattatttttccttacttatttaaaagaaggacttctt

SEQ ID NO: 34077 - DNA, 96 bp, Fusarium azukicola
  misc_feature: 155
tataaaattcaaggaatttagaaaagaaatagaaaataatcctaataaaataagaataaaatcagttttcttagataatataaaggaatatatata

SEQ ID NO: 34078 - DNA, 96 bp, Fusarium azukicola
  misc_feature: 155
agtaatctttaagttcttatttataaagagagctttattaaaagggatagtatagaagcctaaattatttaataatttagagagaaggttatacta

SEQ ID NO: 34079 - DNA, 96 bp, Fusarium azukicola
  misc_feature: 155
tagaggtactatatactaaaactaggttttttaaaaaatcctagaaaattcaaactaactctaaaatagctaaaatttaaagtttagacttattat

SEQ ID NO: 34080 - DNA, 96 bp, Fusarium azukicola
  misc_feature: 155
attggttgaaattagggttaggggtagtagtagagttaagggttagggttaattggttgaaattagggttaggggtagtagtagagttaaggggta

SEQ ID NO: 34081 - DNA, 96 bp, Fusarium azukicola
  misc_feature: 155
cgattttaactatttagctatatataagacttaaaaatattttttctaaatttttaaaaaaattccttatataggtatcttaaagtatacagtgta

SEQ ID NO: 34082 - DNA, 96 bp, Fusarium azukicola
  misc_feature: 155
gtttaattttttcctctaataataagaacgtataaagctataacccttataagattataactttaaaggaggctattaatattctatattatatta

SEQ ID NO: 34083 - DNA, 96 bp, Fusarium azukicola
  misc_feature: 155
aaagaagaagaattagctataaatagcttttcttgtttcttttctctttcttccttcttagaattaggtttagattcctttttcttagaagtctta

SEQ ID NO: 34084 - DNA, 96 bp, Fusarium azukicola
  misc_feature: 155
gtatgtaccgcgtcgataagctgagagggaaaagcaaaatgtgcaggcatatgaaactctatatctgtgaaagtaaacagtgatataatacgtggt

SEQ ID NO: 34085 - DNA, 96 bp, Fusarium azukicola
  misc_feature: 155
ctactactacccctaaccctaatttcaaccaattaaccctaacccttaacgtaactactacccctaaccataatttcaaccaattaaccctaaccc

SEQ ID NO: 34086 - DNA, 96 bp, Fusarium azukicola
  misc_feature: 155
cttagataatataaaggaatatatatataagctaagaccctattatataaagaatggaataaaatataatataagtccgccttataataaataagc

SEQ ID NO: 34087 - DNA, 96 bp, Fusarium azukicola
  misc_feature: 155
cttcttaaggctatttttgcctccctttatctcttatctcttatttcttatttctttatctcttatctcttatctcttatctcttatctcttatct

SEQ ID NO: 34088 - DNA, 96 bp, Fusarium azukicola
  misc_feature: 155
atgaaactctatatctgtgaaagtaaacagtgatataatacgtggtcaaaacaaacaaagatgctagcaagactcttttatcagtggcaatggtag

SEQ ID NO: 34089 - DNA, 96 bp, Fusarium azukicola
  misc_feature: 155
ctaattttagctattttaagcttaatttcgacttttatagcttttttaaaaaataccttttaaggtgaaaatataagtgtctcgttcgcttgtctg

SEQ ID NO: 34090 - DNA, 96 bp, Fusarium azukicola
  misc_feature: 155
aggaggctattaatattctatattatattactaactatagtgatatatccctataaaccatatattatattatagaatttttactctatttttagg

SEQ ID NO: 34091 - DNA, 96 bp, Fusarium azukicola
  misc_feature: 155
cattatgatagttgtctagttgtcttctctaccattgccactgataaaagagtcttgctagcatctttgtttgttttgaccacgtattatatcact

SEQ ID NO: 34092 - DNA, 96 bp, Fusarium azukicola
  misc_feature: 155
atcagtagaatcaactcttcagtcaattcaatcattaacaactaaatcccacttttatctgatccaatcagactctttattgtgacccacttttat

SEQ ID NO: 34093 - DNA, 96 bp, Fusarium azukicola
  misc_feature: 155
aggatatttctttttataatccttaaggaaatccttaattataaggtctttaaatccaataggaatagttatatatatatctatatctatatctat

SEQ ID NO: 34094 - DNA, 96 bp, Fusarium azukicola
  misc_feature: 155
atacctaaaaatagagtaaaaattctataatataatatgtggtttatagggatatatcactatagttggtaatataatatagaacattaacagtat

SEQ ID NO: 34095 - DNA, 96 bp, Fusarium azukicola
  misc_feature: 155
aaataatacccttaatatctagctacctatagtagctataggttaggtaaatatacctaaaaatagagtaaaaattctataatataatatatggtt

SEQ ID NO: 34096 - DNA, 96 bp, Fusarium azukicola
  misc_feature: 154
ataaagacccagattgctattttttgcaccctaataaggctccaaaaaactggaaaattcaggaagccaataaggtgcataagacttctaagaaaa

SEQ ID NO: 34097 - DNA, 96 bp, Fusarium azukicola
  misc_feature: 154
ttttcactccttatcctctcctctcccctctccctctctctcttttcactccttatcctctcctctcccctctccctctctctcttttctctcctt

SEQ ID NO: 34098 - DNA, 96 bp, Fusarium azukicola
  misc_feature: 154
taagggtattattctaattggttaaaaaggttcctatagacctttatgactgccgtcatctatgcattaagtataataactgccgattggctaaaa

SEQ ID NO: 34099 - DNA, 96 bp, Fusarium azukicola
  misc_feature: 154
tttctataaagctattagcttatttattataaggcggacttatattatattttattccattctttatataatagggtcttagcttatatatatatt

SEQ ID NO: 34100 - DNA, 96 bp, Fusarium azukicola
  misc_feature: 154
ttgctattttttgcaccctaataaggctccaaaaaactggaaaactcaggaagccaataaggtgcataagacttctaagaaaaaggaatctaaacc

SEQ ID NO: 34101 - DNA, 96 bp, Fusarium azukicola
  misc_feature: 154
ttcttattagaaataaccttagctattattatatataggttatttttctcttttccttataatattatttttccttatttatttaaaagaaggact

SEQ ID NO: 34102 - DNA, 96 bp, Fusarium azukicola
  misc_feature: 154
ggttaggtaaatatacctaaaaatagagtaaaaattctataatataatatatagtttatagggatatatcactatagttggtaatataatatagaa

SEQ ID NO: 34103 - DNA, 96 bp, Fusarium azukicola
  misc_feature: 154
agaagtccttcttttaaataagtaaggaaaaataatatcataaggaaaagagaaaaataacctatatataataacagctaaggttatttctaataa

SEQ ID NO: 34104 - DNA, 96 bp, Fusarium azukicola
  misc_feature: 154
ataactacttaaccctaacccttaacttaaccacttaaccctaacctttactataactacttaaccctaacccttaacttaaccacttaaccctaa

SEQ ID NO: 34105 - DNA, 96 bp, Fusarium azukicola
  misc_feature: 154
ataataaggaaatataataaataagaaataggaacttctaaagtacctattaaatttatagaaagactcttaaaatctaaagaaccttcttctcca

SEQ ID NO: 34106 - DNA, 96 bp, Fusarium azukicola
  misc_feature: 154
tccattatgatagttgtctagttgtcttctctaccattgccactgataaaagagtcttgctagcatctttgtttgttttgaccacgtattatatca

SEQ ID NO: 34107 - DNA, 96 bp, Fusarium azukicola
  misc_feature: 154
aaactctatatctgtgaaagtaaacagtgatataatacgtggtcaaaacaaacaaagatgctagcaagactcttttatcagtggcaatggtagaga

SEQ ID NO: 34108 - DNA, 96 bp, Fusarium azukicola
  misc_feature: 154
tcactttctaattttagctattttaagcttaatttcgacttttatagcttttttaaaaaataccttttaaggtgaaaatataagtgtctcgttcgc

SEQ ID NO: 34109 - DNA, 96 bp, Fusarium azukicola
  misc_feature: 154
tattagcttatttattataaggcggacttatattatattttattccattctttatataatagggtcttagcttatatatatattcctttatattat

SEQ ID NO: 34110 - DNA, 96 bp, Fusarium azukicola
  misc_feature: 154
aatcgccttaccctagctaataaccctcttatctataccctacccatatagtctaacccgatccatgtaagaaaacgctatttatactatctcata

SEQ ID NO: 34111 - DNA, 96 bp, Fusarium azukicola
  misc_feature: 154
tataactattcctattggatttaaagaccttataattaaggatttccttaaggattataaaaagaaatatcctaatagtagtataaatgagctata

SEQ ID NO: 34112 - DNA, 96 bp, Fusarium azukicola
  misc_feature: 154
tataaagctataacccttataagattataactttaaaggaggctattaatattctatattatattactaactatagtgatatatccctataaacta

SEQ ID NO: 34113 - DNA, 96 bp, Fusarium azukicola
  misc_feature: 154
cctaattctaagaaggaagaaagagaaaagaaataagaaaagctatttatagctaattcttcttcttcgtcatctcctaaagccgaggaagaccta

SEQ ID NO: 34114 - DNA, 96 bp, Fusarium azukicola
  misc_feature: 154
taggtagggattctagaaggaccctatatattagtagctattttatctaggaacttatattccttattattaggttttttatttatattattttta

SEQ ID NO: 34115 - DNA, 96 bp, Fusarium azukicola
  misc_feature: 154
tagaatattaatagcctcctttaaagttataatcttataagggttatagctttatatattcttattattagaggaaaaaattaaacctctattatt

SEQ ID NO: 34116 - DNA, 96 bp, Fusarium azukicola
  misc_feature: 154
atatttgttaatgttctatattatattaccaactatagtgatatatccctataaaccacatattatattatagaatttttactctatttttaggta

SEQ ID NO: 34117 - DNA, 96 bp, Fusarium azukicola
  misc_feature: 154
atattaatagcctcctttaaagttataatcttataagggttatagctttatatattcttattattagaggaaaaaattaaacctctattattatta

SEQ ID NO: 34118 - DNA, 96 bp, Fusarium azukicola
  misc_feature: 154
taaataaataagaagtccttcttttaaataagtaaggaaaaataatatcataaggaaaagagaaaaataacctatatataataacagctaaggtta

SEQ ID NO: 34119 - DNA, 96 bp, Fusarium azukicola
  misc_feature: 154
aacttttactctatttttaggtatatttacctaacctatagctactataggtagctagatattaagggtattattctaattagttaaaaaggttcc

SEQ ID NO: 34120 - DNA, 96 bp, Fusarium azukicola
  misc_feature: 154
atcctaatagtaatataaataagctataaatctatttaaaattaagaaaagccttatatagcctaaaataaagccctagattatagtataaccttc

SEQ ID NO: 34121 - DNA, 96 bp, Fusarium azukicola
  misc_feature: 154
aaaagagagaagagagtatagggtaaagtaaaataaagaataaaagtagagggtaaagtaaaataataaagaaagtatagggtaaagaaaataaag

SEQ ID NO: 34122 - DNA, 96 bp, Fusarium azukicola
  misc_feature: 154
atatctaaaagcctatctattaaggaataagtcagaagctattataaaattcaaggaatttagaaaagaaatagaaaataatcctaataaaataag

SEQ ID NO: 34123 - DNA, 96 bp, Fusarium azukicola
  misc_feature: 154
ctagaatccctacctataataaatatatatactttattaccttcctagatagggctactagatatctaaaagcctatctattaaggaataagtcag

SEQ ID NO: 34124 - DNA, 96 bp, Fusarium azukicola
  misc_feature: 154
atagcttttcttgtttcttttctctttcttccttcttagaattaggtttagattcctttttcttagaagtcttatgcaccttattggctttctgag

SEQ ID NO: 34125 - DNA, 96 bp, Fusarium azukicola
  misc_feature: 154
ctaagggaggctattaaagagttaatttctcttaattatatatataaatatataaataaaaatctctctttaagttttaatagggctatacctcct

SEQ ID NO: 34126 - DNA, 96 bp, Fusarium azukicola
  misc_feature: 154
aaggaggctattaatattctatattatattactaactatagtgatatatccctataaaccatatattatattatagaatttttactctatttttag

SEQ ID NO: 34127 - DNA, 96 bp, Fusarium azukicola
  misc_feature: 154
aataaaataagaataaaattagttttcttagataatataaaggaatatatatataagctaagaccctattatataaagaatggaataaaatataat

SEQ ID NO: 34128 - DNA, 96 bp, Fusarium azukicola
  misc_feature: 154
atggcttagttatagcaaaaaccggttttgatggatagaatgcaacgctgaaggttttaggaaccttcctagccaatcggcagttattatactttt

SEQ ID NO: 34129 - DNA, 96 bp, Fusarium azukicola
  misc_feature: 154
ataggactatattagaaaaggttagagctttattatttacttctaacctacctaaatacctttagggagaggctatagaagtagccgtatatatat

SEQ ID NO: 34130 - DNA, 96 bp, Fusarium azukicola
  misc_feature: 154
atagaatattaatagcctcctttaaagttataatcttataagggttatagctttatatattcttattattagaggaaaaaattaaacctctattat

SEQ ID NO: 34131 - DNA, 96 bp, Fusarium azukicola
  misc_feature: 154
ataataatagaggtttaatttttcctctaataataagaacgtataaagctataacccttataagattataactttaaaggaggctattaatgttct

SEQ ID NO: 34132 - DNA, 96 bp, Fusarium azukicola
  misc_feature: 154
aatataatatagaacattaatagcctcctttaaagttataatcttataagggttatagctttatacgttcttattattagaggaaaaattaaacct

SEQ ID NO: 34133 - DNA, 96 bp, Fusarium azukicola
  misc_feature: 154
actacttaaccctaacccttaacttaaccacttaaccctaacctttactataactacttaaccctaacccttaacttaaccacttaaccctaacct

SEQ ID NO: 34134 - DNA, 96 bp, Fusarium azukicola
  misc_feature: 154
accctcttatctataccctacccatatagtctaacccgatccatgtaagaaaacgctatttatactatctcatactgtacttaactagccgtccct

SEQ ID NO: 34135 - DNA, 96 bp, Fusarium azukicola
  misc_feature: 153
taaagtaaaagagagaagagagtatagggtaaagtaaaataaagaataaaagtagagggtaaagtaaaataataaagaaagtatagggtaaagaaa

SEQ ID NO: 34136 - DNA, 96 bp, Fusarium azukicola
  misc_feature: 153
tatagttggtaatataatatagaatattaatagcctcctttaaagttataatcttataagggttatagctttatacgttcttattattagaggaaa

SEQ ID NO: 34137 - DNA, 96 bp, Fusarium azukicola
  misc_feature: 153
ttaagggtattattctaattggttaaaaaggttcctatagacctttatgactgccgtcatctatgcattaagtataataactgccgattggctaaa

SEQ ID NO: 34138 - DNA, 96 bp, Fusarium azukicola
  misc_feature: 153
ttattcctaaaaagtctttaacttctcctaaggattagattactatatccttagatagaatatttactattctttctatatcttctttataagggc

SEQ ID NO: 34139 - DNA, 96 bp, Fusarium azukicola
  misc_feature: 153
ttatgacccacttttatctatctatcttctataagtctctcttagaagctagatattatctctttactacttttcttcctagttatctaggaaatt

SEQ ID NO: 34140 - DNA, 96 bp, Fusarium azukicola
  misc_feature: 153
aacgtataaagctataacccttataagattataactttaaaggaggctattaatattctatattatattaccaactatagtgatatatccctataa

SEQ ID NO: 34141 - DNA, 96 bp, Fusarium azukicola
  misc_feature: 153
ataagcgaacgagacagcatactatataactaaaaatcgctaaaacctaagtttctaaaaactgctataaaatagctagaaacttaaaaaaagtaa

SEQ ID NO: 34142 - DNA, 96 bp, Fusarium azukicola
  misc_feature: 153
gtataaatagcgttttcttacatggatcgggttagactatatgggtagggtatagataagagggttattagctagggtaaggcgattagggattaa

SEQ ID NO: 34143 - DNA, 96 bp, Fusarium azukicola
  misc_feature: 153
ttaaaggaggctattaatattctatattatattactaactatagtgatatatccctataaaccatatattatattatagaatttttactctatttt

SEQ ID NO: 34144 - DNA, 96 bp, Fusarium azukicola
  misc_feature: 153
tgactctttaatagcctcccttagggctatatattctgcttcacaactagataaagcaacgcttttttgcttagttgttttccagcttattagatt

SEQ ID NO: 34145 - DNA, 96 bp, Fusarium azukicola
  misc_feature: 153
tgaaaagagagagagggagaggggagaggagaggataaggagtgaaaagagagagagggagaggggagaggagaggataaggagagaaaagagaga

SEQ ID NO: 34146 - DNA, 96 bp, Fusarium azukicola
  misc_feature: 153
gattataaaaagaaatatcctaatagtaatataaataagctataaatctatttaaaattaagaaaagccttatatagcctaaaataaagccctaga

SEQ ID NO: 34147 - DNA, 96 bp, Fusarium azukicola
  misc_feature: 153
gaaaataatcctaataaaataagaataaaattagttttcttagataatataaaggaatatatatataagctaagaccctattatataaagaatgga

SEQ ID NO: 34148 - DNA, 96 bp, Fusarium azukicola
  misc_feature: 153
agtaaaagagagaagagagtatagggtaaagtaaaataaagaataaaagtagagggtaaagtaaaataataaagaaagtatagggtaaagaaaata

SEQ ID NO: 34149 - DNA, 96 bp, Fusarium azukicola
  misc_feature: 153
aatattatttttccttatttatttaaaagaaggacttcttatttatttataatagaagttatattataaagagaagattaacttattaagttaata

SEQ ID NO: 34150 - DNA, 96 bp, Fusarium azukicola
  misc_feature: 153
tatccgacggtataatcttggtccgaatcggatcctattaggccggtcaaatgactataataagggactatccttctttattagttactacaagat

SEQ ID NO: 34151 - DNA, 96 bp, Fusarium azukicola
  misc_feature: 153
taggagatgacgaagaagaagaattagctataaatagcttttcttatttcttttctctttcttccttcttagaattaggtttagattcctttttct

SEQ ID NO: 34152 - DNA, 96 bp, Fusarium azukicola
  misc_feature: 153
taataatagaggtttaatttttcctctaataataagaacgtataaagctataacccttataagattataactttaaaggaggctattaatgttcta

SEQ ID NO: 34153 - DNA, 96 bp, Fusarium azukicola
  misc_feature: 153
taatagaagagtaataataataagagaggggtttatttaaataaaggttatagttaaagtttaagagtagtagttaagttaagggttagggttaat

SEQ ID NO: 34154 - DNA, 96 bp, Fusarium azukicola
  misc_feature: 153
gtaatataatatagaatattaatagcctcctttaaagttataatcttataagggttatagctttatacgttcttattattagaggaaaaattaaac

SEQ ID NO: 34155 - DNA, 96 bp, Fusarium azukicola
  misc_feature: 153
atcgccttaccctagctaataaccctcttatctataccctacccatatagtctaacccgatccatgtaagaaaacgctatttatactatctcatac

SEQ ID NO: 34156 - DNA, 96 bp, Fusarium azukicola
  misc_feature: 153
gggtaaagtaaaagagagaagagagtatagggtaaagtaaaagagagaagagagtatagggtaaagtaaaagagagaagagagtataggggaaagt

SEQ ID NO: 34157 - DNA, 96 bp, Fusarium azukicola
  misc_feature: 153
aaccctcttatctataccctacccatatagtctaacccgatccatgtaagaaaacgctatttatactatctcatactgtacttaactagccgtccc

SEQ ID NO: 34158 - DNA, 96 bp, Fusarium azukicola
  misc_feature: 153
gctataaatagcttttcttatttcttttctctttcttccttcttagaattaggtttagattcctttttcttagaagtcttatgcaccttattggct

SEQ ID NO: 34159 - DNA, 96 bp, Fusarium azukicola
  misc_feature: 153
cttatttcttttctctttcttccttcttagaattaggtttagattcctttttcttagaagtcttatataccttattagcttcctgagttttctagt

SEQ ID NO: 34160 - DNA, 96 bp, Fusarium azukicola
  misc_feature: 153
ctataatataatatgtggtttatagggatatatcactatagttggtaatataatatagaatattaatagcctcctttaaagttataatcttataag

SEQ ID NO: 34161 - DNA, 96 bp, Fusarium azukicola
  misc_feature: 153
ctctagaatctcctagaatctctatagaagcccgaagggcttctatctatagctgacccaaagcctgaccctaaccctgacctaatgtatgaccct

SEQ ID NO: 34162 - DNA, 96 bp, Fusarium azukicola
  misc_feature: 153
cgaaaactataaactaggaaaattaactaaaaataatataaataaaaaacctagtaataaggaatataagttcctagataaaatagctactaatat

SEQ ID NO: 34163 - DNA, 96 bp, Fusarium azukicola
  misc_feature: 153
agccttattagggtgcaaaaaatagcaatctgggtctttatgacctagcagtttgcaataactgcattttaaggcagttttcttctttttccaagg

SEQ ID NO: 34164 - DNA, 96 bp, Fusarium azukicola
  misc_feature: 153
ccctctccctctctctcttttcactccttatcctctcctctcccctctccctctctctcttttcactccttctcctctcctctcccctctccctct

SEQ ID NO: 34165 - DNA, 96 bp, Fusarium azukicola
  misc_feature: 153
acccagattgctattttttgcaccctaataaggctccaaaaaactggaaaattcaggaagccaataaggtgcataagacttctaagaaaaaggaat

SEQ ID NO: 34166 - DNA, 96 bp, Fusarium azukicola
  misc_feature: 153
acttttactctatttttaggtatatttacctaacctatagctactataggtagctagatattaagggtattattctaattagttaaaaaggttcct

SEQ ID NO: 34167 - DNA, 96 bp, Fusarium azukicola
  misc_feature: 153
agagagtcgcaacgctctccatccgactgcggccatcctcgcccacagccctccaccatgactatcctagtcatgagctgccccgcggctactatt

SEQ ID NO: 34168 - DNA, 96 bp, Fusarium azukicola
  misc_feature: 153
aaataagaagtccttcttttaaataagtaaggaaaaataatatcataaggaaaagagaaaaataacctatatataataacagctaaggttatttct

SEQ ID NO: 34169 - DNA, 96 bp, Fusarium azukicola
  misc_feature: 152
taaaagagagaagagagtatagggtaaagtaaaataaagaataaaagtagagggtaaagtaaaataataaagaaagtatagggtaaagaaaataaa

SEQ ID NO: 34170 - DNA, 96 bp, Fusarium azukicola
  misc_feature: 152
ttctataaagctattagcttatttattatgaggcggacttatattatattttattccattctttatataatagggtcttagcttatatatatattc

SEQ ID NO: 34171 - DNA, 96 bp, Fusarium azukicola
  misc_feature: 152
catcttaacttaagaagtctaattaaatatataaaaataaaagatcctctctttaaatatactagtgaggacctatatcaagttaaaaactgcgaa

SEQ ID NO: 34172 - DNA, 96 bp, Fusarium azukicola
  misc_feature: 152
actctactactacccctaaccctaatttcaaccaattaaccctaacccttaacgtaactactacccctaaccataatttcaaccaattaaccctaa

SEQ ID NO: 34173 - DNA, 96 bp, Fusarium azukicola
  misc_feature: 152
ttagataatataaaggaatatatatataagctaagaccctattatataaagaatggaataaaatataatataagtccgccttataataaataagct

SEQ ID NO: 34174 - DNA, 96 bp, Fusarium azukicola
  misc_feature: 152
cataaaagactaagttatcttaacttaagaagtctaattaaatatataaaaataaaagatcctctctttaaatatactagtgaggacctatattaa

SEQ ID NO: 34175 - DNA, 96 bp, Fusarium azukicola
  misc_feature: 152
taaagctataacccttataagattataactttaaaggaggctattaatgttctatattatattaccaactatagtgatatatccctataaaccaca

SEQ ID NO: 34176 - DNA, 96 bp, Fusarium azukicola
  misc_feature: 152
tgctattttttgcaccctaataaggctccaaaaaactggaaaattcaggaagccaataaggtgcataagacttctaagaaaaaggaatctaaacct

SEQ ID NO: 34177 - DNA, 96 bp, Fusarium azukicola
  misc_feature: 152
tcttctctttataatataacttctattataaataaataagaagtccttcttttaaataaataaggaaaaataatattataaggaaaagagaaaaat

SEQ ID NO: 34178 - DNA, 96 bp, Fusarium azukicola
  misc_feature: 152
tcataataaataagctaatagctttatagaaaggataaataggactatattagaaaaggttagagctttattatttacttctaacctacctaaata

SEQ ID NO: 34179 - DNA, 96 bp, Fusarium azukicola
  misc_feature: 152
tatgagtcgtcgcgatagcccaatcgcccgggaggttgctttcttggtaccagtgagagaggtgatattggcccgcaaccacgatgaacggctggg

SEQ ID NO: 34180 - DNA, 96 bp, Fusarium azukicola
  misc_feature: 152
tatatgatatggtatggatatagatgatgttattatttattattataatcgtaataacgaaagaggaagaagaagaagaagaagaagaagaagaag

SEQ ID NO: 34181 - DNA, 96 bp, Fusarium azukicola
  misc_feature: 152
aataataagaacgtataaagctataacccttataagattataactttaaaggaggctattaatattctatattatattaccaactatagtgatata

SEQ ID NO: 34182 - DNA, 96 bp, Fusarium azukicola
  misc_feature: 152
ctacttctatagcctctccctaaaggtatttaggtaggttagaagtaaataataaagctctaaccttttctaatatagtcctatttatcctttcta

SEQ ID NO: 34183 - DNA, 96 bp, Fusarium azukicola
  misc_feature: 152
tacataagacttctaagaaaaaggaatctaaacctaattctaagaaggaagaaagagaaaagaaataagaaaagctatttatagctaattcttctt

SEQ ID NO: 34184 - DNA, 96 bp, Fusarium azukicola
  misc_feature: 152
taaccttagctattattatatataggttatttttctcttttccttatgatattatttttccttacttatttaaaagaaggacttcttatttattta

SEQ ID NO: 34185 - DNA, 96 bp, Fusarium azukicola
  misc_feature: 152
atagataagagggttattagctagggtaaggcgattagggattaataagtactaagagaggtaaaggaaaccgctactatccggaggggagataac

SEQ ID NO: 34186 - DNA, 96 bp, Fusarium azukicola
  misc_feature: 152
ggtattattctaattggttaaaaaggttcctatagacctttatgactgccgtcatctatgcatcaagtataataactgccgattggctaaaaaagg

SEQ ID NO: 34187 - DNA, 96 bp, Fusarium azukicola
  misc_feature: 152
gggtattattctaattggttaaaaaggttcctacagacctttatgactgccgtcatctatgcatcaaagtataataactgccgattggctaaaaag

SEQ ID NO: 34188 - DNA, 96 bp, Fusarium azukicola
  misc_feature: 152
agtaaaatatataaataaaataataaggaaatataataaataagaaataggaacttctaaagtacctattaaatttatagaaagactcttaaaatc

SEQ ID NO: 34189 - DNA, 96 bp, Fusarium azukicola
  misc_feature: 152
ctcactttctaattttagctattttaagcttaatttcgacttttatagcttttttaaaaaataccttttaaggtgaaaatataagtgtctcgttcg

SEQ ID NO: 34190 - DNA, 96 bp, Fusarium azukicola
  misc_feature: 152
agattcctttttcttagaagtcttatgcaccttattggcttcctgagttttccagttttttggagccttattagggtgcaaaaaatagcaatctgg

SEQ ID NO: 34191 - DNA, 96 bp, Fusarium azukicola
  misc_feature: 152
agacagacaagcgaacgagacacttatattttcaccttaaaaggtattttttaaaaaagctataaaagtcgaaattaagcttaaaatagctaaaat

SEQ ID NO: 34192 - DNA, 96 bp, Fusarium azukicola
  misc_feature: 152
aaagctataacccttataagattataactttaaaggaggctattaatgttctatattatattaccaactatagtgatatatccctataaaccacat

SEQ ID NO: 34193 - DNA, 96 bp, Fusarium azukicola
  misc_feature: 152
atatataagcctaataagctattctagaaagtatatctattttaggattaaattattttttctagaattattttaagtaccttttaaataaggtgt

SEQ ID NO: 34194 - DNA, 96 bp, Fusarium azukicola
  misc_feature: 151
tttttcttatccttttatactctcttcttatacccttatacacttttcttctttattttctttaccctatactttctttattattttactttaccc

SEQ ID NO: 34195 - DNA, 96 bp, Fusarium azukicola
  misc_feature: 151
ttttactttaccctatactctcttctctcttttactttaccctatactctcttctctcttttactttaccctccacttttattctttattttactt

SEQ ID NO: 34196 - DNA, 96 bp, Fusarium azukicola
  misc_feature: 151
aaaaactggaaaattcaggaagccaataaggtgcataagacttctaagaaaaaggaatctaaacctaattctaagaaggaagaaagagaaaagaaa

SEQ ID NO: 34197 - DNA, 96 bp, Fusarium azukicola
  misc_feature: 151
tttactttaccctatactctcttctctcttttactttaccctatactctcttctctcttttactttaccctccacttttattctttattttacttt

SEQ ID NO: 34198 - DNA, 96 bp, Fusarium azukicola
  misc_feature: 151
ggttatttctaataagaataactatagactaagagataacttagatcttcctattttaaatataaaggaaaaaactagtctttttaactagcataa

SEQ ID NO: 34199 - DNA, 96 bp, Fusarium azukicola
  misc_feature: 151
ttaagttaaaaactgcgaaaactataaactaggaaaattaactaaaaataatataaataaaaaacctagtaataaggaatataagttcctagataa

SEQ ID NO: 34200 - DNA, 96 bp, Fusarium azukicola
  misc_feature: 151
taataaaataagaataaaattagttttcttagataatataaaggaatatatatataagctaagaccctattatataaagaatggaataaaatataa

SEQ ID NO: 34201 - DNA, 96 bp, Fusarium azukicola
  misc_feature: 151
tatttctctagagatatagtagaaaaagggcaaataaagctttattatataaaaagtaaagataatatagctgatttctttactaaaagcttataa

SEQ ID NO: 34202 - DNA, 96 bp, Fusarium azukicola
  misc_feature: 151
ttataaaattcaaggaatttagaaaagaaatagaaaataatcctaataaaataagaataaaatcagttttcttagataatataaaggaatatatat

SEQ ID NO: 34203 - DNA, 96 bp, Fusarium azukicola
  misc_feature: 151
tgttctatattatattaccaactatagtgatatatccctataaactatatattatattatagaatttttactctatttttaggtatatttacctaa

SEQ ID NO: 34204 - DNA, 96 bp, Fusarium azukicola
  misc_feature: 151
tggacccttgacgattggaagaatgttatttggtctgatgagacctctattgtcttgcttcatcgtcgaggaggctatcgtatttggcgacagtct

SEQ ID NO: 34205 - DNA, 96 bp, Fusarium azukicola
  misc_feature: 151
attagtagctattttatctaggaacttatattccttattactaggttttttatttatattatttttagttaattttcctagtttatagttttcgca

SEQ ID NO: 34206 - DNA, 96 bp, Fusarium azukicola
  misc_feature: 151
cccttaatatctagctacctatagtagctataggttaggtaaatatacctaaaaatagagtaaaaattctataatataatatgtggtttatagaga

SEQ ID NO: 34207 - DNA, 96 bp, Fusarium azukicola
  misc_feature: 151
cataatggattatactccctacctgttccatcatcatcatcatgggtcgtcgtgcgcttacagcagaggaaaaggcaaacaaggccaaccgtgaga

SEQ ID NO: 34208 - DNA, 96 bp, Fusarium azukicola
  misc_feature: 151
gtataaagtcttagaaaagacttaaaaaagaagtataatcttcttttaagtataaacccttaggtagagacctccgggcttataacctattagtga

SEQ ID NO: 34209 - DNA, 96 bp, Fusarium azukicola
  misc_feature: 151
tattttactttaccctatactctcttctctcttttactttaccctatactctcttctctcttttactttaccctccacttttattctttattttac

SEQ ID NO: 34210 - DNA, 96 bp, Fusarium azukicola
  misc_feature: 151
tattaatattctatattatattaccaactatagtgatatatccctataaaccatatattatattatagaatttttactctatttttaggtatattt

SEQ ID NO: 34211 - DNA, 96 bp, Fusarium azukicola
  misc_feature: 151
ataataataatagaggtttaattttttcctctaataataagaacgtataaagctataacccttataagattataactttaaaggaggctattaata

SEQ ID NO: 34212 - DNA, 96 bp, Fusarium azukicola
  misc_feature: 151
aggattataaaaagaaatatcctaatagtaatataaataagctataaatctatttaaaattaagaaaagccttatatagcctaaaataaagcccta

SEQ ID NO: 34213 - DNA, 96 bp, Fusarium azukicola
  misc_feature: 151
tagaagctagatattatctctttattacttttcttcctagttatctaggaaatcaactatttataacctagtcacactgacaggttatgagcccgg

SEQ ID NO: 34214 - DNA, 96 bp, Fusarium azukicola
  misc_feature: 151
tactctcttctctcttttactttaccctccacttttattctttattttactttaccctatactctcttctctcttttactttaccctatactctct

SEQ ID NO: 34215 - DNA, 96 bp, Fusarium azukicola
  misc_feature: 151
taatcgccttaccctagctaataaccctcttatctataccctacccatatagtctaacccgatccatgtaagaaaacgctatttatactatctcat

SEQ ID NO: 34216 - DNA, 96 bp, Fusarium azukicola
  misc_feature: 151
ctggagaagaaggttctttagattttaagagtctttctataaatttaataggtactttagaagttcctatttcttatttattatatttccttatta

SEQ ID NO: 34217 - DNA, 96 bp, Fusarium azukicola
  misc_feature: 151
taacctatagctactataggtagctagatattaagggtattattctaattggttaaaaaggttcctacagaccttcatgactgccgtcattaatgc

SEQ ID NO: 34218 - DNA, 96 bp, Fusarium azukicola
  misc_feature: 151
taaagccctagattatggtataaccttctctctaaattattaaataatttaggcttctacgctatcccttttaataaagctctctttataaataag

SEQ ID NO: 34219 - DNA, 96 bp, Fusarium azukicola
  misc_feature: 151
gtagttatagtaaaggttagggttaagtggttaagttaagggttagggttaagtagttatagtaaaggttagggttaagtggttaagttaagggtt

SEQ ID NO: 34220 - DNA, 96 bp, Fusarium azukicola
  misc_feature: 151
aacctaattctaagaaggaagaaagagaaaagaaataagaaaagctatttatagctaattcttcttctttattatctcctaaagccgaggaagacc

SEQ ID NO: 34221 - DNA, 96 bp, Fusarium azukicola
  misc_feature: 151
agccctaagggaggctattaaagagttaatttctcttaattatatatataaatatataaataaaaatctctctttaagttttaatagggctatacc

SEQ ID NO: 34222 - DNA, 96 bp, Fusarium azukicola
  misc_feature: 151
cactgacaggttatgagcccggaggtctcttcctaagggtttatacttaaaagaagattatacttcttttttaagtcttttctaagactttatacc

SEQ ID NO: 34223 - DNA, 96 bp, Fusarium azukicola
  misc_feature: 151
gaagtcttatgcaccttattggcttcctgagttttccagttttttggagccttattagggtgcaaaaaatagcaatctgggtctttatgacctagc

SEQ ID NO: 34224 - DNA, 96 bp, Fusarium azukicola
  misc_feature: 151
aaatgtgcaggcatatgaaactctatatctgtgaaagtaaacagtgatataatacgtggtcaaaacaaacaaagatgctagcaagactcttttatc

SEQ ID NO: 34225 - DNA, 96 bp, Fusarium azukicola
  misc_feature: 151
cttttcttatttcttttctctttcttccttcttagaattaggtttagattcctttttcttagaagtcttatataccttattagcttcctaagtttt

SEQ ID NO: 34226 - DNA, 96 bp, Fusarium azukicola
  misc_feature: 151
aaattcctcttaataagggaatttttttaactttcccttttatcttttaagaatatagaaatatatcttaataagataaaagaggttaaaaataag

SEQ ID NO: 34227 - DNA, 96 bp, Fusarium azukicola
  misc_feature: 151
ctaaaaataatataaataaaaaacctagtaataaggaatataagttcctagataaaatagctattaatatatagggtccttctagaatccctacct

SEQ ID NO: 34228 - DNA, 96 bp, Fusarium azukicola
  misc_feature: 151
ccagattgctattttttgcaccctaataaggctccaaaaaactggaaaattcaggaagccaataaggtgcataagacttctaagaaaaaggaatct

SEQ ID NO: 34229 - DNA, 96 bp, Fusarium azukicola
  misc_feature: 151
aagtaaaatatataaataaaataataaggaaatataataaataagaaataggaacttctaaagtacctattaaatttatagaaagactcttaaaat

SEQ ID NO: 34230 - DNA, 96 bp, Fusarium azukicola
  misc_feature: 151
aatgttctatattatattaccaactatagtgatatatccctataaactatatattatattatagaatttttactctatttttaggtatatttacct

SEQ ID NO: 34231 - DNA, 96 bp, Fusarium azukicola
  misc_feature: 151
aataaataagaagtccttcttttaaataagtaaggaaaaataatatcataaggaaaagagaaaaataacctatatataataacagctaaggttatt

SEQ ID NO: 34232 - DNA, 96 bp, Fusarium azukicola
  misc_feature: 150
taaagacccagattgctattttttgcaccctaataaggctccaaaaaactggaaaattcaggaagccaataaggtgcataagacttctaagaaaaa

SEQ ID NO: 34233 - DNA, 96 bp, Fusarium azukicola
  misc_feature: 150
aagggtattattctaattggttaaaaaggttcctatagacctttatgactgccgtcatctatgcattaagtataataactgccgattggctaaaaa

SEQ ID NO: 34234 - DNA, 96 bp, Fusarium azukicola
  misc_feature: 150
aaagtaaaagagagaagagagtatagggtaaagtaaaataaagaataaaagtagagggtaaagtaaaataataaagaaagtatagggtaaagaaaa

SEQ ID NO: 34235 - DNA, 96 bp, Fusarium azukicola
  misc_feature: 150
aaaagtctatctattaaggaataagtcagaagctattataaaatttaaggaatttagaaaagaaatagaaaataatcctaataaaataagaataaa

SEQ ID NO: 34236 - DNA, 96 bp, Fusarium azukicola
  misc_feature: 150
ttgataagaaaccttccctatataaagaaacaactaggatatttaaataaggtaaataaacctgatttttctactaataaagataatataactaat

SEQ ID NO: 34237 - DNA, 96 bp, Fusarium azukicola
  misc_feature: 150
catatatatatatatgatatggtatggatatagatgatgttattatttattattataatcgtaataacgaaagaggaagaagaagaagaagaagaa

SEQ ID NO: 34238 - DNA, 96 bp, Fusarium azukicola
  misc_feature: 150
ttctgttaatgttctatattatattaccaactatagtgatatatccctataaaccacatattatattatagaatttttactctatttttaggtata

SEQ ID NO: 34239 - DNA, 96 bp, Fusarium azukicola
  misc_feature: 150
accttattggcttcctgagttttccagttttttggagccttattagggtgcaaaaaatagcaatctgggtctttatgacctagcagtttgcaataa

SEQ ID NO: 34240 - DNA, 96 bp, Fusarium azukicola
  misc_feature: 150
ataagaagtccttcttttaaataagtaaggaaaaataatatcataaggaaaagagaaaaataacctatatataataacagctaaggttatttctaa

SEQ ID NO: 34241 - DNA, 96 bp, Fusarium azukicola
  misc_feature: 150
taaacctaattctaagaaggaagaaagagaaaagaaataagaaaagctatttatagctaattcttcttcttcgtcatctcctaaagccgaggaaga

SEQ ID NO: 34242 - DNA, 96 bp, Fusarium azukicola
  misc_feature: 150
tatttattattattattattatataatattgccttttcattattataagggctttctttaaagtaaggaatctcattaaaagaggggttatttcct

SEQ ID NO: 34243 - DNA, 96 bp, Fusarium azukicola
  misc_feature: 150
tatagggatatatcactatagttagtaatataatatagaatattaatagcctcctttaaagttataatcttataagggttatagctttatacgttc

SEQ ID NO: 34244 - DNA, 96 bp, Fusarium azukicola
  misc_feature: 150
tataaataaataagaagtccttcttttaaataagtaaggaaaaataatatcataaggaaaagagaaaaataacctatatataataatagctaaggt

SEQ ID NO: 34245 - DNA, 96 bp, Fusarium azukicola
  misc_feature: 150
taatatagaatattaatagcctcctttaaagttataatcttataagggttatagctttatatattcttattattagaggaaaaaattaaacctcta

SEQ ID NO: 34246 - DNA, 96 bp, Fusarium azukicola
  misc_feature: 150
aagttaagggttagggttaattggttgaaattagggttaggggtagtagtagagttaagggttagggttaattggttgaaattagggttaggggta

SEQ ID NO: 34247 - DNA, 96 bp, Fusarium azukicola
  misc_feature: 150
taataataatagaggtttaatttttcctctaataataagaacgtataaagctataacccttataagattataactttaaaggaggctattaatgtt

SEQ ID NO: 34248 - DNA, 96 bp, Fusarium azukicola
  misc_feature: 150
aattctataatataatatgtggtttatagggatatatcactatagttggtaatataatatagaatattaatagcctcctttaaagttataatctta

SEQ ID NO: 34249 - DNA, 96 bp, Fusarium azukicola
  misc_feature: 150
attagaaataaccttagctgttattatatataggttatttttctcttttccttatgatattatttttccttacttatttaaaagaaggacttctta

SEQ ID NO: 34250 - DNA, 96 bp, Fusarium azukicola
  misc_feature: 150
ctcttttactttaccctatactctcttctctcttttactttaccctccacttttattctttattttactttaccctatactctcttctctctttta

SEQ ID NO: 34251 - DNA, 96 bp, Fusarium azukicola
  misc_feature: 150
ccattatgatagttgtctagttgtcttctctaccattgccactgataaaagagtcttgctagcatctttgtttgttttgaccacgtattatatcac

SEQ ID NO: 34252 - DNA, 96 bp, Fusarium azukicola
  misc_feature: 150
aatacgtggtcaaaacaaacaaagatgctagcaagactcttttatcagtggcaatggtagagaagacaactagacaactatcataatggattatac

SEQ ID NO: 34253 - DNA, 96 bp, Fusarium azukicola
  misc_feature: 150
gtaaaatatataaataaaataataaggaaatataataaataagaaataggaacttctaaagtacctattaaatttatagaaagactcttaaaatct

SEQ ID NO: 34254 - DNA, 96 bp, Fusarium azukicola
  misc_feature: 150
gcttttcttatttcttttctctttcttccttcttagaattaggtttagattcctttttcttagaagtcttatataccttattagcttcctaagttt

SEQ ID NO: 34255 - DNA, 96 bp, Fusarium azukicola
  misc_feature: 150
ataaggtaaataaacctaatttttctactaataaagataatataactaattttatatataatataggtgctactaggtatattatatatagaaaag

SEQ ID NO: 34256 - DNA, 96 bp, Fusarium azukicola
  misc_feature: 150
ctttctaattttagctattttaagcttaatttcgacttttatagcttttttaaaaaataccttttaaggtgaaaatataagtgtctcgttcgcttg

SEQ ID NO: 34257 - DNA, 96 bp, Fusarium azukicola
  misc_feature: 150
aatagcctcctttaaagttataatcttataagggttatagctttatatattcttattattagaggaaaaaattaaacctctattattattatatat

SEQ ID NO: 34258 - DNA, 96 bp, Fusarium azukicola
  misc_feature: 149
cgataagctgagagggaaaagcaaaatgtgcaggcatatgaaactctatatctgtgaaagtaaacagtgatataatacgtggtcaaaacaaacaaa

SEQ ID NO: 34259 - DNA, 96 bp, Fusarium azukicola
  misc_feature: 149
tttctatatataatatacctagtagcacctatattatatataaaattagttatattatctttattagtagaaaaattaggtttatttaccttattt

SEQ ID NO: 34260 - DNA, 96 bp, Fusarium azukicola
  misc_feature: 149
tttattgttaatgttctatattatattaccaactatagtgatatatccctataaaccacatattatattatagaatttttactctatttttaggta

SEQ ID NO: 34261 - DNA, 96 bp, Fusarium azukicola
  misc_feature: 149
acgtataaagctataacccttataagattataactttaaaggaggctattaatattctatattatattaccaactatagtgatatatccctataaa

SEQ ID NO: 34262 - DNA, 96 bp, Fusarium azukicola
  misc_feature: 149
atagctaagagagagaggtaaagctaagaaagagagatatagctagaaaagagagaaataagagataagagataagagataagagataagagataa

SEQ ID NO: 34263 - DNA, 96 bp, Fusarium azukicola
  misc_feature: 149
ttaagggtattattctaattggttaaaaaggttcctatagacctttatgactgccgtcatctatgcatcaagtataataactgccgattggctaag

SEQ ID NO: 34264 - DNA, 96 bp, Fusarium azukicola
  misc_feature: 149
tgaaactctatatctgtgaaagtaaacagtgatataatacgtggtcaaaacaaacaaagatgctagcaagactcttttatcagtggcaatggtaga

SEQ ID NO: 34265 - DNA, 96 bp, Fusarium azukicola
  misc_feature: 149
tcgccttaccctagctaataaccctcttatctataccctacccatatagtctaacccgatccatgtaagaaaacgctatttatactatctcatact

SEQ ID NO: 34266 - DNA, 96 bp, Fusarium azukicola
  misc_feature: 149
gcaaactgctaggtcataaagacccagattgctattttttgcaccctaataaggctccaaaaaactggaaaactcaggaagccaataaggtgcata

SEQ ID NO: 34267 - DNA, 96 bp, Fusarium azukicola
  misc_feature: 149
taatagcctcctttaaagttataatcttataagggttatagctttatatattcttattattagaggaaaaaattaaacctctattattattatata

SEQ ID NO: 34268 - DNA, 96 bp, Fusarium azukicola
  misc_feature: 149
tataaatggcttagttatagcaaaaaccggttttgatggatagaatgcaacgctgaaggttttaggaaccttcctagccaatcggcaggtatttta

SEQ ID NO: 34269 - DNA, 96 bp, Fusarium azukicola
  misc_feature: 149
gctattttttgcaccctaataaggctccaaaaaactggaaaactcaggaagccaataaggtgcataagacttctaagaaaaaggaatctaaaccta

SEQ ID NO: 34270 - DNA, 96 bp, Fusarium azukicola
  misc_feature: 149
taggatatttctttttataatccttaaggaaatccttaattataaggtctttaaatccaataggaatagttatatatatatctatatctatatcta

SEQ ID NO: 34271 - DNA, 96 bp, Fusarium azukicola
  misc_feature: 149
taagagggttattagctagggtaaggcgattagggattaataagtactaagagaggtaaaggaaaccgctactatccggaggggagataacctcta

SEQ ID NO: 34272 - DNA, 96 bp, Fusarium azukicola
  misc_feature: 149
tacttattaatccctaatcgccttaccctagctaataaccctcttatctataccctacccatatagtctaacccgatccatgtaagaaaacgctat

SEQ ID NO: 34273 - DNA, 96 bp, Fusarium azukicola
  misc_feature: 149
ggtaaatatacctaaaaatagagtaaaaattctataatataatatatagtttatagggatatatcactatagttggtaatataatatagaacatta

SEQ ID NO: 34274 - DNA, 96 bp, Fusarium azukicola
  misc_feature: 149
agtataaatagcgttttcttacatggatcgggttagactatatgggtagggtatagataagagggttattagctagggtaaggcgattagggatta

SEQ ID NO: 34275 - DNA, 96 bp, Fusarium azukicola
  misc_feature: 149
taacccttaactctactactacccctaaccctaatttcaaccaattaaccctaacccttaacgtaactactacccctaaccataatttcaaccaat

SEQ ID NO: 34276 - DNA, 96 bp, Fusarium azukicola
  misc_feature: 149
taaagtttaagagtagtagttaagttaagggttagggttaattggttgaaattagggttaggggtagtagtagagttaagggttagggttaattgg

SEQ ID NO: 34277 - DNA, 96 bp, Fusarium azukicola
  misc_feature: 149
taaaaaaagtatttttataaatctaactatataaagaacctaaaaatatcttttttagatttttaaaaaaattgctttatagagaaataactaagt

SEQ ID NO: 34278 - DNA, 96 bp, Fusarium azukicola
  misc_feature: 149
gcgctatcccgcctcgaccaccacttctcgatgattcaccctgtatctgtatatcaatatccatttgatcaattgcttcccttgcctcatctacag

SEQ ID NO: 34279 - DNA, 96 bp, Fusarium azukicola
  misc_feature: 149
cccagattgctattttttgcaccctaataaggctccaaaaaactggaaaattcaggaagccaataaggtgcataagacttctaagaaaaaggaatc

SEQ ID NO: 34280 - DNA, 96 bp, Fusarium azukicola
  misc_feature: 149
aaagacccagattgctattttttgcaccctaataaggctccaaaaaactggaaaattcaggaagccaataaggtgcataagacttctaagaaaaag

SEQ ID NO: 34281 - DNA, 96 bp, Fusarium azukicola
  misc_feature: 149
ataaaaaaagtatttttataaatctaactatataaagaacctaaaaatatcttttttagatttttaaaaaaattgctttatagagaaataactaag

SEQ ID NO: 34282 - DNA, 96 bp, Fusarium azukicola
  misc_feature: 149
ctataaagctattagcttatttattatgaggcggacttatattatattttattccattctttatataatagggtcttagcttatatatatattcct

SEQ ID NO: 34283 - DNA, 96 bp, Fusarium azukicola
  misc_feature: 149
atataactattcctattggatttaaagaccttataattaaggatttccttaaggattataaaaagaaatatcctaatagtagtataaatgagctat

SEQ ID NO: 34284 - DNA, 96 bp, Fusarium azukicola
  misc_feature: 149
aaataaataagaagtccttcttttaaataagtaaggaaaaataatatcataaggaaaagagaaaaataacctatatataataacagctaaggttat

SEQ ID NO: 34285 - DNA, 96 bp, Fusarium azukicola
  misc_feature: 149
aatagtaatataaataagctataaatctatttaaaattaagaaaagccttatatagcctaaaataaagccctagattatagtataaccttctctct

SEQ ID NO: 34286 - DNA, 96 bp, Fusarium azukicola
  misc_feature: 148
ttttactttaccctatactctcttctctcttttactttaccctccacttttattctttattttactttaccctatactctcttctctcttttactt

SEQ ID NO: 34287 - DNA, 96 bp, Fusarium azukicola
  misc_feature: 148
tttccagttttttggagccttattagggtgcaaaaaatagcaatctgggtctttatgacctagcagtttgcaataactgcattttaaggcagtttt

SEQ ID NO: 34288 - DNA, 96 bp, Fusarium azukicola
  misc_feature: 148
gattttaactatttagctatatataagacttaaaaatattttttctaaatttttaaaaaaattccttatataggtatcttaaagtatacagtgtaa

SEQ ID NO: 34289 - DNA, 96 bp, Fusarium azukicola
  misc_feature: 148
ttaaatcctaacttttttatttaactctttctcttatttttaaatcctttcttctcttttctttttaaattaacttcattactacccctaaccttt

SEQ ID NO: 34290 - DNA, 96 bp, Fusarium azukicola
  misc_feature: 148
tgctattttttgcaccctaataaggctccaaaaaactggaaaactcaggaagccaataaggtgcataagacttctaagaaaaaggaatctaaacct

SEQ ID NO: 34291 - DNA, 96 bp, Fusarium azukicola
  misc_feature: 148
tattaaggaataagtcagaagctattataaaatttaaggaatttagaaaagaaatagaaaataatcctaataaaataagaataaaatcagttttct

SEQ ID NO: 34292 - DNA, 96 bp, Fusarium azukicola
  misc_feature: 148
tatatatataaatatataaataaaaatctctctttaagttttaatagggctatacctcctattttaactaataatctagcagctaagcaattagct

SEQ ID NO: 34293 - DNA, 96 bp, Fusarium azukicola
  misc_feature: 148
aaaataatataaataaaaaacctagtaataaggaatataagttcctagataaaatagctattaatatatagggtccttctagaatccctacctata

SEQ ID NO: 34294 - DNA, 96 bp, Fusarium azukicola
  misc_feature: 148
ataatagaggtttaatttttcctctaataataagaacgtataaagctataacccttataagattataactttaaaggaggctattaatgttctata

SEQ ID NO: 34295 - DNA, 96 bp, Fusarium azukicola
  misc_feature: 148
taatacgtggtcaaaacaaacaaagatgctagcaagactcttttatcagtggcaatggtagagaagacaactagacaactatcataatggattata

SEQ ID NO: 34296 - DNA, 96 bp, Fusarium azukicola
  misc_feature: 148
tataaataaataagaagtccttcttttaaataagtaaggaaaaataatatcataaggaaaagagaaaaataacctatatataataacagctaaggt

SEQ ID NO: 34297 - DNA, 96 bp, Fusarium azukicola
  misc_feature: 148
tacctaacctatagctactataggtagctagatattaagggtattattctaattggttaaaaaggttcctacagaccttcatgactgccgtcatta

SEQ ID NO: 34298 - DNA, 96 bp, Fusarium azukicola
  misc_feature: 148
gaggctattaatattctatattatattactaactatagtgatatatccctataaaccatatattatattatagaatttttactctatttttaggta

SEQ ID NO: 34299 - DNA, 96 bp, Fusarium azukicola
  misc_feature: 148
agaatattaatagcctcctttaaagttataatcttataagggttatagctttatatattcttattattagaggaaaaaattaaacctctattatta

SEQ ID NO: 34300 - DNA, 96 bp, Fusarium azukicola
  misc_feature: 148
aaaaatagagtaaaaattctataatataatatatggtttatagggatatatcactatagttagtaatataatatagaacattaatagcctccttta

SEQ ID NO: 34301 - DNA, 96 bp, Fusarium azukicola
  misc_feature: 148
ataaccctcttatctataccctacccatatagtctaacccgatccatgtaagaaaacgctatttatactatctcatactgtacttaactagccgtc

SEQ ID NO: 34302 - DNA, 96 bp, Fusarium azukicola
  misc_feature: 148
cttctaagaaaaaggaatctaaacctaattctaagaaggaagaaagagaaaagaaataagaaaagctatttatagctaattcttcttcttcattat

SEQ ID NO: 34303 - DNA, 96 bp, Fusarium azukicola
  misc_feature: 148
aagacccagattgctattttttgcaccctaataaggctccaaaaaactggaaaattcaggaagccaataaggtgcataagacttctaagaaaaagg

SEQ ID NO: 34304 - DNA, 96 bp, Fusarium azukicola
  misc_feature: 148
attaatatatagggtccttctagaatccctacctataataaatatatatactttattaccttcctagatagggctactagatatctaaaagtctat

SEQ ID NO: 34305 - DNA, 96 bp, Fusarium azukicola
  misc_feature: 148
aaccaattaaccctaacccttaactctactactacccctaaccctaatttcaaccaattaaccctaacccttaacgtaactactacccctaaccat

SEQ ID NO: 34306 - DNA, 96 bp, Fusarium azukicola
  misc_feature: 148
atatagaatattaatagcctcctttaaagttataatcttataagggttatagctttatatattcttattattagaggaaaaaattaaacctctatt

SEQ ID NO: 34307 - DNA, 96 bp, Fusarium azukicola
  misc_feature: 148
aaggattataaaaagaaatatcctaatagtaatataaataagctataaatctatttaaaattaagaaaagccttatatagcctaaaataaagccct

SEQ ID NO: 34308 - DNA, 96 bp, Fusarium azukicola
  misc_feature: 147
atatcttttttataagcaaaatatataaataaaataataaggaaatataataaataagaaataggaacttctaaagtacctattaaatttatagaa

SEQ ID NO: 34309 - DNA, 96 bp, Fusarium azukicola
  misc_feature: 147
gtaaaagagagaagagagtatagggtaaagtaaaataaagaataaaagtagagggtaaagtaaaataataaagaaagtatagggtaaagaaaataa

SEQ ID NO: 34310 - DNA, 96 bp, Fusarium azukicola
  misc_feature: 147
ttattatatttccttattattttatttatatattttgcttatgaaaaagatatactcttattctctctatttatagttatatttattcctaaaaag

SEQ ID NO: 34311 - DNA, 96 bp, Fusarium azukicola
  misc_feature: 147
tacatattatattatagaatttttactctatttttaggtatatttacctaacctatagctactataggtagctagatattaagggtattattctaa

SEQ ID NO: 34312 - DNA, 96 bp, Fusarium azukicola
  misc_feature: 147
aaaatagagtaaaaattctataatataatatatggtttatagggatatatcactatagttagtaatataatatagaacattaatagcctcctttaa

SEQ ID NO: 34313 - DNA, 96 bp, Fusarium azukicola
  misc_feature: 147
ttaaaaactgcgaaaactataaactaggaaaattaactaaaaataatataaataaaaaacctagtaataaggaatataagttcctagataaaatag

SEQ ID NO: 34314 - DNA, 96 bp, Fusarium azukicola
  misc_feature: 147
atatttagttagatctataagattactttttttaagtttctagctattttatagcagtttttagaaacttaggttttagcgatttttagttataca

SEQ ID NO: 34315 - DNA, 96 bp, Fusarium azukicola
  misc_feature: 147
atgaatctaagagactagaaaaaatagattctaatgagatatatttttctaagacttctaagccttagaaaaagaagaaaactgccttaaaatgca

SEQ ID NO: 34316 - DNA, 96 bp, Fusarium azukicola
  misc_feature: 147
tgatatctataatgttgacgagactggctttatgatgggcatgattgcaagcggaatggtcgtcacgggcacagaaaggcgtgaaaagccaaaagc

SEQ ID NO: 34317 - DNA, 96 bp, Fusarium azukicola
  misc_feature: 147
tctagaatccctacctataataaatatatatactttattaccttcctagatagggctactagatatctgaaagcctatctattaaggaataagtca

SEQ ID NO: 34318 - DNA, 96 bp, Fusarium azukicola
  misc_feature: 147
tgaatctaagagactagaaaaaatagattctaatgagatatatttttctaagacttctaagccttagaaaaagaagaaaactgccttaaaatgcag

SEQ ID NO: 34319 - DNA, 96 bp, Fusarium azukicola
  misc_feature: 147
tatctaaaagcctatctattaaggaataagtcagaagctattataaaattcaaggaatttagaaaagaaatagaaaataatcctaataaaataaga

SEQ ID NO: 34320 - DNA, 96 bp, Fusarium azukicola
  misc_feature: 147
tctcttagaagctagatattatctctttattacttttcttcctagttatctaggaaatcaactatttataacctagtcacactgacaggttatgag

SEQ ID NO: 34321 - DNA, 96 bp, Fusarium azukicola
  misc_feature: 147
aggttaagaaaggagagaagtaaggaaggttaagaaaggagagaagtaaggaaggttaagaaaggagagaagtaaggaagggtaagaaaggagaga

SEQ ID NO: 34322 - DNA, 96 bp, Fusarium azukicola
  misc_feature: 147
tattattctaattggttaaaaaggttcctacagaccttcatgactgccgtcatcaatgcatcaaagtataataactgccgattggctaaaaaagag

SEQ ID NO: 34323 - DNA, 96 bp, Fusarium azukicola
  misc_feature: 147
tatagtaaaggttaggggtagtaatgaagttaatttaaaaagaaaagagaagaaaggatttaaaaataagagaaagagttaaataaaaaagttagg

SEQ ID NO: 34324 - DNA, 96 bp, Fusarium azukicola
  misc_feature: 147
tatacttcttccctagaccttagaggctaaccccttccttaccctagaggttagctttactttctaactcttctctcttagataatagtaattaac

SEQ ID NO: 34325 - DNA, 96 bp, Fusarium azukicola
  misc_feature: 147
attaatagcctcctttaaagttataatcttataagggttatagctttatatattcttattattagaggaaaaaattaaacctctattattattata

SEQ ID NO: 34326 - DNA, 96 bp, Fusarium azukicola
  misc_feature: 147
aactctactactacccctaaccctaatttcaaccaattaaccctaacccttaacgtaactactacccctaaccataatttcaaccaattaacccta

SEQ ID NO: 34327 - DNA, 96 bp, Fusarium azukicola
  misc_feature: 147
taagggaggctattaaagagttaatttctcttaattatatatataaatatataaataaaaatctctctttaagttttaatagggctatacctccta

SEQ ID NO: 34328 - DNA, 96 bp, Fusarium azukicola
  misc_feature: 147
tagctataaatagcttttcttatttcttttctctttcttccttcttagaattaggtttagattcctttttcttagaagtcttatgcaccttattgg

SEQ ID NO: 34329 - DNA, 96 bp, Fusarium azukicola
  misc_feature: 147
aataagaagtccttcttttaaataagtaaggaaaaataatatcataaggaaaagagaaaaataacctatatataataatagctaaggttatttcta

SEQ ID NO: 34330 - DNA, 96 bp, Fusarium azukicola
  misc_feature: 147
taatattatttttccttatttatttaaaagaaggacttcttatttatttataatagaagttatattataaagagaagattaacttattaagttaat

SEQ ID NO: 34331 - DNA, 96 bp, Fusarium azukicola
  misc_feature: 147
taatagtaatataaataagctataaatctatttaaaattaagaaaagccttatatagcctaaaataaagccctagattatagtataaccttctctc

SEQ ID NO: 34332 - DNA, 96 bp, Fusarium azukicola
  misc_feature: 147
agctataataattttcttagatttttaaaaagtaattatatagctagtatataaaaaacctatttatactgtgtaattaactatttcactataaac

SEQ ID NO: 34333 - DNA, 96 bp, Fusarium azukicola
  misc_feature: 147
gttgtctagttgtcttctctaccattgccactgataaaagagtcttgctagcatctttgtttgttttgaccacgtattatatcactgtttactttc

SEQ ID NO: 34334 - DNA, 96 bp, Fusarium azukicola
  misc_feature: 147
gtaatctttaagttcttatttataaagagagctttattaaaagggatagtatagaagcctaaattatttaataatttagagagaaggttatactat

SEQ ID NO: 34335 - DNA, 96 bp, Fusarium azukicola
  misc_feature: 147
gtaatatatccctataaaccacatattatattatagaatttttactctatttttaggtatatttacctaacctatagctactataggtagctagat

SEQ ID NO: 34336 - DNA, 96 bp, Fusarium azukicola
  misc_feature: 147
cttaacgtaactactacccctaaccctaatttcaaccaattaaccctaacccttaacgtaactactacccctaaccataatttcaaccaattaacc

SEQ ID NO: 34337 - DNA, 96 bp, Fusarium azukicola
  misc_feature: 147
ctatttattattattattattatataatattgccttttcattattataagggctttctttaaagtaaggaatctcattaaaagaggggttatttcc

SEQ ID NO: 34338 - DNA, 96 bp, Fusarium azukicola
  misc_feature: 147
gctagttaaaaagactagttttttcctttatatttaaaataggaagatctaagttatctcttagtctatagttattcttattagaaataaccttag

SEQ ID NO: 34339 - DNA, 96 bp, Fusarium azukicola
  misc_feature: 147
gctaaatagttaaaatcgttttttttaagtttctagctattttatagcgatttttagaaacttagggtttagctgtttttagttatatagtatgct

SEQ ID NO: 34340 - DNA, 96 bp, Fusarium azukicola
  misc_feature: 147
agagagagagggagaggggagaggagaggataaggagtgaaaagagagagagggagaggggagaggagaggataaggagagaaaagagagagaggg

SEQ ID NO: 34341 - DNA, 96 bp, Fusarium azukicola
  misc_feature: 147
agagaaggaaggagaaagaggaaggggagttaaaagtgtgtgaagttaggagagttaaggggaggggaagtagttcaagtaatggttagggggggg

SEQ ID NO: 34342 - DNA, 96 bp, Fusarium azukicola
  misc_feature: 147
agctataacccttataagattataactttaaaggaggctattaatattctatattatattactaactatagtgatatatccctataaactatatat

SEQ ID NO: 34343 - DNA, 96 bp, Fusarium azukicola
  misc_feature: 147
aaagctataacccttataagattataactttaaaggaggctattaatattctatattatattactaactatagtgatatatccctataaactatat

SEQ ID NO: 34344 - DNA, 96 bp, Fusarium azukicola
  misc_feature: 147
aataatagaggtttaatttttcctctaataataagaacgtataaagctataacccttataagattataactttaaaggaggctattaatgttctat

SEQ ID NO: 34345 - DNA, 96 bp, Fusarium azukicola
  misc_feature: 147
atactgtatactttaagatacctatataaggaatttttttaaaaatttagaaaaaatatttttaagtcttatatatagctaaatagttaaaatcgt

SEQ ID NO: 34346 - DNA, 96 bp, Fusarium azukicola
  misc_feature: 147
atacgtggtcaaaacaaacaaagatgctagcaagactcttttatcagtggcaatggtagagaagacaactagacaactatcataatggattatact

SEQ ID NO: 34347 - DNA, 96 bp, Fusarium azukicola
  misc_feature: 147
agaataatacccttaatatctagctacctatagtagctataggttaggtaaatatacctaaaaatagagtaaaaattctataatataatatgtagt

SEQ ID NO: 34348 - DNA, 96 bp, Fusarium azukicola
  misc_feature: 147
aatagaggtttaatttttcctctaataataagaacgtataaagctataacccttataagattataactttaaaggaggctattaatgttctatatt

SEQ ID NO: 34349 - DNA, 96 bp, Fusarium azukicola
  misc_feature: 146
ttttcttatccttttatactctcttcttatacccttatacacttttcttctttattttctttaccctatactttctttattattttactttaccct

SEQ ID NO: 34350 - DNA, 96 bp, Fusarium azukicola
  misc_feature: 146
gaaaactgccttaaaatgcagttattgcaaactgctaggtcataaagacccagattgctattttttgcaccctaataaggctccaaaaaactggaa

SEQ ID NO: 34351 - DNA, 96 bp, Fusarium azukicola
  misc_feature: 146
ttatacttcttccctagaccttagaggctaaccccttccttaccctagaggttagctttactttctaactcttctctcttagataatagtaattaa

SEQ ID NO: 34352 - DNA, 96 bp, Fusarium azukicola
  misc_feature: 146
ttataaataaataagaagtccttcttttaaataagtaaggaaaaataatatcataaggaaaagagaaaaataacctatatataataatagctaagg

SEQ ID NO: 34353 - DNA, 96 bp, Fusarium azukicola
  misc_feature: 146
ttagtagctattttatctaggaacttatattccttattactaggttttttatttatattatttttagttaattttcctagtttatagttttcgcag

SEQ ID NO: 34354 - DNA, 96 bp, Fusarium azukicola
  misc_feature: 146
ctattttttgcaccctaataaggctccaaaaaactggaaaattcaggaagccaataaggtgcataagacttctaagaaaaaggaatctaaacctaa

SEQ ID NO: 34355 - DNA, 96 bp, Fusarium azukicola
  misc_feature: 146
ttaaaatttgtactagtttacactaaatagaaaagaattctttaaaaattcaaattaaggtaaaaataacttaaaattttagattaggttaattaa

SEQ ID NO: 34356 - DNA, 96 bp, Fusarium azukicola
  misc_feature: 146
ttaatagcctcctttaaagttataatcttataagggttatagctttatatattcttattattagaggaaaaaattaaacctctattattattatat

SEQ ID NO: 34357 - DNA, 96 bp, Fusarium azukicola
  misc_feature: 146
tgcaccctaataaagctccaaaaaactggaaaactcaggaagccaataaggtgcataagacttctaagaaaaaggaatctaaacctaattctaaga

SEQ ID NO: 34358 - DNA, 96 bp, Fusarium azukicola
  misc_feature: 146
taaacagtgatataatacgtggtcaaaacaaacaaagatgctagcaagactcttttatcagtggcaatggtagagaagacaactagacaactatca

SEQ ID NO: 34359 - DNA, 96 bp, Fusarium azukicola
  misc_feature: 146
tctataaagctattagcttatttattatgaggcggacttatattatattttattccattctttatataatagggtcttagcttatatatatattcc

SEQ ID NO: 34360 - DNA, 96 bp, Fusarium azukicola
  misc_feature: 146
tccttcttttaaataagtaaggaaaaataatatcataaggaaaagagaaaaataacctatatataataacagctaaggttatttctaataagaata

SEQ ID NO: 34361 - DNA, 96 bp, Fusarium azukicola
  misc_feature: 146
tatagaatattaatagcctcctttaaagttataatcttataagggttatagctttatatattcttattattagaggaaaaaattaaacctctatta

SEQ ID NO: 34362 - DNA, 96 bp, Fusarium azukicola
  misc_feature: 146
tagtaatctttaagttcttatttataaagagagctttattaaaagggatagtatagaagcctaaattatttaataatttagagagaaggttatact

SEQ ID NO: 34363 - DNA, 96 bp, Fusarium azukicola
  misc_feature: 146
taaaaataatataaataaaaaacctagtaataaggaatataagttcctagataaaatagctattaatatatagggtccttctagaatccctaccta

SEQ ID NO: 34364 - DNA, 96 bp, Fusarium azukicola
  misc_feature: 146
aataagaagtccttcttttaaataagtaaggaaaaataatatcataaggaaaagagaaaaataacctatatataataacagctaaggttatttcta

SEQ ID NO: 34365 - DNA, 96 bp, Fusarium azukicola
  misc_feature: 146
taataggttataagatatacttaaacttttaatcttagttattttaagcttaggtttattttcttagaattattttaagtgttttttaaataaggt

SEQ ID NO: 34366 - DNA, 96 bp, Fusarium azukicola
  misc_feature: 146
attcttattagaaataaccttagctattattatatataggttatttttctcttttccttataatattatttttccttatttatttaaaagaaggac

SEQ ID NO: 34367 - DNA, 96 bp, Fusarium azukicola
  misc_feature: 146
aacctctagaatctcctagaatctctatagaagcccgaagggcttctatctatagctgacccaaagcctgaccctaaccctgacctaatgtatgac

SEQ ID NO: 34368 - DNA, 96 bp, Fusarium azukicola
  misc_feature: 146
gtaaacagtgatataatacgtggtcaaaacaaacaaagatgctagcaagactcttttatcagtggcaatggtagagaagacaactagacaactatc

SEQ ID NO: 34369 - DNA, 96 bp, Fusarium azukicola
  misc_feature: 146
aatatctaaggaaatattatctctaacttctagaggggatttattatttaaagccgaatgcgggcttctattatatatatatacggctgcttcccc

SEQ ID NO: 34370 - DNA, 96 bp, Fusarium azukicola
  misc_feature: 146
gctattaatattctatattatattactaactatagtgatatatccctataaaccatatattatattatagaatttttactctatttttaggtatat

SEQ ID NO: 34371 - DNA, 96 bp, Fusarium azukicola
  misc_feature: 146
ctgagttttccagttttttggagccttattagggtgcaaaaaatagcaatctgggtctttatgacctagcagtttgcaataactgcattttaaggc

SEQ ID NO: 34372 - DNA, 96 bp, Fusarium azukicola
  misc_feature: 146
gattctagaaggaccctatatattaatagctattttatctaggaacttatattccttattactaggttttttatttatattatttttagttaattt

SEQ ID NO: 34373 - DNA, 96 bp, Fusarium azukicola
  misc_feature: 146
gataatacaaaggaatatatatataagctaagaccctattatataaagaatggaataaaatataatataagtccgcctcataataaataagctaat

SEQ ID NO: 34374 - DNA, 96 bp, Fusarium azukicola
  misc_feature: 146
gagttttccagttttttggagccttattagggtgcaaaaaatagcaatctgggtctttatgacctagcagtttgcaataactgcattttaaggcag

SEQ ID NO: 34375 - DNA, 96 bp, Fusarium azukicola
  misc_feature: 146
gacagacaagcgaacgagacacttatattttcaccttaaaaggtattttttaaaaaagctataaaagtcgaaattaagcttaaaatagctaaaatt

SEQ ID NO: 34376 - DNA, 96 bp, Fusarium azukicola
  misc_feature: 146
ctcttattctctctatttatagttatatttattcctaaaaagtctttaacttctcctaaggattagattactatatccttagatagaatatttact

SEQ ID NO: 34377 - DNA, 96 bp, Fusarium azukicola
  misc_feature: 146
cgctttataatgatatataatctattactaaagccttataaatggcttagttatagcaaaaaccggttttgatggatagaatgcaacgctgaaggg

SEQ ID NO: 34378 - DNA, 96 bp, Fusarium azukicola
  misc_feature: 146
agtatagggtaaagtaaaagagagaagagagtatagggtaaagtaaaagagagaagagagtatagggtaaagtaaaagagagaagagaggataggg

SEQ ID NO: 34379 - DNA, 96 bp, Fusarium azukicola
  misc_feature: 146
attttactttaccctatactctcttctctcttttactttaccctatactctcttctctcttttactttaccctccacttttattctttattttact

SEQ ID NO: 34380 - DNA, 96 bp, Fusarium azukicola
  misc_feature: 146
aagagtatttctataaatctaactcttaataaagtctaaaaatgatttttttagatttttaaaaaattctatttatagtgaaatagttaattacat

SEQ ID NO: 34381 - DNA, 96 bp, Fusarium azukicola
  misc_feature: 146
agtaaacagtgatataatacgtggtcaaaacaaacaaagatgctagcaagactcttttatcagtggcaatggtagagaagacaactagacaactat

SEQ ID NO: 34382 - DNA, 96 bp, Fusarium azukicola
  misc_feature: 146
aaaataatacccttaatatctagctacctatagtagctataggttaggtaaatatacctaaaaatagagtaaaaattctataatataatatatggt

SEQ ID NO: 34383 - DNA, 96 bp, Fusarium azukicola
  misc_feature: 145
tttattcctaaaaagtctttaacttctcctaaggattagattactatatccttagatagaatatttactattctttctatatcttctttataaggg

SEQ ID NO: 34384 - DNA, 96 bp, Fusarium azukicola
  misc_feature: 145
attttaactatttagctatatataagacttaaaaatattttttctaaatttttaaaaaaattccttatataggtatcttaaagtatacagtgtaaa

SEQ ID NO: 34385 - DNA, 96 bp, Fusarium azukicola
  misc_feature: 145
ttgctattttttgcaccctaataaggctccaaaaaactggaaaattcaggaagccaataaggtgcataagacttctaagaaaaaggaatctaaacc

SEQ ID NO: 34386 - DNA, 96 bp, Fusarium azukicola
  misc_feature: 145
ctctctcttagctatatctctttttcctagttatacctctctttcttagttatattctcttactcttatatctcttttacctctctttcttaagaa

SEQ ID NO: 34387 - DNA, 96 bp, Fusarium azukicola
  misc_feature: 145
cctaataaagctccaaaaaactggaaaactcaggaagccaataaggtgcataagacttctaagaaaaaggaatctaaacctaattctaagaaggaa

SEQ ID NO: 34388 - DNA, 96 bp, Fusarium azukicola
  misc_feature: 145
ttatttctctagagatatagtagaaaaagggcaaataaagctttattatataaaaagtaaagataatatagctgatttctttactaaaagcttata

SEQ ID NO: 34389 - DNA, 96 bp, Fusarium azukicola
  misc_feature: 145
ataactattcctattggatttaaagaccttataattaaggatttccttaaggattataaaaagaaatatcctaatagtagtataaataagctataa

SEQ ID NO: 34390 - DNA, 96 bp, Fusarium azukicola
  misc_feature: 145
ttaggtcttcctcggctttaggagatgacgaagaagaagaattagctataaatagcttttcttatttcttttctctttcttccttcttagaattag

SEQ ID NO: 34391 - DNA, 96 bp, Fusarium azukicola
  misc_feature: 145
ttaagggtattattctaattggttaaaaaggttcctacagaccttcatgactgccgtcattaatgcatcaaagtataataactgccgattggctaa

SEQ ID NO: 34392 - DNA, 96 bp, Fusarium azukicola
  misc_feature: 145
ttaagtagttatagtaaaggttagggttaagtggttaagttaagggttagggttaagtagttatagtaaaggttagggttaagtggttaagttaag

SEQ ID NO: 34393 - DNA, 96 bp, Fusarium azukicola
  misc_feature: 145
aagtccttcttttaaataagtaaggaaaaataatatcataaggaaaagagaaaaataacctatatataataacagctaaggttatttctaataaga

SEQ ID NO: 34394 - DNA, 96 bp, Fusarium azukicola
  misc_feature: 145
tattcttattagaaataaccttagctattattatatataggttatttttctcttttccttataatattatttttccttatttatttaaaagaagga

SEQ ID NO: 34395 - DNA, 96 bp, Fusarium azukicola
  misc_feature: 145
tattaatagcctcctttaaagttataatcttataagggttatagctttatatattcttattattagaggaaaaaattaaacctctattattattat

SEQ ID NO: 34396 - DNA, 96 bp, Fusarium azukicola
  misc_feature: 145
ctaataataagaacgtataaagctataacccttataagattataactttaaaggaggctattaatattctatattatattaccaactatagtgata

SEQ ID NO: 34397 - DNA, 96 bp, Fusarium azukicola
  misc_feature: 145
attataaaattcaaggaatttagaaaagaaatagaaaataatcctaataaaataagaataaaatcagttttcttagataatataaaggaatatata

SEQ ID NO: 34398 - DNA, 96 bp, Fusarium azukicola
  misc_feature: 145
tatactctcttctctcttttactttaccctatactctcttctctcttttactttaccctccacttttattctttattttactttaccctatactct

SEQ ID NO: 34399 - DNA, 96 bp, Fusarium azukicola
  misc_feature: 145
gctattttttgcaccctaataaggctccaaaaaactggaaaattcaggaagccaataaggtgcataagacttctaagaaaaaggaatctaaaccta

SEQ ID NO: 34400 - DNA, 96 bp, Fusarium azukicola
  misc_feature: 145
taagattactttttttaagtttctagctattttatagcagtttttagaaacttaggttttagcgatttttagttatatagtatgctgtctcgttcg

SEQ ID NO: 34401 - DNA, 96 bp, Fusarium azukicola
  misc_feature: 145
taacttcccaggttttttgctttattaattcctctatttcagctgtcatagatagatgccaattataagataaagcacaacttatggcttcttttt

SEQ ID NO: 34402 - DNA, 96 bp, Fusarium azukicola
  misc_feature: 145
ccacatattatattatagaatttttactctatttttaggtatatttacctaacctatagctactataggtagctagatattaagggtattatttta

SEQ ID NO: 34403 - DNA, 96 bp, Fusarium azukicola
  misc_feature: 145
accctaacccttaactctactactacccctaaccctaatttcaaccaattaaccctaacccttaacgtaactactacccctaaccataatttcaac

SEQ ID NO: 34404 - DNA, 96 bp, Fusarium azukicola
  misc_feature: 145
cctaacctttactataactacttaaccctaacccttaacttaaccacttaaccctaacctttactataactacttaaccctaacccttaacttaac

SEQ ID NO: 34405 - DNA, 96 bp, Fusarium azukicola
  misc_feature: 145
atgatatctataatgttgacgagactggctttatgatgggcatgattgcaagcggaatggtcgtcacgggcacagaaaggcgtgaaaagccaaaag

SEQ ID NO: 34406 - DNA, 96 bp, Fusarium azukicola
  misc_feature: 145
aagagagagagggagaggggagaggagaggataaggagtgaaaagagagagagggagaggggagaggagaggataaggagagaaaagagagagagg

SEQ ID NO: 34407 - DNA, 96 bp, Fusarium azukicola
  misc_feature: 145
aggtaaataaacctaatttttctactaataaagataatataactaattttatatataatataggtgctactaggtatattatatatagaaaagaat

SEQ ID NO: 34408 - DNA, 96 bp, Fusarium azukicola
  misc_feature: 145
attctataatataatatgtggtttatagggatatatcactatagttggtaatataatatagaatattaatagcctcctttaaagttataatcttat

SEQ ID NO: 34409 - DNA, 96 bp, Fusarium azukicola
  misc_feature: 145
atgtggtttatagggatatatcactatagttggtaatataatatagaatattaatagcctcctttaaagttataatcttataagggttatagcttt

SEQ ID NO: 34410 - DNA, 96 bp, Fusarium azukicola
  misc_feature: 145
aggctattaatgttctatattatattaccaactatagtgatatatccctataaaccacatattatattatagaatttttactctatttttaggtat

SEQ ID NO: 34411 - DNA, 96 bp, Fusarium azukicola
  misc_feature: 145
agtagcggtttcctttacctctcttagtacttattaatccctaatcgccttaccctagctaataaccctcttatctataccctacccatatagtct

SEQ ID NO: 34412 - DNA, 96 bp, Fusarium azukicola
  misc_feature: 145
aaaagaaatatcctaatagtaatataaataagctataaatctatttaaaattaagaaaagccttatatagcctaaaataaagccctagattatagt

SEQ ID NO: 34413 - DNA, 96 bp, Fusarium azukicola
  misc_feature: 144
tttgtagaaaggataaataggactatattagaaaaggttagagctttattatttacttctaacctacctaaatacctttggggagaggctgtggga

SEQ ID NO: 34414 - DNA, 96 bp, Fusarium azukicola
  misc_feature: 144
tttcttatccttttatactctcttcttatacccttatacacttttcttctttattttctttaccctatactttctttattattttactttaccctc

SEQ ID NO: 34415 - DNA, 96 bp, Fusarium azukicola
  misc_feature: 144
attcttattattagaggaaaaattaaacctctattattattatatatatatcttagtaaaaacccctttattatagacctaatattataagggaaa

SEQ ID NO: 34416 - DNA, 96 bp, Fusarium azukicola
  misc_feature: 144
attatatatatcttagtaaaaacccctttattatagacctgatattataagggaaaatctaagattatatagggaaaagtattaaaatataataaa

SEQ ID NO: 34417 - DNA, 96 bp, Fusarium azukicola
  misc_feature: 144
ttgactctttaatagcctcccttagggctatatattctgcttcacaactagataaagcaacgcttttttgcttagttgttttccagcttattagat

SEQ ID NO: 34418 - DNA, 96 bp, Fusarium azukicola
  misc_feature: 144
tctaaacctaattctaagaaggaagaaagagaaaagaaataagaaaagctatttatagctaattcttcttcttcgtcatctcctaaagccgaggaa

SEQ ID NO: 34419 - DNA, 96 bp, Fusarium azukicola
  misc_feature: 144
taacttctattataaataaataagaagtccttcttttaaataaataaggaaaaataatattataaggaaaagagaaaaataacctatatataataa

SEQ ID NO: 34420 - DNA, 96 bp, Fusarium azukicola
  misc_feature: 144
aaataatataaataaaaaacctagtaataaggaatataagttcctagataaaatagctattaatatatagggtccttctagaatccctacctataa

SEQ ID NO: 34421 - DNA, 96 bp, Fusarium azukicola
  misc_feature: 144
gatatctataatgttgacgagactggctttatgatgggcatgattgcaagcggaatggtcgtcacgggcacagaaaggcgtgaaaagccaaaagca

SEQ ID NO: 34422 - DNA, 96 bp, Fusarium azukicola
  misc_feature: 144
aagtcttatgcaccttattggcttcctgagttttccagttttttggagccttattagggtgcaaaaaatagcaatctgggtctttatgacctagca

SEQ ID NO: 34423 - DNA, 96 bp, Fusarium azukicola
  misc_feature: 144
ctaatcgccttaccctagctaataaccctcttatctataccctacccatatagtctaacccgatccatgtaagaaaacgctatttatactatctca

SEQ ID NO: 34424 - DNA, 96 bp, Fusarium azukicola
  misc_feature: 144
atggattatactccctacctgttccatcatcatcatcatgggtcgtcgtgcgcttacagcagaggaaaaggcaaacaaggccaaccgtgagagaga

SEQ ID NO: 34425 - DNA, 96 bp, Fusarium azukicola
  misc_feature: 144
agatgacggcagtcataaaggtctataggaacctttttaactaattagaataatacccttaatatctagctacctatagtagctataggttaggga

SEQ ID NO: 34426 - DNA, 96 bp, Fusarium azukicola
  misc_feature: 144
agttgtcttctctaccattgccactgataaaagagtcttgctagcatctttgtttgttttgaccacgtattatatcactgtttactttcacagata

SEQ ID NO: 34427 - DNA, 96 bp, Fusarium azukicola
  misc_feature: 144
tataacttctattataaataaataagaagtccttcttttaaataaataaggaaaaataatattataaggaaaagagaaaaataacctatatataat

SEQ ID NO: 34428 - DNA, 96 bp, Fusarium azukicola
  misc_feature: 144
aagtaaacagtgatataatacgtggtcaaaacaaacaaagatgctagcaagactcttttatcagtggcaatggtagagaagacaactagacaacta

SEQ ID NO: 34429 - DNA, 96 bp, Fusarium azukicola
  misc_feature: 144
gtacttattaatccctaatcgccttaccctagctaataaccctcttatctataccctacccatatagtctaacccgatccatgtaagaaaacgcta

SEQ ID NO: 34430 - DNA, 96 bp, Fusarium azukicola
  misc_feature: 144
tagattcctttttcttagaagtcttatgcaccttattggcttcctgagttttccagttttttggagccttattagggtgcaaaaaatagcaatctg

SEQ ID NO: 34431 - DNA, 96 bp, Fusarium azukicola
  misc_feature: 144
taacttaagaagtctaattaaatatataaaaataaaagatcctctctttaaatatactagtgaggacctatattaagttaaaaactgcgaaaactg

SEQ ID NO: 34432 - DNA, 96 bp, Fusarium azukicola
  misc_feature: 144
aaatgcagttattgcaaactgctaggtcataaagacccagattgctattttttgcaccctaataaggctccaaaaaactggaaaactcaggaagcc

SEQ ID NO: 34433 - DNA, 96 bp, Fusarium azukicola
  misc_feature: 144
ctaaagccttataaatggcttagttatagcaaaaaccggttttgatggatagaatgcaacgctgaaggttttaggaaccttcctagccaatcggcc

SEQ ID NO: 34434 - DNA, 96 bp, Fusarium azukicola
  misc_feature: 144
gagatgacgaagaagaagaattagctataaatagcttttcttatttcttttctctttcttccttcttagaattaggtttagattcctttttcttag

SEQ ID NO: 34435 - DNA, 96 bp, Fusarium azukicola
  misc_feature: 144
ctttaggagataatgaagaagaagaattagctataaatagcttttcttatttcttttctctttcttccttcttagaattaggtttagattcctttt

SEQ ID NO: 34436 - DNA, 96 bp, Fusarium azukicola
  misc_feature: 144
cataagctatattaggtctagtttttatagctagaaatattaaagaacctatttccttttggaattactttatatcttctagagaagaaggttctt

SEQ ID NO: 34437 - DNA, 96 bp, Fusarium azukicola
  misc_feature: 144
atacttcttccctagaccttagaggctaaccccttccttaccctagaggttagctttactttctaactcttctctcttagataatagtaattaact

SEQ ID NO: 34438 - DNA, 96 bp, Fusarium azukicola
  misc_feature: 144
ataaataagaagtccttcttttaaataagtaaggaaaaataatatcataaggaaaagagaaaaataacctatatataataatagctaaggttattt

SEQ ID NO: 34439 - DNA, 96 bp, Fusarium azukicola
  misc_feature: 144
ataaataagaagtccttcttttaaataagtaaggaaaaataatatcataaggaaaagagaaaaataacctatatataataacagctaaggttattt

SEQ ID NO: 34440 - DNA, 96 bp, Fusarium azukicola
  misc_feature: 144
aataaccctcttatctataccctacccatatagtctaacccgatccatgtaagaaaacgctatttatactatctcatactgtacttaactagccgt

SEQ ID NO: 34441 - DNA, 96 bp, Fusarium azukicola
  misc_feature: 143
ttttctatatataatatacctagtagcacctatattatatataaaattagttatattatctttattagtagaaaaattaggtttatttaccttatt

SEQ ID NO: 34442 - DNA, 96 bp, Fusarium azukicola
  misc_feature: 143
tttaagggtaaaatagctaagaattattctttttaggtctataactattttattttagcttttattaagctttaaagttttatgttttagtgcaca

SEQ ID NO: 34443 - DNA, 96 bp, Fusarium azukicola
  misc_feature: 143
ccatccatgtatgtaccgcgtcgataagctgagagggaaaagcaaaatgtgcaggcatatgaaactctatatctgtgaaagtaaacagtgatataa

SEQ ID NO: 34444 - DNA, 96 bp, Fusarium azukicola
  misc_feature: 143
ttaagaaaggagagaagtaaggaaggttaagaaaggagagaagtaaggaaggttaagaaaggagagaagtaaggaaggttaagaaaggagagaagg

SEQ ID NO: 34445 - DNA, 96 bp, Fusarium azukicola
  misc_feature: 143
gctataataattttcttagatttttaaaaagtaattatatagctagtatataaaaaacctatttatactgtgtaattaactatttcactataaaca

SEQ ID NO: 34446 - DNA, 96 bp, Fusarium azukicola
  misc_feature: 143
ctagcatctttgtttgttttgaccacgtattatatcactgtttactttcacagatatagagtttcatatgcctgcacattttgcttttccctctca

SEQ ID NO: 34447 - DNA, 96 bp, Fusarium azukicola
  misc_feature: 143
tcttagataatataaaggaatatatatataagctaagaccctattatataaagaatggaataaaatataatataagtccgccttataataaataag

SEQ ID NO: 34448 - DNA, 96 bp, Fusarium azukicola
  misc_feature: 143
tctagaatctcctagaatctctatagaagcccgaagggcttctatctatagctgacccaaagcctgaccctaaccctgacctaatgtatgaccctg

SEQ ID NO: 34449 - DNA, 96 bp, Fusarium azukicola
  misc_feature: 143
tctaataataagaacgtataaagctataacccttataagattataactttaaaggaggctattaatattctatattatattaccaactatagtgat

SEQ ID NO: 34450 - DNA, 96 bp, Fusarium azukicola
  misc_feature: 143
tcataatggattatactccctacctgttccatcatcatcatcatgggtcgtcgtgcgcttacagcagaggaaaaggcaaacaaggccaaccgtgag

SEQ ID NO: 34451 - DNA, 96 bp, Fusarium azukicola
  misc_feature: 143
ataaaataagaataaaattagttttcttagataatataaaggaatatatatataagctaagaccctattatataaagaatggaataaaatataata

SEQ ID NO: 34452 - DNA, 96 bp, Fusarium azukicola
  misc_feature: 143
ggctattaatattctatattatattactaactatagtgatatatccctataaaccatatattatattatagaatttttactctatttttaggtata

SEQ ID NO: 34453 - DNA, 96 bp, Fusarium azukicola
  misc_feature: 143
tagtataaatagcgttttcttacatggatcgggttagactatatgggtagggtatagataagagggttattagctagggtaaggcgattagggatt

SEQ ID NO: 34454 - DNA, 96 bp, Fusarium azukicola
  misc_feature: 143
attaggtcttcctcggctttaggagatgacgaagaagaagaattagctataaatagcttttcttatttcttttctctttcttccttcttagaatta

SEQ ID NO: 34455 - DNA, 96 bp, Fusarium azukicola
  misc_feature: 143
ggaataactactatttacaacaatatgatgttaagaatgcatttgccaatgcagatatagatacagatatatatataactattcctattggattta

SEQ ID NO: 34456 - DNA, 96 bp, Fusarium azukicola
  misc_feature: 143
acttaaccctaacccttaacttaaccacttaaccctaacctttactataactacttaaccctaacccttaacttaaccacttaaccctaaccttta

SEQ ID NO: 34457 - DNA, 96 bp, Fusarium azukicola
  misc_feature: 143
cttaccctagctaataaccctcttatctataccctacccatatagtctaacccgatccatgtaagaaaacgctatttatactatctcatactgtac

SEQ ID NO: 34458 - DNA, 96 bp, Fusarium azukicola
  misc_feature: 143
gtaaaggttaggggtagtaatgaagttaatttaaaaagaaaagagaagaaaggatttaaaaataagagaaagagttaaataaaaaagttaggattt

SEQ ID NO: 34459 - DNA, 96 bp, Fusarium azukicola
  misc_feature: 143
ggtattattctaattggttaaaaaggttcctacagacctttatgactgccgtcatctatgcatcaaagtataataactgccgattggctaagaaag

SEQ ID NO: 34460 - DNA, 96 bp, Fusarium azukicola
  misc_feature: 143
ggtaaataaacctaatttttctactaataaagataatataactaattttatatataatataggtgctactaggtatattatatatagaaaagaatt

SEQ ID NO: 34461 - DNA, 96 bp, Fusarium azukicola
  misc_feature: 143
ctttaccctatactctcttctctcttttactttaccctatactctcttctctcttttactttaccctccacttttattctttattttactttaccc

SEQ ID NO: 34462 - DNA, 96 bp, Fusarium azukicola
  misc_feature: 143
gccctaagggaggctattaaagagttaatttctcttaattatatatataaatatataaataaaaatctctctttaagttttaatagggctatacct

SEQ ID NO: 34463 - DNA, 96 bp, Fusarium azukicola
  misc_feature: 143
agttatcttaacttaagaagtctaattaaatatataaaaataaaagatcctctctttaaatatactagtgaggacctatattaagttaaaaactgc

SEQ ID NO: 34464 - DNA, 96 bp, Fusarium azukicola
  misc_feature: 143
atactctcttctctcttttactttaccctccacttttattctttattttactttaccctatactctcttctctcttttactttaccctatactctc

SEQ ID NO: 34465 - DNA, 96 bp, Fusarium azukicola
  misc_feature: 143
aattaatttcctagataactaggaagaaaagtaataaagagataatatctagcttctaagagagacttatagaagatagatagataaaagtgggtc

SEQ ID NO: 34466 - DNA, 96 bp, Fusarium azukicola
  misc_feature: 143
cctagcagtttgcaataactgcattttaaggcagttttcttctttttctaaggcttagaagtcttagaaaaatatatctcattagaatctattttt

SEQ ID NO: 34467 - DNA, 96 bp, Fusarium azukicola
  misc_feature: 143
ccctcttatctataccctacccatatagtctaacccgatccatgtaagaaaacgctatttatactatctcatactgtacttaactagccgtccctt

SEQ ID NO: 34468 - DNA, 96 bp, Fusarium azukicola
  misc_feature: 143
aataaatcccctctagaagttagagataatatttccttagatattaaggaattagataaaataaaaacctttaggtctatagtttattataagaat

SEQ ID NO: 34469 - DNA, 96 bp, Fusarium azukicola
  misc_feature: 143
aaacagtgatataatacgtggtcaaaacaaacaaagatgctagcaagactcttttatcagtggcaatggtagagaagacaactagacaactatcat

SEQ ID NO: 34470 - DNA, 96 bp, Fusarium azukicola
  misc_feature: 143
atataattaactatttcactataaatagaattttttaaaaatctaaaaaaatcatttttagactttattaagagttagatttatagaaatactctt

SEQ ID NO: 34471 - DNA, 96 bp, Fusarium azukicola
  misc_feature: 142
aatcttctctttataatataacttctattataaataaataagaagtccttcttttaaataaataaggaaaaataatattataaggaaaagagaaaa

SEQ ID NO: 34472 - DNA, 96 bp, Fusarium azukicola
  misc_feature: 142
tttctaattttagctattttaagcttaatttcgacttttatagcttttttaaaaaataccttttaaggtgaaaatataagtgtctcgttcgcttgt

SEQ ID NO: 34473 - DNA, 96 bp, Fusarium azukicola
  misc_feature: 142
tttatttctctagagatatagtagaaaaagggcaaataaagctttattatataaaaagtaaagataatatagctgatttctttactaaaagcttat

SEQ ID NO: 34474 - DNA, 96 bp, Fusarium azukicola
  misc_feature: 142
aaccttatattttcgggcccttataaagaagatatagaaagaatagtaaatattctatctaaggatatagtaatctaatccttaggagaagttaaa

SEQ ID NO: 34475 - DNA, 96 bp, Fusarium azukicola
  misc_feature: 142
ctatatataatatacctagtagcacctatattatatataaaattagttatattatctttattagtagaaaaattaggtttatttaccttatttaaa

SEQ ID NO: 34476 - DNA, 96 bp, Fusarium azukicola
  misc_feature: 142
atatatgatatggtatggatatagatgatgttattatttattattataatcgtaataacgaaagaggaagaagaagaagaagaagaagaagaagaa

SEQ ID NO: 34477 - DNA, 96 bp, Fusarium azukicola
  misc_feature: 142
ttctagaatccctacctataataaatatatatactttattaccttcctagatagggctactagatatctaaaagcctatctattaaggaataagtc

SEQ ID NO: 34478 - DNA, 96 bp, Fusarium azukicola
  misc_feature: 142
caaactgctaggtcataaagacccagattgctattttttgcaccctaataaggctccaaaaaactggaaaactcaggaagccaataaggtgcataa

SEQ ID NO: 34479 - DNA, 96 bp, Fusarium azukicola
  misc_feature: 142
atataacttctattataaataaataagaagtccttcttttaaataaataaggaaaaataatattataaggaaaagagaaaaataacctatatataa

SEQ ID NO: 34480 - DNA, 96 bp, Fusarium azukicola
  misc_feature: 142
tataaaaaaagtatttttataaatctaactatataaagaacctaaaaatatcttttttagatttttaaaaaaattgctttatagagaaataactaa

SEQ ID NO: 34481 - DNA, 96 bp, Fusarium azukicola
  misc_feature: 142
ttaaccacttaaccctaacctttactataactacttaaccctaacccttaacttaaccacttaaccctaacctttactataactacttaaccctaa

SEQ ID NO: 34482 - DNA, 96 bp, Fusarium azukicola
  misc_feature: 142
ccctaacctttactataactacttaaccctaacccttaacttaaccacttaaccctaacctttactataactacttaaccctaacccttaacttaa

SEQ ID NO: 34483 - DNA, 96 bp, Fusarium azukicola
  misc_feature: 142
tgagttttccagttttttggagccttattagggtgcaaaaaatagcaatctgggtctttatgacctagcagtttgcaataactgcattttaaggca

SEQ ID NO: 34484 - DNA, 96 bp, Fusarium azukicola
  misc_feature: 142
tcttttactttaccctatactctcttctctcttttactttaccctccacttttattctttattttactttaccctatactctcttctctcttttac

SEQ ID NO: 34485 - DNA, 96 bp, Fusarium azukicola
  misc_feature: 142
tctagttaattactattatctaagagagaagagttagaaagtaaagctaacctctagggtaaggaaggggttagcctctaaggtctagggaagaag

SEQ ID NO: 34486 - DNA, 96 bp, Fusarium azukicola
  misc_feature: 142
atctaaacctaattctaagaaggaagaaagagaaaagaaataagaaaagctatttatagctaattcttcttcttcgtcatctcctaaagccgagga

SEQ ID NO: 34487 - DNA, 96 bp, Fusarium azukicola
  misc_feature: 142
tattcctaaaaagtctttaacttctcctaaggattagattactatatccttagatagaatatttactattctttctatatcttctttataagggcc

SEQ ID NO: 34488 - DNA, 96 bp, Fusarium azukicola
  misc_feature: 142
agagtatttctataaatctaactcttaataaagtctaaaaatgatttttttagatttttaaaaaattctatttatagtgaaatagttaattacata

SEQ ID NO: 34489 - DNA, 96 bp, Fusarium azukicola
  misc_feature: 142
tatgaaactctatatctgtgaaagtaaacagtgatataatacgtggtcaaaacaaacaaagatgctagcaagactcttttatcagtggcaatggta

SEQ ID NO: 34490 - DNA, 96 bp, Fusarium azukicola
  misc_feature: 142
gcagttttcttctttttctaaggcttagaagtcttagaaaaatatatctcattagaatctattttttctagtctcttagattcatctataaggcta

SEQ ID NO: 34491 - DNA, 96 bp, Fusarium azukicola
  misc_feature: 142
tagccctaagggaggctattaaagagttaatttctcttaattatatatataaatatataaataaaaatctctctttaagttttaatagggctatac

SEQ ID NO: 34492 - DNA, 96 bp, Fusarium azukicola
  misc_feature: 142
ggaaaagagaaaaataacctatatataataacagctaaggttatttctaataagaataactatagactaagagataacttagatcttcctattcta

SEQ ID NO: 34493 - DNA, 96 bp, Fusarium azukicola
  misc_feature: 142
ggtaaagtaaaagagagaagagagtatagggtaaagtaaaagagagaagagagtatagggtaaagtaaaagagagaagagagtataggggaaagta

SEQ ID NO: 34494 - DNA, 96 bp, Fusarium azukicola
  misc_feature: 142
taaaggttaggggtagtaatgaagttaatttaaaaagaaaagagaagaaaggatttaaaaataagagaaagagttaaataaaaaagttaggattta

SEQ ID NO: 34495 - DNA, 96 bp, Fusarium azukicola
  misc_feature: 142
taaataagaagtccttcttttaaataagtaaggaaaaataatatcataaggaaaagagaaaaataacctatatataataatagctaaggttatttc

SEQ ID NO: 34496 - DNA, 96 bp, Fusarium azukicola
  misc_feature: 142
gattctgaccgctttaaaggcgcctcaactgagcttattaaggcgttctttatgcttctgatgatgccggcgatccaggttatcaagcaggaaaac

SEQ ID NO: 34497 - DNA, 96 bp, Fusarium azukicola
  misc_feature: 142
ggaggctattaatgttctatattatattaccaactatagtgatatatccctataaaccacatattatattatagaatttttactctatttttaggt

SEQ ID NO: 34498 - DNA, 96 bp, Fusarium azukicola
  misc_feature: 142
agaaccttcttctctagaagatataaagtaattccaaaaggaaataggttctttaatatttctagctataaaaactagacctaatatagcttatgc

SEQ ID NO: 34499 - DNA, 96 bp, Fusarium azukicola
  misc_feature: 142
ccctaagggaggctattaaagagttaatttctcttaattatatatataaatatataaataaaaatctctctttaagttttaatagggctatacctc

SEQ ID NO: 34500 - DNA, 96 bp, Fusarium azukicola
  misc_feature: 142
gaaccttcttctctagaagatataaagtaattccaaaaggaaataggttctttaatatttctagctataaaaactagacctaatatagcttatgct

SEQ ID NO: 34501 - DNA, 96 bp, Fusarium azukicola
  misc_feature: 142
ctaacccttaacttaaccacttaaccctaacctttactataactacttaaccctaacccttaacttaaccacttaaccctaacctttactataact

SEQ ID NO: 34502 - DNA, 96 bp, Fusarium azukicola
  misc_feature: 142
aagggttagggttaagtagttatagtaaaggttagggttaagtggttaagttaagggttagggttaagtagttatagtaaaggttagggttaagtg

SEQ ID NO: 34503 - DNA, 96 bp, Fusarium azukicola
  misc_feature: 142
atagtaaaggttagggttaagtggttaagttaagggttagggttaagtagttatagtaaaggttagggttaagtggttaagttaagggttagggtt

SEQ ID NO: 34504 - DNA, 96 bp, Fusarium azukicola
  misc_feature: 142
aagaaatatcctaatagtaatataaataagctataaatctatttaaaattaagaaaagccttatatagcctaaaataaagccctagattatagtat

SEQ ID NO: 34505 - DNA, 96 bp, Fusarium azukicola
  misc_feature: 142
agaggtttaattttttcctctaataataagaatatataaagctataacccttataagattataactttaaaggaggctattaatattctatattat

SEQ ID NO: 34506 - DNA, 96 bp, Fusarium azukicola
  misc_feature: 142
aagattataactttaaaggaggctattaatattctatattatattactaactatagtgatatatccctataaaccatatattatattatagaattt

SEQ ID NO: 34507 - DNA, 96 bp, Fusarium azukicola
  misc_feature: 141
taagtaaaatatataaataaaataataaggaaatataataaataagaaataggaacttctaaagtacctattaaatttatagaaagactcttaaaa

SEQ ID NO: 34508 - DNA, 96 bp, Fusarium azukicola
  misc_feature: 141
ttagtgaattcctcttaataagggaatttttttaactttcccttttatcttttaagaatatagaaatatatcttaataagataaaagaggttaaaa

SEQ ID NO: 34509 - DNA, 96 bp, Fusarium azukicola
  misc_feature: 141
ttggttgaaattagggttaggggtagtagtagagttaagggttagggttaattggttgaaattagggttaggggtagtagtagagttaaggggtag

SEQ ID NO: 34510 - DNA, 96 bp, Fusarium azukicola
  misc_feature: 141
ttcttatttcttttctctttcttccttcttagaattaggtttagattcctttttcttagaagtcttatataccttattagcttcctgagttttcta

SEQ ID NO: 34511 - DNA, 96 bp, Fusarium azukicola
  misc_feature: 141
agaagtccttcttttaaataaataaggaaaaataatattataaggaaaagagaaaaataacctatatataataatagctaaggttatttctaataa

SEQ ID NO: 34512 - DNA, 96 bp, Fusarium azukicola
  misc_feature: 141
tagggtaaagtaaaagagagaagagagtatagggtaaagtaaaataaagaataaaagtagagggtaaagtaaaataataaagaaagtatagggtaa

SEQ ID NO: 34513 - DNA, 96 bp, Fusarium azukicola
  misc_feature: 141
ataatagaagagtaataataataagagaggggtttatttaaataaaggttatagttaaagtttaagagtagtagttaagttaagggttagggttaa

SEQ ID NO: 34514 - DNA, 96 bp, Fusarium azukicola
  misc_feature: 141
ttaaccctaacccttaacttaaccacttaaccctaacctttactataactacttaaccctaacccttaacttaaccacttaaccctaacctttact

SEQ ID NO: 34515 - DNA, 96 bp, Fusarium azukicola
  misc_feature: 141
aagacaactagacaactatcataatggattatactccctacctgttccatcatcatcatcatgggtcgtcgtgcgcttacagcagaggaaaaggca

SEQ ID NO: 34516 - DNA, 96 bp, Fusarium azukicola
  misc_feature: 141
ataatatctagcttctaagagagacttatagaagatagatagataaaagtgggtcacaataaagagtctgattggatcagataaaagtgggattca

SEQ ID NO: 34517 - DNA, 96 bp, Fusarium azukicola
  misc_feature: 141
agatgacgaagaagaagaattagctataaatagcttttcttatttcttttctctttcttccttcttagaattaggtttagattcctttttcttaga

SEQ ID NO: 34518 - DNA, 96 bp, Fusarium azukicola
  misc_feature: 141
atctctaacttctagaggggatttattatttaaagccgaatgcgggcttctattatatatatatacggctgcttccacagcctctccccaaaggga

SEQ ID NO: 34519 - DNA, 96 bp, Fusarium azukicola
  misc_feature: 141
taaagctataacccttataagattataactttaaaggaggctattaatattctatattatattactaactatagtgatatatccctataaactata

SEQ ID NO: 34520 - DNA, 96 bp, Fusarium azukicola
  misc_feature: 141
cacactgacaggttatgagcccggaggtctcttcctaagggtttatacttaaaagaagattatacttcttttttaagtcttttctaagactttata

SEQ ID NO: 34521 - DNA, 96 bp, Fusarium azukicola
  misc_feature: 141
tagttgtcttctctaccattgccactgataaaagagtcttgctagcatctttgtttgttttgaccacgtattatatcactgtttactttcacagat

SEQ ID NO: 34522 - DNA, 96 bp, Fusarium azukicola
  misc_feature: 141
tagcagtttgcaataactgcattttaaggcagttttcttctttttctaaggcttagaagtcttagaaaaatatatctcattagaatctattttttc

SEQ ID NO: 34523 - DNA, 96 bp, Fusarium azukicola
  misc_feature: 141
tagatgacggcagtcataaaggtctataggaacctttttaactaattagaataatacccttaatatctagctacctatagtagctataggttaggg

SEQ ID NO: 34524 - DNA, 96 bp, Fusarium azukicola
  misc_feature: 141
attatacttcttccctagaccttagaggctaaccccttccttaccctagaggttagctttactttctaactcttctctcttagataatagtaatta

SEQ ID NO: 34525 - DNA, 96 bp, Fusarium azukicola
  misc_feature: 141
taagtagttatagtaaaggttagggttaagtggttaagttaagggttagggttaagtagttatagtaaaggttagggttaagtggttaagttaagg

SEQ ID NO: 34526 - DNA, 96 bp, Fusarium azukicola
  misc_feature: 141
aaaggaggctattaatattctatattatattactaactatagtgatatatccctataaaccatatattatattatagaatttttactctattttta

SEQ ID NO: 34527 - DNA, 96 bp, Fusarium azukicola
  misc_feature: 141
aacttcccaggttttttgctttattaattcctctatttcagctgtcatagatagatgccaattataagataaagcacaacttatggcttcttttta

SEQ ID NO: 34528 - DNA, 96 bp, Fusarium azukicola
  misc_feature: 141
gtccttcttttaaataagtaaggaaaaataatatcataaggaaaagagaaaaataacctatatataataacagctaaggttatttctaataagaat

SEQ ID NO: 34529 - DNA, 96 bp, Fusarium azukicola
  misc_feature: 141
ggttagggttaagtagttatagtaaaggttagggttaagtggttaagttaagggttagggttaagtagttatagtaaaggttagggttaagtggtt

SEQ ID NO: 34530 - DNA, 96 bp, Fusarium azukicola
  misc_feature: 141
aaatgcagttattgcaaactgccaggtcataaagacccagattgctattttttgcaccctaataaggctccaaaaaactggaaaattcaggaagcc

SEQ ID NO: 34531 - DNA, 96 bp, Fusarium azukicola
  misc_feature: 141
gagaataaagtgaataaggatttgttcctctagatcagatagccgacgtgatttctggatggtatcgcgtcgagactggatgccttgctggcgggg

SEQ ID NO: 34532 - DNA, 96 bp, Fusarium azukicola
  misc_feature: 141
atatatatatatatgatatggtatggatatagatgatgttattatttattattataatcgtaataacgaaagaggaagaagaagaagaagaagaag

SEQ ID NO: 34533 - DNA, 96 bp, Fusarium azukicola
  misc_feature: 141
cttccttcttagaattaggtttagattcctttttcttagaagtcttatataccttattagcttcctgagttttctagttttttagagccttattag

SEQ ID NO: 34534 - DNA, 96 bp, Fusarium azukicola
  misc_feature: 141
ctaaacctaattctaagaaggaagaaagagaaaagaaataagaaaagctatttatagctaattcttcttcttcgtcatctcctaaagccgaggaag

SEQ ID NO: 34535 - DNA, 96 bp, Fusarium azukicola
  misc_feature: 141
cctctaataataagaacgtataaagctataacccttataagattataactttaaaggaggctattaatattctatattatattaccaactatagtg

SEQ ID NO: 34536 - DNA, 96 bp, Fusarium azukicola
  misc_feature: 141
aagtagttatagtaaaggttagggttaagtggttaagttaagggttagggttaagtagttatagtaaaggttagggttaagtggttaagttaaggg

SEQ ID NO: 34537 - DNA, 96 bp, Fusarium azukicola
  misc_feature: 141
aagaataagaataagaataagaataagaataagaataagaataagaataagaataagaataagaataagaataagaataagaataagaataagaat

SEQ ID NO: 34538 - DNA, 96 bp, Fusarium azukicola
  misc_feature: 141
aaaattaactaaaaataatataaataaaaaacctaataataaggaatataagttcctagataaaatagctactaatatatagggtccttctagaat

SEQ ID NO: 34539 - DNA, 96 bp, Fusarium azukicola
  misc_feature: 141
aagctattataaaattcaaggaatttagaaaagaaatagaaaataatcctaataaaataagaataaaatcagttttcttagataatataaaggaat

SEQ ID NO: 34540 - DNA, 96 bp, Fusarium azukicola
  misc_feature: 141
attaaccctaacccttaactctactactacccctaaccctaatttcaaccaattaaccctaacccttaacgtaactactacccctaaccataattt

SEQ ID NO: 34541 - DNA, 96 bp, Fusarium azukicola
  misc_feature: 141
atatgaaactctatatctgtgaaagtaaacagtgatataatacgtggtcaaaacaaacaaagatgctagcaagactcttttatcagtggcaatggt

SEQ ID NO: 34542 - DNA, 96 bp, Fusarium azukicola
  misc_feature: 141
aaagtaaacagtgatataatacgtggtcaaaacaaacaaagatgctagcaagactcttttatcagtggcaatggtagagaagacaactagacaact

SEQ ID NO: 34543 - DNA, 96 bp, Fusarium azukicola
  misc_feature: 141
aataaataagaagtccttcttttaaataagtaaggaaaaataatatcataaggaaaagagaaaaataacctatatataataatagctaaggttatt

SEQ ID NO: 34544 - DNA, 96 bp, Fusarium azukicola
  misc_feature: 140
ttttcttatttcttttctctttcttccttcttagaattaggtttagattcctttttcttagaagtcttatataccttattagcttcctaagttttc

SEQ ID NO: 34545 - DNA, 96 bp, Fusarium azukicola
  misc_feature: 140
ttttaactatttagctatatataagacttaaaaatattttttctaaatttttaaaaaaattccttatataggtatcttaaagtatacagtgtaaat

SEQ ID NO: 34546 - DNA, 96 bp, Fusarium azukicola
  misc_feature: 140
atatacctaaaaatagagtaaaaattctataatataatatgtggtttatagggatatatcactatagttggtaatataatatagaatattaataaa

SEQ ID NO: 34547 - DNA, 96 bp, Fusarium azukicola
  misc_feature: 140
taagggtattattctaattggttaaaaaggttcctatagacctttatgactgccgtcatctatgcatcaaagtataataactgccgattggctaaa

SEQ ID NO: 34548 - DNA, 96 bp, Fusarium azukicola
  misc_feature: 140
ataagtaaaatatataaataaaataataaggaaatataataaataagaaataggaacttctaaagtacctattaaatttatagaaagactcttaaa

SEQ ID NO: 34549 - DNA, 96 bp, Fusarium azukicola
  misc_feature: 140
ttctcaatcttccctttgttttgcccttcttcgacccggataaatacttcaaagtggtcgtcaaggacttctctgaggtcatcgaaccacgtatta

SEQ ID NO: 34550 - DNA, 96 bp, Fusarium azukicola
  misc_feature: 140
tataagattataactttaaaggaggctattaatgttctatattatattaccaactatagtgatatatccctataaaccacatattatattatagaa

SEQ ID NO: 34551 - DNA, 96 bp, Fusarium azukicola
  misc_feature: 140
gatgacgaagaagaagaattagctataaatagcttttcttatttcttttctctttcttccttcttagaattaggtttagattcctttttcttagaa

SEQ ID NO: 34552 - DNA, 96 bp, Fusarium azukicola
  misc_feature: 140
ataaagccctagattatggtataaccttctctctaaattattaaataatttaggcttctacgctatcccttttaataaagctctctttataaataa

SEQ ID NO: 34553 - DNA, 96 bp, Fusarium azukicola
  misc_feature: 140
ttattaaataatttaggcttctatactatcccttttaataaagctctctttataaataagaacttaaagattactatagctatttatatagataac

SEQ ID NO: 34554 - DNA, 96 bp, Fusarium azukicola
  misc_feature: 140
ttatagggatatatcactatagttagtaatataatatagaatattaatagcctcctttaaagttataatcttataagggttatagctttatacgtt

SEQ ID NO: 34555 - DNA, 96 bp, Fusarium azukicola
  misc_feature: 140
ttaggagatgacgaagaagaagaattagctataaatagcttttcttatttcttttctctttcttccttcttagaattaggtttagattcctttttc

SEQ ID NO: 34556 - DNA, 96 bp, Fusarium azukicola
  misc_feature: 140
ttaagggtaaaatagctaagaattattctttttaggtctataactattttattttagcttttattaagctttaaagttttatgttttagtgcacag

SEQ ID NO: 34557 - DNA, 96 bp, Fusarium azukicola
  misc_feature: 140
tctagaatccctacctataataaatatatatactttattaccttcctagatagggctactagatatctaaaagcctatctattaaggaataagtca

SEQ ID NO: 34558 - DNA, 96 bp, Fusarium azukicola
  misc_feature: 140
taaggtaaataaacctaatttttctactaataaagataatataactaattttatatataatataggtgctactaggtatattatatatagaaaaga

SEQ ID NO: 34559 - DNA, 96 bp, Fusarium azukicola
  misc_feature: 140
tctctaacttctagaggggatttattatttaaagccgaatgcgggcttctattatatatatatacggctgcttccacagcctctccccaaagggat

SEQ ID NO: 34560 - DNA, 96 bp, Fusarium azukicola
  misc_feature: 140
atctctaacttctagaggggatttattatttaaagccgaatgcgggcttctattatatatatatacggctgcttccacagcctctcccccaaggga

SEQ ID NO: 34561 - DNA, 96 bp, Fusarium azukicola
  misc_feature: 140
tataagcttttagtaaagaaatcagctatattatctttactttttatataataaagctttatttgccctttttctactatatctctagagaaatga

SEQ ID NO: 34562 - DNA, 96 bp, Fusarium azukicola
  misc_feature: 140
tatatataaatatataaataaaaatctctctttaagttttaatagggctatacctcctattttaactaataatctagcagctaagcaattagctga

SEQ ID NO: 34563 - DNA, 96 bp, Fusarium azukicola
  misc_feature: 140
tattcctttatattatctaagaaaactgattttattcttattttattaggattattttctatttcttttctaaattccttgaattttataatagct

SEQ ID NO: 34564 - DNA, 96 bp, Fusarium azukicola
  misc_feature: 140
tattataaaattcaaggaatttagaaaagaaatagaaaataatcctaataaaataagaataaaatcagttttcttagataatataaaggaatatat

SEQ ID NO: 34565 - DNA, 96 bp, Fusarium azukicola
  misc_feature: 140
tatcctaatagtaatataaataagctataaatctatttaaaattaagaaaagccttatatagcctaaaataaagccctagattatagtataacctt

SEQ ID NO: 34566 - DNA, 96 bp, Fusarium azukicola
  misc_feature: 140
ctaataaaataagaataaaattagttttcttagataatataaaggaatatatatataagctaagaccctattatataaagaatggaataaaatata

SEQ ID NO: 34567 - DNA, 96 bp, Fusarium azukicola
  misc_feature: 140
tatatttagttagatctataagattactttttttaagtttctagctattttatagcagtttttagaaacttaggttttagcgatttttagttatac

SEQ ID NO: 34568 - DNA, 96 bp, Fusarium azukicola
  misc_feature: 140
ctattataaaattcaaggaatttagaaaagaaatagaaaataatcctaataaaataagaataaaatcagttttcttagataatataaaggaatata

SEQ ID NO: 34569 - DNA, 96 bp, Fusarium azukicola
  misc_feature: 140
tatatataatatacctagtagcacctatattatatataaaattagttatattatctttattagtagaaaaattaggtttatttaccttatttaaat

SEQ ID NO: 34570 - DNA, 96 bp, Fusarium azukicola
  misc_feature: 140
aagctataacccttataagattataactttaaaggaggctattaatattctatattatattactaactatagtgatatatccctataaactatata

SEQ ID NO: 34571 - DNA, 96 bp, Fusarium azukicola
  misc_feature: 140
tataattattcctattggatttaaagaccttataattaaggatttccttaaggattataaaaagaaatatcctaatagtagtataaatgagctata

SEQ ID NO: 34572 - DNA, 96 bp, Fusarium azukicola
  misc_feature: 140
tataatataacttctattataaataaataagaagtccttcttttaaataaataaggaaaaataatattataaggaaaagagaaaaataacctatat

SEQ ID NO: 34573 - DNA, 96 bp, Fusarium azukicola
  misc_feature: 140
tacctcttatttctccttaaatcctaacttttttatttaactctttctcttatttttaaatcctttcttctcttttctttttaaattaacttcatt

SEQ ID NO: 34574 - DNA, 96 bp, Fusarium azukicola
  misc_feature: 140
gaggctattaatgttctatattatattaccaactatagtgatatatccctataaaccacatattatattatagaatttttactctatttttaggta

SEQ ID NO: 34575 - DNA, 96 bp, Fusarium azukicola
  misc_feature: 140
taagtgttaatgttctatattatattaccaactatagtgatatatccctataaaccatatattatattatagaatttttactctatttttaggtat

SEQ ID NO: 34576 - DNA, 96 bp, Fusarium azukicola
  misc_feature: 140
taaaggaggctattaatattctatattatattactaactatagtgatatatccctataaaccatatattatattatagaatttttactctattttt

SEQ ID NO: 34577 - DNA, 96 bp, Fusarium azukicola
  misc_feature: 140
cgtataaagctataacccttataagattataactttaaaggaggctattaatattctatattatattaccaactatagtgatatatccctataaac

SEQ ID NO: 34578 - DNA, 96 bp, Fusarium azukicola
  misc_feature: 140
gtctcttaatagaaaaaaagctacttatatagtgcgaataattctttttctaaactaccttataagggatttttttaaaaagttttaaaaaactat

SEQ ID NO: 34579 - DNA, 96 bp, Fusarium azukicola
  misc_feature: 140
agtggcaatggtagagaagacaactagacaactatcataatggattatactccctacctgttccatcatcatcatcatgggtcgtcgtgcgcttac

SEQ ID NO: 34580 - DNA, 96 bp, Fusarium azukicola
  misc_feature: 140
gggttagggttaagtagttatagtaaaggttagggttaagtggttaagttaagggttagggttaagtagttatagtaaaggttagggttaagtggt

SEQ ID NO: 34581 - DNA, 96 bp, Fusarium azukicola
  misc_feature: 140
aatgactgtagcccattcccggtttccaggctggattgatttcggtcttccacgcctttctgcacctataacgaccattccgcttgtaatcatgcc

SEQ ID NO: 34582 - DNA, 96 bp, Fusarium azukicola
  misc_feature: 140
attgccactgataaaagagtcttgctagcatctttgtttgttttgaccacgtattatatcactgtttactttcacagatatagagtttcatatgcc

SEQ ID NO: 34583 - DNA, 96 bp, Fusarium azukicola
  misc_feature: 140
gaccaaggcgtcaaactggaaggcttggctaagaaaataactatcttagagcatgaaaatcaagagcttcgacccaagaaaaggcgtaaggttatc

SEQ ID NO: 34584 - DNA, 96 bp, Fusarium azukicola
  misc_feature: 140
gagccttattagggtgcaaaaaatagcaatctgggtctttatgacctagcagtttgcaataactgcattttaaggcagttttcttctttttccaag

SEQ ID NO: 34585 - DNA, 96 bp, Fusarium azukicola
  misc_feature: 140
gaatattaatagcctcctttaaagttataatcttataagggttatagctttatatattcttattattagaggaaaaaattaaacctctattattat

SEQ ID NO: 34586 - DNA, 96 bp, Fusarium azukicola
  misc_feature: 140
ctattaaggaataagtcagaagctattataaaatttaaggaatttagaaaagaaatagaaaataatcctaataaaataagaataaaatcagttttc

SEQ ID NO: 34587 - DNA, 96 bp, Fusarium azukicola
  misc_feature: 140
aataataggttataagatatacttaaacttttaatcttagttattttaagcttaggtttattttcttagaattattttaagtgttttttaaataag

SEQ ID NO: 34588 - DNA, 96 bp, Fusarium azukicola
  misc_feature: 140
agttattgcaaactgccaggtcataaagacccagattgctattttttgcaccctaataaggctccaaaaaactggaaaattcaggaagccaataag

SEQ ID NO: 34589 - DNA, 96 bp, Fusarium azukicola
  misc_feature: 140
caaggaatttagaaaagaaatagaaaataatcctaataaaataagaataaaatcagttttcttagataatataaaggaatatatatataagctaag

SEQ ID NO: 34590 - DNA, 96 bp, Fusarium azukicola
  misc_feature: 140
aaggttaggggtagtaatgaagttaatttaaaaagaaaagagaagaaaggatttaaaaataagagaaagagttaaataaaaaagttaggatttaag

SEQ ID NO: 34591 - DNA, 96 bp, Fusarium azukicola
  misc_feature: 140
agtcttatgcaccttattggcttcctgagttttccagttttttggagccttattagggtgcaaaaaatagcaatctgggtctttatgacctagcag

SEQ ID NO: 34592 - DNA, 96 bp, Fusarium azukicola
  misc_feature: 140
acccttaatatctagctacctatagtagctataggttaggtaaatatacctaaaaatagagtaaaaattctataatataatatgtggtttatagag

SEQ ID NO: 34593 - DNA, 96 bp, Fusarium azukicola
  misc_feature: 140
ctaaattattaaataatttaggcttctatactatcccttttaataaagctctctttataaataagaacttaaagattactatagctatttatatag

SEQ ID NO: 34594 - DNA, 96 bp, Fusarium azukicola
  misc_feature: 140
cctcggctttaggagataacgaagaagaagaattagctataaatagcttttcttatttcttttctctttcttccttcttagaattaggtttagatt

SEQ ID NO: 34595 - DNA, 96 bp, Fusarium azukicola
  misc_feature: 140
agatgaatctaagagactagaaaaaatagattctaatgagatatatttttctaagacttctaagccttagaaaaagaagaaaactgccttaaaatg

SEQ ID NO: 34596 - DNA, 96 bp, Fusarium azukicola
  misc_feature: 140
atctattaaggaataagtcagaagctattataaaatttaaggaatttagaaaagaaatagaaaataatcctaataaaataagaataaaatcagttt

SEQ ID NO: 34597 - DNA, 96 bp, Fusarium azukicola
  misc_feature: 140
ataggtcctcactagtatatttaaagagaggatcttttatttttatatatttaattagacttcttaagttaagataacttagtcttttatgctagt

SEQ ID NO: 34598 - DNA, 96 bp, Fusarium azukicola
  misc_feature: 140
ataaatcccctctagaagttagagataatatttccttagatattaaggaattagataaaataaaaacctttaggtctatagtttattataagaatt

SEQ ID NO: 34599 - DNA, 96 bp, Fusarium azukicola
  misc_feature: 140
acctaattctaagaaggaagaaagagaaaagaaataagaaaagctatttatagctaattcttcttctttattatctcctaaagccgaggaagacct

SEQ ID NO: 34600 - DNA, 96 bp, Fusarium azukicola
  misc_feature: 140
aatctcctagaatctctatagaagcccgaagggcttctatctatagctgacccaaagcctgaccctaaccctgacctaatgtatgaccctgaccct

SEQ ID NO: 34601 - DNA, 96 bp, Fusarium azukicola
  misc_feature: 139
gttaaagactttttaggaataaatataactataaatagagagaataagagtatatctttttcataagcaaaatatataaataaaataataaggaaa

SEQ ID NO: 34602 - DNA, 96 bp, Fusarium azukicola
  misc_feature: 139
tttatagggatatatcactatagttagtaatataatatagaatattaatagcctcctttaaagttataatcttataagggttatagctttatacgt

SEQ ID NO: 34603 - DNA, 96 bp, Fusarium azukicola
  misc_feature: 139
ctaacccttaactctactactacccctaaccctaatttcaaccaattaaccctaacccttaacgtaactactacccctaaccataatttcaaccaa

SEQ ID NO: 34604 - DNA, 96 bp, Fusarium azukicola
  misc_feature: 139
ctatagttagtaatataatatagaatattaatagcctcctttaaagttataatcttataagggttatagctttatatattcttattattagaggaa

SEQ ID NO: 34605 - DNA, 96 bp, Fusarium azukicola
  misc_feature: 139
ttccctttgttttgcccttcttcgacccggataaatacttcaaagtggtcgtcaaggacttctctgaggtcatcgaaccacgtattagggtgcatt

SEQ ID NO: 34606 - DNA, 96 bp, Fusarium azukicola
  misc_feature: 139
ttatgatagttgtctagttgtcttctctaccattgccactgataaaagagtcttgctagcatctttgtttgttttgaccacgtattatatcactgt

SEQ ID NO: 34607 - DNA, 96 bp, Fusarium azukicola
  misc_feature: 139
ctattttttgcaccctaataaggctccaaaaaactggaaaactcaggaagccaataaggtgcataagacttctaagaaaaaggaatctaaacctaa

SEQ ID NO: 34608 - DNA, 96 bp, Fusarium azukicola
  misc_feature: 139
ttaatgttctatattatattaccaactatagtgatatatccctataaactatatattatattatagaatttttactctatttttaggtatatttac

SEQ ID NO: 34609 - DNA, 96 bp, Fusarium azukicola
  misc_feature: 139
ttaatatatagggtccttctagaatccctacctataataaatatatatactttattaccttcctagatagggctactagatatctaaaagtctatc

SEQ ID NO: 34610 - DNA, 96 bp, Fusarium azukicola
  misc_feature: 139
ctagttgtcttctctaccattgccactgataaaagagtcttgctagcatctttgtttgttttgaccacgtattatatcactgtttactttcacaga

SEQ ID NO: 34611 - DNA, 96 bp, Fusarium azukicola
  misc_feature: 139
aatttgtactagtttacactaaatagaaaagaattctttaaaaattcaaattaaggtaaaaataacttaaaattttagattaggttaattaagtga

SEQ ID NO: 34612 - DNA, 96 bp, Fusarium azukicola
  misc_feature: 139
aggttatttctaataagaataactatagactaagagataacttagatcttcctattttaaatataaaggaaaaaactagtctttttaactagcata

SEQ ID NO: 34613 - DNA, 96 bp, Fusarium azukicola
  misc_feature: 139
ggatatttctttttataatccttaaggaaatccttaattataaggtctttaaatccaataggaatagttatatatatatctatatctatatctata

SEQ ID NO: 34614 - DNA, 96 bp, Fusarium azukicola
  misc_feature: 139
taggaaaattaactaaaaataatataaataaaaaacctaataataaggaatataagttcctagataaaatagctactaatatatagggtccttcta

SEQ ID NO: 34615 - DNA, 96 bp, Fusarium azukicola
  misc_feature: 139
tagaataatacccttaatatctagctacctatagtagctataggttaggtaaatatacctaaaaatagagtaaaaattctataatataatatgtag

SEQ ID NO: 34616 - DNA, 96 bp, Fusarium azukicola
  misc_feature: 139
aataagcgaacgagacagcatactatataactaaaaatcgctaaaacctaagtttctaaaaactgctataaaatagctagaaacttaaaaaaagta

SEQ ID NO: 34617 - DNA, 96 bp, Fusarium azukicola
  misc_feature: 139
tactttcacagatatagagtttcatatgcctgcacattttgcttttccctctcagcttatcgacgcggtacatacatggatggtgaatagtggcac

SEQ ID NO: 34618 - DNA, 96 bp, Fusarium azukicola
  misc_feature: 139
gttatttggtctgatgagacctctattgtcttgcttcatcgtcgaggaggctatcgtatttggcgacagtctgaggaacgcttccttcgaagctgt

SEQ ID NO: 34619 - DNA, 96 bp, Fusarium azukicola
  misc_feature: 139
gtataagaagtaatctagctttaatatttaattaagatatattaaattataaaggattaattaattaaatagagataatataggttaagggatttt

SEQ ID NO: 34620 - DNA, 96 bp, Fusarium azukicola
  misc_feature: 139
ggtcataaagacccagattgctattttttgcaccctaataaggctccaaaaaactggaaaattcaggaagccaataaggtgcataagacttctaag

SEQ ID NO: 34621 - DNA, 96 bp, Fusarium azukicola
  misc_feature: 139
caattactcgccgaccgcgacgcgctacccgttggcaagaactgggcttctaacttcgtcaagcggcatcaagatctcaagacgcgtttctttcgc

SEQ ID NO: 34622 - DNA, 96 bp, Fusarium azukicola
  misc_feature: 139
cgccttaccctagctaataaccctcttatctataccctacccatatagtctaacccgatccatgtaagaaaacgctatttatactatctcatactg

SEQ ID NO: 34623 - DNA, 96 bp, Fusarium azukicola
  misc_feature: 139
atagtataaatagcgttttcttacatggatcgggttagactatatgggtagggtatagataagagggttattagctagggtaaggcgattagggat

SEQ ID NO: 34624 - DNA, 96 bp, Fusarium azukicola
  misc_feature: 139
aatatatccctataaaccacatattatattatagaatttttactctatttttaggtatatttacctaacctatagctactataggtagctagatat

SEQ ID NO: 34625 - DNA, 96 bp, Fusarium azukicola
  misc_feature: 139
aaccttagctattattatatataggttatttttctcttttccttataatattatttttccttatttatttaaaagaaggacttcttatttatttat

SEQ ID NO: 34626 - DNA, 96 bp, Fusarium azukicola
  misc_feature: 139
agccttataaatggcttagttatagcaaaaaccggttttgatggatagaatgcaacgctgaaggttttaggaaccttcctagccaatcggcaggtt

SEQ ID NO: 34627 - DNA, 96 bp, Fusarium azukicola
  misc_feature: 138
tctgtctctcggatagctgatacttatctggtgctccttctggaaaggcaacccagcacgaccttgtgtttgggtttctatgccatctttcacaaa

SEQ ID NO: 34628 - DNA, 96 bp, Fusarium azukicola
  misc_feature: 138
aatttcctagataactaggaagaaaagtagtaaagagataatatctagcttctaagagagacttatagaagatagatagataaaagtgggtcacaa

SEQ ID NO: 34629 - DNA, 96 bp, Fusarium azukicola
  misc_feature: 138
agacaactagacaactatcataatggattatactccctacctgttccatcatcatcatcatgggtcgtcgtgcgcttacagcagaggaaaaggcaa

SEQ ID NO: 34630 - DNA, 96 bp, Fusarium azukicola
  misc_feature: 138
ttgccactgataaaagagtcttgctagcatctttgtttgttttgaccacgtattatatcactgtttactttcacagatatagagtttcatatgcct

SEQ ID NO: 34631 - DNA, 96 bp, Fusarium azukicola
  misc_feature: 138
aaggtaaataaacctaatttttctactaataaagataatataactaattttatatataatataggtgctactaggtatattatatatagaaaagaa

SEQ ID NO: 34632 - DNA, 96 bp, Fusarium azukicola
  misc_feature: 138
ttattcttattagaaataaccttagctattattatatataggttatttttctcttttccttataatattatttttccttatttatttaaaagaagg

SEQ ID NO: 34633 - DNA, 96 bp, Fusarium azukicola
  misc_feature: 138
ttataagcttttagtaaagaaatcagctatattatctttactttttatataataaagctttatttgccctttttctactatatctctagagaaatg

SEQ ID NO: 34634 - DNA, 96 bp, Fusarium azukicola
  misc_feature: 138
tatatatatatatgatatggtatggatatagatgatgttattatttattattataatcgtaataacgaaagaggaagaagaagaagaagaagaaga

SEQ ID NO: 34635 - DNA, 96 bp, Fusarium azukicola
  misc_feature: 138
tcctaatagtaatataaataagctataaatctatttaaaattaagaaaagccttatatagcctaaaataaagccctagattatagtataaccttct

SEQ ID NO: 34636 - DNA, 96 bp, Fusarium azukicola
  misc_feature: 138
ggacttctctgaggtcatcgaaccacgtattagggtgcattgcttcgaccactcctctgagcttcgcgattcgcattgcttgttcccaactagtga

SEQ ID NO: 34637 - DNA, 96 bp, Fusarium azukicola
  misc_feature: 138
atcataatggattatactccctacctgttccatcatcatcatcatgggtcgtcgtgcgcttacagcagaggaaaaggcaaacaaggccaaccgtga

SEQ ID NO: 34638 - DNA, 96 bp, Fusarium azukicola
  misc_feature: 138
tattgcaaactgccaggtcataaagacccagattgctattttttgcaccctaataaggctccaaaaaactggaaaattcaggaagccaataaggtg

SEQ ID NO: 34639 - DNA, 96 bp, Fusarium azukicola
  misc_feature: 138
ctaaaagcctatctattaaggaataagtcagaagctattataaaattcaaggaatttagaaaagaaatagaaaataatcctaataaaataagaata

SEQ ID NO: 34640 - DNA, 96 bp, Fusarium azukicola
  misc_feature: 138
tattattctaattggttaaaaaggttcctacagaccttcatgactgccgtcatcaatgcatcaaagtataataactgccgattggctaaaaaaggt

SEQ ID NO: 34641 - DNA, 96 bp, Fusarium azukicola
  misc_feature: 138
aagaagtccttcttttaaataaataaggaaaaataatattataaggaaaagagaaaaataacctatatataataatagctaaggttatttctaata

SEQ ID NO: 34642 - DNA, 96 bp, Fusarium azukicola
  misc_feature: 138
tatgacccacttttatctatctatcttctataagtctctcttagaagctagatattatctctttactacttttcttcctagttatctaggaaatta

SEQ ID NO: 34643 - DNA, 96 bp, Fusarium azukicola
  misc_feature: 138
tatctcttatctcttatttcttatttctttatctcttatctcttatctcttatctcttatctcttatctcttatctcttatctcttatctcttatc

SEQ ID NO: 34644 - DNA, 96 bp, Fusarium azukicola
  misc_feature: 138
tatatttgttaatgttctatattatattaccaactatagtgatatatccctataaaccacatattatattatagaatttttactctatttttaggt

SEQ ID NO: 34645 - DNA, 96 bp, Fusarium azukicola
  misc_feature: 138
aatataacttctattataaataaataagaagtccttcttttaaataaataaggaaaaataatattataaggaaaagagaaaaataacctatatata

SEQ ID NO: 34646 - DNA, 96 bp, Fusarium azukicola
  misc_feature: 138
aactgttaatgttctatattatattaccaactatagtgatatatccctataaaccatatattatattatagaatttttactctatttttaggtata

SEQ ID NO: 34647 - DNA, 96 bp, Fusarium azukicola
  misc_feature: 138
tataagaagtaatctagctttaatatttaattaagatatattaaattataaaggattaattaattaaatagagataatataggttaagggattttt

SEQ ID NO: 34648 - DNA, 96 bp, Fusarium azukicola
  misc_feature: 138
tagttaattactattatctaagagagaagagttagaaagtaaagctaacctctagggtaaggaaggggttagcctctaaggtctagggaagaagta

SEQ ID NO: 34649 - DNA, 96 bp, Fusarium azukicola
  misc_feature: 138
cttaaccacttaaccctaacctttactataactacttaaccctaacccttaacttaaccacttaaccctaacctttactataactacttaacccta

SEQ ID NO: 34650 - DNA, 96 bp, Fusarium azukicola
  misc_feature: 138
ctaagaaaactgattttattcttattttattaggattattttctatttcttttctaaattccttaaattttataatagcttctaacttattcctta

SEQ ID NO: 34651 - DNA, 96 bp, Fusarium azukicola
  misc_feature: 138
gataggaagatctaagttatctcttagtctatagttattcttattagaaataaccttagctattattatatataggttatttttctcttttcctta

SEQ ID NO: 34652 - DNA, 96 bp, Fusarium azukicola
  misc_feature: 138
gttaattggttgaaattagggttaggggtagtagttacgttaagggttagggttaattggttgaaattagggttaggggtagtagtagagttaagg

SEQ ID NO: 34653 - DNA, 96 bp, Fusarium azukicola
  misc_feature: 138
gtgcaggcatatgaaactctatatctgtgaaagtaaacagtgatataatacgtggtcaaaacaaacaaagatgctagcaagactcttttatcagtg

SEQ ID NO: 34654 - DNA, 96 bp, Fusarium azukicola
  misc_feature: 138
acactgacaggttatgagcccggaggtctcttcctaagggtttatacttaaaagaagattatacttcttttttaagtcttttctaagactttatac

SEQ ID NO: 34655 - DNA, 96 bp, Fusarium azukicola
  misc_feature: 138
cctaagggaggctattaaagagttaatttctcttaattatatatataaatatataaataaaaatctctctttaagttttaatagggctatacctcc

SEQ ID NO: 34656 - DNA, 96 bp, Fusarium azukicola
  misc_feature: 138
gatatatataataataatagaggtttaattttttcctctaataataagaatatataaagctataacccttataagattataactttaaaggaggct

SEQ ID NO: 34657 - DNA, 96 bp, Fusarium azukicola
  misc_feature: 138
aagaggggttatttccttcgagaaagctattttctattatagttatatccttagagataactagttttttattcttaaaatcctaaatcttataag

SEQ ID NO: 34658 - DNA, 96 bp, Fusarium azukicola
  misc_feature: 138
ctaacctctagaatctcctagaatctctatagaagcccgaagggcttctatctatagctgacccaaagcctgaccctaaccctgacctaatgtatg

SEQ ID NO: 34659 - DNA, 96 bp, Fusarium azukicola
  misc_feature: 138
aatctaaacctaattctaagaaggaagaaagagaaaagaaataagaaaagctatttatagctaattcttcttcttcgtcatctcctaaagccgagg

SEQ ID NO: 34660 - DNA, 96 bp, Fusarium azukicola
  misc_feature: 138
attactattatctaagagagaagagttagaaagtaaagctaacctctagggtaaggaaggggttagcctctaaggtctagggaagaagtataatgg

SEQ ID NO: 34661 - DNA, 96 bp, Fusarium azukicola
  misc_feature: 138
caattaaccctaacccttaactctactactacccctaaccctaatttcaaccaattaaccctaacccttaacgtaactactacccctaaccataat

SEQ ID NO: 34662 - DNA, 96 bp, Fusarium azukicola
  misc_feature: 138
atatcctaatagtaatataaataagctataaatctatttaaaattaagaaaagccttatatagcctaaaataaagccctagattatagtataacct

SEQ ID NO: 34663 - DNA, 96 bp, Fusarium azukicola
  misc_feature: 138
agtcttagaaaaatatatctcattagaatctattttttctagtctcttagattcatctataaggctagaagaaagtgattctaggttataagcctt

SEQ ID NO: 34664 - DNA, 96 bp, Fusarium azukicola
  misc_feature: 138
agtagttatagtaaaggttagggttaagtggttaagttaagggttagggttaagtagttatagtaaaggttagggttaagtggttaagttaagggt

SEQ ID NO: 34665 - DNA, 96 bp, Fusarium azukicola
  misc_feature: 137
tttataatataacttctattataaataaataagaagtccttcttttaaataaataaggaaaaataatattataaggaaaagagaaaaataacctat

SEQ ID NO: 34666 - DNA, 96 bp, Fusarium azukicola
  misc_feature: 137
tttactttaccctatactctcttctctcttttactttaccctccacttttattctttattttactttaccctatactctcttctctcttttacttt

SEQ ID NO: 34667 - DNA, 96 bp, Fusarium azukicola
  misc_feature: 137
gatcgggttagactatatgggtagggtatagataagagggttattagctagggtaaggcgattagggattaataagtactaagagaggtaaaggaa

SEQ ID NO: 34668 - DNA, 96 bp, Fusarium azukicola
  misc_feature: 137
gatgacggcagtcataaaggtctataggaacctttttaactaattagaataatacccttaatatctagctacctatagtagctataggttagggaa

SEQ ID NO: 34669 - DNA, 96 bp, Fusarium azukicola
  misc_feature: 137
ttcattattataagggctttctttaaagtaaggaatctcattaaaagaggggttatgtccttcgagaaagctattttctattatagttatatcctt

SEQ ID NO: 34670 - DNA, 96 bp, Fusarium azukicola
  misc_feature: 137
gtaaaaattctataatataatatgtggtttatagggatatatcactatagttggtaatataatatagaacattaatagcctcctttaaagttataa

SEQ ID NO: 34671 - DNA, 96 bp, Fusarium azukicola
  misc_feature: 137
ttataaataaataagaagtccttcttttaaataagtaaggaaaaataatatcataaggaaaagagaaaaataacctatatataataacagctaagg

SEQ ID NO: 34672 - DNA, 96 bp, Fusarium azukicola
  misc_feature: 137
tattttatttatatattttgcttatgaaaaagatatactcttattctctctatttatagttatatttattcctaaaaagtctttaacttctcctaa

SEQ ID NO: 34673 - DNA, 96 bp, Fusarium azukicola
  misc_feature: 137
ccctagctaataaccctcttatctataccctacccatatagtctaacccgatccatgtaagaaaacgctatttatactatctcatactgtacttaa

SEQ ID NO: 34674 - DNA, 96 bp, Fusarium azukicola
  misc_feature: 137
aaatatacctaaaaatagagtaaaaattctataatataatatatagtttatagggatatatcactatagttggtaatataatatagaacattaaca

SEQ ID NO: 34675 - DNA, 96 bp, Fusarium azukicola
  misc_feature: 137
tgtgaaagtaaacagtgatataatacgtggtcaaaacaaacaaagatgctagcaagactcttttatcagtggcaatggtagagaagacaactagac

SEQ ID NO: 34676 - DNA, 96 bp, Fusarium azukicola
  misc_feature: 137
tcttaaggctatttttgcctccctttatctcttatctcttatttcttatttctttatctcttatctcttatctcttatctcttatctcttatctct

SEQ ID NO: 34677 - DNA, 96 bp, Fusarium azukicola
  misc_feature: 137
ccctaataaagctccaaaaaactggaaaactcaggaagccaataaggtgcataagacttctaagaaaaaggaatctaaacctaattctaagaagga

SEQ ID NO: 34678 - DNA, 96 bp, Fusarium azukicola
  misc_feature: 137
ggaagagacctccgggctcataacctgtcagtgtgactaggttataaatagttgatttcctagataactaggaagaaaagtaataaagagataata

SEQ ID NO: 34679 - DNA, 96 bp, Fusarium azukicola
  misc_feature: 137
tataactacttaaccctaacccttaacttaaccacttaaccctaacctttactataactacttaaccctaacccttaacttaaccacttaacccta

SEQ ID NO: 34680 - DNA, 96 bp, Fusarium azukicola
  misc_feature: 137
tagctaagagagagaggtaaagctaagaaagagagatatagctagaaaagagagaaataagagataagagataagagataagagataagagataag

SEQ ID NO: 34681 - DNA, 96 bp, Fusarium azukicola
  misc_feature: 137
aaagaaatatcctaatagtaatataaataagctataaatctatttaaaattaagaaaagccttatatagcctaaaataaagccctagattatagta

SEQ ID NO: 34682 - DNA, 96 bp, Fusarium azukicola
  misc_feature: 137
taaataagaagtccttcttttaaataagtaaggaaaaataatatcataaggaaaagagaaaaataacctatatataataacagctaaggttatttc

SEQ ID NO: 34683 - DNA, 96 bp, Fusarium azukicola
  misc_feature: 137
taaaaactgcgaaaactataaactaggaaaattaactaaaaataatataaataaaaaacctagtaataaggaatataagttcctagataaaatagc

SEQ ID NO: 34684 - DNA, 96 bp, Fusarium azukicola
  misc_feature: 137
gtaatataatatagaacattaatagcctcctttaaagttataatcttataagggttatagctttatacgttcttattattagaggaaaaattaaac

SEQ ID NO: 34685 - DNA, 96 bp, Fusarium azukicola
  misc_feature: 137
aatatcctaatagtaatataaataagctataaatctatttaaaattaagaaaagccttatatagcctaaaataaagccctagattatagtataacc

SEQ ID NO: 34686 - DNA, 96 bp, Fusarium azukicola
  misc_feature: 137
ctatagctactataggtagctagatattaagggtattattctaattggttaaaaaggttcctacagacctttatgactgccgtcatctatgcatcc

SEQ ID NO: 34687 - DNA, 96 bp, Fusarium azukicola
  misc_feature: 137
gctttaggagataatgaagaagaagaattagctataaatagcttttcttatttcttttctctttcttccttcttagaattaggtttagattccttt

SEQ ID NO: 34688 - DNA, 96 bp, Fusarium azukicola
  misc_feature: 137
aattcaaggaatttagaaaagaaatagaaaataatcctaataaaataagaataaaatcagttttcttagataatataaaggaatatatatataagc

SEQ ID NO: 34689 - DNA, 96 bp, Fusarium azukicola
  misc_feature: 137
ataactttaaaggaggctattaatgttctatattatattaccaactatagtgatatatccctataaaccacatattatattatagaatttttactc

SEQ ID NO: 34690 - DNA, 96 bp, Fusarium azukicola
  misc_feature: 137
atcatatatatatatatgatatggtatggatatagatgatgttattatttattattataatcgtaataacgaaagaggaagaagaagaagaagaag

SEQ ID NO: 34691 - DNA, 96 bp, Fusarium azukicola
  misc_feature: 137
accctaataaggctccaaaaaactggaaaactcaggaagccaataaggtgcataagacttctaagaaaagggaatctaaacctaattctaagaagg

SEQ ID NO: 34692 - DNA, 96 bp, Fusarium azukicola
  misc_feature: 137
agggttagggttaagtagttatagtaaaggttagggttaagtggttaagttaagggttagggttaagtagttatagtaaaggttagggttaagtgg

SEQ ID NO: 34693 - DNA, 96 bp, Fusarium azukicola
  misc_feature: 137
catccatgtatgtaccgcgtcgataagctgagagggaaaagcaaaatgtgcaggcatatgaaactctatatctgtgaaagtaaacagtgatataat

SEQ ID NO: 34694 - DNA, 96 bp, Fusarium azukicola
  misc_feature: 137
attctagaaggaccctatatattaatagctattttatctaggaacttatattccttattactaggttttttatttatattatttttagttaatttt

SEQ ID NO: 34695 - DNA, 96 bp, Fusarium azukicola
  misc_feature: 137
attatctaagaaaactgattttattcttattttattaggattattttctatttcttttctaaattccttaaattttataatagcttctaacttatt

SEQ ID NO: 34696 - DNA, 96 bp, Fusarium azukicola
  misc_feature: 137
ataataataatagaggtttaatttttcctctaataataagaacgtataaagctataacccttataagattataactttaaaggaggctattaatgt

SEQ ID NO: 34697 - DNA, 96 bp, Fusarium azukicola
  misc_feature: 137
aggagataatgaagaagaagaattagctataaatagcttttcttatttcttttctctttcttccttcttagaattaggtttagattcctttttctt

SEQ ID NO: 34698 - DNA, 96 bp, Fusarium azukicola
  misc_feature: 137
agcagtttgcaataactgcattttaaggcagttttcttctttttctaaggcttagaagtcttagaaaaatatatctcattagaatctattttttct

SEQ ID NO: 34699 - DNA, 96 bp, Fusarium azukicola
  misc_feature: 137
aattggttgaaattagggttaggggtagtagttacgttaagggttagggttaattggttgaaattagggttaggggtagtagtagagttaagggtt

SEQ ID NO: 34700 - DNA, 96 bp, Fusarium azukicola
  misc_feature: 136
atatatatatatgatatggtatggatatagatgatgttattatttattattataatcgtaataacgaaagaggaagaagaagaagaagaagaagaa

SEQ ID NO: 34701 - DNA, 96 bp, Fusarium azukicola
  misc_feature: 136
ttcttagataatataaaggaatatatatataagctaagaccctattatataaagaatggaataaaatataatataagtccgccttataataaataa

SEQ ID NO: 34702 - DNA, 96 bp, Fusarium azukicola
  misc_feature: 136
gaagctattataaaattcaaggaatttagaaaagaaatagaaaataatcctaataaaataagaataaaatcagttttcttagataatataaaggaa

SEQ ID NO: 34703 - DNA, 96 bp, Fusarium azukicola
  misc_feature: 136
ataagcttttagtaaagaaatcagctatattatctttactttttatataataaagctttatttgccctttttctactatatctctagagaaatgaa

SEQ ID NO: 34704 - DNA, 96 bp, Fusarium azukicola
  misc_feature: 136
aaataagaataaaattagttttcttagataatataaaggaatatatatataagctaagaccctattatataaagaatggaataaaatataatataa

SEQ ID NO: 34705 - DNA, 96 bp, Fusarium azukicola
  misc_feature: 136
aggtcataaagacccagattgctattttttgcaccctaataaggctccaaaaaactggaaaattcaggaagccaataaggtgcataagacttctaa

SEQ ID NO: 34706 - DNA, 96 bp, Fusarium azukicola
  misc_feature: 136
tatagctactataggtagctagatattaagggtattattctaattggttaaaaaggttcctacagacctttatgactgccgtcatctatgcatcca

SEQ ID NO: 34707 - DNA, 96 bp, Fusarium azukicola
  misc_feature: 136
taaggagtgaaaagagagagagggagaggggagaggagaggataaggagtgaaaagagagagagggagaggggagaggagaggataaggagagaga

SEQ ID NO: 34708 - DNA, 96 bp, Fusarium azukicola
  misc_feature: 136
tatctcttatctcttatctcttatctcttatctcttatctcttatctcttatctcttatctcttatctcttatttctctcttttctagctatatct

SEQ ID NO: 34709 - DNA, 96 bp, Fusarium azukicola
  misc_feature: 136
taatatatccctataaaccacatattatattatagaatttttactctatttttaggtatatttacctaacctatagctactataggtagctagata

SEQ ID NO: 34710 - DNA, 96 bp, Fusarium azukicola
  misc_feature: 136
tataactattcctattggatttaaagaccttataattaaggatttccttaaggattataaaaagaaatatcctaatagtagtataaataagctata

SEQ ID NO: 34711 - DNA, 96 bp, Fusarium azukicola
  misc_feature: 136
ggctattaatgttctatattatattaccaactatagtgatatatccctataaaccacatattatattatagaatttttactctatttttaggtata

SEQ ID NO: 34712 - DNA, 96 bp, Fusarium azukicola
  misc_feature: 136
atctgttaatgttctatattatattaccaactatagtgatatatccctataaaccacatattatattatagaatttttactctatttttaggtata

SEQ ID NO: 34713 - DNA, 96 bp, Fusarium azukicola
  misc_feature: 136
tatacctaaaaatagagtaaaaattctataatataatatgtggtttatagggatatatcactatagttggtaatataatatagaacattaacaagg

SEQ ID NO: 34714 - DNA, 96 bp, Fusarium azukicola
  misc_feature: 136
accttagctattattatatataggttatttttctcttttccttataatattatttttccttatttatttaaaagaaggacttcttatttatttata

SEQ ID NO: 34715 - DNA, 96 bp, Fusarium azukicola
  misc_feature: 136
tagttatagtaaaggttagggttaagtggttaagttaagggttagggttaagtagttatagtaaaggttagggttaagtggttaagttaagggtta

SEQ ID NO: 34716 - DNA, 96 bp, Fusarium azukicola
  misc_feature: 136
taaatcccctctagaagttagagataatatttccttagatattaaggaattagataaaataaaaacctttaggtctatagtttattataagaatta

SEQ ID NO: 34717 - DNA, 96 bp, Fusarium azukicola
  misc_feature: 136
gcataaaagactaagttatcttaacttaagaagtctaattaaatatataaaaataaaagatcctctctttaaatatactagtgaggacctatatta

SEQ ID NO: 34718 - DNA, 96 bp, Fusarium azukicola
  misc_feature: 136
taatagaggtttaatttttcctctaataataagaacgtataaagctataacccttataagattataactttaaaggaggctattaatgttctatat

SEQ ID NO: 34719 - DNA, 96 bp, Fusarium azukicola
  misc_feature: 136
gttagggttaagtagttatagtaaaggttagggttaagtggttaagttaagggttagggttaagtagttatagtaaaggttagggttaagtggtta

SEQ ID NO: 34720 - DNA, 96 bp, Fusarium azukicola
  misc_feature: 136
taaatatacctaaaaatagagtaaaaattctataatataatatatagtttatagggatatatcactatagttggtaatataatatagaacattaac

SEQ ID NO: 34721 - DNA, 96 bp, Fusarium azukicola
  misc_feature: 136
taaaataatacccttaatatctagctacctatagtagctataggttaggtaaatatacctaaaaatagagtaaaaattctataatataatatatgg

SEQ ID NO: 34722 - DNA, 96 bp, Fusarium azukicola
  misc_feature: 136
attgctattttttgcaccctaataaggctccaaaaaactggaaaattcaggaagccaataaggtgcataagacttctaagaaaaaggaatctaaac

SEQ ID NO: 34723 - DNA, 96 bp, Fusarium azukicola
  misc_feature: 136
actacccctaaccctaatttcaaccaattaaccctaacccttaacgtaactactacccctaaccctaatttcaaccaattaaccctaacccttaac

SEQ ID NO: 34724 - DNA, 96 bp, Fusarium azukicola
  misc_feature: 136
gtcatcttaacttaagaagtctaattaaatatataaaaataaaagatcctctctttaaatatactagtgaggacctatatcaagttaaaaactgcg

SEQ ID NO: 34725 - DNA, 96 bp, Fusarium azukicola
  misc_feature: 136
cttaaccctaacccttaacttaaccacttaaccctaacctttactataactacttaaccctaacccttaacttaaccacttaaccctaacctttac

SEQ ID NO: 34726 - DNA, 96 bp, Fusarium azukicola
  misc_feature: 136
cttaactctactactacccctaaccctaatttcaaccaattaaccctaacccttaacgtaactactacccctaaccctaatttcaaccaattaacc

SEQ ID NO: 34727 - DNA, 96 bp, Fusarium azukicola
  misc_feature: 136
ctcctctcccctctccctctctctcttttcactccttatcctctcctctcccctctccctctctctcttttcactccttctcctctcctctccccc

SEQ ID NO: 34728 - DNA, 96 bp, Fusarium azukicola
  misc_feature: 136
aacttttactctatttttaggtatatttacctaacctatagctactataggtagctagatattaagggtattattctaattggttaaaaaggttcc

SEQ ID NO: 34729 - DNA, 96 bp, Fusarium azukicola
  misc_feature: 136
atattcctttatattatctaagaaaactgattttattcttattttattaggattattttctatttcttttctaaattccttgaattttataatagc

SEQ ID NO: 34730 - DNA, 96 bp, Fusarium azukicola
  misc_feature: 136
gctataacccttataagattataactttaaaggaggctattaatattctatattatattactaactatagtgatatatccctataaactatatatt

SEQ ID NO: 34731 - DNA, 96 bp, Fusarium azukicola
  misc_feature: 136
gaatcccacttttatctgatccaatcagactctttattgtgacccacttttatctatctatcttctataagtctctcttagaagctagatattatc

SEQ ID NO: 34732 - DNA, 96 bp, Fusarium azukicola
  misc_feature: 136
gagtatttctataaatctaactcttaataaagtctaaaaatgatttttttagatttttaaaaaattctatttatagtgaaatagttaattacatag

SEQ ID NO: 34733 - DNA, 96 bp, Fusarium azukicola
  misc_feature: 136
acataagacttctaagaaaaaggaatctaaacctaattctaagaaggaagaaagagaaaagaaataagaaaagctatttatagctaattcttcttc

SEQ ID NO: 34734 - DNA, 96 bp, Fusarium azukicola
  misc_feature: 136
cttccctttgttttgcccttcttcgacccggataaatacttcaaagtggtcgtcaaggacttctctgaggtcatcgaaccacgtattagggtgcat

SEQ ID NO: 34735 - DNA, 96 bp, Fusarium azukicola
  misc_feature: 136
ataataggttataagatatacttaaacttttaatcttagttattttaagcttaggtttattttcttagaattattttaagtgttttttaaataagg

SEQ ID NO: 34736 - DNA, 96 bp, Fusarium azukicola
  misc_feature: 136
attatgatagttgtctagttgtcttctctaccattgccactgataaaagagtcttgctagcatctttgtttgttttgaccacgtattatatcactg

SEQ ID NO: 34737 - DNA, 96 bp, Fusarium azukicola
  misc_feature: 136
agattattatatatataaaagcaatagccgctattagatttcctatcatctaggctactgccccagtctgagtctgtatagcctctaattatattg

SEQ ID NO: 34738 - DNA, 96 bp, Fusarium azukicola
  misc_feature: 136
atataattattcctattggatttaaagaccttataattaaggatttccttaaggattataaaaagaaatatcctaatagtagtataaatgagctat

SEQ ID NO: 34739 - DNA, 96 bp, Fusarium azukicola
  misc_feature: 136
aagtctcttaatagaaaaaaagctacttatatagtgcgaataattctttttctaaactaccttataagggatttttttaaaaagttttaaaaaact

SEQ ID NO: 34740 - DNA, 96 bp, Fusarium azukicola
  misc_feature: 136
aaaggctatagaggaccttaagctagaaggcttcaaagccttaggcacttatataggccctatccggcctagaagagccttcttacaagataaact

SEQ ID NO: 34741 - DNA, 96 bp, Fusarium azukicola
  misc_feature: 135
atagttagtaatataatatagaatattaatagcctcctttaaagttataatcttataagggttatagctttatatattcttattattagaggaaaa

SEQ ID NO: 34742 - DNA, 96 bp, Fusarium azukicola
  misc_feature: 135
taatcttctctttataatataacttctattataaataaataagaagtccttcttttaaataaataaggaaaaataatattataaggaaaagagaaa

SEQ ID NO: 34743 - DNA, 96 bp, Fusarium azukicola
  misc_feature: 135
actaggttttttatttatattatttttagttaattttcctagtttgcagttttcgcagtttttaacttaatataggtcctcactagtatatttaaa

SEQ ID NO: 34744 - DNA, 96 bp, Fusarium azukicola
  misc_feature: 135
ttagaggtatataattccttaatttctcaataaaataatataactaataatatactaggacctttaataagaaaccttccctatataaagaaataa

SEQ ID NO: 34745 - DNA, 96 bp, Fusarium azukicola
  misc_feature: 135
ttatctcttatctcttatttcttatttctttatctcttatctcttatctcttatctcttatctcttatctcttatctcttatctcttatctcttat

SEQ ID NO: 34746 - DNA, 96 bp, Fusarium azukicola
  misc_feature: 135
ttataagattataactttaaaggaggctattaatattctatattatattaccaactatagtgatatatccctataaaccacatattatattataga

SEQ ID NO: 34747 - DNA, 96 bp, Fusarium azukicola
  misc_feature: 135
ttaggagataatgaagaagaagaattagctataaatagcttttcttatttcttttctctttcttccttcttagaattaggtttagattcctttttc

SEQ ID NO: 34748 - DNA, 96 bp, Fusarium azukicola
  misc_feature: 135
ttactttcacagatatagagtttcatatgcctgcacattttgcttttccctctcagcttatcgacgcggtacatacatggatggtgaatagtggca

SEQ ID NO: 34749 - DNA, 96 bp, Fusarium azukicola
  misc_feature: 135
ttactattatctaagagagaagagttagaaagtaaagctaacctctagggtaaggaaggggttagcctctaaggtctagggaagaagtataatggc

SEQ ID NO: 34750 - DNA, 96 bp, Fusarium azukicola
  misc_feature: 135
ttaagagttagatttatagaaatactctttttatcttcctagctattttatagtagtttttagaaattaaggtttagctgttttttggttatatag

SEQ ID NO: 34751 - DNA, 96 bp, Fusarium azukicola
  misc_feature: 135
taatttcctagataactaggaagaaaagtagtaaagagataatatctagcttctaagagagacttatagaagatagatagataaaagtgggtcaca

SEQ ID NO: 34752 - DNA, 96 bp, Fusarium azukicola
  misc_feature: 135
caaccaattaaccctaacccttaactctactactacccctaaccctaatttcaaccaattaaccctaacccttaacgtaactactacccctaacca

SEQ ID NO: 34753 - DNA, 96 bp, Fusarium azukicola
  misc_feature: 135
tctgttaatgttctatattatattaccaactatagtgatatatccctataaaccatatattatattatagaatttttactctatttttaggtatat

SEQ ID NO: 34754 - DNA, 96 bp, Fusarium azukicola
  misc_feature: 135
tctgagaaaactgattttattcttattttattaggattattttctatttcttttctaaattccttaaattttataatagcttctaacttattcctt

SEQ ID NO: 34755 - DNA, 96 bp, Fusarium azukicola
  misc_feature: 135
attgactctttaatagcctcccttagggctatatattctgcttcacaactagataaagcaacgcttttttgcttagttgttttccagcttattaga

SEQ ID NO: 34756 - DNA, 96 bp, Fusarium azukicola
  misc_feature: 135
tcctcggctttaggagataacgaagaagaagaattagctataaatagcttttcttatttcttttctctttcttccttcttagaattaggtttagat

SEQ ID NO: 34757 - DNA, 96 bp, Fusarium azukicola
  misc_feature: 135
tatttaaataaggtaaataaacctaatttttctactaataaagataatataactaattttatatataatataggtgctactaggtatattatatat

SEQ ID NO: 34758 - DNA, 96 bp, Fusarium azukicola
  misc_feature: 135
tattattctaattggttaaaaaggttcctacagacctttatgactgccgtcatctatgcatcaaagtataataactgccgattggctaaaaaaggt

SEQ ID NO: 34759 - DNA, 96 bp, Fusarium azukicola
  misc_feature: 135
tattatattttattctattctttatataatagggtcttagcttatatatatattcctttatattatctaagaaaactgattttattcttattttat

SEQ ID NO: 34760 - DNA, 96 bp, Fusarium azukicola
  misc_feature: 135
tattagtagctattttatctaggaacttatattccttattactaggttttttatttatattatttttagttaattttcctagtttatagttttcgc

SEQ ID NO: 34761 - DNA, 96 bp, Fusarium azukicola
  misc_feature: 135
tatggtttatagggatatatcactatagttagtaatataatatagaatattaatagcctcctttaaagttataatcttataagggttatagcttta

SEQ ID NO: 34762 - DNA, 96 bp, Fusarium azukicola
  misc_feature: 135
agtaaaaattctataatataatatgtggtttatagggatatatcactatagttggtaatataatatagaacattaatagcctcctttaaagttata

SEQ ID NO: 34763 - DNA, 96 bp, Fusarium azukicola
  misc_feature: 135
cttttactctatttttaggtatatttacctaacctatagctactataggtagctagatattaagggtattattctaattagttaaaaaggttccta

SEQ ID NO: 34764 - DNA, 96 bp, Fusarium azukicola
  misc_feature: 135
gttattgttaatgttctatattatattaccaactatagtgatatatccctataaaccacatattatattatagaatttttactctatttttaggta

SEQ ID NO: 34765 - DNA, 96 bp, Fusarium azukicola
  misc_feature: 135
taaccttagctattattatatataggttatttttctcttttccttataatattatttttccttatttatttaaaagaaggacttcttatttattta

SEQ ID NO: 34766 - DNA, 96 bp, Fusarium azukicola
  misc_feature: 135
taaagccttataaatggcttagttatagcaaaaaccggttttgatggatagaatgcaacgctgaaggttttaggaaccttcctagccaatcggccg

SEQ ID NO: 34767 - DNA, 96 bp, Fusarium azukicola
  misc_feature: 135
ctctctttaaatatactagtgaggacctatattaagttaaaaactgcgaaaactgcaaactaggaaaattaactaaaaataatataaataaaaaac

SEQ ID NO: 34768 - DNA, 96 bp, Fusarium azukicola
  misc_feature: 135
atgacctcagagaagtccttgacgaccactttgaagtatttatccgggtcgaagaagggcaaaacaaagggaagattgagaatgggacctaccaac

SEQ ID NO: 34769 - DNA, 96 bp, Fusarium azukicola
  misc_feature: 135
ctactactacccctaaccctaatttcaaccaattaaccctaacccttaacgtaactactacccctaaccctaatttcaaccaattaaccctaaccc

SEQ ID NO: 34770 - DNA, 96 bp, Fusarium azukicola
  misc_feature: 135
gctattaatgttctatattatattaccaactatagtgatatatccctataaaccacatattatattatagaatttttactctatttttaggtatat

SEQ ID NO: 34771 - DNA, 96 bp, Fusarium azukicola
  misc_feature: 135
gatgaatctaagagactagaaaaaatagattctaatgagatatatttttctaagacttctaagccttagaaaaagaagaaaactgccttaaaatgc

SEQ ID NO: 34772 - DNA, 96 bp, Fusarium azukicola
  misc_feature: 135
gagatatatttttctaagacttctaagccttagaaaaagaagaaaactgccttaaaatgcagttattgcaaactgctaggtcataaagacccagat

SEQ ID NO: 34773 - DNA, 96 bp, Fusarium azukicola
  misc_feature: 135
ctcttatctcttatctcttatctcttatctcttatctcttatctcttatctcttatctcttatctcttatttctctcttttctagctatatctctc

SEQ ID NO: 34774 - DNA, 96 bp, Fusarium azukicola
  misc_feature: 135
gaagagacctccgggctcataacctgtcagtgtgactaggttataaatagttgatttcctagataactaggaagaaaagtaataaagagataatat

SEQ ID NO: 34775 - DNA, 96 bp, Fusarium azukicola
  misc_feature: 135
ctattgttaatgttctatattatattaccaactatagtgatatatccctataaaccacatattatattatagaatttttactctatttttaggtat

SEQ ID NO: 34776 - DNA, 96 bp, Fusarium azukicola
  misc_feature: 135
aaaaagaaatatcctaatagtaatataaataagctataaatctatttaaaattaagaaaagccttatatagcctaaaataaagccctagattatag

SEQ ID NO: 34777 - DNA, 96 bp, Fusarium azukicola
  misc_feature: 135
ctagcagtttgcaataactgcattttaaggcagttttcttctttttctaaggcttagaagtcttagaaaaatatatctcattagaatctatttttt

SEQ ID NO: 34778 - DNA, 96 bp, Fusarium azukicola
  misc_feature: 135
ataagattataactttaaaggaggctattaatgttctatattatattaccaactatagtgatatatccctataaaccacatattatattatagaat

SEQ ID NO: 34779 - DNA, 96 bp, Fusarium azukicola
  misc_feature: 135
ataatgttaatgttctatattatattaccaactatagtgatatatccctataaaccacatattatattatagaatttttactctatttttaggtat

SEQ ID NO: 34780 - DNA, 96 bp, Fusarium azukicola
  misc_feature: 135
actttcacagatatagagtttcatatgcctgcacattttgcttttccctctcagcttatcgacgcggtacatacatggatggtgaatagtggcact

SEQ ID NO: 34781 - DNA, 96 bp, Fusarium azukicola
  misc_feature: 135
aagatgaatcaactcttcagtcaattcaatcattaacaactaaatcccacttttatctgatccaatcagactctttattgtgacccacttttatct

SEQ ID NO: 34782 - DNA, 96 bp, Fusarium azukicola
  misc_feature: 135
agaagtaaataataaagctctaaccttttctaatatagtcctatttatcctttctataaagccattagcttatttattatgaggcggacttatatt

SEQ ID NO: 34783 - DNA, 96 bp, Fusarium azukicola
  misc_feature: 134
agggtattattctaattggttaaaaaggttcctatagacctttatgactgccgtcatctatgcattaagtataataactgccgattggctaaaaaa

SEQ ID NO: 34784 - DNA, 96 bp, Fusarium azukicola
  misc_feature: 134
tatcttttttataagcaaaatatataaataaaataataaggaaatataataaataagaaataggaacttctaaagtacctattaaatttatagaaa

SEQ ID NO: 34785 - DNA, 96 bp, Fusarium azukicola
  misc_feature: 134
tttcacagatatagagtttcatatgcctgcacattttgcttttccctctcagcttatcgacgcggtacatacatggatggtgaatagtggcacttt

SEQ ID NO: 34786 - DNA, 96 bp, Fusarium azukicola
  misc_feature: 134
ttctagaatccctacctataataaatatatatactttattaccttcctagatagggctactagatatctgaaagcctatctattaaggaataagtc

SEQ ID NO: 34787 - DNA, 96 bp, Fusarium azukicola
  misc_feature: 134
ttccttattattttatttatatattttgcttatgaaaaagatatactcttattctctctatttatagttatatttattcctaaaaagtctttaact

SEQ ID NO: 34788 - DNA, 96 bp, Fusarium azukicola
  misc_feature: 134
tatattttaatacttttccctatataatcttagattttcccttataatatcaggtctataataaaggggtttttactaagatatatataataataa

SEQ ID NO: 34789 - DNA, 96 bp, Fusarium azukicola
  misc_feature: 134
atatactagtgaggacctatattaagttaaaaactgcgaaaactgcaaactaggaaaattaactaaaaataatataaataaaaaacctagtaataa

SEQ ID NO: 34790 - DNA, 96 bp, Fusarium azukicola
  misc_feature: 134
tgttatttggtctgatgagacctctattgtcttgcttcatcgtcgaggaggctatcgtatttggcgacagtctgaggaacgcttccttcgaagctg

SEQ ID NO: 34791 - DNA, 96 bp, Fusarium azukicola
  misc_feature: 134
tctaagaaaaaggaatctaaacctaattctaagaaggaagaaagagaaaagaaataagaaaagctatttatagctaattcttcttcttcattatct

SEQ ID NO: 34792 - DNA, 96 bp, Fusarium azukicola
  misc_feature: 134
tatgtaccgcgtcgataagctgagagggaaaagcaaaatgtgcaggcatatgaaactctatatctgtgaaagtaaacagtgatataatacgtggtc

SEQ ID NO: 34793 - DNA, 96 bp, Fusarium azukicola
  misc_feature: 134
aagagagagaggtaaagctaagaaagagagatatagctagaaaagagagaaataagagataagagataagagataagagataagagataagagata

SEQ ID NO: 34794 - DNA, 96 bp, Fusarium azukicola
  misc_feature: 134
tataaagtcttagaaaagacttaaaaaagaagtataatcttcttttaagtataaacccttaggtagagacctccgggcttataacctattagtgag

SEQ ID NO: 34795 - DNA, 96 bp, Fusarium azukicola
  misc_feature: 134
tagtagctattttatctaggaacttatattccttattactaggttttttatttatattatttttagttaattttcctagtttatagttttcgcagt

SEQ ID NO: 34796 - DNA, 96 bp, Fusarium azukicola
  misc_feature: 134
taggagataatgaagaagaagaattagctataaatagcttttcttatttcttttctctttcttccttcttagaattaggtttagattcctttttct

SEQ ID NO: 34797 - DNA, 96 bp, Fusarium azukicola
  misc_feature: 134
taggacctttaataagaaaccttccctatataaagaaacaactaggatatttaaataaggtgctactaggcatattgtatgtagaaaagaatttct

SEQ ID NO: 34798 - DNA, 96 bp, Fusarium azukicola
  misc_feature: 134
taagaataaaattagttttcttagataatataaaggaatatatatataagctaagaccctattatataaagaatagaataaaatataatataagtc

SEQ ID NO: 34799 - DNA, 96 bp, Fusarium azukicola
  misc_feature: 134
ggagatgacgaagaagaagaattagctataaatagcttttcttatttcttttctctttcttccttcttagaattaggtttagattcctttttctta

SEQ ID NO: 34800 - DNA, 96 bp, Fusarium azukicola
  misc_feature: 134
atttaagggtaaaatagctaagaattattctttttaggtctataactattttattttagcttttattaagctttaaagttttatgttttagtgcac

SEQ ID NO: 34801 - DNA, 96 bp, Fusarium azukicola
  misc_feature: 134
gccttaccctagctaataaccctcttatctataccctacccatatagtctaacccgatccatgtaagaaaacgctatttatactatctcatactgt

SEQ ID NO: 34802 - DNA, 96 bp, Fusarium azukicola
  misc_feature: 134
agtcatcttaacttaagaagtctaattaaatatataaaaataaaagatcctctctttaaatatactagtgaggacctatatcaagttaaaaactgc

SEQ ID NO: 34803 - DNA, 96 bp, Fusarium azukicola
  misc_feature: 134
gagataatgaagaagaagaattagctataaatagcttttcttatttcttttctctttcttccttcttagaattaggtttagattcctttttcttag

SEQ ID NO: 34804 - DNA, 96 bp, Fusarium azukicola
  misc_feature: 134
ctaggacctttaataagaaaccttccctatataaagaaacaactaggatatttaaataaggtgctactaggcatattgtatgtagaaaagaatttc

SEQ ID NO: 34805 - DNA, 96 bp, Fusarium azukicola
  misc_feature: 134
ctttacctctcttagtacttattaatccctaatcgccttaccctagctaataaccctcttatctataccctacccatatagtctaacccgatccat

SEQ ID NO: 34806 - DNA, 96 bp, Fusarium azukicola
  misc_feature: 134
cattattataagggctttctttaaagtaaggaatctcattaaaagaggggttatgtccttcgagaaagctattttctattatagttatatccttag

SEQ ID NO: 34807 - DNA, 96 bp, Fusarium azukicola
  misc_feature: 134
atattttattccattctttatataatagggtcttagcttatatatatattcctttatattatctaagaaaactaattttattcttattttattagg

SEQ ID NO: 34808 - DNA, 96 bp, Fusarium azukicola
  misc_feature: 134
aaatttgtactagtttacactaaatagaaaagaattctttaaaaattcaaattaaggtaaaaataacttaaaattttagattaggttaattaagtg

SEQ ID NO: 34809 - DNA, 96 bp, Fusarium azukicola
  misc_feature: 134
atttccttaaggattataaaaagaaatatcctaatagtaatataaataagctataaatctatttaaaattaagaaaagccttatatagcctaaaat

SEQ ID NO: 34810 - DNA, 96 bp, Fusarium azukicola
  misc_feature: 134
aggaccctatatattagtagctattttatctaggaacttatattccttattattaggttttttatttatattatttttagttaattttcctagttt

SEQ ID NO: 34811 - DNA, 96 bp, Fusarium azukicola
  misc_feature: 134
acttttactctatttttaggtatatttacctaacctatagctactataggtagctagatattaagggtattattctaattggttaaaaaggttcct

SEQ ID NO: 34812 - DNA, 96 bp, Fusarium azukicola
  misc_feature: 133
ttttttcttatccttttatactctcttcttatacccttatacacttttcttctttattttctttaccctatactttctttattattttactttacc

SEQ ID NO: 34813 - DNA, 96 bp, Fusarium azukicola
  misc_feature: 133
agggtattattctaattggttaaaaaggttcctacagacctttatgactgccgtcatctatgcatcaagtataataactgccgattggctaaaaaa

SEQ ID NO: 34814 - DNA, 96 bp, Fusarium azukicola
  misc_feature: 133
tttaggagataatgaagaagaagaattagctataaatagcttttcttatttcttttctctttcttccttcttagaattaggtttagattccttttt

SEQ ID NO: 34815 - DNA, 96 bp, Fusarium azukicola
  misc_feature: 133
tttaagttttttattttttaaaaattaaaggaattttttaaaaatctagaaaaattataaacttataacttttttagttagacttataaaattact

SEQ ID NO: 34816 - DNA, 96 bp, Fusarium azukicola
  misc_feature: 133
agtccttcttttaaataagtaaggaaaaataatatcataaggaaaagagaaaaataacctatatataataacagctaaggttatttctaataagaa

SEQ ID NO: 34817 - DNA, 96 bp, Fusarium azukicola
  misc_feature: 133
ttctatttattattattattattatataatattgccttttcattattataagggctttctttaaagtaaggaatctcattaaaagaggggttattt

SEQ ID NO: 34818 - DNA, 96 bp, Fusarium azukicola
  misc_feature: 133
tataagattataactttaaaggaggctattaatattctatattatattaccaactatagtgatatatccctataaaccacatattatattatagaa

SEQ ID NO: 34819 - DNA, 96 bp, Fusarium azukicola
  misc_feature: 133
tataagattataactttaaaggaggctattaatattctatattatattactaactatagtgatatatccctataaaccatatattatattatagaa

SEQ ID NO: 34820 - DNA, 96 bp, Fusarium azukicola
  misc_feature: 133
gaagctgtctatacccatcatatatatatatatgatatggtatggatatagatgatgttattatttattattataatcgtaataacgaaagaggaa

SEQ ID NO: 34821 - DNA, 96 bp, Fusarium azukicola
  misc_feature: 133
atttgtactagtttacactaaatagaaaagaattctttaaaaattcaaattaaggtaaaaataacttaaaattttagattaggttaattaagtgaa

SEQ ID NO: 34822 - DNA, 96 bp, Fusarium azukicola
  misc_feature: 133
ttattgcaaactgccaggtcataaagacccagattgctattttttgcaccctaataaggctccaaaaaactggaaaattcaggaagccaataaggt

SEQ ID NO: 34823 - DNA, 96 bp, Fusarium azukicola
  misc_feature: 133
tattatatatatcttagtaaaaacccctttattatagacctgatattataagggaaaatctaagattatatagggaaaagtattaaaatataataa

SEQ ID NO: 34824 - DNA, 96 bp, Fusarium azukicola
  misc_feature: 133
ttattagttatattattttattgagaaattaaggaattatatacctctaaattattacttatattaaaatctattttatctagggtcttagaaagg

SEQ ID NO: 34825 - DNA, 96 bp, Fusarium azukicola
  misc_feature: 133
taaaataaataagtaagttaggttaaagaagagaaaaaagggttagaaagtaataaaaaggtttaaggagagaaattaagttaaggaggaatataa

SEQ ID NO: 34826 - DNA, 96 bp, Fusarium azukicola
  misc_feature: 133
taagaaaactgattttattcttattttattaggattattttctatttcttttctaaattccttaaattttataatagcttctaacttattccttaa

SEQ ID NO: 34827 - DNA, 96 bp, Fusarium azukicola
  misc_feature: 133
gaataactactatttacaacaatatgatgttaagaatgcatttgccaatgcagatatagatacagatatatatataactattcctattggatttaa

SEQ ID NO: 34828 - DNA, 96 bp, Fusarium azukicola
  misc_feature: 133
tgtattatattttattccattctttatacaatagggccttagcttatatatatattcctttgcattatctgagaaaactgattttattcttatttt

SEQ ID NO: 34829 - DNA, 96 bp, Fusarium azukicola
  misc_feature: 133
accaaggcgtcaaactggaaggcttggctaagaaaataactatcttagagcatgaaaatcaagagcttcgacccaagaaaaggcgtaaggttatca

SEQ ID NO: 34830 - DNA, 96 bp, Fusarium azukicola
  misc_feature: 133
aatgtgcaggcatatgaaactctatatctgtgaaagtaaacagtgatataatacgtggtcaaaacaaacaaagatgctagcaagactcttttatca

SEQ ID NO: 34831 - DNA, 96 bp, Fusarium azukicola
  misc_feature: 133
tctatttattattattattattatataatattgccttttcattattataagggctttctttaaagtaaggaatctcattaaaagaggggttatttc

SEQ ID NO: 34832 - DNA, 96 bp, Fusarium azukicola
  misc_feature: 133
tacccttaatatctagctacctatagtagctataggttaggtaaatatacctaaaaatagagtaaaaattctataatataatatgtggtttataga

SEQ ID NO: 34833 - DNA, 96 bp, Fusarium azukicola
  misc_feature: 133
ctgtgaaagtaaacagtgatataatacgtggtcaaaacaaacaaagatgctagcaagactcttttatcagtggcaatggtagagaagacaactaga

SEQ ID NO: 34834 - DNA, 96 bp, Fusarium azukicola
  misc_feature: 133
tcctgagttttccagttttttggagccttattagggtgcaaaaaatagcaatctgggtctttatgacctagcagtttgcaataactgcattttaag

SEQ ID NO: 34835 - DNA, 96 bp, Fusarium azukicola
  misc_feature: 133
actatagttagtaatataatatagaatattaatagcctcctttaaagttataatcttataagggttatagctttatatattcttattattagagga

SEQ ID NO: 34836 - DNA, 96 bp, Fusarium azukicola
  misc_feature: 133
tattcaccatccatgtatgtaccgcgtcgataagctgagagggaaaagcaaaatgtgcaggcatatgaaactctatatctgtgaaagtaaacagtg

SEQ ID NO: 34837 - DNA, 96 bp, Fusarium azukicola
  misc_feature: 133
tattaatatatagggtccttctagaatccctacctataataaatatatatactttattaccttcctagatagggctactagatatctaaaagtcta

SEQ ID NO: 34838 - DNA, 96 bp, Fusarium azukicola
  misc_feature: 133
ctagcataaaagactaagttatcttaacttaagaagtctaattaaatatataaaaataaaagatcctctctttaaatatactagtgaggacctata

SEQ ID NO: 34839 - DNA, 96 bp, Fusarium azukicola
  misc_feature: 133
tatactgtatactttaagatacctatataaggaatttttttaaaaatttagaaaaaatatttttaagtcttatatatagctaaatagttaaaatcg

SEQ ID NO: 34840 - DNA, 96 bp, Fusarium azukicola
  misc_feature: 133
ctttataatataacttctattataaataaataagaagtccttcttttaaataaataaggaaaaataatattataaggaaaagagaaaaataaccta

SEQ ID NO: 34841 - DNA, 96 bp, Fusarium azukicola
  misc_feature: 133
tagctttaaataataaatcccctctagaagttagagataatatttccttagatattaaggaattagataaaataaaaacctttaggtctatagttt

SEQ ID NO: 34842 - DNA, 96 bp, Fusarium azukicola
  misc_feature: 133
taatttagaaaaagaattattcgcactatataagtagctttttttctattaagagacttttttagaaattctaaaaaattatctatagtttattta

SEQ ID NO: 34843 - DNA, 96 bp, Fusarium azukicola
  misc_feature: 133
taatataacttctattataaataaataagaagtccttcttttaaataaataaggaaaaataatattataaggaaaagagaaaaataacctatatat

SEQ ID NO: 34844 - DNA, 96 bp, Fusarium azukicola
  misc_feature: 133
ctgagaaaactgattttattcttattttattaggattattttctatttcttttctaaattccttaaattttataatagcttctaacttattcctta

SEQ ID NO: 34845 - DNA, 96 bp, Fusarium azukicola
  misc_feature: 133
taactttaaaggaggctattaatattctatattatattaccaactatagtgatatatccctataaaccacatattatattatagaatttttactct

SEQ ID NO: 34846 - DNA, 96 bp, Fusarium azukicola
  misc_feature: 133
ataaccttatattttcgggcccttataaagaagatatagaaagaatagtaaatattctatctaaggatatagtaatctaatccttaggagaagtta

SEQ ID NO: 34847 - DNA, 96 bp, Fusarium azukicola
  misc_feature: 133
cctaacccttaacttaaccacttaaccctaacctttactataactacttaaccctaacccttaacttaaccacttaaccctaacctttactataac

SEQ ID NO: 34848 - DNA, 96 bp, Fusarium azukicola
  misc_feature: 133
cctagctaataaccctcttatctataccctacccatatagtctaacccgatccatgtaagaaaacgctatttatactatctcatactgtacttaac

SEQ ID NO: 34849 - DNA, 96 bp, Fusarium azukicola
  misc_feature: 133
gtaaataaacctaatttttctactaataaagataatataactaattttatatataatataggtgctactaggtatattatatatagaaaagaattt

SEQ ID NO: 34850 - DNA, 96 bp, Fusarium azukicola
  misc_feature: 133
actttaccctatactctcttctctcttttactttaccctatactctcttctctcttttactttaccctccacttttattctttattttactttacc

SEQ ID NO: 34851 - DNA, 96 bp, Fusarium azukicola
  misc_feature: 133
atagcttagatagtaaatactaaccccaactataaccctaaccctagttccggttccggttccggttccggttccggtttctagttagaccgtgcc

SEQ ID NO: 34852 - DNA, 96 bp, Fusarium azukicola
  misc_feature: 133
gagagaagagttagaaagtaaagctaacctctagggtaaggaaggggttagcctctaaggtctagggaagaagtataatggctaaccactagtgtg

SEQ ID NO: 34853 - DNA, 96 bp, Fusarium azukicola
  misc_feature: 133
ctttcacagatatagagtttcatatgcctgcacattttgcttttccctctcagcttatcgacgcggtacatacatggatggtgaatagtggcactt

SEQ ID NO: 34854 - DNA, 96 bp, Fusarium azukicola
  misc_feature: 133
cttgctagcatctttgtttgttttgaccacgtattatatcactgtttactttcacagatatagagtttcatatgcctgcacattttgcttttccct

SEQ ID NO: 34855 - DNA, 96 bp, Fusarium azukicola
  misc_feature: 133
ctataataattttcttagatttttaaaaagtaattatatagctagtatataaaaaacctatttatactgtgtaattaactatttcactataaacag

SEQ ID NO: 34856 - DNA, 96 bp, Fusarium azukicola
  misc_feature: 133
ctagttaattactattatctaagagagaagagttagaaagtaaagctaacctctagggtaaggaaggggttagcctctaaggtctagggaagaagt

SEQ ID NO: 34857 - DNA, 96 bp, Fusarium azukicola
  misc_feature: 133
cctgagttttccagttttttggagccttattagggtgcaaaaaatagcaatctgggtctttatgacctagcagtttgcaataactgcattttaagg

SEQ ID NO: 34858 - DNA, 96 bp, Fusarium azukicola
  misc_feature: 133
agggcaaaacaaagggaagattgagaatgggacctaccaaccattagacttctctgctcaattccgacaagagattcagaccgaccgagagagagg

SEQ ID NO: 34859 - DNA, 96 bp, Fusarium azukicola
  misc_feature: 133
ataagattataactttaaaggaggctattaatattctatattatattactaactatagtgatatatccctataaactatatattatattatagaat

SEQ ID NO: 34860 - DNA, 96 bp, Fusarium azukicola
  misc_feature: 133
atattttaatacttttccctatataatcttagattttcccttataatatcaggtctataataaaggggtttttactaagatatatataataataat

SEQ ID NO: 34861 - DNA, 96 bp, Fusarium azukicola
  misc_feature: 133
atcagtggcaatggtagagaagacaactagacaactatcataatggattatactccctacctgttccatcatcatcatcatgggtcgtcgtgcgct

SEQ ID NO: 34862 - DNA, 96 bp, Fusarium azukicola
  misc_feature: 133
ataagaataaaattagttttcttagataatataaaggaatatatatataagctaagaccctattatataaagaatagaataaaatataatataagt

SEQ ID NO: 34863 - DNA, 96 bp, Fusarium azukicola
  misc_feature: 133
ataactataaatagagagaataagagtatatctttttcataagtaaaatatataaataaaataataaggaaatataataaataagaaataggaact

SEQ ID NO: 34864 - DNA, 96 bp, Fusarium azukicola
  misc_feature: 133
agagggttattagctagggtaaggcgattagggattaataagtactaagagaggtaaaggaaaccgctactatccggaggggagataacctctact

SEQ ID NO: 34865 - DNA, 96 bp, Fusarium azukicola
  misc_feature: 133
aacccttaacgtaactactacccctaaccctaatttcaaccaattaaccctaacccttaacgtaactactacccctaaccataatttcaaccaatt

SEQ ID NO: 34866 - DNA, 96 bp, Fusarium azukicola
  misc_feature: 132
atcgggttagactatatgggtagggtatagataagagggttattagctagggtaaggcgattagggattaataagtactaagagaggtaaaggaaa

SEQ ID NO: 34867 - DNA, 96 bp, Fusarium azukicola
  misc_feature: 132
ttctatatataatatacctagtagcacctatattatatataaaattagttatattatctttattagtagaaaaattaggtttatttaccttattta

SEQ ID NO: 34868 - DNA, 96 bp, Fusarium azukicola
  misc_feature: 132
ttctaagaaaaaggaatctaaacctaattctaagaaggaagaaagagaaaagaaataagaaaagctatttatagctaattcttcttcttcattatc

SEQ ID NO: 34869 - DNA, 96 bp, Fusarium azukicola
  misc_feature: 132
ttattcttattttattaggattattttctatttcttttctaaattccttgaattttataatagcttctgacttattccttaatagataggctttta

SEQ ID NO: 34870 - DNA, 96 bp, Fusarium azukicola
  misc_feature: 132
ccctaacccttaacttaaccacttaaccctaacctttactataactacttaaccctaacccttaacttaaccacttaaccctaacctttactataa

SEQ ID NO: 34871 - DNA, 96 bp, Fusarium azukicola
  misc_feature: 132
ttagttaaaataggaggtatagccctattaaaacttaaagagagatttttatttatatatttatatatataattaagagaaattaactctttaata

SEQ ID NO: 34872 - DNA, 96 bp, Fusarium azukicola
  misc_feature: 132
ataatattatttttccttatttatttaaaagaaggacttcttatttatttataatagaagttatattataaagagaagattaacttattaagttaa

SEQ ID NO: 34873 - DNA, 96 bp, Fusarium azukicola
  misc_feature: 132
ttaaataaactatagataattttttagaatttctaaaaaagtctcttaatagaaaaaaagctacttatatagtgcgaataattctttttctaaatt

SEQ ID NO: 34874 - DNA, 96 bp, Fusarium azukicola
  misc_feature: 132
atatctaaggaaatattatctctaacttctagaggggatttattatttaaagccgaatgcgggcttctattatatatatatacggctgcttcccca

SEQ ID NO: 34875 - DNA, 96 bp, Fusarium azukicola
  misc_feature: 132
tcttgctagcatctttgtttgttttgaccacgtattatatcactgtttactttcacagatatagagtttcatatgcctgcacattttgcttttccc

SEQ ID NO: 34876 - DNA, 96 bp, Fusarium azukicola
  misc_feature: 132
ggagtgaaaagagagagagggagaggggagaggagaggataaggagtgaaaagagagagagggagaggggagaggagaggataaggagagagaaga

SEQ ID NO: 34877 - DNA, 96 bp, Fusarium azukicola
  misc_feature: 132
ataagaataagaataagaataagaataagaataagaataagaataagaataagaataagaataagaataagaataagaataagaataagaataaga

SEQ ID NO: 34878 - DNA, 96 bp, Fusarium azukicola
  misc_feature: 132
ggaaaattaactaaaaataatataaataaaaaacctaataataaggaatataagttcctagataaaatagctactaatatatagggtccttctaga

SEQ ID NO: 34879 - DNA, 96 bp, Fusarium azukicola
  misc_feature: 132
ggaaggcttggctaagaaaataactatcttagagcatgaaaatcaagagcttcgacccaagaaaaggcgtaaggttatcacagatggcaatgttga

SEQ ID NO: 34880 - DNA, 96 bp, Fusarium azukicola
  misc_feature: 132
tattattctaattggttaaaaaggttcctacagacctttatgactgccgtcatctatgcatcaaagtataataactgccgattggctaaaaaagag

SEQ ID NO: 34881 - DNA, 96 bp, Fusarium azukicola
  misc_feature: 132
tattagttatattattttattgagaaattaaggaattatatacctctaaattattacttatattaaaatctattttatctagggtcttagaaaggg

SEQ ID NO: 34882 - DNA, 96 bp, Fusarium azukicola
  misc_feature: 132
accaattaaccctaacccttaactctactactacccctaaccctaatttcaaccaattaaccctaacccttaacgtaactactacccctaaccata

SEQ ID NO: 34883 - DNA, 96 bp, Fusarium azukicola
  misc_feature: 132
ataaaataaataagtaagttaggttaaagaagagaaaaaagggttagaaagtaataaaaaggtttaaggagagaaattaagttaaggaggaatata

SEQ ID NO: 34884 - DNA, 96 bp, Fusarium azukicola
  misc_feature: 132
atatttaaataaggtaaataaacctaatttttctactaataaagataatataactaattttatatataatataggtgctactaggtatattatata

SEQ ID NO: 34885 - DNA, 96 bp, Fusarium azukicola
  misc_feature: 132
tatataagcctaataagctattctagaaagtatatctattttaggattaaattattttttctagaattattttaagtaccttttaaataaggtgta

SEQ ID NO: 34886 - DNA, 96 bp, Fusarium azukicola
  misc_feature: 132
attaagagttagatttatagaaatactctttttatcttcctagctattttatagtagtttttagaaattaaggtttagctgttttttggttatata

SEQ ID NO: 34887 - DNA, 96 bp, Fusarium azukicola
  misc_feature: 132
tataagctaagaccctattatataaagaatggaataaaatataatataagtccgccttataataaataagctaatagctttatagaaaggataaat

SEQ ID NO: 34888 - DNA, 96 bp, Fusarium azukicola
  misc_feature: 132
atataaaaaaagtatttttataaatctaactatataaagaacctaaaaatatcttttttagatttttaaaaaaattgctttatagagaaataacta

SEQ ID NO: 34889 - DNA, 96 bp, Fusarium azukicola
  misc_feature: 132
tagaatctcctagaatctctatagaagcccgaagggcttctatctatagctgacccaaagcctgaccctaaccctgacctaatgtatgaccctgac

SEQ ID NO: 34890 - DNA, 96 bp, Fusarium azukicola
  misc_feature: 132
tacgtggtcaaaacaaacaaagatgctagcaagactcttttatcagtggcaatggtagagaagacaactagacaactatcataatggattatactc

SEQ ID NO: 34891 - DNA, 96 bp, Fusarium azukicola
  misc_feature: 132
atacctaaaaatagagtaaaaattctataatataatatgtggtttatagggatatatcactatagttggtaatataatatagaacattaacaggta

SEQ ID NO: 34892 - DNA, 96 bp, Fusarium azukicola
  misc_feature: 132
taagattataactttaaaggaggctattaatgttctatattatattaccaactatagtgatatatccctataaaccacatattatattatagaatt

SEQ ID NO: 34893 - DNA, 96 bp, Fusarium azukicola
  misc_feature: 132
atattatattttattctattctttatataatagggtcttagcttatatatatattcctttatattatctaagaaaactgattttattcttatttta

SEQ ID NO: 34894 - DNA, 96 bp, Fusarium azukicola
  misc_feature: 132
gttattgcaaactgccaggtcataaagacccagattgctattttttgcaccctaataaggctccaaaaaactggaaaattcaggaagccaataagg

SEQ ID NO: 34895 - DNA, 96 bp, Fusarium azukicola
  misc_feature: 132
ctctactactacccctaaccctaatttcaaccaattaaccctaacccttaacgtaactactacccctaaccctaatttcaaccaattaaccctaac

SEQ ID NO: 34896 - DNA, 96 bp, Fusarium azukicola
  misc_feature: 132
cctaaccctagttccggttccggttccggttccggttccggtttctagttagaccgtgcctgtacgctccttttctaccctttcaagctctaacac

SEQ ID NO: 34897 - DNA, 96 bp, Fusarium azukicola
  misc_feature: 132
gggttattagctagggtaaggcgattagggattaataagtactaagagaggtaaaggaaaccgctactatccggaggggagataacctctactgtc

SEQ ID NO: 34898 - DNA, 96 bp, Fusarium azukicola
  misc_feature: 132
aataaaattagttttcttagataatataaaggaatatatatataagctaagaccctattatataaagaatagaataaaatataatataagtccgcc

SEQ ID NO: 34899 - DNA, 96 bp, Fusarium azukicola
  misc_feature: 132
ataactttaaaggaggctattaatattctatattatattaccaactatagtgatatatccctataaaccacatattatattatagaatttttactc

SEQ ID NO: 34900 - DNA, 96 bp, Fusarium azukicola
  misc_feature: 132
gagggttattagctagggtaaggcgattagggattaataagtactaagagaggtaaaggaaaccgctactatccggaggggagataacctctactg

SEQ ID NO: 34901 - DNA, 96 bp, Fusarium azukicola
  misc_feature: 132
atctcttatctcttatctcttatctcttatctcttatctcttatctcttatctcttatctcttatctcttatttctctcttttctagctatatctc

SEQ ID NO: 34902 - DNA, 96 bp, Fusarium azukicola
  misc_feature: 132
atcactagttgggaacaagcaatgcgaatcgcgaagctcagaggagtggtcgaagcaatgcaccctaatacgtggttcgatgacctcagagaagtc

SEQ ID NO: 34903 - DNA, 96 bp, Fusarium azukicola
  misc_feature: 132
ataaggagtgaaaagagagagagggagaggggagaggagaggataaggagtgaaaagagagagagggagaggggagaggagaggataaggagagag

SEQ ID NO: 34904 - DNA, 96 bp, Fusarium azukicola
  misc_feature: 132
atactaggacctttaataagaaaccttccctatataaagaaacaactaggatatttaaataaggtgctactaggcatattgtatgtagaaaagaat

SEQ ID NO: 34905 - DNA, 96 bp, Fusarium azukicola
  misc_feature: 132
atgttatttggtctgatgagacctctattgtcttgcttcatcgtcgaggaggctatcgtatttggcgacagtctgaggaacgcttccttcgaagct

SEQ ID NO: 34906 - DNA, 96 bp, Fusarium azukicola
  misc_feature: 132
aaattattaaataatttaggcttctatactatcccttttaataaagctctctttataaataagaacttaaagattactatagctatttatatagat

SEQ ID NO: 34907 - DNA, 96 bp, Fusarium azukicola
  misc_feature: 132
ataaaactatattaattttcctagatttttaataaaatcttatttacttagtatttaaaaaacctatttacactgtatacttagctatttctctat

SEQ ID NO: 34908 - DNA, 96 bp, Fusarium azukicola
  misc_feature: 132
ataaccttagctattattatatataggttatttttctcttttccttataatattatttttccttatttatttaaaagaaggacttcttatttattt

SEQ ID NO: 34909 - DNA, 96 bp, Fusarium azukicola
  misc_feature: 132
acaagatgaatcaactcttcagtcaattcaatcattaacaactaaatcccacttttatctgatccaatcagactctttattgtgacccacttttat

SEQ ID NO: 34910 - DNA, 96 bp, Fusarium azukicola
  misc_feature: 132
aactactacccctaaccctaatttcaaccaattaaccctaacccttaacgtaactactacccctaaccataatttcaaccaattaaccctaaccct

SEQ ID NO: 34911 - DNA, 96 bp, Fusarium azukicola
  misc_feature: 131
tttcttagataatataaaggaatatatatataagctaagaccctattatataaagaatggaataaaatataatataagtccgccttataataaata

SEQ ID NO: 34912 - DNA, 96 bp, Fusarium azukicola
  misc_feature: 131
tttatctcttatctcttatttcttatttctttatctcttatctcttatctcttatctcttatctcttatctcttatctcttatctcttatctctta

SEQ ID NO: 34913 - DNA, 96 bp, Fusarium azukicola
  misc_feature: 131
attccttactttaaagaaagcccttataataatgaaaaggcaatattatataataataataataataaatagaaattcactatcgaaattcctaaa

SEQ ID NO: 34914 - DNA, 96 bp, Fusarium azukicola
  misc_feature: 131
ttggcttcctgaattttccagttttttggagccttattagggtgcaaaaaatagcaatctgggtctttatgacctggcagtttgcaataactgcat

SEQ ID NO: 34915 - DNA, 96 bp, Fusarium azukicola
  misc_feature: 131
aaccctaacccttaactctactactacccctaaccctaatttcaaccaattaaccctaacccttaacgtaactactacccctaaccataatttcaa

SEQ ID NO: 34916 - DNA, 96 bp, Fusarium azukicola
  misc_feature: 131
atatacttaaacttttaatcttagttattttaagcttaggtttattttcttagaattattttaagtgttttttaaataaggtgtaattactaagaa

SEQ ID NO: 34917 - DNA, 96 bp, Fusarium azukicola
  misc_feature: 131
ttaatcttctctttataatataacttctattataaataaataagaagtccttcttttaaataaataaggaaaaataatattataaggaaaagagaa

SEQ ID NO: 34918 - DNA, 96 bp, Fusarium azukicola
  misc_feature: 131
aaataagaataaaatcagttttcttagataatataaaggaatatatatataagctaagaccctattatataaagaatagaataaaatataatataa

SEQ ID NO: 34919 - DNA, 96 bp, Fusarium azukicola
  misc_feature: 131
ttagacttattatatagtctattactaatataaatttctatagagtttttaaaaaatcttaataagctagtatataaaaagcttatttacactgta

SEQ ID NO: 34920 - DNA, 96 bp, Fusarium azukicola
  misc_feature: 131
ttactttaccctatactctcttctctcttttactttaccctatactctcttctctcttttactttaccctccacttttattctttattttacttta

SEQ ID NO: 34921 - DNA, 96 bp, Fusarium azukicola
  misc_feature: 131
ttaagttttttattttttaaaaattaaaggaattttttaaaaatctagaaaaattataaacttataacttttttagttagacttataaaattactc

SEQ ID NO: 34922 - DNA, 96 bp, Fusarium azukicola
  misc_feature: 131
gtgaaagtaaacagtgatataatacgtggtcaaaacaaacaaagatgctagcaagactcttttatcagtggcaatggtagagaagacaactagaca

SEQ ID NO: 34923 - DNA, 96 bp, Fusarium azukicola
  misc_feature: 131
tgtatgtaccgcgtcgataagctgagagggaaaagcaaaatgtgcaggcatatgaaactctatatctgtgaaagtaaacagtgatataatacgtgg

SEQ ID NO: 34924 - DNA, 96 bp, Fusarium azukicola
  misc_feature: 131
tatttaagggtaaaatagctaagaattattctttttaggtctataactattttattttagcttttattaagctttaaagttttatgttttagtgca

SEQ ID NO: 34925 - DNA, 96 bp, Fusarium azukicola
  misc_feature: 131
tattattctaattggttaaaaaggttcctacagaccttcatgactgccgtcatcaatgcatcaaagtataataactgccgattggctaaaaaaaga

SEQ ID NO: 34926 - DNA, 96 bp, Fusarium azukicola
  misc_feature: 131
tcttatcttttatttctctcttttctagctatatctctctttcttagctttacctctctctcttagctatatctctttttcctagctatatctctt

SEQ ID NO: 34927 - DNA, 96 bp, Fusarium azukicola
  misc_feature: 131
agaggggttatttccttcgagaaagctattttctattatagttatatccttagagataactagttttttattcttaaaatcctaaatcttataaga

SEQ ID NO: 34928 - DNA, 96 bp, Fusarium azukicola
  misc_feature: 131
tatctatctatcttctataagtctctcttagaagctagatattatctctttattacttttcttcctagttatctaggaaatcaactatttataact

SEQ ID NO: 34929 - DNA, 96 bp, Fusarium azukicola
  misc_feature: 131
tatctatataaatagctatagtaatctttaagttcttatttataaagagagctttattaaaagggatagtatagaagcctaaattatttaataatt

SEQ ID NO: 34930 - DNA, 96 bp, Fusarium azukicola
  misc_feature: 131
tataatattatttttccttatttatttaaaagaaggacttcttatttatttataatagaagttatattataaagagaagattaacttattaagtta

SEQ ID NO: 34931 - DNA, 96 bp, Fusarium azukicola
  misc_feature: 131
agtctcttaatagaaaaaaagctacttatatagtgcgaataattctttttctaaactaccttataagggatttttttaaaaagttttaaaaaacta

SEQ ID NO: 34932 - DNA, 96 bp, Fusarium azukicola
  misc_feature: 131
tagaggtatataattccttaatttctcaataaaataatataactaataatatactaggacctttaataagaaaccttccctatataaagaaataac

SEQ ID NO: 34933 - DNA, 96 bp, Fusarium azukicola
  misc_feature: 131
tagaagtaaataataaagctctaaccttttctaatatagtcctatttatcctttctataaagccattagcttatttattatgaggcggacttatat

SEQ ID NO: 34934 - DNA, 96 bp, Fusarium azukicola
  misc_feature: 131
tactttctattactttcttacttttctttcttttactcttccccttctccttttatcttcttctctttttctttactcttcccctcctttatttct

SEQ ID NO: 34935 - DNA, 96 bp, Fusarium azukicola
  misc_feature: 131
atattaacagcctcctttaaagttataatcttataagggttatagctttatacgttcttattattagaggaaaaaattaaacctctattattatta

SEQ ID NO: 34936 - DNA, 96 bp, Fusarium azukicola
  misc_feature: 131
taactttaaaggaggctattaatgttctatattatattaccaactatagtgatatatccctataaaccacatattatattatagaatttttactct

SEQ ID NO: 34937 - DNA, 96 bp, Fusarium azukicola
  misc_feature: 131
taaataagctaatggctttatagaaaggataaataggactatattagaaaaggttagagctttattatttacttctaacctacctaaatacctatg

SEQ ID NO: 34938 - DNA, 96 bp, Fusarium azukicola
  misc_feature: 131
aaaaggctatagaggaccttaagctagaaggcttcaaagccttaggcacttatataggccctatccggcctagaagagccttcttacaagataaac

SEQ ID NO: 34939 - DNA, 96 bp, Fusarium azukicola
  misc_feature: 131
gtcttatgcaccttattggcttcctgagttttccagttttttggagccttattagggtgcaaaaaatagcaatctgggtctttatgacctagcagt

SEQ ID NO: 34940 - DNA, 96 bp, Fusarium azukicola
  misc_feature: 131
acctctagaatctcctagaatctctatagaagcccgaagggcttctatctatagctgacccaaagcctgaccctaaccctgacctaatgtatgacc

SEQ ID NO: 34941 - DNA, 96 bp, Fusarium azukicola
  misc_feature: 131
cctagttatttctttatatagggaaggtttcttattaaaggtcctagtatattattagttatattattttattgagaaattaaggaattatatacc

SEQ ID NO: 34942 - DNA, 96 bp, Fusarium azukicola
  misc_feature: 131
gctttataatgatatataatctattactaaagccttataaatggcttagttatagcaaaaaccggttttgatggatagaatgcaacgctgaagggt

SEQ ID NO: 34943 - DNA, 96 bp, Fusarium azukicola
  misc_feature: 131
aagagacctccgggctcataacctgtcagtgtgactaggttataaatagttgatttcctagataactaggaagaaaagtaataaagagataatatc

SEQ ID NO: 34944 - DNA, 96 bp, Fusarium azukicola
  misc_feature: 131
cttttactttaccctatactctcttctctcttttactttaccctccacttttattctttattttactttaccctatactctcttctctcttttact

SEQ ID NO: 34945 - DNA, 96 bp, Fusarium azukicola
  misc_feature: 131
agttaatcttctctttataatataacttctattataaataaataagaagtccttcttttaaataaataaggaaaaataatattataaggaaaagag

SEQ ID NO: 34946 - DNA, 96 bp, Fusarium azukicola
  misc_feature: 131
cagttttcttctttttctaaggcttagaagtcttagaaaaatatatctcattagaatctattttttctagtctcttagattcatctataaggctag

SEQ ID NO: 34947 - DNA, 96 bp, Fusarium azukicola
  misc_feature: 131
agatagtataaatagcgttttcttacatggatcgggttagactatatgggtagggtatagataagagggttattagctagggtaaggcgattaggg

SEQ ID NO: 34948 - DNA, 96 bp, Fusarium azukicola
  misc_feature: 131
atactcttattctctctatttatagttatatttattcctaaaaagtctttaacttctcctaaggattagattactatatccttagatagaatattt

SEQ ID NO: 34949 - DNA, 96 bp, Fusarium azukicola
  misc_feature: 131
aatttcaaccaattaaccctaacccttaacgtaactactacccctaaccctaatttcaaccaattaaccctaacccttaacgtaactactacccct

SEQ ID NO: 34950 - DNA, 96 bp, Fusarium azukicola
  misc_feature: 131
aattaaccctaacccttaactctactactacccctaaccctaatttcaaccaattaaccctaacccttaacgtaactactacccctaaccataatt

SEQ ID NO: 34951 - DNA, 96 bp, Fusarium azukicola
  misc_feature: 130
ttttttcctctaataataagaacgtataaagctataacccttataagattataactttaaaggaggctattaatgttctatattatattaccaact

SEQ ID NO: 34952 - DNA, 96 bp, Fusarium azukicola
  misc_feature: 130
gacaactagacaactatcataatggattatactccctacctgttccatcatcatcatcatgggtcgtcgtgcgcttacagcagaggaaaaggcaaa

SEQ ID NO: 34953 - DNA, 96 bp, Fusarium azukicola
  misc_feature: 130
tattattagttatattattttattgagaaattaaggaattatatacctctaaattattacttatattaaaatctattttatctagggtcttagaaa

SEQ ID NO: 34954 - DNA, 96 bp, Fusarium azukicola
  misc_feature: 130
attccttactttaaagaaagcccttataataataaaaaggcaatattatataataataataataataaatagaaattcactatcgaaattcctaaa

SEQ ID NO: 34955 - DNA, 96 bp, Fusarium azukicola
  misc_feature: 130
tttagattcctttttcttagaagtcttatgcaccttattggcttcctgaattttccagttttttggagccttattagggtgcaaaaaatagcaatc

SEQ ID NO: 34956 - DNA, 96 bp, Fusarium azukicola
  misc_feature: 130
atctgtctctcggatagctgatacttatctggtgctccttctggaaaggcaacccagcacgaccttgtgtttgggtttctatgccatctttcacaa

SEQ ID NO: 34957 - DNA, 96 bp, Fusarium azukicola
  misc_feature: 130
ttctcgattatgccggcaatgttctgaacttggttggcaatctctctcctcgccgccgcctcgatacctttatggtgtttctttaaatgcggctcc

SEQ ID NO: 34958 - DNA, 96 bp, Fusarium azukicola
  misc_feature: 130
atattattagttatattattttattgagaaattaaggaattatatacctctaaattattacttatattaaaatctattttatctagggtcttagaa

SEQ ID NO: 34959 - DNA, 96 bp, Fusarium azukicola
  misc_feature: 130
ttatctcttatctcttatctcttatctcttatctcttatctcttatttctctcttttctagctatatctctctttcttagctttacctctctctct

SEQ ID NO: 34960 - DNA, 96 bp, Fusarium azukicola
  misc_feature: 130
atataagcctaataagctattctagaaagtatatctattttaggattaaattattttttctagaattattttaagtaccttttaaataaggtgtaa

SEQ ID NO: 34961 - DNA, 96 bp, Fusarium azukicola
  misc_feature: 130
gttaagtagttatagtaaaggttagggttaagtggttaagttaagggttagggttaagtagttatagtaaaggttagggttaagtggttaagttaa

SEQ ID NO: 34962 - DNA, 96 bp, Fusarium azukicola
  misc_feature: 130
tactaggttttttatttatattatttttagttaattttcctagtttgcagttttcgcagtttttaacttaatataggtcctcactagtatatttaa

SEQ ID NO: 34963 - DNA, 96 bp, Fusarium azukicola
  misc_feature: 130
attctgaccgctttaaaggcgcctcaactgagcttattaaggcgttctttatgcttctgatgatgccggcgatccaggttatcaagcaggaaaaca

SEQ ID NO: 34964 - DNA, 96 bp, Fusarium azukicola
  misc_feature: 130
tgtggtttatagggatatatcactatagttggtaatataatatagaatattaatagcctcctttaaagttataatcttataagggttatagcttta

SEQ ID NO: 34965 - DNA, 96 bp, Fusarium azukicola
  misc_feature: 130
cctaacccttaactctactactacccctaaccctaatttcaaccaattaaccctaacccttaacgtaactactacccctaaccataatttcaacca

SEQ ID NO: 34966 - DNA, 96 bp, Fusarium azukicola
  misc_feature: 130
tgatatataatctattactaaagccttataaatggcttagttatagcaaaaaccggttttaatggatagaatgcaacgctgaagggtttaggaaac

SEQ ID NO: 34967 - DNA, 96 bp, Fusarium azukicola
  misc_feature: 130
agggtaaggcgattagggattaataagtactaagagaggtaaaggaaaccgctactatccggaggggagataacctctactgtccggggaagaaga

SEQ ID NO: 34968 - DNA, 96 bp, Fusarium azukicola
  misc_feature: 130
gtcataaagacccagattgctattttttgcaccctaataaggctccaaaaaactggaaaattcaggaagccaataaggtgcataagacttctaaga

SEQ ID NO: 34969 - DNA, 96 bp, Fusarium azukicola
  misc_feature: 130
gttaatcttctctttataatataacttctattataaataaataagaagtccttcttttaaataaataaggaaaaataatattataaggaaaagaga

SEQ ID NO: 34970 - DNA, 96 bp, Fusarium azukicola
  misc_feature: 130
taacctctagaatctcctagaatctctatagaagcccgaagggcttctatctatagctgacccaaagcctgaccctaaccctgacctaatgtatga

SEQ ID NO: 34971 - DNA, 96 bp, Fusarium azukicola
  misc_feature: 130
aataaagccctagattatggtataaccttctctctaaattattaaataatttaggcttctacgctatcccttttaataaagctctctttataaata

SEQ ID NO: 34972 - DNA, 96 bp, Fusarium azukicola
  misc_feature: 130
aatatactagtgaggacctatattaagttaaaaactgcgaaaactgcaaactaggaaaattaactaaaaataatataaataaaaaacctagtaata

SEQ ID NO: 34973 - DNA, 96 bp, Fusarium azukicola
  misc_feature: 130
tattaacagcctcctttaaagttataatcttataagggttatagctttatacgttcttattattagaggaaaaaattaaacctctattattattat

SEQ ID NO: 34974 - DNA, 96 bp, Fusarium azukicola
  misc_feature: 130
tatctcccctccggatagtagcggtttcctttacctctcttagtacttattaatccctaatcgccttaccctagctaataaccctcttatctatac

SEQ ID NO: 34975 - DNA, 96 bp, Fusarium azukicola
  misc_feature: 130
tatattttattctattctttatataatagggtcttagcttatatatatattcctttatattatctaagaaaactgattttattcttattttattag

SEQ ID NO: 34976 - DNA, 96 bp, Fusarium azukicola
  misc_feature: 130
aagggtaaaatagctaagaattattctttttaggtctataactattttattttagcttttattaagctttaaagttttatgttttagtgcacagta

SEQ ID NO: 34977 - DNA, 96 bp, Fusarium azukicola
  misc_feature: 130
taattttagctattttaagcttaatttcgacttttatagcttttttaaaaaataccttttaaggtgaaaatataagtgtctcgttcgcttgtctgt

SEQ ID NO: 34978 - DNA, 96 bp, Fusarium azukicola
  misc_feature: 130
taaccctaacccttaacttaactactactcttaaactttaactataacctttatttaaataaacccctctcttattattattactcttctattatt

SEQ ID NO: 34979 - DNA, 96 bp, Fusarium azukicola
  misc_feature: 130
gtttatagggatatatcactatagttagtaatataatatagaatattaatagcctcctttaaagttataatcttataagggttatagctttatacg

SEQ ID NO: 34980 - DNA, 96 bp, Fusarium azukicola
  misc_feature: 130
ccctaacccttaactctactactacccctaaccctaatttcaaccaattaaccctaacccttaacgtaactactacccctaaccataatttcaacc

SEQ ID NO: 34981 - DNA, 96 bp, Fusarium azukicola
  misc_feature: 130
gaagacaactagacaactatcataatggattatactccctacctgttccatcatcatcatcatgggtcgtcgtgcgcttacagcagaggaaaaggc

SEQ ID NO: 34982 - DNA, 96 bp, Fusarium azukicola
  misc_feature: 130
gaagtcttatgcaccttattggcttcctgaattttccagttttttggagccttattagggtgcaaaaaatagcaatctgggtctttatgacctggc

SEQ ID NO: 34983 - DNA, 96 bp, Fusarium azukicola
  misc_feature: 130
ctcttatctcttatctcttatctcttatctcttatctcttatctcttatttctctcttttctagctatatctctctttcttagctttacctctctc

SEQ ID NO: 34984 - DNA, 96 bp, Fusarium azukicola
  misc_feature: 130
gagaaataaaggaggggaagagtaaagaaaaagagaagaagataaaaggagaaggggaagagtaaaagaaagaaaagtaagaaagtaatagaaagt

SEQ ID NO: 34985 - DNA, 96 bp, Fusarium azukicola
  misc_feature: 130
aagctgtctatacccatcatatatatatatatgatatggtatggatatagatgatgttattatttattattataatcgtaataacgaaagaggaag

SEQ ID NO: 34986 - DNA, 96 bp, Fusarium azukicola
  misc_feature: 130
aaactgccaggtcataaagacccagattgctattttttgcaccctaataaggctccaaaaaactggaaaattcaggaagccaataaggtgcataag

SEQ ID NO: 34987 - DNA, 96 bp, Fusarium azukicola
  misc_feature: 130
aaagagagagagggagaggggagaggagaggataaggagtgaaaagagagagagggagaggggagaggagaggataaggagagaaaagagagagag

SEQ ID NO: 34988 - DNA, 96 bp, Fusarium azukicola
  misc_feature: 130
caatatgcctagtagcaccttatttaaatatcctagttgtttctttatatagggaaggtttcttattaaaggtcctagtatattattagttatatt

SEQ ID NO: 34989 - DNA, 96 bp, Fusarium azukicola
  misc_feature: 130
aagaaaactaattttattcttattttattaggattattttctatttcttttctaaattccttaaattttataatagcttctaacttattccttaat

SEQ ID NO: 34990 - DNA, 96 bp, Fusarium azukicola
  misc_feature: 130
ataaaattagttttcttagataatataaaggaatatatatataagctaagaccctattatataaagaatagaataaaatataatataagtccgcct

SEQ ID NO: 34991 - DNA, 96 bp, Fusarium azukicola
  misc_feature: 130
aatataaaaaaagtatttttataaatctaactatataaagaacctaaaaatatcttttttagatttttaaaaaaattgctttatagagaaataact

SEQ ID NO: 34992 - DNA, 96 bp, Fusarium azukicola
  misc_feature: 130
agtataagaagtaatctagctttaatatttaattaagatatattaaattataaaggattaattaattaaatagagataatataggttaagggattt

SEQ ID NO: 34993 - DNA, 96 bp, Fusarium azukicola
  misc_feature: 130
aattccttaatatctaaggaaatattatctctaacttctagaggggatttattatttaaagccgaatgcgggcttctattatatatatatatagct

SEQ ID NO: 34994 - DNA, 96 bp, Fusarium azukicola
  misc_feature: 129
cctctctttaaatatactagtgaggacctatattaagttaaaaactgcgaaaactgcaaactaggaaaattaactaaaaataatataaataaaaaa

SEQ ID NO: 34995 - DNA, 96 bp, Fusarium azukicola
  misc_feature: 129
agggtattattctaattggttaaaaaggttcctatagacctttatgactgccgtcatctatgcatcaaagtataataactgccgattggctaaaaa

SEQ ID NO: 34996 - DNA, 96 bp, Fusarium azukicola
  misc_feature: 129
aagggtattattctaattggttaaaaaggttcctacagacctttatgactgccgtcatctatgcatcaagtataataactgccgattggctaaaaa

SEQ ID NO: 34997 - DNA, 96 bp, Fusarium azukicola
  misc_feature: 129
taagggtattattctaattggttaaaaaggttcctacagacctttatgactgccgtcatctatgcatcaagtataataactgccgattggctaaaa

SEQ ID NO: 34998 - DNA, 96 bp, Fusarium azukicola
  misc_feature: 129
ttcttcttcctctttcgttattacgattataataataaataataacatcatctatatccataccatatcatatatatatatatgatgggtatagac

SEQ ID NO: 34999 - DNA, 96 bp, Fusarium azukicola
  misc_feature: 129
ttcttaaggctatttttgcctccctttatctcttatctcttatttcttatttctttatctcttatctcttatctcttatctcttatctcttatctc

SEQ ID NO: 35000 - DNA, 96 bp, Fusarium azukicola
  misc_feature: 129
tataagattataactttaaaggaggctattaatattctatattatattactaactatagtgatatatccctataaactatatattatattatagaa

SEQ ID NO: 35001 - DNA, 96 bp, Fusarium azukicola
  misc_feature: 129
ttatcgtaatcgtctgatccattagcagcaggggagcatgtctcgacgtagtgtggattgatcttctcaatcatccaattgagcacattgccaatc

SEQ ID NO: 35002 - DNA, 96 bp, Fusarium azukicola
  misc_feature: 129
ttataatataacttctattataaataaataagaagtccttcttttaaataaataaggaaaaataatattataaggaaaagagaaaaataacctata

SEQ ID NO: 35003 - DNA, 96 bp, Fusarium azukicola
  misc_feature: 129
ttataactttaaaggaggctattaatattctatattatattaccaactatagtgatatatccctataaaccacatattatattatagaatttttac

SEQ ID NO: 35004 - DNA, 96 bp, Fusarium azukicola
  misc_feature: 129
agataatacaaaggaatatatatataagctaagaccctattatataaagaatggaataaaatataatataagtccgcctcataataaataagctaa

SEQ ID NO: 35005 - DNA, 96 bp, Fusarium azukicola
  misc_feature: 129
tcaaggaatttagaaaagaaatagaaaataatcctaataaaataagaataaaatcagttttcttagataatataaaggaatatatatataagctaa

SEQ ID NO: 35006 - DNA, 96 bp, Fusarium azukicola
  misc_feature: 129
aatgcagttattgcaaactgccaggtcataaagacccagattgctattttttgcaccctaataaggctccaaaaaactggaaaattcaggaagcca

SEQ ID NO: 35007 - DNA, 96 bp, Fusarium azukicola
  misc_feature: 129
tctctttaaatatactagtgaggacctatattaagttaaaaactgcgaaaactgcaaactaggaaaattaactaaaaataatataaataaaaaacc

SEQ ID NO: 35008 - DNA, 96 bp, Fusarium azukicola
  misc_feature: 129
tctcttatctcttatctcttatctcttatctcttatctcttatctcttatttctctcttttctagctatatctctctttcttagctttacctctct

SEQ ID NO: 35009 - DNA, 96 bp, Fusarium azukicola
  misc_feature: 129
ataaagtcttagaaaagacttaaaaaagaagtataatcttcttttaagtataaacccttaggtagagacctccgggcttataacctattagtgaga

SEQ ID NO: 35010 - DNA, 96 bp, Fusarium azukicola
  misc_feature: 129
tctcaatcttccctttgttttgcccttcttcgacccggataaatacttcaaagtggtcgtcaaggacttctctgaggtcatcgaaccacgtattag

SEQ ID NO: 35011 - DNA, 96 bp, Fusarium azukicola
  misc_feature: 129
agaagctattataaaattcaaggaatttagaaaagaaatagaaaataatcctaataaaataagaataaaatcagttttcttagataatataaagga

SEQ ID NO: 35012 - DNA, 96 bp, Fusarium azukicola
  misc_feature: 129
tcctctcccctctccctctctctcttttcactccttatcctctcctctcccctctccctctctctcttttcactccttctcctctcctctcccccc

SEQ ID NO: 35013 - DNA, 96 bp, Fusarium azukicola
  misc_feature: 129
gcaaactgccaggtcataaagacccagattgctattttttgcaccctaataaggctccaaaaaactggaaaattcaggaagccaataaggtgcata

SEQ ID NO: 35014 - DNA, 96 bp, Fusarium azukicola
  misc_feature: 129
tatgatagttgtctagttgtcttctctaccattgccactgataaaagagtcttgctagcatctttgtttgttttgaccacgtattatatcactgtt

SEQ ID NO: 35015 - DNA, 96 bp, Fusarium azukicola
  misc_feature: 129
atatataagctaagaccctattatataaagaatggaataaaatataatataagtccgccttataataaataagctaatagctttatagaaaggata

SEQ ID NO: 35016 - DNA, 96 bp, Fusarium azukicola
  misc_feature: 129
tatagtagctataggttaggtaaatatacctaaaaatagagtaaaaattctataatataatatatagtttatagggatatatcactatagttggta

SEQ ID NO: 35017 - DNA, 96 bp, Fusarium azukicola
  misc_feature: 129
cttattactaggttttttatttatattatttttagttaattttcctagtttgcagttttcgcagtttttaacttaatataggtcctcactagtata

SEQ ID NO: 35018 - DNA, 96 bp, Fusarium azukicola
  misc_feature: 129
tataataataatagaggtttaatttttcctctaataataagaacgtataaagctataacccttataagattataactttaaaggaggctattaatg

SEQ ID NO: 35019 - DNA, 96 bp, Fusarium azukicola
  misc_feature: 129
aataaaactatattaattttcctagatttttaataaaatcttatttacttagtatttaaaaaacctatttacactgtatacttagctatttctcta

SEQ ID NO: 35020 - DNA, 96 bp, Fusarium azukicola
  misc_feature: 129
tactttaccctatactctcttctctcttttactttaccctatactctcttctctcttttactttaccctccacttttattctttattttactttac

SEQ ID NO: 35021 - DNA, 96 bp, Fusarium azukicola
  misc_feature: 129
tacctaaaaatagagtaaaaattctataatataatatgtggtttatagggatatatcactatagttggtaatataatatagaacattaacatatat

SEQ ID NO: 35022 - DNA, 96 bp, Fusarium azukicola
  misc_feature: 129
taatatctagcttctaagagagacttatagaagatagatagataaaagtgggtcacaataaagagtctgattggatcagataaaagtgggattcag

SEQ ID NO: 35023 - DNA, 96 bp, Fusarium azukicola
  misc_feature: 129
taagtacagtatgagatagtataaatagcgttttcttacatggatcgggttagactatatgggtagggtatagataagagggttattagctagggt

SEQ ID NO: 35024 - DNA, 96 bp, Fusarium azukicola
  misc_feature: 129
taaggcggacttatattatattttattccattctttatataatagggtcttagcttatatatatattcctttatattatctaagaaaactgatttt

SEQ ID NO: 35025 - DNA, 96 bp, Fusarium azukicola
  misc_feature: 129
taagattataactttaaaggaggctattaatattctatattatattactaactatagtgatatatccctataaaccatatattatattatagaatt

SEQ ID NO: 35026 - DNA, 96 bp, Fusarium azukicola
  misc_feature: 129
taagaagtccttcttttaaataaataaggaaaaataatattataaggaaaagagaaaaataacctatatataataatagctaaggttatttctaat

SEQ ID NO: 35027 - DNA, 96 bp, Fusarium azukicola
  misc_feature: 129
taaatgttaatgttctatattatattaccaactatagtgatatatccctataaaccacatattatattatagaatttttactctatttttaggtat

SEQ ID NO: 35028 - DNA, 96 bp, Fusarium azukicola
  misc_feature: 129
aaatatcctaatagtaatataaataagctataaatctatttaaaattaagaaaagccttatatagcctaaaataaagccctagattatagtataac

SEQ ID NO: 35029 - DNA, 96 bp, Fusarium azukicola
  misc_feature: 129
agcggtttcctttacctctcttagtacttattaatccctaatcgccttaccctagctaataaccctcttatctataccctacccatatagtctaac

SEQ ID NO: 35030 - DNA, 96 bp, Fusarium azukicola
  misc_feature: 129
ccttaacgtaactactacccctaaccctaatttcaaccaattaaccctaacccttaacgtaactactacccctaaccataatttcaaccaattaac

SEQ ID NO: 35031 - DNA, 96 bp, Fusarium azukicola
  misc_feature: 129
cctctccctctctctcttttcactccttatcctctcctctcccctctccctctctctcttttcactccttctcctctcctctcccctctccctctc

SEQ ID NO: 35032 - DNA, 96 bp, Fusarium azukicola
  misc_feature: 129
gagaagacaactagacaactatcataatggattatactccctacctgttccatcatcatcatcatgggtcgtcgtgcgcttacagcagaggaaaag

SEQ ID NO: 35033 - DNA, 96 bp, Fusarium azukicola
  misc_feature: 129
aagaaagagaggtataactaggaaaaagagatatagctaagagagagaggtaaagctaagaaagagagatatagctagaaaagagagaaataaaag

SEQ ID NO: 35034 - DNA, 96 bp, Fusarium azukicola
  misc_feature: 129
ctttgtgaaagatggcatagaaacccaaacacaaggtcgtgctgggttgcctttccagaaggagcaccagataagtatcagctatccgagagacag

SEQ ID NO: 35035 - DNA, 96 bp, Fusarium azukicola
  misc_feature: 129
ctttctataaagctattagcttatttattataaggcggacttatattatattttattccattctttatataatagggtcttagcttatatatatat

SEQ ID NO: 35036 - DNA, 96 bp, Fusarium azukicola
  misc_feature: 129
cttatcttttatttctctcttttctagctatatctctctttcttagctttacctctctctcttagctatatctctttttcctagctatatctcttt

SEQ ID NO: 35037 - DNA, 96 bp, Fusarium azukicola
  misc_feature: 129
cttataagattataactttaaaggaggctattaatattctatattatattactaactatagtgatatatccctataaaccatatattatattatag

SEQ ID NO: 35038 - DNA, 96 bp, Fusarium azukicola
  misc_feature: 129
ctctttaaatatactagtgaggacctatattaagttaaaaactgcgaaaactgcaaactaggaaaattaactaaaaataatataaataaaaaacct

SEQ ID NO: 35039 - DNA, 96 bp, Fusarium azukicola
  misc_feature: 129
aggtatataattccttaatttctcaataaaataatataactaataatatactaggacctttaataagaaaccttccctatataaagaaataactag

SEQ ID NO: 35040 - DNA, 96 bp, Fusarium azukicola
  misc_feature: 129
agaataaaattagttttcttagataatataaaggaatatatatataagctaagaccctattatataaagaatagaataaaatataatataagtccg

SEQ ID NO: 35041 - DNA, 96 bp, Fusarium azukicola
  misc_feature: 129
cattatacttcttccctagaccttagaggctaaccccttccttaccctagaggttagctttactttctaactcttctctcttagataatagtaatt

SEQ ID NO: 35042 - DNA, 96 bp, Fusarium azukicola
  misc_feature: 129
attattatatatataaaagcaatagccgctattagatttcctatcatctaggctactgccccagtctgagtctgtatagcctctaattatattgtg

SEQ ID NO: 35043 - DNA, 96 bp, Fusarium azukicola
  misc_feature: 129
aactgccttaaaatgcagttattgcaaactgccaggtcataaagacccagattgctattttttgcaccctaataaggctccaaaaaactggaaaat

SEQ ID NO: 35044 - DNA, 96 bp, Fusarium azukicola
  misc_feature: 129
attcaaggaatttagaaaagaaatagaaaataatcctaataaaataagaataaaatcagttttcttagataatataaaggaatatatatataagct

SEQ ID NO: 35045 - DNA, 96 bp, Fusarium azukicola
  misc_feature: 129
aaaataaataagtaagttaggttaaagaagagaaaaaagggttagaaagtaataaaaaggtttaaggagagaaattaagttaaggaggaatataat

SEQ ID NO: 35046 - DNA, 96 bp, Fusarium azukicola
  misc_feature: 129
attactttctattactttcttacttttctttcttttactcttccccttctccttttatcttcttctctttttctttactcttcccctcctttattt

SEQ ID NO: 35047 - DNA, 96 bp, Fusarium azukicola
  misc_feature: 129
atctcttatctcttatttcttatttctttatctcttatctcttatctcttatctcttatctcttatctcttatctcttatctcttatctcttatct

SEQ ID NO: 35048 - DNA, 96 bp, Fusarium azukicola
  misc_feature: 129
atataactattcctattggatttaaagaccttataattaaggatttccttaaggattataaaaagaaatatcctaatagtagtataaataagctat

SEQ ID NO: 35049 - DNA, 96 bp, Fusarium azukicola
  misc_feature: 129
atagtagcggtttcctttacctctcttagtacttattaatccctaatcgccttaccctagctaataaccctcttatctataccctacccatatagt

SEQ ID NO: 35050 - DNA, 96 bp, Fusarium azukicola
  misc_feature: 129
ataagaataaaattagttttcttagataatataaaggaatatatatataagctaagaccctattatataaagaatggaataaaatataatataagt

SEQ ID NO: 35051 - DNA, 96 bp, Fusarium azukicola
  misc_feature: 129
agggttattagctagggtaaggcgattagggattaataagtactaagagaggtaaaggaaaccgctactatccggaggggagataacctctactgt

SEQ ID NO: 35052 - DNA, 96 bp, Fusarium azukicola
  misc_feature: 129
aaatccaataggaatagttatatatatatctgtatctatatctgcattggcaaatgcattcttaacatcatattgttgtaaatagtagttattcct

SEQ ID NO: 35053 - DNA, 96 bp, Fusarium azukicola
  misc_feature: 129
agagagaagagttagaaagtaaagctaacctctagggtaaggaaggggttagcctctaaggtctagggaagaagtataatggctaaccactagtgt

SEQ ID NO: 35054 - DNA, 96 bp, Fusarium azukicola
  misc_feature: 129
actaggacctttaataagaaaccttccctatataaagaaacaactaggatatttaaataaggtgctactaggcatattgtatgtagaaaagaattt

SEQ ID NO: 35055 - DNA, 96 bp, Fusarium azukicola
  misc_feature: 128
aaagtctatctattaaggaataagtcagaagctattataaaatttaaggaatttagaaaagaaatagaaaataatcctaataaaataagaataaaa

SEQ ID NO: 35056 - DNA, 96 bp, Fusarium azukicola
  misc_feature: 128
aagggtattattctaattggttaaaaaggttcctatagacctttatgactgccgtcatctatgcatcaaagtataataactgccgattggctaaaa

SEQ ID NO: 35057 - DNA, 96 bp, Fusarium azukicola
  misc_feature: 128
cataaagacccagattgctattttttgcaccctaataaggctccaaaaaactggaaaattcaggaagccaataaggtgcataagacttctaagaaa

SEQ ID NO: 35058 - DNA, 96 bp, Fusarium azukicola
  misc_feature: 128
gccactattcaccatccatgtatgtaccgcgtcgataagctgagagggaaaagcaaaatgtgcaggcatatgaaactctatatctgtgaaagtaaa

SEQ ID NO: 35059 - DNA, 96 bp, Fusarium azukicola
  misc_feature: 128
ttcctagttatctaggaaatcaactatttataacctagtcacactgacaggttatgagcccggaggtctcttcctaagggtttatacttaaaagaa

SEQ ID NO: 35060 - DNA, 96 bp, Fusarium azukicola
  misc_feature: 128
gaggggttatttccttcgagaaagctattttctattatagttatatccttagagataactagttttttattcttaaaatcctaaatcttataagaa

SEQ ID NO: 35061 - DNA, 96 bp, Fusarium azukicola
  misc_feature: 128
tatagataagagggttattagctagggtaaggcgattagggattaataagtactaagagaggtaaaggaaaccgctactatccggaggggagataa

SEQ ID NO: 35062 - DNA, 96 bp, Fusarium azukicola
  misc_feature: 128
ttatctatataaatagctatagtaatctttaagttcttatttataaagagagctttattaaaagggatagtatagaagcctaaattatttaataat

SEQ ID NO: 35063 - DNA, 96 bp, Fusarium azukicola
  misc_feature: 128
gaaatatcctaatagtaatataaataagctataaatctatttaaaattaagaaaagccttatatagcctaaaataaagccctagattatagtataa

SEQ ID NO: 35064 - DNA, 96 bp, Fusarium azukicola
  misc_feature: 128
agaatctattttttctagtctcttagatttatctataaggctagaagaaagtaattctaggttataagccttaggattactccttaaagcttataa

SEQ ID NO: 35065 - DNA, 96 bp, Fusarium azukicola
  misc_feature: 128
ttataagattataactttaaaggaggctattaatattctatattatattactaactatagtgatatatccctataaaccatatattatattataga

SEQ ID NO: 35066 - DNA, 96 bp, Fusarium azukicola
  misc_feature: 128
ccttagctattattatatataggttatttttctcttttccttataatattatttttccttatttatttaaaagaaggacttcttatttatttataa

SEQ ID NO: 35067 - DNA, 96 bp, Fusarium azukicola
  misc_feature: 128
agataatataaaggaatatatatataagctaagaccctattatataaagaatagaataaaatataatataagtccgccttataataaataagctaa

SEQ ID NO: 35068 - DNA, 96 bp, Fusarium azukicola
  misc_feature: 128
cagcatactatataactaaaaatcgctaaaacctaagtttctaaaaactgctataaaatagctagaaacttaaaaaaagtaatcttatagatctaa

SEQ ID NO: 35069 - DNA, 96 bp, Fusarium azukicola
  misc_feature: 128
tagcggtttcctttacctctcttagtacttattaatccctaatcgccttaccctagctaataaccctcttatctataccctacccatatagtctaa

SEQ ID NO: 35070 - DNA, 96 bp, Fusarium azukicola
  misc_feature: 128
ttactttaccctatactctcttctctcttttactttaccctccacttttattctttattttactttaccctatactctcttctctcttttacttta

SEQ ID NO: 35071 - DNA, 96 bp, Fusarium azukicola
  misc_feature: 128
aagttaatcttctctttataatataacttctattataaataaataagaagtccttcttttaaataaataaggaaaaataatattataaggaaaaga

SEQ ID NO: 35072 - DNA, 96 bp, Fusarium azukicola
  misc_feature: 128
tatatatgatatggtatggatatagatgatgttattatttattattataatcgtaataacgaaagaggaagaagaagaagaagaagaagaagaaga

SEQ ID NO: 35073 - DNA, 96 bp, Fusarium azukicola
  misc_feature: 128
agctaagagagagaggtaaagctaagaaagagagatatagctagaaaagagagaaataagagataagagataagagataagagataagagataaga

SEQ ID NO: 35074 - DNA, 96 bp, Fusarium azukicola
  misc_feature: 128
tctattaaggaataagtcagaagctattataaaatttaaggaatttagaaaagaaatagaaaataatcctaataaaataagaataaaatcagtttt

SEQ ID NO: 35075 - DNA, 96 bp, Fusarium azukicola
  misc_feature: 128
tcatcttaacttaagaagtctaattaaatatataaaaataaaagatcctctctttaaatatactagtgaggacctatatcaagttaaaaactgcga

SEQ ID NO: 35076 - DNA, 96 bp, Fusarium azukicola
  misc_feature: 128
tcctagttatttctttatatagggaaggtttcttattaaaggtcctagtatattattagttatattattttattgagaaattaaggaattatatac

SEQ ID NO: 35077 - DNA, 96 bp, Fusarium azukicola
  misc_feature: 128
ctctaataataagaacgtataaagctataacccttataagattataactttaaaggaggctattaatattctatattatattaccaactatagtga

SEQ ID NO: 35078 - DNA, 96 bp, Fusarium azukicola
  misc_feature: 128
agaaaactaattttattcttattttattaggattattttctatttcttttctaaattccttaaattttataatagcttctaacttattccttaata

SEQ ID NO: 35079 - DNA, 96 bp, Fusarium azukicola
  misc_feature: 128
aaaataagaataaaatcagttttcttagataatataaaggaatatatatataagctaagaccctattatataaagaatagaataaaatataatata

SEQ ID NO: 35080 - DNA, 96 bp, Fusarium azukicola
  misc_feature: 128
tataagattactttttttaagtttctagctattttatagcagtttttagaaacttaggttttagcgatttttagttatatagtatgctgtctcgtt

SEQ ID NO: 35081 - DNA, 96 bp, Fusarium azukicola
  misc_feature: 128
tataactttaaaggaggctattaatattctatattatattactaactatagtgatatatccctataaactatatattatattatagaatttttact

SEQ ID NO: 35082 - DNA, 96 bp, Fusarium azukicola
  misc_feature: 128
tagtagcggtttcctttacctctcttagtacttattaatccctaatcgccttaccctagctaataaccctcttatctataccctacccatatagtc

SEQ ID NO: 35083 - DNA, 96 bp, Fusarium azukicola
  misc_feature: 128
cagattgctattttttgcaccctaataaggctccaaaaaactggaaaattcaggaagccaataaggtgcataagacttctaagaaaaaggaatcta

SEQ ID NO: 35084 - DNA, 96 bp, Fusarium azukicola
  misc_feature: 128
tactactacccctaaccctaatttcaaccaattaaccctaacccttaacgtaactactacccctaaccctaatttcaaccaattaaccctaaccct

SEQ ID NO: 35085 - DNA, 96 bp, Fusarium azukicola
  misc_feature: 128
taataaccctcttatctataccctacccatatagtctaacccgatccatgtaagaaaacgctatttatactatctcatactgtacttaactagccg

SEQ ID NO: 35086 - DNA, 96 bp, Fusarium azukicola
  misc_feature: 128
taagggtaaaatagctaagaattattctttttaggtctataactattttattttagcttttattaagctttaaagttttatgttttagtgcacagt

SEQ ID NO: 35087 - DNA, 96 bp, Fusarium azukicola
  misc_feature: 128
taacttaaccacttaaccctaacctttactataactacttaaccctaacccttaacttaaccacttaaccctaacctttactataactacttaacc

SEQ ID NO: 35088 - DNA, 96 bp, Fusarium azukicola
  misc_feature: 128
taaataaacctaatttttctactaataaagataatataactaattttatatataatataggtgctactaggtatattatatatagaaaagaatttc

SEQ ID NO: 35089 - DNA, 96 bp, Fusarium azukicola
  misc_feature: 128
gttactcttcttccccggacagtagaggttatctcccctccggatagtagcggtttcctttacctctcttagtacttattaatccctaatcgcctt

SEQ ID NO: 35090 - DNA, 96 bp, Fusarium azukicola
  misc_feature: 128
gttaagaaaggagagaagtaaggaaggttaagaaaggagagaagtaaggaaggttaagaaaggagagaagtaaggaagggtaagaaaggagagaag

SEQ ID NO: 35091 - DNA, 96 bp, Fusarium azukicola
  misc_feature: 128
gtggtttatagggatatatcactatagttggtaatataatatagaatattaatagcctcctttaaagttataatcttataagggttatagctttat

SEQ ID NO: 35092 - DNA, 96 bp, Fusarium azukicola
  misc_feature: 128
ataaagctataacccttataagattataactttaaaggaggctattaatgttctatattatattaccaactatagtgatatatccctataaaccac

SEQ ID NO: 35093 - DNA, 96 bp, Fusarium azukicola
  misc_feature: 128
cttttttataagcaaaatatataaataaaataataaggaaatataataaataagaaataggaacttctaaagtacctattaaatttatagaaagac

SEQ ID NO: 35094 - DNA, 96 bp, Fusarium azukicola
  misc_feature: 128
cttagataatataaaggaatatatatataagctaagaccctattatataaagaatagaataaaatataatataagtccgccttataataaataagc

SEQ ID NO: 35095 - DNA, 96 bp, Fusarium azukicola
  misc_feature: 128
gattattatatatataaaagcaatagccgctattagatttcctatcatctaggctactgccccagtctgagtctgtatagcctctaattatattgt

SEQ ID NO: 35096 - DNA, 96 bp, Fusarium azukicola
  misc_feature: 128
gatcactagttgggaacaagcaatgcgaatcgcgaagctcagaggagtggtcgaagcaatgcaccctaatacgtggttcgatgacctcagagaagt

SEQ ID NO: 35097 - DNA, 96 bp, Fusarium azukicola
  misc_feature: 128
cgtcgaggaggctatcgtatttggcgacagtctgaggaacgcttccttcgaagctgtattcgtgagagatggaagggagccagcgaatttatgttc

SEQ ID NO: 35098 - DNA, 96 bp, Fusarium azukicola
  misc_feature: 128
aataagaataagaataagaataagaataagaataagaataagaataagaataagaataagaataagaataagaataagaataagaataagaataag

SEQ ID NO: 35099 - DNA, 96 bp, Fusarium azukicola
  misc_feature: 128
ctataatataatatatagtttatagggatatatcactatagttagtaatataatatagaatattaatagcctcctttaaagttataatcttataag

SEQ ID NO: 35100 - DNA, 96 bp, Fusarium azukicola
  misc_feature: 128
cttaaataaactatagataattttttagaatttctaaaaaagtctcttaatagaaaaaaagctacttatatagtgcgaataattctttttctaaat

SEQ ID NO: 35101 - DNA, 96 bp, Fusarium azukicola
  misc_feature: 128
ctagtatataccttcaattgcttacattgccactttatgccgacactgatcaaactcgacagcacatcgtgacgaacagcgcgacatcaataccct

SEQ ID NO: 35102 - DNA, 96 bp, Fusarium azukicola
  misc_feature: 128
ctacccctaaccctaatttcaaccaattaaccctaacccttaacgtaactactacccctaaccctaatttcaaccaattaaccctaacccttaacg

SEQ ID NO: 35103 - DNA, 96 bp, Fusarium azukicola
  misc_feature: 128
aaagaatggaataaaatataatataagtccgccttataataaataagctaatagctttatagaaaggataaataggactatattagaaaaggttag

SEQ ID NO: 35104 - DNA, 96 bp, Fusarium azukicola
  misc_feature: 128
ccttattactaggttttttatttatattatttttagttaattttcctagtttgcagttttcgcagtttttaacttaatataggtcctcactagtat

SEQ ID NO: 35105 - DNA, 96 bp, Fusarium azukicola
  misc_feature: 128
agataaaagtgggtcacaataaagagtctgattggatcagataaaagtgggatttagttgttaatgattgaattgactgaagagttgattcatctg

SEQ ID NO: 35106 - DNA, 96 bp, Fusarium azukicola
  misc_feature: 128
actataaaatagctaggaagataaaaagagtatttctataaatctaactcttaataaagtctaaaaatgatttttttagatttttaaaaaattctg

SEQ ID NO: 35107 - DNA, 96 bp, Fusarium azukicola
  misc_feature: 128
attgttaatgttctatattatattactaactatagtgatatatccctataaaccacatattatattatagaatttttactctatttttaggtatat

SEQ ID NO: 35108 - DNA, 96 bp, Fusarium azukicola
  misc_feature: 128
ataagattataactttaaaggaggctattaatattctatattatattactaactatagtgatatatccctataaaccatatattatattatagaat

SEQ ID NO: 35109 - DNA, 96 bp, Fusarium azukicola
  misc_feature: 128
attatattttattctattctttatataatagggtcttagcttatatatatattcctttatattatctaagaaaactgattttattcttattttatt

SEQ ID NO: 35110 - DNA, 96 bp, Fusarium azukicola
  misc_feature: 128
atggtttatagggatatatcactatagttagtaatataatatagaatattaatagcctcctttaaagttataatcttataagggttatagctttat

SEQ ID NO: 35111 - DNA, 96 bp, Fusarium azukicola
  misc_feature: 128
ataaagctataacccttataagattataactttaaaggaggctattaatattctatattatattactaactatagtgatatatccctataaactat

SEQ ID NO: 35112 - DNA, 96 bp, Fusarium azukicola
  misc_feature: 128
aatatagaatattaacagcctcctttaaagttataatcttataagggttatagctttatacgttcttattattagaggaaaaaattaaacctctat

SEQ ID NO: 35113 - DNA, 96 bp, Fusarium azukicola
  misc_feature: 128
agattataactttaaaggaggctattaatgttctatattatattaccaactatagtgatatatccctataaaccacatattatattatagaatttt

SEQ ID NO: 35114 - DNA, 96 bp, Fusarium azukicola
  misc_feature: 128
agattataactttaaaggaggctattaatattctatattatattaccaactatagtgatatatccctataaaccacatattatattatagaatttt

SEQ ID NO: 35115 - DNA, 96 bp, Fusarium azukicola
  misc_feature: 128
actactacccctaaccctaatttcaaccaattaaccctaacccttaacgtaactactacccctaaccctaatttcaaccaattaaccctaaccctt

SEQ ID NO: 35116 - DNA, 96 bp, Fusarium azukicola
  misc_feature: 128
aactttaaattttagctattttagagttagtttgaattttctaggattttttaaaaaacctagttttagtatatagtacctctattgcactcgctt

SEQ ID NO: 35117 - DNA, 96 bp, Fusarium azukicola
  misc_feature: 128
aagattataactttaaaggaggctattaatgttctatattatattaccaactatagtgatatatccctataaaccacatattatattatagaattt

SEQ ID NO: 35118 - DNA, 96 bp, Fusarium azukicola
  misc_feature: 127
agttagtaatataatatagaacattaatagcctcctttaaagttataatcttataagggttatagctttatacgttcttattattagaggaaaaaa

SEQ ID NO: 35119 - DNA, 96 bp, Fusarium azukicola
  misc_feature: 127
tatagttagtaatataatatagaatattaatagcctcctttaaagttataatcttataagggttatagctttatatattcttattattagaggaaa

SEQ ID NO: 35120 - DNA, 96 bp, Fusarium azukicola
  misc_feature: 127
tttaccctatactctcttctctcttttactttaccctatactctcttctctcttttactttaccctccacttttattctttattttactttaccct

SEQ ID NO: 35121 - DNA, 96 bp, Fusarium azukicola
  misc_feature: 127
tatatatatgatatggtatggatatagatgatgttattatttattattataatcgtaataacgaaagaggaagaagaagaagaagaagaagaagaa

SEQ ID NO: 35122 - DNA, 96 bp, Fusarium azukicola
  misc_feature: 127
ctctagttaattactattatctaagagagaagagttagaaagtaaagctaacctctagggtaaggaaggggttagcctctaaggtctagggaagaa

SEQ ID NO: 35123 - DNA, 96 bp, Fusarium azukicola
  misc_feature: 127
actagtgaggacctatattaagttaaaaactgcgaaaactgcaaactaggaaaattaactaaaaataatataaataaaaaacctagtaataaggaa

SEQ ID NO: 35124 - DNA, 96 bp, Fusarium azukicola
  misc_feature: 127
ttataatattatttttccttatttatttaaaagaaggacttcttatttatttataatagaagttatattataaagagaagattaacttattaagtt

SEQ ID NO: 35125 - DNA, 96 bp, Fusarium azukicola
  misc_feature: 127
actctactactacccctaaccctaatttcaaccaattaaccctaacccttaacgtaactactacccctaaccctaatttcaaccaattaaccctaa

SEQ ID NO: 35126 - DNA, 96 bp, Fusarium azukicola
  misc_feature: 127
ttacctcttatttctccttaaatcctaacttttttatttaactctttctcttatttttaaatcctttcttctcttttctttttaaattaacttcat

SEQ ID NO: 35127 - DNA, 96 bp, Fusarium azukicola
  misc_feature: 127
ttaaccctaacctttactataactacttaaccctaacccttaacttaaccacttaaccctaacctttactataactacttaaccctaacccttaac

SEQ ID NO: 35128 - DNA, 96 bp, Fusarium azukicola
  misc_feature: 127
tgtgcaggcatatgaaactctatatctgtgaaagtaaacagtgatataatacgtggtcaaaacaaacaaagatgctagcaagactcttttatcagt

SEQ ID NO: 35129 - DNA, 96 bp, Fusarium azukicola
  misc_feature: 127
tgacctcagagaagtccttgacgaccactttgaagtatttatccgggtcgaagaagggcaaaacaaagggaagattgagaatgggacctaccaacc

SEQ ID NO: 35130 - DNA, 96 bp, Fusarium azukicola
  misc_feature: 127
tcatatatatatatatgatatggtatggatatagatgatgttattatttattattataatcgtaataacgaaagaggaagaagaagaagaagaaga

SEQ ID NO: 35131 - DNA, 96 bp, Fusarium azukicola
  misc_feature: 127
tagctaaaccttaatttctaaaaactgctataaaatagctaggaagataaaaagagtatttctataaatctaactcttaataaagtctaaaaatga

SEQ ID NO: 35132 - DNA, 96 bp, Fusarium azukicola
  misc_feature: 127
ctagaatctcctagaatctctatagaagcccgaagggcttctatctatagctgacccaaagcctgaccctaaccctgacctaatgtatgaccctga

SEQ ID NO: 35133 - DNA, 96 bp, Fusarium azukicola
  misc_feature: 127
tattattctaattggttaaaaaggttcctacagaccttcatgactgccgtcatcaatgcatcaaagtataataactgccgattggctaaaaaaggg

SEQ ID NO: 35134 - DNA, 96 bp, Fusarium azukicola
  misc_feature: 127
tatctctaacttctagaggggatttattatttaaagccgaatgcgggcttctattatatatatatacggctgcttccacagcctctccccaaaggg

SEQ ID NO: 35135 - DNA, 96 bp, Fusarium azukicola
  misc_feature: 127
aaaataagaataaaattagttttcttagataatataaaggaatatatatataagctaagaccctattatataaagaatggaataaaatataatata

SEQ ID NO: 35136 - DNA, 96 bp, Fusarium azukicola
  misc_feature: 127
accctaacccttaacttaaccacttaaccctaacctttactataactacttaaccctaacccttaacttaaccacttaaccctaacctttactata

SEQ ID NO: 35137 - DNA, 96 bp, Fusarium azukicola
  misc_feature: 127
cctaattctaagaaggaagaaagagaaaagaaataagaaaagctatttatagctaattcttcttctttattatctcctaaagccgaggaagaccta

SEQ ID NO: 35138 - DNA, 96 bp, Fusarium azukicola
  misc_feature: 127
gtagcggtttcctttacctctcttagtacttattaatccctaatcgccttaccctagctaataaccctcttatctataccctacccatatagtcta

SEQ ID NO: 35139 - DNA, 96 bp, Fusarium azukicola
  misc_feature: 127
acctcttatttctccttaaatcctaacttttttatttaactctttctcttatttttaaatcctttcttctcttttctttttaaattaacttcatta

SEQ ID NO: 35140 - DNA, 96 bp, Fusarium azukicola
  misc_feature: 127
accctaacctttactataactacttaaccctaacccttaacttaaccacttaaccctaacctttactataactacttaaccctaacccttaactta

SEQ ID NO: 35141 - DNA, 96 bp, Fusarium azukicola
  misc_feature: 127
ggagataatgaagaagaagaattagctataaatagcttttcttatttcttttctctttcttccttcttagaattaggtttagattcctttttctta

SEQ ID NO: 35142 - DNA, 96 bp, Fusarium azukicola
  misc_feature: 127
gtcgaggaggctatcgtatttggcgacagtctgaggaacgcttccttcgaagctgtattcgtgagagatggaagggagccagcgaatttatgttct

SEQ ID NO: 35143 - DNA, 96 bp, Fusarium azukicola
  misc_feature: 127
catcaagttcaaaggaaggatttgcttggcaccaggttcagttggtagtctagtcggataacaggtctgaggcagagatcaagacgcagaaccacc

SEQ ID NO: 35144 - DNA, 96 bp, Fusarium azukicola
  misc_feature: 127
gaatctcctagaatctctatagaagcccgaagggcttctatctatagctgacccaaagcctgaccctaaccctgacctaatgtatgaccctgaccc

SEQ ID NO: 35145 - DNA, 96 bp, Fusarium azukicola
  misc_feature: 127
ctatagctgacccaaagcctgaccctaaccctgacctaatgtatgaccctgaccctgaccctaacctctagaatctcctagaatctctatagaagc

SEQ ID NO: 35146 - DNA, 96 bp, Fusarium azukicola
  misc_feature: 127
gcaggcatatgaaactctatatctgtgaaagtaaacagtgatataatacgtggtcaaaacaaacaaagatgctagcaagactcttttatcagtggc

SEQ ID NO: 35147 - DNA, 96 bp, Fusarium azukicola
  misc_feature: 127
gataatataaaggaatatatatataagctaagaccctattatataaagaatagaataaaatataatataagtccgccttataataaataagctaat

SEQ ID NO: 35148 - DNA, 96 bp, Fusarium azukicola
  misc_feature: 127
gagtgaaaagagagagagggagaggggagaggagaggataaggagtgaaaagagagagagggagaggggagaggagaggataaggagagagaagag

SEQ ID NO: 35149 - DNA, 96 bp, Fusarium azukicola
  misc_feature: 127
ctatactctcttctctcttttactttaccctatactctcttctctcttttactttaccctccacttttattctttattttactttaccctatactc

SEQ ID NO: 35150 - DNA, 96 bp, Fusarium azukicola
  misc_feature: 127
atctcttatctcttatctcttatctcttatctcttatctcttatctcttatttctctcttttctagctatatctctctttcttagctttacctctc

SEQ ID NO: 35151 - DNA, 96 bp, Fusarium azukicola
  misc_feature: 127
agatctataagattactttttttaagtttctagctattttatagcagtttttagaaacttaggttttagcgatttttagttatatagtatgctgtc

SEQ ID NO: 35152 - DNA, 96 bp, Fusarium azukicola
  misc_feature: 127
atcttttttataagcaaaatatataaataaaataataaggaaatataataaataagaaataggaacttctaaagtacctattaaatttatagaaag

SEQ ID NO: 35153 - DNA, 96 bp, Fusarium azukicola
  misc_feature: 127
agagaggtataactaggaaaaagagatatagctaagagagagaggtaaagctaagaaagagagatatagctagaaaagagagaaataaaagataag

SEQ ID NO: 35154 - DNA, 96 bp, Fusarium azukicola
  misc_feature: 127
agatatacttaaacttttaatcttagttattttaagcttaggtttattttcttagaattattttaagtgttttttaaataaggtgtaattactaag

SEQ ID NO: 35155 - DNA, 96 bp, Fusarium azukicola
  misc_feature: 127
atgagatatatttttctaagacttctaagccttagaaaaagaagaaaactgccttaaaatgcagttattgcaaactgctaggtcataaagacccag

SEQ ID NO: 35156 - DNA, 96 bp, Fusarium azukicola
  misc_feature: 127
ctattcaccatccatgtatgtaccgcgtcgataagctgagagggaaaagcaaaatgtgcaggcatatgaaactctatatctgtgaaagtaaacagt

SEQ ID NO: 35157 - DNA, 96 bp, Fusarium azukicola
  misc_feature: 127
atttagctttaaataataaatcccctctagaagttagagataatatttccttagatattaaggaattagataaaataaaaacctttaggtctatag

SEQ ID NO: 35158 - DNA, 96 bp, Fusarium azukicola
  misc_feature: 127
agaagacaactagacaactatcataatggattatactccctacctgttccatcatcatcatcatgggtcgtcgtgcgcttacagcagaggaaaagg

SEQ ID NO: 35159 - DNA, 96 bp, Fusarium azukicola
  misc_feature: 127
atatagaatattaacagcctcctttaaagttataatcttataagggttatagctttatacgttcttattattagaggaaaaaattaaacctctatt

SEQ ID NO: 35160 - DNA, 96 bp, Fusarium azukicola
  misc_feature: 127
agtacttattaatccctaatcgccttaccctagctaataaccctcttatctataccctacccatatagtctaacccgatccatgtaagaaaacgct

SEQ ID NO: 35161 - DNA, 96 bp, Fusarium azukicola
  misc_feature: 127
aatattaacagcctcctttaaagttataatcttataagggttatagctttatacgttcttattattagaggaaaaaattaaacctctattattatt

SEQ ID NO: 35162 - DNA, 96 bp, Fusarium azukicola
  misc_feature: 127
aaggaccctatatattagtagctattttatctaggaacttatattccttattattaggttttttatttatattatttttagttaattttcctagtt

SEQ ID NO: 35163 - DNA, 96 bp, Fusarium azukicola
  misc_feature: 126
ataagttaatcttctctttataatataacttctattataaataaataagaagtccttcttttaaataaataaggaaaaataatattataaggaaaa

SEQ ID NO: 35164 - DNA, 96 bp, Fusarium azukicola
  misc_feature: 126
tttcttatttcttttctctttcttccttcttagaattaggtttagattcctttttcttagaagtcttatataccttattagcttcctaagttttct

SEQ ID NO: 35165 - DNA, 96 bp, Fusarium azukicola
  misc_feature: 126
ttcaggaagccaataaggtgcataagacttctaagaaaaaggaatctaaacctaattctaagaaggaagaaagagaaaagaaacaagaaaagctat

SEQ ID NO: 35166 - DNA, 96 bp, Fusarium azukicola
  misc_feature: 126
ttcaaggaatttagaaaagaaatagaaaataatcctaataaaataagaataaaatcagttttcttagataatataaaggaatatatatataagcta

SEQ ID NO: 35167 - DNA, 96 bp, Fusarium azukicola
  misc_feature: 126
ttattattattattattatataatattgcctttttattattataagggctttctttaaagtaaggaatctcattaaaagaggggttatttccttcg

SEQ ID NO: 35168 - DNA, 96 bp, Fusarium azukicola
  misc_feature: 126
ttatctcttatctcttatctcttatctcttatctcttatctcttatctcttatttctctcttttctagctatatctctctttcttagctttacctc

SEQ ID NO: 35169 - DNA, 96 bp, Fusarium azukicola
  misc_feature: 126
aaaactatattaattttcctagatttttaataaaatcttatttacttagtatttaaaaaacctatttacactgtatacttagctatttctctataa

SEQ ID NO: 35170 - DNA, 96 bp, Fusarium azukicola
  misc_feature: 126
ttagctttaaataataaatcccctctagaagttagagataatatttccttagatattaaggaattagataaaataaaaacctttaggtctatagtt

SEQ ID NO: 35171 - DNA, 96 bp, Fusarium azukicola
  misc_feature: 126
ataagaagtccttcttttaaataaataaggaaaaataatattataaggaaaagagaaaaataacctatatataataatagctaaggttatttctaa

SEQ ID NO: 35172 - DNA, 96 bp, Fusarium azukicola
  misc_feature: 126
ttaaccctaacccttaactctactactacccctaaccctaatttcaaccaattaaccctaacccttaacgtaactactacccctaaccataatttc

SEQ ID NO: 35173 - DNA, 96 bp, Fusarium azukicola
  misc_feature: 126
tctcttatctcttatctcttatctcttatctcttatctcttatctcttatctcttatctcttatctcttatttctctcttttctagctatatctct

SEQ ID NO: 35174 - DNA, 96 bp, Fusarium azukicola
  misc_feature: 126
tctctaacttctagaggggatttattatttaaagccgaatgcgggcttctattatatatatatacggctgcttccacagcctctcccccaagggat

SEQ ID NO: 35175 - DNA, 96 bp, Fusarium azukicola
  misc_feature: 126
tatatcttttttataagcaaaatatataaataaaataataaggaaatataataaataagaaataggaacttctaaagtacctattaaatttataga

SEQ ID NO: 35176 - DNA, 96 bp, Fusarium azukicola
  misc_feature: 126
tatctcttatctcttatctcttatctcttatctcttatctcttatctcttatttctctcttttctagctatatctctctttcttagctttacctct

SEQ ID NO: 35177 - DNA, 96 bp, Fusarium azukicola
  misc_feature: 126
tatatatataaatatataaataaaaatctctctttaagttttaatagggctatacctcctattttaactgataatctagcagctaagcaattagct

SEQ ID NO: 35178 - DNA, 96 bp, Fusarium azukicola
  misc_feature: 126
tatatatataaatatataaataaaaatctctctttaagttttaatagggctatacctcctattttaactaataatctagcagctaagtaattagct

SEQ ID NO: 35179 - DNA, 96 bp, Fusarium azukicola
  misc_feature: 126
ataatataacttctattataaataaataagaagtccttcttttaaataaataaggaaaaataatattataaggaaaagagaaaaataacctatata

SEQ ID NO: 35180 - DNA, 96 bp, Fusarium azukicola
  misc_feature: 126
taaaaagaaatatcctaatagtaatataaataagctataaatctatttaaaattaagaaaagccttatatagcctaaaataaagccctagattata

SEQ ID NO: 35181 - DNA, 96 bp, Fusarium azukicola
  misc_feature: 126
tagaatctattttttctagtctcttagatttatctataaggctagaagaaagtaattctaggttataagccttaggattactccttaaagcttata

SEQ ID NO: 35182 - DNA, 96 bp, Fusarium azukicola
  misc_feature: 126
tataactttaaaggaggctattaatattctatattatattaccaactatagtgatatatccctataaaccacatattatattatagaatttttact

SEQ ID NO: 35183 - DNA, 96 bp, Fusarium azukicola
  misc_feature: 126
tagttagatctataagattactttttttaagtttctagctattttatagcagtttttagaaacttaggttttagcgatttttagttatacagtatg

SEQ ID NO: 35184 - DNA, 96 bp, Fusarium azukicola
  misc_feature: 126
tagtatatttaaagagaggatcttttatttttatatatttaattagacttcttaagttaagataacttagtcttttatgctagttaaaaagactag

SEQ ID NO: 35185 - DNA, 96 bp, Fusarium azukicola
  misc_feature: 126
tagcataaaagactaagttatcttaacttaagaagtctaattaaatatataaaaataaaagatcctctctttaaatatactagtgaggacctatat

SEQ ID NO: 35186 - DNA, 96 bp, Fusarium azukicola
  misc_feature: 126
taagttaatcttctctttataatataacttctattataaataaataagaagtccttcttttaaataaataaggaaaaataatattataaggaaaag

SEQ ID NO: 35187 - DNA, 96 bp, Fusarium azukicola
  misc_feature: 126
acttaaccctaacctttactataactacttaaccctaacccttaacttaaccacttaaccctaacctttactataactacttaaccctaaccctta

SEQ ID NO: 35188 - DNA, 96 bp, Fusarium azukicola
  misc_feature: 126
taactctactactacccctaaccctaatttcaaccaattaaccctaacccttaacgtaactactacccctaaccctaatttcaaccaattaaccct

SEQ ID NO: 35189 - DNA, 96 bp, Fusarium azukicola
  misc_feature: 126
taaaatttgtactagtttacactaaatagaaaagaattctttaaaaattcaaattaaggtaaaaataacttaaaattttagattaggttaattaag

SEQ ID NO: 35190 - DNA, 96 bp, Fusarium azukicola
  misc_feature: 126
acaactagacaactatcataatggattatactccctacctgttccatcatcatcatcatgggtcgtcgtgcgcttacagcagaggaaaaggcaaac

SEQ ID NO: 35191 - DNA, 96 bp, Fusarium azukicola
  misc_feature: 126
gttagtaatataatatagaacattaatagcctcctttaaagttataatcttataagggttatagctttatacgttcttattattagaggaaaaaat

SEQ ID NO: 35192 - DNA, 96 bp, Fusarium azukicola
  misc_feature: 126
gcccggaagatgcgctttataatgatatataatctattactaaagccttataaatggcttagttatagcaaaaaccggttttaatggatagaaagc

SEQ ID NO: 35193 - DNA, 96 bp, Fusarium azukicola
  misc_feature: 126
cttatagtaactaataaagaaggatagtcccttattatagtcatttgaccggcctaataggatccgattcggaccaagattataccgtcggatagc

SEQ ID NO: 35194 - DNA, 96 bp, Fusarium azukicola
  misc_feature: 126
gctaagagagagaggtaaagctaagaaagagagatatagctagaaaagagagaaataagagataagagataagagataagagataagagataagag

SEQ ID NO: 35195 - DNA, 96 bp, Fusarium azukicola
  misc_feature: 126
agacttctctgctcaattccgacaagagattcagaccgaccgagagagaggcaagatagaagagaatactccttccgcagaagagagcctcagatc

SEQ ID NO: 35196 - DNA, 96 bp, Fusarium azukicola
  misc_feature: 126
cagctatagatagaagccctctgggcttctatagagattctagagctttctatagaggttagggtcagggtcagggtcatacattgggtcagggtc

SEQ ID NO: 35197 - DNA, 96 bp, Fusarium azukicola
  misc_feature: 126
gaaggaccctatatattagtagctattttatctaggaacttatattccttattattaggttttttatttatattatttttagttaattttcctagt

SEQ ID NO: 35198 - DNA, 96 bp, Fusarium azukicola
  misc_feature: 126
agggtatagataagagggttattagctagggtaaggcgattagggattaataagtactaagagaggtaaaggaaaccgctactatccggaggggag

SEQ ID NO: 35199 - DNA, 96 bp, Fusarium azukicola
  misc_feature: 126
accaactatagtgatatatccctataaactatatattatattatagaatttttactctatttttaggtatatttacctaacctatagctactatag

SEQ ID NO: 35200 - DNA, 96 bp, Fusarium azukicola
  misc_feature: 126
atcttcttttaagtataaacccttaggaagagacctccgggctcataacctgtcagtgtgactaggttataaatagttgatttcctagataactag

SEQ ID NO: 35201 - DNA, 96 bp, Fusarium azukicola
  misc_feature: 126
ctaagagagaagagttagaaagtaaagctaacctctagggtaaggaaggggttagcctctaaggtctagggaagaagtataatggctaaccactag

SEQ ID NO: 35202 - DNA, 96 bp, Fusarium azukicola
  misc_feature: 126
aatactttttttaagtttctagctattttatagcagtttttattaaggttagaaatataaggttttagtgcacagtatagctatacagctcacttg

SEQ ID NO: 35203 - DNA, 96 bp, Fusarium azukicola
  misc_feature: 126
attactaggttttttatttatattatttttagttaattttcctagtttgcagttttcgcagtttttaacttaatataggtcctcactagtatattt

SEQ ID NO: 35204 - DNA, 96 bp, Fusarium azukicola
  misc_feature: 126
aagaaaactgattttattcttattttattaggattattttctatttcttttctaaattccttaaattttataatagcttctaacttattccttaat

SEQ ID NO: 35205 - DNA, 96 bp, Fusarium azukicola
  misc_feature: 126
ataaaagtgggtcacaataaagagtctgattggatcagataaaagtgggatttagttgttaatgattgaattgactgaagagttgattcatctgat

SEQ ID NO: 35206 - DNA, 96 bp, Fusarium azukicola
  misc_feature: 126
atacctaaaaatagagtaaaaattctataatataatatgtggtttatagggatatatcactatagttggtaatataatatagaatattaatagcct

SEQ ID NO: 35207 - DNA, 96 bp, Fusarium azukicola
  misc_feature: 126
actagtctttttaactagcataaaagactaagttatcttaacttaagaagtctaattaaatatataaaaataaaagatcctctctttaaatatact

SEQ ID NO: 35208 - DNA, 96 bp, Fusarium azukicola
  misc_feature: 125
tttttttactataaaagagccttgagagctcttaacccttctagaaagtggtggttgtgtcacacccatggctttagcagctcgggttatcgaggg

SEQ ID NO: 35209 - DNA, 96 bp, Fusarium azukicola
  misc_feature: 125
taatcctaataaaataagaataaaattagttttcttagataatataaaggaatatatatataagctaagaccctattatataaagaatagaataaa

SEQ ID NO: 35210 - DNA, 96 bp, Fusarium azukicola
  misc_feature: 125
tttagctttaaataataaatcccctctagaagttagagataatatttccttagatattaaggaattagataaaataaaaacctttaggtctatagt

SEQ ID NO: 35211 - DNA, 96 bp, Fusarium azukicola
  misc_feature: 125
taagaataagaataagaataagaataagaataagaataagaataagaataagaataagaataagaataagaataagaataagaataagaataagaa

SEQ ID NO: 35212 - DNA, 96 bp, Fusarium azukicola
  misc_feature: 125
tcataaagacccagattgctattttttgcaccctaataaggctccaaaaaactggaaaattcaggaagccaataaggtgcataagacttctaagaa

SEQ ID NO: 35213 - DNA, 96 bp, Fusarium azukicola
  misc_feature: 125
aagaaaggagagaagtaaggaaggttaagaaaggagagaagtaaggaaggttaagaaaggagagaagtaaggaaggttaagaaaggagagaaggaa

SEQ ID NO: 35214 - DNA, 96 bp, Fusarium azukicola
  misc_feature: 125
ttcctcactcttctcatgtcctccaacctcttgatctcgccatttttggccctctgaagcaggcataccgtcggcttctttctgacctcgctagag

SEQ ID NO: 35215 - DNA, 96 bp, Fusarium azukicola
  misc_feature: 125
ttatctcttatctcttatctcttatctcttatctcttatctcttatctcttatctcttatctcttatctcttatttctctcttttctagctatatc

SEQ ID NO: 35216 - DNA, 96 bp, Fusarium azukicola
  misc_feature: 125
aaaatttaaggaatttagaaaagaaatagaaaataatcctaataaaataagaataaaatcagttttcttagataatataaaggaatatatatataa

SEQ ID NO: 35217 - DNA, 96 bp, Fusarium azukicola
  misc_feature: 125
ttatactgtatactttaagatacctatataaggaatttttttaaaaatttagaaaaaatatttttaagtcttatatatagctaaatagttaaaatc

SEQ ID NO: 35218 - DNA, 96 bp, Fusarium azukicola
  misc_feature: 125
ttaaatagataagcgaattaaatacttttcttaacctttaatatataaatcactataaaaatactataaactatctaattaattaaaactaattac

SEQ ID NO: 35219 - DNA, 96 bp, Fusarium azukicola
  misc_feature: 125
gtggcaatggtagagaagacaactagacaactatcataatggattatactccctacctgttccatcatcatcatcatgggtcgtcgtgcgcttaca

SEQ ID NO: 35220 - DNA, 96 bp, Fusarium azukicola
  misc_feature: 125
tgcaggcatatgaaactctatatctgtgaaagtaaacagtgatataatacgtggtcaaaacaaacaaagatgctagcaagactcttttatcagtgg

SEQ ID NO: 35221 - DNA, 96 bp, Fusarium azukicola
  misc_feature: 125
tcttttttataagcaaaatatataaataaaataataaggaaatataataaataagaaataggaacttctaaagtacctattaaatttatagaaaga

SEQ ID NO: 35222 - DNA, 96 bp, Fusarium azukicola
  misc_feature: 125
ctaagagagagaggtaaagctaagaaagagagatatagctagaaaagagagaaataagagataagagataagagataagagataagagataagaga

SEQ ID NO: 35223 - DNA, 96 bp, Fusarium azukicola
  misc_feature: 125
ggaagctgtctatacccatcatatatatatatatgatatggtatggatatagatgatgttattatttattattataatcgtaataacgaaagagga

SEQ ID NO: 35224 - DNA, 96 bp, Fusarium azukicola
  misc_feature: 125
tcagctaaaagaaagtactattcccataataatatatctcgatgctcacttaaataaaccgatcgtgctaaaggagactaaaaacaaggcgggagg

SEQ ID NO: 35225 - DNA, 96 bp, Fusarium azukicola
  misc_feature: 125
caccttattggcttcctgagttttccagttttttggagccttattagggtgcaaaaaatagcaatctgggtctttatgacctagcagtttgcaata

SEQ ID NO: 35226 - DNA, 96 bp, Fusarium azukicola
  misc_feature: 125
atcctttctataaagctattagcttatttattataaggcggacttatattatattttattccattctttatataatagggtcttagcttatatata

SEQ ID NO: 35227 - DNA, 96 bp, Fusarium azukicola
  misc_feature: 125
agaaatatcctaatagtaatataaataagctataaatctatttaaaattaagaaaagccttatatagcctaaaataaagccctagattatagtata

SEQ ID NO: 35228 - DNA, 96 bp, Fusarium azukicola
  misc_feature: 125
tataactataaatagagagaataagagtatatctttttcataagtaaaatatataaataaaataataaggaaatataataaataagaaataggaac

SEQ ID NO: 35229 - DNA, 96 bp, Fusarium azukicola
  misc_feature: 125
aactctactactacccctaaccctaatttcaaccaattaaccctaacccttaacgtaactactacccctaaccctaatttcaaccaattaacccta

SEQ ID NO: 35230 - DNA, 96 bp, Fusarium azukicola
  misc_feature: 125
tagataatataaaggaatatatatataagctaagaccctattatataaagaatagaataaaatataatataagtccgccttataataaataagcta

SEQ ID NO: 35231 - DNA, 96 bp, Fusarium azukicola
  misc_feature: 125
aactttaaaggaggctattaatattctatattatattaccaactatagtgatatatccctataaaccacatattatattatagaatttttactcta

SEQ ID NO: 35232 - DNA, 96 bp, Fusarium azukicola
  misc_feature: 125
aactttaaaggaggctattaatgttctatattatattaccaactatagtgatatatccctataaaccacatattatattatagaatttttactcta

SEQ ID NO: 35233 - DNA, 96 bp, Fusarium azukicola
  misc_feature: 125
tagaaatataaaaaaagtatttttataaatctaactatataaagaacctaaaaatatcttttttagatttttaaaaaaattgctttatagagaaat

SEQ ID NO: 35234 - DNA, 96 bp, Fusarium azukicola
  misc_feature: 125
tactaggacctttaataagaaaccttccctatataaagaaacaactaggatatttaaataaggtgctactaggcatattgtatgtagaaaagaatt

SEQ ID NO: 35235 - DNA, 96 bp, Fusarium azukicola
  misc_feature: 125
acccttaacgtaactactacccctaaccctaatttcaaccaattaaccctaacccttaacgtaactactacccctaaccataatttcaaccaatta

SEQ ID NO: 35236 - DNA, 96 bp, Fusarium azukicola
  misc_feature: 125
taattccttaatatctaaggaaatattatctctaacttctagaggggatttattatttaaagccgaatgcgggcttctattatatatatatatagc

SEQ ID NO: 35237 - DNA, 96 bp, Fusarium azukicola
  misc_feature: 125
taaggaatttagaaaagaaatagaaaataatcctaataaaataagaataaaatcagttttcttagataatataaaggaatatatatataagctaag

SEQ ID NO: 35238 - DNA, 96 bp, Fusarium azukicola
  misc_feature: 125
taagaagtaatctagctttaatatttaattaagatatattaaattataaaggattaattaattaaatagagataatataggttaagggatttttat

SEQ ID NO: 35239 - DNA, 96 bp, Fusarium azukicola
  misc_feature: 125
taacccttaacgtaactactacccctaaccctaatttcaaccaattaaccctaacccttaacgtaactactacccctaaccataatttcaaccaat

SEQ ID NO: 35240 - DNA, 96 bp, Fusarium azukicola
  misc_feature: 125
ggaccctatatattagtagctattttatctaggaacttatattccttattattaggttttttatttatattatttttagttaattttcctagttta

SEQ ID NO: 35241 - DNA, 96 bp, Fusarium azukicola
  misc_feature: 125
attataactttaaaggaggctattaatgttctatattatattaccaactatagtgatatatccctataaaccacatattatattatagaattttta

SEQ ID NO: 35242 - DNA, 96 bp, Fusarium azukicola
  misc_feature: 125
gttgaaattagggttaggggtagtagtagagttaagggttagggttaattggttgaaattagggttaggggtagtagtagagttaagggttagggg

SEQ ID NO: 35243 - DNA, 96 bp, Fusarium azukicola
  misc_feature: 125
aaatataaaaaaagtatttttataaatctaactatataaagaacctaaaaatatcttttttagatttttaaaaaaattgctttatagagaaataac

SEQ ID NO: 35244 - DNA, 96 bp, Fusarium azukicola
  misc_feature: 125
cactatgtaattaactatttcactataaatagaattttttaaaaatctaaaaaaatcatttttagactttattaagagttagatttatagaaatac

SEQ ID NO: 35245 - DNA, 96 bp, Fusarium azukicola
  misc_feature: 125
gtattattctaattggttaaaaaggttcctacagaccttcatgactgccgtcatcaatgcatcaaagtataataactgccgattggctaagaaagg

SEQ ID NO: 35246 - DNA, 96 bp, Fusarium azukicola
  misc_feature: 125
gtatatcttttttataagcaaaatatataaataaaataataaggaaatataataaataagaaataggaacttctaaagtacctattaaatttatag

SEQ ID NO: 35247 - DNA, 96 bp, Fusarium azukicola
  misc_feature: 125
ccctatactctcttctctcttttactttaccctatactctcttctctcttttactttaccctccacttttattctttattttactttaccctatac

SEQ ID NO: 35248 - DNA, 96 bp, Fusarium azukicola
  misc_feature: 125
gtaatatatccctataaaccatatattatattatagaatttttactctatttttaggtatatttacctaacctatagctactataggtagctagat

SEQ ID NO: 35249 - DNA, 96 bp, Fusarium azukicola
  misc_feature: 125
agaatctcctagaatctctatagaagcccgaagggcttctatctatagctgacccaaagcctgaccctaaccctgacctaatgtatgaccctgacc

SEQ ID NO: 35250 - DNA, 96 bp, Fusarium azukicola
  misc_feature: 125
gggtaaggcgattagggattaataagtactaagagaggtaaaggaaaccgctactatccggaggggagataacctctactgtccggggaagaagag

SEQ ID NO: 35251 - DNA, 96 bp, Fusarium azukicola
  misc_feature: 125
aaaatgcagttattgcaaactgctaggtcataaagacccagattgctattttttgcaccctaataaggctccaaaaaactggaaaactcaggaagc

SEQ ID NO: 35252 - DNA, 96 bp, Fusarium azukicola
  misc_feature: 125
gaataaaattagttttcttagataatataaaggaatatatatataagctaagaccctattatataaagaatagaataaaatataatataagtccgc

SEQ ID NO: 35253 - DNA, 96 bp, Fusarium azukicola
  misc_feature: 125
gccttataaatggcttagttatagcaaaaaccggttttgatggatagaatgcaacgctgaaggttttaggaaccttcctagccaatcggcaggttt

SEQ ID NO: 35254 - DNA, 96 bp, Fusarium azukicola
  misc_feature: 125
cattgccactgataaaagagtcttgctagcatctttgtttgttttgaccacgtattatatcactgtttactttcacagatatagagtttcatatgc

SEQ ID NO: 35255 - DNA, 96 bp, Fusarium azukicola
  misc_feature: 125
gagatagtataaatagcgttttcttacatggatcgggttagactatatgggtagggtatagataagagggttattagctagggtaaggcgattagg

SEQ ID NO: 35256 - DNA, 96 bp, Fusarium azukicola
  misc_feature: 125
agagaaataaaggaggggaagagtaaagaaaaagagaagaagataaaaggagaaggggaagagtaaaagaaagaaaagtaagaaagtaatagaaag

SEQ ID NO: 35257 - DNA, 96 bp, Fusarium azukicola
  misc_feature: 125
aataagaataaaattagttttcttagataatataaaggaatatatatataagctaagaccctattatataaagaatggaataaaatataatataag

SEQ ID NO: 35258 - DNA, 96 bp, Fusarium azukicola
  misc_feature: 125
acttaataagttaatcttctctttataatataacttctattataaataaataagaagtccttcttttaaataaataaggaaaaataatattataag

SEQ ID NO: 35259 - DNA, 96 bp, Fusarium azukicola
  misc_feature: 125
cttaaggctatttttgcctccctttatctcttatctcttatttcttatttctttatctcttatctcttatctcttatctcttatctcttatctctt

SEQ ID NO: 35260 - DNA, 96 bp, Fusarium azukicola
  misc_feature: 125
ctggaaggcttggctaagaaaataactatcttagagcatgaaaatcaagagcttcgacccaagaaaaggcgtaaggttatcacagatggcaatgtt

SEQ ID NO: 35261 - DNA, 96 bp, Fusarium azukicola
  misc_feature: 125
ctcaatcttccctttgttttgcccttcttcgacccggataaatacttcaaagtggtcgtcaaggacttctctgaggtcatcgaaccacgtattagg

SEQ ID NO: 35262 - DNA, 96 bp, Fusarium azukicola
  misc_feature: 125
agaagtcttatgcaccttattggcttcctgaattttccagttttttggagccttattagggtgcaaaaaatagcaatctgggtctttatgacctgg

SEQ ID NO: 35263 - DNA, 96 bp, Fusarium azukicola
  misc_feature: 125
atagctaaaccttaatttctaaaaactgctataaaatagctaggaagataaaaagagtatttctataaatctaactcttaataaagtctaaaaatg

SEQ ID NO: 35264 - DNA, 96 bp, Fusarium azukicola
  misc_feature: 125
attttattccattctttatataatagggtcttagcttatatatatattcctttatattatctaagaaaactaattttattcttattttattaggat

SEQ ID NO: 35265 - DNA, 96 bp, Fusarium azukicola
  misc_feature: 125
agttaaaaactataaaaactataaactaggaaaattaactaaaaataatataaataaaaaacctaataataaggaatataagttcctagataaaat

SEQ ID NO: 35266 - DNA, 96 bp, Fusarium azukicola
  misc_feature: 125
attattttatttatatattttgcttatgaaaaagatatactcttattctctctatttatagttatatttattcctaaaaagtctttaacttctcct

SEQ ID NO: 35267 - DNA, 96 bp, Fusarium azukicola
  misc_feature: 125
aaataagaagtccttcttttaaataaataaggaaaaataatattataaggaaaagagaaaaataacctatatataataatagctaaggttatttct

SEQ ID NO: 35268 - DNA, 96 bp, Fusarium azukicola
  misc_feature: 125
acctaagggtttatacttaaaagaagattatacttcttttttaagtcttttctaagactttatacctccttaagtcttctttaagactttataatt

SEQ ID NO: 35269 - DNA, 96 bp, Fusarium azukicola
  misc_feature: 124
ttttttataagcaaaatatataaataaaataataaggaaatataataaataagaaataggaacttctaaagtacctattaaatttatagaaagact

SEQ ID NO: 35270 - DNA, 96 bp, Fusarium azukicola
  misc_feature: 124
aatcctaataaaataagaataaaattagttttcttagataatataaaggaatatatatataagctaagaccctattatataaagaatagaataaaa

SEQ ID NO: 35271 - DNA, 96 bp, Fusarium azukicola
  misc_feature: 124
gagacagacaagcgaacgagacacttatattttcaccttaaaaggtattttttaaaaaagctataaaagtcgaaattaagcttaaaatagctaaaa

SEQ ID NO: 35272 - DNA, 96 bp, Fusarium azukicola
  misc_feature: 124
ttttacctcttatttctccttaaatcctaacttttttatttaactctttctcttatttttaaatcctttcttctcttttctttttaaattaacttc

SEQ ID NO: 35273 - DNA, 96 bp, Fusarium azukicola
  misc_feature: 124
ttaagggtattattctaattggttaaaaaggttcctacagacctttatgactgccgtcatctatgcatcaagtataataactgccgattggctaaa

SEQ ID NO: 35274 - DNA, 96 bp, Fusarium azukicola
  misc_feature: 124
gaaatataaaaaaagtatttttataaatctaactatataaagaacctaaaaatatcttttttagatttttaaaaaaattgctttatagagaaataa

SEQ ID NO: 35275 - DNA, 96 bp, Fusarium azukicola
  misc_feature: 124
ttatattttattctattctttatataatagggtcttagcttatatatatattcctttatattatctaagaaaactgattttattcttattttatta

SEQ ID NO: 35276 - DNA, 96 bp, Fusarium azukicola
  misc_feature: 124
ttagtaatataatatagaacattaatagcctcctttaaagttataatcttataagggttatagctttatacgttcttattattagaggaaaaaatt

SEQ ID NO: 35277 - DNA, 96 bp, Fusarium azukicola
  misc_feature: 124
gattccttactttaaagaaagcccttataataataaaaaggcaatattatataataataataataataaatagaaattcactatcgaaattcctaa

SEQ ID NO: 35278 - DNA, 96 bp, Fusarium azukicola
  misc_feature: 124
ttagataatataaaggaatatatatataagctaagaccctattatataaagaatagaataaaatataatataagtccgccttataataaataagct

SEQ ID NO: 35279 - DNA, 96 bp, Fusarium azukicola
  misc_feature: 124
taagaaaactaattttattcttattttattaggattattttctatttcttttctaaattccttaaattttataatagcttctaacttattccttaa

SEQ ID NO: 35280 - DNA, 96 bp, Fusarium azukicola
  misc_feature: 124
tctatatataatatacctagtagcacctatattatatataaaattagttatattatctttattagtagaaaaattaggtttatttaccttatttaa

SEQ ID NO: 35281 - DNA, 96 bp, Fusarium azukicola
  misc_feature: 124
tgagatatatttttctaagacttctaagccttagaaaaagaagaaaactgccttaaaatgcagttattgcaaactgctaggtcataaagacccaga

SEQ ID NO: 35282 - DNA, 96 bp, Fusarium azukicola
  misc_feature: 124
ctatccgacggtataatcttggtccgaatcggatcctattaggccggtcaaatgactataataagggactatccttctttattagttactacaaga

SEQ ID NO: 35283 - DNA, 96 bp, Fusarium azukicola
  misc_feature: 124
tcttatctcttatctcttatctcttatctcttatctcttatctcttatttctctcttttctagctatatctctctttcttagctttacctctctct

SEQ ID NO: 35284 - DNA, 96 bp, Fusarium azukicola
  misc_feature: 124
taagggtattattctaattggttaaaaaggttcctatagacctttatgactgccgtcatctatgcatcaagtataataactgccgattggctaaga

SEQ ID NO: 35285 - DNA, 96 bp, Fusarium azukicola
  misc_feature: 124
ggaaaattaactaaaaataatataaataaaaaacctagtaataaggaatataagttcctagataaaatagctattaatatatagggtccttctaga

SEQ ID NO: 35286 - DNA, 96 bp, Fusarium azukicola
  misc_feature: 124
tccttcaaaatgacccaaaattaagtatccgacgtgctgcaataacctatgagatcaacgagcataggctccgtcgccgacggaagggcattcaat

SEQ ID NO: 35287 - DNA, 96 bp, Fusarium azukicola
  misc_feature: 124
tattttattccattctttatataatagggtcttagcttatatatatattcctttatattatctaagaaaactaattttattcttattttattagga

SEQ ID NO: 35288 - DNA, 96 bp, Fusarium azukicola
  misc_feature: 124
tcattattataagggctttctttaaagtaaggaatctcattaaaagaggggttatgtccttcgagaaagctattttctattatagttatatcctta

SEQ ID NO: 35289 - DNA, 96 bp, Fusarium azukicola
  misc_feature: 124
ataagctaagaccctattatataaagaatggaataaaatataatataagtccgccttataataaataagctaatagctttatagaaaggataaata

SEQ ID NO: 35290 - DNA, 96 bp, Fusarium azukicola
  misc_feature: 124
taatatatccctataaaccatatattatattatagaatttttactctatttttaggtatatttacctaacctatagctactataggtagctagata

SEQ ID NO: 35291 - DNA, 96 bp, Fusarium azukicola
  misc_feature: 124
tatcataatggattatactccctacctgttccatcatcatcatcatgggtcgtcgtgcgcttacagcagaggaaaaggcaaacaaggccaaccgtg

SEQ ID NO: 35292 - DNA, 96 bp, Fusarium azukicola
  misc_feature: 124
taggtaataattacttttttaggaatagtaatttctctagcttctagcttatttttaacctcttttatcttattaagatatatttctatattctta

SEQ ID NO: 35293 - DNA, 96 bp, Fusarium azukicola
  misc_feature: 124
ccttaccctagctaataaccctcttatctataccctacccatatagtctaacccgatccatgtaagaaaacgctatttatactatctcatactgta

SEQ ID NO: 35294 - DNA, 96 bp, Fusarium azukicola
  misc_feature: 124
taattggttgaaattagggttaggggtagtagttacgttaagggttagggttaattggttgaaattagggttaggggtagtagtagagttaagggt

SEQ ID NO: 35295 - DNA, 96 bp, Fusarium azukicola
  misc_feature: 124
taagagagagaggtaaagctaagaaagagagatatagctagaaaagagagaaataagagataagagataagagataagagataagagataagagat

SEQ ID NO: 35296 - DNA, 96 bp, Fusarium azukicola
  misc_feature: 124
taagaataaaattagttttcttagataatataaaggaatatatatataagctaagaccctattatataaagaatggaataaaatataatataagtc

SEQ ID NO: 35297 - DNA, 96 bp, Fusarium azukicola
  misc_feature: 124
aaggcggacttatattatattttattccattctttatataatagggtcttagcttatatatatattcctttatattatctaagaaaactgatttta

SEQ ID NO: 35298 - DNA, 96 bp, Fusarium azukicola
  misc_feature: 124
gtattatattttattccattctttatacaatagggccttagcttatatatatattcctttgcattatctgagaaaactgattttattcttatttta

SEQ ID NO: 35299 - DNA, 96 bp, Fusarium azukicola
  misc_feature: 124
aacctttactataactacttaaccctaacccttaacttaaccacttaaccctaacctttactataactacttaaccctaacccttaacttaaccac

SEQ ID NO: 35300 - DNA, 96 bp, Fusarium azukicola
  misc_feature: 124
gcggtttcctttacctctcttagtacttattaatccctaatcgccttaccctagctaataaccctcttatctataccctacccatatagtctaacc

SEQ ID NO: 35301 - DNA, 96 bp, Fusarium azukicola
  misc_feature: 124
gggcaaaacaaagggaagattgagaatgggacctaccaaccattagacttctctgctcaattccgacaagagattcagaccgaccgagagagaggc

SEQ ID NO: 35302 - DNA, 96 bp, Fusarium azukicola
  misc_feature: 124
gaacctttttaaccaattagaataatacccttaatatctagctacctatagtagctataggttaggtaaatatacctaaaaatagagtaaaaaatc

SEQ ID NO: 35303 - DNA, 96 bp, Fusarium azukicola
  misc_feature: 124
atataatatacctagtagcacctatattatatataaaattagttatattatctttattagtagaaaaattaggtttatttaccttatttaaatatc

SEQ ID NO: 35304 - DNA, 96 bp, Fusarium azukicola
  misc_feature: 124
gaatctattttttctagtctcttagatttatctataaggctagaagaaagtaattctaggttataagccttaggattactccttaaagcttataag

SEQ ID NO: 35305 - DNA, 96 bp, Fusarium azukicola
  misc_feature: 124
gaatattaacagcctcctttaaagttataatcttataagggttatagctttatacgttcttattattagaggaaaaaattaaacctctattattat

SEQ ID NO: 35306 - DNA, 96 bp, Fusarium azukicola
  misc_feature: 124
ctttatctcttatctcttatttcttatttctttatctcttatctcttatctcttatctcttatctcttatctcttatctcttatctcttatctctt

SEQ ID NO: 35307 - DNA, 96 bp, Fusarium azukicola
  misc_feature: 124
cttccttcttagaattaggtttagattcctttttcttagaagtcttatgcaccttattggcttcctgaattttccagttttttggagccttattag

SEQ ID NO: 35308 - DNA, 96 bp, Fusarium azukicola
  misc_feature: 124
cttattattttatttatatattttgcttatgaaaaagatatactcttattctctctatttatagttatatttattcctaaaaagtctttaacttct

SEQ ID NO: 35309 - DNA, 96 bp, Fusarium azukicola
  misc_feature: 124
aataagaataaaattagttttcttagataatataaaggaatatatatataagctaagaccctattatataaagaatagaataaaatataatataag

SEQ ID NO: 35310 - DNA, 96 bp, Fusarium azukicola
  misc_feature: 124
aaaaagagaaataaaggaggggaagagtaaagaaaaagagaagaagataaaaggagaaggggaagagtaaaagaaagaaaagtaagaaagtaatag

SEQ ID NO: 35311 - DNA, 96 bp, Fusarium azukicola
  misc_feature: 124
atctcctagaatctctatagaagcccgaagggcttctatctatagctgacccaaagcctgaccctaaccctgacctaatgtatgaccctgaccctg

SEQ ID NO: 35312 - DNA, 96 bp, Fusarium azukicola
  misc_feature: 124
attaaccctaacccttaactctactactacccctaaccctaatttcaaccaattaaccctaacccttaacgtaactactacccctaaccctaattt

SEQ ID NO: 35313 - DNA, 96 bp, Fusarium azukicola
  misc_feature: 124
atgcaaaggaatatatatataagctaaggccctattgtataaagaatggaataaaatataatacaagtccgcctcataataaacaagctaatggct

SEQ ID NO: 35314 - DNA, 96 bp, Fusarium azukicola
  misc_feature: 124
atctgagaaaactgattttattcttattttattaggattattttctatttcttttctaaattccttaaattttataatagcttctaacttattcct

SEQ ID NO: 35315 - DNA, 96 bp, Fusarium azukicola
  misc_feature: 124
aaaagagatatagctaagagagagaggtaaagctaagaaagagagatatagctagaaaagagagaaataaaagataagagataagagataagagat

SEQ ID NO: 35316 - DNA, 96 bp, Fusarium azukicola
  misc_feature: 124
atatgactaaggtcctaatgaacccgatggtcacgaagacccctgagacgccaaaaacaccgccaaaagcacccaaaataccctctgagtgtgtct

SEQ ID NO: 35317 - DNA, 96 bp, Fusarium azukicola
  misc_feature: 124
ataaataagaagtccttcttttaaataaataaggaaaaataatattataaggaaaagagaaaaataacctatatataataatagctaaggttattt

SEQ ID NO: 35318 - DNA, 96 bp, Fusarium azukicola
  misc_feature: 124
aataaccttagctattattatatataggttatttttctcttttccttataatattatttttccttatttatttaaaagaaggacttcttatttatt

SEQ ID NO: 35319 - DNA, 96 bp, Fusarium azukicola
  misc_feature: 123
agagaagacaactagacaactatcataatggattatactccctacctgttccatcatcatcatcatgggtcgtcgtgcgcttacagcagaggaaaa

SEQ ID NO: 35320 - DNA, 96 bp, Fusarium azukicola
  misc_feature: 123
tttctatttattattattattattatataatattgccttttcattattataagggctttctttaaagtaaggaatctcattaaaagaggggttatt

SEQ ID NO: 35321 - DNA, 96 bp, Fusarium azukicola
  misc_feature: 123
ctttagtttctagtttatctaagggagaatagttcttataataaactatagacctaaaggtttttattttatctaattccttaatatctaaggaaa

SEQ ID NO: 35322 - DNA, 96 bp, Fusarium azukicola
  misc_feature: 123
atataagctaagaccctattatataaagaatggaataaaatataatataagtccgccttataataaataagctaatagctttatagaaaggataaa

SEQ ID NO: 35323 - DNA, 96 bp, Fusarium azukicola
  misc_feature: 123
tttacctctcttagtacttattaatccctaatcgccttaccctagctaataaccctcttatctataccctacccatatagtctaacccgatccatg

SEQ ID NO: 35324 - DNA, 96 bp, Fusarium azukicola
  misc_feature: 123
tgaaagtaaacagtgatataatacgtggtcaaaacaaacaaagatgctagcaagactcttttatcagtggcaatggtagagaagacaactagacaa

SEQ ID NO: 35325 - DNA, 96 bp, Fusarium azukicola
  misc_feature: 123
ttctttatatagggaaggtttcttattaaaggtcctagtatattattagttatattattttattgagaaattaaggaattatatacctctaaatca

SEQ ID NO: 35326 - DNA, 96 bp, Fusarium azukicola
  misc_feature: 123
catcatatatatatatatgatatggtatggatatagatgatgttattatttattattataatcgtaataacgaaagaggaagaagaagaagaagaa

SEQ ID NO: 35327 - DNA, 96 bp, Fusarium azukicola
  misc_feature: 123
gaaaattaactaaaaataatataaataaaaaacctaataataaggaatataagttcctagataaaatagctactaatatatagggtccttctagaa

SEQ ID NO: 35328 - DNA, 96 bp, Fusarium azukicola
  misc_feature: 123
aatatacctaaaaatagagtaaaaattctataatataatatatggtttatagggatatatcactatagttggtaatataatatagaacattaataa

SEQ ID NO: 35329 - DNA, 96 bp, Fusarium azukicola
  misc_feature: 123
ttatctcttatttcttatttctttatctcttatctcttatctcttatctcttatctcttatctcttatctcttatctcttatctcttatctcttat

SEQ ID NO: 35330 - DNA, 96 bp, Fusarium azukicola
  misc_feature: 123
tatataagctaagaccctattatataaagaatggaataaaatataatataagtccgccttataataaataagctaatagctttatagaaaggataa

SEQ ID NO: 35331 - DNA, 96 bp, Fusarium azukicola
  misc_feature: 123
ttactttttttaagtttctagctattttatagcagtttttagaaacttaggttttagcgatttttagttatacagtatgctgtctcgttcgcttat

SEQ ID NO: 35332 - DNA, 96 bp, Fusarium azukicola
  misc_feature: 123
ttactttctattactttcttacttttctttcttttactcttccccttctccttttatcttcttctctttttctttactcttcccctcctttatttc

SEQ ID NO: 35333 - DNA, 96 bp, Fusarium azukicola
  misc_feature: 123
tggttgaaattagggttaggggtagtagtagagttaagggttagggttaattggttgaaattagggttaggggtagtagtagagttaaggggtagg

SEQ ID NO: 35334 - DNA, 96 bp, Fusarium azukicola
  misc_feature: 123
attaatttcctagataactaggaagaaaagtaataaagagataatatctagcttctaagagagacttatagaagatagatagataaaagtgggtca

SEQ ID NO: 35335 - DNA, 96 bp, Fusarium azukicola
  misc_feature: 123
atgtaccgcgtcgataagctgagagggaaaagcaaaatgtgcaggcatatgaaactctatatctgtgaaagtaaacagtgatataatacgtggtca

SEQ ID NO: 35336 - DNA, 96 bp, Fusarium azukicola
  misc_feature: 123
taaccctaacccttaactctactactacccctaaccctaatttcaaccaattaaccctaacccttaacgtaactactacccctaaccataatttca

SEQ ID NO: 35337 - DNA, 96 bp, Fusarium azukicola
  misc_feature: 123
ccatcatatatatatatatgatatggtatggatatagatgatgttattatttattattataatcgtaataacgaaagaggaagaagaagaagaaga

SEQ ID NO: 35338 - DNA, 96 bp, Fusarium azukicola
  misc_feature: 123
tctaagaaaactgattttattcttattttattaggattattttctatttcttttctaaattccttaaattttataatagcttctaacttattcctt

SEQ ID NO: 35339 - DNA, 96 bp, Fusarium azukicola
  misc_feature: 123
tccttattactaggttttttatttatattatttttagttaattttcctagtttgcagttttcgcagtttttaacttaatataggtcctcactagta

SEQ ID NO: 35340 - DNA, 96 bp, Fusarium azukicola
  misc_feature: 123
gatagtataaatagcgttttcttacatggatcgggttagactatatgggtagggtatagataagagggttattagctagggtaaggcgattaggga

SEQ ID NO: 35341 - DNA, 96 bp, Fusarium azukicola
  misc_feature: 123
tatattatctaagaaaactgattttattcttattttattaggattattttctatttcttttctaaattccttgaattttataatagcttctgactt

SEQ ID NO: 35342 - DNA, 96 bp, Fusarium azukicola
  misc_feature: 123
aaaataagaataaaattagttttcttagataatataaaggaatatatatataagctaagaccctattatataaagaatagaataaaatataatata

SEQ ID NO: 35343 - DNA, 96 bp, Fusarium azukicola
  misc_feature: 123
tatatatatatgatatggtatggatatagatgatgttattatttattattataatcgtaataacgaaagaggaagaagaagaagaagaagaagaag

SEQ ID NO: 35344 - DNA, 96 bp, Fusarium azukicola
  misc_feature: 123
tatactctcttctctcttttactttaccctccacttttattctttattttactttaccctatactctcttctctcttttactttaccctatactct

SEQ ID NO: 35345 - DNA, 96 bp, Fusarium azukicola
  misc_feature: 123
tacttaaacttttaatcttagttattttaagcttaggtttattttcttagaattattttaagtgttttttaaataaggtgtaattactaagaaatt

SEQ ID NO: 35346 - DNA, 96 bp, Fusarium azukicola
  misc_feature: 123
aatatgcctagtagcaccttatttaaatatcctagttgtttctttatatagggaaggtttcttattaaaggtcctagtatattattagttatatta

SEQ ID NO: 35347 - DNA, 96 bp, Fusarium azukicola
  misc_feature: 123
taactttaaaggaggctattaatattctatattatattactaactatagtgatatatccctataaactatatattatattatagaatttttactct

SEQ ID NO: 35348 - DNA, 96 bp, Fusarium azukicola
  misc_feature: 123
taaataagaagtccttcttttaaataaataaggaaaaataatattataaggaaaagagaaaaataacctatatataataatagctaaggttatttc

SEQ ID NO: 35349 - DNA, 96 bp, Fusarium azukicola
  misc_feature: 123
aggaatttagaaaagaaatagaaaataatcctaataaaataagaataaaatcagttttcttagataatacaaaggaatatatatataagctaagac

SEQ ID NO: 35350 - DNA, 96 bp, Fusarium azukicola
  misc_feature: 123
gtaactactacccctaaccctaatttcaaccaattaaccctaacccttaacgtaactactacccctaaccataatttcaaccaattaaccctaacc

SEQ ID NO: 35351 - DNA, 96 bp, Fusarium azukicola
  misc_feature: 123
gattataactttaaaggaggctattaatgttctatattatattaccaactatagtgatatatccctataaaccacatattatattatagaattttt

SEQ ID NO: 35352 - DNA, 96 bp, Fusarium azukicola
  misc_feature: 123
gatctataagattactttttttaagtttctagctattttatagcagtttttagaaacttaggttttagcgatttttagttatatagtatgctgtct

SEQ ID NO: 35353 - DNA, 96 bp, Fusarium azukicola
  misc_feature: 123
cttattagaaataaccttagctattattatatataggttatttttctcttttccttataatattatttttccttatttatttaaaagaaggacttc

SEQ ID NO: 35354 - DNA, 96 bp, Fusarium azukicola
  misc_feature: 123
gaaagagaggtataactaggaaaaagagatatagctaagagagagaggtaaagctaagaaagagagatatagctagaaaagagagaaataaaagat

SEQ ID NO: 35355 - DNA, 96 bp, Fusarium azukicola
  misc_feature: 123
ctcttatctcttatttcttatttctttatctcttatctcttatctcttatctcttatctcttatctcttatctcttatctcttatctcttatctct

SEQ ID NO: 35356 - DNA, 96 bp, Fusarium azukicola
  misc_feature: 123
ctaggaaaattaactaaaaataatataaataaaaaacctaataataaggaatataagttcctagataaaatagctactaatatatagggtccttct

SEQ ID NO: 35357 - DNA, 96 bp, Fusarium azukicola
  misc_feature: 123
aggaaaattaactaaaaataatataaataaaaaacctaataataaggaatataagttcctagataaaatagctactaatatatagggtccttctag

SEQ ID NO: 35358 - DNA, 96 bp, Fusarium azukicola
  misc_feature: 123
aaaaagagaagttataaagagttattaagaaagggagggtgggggaaaaaagaggaaggatagggagttagtttagggtcggtagagaggaggggg

SEQ ID NO: 35359 - DNA, 96 bp, Fusarium azukicola
  misc_feature: 123
atggaataaaatataatataagtccgccttataataaataagctaatagctttatagaaaggataaataggactatattagaaaaggttagagctt

SEQ ID NO: 35360 - DNA, 96 bp, Fusarium azukicola
  misc_feature: 123
ataatatagaatattaacagcctcctttaaagttataatcttataagggttatagctttatacgttcttattattagaggaaaaaattaaacctct

SEQ ID NO: 35361 - DNA, 96 bp, Fusarium azukicola
  misc_feature: 123
ataaggcggacttatattatattttattccattctttatataatagggtcttagcttatatatatattcctttatattatctaagaaaactgattt

SEQ ID NO: 35362 - DNA, 96 bp, Fusarium azukicola
  misc_feature: 123
acttaaccacttaaccctaacctttactataactacttaaccctaacccttaacttaaccacttaaccctaacctttactataactacttaaccct

SEQ ID NO: 35363 - DNA, 96 bp, Fusarium azukicola
  misc_feature: 123
aatggaataaaatataatataagtccgccttataataaataagctaatagctttatagaaaggataaataggactatattagaaaaggttagagct

SEQ ID NO: 35364 - DNA, 96 bp, Fusarium azukicola
  misc_feature: 123
aagagtaattttataagtctaactaaaaaagttataagtttataatttttctagatttttaaaaaattcctttaatttttaaaaaataaaaaactt

SEQ ID NO: 35365 - DNA, 96 bp, Fusarium azukicola
  misc_feature: 122
tttattatatttccttattattttatttatatattttgcttatgaaaaagatatactcttattctctctatttatagttatatttattcctaaaaa

SEQ ID NO: 35366 - DNA, 96 bp, Fusarium azukicola
  misc_feature: 122
tttttacctcttatttctccttaaatcctaacttttttatttaactctttctcttatttttaaatcctttcttctcttttctttttaaattaactt

SEQ ID NO: 35367 - DNA, 96 bp, Fusarium azukicola
  misc_feature: 122
ttttatttctctcttttctagctatatctctctttcttagctttacctctctctcttagctatatctctttttcctagttatacctctctttctta

SEQ ID NO: 35368 - DNA, 96 bp, Fusarium azukicola
  misc_feature: 122
gtaccgcgtcgataagctgagagggaaaagcaaaatgtgcaggcatatgaaactctatatctgtgaaagtaaacagtgatataatacgtggtcaaa

SEQ ID NO: 35369 - DNA, 96 bp, Fusarium azukicola
  misc_feature: 122
tatacttaaacttttaatcttagttattttaagcttaggtttattttcttagaattattttaagtgttttttaaataaggtgtaattactaagaaa

SEQ ID NO: 35370 - DNA, 96 bp, Fusarium azukicola
  misc_feature: 122
tttctctataaagcaatttttttaaaaatctaaaaaagatatttttaggttctttatatagttagatttataaaaatactttttttatatttctag

SEQ ID NO: 35371 - DNA, 96 bp, Fusarium azukicola
  misc_feature: 122
atgatatataatctattactaaagccttataaatggcttagttatagcaaaaaccggttttaatggatagaatgcaacgctgaagggtttaggaaa

SEQ ID NO: 35372 - DNA, 96 bp, Fusarium azukicola
  misc_feature: 122
aaataagaataaaatcagttttctcagataatgcaaaggaatatatatataagctaaggccctattgtataaagaatggaataaaatataatacaa

SEQ ID NO: 35373 - DNA, 96 bp, Fusarium azukicola
  misc_feature: 122
attctcttgtcctcacgctttaggtatcgaaagctatcaagaactttggtgatcattccattaatgagagaaaataatgccaaaaaaaaaaaccaa

SEQ ID NO: 35374 - DNA, 96 bp, Fusarium azukicola
  misc_feature: 122
ttctatcttgcctctctctcggtcggtctgaatctcttgtcggaattgagcagagaagtctaatggttggtaggtcccattctcaatcttcccttt

SEQ ID NO: 35375 - DNA, 96 bp, Fusarium azukicola
  misc_feature: 122
ttctagaaggaccctatatattaatagctattttatctaggaacttatattccttattactaggttttttatttatattatttttagttaattttc

SEQ ID NO: 35376 - DNA, 96 bp, Fusarium azukicola
  misc_feature: 122
ccaattaaccctaacccttaactctactactacccctaaccctaatttcaaccaattaaccctaacccttaacgtaactactacccctaaccataa

SEQ ID NO: 35377 - DNA, 96 bp, Fusarium azukicola
  misc_feature: 122
gtaaaaattctataatataatatatagtttatagggatatatcactatagttagtaatataatatagaatattaatagcctcctttaaagttataa

SEQ ID NO: 35378 - DNA, 96 bp, Fusarium azukicola
  misc_feature: 122
ctattatctaagagagaagagttagaaagtaaagctaacctctagggtaaggaaggggttagcctctaaggtctagggaagaagtataatggctaa

SEQ ID NO: 35379 - DNA, 96 bp, Fusarium azukicola
  misc_feature: 122
aaccctaaccctagttccggttccggttccggttccggttccggtttctagttagaccgtgcctgtacgctccttttctaccctttcaagctctaa

SEQ ID NO: 35380 - DNA, 96 bp, Fusarium azukicola
  misc_feature: 122
cccttaacgtaactactacccctaaccctaatttcaaccaattaaccctaacccttaacgtaactactacccctaaccataatttcaaccaattaa

SEQ ID NO: 35381 - DNA, 96 bp, Fusarium azukicola
  misc_feature: 122
taaccttatattttcgggcccttataaagaagatatagaaagaatagtaaatattctatctaaggatatagtaatctaatccttaggagaagttaa

SEQ ID NO: 35382 - DNA, 96 bp, Fusarium azukicola
  misc_feature: 122
ctaaccctagttccggttccggttccggttccggttccggtttctagttagaccgtgcctgtacgctccttttctaccctttcaagctctaacaca

SEQ ID NO: 35383 - DNA, 96 bp, Fusarium azukicola
  misc_feature: 122
tggattatactccctacctgttccatcatcatcatcatgggtcgtcgtgcgcttacagcagaggaaaaggcaaacaaggccaaccgtgagagagag

SEQ ID NO: 35384 - DNA, 96 bp, Fusarium azukicola
  misc_feature: 122
tgccactgataaaagagtcttgctagcatctttgtttgttttgaccacgtattatatcactgtttactttcacagatatagagtttcatatgcctg

SEQ ID NO: 35385 - DNA, 96 bp, Fusarium azukicola
  misc_feature: 122
agaaagagaggtataactaggaaaaagagatatagctaagagagagaggtaaagctaagaaagagagatatagctagaaaagagagaaataaaaga

SEQ ID NO: 35386 - DNA, 96 bp, Fusarium azukicola
  misc_feature: 122
gagaggtataactaggaaaaagagatatagctaagagagagaggtaaagctaagaaagagagatatagctagaaaagagagaaataaaagataaga

SEQ ID NO: 35387 - DNA, 96 bp, Fusarium azukicola
  misc_feature: 122
tctcttatctcttatttcttatttctttatctcttatctcttatctcttatctcttatctcttatctcttatctcttatctcttatctcttatctc

SEQ ID NO: 35388 - DNA, 96 bp, Fusarium azukicola
  misc_feature: 122
taaattattaaataatttaggcttctatactatcccttttaataaagctctctttataaataagaacttaaagattactatagctatttatataga

SEQ ID NO: 35389 - DNA, 96 bp, Fusarium azukicola
  misc_feature: 122
tcgggttagactatatgggtagggtatagataagagggttattagctagggtaaggcgattagggattaataagtactaagagaggtaaaggaaac

SEQ ID NO: 35390 - DNA, 96 bp, Fusarium azukicola
  misc_feature: 122
tattcttattagaaataaccttagctattattatatataggttatttttctcttttccttatgatattatttttccttgcttatttaaaagaagga

SEQ ID NO: 35391 - DNA, 96 bp, Fusarium azukicola
  misc_feature: 122
agaaatataaaaaaagtatttttataaatctaactatataaagaacctaaaaatatcttttttagatttttaaaaaaattgctttatagagaaata

SEQ ID NO: 35392 - DNA, 96 bp, Fusarium azukicola
  misc_feature: 122
tattatctgagaaaactgattttattcttattttattaggattattttctatttcttttctaaattccttaaattttataatagcttctaacttat

SEQ ID NO: 35393 - DNA, 96 bp, Fusarium azukicola
  misc_feature: 122
atccatgtatgtaccgcgtcgataagctgagagggaaaagcaaaatgtgcaggcatatgaaactctatatctgtgaaagtaaacagtgatataata

SEQ ID NO: 35394 - DNA, 96 bp, Fusarium azukicola
  misc_feature: 122
tatctgttaatgttctatattatattaccaactatagtgatatatccctataaaccacatattatattatagaatttttactctatttttaggtat

SEQ ID NO: 35395 - DNA, 96 bp, Fusarium azukicola
  misc_feature: 122
tatctattaaggaataagtcagaagctattataaaatttaaggaatttagaaaagaaatagaaaataatcctaataaaataagaataaaatcagtt

SEQ ID NO: 35396 - DNA, 96 bp, Fusarium azukicola
  misc_feature: 122
agattccttactttaaagaaagcccttataataataaaaaggcaatattatataataataataataataaatagaaattcactatcgaaattccta

SEQ ID NO: 35397 - DNA, 96 bp, Fusarium azukicola
  misc_feature: 122
tagaaattcttttctatatataatatacctagtagcacctatattatatataaaattagttatattatctttattagtagaaaaattaggtttatt

SEQ ID NO: 35398 - DNA, 96 bp, Fusarium azukicola
  misc_feature: 122
catacaatatgcctagtagcaccttatttaaatatcctagttgtttctttatatagggaaggtttcttattaaaggtcctagtatattattagtta

SEQ ID NO: 35399 - DNA, 96 bp, Fusarium azukicola
  misc_feature: 122
taaataataaagctctaaccttttctaatatagtcctatttatcctttctataaagccattagcttatttattatgaggcggacttatattatatt

SEQ ID NO: 35400 - DNA, 96 bp, Fusarium azukicola
  misc_feature: 122
taaaataagaataaaattagttttcttagataatataaaggaatatatatataagctaagaccctattatataaagaatggaataaaatataatat

SEQ ID NO: 35401 - DNA, 96 bp, Fusarium azukicola
  misc_feature: 122
ataagaagtaatctagctttaatatttaattaagatatattaaattataaaggattaattaattaaatagagataatataggttaagggattttta

SEQ ID NO: 35402 - DNA, 96 bp, Fusarium azukicola
  misc_feature: 122
attttttcctctaataataagaacgtataaagctataacccttataagattataactttaaaggaggctattaatgttctatattatattaccaac

SEQ ID NO: 35403 - DNA, 96 bp, Fusarium azukicola
  misc_feature: 122
ccaaggcgtcaaactggaaggcttggctaagaaaataactatcttagagcatgaaaatcaagagcttcgacccaagaaaaggcgtaaggttatcac

SEQ ID NO: 35404 - DNA, 96 bp, Fusarium azukicola
  misc_feature: 122
cccctccggatagtagcggtttcctttacctctcttagtacttattaatccctaatcgccttaccctagctaataaccctcttatctataccctac

SEQ ID NO: 35405 - DNA, 96 bp, Fusarium azukicola
  misc_feature: 122
aatataatatagaatattaatagcctcctttaaagttataatcttataagggttatagctttatatattcttattattagaggaaaaaattaaacc

SEQ ID NO: 35406 - DNA, 96 bp, Fusarium azukicola
  misc_feature: 122
ggtattattctaattggttaaaaaggttcctacagaccttcatgactgccgtcatcaatgcatcaaagtataataactgccgattggctaaaaagg

SEQ ID NO: 35407 - DNA, 96 bp, Fusarium azukicola
  misc_feature: 122
gagagagaggtaaagctaagaaagagagatatagctagaaaagagagaaataagagataagagataagagataagagataagagataagagataag

SEQ ID NO: 35408 - DNA, 96 bp, Fusarium azukicola
  misc_feature: 122
atctataagattactttttttaagtttctagctattttatagcagtttttagaaacttaggttttagcgatttttagttatatagtatgctgtctc

SEQ ID NO: 35409 - DNA, 96 bp, Fusarium azukicola
  misc_feature: 122
gaaaggagagaagtaaggaaggttaagaaaggagagaagtaaggaaggttaagaaaggagagaagtaaggaaggttaagaaaggagagaaggaagg

SEQ ID NO: 35410 - DNA, 96 bp, Fusarium azukicola
  misc_feature: 122
ctcttatcttttatttctctcttttctagctatatctctctttcttagctttacctctctctcttagctatatctctttttcctagctatatctct

SEQ ID NO: 35411 - DNA, 96 bp, Fusarium azukicola
  misc_feature: 122
ctagctaataaccctcttatctataccctacccatatagtctaacccgatccatgtaagaaaacgctatttatactatctcatactgtacttaact

SEQ ID NO: 35412 - DNA, 96 bp, Fusarium azukicola
  misc_feature: 122
cctatactctcttctctcttttactttaccctatactctcttctctcttttactttaccctccacttttattctttattttactttaccctatact

SEQ ID NO: 35413 - DNA, 96 bp, Fusarium azukicola
  misc_feature: 122
caatagaggtactatatactaaaactaggttttttaaaaaatcctagaaaattcaaactaactctaaaatagctaaaatttaaagtttagacttat

SEQ ID NO: 35414 - DNA, 96 bp, Fusarium azukicola
  misc_feature: 122
atacttaaacttttaatcttagttattttaagcttaggtttattttcttagaattattttaagtgttttttaaataaggtgtaattactaagaaat

SEQ ID NO: 35415 - DNA, 96 bp, Fusarium azukicola
  misc_feature: 122
atagagtaaaaattctataatataatatgtggtttatagggatatatcactatagttggtaatataatatagaatattaatagcctcctttaaagt

SEQ ID NO: 35416 - DNA, 96 bp, Fusarium azukicola
  misc_feature: 121
gagtctttctataaatttaataggtactttagaagttcctatttcttatttattatatttccttattattttatttatatattttgcttataaaaa

SEQ ID NO: 35417 - DNA, 96 bp, Fusarium azukicola
  misc_feature: 121
ttttaagttttttattttttaaaaattaaaggaattttttaaaaatctagaaaaattataaacttataacttttttagttagacttataaaattac

SEQ ID NO: 35418 - DNA, 96 bp, Fusarium azukicola
  misc_feature: 121
tttctttatatagggaaggtttcttattaaaggtcctagtatattattagttatattattttattgagaaattaaggaattatatacctctaaatc

SEQ ID NO: 35419 - DNA, 96 bp, Fusarium azukicola
  misc_feature: 121
tttacctcttatttctccttaaatcctaacttttttatttaactctttctcttatttttaaatcctttcttctcttttctttttaaattaacttca

SEQ ID NO: 35420 - DNA, 96 bp, Fusarium azukicola
  misc_feature: 121
ttcaaggtattaactatgaagaaacctatgcttgtactataagacctgagactctaagacttttctttataatttctataaggaataactactatt

SEQ ID NO: 35421 - DNA, 96 bp, Fusarium azukicola
  misc_feature: 121
ttcaaccaattaaccctaacccttaacgtaactactacccctaaccctaatttcaaccaattaaccctaacccttaacgtaactactacccctaac

SEQ ID NO: 35422 - DNA, 96 bp, Fusarium azukicola
  misc_feature: 121
ttattttatttatatattttgcttatgaaaaagatatactcttattctctctatttatagttatatttattcctaaaaagtctttaacttctccta

SEQ ID NO: 35423 - DNA, 96 bp, Fusarium azukicola
  misc_feature: 121
atacctaaaaatagagtaaaaattctataatataatatgtggtttatagggatatatcactatagttagtaatataatatagaacattaataataa

SEQ ID NO: 35424 - DNA, 96 bp, Fusarium azukicola
  misc_feature: 121
caaactgccaggtcataaagacccagattgctattttttgcaccctaataaggctccaaaaaactggaaaattcaggaagccaataaggtgcataa

SEQ ID NO: 35425 - DNA, 96 bp, Fusarium azukicola
  misc_feature: 121
ttatctgagaaaactgattttattcttattttattaggattattttctatttcttttctaaattccttaaattttataatagcttctaacttattc

SEQ ID NO: 35426 - DNA, 96 bp, Fusarium azukicola
  misc_feature: 121
aaataagaataaaattagttttcttagataatataaaggaatatatatataagctaagaccctattatataaagaatagaataaaatataatataa

SEQ ID NO: 35427 - DNA, 96 bp, Fusarium azukicola
  misc_feature: 121
ttaccctagctaataaccctcttatctataccctacccatatagtctaacccgatccatgtaagaaaacgctatttatactatctcatactgtact

SEQ ID NO: 35428 - DNA, 96 bp, Fusarium azukicola
  misc_feature: 121
ttaactctactactacccctaaccctaatttcaaccaattaaccctaacccttaacgtaactactacccctaaccctaatttcaaccaattaaccc

SEQ ID NO: 35429 - DNA, 96 bp, Fusarium azukicola
  misc_feature: 121
ccctaaccctagttccggttccggttccggttccggttccggtttctagttagaccgtgcctgtacgctccttttctaccctttcaagctctaaca

SEQ ID NO: 35430 - DNA, 96 bp, Fusarium azukicola
  misc_feature: 121
agctgtctatacccatcatatatatatatatgatatggtatggatatagatgatgttattatttattattataatcgtaataacgaaagaggaaga

SEQ ID NO: 35431 - DNA, 96 bp, Fusarium azukicola
  misc_feature: 121
tcttatttcttttctctttcttccttcttagaattaggtttagattcctttttcttagaagtcttatataccttattagcttcctaagttttctag

SEQ ID NO: 35432 - DNA, 96 bp, Fusarium azukicola
  misc_feature: 121
gaagggcaaaacaaagggaagattgagaatgggacctaccaaccattagacttctctgctcaattccgacaagagattcagaccgaccgagagaga

SEQ ID NO: 35433 - DNA, 96 bp, Fusarium azukicola
  misc_feature: 121
tctactactacccctaaccctaatttcaaccaattaaccctaacccttaacgtaactactacccctaaccctaatttcaaccaattaaccctaacc

SEQ ID NO: 35434 - DNA, 96 bp, Fusarium azukicola
  misc_feature: 121
aatataactataaatagagagaataagagtatatctttttcataagtaaaatatataaataaaataataaggaaatataataaataagaaatagga

SEQ ID NO: 35435 - DNA, 96 bp, Fusarium azukicola
  misc_feature: 121
gcagttattgcaaactgccaggtcataaagacccagattgctattttttgcaccctaataaggctccaaaaaactggaaaattcaggaagccaata

SEQ ID NO: 35436 - DNA, 96 bp, Fusarium azukicola
  misc_feature: 121
agaataagaataagaataagaataagaataagaataagaataagaataagaataagaataagaataagaataagaataagaataagaataagaata

SEQ ID NO: 35437 - DNA, 96 bp, Fusarium azukicola
  misc_feature: 121
gaaaaagagaaataaaggaggggaagagtaaagaaaaagagaagaagataaaaggagaaggggaagagtaaaagaaagaaaagtaagaaagtaata

SEQ ID NO: 35438 - DNA, 96 bp, Fusarium azukicola
  misc_feature: 121
gaaaaaaataacctatatataataacagctaaggttatttctaataagaataactatagactaagagataacttagatcttcctattttaaatata

SEQ ID NO: 35439 - DNA, 96 bp, Fusarium azukicola
  misc_feature: 121
gattgttaatgttctatattatattaccaactatagtgatatatccctataaaccacatattatattatagaatttttactctatttttaggtata

SEQ ID NO: 35440 - DNA, 96 bp, Fusarium azukicola
  misc_feature: 121
acctaaaaatagagtaaaaattctataatataatatgtggtttatagggatatatcactatagttggtaatataatatagaacattaacaattata

SEQ ID NO: 35441 - DNA, 96 bp, Fusarium azukicola
  misc_feature: 121
gaagccaataaggtatataagacttctaagaaaaaggaatctaaacctaattctaagaaggaagaaagagaaaagaaataagaaaagctatttata

SEQ ID NO: 35442 - DNA, 96 bp, Fusarium azukicola
  misc_feature: 121
tataaaaggtttataaagttaaaataaaggggaattaattaaataattaaggttatatatatatagctagctcccctatatctaggagctttagat

SEQ ID NO: 35443 - DNA, 96 bp, Fusarium azukicola
  misc_feature: 121
taaccctaacccttaacttaaccacttaaccctaacctttactataactacttaaccctaacccttaacttaaccacttaaccctaacctttacta

SEQ ID NO: 35444 - DNA, 96 bp, Fusarium azukicola
  misc_feature: 121
tagcttagatagtaaatactaaccccaactataaccctaaccctagttccggttccggttccggttccggttccggtttctagttagaccgtgcct

SEQ ID NO: 35445 - DNA, 96 bp, Fusarium azukicola
  misc_feature: 121
tactgtatactttaagatacctatataaggaatttttttaaaaatttagaaaaaatatttttaagtcttatatatagctaaatagttaaaatcgtt

SEQ ID NO: 35446 - DNA, 96 bp, Fusarium azukicola
  misc_feature: 121
tactattatctaagagagaagagttagaaagtaaagctaacctctagggtaaggaaggggttagcctctaaggtctagggaagaagtataatggct

SEQ ID NO: 35447 - DNA, 96 bp, Fusarium azukicola
  misc_feature: 121
aagtacagtatgagatagtataaatagcgttttcttacatggatcgggttagactatatgggtagggtatagataagagggttattagctagggta

SEQ ID NO: 35448 - DNA, 96 bp, Fusarium azukicola
  misc_feature: 121
taaggattataaaaagaaatatcctaatagtaatataaataagctataaatctatttaaaattaagaaaagccttatatagcctaaaataaagccc

SEQ ID NO: 35449 - DNA, 96 bp, Fusarium azukicola
  misc_feature: 121
attggttgaaattagggttaggggtagtagttacgttaagggttagggttaattggttgaaattagggttaggggtagtagtagagttaagggtta

SEQ ID NO: 35450 - DNA, 96 bp, Fusarium azukicola
  misc_feature: 121
taaaataagaataaaattagttttcttagataatataaaggaatatatatataagctaagaccctattatataaagaatagaataaaatataatat

SEQ ID NO: 35451 - DNA, 96 bp, Fusarium azukicola
  misc_feature: 121
aaaactggaaaattcaggaagccaataaggtgcataagacttctaagaaaaaggaatctaaacctaattctaagaaggaagaaagagaaaagaaac

SEQ ID NO: 35452 - DNA, 96 bp, Fusarium azukicola
  misc_feature: 121
ggttactcttcttccccggacagtagaggttatctcccctccggatagtagcggtttcctttacctctcttagtacttattaatccctaatcgcct

SEQ ID NO: 35453 - DNA, 96 bp, Fusarium azukicola
  misc_feature: 121
ggattatactccctacctgttccatcatcatcatcatgggtcgtcgtgcgcttacagcagaggaaaaggcaaacaaggccaaccgtgagagagagc

SEQ ID NO: 35454 - DNA, 96 bp, Fusarium azukicola
  misc_feature: 121
aagaataaaattagttttcttagataatataaaggaatatatatataagctaagaccctattatataaagaatagaataaaatataatataagtcc

SEQ ID NO: 35455 - DNA, 96 bp, Fusarium azukicola
  misc_feature: 121
ctgaccctgacccaatgtatgaccctgaccctgaccctaacctctatagaaagctctagaatctctatagaagcccagagggcttctatctatagc

SEQ ID NO: 35456 - DNA, 96 bp, Fusarium azukicola
  misc_feature: 121
aaaaattctataatataatatatagtttatagggatatatcactatagttagtaatataatatagaatattaatagcctcctttaaagttataatc

SEQ ID NO: 35457 - DNA, 96 bp, Fusarium azukicola
  misc_feature: 121
gatggaacaggtagggagtataatccattatgatagttgtctagttgtcttctctaccattgccactgataaaagagtcttgctagcatctttgtt

SEQ ID NO: 35458 - DNA, 96 bp, Fusarium azukicola
  misc_feature: 121
ctctcccctctccctctctctcttttcactccttatcctctcctctcccctctccctctctctcttttcactccttatcctctcctctcccccctc

SEQ ID NO: 35459 - DNA, 96 bp, Fusarium azukicola
  misc_feature: 121
gagaaggaaggagaaagaggaaggggagttaaaagtgtgtgaagttaggagagttaaggggaggggaagtagttcaagtaatggttaggggggggt

SEQ ID NO: 35460 - DNA, 96 bp, Fusarium azukicola
  misc_feature: 121
gaccctatatattagtagctattttatctaggaacttatattccttattattaggttttttatttatattatttttagttaattttcctagtttat

SEQ ID NO: 35461 - DNA, 96 bp, Fusarium azukicola
  misc_feature: 121
aactataaatagagagaataagagtatatctttttcataagcaaaatatataaataaaataataaggaaatataataaataagaaataggaacttc

SEQ ID NO: 35462 - DNA, 96 bp, Fusarium azukicola
  misc_feature: 121
atgtgcaggcatatgaaactctatatctgtgaaagtaaacagtgatataatacgtggtcaaaacaaacaaagatgctagcaagactcttttatcag

SEQ ID NO: 35463 - DNA, 96 bp, Fusarium azukicola
  misc_feature: 121
ctctttttcttttctctcctctcccctctccctctctctcttttcactccttatcctctcctctcccctctccctctctctcttttcactccttct

SEQ ID NO: 35464 - DNA, 96 bp, Fusarium azukicola
  misc_feature: 121
aggaaaattaactaaaaataatataaataaaaaacctagtaataaggaatataagttcctagataaaatagctattaatatatagggtccttctag

SEQ ID NO: 35465 - DNA, 96 bp, Fusarium azukicola
  misc_feature: 121
agaataaaattagttttcttagataatataaaggaatatatatataagctaagaccctattatataaagaatggaataaaatataatataagtccg

SEQ ID NO: 35466 - DNA, 96 bp, Fusarium azukicola
  misc_feature: 121
ccctacccatatagtctaacccgatccatgtaagaaaacgctatttatactatctcatactgtacttaactagccgtcccttcgcgataccctctt

SEQ ID NO: 35467 - DNA, 96 bp, Fusarium azukicola
  misc_feature: 121
atgtatgtaccgcgtcgataagctgagagggaaaagcaaaatgtgcaggcatatgaaactctatatctgtgaaagtaaacagtgatataatacgtg

SEQ ID NO: 35468 - DNA, 96 bp, Fusarium azukicola
  misc_feature: 121
attatctgagaaaactgattttattcttattttattaggattattttctatttcttttctaaattccttaaattttataatagcttctaacttatt

SEQ ID NO: 35469 - DNA, 96 bp, Fusarium azukicola
  misc_feature: 121
aaacaaagatgctagcaagactcttttatcagtggcaatggtagagaagacaactagacaactatcataatggattatactccctacctgttccat

SEQ ID NO: 35470 - DNA, 96 bp, Fusarium azukicola
  misc_feature: 121
ataaaatttaaggaatttagaaaagaaatagaaaataatcctaataaaataagaataaaatcagttttcttagataatataaaggaatatatatat

SEQ ID NO: 35471 - DNA, 96 bp, Fusarium azukicola
  misc_feature: 121
actttaaaggaggctattaatgttctatattatattaccaactatagtgatatatccctataaaccacatattatattatagaatttttactctat

SEQ ID NO: 35472 - DNA, 96 bp, Fusarium azukicola
  misc_feature: 121
ataaaattagttttcttagataatataaaggaatatatatataagctaagaccctattatataaagaatggaataaaatataatataagtccgcct

SEQ ID NO: 35473 - DNA, 96 bp, Fusarium azukicola
  misc_feature: 121
aaaattctataatataatatatagtttatagggatatatcactatagttagtaatataatatagaatattaatagcctcctttaaagttataatct

SEQ ID NO: 35474 - DNA, 96 bp, Fusarium azukicola
  misc_feature: 121
aaagctattagcttatttattatgaggcggacttatattatattttattccattctttatataatagggtcttagcttatatatatattcctttgt

SEQ ID NO: 35475 - DNA, 96 bp, Fusarium azukicola
  misc_feature: 121
aattaaccctaacccttaactctactactacccctaaccctaatttcaaccaattaaccctaacccttaacgtaactactacccctaaccctaatt

SEQ ID NO: 35476 - DNA, 96 bp, Fusarium azukicola
  misc_feature: 121
aaatagttaaaatcgttttttttaagtttctagctattttatagcgatttttagaaacttagggtttagctgtttttagttatatagtatgctgtt

SEQ ID NO: 35477 - DNA, 96 bp, Fusarium azukicola
  misc_feature: 120
atacctaaaaatagagtaaaaattctataatataatatgtggtttatagggatatatcactatagttggtaatataatatagaacattaacaaaaa

SEQ ID NO: 35478 - DNA, 96 bp, Fusarium azukicola
  misc_feature: 120
ttccttactttaaagaaagcccttataataatgaaaaggcaatattatataataataataataataaatagaaattcactatcgaaattcctaaaa

SEQ ID NO: 35479 - DNA, 96 bp, Fusarium azukicola
  misc_feature: 120
aagagaaataaaggaggggaagagtaaagaaaaagagaagaagataaaaggagaaggggaagagtaaaagaaagaaaagtaagaaagtaatagaaa

SEQ ID NO: 35480 - DNA, 96 bp, Fusarium azukicola
  misc_feature: 120
aataagttaatcttctctttataatataacttctattataaataaataagaagtccttcttttaaataaataaggaaaaataatattataaggaaa

SEQ ID NO: 35481 - DNA, 96 bp, Fusarium azukicola
  misc_feature: 120
tttagacttattatatagtctattactaatataaatttctatagagtttttaaaaaatcttaataagctagtatataaaaagcttatttacactgt

SEQ ID NO: 35482 - DNA, 96 bp, Fusarium azukicola
  misc_feature: 120
ctaacccttaacgtaactactacccctaaccctaatttcaaccaattaaccctaacccttaacgtaactactacccctaaccataatttcaaccaa

SEQ ID NO: 35483 - DNA, 96 bp, Fusarium azukicola
  misc_feature: 120
ttctgaccgctttaaaggcgcctcaactgagcttattaaggcgttctttatgcttctgatgatgccggcgatccaggttatcaagcaggaaaacag

SEQ ID NO: 35484 - DNA, 96 bp, Fusarium azukicola
  misc_feature: 120
ttcctgagttttccagttttttggagccttattagggtgcaaaaaatagcaatctgggtctttatgacctagcagtttgcaataactgcattttaa

SEQ ID NO: 35485 - DNA, 96 bp, Fusarium azukicola
  misc_feature: 120
ttattttattaggattattttctatttcttttctaaattccttgaattttataatagcttctgacttattccttaatagataggcttttagatatc

SEQ ID NO: 35486 - DNA, 96 bp, Fusarium azukicola
  misc_feature: 120
gaataagaataagaataagaataagaataagaataagaataagaataagaataagaataagaataagaataagaataagaataagaataagaataa

SEQ ID NO: 35487 - DNA, 96 bp, Fusarium azukicola
  misc_feature: 120
aagagaggtataactaggaaaaagagatatagctaagagagagaggtaaagctaagaaagagagatatagctagaaaagagagaaataaaagataa

SEQ ID NO: 35488 - DNA, 96 bp, Fusarium azukicola
  misc_feature: 120
gaaagagatatagctaggaaaaagagatatagctaagagagagaggtaaagctaagaaagagagatatagctagaaaagagagaaataaaagataa

SEQ ID NO: 35489 - DNA, 96 bp, Fusarium azukicola
  misc_feature: 120
ttatattatctaagaaaactgattttattcttattttattaggattattttctatttcttttctaaattccttgaattttataatagcttctgact

SEQ ID NO: 35490 - DNA, 96 bp, Fusarium azukicola
  misc_feature: 120
tctataatataatatatagtttatagggatatatcactatagttagtaatataatatagaatattaatagcctcctttaaagttataatcttataa

SEQ ID NO: 35491 - DNA, 96 bp, Fusarium azukicola
  misc_feature: 120
tactacccctaaccctaatttcaaccaattaaccctaacccttaacgtaactactacccctaaccctaatttcaaccaattaaccctaacccttaa

SEQ ID NO: 35492 - DNA, 96 bp, Fusarium azukicola
  misc_feature: 120
cttaaccctaacctttactataactacttaaccctaacccttaacttaaccacttaaccctaacctttactataactacttaaccctaacccttaa

SEQ ID NO: 35493 - DNA, 96 bp, Fusarium azukicola
  misc_feature: 120
tggatcgggttagactatatgggtagggtatagataagagggttattagctagggtaaggcgattagggattaataagtactaagagaggtaaagg

SEQ ID NO: 35494 - DNA, 96 bp, Fusarium azukicola
  misc_feature: 120
gatagtgaatttctatttattattattattattatataatattgccttttcattattataagggctttctttaaagtaaggaatctcattaaaaga

SEQ ID NO: 35495 - DNA, 96 bp, Fusarium azukicola
  misc_feature: 120
cttcctagttatctaggaaatcaactatttataacctagtcacactgacaggttatgagcccggaggtctcttcctaagggtttatacttaaaaga

SEQ ID NO: 35496 - DNA, 96 bp, Fusarium azukicola
  misc_feature: 120
tcttatctcttatctcttatctcttatctcttatctcttatctcttatctcttatctcttatctcttatttctctcttttctagctatatctctct

SEQ ID NO: 35497 - DNA, 96 bp, Fusarium azukicola
  misc_feature: 120
tcttagaaaaatatatctcattagaatctattttttctagtctcttagattcatctataaggctagaagaaagtgattctaggttataagccttag

SEQ ID NO: 35498 - DNA, 96 bp, Fusarium azukicola
  misc_feature: 120
tccttattattttatttatatattttgcttatgaaaaagatatactcttattctctctatttatagttatatttattcctaaaaagtctttaactt

SEQ ID NO: 35499 - DNA, 96 bp, Fusarium azukicola
  misc_feature: 120
gataaaagtgggtcacaataaagagtctgattggatcagataaaagtgggatttagttgttaatgattgaattgactgaagagttgattcatctga

SEQ ID NO: 35500 - DNA, 96 bp, Fusarium azukicola
  misc_feature: 120
tattactttctattactttcttacttttctttcttttactcttccccttctccttttatcttcttctctttttctttactcttcccctcctttatt

SEQ ID NO: 35501 - DNA, 96 bp, Fusarium azukicola
  misc_feature: 120
tatcgtaatcgtctgatccattagcagcaggggagcatgtctcgacgtagtgtggattgatcttctcaatcatccaattgagcacattgccaatcc

SEQ ID NO: 35502 - DNA, 96 bp, Fusarium azukicola
  misc_feature: 120
gaggtttaattttttcctctaataataagaatatataaagctataacccttataagattataactttaaaggaggctattaatattctatattata

SEQ ID NO: 35503 - DNA, 96 bp, Fusarium azukicola
  misc_feature: 120
actattatctaagagagaagagttagaaagtaaagctaacctctagggtaaggaaggggttagcctctaaggtctagggaagaagtataatggcta

SEQ ID NO: 35504 - DNA, 96 bp, Fusarium azukicola
  misc_feature: 120
taaccctaaccctagttccggttccggttccggttccggttccggtttctagttagaccgtgcctgtacgctccttttctaccctttcaagctcta

SEQ ID NO: 35505 - DNA, 96 bp, Fusarium azukicola
  misc_feature: 120
tactttttttaagtttctagctattttatagcagtttttagaaacttaggttttagcgatttttagttatacagtatgctgtctcgttcgcttatt

SEQ ID NO: 35506 - DNA, 96 bp, Fusarium azukicola
  misc_feature: 120
tactcttattctctctatttatagttatatttattcctaaaaagtctttaacttctcctaaggattagattactatatccttagatagaatattta

SEQ ID NO: 35507 - DNA, 96 bp, Fusarium azukicola
  misc_feature: 120
agaaggaaggagaaagaggaaggggagttaaaagtgtgtgaagttaggagagttaaggggaggggaagtagttcaagtaatggttaggggggggta

SEQ ID NO: 35508 - DNA, 96 bp, Fusarium azukicola
  misc_feature: 120
agaatattaacagcctcctttaaagttataatcttataagggttatagctttatacgttcttattattagaggaaaaaattaaacctctattatta

SEQ ID NO: 35509 - DNA, 96 bp, Fusarium azukicola
  misc_feature: 120
gatatatcactatagttagtaatataatatagaatattaacagcctcctttaaagttataatcttataagggttatagctttatacgttcttatta

SEQ ID NO: 35510 - DNA, 96 bp, Fusarium azukicola
  misc_feature: 120
agagtaattttataagtctaactaaaaaagttataagtttataatttttctagatttttaaaaaattcctttaatttttaaaaaataaaaaactta

SEQ ID NO: 35511 - DNA, 96 bp, Fusarium azukicola
  misc_feature: 120
gttttttatttatattatttttagttaattttcctagtttgcagttttcgcagtttttgacttaatataggtcctcactagtatatttaaagagag

SEQ ID NO: 35512 - DNA, 96 bp, Fusarium azukicola
  misc_feature: 120
accctaaccctagttccggttccggttccggttccggttccggtttctagttagaccgtgcctgtacgctccttttctaccctttcaagctctaac

SEQ ID NO: 35513 - DNA, 96 bp, Fusarium azukicola
  misc_feature: 120
gtcaccaaatagtacttggaagcacgtgataaatgacgcgtcataaacctcgggtttatgaccgtcatttacctaggggttttggtaatttacccc

SEQ ID NO: 35514 - DNA, 96 bp, Fusarium azukicola
  misc_feature: 120
ctttaccctatactctcttctctcttttactttaccctccacttttattctttattttactttaccctatactctcttctctcttttactttaccc

SEQ ID NO: 35515 - DNA, 96 bp, Fusarium azukicola
  misc_feature: 120
acgtggtcaaaacaaacaaagatgctagcaagactcttttatcagtggcaatggtagagaagacaactagacaactatcataatggattatactcc

SEQ ID NO: 35516 - DNA, 96 bp, Fusarium azukicola
  misc_feature: 120
aagaataaaattagttttcttagataatataaaggaatatatatataagctaagaccctattatataaagaatggaataaaatataatataagtcc

SEQ ID NO: 35517 - DNA, 96 bp, Fusarium azukicola
  misc_feature: 120
agatatatataataataatagaggtttaattttttcctctaataataagaatatataaagctataacccttataagattataactttaaaggaggc

SEQ ID NO: 35518 - DNA, 96 bp, Fusarium azukicola
  misc_feature: 120
gatatataatctattactaaagccttataaatggcttagttatagcaaaaaccggttttaatggatagaatgcaacgctgaagggtttaggaaact

SEQ ID NO: 35519 - DNA, 96 bp, Fusarium azukicola
  misc_feature: 120
cttatttttaacctcttttatcttattaagatatatttctatattctcaaaagataaaagggaaagttaaaaaaattcccttattaagaggaattc

SEQ ID NO: 35520 - DNA, 96 bp, Fusarium azukicola
  misc_feature: 120
aatatgcttgtggcctcctcctctgcctcctcctgggcctcccgctcatcgcttgacccgtcctcctcctgctgcctgtccatcttggcctgcttc

SEQ ID NO: 35521 - DNA, 96 bp, Fusarium azukicola
  misc_feature: 120
cctacccatatagtctaacccgatccatgtaagaaaacgctatttatactatctcatactgtacttaactagccgtcccttcgcgataccctcttc

SEQ ID NO: 35522 - DNA, 96 bp, Fusarium azukicola
  misc_feature: 120
ctaggttttttatttatattatttttagttaattttcctagtttgcagttttcgcagtttttaacttaatataggtcctcactagtatatttaaag

SEQ ID NO: 35523 - DNA, 96 bp, Fusarium azukicola
  misc_feature: 120
aagggcaaaacaaagggaagattgagaatgggacctaccaaccattagacttctctgctcaattccgacaagagattcagaccgaccgagagagag

SEQ ID NO: 35524 - DNA, 96 bp, Fusarium azukicola
  misc_feature: 120
agaagggcaaaacaaagggaagattgagaatgggacctaccaaccattagacttctctgctcaattccgacaagagattcagaccgaccgagagag

SEQ ID NO: 35525 - DNA, 96 bp, Fusarium azukicola
  misc_feature: 120
ctcgaagttattaattaaggaccttaatgcagagctagagccgattatgaaggagcaatgggagctgaataacggtatgagaaggctaggtctttg

SEQ ID NO: 35526 - DNA, 96 bp, Fusarium azukicola
  misc_feature: 120
ctattactttctattactttcttacttttctttcttttactcttccccttctccttttatcttcttctctttttctttactcttcccctcctttat

SEQ ID NO: 35527 - DNA, 96 bp, Fusarium azukicola
  misc_feature: 120
ctataactacttaaccctaacccttaacttaaccacttaaccctaacctttactataactacttaaccctaacccttaacttaaccacttaaccct

SEQ ID NO: 35528 - DNA, 96 bp, Fusarium azukicola
  misc_feature: 120
actaattttatatataatataggtgctactaggcatattatatatagaaaagaatttctagttaattttagaaaaataaataaaaatattacttag

SEQ ID NO: 35529 - DNA, 96 bp, Fusarium azukicola
  misc_feature: 120
ccaattactcgccgaccgcgacgcgctacccgttggcaagaactgggcttctaacttcgtcaagcggcatcaagatctcaagacgcgtttctttcg

SEQ ID NO: 35530 - DNA, 96 bp, Fusarium azukicola
  misc_feature: 120
atatatataaatatataaataaaaatctctctttaagttttaatagggctatacctcctattttaactaataatctagcagctaagcaattagctg

SEQ ID NO: 35531 - DNA, 96 bp, Fusarium azukicola
  misc_feature: 120
atcctaataaaataagaataaaattagttttcttagataatataaaggaatatatatataagctaagaccctattatataaagaatagaataaaat

SEQ ID NO: 35532 - DNA, 96 bp, Fusarium azukicola
  misc_feature: 120
attttatctaggaacttatattccttattactaggttttttatttatattatttttagttaattttcctagtttatagttttcgcagtttttgact

SEQ ID NO: 35533 - DNA, 96 bp, Fusarium azukicola
  misc_feature: 120
attaattttcctagatttttaataaaatcttatttacttagtatttaaaaaacctatttacactgtatacttagctatttctctataaagggattt

SEQ ID NO: 35534 - DNA, 96 bp, Fusarium azukicola
  misc_feature: 120
atatgcctagtagcaccttatttaaatatcctagttgtttctttatatagggaaggtttcttattaaaggtcctagtatattattagttatattat

SEQ ID NO: 35535 - DNA, 96 bp, Fusarium azukicola
  misc_feature: 120
aatatatccctataaaccatatattatattatagaatttttactctatttttaggtatatttacctaacctatagctactataggtagctagatat

SEQ ID NO: 35536 - DNA, 96 bp, Fusarium azukicola
  misc_feature: 120
atactttttttaagtttctagctattttatagcagtttttattaaggttagaaatataaggttttagtgcacagtatagctatacagctcacttgt

SEQ ID NO: 35537 - DNA, 96 bp, Fusarium azukicola
  misc_feature: 120
actcgaagttattaattaaggaccttaatgcagagctagagccgattatgaaggagcaatgggagctgaataacggtatgagaaggctaggtcttt

SEQ ID NO: 35538 - DNA, 96 bp, Fusarium azukicola
  misc_feature: 120
aagattataactttaaaggaggctattaatattctatattatattaccaactatagtgatatatccctataaaccacatattatattatagaattt

SEQ ID NO: 35539 - DNA, 96 bp, Fusarium azukicola
  misc_feature: 119
tttttactataaaagagccttgagagctcttaacccttctagaaagtggtggttgtgtcacacccatggctttagcagctcgggttatcgagggat

SEQ ID NO: 35540 - DNA, 96 bp, Fusarium azukicola
  misc_feature: 119
ataaatagagagaataagagtatatctttttcataagcaaaatatataaataaaataataaggaaatataataaataagaaataggaacttctaaa

SEQ ID NO: 35541 - DNA, 96 bp, Fusarium azukicola
  misc_feature: 119
tttaaatatactagtgaggacctatattaagtcaaaaactgcgaaaactgcaaactaggaaaattaactaaaaataatataaataaaaaacctagt

SEQ ID NO: 35542 - DNA, 96 bp, Fusarium azukicola
  misc_feature: 119
ttctattctttatataatagggtcttagcttatatatatattcctttatattatctaagaaaactaattttattcttattttattaggattatttt

SEQ ID NO: 35543 - DNA, 96 bp, Fusarium azukicola
  misc_feature: 119
atataactataaatagagagaataagagtatatctttttcataagtaaaatatataaataaaataataaggaaatataataaataagaaataggaa

SEQ ID NO: 35544 - DNA, 96 bp, Fusarium azukicola
  misc_feature: 119
ttattcttattagaaataaccttagctattattatatataggttatttttctcttttccttatgatattatttttccttgcttatttaaaagaagg

SEQ ID NO: 35545 - DNA, 96 bp, Fusarium azukicola
  misc_feature: 119
ttattattttatttatatattttgcttatgaaaaagatatactcttattctctctatttatagttatatttattcctaaaaagtctttaacttctc

SEQ ID NO: 35546 - DNA, 96 bp, Fusarium azukicola
  misc_feature: 119
ttattagctagggtaaggcgattagggattaataagtactaagagaggtaaaggaaaccgctactatccggaggggagataacctctactgtccgg

SEQ ID NO: 35547 - DNA, 96 bp, Fusarium azukicola
  misc_feature: 119
ttatatatcttagtaaaaacccctttattatagacctaatattataagggaaaatctaagattatatagggaaaagtattaaaatataataaaaac

SEQ ID NO: 35548 - DNA, 96 bp, Fusarium azukicola
  misc_feature: 119
gtaaagtaaaagagagaagagagtatagggtaaagtaaaagagagaagagagtatagggtaaagtaaaagagagaagagagtataggggaaagtaa

SEQ ID NO: 35549 - DNA, 96 bp, Fusarium azukicola
  misc_feature: 119
ttactcttcttccccggacagtagaggttatctcccctccggatagtagcggtttcctttacctctcttagtacttattaatccctaatcgcctta

SEQ ID NO: 35550 - DNA, 96 bp, Fusarium azukicola
  misc_feature: 119
ttactaggttttttatttatattatttttagttaattttcctagtttgcagttttcgcagtttttaacttaatataggtcctcactagtatattta

SEQ ID NO: 35551 - DNA, 96 bp, Fusarium azukicola
  misc_feature: 119
agtaatataatatagaacattaatagcctcctttaaagttataatcttataagggttatagctttatacgttcttattattagaggaaaaaattaa

SEQ ID NO: 35552 - DNA, 96 bp, Fusarium azukicola
  misc_feature: 119
ttaacgtaactactacccctaaccctaatttcaaccaattaaccctaacccttaacgtaactactacccctaaccataatttcaaccaattaaccc

SEQ ID NO: 35553 - DNA, 96 bp, Fusarium azukicola
  misc_feature: 119
atttccttattattttatttatatattttgcttatgaaaaagatatactcttattctctctatttatagttatattcattcctaaaaagtctttaa

SEQ ID NO: 35554 - DNA, 96 bp, Fusarium azukicola
  misc_feature: 119
tggaaggcttggctaagaaaataactatcttagagcatgaaaatcaagagcttcgacccaagaaaaggcgtaaggttatcacagatggcaatgttg

SEQ ID NO: 35555 - DNA, 96 bp, Fusarium azukicola
  misc_feature: 119
tctctttaaatatactagtgaggacctatattaagtcaaaaactgcgaaaactgcaaactaggaaaattaactaaaaataatataaataaaaaacc

SEQ ID NO: 35556 - DNA, 96 bp, Fusarium azukicola
  misc_feature: 119
tctcttatcttttatttctctcttttctagctatatctctctttcttagctttacctctctctcttagctatatctctttttcctagctatatctc

SEQ ID NO: 35557 - DNA, 96 bp, Fusarium azukicola
  misc_feature: 119
aagaagggcaaaacaaagggaagattgagaatgggacctaccaaccattagacttctctgctcaattccgacaagagattcagaccgaccgagaga

SEQ ID NO: 35558 - DNA, 96 bp, Fusarium azukicola
  misc_feature: 119
tccttatagaaattataaagaaaagtcttagagtctcaggtcttatagtacaagcataggtttcttcatagttaataccttgaatttgtaaaaacc

SEQ ID NO: 35559 - DNA, 96 bp, Fusarium azukicola
  misc_feature: 119
ataaattcgctggctcccttccatctctcacgaatacagcttcgaaggaagcgttcctcagactgtcgccaaatacgatagcctcctcgacgatga

SEQ ID NO: 35560 - DNA, 96 bp, Fusarium azukicola
  misc_feature: 119
ataaaataagaataaaattagttttcttagataatataaaggaatatatatataagctaagaccctattatataaagaatagaataaaatataata

SEQ ID NO: 35561 - DNA, 96 bp, Fusarium azukicola
  misc_feature: 119
tatctgagaaaactgattttattcttattttattaggattattttctatttcttttctaaattccttaaattttataatagcttctaacttattcc

SEQ ID NO: 35562 - DNA, 96 bp, Fusarium azukicola
  misc_feature: 119
taaaactatattaattttcctagatttttaataaaatcttatttacttagtatttaaaaaacctatttacactgtatacttagctatttctctata

SEQ ID NO: 35563 - DNA, 96 bp, Fusarium azukicola
  misc_feature: 119
taggaaaattaactaaaaataatataaataaaaaacctagtaataaggaatataagttcctagataaaatagctattaatatatagggtccttcta

SEQ ID NO: 35564 - DNA, 96 bp, Fusarium azukicola
  misc_feature: 119
tagataatataaaggaatatatatataagctaagaccctattatataaagaatggaataaaatataatataagtccgccttataataaataagcta

SEQ ID NO: 35565 - DNA, 96 bp, Fusarium azukicola
  misc_feature: 119
taaaaattctataatataatatatagtttatagggatatatcactatagttagtaatataatatagaatattaatagcctcctttaaagttataat

SEQ ID NO: 35566 - DNA, 96 bp, Fusarium azukicola
  misc_feature: 119
gtttagacttattatatagtctattactaatataaatttctatagagtttttaaaaaatcttaataagctagtatataaaaagcttatttacactg

SEQ ID NO: 35567 - DNA, 96 bp, Fusarium azukicola
  misc_feature: 119
atgcttgtggcctcctcctctgcctcctcctgggcctcccgctcatcgcttgacccgtcctcctcctgctgcctgtccatcttggcctgcttcaac

SEQ ID NO: 35568 - DNA, 96 bp, Fusarium azukicola
  misc_feature: 119
ctagcatcaagttcaaaggaaggatttgcttggcaccaggttcagttggtagtctagtcggataacaggtctgaggcagagatcaagacgcagaac

SEQ ID NO: 35569 - DNA, 96 bp, Fusarium azukicola
  misc_feature: 119
aacttaaccacttaaccctaacctttactataactacttaaccctaacccttaacttaaccacttaaccctaacctttactataactacttaaccc

SEQ ID NO: 35570 - DNA, 96 bp, Fusarium azukicola
  misc_feature: 119
gggattggcaatgtgctcaattggatgattgagaagatcaatccacactacgtcgagacatgctcccctgctgctaatggatcagacgattacgat

SEQ ID NO: 35571 - DNA, 96 bp, Fusarium azukicola
  misc_feature: 119
ggcagttttcttctttttctaaggcttagaagtcttagaaaaatatatcttattagaatctattttttctagtctcttagatttatctataaggct

SEQ ID NO: 35572 - DNA, 96 bp, Fusarium azukicola
  misc_feature: 119
gctagcatctttgtttgttttgaccacgtattatatcactgtttactttcacagatatagagtttcatatgcctgcacattttgcttttccctctc

SEQ ID NO: 35573 - DNA, 96 bp, Fusarium azukicola
  misc_feature: 119
aatagcttagatagtaaatactaaccccaactataaccctaaccctagttccggttccggttccggttccggttccggtttctagttagaccgtgc

SEQ ID NO: 35574 - DNA, 96 bp, Fusarium azukicola
  misc_feature: 119
caagatgaatcaactcttcagtcaattcaatcattaacaactaaatcccacttttatctgatccaatcagactctttattgtgacccacttttatc

SEQ ID NO: 35575 - DNA, 96 bp, Fusarium azukicola
  misc_feature: 119
ataactttaaaggaggctattaatattctatattatattactaactatagtgatatatccctataaactatatattatattatagaatttttactc

SEQ ID NO: 35576 - DNA, 96 bp, Fusarium azukicola
  misc_feature: 119
gacttctctgctcaattccgacaagagattcagaccgaccgagagagaggcaagatagaagagaatactccttccgcagaagagagcctcagatcg

SEQ ID NO: 35577 - DNA, 96 bp, Fusarium azukicola
  misc_feature: 119
gaataattcttagctattttacccttaaataaactataaataatttttatagatttttaaaaaatttcgtttataaagaaattataatttacacag

SEQ ID NO: 35578 - DNA, 96 bp, Fusarium azukicola
  misc_feature: 119
aagagagatatagctagaaaagagagaaataagagataagagataagagataagagataagagataagagataagagataagagataagagataag

SEQ ID NO: 35579 - DNA, 96 bp, Fusarium azukicola
  misc_feature: 119
cttagctattattatatataggttatttttctcttttccttataatattatttttccttatttatttaaaagaaggacttcttatttatttataat

SEQ ID NO: 35580 - DNA, 96 bp, Fusarium azukicola
  misc_feature: 119
aataattctttttctaaactaccttataagggattttttaaaaagttttaaaaaatcataataggttttttatagcttaattagtctaactctaag

SEQ ID NO: 35581 - DNA, 96 bp, Fusarium azukicola
  misc_feature: 119
cttaataagttaatcttctctttataatataacttctattataaataaataagaagtccttcttttaaataaataaggaaaaataatattataagg

SEQ ID NO: 35582 - DNA, 96 bp, Fusarium azukicola
  misc_feature: 119
ctctttaaatatactagtgaggacctatattaagtcaaaaactgcgaaaactgcaaactaggaaaattaactaaaaataatataaataaaaaacct

SEQ ID NO: 35583 - DNA, 96 bp, Fusarium azukicola
  misc_feature: 119
cctttctttttacctcttatttctccttaaatcctaacttttttatttaactctttctcttatttttaaatcctttcttctcttttctttttaaat

SEQ ID NO: 35584 - DNA, 96 bp, Fusarium azukicola
  misc_feature: 119
aggaagctgtctatacccatcatatatatatatatgatatggtatggatatagatgatgttattatttattattataatcgtaataacgaaagagg

SEQ ID NO: 35585 - DNA, 96 bp, Fusarium azukicola
  misc_feature: 119
aagtctatctattaaggaataagtcagaagctattataaaatttaaggaatttagaaaagaaatagaaaataatcctaataaaataagaataaaat

SEQ ID NO: 35586 - DNA, 96 bp, Fusarium azukicola
  misc_feature: 119
aataaaataaataagtaagttaggttaaagaagagaaaaaagggttagaaagtaataaaaaggtttaaggagagaaattaagttaaggaggaatat

SEQ ID NO: 35587 - DNA, 96 bp, Fusarium azukicola
  misc_feature: 119
atatatcactatagttagtaatataatatagaatattaacagcctcctttaaagttataatcttataagggttatagctttatacgttcttattat

SEQ ID NO: 35588 - DNA, 96 bp, Fusarium azukicola
  misc_feature: 119
atagaatattaacagcctcctttaaagttataatcttataagggttatagctttatacgttcttattattagaggaaaaaattaaacctctattat

SEQ ID NO: 35589 - DNA, 96 bp, Fusarium azukicola
  misc_feature: 119
ataatcttataagggttatagctttatatattcttattattagaggaaaaaattaaacctctattattattatatatatcttagtaaaaacccctt

SEQ ID NO: 35590 - DNA, 96 bp, Fusarium azukicola
  misc_feature: 119
ataactataaatagagagaataagagtatatctttttcataagcaaaatatataaataaaataataaggaaatataataaataagaaataggaact

SEQ ID NO: 35591 - DNA, 96 bp, Fusarium azukicola
  misc_feature: 119
agaaattcttttctatatataatatacctagtagcacctatattatatataaaattagttatattatctttattagtagaaaaattaggtttattt

SEQ ID NO: 35592 - DNA, 96 bp, Fusarium azukicola
  misc_feature: 119
aaaatttgtactagtttacactaaatagaaaagaattctttaaaaattcaaattaaggtaaaaataacttaaaattttagattaggttaattaagt

SEQ ID NO: 35593 - DNA, 96 bp, Fusarium azukicola
  misc_feature: 118
tattattctaattggttaaaaaggttcctacagaccttcatgactgccgtcatcaatgcatcaaagtataataactgccgattggctaaaaaaaaa

SEQ ID NO: 35594 - DNA, 96 bp, Fusarium azukicola
  misc_feature: 118
aagttaaaaactataaaaactataaactaggaaaattaactaaaaataatataaataaaaaacctaataataaggaatataagttcctagataaaa

SEQ ID NO: 35595 - DNA, 96 bp, Fusarium azukicola
  misc_feature: 118
tttcactccttatcctctcctctcccctctccctctctctcttttcactccttatcctctcctctcccctctccctctctctcttttctctccttc

SEQ ID NO: 35596 - DNA, 96 bp, Fusarium azukicola
  misc_feature: 118
ggagccttattagggtgcaaaaaatagcaatctgggtctttatgacctagcagtttgcaataactgcattttaaggcagttttcttctttttccaa

SEQ ID NO: 35597 - DNA, 96 bp, Fusarium azukicola
  misc_feature: 118
ttataggatttcacttaattaacctaatctaaaattttaagttatttttaccttaatttgaatttttaaagaattcttttctatttagtgtaaact

SEQ ID NO: 35598 - DNA, 96 bp, Fusarium azukicola
  misc_feature: 118
tgtaagaaaacgctatttatactatctcatactgtacttaactagccgtcccttcgcgataccctcttcctagccataataaccctccccgtcgcc

SEQ ID NO: 35599 - DNA, 96 bp, Fusarium azukicola
  misc_feature: 118
tggtttatagggatatatcactatagttagtaatataatatagaatattaatagcctcctttaaagttataatcttataagggttatagctttata

SEQ ID NO: 35600 - DNA, 96 bp, Fusarium azukicola
  misc_feature: 118
tgctagcatctttgtttgttttgaccacgtattatatcactgtttactttcacagatatagagtttcatatgcctgcacattttgcttttccctct

SEQ ID NO: 35601 - DNA, 96 bp, Fusarium azukicola
  misc_feature: 118
aagtcttatgcaccttattggcttcctgaattttccagttttttggagccttattagggtgcaaaaaatagcaatctgggtctttatgacctggca

SEQ ID NO: 35602 - DNA, 96 bp, Fusarium azukicola
  misc_feature: 118
taggttttttatttatattatttttagttaattttcctagtttgcagttttcgcagtttttaacttaatataggtcctcactagtatatttaaaga

SEQ ID NO: 35603 - DNA, 96 bp, Fusarium azukicola
  misc_feature: 118
tctttaaatatactaataaggacctatattaagttaaaaactataaaaactataaactaggaaaattaactaaaaataatataaataaaaaaccta

SEQ ID NO: 35604 - DNA, 96 bp, Fusarium azukicola
  misc_feature: 118
aaaaagagatatagctaagagagagaggtaaagctaagaaagagagatatagctagaaaagagagaaataaaagataagagataagagataagaga

SEQ ID NO: 35605 - DNA, 96 bp, Fusarium azukicola
  misc_feature: 118
aagaatggaataaaatataatataagtccgccttataataaataagctaatagctttatagaaaggataaataggactatattagaaaaggttaga

SEQ ID NO: 35606 - DNA, 96 bp, Fusarium azukicola
  misc_feature: 118
cttaaaatgcagttattgcaaactgccaggtcataaagacccagattgctattttttgcaccctaataaggctccaaaaaactggaaaattcagga

SEQ ID NO: 35607 - DNA, 96 bp, Fusarium azukicola
  misc_feature: 118
tattattttatttatatattttgcttatgaaaaagatatactcttattctctctatttatagttatatttattcctaaaaagtctttaacttctcc

SEQ ID NO: 35608 - DNA, 96 bp, Fusarium azukicola
  misc_feature: 118
tattatctaagagagaagagttagaaagtaaagctaacctctagggtaaggaaggggttagcctctaaggtctagggaagaagtataatggctaac

SEQ ID NO: 35609 - DNA, 96 bp, Fusarium azukicola
  misc_feature: 118
aaagagatatagctaagagagagaggtaaagctaagaaagagagatatagctagaaaagagagaaataaaagataagagataagagataagagata

SEQ ID NO: 35610 - DNA, 96 bp, Fusarium azukicola
  misc_feature: 118
tatcagtggcaatggtagagaagacaactagacaactatcataatggattatactccctacctgttccatcatcatcatcatgggtcgtcgtgcgc

SEQ ID NO: 35611 - DNA, 96 bp, Fusarium azukicola
  misc_feature: 118
agctacctatagtagctataggttaggtaaatatacctaaaaatagagtaaaaattctataatataatatatggtttatagggatatattactata

SEQ ID NO: 35612 - DNA, 96 bp, Fusarium azukicola
  misc_feature: 118
cttctatctatagctgacccaaagcctgaccctaaccctgacctaatgtatgaccctgaccctgaccctaacctctagaatctcctagaatctcta

SEQ ID NO: 35613 - DNA, 96 bp, Fusarium azukicola
  misc_feature: 118
aatattgttaatgttctatattatattaccaactatagtgatatatccctataaaccacatattatattatagaatttttactctatttttaggta

SEQ ID NO: 35614 - DNA, 96 bp, Fusarium azukicola
  misc_feature: 118
gtcttagaaaaatatatctcattagaatctattttttctagtctcttagattcatctataaggctagaagaaagtgattctaggttataagcctta

SEQ ID NO: 35615 - DNA, 96 bp, Fusarium azukicola
  misc_feature: 118
ctaagaaaactaattttattcttattttattaggattattttctatttcttttctaaattccttaaattttataatagcttctaacttattcctta

SEQ ID NO: 35616 - DNA, 96 bp, Fusarium azukicola
  misc_feature: 118
taacgtaactactacccctaaccctaatttcaaccaattaaccctaacccttaacgtaactactacccctaaccataatttcaaccaattaaccct

SEQ ID NO: 35617 - DNA, 96 bp, Fusarium azukicola
  misc_feature: 118
actttaccctatactctcttctctcttttactttaccctccacttttattctttattttactttaccctatactctcttctctcttttactttacc

SEQ ID NO: 35618 - DNA, 96 bp, Fusarium azukicola
  misc_feature: 118
aaaatgcagttattgcaaactgccaggtcataaagacccagattgctattttttgcaccctaataaggctccaaaaaactggaaaattcaggaagc

SEQ ID NO: 35619 - DNA, 96 bp, Fusarium azukicola
  misc_feature: 118
gctacctatagtagctataggttaggtaaatatacctaaaaatagagtaaaaattctataatataatatatggtttatagggatatattactatag

SEQ ID NO: 35620 - DNA, 96 bp, Fusarium azukicola
  misc_feature: 118
atgtaagaaaacgctatttatactatctcatactgtacttaactagccgtcccttcgcgataccctcttcctagccataataaccctccccgtcgc

SEQ ID NO: 35621 - DNA, 96 bp, Fusarium azukicola
  misc_feature: 118
actctttttcttttctctcctctcccctctccctctctctcttttcactccttatcctctcctctcccctctccctctctctcttttcactccttc

SEQ ID NO: 35622 - DNA, 96 bp, Fusarium azukicola
  misc_feature: 118
atatatatgatatggtatggatatagatgatgttattatttattattataatcgtaataacgaaagaggaagaagaagaagaagaagaagaagaag

SEQ ID NO: 35623 - DNA, 96 bp, Fusarium azukicola
  misc_feature: 118
aaacggtatttcgaagtgctaaaggcagctttaagcggcataacgcactggggagactggatcactagttgggaacaagcaatgcgaatcgcgaag

SEQ ID NO: 35624 - DNA, 96 bp, Fusarium azukicola
  misc_feature: 118
agaaaggagagaagtaaggaaggttaagaaaggagagaagtaaggaaggttaagaaaggagagaagtaaggaaggttaagaaaggagagaaggaag

SEQ ID NO: 35625 - DNA, 96 bp, Fusarium azukicola
  misc_feature: 118
cttacatggatcgggttagactatatgggtagggtatagataagagggttattagctagggtaaggcgattagggattaataagtactaagagagg

SEQ ID NO: 35626 - DNA, 96 bp, Fusarium azukicola
  misc_feature: 118
agaatggaataaaatataatataagtccgccttataataaataagctaatagctttatagaaaggataaataggactatattagaaaaggttagag

SEQ ID NO: 35627 - DNA, 96 bp, Fusarium azukicola
  misc_feature: 118
ctatctattaaggaataagtcagaagctattataaaatttaaggaatttagaaaagaaatagaaaataatcctaataaaataagaataaaatcagt

SEQ ID NO: 35628 - DNA, 96 bp, Fusarium azukicola
  misc_feature: 118
ccatgtatgtaccgcgtcgataagctgagagggaaaagcaaaatgtgcaggcatatgaaactctatatctgtgaaagtaaacagtgatataatacg

SEQ ID NO: 35629 - DNA, 96 bp, Fusarium azukicola
  misc_feature: 118
attagctagggtaaggcgattagggattaataagtactaagagaggtaaaggaaaccgctactatccggaggggagataacctctactgtccgggg

SEQ ID NO: 35630 - DNA, 96 bp, Fusarium azukicola
  misc_feature: 118
catatataaaattagttatattatctttattagtagaaaaatcaggtttatttaccttatttaaatatcctagttatttctttatatagggaaggt

SEQ ID NO: 35631 - DNA, 96 bp, Fusarium azukicola
  misc_feature: 118
agcttagatagtaaatactaaccccaactataaccctaaccctagttccggttccggttccggttccggttccggtttctagttagaccgtgcctg

SEQ ID NO: 35632 - DNA, 96 bp, Fusarium azukicola
  misc_feature: 118
atttttttaactttcccttttatcttttaagaatatagaaatatatcttaataagataaaagaggttaaaaataagctagaagctagagaaattat

SEQ ID NO: 35633 - DNA, 96 bp, Fusarium azukicola
  misc_feature: 118
aactatcttagagcatgaaaatcaagagcttcgacccaagaaaaggcgtaaggttatcacagatggcaatgttgagtttgcaaaggtgccagcaat

SEQ ID NO: 35634 - DNA, 96 bp, Fusarium azukicola
  misc_feature: 118
aaatttcttagtaattacaccttatttaaaaaacacttaaaataattctaagaaaataaacctaagcttaaaataactaagattaaaagtttaagt

SEQ ID NO: 35635 - DNA, 96 bp, Fusarium azukicola
  misc_feature: 118
aaatagaaaagaattctttaaaaattcaaattaaggtaaaaataacttaaaattttagattaggttaattaagtgaaatcctataaggcagaattt

SEQ ID NO: 35636 - DNA, 96 bp, Fusarium azukicola
  misc_feature: 117
tagcccggaaaatgcgctttataatgatatataatctattactaaagccttataaatggcttagttatagcaaaaaccggttttaatggataaaaa

SEQ ID NO: 35637 - DNA, 96 bp, Fusarium azukicola
  misc_feature: 117
tttattattattattattatataatattgccttttcattattataagggctttctttaaagtaaggaatctcattaaaagaggggttatgtccttc

SEQ ID NO: 35638 - DNA, 96 bp, Fusarium azukicola
  misc_feature: 117
tcgataagctgagagggaaaagcaaaatgtgcaggcatatgaaactctatatctgtgaaagtaaacagtgatataatacgtggtcaaaacaaacaa

SEQ ID NO: 35639 - DNA, 96 bp, Fusarium azukicola
  misc_feature: 117
ttgctagcatctttgtttgttttgaccacgtattatatcactgtttactttcacagatatagagtttcatatgcctgcacattttgcttttccctc

SEQ ID NO: 35640 - DNA, 96 bp, Fusarium azukicola
  misc_feature: 117
ttccttatagaaattataaagaaaagtcttagagtctcaggtcttatagtacaagcataggtttcttcatagttaataccttgaatttgtaaaaac

SEQ ID NO: 35641 - DNA, 96 bp, Fusarium azukicola
  misc_feature: 117
taataaaataagaataaaattagttttcttagataatataaaggaatatatatataagctaagaccctattatataaagaatagaataaaatataa

SEQ ID NO: 35642 - DNA, 96 bp, Fusarium azukicola
  misc_feature: 117
ttacatggatcgggttagactatatgggtagggtatagataagagggttattagctagggtaaggcgattagggattaataagtactaagagaggt

SEQ ID NO: 35643 - DNA, 96 bp, Fusarium azukicola
  misc_feature: 117
ttaattttcctagatttttaataaaatcttatttacttagtatttaaaaaacctatttacactgtatacttagctatttctctataaagggatttt

SEQ ID NO: 35644 - DNA, 96 bp, Fusarium azukicola
  misc_feature: 117
caactagacaactatcataatggattatactccctacctgttccatcatcatcatcatgggtcgtcgtgcgcttacagcagaggaaaaggcaaaca

SEQ ID NO: 35645 - DNA, 96 bp, Fusarium azukicola
  misc_feature: 117
agcatcaagttcaaaggaaggatttgcttggcaccaggttcagttggtagtctagtcggataacaggtctgaggcagagatcaagacgcagaacca

SEQ ID NO: 35646 - DNA, 96 bp, Fusarium azukicola
  misc_feature: 117
tggcaatggtagagaagacaactagacaactatcataatggattatactccctacctgttccatcatcatcatcatgggtcgtcgtgcgcttacag

SEQ ID NO: 35647 - DNA, 96 bp, Fusarium azukicola
  misc_feature: 117
aaaggaagctgtctatacccatcatatatatatatatgatatggtatggatatagatgatgttattatttattattataatcgtaataacgaaaga

SEQ ID NO: 35648 - DNA, 96 bp, Fusarium azukicola
  misc_feature: 117
cctctagttaattactattatctaagagagaagagttagaaagtaaagctaacctctagggtaaggaaggggttagcctctaaggtctagggaaga

SEQ ID NO: 35649 - DNA, 96 bp, Fusarium azukicola
  misc_feature: 117
tcttatctcttatttcttatttctttatctcttatctcttatctcttatctcttatctcttatctcttatctcttatctcttatctcttatctctt

SEQ ID NO: 35650 - DNA, 96 bp, Fusarium azukicola
  misc_feature: 117
tcttagataatataaaggaatatatatataagctaagaccctattatataaagaatagaataaaatataatataagtccgccttataataaataag

SEQ ID NO: 35651 - DNA, 96 bp, Fusarium azukicola
  misc_feature: 117
aaaagagagagagggagaggggagaggagaggataaggagtgaaaagagagagagggagaggggagaggagaggataaggagagaaaagagagaga

SEQ ID NO: 35652 - DNA, 96 bp, Fusarium azukicola
  misc_feature: 117
tctattactaaagccttataaatggcttagttatagcaaaaaccggttttaatggatagaatgcaacgctgaagggtttaggaaccttcctagccc

SEQ ID NO: 35653 - DNA, 96 bp, Fusarium azukicola
  misc_feature: 117
acttctctgctcaattccgacaagagattcagaccgaccgagagagaggcaagatagaagagaatactccttccgcagaagagagcctcagatcga

SEQ ID NO: 35654 - DNA, 96 bp, Fusarium azukicola
  misc_feature: 117
taagaaaggagagaagtaaggaaggttaagaaaggagagaagtaaggaaggttaagaaaggagagaagtaaggaaggttaagaaaggagagaagga

SEQ ID NO: 35655 - DNA, 96 bp, Fusarium azukicola
  misc_feature: 117
tcaaccaattaaccctaacccttaacgtaactactacccctaaccctaatttcaaccaattaaccctaacccttaacgtaactactacccctaacc

SEQ ID NO: 35656 - DNA, 96 bp, Fusarium azukicola
  misc_feature: 117
acactatgtaattaactatttcactataaatagaattttttaaaaatctaaaaaaatcatttttagactttattaagagttagatttatagaaata

SEQ ID NO: 35657 - DNA, 96 bp, Fusarium azukicola
  misc_feature: 117
tattctattctttatataatagggtcttagcttatatatatattcctttatattatctaagaaaactaattttattcttattttattaggattatt

SEQ ID NO: 35658 - DNA, 96 bp, Fusarium azukicola
  misc_feature: 117
aaagagaggtataactaggaaaaagagatatagctaagagagagaggtaaagctaagaaagagagatatagctagaaaagagagaaataaaagata

SEQ ID NO: 35659 - DNA, 96 bp, Fusarium azukicola
  misc_feature: 117
tatatataataataatagaggtttaattttttcctctaataataagaatatataaagctataacccttataagattataactttaaaggaggctat

SEQ ID NO: 35660 - DNA, 96 bp, Fusarium azukicola
  misc_feature: 117
tatagaatattaacagcctcctttaaagttataatcttataagggttatagctttatacgttcttattattagaggaaaaaattaaacctctatta

SEQ ID NO: 35661 - DNA, 96 bp, Fusarium azukicola
  misc_feature: 117
accttttctaatatagtcctatttatcctttctataaagctattagcttatttattataaggcggacttatattatattttattccattctttata

SEQ ID NO: 35662 - DNA, 96 bp, Fusarium azukicola
  misc_feature: 117
taggaacctttttaaccaattagaataatacccttaatatctagctacctatagtagctataggttaggtaaatatacctaaaaatagagtaaaag

SEQ ID NO: 35663 - DNA, 96 bp, Fusarium azukicola
  misc_feature: 117
attcaggaagccaataaggtgcataagacttctaagaaaaaggaatctaaacctaattctaagaaggaagaaagagaaaagaaacaagaaaagcta

SEQ ID NO: 35664 - DNA, 96 bp, Fusarium azukicola
  misc_feature: 117
tactttaccctatactctcttctctcttttactttaccctccacttttattctttattttactttaccctatactctcttctctcttttactttac

SEQ ID NO: 35665 - DNA, 96 bp, Fusarium azukicola
  misc_feature: 117
tacctaaaaatagagtaaaaattctataatataatatgtggtttatagggatatatcactatagttggtaatataatatagaacattaacatatag

SEQ ID NO: 35666 - DNA, 96 bp, Fusarium azukicola
  misc_feature: 117
tacctaaaaatagagtaaaaattctataatataatatgtggtttatagggatatatcactatagttggtaatataatatagaacattaacaataag

SEQ ID NO: 35667 - DNA, 96 bp, Fusarium azukicola
  misc_feature: 117
ctatttatcctttctataaagctattagcttatttattataaggcggacttatattatattttattccattctttatataatagggtcttagctta

SEQ ID NO: 35668 - DNA, 96 bp, Fusarium azukicola
  misc_feature: 117
taacttagagttagactaattaagctataaaaaacctattatgattttttaaaactttttaaaaaatcccttataaggtagtttagaaaaagaatt

SEQ ID NO: 35669 - DNA, 96 bp, Fusarium azukicola
  misc_feature: 117
atgatggggtcggcaagcattggattcggcattttctcaaccggaataaggaaatcaagacattgaaaggcaagaagatcgattctgaccgcttta

SEQ ID NO: 35670 - DNA, 96 bp, Fusarium azukicola
  misc_feature: 117
attataactttaaaggaggctattaatattctatattatattaccaactatagtgatatatccctataaaccacatattatattatagaattttta

SEQ ID NO: 35671 - DNA, 96 bp, Fusarium azukicola
  misc_feature: 117
gtttactttcacagatatagagtttcatatgcctgcacattttgcttttccctctcagcttatcgacgcggtacatacatggatggtgaatagtgg

SEQ ID NO: 35672 - DNA, 96 bp, Fusarium azukicola
  misc_feature: 117
gttattcttattagaaataaccttagctattattatatataggttatttttctcttttccttataatattatttttccttatttatttaaaagaag

SEQ ID NO: 35673 - DNA, 96 bp, Fusarium azukicola
  misc_feature: 117
gttattagctagggtaaggcgattagggattaataagtactaagagaggtaaaggaaaccgctactatccggaggggagataacctctactgtccg

SEQ ID NO: 35674 - DNA, 96 bp, Fusarium azukicola
  misc_feature: 117
actcttattctctctatttatagttatatttattcctaaaaagtctttaacttctcctaaggattagattactatatccttagatagaatatttac

SEQ ID NO: 35675 - DNA, 96 bp, Fusarium azukicola
  misc_feature: 117
aacccacttttatctatctatcttctataagtctctcttagaagctagatattatctctttattacttttcttcctagttatctaggaaatcaacc

SEQ ID NO: 35676 - DNA, 96 bp, Fusarium azukicola
  misc_feature: 117
attatctaagagagaagagttagaaagtaaagctaacctctagggtaaggaaggggttagcctctaaggtctagggaagaagtataatggctaacc

SEQ ID NO: 35677 - DNA, 96 bp, Fusarium azukicola
  misc_feature: 117
ctaacctttactataactacttaaccctaacccttaacttaaccacttaaccctaacctttactataactacttaaccctaacccttaacttaacc

SEQ ID NO: 35678 - DNA, 96 bp, Fusarium azukicola
  misc_feature: 117
atctcccctccggatagtagcggtttcctttacctctcttagtacttattaatccctaatcgccttaccctagctaataaccctcttatctatacc

SEQ ID NO: 35679 - DNA, 96 bp, Fusarium azukicola
  misc_feature: 117
atctttttgtttgagatgccctatcgcctctgacttcctcctaggtggttctgcgtcttgatctctgcctcagacctgttatccgactagactacc

SEQ ID NO: 35680 - DNA, 96 bp, Fusarium azukicola
  misc_feature: 117
cctccggatagtagcggtttcctttacctctcttagtacttattaatccctaatcgccttaccctagctaataaccctcttatctataccctaccc

SEQ ID NO: 35681 - DNA, 96 bp, Fusarium azukicola
  misc_feature: 117
ggaagatgcgctttataatctattactaaagccttataaatggcttagttatagcaaaaaccggttttgatggatagaatgcaacgctgaagggtt

SEQ ID NO: 35682 - DNA, 96 bp, Fusarium azukicola
  misc_feature: 117
gctatccgacggtataatcttggtccgaatcggatcctattaggccggtcaaatgactataataagggactatccttctttattagttactacaag

SEQ ID NO: 35683 - DNA, 96 bp, Fusarium azukicola
  misc_feature: 117
actatcttagagcatgaaaatcaagagcttcgacccaagaaaaggcgtaaggttatcacagatggcaatgttgagtttgcaaaggtgccagcaatc

SEQ ID NO: 35684 - DNA, 96 bp, Fusarium azukicola
  misc_feature: 117
gattataactttaaaggaggctattaatattctatattatattaccaactatagtgatatatccctataaaccacatattatattatagaattttt

SEQ ID NO: 35685 - DNA, 96 bp, Fusarium azukicola
  misc_feature: 117
aactataaatagagagaataagagtatatctttttcataagtaaaatatataaataaaataataaggaaatataataaataagaaataggaacttc

SEQ ID NO: 35686 - DNA, 96 bp, Fusarium azukicola
  misc_feature: 117
gaaaaagagatatagctaagagagagaggtaaagctaagaaagagagatatagctagaaaagagagaaataaaagataagagataagagataagag

SEQ ID NO: 35687 - DNA, 96 bp, Fusarium azukicola
  misc_feature: 117
ctttctttttacctcttatttctccttaaatcctaacttttttatttaactctttctcttatttttaaatcctttcttctcttttctttttaaatt

SEQ ID NO: 35688 - DNA, 96 bp, Fusarium azukicola
  misc_feature: 117
attattagttatattattttattgagaaattaaggaattatatacctctaaattattacttatattaaaatctattttatctagggtcttagaaag

SEQ ID NO: 35689 - DNA, 96 bp, Fusarium azukicola
  misc_feature: 117
atattgtggtataaccttctctctaaattattaaataatttaggcttctacgctatcccttttgataaagctctctttataaataagaacttaaag

SEQ ID NO: 35690 - DNA, 96 bp, Fusarium azukicola
  misc_feature: 117
caccctaataaggctccaaaaaactggaaaactcaggaagccaataaggtgcataagacttctaagaaaagggaatctaaacctaattctaagaag

SEQ ID NO: 35691 - DNA, 96 bp, Fusarium azukicola
  misc_feature: 117
cttctctgctcaattccgacaagagattcagaccgaccgagagagaggcaagatagaagagaatactccttccgcagaagagagcctcagatcgag

SEQ ID NO: 35692 - DNA, 96 bp, Fusarium azukicola
  misc_feature: 117
cttctatcttgcctctctctcggtcggtctgaatctcttgtcggaattgagcagagaagtctaatggttggtaggtcccattctcaatcttccctt

SEQ ID NO: 35693 - DNA, 96 bp, Fusarium azukicola
  misc_feature: 117
aaatttaaggaatttagaaaagaaatagaaaataatcctaataaaataagaataaaatcagttttcttagataatataaaggaatatatatataag

SEQ ID NO: 35694 - DNA, 96 bp, Fusarium azukicola
  misc_feature: 117
ctatcataatggattatactccctacctgttccatcatcatcatcatgggtcgtcgtgcgcttacagcagaggaaaaggcaaacaaggccaaccgt

SEQ ID NO: 35695 - DNA, 96 bp, Fusarium azukicola
  misc_feature: 117
ccttaaaatgcagttattgcaaactgccaggtcataaagacccagattgctattttttgcaccctaataaggctccaaaaaactggaaaattcagg

SEQ ID NO: 35696 - DNA, 96 bp, Fusarium azukicola
  misc_feature: 117
cctatttatcctttctataaagctattagcttatttattataaggcggacttatattatattttattccattctttatataatagggtcttagctt

SEQ ID NO: 35697 - DNA, 96 bp, Fusarium azukicola
  misc_feature: 117
aggaggctattaatgttctatattatattaccaactatagtgatatatccctataaaccacatattatattatagaatttttactctatttttagg

SEQ ID NO: 35698 - DNA, 96 bp, Fusarium azukicola
  misc_feature: 117
acattctatccattaaaaccggtttttgctataactaagccatttataaggctttagtaatagattataaagcgcatcttccgggctatccgacgg

SEQ ID NO: 35699 - DNA, 96 bp, Fusarium azukicola
  misc_feature: 117
attctattctttatataatagggtcttagcttatatatatattcctttatattatctaagaaaactaattttattcttattttattaggattattt

SEQ ID NO: 35700 - DNA, 96 bp, Fusarium azukicola
  misc_feature: 117
attactttcttacttttctttcttttactcttccccttctccttttatcttcttctctttttctttactcttcccctcctttatttctctttttct

SEQ ID NO: 35701 - DNA, 96 bp, Fusarium azukicola
  misc_feature: 117
atgatgatggaacaggtagggagtataatccattatgatagttgtctagttgtcttctctaccattgccactgataaaagagtcttgctagcatct

SEQ ID NO: 35702 - DNA, 96 bp, Fusarium azukicola
  misc_feature: 117
atattgttaatgttctatattatattaccaactatagtgatatatccctataaaccatatattatattatagaatttttactctatttttaggtat

SEQ ID NO: 35703 - DNA, 96 bp, Fusarium azukicola
  misc_feature: 117
actttcttacttttctttcttttactcttccccttctccttttatcttcttctctttttctttactcttcccctcctttatttctctttttcttct

SEQ ID NO: 35704 - DNA, 96 bp, Fusarium azukicola
  misc_feature: 117
aaccctaacctttactataactacttaaccctaacccttaacttaaccacttaaccctaacctttactataactacttaaccctaacccttaactt

SEQ ID NO: 35705 - DNA, 96 bp, Fusarium azukicola
  misc_feature: 116
tagttagtaatataatatagaatattaatagcctcctttaaagttataatcttataagggttatagctttatatattcttattattagaggaaaaa

SEQ ID NO: 35706 - DNA, 96 bp, Fusarium azukicola
  misc_feature: 116
ttcttcctagttatctaggaaatcaactatttataacctagtcacactgacaggttatgagcccggaggtctcttcctaagggtttatacttaaaa

SEQ ID NO: 35707 - DNA, 96 bp, Fusarium azukicola
  misc_feature: 116
tttccttaaggattataaaaagaaatatcctaatagtaatataaataagctataaatctatttaaaattaagaaaagccttatatagcctaaaata

SEQ ID NO: 35708 - DNA, 96 bp, Fusarium azukicola
  misc_feature: 116
aaagagaaataaaggaggggaagagtaaagaaaaagagaagaagataaaaggagaaggggaagagtaaaagaaagaaaagtaagaaagtaatagaa

SEQ ID NO: 35709 - DNA, 96 bp, Fusarium azukicola
  misc_feature: 116
ttatttaagggtaaaatagctaagaattattctttttaggtctataactattttattttagcttttattaagctttaaagttttatgttttagtgc

SEQ ID NO: 35710 - DNA, 96 bp, Fusarium azukicola
  misc_feature: 116
tacactaaatcttaaaattcttaagcttaataaaagccgcaataaaatagctataggcttaaaaaaagtattttaataaacttaactcttaaataa

SEQ ID NO: 35711 - DNA, 96 bp, Fusarium azukicola
  misc_feature: 116
aagagatatagctaagagagagaggtaaagctaagaaagagagatatagctagaaaagagagaaataaaagataagagataagagataagagataa

SEQ ID NO: 35712 - DNA, 96 bp, Fusarium azukicola
  misc_feature: 116
aaataatataaataaaaaacctagtaataaggaatataagttcctagataaaatagctattgatatatagggtccttctagaatccctacctataa

SEQ ID NO: 35713 - DNA, 96 bp, Fusarium azukicola
  misc_feature: 116
ttaattggttgaaattagggttaggggtagtagttacgttaagggttagggttaattggttgaaattagggttaggggtagtagtagagttaaggg

SEQ ID NO: 35714 - DNA, 96 bp, Fusarium azukicola
  misc_feature: 116
tgcaaaggaatatatatataagctaaggccctattgtataaagaatggaataaaatataatacaagtccgcctcataataaacaagctaatggctt

SEQ ID NO: 35715 - DNA, 96 bp, Fusarium azukicola
  misc_feature: 116
tatacctaaaaatagagtaaaaattctataatataatatgtggtttatagggatatatcactatagttggtaatataatatagaacattaacaaga

SEQ ID NO: 35716 - DNA, 96 bp, Fusarium azukicola
  misc_feature: 116
tcttcttcttcttcttcttcttcttcctctttcgttattacgattataataataaataataacatcatctatatccataccatatcatatatatat

SEQ ID NO: 35717 - DNA, 96 bp, Fusarium azukicola
  misc_feature: 116
gatatacttaaacttttaatcttagttattttaagcttaggtttattttcttagaattattttaagtgttttttaaataaggtgtaattactaaga

SEQ ID NO: 35718 - DNA, 96 bp, Fusarium azukicola
  misc_feature: 116
cttcttttaagtataaacccttaggaagagacctccgggctcataacctgtcagtgtgactaggttataaatagttgatttcctagataactagga

SEQ ID NO: 35719 - DNA, 96 bp, Fusarium azukicola
  misc_feature: 116
tccatgtatgtaccgcgtcgataagctgagagggaaaagcaaaatgtgcaggcatatgaaactctatatctgtgaaagtaaacagtgatataatac

SEQ ID NO: 35720 - DNA, 96 bp, Fusarium azukicola
  misc_feature: 116
attataaggcggacttatattatattttattccattctttatataatagggtcttagcttatatatatattcctttatattatctaagaaaactga

SEQ ID NO: 35721 - DNA, 96 bp, Fusarium azukicola
  misc_feature: 116
tcagtggcaatggtagagaagacaactagacaactatcataatggattatactccctacctgttccatcatcatcatcatgggtcgtcgtgcgctt

SEQ ID NO: 35722 - DNA, 96 bp, Fusarium azukicola
  misc_feature: 116
agagaagagttagaaagtaaagctaacctctagggtaaggaaggggttagcctctaaggtctagggaagaagtataatggctaaccactagtgtga

SEQ ID NO: 35723 - DNA, 96 bp, Fusarium azukicola
  misc_feature: 116
aaaataatataaataaaaaacctagtaataaggaatataagttcctagataaaatagctattgatatatagggtccttctagaatccctacctata

SEQ ID NO: 35724 - DNA, 96 bp, Fusarium azukicola
  misc_feature: 116
tatagctgacccaaagcctgaccctaaccctgacctaatgtatgaccctgaccctgaccctaacctctagaatctcctagaatctctatagaagcc

SEQ ID NO: 35725 - DNA, 96 bp, Fusarium azukicola
  misc_feature: 116
tagaatattaacagcctcctttaaagttataatcttataagggttatagctttatacgttcttattattagaggaaaaaattaaacctctattatt

SEQ ID NO: 35726 - DNA, 96 bp, Fusarium azukicola
  misc_feature: 116
aataagaagtccttcttttaaataaataaggaaaaataatattataaggaaaagagaaaaataacctatatataataatagctaaggttatttcta

SEQ ID NO: 35727 - DNA, 96 bp, Fusarium azukicola
  misc_feature: 116
agttattccttatagaaattataaagaaaagtcttagagtctcaggtcttatagtacaagcataggtttcttcatagttaataccttgaatttgta

SEQ ID NO: 35728 - DNA, 96 bp, Fusarium azukicola
  misc_feature: 116
taataataagaacgtataaagctataacccttataagattataactttaaaggaggctgttaatattctatattatattactaactatagtgatat

SEQ ID NO: 35729 - DNA, 96 bp, Fusarium azukicola
  misc_feature: 116
taactataaatagagagaataagagtatatctttttcataagcaaaatatataaataaaataataaggaaatataataaataagaaataggaactt

SEQ ID NO: 35730 - DNA, 96 bp, Fusarium azukicola
  misc_feature: 116
gtttatttaagggtaaaatagctaagaattattctttttaggtctataactattttattttagcttttattaagctttaaagttttatgttttagt

SEQ ID NO: 35731 - DNA, 96 bp, Fusarium azukicola
  misc_feature: 116
agaagaattagctataaatagcttttcttatttcttttctctttcttccttcttagaattaagtttagattcctttttcttagaagtcttatatac

SEQ ID NO: 35732 - DNA, 96 bp, Fusarium azukicola
  misc_feature: 116
ggttattagctagggtaaggcgattagggattaataagtactaagagaggtaaaggaaaccgctactatccggaggggagataacctctactgtcc

SEQ ID NO: 35733 - DNA, 96 bp, Fusarium azukicola
  misc_feature: 116
ccctccggatagtagcggtttcctttacctctcttagtacttattaatccctaatcgccttaccctagctaataaccctcttatctataccctacc

SEQ ID NO: 35734 - DNA, 96 bp, Fusarium azukicola
  misc_feature: 116
cctagtatataccttcaattgcttacattgccactttatgccgacactgatcaaactcgacagcacatcgtgacgaacagcgcgacatcaataccc

SEQ ID NO: 35735 - DNA, 96 bp, Fusarium azukicola
  misc_feature: 116
ggattataaaaagaaatatcctaatagtagtataaatgagctacaaatctgtttaaaattaagaaaagccttatatggcctaaaacaaagccctat

SEQ ID NO: 35736 - DNA, 96 bp, Fusarium azukicola
  misc_feature: 116
ggaggctattaatattctatattatattaccaactatagtgatatatccctataaaccacatattatattatagaatttttactctatttttaggt

SEQ ID NO: 35737 - DNA, 96 bp, Fusarium azukicola
  misc_feature: 116
gaatggaataaaatataatataagtccgccttataataaataagctaatagctttatagaaaggataaataggactatattagaaaaggttagagc

SEQ ID NO: 35738 - DNA, 96 bp, Fusarium azukicola
  misc_feature: 116
gcaaaggaatatatatataagctaaggccctattgtataaagaatggaataaaatataatacaagtccgcctcataataaacaagctaatggcttt

SEQ ID NO: 35739 - DNA, 96 bp, Fusarium azukicola
  misc_feature: 116
gaattattctttttaggtctataactattttattttagcttttattaagctttaaagttttatgttttagtgcacagtatagctgtacagcttact

SEQ ID NO: 35740 - DNA, 96 bp, Fusarium azukicola
  misc_feature: 116
ccttattattttatttatatattttgcttatgaaaaagatatactcttattctctctatttatagttatatttattcctaaaaagtctttaacttc

SEQ ID NO: 35741 - DNA, 96 bp, Fusarium azukicola
  misc_feature: 116
gaagagttagaaagtaaagctaacctctagggtaaggaaggggttagcctctaaggtctagggaagaagtataatggctaaccactagtgtgagag

SEQ ID NO: 35742 - DNA, 96 bp, Fusarium azukicola
  misc_feature: 116
cttccccggtagattacaaagacctagccttctcataccgttattcagctcccattgctccttcataatcggctctagctctgcattaaggtcctt

SEQ ID NO: 35743 - DNA, 96 bp, Fusarium azukicola
  misc_feature: 116
cttatttcttttctctttcttccttcttagaattaggtttagattcctttttcttagaagtcttatataccttattagcttcctaagttttctagt

SEQ ID NO: 35744 - DNA, 96 bp, Fusarium azukicola
  misc_feature: 116
ctacaagatgaatcaactcttcagtcaattcaatcattaacaactaaatcccacttttatctgatccaatcagactctttattgtgacccactttt

SEQ ID NO: 35745 - DNA, 96 bp, Fusarium azukicola
  misc_feature: 116
aggttaggggtagtaatgaagttaatttaaaaagaaaagagaagaaaggatttaaaaataagagaaagagttaaataaaaaagttaggatttaagg

SEQ ID NO: 35746 - DNA, 96 bp, Fusarium azukicola
  misc_feature: 116
aataagctaatggctttatagaaaggataaataggactatattagaaaaggttagagctttattatttacttctaacctacctaaatacctatggg

SEQ ID NO: 35747 - DNA, 96 bp, Fusarium azukicola
  misc_feature: 116
catatgaaactctatatctgtgaaagtaaacagtgatataatacgtggtcaaaacaaacaaagatgctagcaagactcttttatcagtggcaatgg

SEQ ID NO: 35748 - DNA, 96 bp, Fusarium azukicola
  misc_feature: 116
acccttaaataaactataaataatttttatagatttttaaaaaatttcgtttataaagaaattataatttacacagtgtaaatagactttttaaat

SEQ ID NO: 35749 - DNA, 96 bp, Fusarium azukicola
  misc_feature: 116
aaaataaaagatcctctctttaaatatactaataaggacctatattaagttaaaaactataaaaactataaactaggaaaattaactaaaaataat

SEQ ID NO: 35750 - DNA, 96 bp, Fusarium azukicola
  misc_feature: 116
atctaagaaaactgattttattcttattttattaggattattttctatttcttttctaaattccttaaattttataatagcttctaacttattcct

SEQ ID NO: 35751 - DNA, 96 bp, Fusarium azukicola
  misc_feature: 116
atatatttttaactccccttcctctttctccttccttcttttccctcctctttctcttaatcttcttctctttctttcccttttatttttttcttt

SEQ ID NO: 35752 - DNA, 96 bp, Fusarium azukicola
  misc_feature: 116
aggtttaattttttcctctaataataagaatatataaagctataacccttataagattataactttaaaggaggctattaatattctatattatat

SEQ ID NO: 35753 - DNA, 96 bp, Fusarium azukicola
  misc_feature: 116
acttagagttagactaattaagctataaaaaacctattatgattttttaaaactttttaaaaaatcccttataaggtagtttagaaaaagaattat

SEQ ID NO: 35754 - DNA, 96 bp, Fusarium azukicola
  misc_feature: 116
ataaagaatggaataaaatataatataagtccgccttataataaataagctaatagctttatagaaaggataaataggactatattagaaaaggtt

SEQ ID NO: 35755 - DNA, 96 bp, Fusarium azukicola
  misc_feature: 116
aaagagtaattttataagtctaactaaaaaagttataagtttataatttttctagatttttaaaaaattcctttaatttttaaaaaataaaaaact

SEQ ID NO: 35756 - DNA, 96 bp, Fusarium azukicola
  misc_feature: 115
aataatttctctagcttctagcttatttttaacctcttttatcttattaagatatatttctatattcttaaaagataaaagggaaagttaaaaaaa

SEQ ID NO: 35757 - DNA, 96 bp, Fusarium azukicola
  misc_feature: 115
ttttttactataaaagagccttgagagctcttaacccttctagaaagtggtggttgtgtcacacccatggctttagcagctcgggttatcgaggga

SEQ ID NO: 35758 - DNA, 96 bp, Fusarium azukicola
  misc_feature: 115
atagctactataggtagctagatattaagggtattattctaattggttaaaaaggttcctacagacctttatgactgccgtcatctatgcatccaa

SEQ ID NO: 35759 - DNA, 96 bp, Fusarium azukicola
  misc_feature: 115
ttcttcctctttcgttattacgattataataataaataataacatcatctatatccataccatatcatatatatatatatgatgggtatagacagc

SEQ ID NO: 35760 - DNA, 96 bp, Fusarium azukicola
  misc_feature: 115
agtccttcttttaaataagcaaggaaaaataatatcataaggaaaagagaaaaataacctatatataataacagctaaggttatttctaataagaa

SEQ ID NO: 35761 - DNA, 96 bp, Fusarium azukicola
  misc_feature: 115
taggggtagtaatgaagttaatttaaaaagaaaagagaagaaaggatttaaaaataagagaaagagttaaataaaaaagttaggatttaaggagaa

SEQ ID NO: 35762 - DNA, 96 bp, Fusarium azukicola
  misc_feature: 115
ttctatctatagctgacccaaagcctgaccctaaccctgacctaatgtatgaccctgaccctgaccctaacctctagaatctcctagaatctctat

SEQ ID NO: 35763 - DNA, 96 bp, Fusarium azukicola
  misc_feature: 115
atataactataaatagagagaataagagtatatctttttcataagcaaaatatataaataaaataataaggaaatataataaataagaaataggaa

SEQ ID NO: 35764 - DNA, 96 bp, Fusarium azukicola
  misc_feature: 115
ttataaggcggacttatattatattttattccattctttatataatagggtcttagcttatatatatattcctttatattatctaagaaaactgat

SEQ ID NO: 35765 - DNA, 96 bp, Fusarium azukicola
  misc_feature: 115
ttaaggaatttagaaaagaaatagaaaataatcctaataaaataagaataaaatcagttttcttagataatataaaggaatatatatataagctaa

SEQ ID NO: 35766 - DNA, 96 bp, Fusarium azukicola
  misc_feature: 115
attaagggtattattctaattagttaaaaaggttcctatagacctttatgactgccgtcatctatgcattaagtataataactgccgattggctaa

SEQ ID NO: 35767 - DNA, 96 bp, Fusarium azukicola
  misc_feature: 115
ttactgttaatgttctatattatattaccaactatagtgatatatccctataaaccacatattatattatagaatttttactctatttttaggtat

SEQ ID NO: 35768 - DNA, 96 bp, Fusarium azukicola
  misc_feature: 115
ttaaggattataaaaagaaatatcctaatagtaatataaataagctataaatctatttaaaattaagaaaagccttatatagcctaaaataaagcc

SEQ ID NO: 35769 - DNA, 96 bp, Fusarium azukicola
  misc_feature: 115
aaactggaaaattcaggaagccaataaggtgcataagacttctaagaaaaaggaatctaaacctaattctaagaaggaagaaagagaaaagaaaca

SEQ ID NO: 35770 - DNA, 96 bp, Fusarium azukicola
  misc_feature: 115
tggcttagttatagcaaaaaccggttttgatggatagaatgcaacgctgaaggttttaggaaccttcctagccaatcggcagttattatactttta

SEQ ID NO: 35771 - DNA, 96 bp, Fusarium azukicola
  misc_feature: 115
tggagatggctatatatcaacaagacgaacgcgaatacaacaagcaagcagatgggattggcaatgtgctcaattggatgattgagaagatcaatc

SEQ ID NO: 35772 - DNA, 96 bp, Fusarium azukicola
  misc_feature: 115
tcttcctagttatctaggaaatcaactatttataacctagtcacactgacaggttatgagcccggaggtctcttcctaagggtttatacttaaaag

SEQ ID NO: 35773 - DNA, 96 bp, Fusarium azukicola
  misc_feature: 115
aagtccttcttttaaataagcaaggaaaaataatatcataaggaaaagagaaaaataacctatatataataacagctaaggttatttctaataaga

SEQ ID NO: 35774 - DNA, 96 bp, Fusarium azukicola
  misc_feature: 115
aactgccaggtcataaagacccagattgctattttttgcaccctaataaggctccaaaaaactggaaaattcaggaagccaataaggtgcataaga

SEQ ID NO: 35775 - DNA, 96 bp, Fusarium azukicola
  misc_feature: 115
agaagagttagaaagtaaagctaacctctagggtaaggaaggggttagcctctaaggtctagggaagaagtataatggctaaccactagtgtgaga

SEQ ID NO: 35776 - DNA, 96 bp, Fusarium azukicola
  misc_feature: 115
aaaagagaaataaaggaggggaagagtaaagaaaaagagaagaagataaaaggagaaggggaagagtaaaagaaagaaaagtaagaaagtaataga

SEQ ID NO: 35777 - DNA, 96 bp, Fusarium azukicola
  misc_feature: 115
tctatagctgacccaaagcctgaccctaaccctgacctaatgtatgaccctgaccctgaccctaacctctagaatctcctagaatctctatagaag

SEQ ID NO: 35778 - DNA, 96 bp, Fusarium azukicola
  misc_feature: 115
atataaaaggtttataaagttaaaataaaggggaattaattaaataattaaggttatatatatatagctagctcccctatatctaggagctttaga

SEQ ID NO: 35779 - DNA, 96 bp, Fusarium azukicola
  misc_feature: 115
ggttaggggtagtaatgaagttaatttaaaaagaaaagagaagaaaggatttaaaaataagagaaagagttaaataaaaaagttaggatttaagga

SEQ ID NO: 35780 - DNA, 96 bp, Fusarium azukicola
  misc_feature: 115
tcccctccggatagtagcggtttcctttacctctcttagtacttattaatccctaatcgccttaccctagctaataaccctcttatctatacccta

SEQ ID NO: 35781 - DNA, 96 bp, Fusarium azukicola
  misc_feature: 115
tatatataaatatataaataaaaatctctctttaagttttaatagggctatacctcctattttaactgataatctagcagctaagcaattagctga

SEQ ID NO: 35782 - DNA, 96 bp, Fusarium azukicola
  misc_feature: 115
gttaaaaactataaaaactataaactaggaaaattaactaaaaataatataaataaaaaacctaataataaggaatataagttcctagataaaata

SEQ ID NO: 35783 - DNA, 96 bp, Fusarium azukicola
  misc_feature: 115
aaataaataagtaagttaggttaaagaagagaaaaaagggttagaaagtaataaaaaggtttaaggagagaaattaagttaaggaggaatataata

SEQ ID NO: 35784 - DNA, 96 bp, Fusarium azukicola
  misc_feature: 115
taaaatttaaggaatttagaaaagaaatagaaaataatcctaataaaataagaataaaatcagttttcttagataatataaaggaatatatatata

SEQ ID NO: 35785 - DNA, 96 bp, Fusarium azukicola
  misc_feature: 115
acctatattatatataaaattagttatattatctttattagtagaaaaattaggtttatttaccttatttaaatatcctagttatttctttatata

SEQ ID NO: 35786 - DNA, 96 bp, Fusarium azukicola
  misc_feature: 115
tagggatatatcactatagttagtaatataatatagaatattaacagcctcctttaaagttataatcttataagggttatagctttatacgttctt

SEQ ID NO: 35787 - DNA, 96 bp, Fusarium azukicola
  misc_feature: 115
tagccttatagataaatctaagagactagaaaaaatagattctaataagatatatttttctaagacttctaagccttagaaaaagaagaaaactgc

SEQ ID NO: 35788 - DNA, 96 bp, Fusarium azukicola
  misc_feature: 115
atatttttctaagacttctaagccttagaaaaagaagaaaactgccttaaaatgcagttattgcaaactgctaggtcataaagacctagattgcta

SEQ ID NO: 35789 - DNA, 96 bp, Fusarium azukicola
  misc_feature: 115
tagaagtcttatgcaccttattggcttcctgaattttccagttttttggagccttattagggtgcaaaaaatagcaatctgggtctttatgacctg

SEQ ID NO: 35790 - DNA, 96 bp, Fusarium azukicola
  misc_feature: 115
tacactatgtaattaactatttcactataaatagaattttttaaaaatctaaaaaaatcatttttagactttattaagagttagatttatagaaat

SEQ ID NO: 35791 - DNA, 96 bp, Fusarium azukicola
  misc_feature: 115
cctaagggtttatacttaaaagaagattatacttcttttttaagtcttttctaagactttatacctccttaagtcttctttaagactttataatta

SEQ ID NO: 35792 - DNA, 96 bp, Fusarium azukicola
  misc_feature: 115
taaggctatttttgcctccctttatctcttatctcttatttcttatttctttatctcttatctcttatctcttatctcttatctcttatctcttat

SEQ ID NO: 35793 - DNA, 96 bp, Fusarium azukicola
  misc_feature: 115
taagagagaagagttagaaagtaaagctaacctctagggtaaggaaggggttagcctctaaggtctagggaagaagtataatggctaaccactagt

SEQ ID NO: 35794 - DNA, 96 bp, Fusarium azukicola
  misc_feature: 115
agggatatatcactatagttagtaatataatatagaatattaacagcctcctttaaagttataatcttataagggttatagctttatacgttctta

SEQ ID NO: 35795 - DNA, 96 bp, Fusarium azukicola
  misc_feature: 115
taaatagataagcgaattaaatacttttcttaacctttaatatataaatcactataaaaatactataaactatctaattaattaaaactaattact

SEQ ID NO: 35796 - DNA, 96 bp, Fusarium azukicola
  misc_feature: 115
accctaacccttaactctactactacccctaaccctaatttcaaccaattaaccctaacccttaacgtaactactacccctaaccctaatttcaac

SEQ ID NO: 35797 - DNA, 96 bp, Fusarium azukicola
  misc_feature: 115
gtagttattccttatagaaattataaagaaaagtcttagagtctcaggtcttatagtacaagcataggtttcttcatagttaataccttgaatttg

SEQ ID NO: 35798 - DNA, 96 bp, Fusarium azukicola
  misc_feature: 115
agaattattctttttaggtctataactattttattttagcttttattaagctttaaagttttatgttttagtgcacagtatagctgtacagcttac

SEQ ID NO: 35799 - DNA, 96 bp, Fusarium azukicola
  misc_feature: 115
ctattctcttgtcctcacgctttaggtatcgaaagctatcaagaactttggtgatcattccattaatgagagaaaataatgccaaaaaaaaaaacc

SEQ ID NO: 35800 - DNA, 96 bp, Fusarium azukicola
  misc_feature: 115
ccttatagaaattataaagaaaagtcttagagtctcaggtcttatagtacaagcataggtttcttcatagttaataccttgaatttgtaaaaaccc

SEQ ID NO: 35801 - DNA, 96 bp, Fusarium azukicola
  misc_feature: 115
gggtagtagttacgttaagggttagggttaattggttgaaattagggttaggggtagtagttacgttaagggttagggttaattggttgaaattag

SEQ ID NO: 35802 - DNA, 96 bp, Fusarium azukicola
  misc_feature: 115
agtcaccaaatagtacttggaagcacgtgataaatgacgcgtcataaacctcgggtttatgaccgtcatttacctaggggttttggtaatttaccc

SEQ ID NO: 35803 - DNA, 96 bp, Fusarium azukicola
  misc_feature: 115
cgtggtcaaaacaaacaaagatgctagcaagactcttttatcagtggcaatggtagagaagacaactagacaactatcataatggattatactccc

SEQ ID NO: 35804 - DNA, 96 bp, Fusarium azukicola
  misc_feature: 115
ggcttttagatatctagtagccctatctaggaaggtaataaagtatatatatttattataggtagggattctagaaggaccctatatattagtagc

SEQ ID NO: 35805 - DNA, 96 bp, Fusarium azukicola
  misc_feature: 115
gcttttagatatctagtagccctatctaggaaggtaataaagtatatatatttattataggtagggattctagaaggaccctatatattagtagct

SEQ ID NO: 35806 - DNA, 96 bp, Fusarium azukicola
  misc_feature: 115
cttaaggattataaaaagaaatatcctaatagtaatataaataagctataaatctatttaaaattaagaaaagccttatatagcctaaaataaagc

SEQ ID NO: 35807 - DNA, 96 bp, Fusarium azukicola
  misc_feature: 115
gatagtagcggtttcctttacctctcttagtacttattaatccctaatcgccttaccctagctaataaccctcttatctataccctacccatatag

SEQ ID NO: 35808 - DNA, 96 bp, Fusarium azukicola
  misc_feature: 115
gataagagataagagataagagataagagataagagataagagataaagaaataagaaataagagataagagataaagggaggcaaaaatagcctt

SEQ ID NO: 35809 - DNA, 96 bp, Fusarium azukicola
  misc_feature: 115
gaggctctcttctgcggaaggagtattctcttctatcttgcctctctctcggtcggtctgaatctcttgtcggaattgagcagagaagtctaatgg

SEQ ID NO: 35810 - DNA, 96 bp, Fusarium azukicola
  misc_feature: 115
gagaagagttagaaagtaaagctaacctctagggtaaggaaggggttagcctctaaggtctagggaagaagtataatggctaaccactagtgtgag

SEQ ID NO: 35811 - DNA, 96 bp, Fusarium azukicola
  misc_feature: 115
cctcttatctataccctacccatatagtctaacccgatccatgtaagaaaacgctatttatactatctcatactgtacttaactagccgtcccttc

SEQ ID NO: 35812 - DNA, 96 bp, Fusarium azukicola
  misc_feature: 115
cttcttcctctttcgttattacgattataataataaataataacatcatctatatccataccatatcatatatatatatatgatgggtatagacag

SEQ ID NO: 35813 - DNA, 96 bp, Fusarium azukicola
  misc_feature: 115
actattcaccatccatgtatgtaccgcgtcgataagctgagagggaaaagcaaaatgtgcaggcatatgaaactctatatctgtgaaagtaaacag

SEQ ID NO: 35814 - DNA, 96 bp, Fusarium azukicola
  misc_feature: 115
aaggcgtcaaactggaaggcttggctaagaaaataactatcttagagcatgaaaatcaagagcttcgacccaagaaaaggcgtaaggttatcacag

SEQ ID NO: 35815 - DNA, 96 bp, Fusarium azukicola
  misc_feature: 115
aatttttttaaaaatctaaaaaagatatttttaggttctttatatagttagatttataaaaatactttttttatatttctagctattttatagcag

SEQ ID NO: 35816 - DNA, 96 bp, Fusarium azukicola
  misc_feature: 115
agtcttatgcaccttattggcttcctgaattttccagttttttggagccttattagggtgcaaaaaatagcaatctgggtctttatgacctggcag

SEQ ID NO: 35817 - DNA, 96 bp, Fusarium azukicola
  misc_feature: 115
atactatctcatactgtacttaactagccgtcccttcgcgataccctcttcctagccataataaccctccccgtcgccctagatattaacggttag

SEQ ID NO: 35818 - DNA, 96 bp, Fusarium azukicola
  misc_feature: 115
aagcaagctcggaaacggtatttcgaagtgctaaaggcagctttaagcggcataacgcactggggagactggatcactagttgggaacaagcaatg

SEQ ID NO: 35819 - DNA, 96 bp, Fusarium azukicola
  misc_feature: 115
ataaccctaaccctagttccggttccggttccggttccggttccggtttctagttagaccgtgcctgtacgctccttttctaccctttcaagctct

SEQ ID NO: 35820 - DNA, 96 bp, Fusarium azukicola
  misc_feature: 115
ataaaatcagttttctcagataatgcaaaggaatatatatataagctaaggccctattgtataaagaatggaataaaatataatacaagtccgcct

SEQ ID NO: 35821 - DNA, 96 bp, Fusarium azukicola
  misc_feature: 115
agataagagataagagataagagataagagataagagataagagataaagaaataagaaataagagataagagataaagggaggcaaaaatagcct

SEQ ID NO: 35822 - DNA, 96 bp, Fusarium azukicola
  misc_feature: 115
aataattcttagctattttacccttaaataaactataaataatttttatagatttttaaaaaatttcgtttataaagaaattataatttacacagt

SEQ ID NO: 35823 - DNA, 96 bp, Fusarium azukicola
  misc_feature: 114
tttagtttctagtttatctaagggagaatagttcttataataaactatagacctaaaggtttttattttatctaattccttaatatctaaggaaat

SEQ ID NO: 35824 - DNA, 96 bp, Fusarium azukicola
  misc_feature: 114
aactggaaaattcaggaagccaataaggtgcataagacttctaagaaaaaggaatctaaacctaattctaagaaggaagaaagagaaaagaaacaa

SEQ ID NO: 35825 - DNA, 96 bp, Fusarium azukicola
  misc_feature: 114
aattttttcctctaataataagaacgtataaagctataacccttataagattataactttaaaggaggctattaatgttctatattatattaccaa

SEQ ID NO: 35826 - DNA, 96 bp, Fusarium azukicola
  misc_feature: 114
gtccttcaaaatgacccaaaattaagtatccgacgtgctgcaataacctatgagatcaacgagcataggctccgtcgccgacggaagggcattcaa

SEQ ID NO: 35827 - DNA, 96 bp, Fusarium azukicola
  misc_feature: 114
tattattctaattggttaaaaaggttcctacagaccttcatgactgccgtcatcaatgcatcaaagtataataactgccgattggctaaaaaagaa

SEQ ID NO: 35828 - DNA, 96 bp, Fusarium azukicola
  misc_feature: 114
gcaccctaataaggctccaaaaaactggaaaactcaggaagccaataaggtgcataagacttctaagaaaagggaatctaaacctaattctaagaa

SEQ ID NO: 35829 - DNA, 96 bp, Fusarium azukicola
  misc_feature: 114
taaattcgctggctcccttccatctctcacgaatacagcttcgaaggaagcgttcctcagactgtcgccaaatacgatagcctcctcgacgatgaa

SEQ ID NO: 35830 - DNA, 96 bp, Fusarium azukicola
  misc_feature: 114
ttaaggctatttttgcctccctttatctcttatctcttatttcttatttctttatctcttatctcttatctcttatctcttatctcttatctctta

SEQ ID NO: 35831 - DNA, 96 bp, Fusarium azukicola
  misc_feature: 114
attggcttcctgaattttccagttttttggagccttattagggtgcaaaaaatagcaatctgggtctttatgacctggcagtttgcaataactgca

SEQ ID NO: 35832 - DNA, 96 bp, Fusarium azukicola
  misc_feature: 114
tcttccctttgttttgcccttcttcgacccggataaatacttcaaagtggtcgtcaaggacttctctgaggtcatcgaaccacgtattagggtgca

SEQ ID NO: 35833 - DNA, 96 bp, Fusarium azukicola
  misc_feature: 114
agctatagatagaagccctctgggcttctatagagattctagagctttctatagaggttagggtcagggtcagggtcatacattgggtcagggtca

SEQ ID NO: 35834 - DNA, 96 bp, Fusarium azukicola
  misc_feature: 114
tctaataataagaacgtataaagctataacccttataagattataactttaaaggaggctgttaatattctatattatattactaactatagtgat

SEQ ID NO: 35835 - DNA, 96 bp, Fusarium azukicola
  misc_feature: 114
tcctttctataaagctattagcttatttattataaggcggacttatattatattttattccattctttatataatagggtcttagcttatatatat

SEQ ID NO: 35836 - DNA, 96 bp, Fusarium azukicola
  misc_feature: 114
tccttcttagaattaggtttagattcctttttcttagaagtcttatataccttattagcttcctgagttttctagttttttagagccttattaggg

SEQ ID NO: 35837 - DNA, 96 bp, Fusarium azukicola
  misc_feature: 114
aaaagagaagttataaagagttattaagaaagggagggtgggggaaaaaagaggaaggatagggagttagtttagggtcggtagagaggaggggga

SEQ ID NO: 35838 - DNA, 96 bp, Fusarium azukicola
  misc_feature: 114
tcatatataaaattagttatattatctttattagtagaaaaatcaggtttatttaccttatttaaatatcctagttatttctttatatagggaagg

SEQ ID NO: 35839 - DNA, 96 bp, Fusarium azukicola
  misc_feature: 114
tcaaggtattaactatgaagaaacctatgcttgtactataagacctgagactctaagacttttctttataatttctataaggaataactactattt

SEQ ID NO: 35840 - DNA, 96 bp, Fusarium azukicola
  misc_feature: 114
tattttatctaggaacttatattccttattactaggttttttatttatattatttttagttaattttcctagtttatagttttcgcagtttttgac

SEQ ID NO: 35841 - DNA, 96 bp, Fusarium azukicola
  misc_feature: 114
tattcctcactcttctcatgtcctccaacctcttgatctcgccatttttggccctctgaagcaggcataccgtcggcttctttctgacctcgctag

SEQ ID NO: 35842 - DNA, 96 bp, Fusarium azukicola
  misc_feature: 114
atctaggaacttatattccttattattaggttttttatttatattatttttagttaattttcctagtttatagtttttatagtttttaacttaata

SEQ ID NO: 35843 - DNA, 96 bp, Fusarium azukicola
  misc_feature: 114
ctaataaaataagaataaaattagttttcttagataatataaaggaatatatatataagctaagaccctattatataaagaatagaataaaatata

SEQ ID NO: 35844 - DNA, 96 bp, Fusarium azukicola
  misc_feature: 114
cctttctataaagctattagcttatttattataaggcggacttatattatattttattccattctttatataatagggtcttagcttatatatata

SEQ ID NO: 35845 - DNA, 96 bp, Fusarium azukicola
  misc_feature: 114
tatactatctcatactgtacttaactagccgtcccttcgcgataccctcttcctagccataataaccctccccgtcgccctagatattaacggtta

SEQ ID NO: 35846 - DNA, 96 bp, Fusarium azukicola
  misc_feature: 114
tataactataaatagagagaataagagtatatctttttcataagcaaaatatataaataaaataataaggaaatataataaataagaaataggaac

SEQ ID NO: 35847 - DNA, 96 bp, Fusarium azukicola
  misc_feature: 114
taggtcagggttagggtcaggctttgggtcagctatagatagaagcccttcgggcttctatagagattctaggagattctagaggttagggtcagg

SEQ ID NO: 35848 - DNA, 96 bp, Fusarium azukicola
  misc_feature: 114
acagcatactatataactaaaaatcgctaaaacctaagtttctaaaaactgctataaaatagctagaaacttaaaaaaagtaatcttatagatcta

SEQ ID NO: 35849 - DNA, 96 bp, Fusarium azukicola
  misc_feature: 114
tagacttctctgctcaattccgacaagagattcagaccgaccgagagagaggcaagatagaagagaatactccttccgcagaagagagcctcagat

SEQ ID NO: 35850 - DNA, 96 bp, Fusarium azukicola
  misc_feature: 114
tactcttcttccccggacagtagaggttatctcccctccggatagtagcggtttcctttacctctcttagtacttattaatccctaatcgccttac

SEQ ID NO: 35851 - DNA, 96 bp, Fusarium azukicola
  misc_feature: 114
tacatggatcgggttagactatatgggtagggtatagataagagggttattagctagggtaaggcgattagggattaataagtactaagagaggta

SEQ ID NO: 35852 - DNA, 96 bp, Fusarium azukicola
  misc_feature: 114
aacttagagttagactaattaagctataaaaaacctattatgattttttaaaactttttaaaaaatcccttataaggtagtttagaaaaagaatta

SEQ ID NO: 35853 - DNA, 96 bp, Fusarium azukicola
  misc_feature: 114
ctactacccctaaccctaatttcaaccaattaaccctaacccttaacgtaactactacccctaaccctaatttcaaccaattaaccctaaccctta

SEQ ID NO: 35854 - DNA, 96 bp, Fusarium azukicola
  misc_feature: 114
taaccctagttccggttccggttccggttccggttccggtttctagttagaccgtgcctgtacgctccttttctaccctttcaagctctaacacag

SEQ ID NO: 35855 - DNA, 96 bp, Fusarium azukicola
  misc_feature: 114
taaaatgcagttattgcaaactgccaggtcataaagacccagattgctattttttgcaccctaataaggctccaaaaaactggaaaattcaggaag

SEQ ID NO: 35856 - DNA, 96 bp, Fusarium azukicola
  misc_feature: 114
gtagtaatgaagttaatttaaaaagaaaagagaagaaaggatttaaaaataagagaaagagttaaataaaaaagttaggatttaaggagaaataag

SEQ ID NO: 35857 - DNA, 96 bp, Fusarium azukicola
  misc_feature: 114
cgggttagactatatgggtagggtatagataagagggttattagctagggtaaggcgattagggattaataagtactaagagaggtaaaggaaacc

SEQ ID NO: 35858 - DNA, 96 bp, Fusarium azukicola
  misc_feature: 114
atagctgacccaaagcctgaccctaaccctgacctaatgtatgaccctgaccctgaccctaacctctagaatctcctagaatctctatagaagccc

SEQ ID NO: 35859 - DNA, 96 bp, Fusarium azukicola
  misc_feature: 114
ggatatatcactatagttagtaatataatatagaatattaacagcctcctttaaagttataatcttataagggttatagctttatacgttcttatt

SEQ ID NO: 35860 - DNA, 96 bp, Fusarium azukicola
  misc_feature: 114
gaataaaatcagttttctcagataatgcaaaggaatatatatataagctaaggccctattgtataaagaatggaataaaatataatacaagtccgc

SEQ ID NO: 35861 - DNA, 96 bp, Fusarium azukicola
  misc_feature: 114
gagaataagagtatatctttttcataagtaaaatatataaataaaataataaggaaatataataaataagaaataggaacttctaaagtacctatt

SEQ ID NO: 35862 - DNA, 96 bp, Fusarium azukicola
  misc_feature: 114
ctttttacctcttatttctccttaaatcctaacttttttatttaactctttctcttatttttaaatcctttcttctcttttctttttaaattaact

SEQ ID NO: 35863 - DNA, 96 bp, Fusarium azukicola
  misc_feature: 114
attagacttctctgctcaattccgacaagagattcagaccgaccgagagagaggcaagatagaagagaatactccttccgcagaagagagcctcag

SEQ ID NO: 35864 - DNA, 96 bp, Fusarium azukicola
  misc_feature: 114
agattactatatccttagatagaatatttactattctttctatatcttctttataagggcccgaaaatataaggttatctatataaatagctatag

SEQ ID NO: 35865 - DNA, 96 bp, Fusarium azukicola
  misc_feature: 114
ctaatagtaatataaataagctataaatctatttaaaattaagaaaagccttatatagcctaaaataaagccctagattatagtataaccttctct

SEQ ID NO: 35866 - DNA, 96 bp, Fusarium azukicola
  misc_feature: 114
atgacggtagaggaaggaaggcaagcaattgatcaaatggatatagatgcgcaggtattagctgaatcgtcgaggagtggtggtcaaggaagggcg

SEQ ID NO: 35867 - DNA, 96 bp, Fusarium azukicola
  misc_feature: 114
aagagagaagagttagaaagtaaagctaacctctagggtaaggaaggggttagcctctaaggtctagggaagaagtataatggctaaccactagtg

SEQ ID NO: 35868 - DNA, 96 bp, Fusarium azukicola
  misc_feature: 114
aaacaaagggaagattgagaatgggacctaccaaccattagacttctctgctcaattccgacaagagattcagaccgaccgagagagaggcaagat

SEQ ID NO: 35869 - DNA, 96 bp, Fusarium azukicola
  misc_feature: 114
atctaagagagaagagttagaaagtaaagctaacctctagggtaaggaaggggttagcctctaaggtctagggaagaagtataatggctaaccact

SEQ ID NO: 35870 - DNA, 96 bp, Fusarium azukicola
  misc_feature: 114
agagaataagagtatatctttttcataagtaaaatatataaataaaataataaggaaatataataaataagaaataggaacttctaaagtacctat

SEQ ID NO: 35871 - DNA, 96 bp, Fusarium azukicola
  misc_feature: 114
ataatttctttataaacgaaattttttaaaaatctataaaaattatttatagtttatttaagggtaaaatagctaagaattattctttttaggtct

SEQ ID NO: 35872 - DNA, 96 bp, Fusarium azukicola
  misc_feature: 114
accctacccatatagtctaacccgatccatgtaagaaaacgctatttatactatctcatactgtacttaactagccgtcccttcgcgataccctct

SEQ ID NO: 35873 - DNA, 96 bp, Fusarium azukicola
  misc_feature: 114
actgccttaaaatgcagttattgcaaactgccaggtcataaagacccagattgctattttttgcaccctaataaggctccaaaaaactggaaaatt

SEQ ID NO: 35874 - DNA, 96 bp, Fusarium azukicola
  misc_feature: 114
aagactcttttatcagtggcaatggtagagaagacaactagacaactatcataatggattatactccctacctgttccatcatcatcatcatgggt

SEQ ID NO: 35875 - DNA, 96 bp, Fusarium azukicola
  misc_feature: 113
ttccttactttaaagaaagcccttataataataaaaaggcaatattatataataataataataataaatagaaattcactatcgaaattcctaaaa

SEQ ID NO: 35876 - DNA, 96 bp, Fusarium azukicola
  misc_feature: 113
acactaaatcttaaaattcttaagcttaataaaagccgcaataaaatagctataggcttaaaaaaagtattttaataaacttaactcttaaataaa

SEQ ID NO: 35877 - DNA, 96 bp, Fusarium azukicola
  misc_feature: 113
taagttaaaaactataaaaactataaactaggaaaattaactaaaaataatataaataaaaaacctaataataaggaatataagttcctagataaa

SEQ ID NO: 35878 - DNA, 96 bp, Fusarium azukicola
  misc_feature: 113
tttatatttaaaataggaagatctaagttatctcttagtctatagttattcttattagaaataaccttagctgttattatatataggttatttttt

SEQ ID NO: 35879 - DNA, 96 bp, Fusarium azukicola
  misc_feature: 113
tacccttaaataaactataaataatttttatagatttttaaaaaatttcgtttataaagaaattataatttacacagtgtaaatagactttttaaa

SEQ ID NO: 35880 - DNA, 96 bp, Fusarium azukicola
  misc_feature: 113
tattattctaattggttaaaaaggttcctacagacctttatgactgccgtcatctatgcatcaaagtataataactgccgattggctaaaaaagaa

SEQ ID NO: 35881 - DNA, 96 bp, Fusarium azukicola
  misc_feature: 113
ttcttcttcgtcatctcctaaagccgaggaagacctaatttccctttctgagaccccagatgaaatggattttgatataagtaatgatttagaggt

SEQ ID NO: 35882 - DNA, 96 bp, Fusarium azukicola
  misc_feature: 113
ttctctataaagcaatttttttaaaaatctaaaaaagatatttttaggttctttatatagttagatttataaaaatactttttttatatttctagc

SEQ ID NO: 35883 - DNA, 96 bp, Fusarium azukicola
  misc_feature: 113
atctatagctgacccaaagcctgaccctaaccctgacctaatgtatgaccctgaccctgaccctaacctctagaatctcctagaatctctatagaa

SEQ ID NO: 35884 - DNA, 96 bp, Fusarium azukicola
  misc_feature: 113
ttctataaatttaataggtactttagaagttcctatttcttatttattatatttccttattattttatttatatattttgcttatgaaaaagatat

SEQ ID NO: 35885 - DNA, 96 bp, Fusarium azukicola
  misc_feature: 113
ttccttcttagaattaggtttagattcctttttcttagaagtcttatataccttattagcttcctgagttttctagttttttagagccttattagg

SEQ ID NO: 35886 - DNA, 96 bp, Fusarium azukicola
  misc_feature: 113
ttccttaaggattataaaaagaaatatcctaatagtaatataaataagctataaatctatttaaaattaagaaaagccttatatagcctaaaataa

SEQ ID NO: 35887 - DNA, 96 bp, Fusarium azukicola
  misc_feature: 113
ttaaaatgcagttattgcaaactgccaggtcataaagacccagattgctattttttgcaccctaataaggctccaaaaaactggaaaattcaggaa

SEQ ID NO: 35888 - DNA, 96 bp, Fusarium azukicola
  misc_feature: 113
cagttattgcaaactgccaggtcataaagacccagattgctattttttgcaccctaataaggctccaaaaaactggaaaattcaggaagccaataa

SEQ ID NO: 35889 - DNA, 96 bp, Fusarium azukicola
  misc_feature: 113
ttatcagtggcaatggtagagaagacaactagacaactatcataatggattatactccctacctgttccatcatcatcatcatgggtcgtcgtgcg

SEQ ID NO: 35890 - DNA, 96 bp, Fusarium azukicola
  misc_feature: 113
ttaggaatttcgatagtgaatttctatttattattattattattatataatattgccttttcattattataagggctttctttaaagtaaggaatc

SEQ ID NO: 35891 - DNA, 96 bp, Fusarium azukicola
  misc_feature: 113
ttagacttctctgctcaattccgacaagagattcagaccgaccgagagagaggcaagatagaagagaatactccttccgcagaagagagcctcaga

SEQ ID NO: 35892 - DNA, 96 bp, Fusarium azukicola
  misc_feature: 113
ttactttcttacttttctttcttttactcttccccttctccttttatcttcttctctttttctttactcttcccctcctttatttctctttttctt

SEQ ID NO: 35893 - DNA, 96 bp, Fusarium azukicola
  misc_feature: 113
acatggatcgggttagactatatgggtagggtatagataagagggttattagctagggtaaggcgattagggattaataagtactaagagaggtaa

SEQ ID NO: 35894 - DNA, 96 bp, Fusarium azukicola
  misc_feature: 113
gtcgataagctgagagggaaaagcaaaatgtgcaggcatatgaaactctatatctgtgaaagtaaacagtgatataatacgtggtcaaaacaaaca

SEQ ID NO: 35895 - DNA, 96 bp, Fusarium azukicola
  misc_feature: 113
aaagaataattcttagctattttacccttaaataaactataaataatttttatagatttttaaaaaatttcgtttataaagaaattataatttaca

SEQ ID NO: 35896 - DNA, 96 bp, Fusarium azukicola
  misc_feature: 113
aatgagatatatttttctaagacttctaagccttagaaaaagaagaaaactgccttaaaatgcagttattgcaaactgctaggtcataaagaccca

SEQ ID NO: 35897 - DNA, 96 bp, Fusarium azukicola
  misc_feature: 113
ctattactaaagccttataaatggcttagttatagcaaaaaccggttttaatggatagaatgcaacgctgaagggtttaggaaccttcctagccca

SEQ ID NO: 35898 - DNA, 96 bp, Fusarium azukicola
  misc_feature: 113
tggagccttattagggtgcaaaaaatagcaatctgggtctttatgacctagcagtttgcaataactgcattttaaggcagttttcttctttttcca

SEQ ID NO: 35899 - DNA, 96 bp, Fusarium azukicola
  misc_feature: 113
tgatgatggaacaggtagggagtataatccattatgatagttgtctagttgtcttctctaccattgccactgataaaagagtcttgctagcatctt

SEQ ID NO: 35900 - DNA, 96 bp, Fusarium azukicola
  misc_feature: 113
atatgcttgtggcctcctcctctgcctcctcctgggcctcccgctcatcgcttgacccgtcctcctcctgctgcctgtccatcttggcctgcttca

SEQ ID NO: 35901 - DNA, 96 bp, Fusarium azukicola
  misc_feature: 113
agcatctttggaaggctttgaagtccaaattgcgaagattacaccctgaatttatcaagctaggaagaagccaagctgatacgaagaaaatgaaga

SEQ ID NO: 35902 - DNA, 96 bp, Fusarium azukicola
  misc_feature: 113
aaggaatttagaaaagaaatagaaaataatcctaataaaataagaataaaatcagttttcttagataatacaaaggaatatatatataagctaaga

SEQ ID NO: 35903 - DNA, 96 bp, Fusarium azukicola
  misc_feature: 113
actattctttctatatcttctttataagggcccgaaaatataaggttatctatataaatagctatagtaatctttaagttcttatttataaagaga

SEQ ID NO: 35904 - DNA, 96 bp, Fusarium azukicola
  misc_feature: 113
tcgaagttattaattaaggaccttaatgcagagctagagccgattatgaaggagcaatgggagctgaataacggtatgagaaggctaggtctttgt

SEQ ID NO: 35905 - DNA, 96 bp, Fusarium azukicola
  misc_feature: 113
tattatctaagaaaactgattttattcttattttattaggattattttctatttcttttctaaattccttaaattttataatagcttctaacttat

SEQ ID NO: 35906 - DNA, 96 bp, Fusarium azukicola
  misc_feature: 113
atatagatatatatataactattcctattggatttaaagaccttataattaaggatttccttaaggattataaaaagaaatatcctaatagtaata

SEQ ID NO: 35907 - DNA, 96 bp, Fusarium azukicola
  misc_feature: 113
tatctaagaaaactgattttattcttattttattaggattattttctatttcttttctaaattccttaaattttataatagcttctaacttattcc

SEQ ID NO: 35908 - DNA, 96 bp, Fusarium azukicola
  misc_feature: 113
tatatttttaactccccttcctctttctccttccttcttttccctcctctttctcttaatcttcttctctttctttcccttttatttttttctttt

SEQ ID NO: 35909 - DNA, 96 bp, Fusarium azukicola
  misc_feature: 113
tatattgttaatgttctatattatattaccaactatagtgatatatccctataaaccacatattatattatagaatttttactctatttttaggta

SEQ ID NO: 35910 - DNA, 96 bp, Fusarium azukicola
  misc_feature: 113
tatatcactatagttagtaatataatatagaatattaacagcctcctttaaagttataatcttataagggttatagctttatacgttcttattatt

SEQ ID NO: 35911 - DNA, 96 bp, Fusarium azukicola
  misc_feature: 113
taattttttcctttatatttaaaataggaagatctaagttatctcttagtctatagttattcttattagaaataaccttagctattattatatata

SEQ ID NO: 35912 - DNA, 96 bp, Fusarium azukicola
  misc_feature: 113
tatacctaaaaatagagtaaaaattctataatataatatgtggtttatagggatatatcactatagttggtaatataatatagaatattaatagcc

SEQ ID NO: 35913 - DNA, 96 bp, Fusarium azukicola
  misc_feature: 113
tataatatagaatattaacagcctcctttaaagttataatcttataagggttatagctttatacgttcttattattagaggaaaaaattaaacctc

SEQ ID NO: 35914 - DNA, 96 bp, Fusarium azukicola
  misc_feature: 113
tataaggcggacttatattatattttattccattctttatataatagggtcttagcttatatatatattcctttatattatctaagaaaactgatt

SEQ ID NO: 35915 - DNA, 96 bp, Fusarium azukicola
  misc_feature: 113
agtaacgtacatgataagcgagtggatcaaccaagcgagtggatcaagaatctcaaccctataagatagatatcacaataaaaacacaacaaacta

SEQ ID NO: 35916 - DNA, 96 bp, Fusarium azukicola
  misc_feature: 113
catcttttgagaatatagaaatatatcttaataagataaaagaggttaaaaatgagctagaagctagagaaatcactattcctgaaaaagtgacta

SEQ ID NO: 35917 - DNA, 96 bp, Fusarium azukicola
  misc_feature: 113
tactatctcatactgtacttaactagccgtcccttcgcgataccctcttcctagccataataaccctccccgtcgccctagatattaacggttagc

SEQ ID NO: 35918 - DNA, 96 bp, Fusarium azukicola
  misc_feature: 113
ctcagagaagtccttgacgaccactttgaagtatttatccgggtcgaagaagggcaaaacaaagggaagattgagaatgggacctaccaaccatta

SEQ ID NO: 35919 - DNA, 96 bp, Fusarium azukicola
  misc_feature: 113
taatataggtcctcactagtatatttaaagagaggatcttttatttttatatatttaattagacttcttaagttaagatgacttagtcttttatgc

SEQ ID NO: 35920 - DNA, 96 bp, Fusarium azukicola
  misc_feature: 113
cttatctcttatttcttatttctttatctcttatctcttatctcttatctcttatctcttatctcttatctcttatctcttatctcttatctctta

SEQ ID NO: 35921 - DNA, 96 bp, Fusarium azukicola
  misc_feature: 113
taactataaatagagagaataagagtatatctttttcataagtaaaatatataaataaaataataaggaaatataataaataagaaataggaactt

SEQ ID NO: 35922 - DNA, 96 bp, Fusarium azukicola
  misc_feature: 113
taaaatgcagttattgcaaactgctaggtcataaagacccagattgctattttttgcaccctaataaggctccaaaaaactggaaaactcaggaag

SEQ ID NO: 35923 - DNA, 96 bp, Fusarium azukicola
  misc_feature: 113
aagcagaatatatagccctaagggaggctattaaagagtcaatttctcttaattatatatataaatatataaataaaaatctctctttaagtttta

SEQ ID NO: 35924 - DNA, 96 bp, Fusarium azukicola
  misc_feature: 113
aagaataattcttagctattttacccttaaataaactataaataatttttatagatttttaaaaaatttcgtttataaagaaattataatttacac

SEQ ID NO: 35925 - DNA, 96 bp, Fusarium azukicola
  misc_feature: 113
gtgattattacctaggttttaaataacctagataatagctattctagctatataactaatatctcataagctttaaggagtaatcctaaggcttat

SEQ ID NO: 35926 - DNA, 96 bp, Fusarium azukicola
  misc_feature: 113
cctcttatttctccttaaatcctaacttttttatttaactctttctcttatttttaaatcctttcttctcttttctttttaaattaacttcattac

SEQ ID NO: 35927 - DNA, 96 bp, Fusarium azukicola
  misc_feature: 113
aaaatcgttttttttaagtttctagctattttatagcgatttttagaaacttagggtttagctgtttttagttatacagtatgctgttgcacttac

SEQ ID NO: 35928 - DNA, 96 bp, Fusarium azukicola
  misc_feature: 113
gtaagaaaacgctatttatactatctcatactgtacttaactagccgtcccttcgcgataccctcttcctagccataataaccctccccgtcgccc

SEQ ID NO: 35929 - DNA, 96 bp, Fusarium azukicola
  misc_feature: 113
ggttgaaattagggttaggggtagtagtagagttaagggttagggttaattggttgaaattagggttaggggtagtagtagagttaaggggtaggg

SEQ ID NO: 35930 - DNA, 96 bp, Fusarium azukicola
  misc_feature: 113
gaagaattagctataaatagcttttcttatttcttttctctttcttccttcttagaattaagtttagattcctttttcttagaagtcttatatacc

SEQ ID NO: 35931 - DNA, 96 bp, Fusarium azukicola
  misc_feature: 113
actcttcttccccggacagtagaggttatctcccctccggatagtagcggtttcctttacctctcttagtacttattaatccctaatcgccttacc

SEQ ID NO: 35932 - DNA, 96 bp, Fusarium azukicola
  misc_feature: 113
ctcctctcccctctccctctctctcttttcactccttatcctctcctctcccctctccctctctctcttttcactccttatcctctcctctccccc

SEQ ID NO: 35933 - DNA, 96 bp, Fusarium azukicola
  misc_feature: 113
ggggagggttagaagggttaagaaaggagagaagtaaggaaggttaagaaaggagagaagtaaggaaggttaagaaaggagagaagtaaggaaggg

SEQ ID NO: 35934 - DNA, 96 bp, Fusarium azukicola
  misc_feature: 113
aataaaatcagttttctcagataatgcaaaggaatatatatataagctaaggccctattgtataaagaatggaataaaatataatacaagtccgcc

SEQ ID NO: 35935 - DNA, 96 bp, Fusarium azukicola
  misc_feature: 113
ggcaatggtagagaagacaactagacaactatcataatggattatactccctacctgttccatcatcatcatcatgggtcgtcgtgcgcttacagc

SEQ ID NO: 35936 - DNA, 96 bp, Fusarium azukicola
  misc_feature: 113
aaccctagttccggttccggttccggttccggttccggtttctagttagaccgtgcctgtacgctccttttctaccctttcaagctctaacacagc

SEQ ID NO: 35937 - DNA, 96 bp, Fusarium azukicola
  misc_feature: 113
actaggaaaattaactaaaaataatataaataaaaaacctagtaataaggaatataagttcctagataaaatagctattaatatatagggtccttc

SEQ ID NO: 35938 - DNA, 96 bp, Fusarium azukicola
  misc_feature: 113
agagatatagctaagagagagaggtaaagctaagaaagagagatatagctagaaaagagagaaataaaagataagagataagagataagagataag

SEQ ID NO: 35939 - DNA, 96 bp, Fusarium azukicola
  misc_feature: 113
ctataagattactttttttaagtttctagctattttatagcagtttttagaaacttaggttttagcgatttttagttatatagtatgctgtctcgt

SEQ ID NO: 35940 - DNA, 96 bp, Fusarium azukicola
  misc_feature: 113
ctagtgaggacctatattaagttaaaaactgcgaaaactgcaaactaggaaaattaactaaaaataatataaataaaaaacctagtaataaggaat

SEQ ID NO: 35941 - DNA, 96 bp, Fusarium azukicola
  misc_feature: 113
aggcttttagatatctagtagccctatctaggaaggtaataaagtatatatatttattataggtagggattctagaaggaccctatatattagtag

SEQ ID NO: 35942 - DNA, 96 bp, Fusarium azukicola
  misc_feature: 113
cggatagtagcggtttcctttacctctcttagtacttattaatccctaatcgccttaccctagctaataaccctcttatctataccctacccatat

SEQ ID NO: 35943 - DNA, 96 bp, Fusarium azukicola
  misc_feature: 113
caattaaccctaacccttaactctactactacccctaaccctaatttcaaccaattaaccctaacccttaacgtaactactacccctaaccctaat

SEQ ID NO: 35944 - DNA, 96 bp, Fusarium azukicola
  misc_feature: 113
aaaaggttttattttttatagcttaaagctgatatatataaattcttaaaaaattatttttatatactagatttataagcaaatacagaaaaaaat

SEQ ID NO: 35945 - DNA, 96 bp, Fusarium azukicola
  misc_feature: 113
atttaaggaatttagaaaagaaatagaaaataatcctaataaaataagaataaaatcagttttcttagataatataaaggaatatatatataagct

SEQ ID NO: 35946 - DNA, 96 bp, Fusarium azukicola
  misc_feature: 113
atggagatggctatatatcaacaagacgaacgcgaatacaacaagcaagcagatgggattggcaatgtgctcaattggatgattgagaagatcaat

SEQ ID NO: 35947 - DNA, 96 bp, Fusarium azukicola
  misc_feature: 113
aaagactttttaggaatgaatataactataaatagagagaataagagtatatctttttcataagcaaaatatataaataaaataataaggaaatat

SEQ ID NO: 35948 - DNA, 96 bp, Fusarium azukicola
  misc_feature: 113
atataggatttcacttaattaacctaatctaaaattttaagttatttttaccttaatttgaatttttaaagaattcttttctatttagtgtaaact

SEQ ID NO: 35949 - DNA, 96 bp, Fusarium azukicola
  misc_feature: 113
agggtaaaatagctaagaattattctttttaggtctataactattttattttagcttttattaagctttaaagttttatgttttagtgcacagtat

SEQ ID NO: 35950 - DNA, 96 bp, Fusarium azukicola
  misc_feature: 113
ataccctacccatatagtctaacccgatccatgtaagaaaacgctatttatactatctcatactgtacttaactagccgtcccttcgcgataccct

SEQ ID NO: 35951 - DNA, 96 bp, Fusarium azukicola
  misc_feature: 112
tccttactttaaagaaagcccttataataatgaaaaggcaatattatataataataataataataaatagaaattcactatcgaaattcctaaaaa

SEQ ID NO: 35952 - DNA, 96 bp, Fusarium azukicola
  misc_feature: 112
tttctactaataaagataatataactaattttatatataatataggtgctactaggcatattatatatagaaaagaatttctagttaattttagaa

SEQ ID NO: 35953 - DNA, 96 bp, Fusarium azukicola
  misc_feature: 112
ttcttatttcttttctctttcttccttcttagaattaggtttagattcctttttcttagaagtcttatataccttattagcttcctaagttttcta

SEQ ID NO: 35954 - DNA, 96 bp, Fusarium azukicola
  misc_feature: 112
aaagagaagttataaagagttattaagaaagggagggtgggggaaaaaagaggaaggatagggagttagtttagggtcggtagagaggagggggaa

SEQ ID NO: 35955 - DNA, 96 bp, Fusarium azukicola
  misc_feature: 112
ttattattttatttatatattttgcttatgaaaaagatatactcttattctctctatttatagttatattcattcctaaaaagtctttaacttctc

SEQ ID NO: 35956 - DNA, 96 bp, Fusarium azukicola
  misc_feature: 112
aaagagagatatagctagaaaagagagaaataagagataagagataagagataagagataagagataagagataagagataagagataagagataa

SEQ ID NO: 35957 - DNA, 96 bp, Fusarium azukicola
  misc_feature: 112
ttaagttaaaaactataaaaactataaactaggaaaattaactaaaaataatataaataaaaaacctaataataaggaatataagttcctagataa

SEQ ID NO: 35958 - DNA, 96 bp, Fusarium azukicola
  misc_feature: 112
ttactattctttctatatcttctttataagggcccgaaaatataaggttatctacgtgaatagctatagcaatctttaagttcttatttataaaga

SEQ ID NO: 35959 - DNA, 96 bp, Fusarium azukicola
  misc_feature: 112
aaaaagaaaagagaagaaaggatttaaaaataagagaaagagttaaataaaaaagttaggatttaaggagaaataagaggtaaaaagaaagggtaa

SEQ ID NO: 35960 - DNA, 96 bp, Fusarium azukicola
  misc_feature: 112
tgaggcggacttgtattatattttattccattctttatacaatagggccttagcttatatatatattcctttgcattatctgagaaaactgatttt

SEQ ID NO: 35961 - DNA, 96 bp, Fusarium azukicola
  misc_feature: 112
tcttcttttaagtataaacccttaggaagagacctccgggctcataacctgtcagtgtgactaggttataaatagttgatttcctagataactagg

SEQ ID NO: 35962 - DNA, 96 bp, Fusarium azukicola
  misc_feature: 112
tcttatttctccttaaatcctaacttttttatttaactctttctcttatttttaaatcctttcttctcttttctttttaaattaacttcattacta

SEQ ID NO: 35963 - DNA, 96 bp, Fusarium azukicola
  misc_feature: 112
tatctatagctgacccaaagcctgaccctaaccctgacctaatgtatgaccctgaccctgaccctaacctctagaatctcctagaatctctataga

SEQ ID NO: 35964 - DNA, 96 bp, Fusarium azukicola
  misc_feature: 112
tctaagagagaagagttagaaagtaaagctaacctctagggtaaggaaggggttagcctctaaggtctagggaagaagtataatggctaaccacta

SEQ ID NO: 35965 - DNA, 96 bp, Fusarium azukicola
  misc_feature: 112
tatattattagttatattattttattgagaaattaaggaattatatacctctaaattattacttatattaaaatctattttatctagggtcttaga

SEQ ID NO: 35966 - DNA, 96 bp, Fusarium azukicola
  misc_feature: 112
aaaggagagaagtaaggaaggttaagaaaggagagaagtaaggaaggttaagaaaggagagaagtaaggaaggttaagaaaggagagaaggaagga

SEQ ID NO: 35967 - DNA, 96 bp, Fusarium azukicola
  misc_feature: 112
tatttccttattattttatttatatattttgcttatgaaaaagatatactcttattctctctatttatagttatattcattcctaaaaagtcttta

SEQ ID NO: 35968 - DNA, 96 bp, Fusarium azukicola
  misc_feature: 112
tatttacctaacctatagctactataggtagctagatattaagggtattattctaattggttaaaaaggttcctacagacctttatgactgccggc

SEQ ID NO: 35969 - DNA, 96 bp, Fusarium azukicola
  misc_feature: 112
ataaaataagaataaaatcagttttcttagataatacaaaggaatatatatataagctaagaccctattatataaagaatggaataaaatataata

SEQ ID NO: 35970 - DNA, 96 bp, Fusarium azukicola
  misc_feature: 112
agttataaatagttaatttcctagataactaggaagaaaagtaataaagagataatatctagcttctaagagagacttatagaagatagatagata

SEQ ID NO: 35971 - DNA, 96 bp, Fusarium azukicola
  misc_feature: 112
tatcctaatagtagtataaatgagctacaaatctgtttaaaattaagaaaagccttatatggcctaaaacaaagccctatattgtggtataacctt

SEQ ID NO: 35972 - DNA, 96 bp, Fusarium azukicola
  misc_feature: 112
tatataaagctataacccttataagattataactttaaaggaggctattaatattctatattatattactaactatagtaatatatccctataaac

SEQ ID NO: 35973 - DNA, 96 bp, Fusarium azukicola
  misc_feature: 112
tatagtgcgaataattctttttctaaactaccttataagggattttttaaaaagttttaaaaaatcataataggttttttatagcttaattagtct

SEQ ID NO: 35974 - DNA, 96 bp, Fusarium azukicola
  misc_feature: 112
tactgttaatgttctatattatattaccaactatagtgatatatccctataaaccatatattatattatagaatttttactctatttttaggtata

SEQ ID NO: 35975 - DNA, 96 bp, Fusarium azukicola
  misc_feature: 112
taatatagaatattaacagcctcctttaaagttataatcttataagggttatagctttatacgttcttattattagaggaaaaaattaaacctcta

SEQ ID NO: 35976 - DNA, 96 bp, Fusarium azukicola
  misc_feature: 112
acccctaaccctaatttcaaccaattaaccctaacccttaacgtaactactacccctaaccctaatttcaaccaattaaccctaacccttaacgta

SEQ ID NO: 35977 - DNA, 96 bp, Fusarium azukicola
  misc_feature: 112
ataactgttaatgttctatattatattaccaactatagtgatatatccctataaaccacatattatattatagaatttttactctatttttaggta

SEQ ID NO: 35978 - DNA, 96 bp, Fusarium azukicola
  misc_feature: 112
taaatagttaaaatcgttttttttaagtttctagctattttatagcgatttttagaaacttagggtttagctgtttttagttatatagtatgctgt

SEQ ID NO: 35979 - DNA, 96 bp, Fusarium azukicola
  misc_feature: 112
taaagctattagcttatttattatgaggcggacttatattatattttattccattctttatataatagggtcttagcttatatatatattcctttg

SEQ ID NO: 35980 - DNA, 96 bp, Fusarium azukicola
  misc_feature: 112
taaaataagaataaaatcagttttcttagataatacaaaggaatatatatataagctaagaccctattatataaagaatggaataaaatataatat

SEQ ID NO: 35981 - DNA, 96 bp, Fusarium azukicola
  misc_feature: 112
cgtcgataagctgagagggaaaagcaaaatgtgcaggcatatgaaactctatatctgtgaaagtaaacagtgatataatacgtggtcaaaacaaac

SEQ ID NO: 35982 - DNA, 96 bp, Fusarium azukicola
  misc_feature: 112
accctaacccttaacgtaactactacccctaaccctaatttcaaccaattaaccctaacccttaacgtaactactacccctaaccataatttcaac

SEQ ID NO: 35983 - DNA, 96 bp, Fusarium azukicola
  misc_feature: 112
aactagtctttttaactagcataaaagactaagttatcttaacttaagaagtctaattaaatatataaaaataaaagatcctctctttaaatatac

SEQ ID NO: 35984 - DNA, 96 bp, Fusarium azukicola
  misc_feature: 112
ggaatttagaaaagaaatagaaaataatcctaataaaataagaataaaatcagttttcttagataatacaaaggaatatatatataagctaagacc

SEQ ID NO: 35985 - DNA, 96 bp, Fusarium azukicola
  misc_feature: 112
gatgatggaacaggtagggagtataatccattatgatagttgtctagttgtcttctctaccattgccactgataaaagagtcttgctagcatcttt

SEQ ID NO: 35986 - DNA, 96 bp, Fusarium azukicola
  misc_feature: 112
cctaatagtaatataaataagctataaatctatttaaaattaagaaaagccttatatagcctaaaataaagccctagattatagtataaccttctc

SEQ ID NO: 35987 - DNA, 96 bp, Fusarium azukicola
  misc_feature: 112
cctcactcttctcatgtcctccaacctcttgatctcgccatttttggccctctgaagcaggcataccgtcggcttctttctgacctcgctagagtc

SEQ ID NO: 35988 - DNA, 96 bp, Fusarium azukicola
  misc_feature: 112
gaagtccttcttttaaataagcaaggaaaaataatatcataaggaaaagagaaaaataacctatatataataacagctaaggttatttctaataag

SEQ ID NO: 35989 - DNA, 96 bp, Fusarium azukicola
  misc_feature: 112
ccttaaggattataaaaagaaatatcctaatagtaatataaataagctataaatctatttaaaattaagaaaagccttatatagcctaaaataaag

SEQ ID NO: 35990 - DNA, 96 bp, Fusarium azukicola
  misc_feature: 112
cttgtttgccttttcctctgctgtaagcgcacgacgacccatgatgatgatgatggaacaggtagggagtataatccattatgatagttgtctagt

SEQ ID NO: 35991 - DNA, 96 bp, Fusarium azukicola
  misc_feature: 112
caatggtagagaagacaactagacaactatcataatggattatactccctacctgttccatcatcatcatcatgggtcgtcgtgcgcttacagcag

SEQ ID NO: 35992 - DNA, 96 bp, Fusarium azukicola
  misc_feature: 112
aaggaagctgtctatacccatcatatatatatatatgatatggtatggatatagatgatgttattatttattattataatcgtaataacgaaagag

SEQ ID NO: 35993 - DNA, 96 bp, Fusarium azukicola
  misc_feature: 112
agaaaacgctatttatactatctcatactgtacttaactagccgtcccttcgcgataccctcttcctagccataataaccctccccgtcgccctag

SEQ ID NO: 35994 - DNA, 96 bp, Fusarium azukicola
  misc_feature: 112
cctttactataactacttaaccctaacccttaacttaaccacttaaccctaacctttactataactacttaaccctaacccttaacttaaccactt

SEQ ID NO: 35995 - DNA, 96 bp, Fusarium azukicola
  misc_feature: 112
cctaataaaataagaataaaattagttttcttagataatataaaggaatatatatataagctaagaccctattatataaagaatagaataaaatat

SEQ ID NO: 35996 - DNA, 96 bp, Fusarium azukicola
  misc_feature: 112
atttttgcctccctttatctcttatctcttatttcttatttctttatctcttatctcttatctcttatctcttatctcttatctcttatctcttat

SEQ ID NO: 35997 - DNA, 96 bp, Fusarium azukicola
  misc_feature: 112
atcacagatggcaatgttgagtttgcaaaggtgccagcaatcaagaaggctcgtgaggcgatgcttaagatcacacagccgcgtaagaccgcaaat

SEQ ID NO: 35998 - DNA, 96 bp, Fusarium azukicola
  misc_feature: 112
attagaggaaaaattaaacctctattattattatatatatatcttagtaaaaacccctttattatagacctgatattataagggaaaatctaagat

SEQ ID NO: 35999 - DNA, 96 bp, Fusarium azukicola
  misc_feature: 112
atctcttatcttttatttctctcttttctagctatatctctctttcttagctttacctctctctcttagctatatctctttttcctagctatatct

SEQ ID NO: 36000 - DNA, 96 bp, Fusarium azukicola
  misc_feature: 112
atagccatctccatttgatatgacttccggtcttcagggtgcagttcgctgactgtattcgcggcgcgttcgcctctttcgagcctcgtggtccct

SEQ ID NO: 36001 - DNA, 96 bp, Fusarium azukicola
  misc_feature: 112
aaccctaatttcaaccaattaaccctaacccttaacgtaactactacccctaaccctaatttcaaccaattaaccctaacccttaacgtaactact

SEQ ID NO: 36002 - DNA, 96 bp, Fusarium azukicola
  misc_feature: 112
aattcaggaagccaataaggtgcataagacttctaagaaaaaggaatctaaacctaattctaagaaggaagaaagagaaaagaaacaagaaaagct

SEQ ID NO: 36003 - DNA, 96 bp, Fusarium azukicola
  misc_feature: 112
aaatagcttttcttgtttcttttctctttcttccttcttagaattaggtttagattcctttttcttagaagtcttatgcaccttattggctttctt

SEQ ID NO: 36004 - DNA, 96 bp, Fusarium azukicola
  misc_feature: 111
tttttctactaataaagataatataactaattttatatataatataggtgctactaggcatattatatatagaaaagaatttctagttaattttag

SEQ ID NO: 36005 - DNA, 96 bp, Fusarium azukicola
  misc_feature: 111
ttttatctaggaacttatattccttattactaggttttttatttatattatttttagttaattttcctagtttatagttttcgcagtttttgactt

SEQ ID NO: 36006 - DNA, 96 bp, Fusarium azukicola
  misc_feature: 111
tttctttatatagggaaggtttcttattaaaggtcctagtatattattagttatattattttattgagaaattaaggaattatatacctctaaatt

SEQ ID NO: 36007 - DNA, 96 bp, Fusarium azukicola
  misc_feature: 111
taataaaaaccctttataaaggaaataagttatattagggatagattctcttttattctcttaaatagtataggttgtaagcttttagtaaagaaa

SEQ ID NO: 36008 - DNA, 96 bp, Fusarium azukicola
  misc_feature: 111
tttatattatctaagaaaactgattttattcttattttattaggattattttctatttcttttctaaattccttgaattttataatagcttctgac

SEQ ID NO: 36009 - DNA, 96 bp, Fusarium azukicola
  misc_feature: 111
tttactataactacttaaccctaacccttaacttaaccacttaaccctaacctttactataactacttaaccctaacccttaacttaaccacttaa

SEQ ID NO: 36010 - DNA, 96 bp, Fusarium azukicola
  misc_feature: 111
ttggttgaaattagggttaggggtagtagttacgttaagggttagggttaattggttgaaattagggttaggggtagtagtagagttaagggttag

SEQ ID NO: 36011 - DNA, 96 bp, Fusarium azukicola
  misc_feature: 111
tatactaggacctttaataagaaaccttccctatataaagaaacaactaggatatttaaataaggtgctactaggcatattgtatgtagaaaagaa

SEQ ID NO: 36012 - DNA, 96 bp, Fusarium azukicola
  misc_feature: 111
ctagggtaaggcgattagggattaataagtactaagagaggtaaaggaaaccgctactatccggaggggagataacctctactgtccggggaagaa

SEQ ID NO: 36013 - DNA, 96 bp, Fusarium azukicola
  misc_feature: 111
ataatcctaataaaataagaataaaattagttttcttagataatataaaggaatatatatataagctaagaccctattatataaagaatagaataa

SEQ ID NO: 36014 - DNA, 96 bp, Fusarium azukicola
  misc_feature: 111
agaagtccttcttttaaataagcaaggaaaaataatatcataaggaaaagagaaaaataacctatatataataacagctaaggttatttctaataa

SEQ ID NO: 36015 - DNA, 96 bp, Fusarium azukicola
  misc_feature: 111
atacaggcgattttaaaagatctaagcatatagatatagcctttcatttctctagagatatagtagaaaaagggcaaataaagctttattatataa

SEQ ID NO: 36016 - DNA, 96 bp, Fusarium azukicola
  misc_feature: 111
ttataaatggcttagttatagcaaaaaccggttttaatggatagaatgcaacgctgaaggttttaggaaccttcctagccaatcggcaggtatttt

SEQ ID NO: 36017 - DNA, 96 bp, Fusarium azukicola
  misc_feature: 111
agatatagatatatatataactattcctattggatttaaagaccttataattaaggatttccttaaggattataaaaagaaatatcctaatagtaa

SEQ ID NO: 36018 - DNA, 96 bp, Fusarium azukicola
  misc_feature: 111
agaataattcttagctattttacccttaaataaactataaataatttttatagatttttaaaaaatttcgtttataaagaaattataatttacaca

SEQ ID NO: 36019 - DNA, 96 bp, Fusarium azukicola
  misc_feature: 111
tatctgtctctcggatagctgatacttatctggtgctccttctggaaaggcaacccagcacgaccttgtgtttgggtttctatgccatctttcaca

SEQ ID NO: 36020 - DNA, 96 bp, Fusarium azukicola
  misc_feature: 111
tattctcttgtcctcacgctttaggtatcgaaagctatcaagaactttggtgatcattccattaatgagagaaaataatgccaaaaaaaaaaacca

SEQ ID NO: 36021 - DNA, 96 bp, Fusarium azukicola
  misc_feature: 111
taacctttactataactacttaaccctaacccttaacttaaccacttaaccctaacctttactataactacttaaccctaacccttaacttaacca

SEQ ID NO: 36022 - DNA, 96 bp, Fusarium azukicola
  misc_feature: 111
gaaaaagaaaagaagaagaaaaagagaaataaaggaggggaagagtaaagaaaaagagaagaagataaaaggagaaggggaagagtaaaagaaaga

SEQ ID NO: 36023 - DNA, 96 bp, Fusarium azukicola
  misc_feature: 111
aaaacaaagggaagattgagaatgggacctaccaaccattagacttctctgctcaattccgacaagagattcagaccgaccgagagagaggcaaga

SEQ ID NO: 36024 - DNA, 96 bp, Fusarium azukicola
  misc_feature: 111
aatggtagagaagacaactagacaactatcataatggattatactccctacctgttccatcatcatcatcatgggtcgtcgtgcgcttacagcaga

SEQ ID NO: 36025 - DNA, 96 bp, Fusarium azukicola
  misc_feature: 111
ctttatattatctaagaaaactgattttattcttattttattaggattattttctatttcttttctaaattccttgaattttataatagcttctga

SEQ ID NO: 36026 - DNA, 96 bp, Fusarium azukicola
  misc_feature: 111
aaataaaagatcctctctttaaatatactaataaggacctatattaagttaaaaactataaaaactataaactaggaaaattaactaaaaataata

SEQ ID NO: 36027 - DNA, 96 bp, Fusarium azukicola
  misc_feature: 111
tattattctaattggttaaaaaggttcctacagacctttatgactgccgtcatctatgcatcaaagtataataactgccgattggctaaaaaaaag

SEQ ID NO: 36028 - DNA, 96 bp, Fusarium azukicola
  misc_feature: 111
cagttttcttagataatataaaggaatatatatataagctaagaccctattatataaagaatggaataaaatataatataagtccgccttataata

SEQ ID NO: 36029 - DNA, 96 bp, Fusarium azukicola
  misc_feature: 111
taattattttttaccttttccttttattttactttaaattttccctctttattaaattaaccctatttactttacccctttatttttctattaata

SEQ ID NO: 36030 - DNA, 96 bp, Fusarium azukicola
  misc_feature: 111
tatctcttatcttttatttctctcttttctagctatatctctctttcttagctttacctctctctcttagctatatctctttttcctagctatatc

SEQ ID NO: 36031 - DNA, 96 bp, Fusarium azukicola
  misc_feature: 111
attaagttaaaaactataaaaactataaactaggaaaattaactaaaaataatataaataaaaaacctaataataaggaatataagttcctagata

SEQ ID NO: 36032 - DNA, 96 bp, Fusarium azukicola
  misc_feature: 111
accctatactctcttctctcttttactttaccctatactctcttctctcttttactttaccctccacttttattctttattttactttaccctata

SEQ ID NO: 36033 - DNA, 96 bp, Fusarium azukicola
  misc_feature: 111
agtatatcttttttataagcaaaatatataaataaaataataaggaaatataataaataagaaataggaacttctaaagtacctattaaatttata

SEQ ID NO: 36034 - DNA, 96 bp, Fusarium azukicola
  misc_feature: 111
gaagctaataaggtacataagacttctaagaaaaaggaatctaaacctaattctaagaaggaagaaagagaaaagaaataagaaaagctatttata

SEQ ID NO: 36035 - DNA, 96 bp, Fusarium azukicola
  misc_feature: 111
tagggtaaggcgattagggattaataagtactaagagaggtaaaggaaaccgctactatccggaggggagataacctctactgtccggggaagaag

SEQ ID NO: 36036 - DNA, 96 bp, Fusarium azukicola
  misc_feature: 111
tagaggaaaaattaaacctctattattattatatatatatcttagtaaaaacccctttattatagacctgatattataagggaaaatctaagatta

SEQ ID NO: 36037 - DNA, 96 bp, Fusarium azukicola
  misc_feature: 111
taagtggttaagttaagggttagggttaagtagttatagtaaaggttagggttaagtggttaagttaagggttagggttaagtagttatagtaaag

SEQ ID NO: 36038 - DNA, 96 bp, Fusarium azukicola
  misc_feature: 111
aagaattattctttttaggtctataactattttattttagcttttattaagctttaaagttttatgttttagtgcacagtatagctgtacagctta

SEQ ID NO: 36039 - DNA, 96 bp, Fusarium azukicola
  misc_feature: 111
taaagaatggaataaaatataatataagtccgccttataataaataagctaatagctttatagaaaggataaataggactatattagaaaaggtta

SEQ ID NO: 36040 - DNA, 96 bp, Fusarium azukicola
  misc_feature: 111
gttattcttattagaaataaccttagctattattatatataggttatttttctcttttccttatgatattatttttccttgcttatttaaaagaag

SEQ ID NO: 36041 - DNA, 96 bp, Fusarium azukicola
  misc_feature: 111
gttaggggtagtaatgaagttaatttaaaaagaaaagagaagaaaggatttaaaaataagagaaagagttaaataaaaaagttaggatttaaggag

SEQ ID NO: 36042 - DNA, 96 bp, Fusarium azukicola
  misc_feature: 111
gtacagctatactgtgcactaaaacataaaactttaaagcttaataaaagctaaaataaaatagttatagacctaaaaagaataattcttagctat

SEQ ID NO: 36043 - DNA, 96 bp, Fusarium azukicola
  misc_feature: 111
aaaagaataattcttagctattttacccttaaataaactataaataatttttatagatttttaaaaaatttcgtttataaagaaattataatttac

SEQ ID NO: 36044 - DNA, 96 bp, Fusarium azukicola
  misc_feature: 111
ggtttcttctagctaaggtatagcttataaatagaggggagattttctaagaaatataaaaagaaaagaaatataaaagatatagctaggaaagag

SEQ ID NO: 36045 - DNA, 96 bp, Fusarium azukicola
  misc_feature: 111
ctataccctacccatatagtctaacccgatccatgtaagaaaacgctatttatactatctcatactgtacttaactagccgtcccttcgcgatacc

SEQ ID NO: 36046 - DNA, 96 bp, Fusarium azukicola
  misc_feature: 111
ctcttctatcttgcctctctctcggtcggtctgaatctcttgtcggaattgagcagagaagtctaatggttggtaggtcccattctcaatcttccc

SEQ ID NO: 36047 - DNA, 96 bp, Fusarium azukicola
  misc_feature: 111
ggcttagttatagcaaaaaccggttttgatggatagaatgcaacgctgaaggttttaggaaccttcctagccaatcggcagttattatacttttat

SEQ ID NO: 36048 - DNA, 96 bp, Fusarium azukicola
  misc_feature: 111
agttagatctataagattactttttttaagtttctagctattttatagcagtttttagaaacttaggttttagcgatttttagttatacagtatgc

SEQ ID NO: 36049 - DNA, 96 bp, Fusarium azukicola
  misc_feature: 111
gagattccttactttaaagaaagcccttataataatgaaaaggcaatattatataataataataataataaatagaaattcactatcgaaattcct

SEQ ID NO: 36050 - DNA, 96 bp, Fusarium azukicola
  misc_feature: 111
agactcttttatcagtggcaatggtagagaagacaactagacaactatcataatggattatactccctacctgttccatcatcatcatcatgggtc

SEQ ID NO: 36051 - DNA, 96 bp, Fusarium azukicola
  misc_feature: 111
gaatatgcttgtggcctcctcctctgcctcctcctgggcctcccgctcatcgcttgacccgtcctcctcctgctgcctgtccatcttggcctgctt

SEQ ID NO: 36052 - DNA, 96 bp, Fusarium azukicola
  misc_feature: 111
gaacgagacagcatactgtataactaaaaatcgctaaaacctaagtttctaaaaactgctataaaatagctagaaacttaaaaaaagtaatcttat

SEQ ID NO: 36053 - DNA, 96 bp, Fusarium azukicola
  misc_feature: 111
actggaaaattcaggaagccaataaggtgcataagacttctaagaaaaaggaatctaaacctaattctaagaaggaagaaagagaaaagaaacaag

SEQ ID NO: 36054 - DNA, 96 bp, Fusarium azukicola
  misc_feature: 111
cttctctttttctttactcttcccctcctttatttctctttttcttcttcttttctttttctattccccttctttctttctcttctaactacctat

SEQ ID NO: 36055 - DNA, 96 bp, Fusarium azukicola
  misc_feature: 111
cttataagggttatagctttatatattcttattattagaggaaaaattaaacctctattattattatatatatatcttagtaaaaacccctttatt

SEQ ID NO: 36056 - DNA, 96 bp, Fusarium azukicola
  misc_feature: 111
ctcttatttctccttaaatcctaacttttttatttaactctttctcttatttttaaatcctttcttctcttttctttttaaattaacttcattact

SEQ ID NO: 36057 - DNA, 96 bp, Fusarium azukicola
  misc_feature: 111
ctctccctctctctcttttcactccttatcctctcctctcccctctccctctctctcttttcactccttctcctctcctctcccctctccctctct

SEQ ID NO: 36058 - DNA, 96 bp, Fusarium azukicola
  misc_feature: 111
ctagccttatagataaatctaagagactagaaaaaatagattctaataagatatatttttctaagacttctaagccttagaaaaagaagaaaactg

SEQ ID NO: 36059 - DNA, 96 bp, Fusarium azukicola
  misc_feature: 111
ctaattttatatataatataggtgctactaggcatattatatatagaaaagaatttctagttaattttagaaaaataaataaaaatattacttagg

SEQ ID NO: 36060 - DNA, 96 bp, Fusarium azukicola
  misc_feature: 111
ctaaaaatagagtaaaaattctataatataatatgtggtttatagggatatatcactatagttggtaatataatatagaacattaatagcctcctt

SEQ ID NO: 36061 - DNA, 96 bp, Fusarium azukicola
  misc_feature: 111
cctaacctctagaatctcctagaatctctatagaagcccgaagggcttctatctatagctgacccaaagcctgaccctaaccctgacctaatgtat

SEQ ID NO: 36062 - DNA, 96 bp, Fusarium azukicola
  misc_feature: 111
agaataaagtgaataaggatttgttcctctagatcagatagccgacgtgatttctggatggtatcgcgtcgagactggatgccttgctggcggggg

SEQ ID NO: 36063 - DNA, 96 bp, Fusarium azukicola
  misc_feature: 111
ataatgcaaaggaatatatatataagctaaggccctattgtataaagaatggaataaaatataatacaagtccgcctcataataaacaagctaatg

SEQ ID NO: 36064 - DNA, 96 bp, Fusarium azukicola
  misc_feature: 111
cagctaaaagaaagtactattcccataataatatatctcgatgctcacttaaataaaccgatcgtgctaaaggagactaaaaacaaggcgggaggt

SEQ ID NO: 36065 - DNA, 96 bp, Fusarium azukicola
  misc_feature: 111
atttttttaaaaatctaaaaaagatatttttaggttctttatatagttagatttataaaaatactttttttatatttctagctattttatagcagt

SEQ ID NO: 36066 - DNA, 96 bp, Fusarium azukicola
  misc_feature: 111
atttttctaagacttctaagccttagaaaaagaagaaaactgccttaaaatgcagttattgcaaactgctaggtcataaagacctagattgctatt

SEQ ID NO: 36067 - DNA, 96 bp, Fusarium azukicola
  misc_feature: 111
agtattctcttctatcttgcctctctctcggtcggtctgaatctcttgtcggaattgagcagagaagtctaatggttggtaggtcccattctcaat

SEQ ID NO: 36068 - DNA, 96 bp, Fusarium azukicola
  misc_feature: 111
aataaaataagaataaaattagttttcttagataatataaaggaatatatatataagctaagaccctattatataaagaatagaataaaatataat

SEQ ID NO: 36069 - DNA, 96 bp, Fusarium azukicola
  misc_feature: 111
atagggatatatcactatagttagtaatataatatagaatattaacagcctcctttaaagttataatcttataagggttatagctttatacgttct

SEQ ID NO: 36070 - DNA, 96 bp, Fusarium azukicola
  misc_feature: 111
agaaaagaagaagaaaaagagaaataaaggaggggaagagtaaagaaaaagagaagaagataaaaggagaaggggaagagtaaaagaaagaaaagt

SEQ ID NO: 36071 - DNA, 96 bp, Fusarium azukicola
  misc_feature: 110
tagagaagacaactagacaactatcataatggattatactccctacctgttccatcatcatcatcatgggtcgtcgtgcgcttacagcagaggaaa

SEQ ID NO: 36072 - DNA, 96 bp, Fusarium azukicola
  misc_feature: 110
tttatactgtatactttaagatacctatataaggaatttttttaaaaatttagaaaaaatatttttaagtcttatatatagctaaatagttaaaat

SEQ ID NO: 36073 - DNA, 96 bp, Fusarium azukicola
  misc_feature: 110
taactatcttagagcatgaaaatcaagagcttcgacccaagaaaaggcgtaaggttatcacagatggcaatgttgagtttgcaaaggtgccagcaa

SEQ ID NO: 36074 - DNA, 96 bp, Fusarium azukicola
  misc_feature: 110
tgtaccgcgtcgataagctgagagggaaaagcaaaatgtgcaggcatatgaaactctatatctgtgaaagtaaacagtgatataatacgtggtcaa

SEQ ID NO: 36075 - DNA, 96 bp, Fusarium azukicola
  misc_feature: 110
aaaaagaaaagaagaagaaaaagagaaataaaggaggggaagagtaaagaaaaagagaagaagataaaaggagaaggggaagagtaaaagaaagaa

SEQ ID NO: 36076 - DNA, 96 bp, Fusarium azukicola
  misc_feature: 110
ttattcctcactcttctcatgtcctccaacctcttgatctcgccatttttggccctctgaagcaggcataccgtcggcttctttctgacctcgcta

SEQ ID NO: 36077 - DNA, 96 bp, Fusarium azukicola
  misc_feature: 110
aaaaaaataacctatatataataacagctaaggttatttctaataagaataactatagactaagagataacttagatcttcctattttaaatataa

SEQ ID NO: 36078 - DNA, 96 bp, Fusarium azukicola
  misc_feature: 110
ttagaggaaaaattaaacctctattattattatatatatatcttagtaaaaacccctttattatagacctgatattataagggaaaatctaagatt

SEQ ID NO: 36079 - DNA, 96 bp, Fusarium azukicola
  misc_feature: 110
aattaactagaaattcttttctacatacaatatgcctagtagcaccttatttaaatatcctagttgtttctttatatagggaaggtttcttattaa

SEQ ID NO: 36080 - DNA, 96 bp, Fusarium azukicola
  misc_feature: 110
ttaaacttttaatcttagttattttaagcttaggtttattttcttagaattattttaagtgttttttaaataaggtgtaattactaagaaatttca

SEQ ID NO: 36081 - DNA, 96 bp, Fusarium azukicola
  misc_feature: 110
tcttcttcctctttcgttattacgattataataataaataataacatcatctatatccataccatatcatatatatatatatgatgggtatagaca

SEQ ID NO: 36082 - DNA, 96 bp, Fusarium azukicola
  misc_feature: 110
ctccggatagtagcggtttcctttacctctcttagtacttattaatccctaatcgccttaccctagctaataaccctcttatctataccctaccca

SEQ ID NO: 36083 - DNA, 96 bp, Fusarium azukicola
  misc_feature: 110
ggcaaaacaaagggaagattgagaatgggacctaccaaccattagacttctctgctcaattccgacaagagattcagaccgaccgagagagaggca

SEQ ID NO: 36084 - DNA, 96 bp, Fusarium azukicola
  misc_feature: 110
tctataccctacccatatagtctaacccgatccatgtaagaaaacgctatttatactatctcatactgtacttaactagccgtcccttcgcgatac

SEQ ID NO: 36085 - DNA, 96 bp, Fusarium azukicola
  misc_feature: 110
tcgacgtagtgtggattgatcttctcaatcatccaattgagcacattgccaatcccatctgcttgcttgttgtattcgcgttcgtcttgttgatat

SEQ ID NO: 36086 - DNA, 96 bp, Fusarium azukicola
  misc_feature: 110
ggatcgggttagactatatgggtagggtatagataagagggttattagctagggtaaggcgattagggattaataagtactaagagaggtaaagga

SEQ ID NO: 36087 - DNA, 96 bp, Fusarium azukicola
  misc_feature: 110
tccggatagtagcggtttcctttacctctcttagtacttattaatccctaatcgccttaccctagctaataaccctcttatctataccctacccat

SEQ ID NO: 36088 - DNA, 96 bp, Fusarium azukicola
  misc_feature: 110
ctctaataataagaacgtataaagctataacccttataagattataactttaaaggaggctgttaatattctatattatattactaactatagtga

SEQ ID NO: 36089 - DNA, 96 bp, Fusarium azukicola
  misc_feature: 110
tattattatatataggttatttttctcttttccttataatattatttttccttatttatttaaaagaaggacttcttatttatttataatagaagt

SEQ ID NO: 36090 - DNA, 96 bp, Fusarium azukicola
  misc_feature: 110
tattatctaagaaaactaattttattcttattttattaggattattttctatttcttttctaaattccttaaattttataatagcttctaacttat

SEQ ID NO: 36091 - DNA, 96 bp, Fusarium azukicola
  misc_feature: 110
aagaagtccttcttttaaataagcaaggaaaaataatatcataaggaaaagagaaaaataacctatatataataacagctaaggttatttctaata

SEQ ID NO: 36092 - DNA, 96 bp, Fusarium azukicola
  misc_feature: 110
tatctcatactgtacttaactagccgtcccttcgcgataccctcttcctagccataataaccctccccgtcgccctagatattaacggttagccac

SEQ ID NO: 36093 - DNA, 96 bp, Fusarium azukicola
  misc_feature: 110
ggatagtagcggtttcctttacctctcttagtacttattaatccctaatcgccttaccctagctaataaccctcttatctataccctacccatata

SEQ ID NO: 36094 - DNA, 96 bp, Fusarium azukicola
  misc_feature: 110
tatagccatctccatttgatatgacttccggtcttcagggtgcagttcgctgactgtattcgcggcgcgttcgcctctttcgagcctcgtggtccc

SEQ ID NO: 36095 - DNA, 96 bp, Fusarium azukicola
  misc_feature: 110
catttagctttaaataataaatcccctctagaagttagagataatatttccttagatattaaggaattagataaaataaaaacctttaggtctata

SEQ ID NO: 36096 - DNA, 96 bp, Fusarium azukicola
  misc_feature: 110
tataagggttatagctttatatattcttattattagaggaaaaattaaacctctattattattatatatatatcttagtaaaaacccctttattat

SEQ ID NO: 36097 - DNA, 96 bp, Fusarium azukicola
  misc_feature: 110
aacgtaactactacccctaaccctaatttcaaccaattaaccctaacccttaacgtaactactacccctaaccataatttcaaccaattaacccta

SEQ ID NO: 36098 - DNA, 96 bp, Fusarium azukicola
  misc_feature: 110
atttcaaccaattaaccctaacccttaacgtaactactacccctaaccctaatttcaaccaattaaccctaacccttaacgtaactactaccccta

SEQ ID NO: 36099 - DNA, 96 bp, Fusarium azukicola
  misc_feature: 110
taatttctttataaacgaaattttttaaaaatctataaaaattatttatagtttatttaagggtaaaatagctaagaattattctttttaggtcta

SEQ ID NO: 36100 - DNA, 96 bp, Fusarium azukicola
  misc_feature: 110
tactttcttacttttctttcttttactcttccccttctccttttatcttcttctctttttctttactcttcccctcctttatttctctttttcttc

SEQ ID NO: 36101 - DNA, 96 bp, Fusarium azukicola
  misc_feature: 110
tacattctatccattaaaaccggtttttgctataactaagccatttataaggctttagtaatagattataaagcgcatcttccgggctatccgacg

SEQ ID NO: 36102 - DNA, 96 bp, Fusarium azukicola
  misc_feature: 110
cttatttaaaagaaggacttcttatttatttataatagaagttatattataaagagaagattgacttattaagttaatagctaacttaggaatgta

SEQ ID NO: 36103 - DNA, 96 bp, Fusarium azukicola
  misc_feature: 110
aagctattagcttatttattatgaggcggacttatattatattttattccattctttatataatagggtcttagcttatatatatattcctttgta

SEQ ID NO: 36104 - DNA, 96 bp, Fusarium azukicola
  misc_feature: 110
taaggcggacttatattatattttattccattctttatataatagggtcttagcttatatatatattcctttatattatctaagaaaactaatttt

SEQ ID NO: 36105 - DNA, 96 bp, Fusarium azukicola
  misc_feature: 110
aatcttataagggttatagctttatatattcttattattagaggaaaaaattaaacctctattattattatatatatcttagtaaaaaccccttta

SEQ ID NO: 36106 - DNA, 96 bp, Fusarium azukicola
  misc_feature: 110
gtctgtaggaacctttttaaccaattagaataatacccttaatatctagctacctatagtagctataggttaggtaaatatacctaaaaatagagg

SEQ ID NO: 36107 - DNA, 96 bp, Fusarium azukicola
  misc_feature: 110
gtccttcttttaaataagcaaggaaaaataatatcataaggaaaagagaaaaataacctatatataataacagctaaggttatttctaataagaat

SEQ ID NO: 36108 - DNA, 96 bp, Fusarium azukicola
  misc_feature: 110
gatttatagaaatactttttttaagtttctagctattttatagcagtttttattaaggttagaaatataaggttttagtgcacagtatagctatac

SEQ ID NO: 36109 - DNA, 96 bp, Fusarium azukicola
  misc_feature: 110
atagagagaataagagtatatctttttcataagcaaaatatataaataaaataataaggaaatataataaataagaaataggaacttctaaagtac

SEQ ID NO: 36110 - DNA, 96 bp, Fusarium azukicola
  misc_feature: 110
gggatatatcactatagttagtaatataatatagaatattaacagcctcctttaaagttataatcttataagggttatagctttatacgttcttat

SEQ ID NO: 36111 - DNA, 96 bp, Fusarium azukicola
  misc_feature: 110
ggcttctatctatagctgacccaaagcctgaccctaaccctgacctaatgtatgaccctgaccctgaccctaacctctagaatctcctagaatctc

SEQ ID NO: 36112 - DNA, 96 bp, Fusarium azukicola
  misc_feature: 110
ggagaagagaaagaagataggtagttagaagagaaagaaagaaggggaatagaaaaagaaaagaagaagaaaaagagaaataaaggaggggaagag

SEQ ID NO: 36113 - DNA, 96 bp, Fusarium azukicola
  misc_feature: 110
ctacccatatagtctaacccgatccatgtaagaaaacgctatttatactatctcatactgtacttaactagccgtcccttcgcgataccctcttcc

SEQ ID NO: 36114 - DNA, 96 bp, Fusarium azukicola
  misc_feature: 110
gaataaaattagttttcttagataatataaaggaatatatatataagctaagaccctattatataaagaatggaataaaatataatataagtccgc

SEQ ID NO: 36115 - DNA, 96 bp, Fusarium azukicola
  misc_feature: 110
aagattactttttttaagtttctagctattttatagcagtttttagaaacttaggttttagcgatttttagttatacagtatgctgtctcgttcgc

SEQ ID NO: 36116 - DNA, 96 bp, Fusarium azukicola
  misc_feature: 110
ctagtagcacctatattatatataaaattagttatattatctttattagtagaaaaatcaggtttatttaccttatttaaatatcctagttgtttc

SEQ ID NO: 36117 - DNA, 96 bp, Fusarium azukicola
  misc_feature: 110
agaaaaagaaaagaagaagaaaaagagaaataaaggaggggaagagtaaagaaaaagagaagaagataaaaggagaaggggaagagtaaaagaaag

SEQ ID NO: 36118 - DNA, 96 bp, Fusarium azukicola
  misc_feature: 110
acctctagttaattactattatctaagagagaagagttagaaagtaaagctaacctctagggtaaggaaggggttagcctctaaggtctagggaag

SEQ ID NO: 36119 - DNA, 96 bp, Fusarium azukicola
  misc_feature: 110
ctctttttctttactcttcccctcctttatttctctttttcttcttcttttctttttctattccccttctttctttctcttctaactacctatctt

SEQ ID NO: 36120 - DNA, 96 bp, Fusarium azukicola
  misc_feature: 110
aggttttttatttatattatttttagttaattttcctagtttatagtttttatagtttttaacttaatataggtccttattagtatatttaaagag

SEQ ID NO: 36121 - DNA, 96 bp, Fusarium azukicola
  misc_feature: 110
atggtagagaagacaactagacaactatcataatggattatactccctacctgttccatcatcatcatcatgggtcgtcgtgcgcttacagcagag

SEQ ID NO: 36122 - DNA, 96 bp, Fusarium azukicola
  misc_feature: 110
ctatctatagctgacccaaagcctgaccctaaccctgacctaatgtatgaccctgaccctgaccctaacctctagaatctcctagaatctctatag

SEQ ID NO: 36123 - DNA, 96 bp, Fusarium azukicola
  misc_feature: 110
ctaaatagttaaaatcgttttttttaagtttctagctattttatagcgatttttagaaacttagggtttagctgtttttagttatatagtatgctg

SEQ ID NO: 36124 - DNA, 96 bp, Fusarium azukicola
  misc_feature: 110
ccttttctaatatagtcctatttatcctttctataaagctattagcttatttattataaggcggacttatattatattttattccattctttatat

SEQ ID NO: 36125 - DNA, 96 bp, Fusarium azukicola
  misc_feature: 110
aagatatatataataataatagaggtttaattttttcctctaataataagaatatataaagctataacccttataagattataactttaaaggagg

SEQ ID NO: 36126 - DNA, 96 bp, Fusarium azukicola
  misc_feature: 110
atatttacctaacctatagctactataggtagctagatattaagggtattattctaattggttaaaaaggttcctacagacctttatgactgccgg

SEQ ID NO: 36127 - DNA, 96 bp, Fusarium azukicola
  misc_feature: 110
aacttctattataaataaataagaagtccttcttttaaataaataaggaaaaataatattataaggaaaagagaaaaataacctatatataataat

SEQ ID NO: 36128 - DNA, 96 bp, Fusarium azukicola
  misc_feature: 110
atcttttatttctctcttttctagctatatctctctttcttagctttacctctctctcttagctatatctctttttcctagctatatctctttcct

SEQ ID NO: 36129 - DNA, 96 bp, Fusarium azukicola
  misc_feature: 110
agggttaggggtagtagttacgttaagggttagggttaattggttgaaattagggttaggggtagtagtagagttaagggttagggttaattggtt

SEQ ID NO: 36130 - DNA, 96 bp, Fusarium azukicola
  misc_feature: 109
aaaaaggttttattttttatagcttaaagctgatatatataaattcttaaaaaattatttttatatactagatttataagcaaatacagaaaaaaa

SEQ ID NO: 36131 - DNA, 96 bp, Fusarium azukicola
  misc_feature: 109
gggtattattctaattggttaaaaaggttcctatagacctttatgactgccgtcatctatgcatcaaagtataataactgccgattggctaaaaaa

SEQ ID NO: 36132 - DNA, 96 bp, Fusarium azukicola
  misc_feature: 109
ttttatataataaagctttatttgccctttttctactatatctctagagaaatgaaaggctatatctatatgcttagatcttttaaaatcgcctgt

SEQ ID NO: 36133 - DNA, 96 bp, Fusarium azukicola
  misc_feature: 109
tttagaaaagaaatagaaaataatcctaataaaataagaataaaatcagttttctcagataatataaaggaatatatatataagctaagaccctat

SEQ ID NO: 36134 - DNA, 96 bp, Fusarium azukicola
  misc_feature: 109
tatattgtggtataaccttctctctaaattattaaataatttaggcttctacgctatcccttttgataaagctctctttataaataagaacttaaa

SEQ ID NO: 36135 - DNA, 96 bp, Fusarium azukicola
  misc_feature: 109
tttaaaggaggctattaatattctatattatattaccaactatagtgatatatccctataaaccacatattatattatagaatttttactctattt

SEQ ID NO: 36136 - DNA, 96 bp, Fusarium azukicola
  misc_feature: 109
ccctttctttttacctcttatttctccttaaatcctaacttttttatttaactctttctcttatttttaaatcctttcttctcttttctttttaaa

SEQ ID NO: 36137 - DNA, 96 bp, Fusarium azukicola
  misc_feature: 109
ttctctttttctttactcttcccctcctttatttctctttttcttcttcttttctttttctattccccttctttctttctcttctaactacctatc

SEQ ID NO: 36138 - DNA, 96 bp, Fusarium azukicola
  misc_feature: 109
taataagttaatcttctctttataatataacttctattataaataaataagaagtccttcttttaaataaataaggaaaaataatattataaggaa

SEQ ID NO: 36139 - DNA, 96 bp, Fusarium azukicola
  misc_feature: 109
ttataaatggcttagttatagcaaaaaccggttttaatggatagaatgcaacgctgaagggtttaggaaccttcctagccaatcggcaggtatttt

SEQ ID NO: 36140 - DNA, 96 bp, Fusarium azukicola
  misc_feature: 109
ttaccctatactctcttctctcttttactttaccctatactctcttctctcttttactttaccctccacttttattctttattttactttacccta

SEQ ID NO: 36141 - DNA, 96 bp, Fusarium azukicola
  misc_feature: 109
accctttctttttacctcttatttctccttaaatcctaacttttttatttaactctttctcttatttttaaatcctttcttctcttttctttttaa

SEQ ID NO: 36142 - DNA, 96 bp, Fusarium azukicola
  misc_feature: 109
tgtccttcaaaatgacccaaaattaagtatccgacgtgctgcaataacctatgagatcaacgagcataggctccgtcgccgacggaagggcattca

SEQ ID NO: 36143 - DNA, 96 bp, Fusarium azukicola
  misc_feature: 109
tgattattacctaggttttaaataacctagataatagctattctagctatataactaatatctcataagctttaaggagtaatcctaaggcttata

SEQ ID NO: 36144 - DNA, 96 bp, Fusarium azukicola
  misc_feature: 109
tctttttacctcttatttctccttaaatcctaacttttttatttaactctttctcttatttttaaatcctttcttctcttttctttttaaattaac

SEQ ID NO: 36145 - DNA, 96 bp, Fusarium azukicola
  misc_feature: 109
atatactaggacctttaataagaaaccttccctatataaagaaacaactaggatatttaaataaggtgctactaggcatattgtatgtagaaaaga

SEQ ID NO: 36146 - DNA, 96 bp, Fusarium azukicola
  misc_feature: 109
aatagaaaaagaaaagaagaagaaaaagagaaataaaggaggggaagagtaaagaaaaagagaagaagataaaaggagaaggggaagagtaaaaga

SEQ ID NO: 36147 - DNA, 96 bp, Fusarium azukicola
  misc_feature: 109
tctttatatagggaaggtttcttattaaaggtcctagtatattattagttatattattttattgagaaattaaggaattatatacctctaaatcat

SEQ ID NO: 36148 - DNA, 96 bp, Fusarium azukicola
  misc_feature: 109
tattgtggtataaccttctctctaaattattaaataatttaggcttctacgctatcccttttgataaagctctctttataaataagaacttaaaga

SEQ ID NO: 36149 - DNA, 96 bp, Fusarium azukicola
  misc_feature: 109
tcttctctttttctttactcttcccctcctttatttctctttttcttcttcttttctttttctattccccttctttctttctcttctaactaccta

SEQ ID NO: 36150 - DNA, 96 bp, Fusarium azukicola
  misc_feature: 109
ataaaaagaaggttattaaagagggaggagagtttaataagtaagtatagaggagaggaagagagaagagaaagaaaggagaggaaggggagaaga

SEQ ID NO: 36151 - DNA, 96 bp, Fusarium azukicola
  misc_feature: 109
gctagggtaaggcgattagggattaataagtactaagagaggtaaaggaaaccgctactatccggaggggagataacctctactgtccggggaaga

SEQ ID NO: 36152 - DNA, 96 bp, Fusarium azukicola
  misc_feature: 109
gggtatagataagagggttattagctagggtaaggcgattagggattaataagtactaagagaggtaaaggaaaccgctactatccggaggggaga

SEQ ID NO: 36153 - DNA, 96 bp, Fusarium azukicola
  misc_feature: 109
gaaaacgctatttatactatctcatactgtacttaactagccgtcccttcgcgataccctcttcctagccataataaccctccccgtcgccctaga

SEQ ID NO: 36154 - DNA, 96 bp, Fusarium azukicola
  misc_feature: 109
tctaggaacttatattccttattattaggttttttatttatattatttttagttaattttcctagtttatagtttttatagtttttaacttaatat

SEQ ID NO: 36155 - DNA, 96 bp, Fusarium azukicola
  misc_feature: 109
attcctcactcttctcatgtcctccaacctcttgatctcgccatttttggccctctgaagcaggcataccgtcggcttctttctgacctcgctaga

SEQ ID NO: 36156 - DNA, 96 bp, Fusarium azukicola
  misc_feature: 109
tcctcactcttctcatgtcctccaacctcttgatctcgccatttttggccctctgaagcaggcataccgtcggcttctttctgacctcgctagagt

SEQ ID NO: 36157 - DNA, 96 bp, Fusarium azukicola
  misc_feature: 109
gaataaaataaataagtaagttaggttaaagaagagaaaaaagggttagaaagtaataaaaaggtttaaggagagaaattaagttaaggaggaata

SEQ ID NO: 36158 - DNA, 96 bp, Fusarium azukicola
  misc_feature: 109
tattagctagggtaaggcgattagggattaataagtactaagagaggtaaaggaaaccgctactatccggaggggagataacctctactgtccggg

SEQ ID NO: 36159 - DNA, 96 bp, Fusarium azukicola
  misc_feature: 109
ggaaagagatatagctaggaaaaagagatatagctaagagagagaggtaaagctaagaaagagagatatagctagaaaagagagaaataaaagata

SEQ ID NO: 36160 - DNA, 96 bp, Fusarium azukicola
  misc_feature: 109
agcaatctaggtctttatgacctagcagtttgcaataactgcattttaaggcagttttcttctttttctaaggcttagaagtcttagaaaaatata

SEQ ID NO: 36161 - DNA, 96 bp, Fusarium azukicola
  misc_feature: 109
gattataaaaagaaatatcctaatagtagtataaatgagctacaaatctgtttaaaattaagaaaagccttatatggcctaaaacaaagccctata

SEQ ID NO: 36162 - DNA, 96 bp, Fusarium azukicola
  misc_feature: 109
tagttattccttatagaaattataaagaaaagtcttagagtctcaggtcttatagtacaagcataggtttcttcatagttaataccttgaatttgt

SEQ ID NO: 36163 - DNA, 96 bp, Fusarium azukicola
  misc_feature: 109
tagtagcacctatattatatataaaattagttatattatctttattagtagaaaaatcaggtttatttaccttatttaaatatcctagttgtttct

SEQ ID NO: 36164 - DNA, 96 bp, Fusarium azukicola
  misc_feature: 109
taggaacttatattccttattattaggttttttatttatattatttttagttaattttcctagtttatagtttttatagtttttaacttaatatag

SEQ ID NO: 36165 - DNA, 96 bp, Fusarium azukicola
  misc_feature: 109
tacctaaaaatagagtaaaaattctataatataatatgtggtttatagggatatatcactatagttggtaatataatatagaacattaacaattac

SEQ ID NO: 36166 - DNA, 96 bp, Fusarium azukicola
  misc_feature: 109
aaattaactagaaattcttttctacatacaatatgcctagtagcaccttatttaaatatcctagttgtttctttatatagggaaggtttcttatta

SEQ ID NO: 36167 - DNA, 96 bp, Fusarium azukicola
  misc_feature: 109
atattatctaagaaaactaattttattcttattttattaggattattttctatttcttttctaaattccttaaattttataatagcttctaactta

SEQ ID NO: 36168 - DNA, 96 bp, Fusarium azukicola
  misc_feature: 109
taactaattatagctcctttataagctctagtttctagtttatctaagggagaatagttcttataataaactatagacctaaaggtttttatttta

SEQ ID NO: 36169 - DNA, 96 bp, Fusarium azukicola
  misc_feature: 109
taaccctaacctttactataactacttaaccctaacccttaacttaaccacttaaccctaacctttactataactacttaaccctaacccttaact

SEQ ID NO: 36170 - DNA, 96 bp, Fusarium azukicola
  misc_feature: 109
atcttataagggttatagctttatatattcttattattagaggaaaaattaaacctctattattattatatatatatcttagtaaaaaccccttta

SEQ ID NO: 36171 - DNA, 96 bp, Fusarium azukicola
  misc_feature: 109
caactatcataatggattatactccctacctgttccatcatcatcatcatgggtcgtcgtgcgcttacagcagaggaaaaggcaaacaaggccaac

SEQ ID NO: 36172 - DNA, 96 bp, Fusarium azukicola
  misc_feature: 109
gttattcttattagaaataaccttagccgttattatatataggttatttttctcttttccttatgatattatttttccttacttatttaaaagaag

SEQ ID NO: 36173 - DNA, 96 bp, Fusarium azukicola
  misc_feature: 109
ctatctgtctctcggatagctgatacttatctggtgctccttctggaaaggcaacccagcacgaccttgtgtttgggtttctatgccatctttcac

SEQ ID NO: 36174 - DNA, 96 bp, Fusarium azukicola
  misc_feature: 109
gtattattctaattggttaaaaaggttcctacagacctttatgactgccgtcatctatgcatcaaagtataataactgccgattggctaagaaagg

SEQ ID NO: 36175 - DNA, 96 bp, Fusarium azukicola
  misc_feature: 109
aatatcctaatagtagtataaatgagctacaaatctgtttaaaattaagaaaagccttatatggcctaaaacaaagccctatattgtggtataacc

SEQ ID NO: 36176 - DNA, 96 bp, Fusarium azukicola
  misc_feature: 109
gcttctatctatagctgacccaaagcctgaccctaaccctgacctaatgtatgaccctgaccctgaccctaacctctagaatctcctagaatctct

SEQ ID NO: 36177 - DNA, 96 bp, Fusarium azukicola
  misc_feature: 109
gcttagatagtaaatactaaccccaactataaccctaaccctagttccggttccggttccggttccggttccggtttctagttagaccgtgcctgt

SEQ ID NO: 36178 - DNA, 96 bp, Fusarium azukicola
  misc_feature: 109
acagatggcaatgttgagtttgcaaaggtgccagcaatcaagaaggctcgtgaggcgatgcttaagatcacacagccgcgtaagaccgcaaatcgc

SEQ ID NO: 36179 - DNA, 96 bp, Fusarium azukicola
  misc_feature: 109
gccttaaaatgcagttattgcaaactgccaggtcataaagacccagattgctattttttgcaccctaataaggctccaaaaaactggaaaattcag

SEQ ID NO: 36180 - DNA, 96 bp, Fusarium azukicola
  misc_feature: 109
aatgcaaaggaatatatatataagctaaggccctattgtataaagaatggaataaaatataatacaagtccgcctcataataaacaagctaatggc

SEQ ID NO: 36181 - DNA, 96 bp, Fusarium azukicola
  misc_feature: 109
agaagcccgaagggcttctatctatagctgacccaaagcctgaccctaaccctgacctaatgtatgaccctgaccctgaccctaacctctagaatc

SEQ ID NO: 36182 - DNA, 96 bp, Fusarium azukicola
  misc_feature: 109
ccctagttccggttccggttccggttccggttccggtttctagttagaccgtgcctgtacgctccttttctaccctttcaagctctaacacagctc

SEQ ID NO: 36183 - DNA, 96 bp, Fusarium azukicola
  misc_feature: 109
ctctcggtcggtctgaatctcttgtcggaattgagcagagaagtctaatggttggtaggtcccattctcaatcttccctttgttttgcccttcttc

SEQ ID NO: 36184 - DNA, 96 bp, Fusarium azukicola
  misc_feature: 109
aataaatataattataaagcctataataatagcgagtataaatataattatatcgcctatagactattaaaaaactaagagaaccgactattaaag

SEQ ID NO: 36185 - DNA, 96 bp, Fusarium azukicola
  misc_feature: 109
aatagagtaaaaattctataatataatatgtggtttatagggatatatcactatagttggtaatataatatagaatattaatagcctcctttaaag

SEQ ID NO: 36186 - DNA, 96 bp, Fusarium azukicola
  misc_feature: 109
ctgccttataggatttcacttaattaacctaatctaaaattttaagttatttttaccttaatttgaatttttaaagaattcttttctatttagtgt

SEQ ID NO: 36187 - DNA, 96 bp, Fusarium azukicola
  misc_feature: 109
ctattctttatataatagggtcttagcttatatatatattcctttatattatctaagaaaactaattttattcttattttattaggattattttct

SEQ ID NO: 36188 - DNA, 96 bp, Fusarium azukicola
  misc_feature: 109
aagctaataaggtacataagacttctaagaaaaaggaatctaaacctaattctaagaaggaagaaagagaaaagaaataagaaaagctatttatag

SEQ ID NO: 36189 - DNA, 96 bp, Fusarium azukicola
  misc_feature: 109
ctaggaaaattaactaaaaataatataaataaaaaacctagtaataaggaatataagttcctagataaaatagctattaatatatagggtccttct

SEQ ID NO: 36190 - DNA, 96 bp, Fusarium azukicola
  misc_feature: 109
ccttataaatggcttagttatagcaaaaaccggttttgatggatagaatgcaacgctgaaggttttaggaaccttcctagccaatcggcaggtttt

SEQ ID NO: 36191 - DNA, 96 bp, Fusarium azukicola
  misc_feature: 109
ccaactatagtgatatatccctataaactatatattatattatagaatttttactctatttttaggtatatttacctaacctatagctactatagg

SEQ ID NO: 36192 - DNA, 96 bp, Fusarium azukicola
  misc_feature: 109
cctaaccctaatttcaaccaattaaccctaacccttaacgtaactactacccctaaccctaatttcaaccaattaaccctaacccttaacgtaact

SEQ ID NO: 36193 - DNA, 96 bp, Fusarium azukicola
  misc_feature: 109
aggaggctattaatattctatattatattaccaactatagtgatatatccctataaaccacatattatattatagaatttttactctatttttagg

SEQ ID NO: 36194 - DNA, 96 bp, Fusarium azukicola
  misc_feature: 109
catgtatgtaccgcgtcgataagctgagagggaaaagcaaaatgtgcaggcatatgaaactctatatctgtgaaagtaaacagtgatataatacgt

SEQ ID NO: 36195 - DNA, 96 bp, Fusarium azukicola
  misc_feature: 109
attctcttctatcttgcctctctctcggtcggtctgaatctcttgtcggaattgagcagagaagtctaatggttggtaggtcccattctcaatctt

SEQ ID NO: 36196 - DNA, 96 bp, Fusarium azukicola
  misc_feature: 109
aagctattataaaatttaaggaatttagaaaagaaatagaaaataatcctaataaaataagaataaaatcagttttctcagataatacaaaggaat

SEQ ID NO: 36197 - DNA, 96 bp, Fusarium azukicola
  misc_feature: 109
attataaaaagaaatatcctaatagtagtataaatgagctacaaatctgtttaaaattaagaaaagccttatatggcctaaaacaaagccctatat

SEQ ID NO: 36198 - DNA, 96 bp, Fusarium azukicola
  misc_feature: 109
aataaaagatcctctctttaaatatactaataaggacctatattaagttaaaaactataaaaactataaactaggaaaattaactaaaaataatat

SEQ ID NO: 36199 - DNA, 96 bp, Fusarium azukicola
  misc_feature: 109
atagcctcctttaaagttataatcttataagggttatagctttatatattcttattattagaggaaaaattaaacctctattattattatatatat

SEQ ID NO: 36200 - DNA, 96 bp, Fusarium azukicola
  misc_feature: 109
atactcttattctctctatttatagttatattcattcctaaaaagtctttaacttctcctaaggattagattgctatatccttagatagaatattt

SEQ ID NO: 36201 - DNA, 96 bp, Fusarium azukicola
  misc_feature: 109
atacctaaaaatagagtaaaaattctataatataatatgtggtttatagggatatatcactatagttggtaatataatatagaacattaacaattt

SEQ ID NO: 36202 - DNA, 96 bp, Fusarium azukicola
  misc_feature: 109
aagaattagctataaatagcttttcttatttcttttctctttcttccttcttagaattaagtttagattcctttttcttagaagtcttatatacct

SEQ ID NO: 36203 - DNA, 96 bp, Fusarium azukicola
  misc_feature: 109
aggctctcttctgcggaaggagtattctcttctatcttgcctctctctcggtcggtctgaatctcttgtcggaattgagcagagaagtctaatggt

SEQ ID NO: 36204 - DNA, 96 bp, Fusarium azukicola
  misc_feature: 109
aatagaaaagaattctttaaaaattcaaattaaggtaaaaataacttaaaattttagattaggttaattaagtgaaatcctataaggcagaatttt

SEQ ID NO: 36205 - DNA, 96 bp, Fusarium azukicola
  misc_feature: 108
tactttctagaatagcttattaggcttatatatatttttatagaattttttggagctgctgactaagctatttagttagatatttaaaaaaaaaaa

SEQ ID NO: 36206 - DNA, 96 bp, Fusarium azukicola
  misc_feature: 108
taccgcgtcgataagctgagagggaaaagcaaaatgtgcaggcatatgaaactctatatctgtgaaagtaaacagtgatataatacgtggtcaaaa

SEQ ID NO: 36207 - DNA, 96 bp, Fusarium azukicola
  misc_feature: 108
tttattaggattattttctatttcttttctaaattccttgaattttataatagcttctgacttattccttaatagatagacttttagatatctaat

SEQ ID NO: 36208 - DNA, 96 bp, Fusarium azukicola
  misc_feature: 108
tttaccctatactctcttctctcttttactttaccctccacttttattctttattttactttaccctatactctcttctctcttttactttaccct

SEQ ID NO: 36209 - DNA, 96 bp, Fusarium azukicola
  misc_feature: 108
tttaaggaatttagaaaagaaatagaaaataatcctaataaaataagaataaaatcagttttcttagataatataaaggaatatatatataagcta

SEQ ID NO: 36210 - DNA, 96 bp, Fusarium azukicola
  misc_feature: 108
ttgtttgccttttcctctgctgtaagcgcacgacgacccatgatgatgatgatggaacaggtagggagtataatccattatgatagttgtctagtt

SEQ ID NO: 36211 - DNA, 96 bp, Fusarium azukicola
  misc_feature: 108
ataataaaaaccctttataaaggaaataagttatattagggatagattctcttttattctcttaaatagtataggttgtaagcttttagtaaagaa

SEQ ID NO: 36212 - DNA, 96 bp, Fusarium azukicola
  misc_feature: 108
ttccttcttagaattaggtttagattcctttttcttagaagtcttatgcaccttattggcttcctgaattttccagttttttggagccttattagg

SEQ ID NO: 36213 - DNA, 96 bp, Fusarium azukicola
  misc_feature: 108
ttatctaagaaaactgattttattcttattttattaggattattttctatttcttttctaaattccttaaattttataatagcttctaacttattc

SEQ ID NO: 36214 - DNA, 96 bp, Fusarium azukicola
  misc_feature: 108
aaataagaataaaatcagttttcttagataatacaaaggaatatatatataagctaagaccctattatataaagaatggaataaaatataatataa

SEQ ID NO: 36215 - DNA, 96 bp, Fusarium azukicola
  misc_feature: 108
ctaattaagctataaaaaacctattatgattttttaaaactttttaaaaaatcccttataaggtagtttagaaaaagaattattcgcactatataa

SEQ ID NO: 36216 - DNA, 96 bp, Fusarium azukicola
  misc_feature: 108
ttagctattattatatataggttatttttctcttttccttataatattatttttccttatttatttaaaagaaggacttcttatttatttataata

SEQ ID NO: 36217 - DNA, 96 bp, Fusarium azukicola
  misc_feature: 108
tggggtctcagaaagggaaattaggtcttcctcggctttaggagatgacgaagaagaagaattagctataaatagcttttcttatttcttttctct

SEQ ID NO: 36218 - DNA, 96 bp, Fusarium azukicola
  misc_feature: 108
tcttctatcttgcctctctctcggtcggtctgaatctcttgtcggaattgagcagagaagtctaatggttggtaggtcccattctcaatcttccct

SEQ ID NO: 36219 - DNA, 96 bp, Fusarium azukicola
  misc_feature: 108
gggagaagagaaagaagataggtagttagaagagaaagaaagaaggggaatagaaaaagaaaagaagaagaaaaagagaaataaaggaggggaaga

SEQ ID NO: 36220 - DNA, 96 bp, Fusarium azukicola
  misc_feature: 108
ggaaaaagagatatagctaagagagagaggtaaagctaagaaagagagatatagctagaaaagagagaaataaaagataagagataagagataaga

SEQ ID NO: 36221 - DNA, 96 bp, Fusarium azukicola
  misc_feature: 108
tctccctctctctcttttcactccttatcctctcctctcccctctccctctctctcttttcactccttctcctctcctctcccctctccctctctc

SEQ ID NO: 36222 - DNA, 96 bp, Fusarium azukicola
  misc_feature: 108
tctataagattactttttttaagtttctagctattttatagcagtttttagaaacttaggttttagcgatttttagttatatagtatgctgtctcg

SEQ ID NO: 36223 - DNA, 96 bp, Fusarium azukicola
  misc_feature: 108
tcctaataaaataagaataaaattagttttcttagataatataaaggaatatatatataagctaagaccctattatataaagaatagaataaaata

SEQ ID NO: 36224 - DNA, 96 bp, Fusarium azukicola
  misc_feature: 108
attcccgtattggccccctctcctcccgccatcatcgccacgcctctccaacgcggcctgcctcctctccctctcctccaccacgcttccttctga

SEQ ID NO: 36225 - DNA, 96 bp, Fusarium azukicola
  misc_feature: 108
ctattttatctaggaacttatattccttattactaggttttttatttatattatttttagttaattttcctagtttatagttttcgcagtttttga

SEQ ID NO: 36226 - DNA, 96 bp, Fusarium azukicola
  misc_feature: 108
tatttccttattattttatttatatattttacttataaaaaagatatactcttattctctctatttatagttatatttattcctaaaaagtcttta

SEQ ID NO: 36227 - DNA, 96 bp, Fusarium azukicola
  misc_feature: 108
aaacgctatttatactatctcatactgtacttaactagccgtcccttcgcgataccctcttcctagccataataaccctccccgtcgccctagata

SEQ ID NO: 36228 - DNA, 96 bp, Fusarium azukicola
  misc_feature: 108
atctataccctacccatatagtctaacccgatccatgtaagaaaacgctatttatactatctcatactgtacttaactagccgtcccttcgcgata

SEQ ID NO: 36229 - DNA, 96 bp, Fusarium azukicola
  misc_feature: 108
aagactttttaggaatgaatataactataaatagagagaataagagtatatctttttcataagcaaaatatataaataaaataataaggaaatata

SEQ ID NO: 36230 - DNA, 96 bp, Fusarium azukicola
  misc_feature: 108
tagtaatataatatagaacattaatagcctcctttaaagttataatcttataagggttatagctttatacgttcttattattagaggaaaaaatta

SEQ ID NO: 36231 - DNA, 96 bp, Fusarium azukicola
  misc_feature: 108
aagaaaacgctatttatactatctcatactgtacttaactagccgtcccttcgcgataccctcttcctagccataataaccctccccgtcgcccta

SEQ ID NO: 36232 - DNA, 96 bp, Fusarium azukicola
  misc_feature: 108
aatagagagaataagagtatatctttttcataagcaaaatatataaataaaataataaggaaatataataaataagaaataggaacttctaaagta

SEQ ID NO: 36233 - DNA, 96 bp, Fusarium azukicola
  misc_feature: 108
aggggaatagaaaaagaaaagaagaagaaaaagagaaataaaggaggggaagagtaaagaaaaagagaagaagataaaaggagaaggggaagagta

SEQ ID NO: 36234 - DNA, 96 bp, Fusarium azukicola
  misc_feature: 108
tacctagtatataccttcaattgcttacattgccactttatgccgacactgatcaaactcgacagcacatcgtgacgaacagcgcgacatcaatac

SEQ ID NO: 36235 - DNA, 96 bp, Fusarium azukicola
  misc_feature: 108
taaaaagaaaagagaagaaaggatttaaaaataagagaaagagttaaataaaaaagttaggatttaaggagaaataagaggtaaaaagaaagggta

SEQ ID NO: 36236 - DNA, 96 bp, Fusarium azukicola
  misc_feature: 108
ggggtagtagttacgttaagggttagggttaattggttgaaattagggttaggggtagtagttacgttaagggttagggttaattggttgaaatta

SEQ ID NO: 36237 - DNA, 96 bp, Fusarium azukicola
  misc_feature: 108
taatcttataagggttatagctttatatattcttattattagaggaaaaaattaaacctctattattattatatatatcttagtaaaaaccccttt

SEQ ID NO: 36238 - DNA, 96 bp, Fusarium azukicola
  misc_feature: 108
taatattgttaatgttctatattatattaccaactatagtgatatatccctataaaccacatattatattatagaatttttactctatttttaggt

SEQ ID NO: 36239 - DNA, 96 bp, Fusarium azukicola
  misc_feature: 108
caaggtattaactatgaagaaacctatgcttgtactataagacctgagactctaagacttttctttataatttctataaggaataactactattta

SEQ ID NO: 36240 - DNA, 96 bp, Fusarium azukicola
  misc_feature: 108
taaataaaataataaggaaatataataaataagaaataagaacttctaaagtacctattaaatttatagaaagactcttaaaatctaaagaacctt

SEQ ID NO: 36241 - DNA, 96 bp, Fusarium azukicola
  misc_feature: 108
taaaggaagctgtctatacccatcatatatatatatatgatatggtatggatatagatgatgttattatttattattataatcgtaataacgaaag

SEQ ID NO: 36242 - DNA, 96 bp, Fusarium azukicola
  misc_feature: 108
atttttctactaataaagataatataactaattttatatataatataggtgctactaggcatattatatatagaaaagaatttctagttaatttta

SEQ ID NO: 36243 - DNA, 96 bp, Fusarium azukicola
  misc_feature: 108
accgcgtcgataagctgagagggaaaagcaaaatgtgcaggcatatgaaactctatatctgtgaaagtaaacagtgatataatacgtggtcaaaac

SEQ ID NO: 36244 - DNA, 96 bp, Fusarium azukicola
  misc_feature: 108
gttagatctataagattactttttttaagtttctagctattttatagcagtttttagaaacttaggttttagcgatttttagttatacagtatgct

SEQ ID NO: 36245 - DNA, 96 bp, Fusarium azukicola
  misc_feature: 108
ccctaaccctaatttcaaccaattaaccctaacccttaacgtaactactacccctaaccctaatttcaaccaattaaccctaacccttaacgtaac

SEQ ID NO: 36246 - DNA, 96 bp, Fusarium azukicola
  misc_feature: 108
aatatacctaaaaatagagtaaaaattctataatataatatatggtttatagggatatatcactatagttagtaatataatatagaacattaacac

SEQ ID NO: 36247 - DNA, 96 bp, Fusarium azukicola
  misc_feature: 108
actatctcatactgtacttaactagccgtcccttcgcgataccctcttcctagccataataaccctccccgtcgccctagatattaacggttagcc

SEQ ID NO: 36248 - DNA, 96 bp, Fusarium azukicola
  misc_feature: 108
gattactatatccttagatagaatatttactattctttctatatcttctttataagggcccgaaaatataaggttatctatataaatagctatagt

SEQ ID NO: 36249 - DNA, 96 bp, Fusarium azukicola
  misc_feature: 108
cttaaacttttaatcttagttattttaagcttaggtttattttcttagaattattttaagtgttttttaaataaggtgtaattactaagaaatttc

SEQ ID NO: 36250 - DNA, 96 bp, Fusarium azukicola
  misc_feature: 108
agctagggtaaggcgattagggattaataagtactaagagaggtaaaggaaaccgctactatccggaggggagataacctctactgtccggggaag

SEQ ID NO: 36251 - DNA, 96 bp, Fusarium azukicola
  misc_feature: 108
cttataaatggcttagttatagcaaaaaccggttttaatggatagaatgcaacgctgaagggtttaggaaccttcctagccaatcggcaggtattt

SEQ ID NO: 36252 - DNA, 96 bp, Fusarium azukicola
  misc_feature: 108
agagagggagaggggagagaagaggataaagaataaaaagagagagaagggaaaagaaagagggaaaaaagaaataaaagaggaagaggaaaggag

SEQ ID NO: 36253 - DNA, 96 bp, Fusarium azukicola
  misc_feature: 108
ctaggtaataattacttttttaggaatagtaatttctctagcttctagcttatttttaacctcttttatcttattaagatatatttctatattctt

SEQ ID NO: 36254 - DNA, 96 bp, Fusarium azukicola
  misc_feature: 108
aggtcagggttagggtcaggctttgggtcagctatagatagaagcccttcgggcttctatagagattctaggagattctagaggttagggtcaggg

SEQ ID NO: 36255 - DNA, 96 bp, Fusarium azukicola
  misc_feature: 108
ataattattttttaccttttccttttattttactttaaattttccctctttattaaattaaccctatttactttacccctttatttttctattaat

SEQ ID NO: 36256 - DNA, 96 bp, Fusarium azukicola
  misc_feature: 108
atagtttatagggatatattactatagttagtaatataatatagaatattaatagcctcctttaaagttataatcttataagggttatagctttat

SEQ ID NO: 36257 - DNA, 96 bp, Fusarium azukicola
  misc_feature: 108
aaagcaatttttttaaaaatctaaaaaagatatttttaggttctttatatagttagatttataaaaatactttttttatatttctagctattttat

SEQ ID NO: 36258 - DNA, 96 bp, Fusarium azukicola
  misc_feature: 108
aactaattatagctcctttataagctctagtttctagtttatctaagggagaatagttcttataataaactatagacctaaaggtttttattttat

SEQ ID NO: 36259 - DNA, 96 bp, Fusarium azukicola
  misc_feature: 108
acctttactataactacttaaccctaacccttaacttaaccacttaaccctaacctttactataactacttaaccctaacccttaacttaaccact

SEQ ID NO: 36260 - DNA, 96 bp, Fusarium azukicola
  misc_feature: 108
agggtagaaaaggagcgtacaggcacggtctaactagaaaccggaaccggaaccggaaccggaaccggaactagggttagggttatagttggggtt

SEQ ID NO: 36261 - DNA, 96 bp, Fusarium azukicola
  misc_feature: 108
agctaaaagaaagtactattcccataataatatatctcgatgctcacttaaataaaccgatcgtgctaaaggagactaaaaacaaggcgggaggtt

SEQ ID NO: 36262 - DNA, 96 bp, Fusarium azukicola
  misc_feature: 108
actggaaggcttggctaagaaaataactatcttagagcatgaaaatcaagagcttcgacccaagaaaaggcgtaaggttatcacagatggcaatgt

SEQ ID NO: 36263 - DNA, 96 bp, Fusarium azukicola
  misc_feature: 107
ttttgcaccctaataaggctccaaaaaactggaaaactcaggaagccaataaggtgcataagacttctaagaaaaaggaatctaaacctaattcta

SEQ ID NO: 36264 - DNA, 96 bp, Fusarium azukicola
  misc_feature: 107
tttctttttacctcttatttctccttaaatcctaacttttttatttaactctttctcttatttttaaatcctttcttctcttttctttttaaatta

SEQ ID NO: 36265 - DNA, 96 bp, Fusarium azukicola
  misc_feature: 107
aaaagaaaagaagaagaaaaagagaaataaaggaggggaagagtaaagaaaaagagaagaagataaaaggagaaggggaagagtaaaagaaagaaa

SEQ ID NO: 36266 - DNA, 96 bp, Fusarium azukicola
  misc_feature: 107
tttcaaccaattaaccctaacccttaacgtaactactacccctaaccctaatttcaaccaattaaccctaacccttaacgtaactactacccctaa

SEQ ID NO: 36267 - DNA, 96 bp, Fusarium azukicola
  misc_feature: 107
aaaagatcctctctttaaatatactaataaggacctatattaagttaaaaactataaaaactataaactaggaaaattaactaaaaataatataaa

SEQ ID NO: 36268 - DNA, 96 bp, Fusarium azukicola
  misc_feature: 107
taagggtattattctaattggttaaaaaggttcctacagaccttcatgactgccgtcattaatgcatcaaagtataataactgccgattggctaaa

SEQ ID NO: 36269 - DNA, 96 bp, Fusarium azukicola
  misc_feature: 107
ttggtaggtcccattctcaatcttccctttgttttgcccttcttcgacccggataaatacttcaaagtggtcgtcaaggacttctctgaggtcatc

SEQ ID NO: 36270 - DNA, 96 bp, Fusarium azukicola
  misc_feature: 107
ttggagccttattagggtgcaaaaaatagcaatctgggtctttatgacctagcagtttgcaataactgcattttaaggcagttttcttctttttcc

SEQ ID NO: 36271 - DNA, 96 bp, Fusarium azukicola
  misc_feature: 107
ttccttattattttatttatatattttgcttatgaaaaagatatactcttattctctctatttatagttatattcattcctaaaaagtctttaact

SEQ ID NO: 36272 - DNA, 96 bp, Fusarium azukicola
  misc_feature: 107
gaaaaggcaatattatataataataataataataaatagaaattcactatcgaaattcctaaaaagccagctgatttctataaagattataaggaa

SEQ ID NO: 36273 - DNA, 96 bp, Fusarium azukicola
  misc_feature: 107
ttcactccttatcctctcctctcccctctccctctctctcttttcactccttatcctctcctctcccctctccctctctctcttttctctccttct

SEQ ID NO: 36274 - DNA, 96 bp, Fusarium azukicola
  misc_feature: 107
aatatacctaaaaatagagtaaaaattctataatataatatatggtttatagggatatatcactatagttagtaatataatatagaacattaataa

SEQ ID NO: 36275 - DNA, 96 bp, Fusarium azukicola
  misc_feature: 107
ttatatataaaattagttatattatctttattagtagaaaaattaggtttatttaccttatttaaatatcctagttgtttctttatatagggaagg

SEQ ID NO: 36276 - DNA, 96 bp, Fusarium azukicola
  misc_feature: 107
acgtaactactacccctaaccctaatttcaaccaattaaccctaacccttaacgtaactactacccctaaccataatttcaaccaattaaccctaa

SEQ ID NO: 36277 - DNA, 96 bp, Fusarium azukicola
  misc_feature: 107
ttagaaaagaaatagaaaataatcctaataaaataagaataaaatcagttttctcagataatataaaggaatatatatataagctaagaccctatt

SEQ ID NO: 36278 - DNA, 96 bp, Fusarium azukicola
  misc_feature: 107
aggcgtcaaactggaaggcttggctaagaaaataactatcttagagcatgaaaatcaagagcttcgacccaagaaaaggcgtaaggttatcacaga

SEQ ID NO: 36279 - DNA, 96 bp, Fusarium azukicola
  misc_feature: 107
tctctttttctttactcttcccctcctttatttctctttttcttcttcttttctttttctattccccttctttctttctcttctaactacctatct

SEQ ID NO: 36280 - DNA, 96 bp, Fusarium azukicola
  misc_feature: 107
aagaaagagagatatagctagaaaagagagaaataagagataagagataagagataagagataagagataagagataagagataagagataagaga

SEQ ID NO: 36281 - DNA, 96 bp, Fusarium azukicola
  misc_feature: 107
tctatctatagctgacccaaagcctgaccctaaccctgacctaatgtatgaccctgaccctgaccctaacctctagaatctcctagaatctctata

SEQ ID NO: 36282 - DNA, 96 bp, Fusarium azukicola
  misc_feature: 107
tctaagaaaactaattttattcttattttattaggattattttctatttcttttctaaattccttaaattttataatagcttctaacttattcctt

SEQ ID NO: 36283 - DNA, 96 bp, Fusarium azukicola
  misc_feature: 107
tcggctttaggagataataaagaagaagaattagctataaatagcttttcttgtttcttttctctttcttccttcttagaattaggtttagattcc

SEQ ID NO: 36284 - DNA, 96 bp, Fusarium azukicola
  misc_feature: 107
gagagagggagaggggagagaagaggataaagaataaaaagagagagaagggaaaagaaagagggaaaaaagaaataaaagaggaagaggaaagga

SEQ ID NO: 36285 - DNA, 96 bp, Fusarium azukicola
  misc_feature: 107
aatataactataaatagagagaataagagtatatctttttcataagcaaaatatataaataaaataataaggaaatataataaataagaaatagga

SEQ ID NO: 36286 - DNA, 96 bp, Fusarium azukicola
  misc_feature: 107
tcctatttatcctttctataaagctattagcttatttattataaggcggacttatattatattttattccattctttatataatagggtcttagct

SEQ ID NO: 36287 - DNA, 96 bp, Fusarium azukicola
  misc_feature: 107
tcacagatggcaatgttgagtttgcaaaggtgccagcaatcaagaaggctcgtgaggcgatgcttaagatcacacagccgcgtaagaccgcaaatc

SEQ ID NO: 36288 - DNA, 96 bp, Fusarium azukicola
  misc_feature: 107
tatttttctaagacttctaagccttagaaaaagaagaaaactgccttaaaatgcagttattgcaaactgctaggtcataaagacctagattgctat

SEQ ID NO: 36289 - DNA, 96 bp, Fusarium azukicola
  misc_feature: 107
agctattataaaatttaaggaatttagaaaagaaatagaaaataatcctaataaaataagaataaaatcagttttcttagataatataaaggaata

SEQ ID NO: 36290 - DNA, 96 bp, Fusarium azukicola
  misc_feature: 107
aaggttttaaggtttattaaataaagaagaaagagggagaataaaataaataagtaagttaggttaaagaagagaaaaaagggttagaaagtaata

SEQ ID NO: 36291 - DNA, 96 bp, Fusarium azukicola
  misc_feature: 107
ctaataataagaacgtataaagctataacccttataagattataactttaaaggaggctgttaatattctatattatattactaactatagtgata

SEQ ID NO: 36292 - DNA, 96 bp, Fusarium azukicola
  misc_feature: 107
accctatatattagtagctattttatctaggaacttatattccttattattaggttttttatttatattatttttagttaattttcctagtttata

SEQ ID NO: 36293 - DNA, 96 bp, Fusarium azukicola
  misc_feature: 107
ataccgttattcagctcccattgctccttcataatcggctctagctctgcattaaggtccttaattaataacttcgagttattcctctcttttata

SEQ ID NO: 36294 - DNA, 96 bp, Fusarium azukicola
  misc_feature: 107
taggcaataattacttttttaggaatagtaatttctctagcttctagcttatttttaacctcttttatcttattaagatatatttctatattctta

SEQ ID NO: 36295 - DNA, 96 bp, Fusarium azukicola
  misc_feature: 107
tactattctttctatatcttctttataagggcccgaaaatataaggttatctatataaatagctatagtaatctttaagttcttatttataaagag

SEQ ID NO: 36296 - DNA, 96 bp, Fusarium azukicola
  misc_feature: 107
agaataagagtatatctttttcataagtaaaatatataaataaaataataaggaaatataataaataagaaataggaacttctaaagtacctatta

SEQ ID NO: 36297 - DNA, 96 bp, Fusarium azukicola
  misc_feature: 107
taaataaagaagaaagagggagaataaaataaataagtaagttaggttaaagaagagaaaaaagggttagaaagtaataaaaaggtttaaggagag

SEQ ID NO: 36298 - DNA, 96 bp, Fusarium azukicola
  misc_feature: 107
cttagtacttattaatccctaatcgccttaccctagctaataaccctcttatctataccctacccatatagtctaacccgatccatgtaagaaaac

SEQ ID NO: 36299 - DNA, 96 bp, Fusarium azukicola
  misc_feature: 107
ctaaatcttataagaattaggaagataactaattatagctcctttataagctctagtttctagtttatctaagggagaatagttcttataataaac

SEQ ID NO: 36300 - DNA, 96 bp, Fusarium azukicola
  misc_feature: 107
actaaccccaactataaccctaaccctagttccggttccggttccggttccggttccggtttctagttagaccgtgcctgtacgctccttttctac

SEQ ID NO: 36301 - DNA, 96 bp, Fusarium azukicola
  misc_feature: 107
cactaataggttataagcctagaggtctctacctaagggtttatacttaaaagaagattatacttcttttttaagtcttttctaagactttatacc

SEQ ID NO: 36302 - DNA, 96 bp, Fusarium azukicola
  misc_feature: 107
ggctttaggagataataaagaagaagaattagctataaatagcttttcttgtttcttttctctttcttccttcttagaattaggtttagattcctt

SEQ ID NO: 36303 - DNA, 96 bp, Fusarium azukicola
  misc_feature: 107
aatttaaggaatttagaaaagaaatagaaaataatcctaataaaataagaataaaatcagttttcttagataatataaaggaatatatatataagc

SEQ ID NO: 36304 - DNA, 96 bp, Fusarium azukicola
  misc_feature: 107
ctgccttaaaatgcagttattgcaaactgccaggtcataaagacccagattgctattttttgcaccctaataaggctccaaaaaactggaaaattc

SEQ ID NO: 36305 - DNA, 96 bp, Fusarium azukicola
  misc_feature: 107
ctttcttacttttctttcttttactcttccccttctccttttatcttcttctctttttctttactcttcccctcctttatttctctttttcttctt

SEQ ID NO: 36306 - DNA, 96 bp, Fusarium azukicola
  misc_feature: 107
aataaaaagaaggttattaaagagggaggagagtttaataagtaagtatagaggagaggaagagagaagagaaagaaaggagaggaaggggagaag

SEQ ID NO: 36307 - DNA, 96 bp, Fusarium azukicola
  misc_feature: 107
cttacttttctttcttttactcttccccttctccttttatcttcttctctttttctttactcttcccctcctttatttctctttttcttcttcttt

SEQ ID NO: 36308 - DNA, 96 bp, Fusarium azukicola
  misc_feature: 107
aaaagaaaagagaagaaaggatttaaaaataagagaaagagttaaataaaaaagttaggatttaaggagaaataagaggtaaaaagaaagggtaag

SEQ ID NO: 36309 - DNA, 96 bp, Fusarium azukicola
  misc_feature: 107
aagatatagctaggaaagagatatagctaggaaaaagagatatagctaagagagagaggtaaagctaagaaagagagatatagctagaaaagagag

SEQ ID NO: 36310 - DNA, 96 bp, Fusarium azukicola
  misc_feature: 107
actatcataatggattatactccctacctgttccatcatcatcatcatgggtcgtcgtgcgcttacagcagaggaaaaggcaaacaaggccaaccg

SEQ ID NO: 36311 - DNA, 96 bp, Fusarium azukicola
  misc_feature: 107
cctttatctcttatctcttatttcttatttctttatctcttatctcttatctcttatctcttatctcttatctcttatctcttatctcttatctct

SEQ ID NO: 36312 - DNA, 96 bp, Fusarium azukicola
  misc_feature: 107
aaagccttataaatggcttagttatagcaaaaaccggttttgatggatagaatgcaacgctgaaggttttaggaaccttcctagccaatcggccgg

SEQ ID NO: 36313 - DNA, 96 bp, Fusarium azukicola
  misc_feature: 107
ccggaagatgcgctttataatctattactaaagccttataaatggcttagttatagcaaaaaccggttttgatggatagaatgcaacgctgaaggg

SEQ ID NO: 36314 - DNA, 96 bp, Fusarium azukicola
  misc_feature: 107
aactggaaggcttggctaagaaaataactatcttagagcatgaaaatcaagagcttcgacccaagaaaaggcgtaaggttatcacagatggcaatg

SEQ ID NO: 36315 - DNA, 96 bp, Fusarium azukicola
  misc_feature: 107
caactatagtgatatatccctataaactatatattatattatagaatttttactctatttttaggtatatttacctaacctatagctactataggt

SEQ ID NO: 36316 - DNA, 96 bp, Fusarium azukicola
  misc_feature: 107
aaagatcctctctttaaatatactaataaggacctatattaagttaaaaactataaaaactataaactaggaaaattaactaaaaataatataaat

SEQ ID NO: 36317 - DNA, 96 bp, Fusarium azukicola
  misc_feature: 107
attattattatataatattgcctttttattattataagggctttctttaaagtaaggaatctcattaaaagaggggttatttccttcgagaaagct

SEQ ID NO: 36318 - DNA, 96 bp, Fusarium azukicola
  misc_feature: 107
aataagttagaagctattataaaatttaaggaatttagaaaagaaatagaaaataatcctaataaaataagaataaaattagttttcttagataat

SEQ ID NO: 36319 - DNA, 96 bp, Fusarium azukicola
  misc_feature: 107
aaaggttttaaggtttattaaataaagaagaaagagggagaataaaataaataagtaagttaggttaaagaagagaaaaaagggttagaaagtaat

SEQ ID NO: 36320 - DNA, 96 bp, Fusarium azukicola
  misc_feature: 107
aaccaattaaccctaacccttaacgtaactactacccctaaccctaatttcaaccaattaaccctaacccttaacgtaactactacccctaaccat

SEQ ID NO: 36321 - DNA, 96 bp, Fusarium azukicola
  misc_feature: 107
ataataagaatatataaagctataacccttataagattataactttaaaggaggctattaatattctatattatattactaactatagtaatatat

SEQ ID NO: 36322 - DNA, 96 bp, Fusarium azukicola
  misc_feature: 107
atataatatagaatattaacagcctcctttaaagttataatcttataagggttatagctttatacgttcttattattagaggaaaaaattaaacct

SEQ ID NO: 36323 - DNA, 96 bp, Fusarium azukicola
  misc_feature: 107
agcataaaagactaagttatcttaacttaagaagtctaattaaatatataaaaataaaagatcctctctttaaatatactagtgaggacctatatt

SEQ ID NO: 36324 - DNA, 96 bp, Fusarium azukicola
  misc_feature: 107
aaggtatataagacttctaagaaaaaggaatctaaacttaattctaagaaggaagaaagagaaaagaaataagaaaagctatttatagctaattct

SEQ ID NO: 36325 - DNA, 96 bp, Fusarium azukicola
  misc_feature: 107
aatcgttttttttaagtttctagctattttatagcgatttttagaaacttagggtttagctgtttttagttatacagtatgctgttgcacttactt

SEQ ID NO: 36326 - DNA, 96 bp, Fusarium azukicola
  misc_feature: 107
aaatagcttttcttgtttcttttctctttcttccttcttagaattaggtttagattcccttttcttagaagtcttatgcaccttattggctttctt

SEQ ID NO: 36327 - DNA, 96 bp, Fusarium azukicola
  misc_feature: 106
ggtattattctaattggttaaaaaggttcctatagacctttatgactgccgtcatctatgcatcaagtataataactgccgattggctaaaaaaaa

SEQ ID NO: 36328 - DNA, 96 bp, Fusarium azukicola
  misc_feature: 106
tttttttattattactttcttactttcttattacctttacttctatatctattttctctttaattactctatatatcttaataattaattacctct

SEQ ID NO: 36329 - DNA, 96 bp, Fusarium azukicola
  misc_feature: 106
ataataataataataataaaaaagaaatcttcttaggataaccctaggataatagaagatatatatatatatgaccctaaccttaaggtaagaaaa

SEQ ID NO: 36330 - DNA, 96 bp, Fusarium azukicola
  misc_feature: 106
ttttaactatttagctatatataagacttaaaaatattttttctaaatttttaaaaaaattccttatataggtatcttaaagtatacagtataaat

SEQ ID NO: 36331 - DNA, 96 bp, Fusarium azukicola
  misc_feature: 106
aggggtagtaatgaagttaatttaaaaagaaaagagaagaaaggatttaaaaataagagaaagagttaaataaaaaagttaggatttaaggagaaa

SEQ ID NO: 36332 - DNA, 96 bp, Fusarium azukicola
  misc_feature: 106
tttattcttattttattaggattattttctatttcttttctaaattccttgaattttataatagcttctgacttattccttaatagataggctttt

SEQ ID NO: 36333 - DNA, 96 bp, Fusarium azukicola
  misc_feature: 106
ataaataagtaagttaggttaaagaagagaaaaaagggttagaaagtaataaaaaggtttaaggagagaaattaagttaaggaggaatataataaa

SEQ ID NO: 36334 - DNA, 96 bp, Fusarium azukicola
  misc_feature: 106
aagagaaagaagataggtagttagaagagaaagaaagaaggggaatagaaaaagaaaagaagaagaaaaagagaaataaaggaggggaagagtaaa

SEQ ID NO: 36335 - DNA, 96 bp, Fusarium azukicola
  misc_feature: 106
ttctttatatagggaaggtttcttattaaaggtcctagtatattattagttatattattttattgagaaattaaggaattatatacctctaaatta

SEQ ID NO: 36336 - DNA, 96 bp, Fusarium azukicola
  misc_feature: 106
aaaggaggggaagagtaaagaaaaagagaagaagataaaaggagaaggggaagagtaaaagaaagaaaagtaagaaagtaatagaaagtaatagaa

SEQ ID NO: 36337 - DNA, 96 bp, Fusarium azukicola
  misc_feature: 106
gtagagaagacaactagacaactatcataatggattatactccctacctgttccatcatcatcatcatgggtcgtcgtgcgcttacagcagaggaa

SEQ ID NO: 36338 - DNA, 96 bp, Fusarium azukicola
  misc_feature: 106
aataaataagtaagttaggttaaagaagagaaaaaagggttagaaagtaataaaaaggtttaaggagagaaattaagttaaggaggaatataataa

SEQ ID NO: 36339 - DNA, 96 bp, Fusarium azukicola
  misc_feature: 106
aattattttttaccttttccttttattttactttaaattttccctctttattaaattaaccctatttactttacccctttatttttctattaataa

SEQ ID NO: 36340 - DNA, 96 bp, Fusarium azukicola
  misc_feature: 106
ttataaggcggacttatattatattttattccattctttatataatagggtcttagcttatatatatattcctttatattatctaagaaaactaat

SEQ ID NO: 36341 - DNA, 96 bp, Fusarium azukicola
  misc_feature: 106
ttagtgttaatgttctatattatattaccaactatagtgatatatccctataaaccacatattatattatagaatttttactctatttttaggtat

SEQ ID NO: 36342 - DNA, 96 bp, Fusarium azukicola
  misc_feature: 106
ttaggggtagtaatgaagttaatttaaaaagaaaagagaagaaaggatttaaaaataagagaaagagttaaataaaaaagttaggatttaaggaga

SEQ ID NO: 36343 - DNA, 96 bp, Fusarium azukicola
  misc_feature: 106
aactgtgattattcagatatacacaatataattagaggctatacagactcagactggggcagtagcctagatgataggaaatctaatagcggctaa

SEQ ID NO: 36344 - DNA, 96 bp, Fusarium azukicola
  misc_feature: 106
ttactattctttctatatcttctttataagggcccgaaaatataaggttatctatataaatagctatagtaatctttaagttcttatttataaaga

SEQ ID NO: 36345 - DNA, 96 bp, Fusarium azukicola
  misc_feature: 106
ggtaatataatatagaacattaatagcctcctttaaagttataatcttataagggttatagctttatacgttcttattattagaggaaaaaattaa

SEQ ID NO: 36346 - DNA, 96 bp, Fusarium azukicola
  misc_feature: 106
atgacccacttttatctatctatcttctataagtctctcttagaagctagatattatctctttactacttttcttcctagttatctaggaaattaa

SEQ ID NO: 36347 - DNA, 96 bp, Fusarium azukicola
  misc_feature: 106
ttaaggaccttaatgcagagctagagccgattatgaaggagcaatgggagctgaataacggtatgagaaggctaggtctttgtaatctaccgggga

SEQ ID NO: 36348 - DNA, 96 bp, Fusarium azukicola
  misc_feature: 106
tgatggaacaggtagggagtataatccattatgatagttgtctagttgtcttctctaccattgccactgataaaagagtcttgctagcatctttgt

SEQ ID NO: 36349 - DNA, 96 bp, Fusarium azukicola
  misc_feature: 106
cattagacttctctgctcaattccgacaagagattcagaccgaccgagagagaggcaagatagaagagaatactccttccgcagaagagagcctca

SEQ ID NO: 36350 - DNA, 96 bp, Fusarium azukicola
  misc_feature: 106
tctttttctttactcttcccctcctttatttctctttttcttcttcttttctttttctattccccttctttctttctcttctaactacctatcttc

SEQ ID NO: 36351 - DNA, 96 bp, Fusarium azukicola
  misc_feature: 106
cactaaatagaaaagaattctttaaaaattcaaattaaggtaaaaataacttaaaattttagattaggttaattaagtgaaatcctataaggcaga

SEQ ID NO: 36352 - DNA, 96 bp, Fusarium azukicola
  misc_feature: 106
tctcctagaatctctatagaagcccgaagggcttctatctatagctgacccaaagcctgaccctaaccctgacctaatgtatgaccctgaccctga

SEQ ID NO: 36353 - DNA, 96 bp, Fusarium azukicola
  misc_feature: 106
tccttcttagaattaggtttagattcctttttcttagaagtcttatgcaccttattggcttcctgaattttccagttttttggagccttattaggg

SEQ ID NO: 36354 - DNA, 96 bp, Fusarium azukicola
  misc_feature: 106
cttcgacccggataaatacttcaaagtggtcgtcaaggacttctctgaggtcatcgaaccacgtattagggtgcattgcttcgaccactcctctga

SEQ ID NO: 36355 - DNA, 96 bp, Fusarium azukicola
  misc_feature: 106
tattcctttatattatctgagaaaactgattttattcttattttattaggattattttctatttcttttctaaattccttaaattttataatagct

SEQ ID NO: 36356 - DNA, 96 bp, Fusarium azukicola
  misc_feature: 106
tatatatattcctttatattatctaagaaaactgattttattcttattttattaggattattttctatttcttttctaaattccttaaattttata

SEQ ID NO: 36357 - DNA, 96 bp, Fusarium azukicola
  misc_feature: 106
tataatcttataagggttatagctttatatattcttattattagaggaaaaaattaaacctctattattattatatatatcttagtaaaaacccct

SEQ ID NO: 36358 - DNA, 96 bp, Fusarium azukicola
  misc_feature: 106
atttatcctttctacaaagccattagcttgtttattatgaggcggacttgtattatattttattccattctttatacaatagggccttagcttata

SEQ ID NO: 36359 - DNA, 96 bp, Fusarium azukicola
  misc_feature: 106
tagcatcaagttcaaaggaaggatttgcttggcaccaggttcagttggtagtctagtcggataacaggtctgaggcagagatcaagacgcagaacc

SEQ ID NO: 36360 - DNA, 96 bp, Fusarium azukicola
  misc_feature: 106
attagtgttaatgttctatattatattaccaactatagtgatatatccctataaaccacatattatattatagaatttttactctatttttaggta

SEQ ID NO: 36361 - DNA, 96 bp, Fusarium azukicola
  misc_feature: 106
taccctatactctcttctctcttttactttaccctatactctcttctctcttttactttaccctccacttttattctttattttactttaccctat

SEQ ID NO: 36362 - DNA, 96 bp, Fusarium azukicola
  misc_feature: 106
tacccatatagtctaacccgatccatgtaagaaaacgctatttatactatctcatactgtacttaactagccgtcccttcgcgataccctcttcct

SEQ ID NO: 36363 - DNA, 96 bp, Fusarium azukicola
  misc_feature: 106
actaataatatactaggacctttaataagaaaccttccctatataaagaaacaactaggatatttaaataaggtgctactaggcatattgtatgta

SEQ ID NO: 36364 - DNA, 96 bp, Fusarium azukicola
  misc_feature: 106
taagcgcacgacgacccatgatgatgatgatggaacaggtagggagtataatccattatgatagttgtctagttgtcttctctaccattgccactg

SEQ ID NO: 36365 - DNA, 96 bp, Fusarium azukicola
  misc_feature: 106
taaaaagaaggttattaaagagggaggagagtttaataagtaagtatagaggagaggaagagagaagagaaagaaaggagaggaaggggagaagag

SEQ ID NO: 36366 - DNA, 96 bp, Fusarium azukicola
  misc_feature: 106
cctattctcttgtcctcacgctttaggtatcgaaagctatcaagaactttggtgatcattccattaatgagagaaaataatgccaaaaaaaaaaac

SEQ ID NO: 36367 - DNA, 96 bp, Fusarium azukicola
  misc_feature: 106
gtattgttaatgttctatattatattaccaactatagtgatatatccctataaaccacatattatattatagaatttttactctatttttaggtat

SEQ ID NO: 36368 - DNA, 96 bp, Fusarium azukicola
  misc_feature: 106
gtattcagactgagattgggcctcaaggacggtctttggggtctttgagacccaaggggtggtagggctagctacctcctcggcaggcggtggggg

SEQ ID NO: 36369 - DNA, 96 bp, Fusarium azukicola
  misc_feature: 106
gatctttttgtttgagatgccctatcgcctctgacttcctcctaggtggttctgcgtcttgatctctgcctcagacctgttatccgactagactac

SEQ ID NO: 36370 - DNA, 96 bp, Fusarium azukicola
  misc_feature: 106
aactatcataatggattatactccctacctgttccatcatcatcatcatgggtcgtcgtgcgcttacagcagaggaaaaggcaaacaaggccaacc

SEQ ID NO: 36371 - DNA, 96 bp, Fusarium azukicola
  misc_feature: 106
ccctaacccttaacgtaactactacccctaaccctaatttcaaccaattaaccctaacccttaacgtaactactacccctaaccataatttcaacc

SEQ ID NO: 36372 - DNA, 96 bp, Fusarium azukicola
  misc_feature: 106
ggttccggttccggttccggtttctagttagaccgtgcctgtacgctccttttctaccctttcaagctctaacacagctctgcgtcgcccttctgt

SEQ ID NO: 36373 - DNA, 96 bp, Fusarium azukicola
  misc_feature: 106
ggtagaaaaggagcgtacaggcacggtctaactagaaaccggaaccggaaccggaaccggaaccggaactagggttagggttatagttggggttag

SEQ ID NO: 36374 - DNA, 96 bp, Fusarium azukicola
  misc_feature: 106
ggggtagtaatgaagttaatttaaaaagaaaagagaagaaaggatttaaaaataagagaaagagttaaataaaaaagttaggatttaaggagaaat

SEQ ID NO: 36375 - DNA, 96 bp, Fusarium azukicola
  misc_feature: 106
gatctggaatacttctagggcttcttaaggctatttttgcctccctttatctcttatctcttatttcttatttctttatctcttatctcttatccc

SEQ ID NO: 36376 - DNA, 96 bp, Fusarium azukicola
  misc_feature: 106
aataaaattagttttcttagataatataaaggaatatatatataagctaagaccctattatataaagaatggaataaaatataatataagtccgcc

SEQ ID NO: 36377 - DNA, 96 bp, Fusarium azukicola
  misc_feature: 106
gcaatttttttaaaaatctaaaaaagatatttttaggttctttatatagttagatttataaaaatactttttttatatttctagctattttatagc

SEQ ID NO: 36378 - DNA, 96 bp, Fusarium azukicola
  misc_feature: 106
gatggatagaatgcaacgctgaaggttttaggaaccttcctagccaatcggcagttattatactttgatgcatagatgacggcagtcataaagggc

SEQ ID NO: 36379 - DNA, 96 bp, Fusarium azukicola
  misc_feature: 106
agcaagctcggaaacggtatttcgaagtgctaaaggcagctttaagcggcataacgcactggggagactggatcactagttgggaacaagcaatgc

SEQ ID NO: 36380 - DNA, 96 bp, Fusarium azukicola
  misc_feature: 106
atataatatgcctagtagcacctatattatatataaaattagttatattatctttattagtagaaaaatcaggtttatttaccttatttaaatatc

SEQ ID NO: 36381 - DNA, 96 bp, Fusarium azukicola
  misc_feature: 106
attagcttgtttattatgaggcggacttgtattatattttattccattctttatacaatagggccttagcttatatatatattcctttgcattatc

SEQ ID NO: 36382 - DNA, 96 bp, Fusarium azukicola
  misc_feature: 106
gagataagagataagagataagagataagagataagagataagagataagagataagagataaagaaataagaaataagagataagagataaaggg

SEQ ID NO: 36383 - DNA, 96 bp, Fusarium azukicola
  misc_feature: 106
agcccggaaaatgcgctttataatgatatataatctattactaaagccttataaatggcttagttatagcaaaaaccggttttaatggatagaaag

SEQ ID NO: 36384 - DNA, 96 bp, Fusarium azukicola
  misc_feature: 106
cttcttagaattaggtttagattcctttttcttagaagtcttatgcaccttattggcttcctgagttttccagttttttggagctttattagggtg

SEQ ID NO: 36385 - DNA, 96 bp, Fusarium azukicola
  misc_feature: 106
cttatctataccctacccatatagtctaacccgatccatgtaagaaaacgctatttatactatctcatactgtacttaactagccgtcccttcgcg

SEQ ID NO: 36386 - DNA, 96 bp, Fusarium azukicola
  misc_feature: 106
caagaggagtgcatactttgtgaaagatggcatagaaacccaaacacaaggtcgtgctgggttgcctttccagaaggagcaccagataagtatcag

SEQ ID NO: 36387 - DNA, 96 bp, Fusarium azukicola
  misc_feature: 106
atagcttttcttgtttcttttctctttcttccttcttagaattaggtttagattcccttttcttagaagtcttatgcaccttattggctttctgag

SEQ ID NO: 36388 - DNA, 96 bp, Fusarium azukicola
  misc_feature: 106
ctacctatagtagctataggttaggtaaatatacctaaaaatagagtaaaaattctataatataatatatggtttatagggatatattactatagt

SEQ ID NO: 36389 - DNA, 96 bp, Fusarium azukicola
  misc_feature: 106
actaattttatatataatataggtgctactaggtatattatatatagaaaagaatttctagttaattttagaaaaataaataaaaatattacttag

SEQ ID NO: 36390 - DNA, 96 bp, Fusarium azukicola
  misc_feature: 106
agaaaaattataaacttataacttttttagttagacttataaaattactctttttaggcttatagctattttatagctgtttttagaaatttaagg

SEQ ID NO: 36391 - DNA, 96 bp, Fusarium azukicola
  misc_feature: 106
cctctcccctctccctctctctcttttcactccttatcctctcctctcccctctccctctctctcttttcactccttctcctctcctctcccccct

SEQ ID NO: 36392 - DNA, 96 bp, Fusarium azukicola
  misc_feature: 106
aggatgaatagagaaagtatttaaggaaagggaagaaagaagagggaaaaaaaaaaagggggagaaaaaaaaagaagaaagagagagagaggaggg

SEQ ID NO: 36393 - DNA, 96 bp, Fusarium azukicola
  misc_feature: 106
atctaagaaaactaattttattcttattttattaggattattttctatttcttttctaaattccttaaattttataatagcttctaacttattcct

SEQ ID NO: 36394 - DNA, 96 bp, Fusarium azukicola
  misc_feature: 106
atatcctaatagtagtataaatgagctacaaatctgtttaaaattaagaaaagccttatatggcctaaaacaaagccctatattgtggtataacct

SEQ ID NO: 36395 - DNA, 96 bp, Fusarium azukicola
  misc_feature: 106
actttaaaggaggctattaatattctatattatattactaactatagtgatatatccctataaactatatattatattatagaatttttactctat

SEQ ID NO: 36396 - DNA, 96 bp, Fusarium azukicola
  misc_feature: 106
acaataagaatcaactcttcagttaattcaatcatcaacaactaaatcccacttttatctgatccaatcagactctttattgtgacccacttttat

SEQ ID NO: 36397 - DNA, 96 bp, Fusarium azukicola
  misc_feature: 106
agtagcacctatattatatataaaattagttatattatctttattagtagaaaaatcaggtttatttaccttatttaaatatcctagttgtttctt

SEQ ID NO: 36398 - DNA, 96 bp, Fusarium azukicola
  misc_feature: 106
agctgtgttagagcttgaaagggtagaaaaggagcgtacaggcacggtctaactagaaaccggaaccggaaccggaaccggaaccggaactagggt

SEQ ID NO: 36399 - DNA, 96 bp, Fusarium azukicola
  misc_feature: 106
aaactttaaattttagctattttagagttagtttgaattttctaggattttttaaaaaacctagttttagtatatagtacctctattgcactcgct

SEQ ID NO: 36400 - DNA, 96 bp, Fusarium azukicola
  misc_feature: 106
aagataatggttagggttaatggattgtagtaaaggttagggggagtaattaagattaaggttagttagagtaatagaaaaggaagagaaggggtt

SEQ ID NO: 36401 - DNA, 96 bp, Fusarium azukicola
  misc_feature: 106
aactagaaattcttttctatatataatatgcctagtagcacctatattatatataaaattagttatattatctttattagtagaaaaattaggttt

SEQ ID NO: 36402 - DNA, 96 bp, Fusarium azukicola
  misc_feature: 105
tattattctaattggttaaaaaggttcctacagacctttatgactgccgtcatctatgcatcaaagtataataactgccgattggctaaaaaaaaa

SEQ ID NO: 36403 - DNA, 96 bp, Fusarium azukicola
  misc_feature: 105
aataataataataataaaaaagaaatcttcttaggataaccctaggataatagaagatatatatatatatgaccctaaccttaaggtaagaaaaaa

SEQ ID NO: 36404 - DNA, 96 bp, Fusarium azukicola
  misc_feature: 105
agagagagagggagaggggagagaagaggataaagaataaaaagagagagaagggaaaagaaagagggaaaaaagaaataaaagaggaagaggaaa

SEQ ID NO: 36405 - DNA, 96 bp, Fusarium azukicola
  misc_feature: 105
ttgtagaaaggataaataggactatattagaaaaggttagagctttattatttacttctaacctacctaaatacctttggggagaggctgtgggag

SEQ ID NO: 36406 - DNA, 96 bp, Fusarium azukicola
  misc_feature: 105
gaagctattataaaatttaaggaatttagaaaagaaatagaaaataatcctaataaaataagaataaaatcagttttctcagataatacaaaggaa

SEQ ID NO: 36407 - DNA, 96 bp, Fusarium azukicola
  misc_feature: 105
ttcctttatattatctgagaaaactgattttattcttattttattaggattattttctatttcttttctaaattccttaaattttataatagcttc

SEQ ID NO: 36408 - DNA, 96 bp, Fusarium azukicola
  misc_feature: 105
ataatcctaataaaataagaataaaatcagttttcttagataatataaaggaatatatatataagctaagaccctattatataaagaatagaataa

SEQ ID NO: 36409 - DNA, 96 bp, Fusarium azukicola
  misc_feature: 105
ttattagaggaaaaaattaaacctctattattattatatatcttagtaaaaacccctttattatagacctaatattataagggaaaatctaagatt

SEQ ID NO: 36410 - DNA, 96 bp, Fusarium azukicola
  misc_feature: 105
ataactattcctattggatttaaagaccttataattaaggatttccttaaggattataaaaagaaacatcctaatagtagtataaatgagctataa

SEQ ID NO: 36411 - DNA, 96 bp, Fusarium azukicola
  misc_feature: 105
ttagattactatatccttagatagaatatttactattctttctatatcttctttataagggcccgaaaatataaggttatctatataaatagctat

SEQ ID NO: 36412 - DNA, 96 bp, Fusarium azukicola
  misc_feature: 105
cttaattatatatataaatatataaataaaaatctctctttaagttttaatagggctatacctcctattttaactaataatctagcagctaagtaa

SEQ ID NO: 36413 - DNA, 96 bp, Fusarium azukicola
  misc_feature: 105
gttaagtggttaagttaagggttagggttaagtagttatagtaaaggttagggttaagtggttaagttaagggttagggttaagtagttatagtaa

SEQ ID NO: 36414 - DNA, 96 bp, Fusarium azukicola
  misc_feature: 105
ttacgttaagggttagggttaattggttgaaattagggttaggggtagtagttacgttaagggttagggttaattggttgaaattagggttagggg

SEQ ID NO: 36415 - DNA, 96 bp, Fusarium azukicola
  misc_feature: 105
ttaattaataacttcgagttattcctctcttttatagtctctggaccccagcaatgacaaggtcccttcttctcataggaaaaggcgccccagaac

SEQ ID NO: 36416 - DNA, 96 bp, Fusarium azukicola
  misc_feature: 105
ttaatatttaaatataacgctattaatactacctataaagatatcggcgagattattaagcctaaggacctagagctatttaatagataagctaat

SEQ ID NO: 36417 - DNA, 96 bp, Fusarium azukicola
  misc_feature: 105
ttaataagttaatcttctctttataatataacttctattataaataaataagaagtccttcttttaaataaataaggaaaaataatattataagga

SEQ ID NO: 36418 - DNA, 96 bp, Fusarium azukicola
  misc_feature: 105
tctttaaatatactagtgaggacctatattaagtcaaaaactgcgaaaactgcaaactaggaaaattaactaaaaataatataaataaaaaaccta

SEQ ID NO: 36419 - DNA, 96 bp, Fusarium azukicola
  misc_feature: 105
tcttcttcgtcatctcctaaagccgaggaagacctaatttccctttctgagaccccagatgaaatggattttgatataagtaatgatttagaggta

SEQ ID NO: 36420 - DNA, 96 bp, Fusarium azukicola
  misc_feature: 105
tcttacatggatcgggttagactatatgggtagggtatagataagagggttattagctagggtaaggcgattagggattaataagtactaagagag

SEQ ID NO: 36421 - DNA, 96 bp, Fusarium azukicola
  misc_feature: 105
tctcttctatcttgcctctctctcggtcggtctgaatctcttgtcggaattgagcagagaagtctaatggttggtaggtcccattctcaatcttcc

SEQ ID NO: 36422 - DNA, 96 bp, Fusarium azukicola
  misc_feature: 105
tctctataaagcaatttttttaaaaatctaaaaaagatatttttaggttctttatatagttagatttataaaaatactttttttatatttctagct

SEQ ID NO: 36423 - DNA, 96 bp, Fusarium azukicola
  misc_feature: 105
tctaattccttaatatctaaggaaatattatctctaacttctagaggggatttattatttaaagccgaatgcgggcttctattatatatatatata

SEQ ID NO: 36424 - DNA, 96 bp, Fusarium azukicola
  misc_feature: 105
tattattattattattatataatattgcctttttattattataagggctttctttaaagtaaggaatctcattaaaagaggggttatttccttcga

SEQ ID NO: 36425 - DNA, 96 bp, Fusarium azukicola
  misc_feature: 105
tcctctcccctctccctctctctcttttcactccttatcctctcctctcccctctccctctctctcttttcactccttatcctctcctctcccccc

SEQ ID NO: 36426 - DNA, 96 bp, Fusarium azukicola
  misc_feature: 105
tatttccttattattttatttatatattttacttatgaaaaagatatactcttattctctctatttatagttatatttattcctaaaaagtcttta

SEQ ID NO: 36427 - DNA, 96 bp, Fusarium azukicola
  misc_feature: 105
tatttatcctttctacaaagccattagcttgtttattatgaggcggacttgtattatattttattccattctttatacaatagggccttagcttat

SEQ ID NO: 36428 - DNA, 96 bp, Fusarium azukicola
  misc_feature: 105
tagaaaataatcctaataaaataagaataaaatcagttttcttagataatataaaggaatatatatataagctaagaccctattatataaagaata

SEQ ID NO: 36429 - DNA, 96 bp, Fusarium azukicola
  misc_feature: 105
ctaggaacttatattccttattattaggttttttatttatattatttttagttaattttcctagtttatagtttttatagtttttaacttaatata

SEQ ID NO: 36430 - DNA, 96 bp, Fusarium azukicola
  misc_feature: 105
aagaagaattagctataaatagcttttcttatttcttttctctttcttccttcttagaattaagtttagattcctttttcttagaagtcttatata

SEQ ID NO: 36431 - DNA, 96 bp, Fusarium azukicola
  misc_feature: 105
tatataaaaggtttataaagttaaaataaaggggaattaattaaataattaaggttatatatatatagctagctcccctatatctaggagctttag

SEQ ID NO: 36432 - DNA, 96 bp, Fusarium azukicola
  misc_feature: 105
tatagtgatatatccctataaaccatatattatattatagaatttttactttatttttaggtatatttacctaacctatagctactataggtagct

SEQ ID NO: 36433 - DNA, 96 bp, Fusarium azukicola
  misc_feature: 105
tatactagtgaggacctatattaagtcaaaaactgcgaaaactgcaaactaggaaaattaactaaaaataatataaataaaaaacctagtaataag

SEQ ID NO: 36434 - DNA, 96 bp, Fusarium azukicola
  misc_feature: 105
tataccctacccatatagtctaacccgatccatgtaagaaaacgctatttatactatctcatactgtacttaactagccgtcccttcgcgataccc

SEQ ID NO: 36435 - DNA, 96 bp, Fusarium azukicola
  misc_feature: 105
gacctaaaaagaataattcttagctattttacccttaaataaactataaataatttttatagatttttaaaaaatttcgtttataaagaaattata

SEQ ID NO: 36436 - DNA, 96 bp, Fusarium azukicola
  misc_feature: 105
tataaggcggacttatattatattttattccattctttatataatagggtcttagcttatatatatattcctttatattatctaagaaaactaatt

SEQ ID NO: 36437 - DNA, 96 bp, Fusarium azukicola
  misc_feature: 105
gaagccaataaggtgcataagacttctaagaaaaaggaatctaaacctaattctaagaaggaagaaagagaaaagaaataagaaaagctatttata

SEQ ID NO: 36438 - DNA, 96 bp, Fusarium azukicola
  misc_feature: 105
accctaatttcaaccaattaaccctaacccttaacgtaactactacccctaaccctaatttcaaccaattaaccctaacccttaacgtaactacta

SEQ ID NO: 36439 - DNA, 96 bp, Fusarium azukicola
  misc_feature: 105
tagtacttattaatccctaatcgccttaccctagctaataaccctcttatctataccctacccatatagtctaacccgatccatgtaagaaaacgc

SEQ ID NO: 36440 - DNA, 96 bp, Fusarium azukicola
  misc_feature: 105
aactttaaaggaggctattaatattctatattatattactaactatagtgatatatccctataaactatatattatattatagaatttttactcta

SEQ ID NO: 36441 - DNA, 96 bp, Fusarium azukicola
  misc_feature: 105
tagaataaaatataatataagtccgccttataataaataagctaatggctttatagaaaggataaataggactatattagaaaaggttagagcttt

SEQ ID NO: 36442 - DNA, 96 bp, Fusarium azukicola
  misc_feature: 105
tactatatactttaagatacctatataaggaatttttttaaaaatttagaaaaaatatttttaagtcttatatatagctaaatagttaaaatcgtt

SEQ ID NO: 36443 - DNA, 96 bp, Fusarium azukicola
  misc_feature: 105
tacctaaaaatagagtaaaaattctataatataatatgtggtttatagggatatatcactatagttggtaatataatatagaacattaacaaaaat

SEQ ID NO: 36444 - DNA, 96 bp, Fusarium azukicola
  misc_feature: 105
taccctacccatatagtctaacccgatccatgtaagaaaacgctatttatactatctcatactgtacttaactagccgtcccttcgcgataccctc

SEQ ID NO: 36445 - DNA, 96 bp, Fusarium azukicola
  misc_feature: 105
taatgcaaaggaatatatatataagctaaggccctattgtataaagaatggaataaaatataatacaagtccgcctcataataaacaagctaatgg

SEQ ID NO: 36446 - DNA, 96 bp, Fusarium azukicola
  misc_feature: 105
agtttgttgtgtttttattgtgatatctatcttatagggttgagattcttgatccactcgcttggttgatccactcgcttatcatgtacgttatta

SEQ ID NO: 36447 - DNA, 96 bp, Fusarium azukicola
  misc_feature: 105
taactactacccctaaccctaatttcaaccaattaaccctaacccttaacgtaactactacccctaaccataatttcaaccaattaaccctaaccc

SEQ ID NO: 36448 - DNA, 96 bp, Fusarium azukicola
  misc_feature: 105
taacgcactggggagactggatcactagttgggaacaagcaatgcgaatcgcgaagctcagaggagtggtcgaagcaatgcaccctaatacgtggt

SEQ ID NO: 36449 - DNA, 96 bp, Fusarium azukicola
  misc_feature: 105
atttctctccttaaacctttttattactttctaacccttttttctcttctttaacctaacttacttatttattttattctccctctttcttcttta

SEQ ID NO: 36450 - DNA, 96 bp, Fusarium azukicola
  misc_feature: 105
gtattctcttctatcttgcctctctctcggtcggtctgaatctcttgtcggaattgagcagagaagtctaatggttggtaggtcccattctcaatc

SEQ ID NO: 36451 - DNA, 96 bp, Fusarium azukicola
  misc_feature: 105
aaggagcgtacaggcacggtctaactagaaaccggaaccggaaccggaaccggaaccggaactagggttagggttatagttggggttagtatttac

SEQ ID NO: 36452 - DNA, 96 bp, Fusarium azukicola
  misc_feature: 105
ggctatttttgcctccctttatctcttatctcttatttcttatttctttatctcttatctcttatctcttatctcttatctcttatctcttatctc

SEQ ID NO: 36453 - DNA, 96 bp, Fusarium azukicola
  misc_feature: 105
agacaactatcataatggattatactccctacctgttccatcatcatcatcatgggtcgtcgtgcgcttacagcagaggaaaaggcaaacaaggcc

SEQ ID NO: 36454 - DNA, 96 bp, Fusarium azukicola
  misc_feature: 105
agaaccttcttctccagaagatataaagtaattccaaaaggaaataggttctttaatatttctagctataaaaactagacctaatatagcttatgc

SEQ ID NO: 36455 - DNA, 96 bp, Fusarium azukicola
  misc_feature: 105
gatgatgatggaacaggtagggagtataatccattatgatagttgtctagttgtcttctctaccattgccactgataaaagagtcttgctagcatc

SEQ ID NO: 36456 - DNA, 96 bp, Fusarium azukicola
  misc_feature: 105
caatctaggtctttatgacctagcagtttgcaataactgcattttaaggcagttttcttctttttctaaggcttagaagtcttagaaaaatatatc

SEQ ID NO: 36457 - DNA, 96 bp, Fusarium azukicola
  misc_feature: 105
ctctcccctctccctctctctcttttcactccttatcctctcctctcccctctccctctctctcttttcactccttctcctctcctctcccccctc

SEQ ID NO: 36458 - DNA, 96 bp, Fusarium azukicola
  misc_feature: 105
cttataagctttaaggagtaatcctaaggcttataacctagaatcactttcttctagccttatagataaatctaagagactagaaaaaatagattc

SEQ ID NO: 36459 - DNA, 96 bp, Fusarium azukicola
  misc_feature: 105
agacttagacttagggttagacttagacttagacttagacttagacttagggttagacttagggttaggcttaggcctttacttactcttatattc

SEQ ID NO: 36460 - DNA, 96 bp, Fusarium azukicola
  misc_feature: 105
aagaaaagaagaagaaaaagagaaataaaggaggggaagagtaaagaaaaagagaagaagataaaaggagaaggggaagagtaaaagaaagaaaag

SEQ ID NO: 36461 - DNA, 96 bp, Fusarium azukicola
  misc_feature: 105
ctttaaatatactagtgaggacctatattaagtcaaaaactgcgaaaactgcaaactaggaaaattaactaaaaataatataaataaaaaacctag

SEQ ID NO: 36462 - DNA, 96 bp, Fusarium azukicola
  misc_feature: 105
caaaacaaagggaagattgagaatgggacctaccaaccattagacttctctgctcaattccgacaagagattcagaccgaccgagagagaggcaag

SEQ ID NO: 36463 - DNA, 96 bp, Fusarium azukicola
  misc_feature: 105
agagagagggagaggggagaggagaggataaggagtgaaaagagagagagggagaggggagaggagaggataaggagagaaaagagagagagggag

SEQ ID NO: 36464 - DNA, 96 bp, Fusarium azukicola
  misc_feature: 105
ctcaattcctcctcctttcatctaatcaatcaattctctaccattcaagatgccacaatcaaatattgaagcaagaacgcttcttgcccttcttgt

SEQ ID NO: 36465 - DNA, 96 bp, Fusarium azukicola
  misc_feature: 105
aattttttcctttatatttaaaataggaagatctaagttatctcttagtctatagttattcttattagaaataaccttagctattattatatatag

SEQ ID NO: 36466 - DNA, 96 bp, Fusarium azukicola
  misc_feature: 105
ataataataataaaaaagaaatcttcttaggataaccctaggataatagaagatatatatatatatgaccctaaccttaaggtaagaaaaaaaagg

SEQ ID NO: 36467 - DNA, 96 bp, Fusarium azukicola
  misc_feature: 105
aagaaccttcttctccagaagatataaagtaattccaaaaggaaataggttctttaatatttctagctataaaaactagacctaatatagcttatg

SEQ ID NO: 36468 - DNA, 96 bp, Fusarium azukicola
  misc_feature: 105
ataagagtatatctttttcataagtaaaatatataaataaaataataaggaaatataataaataagaaataggaacttctaaagtacctattaaat

SEQ ID NO: 36469 - DNA, 96 bp, Fusarium azukicola
  misc_feature: 105
aagctattataaaatttaaggaatttagaaaagaaatagaaaataatcctaataaaataagaataaaatcagttttcttagataatataaaggaat

SEQ ID NO: 36470 - DNA, 96 bp, Fusarium azukicola
  misc_feature: 105
agggttaatttaataaagagggaaaatttaaagtaaaataaaaggaaaaggtaaaaaataattataataaaggttaagagaaataattaaagtaat

SEQ ID NO: 36471 - DNA, 96 bp, Fusarium azukicola
  misc_feature: 105
atataccttcaattgcttacattgccactttatgccgacactgatcaaactcgacagcacatcgtgacgaacagcgcgacatcaataccctacact

SEQ ID NO: 36472 - DNA, 96 bp, Fusarium azukicola
  misc_feature: 105
agaggaaaaattaaacctctattattattatatatatatcttagtaaaaacccctttattatagacctgatattataagggaaaatctaagattat

SEQ ID NO: 36473 - DNA, 96 bp, Fusarium azukicola
  misc_feature: 105
ataatataggtgctactaggcatattatatatagaaaagaatttctagttaattttagaaaaataaataaaaatattacttagggaaaagccgctt

SEQ ID NO: 36474 - DNA, 96 bp, Fusarium azukicola
  misc_feature: 105
ataaataaaataataaggaaatataataaataagaaataagaacttctaaagtacctattaaatttatagaaagactcttaaaatctaaagaacct

SEQ ID NO: 36475 - DNA, 96 bp, Fusarium azukicola
  misc_feature: 105
agctttatatattcttattattagaggaaaaattaaacctctattattattatatatatatcttagtaaaaacccctttattatagacctaatatt

SEQ ID NO: 36476 - DNA, 96 bp, Fusarium azukicola
  misc_feature: 105
agccttataaatggcttagttatagcaaaaaccggttttaatggatagaatgcaacgctgaaggttttaggaaccttcctagccaatcggcaggtt

SEQ ID NO: 36477 - DNA, 96 bp, Fusarium azukicola
  misc_feature: 105
aataataaaactatattaattttcctagatttttaataaaatcttatttacttagtatttaaaaaacctatttacactgtatacttagctatttct

SEQ ID NO: 36478 - DNA, 96 bp, Fusarium azukicola
  misc_feature: 105
aaatagagagaataagagtatatctttttcataagcaaaatatataaataaaataataaggaaatataataaataagaaataggaacttctaaagt

SEQ ID NO: 36479 - DNA, 96 bp, Fusarium azukicola
  misc_feature: 105
aaggggaatagaaaaagaaaagaagaagaaaaagagaaataaaggaggggaagagtaaagaaaaagagaagaagataaaaggagaaggggaagagt

SEQ ID NO: 36480 - DNA, 96 bp, Fusarium azukicola
  misc_feature: 105
aactaataatatactaggacctttaataagaaaccttccctatataaagaaacaactaggatatttaaataaggtgctactaggcatattgtatgt

SEQ ID NO: 36481 - DNA, 96 bp, Fusarium azukicola
  misc_feature: 105
aactgcgaaaactataaactaggaaaattaactaaaaataatataaataaaaaacctagtaataaggaatataagttcctagataaaatagctatt

SEQ ID NO: 36482 - DNA, 96 bp, Fusarium azukicola
  misc_feature: 105
aactaggaaaattaactaaaaataatataaataaaaaacctagtaataaggaatataagttcctagataaaatagctattaatatatagggtcctt

SEQ ID NO: 36483 - DNA, 96 bp, Fusarium azukicola
  misc_feature: 104
attatatatcttagtaaaaacccctttattatagacctaatattataagggaaaatctaagattatatagggaaaagtattaaaatataataaaaa

SEQ ID NO: 36484 - DNA, 96 bp, Fusarium azukicola
  misc_feature: 104
ataccgtcggatagcccggaagatgcgctttataatctattactaaagccttataaatggcttagttatagcaaaaaccggttttaatggataaaa

SEQ ID NO: 36485 - DNA, 96 bp, Fusarium azukicola
  misc_feature: 104
atatagctaggaaagagatatagctaggaaaaagagatatagctaagagagagaggtaaagctaagaaagagagatatagctagaaaagagagaaa

SEQ ID NO: 36486 - DNA, 96 bp, Fusarium azukicola
  misc_feature: 104
tttccttattattttatttatatattttgcttatgaaaaagatatactcttattctctctatttatagttatattcattcctaaaaagtctttaac

SEQ ID NO: 36487 - DNA, 96 bp, Fusarium azukicola
  misc_feature: 104
tttatttaagggtaaaatagctaagaattattctttttaggtctataactattttattttagcttttattaagctttaaagttttatgttttagtg

SEQ ID NO: 36488 - DNA, 96 bp, Fusarium azukicola
  misc_feature: 104
atatataaagctataacccttataagattataactttaaaggaggctattaatattctatattatattactaactatagtaatatatccctataaa

SEQ ID NO: 36489 - DNA, 96 bp, Fusarium azukicola
  misc_feature: 104
tttaatttttcctctaataataagaacgtataaagctataacccttataagattataactttaaaggaggctattaatattctatattatattact

SEQ ID NO: 36490 - DNA, 96 bp, Fusarium azukicola
  misc_feature: 104
aaccctaacccttaacgtaactactacccctaaccctaatttcaaccaattaaccctaacccttaacgtaactactacccctaaccataatttcaa

SEQ ID NO: 36491 - DNA, 96 bp, Fusarium azukicola
  misc_feature: 104
ttgaaattagggttaggggtagtagtagagttaagggttagggttaattggttgaaattagggttaggggtagtagtagagttaagggttaggggt

SEQ ID NO: 36492 - DNA, 96 bp, Fusarium azukicola
  misc_feature: 104
gatatagctaggaaagagatatagctaggaaaaagagatatagctaagagagagaggtaaagctaagaaagagagatatagctagaaaagagagaa

SEQ ID NO: 36493 - DNA, 96 bp, Fusarium azukicola
  misc_feature: 104
agaaagaaagaaggggaatagaaaaagaaaagaagaagaaaaagagaaataaaggaggggaagagtaaagaaaaagagaagaagataaaaggagaa

SEQ ID NO: 36494 - DNA, 96 bp, Fusarium azukicola
  misc_feature: 104
atatactagtgaggacctatattaagtcaaaaactgcgaaaactgcaaactaggaaaattaactaaaaataatataaataaaaaacctagtaataa

SEQ ID NO: 36495 - DNA, 96 bp, Fusarium azukicola
  misc_feature: 104
ttattaatattctatattatattactaactatagtgatatatccctataaaccatatattatattatagaatttttactctatttttaggtatatt

SEQ ID NO: 36496 - DNA, 96 bp, Fusarium azukicola
  misc_feature: 104
ttatctcttatcttttatttctctcttttctagctatatctctctttcttagctttacctctctctcttagctatatctctttttcctagctatat

SEQ ID NO: 36497 - DNA, 96 bp, Fusarium azukicola
  misc_feature: 104
ttatatttccttattattttatttatatattttacttataaaaaagatatactcttattctctctatttatagttatatttattcctaaaaagtct

SEQ ID NO: 36498 - DNA, 96 bp, Fusarium azukicola
  misc_feature: 104
ttataatcttataagggttatagctttatatattcttattattagaggaaaaaattaaacctctattattattatatatatcttagtaaaaacccc

SEQ ID NO: 36499 - DNA, 96 bp, Fusarium azukicola
  misc_feature: 104
ctttatattatctaagaaaactaattttattcttattttattaggattattttctatttcttttctaaattccttaaattttataatagcttctaa

SEQ ID NO: 36500 - DNA, 96 bp, Fusarium azukicola
  misc_feature: 104
tagggttaatttaataaagagggaaaatttaaagtaaaataaaaggaaaaggtaaaaaataattataataaaggttaagagaaataattaaagtaa

SEQ ID NO: 36501 - DNA, 96 bp, Fusarium azukicola
  misc_feature: 104
ggggaatagaaaaagaaaagaagaagaaaaagagaaataaaggaggggaagagtaaagaaaaagagaagaagataaaaggagaaggggaagagtaa

SEQ ID NO: 36502 - DNA, 96 bp, Fusarium azukicola
  misc_feature: 104
gaagagaaagaagataggtagttagaagagaaagaaagaaggggaatagaaaaagaaaagaagaagaaaaagagaaataaaggaggggaagagtaa

SEQ ID NO: 36503 - DNA, 96 bp, Fusarium azukicola
  misc_feature: 104
ttaatataggtcctcactagtatatttaaagagaggatcttttatttttatatatttaattagacttcttaagttaagatgacttagtcttttatg

SEQ ID NO: 36504 - DNA, 96 bp, Fusarium azukicola
  misc_feature: 104
atttccttattattttatttatatattttacttataaaaaagatatactcttattctctctatttatagttatatttattcctaaaaagtctttaa

SEQ ID NO: 36505 - DNA, 96 bp, Fusarium azukicola
  misc_feature: 104
tgtatagctatactgtgcactaaaaccttatatttctaaccttaataaaaactgctataaaatagctagaaacttaaaaaaagtatttctataaat

SEQ ID NO: 36506 - DNA, 96 bp, Fusarium azukicola
  misc_feature: 104
tctttttgtttgagatgccctatcgcctctgacttcctcctaggtggttctgcgtcttgatctctgcctcagacctgttatccgactagactacca

SEQ ID NO: 36507 - DNA, 96 bp, Fusarium azukicola
  misc_feature: 104
atttacctaacctatagctactataggtagctagatattaagggtattattctaattggttaaaaaggttcctacagacctttatgactgccggca

SEQ ID NO: 36508 - DNA, 96 bp, Fusarium azukicola
  misc_feature: 104
atggcgagatcaagaggttggaggacatgagaagagtgaggaataaggaataaaaggaagatattattatcgtagcactcaaagaggaattcctca

SEQ ID NO: 36509 - DNA, 96 bp, Fusarium azukicola
  misc_feature: 104
ggtattattctaattggttaaaaaggttcctatagacctttatgactgccgtcatctatgcatcaagtataataactgccgattggctaaaaaaga

SEQ ID NO: 36510 - DNA, 96 bp, Fusarium azukicola
  misc_feature: 104
ataaatataattataaagcctataataatagcgagtataaatataattatatcgcctatagactattaaaaaactaagagaaccgactattaaaga

SEQ ID NO: 36511 - DNA, 96 bp, Fusarium azukicola
  misc_feature: 104
gagagggagaggggagagaagaggataaagaataaaaagagagagaagggaaaagaaagagggaaaaaagaaataaaagaggaagaggaaaggaga

SEQ ID NO: 36512 - DNA, 96 bp, Fusarium azukicola
  misc_feature: 104
agtaatatatccctataaactatatattatattatagaatttttactctatttttaggtatatttacctaacctatagctactataggtagctaga

SEQ ID NO: 36513 - DNA, 96 bp, Fusarium azukicola
  misc_feature: 104
ggtagagaagacaactagacaactatcataatggattatactccctacctgttccatcatcatcatcatgggtcgtcgtgcgcttacagcagagga

SEQ ID NO: 36514 - DNA, 96 bp, Fusarium azukicola
  misc_feature: 104
tcctctaataataagaacgtataaagctataacccttataagattataactttaaaggaggctgttaatattctatattatattactaactatagt

SEQ ID NO: 36515 - DNA, 96 bp, Fusarium azukicola
  misc_feature: 104
tcatcttttgagaatatagaaatatatcttaataagataaaagaggttaaaaatgagctagaagctagagaaatcactattcctgaaaaagtgact

SEQ ID NO: 36516 - DNA, 96 bp, Fusarium azukicola
  misc_feature: 104
gtataaagtcttagaaaagacttaaaaaagaagtataatcttcttttaagtataaacccttaggtagagacctctaggcttataacctattagtga

SEQ ID NO: 36517 - DNA, 96 bp, Fusarium azukicola
  misc_feature: 104
aagatcctctctttaaatatactaataaggacctatattaagttaaaaactataaaaactataaactaggaaaattaactaaaaataatataaata

SEQ ID NO: 36518 - DNA, 96 bp, Fusarium azukicola
  misc_feature: 104
ccggatagtagcggtttcctttacctctcttagtacttattaatccctaatcgccttaccctagctaataaccctcttatctataccctacccata

SEQ ID NO: 36519 - DNA, 96 bp, Fusarium azukicola
  misc_feature: 104
aaaataagaataaaatcagttttcttagataatacaaaggaatatatatataagctaagaccctattatataaagaatggaataaaatataatata

SEQ ID NO: 36520 - DNA, 96 bp, Fusarium azukicola
  misc_feature: 104
tatataattaactatttcactataaatagaattttttaaaaatctaaaaaaatcatttttagactttattaagagttagatttatagaaatactct

SEQ ID NO: 36521 - DNA, 96 bp, Fusarium azukicola
  misc_feature: 104
tataagattactttttttaagtttctagctattttatagcagtttttagaaacttaggttttagcgatttttagttatacagtatgctgtctcgtt

SEQ ID NO: 36522 - DNA, 96 bp, Fusarium azukicola
  misc_feature: 104
tagttaaaataggaggtatagccctattaaaacttaaagagagatttttatttatatatttatatatataattaagagaaattaactctttaatag

SEQ ID NO: 36523 - DNA, 96 bp, Fusarium azukicola
  misc_feature: 104
atagtaatatatccctataaactatatattatattatagaatttttactctatttttaggtatatttacctaacctatagctactataggtagcta

SEQ ID NO: 36524 - DNA, 96 bp, Fusarium azukicola
  misc_feature: 104
tagagagaataagagtatatctttttcataagcaaaatatataaataaaataataaggaaatataataaataagaaataggaacttctaaagtacc

SEQ ID NO: 36525 - DNA, 96 bp, Fusarium azukicola
  misc_feature: 104
tactttttttaagtttctagctattttatagcagtttttattaaggttagaaatataaggttttagtgcacagtatagctatacagctcacttgtg

SEQ ID NO: 36526 - DNA, 96 bp, Fusarium azukicola
  misc_feature: 104
tactataactacttaaccctaacccttaacttaaccacttaaccctaacctttactataactacttaaccctaacccttaacttaaccacttaacc

SEQ ID NO: 36527 - DNA, 96 bp, Fusarium azukicola
  misc_feature: 104
tacctaaaaatagagtaaaaattctataatataatatgtggtttatagggatatatcactatagttggtaatataatatagaacattaacaggtat

SEQ ID NO: 36528 - DNA, 96 bp, Fusarium azukicola
  misc_feature: 104
ggagggttagaagggttaagaaaggagagaagtaaggaaggttaagaaaggagagaagtaaggaaggttaagaaaggagagaagtaaggaagggta

SEQ ID NO: 36529 - DNA, 96 bp, Fusarium azukicola
  misc_feature: 104
tacagctatactgtgcactaaaacataaaactttaaagcttaataaaagctaaaataaaatagttatagacctaaaaagaataattcttagctatt

SEQ ID NO: 36530 - DNA, 96 bp, Fusarium azukicola
  misc_feature: 104
taatgagatatatttttctaagacttctaagccttagaaaaagaagaaaactgccttaaaatgcagttattgcaaactgctaggtcataaagaccc

SEQ ID NO: 36531 - DNA, 96 bp, Fusarium azukicola
  misc_feature: 104
taatataatatagaatattaatagcctcctttaaagttataatcttataagggttatagctttatatattcttattattagaggaaaaaattaaac

SEQ ID NO: 36532 - DNA, 96 bp, Fusarium azukicola
  misc_feature: 104
agaataaaatataatataagtccgccttataataaataagctaatggctttatagaaaggataaataggactatattagaaaaggttagagcttta

SEQ ID NO: 36533 - DNA, 96 bp, Fusarium azukicola
  misc_feature: 104
aaggcggacttatattatattttattccattctttatataatagggtcttagcttatatatatattcctttatattatctaagaaaactaatttta

SEQ ID NO: 36534 - DNA, 96 bp, Fusarium azukicola
  misc_feature: 104
agtgcgaataattctttttctaaactaccttataagggattttttaaaaagttttaaaaaatcataataggttttttatagcttaattagtctaac

SEQ ID NO: 36535 - DNA, 96 bp, Fusarium azukicola
  misc_feature: 104
agggagtataatccattatgatagttgtctagttgtcttctctaccattgccactgataaaagagtcttgctagcatctttgtttgttttgaccac

SEQ ID NO: 36536 - DNA, 96 bp, Fusarium azukicola
  misc_feature: 104
gtcttcattttcttcgtatcagcttggcttcttcctagcttgataaattcagggtgtaatcttcgcaatttggacttcaaagccttccaaagatgc

SEQ ID NO: 36537 - DNA, 96 bp, Fusarium azukicola
  misc_feature: 104
gtataaagctataacccttataagattataactttaaaggaggctattaatattctatattatattactaactatagtgatatatccctataaact

SEQ ID NO: 36538 - DNA, 96 bp, Fusarium azukicola
  misc_feature: 104
agtatataccttcaattgcttacattgccactttatgccgacactgatcaaactcgacagcacatcgtgacgaacagcgcgacatcaataccctac

SEQ ID NO: 36539 - DNA, 96 bp, Fusarium azukicola
  misc_feature: 104
ccctaacccttaactctactactacccctaaccctaatttcaaccaattaaccctaacccttaacgtaactactacccctaaccctaatttcaacc

SEQ ID NO: 36540 - DNA, 96 bp, Fusarium azukicola
  misc_feature: 104
acctagtatataccttcaattgcttacattgccactttatgccgacactgatcaaactcgacagcacatcgtgacgaacagcgcgacatcaatacc

SEQ ID NO: 36541 - DNA, 96 bp, Fusarium azukicola
  misc_feature: 104
gggagggttagaagggttaagaaaggagagaagtaaggaaggttaagaaaggagagaagtaaggaaggttaagaaaggagagaagtaaggaagggt

SEQ ID NO: 36542 - DNA, 96 bp, Fusarium azukicola
  misc_feature: 104
ggctctcttctgcggaaggagtattctcttctatcttgcctctctctcggtcggtctgaatctcttgtcggaattgagcagagaagtctaatggtt

SEQ ID NO: 36543 - DNA, 96 bp, Fusarium azukicola
  misc_feature: 104
ggattgatcttctcaatcatccaattgagcacattgccaatcccatctgcttgcttgttgtattcgcgttcgtcttgttgatatatagccatctcc

SEQ ID NO: 36544 - DNA, 96 bp, Fusarium azukicola
  misc_feature: 104
ggagaggataaggagtgaaaagagagagagggagaggggagaggagaggataaggagtgaaaagagagagagggagaggggagaggagaggagaag

SEQ ID NO: 36545 - DNA, 96 bp, Fusarium azukicola
  misc_feature: 104
aagacgggtctcgagtggatcaagcacttcaatcaacacacaaaggcccgatcaaccggtggctatcgtcttctgatccttgacgggcatgaaagc

SEQ ID NO: 36546 - DNA, 96 bp, Fusarium azukicola
  misc_feature: 104
aggaatttagaaaagaaatagaaaataatcctaataaaataagaataaaatcagttttctcagataatgcaaaggaatatatatataagctaaggc

SEQ ID NO: 36547 - DNA, 96 bp, Fusarium azukicola
  misc_feature: 104
gattactttttttaagtttctagctattttatagcagtttttagaaacttaggttttagcgatttttagttatacagtatgctgtctcgttcgctt

SEQ ID NO: 36548 - DNA, 96 bp, Fusarium azukicola
  misc_feature: 104
caataagaatcaactcttcagttaattcaatcatcaacaactaaatcccacttttatctgatccaatcagactctttattgtgacccacttttatc

SEQ ID NO: 36549 - DNA, 96 bp, Fusarium azukicola
  misc_feature: 104
ctggggtctcagaaagggaaattaggtcttcctcggctttaggagatgacgaagaagaagaattagctataaatagcttttcttatttcttttctc

SEQ ID NO: 36550 - DNA, 96 bp, Fusarium azukicola
  misc_feature: 104
attatatttccttattattttatttatatattttacttataaaaaagatatactcttattctctctatttatagttatatttattcctaaaaagtc

SEQ ID NO: 36551 - DNA, 96 bp, Fusarium azukicola
  misc_feature: 104
gacgtagtgtggattgatcttctcaatcatccaattgagcacattgccaatcccatctgcttgcttgttgtattcgcgttcgtcttgttgatatat

SEQ ID NO: 36552 - DNA, 96 bp, Fusarium azukicola
  misc_feature: 104
cttaatttctctccttaaacctttttattactttctaacccttttttctcttctttaacctaacttacttatttattttattctccctctttcttc

SEQ ID NO: 36553 - DNA, 96 bp, Fusarium azukicola
  misc_feature: 104
gaaagaaagaaggggaatagaaaaagaaaagaagaagaaaaagagaaataaaggaggggaagagtaaagaaaaagagaagaagataaaaggagaag

SEQ ID NO: 36554 - DNA, 96 bp, Fusarium azukicola
  misc_feature: 104
ctttagctagaagaaacccgccgggcaaaatagcttagatagtaaatactaaccccaactataaccctaaccctagttccggttccggttccggtt

SEQ ID NO: 36555 - DNA, 96 bp, Fusarium azukicola
  misc_feature: 104
attatatataaaattagttatattatctttattagtagaaaaattaggtttatttaccttatttaaatatcctagttgtttctttatatagggaag

SEQ ID NO: 36556 - DNA, 96 bp, Fusarium azukicola
  misc_feature: 104
attagttttttattcttaaaatcccaaatcttataagaattaggaagataaccgattatagctcctttataagctctagtttctagtttatctaag

SEQ ID NO: 36557 - DNA, 96 bp, Fusarium azukicola
  misc_feature: 104
ctattaatattctatattatattactaactatagtgatatatccctataaactatatattatattatagaatttttactctatttttaggtatatt

SEQ ID NO: 36558 - DNA, 96 bp, Fusarium azukicola
  misc_feature: 104
ctaattccttaatatctaaggaaatattatctctaacttctagaggggatttattatttaaagccgaatgcgggcttctattatatatatatatag

SEQ ID NO: 36559 - DNA, 96 bp, Fusarium azukicola
  misc_feature: 104
ctataaaatagctagaaatataaaaaaagtatttttataaatctaactatataaagaacctaaaaatatcttttttagatttttaaaaaaattgct

SEQ ID NO: 36560 - DNA, 96 bp, Fusarium azukicola
  misc_feature: 104
ctagacaactatcataatggattatactccctacctgttccatcatcatcatcatgggtcgtcgtgcgcttacagcagaggaaaaggcaaacaagg

SEQ ID NO: 36561 - DNA, 96 bp, Fusarium azukicola
  misc_feature: 104
cggctttaggagataataaagaagaagaattagctataaatagcttttcttgtttcttttctctttcttccttcttagaattaggtttagattcct

SEQ ID NO: 36562 - DNA, 96 bp, Fusarium azukicola
  misc_feature: 104
agagagagggagaggggagagaagaggataaagaataaaaagagagagaagggaaaagaaagagggaaaaaagaaataaaagaggaagaggaaagg

SEQ ID NO: 36563 - DNA, 96 bp, Fusarium azukicola
  misc_feature: 104
cctctaataataagaacgtataaagctataacccttataagattataactttaaaggaggctgttaatattctatattatattactaactatagtg

SEQ ID NO: 36564 - DNA, 96 bp, Fusarium azukicola
  misc_feature: 104
attataatttctttataaacgaaattttttaaaaatctataaaaattatttatagtttatttaagggtaaaatagctaagaattattctttttagg

SEQ ID NO: 36565 - DNA, 96 bp, Fusarium azukicola
  misc_feature: 104
agtaactaataaagaaggatagtcccttattatagtcatttgaccggcctaataggatccgattcggaccaagattataccgtcggatagcccggg

SEQ ID NO: 36566 - DNA, 96 bp, Fusarium azukicola
  misc_feature: 104
caaaggaatatatatataagctaaggccctattgtataaagaatggaataaaatataatacaagtccgcctcataataaacaagctaatggctttg

SEQ ID NO: 36567 - DNA, 96 bp, Fusarium azukicola
  misc_feature: 104
atgatggaacaggtagggagtataatccattatgatagttgtctagttgtcttctctaccattgccactgataaaagagtcttgctagcatctttg

SEQ ID NO: 36568 - DNA, 96 bp, Fusarium azukicola
  misc_feature: 104
attattttcttatttttcttttttttatttttctctttctttttttatctttttttctttttttttctttttcctctcttttatttctctttttct

SEQ ID NO: 36569 - DNA, 96 bp, Fusarium azukicola
  misc_feature: 104
aaagctataacccttataagattataactttaaaggaggctattaatgttctatattatattactaactatagtgatatatccctataaaccacat

SEQ ID NO: 36570 - DNA, 96 bp, Fusarium azukicola
  misc_feature: 104
atctcttatcttttatttctctcttttctagctatatctctctttcttagctttacctctctctcttagctatatctctttttcctagttatacct

SEQ ID NO: 36571 - DNA, 96 bp, Fusarium azukicola
  misc_feature: 104
agctattagcttatttattatgaggcggacttatattatattttattccattctttatataatagggtcttagcttatatatatattcctttatat

SEQ ID NO: 36572 - DNA, 96 bp, Fusarium azukicola
  misc_feature: 104
aaactgcgaaaactataaactaggaaaattaactaaaaataatataaataaaaaacctagtaataaggaatataagttcctagataaaatagctat

SEQ ID NO: 36573 - DNA, 96 bp, Fusarium azukicola
  misc_feature: 104
atagcctaaaataaagccctagattatagtataaccttctctctaaattattaaataatttaggcttctacgctatcccttttaataaagctctct

SEQ ID NO: 36574 - DNA, 96 bp, Fusarium azukicola
  misc_feature: 104
acattcggctttaaataataaatcccctctagaagttagagataatatttccttagatattaaggaattagataaaataaaaacctttaggtctat

SEQ ID NO: 36575 - DNA, 96 bp, Fusarium azukicola
  misc_feature: 104
aatttctttataaacgaaattttttaaaaatctataaaaattatttatagtttatttaagggtaaaatagctaagaattattctttttaggtctat

SEQ ID NO: 36576 - DNA, 96 bp, Fusarium azukicola
  misc_feature: 104
ataaggcggacttatattatattttattccattctttatataatagggtcttagcttatatatatattcctttatattatctaagaaaactaattt

SEQ ID NO: 36577 - DNA, 96 bp, Fusarium azukicola
  misc_feature: 104
actatataattaactatttcactataaatagaattttttaaaaatctaaaaaaatcatttttagactttattaagagttagatttatagaaatact

SEQ ID NO: 36578 - DNA, 96 bp, Fusarium azukicola
  misc_feature: 104
aaatcgttttttttaagtttctagctattttatagcgatttttagaaacttagggtttagctgtttttagttatacagtatgctgttgcacttact

SEQ ID NO: 36579 - DNA, 96 bp, Fusarium azukicola
  misc_feature: 104
aggtacataagacttctaagaaaaaggaatctaaacctaattctaagaaggaagaaagagaaaagaaacaagaaaagctatttatagctaattctt

SEQ ID NO: 36580 - DNA, 96 bp, Fusarium azukicola
  misc_feature: 104
aagaagtaatctagctttaatatttaattaagatatattaaattataaaggattaattaattaaatagagataatataggttaagggatttttatt

SEQ ID NO: 36581 - DNA, 96 bp, Fusarium azukicola
  misc_feature: 103
tccttactttaaagaaagcccttataataataaaaaggcaatattatataataataataataataaatagaaattcactatcgaaattcctaaaaa

SEQ ID NO: 36582 - DNA, 96 bp, Fusarium azukicola
  misc_feature: 103
aaagaaaagaagaagaaaaagagaaataaaggaggggaagagtaaagaaaaagagaagaagataaaaggagaaggggaagagtaaaagaaagaaaa

SEQ ID NO: 36583 - DNA, 96 bp, Fusarium azukicola
  misc_feature: 103
ttttctactaataaagataatataactaattttatatataatataggtgctactaggcatattatatatagaaaagaatttctagttaattttaga

SEQ ID NO: 36584 - DNA, 96 bp, Fusarium azukicola
  misc_feature: 103
aataataataataataataaaaaagaaatcttcttaggataaccctaggataatagaagatatatatatatatgaccctaaccttaaggtaagaaa

SEQ ID NO: 36585 - DNA, 96 bp, Fusarium azukicola
  misc_feature: 103
tttctccctttctttcctttatctttctttatttttctttttaaccttaaccctctctttccttcctttttttcctttctctttttcttcttttct

SEQ ID NO: 36586 - DNA, 96 bp, Fusarium azukicola
  misc_feature: 103
tttctataaatttaataggtactttagaagttcctatttcttatttattatatttccttattattttatttatatattttgcttatgaaaaagata

SEQ ID NO: 36587 - DNA, 96 bp, Fusarium azukicola
  misc_feature: 103
tttatattatctaagaaaactaattttattcttattttattaggattattttctatttcttttctaaattccttaaattttataatagcttctaac

SEQ ID NO: 36588 - DNA, 96 bp, Fusarium azukicola
  misc_feature: 103
tttagctagaagaaacccgccgggcaaaatagcttagatagtaaatactaaccccaactataaccctaaccctagttccggttccggttccggttc

SEQ ID NO: 36589 - DNA, 96 bp, Fusarium azukicola
  misc_feature: 103
taaagtaaaagagagaagagagtatagggtaaagtaaaagagagaagagagtatagggtaaagtaaaagagagaagagagtataggggaaagtaaa

SEQ ID NO: 36590 - DNA, 96 bp, Fusarium azukicola
  misc_feature: 103
tatgcttgtggcctcctcctctgcctcctcctgggcctcccgctcatcgcttgacccgtcctcctcctgctgcctgtccatcttggcctgcttcaa

SEQ ID NO: 36591 - DNA, 96 bp, Fusarium azukicola
  misc_feature: 103
ttcttctctttttctttactcttcccctcctttatttctctttttcttcttcttttctttttctattccccttctttctttctcttctaactacct

SEQ ID NO: 36592 - DNA, 96 bp, Fusarium azukicola
  misc_feature: 103
ttcgcgattcgcattgcttgttcccaactagtgatccagtctccccagtgcgttatgccgcttaaagctgcctttagcacttcgaaataccgtttc

SEQ ID NO: 36593 - DNA, 96 bp, Fusarium azukicola
  misc_feature: 103
gaagctattataaaatttaaggaatttagaaaagaaatagaaaataatcctaataaaataagaataaaatcagttttcttagataatataaaggaa

SEQ ID NO: 36594 - DNA, 96 bp, Fusarium azukicola
  misc_feature: 103
aagagagagagggagaggggagagaagaggataaagaataaaaagagagagaagggaaaagaaagagggaaaaaagaaataaaagaggaagaggaa

SEQ ID NO: 36595 - DNA, 96 bp, Fusarium azukicola
  misc_feature: 103
ttcacagatatagagtttcatatgcctgcacattttgcttttccctctcagcttatcgacgcggtacatacatggatggtgaatagtggcacttta

SEQ ID NO: 36596 - DNA, 96 bp, Fusarium azukicola
  misc_feature: 103
ggtagtaatgaagttaatttaaaaagaaaagagaagaaaggatttaaaaataagagaaagagttaaataaaaaagttaggatttaaggagaaataa

SEQ ID NO: 36597 - DNA, 96 bp, Fusarium azukicola
  misc_feature: 103
agactttttaggaatgaatataactataaatagagagaataagagtatatctttttcataagcaaaatatataaataaaataataaggaaatataa

SEQ ID NO: 36598 - DNA, 96 bp, Fusarium azukicola
  misc_feature: 103
taataaaggggtttttactaagatatatatataataataatagaggtttaatttttcctctaataataagaatatataaagctataacccttataa

SEQ ID NO: 36599 - DNA, 96 bp, Fusarium azukicola
  misc_feature: 103
ttagctagggtaaggcgattagggattaataagtactaagagaggtaaaggaaaccgctactatccggaggggagataacctctactgtccgggga

SEQ ID NO: 36600 - DNA, 96 bp, Fusarium azukicola
  misc_feature: 103
attaagggtattattctaattagttaaaaaggttcctatagacctttatgactgccgtcatctatgcatcaagtataataactgccgattggctaa

SEQ ID NO: 36601 - DNA, 96 bp, Fusarium azukicola
  misc_feature: 103
aaaagaagaagaaaaagagaaataaaggaggggaagagtaaagaaaaagagaagaagataaaaggagaaggggaagagtaaaagaaagaaaagtaa

SEQ ID NO: 36602 - DNA, 96 bp, Fusarium azukicola
  misc_feature: 103
ttaaataaagaagaaagagggagaataaaataaataagtaagttaggttaaagaagagaaaaaagggttagaaagtaataaaaaggtttaaggaga

SEQ ID NO: 36603 - DNA, 96 bp, Fusarium azukicola
  misc_feature: 103
tgatggggtcggcaagcattggattcggcattttctcaaccggaataaggaaatcaagacattgaaaggcaagaagatcgattctgaccgctttaa

SEQ ID NO: 36604 - DNA, 96 bp, Fusarium azukicola
  misc_feature: 103
caatttttttaaaaatctaaaaaagatatttttaggttctttatatagttagatttataaaaatactttttttatatttctagctattttatagca

SEQ ID NO: 36605 - DNA, 96 bp, Fusarium azukicola
  misc_feature: 103
tctttttcttttctctcctctcccctctccctctctctcttttcactccttatcctctcctctcccctctccctctctctcttttcactccttctc

SEQ ID NO: 36606 - DNA, 96 bp, Fusarium azukicola
  misc_feature: 103
tctttacttataagctatatctttagctagaagaaacccgccgggcaaaatagcttagatagtaaatactaaccccaactataaccctaaccctag

SEQ ID NO: 36607 - DNA, 96 bp, Fusarium azukicola
  misc_feature: 103
aaaaagaaggttattaaagagggaggagagtttaataagtaagtatagaggagaggaagagagaagagaaagaaaggagaggaaggggagaagaga

SEQ ID NO: 36608 - DNA, 96 bp, Fusarium azukicola
  misc_feature: 103
tctcccctctccctctctctcttttcactccttatcctctcctctcccctctccctctctctcttttcactccttatcctctcctctcccccctcc

SEQ ID NO: 36609 - DNA, 96 bp, Fusarium azukicola
  misc_feature: 103
tctattctttatataatagggtcttagcttatatatatattcctttatattatctaagaaaactaattttattcttattttattaggattattttc

SEQ ID NO: 36610 - DNA, 96 bp, Fusarium azukicola
  misc_feature: 103
acactgtgtaattaactatttcactataaatagaattttttaaaaatctaaaaaaatcatttttagactttattaagagttagatttatagaaata

SEQ ID NO: 36611 - DNA, 96 bp, Fusarium azukicola
  misc_feature: 103
tattattttatttatatattttgcttatgaaaaagatatactcttattctctctatttatagttatattcattcctaaaaagtctttaacttctcc

SEQ ID NO: 36612 - DNA, 96 bp, Fusarium azukicola
  misc_feature: 103
tattactaaagccttataaatggcttagttatagcaaaaaccggttttaatggatagaatgcaacgctgaagggtttaggaaccttcctagcccat

SEQ ID NO: 36613 - DNA, 96 bp, Fusarium azukicola
  misc_feature: 103
tatgcctagtagcaccttatttaaatatcctagttgtttctttatatagggaaggtttcttattaaaggtcctagtatattattagttatattatt

SEQ ID NO: 36614 - DNA, 96 bp, Fusarium azukicola
  misc_feature: 103
tatatttccttattattttatttatatattttacttatgaaaaagatatactcttattctctctatttatagttatatttattcctaaaaagtctt

SEQ ID NO: 36615 - DNA, 96 bp, Fusarium azukicola
  misc_feature: 103
tatatttccttattattttatttatatattttacttataaaaaagatatactcttattctctctatttatagttatatttattcctaaaaagtctt

SEQ ID NO: 36616 - DNA, 96 bp, Fusarium azukicola
  misc_feature: 103
cgacgtagtgtggattgatcttctcaatcatccaattgagcacattgccaatcccatctgcttgcttgttgtattcgcgttcgtcttgttgatata

SEQ ID NO: 36617 - DNA, 96 bp, Fusarium azukicola
  misc_feature: 103
agctgttaatgttctatattatattaccaactatagtgatatatccctataaaccacatattatattatagaatttttactctatttttaggtata

SEQ ID NO: 36618 - DNA, 96 bp, Fusarium azukicola
  misc_feature: 103
ataagggttatagctttatatattcttattattagaggaaaaattaaacctctattattattatatatatatcttagtaaaaacccctttattata

SEQ ID NO: 36619 - DNA, 96 bp, Fusarium azukicola
  misc_feature: 103
tataagctttaaggagtaatcctaaggcttataacctagaatcactttcttctagccttatagataaatctaagagactagaaaaaatagattcta

SEQ ID NO: 36620 - DNA, 96 bp, Fusarium azukicola
  misc_feature: 103
gttgtttctttatatagggaaggtttcttattaaaggtcctagtatattattagttatattattttattgagaaattaaggaattatatacctcta

SEQ ID NO: 36621 - DNA, 96 bp, Fusarium azukicola
  misc_feature: 103
tactattctttctatatcttctttataagggcccgaaaatataaggttatctacgtgaatagctatagcaatctttaagttcttatttataaagag

SEQ ID NO: 36622 - DNA, 96 bp, Fusarium azukicola
  misc_feature: 103
tacctatagtagctataggttaggtaaatatacctaaaaatagagtaaaaattctataatataatatatggtttatagggatatattactatagtt

SEQ ID NO: 36623 - DNA, 96 bp, Fusarium azukicola
  misc_feature: 103
taattttaaatagatttatagcttatttatattactattaggatatttctttttataatccttaaggaaatccttaattataaggtctttaaatct

SEQ ID NO: 36624 - DNA, 96 bp, Fusarium azukicola
  misc_feature: 103
gctttatatattcttattattagaggaaaaattaaacctctattattattatatatatatcttagtaaaaacccctttattatagacctaatatta

SEQ ID NO: 36625 - DNA, 96 bp, Fusarium azukicola
  misc_feature: 103
taaggtacataagacttctaagaaaaaggaatctaaacctaattctaagaaggaagaaagagaaaagaaacaagaaaagctatttatagctaattc

SEQ ID NO: 36626 - DNA, 96 bp, Fusarium azukicola
  misc_feature: 103
taagaaaacgctatttatactatctcatactgtacttaactagccgtcccttcgcgataccctcttcctagccataataaccctccccgtcgccct

SEQ ID NO: 36627 - DNA, 96 bp, Fusarium azukicola
  misc_feature: 103
aaaaagaataattcttagctattttacccttaaataaactataaataatttttatagatttttaaaaaatttcgtttataaagaaattataattta

SEQ ID NO: 36628 - DNA, 96 bp, Fusarium azukicola
  misc_feature: 103
atatttttaactccccttcctctttctccttccttcttttccctcctctttctcttaatcttcttctctttctttcccttttatttttttctttta

SEQ ID NO: 36629 - DNA, 96 bp, Fusarium azukicola
  misc_feature: 103
cgtaactactacccctaaccctaatttcaaccaattaaccctaacccttaacgtaactactacccctaaccataatttcaaccaattaaccctaac

SEQ ID NO: 36630 - DNA, 96 bp, Fusarium azukicola
  misc_feature: 103
ccctaatttcaaccaattaaccctaacccttaacgtaactactacccctaaccctaatttcaaccaattaaccctaacccttaacgtaactactac

SEQ ID NO: 36631 - DNA, 96 bp, Fusarium azukicola
  misc_feature: 103
atatacctaaaaatagagtaaaaattctataatataatatatggtttatagggatatatcactatagttggtaatataatatagaacattaacacc

SEQ ID NO: 36632 - DNA, 96 bp, Fusarium azukicola
  misc_feature: 103
cctaatttcaaccaattaaccctaacccttaacgtaactactacccctaaccctaatttcaaccaattaaccctaacccttaacgtaactactacc

SEQ ID NO: 36633 - DNA, 96 bp, Fusarium azukicola
  misc_feature: 103
ggtacataagacttctaagaaaaaggaatctaaacctaattctaagaaggaagaaagagaaaagaaacaagaaaagctatttatagctaattcttc

SEQ ID NO: 36634 - DNA, 96 bp, Fusarium azukicola
  misc_feature: 103
ctcccctctccctctctctcttttcactccttatcctctcctctcccctctccctctctctcttttcactccttatcctctcctctcccccctccc

SEQ ID NO: 36635 - DNA, 96 bp, Fusarium azukicola
  misc_feature: 103
ctaataaccctcttatctataccctacccatatagtctaacccgatccatgtaagaaaacgctatttatactatctcatactgtacttaactagcc

SEQ ID NO: 36636 - DNA, 96 bp, Fusarium azukicola
  misc_feature: 103
actgaggaattcctctttgagtgctacgataataatatcttccttttattccttattcctcactcttctcatgtcctccaacctcttgatctcgcc

SEQ ID NO: 36637 - DNA, 96 bp, Fusarium azukicola
  misc_feature: 103
agcccgaagggcttctatctatagctgacccaaagcctgaccctaaccctgacctaatgtatgaccctgaccctgaccctaacctctagaatctcc

SEQ ID NO: 36638 - DNA, 96 bp, Fusarium azukicola
  misc_feature: 103
caattcctcctcctttcatctaatcaatcaattctctaccattcaagatgccacaatcaaatattgaagcaagaacgcttcttgcccttcttgtcc

SEQ ID NO: 36639 - DNA, 96 bp, Fusarium azukicola
  misc_feature: 103
gctagcaagactcttttatcagtggcaatggtagagaagacaactagacaactatcataatggattatactccctacctgttccatcatcatcatc

SEQ ID NO: 36640 - DNA, 96 bp, Fusarium azukicola
  misc_feature: 103
gattactttgcaagagcaggacctgagactagatcagggaccacgaggctcgaaagaggcgaacgcgccgcgaatacagtcagcgaactgcaccct

SEQ ID NO: 36641 - DNA, 96 bp, Fusarium azukicola
  misc_feature: 103
ctatactctcttctctcttttactttaccctccacttttattctttattttactttaccctatactctcttctctcttttactttaccctatactc

SEQ ID NO: 36642 - DNA, 96 bp, Fusarium azukicola
  misc_feature: 103
aagcccgaagggcttctatctatagctgacccaaagcctgaccctaaccctgacctaatgtatgaccctgaccctgaccctaacctctagaatctc

SEQ ID NO: 36643 - DNA, 96 bp, Fusarium azukicola
  misc_feature: 103
gagagaaataaaagataagagataagagataagggataagagataagagataaagaaataagaaataagagataagagataaagggaggcaaaaat

SEQ ID NO: 36644 - DNA, 96 bp, Fusarium azukicola
  misc_feature: 103
gaatagaaaaagaaaagaagaagaaaaagagaaataaaggaggggaagagtaaagaaaaagagaagaagataaaaggagaaggggaagagtaaaag

SEQ ID NO: 36645 - DNA, 96 bp, Fusarium azukicola
  misc_feature: 103
gaagcccgaagggcttctatctatagctgacccaaagcctgaccctaaccctgacctaatgtatgaccctgaccctgaccctaacctctagaatct

SEQ ID NO: 36646 - DNA, 96 bp, Fusarium azukicola
  misc_feature: 103
agaagttaaagactttttaggaatgaatataactataaatagagagaataagagtatatctttttcataagcaaaatatataaataaaataataag

SEQ ID NO: 36647 - DNA, 96 bp, Fusarium azukicola
  misc_feature: 103
ctcttatctataccctacccatatagtctaacccgatccatgtaagaaaacgctatttatactatctcatactgtacttaactagccgtcccttcg

SEQ ID NO: 36648 - DNA, 96 bp, Fusarium azukicola
  misc_feature: 103
ctatcttgcctctctctcggtcggtctgaatctcttgtcggaattgagcagagaagtctaatggttggtaggtcccattctcaatcttccctttgt

SEQ ID NO: 36649 - DNA, 96 bp, Fusarium azukicola
  misc_feature: 103
cctatattatatataaaattagttatattatctttattagtagaaaaattaggtttatttaccttatttaaatatcctagttatttctttatatag

SEQ ID NO: 36650 - DNA, 96 bp, Fusarium azukicola
  misc_feature: 103
aaggaggctattaatattctatattatattaccaactatagtgatatatccctataaaccacatattatattatagaatttttactctatttttag

SEQ ID NO: 36651 - DNA, 96 bp, Fusarium azukicola
  misc_feature: 103
cagatggcaatgttgagtttgcaaaggtgccagcaatcaagaaggctcgtgaggcgatgcttaagatcacacagccgcgtaagaccgcaaatcgcg

SEQ ID NO: 36652 - DNA, 96 bp, Fusarium azukicola
  misc_feature: 103
aaaagagagagagggagaggggagagaagaggataaagaataaaaagagagagaagggaaaagaaagagggaaaaaagaaataaaagaggaagagg

SEQ ID NO: 36653 - DNA, 96 bp, Fusarium azukicola
  misc_feature: 103
cctctcccctctccctctctctcttttcactccttatcctctcctctcccctctccctctctctcttttcactccttatcctctcctctcccccct

SEQ ID NO: 36654 - DNA, 96 bp, Fusarium azukicola
  misc_feature: 103
cctagttccggttccggttccggttccggttccggtttctagttagaccgtgcctgtacgctccttttctaccctttcaagctctaacacagctct

SEQ ID NO: 36655 - DNA, 96 bp, Fusarium azukicola
  misc_feature: 103
cctagtagcacctatattatatataaaattagttatattatctttattagtagaaaaatcaggtttatttaccttatttaaatatcctagttgttt

SEQ ID NO: 36656 - DNA, 96 bp, Fusarium azukicola
  misc_feature: 103
cctaaaaatagagtaaaaattctataatataatatgtggtttatagggatatatcactatagttggtaatataatatagaacattaacaattatat

SEQ ID NO: 36657 - DNA, 96 bp, Fusarium azukicola
  misc_feature: 103
atagccgcgatgataataatgagaacagggagggcaatgatggcaatagcgaagaaagtatccgacaacgagggtccaaggccgtccatcggcggg

SEQ ID NO: 36658 - DNA, 96 bp, Fusarium azukicola
  misc_feature: 103
atatatataaatatataaataaaaatctctctttaagttttaatagggctatacctcctattttaactgataatctagcagctaagcaattagctg

SEQ ID NO: 36659 - DNA, 96 bp, Fusarium azukicola
  misc_feature: 103
aaatatactagtgaggacctatattaagtcaaaaactgcgaaaactgcaaactaggaaaattaactaaaaataatataaataaaaaacctagtaat

SEQ ID NO: 36660 - DNA, 96 bp, Fusarium azukicola
  misc_feature: 103
atcttctataagtctctcttagaagctagatattatctctttactacttttcttcctagttatctaggaaatcaactatttataacctagttatat

SEQ ID NO: 36661 - DNA, 96 bp, Fusarium azukicola
  misc_feature: 103
atctggaatacttctagggcttcttaaggctatttttgcctccctttatctcttatctcttatttcttatttctttatctcttatctcttatccct

SEQ ID NO: 36662 - DNA, 96 bp, Fusarium azukicola
  misc_feature: 103
atctcatactgtacttaactagccgtcccttcgcgataccctcttcctagccataataaccctccccgtcgccctagatattaacggttagccact

SEQ ID NO: 36663 - DNA, 96 bp, Fusarium azukicola
  misc_feature: 103
atatgcctagtagcacctatattatatataaaattagttatattatctttattagtagaaaaatcaggtttatttaccttatttaaatatcctagt

SEQ ID NO: 36664 - DNA, 96 bp, Fusarium azukicola
  misc_feature: 103
atagaataaaatataatataagtccgccttataataaataagctaatggctttatagaaaggataaataggactatattagaaaaggttagagctt

SEQ ID NO: 36665 - DNA, 96 bp, Fusarium azukicola
  misc_feature: 103
aatttctctccttaaacctttttattactttctaacccttttttctcttctttaacctaacttacttatttattttattctccctctttcttcttt

SEQ ID NO: 36666 - DNA, 96 bp, Fusarium azukicola
  misc_feature: 102
ataataataataataaaaaagaaatcttcttaggataaccctaggataatagaagatatatatatatatgaccctaaccttaaggtaagaaaaaaa

SEQ ID NO: 36667 - DNA, 96 bp, Fusarium azukicola
  misc_feature: 102
tttttaagttttttattttttaaaaattaaaggaattttttaaaaatctagaaaaattataaacttataacttttttagttagacttataaaatta

SEQ ID NO: 36668 - DNA, 96 bp, Fusarium azukicola
  misc_feature: 102
ttttcttacatggatcgggttagactatatgggtagggtatagataagagggttattagctagggtaaggcgattagggattaataagtactaaga

SEQ ID NO: 36669 - DNA, 96 bp, Fusarium azukicola
  misc_feature: 102
taatatactaggacctttaataagaaaccttccctatataaagaaacaactaggatatttaaataaggtgctactaggcatattgtatgtagaaaa

SEQ ID NO: 36670 - DNA, 96 bp, Fusarium azukicola
  misc_feature: 102
tttcttacttttctttcttttactcttccccttctccttttatcttcttctctttttctttactcttcccctcctttatttctctttttcttcttc

SEQ ID NO: 36671 - DNA, 96 bp, Fusarium azukicola
  misc_feature: 102
tttcttacatggatcgggttagactatatgggtagggtatagataagagggttattagctagggtaaggcgattagggattaataagtactaagag

SEQ ID NO: 36672 - DNA, 96 bp, Fusarium azukicola
  misc_feature: 102
cctaaatcttataagaattaggaagataactaattatagctcctttataagctctagtttctagtttatctaagggagaatagttcttataataaa

SEQ ID NO: 36673 - DNA, 96 bp, Fusarium azukicola
  misc_feature: 102
aagagtctttctataaatttaataggtactttagaagttcctatttcttatttattatatttccttattattttatttatatattttgcttataaa

SEQ ID NO: 36674 - DNA, 96 bp, Fusarium azukicola
  misc_feature: 102
gagtattctcttctatcttgcctctctctcggtcggtctgaatctcttgtcggaattgagcagagaagtctaatggttggtaggtcccattctcaa

SEQ ID NO: 36675 - DNA, 96 bp, Fusarium azukicola
  misc_feature: 102
atagaaaaagaaaagaagaagaaaaagagaaataaaggaggggaagagtaaagaaaaagagaagaagataaaaggagaaggggaagagtaaaagaa

SEQ ID NO: 36676 - DNA, 96 bp, Fusarium azukicola
  misc_feature: 102
aaataataataataataataaaaaagaaatcttcttaggataaccctaggataatagaagatatatatatatatgaccctaaccttaaggtaagaa

SEQ ID NO: 36677 - DNA, 96 bp, Fusarium azukicola
  misc_feature: 102
ttcctctaataataagaacgtataaagctataacccttataagattataactttaaaggaggctgttaatattctatattatattactaactatag

SEQ ID NO: 36678 - DNA, 96 bp, Fusarium azukicola
  misc_feature: 102
aggttttaaggtttattaaataaagaagaaagagggagaataaaataaataagtaagttaggttaaagaagagaaaaaagggttagaaagtaataa

SEQ ID NO: 36679 - DNA, 96 bp, Fusarium azukicola
  misc_feature: 102
ttatactatctcatactgtacttaactagccgtcccttcgcgataccctcttcctagccataataaccctccccgtcgccctagatattaacggtt

SEQ ID NO: 36680 - DNA, 96 bp, Fusarium azukicola
  misc_feature: 102
acctaaaaagaataattcttagctattttacccttaaataaactataaataatttttatagatttttaaaaaatttcgtttataaagaaattataa

SEQ ID NO: 36681 - DNA, 96 bp, Fusarium azukicola
  misc_feature: 102
ttagttttttattcttaaaatcccaaatcttataagaattaggaagataaccgattatagctcctttataagctctagtttctagtttatctaagg

SEQ ID NO: 36682 - DNA, 96 bp, Fusarium azukicola
  misc_feature: 102
tatttccttagatattaaggaattagataaaataaaaacctttaggtctatagtttattataagaactattctcccttagataaactagaaactaa

SEQ ID NO: 36683 - DNA, 96 bp, Fusarium azukicola
  misc_feature: 102
aatagagatattataaggctatttaataagctaatagctatttattacttattattatattattatttagtgactaaattgactaaaattgactaa

SEQ ID NO: 36684 - DNA, 96 bp, Fusarium azukicola
  misc_feature: 102
tataaatagagagaataagagtatatctttttcataagcaaaatatataaataaaataataaggaaatataataaataagaaataggaacttctaa

SEQ ID NO: 36685 - DNA, 96 bp, Fusarium azukicola
  misc_feature: 102
tataagcaaaatatataaataaaataataaggaaatataataaataagaaataggaacttctaaagtacctattaaatttatagaaagactcttaa

SEQ ID NO: 36686 - DNA, 96 bp, Fusarium azukicola
  misc_feature: 102
ttaaccctaacccttaactctactactacccctaaccctaatttcaaccaattaaccctaacccttaacgtaactactacccctaaccctaatttc

SEQ ID NO: 36687 - DNA, 96 bp, Fusarium azukicola
  misc_feature: 102
ttaaatatactagtgaggacctatattaagtcaaaaactgcgaaaactgcaaactaggaaaattaactaaaaataatataaataaaaaacctagta

SEQ ID NO: 36688 - DNA, 96 bp, Fusarium azukicola
  misc_feature: 102
caaggcgtcaaactggaaggcttggctaagaaaataactatcttagagcatgaaaatcaagagcttcgacccaagaaaaggcgtaaggttatcaca

SEQ ID NO: 36689 - DNA, 96 bp, Fusarium azukicola
  misc_feature: 102
gtatataccttcaattgcttacattgccactttatgccgacactgatcaaactcgacagcacatcgtgacgaacagcgcgacatcaataccctaca

SEQ ID NO: 36690 - DNA, 96 bp, Fusarium azukicola
  misc_feature: 102
tagctaagaattattctttttaggtctataactattttattttagcttttattaagctttaaagttttatgttttagtgcacagtatagctgtaca

SEQ ID NO: 36691 - DNA, 96 bp, Fusarium azukicola
  misc_feature: 102
caaacaaagatgctagcaagactcttttatcagtggcaatggtagagaagacaactagacaactatcataatggattatactccctacctgttcca

SEQ ID NO: 36692 - DNA, 96 bp, Fusarium azukicola
  misc_feature: 102
tgccttataggatttcacttaattaacctaatctaaaattttaagttatttttaccttaatttgaatttttaaagaattcttttctatttagtgta

SEQ ID NO: 36693 - DNA, 96 bp, Fusarium azukicola
  misc_feature: 102
aagagataagagataagagataagagataagagataagagataagagataagagataaagaaataagaaataagagataagagataaagggaggca

SEQ ID NO: 36694 - DNA, 96 bp, Fusarium azukicola
  misc_feature: 102
tcttttatttctctcttttctagctatatctctctttcttagctttacctctctctcttagctatatctctttttcctagctatatctctttccta

SEQ ID NO: 36695 - DNA, 96 bp, Fusarium azukicola
  misc_feature: 102
gggtttcttctagctaaggtatagcttataaatagaggggagattttctaagaaatataaaaagaaaagaaatataaaagatatagctaggaaaga

SEQ ID NO: 36696 - DNA, 96 bp, Fusarium azukicola
  misc_feature: 102
ctggaaaattcaggaagccaataaggtgcataagacttctaagaaaaaggaatctaaacctaattctaagaaggaagaaagagaaaagaaacaaga

SEQ ID NO: 36697 - DNA, 96 bp, Fusarium azukicola
  misc_feature: 102
actattctttctatatcttctttataagggcccgaaaatataaggttatctacgtgaatagctatagcaatctttaagttcttatttataaagaga

SEQ ID NO: 36698 - DNA, 96 bp, Fusarium azukicola
  misc_feature: 102
tctcttatcttttatttctctcttttctagctatatctctctttcttagctttacctctctctcttagctatatctctttttcctagttatacctc

SEQ ID NO: 36699 - DNA, 96 bp, Fusarium azukicola
  misc_feature: 102
taccttcaattgcttacattgccactttatgccgacactgatcaaactcgacagcacatcgtgacgaacagcgcgacatcaataccctacactcga

SEQ ID NO: 36700 - DNA, 96 bp, Fusarium azukicola
  misc_feature: 102
tcagagaagtccttgacgaccactttgaagtatttatccgggtcgaagaagggcaaaacaaagggaagattgagaatgggacctaccaaccattag

SEQ ID NO: 36701 - DNA, 96 bp, Fusarium azukicola
  misc_feature: 102
aatagcttttcttgtttcttttctctttcttccttcttagaattaggtttagattcccttttcttagaagtcttatgcaccttattggctttctga

SEQ ID NO: 36702 - DNA, 96 bp, Fusarium azukicola
  misc_feature: 102
tatttaaaattaagaaaagccttatatagcctaaaataaagccctagattatagtataaccttctctctaaattattaaataatttaggcttctac

SEQ ID NO: 36703 - DNA, 96 bp, Fusarium azukicola
  misc_feature: 102
cccttaaataaactataaataatttttatagatttttaaaaaatttcgtttataaagaaattataatttacacagtgtaaatagactttttaaata

SEQ ID NO: 36704 - DNA, 96 bp, Fusarium azukicola
  misc_feature: 102
tattataaaatttaaggaatttagaaaagaaatagaaaataatcctaataaaataagaataaaatcagttttcttagataatataaaggaatatat

SEQ ID NO: 36705 - DNA, 96 bp, Fusarium azukicola
  misc_feature: 102
ataaaagatcctctctttaaatatactaataaggacctatattaagttaaaaactataaaaactataaactaggaaaattaactaaaaataatata

SEQ ID NO: 36706 - DNA, 96 bp, Fusarium azukicola
  misc_feature: 102
tatatagtgcgaataattctttttctaaactaccttataagggattttttaaaaagttttaaaaaatcataataggttttttatagcttaattagt

SEQ ID NO: 36707 - DNA, 96 bp, Fusarium azukicola
  misc_feature: 102
tatataaagaatggaataaaatataatataagtccgccttataataaataagctaatagctttatagaaaggataaataggactatattagaaaag

SEQ ID NO: 36708 - DNA, 96 bp, Fusarium azukicola
  misc_feature: 102
tagattactatatccttagatagaatatttactattctttctatatcttctttataagggcccgaaaatataaggttatctatataaatagctata

SEQ ID NO: 36709 - DNA, 96 bp, Fusarium azukicola
  misc_feature: 102
tataaccctaaccctagttccggttccggttccggttccggttccggtttctagttagaccgtgcctgtacgctccttttctaccctttcaagctc

SEQ ID NO: 36710 - DNA, 96 bp, Fusarium azukicola
  misc_feature: 102
tataaatggcttagttatagcaaaaaccggttttaatggatagaatgcaacgctgaaggttttaggaaccttcctagccaatcggcaggtatttta

SEQ ID NO: 36711 - DNA, 96 bp, Fusarium azukicola
  misc_feature: 102
tagtatataccttcaattgcttacattgccactttatgccgacactgatcaaactcgacagcacatcgtgacgaacagcgcgacatcaatacccta

SEQ ID NO: 36712 - DNA, 96 bp, Fusarium azukicola
  misc_feature: 102
atttagaaaagaaatagaaaataatcctaataaaataagaataaaatcagttttctcagataatataaaggaatatatatataagctaagacccta

SEQ ID NO: 36713 - DNA, 96 bp, Fusarium azukicola
  misc_feature: 102
agattccttactttaaagaaagcccttataataatgaaaaggcaatattatataataataataataataaatagaaattcactatcgaaattccta

SEQ ID NO: 36714 - DNA, 96 bp, Fusarium azukicola
  misc_feature: 102
cataagctttaaggagtaatcctaaggcttataacctagaatcactttcttctagccttatagatgaatctaagagactagaaaaaatagattcta

SEQ ID NO: 36715 - DNA, 96 bp, Fusarium azukicola
  misc_feature: 102
agaagagaaagaagataggtagttagaagagaaagaaagaaggggaatagaaaaagaaaagaagaagaaaaagagaaataaaggaggggaagagta

SEQ ID NO: 36716 - DNA, 96 bp, Fusarium azukicola
  misc_feature: 102
tacccctaaccctaatttcaaccaattaaccctaacccttaacgtaactactacccctaaccctaatttcaaccaattaaccctaacccttaacgt

SEQ ID NO: 36717 - DNA, 96 bp, Fusarium azukicola
  misc_feature: 102
tacataagacttctaagaaaaaggaatctaaacctaattctaagaaggaagaaagagaaaagaaacaagaaaagctatttatagctaattcttctt

SEQ ID NO: 36718 - DNA, 96 bp, Fusarium azukicola
  misc_feature: 102
agaagtaatctagctttaatatttaattaagatatattaaattataaaggattaattaattaaatagagataatataggttaagggatttttatta

SEQ ID NO: 36719 - DNA, 96 bp, Fusarium azukicola
  misc_feature: 102
taagagtatatctttttcataagtaaaatatataaataaaataataaggaaatataataaataagaaataggaacttctaaagtacctattaaatt

SEQ ID NO: 36720 - DNA, 96 bp, Fusarium azukicola
  misc_feature: 102
gcctccctttatctcttatctcttatttcttatttctttatctcttatctcttatctcttatctcttatctcttatctcttatctcttatctctta

SEQ ID NO: 36721 - DNA, 96 bp, Fusarium azukicola
  misc_feature: 102
attagaaataaccttagctgttattatatataggttatttttctcttttccttatgatattatttttccttgcttatttaaaagaaggacttctta

SEQ ID NO: 36722 - DNA, 96 bp, Fusarium azukicola
  misc_feature: 102
gggtagaaaaggagcgtacaggcacggtctaactagaaaccggaaccggaaccggaaccggaaccggaactagggttagggttatagttggggtta

SEQ ID NO: 36723 - DNA, 96 bp, Fusarium azukicola
  misc_feature: 102
atactgtacttaactagccgtcccttcgcgataccctcttcctagccataataaccctccccgtcgccctagatattaacggttagccactattta

SEQ ID NO: 36724 - DNA, 96 bp, Fusarium azukicola
  misc_feature: 102
taaatagagagaataagagtatatctttttcataagcaaaatatataaataaaataataaggaaatataataaataagaaataggaacttctaaag

SEQ ID NO: 36725 - DNA, 96 bp, Fusarium azukicola
  misc_feature: 102
taaaatcagttttctcagataatgcaaaggaatatatatataagctaaggccctattgtataaagaatggaataaaatataatacaagtccgcctc

SEQ ID NO: 36726 - DNA, 96 bp, Fusarium azukicola
  misc_feature: 102
attataactttaaaggaggctattaatgttctatattatattactaactatagtgatatatccctataaaccacatattatattatagaattttta

SEQ ID NO: 36727 - DNA, 96 bp, Fusarium azukicola
  misc_feature: 102
aatcgggaatggattacggtcattcaagcgattaatgcagatggccgagcgatcccgccatttatcatcggtgcaggccaatatcacctcgccaac

SEQ ID NO: 36728 - DNA, 96 bp, Fusarium azukicola
  misc_feature: 102
ggggtctcagaaagggaaattaggtcttcctcggctttaggagatgacgaagaagaagaattagctataaatagcttttcttatttcttttctctt

SEQ ID NO: 36729 - DNA, 96 bp, Fusarium azukicola
  misc_feature: 102
ggaatacttctagggcttcttaaggctatttttgcctccctttatctcttatctcttatttcttatttctttatctcttatctcttatcccttatc

SEQ ID NO: 36730 - DNA, 96 bp, Fusarium azukicola
  misc_feature: 102
gctattataaaatttaaggaatttagaaaagaaatagaaaataatcctaataaaataagaataaaatcagttttcttagataatataaaggaatat

SEQ ID NO: 36731 - DNA, 96 bp, Fusarium azukicola
  misc_feature: 102
aatgacggtagaggaaggaaggcaagcaattgatcaaatggatatagatgcgcaggtattagctgaatcgtcgaggagtggtggtcaaggaagggc

SEQ ID NO: 36732 - DNA, 96 bp, Fusarium azukicola
  misc_feature: 102
atatacctaaaaatagagtaaaaattctataatataatatgtggtttatagggatatatcactatagttagtaatataatatagaacattaacatc

SEQ ID NO: 36733 - DNA, 96 bp, Fusarium azukicola
  misc_feature: 102
gatatagatatatatataactattcctattggatttaaagaccttataattaaggatttccttaaggattataaaaagaaatatcctaatagtaat

SEQ ID NO: 36734 - DNA, 96 bp, Fusarium azukicola
  misc_feature: 102
gagagagagggagaggggagagaagaggataaagaataaaaagagagagaagggaaaagaaagagggaaaaaagaaataaaagaggaagaggaaag

SEQ ID NO: 36735 - DNA, 96 bp, Fusarium azukicola
  misc_feature: 102
atatagtgcgaataattctttttctaaactaccttataagggattttttaaaaagttttaaaaaatcataataggttttttatagcttaattagtc

SEQ ID NO: 36736 - DNA, 96 bp, Fusarium azukicola
  misc_feature: 102
gaaaactaattttattcttattttattaggattattttctatttcttttctaaattccttaaattttataatagcttctaacttattccttaatag

SEQ ID NO: 36737 - DNA, 96 bp, Fusarium azukicola
  misc_feature: 102
aatatactaggacctttaataagaaaccttccctatataaagaaacaactaggatatttaaataaggtgctactaggcatattgtatgtagaaaag

SEQ ID NO: 36738 - DNA, 96 bp, Fusarium azukicola
  misc_feature: 102
agagaaagaagataggtagttagaagagaaagaaagaaggggaatagaaaaagaaaagaagaagaaaaagagaaataaaggaggggaagagtaaag

SEQ ID NO: 36739 - DNA, 96 bp, Fusarium azukicola
  misc_feature: 102
ctttaaaggaggctattaatattctatattatattactaactatagtgatatatccctataaactatatattatattatagaatttttactctatt

SEQ ID NO: 36740 - DNA, 96 bp, Fusarium azukicola
  misc_feature: 102
aaaaagagagagagggagaggggagagaagaggataaagaataaaaagagagagaagggaaaagaaagagggaaaaaagaaataaaagaggaagag

SEQ ID NO: 36741 - DNA, 96 bp, Fusarium azukicola
  misc_feature: 102
attaaataaagaagaaagagggagaataaaataaataagtaagttaggttaaagaagagaaaaaagggttagaaagtaataaaaaggtttaaggag

SEQ ID NO: 36742 - DNA, 96 bp, Fusarium azukicola
  misc_feature: 102
ctcactcttctcatgtcctccaacctcttgatctcgccatttttggccctctgaagcaggcataccgtcggcttctttctgacctcgctagagtcg

SEQ ID NO: 36743 - DNA, 96 bp, Fusarium azukicola
  misc_feature: 102
agctaataaccctcttatctataccctacccatatagtctaacccgatccatgtaagaaaacgctatttatactatctcatactgtacttaactag

SEQ ID NO: 36744 - DNA, 96 bp, Fusarium azukicola
  misc_feature: 102
ctaaatagaaaagaattctttaaaaattcaaattaaggtaaaaataacttaaaattttagattaggttaattaagtgaaatcctataaggcagaat

SEQ ID NO: 36745 - DNA, 96 bp, Fusarium azukicola
  misc_feature: 102
cgagtgtagggtattgatgtcgcgctgttcgtcacgatgtgctgtcgagtttgatcagtgtcggcataaagtggcaatgtaagcaattgaaggtat

SEQ ID NO: 36746 - DNA, 96 bp, Fusarium azukicola
  misc_feature: 102
atattttattctattctttatataatagggtcttagcttatatatatattcctttatattatctaagaaaactgattttattcttattttattagg

SEQ ID NO: 36747 - DNA, 96 bp, Fusarium azukicola
  misc_feature: 102
cagtcaaaaagactaattttttcctttatatttaaaataggaagatctaagttatctcttagtctatagttattcttattagaaataaccttagct

SEQ ID NO: 36748 - DNA, 96 bp, Fusarium azukicola
  misc_feature: 102
agaataaaataaataagtaagttaggttaaagaagagaaaaaagggttagaaagtaataaaaaggtttaaggagagaaattaagttaaggaggaat

SEQ ID NO: 36749 - DNA, 96 bp, Fusarium azukicola
  misc_feature: 102
attatttttttttcttttccttactctctccttataaccctttcctattcttctcttactctcttaccttaattccccctctcttttatcccttct

SEQ ID NO: 36750 - DNA, 96 bp, Fusarium azukicola
  misc_feature: 102
agaaagagagatatagctagaaaagagagaaataagagataagagataagagataagagataagagataagagataagagataagagataagagat

SEQ ID NO: 36751 - DNA, 96 bp, Fusarium azukicola
  misc_feature: 102
aatttttttaaaaatttagaaaaaatatttttaagtcttatatatagctaaatagttaaaatcgtttttttaagtttctagctattttatagcgat

SEQ ID NO: 36752 - DNA, 96 bp, Fusarium azukicola
  misc_feature: 102
atatttccttattattttatttatatattttacttatgaaaaagatatactcttattctctctatttatagttatatttattcctaaaaagtcttt

SEQ ID NO: 36753 - DNA, 96 bp, Fusarium azukicola
  misc_feature: 102
ataggttataagatatacttaaacttttaatcttagttattttaagcttaggtttattttcttagaattattttaagtgttttttaaataaggtgt

SEQ ID NO: 36754 - DNA, 96 bp, Fusarium azukicola
  misc_feature: 102
atacttaataagcgagttaaatagataagcgaattaaatacttttcttaacctttaatatataaatcactataaaaacactataaactatctaatt

SEQ ID NO: 36755 - DNA, 96 bp, Fusarium azukicola
  misc_feature: 102
agctattagcttatttattatgaggcggacttatattatattttattccattctttatataatagggtcttagcttatatatatattcctttgtat

SEQ ID NO: 36756 - DNA, 96 bp, Fusarium azukicola
  misc_feature: 102
agaaaagaaatagaaaataatcctaataaaataagaataaaatcagttttctcagataatataaaggaatatatatataagctaagaccctattat

SEQ ID NO: 36757 - DNA, 96 bp, Fusarium azukicola
  misc_feature: 102
ataaataagaagtccttcttttaaataagcaaggaaaaataatatcataaggaaaagagaaaaataacctatatataataatagctaaggttattt

SEQ ID NO: 36758 - DNA, 96 bp, Fusarium azukicola
  misc_feature: 102
aaactaggaaaattaactaaaaataatataaataaaaaacctagtaataaggaatataagttcctagataaaatagctattaatatatagggtcct

SEQ ID NO: 36759 - DNA, 96 bp, Fusarium azukicola
  misc_feature: 102
aagattataactttaaaggaggctattaatattctatattatattactaactatagtgatatatccctataaactatatattatattatagaattt

SEQ ID NO: 36760 - DNA, 96 bp, Fusarium azukicola
  misc_feature: 102
aagagtatatctttttcataagtaaaatatataaataaaataataaggaaatataataaataagaaataggaacttctaaagtacctattaaattt

SEQ ID NO: 36761 - DNA, 96 bp, Fusarium azukicola
  misc_feature: 101
ttttttcctctaataataagaacgtataaagctataacccttataagattataactttaaaggaggctattaatattctatattatattaccaact

SEQ ID NO: 36762 - DNA, 96 bp, Fusarium azukicola
  misc_feature: 101
taataataataataataaaaaagaaatcttcttaggataaccctaggataatagaagatatatatatatatgaccctaaccttaaggtaagaaaaa

SEQ ID NO: 36763 - DNA, 96 bp, Fusarium azukicola
  misc_feature: 101
ggatcagacgattacgataatatatcgaggttctactcgaacctcaaagccgcgtgtggcatagacgaggccttaagaaggaagcaagctcggaaa

SEQ ID NO: 36764 - DNA, 96 bp, Fusarium azukicola
  misc_feature: 101
tttatataatagggtcttagcttatatatatattcctttatattatctgagaaaactgattttattcttattttattaggattattttctatttct

SEQ ID NO: 36765 - DNA, 96 bp, Fusarium azukicola
  misc_feature: 101
agagataagagataagagataagagataagagataagagataagagataagagataaagaaataagaaataagagataagagataaagggaggcaa

SEQ ID NO: 36766 - DNA, 96 bp, Fusarium azukicola
  misc_feature: 101
aaccctaacccttaactctactactacccctaaccctaatttcaaccaattaaccctaacccttaacgtaactactacccctaaccctaatttcaa

SEQ ID NO: 36767 - DNA, 96 bp, Fusarium azukicola
  misc_feature: 101
gaagattgagaatgggacctaccaaccattagacttctctgctcaattccgacaagagattcagaccgaccgagagagaggcaagatagaagagaa

SEQ ID NO: 36768 - DNA, 96 bp, Fusarium azukicola
  misc_feature: 101
aacctctagttaattactattatctaagagagaagagttagaaagtaaagctaacctctagggtaaggaaggggttagcctctaaggtctagggaa

SEQ ID NO: 36769 - DNA, 96 bp, Fusarium azukicola
  misc_feature: 101
ttattattattattattatataatattgccttttcattattataagggctttctttaaagtaaggaatctcattaaaagaggggttatgtccttcg

SEQ ID NO: 36770 - DNA, 96 bp, Fusarium azukicola
  misc_feature: 101
taaaagatcctctctttaaatatactaataaggacctatattaagttaaaaactataaaaactataaactaggaaaattaactaaaaataatataa

SEQ ID NO: 36771 - DNA, 96 bp, Fusarium azukicola
  misc_feature: 101
ttataagctttaaggagtaatcctaaggcttataacctagaatcactttcttctagccttatagataaatctaagagactagaaaaaatagattct

SEQ ID NO: 36772 - DNA, 96 bp, Fusarium azukicola
  misc_feature: 101
gccttataggatttcacttaattaacctaatctaaaattttaagttatttttaccttaatttgaatttttaaagaattcttttctatttagtgtaa

SEQ ID NO: 36773 - DNA, 96 bp, Fusarium azukicola
  misc_feature: 101
cactattcaccatccatgtatgtaccgcgtcgataagctgagagggaaaagcaaaatgtgcaggcatatgaaactctatatctgtgaaagtaaaca

SEQ ID NO: 36774 - DNA, 96 bp, Fusarium azukicola
  misc_feature: 101
taattaataacttcgagttattcctctcttttatagtctctggaccccagcaatgacaaggtcccttcttctcataggaaaaggcgccccagaaca

SEQ ID NO: 36775 - DNA, 96 bp, Fusarium azukicola
  misc_feature: 101
caaccaattaaccctaacccttaacgtaactactacccctaaccctaatttcaaccaattaaccctaacccttaacgtaactactacccctaacca

SEQ ID NO: 36776 - DNA, 96 bp, Fusarium azukicola
  misc_feature: 101
gacaactatcataatggattatactccctacctgttccatcatcatcatcatgggtcgtcgtgcgcttacagcagaggaaaaggcaaacaaggcca

SEQ ID NO: 36777 - DNA, 96 bp, Fusarium azukicola
  misc_feature: 101
gcaatggtagagaagacaactagacaactatcataatggattatactccctacctgttccatcatcatcatcatgggtcgtcgtgcgcttacagca

SEQ ID NO: 36778 - DNA, 96 bp, Fusarium azukicola
  misc_feature: 101
tgctagcaagactcttttatcagtggcaatggtagagaagacaactagacaactatcataatggattatactccctacctgttccatcatcatcat

SEQ ID NO: 36779 - DNA, 96 bp, Fusarium azukicola
  misc_feature: 101
tctttagctagaagaaacccgccgggcaaaatagcttagatagtaaatactaaccccaactataaccctaaccctagttccggttccggttccggt

SEQ ID NO: 36780 - DNA, 96 bp, Fusarium azukicola
  misc_feature: 101
tcttatctataccctacccatatagtctaacccgatccatgtaagaaaacgctatttatactatctcatactgtacttaactagccgtcccttcgc

SEQ ID NO: 36781 - DNA, 96 bp, Fusarium azukicola
  misc_feature: 101
tcttagattttcccttataatatcaggtctataataaaggggtttttactaagatatatatataataataatagaggtttaatttttcctctaata
